United States Patent Application Publication US 2025/0313840 A1 - sequence listing, part 3

SEQ ID NO: 53367 - RNA, 21 nt, synthetic construct
  source 1..21: mol_type = other RNA
atgtgcttcaactatgaaatc

SEQ ID NO: 53368 - RNA, 21 nt, synthetic construct
  source 1..21: mol_type = other RNA
cagtgcaagcccctgccctgt

SEQ ID NO: 53369 - RNA, 21 nt, synthetic construct
  source 1..21: mol_type = other RNA
tgaggggccagcaggacccct

SEQ ID NO: 53370 - RNA, 21 nt, synthetic construct
  source 1..21: mol_type = other RNA
gtggcccaccttggccttgcc

SEQ ID NO: 53371 - RNA, 21 nt, synthetic construct
  source 1..21: mol_type = other RNA
cgggcaggtgctgacctgcag

SEQ ID NO: 53372 - RNA, 21 nt, synthetic construct
  source 1..21: mol_type = other RNA
gtgctgacctgcagcctggag

SEQ ID NO: 53373 - RNA, 21 nt, synthetic construct
  source 1..21: mol_type = other RNA
cggccatgccctcctccactc

SEQ ID NO: 53374 - RNA, 21 nt, synthetic construct
  source 1..21: mol_type = other RNA
cggccatgccctcctccactc

SEQ ID NO: 53375 - RNA, 21 nt, synthetic construct
  source 1..21: mol_type = other RNA
ctgacctgcagcctggagacg

SEQ ID NO: 53376 - RNA, 21 nt, synthetic construct
  source 1..21: mol_type = other RNA
ccacagcggagaactgccaga

SEQ ID NO: 53377 - RNA, 21 nt, synthetic construct
  source 1..21: mol_type = other RNA
cacagcggagaactgccagag

SEQ ID NO: 53378 - RNA, 21 nt, synthetic construct
  source 1..21: mol_type = other RNA
cactgccccagcaccccggcc

SEQ ID NO: 53379 - RNA, 21 nt, synthetic construct
  source 1..21: mol_type = other RNA
cactgccccagcaccccggcc

SEQ ID NO: 53380 - RNA, 21 nt, synthetic construct
  source 1..21: mol_type = other RNA
cactgccccagcaccccggcc

SEQ ID NO: 53381 - RNA, 21 nt, synthetic construct
  source 1..21: mol_type = other RNA
cactgccccagcaccccggcc

SEQ ID NO: 53382 - RNA, 21 nt, synthetic construct
  source 1..21: mol_type = other RNA
ctgctccctcagtgtggagaa

SEQ ID NO: 53383 - RNA, 21 nt, synthetic construct
  source 1..21: mol_type = other RNA
ttaccaccacggccaccacaa

SEQ ID NO: 53384 - RNA, 21 nt, synthetic construct
  source 1..21: mol_type = other RNA
ttaccaccacggccaccacaa

SEQ ID NO: 53385 - RNA, 21 nt, synthetic construct
  source 1..21: mol_type = other RNA
ccctcctccactccagagact

SEQ ID NO: 53386 - RNA, 21 nt, synthetic construct
  source 1..21: mol_type = other RNA
ccctcctccactccagagact

SEQ ID NO: 53387 - RNA, 21 nt, synthetic construct
  source 1..21: mol_type = other RNA
ccctcctccactccagagact

SEQ ID NO: 53388 - RNA, 21 nt, synthetic construct
  source 1..21: mol_type = other RNA
ccctcctccactccagagact

SEQ ID NO: 53389 - RNA, 21 nt, synthetic construct
  source 1..21: mol_type = other RNA
tacagccatcccctcttcctc

SEQ ID NO: 53390 - RNA, 21 nt, synthetic construct
  source 1..21: mol_type = other RNA
acagtgcttaccaccacggcc

SEQ ID NO: 53391 - RNA, 21 nt, synthetic construct
  source 1..21: mol_type = other RNA
acagtgcttaccaccacggcc

SEQ ID NO: 53392 - RNA, 21 nt, synthetic construct
  source 1..21: mol_type = other RNA
gcccctgcacccacggcggcc

SEQ ID NO: 53393 - RNA, 21 nt, synthetic construct
  source 1..21: mol_type = other RNA
gcagtgctgtggggagtgcgt

SEQ ID NO: 53394 - RNA, 21 nt, synthetic construct
  source 1..21: mol_type = other RNA
cccctgctccctcagtgtgga

SEQ ID NO: 53395 - RNA, 21 nt, synthetic construct
  source 1..21: mol_type = other RNA
gcccctgggcctcgagtgccg

SEQ ID NO: 53396 - RNA, 21 nt, synthetic construct
  source 1..21: mol_type = other RNA
gcccctgggcctcgagtgccg

SEQ ID NO: 53397 - RNA, 21 nt, synthetic construct
  source 1..21: mol_type = other RNA
gcccctgggcctcgagtgccg

SEQ ID NO: 53398 - RNA, 21 nt, synthetic construct
  source 1..21: mol_type = other RNA
gcccctgggcctcgagtgccg

SEQ ID NO: 53399 - RNA, 21 nt, synthetic construct
  source 1..21: mol_type = other RNA
ccctgctccctcagtgtggag

SEQ ID NO: 53400 - RNA, 21 nt, synthetic construct
  source 1..21: mol_type = other RNA
gccctgagctctgcccccgga

SEQ ID NO: 53401 - RNA, 21 nt, synthetic construct
  source 1..21: mol_type = other RNA
acccctgctccctcagtgtgg

SEQ ID NO: 53402 - RNA, 21 nt, synthetic construct
  source 1..21: mol_type = other RNA
gagcagcccctgggcctcgag

SEQ ID NO: 53403 - RNA, 21 nt, synthetic construct
  source 1..21: mol_type = other RNA
gagcagcccctgggcctcgag

SEQ ID NO: 53404 - RNA, 21 nt, synthetic construct
  source 1..21: mol_type = other RNA
gagcagcccctgggcctcgag

SEQ ID NO: 53405 - RNA, 21 nt, synthetic construct
  source 1..21: mol_type = other RNA
gagcagcccctgggcctcgag

SEQ ID NO: 53406 - RNA, 21 nt, synthetic construct
  source 1..21: mol_type = other RNA
acccctgcagtgctccccagc

SEQ ID NO: 53407 - RNA, 21 nt, synthetic construct
  source 1..21: mol_type = other RNA
cctgcagtgctccccagcagc

SEQ ID NO: 53408 - RNA, 21 nt, synthetic construct
  source 1..21: mol_type = other RNA
gggcagtgctgtggggagtgc

SEQ ID NO: 53409 - RNA, 21 nt, synthetic construct
  source 1..21: mol_type = other RNA
tcctccagtccagggactgca

SEQ ID NO: 53410 - RNA, 21 nt, synthetic construct
  source 1..21: mol_type = other RNA
taccaccacggccaccacaac

SEQ ID NO: 53411 - RNA, 21 nt, synthetic construct
  source 1..21: mol_type = other RNA
tcctccagtccagggactgca

SEQ ID NO: 53412 - RNA, 21 nt, synthetic construct
  source 1..21: mol_type = other RNA
taccaccacggccaccacaac

SEQ ID NO: 53413 - RNA, 21 nt, synthetic construct
  source 1..21: mol_type = other RNA
tcctccagtccagggactgca

SEQ ID NO: 53414 - RNA, 21 nt, synthetic construct
  source 1..21: mol_type = other RNA
cagcacagaccaccacaccca

SEQ ID NO: 53415 - RNA, 21 nt, synthetic construct
  source 1..21: mol_type = other RNA
ccgaggtaagcatcgaccagg

SEQ ID NO: 53416 - RNA, 21 nt, synthetic construct
  source 1..21: mol_type = other RNA
atcgaccaggtcgggcaggtg

SEQ ID NO: 53417 - RNA, 21 nt, synthetic construct
  source 1..21: mol_type = other RNA
cactacgactgcatccactgg

SEQ ID NO: 53418 - RNA, 21 nt, synthetic construct
  source 1..21: mol_type = other RNA
acaacagccactacgactgcg

SEQ ID NO: 53419 - RNA, 21 nt, synthetic construct
  source 1..21: mol_type = other RNA
acaacagccactacgactgca

SEQ ID NO: 53420 - RNA, 21 nt, synthetic construct
  source 1..21: mol_type = other RNA
acaacagccactacgactgcg

SEQ ID NO: 53421 - RNA, 21 nt, synthetic construct
  source 1..21: mol_type = other RNA
tgcaagaacgaagaccagaca

SEQ ID NO: 53422 - RNA, 21 nt, synthetic construct
  source 1..21: mol_type = other RNA
ggggttgcaggcggggacatg

SEQ ID NO: 53423 - RNA, 21 nt, synthetic construct
  source 1..21: mol_type = other RNA
ggccacgccctcctcaactcc

SEQ ID NO: 53424 - RNA, 21 nt, synthetic construct
  source 1..21: mol_type = other RNA
gatcctcacaaagccgaccac

SEQ ID NO: 53425 - RNA, 21 nt, synthetic construct
  source 1..21: mol_type = other RNA
ggccacgccctcctcaactcc

SEQ ID NO: 53426 - RNA, 21 nt, synthetic construct
  source 1..21: mol_type = other RNA
cggccacgccctcctcaactc

SEQ ID NO: 53427 - RNA, 21 nt, synthetic construct
  source 1..21: mol_type = other RNA
atcctcacaaagccgaccaca

SEQ ID NO: 53428 - RNA, 21 nt, synthetic construct
  source 1..21: mol_type = other RNA
cggccacgccctcctcaactc

SEQ ID NO: 53429 - RNA, 21 nt, synthetic construct
  source 1..21: mol_type = other RNA
accaccctatgggtgaccccg

SEQ ID NO: 53430 - RNA, 21 nt, synthetic construct
  source 1..21: mol_type = other RNA
ccctcacctcgcagactgggt

SEQ ID NO: 53431 - RNA, 21 nt, synthetic construct
  source 1..21: mol_type = other RNA
gggttgcaggcggggacatgg

SEQ ID NO: 53432 - RNA, 21 nt, synthetic construct
  source 1..21: mol_type = other RNA
gcgtgtgctttgctgtgacga

SEQ ID NO: 53433 - RNA, 21 nt, synthetic construct
  source 1..21: mol_type = other RNA
gacttcccaacctcaggggtt

SEQ ID NO: 53434 - RNA, 21 nt, synthetic construct
  source 1..21: mol_type = other RNA
ggttgcaggcggggacatgga

SEQ ID NO: 53435 - RNA, 21 nt, synthetic construct
  source 1..21: mol_type = other RNA
ctgcaagaacgaagaccagac

SEQ ID NO: 53436 - RNA, 21 nt, synthetic construct
  source 1..21: mol_type = other RNA
aagaccagacaggcaggttca

SEQ ID NO: 53437 - RNA, 21 nt, synthetic construct
  source 1..21: mol_type = other RNA
acatgtgcttcaactacaacg

SEQ ID NO: 53438 - RNA, 21 nt, synthetic construct
  source 1..21: mol_type = other RNA
tgtgcttcaactacaacgtgc

SEQ ID NO: 53439 - RNA, 21 nt, synthetic construct
  source 1..21: mol_type = other RNA
gctttgctgtgacgactacag

SEQ ID NO: 53440 - RNA, 21 nt, synthetic construct
  source 1..21: mol_type = other RNA
tttgctgtgacgactacagcc

SEQ ID NO: 53441 - RNA, 21 nt, synthetic construct
  source 1..21: mol_type = other RNA
aactccggggacgacctggat

SEQ ID NO: 53442 - RNA, 21 nt, synthetic construct
  source 1..21: mol_type = other RNA
gacctggatcctcacaaagcc

SEQ ID NO: 53443 - RNA, 21 nt, synthetic construct
  source 1..21: mol_type = other RNA
acgactgcgtccactggatcc

SEQ ID NO: 53444 - RNA, 21 nt, synthetic construct
  source 1..21: mol_type = other RNA
cactccggggacgacctggat

SEQ ID NO: 53445 - RNA, 21 nt, synthetic construct
  source 1..21: mol_type = other RNA
cactccggggacgacctggat

SEQ ID NO: 53446 - RNA, 21 nt, synthetic construct
  source 1..21: mol_type = other RNA
gccactacgatcacagccacc

SEQ ID NO: 53447 - RNA, 21 nt, synthetic construct
  source 1..21: mol_type = other RNA
aactccggggacgacctggat

SEQ ID NO: 53448 - RNA, 21 nt, synthetic construct
  source 1..21: mol_type = other RNA
gacctggatcctcacaaagct

SEQ ID NO: 53449 - RNA, 21 nt, synthetic construct
  source 1..21: mol_type = other RNA
cactccggggacgacctggat

SEQ ID NO: 53450 - RNA, 21 nt, synthetic construct
  source 1..21: mol_type = other RNA
ccactacgactgcatccactg

SEQ ID NO: 53451 - RNA, 21 nt, synthetic construct
  source 1..21: mol_type = other RNA
actacgactgcatccactgga

SEQ ID NO: 53452 - RNA, 21 nt, synthetic construct
  source 1..21: mol_type = other RNA
cactccggggacgacctggat

SEQ ID NO: 53453 - RNA, 21 nt, synthetic construct
  source 1..21: mol_type = other RNA
acgactgcgtccactggatcc

SEQ ID NO: 53454 - RNA, 21 nt, synthetic construct
  source 1..21: mol_type = other RNA
gcactcgactccagccctttc

SEQ ID NO: 53455 - RNA, 21 nt, synthetic construct
  source 1..21: mol_type = other RNA
cagtaccccagccaccagctc

SEQ ID NO: 53456 - RNA, 21 nt, synthetic construct
  source 1..21: mol_type = other RNA
cccaacctcaggggttgcagg

SEQ ID NO: 53457 - RNA, 21 nt, synthetic construct
  source 1..21: mol_type = other RNA
aacgaagaccagacaggcagg

SEQ ID NO: 53458 - RNA, 21 nt, synthetic construct
  source 1..21: mol_type = other RNA
tccggggacgacctggatcct

SEQ ID NO: 53459 - RNA, 21 nt, synthetic construct
  source 1..21: mol_type = other RNA
tccggggacgacctggatcct

SEQ ID NO: 53460 - RNA, 21 nt, synthetic construct
  source 1..21: mol_type = other RNA
ctggatcctcacagagctgac

SEQ ID NO: 53461 - RNA, 21 nt, synthetic construct
  source 1..21: mol_type = other RNA
cacagagctgaccacaacagc

SEQ ID NO: 53462 - RNA, 21 nt, synthetic construct
  source 1..21: mol_type = other RNA
tccggggacgacctggatcct

SEQ ID NO: 53463 - RNA, 21 nt, synthetic construct
  source 1..21: mol_type = other RNA
ctggatcctcacagagctgac

SEQ ID NO: 53464 - RNA, 21 nt, synthetic construct
  source 1..21: mol_type = other RNA
tccggggacgacctggatcct

SEQ ID NO: 53465 - RNA, 21 nt, synthetic construct
  source 1..21: mol_type = other RNA
tccggggacgacctggatcct

SEQ ID NO: 53466 - RNA, 21 nt, synthetic construct
  source 1..21: mol_type = other RNA
ctggatcctcacagagctgac

SEQ ID NO: 53467 - RNA, 21 nt, synthetic construct
  source 1..21: mol_type = other RNA
cacagagctgaccacaacagc

SEQ ID NO: 53468 - RNA, 21 nt, synthetic construct
  source 1..21: mol_type = other RNA
tccggggacgacctggatcct

SEQ ID NO: 53469 - RNA, 21 nt, synthetic construct
  source 1..21: mol_type = other RNA
ctggatcctcacagagctgac

SEQ ID NO: 53470 - RNA, 21 nt, synthetic construct
  source 1..21: mol_type = other RNA
ctggatcctcacagagctgac

SEQ ID NO: 53471 - RNA, 21 nt, synthetic construct
  source 1..21: mol_type = other RNA
cacagagctgaccacaacagc

SEQ ID NO: 53472 - RNA, 21 nt, synthetic construct
  source 1..21: mol_type = other RNA
tgaccacaacagccactacaa

SEQ ID NO: 53473 - RNA, 21 nt, synthetic construct
  source 1..21: mol_type = other RNA
tcagcgactggagggacggcg

SEQ ID NO: 53474 - RNA, 21 nt, synthetic construct
  source 1..21: mol_type = other RNA
ggtaagcatcgaccaggtcgg

SEQ ID NO: 53475 - RNA, 21 nt, synthetic construct
  source 1..21: mol_type = other RNA
cctgcaagaacgaagaccaga

SEQ ID NO: 53476 - RNA, 21 nt, synthetic construct
  source 1..21: mol_type = other RNA
tgcgtgtgctttgctgtgacg

SEQ ID NO: 53477 - RNA, 21 nt, synthetic construct
  source 1..21: mol_type = other RNA
cctcctcaactccggggacga

SEQ ID NO: 53478 - RNA, 21 nt, synthetic construct
  source 1..21: mol_type = other RNA
cctcctcaactccggggacga

SEQ ID NO: 53479 - RNA, 21 nt, synthetic construct
  source 1..21: mol_type = other RNA
gaacccctgctgccccgagac

SEQ ID NO: 53480 - RNA, 21 nt, synthetic construct
  source 1..21: mol_type = other RNA
ctggagacggggctgacctgc

SEQ ID NO: 53481 - RNA, 21 nt, synthetic construct
  source 1..21: mol_type = other RNA
tgctttgctgtgacgactaca

SEQ ID NO: 53482 - RNA, 21 nt, synthetic construct
  source 1..21: mol_type = other RNA
gccacgccctcctcaactccg

SEQ ID NO: 53483 - RNA, 21 nt, synthetic construct
  source 1..21: mol_type = other RNA
cacgccctcctcaactccggg

SEQ ID NO: 53484 - RNA, 21 nt, synthetic construct
  source 1..21: mol_type = other RNA
gccacgccctcctcaactccg

SEQ ID NO: 53485 - RNA, 21 nt, synthetic construct
  source 1..21: mol_type = other RNA
cacgccctcctcaactccggg

SEQ ID NO: 53486 - RNA, 21 nt, synthetic construct
  source 1..21: mol_type = other RNA
tcagcatccactacaagtcca

SEQ ID NO: 53487 - RNA, 21 nt, synthetic construct
  source 1..21: mol_type = other RNA
cctcacctcgcagactgggtc

SEQ ID NO: 53488 - RNA, 21 nt, synthetic construct
  source 1..21: mol_type = other RNA
gacctgcaagaacgaagacca

SEQ ID NO: 53489 - RNA, 21 nt, synthetic construct
  source 1..21: mol_type = other RNA
cgtgcgtgtgctttgctgtga

SEQ ID NO: 53490 - RNA, 21 nt, synthetic construct
  source 1..21: mol_type = other RNA
accacaacagccactacgact

SEQ ID NO: 53491 - RNA, 21 nt, synthetic construct
  source 1..21: mol_type = other RNA
accacaacagccactacgact

SEQ ID NO: 53492 - RNA, 21 nt, synthetic construct
  source 1..21: mol_type = other RNA
accacaacagccactacgact

SEQ ID NO: 53493 - RNA, 21 nt, synthetic construct
  source 1..21: mol_type = other RNA
accacaacagccactacgact

SEQ ID NO: 53494 - RNA, 21 nt, synthetic construct
  source 1..21: mol_type = other RNA
accacaacagccactacgact

SEQ ID NO: 53495 - RNA, 21 nt, synthetic construct
  source 1..21: mol_type = other RNA
aacctcaggggttgcaggcgg

SEQ ID NO: 53496 - RNA, 21 nt, synthetic construct
  source 1..21: mol_type = other RNA
cagccactgccccagtacccc

SEQ ID NO: 53497 - RNA, 21 nt, synthetic construct
  source 1..21: mol_type = other RNA
gccactgccccagtaccccag

SEQ ID NO: 53498 - RNA, 21 nt, synthetic construct
  source 1..21: mol_type = other RNA
ccacaacagccactacgactg

SEQ ID NO: 53499 - RNA, 21 nt, synthetic construct
  source 1..21: mol_type = other RNA
ccacaacagccactacgactg

SEQ ID NO: 53500 - RNA, 21 nt, synthetic construct
  source 1..21: mol_type = other RNA
cggccatcccgtcctccaccc

SEQ ID NO: 53501 - RNA, 21 nt, synthetic construct
  source 1..21: mol_type = other RNA
ccacaacagccactacgactg

SEQ ID NO: 53502 - RNA, 21 nt, synthetic construct
  source 1..21: mol_type = other RNA
ccacaacagccactacgactg

SEQ ID NO: 53503 - RNA, 21 nt, synthetic construct
  source 1..21: mol_type = other RNA
ccacaacagccactacgactg

SEQ ID NO: 53504 - RNA, 21 nt, synthetic construct
  source 1..21: mol_type = other RNA
ggctgcctgtgccaatgccag

SEQ ID NO: 53505 - RNA, 21 nt, synthetic construct
  source 1..21: mol_type = other RNA
cagcgactggagggacggcgt

SEQ ID NO: 53506 - RNA, 21 nt, synthetic construct
  source 1..21: mol_type = other RNA
cctcaggggttgcaggcgggg

SEQ ID NO: 53507 - RNA, 21 nt, synthetic construct
  source 1..21: mol_type = other RNA
aggtcgggcaggtgctgacct

SEQ ID NO: 53508 - RNA, 21 nt, synthetic construct
  source 1..21: mol_type = other RNA
gcctggagacggggctgacct

SEQ ID NO: 53509 - RNA, 21 nt, synthetic construct
  source 1..21: mol_type = other RNA
cctggagacggggctgacctg

SEQ ID NO: 53510 - RNA, 21 nt, synthetic construct
  source 1..21: mol_type = other RNA
acctgcaagaacgaagaccag

SEQ ID NO: 53511 - RNA, 21 nt, synthetic construct
  source 1..21: mol_type = other RNA
gtgcttcaactacaacgtgcg

SEQ ID NO: 53512 - RNA, 21 nt, synthetic construct
  source 1..21: mol_type = other RNA
cttcaactacaacgtgcgtgt

SEQ ID NO: 53513 - RNA, 21 nt, synthetic construct
  source 1..21: mol_type = other RNA
ctttgctgtgacgactacagc

SEQ ID NO: 53514 - RNA, 21 nt, synthetic construct
  source 1..21: mol_type = other RNA
ctacagccactgccccagtac

SEQ ID NO: 53515 - RNA, 21 nt, synthetic construct
  source 1..21: mol_type = other RNA
agccactgccccagtacccca

SEQ ID NO: 53516 - RNA, 21 nt, synthetic construct
  source 1..21: mol_type = other RNA
cactgccccagtaccccagcc

SEQ ID NO: 53517 - RNA, 21 nt, synthetic construct
  source 1..21: mol_type = other RNA
ctgccccagtaccccagccac

SEQ ID NO: 53518 - RNA, 21 nt, synthetic construct
  source 1..21: mol_type = other RNA
cccagtaccccagccaccagc

SEQ ID NO: 53519 - RNA, 21 nt, synthetic construct
  source 1..21: mol_type = other RNA
gtaccccagccaccagctcca

SEQ ID NO: 53520 - RNA, 21 nt, synthetic construct
  source 1..21: mol_type = other RNA
cgccctcctcaactccgggga

SEQ ID NO: 53521 - RNA, 21 nt, synthetic construct
  source 1..21: mol_type = other RNA
caactccggggacgacctgga

SEQ ID NO: 53522 - RNA, 21 nt, synthetic construct
  source 1..21: mol_type = other RNA
ccggggacgacctggatcctc

SEQ ID NO: 53523 - RNA, 21 nt, synthetic construct
  source 1..21: mol_type = other RNA
ggacgacctggatcctcacaa

SEQ ID NO: 53524 - RNA, 21 nt, synthetic construct
  source 1..21: mol_type = other RNA
gccgaccacaacagccactac

SEQ ID NO: 53525 - RNA, 21 nt, synthetic construct
  source 1..21: mol_type = other RNA
ccgaccacaacagccactacg

SEQ ID NO: 53526 - RNA, 21 nt, synthetic construct
  source 1..21: mol_type = other RNA
actgcgtccactggatccacg

SEQ ID NO: 53527 - RNA, 21 nt, synthetic construct
  source 1..21: mol_type = other RNA
ggtcagagtggctggactaca

SEQ ID NO: 53528 - RNA, 21 nt, synthetic construct
  source 1..21: mol_type = other RNA
ccggggacgacctggatcctc

SEQ ID NO: 53529 - RNA, 21 nt, synthetic construct
  source 1..21: mol_type = other RNA
ctgaccacaacagccactacg

SEQ ID NO: 53530 - RNA, 21 nt, synthetic construct
  source 1..21: mol_type = other RNA
gggccacaccagggccacctc

SEQ ID NO: 53531 - RNA, 21 nt, synthetic construct
  source 1..21: mol_type = other RNA
ggtcagagtggctggactaca

SEQ ID NO: 53532 - RNA, 21 nt, synthetic construct
  source 1..21: mol_type = other RNA
ccggggacgacctggatcctc

SEQ ID NO: 53533 - RNA, 21 nt, synthetic construct
  source 1..21: mol_type = other RNA
ggtcagagtggctggactaca

SEQ ID NO: 53534 - RNA, 21 nt, synthetic construct
  source 1..21: mol_type = other RNA
cgccctcctcaactccgggga

SEQ ID NO: 53535 - RNA, 21 nt, synthetic construct
  source 1..21: mol_type = other RNA
caactccggggacgacctgga

SEQ ID NO: 53536 - RNA, 21 nt, synthetic construct
  source 1..21: mol_type = other RNA
ccggggacgacctggatcctc

SEQ ID NO: 53537 - RNA, 21 nt, synthetic construct
  source 1..21: mol_type = other RNA
ggacgacctggatcctcacaa

SEQ ID NO: 53538 - RNA, 21 nt, synthetic construct
  source 1..21: mol_type = other RNA
ctgaccacaacagccactacg

SEQ ID NO: 53539 - RNA, 21 nt, synthetic construct
  source 1..21: mol_type = other RNA
ggtcagagtggctggactaca

SEQ ID NO: 53540 - RNA, 21 nt, synthetic construct
  source 1..21: mol_type = other RNA
ccggggacgacctggatcctc

SEQ ID NO: 53541 - RNA, 21 nt, synthetic construct
  source 1..21: mol_type = other RNA
ctgaccacaacagccactacg

SEQ ID NO: 53542 - RNA, 21 nt, synthetic construct
  source 1..21: mol_type = other RNA
ccggggacgacctggatcctc

SEQ ID NO: 53543 - RNA, 21 nt, synthetic construct
  source 1..21: mol_type = other RNA
ctgaccacaacagccactacg

SEQ ID NO: 53544 - RNA, 21 nt, synthetic construct
  source 1..21: mol_type = other RNA
actgcgtccactggatccacg

SEQ ID NO: 53545 - RNA, 21 nt, synthetic construct
  source 1..21: mol_type = other RNA
ctgaccacaacagccactaca

SEQ ID NO: 53546 - RNA, 21 nt, synthetic construct
  source 1..21: mol_type = other RNA
caccccatgcccaccacagcc

SEQ ID NO: 53547 - RNA, 21 nt, synthetic construct
  source 1..21: mol_type = other RNA
caacctcaggggttgcaggcg

SEQ ID NO: 53548 - RNA, 21 nt, synthetic construct
  source 1..21: mol_type = other RNA
cctggatcctcacaaagctga

SEQ ID NO: 53549 - RNA, 21 nt, synthetic construct
  source 1..21: mol_type = other RNA
tcctcacaaagccgaccacaa

SEQ ID NO: 53550 - RNA, 21 nt, synthetic construct
  source 1..21: mol_type = other RNA
tacagccaccacgggaggccc

SEQ ID NO: 53551 - RNA, 21 nt, synthetic construct
  source 1..21: mol_type = other RNA
acctggatcctcacaaagccg

SEQ ID NO: 53552 - RNA, 21 nt, synthetic construct
  source 1..21: mol_type = other RNA
gactgcatccactggatccac

SEQ ID NO: 53553 - RNA, 21 nt, synthetic construct
  source 1..21: mol_type = other RNA
caggggttgcaggcggggaca

SEQ ID NO: 53554 - RNA, 21 nt, synthetic construct
  source 1..21: mol_type = other RNA
acaacgtgcgtgtgctttgct

SEQ ID NO: 53555 - RNA, 21 nt, synthetic construct
  source 1..21: mol_type = other RNA
caacgtgcgtgtgctttgctg

SEQ ID NO: 53556 - RNA, 21 nt, synthetic construct
  source 1..21: mol_type = other RNA
ctcctggagaggtggtgcacg

SEQ ID NO: 53557 - RNA, 21 nt, synthetic construct
  source 1..21: mol_type = other RNA
cccccagcagtccccacacgg

SEQ ID NO: 53558 - RNA, 21 nt, synthetic construct
  source 1..21: mol_type = other RNA
cccccagcagtccccacacgg

SEQ ID NO: 53559 - RNA, 21 nt, synthetic construct
  source 1..21: mol_type = other RNA
cccccagcagtccccacacgg

SEQ ID NO: 53560 - RNA, 21 nt, synthetic construct
  source 1..21: mol_type = other RNA
cccccagcagtccccacacgg

SEQ ID NO: 53561 - RNA, 21 nt, synthetic construct
  source 1..21: mol_type = other RNA
gtggcaccagggctgcgagac

SEQ ID NO: 53562 - RNA, 21 nt, synthetic construct
  source 1..21: mol_type = other RNA
caggctgacgacttcacggcc

SEQ ID NO: 53563 - RNA, 21 nt, synthetic construct
  source 1..21: mol_type = other RNA
agccactcccttctccagtcc

SEQ ID NO: 53564 - RNA, 21 nt, synthetic construct
  source 1..21: mol_type = other RNA
agccaccaaatccacagctac

SEQ ID NO: 53565 - RNA, 21 nt, synthetic construct
  source 1..21: mol_type = other RNA
agccactcccttctccagtcc

SEQ ID NO: 53566 - RNA, 21 nt, synthetic construct
  source 1..21: mol_type = other RNA
agccaccaaatccacagctac

SEQ ID NO: 53567 - RNA, 21 nt, synthetic construct
  source 1..21: mol_type = other RNA
aggggttgcaggcggggacat

SEQ ID NO: 53568 - RNA, 21 nt, synthetic construct
  source 1..21: mol_type = other RNA
cagctccacggccacgccctc

SEQ ID NO: 53569 - RNA, 21 nt, synthetic construct
  source 1..21: mol_type = other RNA
ctccaggaccacagccacggc

SEQ ID NO: 53570 - RNA, 21 nt, synthetic construct
  source 1..21: mol_type = other RNA
gagctgaccacaacagccact

SEQ ID NO: 53571 - RNA, 21 nt, synthetic construct
  source 1..21: mol_type = other RNA
accacacccatggccaccatg

SEQ ID NO: 53572 - RNA, 21 nt, synthetic construct
  source 1..21: mol_type = other RNA
ccaggggcacctccaggacca

SEQ ID NO: 53573 - RNA, 21 nt, synthetic construct
  source 1..21: mol_type = other RNA
aagctgaccacaacagccact

SEQ ID NO: 53574 - RNA, 21 nt, synthetic construct
  source 1..21: mol_type = other RNA
gagctgaccacaacagccact

SEQ ID NO: 53575 - RNA, 21 nt, synthetic construct
  source 1..21: mol_type = other RNA
gagctgaccacaacagccact

SEQ ID NO: 53576 - RNA, 21 nt, synthetic construct
  source 1..21: mol_type = other RNA
caccacagccaccatgacaag

SEQ ID NO: 53577 - RNA, 21 nt, synthetic construct
  source 1..21: mol_type = other RNA
gagctgaccacaacagccact

SEQ ID NO: 53578 - RNA, 21 nt, synthetic construct
  source 1..21: mol_type = other RNA
tggcaccagggctgcgagacc

SEQ ID NO: 53579 - RNA, 21 nt, synthetic construct
  source 1..21: mol_type = other RNA
acttcccaacctcaggggttg

SEQ ID NO: 53580 - RNA, 21 nt, synthetic construct
  source 1..21: mol_type = other RNA
cctccacagtgcttaccacca

SEQ ID NO: 53581 - RNA, 21 nt, synthetic construct
  source 1..21: mol_type = other RNA
cctccacagtgcttaccacca

SEQ ID NO: 53582 - RNA, 21 nt, synthetic construct
  source 1..21: mol_type = other RNA
cctccacagtgcttaccacca

SEQ ID NO: 53583 - RNA, 21 nt, synthetic construct
  source 1..21: mol_type = other RNA
gccctgtccagccctcaccct

SEQ ID NO: 53584 - RNA, 21 nt, synthetic construct
  source 1..21: mol_type = other RNA
gccctgtccagccctcaccct

SEQ ID NO: 53585 - RNA, 21 nt, synthetic construct
  source 1..21: mol_type = other RNA
gccctgtccagccctcaccct

SEQ ID NO: 53586 - RNA, 21 nt, synthetic construct
  source 1..21: mol_type = other RNA
tcctgcacacctacacccacg

SEQ ID NO: 53587 - RNA, 21 nt, synthetic construct
  source 1..21: mol_type = other RNA
ctgtggcccctccccggcccc

SEQ ID NO: 53588 - RNA, 21 nt, synthetic construct
  source 1..21: mol_type = other RNA
acgtgcgtgtgctttgctgtg

SEQ ID NO: 53589 - RNA, 21 nt, synthetic construct
  source 1..21: mol_type = other RNA
agtccagggactgcaaccgcc

SEQ ID NO: 53590 - RNA, 21 nt, synthetic construct
  source 1..21: mol_type = other RNA
gcccttccagcactgagaagc

SEQ ID NO: 53591 - RNA, 21 nt, synthetic construct
  source 1..21: mol_type = other RNA
atcctcacagagctgaccaca

SEQ ID NO: 53592 - RNA, 21 nt, synthetic construct
  source 1..21: mol_type = other RNA
agagctgaccacaacagccac

SEQ ID NO: 53593 - RNA, 21 nt, synthetic construct
  source 1..21: mol_type = other RNA
agtccagggactgcaaccgcc

SEQ ID NO: 53594 - RNA, 21 nt, synthetic construct
  source 1..21: mol_type = other RNA
gcccttccagcactgagaagc

SEQ ID NO: 53595 - RNA, 21 nt, synthetic construct
  source 1..21: mol_type = other RNA
atcctcacagagctgaccaca

SEQ ID NO: 53596 - RNA, 21 nt, synthetic construct
  source 1..21: mol_type = other RNA
agtccagggactgcaaccgcc

SEQ ID NO: 53597 - RNA, 21 nt, synthetic construct
  source 1..21: mol_type = other RNA
gcccttccagcactgagaagc

SEQ ID NO: 53598 - RNA, 21 nt, synthetic construct
  source 1..21: mol_type = other RNA
agtccagggactgcaaccgcc

SEQ ID NO: 53599 - RNA, 21 nt, synthetic construct
  source 1..21: mol_type = other RNA
gcccttccagcactgagaagc

SEQ ID NO: 53600 - RNA, 21 nt, synthetic construct
  source 1..21: mol_type = other RNA
atcctcacagagctgaccaca

SEQ ID NO: 53601 - RNA, 21 nt, synthetic construct
  source 1..21: mol_type = other RNA
agagctgaccacaacagccac

SEQ ID NO: 53602 - RNA, 21 nt, synthetic construct
  source 1..21: mol_type = other RNA
atcctcacagagctgaccaca

SEQ ID NO: 53603 - RNA, 21 nt, synthetic construct
  source 1..21: mol_type = other RNA
atcctcacagagctgaccaca

SEQ ID NO: 53604 - RNA, 21 nt, synthetic construct
  source 1..21: mol_type = other RNA
agagctgaccacaacagccac

SEQ ID NO: 53605 - RNA, 21 nt, synthetic construct
  source 1..21: mol_type = other RNA
gcccttccagcactgagaagc

SEQ ID NO: 53606 - RNA, 21 nt, synthetic construct
  source 1..21: mol_type = other RNA
tgagctgaccacaacagccac

SEQ ID NO: 53607 - RNA, 21 nt, synthetic construct
  source 1..21: mol_type = other RNA
accctgggagagcctgtggcc

SEQ ID NO: 53608 - RNA, 21 nt, synthetic construct
  source 1..21: mol_type = other RNA
agtggccgggcagtgctgtgg

SEQ ID NO: 53609 - RNA, 21 nt, synthetic construct
  source 1..21: mol_type = other RNA
cacccaggcaactgctggcac

SEQ ID NO: 53610 - RNA, 21 nt, synthetic construct
  source 1..21: mol_type = other RNA
cctggatcctcacagagcaga

SEQ ID NO: 53611 - RNA, 21 nt, synthetic construct
  source 1..21: mol_type = other RNA
cacccaggcaactgctggcac

SEQ ID NO: 53612 - RNA, 21 nt, synthetic construct
  source 1..21: mol_type = other RNA
cacccaggcaactgctggcac

SEQ ID NO: 53613 - RNA, 21 nt, synthetic construct
  source 1..21: mol_type = other RNA
tcctcacagagctgaccacaa

SEQ ID NO: 53614 - RNA, 21 nt, synthetic construct
  source 1..21: mol_type = other RNA
tcctcacagagctgaccacag

SEQ ID NO: 53615 - RNA, 21 nt, synthetic construct
  source 1..21: mol_type = other RNA
tcctcacagagctgaccacaa

SEQ ID NO: 53616 - RNA, 21 nt, synthetic construct
  source 1..21: mol_type = other RNA
tcctcacagagctgaccacag

SEQ ID NO: 53617 - RNA, 21 nt, synthetic construct
  source 1..21: mol_type = other RNA
tcctcacagagctgaccacaa

SEQ ID NO: 53618 - RNA, 21 nt, synthetic construct
  source 1..21: mol_type = other RNA
acggggctgacctgcaagaac

SEQ ID NO: 53619 - RNA, 21 nt, synthetic construct
  source 1..21: mol_type = other RNA
gctggtgctgacattcctgtg

SEQ ID NO: 53620 - RNA, 21 nt, synthetic construct
  source 1..21: mol_type = other RNA
cggggctgacctgcaagaacg

SEQ ID NO: 53621 - RNA, 21 nt, synthetic construct
  source 1..21: mol_type = other RNA
gcctcctccacccaggcaact

SEQ ID NO: 53622 - RNA, 21 nt, synthetic construct
  source 1..21: mol_type = other RNA
gcctcctccacccaggcaact

SEQ ID NO: 53623 - RNA, 21 nt, synthetic construct
  source 1..21: mol_type = other RNA
gcctcctccacccaggcaact

SEQ ID NO: 53624 - RNA, 21 nt, synthetic construct
  source 1..21: mol_type = other RNA
ccggccctcccggtctccacc

SEQ ID NO: 53625 - RNA, 21 nt, synthetic construct
  source 1..21: mol_type = other RNA
ctcaggggttgcaggcgggga

SEQ ID NO: 53626 - RNA, 21 nt, synthetic construct
  source 1..21: mol_type = other RNA
gcacagggtgtgcagccccca

SEQ ID NO: 53627 - RNA, 21 nt, synthetic construct
  source 1..21: mol_type = other RNA
gccccagtaccccagccacca

SEQ ID NO: 53628 - RNA, 21 nt, synthetic construct
  source 1..21: mol_type = other RNA
ccagccaccagctccacggcc

SEQ ID NO: 53629 - RNA, 21 nt, synthetic construct
  source 1..21: mol_type = other RNA
cagccaccagctccacggcca

SEQ ID NO: 53630 - RNA, 21 nt, synthetic construct
  source 1..21: mol_type = other RNA
ggatcctcacagagctgacca

SEQ ID NO: 53631 - RNA, 21 nt, synthetic construct
  source 1..21: mol_type = other RNA
ggatcctcacagagctgacca

SEQ ID NO: 53632 - RNA, 21 nt, synthetic construct
  source 1..21: mol_type = other RNA
ggatcctcacagagctgacca

SEQ ID NO: 53633 - RNA, 21 nt, synthetic construct
  source 1..21: mol_type = other RNA
ggatcctcacagagctgacca

SEQ ID NO: 53634 - RNA, 21 nt, synthetic construct
  source 1..21: mol_type = other RNA
ggatcctcacagagctgacca

SEQ ID NO: 53635 - RNA, 21 nt, synthetic construct
  source 1..21: mol_type = other RNA
aggaaccagagcccacagctg

SEQ ID NO: 53636 - RNA, 21 nt, synthetic construct
  source 1..21: mol_type = other RNA
ctgcaactgcccttccagcac

SEQ ID NO: 53637 - RNA, 21 nt, synthetic construct
  source 1..21: mol_type = other RNA
cacaaccacctgcccccagag

SEQ ID NO: 53638 - RNA, 21 nt, synthetic construct
  source 1..21: mol_type = other RNA
gctcctggagaggtggtgcac

SEQ ID NO: 53639 - RNA, 21 nt, synthetic construct
  source 1..21: mol_type = other RNA
caccaccacccaggccctgtt

SEQ ID NO: 53640 - RNA, 21 nt, synthetic construct
  source 1..21: mol_type = other RNA
cgaagaccagacaggcaggtt

SEQ ID NO: 53641 - RNA, 21 nt, synthetic construct
  source 1..21: mol_type = other RNA
cgactacagccactgccccag

SEQ ID NO: 53642 - RNA, 21 nt, synthetic construct
  source 1..21: mol_type = other RNA
tccaggaccacagccacggcc

SEQ ID NO: 53643 - RNA, 21 nt, synthetic construct
  source 1..21: mol_type = other RNA
tggatcctcacagagctgacc

SEQ ID NO: 53644 - RNA, 21 nt, synthetic construct
  source 1..21: mol_type = other RNA
tggatcctcacagagctgacc

SEQ ID NO: 53645 - RNA, 21 nt, synthetic construct
  source 1..21: mol_type = other RNA
acaaccagtggctccacggtg

SEQ ID NO: 53646 - RNA, 21 nt, synthetic construct
  source 1..21: mol_type = other RNA
cacccccttccccagggacga

SEQ ID NO: 53647 - RNA, 21 nt, synthetic construct
  source 1..21: mol_type = other RNA
tggatcctcacagagctgacc

SEQ ID NO: 53648 - RNA, 21 nt, synthetic construct
  source 1..21: mol_type = other RNA
tggatcctcacagagctgacc

SEQ ID NO: 53649 - RNA, 21 nt, synthetic construct
  source 1..21: mol_type = other RNA
tggatcctcacagagctgacc

SEQ ID NO: 53650 - RNA, 21 nt, synthetic construct
  source 1..21: mol_type = other RNA
acaaccagtggctccacggtg

SEQ ID NO: 53651 - RNA, 21 nt, synthetic construct
  source 1..21: mol_type = other RNA
gatggccagccagtccagctg

SEQ ID NO: 53652 - RNA, 21 nt, synthetic construct
  source 1..21: mol_type = other RNA
gctgctgccaggaagctgcga

SEQ ID NO: 53653 - RNA, 21 nt, synthetic construct
  source 1..21: mol_type = other RNA
ccactgccccagtaccccagc

SEQ ID NO: 53654 - RNA, 21 nt, synthetic construct
  source 1..21: mol_type = other RNA
cctcctccagcccagggacgg

SEQ ID NO: 53655 - RNA, 21 nt, synthetic construct
  source 1..21: mol_type = other RNA
ccacccacacacccccagtgc

SEQ ID NO: 53656 - RNA, 21 nt, synthetic construct
  source 1..21: mol_type = other RNA
cctcctccagcccagggacgg

SEQ ID NO: 53657 - RNA, 21 nt, synthetic construct
  source 1..21: mol_type = other RNA
ccacccacacacccccagtgc

SEQ ID NO: 53658 - RNA, 21 nt, synthetic construct
  source 1..21: mol_type = other RNA
cctcctccagcccagggacgg

SEQ ID NO: 53659 - RNA, 21 nt, synthetic construct
  source 1..21: mol_type = other RNA
ccacccacacacccccagtgc

SEQ ID NO: 53660 - RNA, 21 nt, synthetic construct
  source 1..21: mol_type = other RNA
cctcctccagcccagggacgg

SEQ ID NO: 53661 - RNA, 21 nt, synthetic construct
  source 1..21: mol_type = other RNA
ccacccacacacccccagtgc

SEQ ID NO: 53662 - RNA, 21 nt, synthetic construct
  source 1..21: mol_type = other RNA
cctcctccagcccagggacgg

SEQ ID NO: 53663 - RNA, 21 nt, synthetic construct
  source 1..21: mol_type = other RNA
tgctccccagcagcctgccaa

SEQ ID NO: 53664 - RNA, 21 nt, synthetic construct
  source 1..21: mol_type = other RNA
acgactacagccactgcccca

SEQ ID NO: 53665 - RNA, 21 nt, synthetic construct
  source 1..21: mol_type = other RNA
aagccgaccacaacagccact

SEQ ID NO: 53666 - RNA, 21 nt, synthetic construct
  source 1..21: mol_type = other RNA
acccccacagtgctgaccacc

SEQ ID NO: 53667 - RNA, 21 nt, synthetic construct
  source 1..21: mol_type = other RNA
cacaaccagtggctccacggt

SEQ ID NO: 53668 - RNA, 21 nt, synthetic construct
  source 1..21: mol_type = other RNA
acccccacagtgctgaccacc

SEQ ID NO: 53669 - RNA, 21 nt, synthetic construct
  source 1..21: mol_type = other RNA
cacaaccagtggctccacggt

SEQ ID NO: 53670 - RNA, 21 nt, synthetic construct
  source 1..21: mol_type = other RNA
cacagggtgtgcagcccccat

SEQ ID NO: 53671 - RNA, 21 nt, synthetic construct
  source 1..21: mol_type = other RNA
acctcaggggttgcaggcggg

SEQ ID NO: 53672 - RNA, 21 nt, synthetic construct
  source 1..21: mol_type = other RNA
cagcctggagacggggctgac

SEQ ID NO: 53673 - RNA, 21 nt, synthetic construct
  source 1..21: mol_type = other RNA
cgccaccacacctgcagccac

SEQ ID NO: 53674 - RNA, 21 nt, synthetic construct
  source 1..21: mol_type = other RNA
cgccaccacacctgcagccac

SEQ ID NO: 53675 - RNA, 21 nt, synthetic construct
  source 1..21: mol_type = other RNA
cgccaccacacctgcagccac

SEQ ID NO: 53676 - RNA, 21 nt, synthetic construct
  source 1..21: mol_type = other RNA
caggggcacctccaggaccac

SEQ ID NO: 53677 - RNA, 21 nt, synthetic construct
  source 1..21: mol_type = other RNA
cgccaccacacctgcagccac

SEQ ID NO: 53678 - RNA, 21 nt, synthetic construct
  source 1..21: mol_type = other RNA
cccgcagccaccagctccaaa

SEQ ID NO: 53679 - RNA, 21 nt, synthetic construct
  source 1..21: mol_type = other RNA
atgtccaccatgtccacaatc

SEQ ID NO: 53680 - RNA, 21 nt, synthetic construct
  source 1..21: mol_type = other RNA
accacctgcccccagagcctg

SEQ ID NO: 53681 - RNA, 21 nt, synthetic construct
  source 1..21: mol_type = other RNA
cctgcacacctacacccacgt

SEQ ID NO: 53682 - RNA, 21 nt, synthetic construct
  source 1..21: mol_type = other RNA
ccggcccggctccctccctgc

SEQ ID NO: 53683 - RNA, 21 nt, synthetic construct
  source 1..21: mol_type = other RNA
cagagacccagggccctgtgg

SEQ ID NO: 53684 - RNA, 21 nt, synthetic construct
  source 1..21: mol_type = other RNA
actggaggtgccctgagctct

SEQ ID NO: 53685 - RNA, 21 nt, synthetic construct
  source 1..21: mol_type = other RNA
gaggtgccctgagctctgccc

SEQ ID NO: 53686 - RNA, 21 nt, synthetic construct
  source 1..21: mol_type = other RNA
aggtgccctgagctctgcccc

SEQ ID NO: 53687 - RNA, 21 nt, synthetic construct
  source 1..21: mol_type = other RNA
cacctccttcaacaccacctg

SEQ ID NO: 53688 - RNA, 21 nt, synthetic construct
  source 1..21: mol_type = other RNA
aggctgacgacttcacggccc

SEQ ID NO: 53689 - RNA, 21 nt, synthetic construct
  source 1..21: mol_type = other RNA
ggggtggtggaggccacgggc

SEQ ID NO: 53690 - RNA, 21 nt, synthetic construct
  source 1..21: mol_type = other RNA
gggtggtggaggccacgggcg

SEQ ID NO: 53691 - RNA, 21 nt, synthetic construct
  source 1..21: mol_type = other RNA
ggtggtggaggccacgggcgc

SEQ ID NO: 53692 - RNA, 21 nt, synthetic construct
  source 1..21: mol_type = other RNA
tcccccggggctggtgtcgga

SEQ ID NO: 53693 - RNA, 21 nt, synthetic construct
  source 1..21: mol_type = other RNA
ccggcctgggaggcggagact

SEQ ID NO: 53694 - RNA, 21 nt, synthetic construct
  source 1..21: mol_type = other RNA
ggcccctccccggccccaggc

SEQ ID NO: 53695 - RNA, 21 nt, synthetic construct
  source 1..21: mol_type = other RNA
gcccctccccggccccaggca

SEQ ID NO: 53696 - RNA, 21 nt, synthetic construct
  source 1..21: mol_type = other RNA
gttgcaggcggggacatggaa

SEQ ID NO: 53697 - RNA, 21 nt, synthetic construct
  source 1..21: mol_type = other RNA
ccaggtcgggcaggtgctgac

SEQ ID NO: 53698 - RNA, 21 nt, synthetic construct
  source 1..21: mol_type = other RNA
ggtcgggcaggtgctgacctg

SEQ ID NO: 53699 - RNA, 21 nt, synthetic construct
  source 1..21: mol_type = other RNA
gtcgggcaggtgctgacctgc

SEQ ID NO: 53700 - RNA, 21 nt, synthetic construct
  source 1..21: mol_type = other RNA
agcctggagacggggctgacc

SEQ ID NO: 53701 - RNA, 21 nt, synthetic construct
  source 1..21: mol_type = other RNA
gactacagccactgccccagt

SEQ ID NO: 53702 - RNA, 21 nt, synthetic construct
  source 1..21: mol_type = other RNA
actacagccactgccccagta

SEQ ID NO: 53703 - RNA, 21 nt, synthetic construct
  source 1..21: mol_type = other RNA
tacagccactgccccagtacc

SEQ ID NO: 53704 - RNA, 21 nt, synthetic construct
  source 1..21: mol_type = other RNA
acagccactgccccagtaccc

SEQ ID NO: 53705 - RNA, 21 nt, synthetic construct
  source 1..21: mol_type = other RNA
tgccccagtaccccagccacc

SEQ ID NO: 53706 - RNA, 21 nt, synthetic construct
  source 1..21: mol_type = other RNA
ccccagtaccccagccaccag

SEQ ID NO: 53707 - RNA, 21 nt, synthetic construct
  source 1..21: mol_type = other RNA
agtaccccagccaccagctcc

SEQ ID NO: 53708 - RNA, 21 nt, synthetic construct
  source 1..21: mol_type = other RNA
taccccagccaccagctccac

SEQ ID NO: 53709 - RNA, 21 nt, synthetic construct
  source 1..21: mol_type = other RNA
cccagccaccagctccacggc

SEQ ID NO: 53710 - RNA, 21 nt, synthetic construct
  source 1..21: mol_type = other RNA
agccaccagctccacggccac

SEQ ID NO: 53711 - RNA, 21 nt, synthetic construct
  source 1..21: mol_type = other RNA
gccaccagctccacggccacg

SEQ ID NO: 53712 - RNA, 21 nt, synthetic construct
  source 1..21: mol_type = other RNA
ccaccagctccacggccacgc

SEQ ID NO: 53713 - RNA, 21 nt, synthetic construct
  source 1..21: mol_type = other RNA
caccagctccacggccacgcc

SEQ ID NO: 53714 - RNA, 21 nt, synthetic construct
  source 1..21: mol_type = other RNA
ccagctccacggccacgccct

SEQ ID NO: 53715 - RNA, 21 nt, synthetic construct
  source 1..21: mol_type = other RNA
agctccacggccacgccctcc

SEQ ID NO: 53716 - RNA, 21 nt, synthetic construct
  source 1..21: mol_type = other RNA
ccacggccacgccctcctcaa

SEQ ID NO: 53717 - RNA, 21 nt, synthetic construct
  source 1..21: mol_type = other RNA
cggggacgacctggatcctca

SEQ ID NO: 53718 - RNA, 21 nt, synthetic construct
  source 1..21: mol_type = other RNA
cgactgcgtccactggatcca

SEQ ID NO: 53719 - RNA, 21 nt, synthetic construct
  source 1..21: mol_type = other RNA
ctccccctcccaaagtgctga

SEQ ID NO: 53720 - RNA, 21 nt, synthetic construct
  source 1..21: mol_type = other RNA
tccagtccagggactgcaacc

SEQ ID NO: 53721 - RNA, 21 nt, synthetic construct
  source 1..21: mol_type = other RNA
cccatcccctcttcctccctg

SEQ ID NO: 53722 - RNA, 21 nt, synthetic construct
  source 1..21: mol_type = other RNA
gtggccaccccctcctccacc

SEQ ID NO: 53723 - RNA, 21 nt, synthetic construct
  source 1..21: mol_type = other RNA
cggtgaccccctcctccatcc

SEQ ID NO: 53724 - RNA, 21 nt, synthetic construct
  source 1..21: mol_type = other RNA
cacctgcagccaccagcaaca

SEQ ID NO: 53725 - RNA, 21 nt, synthetic construct
  source 1..21: mol_type = other RNA
cacccacacacccccagtgcc

SEQ ID NO: 53726 - RNA, 21 nt, synthetic construct
  source 1..21: mol_type = other RNA
cggtgcgcacagcctggactt

SEQ ID NO: 53727 - RNA, 21 nt, synthetic construct
  source 1..21: mol_type = other RNA
tgcccaggcccagcctggtgt

SEQ ID NO: 53728 - RNA, 21 nt, synthetic construct
  source 1..21: mol_type = other RNA
cggggacgacctggatcctca

SEQ ID NO: 53729 - RNA, 21 nt, synthetic construct
  source 1..21: mol_type = other RNA
cagagctgaccacaacagcca

SEQ ID NO: 53730 - RNA, 21 nt, synthetic construct
  source 1..21: mol_type = other RNA
gctgaccacaacagccactac

SEQ ID NO: 53731 - RNA, 21 nt, synthetic construct
  source 1..21: mol_type = other RNA
ggccaccccgtcctccacccc

SEQ ID NO: 53732 - RNA, 21 nt, synthetic construct
  source 1..21: mol_type = other RNA
gccaccccgtcctccacccca

SEQ ID NO: 53733 - RNA, 21 nt, synthetic construct
  source 1..21: mol_type = other RNA
tccacggccaccgcctcctcc

SEQ ID NO: 53734 - RNA, 21 nt, synthetic construct
  source 1..21: mol_type = other RNA
ccacggccaccgcctcctcca

SEQ ID NO: 53735 - RNA, 21 nt, synthetic construct
  source 1..21: mol_type = other RNA
ccacccaggcaactgctggca

SEQ ID NO: 53736 - RNA, 21 nt, synthetic construct
  source 1..21: mol_type = other RNA
tccagtccagggactgcaacc

SEQ ID NO: 53737 - RNA, 21 nt, synthetic construct
  source 1..21: mol_type = other RNA
gtggccaccccctcctccacc

SEQ ID NO: 53738 - RNA, 21 nt, synthetic construct
  source 1..21: mol_type = other RNA
cggtgaccccctcctccatcc

SEQ ID NO: 53739 - RNA, 21 nt, synthetic construct
  source 1..21: mol_type = other RNA
cacctgcagccaccagcagca

SEQ ID NO: 53740 - RNA, 21 nt, synthetic construct
  source 1..21: mol_type = other RNA
acctgcagccaccagcagcac

SEQ ID NO: 53741 - RNA, 21 nt, synthetic construct
  source 1..21: mol_type = other RNA
cacccacacacccccagtgcc

SEQ ID NO: 53742 - RNA, 21 nt, synthetic construct
  source 1..21: mol_type = other RNA
cggtgcgcacagcctggactt

SEQ ID NO: 53743 - RNA, 21 nt, synthetic construct
  source 1..21: mol_type = other RNA
cgggccacaccagggccacct

SEQ ID NO: 53744 - RNA, 21 nt, synthetic construct
  source 1..21: mol_type = other RNA
gaccacggccacggccacacc

SEQ ID NO: 53745 - RNA, 21 nt, synthetic construct
  source 1..21: mol_type = other RNA
tgcccaggcccagcctggtgt

SEQ ID NO: 53746 - RNA, 21 nt, synthetic construct
  source 1..21: mol_type = other RNA
gagcagaccacagcagccact

SEQ ID NO: 53747 - RNA, 21 nt, synthetic construct
  source 1..21: mol_type = other RNA
ctccccctcccaaagtgctga

SEQ ID NO: 53748 - RNA, 21 nt, synthetic construct
  source 1..21: mol_type = other RNA
ggccaccacacccacagccac

SEQ ID NO: 53749 - RNA, 21 nt, synthetic construct
  source 1..21: mol_type = other RNA
ccaaagccacttcctcctcca

SEQ ID NO: 53750 - RNA, 21 nt, synthetic construct
  source 1..21: mol_type = other RNA
acacccatcccctccttcacc

SEQ ID NO: 53751 - RNA, 21 nt, synthetic construct
  source 1..21: mol_type = other RNA
cggggacgacctggatcctca

SEQ ID NO: 53752 - RNA, 21 nt, synthetic construct
  source 1..21: mol_type = other RNA
actggccccacggccaccccg

SEQ ID NO: 53753 - RNA, 21 nt, synthetic construct
  source 1..21: mol_type = other RNA
ggccaccccgtcctccacccc

SEQ ID NO: 53754 - RNA, 21 nt, synthetic construct
  source 1..21: mol_type = other RNA
gccaccccgtcctccacccca

SEQ ID NO: 53755 - RNA, 21 nt, synthetic construct
  source 1..21: mol_type = other RNA
tccacggccaccgcctcctcc

SEQ ID NO: 53756 - RNA, 21 nt, synthetic construct
  source 1..21: mol_type = other RNA
ccacggccaccgcctcctcca

SEQ ID NO: 53757 - RNA, 21 nt, synthetic construct
  source 1..21: mol_type = other RNA
tccagtccagggactgcaacc

SEQ ID NO: 53758 - RNA, 21 nt, synthetic construct
  source 1..21: mol_type = other RNA
acagccatcccctcttcctcc

SEQ ID NO: 53759 - RNA, 21 nt, synthetic construct
  source 1..21: mol_type = other RNA
gccatcccctcttcctccctg

SEQ ID NO: 53760 - RNA, 21 nt, synthetic construct
  source 1..21: mol_type = other RNA
gtggccaccccctcctccacc

SEQ ID NO: 53761 - RNA, 21 nt, synthetic construct
  source 1..21: mol_type = other RNA
cggtgaccccctcctccatcc

SEQ ID NO: 53762 - RNA, 21 nt, synthetic construct
  source 1..21: mol_type = other RNA
cacctgcagccaccagcagca

SEQ ID NO: 53763 - RNA, 21 nt, synthetic construct
  source 1..21: mol_type = other RNA
acctgcagccaccagcagcac

SEQ ID NO: 53764 - RNA, 21 nt, synthetic construct
  source 1..21: mol_type = other RNA
cacccacacacccccagtgcc

SEQ ID NO: 53765 - RNA, 21 nt, synthetic construct
  source 1..21: mol_type = other RNA
cggtgcgcacagcctggactt

SEQ ID NO: 53766 - RNA, 21 nt, synthetic construct
  source 1..21: mol_type = other RNA
aaccaccagtaccacccagca

SEQ ID NO: 53767 - RNA, 21 nt, synthetic construct
  source 1..21: mol_type = other RNA
ctccaggaccacagccacagc

SEQ ID NO: 53768 - RNA, 21 nt, synthetic construct
  source 1..21: mol_type = other RNA
ccacagccacacccagcaaga

SEQ ID NO: 53769 - RNA, 21 nt, synthetic construct
  source 1..21: mol_type = other RNA
tgcccaggcccagcctggtgt

SEQ ID NO: 53770 - RNA, 21 nt, synthetic construct
  source 1..21: mol_type = other RNA
cggggacgacctggatcctca

SEQ ID NO: 53771 - RNA, 21 nt, synthetic construct
  source 1..21: mol_type = other RNA
gctgaccacaacagccactac

SEQ ID NO: 53772 - RNA, 21 nt, synthetic construct
  source 1..21: mol_type = other RNA
ggccaccccgtcctccacccc

SEQ ID NO: 53773 - RNA, 21 nt, synthetic construct
  source 1..21: mol_type = other RNA
gccaccccgtcctccacccca

SEQ ID NO: 53774 - RNA, 21 nt, synthetic construct
  source 1..21: mol_type = other RNA
tccacggccaccgcctcctcc

SEQ ID NO: 53775 - RNA, 21 nt, synthetic construct
  source 1..21: mol_type = other RNA
ccacggccaccgcctcctcca

SEQ ID NO: 53776 - RNA, 21 nt, synthetic construct
  source 1..21: mol_type = other RNA
ccacccaggcaactgctggca

SEQ ID NO: 53777 - RNA, 21 nt, synthetic construct
  source 1..21: mol_type = other RNA
tccagtccagggactgcaacc

SEQ ID NO: 53778 - RNA, 21 nt, synthetic construct
  source 1..21: mol_type = other RNA
gccaccccctcttccacccca

SEQ ID NO: 53779 - RNA, 21 nt, synthetic construct
  source 1..21: mol_type = other RNA
ccaccccctcttccaccccag

SEQ ID NO: 53780 - RNA, 21 nt, synthetic construct
  source 1..21: mol_type = other RNA
ccccctcttccaccccaggaa

SEQ ID NO: 53781 - RNA, 21 nt, synthetic construct
  source 1..21: mol_type = other RNA
agtcaccccctcctccagccc

SEQ ID NO: 53782 - RNA, 21 nt, synthetic construct
  source 1..21: mol_type = other RNA
cacctgcagccaccagcagca

SEQ ID NO: 53783 - RNA, 21 nt, synthetic construct
  source 1..21: mol_type = other RNA
acctgcagccaccagcagcac

SEQ ID NO: 53784 - RNA, 21 nt, synthetic construct
  source 1..21: mol_type = other RNA
cacccacacacccccagtgcc

SEQ ID NO: 53785 - RNA, 21 nt, synthetic construct
  source 1..21: mol_type = other RNA
cggtgcgcacagcctggactt

SEQ ID NO: 53786 - RNA, 21 nt, synthetic construct
  source 1..21: mol_type = other RNA
gaccacggccacggccacacc

SEQ ID NO: 53787 - RNA, 21 nt, synthetic construct
  source 1..21: mol_type = other RNA
tgcccaggcccagcctggtgt

SEQ ID NO: 53788 - RNA, 21 nt, synthetic construct
  source 1..21: mol_type = other RNA
cggggacgacctggatcctca

SEQ ID NO: 53789 - RNA, 21 nt, synthetic construct
  source 1..21: mol_type = other RNA
cagagctgaccacaacagcca

SEQ ID NO: 53790 - RNA, 21 nt, synthetic construct
  source 1..21: mol_type = other RNA
gctgaccacaacagccactac

SEQ ID NO: 53791 - RNA, 21 nt, synthetic construct
  source 1..21: mol_type = other RNA
actgcatccactggatccacg

SEQ ID NO: 53792 - RNA, 21 nt, synthetic construct
  source 1..21: mol_type = other RNA
ggccaccccgtcctccacccc

SEQ ID NO: 53793 - RNA, 21 nt, synthetic construct
  source 1..21: mol_type = other RNA
gccaccccgtcctccaccccg

SEQ ID NO: 53794 - RNA, 21 nt, synthetic construct
  source 1..21: mol_type = other RNA
ctccccctcccaaagtgctga

SEQ ID NO: 53795 - RNA, 21 nt, synthetic construct
  source 1..21: mol_type = other RNA
ggccaccacacccacagccac

SEQ ID NO: 53796 - RNA, 21 nt, synthetic construct
  source 1..21: mol_type = other RNA
ccaaagccacttcctcctcca

SEQ ID NO: 53797 - RNA, 21 nt, synthetic construct
  source 1..21: mol_type = other RNA
cggggacgacctggatcctca

SEQ ID NO: 53798 - RNA, 21 nt, synthetic construct
  source 1..21: mol_type = other RNA
actggccccacggccaccccg

SEQ ID NO: 53799 - RNA, 21 nt, synthetic construct
  source 1..21: mol_type = other RNA
ggccaccccgtcctccacccc

SEQ ID NO: 53800 - RNA, 21 nt, synthetic construct
  source 1..21: mol_type = other RNA
gccaccccgtcctccacccca

SEQ ID NO: 53801 - RNA, 21 nt, synthetic construct
  source 1..21: mol_type = other RNA
cagagctgaccacaacagcca

SEQ ID NO: 53802 - RNA, 21 nt, synthetic construct
  source 1..21: mol_type = other RNA
gctgaccacaacagccactac

SEQ ID NO: 53803 - RNA, 21 nt, synthetic construct
  source 1..21: mol_type = other RNA
cgactgcgtccactggatcca

SEQ ID NO: 53804 - RNA, 21 nt, synthetic construct
  source 1..21: mol_type = other RNA
ggccaccccgtcctccacccc

SEQ ID NO: 53805 - RNA, 21 nt, synthetic construct
  source 1..21: mol_type = other RNA
gccaccccgtcctccacccca

SEQ ID NO: 53806 - RNA, 21 nt, synthetic construct
  source 1..21: mol_type = other RNA
tccacggccaccgcctcctcc

SEQ ID NO: 53807 - RNA, 21 nt, synthetic construct
  source 1..21: mol_type = other RNA
ccacggccaccgcctcctcca

SEQ ID NO: 53808 - RNA, 21 nt, synthetic construct
  source 1..21: mol_type = other RNA
ccacccaggcaactgctggca

SEQ ID NO: 53809 - RNA, 21 nt, synthetic construct
  source 1..21: mol_type = other RNA
tccagtccagggactgcaact

SEQ ID NO: 53810 - RNA, 21 nt, synthetic construct
  source 1..21: mol_type = other RNA
gtggccaccccctcctccacc

SEQ ID NO: 53811 - RNA, 21 nt, synthetic construct
  source 1..21: mol_type = other RNA
cggtgaccccctcctccatcc

SEQ ID NO: 53812 - RNA, 21 nt, synthetic construct
  source 1..21: mol_type = other RNA
accagctccaaagccacttcc

SEQ ID NO: 53813 - RNA, 21 nt, synthetic construct
  source 1..21: mol_type = other RNA
ccaaagccacttcctcctcca

SEQ ID NO: 53814 - RNA, 21 nt, synthetic construct
  source 1..21: mol_type = other RNA
ccatcccctcctccaccctgt

SEQ ID NO: 53815 - RNA, 21 nt, synthetic construct
  source 1..21: mol_type = other RNA
accaccacagccaccatgaca

SEQ ID NO: 53816 - RNA, 21 nt, synthetic construct
  source 1..21: mol_type = other RNA
ccaccacagccaccatgacaa

SEQ ID NO: 53817 - RNA, 21 nt, synthetic construct
  source 1..21: mol_type = other RNA
ttccacggccacaccctcctc

SEQ ID NO: 53818 - RNA, 21 nt, synthetic construct
  source 1..21: mol_type = other RNA
gctgaccacaacagccactac

SEQ ID NO: 53819 - RNA, 21 nt, synthetic construct
  source 1..21: mol_type = other RNA
cctgtcctccaccccagggac

SEQ ID NO: 53820 - RNA, 21 nt, synthetic construct
  source 1..21: mol_type = other RNA
ctgtcctccaccccagggacc

SEQ ID NO: 53821 - RNA, 21 nt, synthetic construct
  source 1..21: mol_type = other RNA
tccacggccaccgcctcctcc

SEQ ID NO: 53822 - RNA, 21 nt, synthetic construct
  source 1..21: mol_type = other RNA
ccacggccaccgcctcctcca

SEQ ID NO: 53823 - RNA, 21 nt, synthetic construct
  source 1..21: mol_type = other RNA
acccactggcttccccagctc

SEQ ID NO: 53824 - RNA, 21 nt, synthetic construct
  source 1..21: mol_type = other RNA
cccactggcttccccagctcc

SEQ ID NO: 53825 - RNA, 21 nt, synthetic construct
  source 1..21: mol_type = other RNA
gccactgccgctgccgcccgc

SEQ ID NO: 53826 - RNA, 21 nt, synthetic construct
  source 1..21: mol_type = other RNA
cccgctgcccccgcgccctca

SEQ ID NO: 53827 - RNA, 21 nt, synthetic construct
  source 1..21: mol_type = other RNA
tcaatggccaagtcttccagg

SEQ ID NO: 53828 - RNA, 21 nt, synthetic construct
  source 1..21: mol_type = other RNA
acccacccccaccccatgccc

SEQ ID NO: 53829 - RNA, 21 nt, synthetic construct
  source 1..21: mol_type = other RNA
ccacccccaccccatgcccac

SEQ ID NO: 53830 - RNA, 21 nt, synthetic construct
  source 1..21: mol_type = other RNA
gacctcacctgcccacccacc

SEQ ID NO: 53831 - RNA, 21 nt, synthetic construct
  source 1..21: mol_type = other RNA
taggaaccagagcccacagct

SEQ ID NO: 53832 - RNA, 21 nt, synthetic construct
  source 1..21: mol_type = other RNA
tacctgtccccagggctttga

SEQ ID NO: 53833 - RNA, 21 nt, synthetic construct
  source 1..21: mol_type = other RNA
gctccccctcccaaagtgctg

SEQ ID NO: 53834 - RNA, 21 nt, synthetic construct
  source 1..21: mol_type = other RNA
gctccccctcccaaagtgctg

SEQ ID NO: 53835 - RNA, 21 nt, synthetic construct
  source 1..21: mol_type = other RNA
gctccccctcccaaagtgctg

SEQ ID NO: 53836 - RNA, 21 nt, synthetic construct
  source 1..21: mol_type = other RNA
ccatcccctcctccacccttg

SEQ ID NO: 53837 - RNA, 21 nt, synthetic construct
  source 1..21: mol_type = other RNA
gccaccgcctcctccactctg

SEQ ID NO: 53838 - RNA, 21 nt, synthetic construct
  source 1..21: mol_type = other RNA
cctcctccactctgggaacag

SEQ ID NO: 53839 - RNA, 21 nt, synthetic construct
  source 1..21: mol_type = other RNA
tggtgcatgggaaggaggagg

SEQ ID NO: 53840 - RNA, 21 nt, synthetic construct
  source 1..21: mol_type = other RNA
gtgcccaggcccagcctggtg

SEQ ID NO: 53841 - RNA, 21 nt, synthetic construct
  source 1..21: mol_type = other RNA
gtgcccaggcccagcctggtg

SEQ ID NO: 53842 - RNA, 21 nt, synthetic construct
  source 1..21: mol_type = other RNA
gtgcccaggcccagcctggtg

SEQ ID NO: 53843 - RNA, 21 nt, synthetic construct
  source 1..21: mol_type = other RNA
gtgcccaggcccagcctggtg

SEQ ID NO: 53844 - RNA, 21 nt, synthetic construct
  source 1..21: mol_type = other RNA
accagttccaaagccacttcc

SEQ ID NO: 53845 - RNA, 21 nt, synthetic construct
  source 1..21: mol_type = other RNA
accagttccaaagccacttcc

SEQ ID NO: 53846 - RNA, 21 nt, synthetic construct
  source 1..21: mol_type = other RNA
aagcacagggtgtgcagcccc

SEQ ID NO: 53847 - RNA, 21 nt, synthetic construct
  source 1..21: mol_type = other RNA
agcacagggtgtgcagccccc

SEQ ID NO: 53848 - RNA, 21 nt, synthetic construct
  source 1..21: mol_type = other RNA
cacggccaccgcctcctccac

SEQ ID NO: 53849 - RNA, 21 nt, synthetic construct
  source 1..21: mol_type = other RNA
ccagttccaaagccacttcct

SEQ ID NO: 53850 - RNA, 21 nt, synthetic construct
  source 1..21: mol_type = other RNA
cacggccaccgcctcctccac

SEQ ID NO: 53851 - RNA, 21 nt, synthetic construct
  source 1..21: mol_type = other RNA
cacggccaccgcctcctccac

SEQ ID NO: 53852 - RNA, 21 nt, synthetic construct
  source 1..21: mol_type = other RNA
ccagttccaaagccacttcct

SEQ ID NO: 53853 - RNA, 21 nt, synthetic construct
  source 1..21: mol_type = other RNA
cacggccaccgcctcctccac

SEQ ID NO: 53854 - RNA, 21 nt, synthetic construct
  source 1..21: mol_type = other RNA
cacggccaccgcctcctccac

SEQ ID NO: 53855 - RNA, 21 nt, synthetic construct
  source 1..21: mol_type = other RNA
aaagcacagggtgtgcagccc

SEQ ID NO: 53856 - RNA, 21 nt, synthetic construct
  source 1..21: mol_type = other RNA
cggccaccccgtcctccaccc

SEQ ID NO: 53857 - RNA, 21 nt, synthetic construct
  source 1..21: mol_type = other RNA
cggccaccccgtcctccaccc

SEQ ID NO: 53858 - RNA, 21 nt, synthetic construct
  source 1..21: mol_type = other RNA
cggccaccccgtcctccaccc

SEQ ID NO: 53859 - RNA, 21 nt, synthetic construct
  source 1..21: mol_type = other RNA
cggccaccccgtcctccaccc

SEQ ID NO: 53860 - RNA, 21 nt, synthetic construct
  source 1..21: mol_type = other RNA
cggccaccccgtcctccaccc

SEQ ID NO: 53861 - RNA, 21 nt, synthetic construct
  source 1..21: mol_type = other RNA
cggccaccccgtcctccaccc

SEQ ID NO: 53862 - RNA, 21 nt, synthetic construct
  source 1..21: mol_type = other RNA
gcggggtggtggaggccacgg

SEQ ID NO: 53863 - RNA, 21 nt, synthetic construct
  source 1..21: mol_type = other RNA
tgccgctggaggagctgggcc

SEQ ID NO: 53864 - RNA, 21 nt, synthetic construct
  source 1..21: mol_type = other RNA
actgccccagtaccccagcca

SEQ ID NO: 53865 - RNA, 21 nt, synthetic construct
  source 1..21: mol_type = other RNA
gccctttccagccctcaccct

SEQ ID NO: 53866 - RNA, 21 nt, synthetic construct
  source 1..21: mol_type = other RNA
agccacagccacacccagcaa

SEQ ID NO: 53867 - RNA, 21 nt, synthetic construct
  source 1..21: mol_type = other RNA
gccacagccacacccagcaag

SEQ ID NO: 53868 - RNA, 21 nt, synthetic construct
  source 1..21: mol_type = other RNA
accccatgcccaccacagccg

SEQ ID NO: 53869 - RNA, 21 nt, synthetic construct
  source 1..21: mol_type = other RNA
ctcacagagccgagcactata

SEQ ID NO: 53870 - RNA, 21 nt, synthetic construct
  source 1..21: mol_type = other RNA
gaacaaactaagcatgtgcgg

SEQ ID NO: 53871 - RNA, 21 nt, synthetic construct
  source 1..21: mol_type = other RNA
ccacagtgcttaccgccacgg

SEQ ID NO: 53872 - RNA, 21 nt, synthetic construct
  source 1..21: mol_type = other RNA
ccacagtgcttaccgccacgg

SEQ ID NO: 53873 - RNA, 21 nt, synthetic construct
  source 1..21: mol_type = other RNA
gccagagcctggaggcttacg

SEQ ID NO: 53874 - RNA, 21 nt, synthetic construct
  source 1..21: mol_type = other RNA
ccacacccatggccaccatgt

SEQ ID NO: 53875 - RNA, 21 nt, synthetic construct
  source 1..21: mol_type = other RNA
cctcacagagccgagcactac

SEQ ID NO: 53876 - RNA, 21 nt, synthetic construct
  source 1..21: mol_type = other RNA
cctcacagagccgagcactac

SEQ ID NO: 53877 - RNA, 21 nt, synthetic construct
  source 1..21: mol_type = other RNA
cctcacagagccgagcactac

SEQ ID NO: 53878 - RNA, 21 nt, synthetic construct
  source 1..21: mol_type = other RNA
cctcacagagccgagcactat

SEQ ID NO: 53879 - RNA, 21 nt, synthetic construct
  source 1..21: mol_type = other RNA
tccacggccacgccctcctca

SEQ ID NO: 53880 - RNA, 21 nt, synthetic construct
  source 1..21: mol_type = other RNA
gctggctgacatcgagtgccg

SEQ ID NO: 53881 - RNA, 21 nt, synthetic construct
  source 1..21: mol_type = other RNA
gacattcctgtggaacggaga

SEQ ID NO: 53882 - RNA, 21 nt, synthetic construct
  source 1..21: mol_type = other RNA
agcagcaaccaccagtaccac

SEQ ID NO: 53883 - RNA, 21 nt, synthetic construct
  source 1..21: mol_type = other RNA
accttcagcgtgtccactgtg

SEQ ID NO: 53884 - RNA, 21 nt, synthetic construct
  source 1..21: mol_type = other RNA
gagtgcatctgcagcatgtgg

SEQ ID NO: 53885 - RNA, 21 nt, synthetic construct
  source 1..21: mol_type = other RNA
atgccctgtgctggctgacat

SEQ ID NO: 53886 - RNA, 21 nt, synthetic construct
  source 1..21: mol_type = other RNA
agcatcccaaagccccctctg

SEQ ID NO: 53887 - RNA, 21 nt, synthetic construct
  source 1..21: mol_type = other RNA
tctgcaggaaccgtgagcagg

SEQ ID NO: 53888 - RNA, 21 nt, synthetic construct
  source 1..21: mol_type = other RNA
tctgcaggaaccgtgagcagg

SEQ ID NO: 53889 - RNA, 21 nt, synthetic construct
  source 1..21: mol_type = other RNA
cctcacagagcagaccacagc

SEQ ID NO: 53890 - RNA, 21 nt, synthetic construct
  source 1..21: mol_type = other RNA
gtgctgaccagcacggccacc

SEQ ID NO: 53891 - RNA, 21 nt, synthetic construct
  source 1..21: mol_type = other RNA
gtgctgaccagcacggccacc

SEQ ID NO: 53892 - RNA, 21 nt, synthetic construct
  source 1..21: mol_type = other RNA
tctgcaggaaccgtgagcagg

SEQ ID NO: 53893 - RNA, 21 nt, synthetic construct
  source 1..21: mol_type = other RNA
tctgcaggaaccgtgagcagg

SEQ ID NO: 53894 - RNA, 21 nt, synthetic construct
  source 1..21: mol_type = other RNA
ccagtgctgaccagcacggcc

SEQ ID NO: 53895 - RNA, 21 nt, synthetic construct
  source 1..21: mol_type = other RNA
gtgctgaccagcacggccacc

SEQ ID NO: 53896 - RNA, 21 nt, synthetic construct
  source 1..21: mol_type = other RNA
acagcagaaaggatggctgct

SEQ ID NO: 53897 - RNA, 21 nt, synthetic construct
  source 1..21: mol_type = other RNA
ggctggtccaggcaaggccag

SEQ ID NO: 53898 - RNA, 21 nt, synthetic construct
  source 1..21: mol_type = other RNA
aatccacagctaccagcttta

SEQ ID NO: 53899 - RNA, 21 nt, synthetic construct
  source 1..21: mol_type = other RNA
agccacaaaatccacagctac

SEQ ID NO: 53900 - RNA, 21 nt, synthetic construct
  source 1..21: mol_type = other RNA
aatccacagctaccagcttta

SEQ ID NO: 53901 - RNA, 21 nt, synthetic construct
  source 1..21: mol_type = other RNA
tgtccacctggagccaggatg

SEQ ID NO: 53902 - RNA, 21 nt, synthetic construct
  source 1..21: mol_type = other RNA
gcctgctgcagggtaactcag

SEQ ID NO: 53903 - RNA, 21 nt, synthetic construct
  source 1..21: mol_type = other RNA
tgtgacaatgccatccctctc

SEQ ID NO: 53904 - RNA, 21 nt, synthetic construct
  source 1..21: mol_type = other RNA
cacctcgggcatcttgggcac

SEQ ID NO: 53905 - RNA, 21 nt, synthetic construct
  source 1..21: mol_type = other RNA
ccacctcaggcaccttgggca

SEQ ID NO: 53906 - RNA, 21 nt, synthetic construct
  source 1..21: mol_type = other RNA
cacctcgggcatcttgggcac

SEQ ID NO: 53907 - RNA, 21 nt, synthetic construct
  source 1..21: mol_type = other RNA
ccacctcaggcaccttgggca

SEQ ID NO: 53908 - RNA, 21 nt, synthetic construct
  source 1..21: mol_type = other RNA
agcatccggtcgacggcggcc

SEQ ID NO: 53909 - RNA, 21 nt, synthetic construct
  source 1..21: mol_type = other RNA
agcagcacagtgactccctcc

SEQ ID NO: 53910 - RNA, 21 nt, synthetic construct
  source 1..21: mol_type = other RNA
agcagcacagtgactccctcc

SEQ ID NO: 53911 - RNA, 21 nt, synthetic construct
  source 1..21: mol_type = other RNA
agcagcacagtgactccctcc

SEQ ID NO: 53912 - RNA, 21 nt, synthetic construct
  source 1..21: mol_type = other RNA
cggaagaccagcgtgttcatc

SEQ ID NO: 53913 - RNA, 21 nt, synthetic construct
  source 1..21: mol_type = other RNA
accacggccacggccacaccc

SEQ ID NO: 53914 - RNA, 21 nt, synthetic construct
  source 1..21: mol_type = other RNA
accacggccacggccacaccc

SEQ ID NO: 53915 - RNA, 21 nt, synthetic construct
  source 1..21: mol_type = other RNA
cccctgaacccggcgcacaat

SEQ ID NO: 53916 - RNA, 21 nt, synthetic construct
  source 1..21: mol_type = other RNA
ccagcagcctaaggacataga

SEQ ID NO: 53917 - RNA, 21 nt, synthetic construct
  source 1..21: mol_type = other RNA
caaagtgccaactaccacaac

SEQ ID NO: 53918 - RNA, 21 nt, synthetic construct
  source 1..21: mol_type = other RNA
ctcacagagccgagcactaca

SEQ ID NO: 53919 - RNA, 21 nt, synthetic construct
  source 1..21: mol_type = other RNA
ctcacagagccgagcactaca

SEQ ID NO: 53920 - RNA, 21 nt, synthetic construct
  source 1..21: mol_type = other RNA
ctcacagagccgagcactaca

SEQ ID NO: 53921 - RNA, 21 nt, synthetic construct
  source 1..21: mol_type = other RNA
ccacagtgctgaccacgaagg

SEQ ID NO: 53922 - RNA, 21 nt, synthetic construct
  source 1..21: mol_type = other RNA
ccacagtgctgaccacgaagg

SEQ ID NO: 53923 - RNA, 21 nt, synthetic construct
  source 1..21: mol_type = other RNA
cctcacaaagctgaccacaac

SEQ ID NO: 53924 - RNA, 21 nt, synthetic construct
  source 1..21: mol_type = other RNA
cgtgcaaccgtcccggcttcg

SEQ ID NO: 53925 - RNA, 21 nt, synthetic construct
  source 1..21: mol_type = other RNA
taaccgtgaccaggccccggg

SEQ ID NO: 53926 - RNA, 21 nt, synthetic construct
  source 1..21: mol_type = other RNA
gcccctgctacgctcacggca

SEQ ID NO: 53927 - RNA, 21 nt, synthetic construct
  source 1..21: mol_type = other RNA
gctcacactaccaaagtgctg

SEQ ID NO: 53928 - RNA, 21 nt, synthetic construct
  source 1..21: mol_type = other RNA
ggctggtgtcggatgggagtg

SEQ ID NO: 53929 - RNA, 21 nt, synthetic construct
  source 1..21: mol_type = other RNA
ccagtgccgaacaccatggcc

SEQ ID NO: 53930 - RNA, 21 nt, synthetic construct
  source 1..21: mol_type = other RNA
tagcagcagaaccaccgagtc

SEQ ID NO: 53931 - RNA, 21 nt, synthetic construct
  source 1..21: mol_type = other RNA
gtgctgaccagcccggccacc

SEQ ID NO: 53932 - RNA, 21 nt, synthetic construct
  source 1..21: mol_type = other RNA
cctcccagaacagaccaccac

SEQ ID NO: 53933 - RNA, 21 nt, synthetic construct
  source 1..21: mol_type = other RNA
cctcccagaacagaccaccac

SEQ ID NO: 53934 - RNA, 21 nt, synthetic construct
  source 1..21: mol_type = other RNA
agcatccggctggtgctgaca

SEQ ID NO: 53935 - RNA, 21 nt, synthetic construct
  source 1..21: mol_type = other RNA
cctcccaaagtgctgaccacc

SEQ ID NO: 53936 - RNA, 21 nt, synthetic construct
  source 1..21: mol_type = other RNA
gagcaccacggccacgacacc

SEQ ID NO: 53937 - RNA, 21 nt, synthetic construct
  source 1..21: mol_type = other RNA
ccagcagcacagtgactccct

SEQ ID NO: 53938 - RNA, 21 nt, synthetic construct
  source 1..21: mol_type = other RNA
ccagcagcacagtgactccct

SEQ ID NO: 53939 - RNA, 21 nt, synthetic construct
  source 1..21: mol_type = other RNA
gagcaccacggccacgacacc

SEQ ID NO: 53940 - RNA, 21 nt, synthetic construct
  source 1..21: mol_type = other RNA
ccagcagcacagtgactccct

SEQ ID NO: 53941 - RNA, 21 nt, synthetic construct
  source 1..21: mol_type = other RNA
gagcaccacggccacgacacc

SEQ ID NO: 53942 - RNA, 21 nt, synthetic construct
  source 1..21: mol_type = other RNA
acagtgctgaccaccacagcc

SEQ ID NO: 53943 - RNA, 21 nt, synthetic construct
  source 1..21: mol_type = other RNA
gctcacacccccaaagtggtg

SEQ ID NO: 53944 - RNA, 21 nt, synthetic construct
  source 1..21: mol_type = other RNA
caaagtggtgaccaccatggc

SEQ ID NO: 53945 - RNA, 21 nt, synthetic construct
  source 1..21: mol_type = other RNA
acccctgctgccccgagacgg

SEQ ID NO: 53946 - RNA, 21 nt, synthetic construct
  source 1..21: mol_type = other RNA
accttgggcctcctctgcgga

SEQ ID NO: 53947 - RNA, 21 nt, synthetic construct
  source 1..21: mol_type = other RNA
tgccaccgcaccctgctgggg

SEQ ID NO: 53948 - RNA, 21 nt, synthetic construct
  source 1..21: mol_type = other RNA
cctcacaaagccgaccacaac

SEQ ID NO: 53949 - RNA, 21 nt, synthetic construct
  source 1..21: mol_type = other RNA
actttggcctggtctgcagga

SEQ ID NO: 53950 - RNA, 21 nt, synthetic construct
  source 1..21: mol_type = other RNA
ccggggccaccggctctgtgg

SEQ ID NO: 53951 - RNA, 21 nt, synthetic construct
  source 1..21: mol_type = other RNA
gccacctcaggcaccttgggc

SEQ ID NO: 53952 - RNA, 21 nt, synthetic construct
  source 1..21: mol_type = other RNA
actttggcctggtctgcagga

SEQ ID NO: 53953 - RNA, 21 nt, synthetic construct
  source 1..21: mol_type = other RNA
cctcacagagctgaccacagc

SEQ ID NO: 53954 - RNA, 21 nt, synthetic construct
  source 1..21: mol_type = other RNA
ctcacagagctgaccacagca

SEQ ID NO: 53955 - RNA, 21 nt, synthetic construct
  source 1..21: mol_type = other RNA
gctgaccacagcagccactac

SEQ ID NO: 53956 - RNA, 21 nt, synthetic construct
  source 1..21: mol_type = other RNA
actttggcctggtctgcagga

SEQ ID NO: 53957 - RNA, 21 nt, synthetic construct
  source 1..21: mol_type = other RNA
gccacctcaggcaccttgggc

SEQ ID NO: 53958 - RNA, 21 nt, synthetic construct
  source 1..21: mol_type = other RNA
actttggcctggtctgcagga

SEQ ID NO: 53959 - RNA, 21 nt, synthetic construct
  source 1..21: mol_type = other RNA
cctcacagagctgaccacagc

SEQ ID NO: 53960 - RNA, 21 nt, synthetic construct
  source 1..21: mol_type = other RNA
ctcacagagctgaccacagca

SEQ ID NO: 53961 - RNA, 21 nt, synthetic construct
  source 1..21: mol_type = other RNA
gctgaccacagcagccactac

SEQ ID NO: 53962 - RNA, 21 nt, synthetic construct
  source 1..21: mol_type = other RNA
ccggggccaccggctctgtgg

SEQ ID NO: 53963 - RNA, 21 nt, synthetic construct
  source 1..21: mol_type = other RNA
gagccggctgccatttctacg

SEQ ID NO: 53964 - RNA, 21 nt, synthetic construct
  source 1..21: mol_type = other RNA
gggccgccttgaggtgccctg

SEQ ID NO: 53965 - RNA, 21 nt, synthetic construct
  source 1..21: mol_type = other RNA
gccaggagaggcgggtccacg

SEQ ID NO: 53966 - RNA, 21 nt, synthetic construct
  source 1..21: mol_type = other RNA
gtccggccgctggggcagaca

SEQ ID NO: 53967 - RNA, 21 nt, synthetic construct
  source 1..21: mol_type = other RNA
atcctgcacacctacacccac

SEQ ID NO: 53968 - RNA, 21 nt, synthetic construct
  source 1..21: mol_type = other RNA
tacggccacgccctcctccac

SEQ ID NO: 53969 - RNA, 21 nt, synthetic construct
  source 1..21: mol_type = other RNA
cccctcccaaagtgctgacca

SEQ ID NO: 53970 - RNA, 21 nt, synthetic construct
  source 1..21: mol_type = other RNA
cccctcccaaagtgctgacca

SEQ ID NO: 53971 - RNA, 21 nt, synthetic construct
  source 1..21: mol_type = other RNA
cccctcccaaagtgctgacca

SEQ ID NO: 53972 - RNA, 21 nt, synthetic construct
  source 1..21: mol_type = other RNA
cccctcctcaactccagggac

SEQ ID NO: 53973 - RNA, 21 nt, synthetic construct
  source 1..21: mol_type = other RNA
cccctcctcaactccagggac

SEQ ID NO: 53974 - RNA, 21 nt, synthetic construct
  source 1..21: mol_type = other RNA
cccctcctcaactccagggac

SEQ ID NO: 53975 - RNA, 21 nt, synthetic construct
  source 1..21: mol_type = other RNA
cccctcctcaactccagggac

SEQ ID NO: 53976 - RNA, 21 nt, synthetic construct
  source 1..21: mol_type = other RNA
tggtgaccaccatggccacta

SEQ ID NO: 53977 - RNA, 21 nt, synthetic construct
  source 1..21: mol_type = other RNA
cccggccctcccggtctccac

SEQ ID NO: 53978 - RNA, 21 nt, synthetic construct
  source 1..21: mol_type = other RNA
tggaatgcagcctggactttg

SEQ ID NO: 53979 - RNA, 21 nt, synthetic construct
  source 1..21: mol_type = other RNA
tggaatgcagcctggactttg

SEQ ID NO: 53980 - RNA, 21 nt, synthetic construct
  source 1..21: mol_type = other RNA
tggaatgcagcctggactttg

SEQ ID NO: 53981 - RNA, 21 nt, synthetic construct
  source 1..21: mol_type = other RNA
tggaatgcagcctggactttg

SEQ ID NO: 53982 - RNA, 21 nt, synthetic construct
  source 1..21: mol_type = other RNA
ttggcccaggactactgtggg

SEQ ID NO: 53983 - RNA, 21 nt, synthetic construct
  source 1..21: mol_type = other RNA
ctcaacatgcagcaccaggag

SEQ ID NO: 53984 - RNA, 21 nt, synthetic construct
  source 1..21: mol_type = other RNA
ttcaacaccacctgcagctcc

SEQ ID NO: 53985 - RNA, 21 nt, synthetic construct
  source 1..21: mol_type = other RNA
ctcacagccacccacgctggc

SEQ ID NO: 53986 - RNA, 21 nt, synthetic construct
  source 1..21: mol_type = other RNA
ggtgcaagggtccccacagcg

SEQ ID NO: 53987 - RNA, 21 nt, synthetic construct
  source 1..21: mol_type = other RNA
cctcacagagctgaccacaac

SEQ ID NO: 53988 - RNA, 21 nt, synthetic construct
  source 1..21: mol_type = other RNA
cctcacagagctgaccacaac

SEQ ID NO: 53989 - RNA, 21 nt, synthetic construct
  source 1..21: mol_type = other RNA
cctcacagagctgaccacaac

SEQ ID NO: 53990 - RNA, 21 nt, synthetic construct
  source 1..21: mol_type = other RNA
ggctggtgctgacattcctgt

SEQ ID NO: 53991 - RNA, 21 nt, synthetic construct
  source 1..21: mol_type = other RNA
gatgcctgccagcccacttgc

SEQ ID NO: 53992 - RNA, 21 nt, synthetic construct
  source 1..21: mol_type = other RNA
cctcacagagcccagcactac

SEQ ID NO: 53993 - RNA, 21 nt, synthetic construct
  source 1..21: mol_type = other RNA
ctcacagagcccagcactaca

SEQ ID NO: 53994 - RNA, 21 nt, synthetic construct
  source 1..21: mol_type = other RNA
actgcagccactggatccacg

SEQ ID NO: 53995 - RNA, 21 nt, synthetic construct
  source 1..21: mol_type = other RNA
tcagcagaggcccaggccatg

SEQ ID NO: 53996 - RNA, 21 nt, synthetic construct
  source 1..21: mol_type = other RNA
gctggtccagctggtacaatg

SEQ ID NO: 53997 - RNA, 21 nt, synthetic construct
  source 1..21: mol_type = other RNA
ctggtcagagtggctggacta

SEQ ID NO: 53998 - RNA, 21 nt, synthetic construct
  source 1..21: mol_type = other RNA
ctggtcagagtggctggacta

SEQ ID NO: 53999 - RNA, 21 nt, synthetic construct
  source 1..21: mol_type = other RNA
ctggtcagagtggctggacta

SEQ ID NO: 54000 - RNA, 21 nt, synthetic construct
  source 1..21: mol_type = other RNA
ctggtcagagtggctggacta

SEQ ID NO: 54001 - RNA, 21 nt, synthetic construct
  source 1..21: mol_type = other RNA
ggctgcttctgccctgaggac

SEQ ID NO: 54002 - RNA, 21 nt, synthetic construct
  source 1..21: mol_type = other RNA
cactgccgctgccgcccgctg

SEQ ID NO: 54003 - RNA, 21 nt, synthetic construct
  source 1..21: mol_type = other RNA
tacgcccaggcctgccacgac

SEQ ID NO: 54004 - RNA, 21 nt, synthetic construct
  source 1..21: mol_type = other RNA
cccctcctcctccctgggcac

SEQ ID NO: 54005 - RNA, 21 nt, synthetic construct
  source 1..21: mol_type = other RNA
cccctcctcctccctgggcac

SEQ ID NO: 54006 - RNA, 21 nt, synthetic construct
  source 1..21: mol_type = other RNA
cccctcctcctccctgggcac

SEQ ID NO: 54007 - RNA, 21 nt, synthetic construct
  source 1..21: mol_type = other RNA
ccactgccgctgccgcccgct

SEQ ID NO: 54008 - RNA, 21 nt, synthetic construct
  source 1..21: mol_type = other RNA
gccagccccgcagccccggtg

SEQ ID NO: 54009 - RNA, 21 nt, synthetic construct
  source 1..21: mol_type = other RNA
acgccctggaacaaactaagc

SEQ ID NO: 54010 - RNA, 21 nt, synthetic construct
  source 1..21: mol_type = other RNA
ctgccctagggaccacccaca

SEQ ID NO: 54011 - RNA, 21 nt, synthetic construct
  source 1..21: mol_type = other RNA
ctgccctagggaccacccaca

SEQ ID NO: 54012 - RNA, 21 nt, synthetic construct
  source 1..21: mol_type = other RNA
ctgccctagggaccacccaca

SEQ ID NO: 54013 - RNA, 21 nt, synthetic construct
  source 1..21: mol_type = other RNA
ctgccctagggaccacccaca

SEQ ID NO: 54014 - RNA, 21 nt, synthetic construct
  source 1..21: mol_type = other RNA
ggtgcaatgtcaggaggatgc

SEQ ID NO: 54015 - RNA, 21 nt, synthetic construct
  source 1..21: mol_type = other RNA
gctgagctgcggaagtgcggc

SEQ ID NO: 54016 - RNA, 21 nt, synthetic construct
  source 1..21: mol_type = other RNA
atgctgagccaggtctttgct

SEQ ID NO: 54017 - RNA, 21 nt, synthetic construct
  source 1..21: mol_type = other RNA
ggaggggcagtctgtgagcag

SEQ ID NO: 54018 - RNA, 21 nt, synthetic construct
  source 1..21: mol_type = other RNA
caaagtgctgaccagcccggc

SEQ ID NO: 54019 - RNA, 21 nt, synthetic construct
  source 1..21: mol_type = other RNA
ccacagtgctgaccaccacag

SEQ ID NO: 54020 - RNA, 21 nt, synthetic construct
  source 1..21: mol_type = other RNA
catggctcccccacacacccg

SEQ ID NO: 54021 - RNA, 21 nt, synthetic construct
  source 1..21: mol_type = other RNA
agccccccggcctgtgtgtgg

SEQ ID NO: 54022 - RNA, 21 nt, synthetic construct
  source 1..21: mol_type = other RNA
gccccccggcctgtgtgtggc

SEQ ID NO: 54023 - RNA, 21 nt, synthetic construct
  source 1..21: mol_type = other RNA
aggacggaaactactatgacg

SEQ ID NO: 54024 - RNA, 21 nt, synthetic construct
  source 1..21: mol_type = other RNA
cagctgcgagtacatcttggc

SEQ ID NO: 54025 - RNA, 21 nt, synthetic construct
  source 1..21: mol_type = other RNA
ccagtgctgaccaccaccgcc

SEQ ID NO: 54026 - RNA, 21 nt, synthetic construct
  source 1..21: mol_type = other RNA
gtgctgaccaccaccgccacc

SEQ ID NO: 54027 - RNA, 21 nt, synthetic construct
  source 1..21: mol_type = other RNA
tagcagcaaccaccggtacca

SEQ ID NO: 54028 - RNA, 21 nt, synthetic construct
  source 1..21: mol_type = other RNA
agcagcaaccaccggtaccac

SEQ ID NO: 54029 - RNA, 21 nt, synthetic construct
  source 1..21: mol_type = other RNA
ccagtgctgaccaccaccgcc

SEQ ID NO: 54030 - RNA, 21 nt, synthetic construct
  source 1..21: mol_type = other RNA
gtgctgaccaccaccgccacc

SEQ ID NO: 54031 - RNA, 21 nt, synthetic construct
  source 1..21: mol_type = other RNA
cagcagcaaccaccggtacca

SEQ ID NO: 54032 - RNA, 21 nt, synthetic construct
  source 1..21: mol_type = other RNA
agcagcaaccaccggtaccac

SEQ ID NO: 54033 - RNA, 21 nt, synthetic construct
  source 1..21: mol_type = other RNA
ccagtgctgaccaccaccgcc

SEQ ID NO: 54034 - RNA, 21 nt, synthetic construct
  source 1..21: mol_type = other RNA
gtgctgaccaccaccgccacc

SEQ ID NO: 54035 - RNA, 21 nt, synthetic construct
  source 1..21: mol_type = other RNA
cagcagcaaccaccagtacca

SEQ ID NO: 54036 - RNA, 21 nt, synthetic construct
  source 1..21: mol_type = other RNA
ccagtgctgaccaccaccgcc

SEQ ID NO: 54037 - RNA, 21 nt, synthetic construct
  source 1..21: mol_type = other RNA
gtgctgaccaccaccgccacc

SEQ ID NO: 54038 - RNA, 21 nt, synthetic construct
  source 1..21: mol_type = other RNA
cagcagcaaccaccggtacca

SEQ ID NO: 54039 - RNA, 21 nt, synthetic construct
  source 1..21: mol_type = other RNA
agcagcaaccaccggtaccac

SEQ ID NO: 54040 - RNA, 21 nt, synthetic construct
  source 1..21: mol_type = other RNA
ccccctgggggagttgggcca

SEQ ID NO: 54041 - RNA, 21 nt, synthetic construct
  source 1..21: mol_type = other RNA
gtgtgcgtgtgcaacacaacc

SEQ ID NO: 54042 - RNA, 21 nt, synthetic construct
  source 1..21: mol_type = other RNA
caatactacctgtccccaggg

SEQ ID NO: 54043 - RNA, 21 nt, synthetic construct
  source 1..21: mol_type = other RNA
gcgaggaccactgtgtggacg

SEQ ID NO: 54044 - RNA, 21 nt, synthetic construct
  source 1..21: mol_type = other RNA
cagcagcacagtgactccctc

SEQ ID NO: 54045 - RNA, 21 nt, synthetic construct
  source 1..21: mol_type = other RNA
cctggacttcggccacctcag

SEQ ID NO: 54046 - RNA, 21 nt, synthetic construct
  source 1..21: mol_type = other RNA
cagcagcacagtgactccctc

SEQ ID NO: 54047 - RNA, 21 nt, synthetic construct
  source 1..21: mol_type = other RNA
cagcagcacagtgactccctc

SEQ ID NO: 54048 - RNA, 21 nt, synthetic construct
  source 1..21: mol_type = other RNA
cctggacttcggccacctcag

SEQ ID NO: 54049 - RNA, 21 nt, synthetic construct
  source 1..21: mol_type = other RNA
gatggctgctgggccccgact

SEQ ID NO: 54050 - RNA, 21 nt, synthetic construct
  source 1..21: mol_type = other RNA
cggctcagccatcctgcacac

SEQ ID NO: 54051 - RNA, 21 nt, synthetic construct
  source 1..21: mol_type = other RNA
atgtgcgggcctatgtgtccc

SEQ ID NO: 54052 - RNA, 21 nt, synthetic construct
  source 1..21: mol_type = other RNA
gcccctgtgtgcacaacgagg

SEQ ID NO: 54053 - RNA, 21 nt, synthetic construct
  source 1..21: mol_type = other RNA
aatggcaacctccagagctcg

SEQ ID NO: 54054 - RNA, 21 nt, synthetic construct
  source 1..21: mol_type = other RNA
gtcaacatcaccttctgcgag

SEQ ID NO: 54055 - RNA, 21 nt, synthetic construct
  source 1..21: mol_type = other RNA
gctgcagggtaactcagggct

SEQ ID NO: 54056 - RNA, 21 nt, synthetic construct
  source 1..21: mol_type = other RNA
cagcacctggggtgacttcca

SEQ ID NO: 54057 - RNA, 21 nt, synthetic construct
  source 1..21: mol_type = other RNA
ccagcagcaaccaccagtacc

SEQ ID NO: 54058 - RNA, 21 nt, synthetic construct
  source 1..21: mol_type = other RNA
gctggctgagctgcggaagtg

SEQ ID NO: 54059 - RNA, 21 nt, synthetic construct
  source 1..21: mol_type = other RNA
cggagactttgagacgtttga

SEQ ID NO: 54060 - RNA, 21 nt, synthetic construct
  source 1..21: mol_type = other RNA
accctgagaacagctccccct

SEQ ID NO: 54061 - RNA, 21 nt, synthetic construct
  source 1..21: mol_type = other RNA
cagcagccactacaactgcag

SEQ ID NO: 54062 - RNA, 21 nt, synthetic construct
  source 1..21: mol_type = other RNA
cagcagccactacaactgcag

SEQ ID NO: 54063 - RNA, 21 nt, synthetic construct
  source 1..21: mol_type = other RNA
gaatctcagcctctacctgga

SEQ ID NO: 54064 - RNA, 21 nt, synthetic construct
  source 1..21: mol_type = other RNA
cctggacaaccactactgcac

SEQ ID NO: 54065 - RNA, 21 nt, synthetic construct
  source 1..21: mol_type = other RNA
tcctgctgcccaccccgtggg

SEQ ID NO: 54066 - RNA, 21 nt, synthetic construct
  source 1..21: mol_type = other RNA
cgcagcacggattccagctgg

SEQ ID NO: 54067 - RNA, 21 nt, synthetic construct
  source 1..21: mol_type = other RNA
tgccgacagcagcttcaccgt

SEQ ID NO: 54068 - RNA, 21 nt, synthetic construct
  source 1..21: mol_type = other RNA
ccaacagccaacagagtcccc

SEQ ID NO: 54069 - RNA, 21 nt, synthetic construct
  source 1..21: mol_type = other RNA
ccctcccaaagtgctgaccac

SEQ ID NO: 54070 - RNA, 21 nt, synthetic construct
  source 1..21: mol_type = other RNA
cctgtccagccctcaccctag

SEQ ID NO: 54071 - RNA, 21 nt, synthetic construct
  source 1..21: mol_type = other RNA
ccctcccaaagtgctgaccag

SEQ ID NO: 54072 - RNA, 21 nt, synthetic construct
  source 1..21: mol_type = other RNA
cctgtccagccctcaccctag

SEQ ID NO: 54073 - RNA, 21 nt, synthetic construct
  source 1..21: mol_type = other RNA
cctgtccagccctcaccctag

SEQ ID NO: 54074 - RNA, 21 nt, synthetic construct
  source 1..21: mol_type = other RNA
ccctcccaaagtgctgaccag

SEQ ID NO: 54075 - RNA, 21 nt, synthetic construct
  source 1..21: mol_type = other RNA
cagccacaaaatccacagcta

SEQ ID NO: 54076 - RNA, 21 nt, synthetic construct
  source 1..21: mol_type = other RNA
ctgcacacctacacccacgtg

SEQ ID NO: 54077 - RNA, 21 nt, synthetic construct
  source 1..21: mol_type = other RNA
aagcacccttggtacagccac

SEQ ID NO: 54078 - RNA, 21 nt, synthetic construct
  source 1..21: mol_type = other RNA
gtgcccttgcactgtcctaac

SEQ ID NO: 54079 - RNA, 21 nt, synthetic construct
  source 1..21: mol_type = other RNA
caatgccatcaatgactttgc

SEQ ID NO: 54080 - RNA, 21 nt, synthetic construct
  source 1..21: mol_type = other RNA
gtgctgacaagcacagccaca

SEQ ID NO: 54081 - RNA, 21 nt, synthetic construct
  source 1..21: mol_type = other RNA
gctggtgcagctggtgccact

SEQ ID NO: 54082 - RNA, 21 nt, synthetic construct
  source 1..21: mol_type = other RNA
cagcagcttcaccgtgctggc

SEQ ID NO: 54083 - RNA, 21 nt, synthetic construct
  source 1..21: mol_type = other RNA
ccggatccacggccaccgcct

SEQ ID NO: 54084 - RNA, 21 nt, synthetic construct
  source 1..21: mol_type = other RNA
ccggatccacggccaccgcct

SEQ ID NO: 54085 - RNA, 21 nt, synthetic construct
  source 1..21: mol_type = other RNA
ccggatccacggccaccgcct

SEQ ID NO: 54086 - RNA, 21 nt, synthetic construct
  source 1..21: mol_type = other RNA
ccggatccacggccaccgcct

SEQ ID NO: 54087 - RNA, 21 nt, synthetic construct
  source 1..21: mol_type = other RNA
gctcccactattccacctttg

SEQ ID NO: 54088 - RNA, 21 nt, synthetic construct
  source 1..21: mol_type = other RNA
gtgcattgtctgatcatgaaa

SEQ ID NO: 54089 - RNA, 21 nt, synthetic construct
  source 1..21: mol_type = other RNA
aggagtgtggctcaccctgca

SEQ ID NO: 54090 - RNA, 21 nt, synthetic construct
  source 1..21: mol_type = other RNA
cggagaccacccacacctcca

SEQ ID NO: 54091 - RNA, 21 nt, synthetic construct
  source 1..21: mol_type = other RNA
ccacagtcatcagctccagag

SEQ ID NO: 54092 - RNA, 21 nt, synthetic construct
  source 1..21: mol_type = other RNA
cggagaccacccacacctcca

SEQ ID NO: 54093 - RNA, 21 nt, synthetic construct
  source 1..21: mol_type = other RNA
cagcagcctgccaaccttcag

SEQ ID NO: 54094 - RNA, 21 nt, synthetic construct
  source 1..21: mol_type = other RNA
tggactgcagcaacagctcgg

SEQ ID NO: 54095 - RNA, 21 nt, synthetic construct
  source 1..21: mol_type = other RNA
tggcgagagggccgggtgggg

SEQ ID NO: 54096 - RNA, 21 nt, synthetic construct
  source 1..21: mol_type = other RNA
gccctgggcgtgagcgtcacc

SEQ ID NO: 54097 - RNA, 21 nt, synthetic construct
  source 1..21: mol_type = other RNA
ctgccagagcctggaggctta

SEQ ID NO: 54098 - RNA, 21 nt, synthetic construct
  source 1..21: mol_type = other RNA
caaccgtgtcgtcctgctgga

SEQ ID NO: 54099 - RNA, 21 nt, synthetic construct
  source 1..21: mol_type = other RNA
cctcacagccacccacgctgg

SEQ ID NO: 54100 - RNA, 21 nt, synthetic construct
  source 1..21: mol_type = other RNA
actctgggaacagctcacacc

SEQ ID NO: 54101 - RNA, 21 nt, synthetic construct
  source 1..21: mol_type = other RNA
tgtgcaatcagcactgtgaca

SEQ ID NO: 54102 - RNA, 21 nt, synthetic construct
  source 1..21: mol_type = other RNA
tgtgcaacacaaccacctgcc

SEQ ID NO: 54103 - RNA, 21 nt, synthetic construct
  source 1..21: mol_type = other RNA
acaagagagtggccgggcagt

SEQ ID NO: 54104 - RNA, 21 nt, synthetic construct
  source 1..21: mol_type = other RNA
atcacagccaccggctccacc

SEQ ID NO: 54105 - RNA, 21 nt, synthetic construct
  source 1..21: mol_type = other RNA
cctgcaggaaccggaggtggg

SEQ ID NO: 54106 - RNA, 21 nt, synthetic construct
  source 1..21: mol_type = other RNA
cgctacagctttgaaggcagc

SEQ ID NO: 54107 - RNA, 21 nt, synthetic construct
  source 1..21: mol_type = other RNA
ctgtgctggctgacatcgagt

SEQ ID NO: 54108 - RNA, 21 nt, synthetic construct
  source 1..21: mol_type = other RNA
gaggagctgggccagcaggtg

SEQ ID NO: 54109 - RNA, 21 nt, synthetic construct
  source 1..21: mol_type = other RNA
tccttcacccttgggaccacc

SEQ ID NO: 54110 - RNA, 21 nt, synthetic construct
  source 1..21: mol_type = other RNA
ctgtgctggggaccaccacca

SEQ ID NO: 54111 - RNA, 21 nt, synthetic construct
  source 1..21: mol_type = other RNA
gacattcctgccctgggcgtg

SEQ ID NO: 54112 - RNA, 21 nt, synthetic construct
  source 1..21: mol_type = other RNA
tgaccagcacggccaccacac

SEQ ID NO: 54113 - RNA, 21 nt, synthetic construct
  source 1..21: mol_type = other RNA
tgaccagcacggccaccacac

SEQ ID NO: 54114 - RNA, 21 nt, synthetic construct
  source 1..21: mol_type = other RNA
tgaccagcacggccaccacac

SEQ ID NO: 54115 - RNA, 21 nt, synthetic construct
  source 1..21: mol_type = other RNA
ccggatcctcactgagctgac

SEQ ID NO: 54116 - RNA, 21 nt, synthetic construct
  source 1..21: mol_type = other RNA
tgtgacattgaccgcttccag

SEQ ID NO: 54117 - RNA, 21 nt, synthetic construct
  source 1..21: mol_type = other RNA
caccctgcacggacacctgct

SEQ ID NO: 54118 - RNA, 21 nt, synthetic construct
  source 1..21: mol_type = other RNA
ctgtgcgacctcacctgccca

SEQ ID NO: 54119 - RNA, 21 nt, synthetic construct
  source 1..21: mol_type = other RNA
catgtgcgggcctatgtgtcc

SEQ ID NO: 54120 - RNA, 21 nt, synthetic construct
  source 1..21: mol_type = other RNA
gtgctgacattcctgtggaac

SEQ ID NO: 54121 - RNA, 21 nt, synthetic construct
  source 1..21: mol_type = other RNA
aatgtgccgacagcagcttca

SEQ ID NO: 54122 - RNA, 21 nt, synthetic construct
  source 1..21: mol_type = other RNA
ccaagaggggacctttaaggc

SEQ ID NO: 54123 - RNA, 21 nt, synthetic construct
  source 1..21: mol_type = other RNA
acgccctggcacccaaggacc

SEQ ID NO: 54124 - RNA, 21 nt, synthetic construct
  source 1..21: mol_type = other RNA
gcctgcttgatcgccatctgc

SEQ ID NO: 54125 - RNA, 21 nt, synthetic construct
  source 1..21: mol_type = other RNA
actggaccctggcacaggtgg

SEQ ID NO: 54126 - RNA, 21 nt, synthetic construct
  source 1..21: mol_type = other RNA
ccgcccttccagcactgagaa

SEQ ID NO: 54127 - RNA, 21 nt, synthetic construct
  source 1..21: mol_type = other RNA
gaaccgtgagcaggtggggaa

SEQ ID NO: 54128 - RNA, 21 nt, synthetic construct
  source 1..21: mol_type = other RNA
ccgcccttccagcactgagaa

SEQ ID NO: 54129 - RNA, 21 nt, synthetic construct
  source 1..21: mol_type = other RNA
gaaccgtgagcaggtggggaa

SEQ ID NO: 54130 - RNA, 21 nt, synthetic construct
  source 1..21: mol_type = other RNA
ccgcccttccagcactgagaa

SEQ ID NO: 54131 - RNA, 21 nt, synthetic construct
  source 1..21: mol_type = other RNA
gaaccgtgagcaggtggggaa

SEQ ID NO: 54132 - RNA, 21 nt, synthetic construct
  source 1..21: mol_type = other RNA
ccgcccttccagcactgagaa

SEQ ID NO: 54133 - RNA, 21 nt, synthetic construct
  source 1..21: mol_type = other RNA
gaaccgtgagcaggtggggaa

SEQ ID NO: 54134 - RNA, 21 nt, synthetic construct
  source 1..21: mol_type = other RNA
ctgcccttccagcactgagaa

SEQ ID NO: 54135 - RNA, 21 nt, synthetic construct
  source 1..21: mol_type = other RNA
caccctgtggaccacgtggac

SEQ ID NO: 54136 - RNA, 21 nt, synthetic construct
  source 1..21: mol_type = other RNA
tctgcagcatgtggggcggct

SEQ ID NO: 54137 - RNA, 21 nt, synthetic construct
  source 1..21: mol_type = other RNA
cgagaacccctgctgccccga

SEQ ID NO: 54138 - RNA, 21 nt, synthetic construct
  source 1..21: mol_type = other RNA
gcgcccttccctgccacatgt

SEQ ID NO: 54139 - RNA, 21 nt, synthetic construct
  source 1..21: mol_type = other RNA
gtcaacagccatgtggacaac

SEQ ID NO: 54140 - RNA, 21 nt, synthetic construct
  source 1..21: mol_type = other RNA
tgcagcaccaggagtgtggct

SEQ ID NO: 54141 - RNA, 21 nt, synthetic construct
  source 1..21: mol_type = other RNA
cagcaccaggagtgtggctca

SEQ ID NO: 54142 - RNA, 21 nt, synthetic construct
  source 1..21: mol_type = other RNA
ggaccctggcacaggtggggc

SEQ ID NO: 54143 - RNA, 21 nt, synthetic construct
  source 1..21: mol_type = other RNA
tgagaacagctccccctccca

SEQ ID NO: 54144 - RNA, 21 nt, synthetic construct
  source 1..21: mol_type = other RNA
ccagtgctgacaagcacagcc

SEQ ID NO: 54145 - RNA, 21 nt, synthetic construct
  source 1..21: mol_type = other RNA
ccagtgctgacaagcacagcc

SEQ ID NO: 54146 - RNA, 21 nt, synthetic construct
  source 1..21: mol_type = other RNA
ccagtgctgacaagcacagcc

SEQ ID NO: 54147 - RNA, 21 nt, synthetic construct
  source 1..21: mol_type = other RNA
caccctgagacccactggctt

SEQ ID NO: 54148 - RNA, 21 nt, synthetic construct
  source 1..21: mol_type = other RNA
taccctgggagagcctgtggc

SEQ ID NO: 54149 - RNA, 21 nt, synthetic construct
  source 1..21: mol_type = other RNA
atcacagaccaccacacccac

SEQ ID NO: 54150 - RNA, 21 nt, synthetic construct
  source 1..21: mol_type = other RNA
actcccatccccccagtgctg

SEQ ID NO: 54151 - RNA, 21 nt, synthetic construct
  source 1..21: mol_type = other RNA
atcacagaccaccacacccac

SEQ ID NO: 54152 - RNA, 21 nt, synthetic construct
  source 1..21: mol_type = other RNA
accttgggcaccacccacatc

SEQ ID NO: 54153 - RNA, 21 nt, synthetic construct
  source 1..21: mol_type = other RNA
atcacagaccaccacacccac

SEQ ID NO: 54154 - RNA, 21 nt, synthetic construct
  source 1..21: mol_type = other RNA
actcccatccccccagtgctg

SEQ ID NO: 54155 - RNA, 21 nt, synthetic construct
  source 1..21: mol_type = other RNA
atcacagaccaccacacccac

SEQ ID NO: 54156 - RNA, 21 nt, synthetic construct
  source 1..21: mol_type = other RNA
ttcacagtcaccccctcctcc

SEQ ID NO: 54157 - RNA, 21 nt, synthetic construct
  source 1..21: mol_type = other RNA
accttgggcaccacccacatc

SEQ ID NO: 54158 - RNA, 21 nt, synthetic construct
  source 1..21: mol_type = other RNA
atcacagaccaccacacccac

SEQ ID NO: 54159 - RNA, 21 nt, synthetic construct
  source 1..21: mol_type = other RNA
ctccagtccaaggactgcaac

SEQ ID NO: 54160 - RNA, 21 nt, synthetic construct
  source 1..21: mol_type = other RNA
ctccagtccaaggactgcaac

SEQ ID NO: 54161 - RNA, 21 nt, synthetic construct
  source 1..21: mol_type = other RNA
ctccagtccaaggactgcaac

SEQ ID NO: 54162 - RNA, 21 nt, synthetic construct
  source 1..21: mol_type = other RNA
cacccgtggcttcccggccca

SEQ ID NO: 54163 - RNA, 21 nt, synthetic construct
  source 1..21: mol_type = other RNA
cacccgtgccagcccccagga

SEQ ID NO: 54164 - RNA, 21 nt, synthetic construct
  source 1..21: mol_type = other RNA
ggctggtgctggaggcgtcca

SEQ ID NO: 54165 - RNA, 21 nt, synthetic construct
  source 1..21: mol_type = other RNA
ccctgctggagctggatccca

SEQ ID NO: 54166 - RNA, 21 nt, synthetic construct
  source 1..21: mol_type = other RNA
gtgccctgagctctgcccccg

SEQ ID NO: 54167 - RNA, 21 nt, synthetic construct
  source 1..21: mol_type = other RNA
gtgccctggcacctgctctgt

SEQ ID NO: 54168 - RNA, 21 nt, synthetic construct
  source 1..21: mol_type = other RNA
acagcagcttcaccgtgctgg

SEQ ID NO: 54169 - RNA, 21 nt, synthetic construct
  source 1..21: mol_type = other RNA
acagtgccttctcgcgctgcc

SEQ ID NO: 54170 - RNA, 21 nt, synthetic construct
  source 1..21: mol_type = other RNA
actccatcatcaaccccaagc

SEQ ID NO: 54171 - RNA, 21 nt, synthetic construct
  source 1..21: mol_type = other RNA
tggacggctgcacctgccccg

SEQ ID NO: 54172 - RNA, 21 nt, synthetic construct
  source 1..21: mol_type = other RNA
gctggctcctggagaggtggt

SEQ ID NO: 54173 - RNA, 21 nt, synthetic construct
  source 1..21: mol_type = other RNA
cctggactgcagcaacagctc

SEQ ID NO: 54174 - RNA, 21 nt, synthetic construct
  source 1..21: mol_type = other RNA
actgcagcaacagctcggcgg

SEQ ID NO: 54175 - RNA, 21 nt, synthetic construct
  source 1..21: mol_type = other RNA
ccgaggaggactgcccctgtg

SEQ ID NO: 54176 - RNA, 21 nt, synthetic construct
  source 1..21: mol_type = other RNA
cttgttctgtgacttctacaa

SEQ ID NO: 54177 - RNA, 21 nt, synthetic construct
  source 1..21: mol_type = other RNA
gtgccctgtggcccctccccg

SEQ ID NO: 54178 - RNA, 21 nt, synthetic construct
  source 1..21: mol_type = other RNA
ctggccccaacaacaatggca

SEQ ID NO: 54179 - RNA, 21 nt, synthetic construct
  source 1..21: mol_type = other RNA
caccctgagaacagctccccc

SEQ ID NO: 54180 - RNA, 21 nt, synthetic construct
  source 1..21: mol_type = other RNA
ctccagtccagggactgcaac

SEQ ID NO: 54181 - RNA, 21 nt, synthetic construct
  source 1..21: mol_type = other RNA
ttcacagccaccccctcctcc

SEQ ID NO: 54182 - RNA, 21 nt, synthetic construct
  source 1..21: mol_type = other RNA
cctccatcccggggaccaccc

SEQ ID NO: 54183 - RNA, 21 nt, synthetic construct
  source 1..21: mol_type = other RNA
ccacagtgctgaccaccacca

SEQ ID NO: 54184 - RNA, 21 nt, synthetic construct
  source 1..21: mol_type = other RNA
cctgcagccaccagcaacaca

SEQ ID NO: 54185 - RNA, 21 nt, synthetic construct
  source 1..21: mol_type = other RNA
acacagtgactccctcctctg

SEQ ID NO: 54186 - RNA, 21 nt, synthetic construct
  source 1..21: mol_type = other RNA
ccagcagtccccacacggtgc

SEQ ID NO: 54187 - RNA, 21 nt, synthetic construct
  source 1..21: mol_type = other RNA
ctccagtccagggactgcaac

SEQ ID NO: 54188 - RNA, 21 nt, synthetic construct
  source 1..21: mol_type = other RNA
ttcacagccaccccctcctcc

SEQ ID NO: 54189 - RNA, 21 nt, synthetic construct
  source 1..21: mol_type = other RNA
cctccatcccggggaccaccc

SEQ ID NO: 54190 - RNA, 21 nt, synthetic construct
  source 1..21: mol_type = other RNA
ccacagtgctgaccaccacca

SEQ ID NO: 54191 - RNA, 21 nt, synthetic construct
  source 1..21: mol_type = other RNA
gcacagtgactccctcctctg

SEQ ID NO: 54192 - RNA, 21 nt, synthetic construct
  source 1..21: mol_type = other RNA
ccagcagtccccacacggtgc

SEQ ID NO: 54193 - RNA, 21 nt, synthetic construct
  source 1..21: mol_type = other RNA
acagcagccactacgaccgca

SEQ ID NO: 54194 - RNA, 21 nt, synthetic construct
  source 1..21: mol_type = other RNA
actgcagccactggccccacg

SEQ ID NO: 54195 - RNA, 21 nt, synthetic construct
  source 1..21: mol_type = other RNA
ctccagtccagggactgcaac

SEQ ID NO: 54196 - RNA, 21 nt, synthetic construct
  source 1..21: mol_type = other RNA
ttcacagccaccccctcctcc

SEQ ID NO: 54197 - RNA, 21 nt, synthetic construct
  source 1..21: mol_type = other RNA
cctccatcccggggaccaccc

SEQ ID NO: 54198 - RNA, 21 nt, synthetic construct
  source 1..21: mol_type = other RNA
ccacagtgctgaccaccacca

SEQ ID NO: 54199 - RNA, 21 nt, synthetic construct
  source 1..21: mol_type = other RNA
gcacagtgactccctcctctg

SEQ ID NO: 54200 - RNA, 21 nt, synthetic construct
  source 1..21: mol_type = other RNA
ccagcagtccccacacggtgc

SEQ ID NO: 54201 - RNA, 21 nt, synthetic construct
  source 1..21: mol_type = other RNA
gggcagtctgtgagcagcccc

SEQ ID NO: 54202 - RNA, 21 nt, synthetic construct
  source 1..21: mol_type = other RNA
ctccagtccagggactgcaac

SEQ ID NO: 54203 - RNA, 21 nt, synthetic construct
  source 1..21: mol_type = other RNA
tcacagtcaccccctcctcca

SEQ ID NO: 54204 - RNA, 21 nt, synthetic construct
  source 1..21: mol_type = other RNA
ccacagtgctgaccaccacca

SEQ ID NO: 54205 - RNA, 21 nt, synthetic construct
  source 1..21: mol_type = other RNA
gcacagtgactccctcctctg

SEQ ID NO: 54206 - RNA, 21 nt, synthetic construct
  source 1..21: mol_type = other RNA
ccagcagtccccacacggtgc

SEQ ID NO: 54207 - RNA, 21 nt, synthetic construct
  source 1..21: mol_type = other RNA
tgcatccactggatccacggc

SEQ ID NO: 54208 - RNA, 21 nt, synthetic construct
  source 1..21: mol_type = other RNA
actgcagccactggccccacg

SEQ ID NO: 54209 - RNA, 21 nt, synthetic construct
  source 1..21: mol_type = other RNA
ctccagtccagggactgcaac

SEQ ID NO: 54210 - RNA, 21 nt, synthetic construct
  source 1..21: mol_type = other RNA
ttcacagccaccccctcctcc

SEQ ID NO: 54211 - RNA, 21 nt, synthetic construct
  source 1..21: mol_type = other RNA
cctccatcccggggaccaccc

SEQ ID NO: 54212 - RNA, 21 nt, synthetic construct
  source 1..21: mol_type = other RNA
gtgctgaccaccacagccacc

SEQ ID NO: 54213 - RNA, 21 nt, synthetic construct
  source 1..21: mol_type = other RNA
accctgagacccactggcttc

SEQ ID NO: 54214 - RNA, 21 nt, synthetic construct
  source 1..21: mol_type = other RNA
actggcttccccagctcccac

SEQ ID NO: 54215 - RNA, 21 nt, synthetic construct
  source 1..21: mol_type = other RNA
caatgccatccctctccggca

SEQ ID NO: 54216 - RNA, 21 nt, synthetic construct
  source 1..21: mol_type = other RNA
tcctgctggacccaaagcctg

SEQ ID NO: 54217 - RNA, 21 nt, synthetic construct
  source 1..21: mol_type = other RNA
gccctgaggaccagatcctct

SEQ ID NO: 54218 - RNA, 21 nt, synthetic construct
  source 1..21: mol_type = other RNA
gctgcagacctcagctgtgtt

SEQ ID NO: 54219 - RNA, 21 nt, synthetic construct
  source 1..21: mol_type = other RNA
accttggccttgcccctccct

SEQ ID NO: 54220 - RNA, 21 nt, synthetic construct
  source 1..21: mol_type = other RNA
cagctgctgccaggaagctgc

SEQ ID NO: 54221 - RNA, 21 nt, synthetic construct
  source 1..21: mol_type = other RNA
gcccaggggctggtgctggag

SEQ ID NO: 54222 - RNA, 21 nt, synthetic construct
  source 1..21: mol_type = other RNA
cccaggggctggtgctggagg

SEQ ID NO: 54223 - RNA, 21 nt, synthetic construct
  source 1..21: mol_type = other RNA
ccaggggctggtgctggaggc

SEQ ID NO: 54224 - RNA, 21 nt, synthetic construct
  source 1..21: mol_type = other RNA
caggggctggtgctggaggcg

SEQ ID NO: 54225 - RNA, 21 nt, synthetic construct
  source 1..21: mol_type = other RNA
gtgccctgctggagctggatc

SEQ ID NO: 54226 - RNA, 21 nt, synthetic construct
  source 1..21: mol_type = other RNA
ctgcacctgctccggggggct

SEQ ID NO: 54227 - RNA, 21 nt, synthetic construct
  source 1..21: mol_type = other RNA
tgcacctgctccggggggcta

SEQ ID NO: 54228 - RNA, 21 nt, synthetic construct
  source 1..21: mol_type = other RNA
acctgctctgtgcagggcggg

SEQ ID NO: 54229 - RNA, 21 nt, synthetic construct
  source 1..21: mol_type = other RNA
tgctggtgcagctggtgccac

SEQ ID NO: 54230 - RNA, 21 nt, synthetic construct
  source 1..21: mol_type = other RNA
tggtgcagctggtgccactca

SEQ ID NO: 54231 - RNA, 21 nt, synthetic construct
  source 1..21: mol_type = other RNA
atcatcaggaaggctgtggca

SEQ ID NO: 54232 - RNA, 21 nt, synthetic construct
  source 1..21: mol_type = other RNA
cgctggtccagctggtacaat

SEQ ID NO: 54233 - RNA, 21 nt, synthetic construct
  source 1..21: mol_type = other RNA
atgccgctggaggagctgggc

SEQ ID NO: 54234 - RNA, 21 nt, synthetic construct
  source 1..21: mol_type = other RNA
accaccagccagggcacgacc

SEQ ID NO: 54235 - RNA, 21 nt, synthetic construct
  source 1..21: mol_type = other RNA
ccctcctccagcccagggacg

SEQ ID NO: 54236 - RNA, 21 nt, synthetic construct
  source 1..21: mol_type = other RNA
gaccaccaccaccacaactgt

SEQ ID NO: 54237 - RNA, 21 nt, synthetic construct
  source 1..21: mol_type = other RNA
tggcctggtctgcaggaaccg

SEQ ID NO: 54238 - RNA, 21 nt, synthetic construct
  source 1..21: mol_type = other RNA
atccacggccaccgcctcctc

SEQ ID NO: 54239 - RNA, 21 nt, synthetic construct
  source 1..21: mol_type = other RNA
acggccaccgcctcctccacc

SEQ ID NO: 54240 - RNA, 21 nt, synthetic construct
  source 1..21: mol_type = other RNA
gccaccgcctcctccacccag

SEQ ID NO: 54241 - RNA, 21 nt, synthetic construct
  source 1..21: mol_type = other RNA
actcccttctccagtccaggg

SEQ ID NO: 54242 - RNA, 21 nt, synthetic construct
  source 1..21: mol_type = other RNA
tcctcctccctgggcaccacc

SEQ ID NO: 54243 - RNA, 21 nt, synthetic construct
  source 1..21: mol_type = other RNA
accaccacggccaccacaacc

SEQ ID NO: 54244 - RNA, 21 nt, synthetic construct
  source 1..21: mol_type = other RNA
ccaccacggccaccacaaccg

SEQ ID NO: 54245 - RNA, 21 nt, synthetic construct
  source 1..21: mol_type = other RNA
ccctcctccagcccagggacg

SEQ ID NO: 54246 - RNA, 21 nt, synthetic construct
  source 1..21: mol_type = other RNA
gaccaccaccaccacaactgt

SEQ ID NO: 54247 - RNA, 21 nt, synthetic construct
  source 1..21: mol_type = other RNA
cctgcagccaccagcagcaca

SEQ ID NO: 54248 - RNA, 21 nt, synthetic construct
  source 1..21: mol_type = other RNA
cggccacggccacacccagca

SEQ ID NO: 54249 - RNA, 21 nt, synthetic construct
  source 1..21: mol_type = other RNA
tggcctggtctgcaggaaccg

SEQ ID NO: 54250 - RNA, 21 nt, synthetic construct
  source 1..21: mol_type = other RNA
gaccagcacggccaccacacc

SEQ ID NO: 54251 - RNA, 21 nt, synthetic construct
  source 1..21: mol_type = other RNA
agttccaaagccacttcctcc

SEQ ID NO: 54252 - RNA, 21 nt, synthetic construct
  source 1..21: mol_type = other RNA
tccaaagccacttcctcctcc

SEQ ID NO: 54253 - RNA, 21 nt, synthetic construct
  source 1..21: mol_type = other RNA
agtgctgacaagcacagccac

SEQ ID NO: 54254 - RNA, 21 nt, synthetic construct
  source 1..21: mol_type = other RNA
agctgaccacagcagccacta

SEQ ID NO: 54255 - RNA, 21 nt, synthetic construct
  source 1..21: mol_type = other RNA
atccacggccaccgcctcctc

SEQ ID NO: 54256 - RNA, 21 nt, synthetic construct
  source 1..21: mol_type = other RNA
acggccaccgcctcctccacc

SEQ ID NO: 54257 - RNA, 21 nt, synthetic construct
  source 1..21: mol_type = other RNA
gccaccgcctcctccacccgg

SEQ ID NO: 54258 - RNA, 21 nt, synthetic construct
  source 1..21: mol_type = other RNA
gaccagcacggccaccacacc

SEQ ID NO: 54259 - RNA, 21 nt, synthetic construct
  source 1..21: mol_type = other RNA
ccctcctccagcccagggacg

SEQ ID NO: 54260 - RNA, 21 nt, synthetic construct
  source 1..21: mol_type = other RNA
gaccaccaccaccacaactgt

SEQ ID NO: 54261 - RNA, 21 nt, synthetic construct
  source 1..21: mol_type = other RNA
cctgcagccaccagcagcaca

SEQ ID NO: 54262 - RNA, 21 nt, synthetic construct
  source 1..21: mol_type = other RNA
ggggcacctccaggaccacag

SEQ ID NO: 54263 - RNA, 21 nt, synthetic construct
  source 1..21: mol_type = other RNA
tggcctggtctgcaggaaccg

SEQ ID NO: 54264 - RNA, 21 nt, synthetic construct
  source 1..21: mol_type = other RNA
atccacggccaccgcctcctc

SEQ ID NO: 54265 - RNA, 21 nt, synthetic construct
  source 1..21: mol_type = other RNA
acggccaccgcctcctccacc

SEQ ID NO: 54266 - RNA, 21 nt, synthetic construct
  source 1..21: mol_type = other RNA
gccaccgcctcctccacccag

SEQ ID NO: 54267 - RNA, 21 nt, synthetic construct
  source 1..21: mol_type = other RNA
actcccttctccagtccaggg

SEQ ID NO: 54268 - RNA, 21 nt, synthetic construct
  source 1..21: mol_type = other RNA
tcctcctccctgggcaccacc

SEQ ID NO: 54269 - RNA, 21 nt, synthetic construct
  source 1..21: mol_type = other RNA
accaccacggccaccacaacc

SEQ ID NO: 54270 - RNA, 21 nt, synthetic construct
  source 1..21: mol_type = other RNA
ccaccacggccaccacaacca

SEQ ID NO: 54271 - RNA, 21 nt, synthetic construct
  source 1..21: mol_type = other RNA
gtcaccccctcctccagccca

SEQ ID NO: 54272 - RNA, 21 nt, synthetic construct
  source 1..21: mol_type = other RNA
ccctcctccagcccagggacg

SEQ ID NO: 54273 - RNA, 21 nt, synthetic construct
  source 1..21: mol_type = other RNA
gaccaccaccaccacaactgt

SEQ ID NO: 54274 - RNA, 21 nt, synthetic construct
  source 1..21: mol_type = other RNA
cctgcagccaccagcagcaca

SEQ ID NO: 54275 - RNA, 21 nt, synthetic construct
  source 1..21: mol_type = other RNA
tcacccccttccccagggacg

SEQ ID NO: 54276 - RNA, 21 nt, synthetic construct
  source 1..21: mol_type = other RNA
cggccacggccacacccagca

SEQ ID NO: 54277 - RNA, 21 nt, synthetic construct
  source 1..21: mol_type = other RNA
tggcctggtctgcaggaaccg

SEQ ID NO: 54278 - RNA, 21 nt, synthetic construct
  source 1..21: mol_type = other RNA
agttccaaagccacttcctcc

SEQ ID NO: 54279 - RNA, 21 nt, synthetic construct
  source 1..21: mol_type = other RNA
tccaaagccacttcctcctcc

SEQ ID NO: 54280 - RNA, 21 nt, synthetic construct
  source 1..21: mol_type = other RNA
agtgctgacaagcacagccac

SEQ ID NO: 54281 - RNA, 21 nt, synthetic construct
  source 1..21: mol_type = other RNA
agctgaccacagcagccacta

SEQ ID NO: 54282 - RNA, 21 nt, synthetic construct
  source 1..21: mol_type = other RNA
atccacggccaccgcctcctc

SEQ ID NO: 54283 - RNA, 21 nt, synthetic construct
  source 1..21: mol_type = other RNA
acggccaccgcctcctccacc

SEQ ID NO: 54284 - RNA, 21 nt, synthetic construct
  source 1..21: mol_type = other RNA
gccaccgcctcctccacccag

SEQ ID NO: 54285 - RNA, 21 nt, synthetic construct
  source 1..21: mol_type = other RNA
tcctcctccctgggcaccacc

SEQ ID NO: 54286 - RNA, 21 nt, synthetic construct
  source 1..21: mol_type = other RNA
ccctcctccagcccagggacg

SEQ ID NO: 54287 - RNA, 21 nt, synthetic construct
  source 1..21: mol_type = other RNA
gaccaccaccaccacaactgt

SEQ ID NO: 54288 - RNA, 21 nt, synthetic construct
  source 1..21: mol_type = other RNA
acacccatcaccccagtgctg

SEQ ID NO: 54289 - RNA, 21 nt, synthetic construct
  source 1..21: mol_type = other RNA
gaccagcacggccaccacacc

SEQ ID NO: 54290 - RNA, 21 nt, synthetic construct
  source 1..21: mol_type = other RNA
tccaaagccacttcctcctcc

SEQ ID NO: 54291 - RNA, 21 nt, synthetic construct
  source 1..21: mol_type = other RNA
agtgctgacaagcacagccac

SEQ ID NO: 54292 - RNA, 21 nt, synthetic construct
  source 1..21: mol_type = other RNA
cctcctccaccctgtggacca

SEQ ID NO: 54293 - RNA, 21 nt, synthetic construct
  source 1..21: mol_type = other RNA
agcacagaccaccacacccat

SEQ ID NO: 54294 - RNA, 21 nt, synthetic construct
  source 1..21: mol_type = other RNA
caccctgtcctccaccccagg

SEQ ID NO: 54295 - RNA, 21 nt, synthetic construct
  source 1..21: mol_type = other RNA
ttccacggccaccgcctcctc

SEQ ID NO: 54296 - RNA, 21 nt, synthetic construct
  source 1..21: mol_type = other RNA
acggccaccgcctcctccact

SEQ ID NO: 54297 - RNA, 21 nt, synthetic construct
  source 1..21: mol_type = other RNA
ctttgggaatctcagcctcta

SEQ ID NO: 54298 - RNA, 21 nt, synthetic construct
  source 1..21: mol_type = other RNA
tgccactgccgctgccgcccg

SEQ ID NO: 54299 - RNA, 21 nt, synthetic construct
  source 1..21: mol_type = other RNA
actgccgctgccgcccgctgc

SEQ ID NO: 54300 - RNA, 21 nt, synthetic construct
  source 1..21: mol_type = other RNA
gccgcccgctgcccccgcgcc

SEQ ID NO: 54301 - RNA, 21 nt, synthetic construct
  source 1..21: mol_type = other RNA
ccagccccgcagccccggtgt

SEQ ID NO: 54302 - RNA, 21 nt, synthetic construct
  source 1..21: mol_type = other RNA
cccccaccccatgcccaccac

SEQ ID NO: 54303 - RNA, 21 nt, synthetic construct
  source 1..21: mol_type = other RNA
cccaccccatgcccaccacag

SEQ ID NO: 54304 - RNA, 21 nt, synthetic construct
  source 1..21: mol_type = other RNA
ggggccgccttgaggtgccct

SEQ ID NO: 54305 - RNA, 21 nt, synthetic construct
  source 1..21: mol_type = other RNA
ggccgccttgaggtgccctgc

SEQ ID NO: 54306 - RNA, 21 nt, synthetic construct
  source 1..21: mol_type = other RNA
cctgccagagcctggaggctt

SEQ ID NO: 54307 - RNA, 21 nt, synthetic construct
  source 1..21: mol_type = other RNA
tgccagagcctggaggcttac

SEQ ID NO: 54308 - RNA, 21 nt, synthetic construct
  source 1..21: mol_type = other RNA
acacaaccacctgcccccaga

SEQ ID NO: 54309 - RNA, 21 nt, synthetic construct
  source 1..21: mol_type = other RNA
actcagcagaggcccaggcca

SEQ ID NO: 54310 - RNA, 21 nt, synthetic construct
  source 1..21: mol_type = other RNA
tgccaggagaggcgggtccac

SEQ ID NO: 54311 - RNA, 21 nt, synthetic construct
  source 1..21: mol_type = other RNA
cccaggaggccactgctgtct

SEQ ID NO: 54312 - RNA, 21 nt, synthetic construct
  source 1..21: mol_type = other RNA
cccaccttggccttgcccctc

SEQ ID NO: 54313 - RNA, 21 nt, synthetic construct
  source 1..21: mol_type = other RNA
aggcaaggccagctgctgcca

SEQ ID NO: 54314 - RNA, 21 nt, synthetic construct
  source 1..21: mol_type = other RNA
ccagctgctgccaggaagctg

SEQ ID NO: 54315 - RNA, 21 nt, synthetic construct
  source 1..21: mol_type = other RNA
aagctgcctgggagcctctct

SEQ ID NO: 54316 - RNA, 21 nt, synthetic construct
  source 1..21: mol_type = other RNA
tatggcagtgccaggacctgc

SEQ ID NO: 54317 - RNA, 21 nt, synthetic construct
  source 1..21: mol_type = other RNA
cacacccacccccaccccatg

SEQ ID NO: 54318 - RNA, 21 nt, synthetic construct
  source 1..21: mol_type = other RNA
ttgctgagtgccacaaccttg

SEQ ID NO: 54319 - RNA, 21 nt, synthetic construct
  source 1..21: mol_type = other RNA
cacagccacagccacacccag

SEQ ID NO: 54320 - RNA, 21 nt, synthetic construct
  source 1..21: mol_type = other RNA
gcgagagggccgggtggggac

SEQ ID NO: 54321 - RNA, 21 nt, synthetic construct
  source 1..21: mol_type = other RNA
gtgctgaccaccaccaccaca

SEQ ID NO: 54322 - RNA, 21 nt, synthetic construct
  source 1..21: mol_type = other RNA
gtgctgaccaccaccaccaca

SEQ ID NO: 54323 - RNA, 21 nt, synthetic construct
  source 1..21: mol_type = other RNA
gtgctgaccaccaccaccaca

SEQ ID NO: 54324 - RNA, 21 nt, synthetic construct
  source 1..21: mol_type = other RNA
gtgctgaccaccaccaccaca

SEQ ID NO: 54325 - RNA, 21 nt, synthetic construct
  source 1..21: mol_type = other RNA
gtgctgaccaccaccaccaca

SEQ ID NO: 54326 - RNA, 21 nt, synthetic construct
  source 1..21: mol_type = other RNA
ctggccccacggccaccccgt

SEQ ID NO: 54327 - RNA, 21 nt, synthetic construct
  source 1..21: mol_type = other RNA
ctggccccacggccaccccgt

SEQ ID NO: 54328 - RNA, 21 nt, synthetic construct
  source 1..21: mol_type = other RNA
cctgtggcctgtgtggggact

SEQ ID NO: 54329 - RNA, 21 nt, synthetic construct
  source 1..21: mol_type = other RNA
ggcgagagggccgggtgggga

SEQ ID NO: 54330 - RNA, 21 nt, synthetic construct
  source 1..21: mol_type = other RNA
tggagacggggctgacctgca

SEQ ID NO: 54331 - RNA, 21 nt, synthetic construct
  source 1..21: mol_type = other RNA
tgggcccagaagcagtgcagc

SEQ ID NO: 54332 - RNA, 21 nt, synthetic construct
  source 1..21: mol_type = other RNA
tggacttcccaacctcagggg

SEQ ID NO: 54333 - RNA, 21 nt, synthetic construct
  source 1..21: mol_type = other RNA
tgaaaacatcagggctgctgg

SEQ ID NO: 54334 - RNA, 21 nt, synthetic construct
  source 1..21: mol_type = other RNA
agatgtgctgggcaccaaaga

SEQ ID NO: 54335 - RNA, 21 nt, synthetic construct
  source 1..21: mol_type = other RNA
gggacatggaaacttttgaaa

SEQ ID NO: 54336 - RNA, 21 nt, synthetic construct
  source 1..21: mol_type = other RNA
cagccaccacacccacagcta

SEQ ID NO: 54337 - RNA, 21 nt, synthetic construct
  source 1..21: mol_type = other RNA
cagccaccacacccacagcta

SEQ ID NO: 54338 - RNA, 21 nt, synthetic construct
  source 1..21: mol_type = other RNA
cagccaccacacccacagcta

SEQ ID NO: 54339 - RNA, 21 nt, synthetic construct
  source 1..21: mol_type = other RNA
cagccaccacacccacagcta

SEQ ID NO: 54340 - RNA, 21 nt, synthetic construct
  source 1..21: mol_type = other RNA
cagccaccacacccacagcta

SEQ ID NO: 54341 - RNA, 21 nt, synthetic construct
  source 1..21: mol_type = other RNA
cccccaggcacggtgctggat

SEQ ID NO: 54342 - RNA, 21 nt, synthetic construct
  source 1..21: mol_type = other RNA
tacaagggcagggtctgcggc

SEQ ID NO: 54343 - RNA, 21 nt, synthetic construct
  source 1..21: mol_type = other RNA
acatcagggctgctgggggca

SEQ ID NO: 54344 - RNA, 21 nt, synthetic construct
  source 1..21: mol_type = other RNA
atcagggctgctgggggcaag

SEQ ID NO: 54345 - RNA, 21 nt, synthetic construct
  source 1..21: mol_type = other RNA
ctgaccaccacggccaccaca

SEQ ID NO: 54346 - RNA, 21 nt, synthetic construct
  source 1..21: mol_type = other RNA
acagccaccacacccacagct

SEQ ID NO: 54347 - RNA, 21 nt, synthetic construct
  source 1..21: mol_type = other RNA
agccaccacacccacagctac

SEQ ID NO: 54348 - RNA, 21 nt, synthetic construct
  source 1..21: mol_type = other RNA
acagccaccacacccacagct

SEQ ID NO: 54349 - RNA, 21 nt, synthetic construct
  source 1..21: mol_type = other RNA
agccaccacacccacagctac

SEQ ID NO: 54350 - RNA, 21 nt, synthetic construct
  source 1..21: mol_type = other RNA
acagccaccacacccacagct

SEQ ID NO: 54351 - RNA, 21 nt, synthetic construct
  source 1..21: mol_type = other RNA
agccaccacacccacagctac

SEQ ID NO: 54352 - RNA, 21 nt, synthetic construct
  source 1..21: mol_type = other RNA
acagccaccacacccacagct

SEQ ID NO: 54353 - RNA, 21 nt, synthetic construct
  source 1..21: mol_type = other RNA
agccaccacacccacagctac

SEQ ID NO: 54354 - RNA, 21 nt, synthetic construct
  source 1..21: mol_type = other RNA
acagccaccacacccacagct

SEQ ID NO: 54355 - RNA, 21 nt, synthetic construct
  source 1..21: mol_type = other RNA
agccaccacacccacagctac

SEQ ID NO: 54356 - RNA, 21 nt, synthetic construct
  source 1..21: mol_type = other RNA
aacttttgaaaacatcagggc

SEQ ID NO: 54357 - RNA, 21 nt, synthetic construct
  source 1..21: mol_type = other RNA
cagggctgctgggggcaagat

SEQ ID NO: 54358 - RNA, 21 nt, synthetic construct
  source 1..21: mol_type = other RNA
ggacttcccaacctcaggggt

SEQ ID NO: 54359 - RNA, 21 nt, synthetic construct
  source 1..21: mol_type = other RNA
ttgaaaacatcagggctgctg

SEQ ID NO: 54360 - RNA, 21 nt, synthetic construct
  source 1..21: mol_type = other RNA
tgacgactacagccactgccc

SEQ ID NO: 54361 - RNA, 21 nt, synthetic construct
  source 1..21: mol_type = other RNA
ggctgcttctgccccccaggc

SEQ ID NO: 54362 - RNA, 21 nt, synthetic construct
  source 1..21: mol_type = other RNA
gtttgacacctgcaactgtga

SEQ ID NO: 54363 - RNA, 21 nt, synthetic construct
  source 1..21: mol_type = other RNA
accggcaccacctgctccaag

SEQ ID NO: 54364 - RNA, 21 nt, synthetic construct
  source 1..21: mol_type = other RNA
atggaaacttttgaaaacatc

SEQ ID NO: 54365 - RNA, 21 nt, synthetic construct
  source 1..21: mol_type = other RNA
tggaaacttttgaaaacatca

SEQ ID NO: 54366 - RNA, 21 nt, synthetic construct
  source 1..21: mol_type = other RNA
ggaaacttttgaaaacatcag

SEQ ID NO: 54367 - RNA, 21 nt, synthetic construct
  source 1..21: mol_type = other RNA
caccccctcctccagcccagg

SEQ ID NO: 54368 - RNA, 21 nt, synthetic construct
  source 1..21: mol_type = other RNA
caccccctcctccagcccagg

SEQ ID NO: 54369 - RNA, 21 nt, synthetic construct
  source 1..21: mol_type = other RNA
caccccctcctccagcccagg

SEQ ID NO: 54370 - RNA, 21 nt, synthetic construct
  source 1..21: mol_type = other RNA
caccccctcctccagcccagg

SEQ ID NO: 54371 - RNA, 21 nt, synthetic construct
  source 1..21: mol_type = other RNA
caccccctcctccagcccagg

SEQ ID NO: 54372 - RNA, 21 nt, synthetic construct
  source 1..21: mol_type = other RNA
tcttccaggcccggctgccct

SEQ ID NO: 54373 - RNA, 21 nt, synthetic construct
  source 1..21: mol_type = other RNA
ggctgctgctactcctgtgag

SEQ ID NO: 54374 - RNA, 21 nt, synthetic construct
  source 1..21: mol_type = other RNA
gctgctgctactcctgtgagg

SEQ ID NO: 54375 - RNA, 21 nt, synthetic construct
  source 1..21: mol_type = other RNA
cctgctgcccagcagccccac

SEQ ID NO: 54376 - RNA, 21 nt, synthetic construct
  source 1..21: mol_type = other RNA
cctgctgcccagcagccccac

SEQ ID NO: 54377 - RNA, 21 nt, synthetic construct
  source 1..21: mol_type = other RNA
cctgctgcccagcagccccac

SEQ ID NO: 54378 - RNA, 21 nt, synthetic construct
  source 1..21: mol_type = other RNA
cctgctgcccagcagccccac

SEQ ID NO: 54379 - RNA, 21 nt, synthetic construct
  source 1..21: mol_type = other RNA
ctgtgcgccgcgctgtcctcc

SEQ ID NO: 54380 - RNA, 21 nt, synthetic construct
  source 1..21: mol_type = other RNA
cgaccctgctgcccagcagcc

SEQ ID NO: 54381 - RNA, 21 nt, synthetic construct
  source 1..21: mol_type = other RNA
cgaccctgctgcccagcagcc

SEQ ID NO: 54382 - RNA, 21 nt, synthetic construct
  source 1..21: mol_type = other RNA
cgaccctgctgcccagcagcc

SEQ ID NO: 54383 - RNA, 21 nt, synthetic construct
  source 1..21: mol_type = other RNA
cgaccctgctgcccagcagcc

SEQ ID NO: 54384 - RNA, 21 nt, synthetic construct
  source 1..21: mol_type = other RNA
tatgtgcacgcctgtgccgcc

SEQ ID NO: 54385 - RNA, 21 nt, synthetic construct
  source 1..21: mol_type = other RNA
gggagtgtgcagtgactggcg

SEQ ID NO: 54386 - RNA, 21 nt, synthetic construct
  source 1..21: mol_type = other RNA
ggagacggccaccaccaccac

SEQ ID NO: 54387 - RNA, 21 nt, synthetic construct
  source 1..21: mol_type = other RNA
ccctgctgcccagcagcccca

SEQ ID NO: 54388 - RNA, 21 nt, synthetic construct
  source 1..21: mol_type = other RNA
ccctgctgcccagcagcccca

SEQ ID NO: 54389 - RNA, 21 nt, synthetic construct
  source 1..21: mol_type = other RNA
ccctgctgcccagcagcccca

SEQ ID NO: 54390 - RNA, 21 nt, synthetic construct
  source 1..21: mol_type = other RNA
ccctgctgcccagcagcccca

SEQ ID NO: 54391 - RNA, 21 nt, synthetic construct
  source 1..21: mol_type = other RNA
ccactgtgtcctcctcagtcc

SEQ ID NO: 54392 - RNA, 21 nt, synthetic construct
  source 1..21: mol_type = other RNA
cactgtgtcctcctcagtcct

SEQ ID NO: 54393 - RNA, 21 nt, synthetic construct
  source 1..21: mol_type = other RNA
tgcagggggagcctcaggaaa

SEQ ID NO: 54394 - RNA, 21 nt, synthetic construct
  source 1..21: mol_type = other RNA
gtcctgggcccagaagcagtg

SEQ ID NO: 54395 - RNA, 21 nt, synthetic construct
  source 1..21: mol_type = other RNA
tcctgggcccagaagcagtgc

SEQ ID NO: 54396 - RNA, 21 nt, synthetic construct
  source 1..21: mol_type = other RNA
ggcccagaagcagtgcagcat

SEQ ID NO: 54397 - RNA, 21 nt, synthetic construct
  source 1..21: mol_type = other RNA
gcccagaagcagtgcagcatc

SEQ ID NO: 54398 - RNA, 21 nt, synthetic construct
  source 1..21: mol_type = other RNA
tgctacaactacaggatccgg

SEQ ID NO: 54399 - RNA, 21 nt, synthetic construct
  source 1..21: mol_type = other RNA
tctgcagaaaagcacagggtg

SEQ ID NO: 54400 - RNA, 21 nt, synthetic construct
  source 1..21: mol_type = other RNA
tcccctgcccctggctgtgac

SEQ ID NO: 54401 - RNA, 21 nt, synthetic construct
  source 1..21: mol_type = other RNA
ccctgcttctgcagggcattt

SEQ ID NO: 54402 - RNA, 21 nt, synthetic construct
  source 1..21: mol_type = other RNA
cagcaccagtgcacctgctgc

SEQ ID NO: 54403 - RNA, 21 nt, synthetic construct
  source 1..21: mol_type = other RNA
cctggctgtgacaatgccatc

SEQ ID NO: 54404 - RNA, 21 nt, synthetic construct
  source 1..21: mol_type = other RNA
actctggctgcctgcccctcg

SEQ ID NO: 54405 - RNA, 21 nt, synthetic construct
  source 1..21: mol_type = other RNA
ctgcagctgctggtgcagctg

SEQ ID NO: 54406 - RNA, 21 nt, synthetic construct
  source 1..21: mol_type = other RNA
atgtgcggcctgtgtgggaac

SEQ ID NO: 54407 - RNA, 21 nt, synthetic construct
  source 1..21: mol_type = other RNA
gcgaggactgcctgtgcgccg

SEQ ID NO: 54408 - RNA, 21 nt, synthetic construct
  source 1..21: mol_type = other RNA
acctgctccaaggccatcaag

SEQ ID NO: 54409 - RNA, 21 nt, synthetic construct
  source 1..21: mol_type = other RNA
gaccctggagaactgcacggt

SEQ ID NO: 54410 - RNA, 21 nt, synthetic construct
  source 1..21: mol_type = other RNA
acccctgcacggccaacccct

SEQ ID NO: 54411 - RNA, 21 nt, synthetic construct
  source 1..21: mol_type = other RNA
gaccctgctgcccagcagccc

SEQ ID NO: 54412 - RNA, 21 nt, synthetic construct
  source 1..21: mol_type = other RNA
gaccctgctgcccagcagccc

SEQ ID NO: 54413 - RNA, 21 nt, synthetic construct
  source 1..21: mol_type = other RNA
gaccctgctgcccagcagccc

SEQ ID NO: 54414 - RNA, 21 nt, synthetic construct
  source 1..21: mol_type = other RNA
gaccctgctgcccagcagccc

SEQ ID NO: 54415 - RNA, 21 nt, synthetic construct
  source 1..21: mol_type = other RNA
tcgccctcccctgcccctggc

SEQ ID NO: 54416 - RNA, 21 nt, synthetic construct
  source 1..21: mol_type = other RNA
tgcagcaccagtgcacctgct

SEQ ID NO: 54417 - RNA, 21 nt, synthetic construct
  source 1..21: mol_type = other RNA
cagtgcacctgctgccaggag

SEQ ID NO: 54418 - RNA, 21 nt, synthetic construct
  source 1..21: mol_type = other RNA
gctgcagctgctggtgcagct

SEQ ID NO: 54419 - RNA, 21 nt, synthetic construct
  source 1..21: mol_type = other RNA
catcagggctgctgggggcaa

SEQ ID NO: 54420 - RNA, 21 nt, synthetic construct
  source 1..21: mol_type = other RNA
gcaggcagagacccagggccc

SEQ ID NO: 54421 - RNA, 21 nt, synthetic construct
  source 1..21: mol_type = other RNA
ctgcagcctggagacggggct

SEQ ID NO: 54422 - RNA, 21 nt, synthetic construct
  source 1..21: mol_type = other RNA
agacggccaccaccaccacca

SEQ ID NO: 54423 - RNA, 21 nt, synthetic construct
  source 1..21: mol_type = other RNA
aggtgctgacctgcagcctgg

SEQ ID NO: 54424 - RNA, 21 nt, synthetic construct
  source 1..21: mol_type = other RNA
acgcccttctgtgtccctgcg

SEQ ID NO: 54425 - RNA, 21 nt, synthetic construct
  source 1..21: mol_type = other RNA
agtgcaagcccctgccctgtg

SEQ ID NO: 54426 - RNA, 21 nt, synthetic construct
  source 1..21: mol_type = other RNA
gggcaggtgctgacctgcagc

SEQ ID NO: 54427 - RNA, 21 nt, synthetic construct
  source 1..21: mol_type = other RNA
ccaccaccaccaccacccagg

SEQ ID NO: 54428 - RNA, 21 nt, synthetic construct
  source 1..21: mol_type = other RNA
actgccccagcaccccggcca

SEQ ID NO: 54429 - RNA, 21 nt, synthetic construct
  source 1..21: mol_type = other RNA
actgccccagcaccccggcca

SEQ ID NO: 54430 - RNA, 21 nt, synthetic construct
  source 1..21: mol_type = other RNA
actgccccagcaccccggcca

SEQ ID NO: 54431 - RNA, 21 nt, synthetic construct
  source 1..21: mol_type = other RNA
actgccccagcaccccggcca

SEQ ID NO: 54432 - RNA, 21 nt, synthetic construct
  source 1..21: mol_type = other RNA
gcagtgcagcatcctccacgg

SEQ ID NO: 54433 - RNA, 21 nt, synthetic construct
  source 1..21: mol_type = other RNA
ctacgactgcgtccactggat

SEQ ID NO: 54434 - RNA, 21 nt, synthetic construct
  source 1..21: mol_type = other RNA
ctacgactgcgtccactggat

SEQ ID NO: 54435 - RNA, 21 nt, synthetic construct
  source 1..21: mol_type = other RNA
gacgacctggatcctcacaaa

SEQ ID NO: 54436 - RNA, 21 nt, synthetic construct
  source 1..21: mol_type = other RNA
gacgacctggatcctcacaaa

SEQ ID NO: 54437 - RNA, 21 nt, synthetic construct
  source 1..21: mol_type = other RNA
ggtgaccatgggctgtgagcc

SEQ ID NO: 54438 - RNA, 21 nt, synthetic construct
  source 1..21: mol_type = other RNA
ggtgaccatgggctgtgagcc

SEQ ID NO: 54439 - RNA, 21 nt, synthetic construct
  source 1..21: mol_type = other RNA
ccacccacgctggccccaaca

SEQ ID NO: 54440 - RNA, 21 nt, synthetic construct
  source 1..21: mol_type = other RNA
gtgcgtgtgctttgctgtgac

SEQ ID NO: 54441 - RNA, 21 nt, synthetic construct
  source 1..21: mol_type = other RNA
ccagtaccccagccaccagct

SEQ ID NO: 54442 - RNA, 21 nt, synthetic construct
  source 1..21: mol_type = other RNA
ccagccctttccagccctcac

SEQ ID NO: 54443 - RNA, 21 nt, synthetic construct
  source 1..21: mol_type = other RNA
acctggatcctcacaaagctg

SEQ ID NO: 54444 - RNA, 21 nt, synthetic construct
  source 1..21: mol_type = other RNA
ccaacctcaggggttgcaggc

SEQ ID NO: 54445 - RNA, 21 nt, synthetic construct
  source 1..21: mol_type = other RNA
acagagctgaccacaacagcc

SEQ ID NO: 54446 - RNA, 21 nt, synthetic construct
  source 1..21: mol_type = other RNA
acagagctgaccacaacagcc

SEQ ID NO: 54447 - RNA, 21 nt, synthetic construct
  source 1..21: mol_type = other RNA
acagagctgaccacaacagcc

SEQ ID NO: 54448 - RNA, 21 nt, synthetic construct
  source 1..21: mol_type = other RNA
cgcaggcagagacccagggcc

SEQ ID NO: 54449 - RNA, 21 nt, synthetic construct
  source 1..21: mol_type = other RNA
tgtggcccctccccggcccca

SEQ ID NO: 54450 - RNA, 21 nt, synthetic construct
  source 1..21: mol_type = other RNA
tggcccctccccggccccagg

SEQ ID NO: 54451 - RNA, 21 nt, synthetic construct
  source 1..21: mol_type = other RNA
accctggcacaggtggggcag

SEQ ID NO: 54452 - RNA, 21 nt, synthetic construct
  source 1..21: mol_type = other RNA
ccctggcacaggtggggcaga

SEQ ID NO: 54453 - RNA, 21 nt, synthetic construct
  source 1..21: mol_type = other RNA
aacgtgcgtgtgctttgctgt

SEQ ID NO: 54454 - RNA, 21 nt, synthetic construct
  source 1..21: mol_type = other RNA
ccccagccaccagctccacgg

SEQ ID NO: 54455 - RNA, 21 nt, synthetic construct
  source 1..21: mol_type = other RNA
tccagccctttccagccctca

SEQ ID NO: 54456 - RNA, 21 nt, synthetic construct
  source 1..21: mol_type = other RNA
cctggatcctcacagagctga

SEQ ID NO: 54457 - RNA, 21 nt, synthetic construct
  source 1..21: mol_type = other RNA
ggccaccgcctcctccaccca

SEQ ID NO: 54458 - RNA, 21 nt, synthetic construct
  source 1..21: mol_type = other RNA
ccacccctcctccactccgga

SEQ ID NO: 54459 - RNA, 21 nt, synthetic construct
  source 1..21: mol_type = other RNA
cctggatcctcacagagctga

SEQ ID NO: 54460 - RNA, 21 nt, synthetic construct
  source 1..21: mol_type = other RNA
ggccaccgcctcctccacccg

SEQ ID NO: 54461 - RNA, 21 nt, synthetic construct
  source 1..21: mol_type = other RNA
ggccaccgcctcctccaccca

SEQ ID NO: 54462 - RNA, 21 nt, synthetic construct
  source 1..21: mol_type = other RNA
cctggatcctcacagagctga

SEQ ID NO: 54463 - RNA, 21 nt, synthetic construct
  source 1..21: mol_type = other RNA
ccacccctcctccactccgga

SEQ ID NO: 54464 - RNA, 21 nt, synthetic construct
  source 1..21: mol_type = other RNA
cctggatcctcacagagctga

SEQ ID NO: 54465 - RNA, 21 nt, synthetic construct
  source 1..21: mol_type = other RNA
cctggatcctcacagagctga

SEQ ID NO: 54466 - RNA, 21 nt, synthetic construct
  source 1..21: mol_type = other RNA
ggccaccgcctcctccaccca

SEQ ID NO: 54467 - RNA, 21 nt, synthetic construct
  source 1..21: mol_type = other RNA
ccccccactgccagccccgca

SEQ ID NO: 54468 - RNA, 21 nt, synthetic construct
  source 1..21: mol_type = other RNA
cacccccaccccatgcccacc

SEQ ID NO: 54469 - RNA, 21 nt, synthetic construct
  source 1..21: mol_type = other RNA
cctgcccagatgtgtccagct

SEQ ID NO: 54470 - RNA, 21 nt, synthetic construct
  source 1..21: mol_type = other RNA
agatgtgtccagctgcagggg

SEQ ID NO: 54471 - RNA, 21 nt, synthetic construct
  source 1..21: mol_type = other RNA
ggccaccgcctcctccactct

SEQ ID NO: 54472 - RNA, 21 nt, synthetic construct
  source 1..21: mol_type = other RNA
atggcagtgccaggacctgcc

SEQ ID NO: 54473 - RNA, 21 nt, synthetic construct
  source 1..21: mol_type = other RNA
gaccaggtcgggcaggtgctg

SEQ ID NO: 54474 - RNA, 21 nt, synthetic construct
  source 1..21: mol_type = other RNA
ctacgactgcatccactggat

SEQ ID NO: 54475 - RNA, 21 nt, synthetic construct
  source 1..21: mol_type = other RNA
gctccccagcagcctgccaac

SEQ ID NO: 54476 - RNA, 21 nt, synthetic construct
  source 1..21: mol_type = other RNA
gaagaccagacaggcaggttc

SEQ ID NO: 54477 - RNA, 21 nt, synthetic construct
  source 1..21: mol_type = other RNA
accagctccaaagccactccc

SEQ ID NO: 54478 - RNA, 21 nt, synthetic construct
  source 1..21: mol_type = other RNA
caccctcctccactccagaga

SEQ ID NO: 54479 - RNA, 21 nt, synthetic construct
  source 1..21: mol_type = other RNA
accagctccaaagccactccc

SEQ ID NO: 54480 - RNA, 21 nt, synthetic construct
  source 1..21: mol_type = other RNA
caccctcctccactccagaga

SEQ ID NO: 54481 - RNA, 21 nt, synthetic construct
  source 1..21: mol_type = other RNA
accagctccaaagccactccc

SEQ ID NO: 54482 - RNA, 21 nt, synthetic construct
  source 1..21: mol_type = other RNA
caccctcctccactccagaga

SEQ ID NO: 54483 - RNA, 21 nt, synthetic construct
  source 1..21: mol_type = other RNA
accagctccaaagccactccc

SEQ ID NO: 54484 - RNA, 21 nt, synthetic construct
  source 1..21: mol_type = other RNA
caccctcctccactccagaga

SEQ ID NO: 54485 - RNA, 21 nt, synthetic construct
  source 1..21: mol_type = other RNA
cggggtggtggaggccacggg

SEQ ID NO: 54486 - RNA, 21 nt, synthetic construct
  source 1..21: mol_type = other RNA
ctgcagcaacagctcggcggg

SEQ ID NO: 54487 - RNA, 21 nt, synthetic construct
  source 1..21: mol_type = other RNA
gctggaggagctgggccagca

SEQ ID NO: 54488 - RNA, 21 nt, synthetic construct
  source 1..21: mol_type = other RNA
accccagccaccagctccacg

SEQ ID NO: 54489 - RNA, 21 nt, synthetic construct
  source 1..21: mol_type = other RNA
ccaccccctcctccaccccag

SEQ ID NO: 54490 - RNA, 21 nt, synthetic construct
  source 1..21: mol_type = other RNA
ccaccccctcctccaccccag

SEQ ID NO: 54491 - RNA, 21 nt, synthetic construct
  source 1..21: mol_type = other RNA
ccaccccctcctccaccccag

SEQ ID NO: 54492 - RNA, 21 nt, synthetic construct
  source 1..21: mol_type = other RNA
ccaccccctcctccaccccag

SEQ ID NO: 54493 - RNA, 21 nt, synthetic construct
  source 1..21: mol_type = other RNA
tgccgcccgctgcccccgcgc

SEQ ID NO: 54494 - RNA, 21 nt, synthetic construct
  source 1..21: mol_type = other RNA
cggagtgccacgcactggtgg

SEQ ID NO: 54495 - RNA, 21 nt, synthetic construct
  source 1..21: mol_type = other RNA
gctttgggaatctcagcctct

SEQ ID NO: 54496 - RNA, 21 nt, synthetic construct
  source 1..21: mol_type = other RNA
accacagccacagccacaccc

SEQ ID NO: 54497 - RNA, 21 nt, synthetic construct
  source 1..21: mol_type = other RNA
cgctgccgcccgctgcccccg

SEQ ID NO: 54498 - RNA, 21 nt, synthetic construct
  source 1..21: mol_type = other RNA
ctgccgcccgctgcccccgcg

SEQ ID NO: 54499 - RNA, 21 nt, synthetic construct
  source 1..21: mol_type = other RNA
cacccgtggccaccatgtcca

SEQ ID NO: 54500 - RNA, 21 nt, synthetic construct
  source 1..21: mol_type = other RNA
gaccctggcacaggtggggca

SEQ ID NO: 54501 - RNA, 21 nt, synthetic construct
  source 1..21: mol_type = other RNA
tgcatcctgcccagatgtgtc

SEQ ID NO: 54502 - RNA, 21 nt, synthetic construct
  source 1..21: mol_type = other RNA
tgcagcacctggggtgacttc

SEQ ID NO: 54503 - RNA, 21 nt, synthetic construct
  source 1..21: mol_type = other RNA
gtggcccctccccggccccag

SEQ ID NO: 54504 - RNA, 21 nt, synthetic construct
  source 1..21: mol_type = other RNA
ccacagtcaccagctccaaag

SEQ ID NO: 54505 - RNA, 21 nt, synthetic construct
  source 1..21: mol_type = other RNA
ccacagtcaccagctccaaag

SEQ ID NO: 54506 - RNA, 21 nt, synthetic construct
  source 1..21: mol_type = other RNA
ctcccttctccagtccaggga

SEQ ID NO: 54507 - RNA, 21 nt, synthetic construct
  source 1..21: mol_type = other RNA
ccacagtcaccagctccaaag

SEQ ID NO: 54508 - RNA, 21 nt, synthetic construct
  source 1..21: mol_type = other RNA
ctcccttctccagtccaggga

SEQ ID NO: 54509 - RNA, 21 nt, synthetic construct
  source 1..21: mol_type = other RNA
ccacagtcaccagctccaaag

SEQ ID NO: 54510 - RNA, 21 nt, synthetic construct
  source 1..21: mol_type = other RNA
gcccctgccctgtgacgccca

SEQ ID NO: 54511 - RNA, 21 nt, synthetic construct
  source 1..21: mol_type = other RNA
atcccctcctcctccctgggc

SEQ ID NO: 54512 - RNA, 21 nt, synthetic construct
  source 1..21: mol_type = other RNA
aagccacttcctcctccagtc

SEQ ID NO: 54513 - RNA, 21 nt, synthetic construct
  source 1..21: mol_type = other RNA
atcccctcctcctccctgggc

SEQ ID NO: 54514 - RNA, 21 nt, synthetic construct
  source 1..21: mol_type = other RNA
aagccacttcctcctccagtc

SEQ ID NO: 54515 - RNA, 21 nt, synthetic construct
  source 1..21: mol_type = other RNA
atcccctcctcctccctgggc

SEQ ID NO: 54516 - RNA, 21 nt, synthetic construct
  source 1..21: mol_type = other RNA
aagccacttcctcctccagtc

SEQ ID NO: 54517 - RNA, 21 nt, synthetic construct
  source 1..21: mol_type = other RNA
ctgccactgccgctgccgccc

SEQ ID NO: 54518 - RNA, 21 nt, synthetic construct
  source 1..21: mol_type = other RNA
acccccaccccatgcccacca

SEQ ID NO: 54519 - RNA, 21 nt, synthetic construct
  source 1..21: mol_type = other RNA
tgctcctgctgcccaccccgt

SEQ ID NO: 54520 - RNA, 21 nt, synthetic construct
  source 1..21: mol_type = other RNA
tccccctcccaaagtgctgac

SEQ ID NO: 54521 - RNA, 21 nt, synthetic construct
  source 1..21: mol_type = other RNA
ccccctcccaaagtgctgacc

SEQ ID NO: 54522 - RNA, 21 nt, synthetic construct
  source 1..21: mol_type = other RNA
tccccctcccaaagtgctgac

SEQ ID NO: 54523 - RNA, 21 nt, synthetic construct
  source 1..21: mol_type = other RNA
ccccctcccaaagtgctgacc

SEQ ID NO: 54524 - RNA, 21 nt, synthetic construct
  source 1..21: mol_type = other RNA
tccccctcccaaagtgctgac

SEQ ID NO: 54525 - RNA, 21 nt, synthetic construct
  source 1..21: mol_type = other RNA
ccccctcccaaagtgctgacc

SEQ ID NO: 54526 - RNA, 21 nt, synthetic construct
  source 1..21: mol_type = other RNA
tgcagctcctgcacctgctcc

SEQ ID NO: 54527 - RNA, 21 nt, synthetic construct
  source 1..21: mol_type = other RNA
cgcctcctccactctgggaac

SEQ ID NO: 54528 - RNA, 21 nt, synthetic construct
  source 1..21: mol_type = other RNA
gctgccgcccgctgcccccgc

SEQ ID NO: 54529 - RNA, 21 nt, synthetic construct
  source 1..21: mol_type = other RNA
gcccggccctcccggtctcca

SEQ ID NO: 54530 - RNA, 21 nt, synthetic construct
  source 1..21: mol_type = other RNA
agcccggccctcccggtctcc

SEQ ID NO: 54531 - RNA, 21 nt, synthetic construct
  source 1..21: mol_type = other RNA
ccccctgaacccggcgcacaa

SEQ ID NO: 54532 - RNA, 21 nt, synthetic construct
  source 1..21: mol_type = other RNA
aggagacggtgcccttgcact

SEQ ID NO: 54533 - RNA, 21 nt, synthetic construct
  source 1..21: mol_type = other RNA
gagctgcgggttctctgctgc

SEQ ID NO: 54534 - RNA, 21 nt, synthetic construct
  source 1..21: mol_type = other RNA
acgaggacttcaacgtccagc

SEQ ID NO: 54535 - RNA, 21 nt, synthetic construct
  source 1..21: mol_type = other RNA
tccttcaacaccacctgcagc

SEQ ID NO: 54536 - RNA, 21 nt, synthetic construct
  source 1..21: mol_type = other RNA
ctccagtgtggatcagcacaa

SEQ ID NO: 54537 - RNA, 21 nt, synthetic construct
  source 1..21: mol_type = other RNA
ttccagtgtggatcagcacaa

SEQ ID NO: 54538 - RNA, 21 nt, synthetic construct
  source 1..21: mol_type = other RNA
ttccagtgctgacaagcacag

SEQ ID NO: 54539 - RNA, 21 nt, synthetic construct
  source 1..21: mol_type = other RNA
ctccagtgtggatcagcacaa

SEQ ID NO: 54540 - RNA, 21 nt, synthetic construct
  source 1..21: mol_type = other RNA
ctccagtgtggatcagcacaa

SEQ ID NO: 54541 - RNA, 21 nt, synthetic construct
  source 1..21: mol_type = other RNA
ttccagtgctgacaagcacag

SEQ ID NO: 54542 - RNA, 21 nt, synthetic construct
  source 1..21: mol_type = other RNA
ctccagtgtggatcagcacaa

SEQ ID NO: 54543 - RNA, 21 nt, synthetic construct
  source 1..21: mol_type = other RNA
ttccagtgctgacaagcacag

SEQ ID NO: 54544 - RNA, 21 nt, synthetic construct
  source 1..21: mol_type = other RNA
aaacctgggtcaacagccatg

SEQ ID NO: 54545 - RNA, 21 nt, synthetic construct
  source 1..21: mol_type = other RNA
gactttggcctggtctgcagg

SEQ ID NO: 54546 - RNA, 21 nt, synthetic construct
  source 1..21: mol_type = other RNA
gactttggcctggtctgcagg

SEQ ID NO: 54547 - RNA, 21 nt, synthetic construct
  source 1..21: mol_type = other RNA
gactttggcctggtctgcagg

SEQ ID NO: 54548 - RNA, 21 nt, synthetic construct
  source 1..21: mol_type = other RNA
gactttggcctggtctgcagg

SEQ ID NO: 54549 - RNA, 21 nt, synthetic construct
  source 1..21: mol_type = other RNA
cagtgcagcatcctccacggc

SEQ ID NO: 54550 - RNA, 21 nt, synthetic construct
  source 1..21: mol_type = other RNA
acagtgctgaccaccaccacc

SEQ ID NO: 54551 - RNA, 21 nt, synthetic construct
  source 1..21: mol_type = other RNA
acagtgctgaccaccaccacc

SEQ ID NO: 54552 - RNA, 21 nt, synthetic construct
  source 1..21: mol_type = other RNA
acagtgctgaccaccaccacc

SEQ ID NO: 54553 - RNA, 21 nt, synthetic construct
  source 1..21: mol_type = other RNA
acagtgctgaccaccaccacc

SEQ ID NO: 54554 - RNA, 21 nt, synthetic construct
  source 1..21: mol_type = other RNA
tgcagcaacagctcggcgggc

SEQ ID NO: 54555 - RNA, 21 nt, synthetic construct
  source 1..21: mol_type = other RNA
tgcagcatcctccacggcccc

SEQ ID NO: 54556 - RNA, 21 nt, synthetic construct
  source 1..21: mol_type = other RNA
agcatcctccacggccccacc

SEQ ID NO: 54557 - RNA, 21 nt, synthetic construct
  source 1..21: mol_type = other RNA
ctgccctgaggaccagatcct

SEQ ID NO: 54558 - RNA, 21 nt, synthetic construct
  source 1..21: mol_type = other RNA
acaggcctggggctgcagctg

SEQ ID NO: 54559 - RNA, 21 nt, synthetic construct
  source 1..21: mol_type = other RNA
caggcctggggctgcagctgc

SEQ ID NO: 54560 - RNA, 21 nt, synthetic construct
  source 1..21: mol_type = other RNA
aggcctggggctgcagctgct

SEQ ID NO: 54561 - RNA, 21 nt, synthetic construct
  source 1..21: mol_type = other RNA
acaagcctggagagaccatca

SEQ ID NO: 54562 - RNA, 21 nt, synthetic construct
  source 1..21: mol_type = other RNA
tggaggagctgggccagcagg

SEQ ID NO: 54563 - RNA, 21 nt, synthetic construct
  source 1..21: mol_type = other RNA
cggccaccaccaccaccaccc

SEQ ID NO: 54564 - RNA, 21 nt, synthetic construct
  source 1..21: mol_type = other RNA
ggccaccaccaccaccaccca

SEQ ID NO: 54565 - RNA, 21 nt, synthetic construct
  source 1..21: mol_type = other RNA
gccaccaccaccaccacccag

SEQ ID NO: 54566 - RNA, 21 nt, synthetic construct
  source 1..21: mol_type = other RNA
ctcctcctccctgggcaccac

SEQ ID NO: 54567 - RNA, 21 nt, synthetic construct
  source 1..21: mol_type = other RNA
cagttccaaagccacttcctc

SEQ ID NO: 54568 - RNA, 21 nt, synthetic construct
  source 1..21: mol_type = other RNA
ccacagccacagccacaccca

SEQ ID NO: 54569 - RNA, 21 nt, synthetic construct
  source 1..21: mol_type = other RNA
ctcctcctccctgggcaccac

SEQ ID NO: 54570 - RNA, 21 nt, synthetic construct
  source 1..21: mol_type = other RNA
cagttccaaagccacttcctc

SEQ ID NO: 54571 - RNA, 21 nt, synthetic construct
  source 1..21: mol_type = other RNA
ctcctcctccctgggcaccac

SEQ ID NO: 54572 - RNA, 21 nt, synthetic construct
  source 1..21: mol_type = other RNA
tctgccactgccgctgccgcc

SEQ ID NO: 54573 - RNA, 21 nt, synthetic construct
  source 1..21: mol_type = other RNA
tgccagccccgcagccccggt

SEQ ID NO: 54574 - RNA, 21 nt, synthetic construct
  source 1..21: mol_type = other RNA
ccccaccccatgcccaccaca

SEQ ID NO: 54575 - RNA, 23 nt, synthetic construct
  source 1..23: mol_type = other RNA
caggcgcccgcgtcattgaggaa

SEQ ID NO: 54576 - RNA, 23 nt, synthetic construct
  source 1..23: mol_type = other RNA
tgtgctgaaacagcccacgtcca

SEQ ID NO: 54577 - RNA, 23 nt, synthetic construct
  source 1..23: mol_type = other RNA
cagcggcagacctcgcggacaca

SEQ ID NO: 54578 - RNA, 23 nt, synthetic construct
  source 1..23: mol_type = other RNA
cttatcgtaggactcaacgtccc

SEQ ID NO: 54579 - RNA, 23 nt, synthetic construct
  source 1..23: mol_type = other RNA
agatgcactcgcactcatagtgg

SEQ ID NO: 54580 - RNA, 23 nt, synthetic construct
  source 1..23: mol_type = other RNA
atttcttggacagaacgtagctg

SEQ ID NO: 54581 - RNA, 23 nt, synthetic construct
  source 1..23: mol_type = other RNA
acgtcccctccaagttgttcaga

SEQ ID NO: 54582 - RNA, 23 nt, synthetic construct
  source 1..23: mol_type = other RNA
tgcactcgcactcatagtggaag

SEQ ID NO: 54583 - RNA, 23 nt, synthetic construct
  source 1..23: mol_type = other RNA
cgccgttcttgctgaaaccgctg

SEQ ID NO: 54584 - RNA, 23 nt, synthetic construct
  source 1..23: mol_type = other RNA
cagacacaagcacgccgttcttg

SEQ ID NO: 54585 - RNA, 23 nt, synthetic construct
  source 1..23: mol_type = other RNA
cccaaactggagcggggtcagcc

SEQ ID NO: 54586 - RNA, 23 nt, synthetic construct
  source 1..23: mol_type = other RNA
gtgcttgttcacgcaggtgacgt

SEQ ID NO: 54587 - RNA, 23 nt, synthetic construct
  source 1..23: mol_type = other RNA
ggcgtgagtattccacaaaggtg

SEQ ID NO: 54588 - RNA, 23 nt, synthetic construct
  source 1..23: mol_type = other RNA
ggtgttggcgaaggctgcgcccg

SEQ ID NO: 54589 - RNA, 23 nt, synthetic construct
  source 1..23: mol_type = other RNA
ttatcgtaggactcaacgtcccc

SEQ ID NO: 54590 - RNA, 23 nt, synthetic construct
  source 1..23: mol_type = other RNA
ggagccagcacggtgccgtgagc

SEQ ID NO: 54591 - RNA, 23 nt, synthetic construct
  source 1..23: mol_type = other RNA
gtagtacttggtggagtcaacct

SEQ ID NO: 54592 - RNA, 23 nt, synthetic construct
  source 1..23: mol_type = other RNA
aggacgatatccatggacttgta

SEQ ID NO: 54593 - RNA, 23 nt, synthetic construct
  source 1..23: mol_type = other RNA
ttcttggacagaacgtagctgca

SEQ ID NO: 54594 - RNA, 23 nt, synthetic construct
  source 1..23: mol_type = other RNA
ggtgtaagaggtgccgtcaaagg

SEQ ID NO: 54595 - RNA, 23 nt, synthetic construct
  source 1..23: mol_type = other RNA
caccggaatttggtcaaacagga

SEQ ID NO: 54596 - RNA, 23 nt, synthetic construct
  source 1..23: mol_type = other RNA
cacgatgaagaagctcgagggtg

SEQ ID NO: 54597 - RNA, 23 nt, synthetic construct
  source 1..23: mol_type = other RNA
ggtgccgtcaaaggtggaatagt

SEQ ID NO: 54598 - RNA, 23 nt, synthetic construct
  source 1..23: mol_type = other RNA
tgtacttggtgcagacgccgtcc

SEQ ID NO: 54599 - RNA, 23 nt, synthetic construct
  source 1..23: mol_type = other RNA
tcctggtgcagtcggatgaacac

SEQ ID NO: 54600 - RNA, 23 nt, synthetic construct
  source 1..23: mol_type = other RNA
cctcgtagtacttggtggagtca

SEQ ID NO: 54601 - RNA, 23 nt, synthetic construct
  source 1..23: mol_type = other RNA
cgcactcatagtggaagtcacag

SEQ ID NO: 54602 - RNA, 23 nt, synthetic construct
  source 1..23: mol_type = other RNA
aggtcgtccccggagtggaggag

SEQ ID NO: 54603 - RNA, 23 nt, synthetic construct
  source 1..23: mol_type = other RNA
aggtcgtccccggagtggaggag

SEQ ID NO: 54604 - RNA, 23 nt, synthetic construct
  source 1..23: mol_type = other RNA
aggtcgtccccggagtggaggag

SEQ ID NO: 54605 - RNA, 23 nt, synthetic construct
  source 1..23: mol_type = other RNA
tgctcaccggaatttggtcaaac

SEQ ID NO: 54606 - RNA, 23 nt, synthetic construct
  source 1..23: mol_type = other RNA
agtgcccactggggttccggcag

SEQ ID NO: 54607 - RNA, 23 nt, synthetic construct
  source 1..23: mol_type = other RNA
cagcagaacacacggatttcata

SEQ ID NO: 54608 - RNA, 23 nt, synthetic construct
  source 1..23: mol_type = other RNA
cagcagaacacacggatttcata

SEQ ID NO: 54609 - RNA, 23 nt, synthetic construct
  source 1..23: mol_type = other RNA
cagcagaacacacggatttcata

SEQ ID NO: 54610 - RNA, 23 nt, synthetic construct
  source 1..23: mol_type = other RNA
gggccacagggcacgtattcgca

SEQ ID NO: 54611 - RNA, 23 nt, synthetic construct
  source 1..23: mol_type = other RNA
cgtgggcgcactggcgtgagtat

SEQ ID NO: 54612 - RNA, 23 nt, synthetic construct
  source 1..23: mol_type = other RNA
atgtacttggtgcagacgccgtc

SEQ ID NO: 54613 - RNA, 23 nt, synthetic construct
  source 1..23: mol_type = other RNA
gcgccaggctcgtggtcagcggc

SEQ ID NO: 54614 - RNA, 23 nt, synthetic construct
  source 1..23: mol_type = other RNA
gatatccatggacttgtagtgga

SEQ ID NO: 54615 - RNA, 23 nt, synthetic construct
  source 1..23: mol_type = other RNA
ctggtgcagtcggatgaacacgc

SEQ ID NO: 54616 - RNA, 23 nt, synthetic construct
  source 1..23: mol_type = other RNA
gccgttcttgctgaaaccgctgc

SEQ ID NO: 54617 - RNA, 23 nt, synthetic construct
  source 1..23: mol_type = other RNA
caacgtcccctccaagttgttca

SEQ ID NO: 54618 - RNA, 23 nt, synthetic construct
  source 1..23: mol_type = other RNA
ccgctgctcaccggaatttggtc

SEQ ID NO: 54619 - RNA, 23 nt, synthetic construct
  source 1..23: mol_type = other RNA
gttgtcacccacgcacctggcca

SEQ ID NO: 54620 - RNA, 23 nt, synthetic construct
  source 1..23: mol_type = other RNA
ggcgcccgcgtcattgaggaagg

SEQ ID NO: 54621 - RNA, 23 nt, synthetic construct
  source 1..23: mol_type = other RNA
gtggtgttgtagatgacgtcctg

SEQ ID NO: 54622 - RNA, 23 nt, synthetic construct
  source 1..23: mol_type = other RNA
gttcccaaactggagcggggtca

SEQ ID NO: 54623 - RNA, 23 nt, synthetic construct
  source 1..23: mol_type = other RNA
agtcctggtgcagtcggatgaac

SEQ ID NO: 54624 - RNA, 23 nt, synthetic construct
  source 1..23: mol_type = other RNA
agttacagctctggcagttctcc

SEQ ID NO: 54625 - RNA, 23 nt, synthetic construct
  source 1..23: mol_type = other RNA
gaggacccggatcctgtagttgt

SEQ ID NO: 54626 - RNA, 23 nt, synthetic construct
  source 1..23: mol_type = other RNA
tgtaagaggtgccgtcaaaggtg

SEQ ID NO: 54627 - RNA, 23 nt, synthetic construct
  source 1..23: mol_type = other RNA
gtgacgatgcggaaggtcccgtg

SEQ ID NO: 54628 - RNA, 23 nt, synthetic construct
  source 1..23: mol_type = other RNA
tcttatcgtaggactcaacgtcc

SEQ ID NO: 54629 - RNA, 23 nt, synthetic construct
  source 1..23: mol_type = other RNA
aggtgtaagaggtgccgtcaaag

SEQ ID NO: 54630 - RNA, 23 nt, synthetic construct
  source 1..23: mol_type = other RNA
cgatgaagaagctcgagggtgtg

SEQ ID NO: 54631 - RNA, 23 nt, synthetic construct
  source 1..23: mol_type = other RNA
cagtgcggctgtaaggcagctcc

SEQ ID NO: 54632 - RNA, 23 nt, synthetic construct
  source 1..23: mol_type = other RNA
gaggacgatatccatggacttgt

SEQ ID NO: 54633 - RNA, 23 nt, synthetic construct
  source 1..23: mol_type = other RNA
ctggcgtgagtattccacaaagg

SEQ ID NO: 54634 - RNA, 23 nt, synthetic construct
  source 1..23: mol_type = other RNA
ggccgtagttgcagcagaacaca

SEQ ID NO: 54635 - RNA, 23 nt, synthetic construct
  source 1..23: mol_type = other RNA
ggccgtagttgcagcagaacaca

SEQ ID NO: 54636 - RNA, 23 nt, synthetic construct
  source 1..23: mol_type = other RNA
cactgggccacgcacttcatctg

SEQ ID NO: 54637 - RNA, 23 nt, synthetic construct
  source 1..23: mol_type = other RNA
taagaggtgccgtcaaaggtgga

SEQ ID NO: 54638 - RNA, 23 nt, synthetic construct
  source 1..23: mol_type = other RNA
cacaagcacgccgttcttgctga

SEQ ID NO: 54639 - RNA, 23 nt, synthetic construct
  source 1..23: mol_type = other RNA
tgacgtcggcctcactcaggccg

SEQ ID NO: 54640 - RNA, 23 nt, synthetic construct
  source 1..23: mol_type = other RNA
aagtcgtcagcctggttctggtt

SEQ ID NO: 54641 - RNA, 23 nt, synthetic construct
  source 1..23: mol_type = other RNA
gtgccgtcaaaggtggaatagtg

SEQ ID NO: 54642 - RNA, 23 nt, synthetic construct
  source 1..23: mol_type = other RNA
gtaagaggtgccgtcaaaggtgg

SEQ ID NO: 54643 - RNA, 23 nt, synthetic construct
  source 1..23: mol_type = other RNA
gcagccggttttcctgaggctcc

SEQ ID NO: 54644 - RNA, 23 nt, synthetic construct
  source 1..23: mol_type = other RNA
ccacgcacctggccaccgtgcag

SEQ ID NO: 54645 - RNA, 23 nt, synthetic construct
  source 1..23: mol_type = other RNA
cattccacgacctggcccaactc

SEQ ID NO: 54646 - RNA, 23 nt, synthetic construct
  source 1..23: mol_type = other RNA
cattccacgacctggcccaactc

SEQ ID NO: 54647 - RNA, 23 nt, synthetic construct
  source 1..23: mol_type = other RNA
cattccacgacctggcccaactc

SEQ ID NO: 54648 - RNA, 23 nt, synthetic construct
  source 1..23: mol_type = other RNA
cattccacgacctggcccaactc

SEQ ID NO: 54649 - RNA, 23 nt, synthetic construct
  source 1..23: mol_type = other RNA
ctcggtgttgttgtggaagaggc

SEQ ID NO: 54650 - RNA, 23 nt, synthetic construct
  source 1..23: mol_type = other RNA
gtcgtccctctggttgttggtgc

SEQ ID NO: 54651 - RNA, 23 nt, synthetic construct
  source 1..23: mol_type = other RNA
gggcgtgcagccacactcatcca

SEQ ID NO: 54652 - RNA, 23 nt, synthetic construct
  source 1..23: mol_type = other RNA
gacgatatccatggacttgtagt

SEQ ID NO: 54653 - RNA, 23 nt, synthetic construct
  source 1..23: mol_type = other RNA
tgccgggcgtagttctcattctc

SEQ ID NO: 54654 - RNA, 23 nt, synthetic construct
  source 1..23: mol_type = other RNA
tcccacaggggatgttctcggtg

SEQ ID NO: 54655 - RNA, 23 nt, synthetic construct
  source 1..23: mol_type = other RNA
ttcagacttggggtagtcctcat

SEQ ID NO: 54656 - RNA, 23 nt, synthetic construct
  source 1..23: mol_type = other RNA
ccctgatcttatcgtaggactca

SEQ ID NO: 54657 - RNA, 23 nt, synthetic construct
  source 1..23: mol_type = other RNA
agcacgccgttcttgctgaaacc

SEQ ID NO: 54658 - RNA, 23 nt, synthetic construct
  source 1..23: mol_type = other RNA
gtgatgaagtggccatccccgta

SEQ ID NO: 54659 - RNA, 23 nt, synthetic construct
  source 1..23: mol_type = other RNA
gacgggtggaacaaagctcacgc

SEQ ID NO: 54660 - RNA, 23 nt, synthetic construct
  source 1..23: mol_type = other RNA
ttgttcagacttggggtagtcct

SEQ ID NO: 54661 - RNA, 23 nt, synthetic construct
  source 1..23: mol_type = other RNA
gtaggtcctgtcctcataggtgc

SEQ ID NO: 54662 - RNA, 23 nt, synthetic construct
  source 1..23: mol_type = other RNA
acgatgaagaagctcgagggtgt

SEQ ID NO: 54663 - RNA, 23 nt, synthetic construct
  source 1..23: mol_type = other RNA
ctcgcactcatagtggaagtcac

SEQ ID NO: 54664 - RNA, 23 nt, synthetic construct
  source 1..23: mol_type = other RNA
ggctgcattccacgacctggccc

SEQ ID NO: 54665 - RNA, 23 nt, synthetic construct
  source 1..23: mol_type = other RNA
ggctgcattccacgacctggccc

SEQ ID NO: 54666 - RNA, 23 nt, synthetic construct
  source 1..23: mol_type = other RNA
ggctgcattccacgacctggccc

SEQ ID NO: 54667 - RNA, 23 nt, synthetic construct
  source 1..23: mol_type = other RNA
ggctgcattccacgacctggccc

SEQ ID NO: 54668 - RNA, 23 nt, synthetic construct
  source 1..23: mol_type = other RNA
acgtcaaaccactctgtccactc

SEQ ID NO: 54669 - RNA, 23 nt, synthetic construct
  source 1..23: mol_type = other RNA
gccgggcgtagttctcattctcc

SEQ ID NO: 54670 - RNA, 23 nt, synthetic construct
  source 1..23: mol_type = other RNA
gttacagctctggcagttctccg

SEQ ID NO: 54671 - RNA, 23 nt, synthetic construct
  source 1..23: mol_type = other RNA
gtagttgtagcacatcttgaaga

SEQ ID NO: 54672 - RNA, 23 nt, synthetic construct
  source 1..23: mol_type = other RNA
atcgtaggactcaacgtcccctc

SEQ ID NO: 54673 - RNA, 23 nt, synthetic construct
  source 1..23: mol_type = other RNA
catgaggacataggtgcagttgc

SEQ ID NO: 54674 - RNA, 23 nt, synthetic construct
  source 1..23: mol_type = other RNA
gccccccgcgtgggcgcactggc

SEQ ID NO: 54675 - RNA, 23 nt, synthetic construct
  source 1..23: mol_type = other RNA
gggtagtcctcatcaaaccactc

SEQ ID NO: 54676 - RNA, 23 nt, synthetic construct
  source 1..23: mol_type = other RNA
ggcactgctccgtgggcccatcc

SEQ ID NO: 54677 - RNA, 23 nt, synthetic construct
  source 1..23: mol_type = other RNA
tgtaggtggcctcgttgtgcaca

SEQ ID NO: 54678 - RNA, 23 nt, synthetic construct
  source 1..23: mol_type = other RNA
acacacacaggcccgcgtcgtgg

SEQ ID NO: 54679 - RNA, 23 nt, synthetic construct
  source 1..23: mol_type = other RNA
ggtggtgttgtagatgacgtcct

SEQ ID NO: 54680 - RNA, 23 nt, synthetic construct
  source 1..23: mol_type = other RNA
cgtagctggacgttgaagtcctc

SEQ ID NO: 54681 - RNA, 23 nt, synthetic construct
  source 1..23: mol_type = other RNA
ggtcctgtcctcataggtgcagg

SEQ ID NO: 54682 - RNA, 23 nt, synthetic construct
  source 1..23: mol_type = other RNA
actcaacgtcccctccaagttgt

SEQ ID NO: 54683 - RNA, 23 nt, synthetic construct
  source 1..23: mol_type = other RNA
gctcgagggtgtgaacagggtga

SEQ ID NO: 54684 - RNA, 23 nt, synthetic construct
  source 1..23: mol_type = other RNA
agctcgagggtgtgaacagggtg

SEQ ID NO: 54685 - RNA, 23 nt, synthetic construct
  source 1..23: mol_type = other RNA
gatgttctcggtgacgatgcgga

SEQ ID NO: 54686 - RNA, 23 nt, synthetic construct
  source 1..23: mol_type = other RNA
aggtgtccggagtccgccaggac

SEQ ID NO: 54687 - RNA, 23 nt, synthetic construct
  source 1..23: mol_type = other RNA
tgcaccgacgtcatagtagtttc

SEQ ID NO: 54688 - RNA, 23 nt, synthetic construct
  source 1..23: mol_type = other RNA
ttcggttgacagcgggtcgtgcc

SEQ ID NO: 54689 - RNA, 23 nt, synthetic construct
  source 1..23: mol_type = other RNA
cgacgtcatagtagtttccgtcc

SEQ ID NO: 54690 - RNA, 23 nt, synthetic construct
  source 1..23: mol_type = other RNA
gccggctcggtcggtcttattgt

SEQ ID NO: 54691 - RNA, 23 nt, synthetic construct
  source 1..23: mol_type = other RNA
ggccgtgatcgtagtggccgtgg

SEQ ID NO: 54692 - RNA, 23 nt, synthetic construct
  source 1..23: mol_type = other RNA
ggccgtgatcgtagtggccgtgg

SEQ ID NO: 54693 - RNA, 23 nt, synthetic construct
  source 1..23: mol_type = other RNA
ggccgtgatcgtagtggccgtgg

SEQ ID NO: 54694 - RNA, 23 nt, synthetic construct
  source 1..23: mol_type = other RNA
ggccgtgatcgtagtggccgtgg

SEQ ID NO: 54695 - RNA, 23 nt, synthetic construct
  source 1..23: mol_type = other RNA
acttcggttgacagcgggtcgtg

SEQ ID NO: 54696 - RNA, 23 nt, synthetic construct
  source 1..23: mol_type = other RNA
cacgtcccctgcagtggtcgtca

SEQ ID NO: 54697 - RNA, 23 nt, synthetic construct
  source 1..23: mol_type = other RNA
gggatcggtcaggcgcgagcacc

SEQ ID NO: 54698 - RNA, 23 nt, synthetic construct
  source 1..23: mol_type = other RNA
tggtagtcggcactttggtagtg

SEQ ID NO: 54699 - RNA, 23 nt, synthetic construct
  source 1..23: mol_type = other RNA
tggtagtcggcactttggtagtg

SEQ ID NO: 54700 - RNA, 23 nt, synthetic construct
  source 1..23: mol_type = other RNA
tggtagtcggcactttggtagtg

SEQ ID NO: 54701 - RNA, 23 nt, synthetic construct
  source 1..23: mol_type = other RNA
ccacagggcacgtattcgcagca

SEQ ID NO: 54702 - RNA, 23 nt, synthetic construct
  source 1..23: mol_type = other RNA
gtagtcggcactttggtagtgtg

SEQ ID NO: 54703 - RNA, 23 nt, synthetic construct
  source 1..23: mol_type = other RNA
ggtagtcggcactttggtagtgt

SEQ ID NO: 54704 - RNA, 23 nt, synthetic construct
  source 1..23: mol_type = other RNA
gtagtcggcactttggtagtgtg

SEQ ID NO: 54705 - RNA, 23 nt, synthetic construct
  source 1..23: mol_type = other RNA
ggtagtcggcactttggtagtgt

SEQ ID NO: 54706 - RNA, 23 nt, synthetic construct
  source 1..23: mol_type = other RNA
gtagtcggcactttggtagtgtg

SEQ ID NO: 54707 - RNA, 23 nt, synthetic construct
  source 1..23: mol_type = other RNA
ggtagtcggcactttggtagtgt

SEQ ID NO: 54708 - RNA, 23 nt, synthetic construct
  source 1..23: mol_type = other RNA
atttaggaaacccatcgggtccc

SEQ ID NO: 54709 - RNA, 23 nt, synthetic construct
  source 1..23: mol_type = other RNA
gtgttcggcactgggggtgtgtg

SEQ ID NO: 54710 - RNA, 23 nt, synthetic construct
  source 1..23: mol_type = other RNA
gtgttcggcactgggggtgtgtg

SEQ ID NO: 54711 - RNA, 23 nt, synthetic construct
  source 1..23: mol_type = other RNA
gtgttcggcactgggggtgtgtg

SEQ ID NO: 54712 - RNA, 23 nt, synthetic construct
  source 1..23: mol_type = other RNA
gtgttcggcactgggggtgtgtg

SEQ ID NO: 54713 - RNA, 23 nt, synthetic construct
  source 1..23: mol_type = other RNA
ggatcggtcaggcgcgagcacca

SEQ ID NO: 54714 - RNA, 23 nt, synthetic construct
  source 1..23: mol_type = other RNA
aagatccccatgtagcgtatctt

SEQ ID NO: 54715 - RNA, 23 nt, synthetic construct
  source 1..23: mol_type = other RNA
caactcccgcagggggacaccag

SEQ ID NO: 54716 - RNA, 23 nt, synthetic construct
  source 1..23: mol_type = other RNA
ctcaaggctgtgagcgcactgga

SEQ ID NO: 54717 - RNA, 23 nt, synthetic construct
  source 1..23: mol_type = other RNA
tatcgtaggactcaacgtcccct

SEQ ID NO: 54718 - RNA, 23 nt, synthetic construct
  source 1..23: mol_type = other RNA
caactcccgcagggggacaccag

SEQ ID NO: 54719 - RNA, 23 nt, synthetic construct
  source 1..23: mol_type = other RNA
caactcccgcagggggacaccag

SEQ ID NO: 54720 - RNA, 23 nt, synthetic construct
  source 1..23: mol_type = other RNA
gttcacgcaggtgacgttggcca

SEQ ID NO: 54721 - RNA, 23 nt, synthetic construct
  source 1..23: mol_type = other RNA
ttcccaaactccagtgcgtcccc

SEQ ID NO: 54722 - RNA, 23 nt, synthetic construct
  source 1..23: mol_type = other RNA
gcggccctgatcttatcgtagga

SEQ ID NO: 54723 - RNA, 23 nt, synthetic construct
  source 1..23: mol_type = other RNA
ccggctcggtcggtcttattgta

SEQ ID NO: 54724 - RNA, 23 nt, synthetic construct
  source 1..23: mol_type = other RNA
cttgcaccgacgtcatagtagtt

SEQ ID NO: 54725 - RNA, 23 nt, synthetic construct
  source 1..23: mol_type = other RNA
ccgcagggggacaccaggctggg

SEQ ID NO: 54726 - RNA, 23 nt, synthetic construct
  source 1..23: mol_type = other RNA
ccgcagggggacaccaggctggg

SEQ ID NO: 54727 - RNA, 23 nt, synthetic construct
  source 1..23: mol_type = other RNA
ccgcagggggacaccaggctggg

SEQ ID NO: 54728 - RNA, 23 nt, synthetic construct
  source 1..23: mol_type = other RNA
gaagtcgtcagcctggttctggt

SEQ ID NO: 54729 - RNA, 23 nt, synthetic construct
  source 1..23: mol_type = other RNA
cttagcttcccacccgtacatga

SEQ ID NO: 54730 - RNA, 23 nt, synthetic construct
  source 1..23: mol_type = other RNA
ggaagatccccatgtagcgtatc

SEQ ID NO: 54731 - RNA, 23 nt, synthetic construct
  source 1..23: mol_type = other RNA
ggccacagggcacgtattcgcag

SEQ ID NO: 54732 - RNA, 23 nt, synthetic construct
  source 1..23: mol_type = other RNA
catccaccacgtaggcgtagcgc

SEQ ID NO: 54733 - RNA, 23 nt, synthetic construct
  source 1..23: mol_type = other RNA
tcggttgacagcgggtcgtgccc

SEQ ID NO: 54734 - RNA, 23 nt, synthetic construct
  source 1..23: mol_type = other RNA
gagtgctgggtggtaccggtggt

SEQ ID NO: 54735 - RNA, 23 nt, synthetic construct
  source 1..23: mol_type = other RNA
cactggaagcgtgcgtgccgtcc

SEQ ID NO: 54736 - RNA, 23 nt, synthetic construct
  source 1..23: mol_type = other RNA
gagtgctgggtggtaccggtggt

SEQ ID NO: 54737 - RNA, 23 nt, synthetic construct
  source 1..23: mol_type = other RNA
gagtgctgggtggtaccggtggt

SEQ ID NO: 54738 - RNA, 23 nt, synthetic construct
  source 1..23: mol_type = other RNA
cctcggcgtagctggacgttgaa

SEQ ID NO: 54739 - RNA, 23 nt, synthetic construct
  source 1..23: mol_type = other RNA
agcccactaggcctcggcgtagc

SEQ ID NO: 54740 - RNA, 23 nt, synthetic construct
  source 1..23: mol_type = other RNA
ggccagtgcggctgtaaggcagc

SEQ ID NO: 54741 - RNA, 23 nt, synthetic construct
  source 1..23: mol_type = other RNA
agtcaccatgcaggtcgtagagt

SEQ ID NO: 54742 - RNA, 23 nt, synthetic construct
  source 1..23: mol_type = other RNA
tggagttgaggaacacgccgccg

SEQ ID NO: 54743 - RNA, 23 nt, synthetic construct
  source 1..23: mol_type = other RNA
accacgtaggcgtagcgctggga

SEQ ID NO: 54744 - RNA, 23 nt, synthetic construct
  source 1..23: mol_type = other RNA
ttcaaagctgtagcgatcgccat

SEQ ID NO: 54745 - RNA, 23 nt, synthetic construct
  source 1..23: mol_type = other RNA
ccttcaaagctgtagcgatcgcc

SEQ ID NO: 54746 - RNA, 23 nt, synthetic construct
  source 1..23: mol_type = other RNA
gaacacgctggtcttccggtccc

SEQ ID NO: 54747 - RNA, 23 nt, synthetic construct
  source 1..23: mol_type = other RNA
aacccgcagctcgtagtcgtgac

SEQ ID NO: 54748 - RNA, 23 nt, synthetic construct
  source 1..23: mol_type = other RNA
tgtgcccaagctccccgtcgtcc

SEQ ID NO: 54749 - RNA, 23 nt, synthetic construct
  source 1..23: mol_type = other RNA
agtgttggcgccaggctcgtggt

SEQ ID NO: 54750 - RNA, 23 nt, synthetic construct
  source 1..23: mol_type = other RNA
caaggggctcattgtcgtctctg

SEQ ID NO: 54751 - RNA, 23 nt, synthetic construct
  source 1..23: mol_type = other RNA
gtcaaggggctcattgtcgtctc

SEQ ID NO: 54752 - RNA, 23 nt, synthetic construct
  source 1..23: mol_type = other RNA
aggggatgggtgtaacgctggta

SEQ ID NO: 54753 - RNA, 23 nt, synthetic construct
  source 1..23: mol_type = other RNA
gaggggatgggtgtaacgctggt

SEQ ID NO: 54754 - RNA, 23 nt, synthetic construct
  source 1..23: mol_type = other RNA
aggggatgggtgtaacgctggta

SEQ ID NO: 54755 - RNA, 23 nt, synthetic construct
  source 1..23: mol_type = other RNA
gaggggatgggtgtaacgctggt

SEQ ID NO: 54756 - RNA, 23 nt, synthetic construct
  source 1..23: mol_type = other RNA
gggctggctcgggtccgacactt

SEQ ID NO: 54757 - RNA, 23 nt, synthetic construct
  source 1..23: mol_type = other RNA
ggcagaggccgtgcagtagtggt

SEQ ID NO: 54758 - RNA, 23 nt, synthetic construct
  source 1..23: mol_type = other RNA
gcgcggcagagctctgcgtaagc

SEQ ID NO: 54759 - RNA, 23 nt, synthetic construct
  source 1..23: mol_type = other RNA
acggttacgaagccgggacggtt

SEQ ID NO: 54760 - RNA, 23 nt, synthetic construct
  source 1..23: mol_type = other RNA
ggtcacggttacgaagccgggac

SEQ ID NO: 54761 - RNA, 23 nt, synthetic construct
  source 1..23: mol_type = other RNA
tgtgttgcacacgcacaccgtct

SEQ ID NO: 54762 - RNA, 23 nt, synthetic construct
  source 1..23: mol_type = other RNA
agggacacataggcccgcacatg

SEQ ID NO: 54763 - RNA, 23 nt, synthetic construct
  source 1..23: mol_type = other RNA
acgtggccagctggaatccgtgc

SEQ ID NO: 54764 - RNA, 23 nt, synthetic construct
  source 1..23: mol_type = other RNA
cagccggttttcctgaggctccc

SEQ ID NO: 54765 - RNA, 23 nt, synthetic construct
  source 1..23: mol_type = other RNA
cccccgcgtgggcgcactggcgt

SEQ ID NO: 54766 - RNA, 23 nt, synthetic construct
  source 1..23: mol_type = other RNA
tgcgccgcccggcactcgatgtc

SEQ ID NO: 54767 - RNA, 23 nt, synthetic construct
  source 1..23: mol_type = other RNA
catagggtggtcttttcggttgc

SEQ ID NO: 54768 - RNA, 23 nt, synthetic construct
  source 1..23: mol_type = other RNA
cggcgtagctggacgttgaagtc

SEQ ID NO: 54769 - RNA, 23 nt, synthetic construct
  source 1..23: mol_type = other RNA
cccaccacggaccggctacgcgt

SEQ ID NO: 54770 - RNA, 23 nt, synthetic construct
  source 1..23: mol_type = other RNA
gtagtcagcactttggtagtgtg

SEQ ID NO: 54771 - RNA, 23 nt, synthetic construct
  source 1..23: mol_type = other RNA
ccatagggtggtcttttcggttg

SEQ ID NO: 54772 - RNA, 23 nt, synthetic construct
  source 1..23: mol_type = other RNA
cccactaggcctcggcgtagctg

SEQ ID NO: 54773 - RNA, 23 nt, synthetic construct
  source 1..23: mol_type = other RNA
ccacgatgaagaagctcgagggt

SEQ ID NO: 54774 - RNA, 23 nt, synthetic construct
  source 1..23: mol_type = other RNA
ctgagtacttggacgctccgggg

SEQ ID NO: 54775 - RNA, 23 nt, synthetic construct
  source 1..23: mol_type = other RNA
tcgtagtcgtgacagagcggggg

SEQ ID NO: 54776 - RNA, 23 nt, synthetic construct
  source 1..23: mol_type = other RNA
ggtggaacaaagctcacgcgccg

SEQ ID NO: 54777 - RNA, 23 nt, synthetic construct
  source 1..23: mol_type = other RNA
ttgcaccgacgtcatagtagttt

SEQ ID NO: 54778 - RNA, 23 nt, synthetic construct
  source 1..23: mol_type = other RNA
cagtgcgtggcactccgcaaagg

SEQ ID NO: 54779 - RNA, 23 nt, synthetic construct
  source 1..23: mol_type = other RNA
aggttgcaccaaccccgtagaag

SEQ ID NO: 54780 - RNA, 23 nt, synthetic construct
  source 1..23: mol_type = other RNA
gtgccattgtacgaacacagctg

SEQ ID NO: 54781 - RNA, 23 nt, synthetic construct
  source 1..23: mol_type = other RNA
gagaacccgcagctcgtagtcgt

SEQ ID NO: 54782 - RNA, 23 nt, synthetic construct
  source 1..23: mol_type = other RNA
cgccgtcgaccggatgctcgggg

SEQ ID NO: 54783 - RNA, 23 nt, synthetic construct
  source 1..23: mol_type = other RNA
tccccatgtagcgtatcttgtag

SEQ ID NO: 54784 - RNA, 23 nt, synthetic construct
  source 1..23: mol_type = other RNA
cgcagctcgtagtcgtgacagag

SEQ ID NO: 54785 - RNA, 23 nt, synthetic construct
  source 1..23: mol_type = other RNA
tccagcggccctgatcttatcgt

SEQ ID NO: 54786 - RNA, 23 nt, synthetic construct
  source 1..23: mol_type = other RNA
atccacactggaagcgtgcgtgc

SEQ ID NO: 54787 - RNA, 23 nt, synthetic construct
  source 1..23: mol_type = other RNA
tgggtgtaaagctggtagctgtg

SEQ ID NO: 54788 - RNA, 23 nt, synthetic construct
  source 1..23: mol_type = other RNA
tgggtgtaaagctggtagctgtg

SEQ ID NO: 54789 - RNA, 23 nt, synthetic construct
  source 1..23: mol_type = other RNA
ggctactcgtaggctgcggcgtt

SEQ ID NO: 54790 - RNA, 23 nt, synthetic construct
  source 1..23: mol_type = other RNA
ccggctacgcgtggcaaagtcat

SEQ ID NO: 54791 - RNA, 23 nt, synthetic construct
  source 1..23: mol_type = other RNA
accggctacgcgtggcaaagtca

SEQ ID NO: 54792 - RNA, 23 nt, synthetic construct
  source 1..23: mol_type = other RNA
ttgtgggcatagaactcgttgaa

SEQ ID NO: 54793 - RNA, 23 nt, synthetic construct
  source 1..23: mol_type = other RNA
cacagacacaagcacgccgttct

SEQ ID NO: 54794 - RNA, 23 nt, synthetic construct
  source 1..23: mol_type = other RNA
accagtgccgggcgtagttctca

SEQ ID NO: 54795 - RNA, 23 nt, synthetic construct
  source 1..23: mol_type = other RNA
gcatgtacttggtgcagacgccg

SEQ ID NO: 54796 - RNA, 23 nt, synthetic construct
  source 1..23: mol_type = other RNA
gatgcactcgcactcatagtgga

SEQ ID NO: 54797 - RNA, 23 nt, synthetic construct
  source 1..23: mol_type = other RNA
aaccgctgctcaccggaatttgg

SEQ ID NO: 54798 - RNA, 23 nt, synthetic construct
  source 1..23: mol_type = other RNA
tgttctcggtgacgatgcggaag

SEQ ID NO: 54799 - RNA, 23 nt, synthetic construct
  source 1..23: mol_type = other RNA
ggcttgtaggtggcctcgttgtg

SEQ ID NO: 54800 - RNA, 23 nt, synthetic construct
  source 1..23: mol_type = other RNA
ggcacacgcgtcgttcacgcagg

SEQ ID NO: 54801 - RNA, 23 nt, synthetic construct
  source 1..23: mol_type = other RNA
aggcacacgcgtcgttcacgcag

SEQ ID NO: 54802 - RNA, 23 nt, synthetic construct
  source 1..23: mol_type = other RNA
caggcacacgcgtcgttcacgca

SEQ ID NO: 54803 - RNA, 23 nt, synthetic construct
  source 1..23: mol_type = other RNA
tgtgggcatagaactcgttgaag

SEQ ID NO: 54804 - RNA, 23 nt, synthetic construct
  source 1..23: mol_type = other RNA
ggcagttctcgttgtccgtcagg

SEQ ID NO: 54805 - RNA, 23 nt, synthetic construct
  source 1..23: mol_type = other RNA
ggccacaggtctggttggcgtat

SEQ ID NO: 54806 - RNA, 23 nt, synthetic construct
  source 1..23: mol_type = other RNA
ggcaccgtctcctcgtggacccg

SEQ ID NO: 54807 - RNA, 23 nt, synthetic construct
  source 1..23: mol_type = other RNA
gaccggctacgcgtggcaaagtc

SEQ ID NO: 54808 - RNA, 23 nt, synthetic construct
  source 1..23: mol_type = other RNA
ctgatcttatcgtaggactcaac

SEQ ID NO: 54809 - RNA, 23 nt, synthetic construct
  source 1..23: mol_type = other RNA
acgatgcggaaggtcccgtgggt

SEQ ID NO: 54810 - RNA, 23 nt, synthetic construct
  source 1..23: mol_type = other RNA
tgaaaccgctgctcaccggaatt

SEQ ID NO: 54811 - RNA, 23 nt, synthetic construct
  source 1..23: mol_type = other RNA
gtccactcacacttcggttgaca

SEQ ID NO: 54812 - RNA, 23 nt, synthetic construct
  source 1..23: mol_type = other RNA
ggatgttctcggtgacgatgcgg

SEQ ID NO: 54813 - RNA, 23 nt, synthetic construct
  source 1..23: mol_type = other RNA
gctcaccggaatttggtcaaaca

SEQ ID NO: 54814 - RNA, 23 nt, synthetic construct
  source 1..23: mol_type = other RNA
cacaggtctggttggcgtatttg

SEQ ID NO: 54815 - RNA, 23 nt, synthetic construct
  source 1..23: mol_type = other RNA
gcagatgcactcgcactcatagt

SEQ ID NO: 54816 - RNA, 23 nt, synthetic construct
  source 1..23: mol_type = other RNA
ccaggctgcattccacgacctgg

SEQ ID NO: 54817 - RNA, 23 nt, synthetic construct
  source 1..23: mol_type = other RNA
ccaggctgcattccacgacctgg

SEQ ID NO: 54818 - RNA, 23 nt, synthetic construct
  source 1..23: mol_type = other RNA
ccaggctgcattccacgacctgg

SEQ ID NO: 54819 - RNA, 23 nt, synthetic construct
  source 1..23: mol_type = other RNA
ccaggctgcattccacgacctgg

SEQ ID NO: 54820 - RNA, 23 nt, synthetic construct
  source 1..23: mol_type = other RNA
cagccgtgcagaaacactcgcag

SEQ ID NO: 54821 - RNA, 23 nt, synthetic construct
  source 1..23: mol_type = other RNA
cgttgtgggcatagaactcgttg

SEQ ID NO: 54822 - RNA, 23 nt, synthetic construct
  source 1..23: mol_type = other RNA
ccccaccacggaccggctacgcg

SEQ ID NO: 54823 - RNA, 23 nt, synthetic construct
  source 1..23: mol_type = other RNA
tcccaaactccagtgcgtccccc

SEQ ID NO: 54824 - RNA, 23 nt, synthetic construct
  source 1..23: mol_type = other RNA
cttccgcagatggcgatcaagca

SEQ ID NO: 54825 - RNA, 23 nt, synthetic construct
  source 1..23: mol_type = other RNA
cgcggcagagctctgcgtaagcc

SEQ ID NO: 54826 - RNA, 23 nt, synthetic construct
  source 1..23: mol_type = other RNA
gcctcggcgtagctggacgttga

SEQ ID NO: 54827 - RNA, 23 nt, synthetic construct
  source 1..23: mol_type = other RNA
tgcttccgcagatggcgatcaag

SEQ ID NO: 54828 - RNA, 23 nt, synthetic construct
  source 1..23: mol_type = other RNA
cctgcacaccaggccgaagtgga

SEQ ID NO: 54829 - RNA, 23 nt, synthetic construct
  source 1..23: mol_type = other RNA
ccatcacggtggctatagtgctc

SEQ ID NO: 54830 - RNA, 23 nt, synthetic construct
  source 1..23: mol_type = other RNA
gcagccggctcggtcggtcttat

SEQ ID NO: 54831 - RNA, 23 nt, synthetic construct
  source 1..23: mol_type = other RNA
ccgcagctcgtagtcgtgacaga

SEQ ID NO: 54832 - RNA, 23 nt, synthetic construct
  source 1..23: mol_type = other RNA
gccatcccgtgggtctcgatgac

SEQ ID NO: 54833 - RNA, 23 nt, synthetic construct
  source 1..23: mol_type = other RNA
ctgggtgggcacttcgggtagca

SEQ ID NO: 54834 - RNA, 23 nt, synthetic construct
  source 1..23: mol_type = other RNA
gcttagcttcccacccgtacatg

SEQ ID NO: 54835 - RNA, 23 nt, synthetic construct
  source 1..23: mol_type = other RNA
ggtggccgtggcggtaagcactg

SEQ ID NO: 54836 - RNA, 23 nt, synthetic construct
  source 1..23: mol_type = other RNA
ggtggccgtggcggtaagcactg

SEQ ID NO: 54837 - RNA, 23 nt, synthetic construct
  source 1..23: mol_type = other RNA
cgacactgaaccctcgtcacaca

SEQ ID NO: 54838 - RNA, 23 nt, synthetic construct
  source 1..23: mol_type = other RNA
ccgtggatccagtggttgcggtc

SEQ ID NO: 54839 - RNA, 23 nt, synthetic construct
  source 1..23: mol_type = other RNA
ggtcagcactgtggcggtgtggg

SEQ ID NO: 54840 - RNA, 23 nt, synthetic construct
  source 1..23: mol_type = other RNA
ggggacagggatcgcccgtgtgt

SEQ ID NO: 54841 - RNA, 23 nt, synthetic construct
  source 1..23: mol_type = other RNA
ggtcagcactgtggcggtgtggg

SEQ ID NO: 54842 - RNA, 23 nt, synthetic construct
  source 1..23: mol_type = other RNA
ggggacagggatcgcccgtgtgt

SEQ ID NO: 54843 - RNA, 23 nt, synthetic construct
  source 1..23: mol_type = other RNA
tcgcaggcacacgcgtcgttcac

SEQ ID NO: 54844 - RNA, 23 nt, synthetic construct
  source 1..23: mol_type = other RNA
tgttctcagggtggaggtcgggg

SEQ ID NO: 54845 - RNA, 23 nt, synthetic construct
  source 1..23: mol_type = other RNA
ttgggatcggtcaggcgcgagca

SEQ ID NO: 54846 - RNA, 23 nt, synthetic construct
  source 1..23: mol_type = other RNA
aacacgctggtcttccggtccca

SEQ ID NO: 54847 - RNA, 23 nt, synthetic construct
  source 1..23: mol_type = other RNA
cgagtcgcaggcacacgcgtcgt

SEQ ID NO: 54848 - RNA, 23 nt, synthetic construct
  source 1..23: mol_type = other RNA
cacatcagcccccgcatgcggtc

SEQ ID NO: 54849 - RNA, 23 nt, synthetic construct
  source 1..23: mol_type = other RNA
gcacagacacaagcacgccgttc

SEQ ID NO: 54850 - RNA, 23 nt, synthetic construct
  source 1..23: mol_type = other RNA
ggccattgaaggtgacgctcacg

SEQ ID NO: 54851 - RNA, 23 nt, synthetic construct
  source 1..23: mol_type = other RNA
tgcacacgcacaccgtctcgggg

SEQ ID NO: 54852 - RNA, 23 nt, synthetic construct
  source 1..23: mol_type = other RNA
cgagtgctgggtggtaccggtgg

SEQ ID NO: 54853 - RNA, 23 nt, synthetic construct
  source 1..23: mol_type = other RNA
cgagtgctgggtggtaccggtgg

SEQ ID NO: 54854 - RNA, 23 nt, synthetic construct
  source 1..23: mol_type = other RNA
cgagtgctgggtggtaccggtgg

SEQ ID NO: 54855 - RNA, 23 nt, synthetic construct
  source 1..23: mol_type = other RNA
caccgacactgaaccctcgtcac

SEQ ID NO: 54856 - RNA, 23 nt, synthetic construct
  source 1..23: mol_type = other RNA
catcacggtggctatagtgctcg

SEQ ID NO: 54857 - RNA, 23 nt, synthetic construct
  source 1..23: mol_type = other RNA
cttggccattgaaggtgacgctc

SEQ ID NO: 54858 - RNA, 23 nt, synthetic construct
  source 1..23: mol_type = other RNA
atgcccatgtgtgcgttgaagag

SEQ ID NO: 54859 - RNA, 23 nt, synthetic construct
  source 1..23: mol_type = other RNA
cccaccgctccccgggaaattta

SEQ ID NO: 54860 - RNA, 23 nt, synthetic construct
  source 1..23: mol_type = other RNA
cacccgcccattgtgcgccgggt

SEQ ID NO: 54861 - RNA, 23 nt, synthetic construct
  source 1..23: mol_type = other RNA
cacacggcgccctcgtcgtgcac

SEQ ID NO: 54862 - RNA, 23 nt, synthetic construct
  source 1..23: mol_type = other RNA
tgccttcaaagctgtagcgatcg

SEQ ID NO: 54863 - RNA, 23 nt, synthetic construct
  source 1..23: mol_type = other RNA
gaaggcactgttgggatcggtca

SEQ ID NO: 54864 - RNA, 23 nt, synthetic construct
  source 1..23: mol_type = other RNA
cggccatcccgtgggtctcgatg

SEQ ID NO: 54865 - RNA, 23 nt, synthetic construct
  source 1..23: mol_type = other RNA
ggccgtggcagggacacataggc

SEQ ID NO: 54866 - RNA, 23 nt, synthetic construct
  source 1..23: mol_type = other RNA
ctgatccacactggaggcgtgag

SEQ ID NO: 54867 - RNA, 23 nt, synthetic construct
  source 1..23: mol_type = other RNA
ctgatccacactggaggcgtgag

SEQ ID NO: 54868 - RNA, 23 nt, synthetic construct
  source 1..23: mol_type = other RNA
ctgatccacactggaggcgtgcg

SEQ ID NO: 54869 - RNA, 23 nt, synthetic construct
  source 1..23: mol_type = other RNA
ctgatccacactggaggcgtgag

SEQ ID NO: 54870 - RNA, 23 nt, synthetic construct
  source 1..23: mol_type = other RNA
tggcggggttgtggcacgtcccc

SEQ ID NO: 54871 - RNA, 23 nt, synthetic construct
  source 1..23: mol_type = other RNA
ccttgatgtagtccccgctctgc

SEQ ID NO: 54872 - RNA, 23 nt, synthetic construct
  source 1..23: mol_type = other RNA
agaaggtgccattgtacgaacac

SEQ ID NO: 54873 - RNA, 23 nt, synthetic construct
  source 1..23: mol_type = other RNA
cgcaggcacacgcgtcgttcacg

SEQ ID NO: 54874 - RNA, 23 nt, synthetic construct
  source 1..23: mol_type = other RNA
tgctgcacacccgcccattgtgc

SEQ ID NO: 54875 - RNA, 23 nt, synthetic construct
  source 1..23: mol_type = other RNA
tggtgacagtgaggacgatatcc

SEQ ID NO: 54876 - RNA, 23 nt, synthetic construct
  source 1..23: mol_type = other RNA
tctctccaggcttgtaggtggcc

SEQ ID NO: 54877 - RNA, 23 nt, synthetic construct
  source 1..23: mol_type = other RNA
ggggacccttgcaccgacgtcat

SEQ ID NO: 54878 - RNA, 23 nt, synthetic construct
  source 1..23: mol_type = other RNA
cggcatgtcgggaagctgcgccg

SEQ ID NO: 54879 - RNA, 23 nt, synthetic construct
  source 1..23: mol_type = other RNA
tcctccagcggcatgtcgggaag

SEQ ID NO: 54880 - RNA, 23 nt, synthetic construct
  source 1..23: mol_type = other RNA
catgctgcagatgcactcgcact

SEQ ID NO: 54881 - RNA, 23 nt, synthetic construct
  source 1..23: mol_type = other RNA
ctctgacctggccgttgcgacct

SEQ ID NO: 54882 - RNA, 23 nt, synthetic construct
  source 1..23: mol_type = other RNA
tccaccacgtaggcgtagcgctg

SEQ ID NO: 54883 - RNA, 23 nt, synthetic construct
  source 1..23: mol_type = other RNA
ccctcctcgtccgtgcagttgcc

SEQ ID NO: 54884 - RNA, 23 nt, synthetic construct
  source 1..23: mol_type = other RNA
atccaccacgtaggcgtagcgct

SEQ ID NO: 54885 - RNA, 23 nt, synthetic construct
  source 1..23: mol_type = other RNA
ggccatcccgtgggtctcgatga

SEQ ID NO: 54886 - RNA, 23 nt, synthetic construct
  source 1..23: mol_type = other RNA
ctggacgttgaagtcctcgtagg

SEQ ID NO: 54887 - RNA, 23 nt, synthetic construct
  source 1..23: mol_type = other RNA
tgtcgtcgaagttcccgcacagg

SEQ ID NO: 54888 - RNA, 23 nt, synthetic construct
  source 1..23: mol_type = other RNA
gctcctccagcggcatgtcggga

SEQ ID NO: 54889 - RNA, 23 nt, synthetic construct
  source 1..23: mol_type = other RNA
tccacaaaggtggcacacgggca

SEQ ID NO: 54890 - RNA, 23 nt, synthetic construct
  source 1..23: mol_type = other RNA
ctgccttcaaagctgtagcgatc

SEQ ID NO: 54891 - RNA, 23 nt, synthetic construct
  source 1..23: mol_type = other RNA
tcagccccgggctactcgtaggc

SEQ ID NO: 54892 - RNA, 23 nt, synthetic construct
  source 1..23: mol_type = other RNA
ttctcagggtggaggtcggggtg

SEQ ID NO: 54893 - RNA, 23 nt, synthetic construct
  source 1..23: mol_type = other RNA
agatgcccgaggtggccgaagtc

SEQ ID NO: 54894 - RNA, 23 nt, synthetic construct
  source 1..23: mol_type = other RNA
agatgcccgaggtggccgaagtc

SEQ ID NO: 54895 - RNA, 23 nt, synthetic construct
  source 1..23: mol_type = other RNA
tggtgccacaggatggtcgtgtt

SEQ ID NO: 54896 - RNA, 23 nt, synthetic construct
  source 1..23: mol_type = other RNA
ctctgttggctgttggcgcacat

SEQ ID NO: 54897 - RNA, 23 nt, synthetic construct
  source 1..23: mol_type = other RNA
tgtggacagtctctggagtagag

SEQ ID NO: 54898 - RNA, 23 nt, synthetic construct
  source 1..23: mol_type = other RNA
gtctcattcacctgccggagagg

SEQ ID NO: 54899 - RNA, 23 nt, synthetic construct
  source 1..23: mol_type = other RNA
tgcagcagaacacacggatttca

SEQ ID NO: 54900 - RNA, 23 nt, synthetic construct
  source 1..23: mol_type = other RNA
tgcagcagaacacacggatttca

SEQ ID NO: 54901 - RNA, 23 nt, synthetic construct
  source 1..23: mol_type = other RNA
tgcagcagaacacacggatttca

SEQ ID NO: 54902 - RNA, 23 nt, synthetic construct
  source 1..23: mol_type = other RNA
tgcagcagaacacacggatttca

SEQ ID NO: 54903 - RNA, 23 nt, synthetic construct
  source 1..23: mol_type = other RNA
agtggccatccccgtaggccacg

SEQ ID NO: 54904 - RNA, 23 nt, synthetic construct
  source 1..23: mol_type = other RNA
cgtcgttcacgcaggcctcgtag

SEQ ID NO: 54905 - RNA, 23 nt, synthetic construct
  source 1..23: mol_type = other RNA
ccccgcagggctggtagtgccac

SEQ ID NO: 54906 - RNA, 23 nt, synthetic construct
  source 1..23: mol_type = other RNA
gtggtggccgtggtggtaagcac

SEQ ID NO: 54907 - RNA, 23 nt, synthetic construct
  source 1..23: mol_type = other RNA
gtggtggccgtggtggtaagcac

SEQ ID NO: 54908 - RNA, 23 nt, synthetic construct
  source 1..23: mol_type = other RNA
agaggggatgggtgtaacgctgg

SEQ ID NO: 54909 - RNA, 23 nt, synthetic construct
  source 1..23: mol_type = other RNA
ggaggggatgggtgtaacgctgg

SEQ ID NO: 54910 - RNA, 23 nt, synthetic construct
  source 1..23: mol_type = other RNA
aggaagatccccatgtagcgtat

SEQ ID NO: 54911 - RNA, 23 nt, synthetic construct
  source 1..23: mol_type = other RNA
gtgctgattgcacactgcgtaga

SEQ ID NO: 54912 - RNA, 23 nt, synthetic construct
  source 1..23: mol_type = other RNA
aagacgtcgccgtcgaaggtctt

SEQ ID NO: 54913 - RNA, 23 nt, synthetic construct
  source 1..23: mol_type = other RNA
aagcggaagacgtcgccgtcgaa

SEQ ID NO: 54914 - RNA, 23 nt, synthetic construct
  source 1..23: mol_type = other RNA
gtcaaacatgcagttcgagtgga

SEQ ID NO: 54915 - RNA, 23 nt, synthetic construct
  source 1..23: mol_type = other RNA
ggtgtcaaacatgcagttcgagt

SEQ ID NO: 54916 - RNA, 23 nt, synthetic construct
  source 1..23: mol_type = other RNA
gcctcacagaggtacacggtgca

SEQ ID NO: 54917 - RNA, 23 nt, synthetic construct
  source 1..23: mol_type = other RNA
cgtcgccgtcgaaggtcttgtag

SEQ ID NO: 54918 - RNA, 23 nt, synthetic construct
  source 1..23: mol_type = other RNA
gggacggttgcacggcgggggct

SEQ ID NO: 54919 - RNA, 23 nt, synthetic construct
  source 1..23: mol_type = other RNA
cagtcaccatgcaggtcgtagag

SEQ ID NO: 54920 - RNA, 23 nt, synthetic construct
  source 1..23: mol_type = other RNA
catgtagcgtatcttgtagggtg

SEQ ID NO: 54921 - RNA, 23 nt, synthetic construct
  source 1..23: mol_type = other RNA
gatggctgagccgttaggacagt

SEQ ID NO: 54922 - RNA, 23 nt, synthetic construct
  source 1..23: mol_type = other RNA
gaaggtgccattgtacgaacaca

SEQ ID NO: 54923 - RNA, 23 nt, synthetic construct
  source 1..23: mol_type = other RNA
ctcacagaggtacacggtgcagt

SEQ ID NO: 54924 - RNA, 23 nt, synthetic construct
  source 1..23: mol_type = other RNA
gaagcggaagacgtcgccgtcga

SEQ ID NO: 54925 - RNA, 23 nt, synthetic construct
  source 1..23: mol_type = other RNA
tgtggtggccgtggcggtaagca

SEQ ID NO: 54926 - RNA, 23 nt, synthetic construct
  source 1..23: mol_type = other RNA
tgtggtggccgtggcggtaagca

SEQ ID NO: 54927 - RNA, 23 nt, synthetic construct
  source 1..23: mol_type = other RNA
gccacagggcacgtattcgcagc

SEQ ID NO: 54928 - RNA, 23 nt, synthetic construct
  source 1..23: mol_type = other RNA
agaaggcactgttgggatcggtc

SEQ ID NO: 54929 - RNA, 23 nt, synthetic construct
  source 1..23: mol_type = other RNA
acgtcatagtagtttccgtcctt

SEQ ID NO: 54930 - RNA, 23 nt, synthetic construct
  source 1..23: mol_type = other RNA
ccctccggccgcacggatgttgg

SEQ ID NO: 54931 - RNA, 23 nt, synthetic construct
  source 1..23: mol_type = other RNA
ccctccggccgcacggatgttgg

SEQ ID NO: 54932 - RNA, 23 nt, synthetic construct
  source 1..23: mol_type = other RNA
ccctccggccgcacggatgttgg

SEQ ID NO: 54933 - RNA, 23 nt, synthetic construct
  source 1..23: mol_type = other RNA
ccctccggccgcacggatgttgg

SEQ ID NO: 54934 - RNA, 23 nt, synthetic construct
  source 1..23: mol_type = other RNA
ggtgccattgtacgaacacagct

SEQ ID NO: 54935 - RNA, 23 nt, synthetic construct
  source 1..23: mol_type = other RNA
tcctgacattgcaccgttgggtc

SEQ ID NO: 54936 - RNA, 23 nt, synthetic construct
  source 1..23: mol_type = other RNA
caggatggctgagccgttaggac

SEQ ID NO: 54937 - RNA, 23 nt, synthetic construct
  source 1..23: mol_type = other RNA
tgggtgtaacgctggtagctgtg

SEQ ID NO: 54938 - RNA, 23 nt, synthetic construct
  source 1..23: mol_type = other RNA
gtggttattggggccgatgtggg

SEQ ID NO: 54939 - RNA, 23 nt, synthetic construct
  source 1..23: mol_type = other RNA
tgggtgtaacgctggtagctgtg

SEQ ID NO: 54940 - RNA, 23 nt, synthetic construct
  source 1..23: mol_type = other RNA
cagctcgctcgtgagtgttggcg

SEQ ID NO: 54941 - RNA, 23 nt, synthetic construct
  source 1..23: mol_type = other RNA
tggacgttgaagtcctcgtaggc

SEQ ID NO: 54942 - RNA, 23 nt, synthetic construct
  source 1..23: mol_type = other RNA
gctcggtcggtcttattgtagat

SEQ ID NO: 54943 - RNA, 23 nt, synthetic construct
  source 1..23: mol_type = other RNA
ggcaccgccatccatggtgtgcc

SEQ ID NO: 54944 - RNA, 23 nt, synthetic construct
  source 1..23: mol_type = other RNA
tggccgtgatcgtagtggccgtg

SEQ ID NO: 54945 - RNA, 23 nt, synthetic construct
  source 1..23: mol_type = other RNA
tggccgtgatcgtagtggccgtg

SEQ ID NO: 54946 - RNA, 23 nt, synthetic construct
  source 1..23: mol_type = other RNA
tggccgtgatcgtagtggccgtg

SEQ ID NO: 54947 - RNA, 23 nt, synthetic construct
  source 1..23: mol_type = other RNA
tggccgtgatcgtagtggccgtg

SEQ ID NO: 54948 - RNA, 23 nt, synthetic construct
  source 1..23: mol_type = other RNA
gaacccgcagctcgtagtcgtga

SEQ ID NO: 54949 - RNA, 23 nt, synthetic construct
  source 1..23: mol_type = other RNA
caccacgtaggcgtagcgctggg

SEQ ID NO: 54950 - RNA, 23 nt, synthetic construct
  source 1..23: mol_type = other RNA
aggtgagggccgccgtcgaccgg

SEQ ID NO: 54951 - RNA, 23 nt, synthetic construct
  source 1..23: mol_type = other RNA
cagccccgggctactcgtaggct

SEQ ID NO: 54952 - RNA, 23 nt, synthetic construct
  source 1..23: mol_type = other RNA
ctggaagcgtgcgtgccgtccct

SEQ ID NO: 54953 - RNA, 23 nt, synthetic construct
  source 1..23: mol_type = other RNA
tgggatcggtcaggcgcgagcac

SEQ ID NO: 54954 - RNA, 23 nt, synthetic construct
  source 1..23: mol_type = other RNA
ccaccacgtaggcgtagcgctgg

SEQ ID NO: 54955 - RNA, 23 nt, synthetic construct
  source 1..23: mol_type = other RNA
cagtcgccacccgagtcgcaggc

SEQ ID NO: 54956 - RNA, 23 nt, synthetic construct
  source 1..23: mol_type = other RNA
tgggtgggcacttcgggtagcag

SEQ ID NO: 54957 - RNA, 23 nt, synthetic construct
  source 1..23: mol_type = other RNA
ccgagggggtgaccgtcacgggg

SEQ ID NO: 54958 - RNA, 23 nt, synthetic construct
  source 1..23: mol_type = other RNA
ctcgtgagtgttggcgccaggct

SEQ ID NO: 54959 - RNA, 23 nt, synthetic construct
  source 1..23: mol_type = other RNA
ggatgggtgtaacgctggtagct

SEQ ID NO: 54960 - RNA, 23 nt, synthetic construct
  source 1..23: mol_type = other RNA
tggtctgtgataggcgggtccag

SEQ ID NO: 54961 - RNA, 23 nt, synthetic construct
  source 1..23: mol_type = other RNA
ctggaggcgtgagtgccgtccct

SEQ ID NO: 54962 - RNA, 23 nt, synthetic construct
  source 1..23: mol_type = other RNA
ccggtggccgtgatcgtagtggc

SEQ ID NO: 54963 - RNA, 23 nt, synthetic construct
  source 1..23: mol_type = other RNA
tggtctgtgataggcgggtccag

SEQ ID NO: 54964 - RNA, 23 nt, synthetic construct
  source 1..23: mol_type = other RNA
ccggtggccgtgatcgtagtggc

SEQ ID NO: 54965 - RNA, 23 nt, synthetic construct
  source 1..23: mol_type = other RNA
tcagcactggggggataggtgtt

SEQ ID NO: 54966 - RNA, 23 nt, synthetic construct
  source 1..23: mol_type = other RNA
tggtctgtgataggcgggtccag

SEQ ID NO: 54967 - RNA, 23 nt, synthetic construct
  source 1..23: mol_type = other RNA
ctggaggcgtgagtgccgtccct

SEQ ID NO: 54968 - RNA, 23 nt, synthetic construct
  source 1..23: mol_type = other RNA
tggtctgtgataggcgggtccag

SEQ ID NO: 54969 - RNA, 23 nt, synthetic construct
  source 1..23: mol_type = other RNA
ccggtggccgtgatcgtagtggc

SEQ ID NO: 54970 - RNA, 23 nt, synthetic construct
  source 1..23: mol_type = other RNA
tcagcactggggggataggtgtt

SEQ ID NO: 54971 - RNA, 23 nt, synthetic construct
  source 1..23: mol_type = other RNA
ggatgggtgtaacgctggtagct

SEQ ID NO: 54972 - RNA, 23 nt, synthetic construct
  source 1..23: mol_type = other RNA
tggtctgtgataggcgggtccag

SEQ ID NO: 54973 - RNA, 23 nt, synthetic construct
  source 1..23: mol_type = other RNA
ctggaggcgtgagtgccgtccct

SEQ ID NO: 54974 - RNA, 23 nt, synthetic construct
  source 1..23: mol_type = other RNA
ccggtggccgtgatcgtagtggc

SEQ ID NO: 54975 - RNA, 23 nt, synthetic construct
  source 1..23: mol_type = other RNA
tgtgctgggacggtccacgtggt

SEQ ID NO: 54976 - RNA, 23 nt, synthetic construct
  source 1..23: mol_type = other RNA
gcggcagagctctgcgtaagcct

SEQ ID NO: 54977 - RNA, 23 nt, synthetic construct
  source 1..23: mol_type = other RNA
aggccaccggttgcacctcgcca

SEQ ID NO: 54978 - RNA, 23 nt, synthetic construct
  source 1..23: mol_type = other RNA
acacgcacaccgtctcggggcag

SEQ ID NO: 54979 - RNA, 23 nt, synthetic construct
  source 1..23: mol_type = other RNA
ggaaggttgcaccaaccccgtag

SEQ ID NO: 54980 - RNA, 23 nt, synthetic construct
  source 1..23: mol_type = other RNA
acctcgcggacacacacggtgga

SEQ ID NO: 54981 - RNA, 23 nt, synthetic construct
  source 1..23: mol_type = other RNA
gcaggatggctgagccgttagga

SEQ ID NO: 54982 - RNA, 23 nt, synthetic construct
  source 1..23: mol_type = other RNA
ctggaggcgtgcgtgccgtccct

SEQ ID NO: 54983 - RNA, 23 nt, synthetic construct
  source 1..23: mol_type = other RNA
agcccgtggttgtggtagtcagc

SEQ ID NO: 54984 - RNA, 23 nt, synthetic construct
  source 1..23: mol_type = other RNA
agcccgtggttgtggtagtcggc

SEQ ID NO: 54985 - RNA, 23 nt, synthetic construct
  source 1..23: mol_type = other RNA
agcccgtggttgtggtagtcggc

SEQ ID NO: 54986 - RNA, 23 nt, synthetic construct
  source 1..23: mol_type = other RNA
agcccgtggttgtggtagtcggc

SEQ ID NO: 54987 - RNA, 23 nt, synthetic construct
  source 1..23: mol_type = other RNA
gcgttgaagaatgggcccggggg

SEQ ID NO: 54988 - RNA, 23 nt, synthetic construct
  source 1..23: mol_type = other RNA
aaatttaggaaacccatcgggtc

SEQ ID NO: 54989 - RNA, 23 nt, synthetic construct
  source 1..23: mol_type = other RNA
cacggtggctatagtgctcggct

SEQ ID NO: 54990 - RNA, 23 nt, synthetic construct
  source 1..23: mol_type = other RNA
gtggagcctgcaggcgtcgtggg

SEQ ID NO: 54991 - RNA, 23 nt, synthetic construct
  source 1..23: mol_type = other RNA
cagggtcgaggtgcgggtcttgc

SEQ ID NO: 54992 - RNA, 23 nt, synthetic construct
  source 1..23: mol_type = other RNA
cagggtcgaggtgcgggtcttgc

SEQ ID NO: 54993 - RNA, 23 nt, synthetic construct
  source 1..23: mol_type = other RNA
cagggtcgaggtgcgggtcttgc

SEQ ID NO: 54994 - RNA, 23 nt, synthetic construct
  source 1..23: mol_type = other RNA
cagggtcgaggtgcgggtcttgc

SEQ ID NO: 54995 - RNA, 23 nt, synthetic construct
  source 1..23: mol_type = other RNA
cagcttagcttcccacccgtaca

SEQ ID NO: 54996 - RNA, 23 nt, synthetic construct
  source 1..23: mol_type = other RNA
gtcatagtagtttccgtccttgt

SEQ ID NO: 54997 - RNA, 23 nt, synthetic construct
  source 1..23: mol_type = other RNA
gcataagtgccctccagcggccc

SEQ ID NO: 54998 - RNA, 23 nt, synthetic construct
  source 1..23: mol_type = other RNA
ggcataagtgccctccagcggcc

SEQ ID NO: 54999 - RNA, 23 nt, synthetic construct
  source 1..23: mol_type = other RNA
gctgagtacttggacgctccggg

SEQ ID NO: 55000 - RNA, 23 nt, synthetic construct
  source 1..23: mol_type = other RNA
atgacttccccgggcgagaaaaa

SEQ ID NO: 55001 - RNA, 23 nt, synthetic construct
  source 1..23: mol_type = other RNA
gtggacagctcgctcgtgagtgt

SEQ ID NO: 55002 - RNA, 23 nt, synthetic construct
  source 1..23: mol_type = other RNA
agcacggtgccgtgagcgtagca

SEQ ID NO: 55003 - RNA, 23 nt, synthetic construct
  source 1..23: mol_type = other RNA
atggagttgaggaacacgccgcc

SEQ ID NO: 55004 - RNA, 23 nt, synthetic construct
  source 1..23: mol_type = other RNA
ttccacaaaggtggcacacgggc

SEQ ID NO: 55005 - RNA, 23 nt, synthetic construct
  source 1..23: mol_type = other RNA
agccggtggccgtgatcgtagtg

SEQ ID NO: 55006 - RNA, 23 nt, synthetic construct
  source 1..23: mol_type = other RNA
agccggtggccgtgatcgtagtg

SEQ ID NO: 55007 - RNA, 23 nt, synthetic construct
  source 1..23: mol_type = other RNA
agccggtggccgtgatcgtagtg

SEQ ID NO: 55008 - RNA, 23 nt, synthetic construct
  source 1..23: mol_type = other RNA
agccggtggccgtgatcgtagtg

SEQ ID NO: 55009 - RNA, 23 nt, synthetic construct
  source 1..23: mol_type = other RNA
gccattgtacgaacacagctgag

SEQ ID NO: 55010 - RNA, 23 nt, synthetic construct
  source 1..23: mol_type = other RNA
ccgtccgcttggacccggatggc

SEQ ID NO: 55011 - RNA, 23 nt, synthetic construct
  source 1..23: mol_type = other RNA
gtcacggttacgaagccgggacg

SEQ ID NO: 55012 - RNA, 23 nt, synthetic construct
  source 1..23: mol_type = other RNA
ccttgcaccgacgtcatagtagt

SEQ ID NO: 55013 - RNA, 23 nt, synthetic construct
  source 1..23: mol_type = other RNA
gggacccttgcaccgacgtcata

SEQ ID NO: 55014 - RNA, 23 nt, synthetic construct
  source 1..23: mol_type = other RNA
cctcttggaggatcagctcgtag

SEQ ID NO: 55015 - RNA, 23 nt, synthetic construct
  source 1..23: mol_type = other RNA
ccgtggttattggggccgatgtg

SEQ ID NO: 55016 - RNA, 23 nt, synthetic construct
  source 1..23: mol_type = other RNA
gcaggtggcaggctgtatggggc

SEQ ID NO: 55017 - RNA, 23 nt, synthetic construct
  source 1..23: mol_type = other RNA
ggtgccacaggatggtcgtgttg

SEQ ID NO: 55018 - RNA, 23 nt, synthetic construct
  source 1..23: mol_type = other RNA
atgttgagggggcaggtccgggg

SEQ ID NO: 55019 - RNA, 23 nt, synthetic construct
  source 1..23: mol_type = other RNA
gtggttatgggggccgatgtggg

SEQ ID NO: 55020 - RNA, 23 nt, synthetic construct
  source 1..23: mol_type = other RNA
tgatccacactggaagcgtgcgt

SEQ ID NO: 55021 - RNA, 23 nt, synthetic construct
  source 1..23: mol_type = other RNA
gtggttatgggggccgatgtggg

SEQ ID NO: 55022 - RNA, 23 nt, synthetic construct
  source 1..23: mol_type = other RNA
gtggttatgggggccgatgtggg

SEQ ID NO: 55023 - RNA, 23 nt, synthetic construct
  source 1..23: mol_type = other RNA
tggtcacggttacgaagccggga

SEQ ID NO: 55024 - RNA, 23 nt, synthetic construct
  source 1..23: mol_type = other RNA
cacataggcccgcacatgcttag

SEQ ID NO: 55025 - RNA, 23 nt, synthetic construct
  source 1..23: mol_type = other RNA
tcgtaggctgcggcgttgagaac

SEQ ID NO: 55026 - RNA, 23 nt, synthetic construct
  source 1..23: mol_type = other RNA
gcacggtgccgtgagcgtagcag

SEQ ID NO: 55027 - RNA, 23 nt, synthetic construct
  source 1..23: mol_type = other RNA
gtggcggggttgtggcacgtccc

SEQ ID NO: 55028 - RNA, 23 nt, synthetic construct
  source 1..23: mol_type = other RNA
gcgttgtgggcatagaactcgtt

SEQ ID NO: 55029 - RNA, 23 nt, synthetic construct
  source 1..23: mol_type = other RNA
ctctcgccaccgccttaaaggtc

SEQ ID NO: 55030 - RNA, 23 nt, synthetic construct
  source 1..23: mol_type = other RNA
gctcgtagtcgtgacagagcggg

SEQ ID NO: 55031 - RNA, 23 nt, synthetic construct
  source 1..23: mol_type = other RNA
acacggttgtcacccacgcacct

SEQ ID NO: 55032 - RNA, 23 nt, synthetic construct
  source 1..23: mol_type = other RNA
gtggccgtgatcgtagtggccgt

SEQ ID NO: 55033 - RNA, 23 nt, synthetic construct
  source 1..23: mol_type = other RNA
gtggccgtgatcgtagtggccgt

SEQ ID NO: 55034 - RNA, 23 nt, synthetic construct
  source 1..23: mol_type = other RNA
gtggccgtgatcgtagtggccgt

SEQ ID NO: 55035 - RNA, 23 nt, synthetic construct
  source 1..23: mol_type = other RNA
gtggccgtgatcgtagtggccgt

SEQ ID NO: 55036 - RNA, 23 nt, synthetic construct
  source 1..23: mol_type = other RNA
ccgacactgaaccctcgtcacac

SEQ ID NO: 55037 - RNA, 23 nt, synthetic construct
  source 1..23: mol_type = other RNA
gttgatgcggacttgacaggagt

SEQ ID NO: 55038 - RNA, 23 nt, synthetic construct
  source 1..23: mol_type = other RNA
ctgtcggcacatttcttggacag

SEQ ID NO: 55039 - RNA, 23 nt, synthetic construct
  source 1..23: mol_type = other RNA
aggccgaagtggacgtcacagtg

SEQ ID NO: 55040 - RNA, 23 nt, synthetic construct
  source 1..23: mol_type = other RNA
cacggttgtcacccacgcacctg

SEQ ID NO: 55041 - RNA, 23 nt, synthetic construct
  source 1..23: mol_type = other RNA
cactaggcctcggcgtagctgga

SEQ ID NO: 55042 - RNA, 23 nt, synthetic construct
  source 1..23: mol_type = other RNA
gcaccgacgtcatagtagtttcc

SEQ ID NO: 55043 - RNA, 23 nt, synthetic construct
  source 1..23: mol_type = other RNA
aggacgacacggttgtcacccac

SEQ ID NO: 55044 - RNA, 23 nt, synthetic construct
  source 1..23: mol_type = other RNA
ggacggttgcacggcgggggctg

SEQ ID NO: 55045 - RNA, 23 nt, synthetic construct
  source 1..23: mol_type = other RNA
agcttagcttcccacccgtacat

SEQ ID NO: 55046 - RNA, 23 nt, synthetic construct
  source 1..23: mol_type = other RNA
tttccgtccttgtcgtagcagcc

SEQ ID NO: 55047 - RNA, 23 nt, synthetic construct
  source 1..23: mol_type = other RNA
agtcggcactttggtagtgtgag

SEQ ID NO: 55048 - RNA, 23 nt, synthetic construct
  source 1..23: mol_type = other RNA
agtcggcactttggtagtgtgag

SEQ ID NO: 55049 - RNA, 23 nt, synthetic construct
  source 1..23: mol_type = other RNA
agtcggcactttggtagtgtgag

SEQ ID NO: 55050 - RNA, 23 nt, synthetic construct
  source 1..23: mol_type = other RNA
gctcgctcgtgagtgttggcgcc

SEQ ID NO: 55051 - RNA, 23 nt, synthetic construct
  source 1..23: mol_type = other RNA
gtcgcacaggccaccggttgcac

SEQ ID NO: 55052 - RNA, 23 nt, synthetic construct
  source 1..23: mol_type = other RNA
ccgtcgaccggatgctcggggtc

SEQ ID NO: 55053 - RNA, 23 nt, synthetic construct
  source 1..23: mol_type = other RNA
gtagcgatcgccatcaaaggtga

SEQ ID NO: 55054 - RNA, 23 nt, synthetic construct
  source 1..23: mol_type = other RNA
cgtcgaccggatgctcggggtca

SEQ ID NO: 55055 - RNA, 23 nt, synthetic construct
  source 1..23: mol_type = other RNA
gtagtcgtgacagagcgggggac

SEQ ID NO: 55056 - RNA, 23 nt, synthetic construct
  source 1..23: mol_type = other RNA
gcggacttgacaggagtcctcct

SEQ ID NO: 55057 - RNA, 23 nt, synthetic construct
  source 1..23: mol_type = other RNA
ccgttaggacagtgcaagggcac

SEQ ID NO: 55058 - RNA, 23 nt, synthetic construct
  source 1..23: mol_type = other RNA
cttcggttgacagcgggtcgtgc

SEQ ID NO: 55059 - RNA, 23 nt, synthetic construct
  source 1..23: mol_type = other RNA
gcagttgccggccggcaagggca

SEQ ID NO: 55060 - RNA, 23 nt, synthetic construct
  source 1..23: mol_type = other RNA
accaaccccgtagaaggtgccat

SEQ ID NO: 55061 - RNA, 23 nt, synthetic construct
  source 1..23: mol_type = other RNA
tggtcgtgttgatgcggacttga

SEQ ID NO: 55062 - RNA, 23 nt, synthetic construct
  source 1..23: mol_type = other RNA
cgtccgcttggacccggatggcc

SEQ ID NO: 55063 - RNA, 23 nt, synthetic construct
  source 1..23: mol_type = other RNA
gcagtcgaccctgatggtctctc

SEQ ID NO: 55064 - RNA, 23 nt, synthetic construct
  source 1..23: mol_type = other RNA
tgtagcgatcgccatcaaaggtg

SEQ ID NO: 55065 - RNA, 23 nt, synthetic construct
  source 1..23: mol_type = other RNA
tagtcgtgacagagcgggggact

SEQ ID NO: 55066 - RNA, 23 nt, synthetic construct
  source 1..23: mol_type = other RNA
cgtagtcgtgacagagcggggga

SEQ ID NO: 55067 - RNA, 23 nt, synthetic construct
  source 1..23: mol_type = other RNA
cacttcggttgacagcgggtcgt

SEQ ID NO: 55068 - RNA, 23 nt, synthetic construct
  source 1..23: mol_type = other RNA
gggtgtaacgctggtagctgtgg

SEQ ID NO: 55069 - RNA, 23 nt, synthetic construct
  source 1..23: mol_type = other RNA
gggtgtaacgctggtagctgtgg

SEQ ID NO: 55070 - RNA, 23 nt, synthetic construct
  source 1..23: mol_type = other RNA
cccgggcgagaaaaactgtccaa

SEQ ID NO: 55071 - RNA, 23 nt, synthetic construct
  source 1..23: mol_type = other RNA
ttacgaagccgggacggttgcac

SEQ ID NO: 55072 - RNA, 23 nt, synthetic construct
  source 1..23: mol_type = other RNA
ggttacgaagccgggacggttgc

SEQ ID NO: 55073 - RNA, 23 nt, synthetic construct
  source 1..23: mol_type = other RNA
gcctggtcacggttacgaagccg

SEQ ID NO: 55074 - RNA, 23 nt, synthetic construct
  source 1..23: mol_type = other RNA
ttgtacgaacacagctgaggtct

SEQ ID NO: 55075 - RNA, 23 nt, synthetic construct
  source 1..23: mol_type = other RNA
ttgatgcggacttgacaggagtc

SEQ ID NO: 55076 - RNA, 23 nt, synthetic construct
  source 1..23: mol_type = other RNA
ctggccgttgcgacctcagccct

SEQ ID NO: 55077 - RNA, 23 nt, synthetic construct
  source 1..23: mol_type = other RNA
ccgctccccgggaaatttaggaa

SEQ ID NO: 55078 - RNA, 23 nt, synthetic construct
  source 1..23: mol_type = other RNA
ttccgtccttgtcgtagcagcca

SEQ ID NO: 55079 - RNA, 23 nt, synthetic construct
  source 1..23: mol_type = other RNA
gctccccgggaaatttaggaaac

SEQ ID NO: 55080 - RNA, 23 nt, synthetic construct
  source 1..23: mol_type = other RNA
taccggtggttgctgctagggtg

SEQ ID NO: 55081 - RNA, 23 nt, synthetic construct
  source 1..23: mol_type = other RNA
ccactaggcctcggcgtagctgg

SEQ ID NO: 55082 - RNA, 23 nt, synthetic construct
  source 1..23: mol_type = other RNA
gttgcggtcgtagtggctgctgt

SEQ ID NO: 55083 - RNA, 23 nt, synthetic construct
  source 1..23: mol_type = other RNA
gaatagtgggagccgccccacat

SEQ ID NO: 55084 - RNA, 23 nt, synthetic construct
  source 1..23: mol_type = other RNA
ccgggaaatttaggaaacccatc

SEQ ID NO: 55085 - RNA, 23 nt, synthetic construct
  source 1..23: mol_type = other RNA
tcggtcggtcttattgtagatga

SEQ ID NO: 55086 - RNA, 23 nt, synthetic construct
  source 1..23: mol_type = other RNA
ccgtgatcgtagtggccgtggtg

SEQ ID NO: 55087 - RNA, 23 nt, synthetic construct
  source 1..23: mol_type = other RNA
ccgtgatcgtagtggccgtggtg

SEQ ID NO: 55088 - RNA, 23 nt, synthetic construct
  source 1..23: mol_type = other RNA
ccgtgatcgtagtggccgtggtg

SEQ ID NO: 55089 - RNA, 23 nt, synthetic construct
  source 1..23: mol_type = other RNA
ccgtgatcgtagtggccgtggtg

SEQ ID NO: 55090 - RNA, 23 nt, synthetic construct
  source 1..23: mol_type = other RNA
ctccggccgcacggatgttggag

SEQ ID NO: 55091 - RNA, 23 nt, synthetic construct
  source 1..23: mol_type = other RNA
ctccggccgcacggatgttggag

SEQ ID NO: 55092 - RNA, 23 nt, synthetic construct
  source 1..23: mol_type = other RNA
ctccggccgcacggatgttggag

SEQ ID NO: 55093 - RNA, 23 nt, synthetic construct
  source 1..23: mol_type = other RNA
ctccggccgcacggatgttggag

SEQ ID NO: 55094 - RNA, 23 nt, synthetic construct
  source 1..23: mol_type = other RNA
ggacggagccgttggacgcctcc

SEQ ID NO: 55095 - RNA, 23 nt, synthetic construct
  source 1..23: mol_type = other RNA
ggcgatcaagcaggcgccaagcc

SEQ ID NO: 55096 - RNA, 23 nt, synthetic construct
  source 1..23: mol_type = other RNA
acgacacggttgtcacccacgca

SEQ ID NO: 55097 - RNA, 23 nt, synthetic construct
  source 1..23: mol_type = other RNA
tgctagacaccggggctgcgggg

SEQ ID NO: 55098 - RNA, 23 nt, synthetic construct
  source 1..23: mol_type = other RNA
cccgcacatgcttagtttgttcc

SEQ ID NO: 55099 - RNA, 23 nt, synthetic construct
  source 1..23: mol_type = other RNA
cggctcggtcggtcttattgtag

SEQ ID NO: 55100 - RNA, 23 nt, synthetic construct
  source 1..23: mol_type = other RNA
cacacgcacaccgtctcggggca

SEQ ID NO: 55101 - RNA, 23 nt, synthetic construct
  source 1..23: mol_type = other RNA
cagcgtccggcacgcgctcgggg

SEQ ID NO: 55102 - RNA, 23 nt, synthetic construct
  source 1..23: mol_type = other RNA
ccccatgtagcgtatcttgtagg

SEQ ID NO: 55103 - RNA, 23 nt, synthetic construct
  source 1..23: mol_type = other RNA
ggcgtagcgctgggacttggggc

SEQ ID NO: 55104 - RNA, 23 nt, synthetic construct
  source 1..23: mol_type = other RNA
gtcgtgacagagcgggggactct

SEQ ID NO: 55105 - RNA, 23 nt, synthetic construct
  source 1..23: mol_type = other RNA
gtggtagttggcactttggtagt

SEQ ID NO: 55106 - RNA, 23 nt, synthetic construct
  source 1..23: mol_type = other RNA
gatcgcccgtgtgtggtggccat

SEQ ID NO: 55107 - RNA, 23 nt, synthetic construct
  source 1..23: mol_type = other RNA
caccaccgtggttatgggggccg

SEQ ID NO: 55108 - RNA, 23 nt, synthetic construct
  source 1..23: mol_type = other RNA
ggccgcacggatgttggagtagg

SEQ ID NO: 55109 - RNA, 23 nt, synthetic construct
  source 1..23: mol_type = other RNA
gatcgcccgtgtgtggtggccgt

SEQ ID NO: 55110 - RNA, 23 nt, synthetic construct
  source 1..23: mol_type = other RNA
ttattggggccgatgtggggctg

SEQ ID NO: 55111 - RNA, 23 nt, synthetic construct
  source 1..23: mol_type = other RNA
ggccgcacggatgttggagtagg

SEQ ID NO: 55112 - RNA, 23 nt, synthetic construct
  source 1..23: mol_type = other RNA
gtggtagtcggcactttggtagt

SEQ ID NO: 55113 - RNA, 23 nt, synthetic construct
  source 1..23: mol_type = other RNA
caccaccgtggttatgggggccg

SEQ ID NO: 55114 - RNA, 23 nt, synthetic construct
  source 1..23: mol_type = other RNA
ggccgcacggatgttggagtagg

SEQ ID NO: 55115 - RNA, 23 nt, synthetic construct
  source 1..23: mol_type = other RNA
gtggtagtcggcactttggtagt

SEQ ID NO: 55116 - RNA, 23 nt, synthetic construct
  source 1..23: mol_type = other RNA
gatcgcccgtgtgtggtggccgt

SEQ ID NO: 55117 - RNA, 23 nt, synthetic construct
  source 1..23: mol_type = other RNA
caccaccgtggttatgggggccg

SEQ ID NO: 55118 - RNA, 23 nt, synthetic construct
  source 1..23: mol_type = other RNA
ggccgcacggatgttggagtagg

SEQ ID NO: 55119 - RNA, 23 nt, synthetic construct
  source 1..23: mol_type = other RNA
gtggtagtcggcactttggtagt

SEQ ID NO: 55120 - RNA, 23 nt, synthetic construct
  source 1..23: mol_type = other RNA
ggacggtccacgtggtccacagg

SEQ ID NO: 55121 - RNA, 23 nt, synthetic construct
  source 1..23: mol_type = other RNA
gcccatgtgtgcgttgaagagga

SEQ ID NO: 55122 - RNA, 23 nt, synthetic construct
  source 1..23: mol_type = other RNA
gagcgcggggtgccacacacagg

SEQ ID NO: 55123 - RNA, 23 nt, synthetic construct
  source 1..23: mol_type = other RNA
ggcgttgaagaatgggcccgggg

SEQ ID NO: 55124 - RNA, 23 nt, synthetic construct
  source 1..23: mol_type = other RNA
ccgggctactcgtaggctgcggc

SEQ ID NO: 55125 - RNA, 23 nt, synthetic construct
  source 1..23: mol_type = other RNA
cccgggctactcgtaggctgcgg

SEQ ID NO: 55126 - RNA, 23 nt, synthetic construct
  source 1..23: mol_type = other RNA
ctcggtcggtcttattgtagatg

SEQ ID NO: 55127 - RNA, 23 nt, synthetic construct
  source 1..23: mol_type = other RNA
ggaccgcccgtgtgtggtggccg

SEQ ID NO: 55128 - RNA, 23 nt, synthetic construct
  source 1..23: mol_type = other RNA
gcccgcacatgcttagtttgttc

SEQ ID NO: 55129 - RNA, 23 nt, synthetic construct
  source 1..23: mol_type = other RNA
cagtcgaccctgatggtctctcc

SEQ ID NO: 55130 - RNA, 23 nt, synthetic construct
  source 1..23: mol_type = other RNA
gcggcgttgagaacagggcctgg

SEQ ID NO: 55131 - RNA, 23 nt, synthetic construct
  source 1..23: mol_type = other RNA
gctgtcggcacatttcttggaca

SEQ ID NO: 55132 - RNA, 23 nt, synthetic construct
  source 1..23: mol_type = other RNA
caccgtggttattggggccgatg

SEQ ID NO: 55133 - RNA, 23 nt, synthetic construct
  source 1..23: mol_type = other RNA
ggcgcgagcaccagtgccgggcg

SEQ ID NO: 55134 - RNA, 23 nt, synthetic construct
  source 1..23: mol_type = other RNA
cataagtgccctccagcggccct

SEQ ID NO: 55135 - RNA, 23 nt, synthetic construct
  source 1..23: mol_type = other RNA
tggacgcactccccacagcactg

SEQ ID NO: 55136 - RNA, 23 nt, synthetic construct
  source 1..23: mol_type = other RNA
ttgaaggtgacgctcacgcccag

SEQ ID NO: 55137 - RNA, 23 nt, synthetic construct
  source 1..23: mol_type = other RNA
agatccccatgtagcgtatcttg

SEQ ID NO: 55138 - RNA, 23 nt, synthetic construct
  source 1..23: mol_type = other RNA
gggtggaacaaagctcacgcgcc

SEQ ID NO: 55139 - RNA, 23 nt, synthetic construct
  source 1..23: mol_type = other RNA
ggtcgcacaggccaccggttgca

SEQ ID NO: 55140 - RNA, 23 nt, synthetic construct
  source 1..23: mol_type = other RNA
cgtggttattggggccgatgtgg

SEQ ID NO: 55141 - RNA, 23 nt, synthetic construct
  source 1..23: mol_type = other RNA
cccggatcctgtagttgtagcac

SEQ ID NO: 55142 - RNA, 23 nt, synthetic construct
  source 1..23: mol_type = other RNA
gccaacaccagcgtccggcacgc

SEQ ID NO: 55143 - RNA, 23 nt, synthetic construct
  source 1..23: mol_type = other RNA
agacacaagcacgccgttcttgc

SEQ ID NO: 55144 - RNA, 23 nt, synthetic construct
  source 1..23: mol_type = other RNA
gggatgttctcggtgacgatgcg

SEQ ID NO: 55145 - RNA, 23 nt, synthetic construct
  source 1..23: mol_type = other RNA
tccactcacacttcggttgacag

SEQ ID NO: 55146 - RNA, 23 nt, synthetic construct
  source 1..23: mol_type = other RNA
tttcttggacagaacgtagctgc

SEQ ID NO: 55147 - RNA, 23 nt, synthetic construct
  source 1..23: mol_type = other RNA
catgtacttggtgcagacgccgt

SEQ ID NO: 55148 - RNA, 23 nt, synthetic construct
  source 1..23: mol_type = other RNA
cacacacaggcccgcgtcgtggc

SEQ ID NO: 55149 - RNA, 23 nt, synthetic construct
  source 1..23: mol_type = other RNA
tcacacttcggttgacagcgggt

SEQ ID NO: 55150 - RNA, 23 nt, synthetic construct
  source 1..23: mol_type = other RNA
aggagccagcacggtgccgtgag

SEQ ID NO: 55151 - RNA, 23 nt, synthetic construct
  source 1..23: mol_type = other RNA
gcaccagtgccgggcgtagttct

SEQ ID NO: 55152 - RNA, 23 nt, synthetic construct
  source 1..23: mol_type = other RNA
cttgtaggtggcctcgttgtgca

SEQ ID NO: 55153 - RNA, 23 nt, synthetic construct
  source 1..23: mol_type = other RNA
cagtgcccactggggttccggca

SEQ ID NO: 55154 - RNA, 23 nt, synthetic construct
  source 1..23: mol_type = other RNA
tatccatggacttgtagtggatg

SEQ ID NO: 55155 - RNA, 23 nt, synthetic construct
  source 1..23: mol_type = other RNA
gtgggcgcactggcgtgagtatt

SEQ ID NO: 55156 - RNA, 23 nt, synthetic construct
  source 1..23: mol_type = other RNA
tgggcgcactggcgtgagtattc

SEQ ID NO: 55157 - RNA, 23 nt, synthetic construct
  source 1..23: mol_type = other RNA
cgtaggactcaacgtcccctcca

SEQ ID NO: 55158 - RNA, 23 nt, synthetic construct
  source 1..23: mol_type = other RNA
acattgcaccgttgggtcctggg

SEQ ID NO: 55159 - RNA, 23 nt, synthetic construct
  source 1..23: mol_type = other RNA
cactcacacttcggttgacagcg

SEQ ID NO: 55160 - RNA, 23 nt, synthetic construct
  source 1..23: mol_type = other RNA
caggctgcattccacgacctggc

SEQ ID NO: 55161 - RNA, 23 nt, synthetic construct
  source 1..23: mol_type = other RNA
caggctgcattccacgacctggc

SEQ ID NO: 55162 - RNA, 23 nt, synthetic construct
  source 1..23: mol_type = other RNA
caggctgcattccacgacctggc

SEQ ID NO: 55163 - RNA, 23 nt, synthetic construct
  source 1..23: mol_type = other RNA
caggctgcattccacgacctggc

SEQ ID NO: 55164 - RNA, 23 nt, synthetic construct
  source 1..23: mol_type = other RNA
ctgtccactcacacttcggttga

SEQ ID NO: 55165 - RNA, 23 nt, synthetic construct
  source 1..23: mol_type = other RNA
aggcgcccgcgtcattgaggaag

SEQ ID NO: 55166 - RNA, 23 nt, synthetic construct
  source 1..23: mol_type = other RNA
taggactcaacgtcccctccaag

SEQ ID NO: 55167 - RNA, 23 nt, synthetic construct
  source 1..23: mol_type = other RNA
acaggcgcccgcgtcattgagga

SEQ ID NO: 55168 - RNA, 23 nt, synthetic construct
  source 1..23: mol_type = other RNA
cactggcgtgagtattccacaaa

SEQ ID NO: 55169 - RNA, 23 nt, synthetic construct
  source 1..23: mol_type = other RNA
agcccatcggtggtgttgtagat

SEQ ID NO: 55170 - RNA, 23 nt, synthetic construct
  source 1..23: mol_type = other RNA
gaccagcggcagacctcgcggac

SEQ ID NO: 55171 - RNA, 23 nt, synthetic construct
  source 1..23: mol_type = other RNA
agcaccagtgccgggcgtagttc

SEQ ID NO: 55172 - RNA, 23 nt, synthetic construct
  source 1..23: mol_type = other RNA
aggacccggatcctgtagttgta

SEQ ID NO: 55173 - RNA, 23 nt, synthetic construct
  source 1..23: mol_type = other RNA
tcaccggaatttggtcaaacagg

SEQ ID NO: 55174 - RNA, 23 nt, synthetic construct
  source 1..23: mol_type = other RNA
ccactcacacttcggttgacagc

SEQ ID NO: 55175 - RNA, 23 nt, synthetic construct
  source 1..23: mol_type = other RNA
tccccgtaggccacgcaggtgcc

SEQ ID NO: 55176 - RNA, 23 nt, synthetic construct
  source 1..23: mol_type = other RNA
tgaggacgatatccatggacttg

SEQ ID NO: 55177 - RNA, 23 nt, synthetic construct
  source 1..23: mol_type = other RNA
accgctgctcaccggaatttggt

SEQ ID NO: 55178 - RNA, 23 nt, synthetic construct
  source 1..23: mol_type = other RNA
tgatgttggctgccgacaggggc

SEQ ID NO: 55179 - RNA, 23 nt, synthetic construct
  source 1..23: mol_type = other RNA
gtgcggctgtaaggcagctcctc

SEQ ID NO: 55180 - RNA, 23 nt, synthetic construct
  source 1..23: mol_type = other RNA
tgcagatgcactcgcactcatag

SEQ ID NO: 55181 - RNA, 23 nt, synthetic construct
  source 1..23: mol_type = other RNA
ggtgttgcagtcgaccctgatgg

SEQ ID NO: 55182 - RNA, 23 nt, synthetic construct
  source 1..23: mol_type = other RNA
ggccatccccgtaggccacgcag

SEQ ID NO: 55183 - RNA, 23 nt, synthetic construct
  source 1..23: mol_type = other RNA
gcccatcggtggtgttgtagatg

SEQ ID NO: 55184 - RNA, 23 nt, synthetic construct
  source 1..23: mol_type = other RNA
tcgtaggactcaacgtcccctcc

SEQ ID NO: 55185 - RNA, 23 nt, synthetic construct
  source 1..23: mol_type = other RNA
cgtgggcccatccaacttctgca

SEQ ID NO: 55186 - RNA, 23 nt, synthetic construct
  source 1..23: mol_type = other RNA
gtccggagtccgccaggacacac

SEQ ID NO: 55187 - RNA, 23 nt, synthetic construct
  source 1..23: mol_type = other RNA
gatgaagaagctcgagggtgtga

SEQ ID NO: 55188 - RNA, 23 nt, synthetic construct
  source 1..23: mol_type = other RNA
gccatccccgtaggccacgcagg

SEQ ID NO: 55189 - RNA, 23 nt, synthetic construct
  source 1..23: mol_type = other RNA
gtgacgtcggcctcactcaggcc

SEQ ID NO: 55190 - RNA, 23 nt, synthetic construct
  source 1..23: mol_type = other RNA
ggtgacgtcggcctcactcaggc

SEQ ID NO: 55191 - RNA, 23 nt, synthetic construct
  source 1..23: mol_type = other RNA
cagtgacgggtggaacaaagctc

SEQ ID NO: 55192 - RNA, 23 nt, synthetic construct
  source 1..23: mol_type = other RNA
acacttcggttgacagcgggtcg

SEQ ID NO: 55193 - RNA, 23 nt, synthetic construct
  source 1..23: mol_type = other RNA
actggcgtgagtattccacaaag

SEQ ID NO: 55194 - RNA, 23 nt, synthetic construct
  source 1..23: mol_type = other RNA
aagcccatcggtggtgttgtaga

SEQ ID NO: 55195 - RNA, 23 nt, synthetic construct
  source 1..23: mol_type = other RNA
cggttgcacctcgccagtcactg

SEQ ID NO: 55196 - RNA, 23 nt, synthetic construct
  source 1..23: mol_type = other RNA
ccggttgcacctcgccagtcact

SEQ ID NO: 55197 - RNA, 23 nt, synthetic construct
  source 1..23: mol_type = other RNA
cacccacgcacctggccaccgtg

SEQ ID NO: 55198 - RNA, 23 nt, synthetic construct
  source 1..23: mol_type = other RNA
cacacttcggttgacagcgggtc

SEQ ID NO: 55199 - RNA, 23 nt, synthetic construct
  source 1..23: mol_type = other RNA
ggttgcacctcgccagtcactgc

SEQ ID NO: 55200 - RNA, 23 nt, synthetic construct
  source 1..23: mol_type = other RNA
tacttggtgcagacgccgtccct

SEQ ID NO: 55201 - RNA, 23 nt, synthetic construct
  source 1..23: mol_type = other RNA
tggcgtgagtattccacaaaggt

SEQ ID NO: 55202 - RNA, 23 nt, synthetic construct
  source 1..23: mol_type = other RNA
cctgatcttatcgtaggactcaa

SEQ ID NO: 55203 - RNA, 23 nt, synthetic construct
  source 1..23: mol_type = other RNA
tcggcctggcactctatgtcctt

SEQ ID NO: 55204 - RNA, 23 nt, synthetic construct
  source 1..23: mol_type = other RNA
ctgcatgtacttggtgcagacgc

SEQ ID NO: 55205 - RNA, 23 nt, synthetic construct
  source 1..23: mol_type = other RNA
gcactggcgtgagtattccacaa

SEQ ID NO: 55206 - RNA, 23 nt, synthetic construct
  source 1..23: mol_type = other RNA
cagatgcactcgcactcatagtg

SEQ ID NO: 55207 - RNA, 23 nt, synthetic construct
  source 1..23: mol_type = other RNA
gttgcagtcgaccctgatggtct

SEQ ID NO: 55208 - RNA, 23 nt, synthetic construct
  source 1..23: mol_type = other RNA
ggtcttccggtcccaggacacgg

SEQ ID NO: 55209 - RNA, 23 nt, synthetic construct
  source 1..23: mol_type = other RNA
ttgtaggtggcctcgttgtgcac

SEQ ID NO: 55210 - RNA, 23 nt, synthetic construct
  source 1..23: mol_type = other RNA
atgttctcggtgacgatgcggaa

SEQ ID NO: 55211 - RNA, 23 nt, synthetic construct
  source 1..23: mol_type = other RNA
aggtgttgcagtcgaccctgatg

SEQ ID NO: 55212 - RNA, 23 nt, synthetic construct
  source 1..23: mol_type = other RNA
ggacgatatccatggacttgtag

SEQ ID NO: 55213 - RNA, 23 nt, synthetic construct
  source 1..23: mol_type = other RNA
cgctgctcaccggaatttggtca

SEQ ID NO: 55214 - RNA, 23 nt, synthetic construct
  source 1..23: mol_type = other RNA
gacacaagcacgccgttcttgct

SEQ ID NO: 55215 - RNA, 23 nt, synthetic construct
  source 1..23: mol_type = other RNA
tgccgtcaaaggtggaatagtgg

SEQ ID NO: 55216 - RNA, 23 nt, synthetic construct
  source 1..23: mol_type = other RNA
cccacgcacctggccaccgtgca

SEQ ID NO: 55217 - RNA, 23 nt, synthetic construct
  source 1..23: mol_type = other RNA
cttggacagaacgtagctgcagt

SEQ ID NO: 55218 - RNA, 23 nt, synthetic construct
  source 1..23: mol_type = other RNA
gtgttgcagtcgaccctgatggt

SEQ ID NO: 55219 - RNA, 23 nt, synthetic construct
  source 1..23: mol_type = other RNA
tgaggacataggtgcagttgccc

SEQ ID NO: 55220 - RNA, 23 nt, synthetic construct
  source 1..23: mol_type = other RNA
ttccacgacctggcccaactccc

SEQ ID NO: 55221 - RNA, 23 nt, synthetic construct
  source 1..23: mol_type = other RNA
ttggacagaacgtagctgcagtc

SEQ ID NO: 55222 - RNA, 23 nt, synthetic construct
  source 1..23: mol_type = other RNA
caggcagttctcgttgtccgtca

SEQ ID NO: 55223 - RNA, 23 nt, synthetic construct
  source 1..23: mol_type = other RNA
atgaagaagctcgagggtgtgaa

SEQ ID NO: 55224 - RNA, 23 nt, synthetic construct
  source 1..23: mol_type = other RNA
gcaggtgttgcagtcgaccctga

SEQ ID NO: 55225 - RNA, 23 nt, synthetic construct
  source 1..23: mol_type = other RNA
tctcggtgacgatgcggaaggtc

SEQ ID NO: 55226 - RNA, 23 nt, synthetic construct
  source 1..23: mol_type = other RNA
ttccacgacctggcccaactccc

SEQ ID NO: 55227 - RNA, 23 nt, synthetic construct
  source 1..23: mol_type = other RNA
ctcggcctggcactctatgtcct

SEQ ID NO: 55228 - RNA, 23 nt, synthetic construct
  source 1..23: mol_type = other RNA
gggtgtgggaagtcaccgtggaa

SEQ ID NO: 55229 - RNA, 23 nt, synthetic construct
  source 1..23: mol_type = other RNA
ggctgtaaagctggtagctgtgg

SEQ ID NO: 55230 - RNA, 23 nt, synthetic construct
  source 1..23: mol_type = other RNA
gggtgtgggaagtcaccgtggaa

SEQ ID NO: 55231 - RNA, 23 nt, synthetic construct
  source 1..23: mol_type = other RNA
ggctgtaaagctggtagctgtgg

SEQ ID NO: 55232 - RNA, 23 nt, synthetic construct
  source 1..23: mol_type = other RNA
ggctgtaaagctggtagctgtgg

SEQ ID NO: 55233 - RNA, 23 nt, synthetic construct
  source 1..23: mol_type = other RNA
aggtgcttgttcacgcaggtgac

SEQ ID NO: 55234 - RNA, 23 nt, synthetic construct
  source 1..23: mol_type = other RNA
caagcacgccgttcttgctgaaa

SEQ ID NO: 55235 - RNA, 23 nt, synthetic construct
  source 1..23: mol_type = other RNA
acagacacaagcacgccgttctt

SEQ ID NO: 55236 - RNA, 23 nt, synthetic construct
  source 1..23: mol_type = other RNA
acagtgacgggtggaacaaagct

SEQ ID NO: 55237 - RNA, 23 nt, synthetic construct
  source 1..23: mol_type = other RNA
agacagtgacgggtggaacaaag

SEQ ID NO: 55238 - RNA, 23 nt, synthetic construct
  source 1..23: mol_type = other RNA
aagacagtgacgggtggaacaaa

SEQ ID NO: 55239 - RNA, 23 nt, synthetic construct
  source 1..23: mol_type = other RNA
ttccacgacctggcccaactccc

SEQ ID NO: 55240 - RNA, 23 nt, synthetic construct
  source 1..23: mol_type = other RNA
ttccacgacctggcccaactccc

SEQ ID NO: 55241 - RNA, 23 nt, synthetic construct
  source 1..23: mol_type = other RNA
tgagtattccacaaaggtggcac

SEQ ID NO: 55242 - RNA, 23 nt, synthetic construct
  source 1..23: mol_type = other RNA
gggcgcactggcgtgagtattcc

SEQ ID NO: 55243 - RNA, 23 nt, synthetic construct
  source 1..23: mol_type = other RNA
ggccccccgcgtgggcgcactgg

SEQ ID NO: 55244 - RNA, 23 nt, synthetic construct
  source 1..23: mol_type = other RNA
gacccggatggccgtgtccccgc

SEQ ID NO: 55245 - RNA, 23 nt, synthetic construct
  source 1..23: mol_type = other RNA
ctcggtgacgatgcggaaggtcc

SEQ ID NO: 55246 - RNA, 23 nt, synthetic construct
  source 1..23: mol_type = other RNA
ggactcaacgtcccctccaagtt

SEQ ID NO: 55247 - RNA, 23 nt, synthetic construct
  source 1..23: mol_type = other RNA
attgcaccgttgggtcctgggtg

SEQ ID NO: 55248 - RNA, 23 nt, synthetic construct
  source 1..23: mol_type = other RNA
ccgggcgtagttctcattctcca

SEQ ID NO: 55249 - RNA, 23 nt, synthetic construct
  source 1..23: mol_type = other RNA
tgttggcgcacatcagcccccgc

SEQ ID NO: 55250 - RNA, 23 nt, synthetic construct
  source 1..23: mol_type = other RNA
gcccgcgtcattgaggaaggtgc

SEQ ID NO: 55251 - RNA, 23 nt, synthetic construct
  source 1..23: mol_type = other RNA
tcaacgtcccctccaagttgttc

SEQ ID NO: 55252 - RNA, 23 nt, synthetic construct
  source 1..23: mol_type = other RNA
agtgccgggcgtagttctcattc

SEQ ID NO: 55253 - RNA, 23 nt, synthetic construct
  source 1..23: mol_type = other RNA
cagtgtgtgctgaaacagcccac

SEQ ID NO: 55254 - RNA, 23 nt, synthetic construct
  source 1..23: mol_type = other RNA
gcactcgcactcatagtggaagt

SEQ ID NO: 55255 - RNA, 23 nt, synthetic construct
  source 1..23: mol_type = other RNA
gtgccgggcgtagttctcattct

SEQ ID NO: 55256 - RNA, 23 nt, synthetic construct
  source 1..23: mol_type = other RNA
ggagtagcagcagccggttttcc

SEQ ID NO: 55257 - RNA, 23 nt, synthetic construct
  source 1..23: mol_type = other RNA
cactccgcaaaggccggccccag

SEQ ID NO: 55258 - RNA, 23 nt, synthetic construct
  source 1..23: mol_type = other RNA
ccatccccgtaggccacgcaggt

SEQ ID NO: 55259 - RNA, 23 nt, synthetic construct
  source 1..23: mol_type = other RNA
gaacagggtgatgttggctgccg

SEQ ID NO: 55260 - RNA, 23 nt, synthetic construct
  source 1..23: mol_type = other RNA
cacgtccagcgtgtggcagctcc

SEQ ID NO: 55261 - RNA, 23 nt, synthetic construct
  source 1..23: mol_type = other RNA
cccgtaggccacgcaggtgccca

SEQ ID NO: 55262 - RNA, 23 nt, synthetic construct
  source 1..23: mol_type = other RNA
tcggtgacgatgcggaaggtccc

SEQ ID NO: 55263 - RNA, 23 nt, synthetic construct
  source 1..23: mol_type = other RNA
tagtcctggtgcagtcggatgaa

SEQ ID NO: 55264 - RNA, 23 nt, synthetic construct
  source 1..23: mol_type = other RNA
gtgtatctgggggatgtcagtcc

SEQ ID NO: 55265 - RNA, 23 nt, synthetic construct
  source 1..23: mol_type = other RNA
ggccgtagttgcagcagaacaca

SEQ ID NO: 55266 - RNA, 23 nt, synthetic construct
  source 1..23: mol_type = other RNA
ggtgtccggagtccgccaggaca

SEQ ID NO: 55267 - RNA, 23 nt, synthetic construct
  source 1..23: mol_type = other RNA
tgtcctcataggtgcaggtgcag

SEQ ID NO: 55268 - RNA, 23 nt, synthetic construct
  source 1..23: mol_type = other RNA
gttgtagatgacgtcctggtagc

SEQ ID NO: 55269 - RNA, 23 nt, synthetic construct
  source 1..23: mol_type = other RNA
tggtgttgtagatgacgtcctgg

SEQ ID NO: 55270 - RNA, 23 nt, synthetic construct
  source 1..23: mol_type = other RNA
ggccgtagttgcagcagaacaca

SEQ ID NO: 55271 - RNA, 23 nt, synthetic construct
  source 1..23: mol_type = other RNA
cggatcctgtagttgtagcacat

SEQ ID NO: 55272 - RNA, 23 nt, synthetic construct
  source 1..23: mol_type = other RNA
cccatcggtggtgttgtagatga

SEQ ID NO: 55273 - RNA, 23 nt, synthetic construct
  source 1..23: mol_type = other RNA
atatccatggacttgtagtggat

SEQ ID NO: 55274 - RNA, 23 nt, synthetic construct
  source 1..23: mol_type = other RNA
ggcgccaggctcgtggtcagcgg

SEQ ID NO: 55275 - RNA, 23 nt, synthetic construct
  source 1..23: mol_type = other RNA
tggaccagcggcagacctcgcgg

SEQ ID NO: 55276 - RNA, 23 nt, synthetic construct
  source 1..23: mol_type = other RNA
caggtgtccggagtccgccagga

SEQ ID NO: 55277 - RNA, 23 nt, synthetic construct
  source 1..23: mol_type = other RNA
ccatcggtggtgttgtagatgac

SEQ ID NO: 55278 - RNA, 23 nt, synthetic construct
  source 1..23: mol_type = other RNA
tggctgttggcgcacatcagccc

SEQ ID NO: 55279 - RNA, 23 nt, synthetic construct
  source 1..23: mol_type = other RNA
gatgcggaaggtcccgtgggtgg

SEQ ID NO: 55280 - RNA, 23 nt, synthetic construct
  source 1..23: mol_type = other RNA
tagtcctcatcaaaccactctgt

SEQ ID NO: 55281 - RNA, 23 nt, synthetic construct
  source 1..23: mol_type = other RNA
gggcatagaactcgttgaaggcc

SEQ ID NO: 55282 - RNA, 23 nt, synthetic construct
  source 1..23: mol_type = other RNA
ggggtagtcctcatcaaaccact

SEQ ID NO: 55283 - RNA, 23 nt, synthetic construct
  source 1..23: mol_type = other RNA
tggggtagtcctcatcaaaccac

SEQ ID NO: 55284 - RNA, 23 nt, synthetic construct
  source 1..23: mol_type = other RNA
gttcagacttggggtagtcctca

SEQ ID NO: 55285 - RNA, 23 nt, synthetic construct
  source 1..23: mol_type = other RNA
ctcaacgtcccctccaagttgtt

SEQ ID NO: 55286 - RNA, 23 nt, synthetic construct
  source 1..23: mol_type = other RNA
tctcggcctggcactctatgtcc

SEQ ID NO: 55287 - RNA, 23 nt, synthetic construct
  source 1..23: mol_type = other RNA
ctctcggcctggcactctatgtc

SEQ ID NO: 55288 - RNA, 23 nt, synthetic construct
  source 1..23: mol_type = other RNA
cagttggggaagctctcggcctg

SEQ ID NO: 55289 - RNA, 23 nt, synthetic construct
  source 1..23: mol_type = other RNA
ggtgccggtggtcccacagggga

SEQ ID NO: 55290 - RNA, 23 nt, synthetic construct
  source 1..23: mol_type = other RNA
tgtccaaatgccctgcagaagca

SEQ ID NO: 55291 - RNA, 23 nt, synthetic construct
  source 1..23: mol_type = other RNA
cacgtcaaaccactctgtccact

SEQ ID NO: 55292 - RNA, 23 nt, synthetic construct
  source 1..23: mol_type = other RNA
acctggccaccgtgcagttctcc

SEQ ID NO: 55293 - RNA, 23 nt, synthetic construct
  source 1..23: mol_type = other RNA
acccacgcacctggccaccgtgc

SEQ ID NO: 55294 - RNA, 23 nt, synthetic construct
  source 1..23: mol_type = other RNA
agtacttggtggagtcaacctgg

SEQ ID NO: 55295 - RNA, 23 nt, synthetic construct
  source 1..23: mol_type = other RNA
ggacccggatcctgtagttgtag

SEQ ID NO: 55296 - RNA, 23 nt, synthetic construct
  source 1..23: mol_type = other RNA
acacaagcacgccgttcttgctg

SEQ ID NO: 55297 - RNA, 23 nt, synthetic construct
  source 1..23: mol_type = other RNA
cctcggtgttgttgtggaagagg

SEQ ID NO: 55298 - RNA, 23 nt, synthetic construct
  source 1..23: mol_type = other RNA
gccctcggtgttgttgtggaaga

SEQ ID NO: 55299 - RNA, 23 nt, synthetic construct
  source 1..23: mol_type = other RNA
agaatgggcccgggggcacaagg

SEQ ID NO: 55300 - RNA, 23 nt, synthetic construct
  source 1..23: mol_type = other RNA
agtgacgggtggaacaaagctca

SEQ ID NO: 55301 - RNA, 23 nt, synthetic construct
  source 1..23: mol_type = other RNA
gtcactgcacactccccgggcgc

SEQ ID NO: 55302 - RNA, 23 nt, synthetic construct
  source 1..23: mol_type = other RNA
ctccgcaaaggccggccccagca

SEQ ID NO: 55303 - RNA, 23 nt, synthetic construct
  source 1..23: mol_type = other RNA
tggcactccgcaaaggccggccc

SEQ ID NO: 55304 - RNA, 23 nt, synthetic construct
  source 1..23: mol_type = other RNA
agctgcgtgtagatggagttgag

SEQ ID NO: 55305 - RNA, 23 nt, synthetic construct
  source 1..23: mol_type = other RNA
ctggaccagcggcagacctcgcg

SEQ ID NO: 55306 - RNA, 23 nt, synthetic construct
  source 1..23: mol_type = other RNA
aagctcgagggtgtgaacagggt

SEQ ID NO: 55307 - RNA, 23 nt, synthetic construct
  source 1..23: mol_type = other RNA
tcagcctggttctggttgaagtt

SEQ ID NO: 55308 - RNA, 23 nt, synthetic construct
  source 1..23: mol_type = other RNA
tgcatgtacttggtgcagacgcc

SEQ ID NO: 55309 - RNA, 23 nt, synthetic construct
  source 1..23: mol_type = other RNA
gcgcccgcgtcattgaggaaggt

SEQ ID NO: 55310 - RNA, 23 nt, synthetic construct
  source 1..23: mol_type = other RNA
gggcacacaggcgcccgcgtcat

SEQ ID NO: 55311 - RNA, 23 nt, synthetic construct
  source 1..23: mol_type = other RNA
aggtgacgtcggcctcactcagg

SEQ ID NO: 55312 - RNA, 23 nt, synthetic construct
  source 1..23: mol_type = other RNA
gatgaagtggccatccccgtagg

SEQ ID NO: 55313 - RNA, 23 nt, synthetic construct
  source 1..23: mol_type = other RNA
tgctgaaacagcccacgtccagc

SEQ ID NO: 55314 - RNA, 23 nt, synthetic construct
  source 1..23: mol_type = other RNA
aactcccgcagggggacaccagg

SEQ ID NO: 55315 - RNA, 23 nt, synthetic construct
  source 1..23: mol_type = other RNA
caggtggggcagcggcacaggtc

SEQ ID NO: 55316 - RNA, 23 nt, synthetic construct
  source 1..23: mol_type = other RNA
ctgcgtgtagatggagttgagga

SEQ ID NO: 55317 - RNA, 23 nt, synthetic construct
  source 1..23: mol_type = other RNA
gacttggggcagttctgcatgta

SEQ ID NO: 55318 - RNA, 23 nt, synthetic construct
  source 1..23: mol_type = other RNA
tgtagttgtagcacatcttgaag

SEQ ID NO: 55319 - RNA, 23 nt, synthetic construct
  source 1..23: mol_type = other RNA
aactcccgcagggggacaccagg

SEQ ID NO: 55320 - RNA, 23 nt, synthetic construct
  source 1..23: mol_type = other RNA
aactcccgcagggggacaccagg

SEQ ID NO: 55321 - RNA, 23 nt, synthetic construct
  source 1..23: mol_type = other RNA
ttccggcaggtttttaggcaggg

SEQ ID NO: 55322 - RNA, 23 nt, synthetic construct
  source 1..23: mol_type = other RNA
ctctgtccactcacacttcggtt

SEQ ID NO: 55323 - RNA, 23 nt, synthetic construct
  source 1..23: mol_type = other RNA
tgatgaagtggccatccccgtag

SEQ ID NO: 55324 - RNA, 23 nt, synthetic construct
  source 1..23: mol_type = other RNA
gccaggctcgtggtcagcggctc

SEQ ID NO: 55325 - RNA, 23 nt, synthetic construct
  source 1..23: mol_type = other RNA
ctcacacttcggttgacagcggg

SEQ ID NO: 55326 - RNA, 23 nt, synthetic construct
  source 1..23: mol_type = other RNA
tgcaggtgttgcagtcgaccctg

SEQ ID NO: 55327 - RNA, 23 nt, synthetic construct
  source 1..23: mol_type = other RNA
cacagccggacacgcagtgtgtg

SEQ ID NO: 55328 - RNA, 23 nt, synthetic construct
  source 1..23: mol_type = other RNA
cctggtgcagtcggatgaacacg

SEQ ID NO: 55329 - RNA, 23 nt, synthetic construct
  source 1..23: mol_type = other RNA
ccacgtcaaaccactctgtccac

SEQ ID NO: 55330 - RNA, 23 nt, synthetic construct
  source 1..23: mol_type = other RNA
ggacacgcagtgtgtgctgaaac

SEQ ID NO: 55331 - RNA, 23 nt, synthetic construct
  source 1..23: mol_type = other RNA
acactgggccacgcacttcatct

SEQ ID NO: 55332 - RNA, 23 nt, synthetic construct
  source 1..23: mol_type = other RNA
gcctcaaggctgtgagcgcactg

SEQ ID NO: 55333 - RNA, 23 nt, synthetic construct
  source 1..23: mol_type = other RNA
gtcctgtcctcataggtgcaggt

SEQ ID NO: 55334 - RNA, 23 nt, synthetic construct
  source 1..23: mol_type = other RNA
ggaagacagtgacgggtggaaca

SEQ ID NO: 55335 - RNA, 23 nt, synthetic construct
  source 1..23: mol_type = other RNA
tggttgttggtgcaggtgccgca

SEQ ID NO: 55336 - RNA, 23 nt, synthetic construct
  source 1..23: mol_type = other RNA
ttgaagaatgggcccgggggcac

SEQ ID NO: 55337 - RNA, 23 nt, synthetic construct
  source 1..23: mol_type = other RNA
gtaaggcagctcctcccgctgcc

SEQ ID NO: 55338 - RNA, 23 nt, synthetic construct
  source 1..23: mol_type = other RNA
tccgggcactgctccgtgggccc

SEQ ID NO: 55339 - RNA, 23 nt, synthetic construct
  source 1..23: mol_type = other RNA
gggtccgggcactgctccgtggg

SEQ ID NO: 55340 - RNA, 23 nt, synthetic construct
  source 1..23: mol_type = other RNA
gttgggaagtccacgtcaaacca

SEQ ID NO: 55341 - RNA, 23 nt, synthetic construct
  source 1..23: mol_type = other RNA
aagaggtgccgtcaaaggtggaa

SEQ ID NO: 55342 - RNA, 23 nt, synthetic construct
  source 1..23: mol_type = other RNA
gcgcgctgggggttggagcaggt

SEQ ID NO: 55343 - RNA, 23 nt, synthetic construct
  source 1..23: mol_type = other RNA
accagcggcagacctcgcggaca

SEQ ID NO: 55344 - RNA, 23 nt, synthetic construct
  source 1..23: mol_type = other RNA
gcacggcaggtcctggcactgcc

SEQ ID NO: 55345 - RNA, 23 nt, synthetic construct
  source 1..23: mol_type = other RNA
gcgtgtagatggagttgaggaac

SEQ ID NO: 55346 - RNA, 23 nt, synthetic construct
  source 1..23: mol_type = other RNA
tgcgtgtagatggagttgaggaa

SEQ ID NO: 55347 - RNA, 23 nt, synthetic construct
  source 1..23: mol_type = other RNA
tggaggatcagctcgtagctctc

SEQ ID NO: 55348 - RNA, 23 nt, synthetic construct
  source 1..23: mol_type = other RNA
aggtgcagccgtccacaggcacg

SEQ ID NO: 55349 - RNA, 23 nt, synthetic construct
  source 1..23: mol_type = other RNA
ctgggccacgcacttcatctggt

SEQ ID NO: 55350 - RNA, 23 nt, synthetic construct
  source 1..23: mol_type = other RNA
cagagccggtggctgcactccca

SEQ ID NO: 55351 - RNA, 23 nt, synthetic construct
  source 1..23: mol_type = other RNA
gccggtggtcccacaggggatgt

SEQ ID NO: 55352 - RNA, 23 nt, synthetic construct
  source 1..23: mol_type = other RNA
tcgtagtacttggtggagtcaac

SEQ ID NO: 55353 - RNA, 23 nt, synthetic construct
  source 1..23: mol_type = other RNA
cacgccgttcttgctgaaaccgc

SEQ ID NO: 55354 - RNA, 23 nt, synthetic construct
  source 1..23: mol_type = other RNA
cctcgccagtcactgcacactcc

SEQ ID NO: 55355 - RNA, 23 nt, synthetic construct
  source 1..23: mol_type = other RNA
ccccgcgtgggcgcactggcgtg

SEQ ID NO: 55356 - RNA, 23 nt, synthetic construct
  source 1..23: mol_type = other RNA
accgttgggtcctgggtgtcccc

SEQ ID NO: 55357 - RNA, 23 nt, synthetic construct
  source 1..23: mol_type = other RNA
gtagctggacgttgaagtcctcg

SEQ ID NO: 55358 - RNA, 23 nt, synthetic construct
  source 1..23: mol_type = other RNA
gcgtagctggacgttgaagtcct

SEQ ID NO: 55359 - RNA, 23 nt, synthetic construct
  source 1..23: mol_type = other RNA
tagctggacgttgaagtcctcgt

SEQ ID NO: 55360 - RNA, 23 nt, synthetic construct
  source 1..23: mol_type = other RNA
cagccggacacgcagtgtgtgct

SEQ ID NO: 55361 - RNA, 23 nt, synthetic construct
  source 1..23: mol_type = other RNA
gtaggtggcctcgttgtgcacac

SEQ ID NO: 55362 - RNA, 23 nt, synthetic construct
  source 1..23: mol_type = other RNA
cagacacagccggacacgcagtg

SEQ ID NO: 55363 - RNA, 23 nt, synthetic construct
  source 1..23: mol_type = other RNA
caggcttgtaggtggcctcgttg

SEQ ID NO: 55364 - RNA, 23 nt, synthetic construct
  source 1..23: mol_type = other RNA
ccccgtaggccacgcaggtgccc

SEQ ID NO: 55365 - RNA, 23 nt, synthetic construct
  source 1..23: mol_type = other RNA
gacacacacaggcccgcgtcgtg

SEQ ID NO: 55366 - RNA, 23 nt, synthetic construct
  source 1..23: mol_type = other RNA
tccggagtccgccaggacacaca

SEQ ID NO: 55367 - RNA, 23 nt, synthetic construct
  source 1..23: mol_type = other RNA
ggcaggtgtccggagtccgccag

SEQ ID NO: 55368 - RNA, 23 nt, synthetic construct
  source 1..23: mol_type = other RNA
taggcagggtgccccgcagggct

SEQ ID NO: 55369 - RNA, 23 nt, synthetic construct
  source 1..23: mol_type = other RNA
tcggtggtgttgtagatgacgtc

SEQ ID NO: 55370 - RNA, 23 nt, synthetic construct
  source 1..23: mol_type = other RNA
cgccaggctcgtggtcagcggct

SEQ ID NO: 55371 - RNA, 23 nt, synthetic construct
  source 1..23: mol_type = other RNA
ctggtctcggcctgagaggtgga

SEQ ID NO: 55372 - RNA, 23 nt, synthetic construct
  source 1..23: mol_type = other RNA
aggtgccgtcaaaggtggaatag

SEQ ID NO: 55373 - RNA, 23 nt, synthetic construct
  source 1..23: mol_type = other RNA
ctgctcaccggaatttggtcaaa

SEQ ID NO: 55374 - RNA, 23 nt, synthetic construct
  source 1..23: mol_type = other RNA
tgacgatgcggaaggtcccgtgg

SEQ ID NO: 55375 - RNA, 23 nt, synthetic construct
  source 1..23: mol_type = other RNA
ggtgacgatgcggaaggtcccgt

SEQ ID NO: 55376 - RNA, 23 nt, synthetic construct
  source 1..23: mol_type = other RNA
gcacctcgccagtcactgcacac

SEQ ID NO: 55377 - RNA, 23 nt, synthetic construct
  source 1..23: mol_type = other RNA
cggtgacgatgcggaaggtcccg

SEQ ID NO: 55378 - RNA, 23 nt, synthetic construct
  source 1..23: mol_type = other RNA
ctcgtagtacttggtggagtcaa

SEQ ID NO: 55379 - RNA, 23 nt, synthetic construct
  source 1..23: mol_type = other RNA
gtgtccggagtccgccaggacac

SEQ ID NO: 55380 - RNA, 23 nt, synthetic construct
  source 1..23: mol_type = other RNA
atcggtggtgttgtagatgacgt

SEQ ID NO: 55381 - RNA, 23 nt, synthetic construct
  source 1..23: mol_type = other RNA
ggacacacacaggcccgcgtcgt

SEQ ID NO: 55382 - RNA, 23 nt, synthetic construct
  source 1..23: mol_type = other RNA
catcggtggtgttgtagatgacg

SEQ ID NO: 55383 - RNA, 23 nt, synthetic construct
  source 1..23: mol_type = other RNA
caagcccatcggtggtgttgtag

SEQ ID NO: 55384 - RNA, 23 nt, synthetic construct
  source 1..23: mol_type = other RNA
ggaccagcggcagacctcgcgga

SEQ ID NO: 55385 - RNA, 23 nt, synthetic construct
  source 1..23: mol_type = other RNA
ctgttggcgcacatcagcccccg

SEQ ID NO: 55386 - RNA, 23 nt, synthetic construct
  source 1..23: mol_type = other RNA
ggctgttggcgcacatcagcccc

SEQ ID NO: 55387 - RNA, 23 nt, synthetic construct
  source 1..23: mol_type = other RNA
ttgcaccgttgggtcctgggtgt

SEQ ID NO: 55388 - RNA, 23 nt, synthetic construct
  source 1..23: mol_type = other RNA
catcaaaccactctgtccactga

SEQ ID NO: 55389 - RNA, 23 nt, synthetic construct
  source 1..23: mol_type = other RNA
agggtggtcttttcggttgctgt

SEQ ID NO: 55390 - RNA, 23 nt, synthetic construct
  source 1..23: mol_type = other RNA
ggtagtcctcatcaaaccactct

SEQ ID NO: 55391 - RNA, 23 nt, synthetic construct
  source 1..23: mol_type = other RNA
ccagttggggaagctctcggcct

SEQ ID NO: 55392 - RNA, 23 nt, synthetic construct
  source 1..23: mol_type = other RNA
cgatatccatggacttgtagtgg

SEQ ID NO: 55393 - RNA, 23 nt, synthetic construct
  source 1..23: mol_type = other RNA
ggatcctgtagttgtagcacatc

SEQ ID NO: 55394 - RNA, 23 nt, synthetic construct
  source 1..23: mol_type = other RNA
aggctgtgagcgcactggatgcc

SEQ ID NO: 55395 - RNA, 23 nt, synthetic construct
  source 1..23: mol_type = other RNA
ttcccaaactggagcggggtcag

SEQ ID NO: 55396 - RNA, 23 nt, synthetic construct
  source 1..23: mol_type = other RNA
gctgtaaagctggtagctgtggg

SEQ ID NO: 55397 - RNA, 23 nt, synthetic construct
  source 1..23: mol_type = other RNA
gctgtaaagctggtagctgtggg

SEQ ID NO: 55398 - RNA, 23 nt, synthetic construct
  source 1..23: mol_type = other RNA
gctgtaaagctggtagctgtggg

SEQ ID NO: 55399 - RNA, 23 nt, synthetic construct
  source 1..23: mol_type = other RNA
agggccgggcttgtcgtggagtg

SEQ ID NO: 55400 - RNA, 23 nt, synthetic construct
  source 1..23: mol_type = other RNA
ctctcatgaggacataggtgcag

SEQ ID NO: 55401 - RNA, 23 nt, synthetic construct
  source 1..23: mol_type = other RNA
gtcaacctgggagcggcaggcgg

SEQ ID NO: 55402 - RNA, 23 nt, synthetic construct
  source 1..23: mol_type = other RNA
aagaagctcgagggtgtgaacag

SEQ ID NO: 55403 - RNA, 23 nt, synthetic construct
  source 1..23: mol_type = other RNA
gaagaagctcgagggtgtgaaca

SEQ ID NO: 55404 - RNA, 23 nt, synthetic construct
  source 1..23: mol_type = other RNA
ctgtagttgtagcacatcttgaa

SEQ ID NO: 55405 - RNA, 23 nt, synthetic construct
  source 1..23: mol_type = other RNA
ctgtccactgacaccggggctgg

SEQ ID NO: 55406 - RNA, 23 nt, synthetic construct
  source 1..23: mol_type = other RNA
agggcacggcaggtcctggcact

SEQ ID NO: 55407 - RNA, 23 nt, synthetic construct
  source 1..23: mol_type = other RNA
gttccggcaggtttttaggcagg

SEQ ID NO: 55408 - RNA, 23 nt, synthetic construct
  source 1..23: mol_type = other RNA
ggtggtcccacaggggatgttct

SEQ ID NO: 55409 - RNA, 23 nt, synthetic construct
  source 1..23: mol_type = other RNA
aggtcctgtcctcataggtgcag

SEQ ID NO: 55410 - RNA, 23 nt, synthetic construct
  source 1..23: mol_type = other RNA
cacaggcgcccgcgtcattgagg

SEQ ID NO: 55411 - RNA, 23 nt, synthetic construct
  source 1..23: mol_type = other RNA
ctccgtgctggcactgagggagg

SEQ ID NO: 55412 - RNA, 23 nt, synthetic construct
  source 1..23: mol_type = other RNA
gatgttggctgccgacaggggca

SEQ ID NO: 55413 - RNA, 23 nt, synthetic construct
  source 1..23: mol_type = other RNA
tgtaaagctggtagctgtgggtg

SEQ ID NO: 55414 - RNA, 23 nt, synthetic construct
  source 1..23: mol_type = other RNA
tgtaaagctggtagctgtgggtg

SEQ ID NO: 55415 - RNA, 23 nt, synthetic construct
  source 1..23: mol_type = other RNA
agcgggtccgggcactgctccgt

SEQ ID NO: 55416 - RNA, 23 nt, synthetic construct
  source 1..23: mol_type = other RNA
gcggctggccccccgcgtgggcg

SEQ ID NO: 55417 - RNA, 23 nt, synthetic construct
  source 1..23: mol_type = other RNA
ggcacacaggcgcccgcgtcatt

SEQ ID NO: 55418 - RNA, 23 nt, synthetic construct
  source 1..23: mol_type = other RNA
gccggacacgcagtgtgtgctga

SEQ ID NO: 55419 - RNA, 23 nt, synthetic construct
  source 1..23: mol_type = other RNA
tgtaaagctggtagctgtgggtg

SEQ ID NO: 55420 - RNA, 23 nt, synthetic construct
  source 1..23: mol_type = other RNA
gtcaaaggtggaatagtgggagc

SEQ ID NO: 55421 - RNA, 23 nt, synthetic construct
  source 1..23: mol_type = other RNA
catctggtcctcattgaagaagg

SEQ ID NO: 55422 - RNA, 23 nt, synthetic construct
  source 1..23: mol_type = other RNA
tggatctctctcatgaggacata

SEQ ID NO: 55423 - RNA, 23 nt, synthetic construct
  source 1..23: mol_type = other RNA
tgaaggtgaatggcgttgtggct

SEQ ID NO: 55424 - RNA, 23 nt, synthetic construct
  source 1..23: mol_type = other RNA
gtgaaggtgaatggcgttgtggc

SEQ ID NO: 55425 - RNA, 23 nt, synthetic construct
  source 1..23: mol_type = other RNA
gtagtcctcatcaaaccactctg

SEQ ID NO: 55426 - RNA, 23 nt, synthetic construct
  source 1..23: mol_type = other RNA
ggtaggcacagcaggctccgtgc

SEQ ID NO: 55427 - RNA, 23 nt, synthetic construct
  source 1..23: mol_type = other RNA
gctgctcaccggaatttggtcaa

SEQ ID NO: 55428 - RNA, 23 nt, synthetic construct
  source 1..23: mol_type = other RNA
gtgaggacgatatccatggactt

SEQ ID NO: 55429 - RNA, 23 nt, synthetic construct
  source 1..23: mol_type = other RNA
ttcgagtggaagggcttggggtt

SEQ ID NO: 55430 - RNA, 23 nt, synthetic construct
  source 1..23: mol_type = other RNA
tgtgggttgtagaagtcacagaa

SEQ ID NO: 55431 - RNA, 23 nt, synthetic construct
  source 1..23: mol_type = other RNA
cggcctggcactctatgtcctta

SEQ ID NO: 55432 - RNA, 23 nt, synthetic construct
  source 1..23: mol_type = other RNA
cgttcttgctgaaaccgctgctc

SEQ ID NO: 55433 - RNA, 23 nt, synthetic construct
  source 1..23: mol_type = other RNA
agaggagggtgttgccatagaac

SEQ ID NO: 55434 - RNA, 23 nt, synthetic construct
  source 1..23: mol_type = other RNA
agaggagggtgttgccatagaac

SEQ ID NO: 55435 - RNA, 23 nt, synthetic construct
  source 1..23: mol_type = other RNA
agaggagggtgttgccatagaac

SEQ ID NO: 55436 - RNA, 23 nt, synthetic construct
  source 1..23: mol_type = other RNA
agaggagggtgttgccatagaac

SEQ ID NO: 55437 - RNA, 23 nt, synthetic construct
  source 1..23: mol_type = other RNA
agaggagggtgttgccatagaac

SEQ ID NO: 55438 - RNA, 23 nt, synthetic construct
  source 1..23: mol_type = other RNA
aagcacgccgttcttgctgaaac

SEQ ID NO: 55439 - RNA, 23 nt, synthetic construct
  source 1..23: mol_type = other RNA
aagaatgggcccgggggcacaag

SEQ ID NO: 55440 - RNA, 23 nt, synthetic construct
  source 1..23: mol_type = other RNA
tgcaccgttgggtcctgggtgtc

SEQ ID NO: 55441 - RNA, 23 nt, synthetic construct
  source 1..23: mol_type = other RNA
tggtagtgccactcacagccccc

SEQ ID NO: 55442 - RNA, 23 nt, synthetic construct
  source 1..23: mol_type = other RNA
gtcacccacgcacctggccaccg

SEQ ID NO: 55443 - RNA, 23 nt, synthetic construct
  source 1..23: mol_type = other RNA
gcggtcacagtccacctgctggc

SEQ ID NO: 55444 - RNA, 23 nt, synthetic construct
  source 1..23: mol_type = other RNA
ggctgtagggcagccgggcctgg

SEQ ID NO: 55445 - RNA, 23 nt, synthetic construct
  source 1..23: mol_type = other RNA
tgtatctgggggatgtcagtcct

SEQ ID NO: 55446 - RNA, 23 nt, synthetic construct
  source 1..23: mol_type = other RNA
gacgtcacagtgcaccttctgcc

SEQ ID NO: 55447 - RNA, 23 nt, synthetic construct
  source 1..23: mol_type = other RNA
gggaagctctcggcctggcactc

SEQ ID NO: 55448 - RNA, 23 nt, synthetic construct
  source 1..23: mol_type = other RNA
ccgtcaaaggtggaatagtggga

SEQ ID NO: 55449 - RNA, 23 nt, synthetic construct
  source 1..23: mol_type = other RNA
ggacccggatggccgtgtccccg

SEQ ID NO: 55450 - RNA, 23 nt, synthetic construct
  source 1..23: mol_type = other RNA
cgtagtacttggtggagtcaacc

SEQ ID NO: 55451 - RNA, 23 nt, synthetic construct
  source 1..23: mol_type = other RNA
ggggcagcggcacaggtcctggg

SEQ ID NO: 55452 - RNA, 23 nt, synthetic construct
  source 1..23: mol_type = other RNA
gtcctcattgaagaagggctggc

SEQ ID NO: 55453 - RNA, 23 nt, synthetic construct
  source 1..23: mol_type = other RNA
tgttgcagtcgaccctgatggtc

SEQ ID NO: 55454 - RNA, 23 nt, synthetic construct
  source 1..23: mol_type = other RNA
tggtcctcattgaagaagggctg

SEQ ID NO: 55455 - RNA, 23 nt, synthetic construct
  source 1..23: mol_type = other RNA
cacactgggccacgcacttcatc

SEQ ID NO: 55456 - RNA, 23 nt, synthetic construct
  source 1..23: mol_type = other RNA
ccggtggtcccacaggggatgtt

SEQ ID NO: 55457 - RNA, 23 nt, synthetic construct
  source 1..23: mol_type = other RNA
tgggccacgcacttcatctggtc

SEQ ID NO: 55458 - RNA, 23 nt, synthetic construct
  source 1..23: mol_type = other RNA
cgtgggtgcaggggcactgcccg

SEQ ID NO: 55459 - RNA, 23 nt, synthetic construct
  source 1..23: mol_type = other RNA
cttttcggttgctgtggtctggg

SEQ ID NO: 55460 - RNA, 23 nt, synthetic construct
  source 1..23: mol_type = other RNA
gggcggggtccagcctgacaaac

SEQ ID NO: 55461 - RNA, 23 nt, synthetic construct
  source 1..23: mol_type = other RNA
cactgtcctctccgttccacagg

SEQ ID NO: 55462 - RNA, 23 nt, synthetic construct
  source 1..23: mol_type = other RNA
agccggacacgcagtgtgtgctg

SEQ ID NO: 55463 - RNA, 23 nt, synthetic construct
  source 1..23: mol_type = other RNA
tttaggcagggtgccccgcaggg

SEQ ID NO: 55464 - RNA, 23 nt, synthetic construct
  source 1..23: mol_type = other RNA
gggccacgcacttcatctggtcc

SEQ ID NO: 55465 - RNA, 23 nt, synthetic construct
  source 1..23: mol_type = other RNA
ggctccgtgctggcactgaggga

SEQ ID NO: 55466 - RNA, 23 nt, synthetic construct
  source 1..23: mol_type = other RNA
aggactcaacgtcccctccaagt

SEQ ID NO: 55467 - RNA, 23 nt, synthetic construct
  source 1..23: mol_type = other RNA
tcacccacgcacctggccaccgt

SEQ ID NO: 55468 - RNA, 23 nt, synthetic construct
  source 1..23: mol_type = other RNA
ccacgacctggcccaactcccgc

SEQ ID NO: 55469 - RNA, 23 nt, synthetic construct
  source 1..23: mol_type = other RNA
ccacgacctggcccaactcccgc

SEQ ID NO: 55470 - RNA, 23 nt, synthetic construct
  source 1..23: mol_type = other RNA
ccacgacctggcccaactcccgc

SEQ ID NO: 55471 - RNA, 23 nt, synthetic construct
  source 1..23: mol_type = other RNA
ccgcacatctggccctggtgggc

SEQ ID NO: 55472 - RNA, 23 nt, synthetic construct
  source 1..23: mol_type = other RNA
ccacgacctggcccaactccccc

SEQ ID NO: 55473 - RNA, 23 nt, synthetic construct
  source 1..23: mol_type = other RNA
ggcagtggttccgtcccgctgga

SEQ ID NO: 55474 - RNA, 23 nt, synthetic construct
  source 1..23: mol_type = other RNA
tcccgctggagacagtcgtccct

SEQ ID NO: 55475 - RNA, 23 nt, synthetic construct
  source 1..23: mol_type = other RNA
acacacggatttcatagttgaag

SEQ ID NO: 55476 - RNA, 23 nt, synthetic construct
  source 1..23: mol_type = other RNA
acacacggatttcatagttgaag

SEQ ID NO: 55477 - RNA, 23 nt, synthetic construct
  source 1..23: mol_type = other RNA
acacacggatttcatagttgaag

SEQ ID NO: 55478 - RNA, 23 nt, synthetic construct
  source 1..23: mol_type = other RNA
acacacggatttcatagttgaag

SEQ ID NO: 55479 - RNA, 23 nt, synthetic construct
  source 1..23: mol_type = other RNA
ggctggctcgggtccgacacttt

SEQ ID NO: 55480 - RNA, 23 nt, synthetic construct
  source 1..23: mol_type = other RNA
ggcgttgtgggcatagaactcgt

SEQ ID NO: 55481 - RNA, 23 nt, synthetic construct
  source 1..23: mol_type = other RNA
agaacacacggatttcatagttg

SEQ ID NO: 55482 - RNA, 23 nt, synthetic construct
  source 1..23: mol_type = other RNA
agaacacacggatttcatagttg

SEQ ID NO: 55483 - RNA, 23 nt, synthetic construct
  source 1..23: mol_type = other RNA
agaacacacggatttcatagttg

SEQ ID NO: 55484 - RNA, 23 nt, synthetic construct
  source 1..23: mol_type = other RNA
agaacacacggatttcatagttg

SEQ ID NO: 55485 - RNA, 23 nt, synthetic construct
  source 1..23: mol_type = other RNA
cccgctggagacagtcgtccctc

SEQ ID NO: 55486 - RNA, 23 nt, synthetic construct
  source 1..23: mol_type = other RNA
cagggcgtcccagtgacatcagg

SEQ ID NO: 55487 - RNA, 23 nt, synthetic construct
  source 1..23: mol_type = other RNA
acggatttcatagttgaagcaca

SEQ ID NO: 55488 - RNA, 23 nt, synthetic construct
  source 1..23: mol_type = other RNA
acggatttcatagttgaagcaca

SEQ ID NO: 55489 - RNA, 23 nt, synthetic construct
  source 1..23: mol_type = other RNA
acggatttcatagttgaagcaca

SEQ ID NO: 55490 - RNA, 23 nt, synthetic construct
  source 1..23: mol_type = other RNA
acggatttcatagttgaagcaca

SEQ ID NO: 55491 - RNA, 23 nt, synthetic construct
  source 1..23: mol_type = other RNA
gtcgtccccggagtggaggaggg

SEQ ID NO: 55492 - RNA, 23 nt, synthetic construct
  source 1..23: mol_type = other RNA
cagtggttccgtcccgctggaga

SEQ ID NO: 55493 - RNA, 23 nt, synthetic construct
  source 1..23: mol_type = other RNA
gtcgtccccggagtggaggaggg

SEQ ID NO: 55494 - RNA, 23 nt, synthetic construct
  source 1..23: mol_type = other RNA
acgatatccatggacttgtagtg

SEQ ID NO: 55495 - RNA, 23 nt, synthetic construct
  source 1..23: mol_type = other RNA
tcgagggtgtgaacagggtgatg

SEQ ID NO: 55496 - RNA, 23 nt, synthetic construct
  source 1..23: mol_type = other RNA
tgttcacgcaggtgacgttggcc

SEQ ID NO: 55497 - RNA, 23 nt, synthetic construct
  source 1..23: mol_type = other RNA
ccgctggagacagtcgtccctct

SEQ ID NO: 55498 - RNA, 23 nt, synthetic construct
  source 1..23: mol_type = other RNA
cacacggatttcatagttgaagc

SEQ ID NO: 55499 - RNA, 23 nt, synthetic construct
  source 1..23: mol_type = other RNA
cacacggatttcatagttgaagc

SEQ ID NO: 55500 - RNA, 23 nt, synthetic construct
  source 1..23: mol_type = other RNA
cacacggatttcatagttgaagc

SEQ ID NO: 55501 - RNA, 23 nt, synthetic construct
  source 1..23: mol_type = other RNA
cacacggatttcatagttgaagc

SEQ ID NO: 55502 - RNA, 23 nt, synthetic construct
  source 1..23: mol_type = other RNA
ctggcgttgtgggcatagaactc

SEQ ID NO: 55503 - RNA, 23 nt, synthetic construct
  source 1..23: mol_type = other RNA
acacggatttcatagttgaagca

SEQ ID NO: 55504 - RNA, 23 nt, synthetic construct
  source 1..23: mol_type = other RNA
acacggatttcatagttgaagca

SEQ ID NO: 55505 - RNA, 23 nt, synthetic construct
  source 1..23: mol_type = other RNA
cagcagaacacacggatttcata

SEQ ID NO: 55506 - RNA, 23 nt, synthetic construct
  source 1..23: mol_type = other RNA
ggatttcatagttgaagcacatc

SEQ ID NO: 55507 - RNA, 23 nt, synthetic construct
  source 1..23: mol_type = other RNA
agcagaacacacggatttcatag

SEQ ID NO: 55508 - RNA, 23 nt, synthetic construct
  source 1..23: mol_type = other RNA
ggatttcatagttgaagcacatc

SEQ ID NO: 55509 - RNA, 23 nt, synthetic construct
  source 1..23: mol_type = other RNA
agcagaacacacggatttcatag

SEQ ID NO: 55510 - RNA, 23 nt, synthetic construct
  source 1..23: mol_type = other RNA
ggatttcatagttgaagcacatc

SEQ ID NO: 55511 - RNA, 23 nt, synthetic construct
  source 1..23: mol_type = other RNA
agcagaacacacggatttcatag

SEQ ID NO: 55512 - RNA, 23 nt, synthetic construct
  source 1..23: mol_type = other RNA
ggatttcatagttgaagcacatc

SEQ ID NO: 55513 - RNA, 23 nt, synthetic construct
  source 1..23: mol_type = other RNA
agcagaacacacggatttcatag

SEQ ID NO: 55514 - RNA, 23 nt, synthetic construct
  source 1..23: mol_type = other RNA
tgcttgttcacgcaggtgacgtt

SEQ ID NO: 55515 - RNA, 23 nt, synthetic construct
  source 1..23: mol_type = other RNA
gcagtggttccgtcccgctggag

SEQ ID NO: 55516 - RNA, 23 nt, synthetic construct
  source 1..23: mol_type = other RNA
cacggaccggctacgcgtggcaa

SEQ ID NO: 55517 - RNA, 23 nt, synthetic construct
  source 1..23: mol_type = other RNA
catgcggtcacagtccacctgct

SEQ ID NO: 55518 - RNA, 23 nt, synthetic construct
  source 1..23: mol_type = other RNA
cacggatttcatagttgaagcac

SEQ ID NO: 55519 - RNA, 23 nt, synthetic construct
  source 1..23: mol_type = other RNA
cacggatttcatagttgaagcac

SEQ ID NO: 55520 - RNA, 23 nt, synthetic construct
  source 1..23: mol_type = other RNA
cacggatttcatagttgaagcac

SEQ ID NO: 55521 - RNA, 23 nt, synthetic construct
  source 1..23: mol_type = other RNA
cacggatttcatagttgaagcac

SEQ ID NO: 55522 - RNA, 23 nt, synthetic construct
  source 1..23: mol_type = other RNA
gcttgttcacgcaggtgacgttg

SEQ ID NO: 55523 - RNA, 23 nt, synthetic construct
  source 1..23: mol_type = other RNA
tccgacactttgatgggcaggtg

SEQ ID NO: 55524 - RNA, 23 nt, synthetic construct
  source 1..23: mol_type = other RNA
cagtcgtccctctggttgttggt

SEQ ID NO: 55525 - RNA, 23 nt, synthetic construct
  source 1..23: mol_type = other RNA
ctggagacagtcgtccctctggt

SEQ ID NO: 55526 - RNA, 23 nt, synthetic construct
  source 1..23: mol_type = other RNA
gctggagacagtcgtccctctgg

SEQ ID NO: 55527 - RNA, 23 nt, synthetic construct
  source 1..23: mol_type = other RNA
gtcccgctggagacagtcgtccc

SEQ ID NO: 55528 - RNA, 23 nt, synthetic construct
  source 1..23: mol_type = other RNA
ttgtacactttggtgggtgggca

SEQ ID NO: 55529 - RNA, 23 nt, synthetic construct
  source 1..23: mol_type = other RNA
gggacacagaagggcgtgcagcc

SEQ ID NO: 55530 - RNA, 23 nt, synthetic construct
  source 1..23: mol_type = other RNA
gagacagtcgtccctctggttgt

SEQ ID NO: 55531 - RNA, 23 nt, synthetic construct
  source 1..23: mol_type = other RNA
gacacagaagggcgtgcagccac

SEQ ID NO: 55532 - RNA, 23 nt, synthetic construct
  source 1..23: mol_type = other RNA
agcgtgtggcagctccggaggca

SEQ ID NO: 55533 - RNA, 23 nt, synthetic construct
  source 1..23: mol_type = other RNA
cagcgtgtggcagctccggaggc

SEQ ID NO: 55534 - RNA, 23 nt, synthetic construct
  source 1..23: mol_type = other RNA
agctccggaggcactcggcccca

SEQ ID NO: 55535 - RNA, 23 nt, synthetic construct
  source 1..23: mol_type = other RNA
acacggatttcatagttgaagca

SEQ ID NO: 55536 - RNA, 23 nt, synthetic construct
  source 1..23: mol_type = other RNA
ggcttgtacactttggtgggtgg

SEQ ID NO: 55537 - RNA, 23 nt, synthetic construct
  source 1..23: mol_type = other RNA
acacggatttcatagttgaagca

SEQ ID NO: 55538 - RNA, 23 nt, synthetic construct
  source 1..23: mol_type = other RNA
cagctccggaggcactcggcccc

SEQ ID NO: 55539 - RNA, 23 nt, synthetic construct
  source 1..23: mol_type = other RNA
ctgcacactccccgggcgcggca

SEQ ID NO: 55540 - RNA, 23 nt, synthetic construct
  source 1..23: mol_type = other RNA
agtggttccgtcccgctggagac

SEQ ID NO: 55541 - RNA, 23 nt, synthetic construct
  source 1..23: mol_type = other RNA
acactttggtgggtgggcaggtg

SEQ ID NO: 55542 - RNA, 23 nt, synthetic construct
  source 1..23: mol_type = other RNA
ggccgccagagccaacaccagcg

SEQ ID NO: 55543 - RNA, 23 nt, synthetic construct
  source 1..23: mol_type = other RNA
tggttccgtcccgctggagacag

SEQ ID NO: 55544 - RNA, 23 nt, synthetic construct
  source 1..23: mol_type = other RNA
ccagcgtgtggcagctccggagg

SEQ ID NO: 55545 - RNA, 23 nt, synthetic construct
  source 1..23: mol_type = other RNA
ggttccgtcccgctggagacagt

SEQ ID NO: 55546 - RNA, 23 nt, synthetic construct
  source 1..23: mol_type = other RNA
ggacacagaagggcgtgcagcca

SEQ ID NO: 55547 - RNA, 23 nt, synthetic construct
  source 1..23: mol_type = other RNA
aggtgggacagcagtcgccctcc

SEQ ID NO: 55548 - RNA, 23 nt, synthetic construct
  source 1..23: mol_type = other RNA
tccgtcccgctggagacagtcgt

SEQ ID NO: 55549 - RNA, 23 nt, synthetic construct
  source 1..23: mol_type = other RNA
gtggacgagctgggaaccgtgga

SEQ ID NO: 55550 - RNA, 23 nt, synthetic construct
  source 1..23: mol_type = other RNA
cacactccccgggcgcggcagag

SEQ ID NO: 55551 - RNA, 23 nt, synthetic construct
  source 1..23: mol_type = other RNA
aacgctgcaggtgacgtcggcct

SEQ ID NO: 55552 - RNA, 23 nt, synthetic construct
  source 1..23: mol_type = other RNA
tgatgacaacacgggtgaccaca

SEQ ID NO: 55553 - RNA, 23 nt, synthetic construct
  source 1..23: mol_type = other RNA
ccgggctgtaggtgcggccgccg

SEQ ID NO: 55554 - RNA, 23 nt, synthetic construct
  source 1..23: mol_type = other RNA
ggggcagtggccgtagttgcagc

SEQ ID NO: 55555 - RNA, 23 nt, synthetic construct
  source 1..23: mol_type = other RNA
cgtggtggtaagcactgtggagg

SEQ ID NO: 55556 - RNA, 23 nt, synthetic construct
  source 1..23: mol_type = other RNA
tggccgtggtggtaagcactgtg

SEQ ID NO: 55557 - RNA, 23 nt, synthetic construct
  source 1..23: mol_type = other RNA
ggtagtcagcactttggtagtgt

SEQ ID NO: 55558 - RNA, 23 nt, synthetic construct
  source 1..23: mol_type = other RNA
ggttgtggtagtcagcactttgg

SEQ ID NO: 55559 - RNA, 23 nt, synthetic construct
  source 1..23: mol_type = other RNA
tggttgtggtagtcagcactttg

SEQ ID NO: 55560 - RNA, 23 nt, synthetic construct
  source 1..23: mol_type = other RNA
ggggcagtggccgtagttgcagc

SEQ ID NO: 55561 - RNA, 23 nt, synthetic construct
  source 1..23: mol_type = other RNA
cgtggtggtaagcactgtggagg

SEQ ID NO: 55562 - RNA, 23 nt, synthetic construct
  source 1..23: mol_type = other RNA
ggggcagtggccgtagttgcagc

SEQ ID NO: 55563 - RNA, 23 nt, synthetic construct
  source 1..23: mol_type = other RNA
cgtggtggtaagcactgtggagg

SEQ ID NO: 55564 - RNA, 23 nt, synthetic construct
  source 1..23: mol_type = other RNA
tggccgtggtggtaagcactgtg

SEQ ID NO: 55565 - RNA, 23 nt, synthetic construct
  source 1..23: mol_type = other RNA
ggggcagtggccgtagttgcagc

SEQ ID NO: 55566 - RNA, 23 nt, synthetic construct
  source 1..23: mol_type = other RNA
tacacggtgcagttgtccacatg

SEQ ID NO: 55567 - RNA, 23 nt, synthetic construct
  source 1..23: mol_type = other RNA
ggtacacggtgcagttgtccaca

SEQ ID NO: 55568 - RNA, 23 nt, synthetic construct
  source 1..23: mol_type = other RNA
ggtgggacagcagtcgccctcct

SEQ ID NO: 55569 - RNA, 23 nt, synthetic construct
  source 1..23: mol_type = other RNA
agctctggcagttctccgctgtg

SEQ ID NO: 55570 - RNA, 23 nt, synthetic construct
  source 1..23: mol_type = other RNA
ggaaacgctgcaggtgacgtcgg

SEQ ID NO: 55571 - RNA, 23 nt, synthetic construct
  source 1..23: mol_type = other RNA
ctggctcgggtccgacactttga

SEQ ID NO: 55572 - RNA, 23 nt, synthetic construct
  source 1..23: mol_type = other RNA
caaactccagtgcgtcccccacc

SEQ ID NO: 55573 - RNA, 23 nt, synthetic construct
  source 1..23: mol_type = other RNA
ccaaactccagtgcgtcccccac

SEQ ID NO: 55574 - RNA, 23 nt, synthetic construct
  source 1..23: mol_type = other RNA
tgtggtagtcagcactttggtag

SEQ ID NO: 55575 - RNA, 23 nt, synthetic construct
  source 1..23: mol_type = other RNA
ttccgtcccgctggagacagtcg

SEQ ID NO: 55576 - RNA, 23 nt, synthetic construct
  source 1..23: mol_type = other RNA
gttccgtcccgctggagacagtc

SEQ ID NO: 55577 - RNA, 23 nt, synthetic construct
  source 1..23: mol_type = other RNA
gacaacacgggtgaccacaggcc

SEQ ID NO: 55578 - RNA, 23 nt, synthetic construct
  source 1..23: mol_type = other RNA
acaacacgggtgaccacaggcct

SEQ ID NO: 55579 - RNA, 23 nt, synthetic construct
  source 1..23: mol_type = other RNA
ttttcggttgctgtggtctgggt

SEQ ID NO: 55580 - RNA, 23 nt, synthetic construct
  source 1..23: mol_type = other RNA
gtggccgtagttgcagcagaaca

SEQ ID NO: 55581 - RNA, 23 nt, synthetic construct
  source 1..23: mol_type = other RNA
gtggccgtagttgcagcagaaca

SEQ ID NO: 55582 - RNA, 23 nt, synthetic construct
  source 1..23: mol_type = other RNA
gtggccgtagttgcagcagaaca

SEQ ID NO: 55583 - RNA, 23 nt, synthetic construct
  source 1..23: mol_type = other RNA
gtggccgtagttgcagcagaaca

SEQ ID NO: 55584 - RNA, 23 nt, synthetic construct
  source 1..23: mol_type = other RNA
tggccgtagttgcagcagaacac

SEQ ID NO: 55585 - RNA, 23 nt, synthetic construct
  source 1..23: mol_type = other RNA
cagtggccgtagttgcagcagaa

SEQ ID NO: 55586 - RNA, 23 nt, synthetic construct
  source 1..23: mol_type = other RNA
tggccgtagttgcagcagaacac

SEQ ID NO: 55587 - RNA, 23 nt, synthetic construct
  source 1..23: mol_type = other RNA
aaacgctgcaggtgacgtcggcc

SEQ ID NO: 55588 - RNA, 23 nt, synthetic construct
  source 1..23: mol_type = other RNA
gcagtggccgtagttgcagcaga

SEQ ID NO: 55589 - RNA, 23 nt, synthetic construct
  source 1..23: mol_type = other RNA
gcagtggccgtagttgcagcaga

SEQ ID NO: 55590 - RNA, 23 nt, synthetic construct
  source 1..23: mol_type = other RNA
gcagtggccgtagttgcagcaga

SEQ ID NO: 55591 - RNA, 23 nt, synthetic construct
  source 1..23: mol_type = other RNA
gcagtggccgtagttgcagcaga

SEQ ID NO: 55592 - RNA, 23 nt, synthetic construct
  source 1..23: mol_type = other RNA
tacagctctggcagttctccgct

SEQ ID NO: 55593 - RNA, 23 nt, synthetic construct
  source 1..23: mol_type = other RNA
tttcggttgctgtggtctgggtt

SEQ ID NO: 55594 - RNA, 23 nt, synthetic construct
  source 1..23: mol_type = other RNA
aactccagtgcgtcccccaccac

SEQ ID NO: 55595 - RNA, 23 nt, synthetic construct
  source 1..23: mol_type = other RNA
cagtggccgtagttgcagcagaa

SEQ ID NO: 55596 - RNA, 23 nt, synthetic construct
  source 1..23: mol_type = other RNA
aaggaaacgctgcaggtgacgtc

SEQ ID NO: 55597 - RNA, 23 nt, synthetic construct
  source 1..23: mol_type = other RNA
caccgacgtcatagtagtttccg

SEQ ID NO: 55598 - RNA, 23 nt, synthetic construct
  source 1..23: mol_type = other RNA
ggccctgatcttatcgtaggact

SEQ ID NO: 55599 - RNA, 23 nt, synthetic construct
  source 1..23: mol_type = other RNA
tggccgtagttgcagcagaacac

SEQ ID NO: 55600 - RNA, 23 nt, synthetic construct
  source 1..23: mol_type = other RNA
cagtggccgtagttgcagcagaa

SEQ ID NO: 55601 - RNA, 23 nt, synthetic construct
  source 1..23: mol_type = other RNA
gccaccggttgcacctcgccagt

SEQ ID NO: 55602 - RNA, 23 nt, synthetic construct
  source 1..23: mol_type = other RNA
atggtcgtgttgatgcggacttg

SEQ ID NO: 55603 - RNA, 23 nt, synthetic construct
  source 1..23: mol_type = other RNA
tggccgtagttgcagcagaacac

SEQ ID NO: 55604 - RNA, 23 nt, synthetic construct
  source 1..23: mol_type = other RNA
cagtggccgtagttgcagcagaa

SEQ ID NO: 55605 - RNA, 23 nt, synthetic construct
  source 1..23: mol_type = other RNA
agaacccgcagctcgtagtcgtg

SEQ ID NO: 55606 - RNA, 23 nt, synthetic construct
  source 1..23: mol_type = other RNA
gcaccaaccccgtagaaggtgcc

SEQ ID NO: 55607 - RNA, 23 nt, synthetic construct
  source 1..23: mol_type = other RNA
cagagaacccgcagctcgtagtc

SEQ ID NO: 55608 - RNA, 23 nt, synthetic construct
  source 1..23: mol_type = other RNA
agcaggacgacacggttgtcacc

SEQ ID NO: 55609 - RNA, 23 nt, synthetic construct
  source 1..23: mol_type = other RNA
aaactccagtgcgtcccccacca

SEQ ID NO: 55610 - RNA, 23 nt, synthetic construct
  source 1..23: mol_type = other RNA
caccgctccccgggaaatttagg

SEQ ID NO: 55611 - RNA, 23 nt, synthetic construct
  source 1..23: mol_type = other RNA
gacgtcatagtagtttccgtcct

SEQ ID NO: 55612 - RNA, 23 nt, synthetic construct
  source 1..23: mol_type = other RNA
cagtggttgcggtcgtagtggct

SEQ ID NO: 55613 - RNA, 23 nt, synthetic construct
  source 1..23: mol_type = other RNA
tggaacaaagctcacgcgccggg

SEQ ID NO: 55614 - RNA, 23 nt, synthetic construct
  source 1..23: mol_type = other RNA
ggacgacacggttgtcacccacg

SEQ ID NO: 55615 - RNA, 23 nt, synthetic construct
  source 1..23: mol_type = other RNA
tgagtggcgccctcccgaaaggg

SEQ ID NO: 55616 - RNA, 23 nt, synthetic construct
  source 1..23: mol_type = other RNA
gacccttgcaccgacgtcatagt

SEQ ID NO: 55617 - RNA, 23 nt, synthetic construct
  source 1..23: mol_type = other RNA
ggtggacagctcgctcgtgagtg

SEQ ID NO: 55618 - RNA, 23 nt, synthetic construct
  source 1..23: mol_type = other RNA
tgtagcgtatcttgtagggtggg

SEQ ID NO: 55619 - RNA, 23 nt, synthetic construct
  source 1..23: mol_type = other RNA
tcacggttacgaagccgggacgg

SEQ ID NO: 55620 - RNA, 23 nt, synthetic construct
  source 1..23: mol_type = other RNA
agcggccctgatcttatcgtagg

SEQ ID NO: 55621 - RNA, 23 nt, synthetic construct
  source 1..23: mol_type = other RNA
caaagctcacgcgccgggtgggc

SEQ ID NO: 55622 - RNA, 23 nt, synthetic construct
  source 1..23: mol_type = other RNA
ccagtggttgcggtcgtagtggc

SEQ ID NO: 55623 - RNA, 23 nt, synthetic construct
  source 1..23: mol_type = other RNA
gccccgggctactcgtaggctgc

SEQ ID NO: 55624 - RNA, 23 nt, synthetic construct
  source 1..23: mol_type = other RNA
cagctcgtagtcgtgacagagcg

SEQ ID NO: 55625 - RNA, 23 nt, synthetic construct
  source 1..23: mol_type = other RNA
ggccgccttgcctgtcgcagctt

SEQ ID NO: 55626 - RNA, 23 nt, synthetic construct
  source 1..23: mol_type = other RNA
gatccccatgtagcgtatcttgt

SEQ ID NO: 55627 - RNA, 23 nt, synthetic construct
  source 1..23: mol_type = other RNA
cccttgcaccgacgtcatagtag

SEQ ID NO: 55628 - RNA, 23 nt, synthetic construct
  source 1..23: mol_type = other RNA
ccccgggctactcgtaggctgcg

SEQ ID NO: 55629 - RNA, 23 nt, synthetic construct
  source 1..23: mol_type = other RNA
agccccgggctactcgtaggctg

SEQ ID NO: 55630 - RNA, 23 nt, synthetic construct
  source 1..23: mol_type = other RNA
acaaagctcacgcgccgggtggg

SEQ ID NO: 55631 - RNA, 23 nt, synthetic construct
  source 1..23: mol_type = other RNA
ggatccagtggttgcggtcgtag

SEQ ID NO: 55632 - RNA, 23 nt, synthetic construct
  source 1..23: mol_type = other RNA
tgagtacttggacgctccggggc

SEQ ID NO: 55633 - RNA, 23 nt, synthetic construct
  source 1..23: mol_type = other RNA
cctcactcaggccgcggcaagtg

SEQ ID NO: 55634 - RNA, 23 nt, synthetic construct
  source 1..23: mol_type = other RNA
acctggccgttgcgacctcagcc

SEQ ID NO: 55635 - RNA, 23 nt, synthetic construct
  source 1..23: mol_type = other RNA
tggatccagtggttgcggtcgta

SEQ ID NO: 55636 - RNA, 23 nt, synthetic construct
  source 1..23: mol_type = other RNA
acatgaacacacggcgccctcgt

SEQ ID NO: 55637 - RNA, 23 nt, synthetic construct
  source 1..23: mol_type = other RNA
cgcagtcgccacccgagtcgcag

SEQ ID NO: 55638 - RNA, 23 nt, synthetic construct
  source 1..23: mol_type = other RNA
tccagtggttgcggtcgtagtgg

SEQ ID NO: 55639 - RNA, 23 nt, synthetic construct
  source 1..23: mol_type = other RNA
acacgccgccgtccgcttggacc

SEQ ID NO: 55640 - RNA, 23 nt, synthetic construct
  source 1..23: mol_type = other RNA
gttgaggaacacgccgccgtccg

SEQ ID NO: 55641 - RNA, 23 nt, synthetic construct
  source 1..23: mol_type = other RNA
tacatgaacacacggcgccctcg

SEQ ID NO: 55642 - RNA, 23 nt, synthetic construct
  source 1..23: mol_type = other RNA
tcttggaggatcagctcgtagct

SEQ ID NO: 55643 - RNA, 23 nt, synthetic construct
  source 1..23: mol_type = other RNA
agctcgctcgtgagtgttggcgc

SEQ ID NO: 55644 - RNA, 23 nt, synthetic construct
  source 1..23: mol_type = other RNA
agggggtcaccgtggaacctctg

SEQ ID NO: 55645 - RNA, 23 nt, synthetic construct
  source 1..23: mol_type = other RNA
aggccgtgcagtagtggttgtcc

SEQ ID NO: 55646 - RNA, 23 nt, synthetic construct
  source 1..23: mol_type = other RNA
acagtgaggacgatatccatgga

SEQ ID NO: 55647 - RNA, 23 nt, synthetic construct
  source 1..23: mol_type = other RNA
tgctgagtacttggacgctccgg

SEQ ID NO: 55648 - RNA, 23 nt, synthetic construct
  source 1..23: mol_type = other RNA
gttggcgtatttgggatccagct

SEQ ID NO: 55649 - RNA, 23 nt, synthetic construct
  source 1..23: mol_type = other RNA
gcaggtcgtagagtttctcatca

SEQ ID NO: 55650 - RNA, 23 nt, synthetic construct
  source 1..23: mol_type = other RNA
ggaacacgccgccgtccgcttgg

SEQ ID NO: 55651 - RNA, 23 nt, synthetic construct
  source 1..23: mol_type = other RNA
caaacacctgcatgagtggcacc

SEQ ID NO: 55652 - RNA, 23 nt, synthetic construct
  source 1..23: mol_type = other RNA
aaggcactgttgggatcggtcag

SEQ ID NO: 55653 - RNA, 23 nt, synthetic construct
  source 1..23: mol_type = other RNA
gcatccaccacgtaggcgtagcg

SEQ ID NO: 55654 - RNA, 23 nt, synthetic construct
  source 1..23: mol_type = other RNA
atgacgtcctggtagctgtaggt

SEQ ID NO: 55655 - RNA, 23 nt, synthetic construct
  source 1..23: mol_type = other RNA
gcctcaggttttcaaacgtctca

SEQ ID NO: 55656 - RNA, 23 nt, synthetic construct
  source 1..23: mol_type = other RNA
cacatcttgaagacgccctcctg

SEQ ID NO: 55657 - RNA, 23 nt, synthetic construct
  source 1..23: mol_type = other RNA
ggcggggttgtggcacgtcccct

SEQ ID NO: 55658 - RNA, 23 nt, synthetic construct
  source 1..23: mol_type = other RNA
tcccgtggtggctgtaccaaggg

SEQ ID NO: 55659 - RNA, 23 nt, synthetic construct
  source 1..23: mol_type = other RNA
gtctgtgataggcgggtccaggt

SEQ ID NO: 55660 - RNA, 23 nt, synthetic construct
  source 1..23: mol_type = other RNA
cctccggccgcacggatgttgga

SEQ ID NO: 55661 - RNA, 23 nt, synthetic construct
  source 1..23: mol_type = other RNA
gtctgtgataggcgggtccaggt

SEQ ID NO: 55662 - RNA, 23 nt, synthetic construct
  source 1..23: mol_type = other RNA
cctccggccgcacggatgttgga

SEQ ID NO: 55663 - RNA, 23 nt, synthetic construct
  source 1..23: mol_type = other RNA
gtggttgcggtcgtagtggctgc

SEQ ID NO: 55664 - RNA, 23 nt, synthetic construct
  source 1..23: mol_type = other RNA
gtctgtgataggcgggtccaggc

SEQ ID NO: 55665 - RNA, 23 nt, synthetic construct
  source 1..23: mol_type = other RNA
cctccggccgcacggatgttgga

SEQ ID NO: 55666 - RNA, 23 nt, synthetic construct
  source 1..23: mol_type = other RNA
gtctgtgataggcgggtccaggt

SEQ ID NO: 55667 - RNA, 23 nt, synthetic construct
  source 1..23: mol_type = other RNA
cacactggaggcgtgcgtgccgt

SEQ ID NO: 55668 - RNA, 23 nt, synthetic construct
  source 1..23: mol_type = other RNA
cctccggccgcacggatgttgga

SEQ ID NO: 55669 - RNA, 23 nt, synthetic construct
  source 1..23: mol_type = other RNA
gtctgtgataggcgggtccaggt

SEQ ID NO: 55670 - RNA, 23 nt, synthetic construct
  source 1..23: mol_type = other RNA
tggaattggtggcccttgtcatg

SEQ ID NO: 55671 - RNA, 23 nt, synthetic construct
  source 1..23: mol_type = other RNA
gcggtggccgtggaaccggtggg

SEQ ID NO: 55672 - RNA, 23 nt, synthetic construct
  source 1..23: mol_type = other RNA
ctgattgcacactgcgtagaaat

SEQ ID NO: 55673 - RNA, 23 nt, synthetic construct
  source 1..23: mol_type = other RNA
agattcccaaagcgtgcatggat

SEQ ID NO: 55674 - RNA, 23 nt, synthetic construct
  source 1..23: mol_type = other RNA
gcagaggccgtgcagtagtggtt

SEQ ID NO: 55675 - RNA, 23 nt, synthetic construct
  source 1..23: mol_type = other RNA
gcttgcactgcaccgacactgaa

SEQ ID NO: 55676 - RNA, 23 nt, synthetic construct
  source 1..23: mol_type = other RNA
ggcttgcactgcaccgacactga

SEQ ID NO: 55677 - RNA, 23 nt, synthetic construct
  source 1..23: mol_type = other RNA
ggatggtcgtgttgatgcggact

SEQ ID NO: 55678 - RNA, 23 nt, synthetic construct
  source 1..23: mol_type = other RNA
ctcggcgtagctggacgttgaag

SEQ ID NO: 55679 - RNA, 23 nt, synthetic construct
  source 1..23: mol_type = other RNA
cacggtgccgtgagcgtagcagg

SEQ ID NO: 55680 - RNA, 23 nt, synthetic construct
  source 1..23: mol_type = other RNA
gaactcgttgaaggccgggaggc

SEQ ID NO: 55681 - RNA, 23 nt, synthetic construct
  source 1..23: mol_type = other RNA
tgggccaagatgtactcgcagct

SEQ ID NO: 55682 - RNA, 23 nt, synthetic construct
  source 1..23: mol_type = other RNA
aggcggtggccgtggaaccggtg

SEQ ID NO: 55683 - RNA, 23 nt, synthetic construct
  source 1..23: mol_type = other RNA
caggctgtatggggccgcatggc

SEQ ID NO: 55684 - RNA, 23 nt, synthetic construct
  source 1..23: mol_type = other RNA
atgggtgtaaagctggtagctgt

SEQ ID NO: 55685 - RNA, 23 nt, synthetic construct
  source 1..23: mol_type = other RNA
atgggtgtaaagctggtagctgt

SEQ ID NO: 55686 - RNA, 23 nt, synthetic construct
  source 1..23: mol_type = other RNA
cggtgccgtgagcgtagcagggg

SEQ ID NO: 55687 - RNA, 23 nt, synthetic construct
  source 1..23: mol_type = other RNA
tagcttcccacccgtacatgaac

SEQ ID NO: 55688 - RNA, 23 nt, synthetic construct
  source 1..23: mol_type = other RNA
ggggatgggtgtaacgctggtag

SEQ ID NO: 55689 - RNA, 23 nt, synthetic construct
  source 1..23: mol_type = other RNA
ggggatgggtgtaacgctggtag

SEQ ID NO: 55690 - RNA, 23 nt, synthetic construct
  source 1..23: mol_type = other RNA
aaggccgggaggccgttgaagtc

SEQ ID NO: 55691 - RNA, 23 nt, synthetic construct
  source 1..23: mol_type = other RNA
gggggacagggatcgcccgtgtg

SEQ ID NO: 55692 - RNA, 23 nt, synthetic construct
  source 1..23: mol_type = other RNA
gggggacagggatcgcccgtgtg

SEQ ID NO: 55693 - RNA, 23 nt, synthetic construct
  source 1..23: mol_type = other RNA
gacacataggcccgcacatgctt

SEQ ID NO: 55694 - RNA, 23 nt, synthetic construct
  source 1..23: mol_type = other RNA
agcctggcgttgtgggcatagaa

SEQ ID NO: 55695 - RNA, 23 nt, synthetic construct
  source 1..23: mol_type = other RNA
gagtaggtgtcaaagtccccgcc

SEQ ID NO: 55696 - RNA, 23 nt, synthetic construct
  source 1..23: mol_type = other RNA
gagtaggtgtcaaagtccccgcc

SEQ ID NO: 55697 - RNA, 23 nt, synthetic construct
  source 1..23: mol_type = other RNA
gagtaggtgtcaaagtccccgcc

SEQ ID NO: 55698 - RNA, 23 nt, synthetic construct
  source 1..23: mol_type = other RNA
gagtaggtgtcaaagtccccgcc

SEQ ID NO: 55699 - RNA, 23 nt, synthetic construct
  source 1..23: mol_type = other RNA
tagaactcgttgaaggccgggag

SEQ ID NO: 55700 - RNA, 23 nt, synthetic construct
  source 1..23: mol_type = other RNA
aagggggtgactcggtggtcctg

SEQ ID NO: 55701 - RNA, 23 nt, synthetic construct
  source 1..23: mol_type = other RNA
aagggggtgactcggtggtcctg

SEQ ID NO: 55702 - RNA, 23 nt, synthetic construct
  source 1..23: mol_type = other RNA
aagggggtgactcggtggtcctg

SEQ ID NO: 55703 - RNA, 23 nt, synthetic construct
  source 1..23: mol_type = other RNA
acccgcagctcgtagtcgtgaca

SEQ ID NO: 55704 - RNA, 23 nt, synthetic construct
  source 1..23: mol_type = other RNA
tagggtggtcttttcggttgctg

SEQ ID NO: 55705 - RNA, 23 nt, synthetic construct
  source 1..23: mol_type = other RNA
gggacagggatcgcccgtgtgtg

SEQ ID NO: 55706 - RNA, 23 nt, synthetic construct
  source 1..23: mol_type = other RNA
gggacagggatcgcccgtgtgtg

SEQ ID NO: 55707 - RNA, 23 nt, synthetic construct
  source 1..23: mol_type = other RNA
ctggcggcagtggttccgtcccg

SEQ ID NO: 55708 - RNA, 23 nt, synthetic construct
  source 1..23: mol_type = other RNA
actggcggcagtggttccgtccc

SEQ ID NO: 55709 - RNA, 23 nt, synthetic construct
  source 1..23: mol_type = other RNA
gtgggcaggtgaggtcgcacagg

SEQ ID NO: 55710 - RNA, 23 nt, synthetic construct
  source 1..23: mol_type = other RNA
tccagtcgctgagctgtacgccc

SEQ ID NO: 55711 - RNA, 23 nt, synthetic construct
  source 1..23: mol_type = other RNA
ccgtacatgaacacacggcgccc

SEQ ID NO: 55712 - RNA, 23 nt, synthetic construct
  source 1..23: mol_type = other RNA
agtttccgtccttgtcgtagcag

SEQ ID NO: 55713 - RNA, 23 nt, synthetic construct
  source 1..23: mol_type = other RNA
acgcacaccgtctcggggcagca

SEQ ID NO: 55714 - RNA, 23 nt, synthetic construct
  source 1..23: mol_type = other RNA
gggccggtttcacccacggggtg

SEQ ID NO: 55715 - RNA, 23 nt, synthetic construct
  source 1..23: mol_type = other RNA
gacgttgaagtcctcgtaggcgg

SEQ ID NO: 55716 - RNA, 23 nt, synthetic construct
  source 1..23: mol_type = other RNA
ggacgttgaagtcctcgtaggcg

SEQ ID NO: 55717 - RNA, 23 nt, synthetic construct
  source 1..23: mol_type = other RNA
acgttgaagtcctcgtaggcggc

SEQ ID NO: 55718 - RNA, 23 nt, synthetic construct
  source 1..23: mol_type = other RNA
gcacactgcgtagaaatggcagc

SEQ ID NO: 55719 - RNA, 23 nt, synthetic construct
  source 1..23: mol_type = other RNA
gcactgcaccgacactgaaccct

SEQ ID NO: 55720 - RNA, 23 nt, synthetic construct
  source 1..23: mol_type = other RNA
cggccgccttgcctgtcgcagct

SEQ ID NO: 55721 - RNA, 23 nt, synthetic construct
  source 1..23: mol_type = other RNA
tagcgtatcttgtagggtgggtc

SEQ ID NO: 55722 - RNA, 23 nt, synthetic construct
  source 1..23: mol_type = other RNA
aacccatcgggtcccacgcaggg

SEQ ID NO: 55723 - RNA, 23 nt, synthetic construct
  source 1..23: mol_type = other RNA
gacacggttgtcacccacgcacc

SEQ ID NO: 55724 - RNA, 23 nt, synthetic construct
  source 1..23: mol_type = other RNA
gtgcgtggcactccgcaaaggcc

SEQ ID NO: 55725 - RNA, 23 nt, synthetic construct
  source 1..23: mol_type = other RNA
taggcccgcacatgcttagtttg

SEQ ID NO: 55726 - RNA, 23 nt, synthetic construct
  source 1..23: mol_type = other RNA
ccgggcgagaaaaactgtccaaa

SEQ ID NO: 55727 - RNA, 23 nt, synthetic construct
  source 1..23: mol_type = other RNA
ccccgggcgagaaaaactgtcca

SEQ ID NO: 55728 - RNA, 23 nt, synthetic construct
  source 1..23: mol_type = other RNA
ccaccggttgcacctcgccagtc

SEQ ID NO: 55729 - RNA, 23 nt, synthetic construct
  source 1..23: mol_type = other RNA
ggtcgtgttgatgcggacttgac

SEQ ID NO: 55730 - RNA, 23 nt, synthetic construct
  source 1..23: mol_type = other RNA
ggcccgcacatgcttagtttgtt

SEQ ID NO: 55731 - RNA, 23 nt, synthetic construct
  source 1..23: mol_type = other RNA
gtagatgacgtcctggtagctgt

SEQ ID NO: 55732 - RNA, 23 nt, synthetic construct
  source 1..23: mol_type = other RNA
cggtcggtcttattgtagatgac

SEQ ID NO: 55733 - RNA, 23 nt, synthetic construct
  source 1..23: mol_type = other RNA
gacgggatggccgtggatccagt

SEQ ID NO: 55734 - RNA, 23 nt, synthetic construct
  source 1..23: mol_type = other RNA
gtgaccgtcacggggcctgagct

SEQ ID NO: 55735 - RNA, 23 nt, synthetic construct
  source 1..23: mol_type = other RNA
cacgccgccgtccgcttggaccc

SEQ ID NO: 55736 - RNA, 23 nt, synthetic construct
  source 1..23: mol_type = other RNA
cacgtattcgcagcagagaaccc

SEQ ID NO: 55737 - RNA, 23 nt, synthetic construct
  source 1..23: mol_type = other RNA
ggccgttgcgacctcagccctga

SEQ ID NO: 55738 - RNA, 23 nt, synthetic construct
  source 1..23: mol_type = other RNA
atggcgatcaagcaggcgccaag

SEQ ID NO: 55739 - RNA, 23 nt, synthetic construct
  source 1..23: mol_type = other RNA
gcgtgttggaagggtggatgtgg

SEQ ID NO: 55740 - RNA, 23 nt, synthetic construct
  source 1..23: mol_type = other RNA
ggtgtaacgctggtagctgtggg

SEQ ID NO: 55741 - RNA, 23 nt, synthetic construct
  source 1..23: mol_type = other RNA
gtgatcgtagtggccgtggtggt

SEQ ID NO: 55742 - RNA, 23 nt, synthetic construct
  source 1..23: mol_type = other RNA
gtgatcgtagtggccgtggtggt

SEQ ID NO: 55743 - RNA, 23 nt, synthetic construct
  source 1..23: mol_type = other RNA
gtgatcgtagtggccgtggtggt

SEQ ID NO: 55744 - RNA, 23 nt, synthetic construct
  source 1..23: mol_type = other RNA
gaggcgtgcgtgccgtccctggg

SEQ ID NO: 55745 - RNA, 23 nt, synthetic construct
  source 1..23: mol_type = other RNA
gtgatcgtagtggccgtggtgat

SEQ ID NO: 55746 - RNA, 23 nt, synthetic construct
  source 1..23: mol_type = other RNA
ggtgtaacgctggtagctgtgga

SEQ ID NO: 55747 - RNA, 23 nt, synthetic construct
  source 1..23: mol_type = other RNA
gtgatcgtagtggccgtggtggt

SEQ ID NO: 55748 - RNA, 23 nt, synthetic construct
  source 1..23: mol_type = other RNA
cagtcggatgaacacgctggtct

SEQ ID NO: 55749 - RNA, 23 nt, synthetic construct
  source 1..23: mol_type = other RNA
cccccgcatgcggtcacagtcca

SEQ ID NO: 55750 - RNA, 23 nt, synthetic construct
  source 1..23: mol_type = other RNA
ggtcgtcactgcagcagaggacc

SEQ ID NO: 55751 - RNA, 23 nt, synthetic construct
  source 1..23: mol_type = other RNA
ggaatagtgggagccgccccaca

SEQ ID NO: 55752 - RNA, 23 nt, synthetic construct
  source 1..23: mol_type = other RNA
aaagcgtgcatggatctctctca

SEQ ID NO: 55753 - RNA, 23 nt, synthetic construct
  source 1..23: mol_type = other RNA
cacagggcacgtattcgcagcag

SEQ ID NO: 55754 - RNA, 23 nt, synthetic construct
  source 1..23: mol_type = other RNA
gcgtggcactccgcaaaggccgg

SEQ ID NO: 55755 - RNA, 23 nt, synthetic construct
  source 1..23: mol_type = other RNA
ggctatagtgctcggctctgtga

SEQ ID NO: 55756 - RNA, 23 nt, synthetic construct
  source 1..23: mol_type = other RNA
ccaccgccttaaaggtcccctct

SEQ ID NO: 55757 - RNA, 23 nt, synthetic construct
  source 1..23: mol_type = other RNA
tggctgtgatcgtagtggccgtg

SEQ ID NO: 55758 - RNA, 23 nt, synthetic construct
  source 1..23: mol_type = other RNA
ccgtgaagtcgtcagcctggttc

SEQ ID NO: 55759 - RNA, 23 nt, synthetic construct
  source 1..23: mol_type = other RNA
gcgatcgccatcaaaggtgatga

SEQ ID NO: 55760 - RNA, 23 nt, synthetic construct
  source 1..23: mol_type = other RNA
tctcgccaccgccttaaaggtcc

SEQ ID NO: 55761 - RNA, 23 nt, synthetic construct
  source 1..23: mol_type = other RNA
gtcgaccggatgctcggggtcac

SEQ ID NO: 55762 - RNA, 23 nt, synthetic construct
  source 1..23: mol_type = other RNA
gtggtcgtcactgcagcagagga

SEQ ID NO: 55763 - RNA, 23 nt, synthetic construct
  source 1..23: mol_type = other RNA
gttgtggcacgtcccctgcagtg

SEQ ID NO: 55764 - RNA, 23 nt, synthetic construct
  source 1..23: mol_type = other RNA
gcggggttgtggcacgtcccctg

SEQ ID NO: 55765 - RNA, 23 nt, synthetic construct
  source 1..23: mol_type = other RNA
ctgtgataggcgggtccaggtgg

SEQ ID NO: 55766 - RNA, 23 nt, synthetic construct
  source 1..23: mol_type = other RNA
ggatcgcccgtgtgtggtggcca

SEQ ID NO: 55767 - RNA, 23 nt, synthetic construct
  source 1..23: mol_type = other RNA
ggatccggtgggcaccgtcacgg

SEQ ID NO: 55768 - RNA, 23 nt, synthetic construct
  source 1..23: mol_type = other RNA
ctgtgataggcgggtccaggtgg

SEQ ID NO: 55769 - RNA, 23 nt, synthetic construct
  source 1..23: mol_type = other RNA
ggatcgcccgtgtgtggtggccg

SEQ ID NO: 55770 - RNA, 23 nt, synthetic construct
  source 1..23: mol_type = other RNA
gttattggggccgatgtggggct

SEQ ID NO: 55771 - RNA, 23 nt, synthetic construct
  source 1..23: mol_type = other RNA
ggatccggtgggcaccgtcacgg

SEQ ID NO: 55772 - RNA, 23 nt, synthetic construct
  source 1..23: mol_type = other RNA
ctgtgataggcgggtccaggcgg

SEQ ID NO: 55773 - RNA, 23 nt, synthetic construct
  source 1..23: mol_type = other RNA
gaccgcccgtgtgtggtggccgt

SEQ ID NO: 55774 - RNA, 23 nt, synthetic construct
  source 1..23: mol_type = other RNA
tgaacacgctggtcttccggtcc

SEQ ID NO: 55775 - RNA, 23 nt, synthetic construct
  source 1..23: mol_type = other RNA
gccccggaaggtgtaagaggtgc

SEQ ID NO: 55776 - RNA, 23 nt, synthetic construct
  source 1..23: mol_type = other RNA
ggcggtctggacgcactccccac

SEQ ID NO: 55777 - RNA, 23 nt, synthetic construct
  source 1..23: mol_type = other RNA
aggcccgcacatgcttagtttgt

SEQ ID NO: 55778 - RNA, 23 nt, synthetic construct
  source 1..23: mol_type = other RNA
ctgcggcaccacgagcatggccg

SEQ ID NO: 55779 - RNA, 23 nt, synthetic construct
  source 1..23: mol_type = other RNA
ggagttgaggaacacgccgccgt

SEQ ID NO: 55780 - RNA, 23 nt, synthetic construct
  source 1..23: mol_type = other RNA
gtgccgtgagcgtagcaggggca

SEQ ID NO: 55781 - RNA, 23 nt, synthetic construct
  source 1..23: mol_type = other RNA
cgtcgtgcaccacctctccagga

SEQ ID NO: 55782 - RNA, 23 nt, synthetic construct
  source 1..23: mol_type = other RNA
tgcagtcggatgaacacgctggt

SEQ ID NO: 55783 - RNA, 23 nt, synthetic construct
  source 1..23: mol_type = other RNA
gttgcttccgcagatggcgatca

SEQ ID NO: 55784 - RNA, 23 nt, synthetic construct
  source 1..23: mol_type = other RNA
tcgcggacacacacggtggagac

SEQ ID NO: 55785 - RNA, 23 nt, synthetic construct
  source 1..23: mol_type = other RNA
cagcggcatgtcgggaagctgcg

SEQ ID NO: 55786 - RNA, 23 nt, synthetic construct
  source 1..23: mol_type = other RNA
ccaccgtggttatgggggccgat

SEQ ID NO: 55787 - RNA, 23 nt, synthetic construct
  source 1..23: mol_type = other RNA
ggggataggtgttgtccctggag

SEQ ID NO: 55788 - RNA, 23 nt, synthetic construct
  source 1..23: mol_type = other RNA
ccaccgtggttatgggggccgat

SEQ ID NO: 55789 - RNA, 23 nt, synthetic construct
  source 1..23: mol_type = other RNA
ggggataggtgttgtccctggag

SEQ ID NO: 55790 - RNA, 23 nt, synthetic construct
  source 1..23: mol_type = other RNA
ccaccgtggttatgggggccgat

SEQ ID NO: 55791 - RNA, 23 nt, synthetic construct
  source 1..23: mol_type = other RNA
accgacactgaaccctcgtcaca

SEQ ID NO: 55792 - RNA, 23 nt, synthetic construct
  source 1..23: mol_type = other RNA
ggatccggtgggcaccgtcacgg

SEQ ID NO: 55793 - RNA, 23 nt, synthetic construct
  source 1..23: mol_type = other RNA
ctgtgataggcgggtccaggtgg

SEQ ID NO: 55794 - RNA, 23 nt, synthetic construct
  source 1..23: mol_type = other RNA
ggatcgcccgtgtgtggtggccg

SEQ ID NO: 55795 - RNA, 23 nt, synthetic construct
  source 1..23: mol_type = other RNA
ggatccggtgggcaccgtcacgg

SEQ ID NO: 55796 - RNA, 23 nt, synthetic construct
  source 1..23: mol_type = other RNA
cggtttcacccacggggtgggca

SEQ ID NO: 55797 - RNA, 23 nt, synthetic construct
  source 1..23: mol_type = other RNA
atagtagtttccgtccttgtcgt

SEQ ID NO: 55798 - RNA, 23 nt, synthetic construct
  source 1..23: mol_type = other RNA
tccggccgcacggatgttggagt

SEQ ID NO: 55799 - RNA, 23 nt, synthetic construct
  source 1..23: mol_type = other RNA
tccggccgcacggatgttggagt

SEQ ID NO: 55800 - RNA, 23 nt, synthetic construct
  source 1..23: mol_type = other RNA
tccggccgcacggatgttggagt

SEQ ID NO: 55801 - RNA, 23 nt, synthetic construct
  source 1..23: mol_type = other RNA
tccggccgcacggatgttggagt

SEQ ID NO: 55802 - RNA, 23 nt, synthetic construct
  source 1..23: mol_type = other RNA
ctgtgataggcgggtccaggtgg

SEQ ID NO: 55803 - RNA, 23 nt, synthetic construct
  source 1..23: mol_type = other RNA
gccgtgatcgtagtggccgtggt

SEQ ID NO: 55804 - RNA, 23 nt, synthetic construct
  source 1..23: mol_type = other RNA
gccgtgatcgtagtggccgtggt

SEQ ID NO: 55805 - RNA, 23 nt, synthetic construct
  source 1..23: mol_type = other RNA
gccgtgatcgtagtggccgtggt

SEQ ID NO: 55806 - RNA, 23 nt, synthetic construct
  source 1..23: mol_type = other RNA
gccgtgatcgtagtggccgtggt

SEQ ID NO: 55807 - RNA, 23 nt, synthetic construct
  source 1..23: mol_type = other RNA
cctctcgccaccgccttaaaggt

SEQ ID NO: 55808 - RNA, 23 nt, synthetic construct
  source 1..23: mol_type = other RNA
ggccgcatggcttgtacactttg

SEQ ID NO: 55809 - RNA, 23 nt, synthetic construct
  source 1..23: mol_type = other RNA
agccgggacggttgcacggcggg

SEQ ID NO: 55810 - RNA, 23 nt, synthetic construct
  source 1..23: mol_type = other RNA
aagccgggacggttgcacggcgg

SEQ ID NO: 55811 - RNA, 23 nt, synthetic construct
  source 1..23: mol_type = other RNA
tggacagctcgctcgtgagtgtt

SEQ ID NO: 55812 - RNA, 23 nt, synthetic construct
  source 1..23: mol_type = other RNA
gatccagtggttgcggtcgtagt

SEQ ID NO: 55813 - RNA, 23 nt, synthetic construct
  source 1..23: mol_type = other RNA
cccgtggttgtggtagtcggcac

SEQ ID NO: 55814 - RNA, 23 nt, synthetic construct
  source 1..23: mol_type = other RNA
cccgtggttgtggtagtcggcac

SEQ ID NO: 55815 - RNA, 23 nt, synthetic construct
  source 1..23: mol_type = other RNA
gactgtgaagcccgtggttgtgg

SEQ ID NO: 55816 - RNA, 23 nt, synthetic construct
  source 1..23: mol_type = other RNA
cccgtggttgtggtagtcggcac

SEQ ID NO: 55817 - RNA, 23 nt, synthetic construct
  source 1..23: mol_type = other RNA
ccctctcgccaccgccttaaagg

SEQ ID NO: 55818 - RNA, 23 nt, synthetic construct
  source 1..23: mol_type = other RNA
ctggggggataggtgttgtccct

SEQ ID NO: 55819 - RNA, 23 nt, synthetic construct
  source 1..23: mol_type = other RNA
ctggggggataggtgttgtccct

SEQ ID NO: 55820 - RNA, 23 nt, synthetic construct
  source 1..23: mol_type = other RNA
agaactcgttgaaggccgggagg

SEQ ID NO: 55821 - RNA, 23 nt, synthetic construct
  source 1..23: mol_type = other RNA
aacacgccgccgtccgcttggac

SEQ ID NO: 55822 - RNA, 23 nt, synthetic construct
  source 1..23: mol_type = other RNA
tgatggtgccgttgcttccgcag

SEQ ID NO: 55823 - RNA, 23 nt, synthetic construct
  source 1..23: mol_type = other RNA
caggccgaagtggacgtcacagt

SEQ ID NO: 55824 - RNA, 23 nt, synthetic construct
  source 1..23: mol_type = other RNA
gggtcgaggtgcgggtcttgctg

SEQ ID NO: 55825 - RNA, 23 nt, synthetic construct
  source 1..23: mol_type = other RNA
gggtcgaggtgcgggtcttgctg

SEQ ID NO: 55826 - RNA, 23 nt, synthetic construct
  source 1..23: mol_type = other RNA
gggtcgaggtgcgggtcttgctg

SEQ ID NO: 55827 - RNA, 23 nt, synthetic construct
  source 1..23: mol_type = other RNA
gggtcgaggtgcgggtcttgctg

SEQ ID NO: 55828 - RNA, 23 nt, synthetic construct
  source 1..23: mol_type = other RNA
tgccattgtacgaacacagctga

SEQ ID NO: 55829 - RNA, 23 nt, synthetic construct
  source 1..23: mol_type = other RNA
tgccatagccccccggagcaggt

SEQ ID NO: 55830 - RNA, 23 nt, synthetic construct
  source 1..23: mol_type = other RNA
ttgatggcattgtcgtcgaagtt

SEQ ID NO: 55831 - RNA, 23 nt, synthetic construct
  source 1..23: mol_type = other RNA
catagtagtttccgtccttgtcg

SEQ ID NO: 55832 - RNA, 23 nt, synthetic construct
  source 1..23: mol_type = other RNA
gatgggtgtaacgctggtagctg

SEQ ID NO: 55833 - RNA, 23 nt, synthetic construct
  source 1..23: mol_type = other RNA
tgtgctagaggagggtgttgcca

SEQ ID NO: 55834 - RNA, 23 nt, synthetic construct
  source 1..23: mol_type = other RNA
tggttatgggggccgatgtgggg

SEQ ID NO: 55835 - RNA, 23 nt, synthetic construct
  source 1..23: mol_type = other RNA
ggcatggggtagctgtagtccag

SEQ ID NO: 55836 - RNA, 23 nt, synthetic construct
  source 1..23: mol_type = other RNA
aggtgtcaaagtccccgccagag

SEQ ID NO: 55837 - RNA, 23 nt, synthetic construct
  source 1..23: mol_type = other RNA
tgtgctagaggagggtgttgcca

SEQ ID NO: 55838 - RNA, 23 nt, synthetic construct
  source 1..23: mol_type = other RNA
ggcatggggtagctgtagtccag

SEQ ID NO: 55839 - RNA, 23 nt, synthetic construct
  source 1..23: mol_type = other RNA
aggtgtcaaagtccccgccagag

SEQ ID NO: 55840 - RNA, 23 nt, synthetic construct
  source 1..23: mol_type = other RNA
gtggatccagtggttgcggtcgt

SEQ ID NO: 55841 - RNA, 23 nt, synthetic construct
  source 1..23: mol_type = other RNA
tggctgtaacgctggtagctgtg

SEQ ID NO: 55842 - RNA, 23 nt, synthetic construct
  source 1..23: mol_type = other RNA
tgtgctagaggagggtgttgcca

SEQ ID NO: 55843 - RNA, 23 nt, synthetic construct
  source 1..23: mol_type = other RNA
gggcagggaccgcccgtgtgtgg

SEQ ID NO: 55844 - RNA, 23 nt, synthetic construct
  source 1..23: mol_type = other RNA
tggttatgggggccgatgtgggg

SEQ ID NO: 55845 - RNA, 23 nt, synthetic construct
  source 1..23: mol_type = other RNA
ggcatggggtagctgtagtccag

SEQ ID NO: 55846 - RNA, 23 nt, synthetic construct
  source 1..23: mol_type = other RNA
aggtgtcaaagtccccgccagag

SEQ ID NO: 55847 - RNA, 23 nt, synthetic construct
  source 1..23: mol_type = other RNA
tgtgctagaggagggtgttgcca

SEQ ID NO: 55848 - RNA, 23 nt, synthetic construct
  source 1..23: mol_type = other RNA
tggttatgggggccgatgtgggg

SEQ ID NO: 55849 - RNA, 23 nt, synthetic construct
  source 1..23: mol_type = other RNA
ggcatggggtagctgtagtccag

SEQ ID NO: 55850 - RNA, 23 nt, synthetic construct
  source 1..23: mol_type = other RNA
aggtgtcaaagtccccgccagag

SEQ ID NO: 55851 - RNA, 23 nt, synthetic construct
  source 1..23: mol_type = other RNA
gatgggtgtaacgctggtagctg

SEQ ID NO: 55852 - RNA, 23 nt, synthetic construct
  source 1..23: mol_type = other RNA
tgtgctagaggagggtgttgcca

SEQ ID NO: 55853 - RNA, 23 nt, synthetic construct
  source 1..23: mol_type = other RNA
accatcacggtggctatagtgct

SEQ ID NO: 55854 - RNA, 23 nt, synthetic construct
  source 1..23: mol_type = other RNA
ggcccgggggcacaaggttgtgg

SEQ ID NO: 55855 - RNA, 23 nt, synthetic construct
  source 1..23: mol_type = other RNA
caggcgttgaagaatgggcccgg

SEQ ID NO: 55856 - RNA, 23 nt, synthetic construct
  source 1..23: mol_type = other RNA
ccctcgtcacacacgcaggactg

SEQ ID NO: 55857 - RNA, 23 nt, synthetic construct
  source 1..23: mol_type = other RNA
ccccgtagaaggtgccattgtac

SEQ ID NO: 55858 - RNA, 23 nt, synthetic construct
  source 1..23: mol_type = other RNA
cagcaggacgacacggttgtcac

SEQ ID NO: 55859 - RNA, 23 nt, synthetic construct
  source 1..23: mol_type = other RNA
actgcaccgacactgaaccctcg

SEQ ID NO: 55860 - RNA, 23 nt, synthetic construct
  source 1..23: mol_type = other RNA
ggggcagggatcgcccgtgtgtg

SEQ ID NO: 55861 - RNA, 23 nt, synthetic construct
  source 1..23: mol_type = other RNA
ttccccgggcgagaaaaactgtc

SEQ ID NO: 55862 - RNA, 23 nt, synthetic construct
  source 1..23: mol_type = other RNA
tgaaccctcgtcacacacgcagg

SEQ ID NO: 55863 - RNA, 23 nt, synthetic construct
  source 1..23: mol_type = other RNA
agtcgagtgctgggtggtaccgg

SEQ ID NO: 55864 - RNA, 23 nt, synthetic construct
  source 1..23: mol_type = other RNA
agtcgagtgctgggtggtaccgg

SEQ ID NO: 55865 - RNA, 23 nt, synthetic construct
  source 1..23: mol_type = other RNA
agtcgagtgctgggtggtactgg

SEQ ID NO: 55866 - RNA, 23 nt, synthetic construct
  source 1..23: mol_type = other RNA
agtcgagtgctgggtggtaccgg

SEQ ID NO: 55867 - RNA, 23 nt, synthetic construct
  source 1..23: mol_type = other RNA
acagctcgctcgtgagtgttggc

SEQ ID NO: 55868 - RNA, 23 nt, synthetic construct
  source 1..23: mol_type = other RNA
agtcggatgaacacgctggtctt

SEQ ID NO: 55869 - RNA, 23 nt, synthetic construct
  source 1..23: mol_type = other RNA
ggaagcgtgcgtgccgtccctgg

SEQ ID NO: 55870 - RNA, 23 nt, synthetic construct
  source 1..23: mol_type = other RNA
cgccgtccgcttggacccggatg

SEQ ID NO: 55871 - RNA, 23 nt, synthetic construct
  source 1..23: mol_type = other RNA
caccaccgtggttattggggccg

SEQ ID NO: 55872 - RNA, 23 nt, synthetic construct
  source 1..23: mol_type = other RNA
ccattgtgcgccgggttcagggg

SEQ ID NO: 55873 - RNA, 23 nt, synthetic construct
  source 1..23: mol_type = other RNA
ggcacgaaggaaacgctgcaggt

SEQ ID NO: 55874 - RNA, 23 nt, synthetic construct
  source 1..23: mol_type = other RNA
gaaggccgggaggccgttgaagt

SEQ ID NO: 55875 - RNA, 23 nt, synthetic construct
  source 1..23: mol_type = other RNA
tcgcacaggccaccggttgcacc

SEQ ID NO: 55876 - RNA, 23 nt, synthetic construct
  source 1..23: mol_type = other RNA
accgctccccgggaaatttagga

SEQ ID NO: 55877 - RNA, 23 nt, synthetic construct
  source 1..23: mol_type = other RNA
ggtcacccatagggtggtctttt

SEQ ID NO: 55878 - RNA, 23 nt, synthetic construct
  source 1..23: mol_type = other RNA
ataggtgttgtccctggagttga

SEQ ID NO: 55879 - RNA, 23 nt, synthetic construct
  source 1..23: mol_type = other RNA
gggaccgcccgtgtgtggtggcc

SEQ ID NO: 55880 - RNA, 23 nt, synthetic construct
  source 1..23: mol_type = other RNA
ataggtgttgtccctggagttga

SEQ ID NO: 55881 - RNA, 23 nt, synthetic construct
  source 1..23: mol_type = other RNA
acggttgtcacccacgcacctgg

SEQ ID NO: 55882 - RNA, 23 nt, synthetic construct
  source 1..23: mol_type = other RNA
gcacaccgtctcggggcagcagg

SEQ ID NO: 55883 - RNA, 23 nt, synthetic construct
  source 1..23: mol_type = other RNA
agaacgttctcagacagcagtgg

SEQ ID NO: 55884 - RNA, 23 nt, synthetic construct
  source 1..23: mol_type = other RNA
ttgcacactgcgtagaaatggca

SEQ ID NO: 55885 - RNA, 23 nt, synthetic construct
  source 1..23: mol_type = other RNA
cgacacggttgtcacccacgcac

SEQ ID NO: 55886 - RNA, 23 nt, synthetic construct
  source 1..23: mol_type = other RNA
cgtacatgaacacacggcgccct

SEQ ID NO: 55887 - RNA, 23 nt, synthetic construct
  source 1..23: mol_type = other RNA
cccgcatgcggtcacagtccacc

SEQ ID NO: 55888 - RNA, 23 nt, synthetic construct
  source 1..23: mol_type = other RNA
cataggcccgcacatgcttagtt

SEQ ID NO: 55889 - RNA, 23 nt, synthetic construct
  source 1..23: mol_type = other RNA
agggaccgcccgtgtgtggtggc

SEQ ID NO: 55890 - RNA, 23 nt, synthetic construct
  source 1..23: mol_type = other RNA
tggatccggtgggcaccgtcacg

SEQ ID NO: 55891 - RNA, 23 nt, synthetic construct
  source 1..23: mol_type = other RNA
tggatccggtgggcaccgtcacg

SEQ ID NO: 55892 - RNA, 23 nt, synthetic construct
  source 1..23: mol_type = other RNA
tggatccggtgggcaccgtcacg

SEQ ID NO: 55893 - RNA, 23 nt, synthetic construct
  source 1..23: mol_type = other RNA
tggatccggtgggcaccgtcacg

SEQ ID NO: 55894 - RNA, 23 nt, synthetic construct
  source 1..23: mol_type = other RNA
agctcgtagtcgtgacagagcgg

SEQ ID NO: 55895 - RNA, 23 nt, synthetic construct
  source 1..23: mol_type = other RNA
tggtgttcggcactgggggtgtg

SEQ ID NO: 55896 - RNA, 23 nt, synthetic construct
  source 1..23: mol_type = other RNA
tggtgttcggcactgggggtgtg

SEQ ID NO: 55897 - RNA, 23 nt, synthetic construct
  source 1..23: mol_type = other RNA
cctcaggttttcaaacgtctcaa

SEQ ID NO: 55898 - RNA, 23 nt, synthetic construct
  source 1..23: mol_type = other RNA
tttaggaaacccatcgggtccca

SEQ ID NO: 55899 - RNA, 23 nt, synthetic construct
  source 1..23: mol_type = other RNA
cacaggcccgcgtcgtggcaggc

SEQ ID NO: 55900 - RNA, 23 nt, synthetic construct
  source 1..23: mol_type = other RNA
tcctgatgatggtgccgttgctt

SEQ ID NO: 55901 - RNA, 23 nt, synthetic construct
  source 1..23: mol_type = other RNA
ggtggcggggttgtggcacgtcc

SEQ ID NO: 55902 - RNA, 23 nt, synthetic construct
  source 1..23: mol_type = other RNA
gtggtcggtggcggggttgtggc

SEQ ID NO: 55903 - RNA, 23 nt, synthetic construct
  source 1..23: mol_type = other RNA
agtacttggacgctccggggcag

SEQ ID NO: 55904 - RNA, 23 nt, synthetic construct
  source 1..23: mol_type = other RNA
ggagccgttggacgcctccagca

SEQ ID NO: 55905 - RNA, 23 nt, synthetic construct
  source 1..23: mol_type = other RNA
tgcctcaggttttcaaacgtctc

SEQ ID NO: 55906 - RNA, 23 nt, synthetic construct
  source 1..23: mol_type = other RNA
ctgcctcaggttttcaaacgtct

SEQ ID NO: 55907 - RNA, 23 nt, synthetic construct
  source 1..23: mol_type = other RNA
ttgttgttggggccagcgtgggt

SEQ ID NO: 55908 - RNA, 23 nt, synthetic construct
  source 1..23: mol_type = other RNA
tgcaccaaccccgtagaaggtgc

SEQ ID NO: 55909 - RNA, 23 nt, synthetic construct
  source 1..23: mol_type = other RNA
agccgttaggacagtgcaagggc

SEQ ID NO: 55910 - RNA, 23 nt, synthetic construct
  source 1..23: mol_type = other RNA
ggcggccgccttgcctgtcgcag

SEQ ID NO: 55911 - RNA, 23 nt, synthetic construct
  source 1..23: mol_type = other RNA
agtagtttccgtccttgtcgtag

SEQ ID NO: 55912 - RNA, 23 nt, synthetic construct
  source 1..23: mol_type = other RNA
gaagatccccatgtagcgtatct

SEQ ID NO: 55913 - RNA, 23 nt, synthetic construct
  source 1..23: mol_type = other RNA
tggttggcgtatttgggatccag

SEQ ID NO: 55914 - RNA, 23 nt, synthetic construct
  source 1..23: mol_type = other RNA
cttggacccggatggccgtgtcc

SEQ ID NO: 55915 - RNA, 23 nt, synthetic construct
  source 1..23: mol_type = other RNA
tggtgttcggcactgggggtgtg

SEQ ID NO: 55916 - RNA, 23 nt, synthetic construct
  source 1..23: mol_type = other RNA
tggtgttcggcactgggggtgtg

SEQ ID NO: 55917 - RNA, 23 nt, synthetic construct
  source 1..23: mol_type = other RNA
taggcgtagcgctgggacttggg

SEQ ID NO: 55918 - RNA, 23 nt, synthetic construct
  source 1..23: mol_type = other RNA
agcgtagcaggggcactcctggg

SEQ ID NO: 55919 - RNA, 23 nt, synthetic construct
  source 1..23: mol_type = other RNA
ggccggtttcacccacggggtgg

SEQ ID NO: 55920 - RNA, 23 nt, synthetic construct
  source 1..23: mol_type = other RNA
gaccgtcacggggcctgagctgg

SEQ ID NO: 55921 - RNA, 23 nt, synthetic construct
  source 1..23: mol_type = other RNA
gttagtcaaggggctcattgtcg

SEQ ID NO: 55922 - RNA, 23 nt, synthetic construct
  source 1..23: mol_type = other RNA
gaagcgtgcgtgccgtccctggg

SEQ ID NO: 55923 - RNA, 23 nt, synthetic construct
  source 1..23: mol_type = other RNA
gtggatccggtgggcaccgtcac

SEQ ID NO: 55924 - RNA, 23 nt, synthetic construct
  source 1..23: mol_type = other RNA
gtggatccggtgggcaccgtcac

SEQ ID NO: 55925 - RNA, 23 nt, synthetic construct
  source 1..23: mol_type = other RNA
gtggatccggtgggcaccgtcac

SEQ ID NO: 55926 - RNA, 23 nt, synthetic construct
  source 1..23: mol_type = other RNA
gtggatccggtgggcaccgtcac

SEQ ID NO: 55927 - RNA, 23 nt, synthetic construct
  source 1..23: mol_type = other RNA
acgtattcgcagcagagaacccg

SEQ ID NO: 55928 - RNA, 23 nt, synthetic construct
  source 1..23: mol_type = other RNA
gagtcgagtgctgggtggtaccg

SEQ ID NO: 55929 - RNA, 23 nt, synthetic construct
  source 1..23: mol_type = other RNA
gagtcgagtgctgggtggtaccg

SEQ ID NO: 55930 - RNA, 23 nt, synthetic construct
  source 1..23: mol_type = other RNA
gagtcgagtgctgggtggtactg

SEQ ID NO: 55931 - RNA, 23 nt, synthetic construct
  source 1..23: mol_type = other RNA
gagtcgagtgctgggtggtaccg

SEQ ID NO: 55932 - RNA, 23 nt, synthetic construct
  source 1..23: mol_type = other RNA
gaatccgtgctgcgcgggcgctc

SEQ ID NO: 55933 - RNA, 23 nt, synthetic construct
  source 1..23: mol_type = other RNA
gtatggggccgcatggcttgtac

SEQ ID NO: 55934 - RNA, 23 nt, synthetic construct
  source 1..23: mol_type = other RNA
agtttgttccagggcgtcccagt

SEQ ID NO: 55935 - RNA, 23 nt, synthetic construct
  source 1..23: mol_type = other RNA
gcacgtattcgcagcagagaacc

SEQ ID NO: 55936 - RNA, 23 nt, synthetic construct
  source 1..23: mol_type = other RNA
agggcatacctggtaccctctct

SEQ ID NO: 55937 - RNA, 23 nt, synthetic construct
  source 1..23: mol_type = other RNA
caccaaccccgtagaaggtgcca

SEQ ID NO: 55938 - RNA, 23 nt, synthetic construct
  source 1..23: mol_type = other RNA
gcgcgagaaggcactgttgggat

SEQ ID NO: 55939 - RNA, 23 nt, synthetic construct
  source 1..23: mol_type = other RNA
gccgagggggtgaccgtcacggg

SEQ ID NO: 55940 - RNA, 23 nt, synthetic construct
  source 1..23: mol_type = other RNA
ggcgtgagtgccgtccctgggct

SEQ ID NO: 55941 - RNA, 23 nt, synthetic construct
  source 1..23: mol_type = other RNA
caggtcgtccctggagtggagga

SEQ ID NO: 55942 - RNA, 23 nt, synthetic construct
  source 1..23: mol_type = other RNA
ggcgtgagtgccgtccctgggct

SEQ ID NO: 55943 - RNA, 23 nt, synthetic construct
  source 1..23: mol_type = other RNA
ggcgtgagtgccgtccctgggct

SEQ ID NO: 55944 - RNA, 23 nt, synthetic construct
  source 1..23: mol_type = other RNA
gagattcccaaagcgtgcatgga

SEQ ID NO: 55945 - RNA, 23 nt, synthetic construct
  source 1..23: mol_type = other RNA
gcaggacgacacggttgtcaccc

SEQ ID NO: 55946 - RNA, 23 nt, synthetic construct
  source 1..23: mol_type = other RNA
agggatcgcccgtgtgtggtggc

SEQ ID NO: 55947 - RNA, 23 nt, synthetic construct
  source 1..23: mol_type = other RNA
agggatcgcccgtgtgtggtggc

SEQ ID NO: 55948 - RNA, 23 nt, synthetic construct
  source 1..23: mol_type = other RNA
agggatcgcccgtgtgtggtggc

SEQ ID NO: 55949 - RNA, 23 nt, synthetic construct
  source 1..23: mol_type = other RNA
aaatggcagccggctcggtcggt

SEQ ID NO: 55950 - RNA, 23 nt, synthetic construct
  source 1..23: mol_type = other RNA
ggtcgtagagtttctcatcatag

SEQ ID NO: 55951 - RNA, 23 nt, synthetic construct
  source 1..23: mol_type = other RNA
gatgacgtcctggtagctgtagg

SEQ ID NO: 55952 - RNA, 23 nt, synthetic construct
  source 1..23: mol_type = other RNA
ctcgcggacacacacggtggaga

SEQ ID NO: 55953 - RNA, 23 nt, synthetic construct
  source 1..23: mol_type = other RNA
gcggcatgtcgggaagctgcgcc

SEQ ID NO: 55954 - RNA, 23 nt, synthetic construct
  source 1..23: mol_type = other RNA
gggcacgtattcgcagcagagaa

SEQ ID NO: 55955 - RNA, 23 nt, synthetic construct
  source 1..23: mol_type = other RNA
tccccgggcgagaaaaactgtcc

SEQ ID NO: 55956 - RNA, 23 nt, synthetic construct
  source 1..23: mol_type = other RNA
ggctcggtcggtcttattgtaga

SEQ ID NO: 55957 - RNA, 23 nt, synthetic construct
  source 1..23: mol_type = other RNA
gaggtcgcacaggccaccggttg

SEQ ID NO: 55958 - RNA, 23 nt, synthetic construct
  source 1..23: mol_type = other RNA
gttgtgttgcacacgcacaccgt

SEQ ID NO: 55959 - RNA, 23 nt, synthetic construct
  source 1..23: mol_type = other RNA
gtgccacaggatggtcgtgttga

SEQ ID NO: 55960 - RNA, 23 nt, synthetic construct
  source 1..23: mol_type = other RNA
ggagtcgagtgctgggtggtacc

SEQ ID NO: 55961 - RNA, 23 nt, synthetic construct
  source 1..23: mol_type = other RNA
ggagtcgagtgctgggtggtacc

SEQ ID NO: 55962 - RNA, 23 nt, synthetic construct
  source 1..23: mol_type = other RNA
ggagtcgagtgctgggtggtact

SEQ ID NO: 55963 - RNA, 23 nt, synthetic construct
  source 1..23: mol_type = other RNA
ggagtcgagtgctgggtggtacc

SEQ ID NO: 55964 - RNA, 23 nt, synthetic construct
  source 1..23: mol_type = other RNA
agtggcgccctcccgaaaggggt

SEQ ID NO: 55965 - RNA, 23 nt, synthetic construct
  source 1..23: mol_type = other RNA
tgcggacttgacaggagtcctcc

SEQ ID NO: 55966 - RNA, 23 nt, synthetic construct
  source 1..23: mol_type = other RNA
gccgtcgaccggatgctcggggt

SEQ ID NO: 55967 - RNA, 23 nt, synthetic construct
  source 1..23: mol_type = other RNA
gctgagcgtcaccgctttcaggc

SEQ ID NO: 55968 - RNA, 23 nt, synthetic construct
  source 1..23: mol_type = other RNA
agtcgccacccgagtcgcaggca

SEQ ID NO: 55969 - RNA, 23 nt, synthetic construct
  source 1..23: mol_type = other RNA
gtgataggcgggtccaggcggtg

SEQ ID NO: 55970 - RNA, 23 nt, synthetic construct
  source 1..23: mol_type = other RNA
catcccgtgggtctcgatgacca

SEQ ID NO: 55971 - RNA, 23 nt, synthetic construct
  source 1..23: mol_type = other RNA
cagttgccggccggcaagggcag

SEQ ID NO: 55972 - RNA, 23 nt, synthetic construct
  source 1..23: mol_type = other RNA
gctgtagcgatcgccatcaaagg

SEQ ID NO: 55973 - RNA, 23 nt, synthetic construct
  source 1..23: mol_type = other RNA
cacgtaggcgtagcgctgggact

SEQ ID NO: 55974 - RNA, 23 nt, synthetic construct
  source 1..23: mol_type = other RNA
agcgatcgccatcaaaggtgatg

SEQ ID NO: 55975 - RNA, 23 nt, synthetic construct
  source 1..23: mol_type = other RNA
gtagcgtatcttgtagggtgggt

SEQ ID NO: 55976 - RNA, 23 nt, synthetic construct
  source 1..23: mol_type = other RNA
ccagagtgcgtgatgtcatccag

SEQ ID NO: 55977 - RNA, 23 nt, synthetic construct
  source 1..23: mol_type = other RNA
gtcggatgaacacgctggtcttc

SEQ ID NO: 55978 - RNA, 23 nt, synthetic construct
  source 1..23: mol_type = other RNA
ccggcactcgatgtcagccagca

SEQ ID NO: 55979 - RNA, 23 nt, synthetic construct
  source 1..23: mol_type = other RNA
ggtgaccgtcacggggcctgagc

SEQ ID NO: 55980 - RNA, 23 nt, synthetic construct
  source 1..23: mol_type = other RNA
ctactcgtaggctgcggcgttga

SEQ ID NO: 55981 - RNA, 23 nt, synthetic construct
  source 1..23: mol_type = other RNA
gtgataggcgggtccaggtggtg

SEQ ID NO: 55982 - RNA, 23 nt, synthetic construct
  source 1..23: mol_type = other RNA
gccgtggcggtaagcactgtgga

SEQ ID NO: 55983 - RNA, 23 nt, synthetic construct
  source 1..23: mol_type = other RNA
gtgataggcgggtccaggtggtg

SEQ ID NO: 55984 - RNA, 23 nt, synthetic construct
  source 1..23: mol_type = other RNA
gtgataggcgggtccaggtggtg

SEQ ID NO: 55985 - RNA, 23 nt, synthetic construct
  source 1..23: mol_type = other RNA
gtgataggcgggtccaggtggtg

SEQ ID NO: 55986 - RNA, 23 nt, synthetic construct
  source 1..23: mol_type = other RNA
gccgtggcggtaagcactgtgga

SEQ ID NO: 55987 - RNA, 23 nt, synthetic construct
  source 1..23: mol_type = other RNA
gttgccccggaaggtgtaagagg

SEQ ID NO: 55988 - RNA, 23 nt, synthetic construct
  source 1..23: mol_type = other RNA
gacggttgcacggcgggggctga

SEQ ID NO: 55989 - RNA, 23 nt, synthetic construct
  source 1..23: mol_type = other RNA
cggttacgaagccgggacggttg

SEQ ID NO: 55990 - RNA, 23 nt, synthetic construct
  source 1..23: mol_type = other RNA
gatggtcgtgttgatgcggactt

SEQ ID NO: 55991 - RNA, 23 nt, synthetic construct
  source 1..23: mol_type = other RNA
gcagaacgttctcagacagcagt

SEQ ID NO: 55992 - RNA, 23 nt, synthetic construct
  source 1..23: mol_type = other RNA
cctcccgaaaggggtcctgctgg

SEQ ID NO: 55993 - RNA, 23 nt, synthetic construct
  source 1..23: mol_type = other RNA
gccgtccgcttggacccggatgg

SEQ ID NO: 55994 - RNA, 23 nt, synthetic construct
  source 1..23: mol_type = other RNA
tgtgataggcgggtccaggtggt

SEQ ID NO: 55995 - RNA, 23 nt, synthetic construct
  source 1..23: mol_type = other RNA
acggatgttggagtaggtgtcaa

SEQ ID NO: 55996 - RNA, 23 nt, synthetic construct
  source 1..23: mol_type = other RNA
tgtgataggcgggtccaggtggt

SEQ ID NO: 55997 - RNA, 23 nt, synthetic construct
  source 1..23: mol_type = other RNA
acggatgttggagtaggtgtcaa

SEQ ID NO: 55998 - RNA, 23 nt, synthetic construct
  source 1..23: mol_type = other RNA
tgtgataggcgggtccaggcggt

SEQ ID NO: 55999 - RNA, 23 nt, synthetic construct
  source 1..23: mol_type = other RNA
gtcgagtgctgggtggtactggt

SEQ ID NO: 56000 - RNA, 23 nt, synthetic construct
  source 1..23: mol_type = other RNA
acggatgttggagtaggtgtcaa

SEQ ID NO: 56001 - RNA, 23 nt, synthetic construct
  source 1..23: mol_type = other RNA
tgtgataggcgggtccaggtggt

SEQ ID NO: 56002 - RNA, 23 nt, synthetic construct
  source 1..23: mol_type = other RNA
acggatgttggagtaggtgtcaa

SEQ ID NO: 56003 - RNA, 23 nt, synthetic construct
  source 1..23: mol_type = other RNA
tgtgataggcgggtccaggtggt

SEQ ID NO: 56004 - RNA, 23 nt, synthetic construct
  source 1..23: mol_type = other RNA
ctgagccgttaggacagtgcaag

SEQ ID NO: 56005 - RNA, 23 nt, synthetic construct
  source 1..23: mol_type = other RNA
gccgttgcgacctcagccctgag

SEQ ID NO: 56006 - RNA, 23 nt, synthetic construct
  source 1..23: mol_type = other RNA
cgtgttgatgcggacttgacagg

SEQ ID NO: 56007 - RNA, 23 nt, synthetic construct
  source 1..23: mol_type = other RNA
acgtcggggcaccgccatccatg

SEQ ID NO: 56008 - RNA, 23 nt, synthetic construct
  source 1..23: mol_type = other RNA
aggtcgtagagtttctcatcata

SEQ ID NO: 56009 - RNA, 23 nt, synthetic construct
  source 1..23: mol_type = other RNA
agggcacgtattcgcagcagaga

SEQ ID NO: 56010 - RNA, 23 nt, synthetic construct
  source 1..23: mol_type = other RNA
tcgtagtggccgtggtgatcagt

SEQ ID NO: 56011 - RNA, 23 nt, synthetic construct
  source 1..23: mol_type = other RNA
tcacggtggctatagtgctcggc

SEQ ID NO: 56012 - RNA, 23 nt, synthetic construct
  source 1..23: mol_type = other RNA
tgattgcacactgcgtagaaatg

SEQ ID NO: 56013 - RNA, 23 nt, synthetic construct
  source 1..23: mol_type = other RNA
cccatcgggtcccacgcaggggc

SEQ ID NO: 56014 - RNA, 23 nt, synthetic construct
  source 1..23: mol_type = other RNA
gagcgtcaccgctttcaggcagt

SEQ ID NO: 56015 - RNA, 23 nt, synthetic construct
  source 1..23: mol_type = other RNA
cggccctgatcttatcgtaggac

SEQ ID NO: 56016 - RNA, 23 nt, synthetic construct
  source 1..23: mol_type = other RNA
cagcggccctgatcttatcgtag

SEQ ID NO: 56017 - RNA, 23 nt, synthetic construct
  source 1..23: mol_type = other RNA
cgggacggttgcacggcgggggc

SEQ ID NO: 56018 - RNA, 23 nt, synthetic construct
  source 1..23: mol_type = other RNA
gctcacgcgccgggtgggcgagg

SEQ ID NO: 56019 - RNA, 23 nt, synthetic construct
  source 1..23: mol_type = other RNA
aaagctcacgcgccgggtgggcg

SEQ ID NO: 56020 - RNA, 23 nt, synthetic construct
  source 1..23: mol_type = other RNA
aacaaagctcacgcgccgggtgg

SEQ ID NO: 56021 - RNA, 23 nt, synthetic construct
  source 1..23: mol_type = other RNA
cagagtgcgtgatgtcatccagc

SEQ ID NO: 56022 - RNA, 23 nt, synthetic construct
  source 1..23: mol_type = other RNA
gccgccgtccgcttggacccgga

SEQ ID NO: 56023 - RNA, 23 nt, synthetic construct
  source 1..23: mol_type = other RNA
tcccacccgtacatgaacacacg

SEQ ID NO: 56024 - RNA, 23 nt, synthetic construct
  source 1..23: mol_type = other RNA
gcagcttagcttcccacccgtac

SEQ ID NO: 56025 - RNA, 23 nt, synthetic construct
  source 1..23: mol_type = other RNA
atgtagcgtatcttgtagggtgg

SEQ ID NO: 56026 - RNA, 23 nt, synthetic construct
  source 1..23: mol_type = other RNA
gctactcgtaggctgcggcgttg

SEQ ID NO: 56027 - RNA, 23 nt, synthetic construct
  source 1..23: mol_type = other RNA
ccgtggttatgggggccgatgtg

SEQ ID NO: 56028 - RNA, 23 nt, synthetic construct
  source 1..23: mol_type = other RNA
tggggggataggtgttgtccctg

SEQ ID NO: 56029 - RNA, 23 nt, synthetic construct
  source 1..23: mol_type = other RNA
ggctgtaacgctggtagctgtgg

SEQ ID NO: 56030 - RNA, 23 nt, synthetic construct
  source 1..23: mol_type = other RNA
ctgtgatcgtagtggccgtggtg

SEQ ID NO: 56031 - RNA, 23 nt, synthetic construct
  source 1..23: mol_type = other RNA
ccgtggttatgggggccgatgtg

SEQ ID NO: 56032 - RNA, 23 nt, synthetic construct
  source 1..23: mol_type = other RNA
tggggggataggtgttgtccctg

SEQ ID NO: 56033 - RNA, 23 nt, synthetic construct
  source 1..23: mol_type = other RNA
ccgtggttatgggggccgatgtg

SEQ ID NO: 56034 - RNA, 23 nt, synthetic construct
  source 1..23: mol_type = other RNA
acactgcgtagaaatggcagccg

SEQ ID NO: 56035 - RNA, 23 nt, synthetic construct
  source 1..23: mol_type = other RNA
tgccccggaaggtgtaagaggtg

SEQ ID NO: 56036 - RNA, 23 nt, synthetic construct
  source 1..23: mol_type = other RNA
aagcgtgcatggatctctctcat

SEQ ID NO: 56037 - RNA, 23 nt, synthetic construct
  source 1..23: mol_type = other RNA
ccaaagcgtgcatggatctctct

SEQ ID NO: 56038 - RNA, 23 nt, synthetic construct
  source 1..23: mol_type = other RNA
ccgtgcagtagtggttgtccagg

SEQ ID NO: 56039 - RNA, 23 nt, synthetic construct
  source 1..23: mol_type = other RNA
ctcaaggcggcccctgcagtggt

SEQ ID NO: 56040 - RNA, 23 nt, synthetic construct
  source 1..23: mol_type = other RNA
ctgcaccgacactgaaccctcgt

SEQ ID NO: 56041 - RNA, 23 nt, synthetic construct
  source 1..23: mol_type = other RNA
ggcagaacgttctcagacagcag

SEQ ID NO: 56042 - RNA, 23 nt, synthetic construct
  source 1..23: mol_type = other RNA
ataggcccgcacatgcttagttt

SEQ ID NO: 56043 - RNA, 23 nt, synthetic construct
  source 1..23: mol_type = other RNA
ccgttgcgacctcagccctgagt

SEQ ID NO: 56044 - RNA, 23 nt, synthetic construct
  source 1..23: mol_type = other RNA
ctcgtagtcgtgacagagcgggg

SEQ ID NO: 56045 - RNA, 23 nt, synthetic construct
  source 1..23: mol_type = other RNA
ggaaacccatcgggtcccacgca

SEQ ID NO: 56046 - RNA, 23 nt, synthetic construct
  source 1..23: mol_type = other RNA
ggcagggatcgcccgtgtgtggt

SEQ ID NO: 56047 - RNA, 23 nt, synthetic construct
  source 1..23: mol_type = other RNA
tcggtcaggcgcgagcaccagtg

SEQ ID NO: 56048 - RNA, 23 nt, synthetic construct
  source 1..23: mol_type = other RNA
acgtaggcgtagcgctgggactt

SEQ ID NO: 56049 - RNA, 23 nt, synthetic construct
  source 1..23: mol_type = other RNA
acggtgccgtgagcgtagcaggg

SEQ ID NO: 56050 - RNA, 23 nt, synthetic construct
  source 1..23: mol_type = other RNA
tcattgatggcattgtcgtcgaa

SEQ ID NO: 56051 - RNA, 23 nt, synthetic construct
  source 1..23: mol_type = other RNA
gaccggatgctcggggtcaccca

SEQ ID NO: 56052 - RNA, 23 nt, synthetic construct
  source 1..23: mol_type = other RNA
cgaccggatgctcggggtcaccc

SEQ ID NO: 56053 - RNA, 23 nt, synthetic construct
  source 1..23: mol_type = other RNA
gacttccccgggcgagaaaaact

SEQ ID NO: 56054 - RNA, 23 nt, synthetic construct
  source 1..23: mol_type = other RNA
gacgacacggttgtcacccacgc

SEQ ID NO: 56055 - RNA, 23 nt, synthetic construct
  source 1..23: mol_type = other RNA
gaaacccatcgggtcccacgcag

SEQ ID NO: 56056 - RNA, 23 nt, synthetic construct
  source 1..23: mol_type = other RNA
ccaaactggagcggggtcagcct

SEQ ID NO: 56057 - RNA, 23 nt, synthetic construct
  source 1..23: mol_type = other RNA
cgtggcactccgcaaaggccggc

SEQ ID NO: 56058 - RNA, 23 nt, synthetic construct
  source 1..23: mol_type = other RNA
gatcggtcaggcgcgagcaccag

SEQ ID NO: 56059 - RNA, 23 nt, synthetic construct
  source 1..23: mol_type = other RNA
cgccaccgccttaaaggtcccct

SEQ ID NO: 56060 - RNA, 23 nt, synthetic construct
  source 1..23: mol_type = other RNA
atgtgggttgtagaagtcacaga

SEQ ID NO: 56061 - RNA, 23 nt, synthetic construct
  source 1..23: mol_type = other RNA
gatggcgatcaagcaggcgccaa

SEQ ID NO: 56062 - RNA, 23 nt, synthetic construct
  source 1..23: mol_type = other RNA
ccgttgcttccgcagatggcgat

SEQ ID NO: 56063 - RNA, 23 nt, synthetic construct
  source 1..23: mol_type = other RNA
cagagcgggggactctgttggct

SEQ ID NO: 56064 - RNA, 23 nt, synthetic construct
  source 1..23: mol_type = other RNA
cgggctactcgtaggctgcggcg

SEQ ID NO: 56065 - RNA, 23 nt, synthetic construct
  source 1..23: mol_type = other RNA
gatgggggagtaccactggtctg

SEQ ID NO: 56066 - RNA, 23 nt, synthetic construct
  source 1..23: mol_type = other RNA
gggatcgcccgtgtgtggtggcc

SEQ ID NO: 56067 - RNA, 23 nt, synthetic construct
  source 1..23: mol_type = other RNA
ggagtaggtgtcaaagtccccgc

SEQ ID NO: 56068 - RNA, 23 nt, synthetic construct
  source 1..23: mol_type = other RNA
cgtggatccggtgggcaccgtca

SEQ ID NO: 56069 - RNA, 23 nt, synthetic construct
  source 1..23: mol_type = other RNA
gatgggggagtaccactggtctg

SEQ ID NO: 56070 - RNA, 23 nt, synthetic construct
  source 1..23: mol_type = other RNA
gggatcgcccgtgtgtggtggcc

SEQ ID NO: 56071 - RNA, 23 nt, synthetic construct
  source 1..23: mol_type = other RNA
ggagtaggtgtcaaagtccccgc

SEQ ID NO: 56072 - RNA, 23 nt, synthetic construct
  source 1..23: mol_type = other RNA
cgtggatccggtgggcaccgtca

SEQ ID NO: 56073 - RNA, 23 nt, synthetic construct
  source 1..23: mol_type = other RNA
gatgggggagtaccactggtctg

SEQ ID NO: 56074 - RNA, 23 nt, synthetic construct
  source 1..23: mol_type = other RNA
ggagtaggtgtcaaagtccccgc

SEQ ID NO: 56075 - RNA, 23 nt, synthetic construct
  source 1..23: mol_type = other RNA
cgtggatccggtgggcaccgtca

SEQ ID NO: 56076 - RNA, 23 nt, synthetic construct
  source 1..23: mol_type = other RNA
gatgggggagtaccactggtctg

SEQ ID NO: 56077 - RNA, 23 nt, synthetic construct
  source 1..23: mol_type = other RNA
gggatcgcccgtgtgtggtggcc

SEQ ID NO: 56078 - RNA, 23 nt, synthetic construct
  source 1..23: mol_type = other RNA
ggagtaggtgtcaaagtccccgc

SEQ ID NO: 56079 - RNA, 23 nt, synthetic construct
  source 1..23: mol_type = other RNA
cgtggatccggtgggcaccgtca

SEQ ID NO: 56080 - RNA, 23 nt, synthetic construct
  source 1..23: mol_type = other RNA
gatgggggagtaccactggtctg

SEQ ID NO: 56081 - RNA, 23 nt, synthetic construct
  source 1..23: mol_type = other RNA
acggtggctatagtgctcggctc

SEQ ID NO: 56082 - RNA, 23 nt, synthetic construct
  source 1..23: mol_type = other RNA
gccgtgcagtagtggttgtccag

SEQ ID NO: 56083 - RNA, 23 nt, synthetic construct
  source 1..23: mol_type = other RNA
ggccgtgcagtagtggttgtcca

SEQ ID NO: 56084 - RNA, 23 nt, synthetic construct
  source 1..23: mol_type = other RNA
gccgcatggcttgtacactttgg

SEQ ID NO: 56085 - RNA, 23 nt, synthetic construct
  source 1..23: mol_type = other RNA
ccgggacggttgcacggcggggg

SEQ ID NO: 56086 - RNA, 23 nt, synthetic construct
  source 1..23: mol_type = other RNA
ggcaggtacacatgtggcaggga

SEQ ID NO: 56087 - RNA, 23 nt, synthetic construct
  source 1..23: mol_type = other RNA
gttgacctcggtctcgcagccct

SEQ ID NO: 56088 - RNA, 23 nt, synthetic construct
  source 1..23: mol_type = other RNA
ggagcgcggggtgccacacacag

SEQ ID NO: 56089 - RNA, 23 nt, synthetic construct
  source 1..23: mol_type = other RNA
ctggaatccgtgctgcgcgggcg

SEQ ID NO: 56090 - RNA, 23 nt, synthetic construct
  source 1..23: mol_type = other RNA
ggcgaggacgtcggggcaccgcc

SEQ ID NO: 56091 - RNA, 23 nt, synthetic construct
  source 1..23: mol_type = other RNA
agctcacgcgccgggtgggcgag

SEQ ID NO: 56092 - RNA, 23 nt, synthetic construct
  source 1..23: mol_type = other RNA
ggagcccactaggcctcggcgta

SEQ ID NO: 56093 - RNA, 23 nt, synthetic construct
  source 1..23: mol_type = other RNA
agcaccagccggatgctgacctt

SEQ ID NO: 56094 - RNA, 23 nt, synthetic construct
  source 1..23: mol_type = other RNA
catagaactcgttgaaggccggg

SEQ ID NO: 56095 - RNA, 23 nt, synthetic construct
  source 1..23: mol_type = other RNA
caggtacgcagtgctgtccacca

SEQ ID NO: 56096 - RNA, 23 nt, synthetic construct
  source 1..23: mol_type = other RNA
gccaggtacgcagtgctgtccac

SEQ ID NO: 56097 - RNA, 23 nt, synthetic construct
  source 1..23: mol_type = other RNA
ggccaggtacgcagtgctgtcca

SEQ ID NO: 56098 - RNA, 23 nt, synthetic construct
  source 1..23: mol_type = other RNA
gtccgtgcagggtgagccacact

SEQ ID NO: 56099 - RNA, 23 nt, synthetic construct
  source 1..23: mol_type = other RNA
gtcaccgctttcaggcagttctc

SEQ ID NO: 56100 - RNA, 23 nt, synthetic construct
  source 1..23: mol_type = other RNA
acaaacacctgcatgagtggcac

SEQ ID NO: 56101 - RNA, 23 nt, synthetic construct
  source 1..23: mol_type = other RNA
ccccgctgagggccgtgaagtcg

SEQ ID NO: 56102 - RNA, 23 nt, synthetic construct
  source 1..23: mol_type = other RNA
aggcgcgagcaccagtgccgggc

SEQ ID NO: 56103 - RNA, 23 nt, synthetic construct
  source 1..23: mol_type = other RNA
cggtcaggcgcgagcaccagtgc

SEQ ID NO: 56104 - RNA, 23 nt, synthetic construct
  source 1..23: mol_type = other RNA
ggcactgttgggatcggtcaggc

SEQ ID NO: 56105 - RNA, 23 nt, synthetic construct
  source 1..23: mol_type = other RNA
aggcgtagcgctgggacttgggg

SEQ ID NO: 56106 - RNA, 23 nt, synthetic construct
  source 1..23: mol_type = other RNA
ggccgcggcaagtgggctggcag

SEQ ID NO: 56107 - RNA, 23 nt, synthetic construct
  source 1..23: mol_type = other RNA
actcaggccgcggcaagtgggct

SEQ ID NO: 56108 - RNA, 23 nt, synthetic construct
  source 1..23: mol_type = other RNA
aacacacggcgccctcgtcgtgc

SEQ ID NO: 56109 - RNA, 23 nt, synthetic construct
  source 1..23: mol_type = other RNA
gaacacacggcgccctcgtcgtg

SEQ ID NO: 56110 - RNA, 23 nt, synthetic construct
  source 1..23: mol_type = other RNA
cccatccgacaccagccccgggg

SEQ ID NO: 56111 - RNA, 23 nt, synthetic construct
  source 1..23: mol_type = other RNA
gccaccgccttaaaggtcccctc

SEQ ID NO: 56112 - RNA, 23 nt, synthetic construct
  source 1..23: mol_type = other RNA
cccatgtagcgtatcttgtaggg

SEQ ID NO: 56113 - RNA, 23 nt, synthetic construct
  source 1..23: mol_type = other RNA
gcagtcggatgaacacgctggtc

SEQ ID NO: 56114 - RNA, 23 nt, synthetic construct
  source 1..23: mol_type = other RNA
gtagtttccgtccttgtcgtagc

SEQ ID NO: 56115 - RNA, 23 nt, synthetic construct
  source 1..23: mol_type = other RNA
atggcgttgtggctggagttcca

SEQ ID NO: 56116 - RNA, 23 nt, synthetic construct
  source 1..23: mol_type = other RNA
ggtgaatggcgttgtggctggag

SEQ ID NO: 56117 - RNA, 23 nt, synthetic construct
  source 1..23: mol_type = other RNA
agacctcgcggacacacacggtg

SEQ ID NO: 56118 - RNA, 23 nt, synthetic construct
  source 1..23: mol_type = other RNA
cagacctcgcggacacacacggt

SEQ ID NO: 56119 - RNA, 23 nt, synthetic construct
  source 1..23: mol_type = other RNA
cccggcactcgatgtcagccagc

SEQ ID NO: 56120 - RNA, 23 nt, synthetic construct
  source 1..23: mol_type = other RNA
gcccggcactcgatgtcagccag

SEQ ID NO: 56121 - RNA, 23 nt, synthetic construct
  source 1..23: mol_type = other RNA
ccgcccggcactcgatgtcagcc

SEQ ID NO: 56122 - RNA, 23 nt, synthetic construct
  source 1..23: mol_type = other RNA
ccccgcatgcggtcacagtccac

SEQ ID NO: 56123 - RNA, 23 nt, synthetic construct
  source 1..23: mol_type = other RNA
agagcgggggactctgttggctg

SEQ ID NO: 56124 - RNA, 23 nt, synthetic construct
  source 1..23: mol_type = other RNA
tcgaccggatgctcggggtcacc

SEQ ID NO: 56125 - RNA, 23 nt, synthetic construct
  source 1..23: mol_type = other RNA
tgaccgtcacggggcctgagctg

SEQ ID NO: 56126 - RNA, 23 nt, synthetic construct
  source 1..23: mol_type = other RNA
ctgcggcgttgagaacagggcct

SEQ ID NO: 56127 - RNA, 23 nt, synthetic construct
  source 1..23: mol_type = other RNA
gctgcggcgttgagaacagggcc

SEQ ID NO: 56128 - RNA, 23 nt, synthetic construct
  source 1..23: mol_type = other RNA
ggctgcggcgttgagaacagggc

SEQ ID NO: 56129 - RNA, 23 nt, synthetic construct
  source 1..23: mol_type = other RNA
aggctgcggcgttgagaacaggg

SEQ ID NO: 56130 - RNA, 23 nt, synthetic construct
  source 1..23: mol_type = other RNA
gggctactcgtaggctgcggcgt

SEQ ID NO: 56131 - RNA, 23 nt, synthetic construct
  source 1..23: mol_type = other RNA
ctcccgtggtggctgtaccaagg

SEQ ID NO: 56132 - RNA, 23 nt, synthetic construct
  source 1..23: mol_type = other RNA
tgttggcgccaggctcgtggtca

SEQ ID NO: 56133 - RNA, 23 nt, synthetic construct
  source 1..23: mol_type = other RNA
ttagtcaaggggctcattgtcgt

SEQ ID NO: 56134 - RNA, 23 nt, synthetic construct
  source 1..23: mol_type = other RNA
tgttagtcaaggggctcattgtc

SEQ ID NO: 56135 - RNA, 23 nt, synthetic construct
  source 1..23: mol_type = other RNA
gtggtgttagtcaaggggctcat

SEQ ID NO: 56136 - RNA, 23 nt, synthetic construct
  source 1..23: mol_type = other RNA
atgggtgtaacgctggtagctgt

SEQ ID NO: 56137 - RNA, 23 nt, synthetic construct
  source 1..23: mol_type = other RNA
gtggcggtaagcactgtggaggt

SEQ ID NO: 56138 - RNA, 23 nt, synthetic construct
  source 1..23: mol_type = other RNA
tgtggtagttggcactttggtag

SEQ ID NO: 56139 - RNA, 23 nt, synthetic construct
  source 1..23: mol_type = other RNA
ttgtggtagttggcactttggta

SEQ ID NO: 56140 - RNA, 23 nt, synthetic construct
  source 1..23: mol_type = other RNA
gcgtgagtgccgtccctgggctg

SEQ ID NO: 56141 - RNA, 23 nt, synthetic construct
  source 1..23: mol_type = other RNA
tgtgtgctagaggagggtgttgc

SEQ ID NO: 56142 - RNA, 23 nt, synthetic construct
  source 1..23: mol_type = other RNA
tgatcgtagtggccgtggtggtc

SEQ ID NO: 56143 - RNA, 23 nt, synthetic construct
  source 1..23: mol_type = other RNA
ggctgtgcgcaccgtgtggggac

SEQ ID NO: 56144 - RNA, 23 nt, synthetic construct
  source 1..23: mol_type = other RNA
aggctgtgcgcaccgtgtgggga

SEQ ID NO: 56145 - RNA, 23 nt, synthetic construct
  source 1..23: mol_type = other RNA
gggtggtaccggtggttgctgct

SEQ ID NO: 56146 - RNA, 23 nt, synthetic construct
  source 1..23: mol_type = other RNA
tggagtcgagtgctgggtggtac

SEQ ID NO: 56147 - RNA, 23 nt, synthetic construct
  source 1..23: mol_type = other RNA
ggtcaccaccgtggttatggggg

SEQ ID NO: 56148 - RNA, 23 nt, synthetic construct
  source 1..23: mol_type = other RNA
ggccccggcatggggtagctgta

SEQ ID NO: 56149 - RNA, 23 nt, synthetic construct
  source 1..23: mol_type = other RNA
cctgggcacggcactcgaggccc

SEQ ID NO: 56150 - RNA, 23 nt, synthetic construct
  source 1..23: mol_type = other RNA
tgtgtgctagaggagggtgttgc

SEQ ID NO: 56151 - RNA, 23 nt, synthetic construct
  source 1..23: mol_type = other RNA
tgatcgtagtggccgtggtggtc

SEQ ID NO: 56152 - RNA, 23 nt, synthetic construct
  source 1..23: mol_type = other RNA
ggataggtgttgtccctggagtt

SEQ ID NO: 56153 - RNA, 23 nt, synthetic construct
  source 1..23: mol_type = other RNA
gccgtggtgttcggcactggggg

SEQ ID NO: 56154 - RNA, 23 nt, synthetic construct
  source 1..23: mol_type = other RNA
ggctgtgcgcaccgtgtggggac

SEQ ID NO: 56155 - RNA, 23 nt, synthetic construct
  source 1..23: mol_type = other RNA
aggctgtgcgcaccgtgtgggga

SEQ ID NO: 56156 - RNA, 23 nt, synthetic construct
  source 1..23: mol_type = other RNA
gggtggtaccggtggttgctgct

SEQ ID NO: 56157 - RNA, 23 nt, synthetic construct
  source 1..23: mol_type = other RNA
tggagtcgagtgctgggtggtac

SEQ ID NO: 56158 - RNA, 23 nt, synthetic construct
  source 1..23: mol_type = other RNA
ggccccggcatggggtagctgta

SEQ ID NO: 56159 - RNA, 23 nt, synthetic construct
  source 1..23: mol_type = other RNA
cctgggcacggcactcgaggccc

SEQ ID NO: 56160 - RNA, 23 nt, synthetic construct
  source 1..23: mol_type = other RNA
gggatggccgtggatccagtggt

SEQ ID NO: 56161 - RNA, 23 nt, synthetic construct
  source 1..23: mol_type = other RNA
gataggcgggtccaggcggtgcc

SEQ ID NO: 56162 - RNA, 23 nt, synthetic construct
  source 1..23: mol_type = other RNA
tgtggtagtcggcactttggtag

SEQ ID NO: 56163 - RNA, 23 nt, synthetic construct
  source 1..23: mol_type = other RNA
gcgtgagtgccgtccctgggctg

SEQ ID NO: 56164 - RNA, 23 nt, synthetic construct
  source 1..23: mol_type = other RNA
tgtgtgctagaggagggtgttgc

SEQ ID NO: 56165 - RNA, 23 nt, synthetic construct
  source 1..23: mol_type = other RNA
tgatcgtagtggccgtggtggtc

SEQ ID NO: 56166 - RNA, 23 nt, synthetic construct
  source 1..23: mol_type = other RNA
gccgtggtgttcggcactggggg

SEQ ID NO: 56167 - RNA, 23 nt, synthetic construct
  source 1..23: mol_type = other RNA
ggctgtgcgcaccgtgtggggac

SEQ ID NO: 56168 - RNA, 23 nt, synthetic construct
  source 1..23: mol_type = other RNA
aggctgtgcgcaccgtgtgggga

SEQ ID NO: 56169 - RNA, 23 nt, synthetic construct
  source 1..23: mol_type = other RNA
tggagtcgagtgctgggtggtac

SEQ ID NO: 56170 - RNA, 23 nt, synthetic construct
  source 1..23: mol_type = other RNA
ggtcaccaccgtggttatggggg

SEQ ID NO: 56171 - RNA, 23 nt, synthetic construct
  source 1..23: mol_type = other RNA
ggccccggcatggggtagctgta

SEQ ID NO: 56172 - RNA, 23 nt, synthetic construct
  source 1..23: mol_type = other RNA
cctgggcacggcactcgaggccc

SEQ ID NO: 56173 - RNA, 23 nt, synthetic construct
  source 1..23: mol_type = other RNA
tgtggtagtcggcactttggtag

SEQ ID NO: 56174 - RNA, 23 nt, synthetic construct
  source 1..23: mol_type = other RNA
tgtgtgctagaggagggtgttgc

SEQ ID NO: 56175 - RNA, 23 nt, synthetic construct
  source 1..23: mol_type = other RNA
tgatcgtagtggccgtggtgatc

SEQ ID NO: 56176 - RNA, 23 nt, synthetic construct
  source 1..23: mol_type = other RNA
ggataggtgttgtccctggagtt

SEQ ID NO: 56177 - RNA, 23 nt, synthetic construct
  source 1..23: mol_type = other RNA
gccgtggtgttcggcactggggg

SEQ ID NO: 56178 - RNA, 23 nt, synthetic construct
  source 1..23: mol_type = other RNA
ggctgtgcgcaccgtgtggggac

SEQ ID NO: 56179 - RNA, 23 nt, synthetic construct
  source 1..23: mol_type = other RNA
aggctgtgcgcaccgtgtgggga

SEQ ID NO: 56180 - RNA, 23 nt, synthetic construct
  source 1..23: mol_type = other RNA
gggtggtaccggtggttgctgct

SEQ ID NO: 56181 - RNA, 23 nt, synthetic construct
  source 1..23: mol_type = other RNA
tggagtcgagtgctgggtggtac

SEQ ID NO: 56182 - RNA, 23 nt, synthetic construct
  source 1..23: mol_type = other RNA
ggtcaccaccgtggttatggggg

SEQ ID NO: 56183 - RNA, 23 nt, synthetic construct
  source 1..23: mol_type = other RNA
ggccccggcatggggtagctgta

SEQ ID NO: 56184 - RNA, 23 nt, synthetic construct
  source 1..23: mol_type = other RNA
cctgggcacggcactcgaggccc

SEQ ID NO: 56185 - RNA, 23 nt, synthetic construct
  source 1..23: mol_type = other RNA
atgggtgtaacgctggtagctgt

SEQ ID NO: 56186 - RNA, 23 nt, synthetic construct
  source 1..23: mol_type = other RNA
gtggcggtaagcactgtggaggt

SEQ ID NO: 56187 - RNA, 23 nt, synthetic construct
  source 1..23: mol_type = other RNA
tgtggtagtcggcactttggtag

SEQ ID NO: 56188 - RNA, 23 nt, synthetic construct
  source 1..23: mol_type = other RNA
gcgtgagtgccgtccctgggctg

SEQ ID NO: 56189 - RNA, 23 nt, synthetic construct
  source 1..23: mol_type = other RNA
tgtgtgctagaggagggtgttgc

SEQ ID NO: 56190 - RNA, 23 nt, synthetic construct
  source 1..23: mol_type = other RNA
tgatcgtagtggccgtggtggtc

SEQ ID NO: 56191 - RNA, 23 nt, synthetic construct
  source 1..23: mol_type = other RNA
ctgggacggtccacgtggtccac

SEQ ID NO: 56192 - RNA, 23 nt, synthetic construct
  source 1..23: mol_type = other RNA
ggccgtggaaccggtgggcacca

SEQ ID NO: 56193 - RNA, 23 nt, synthetic construct
  source 1..23: mol_type = other RNA
gtggacacgctgaaggttggcag

SEQ ID NO: 56194 - RNA, 23 nt, synthetic construct
  source 1..23: mol_type = other RNA
gggacaggcgccctggaagcggt

SEQ ID NO: 56195 - RNA, 23 nt, synthetic construct
  source 1..23: mol_type = other RNA
agtgaggacgatatccatggact

SEQ ID NO: 56196 - RNA, 23 nt, synthetic construct
  source 1..23: mol_type = other RNA
atgtccacacgcatggtggtggt

SEQ ID NO: 56197 - RNA, 23 nt, synthetic construct
  source 1..23: mol_type = other RNA
gaccagccacgtcttggccatgt

SEQ ID NO: 56198 - RNA, 23 nt, synthetic construct
  source 1..23: mol_type = other RNA
ggtgtgccagtcggggcccagca

SEQ ID NO: 56199 - RNA, 23 nt, synthetic construct
  source 1..23: mol_type = other RNA
tgcagtggtcgctgatgcaggcg

SEQ ID NO: 56200 - RNA, 23 nt, synthetic construct
  source 1..23: mol_type = other RNA
ggggccgcatggcttgtacactt

SEQ ID NO: 56201 - RNA, 23 nt, synthetic construct
  source 1..23: mol_type = other RNA
ccatgtgtgcgttgaagaggatc

SEQ ID NO: 56202 - RNA, 23 nt, synthetic construct
  source 1..23: mol_type = other RNA
gggaaatttaggaaacccatcgg

SEQ ID NO: 56203 - RNA, 23 nt, synthetic construct
  source 1..23: mol_type = other RNA
ccattgtacgaacacagctgagg

SEQ ID NO: 56204 - RNA, 23 nt, synthetic construct
  source 1..23: mol_type = other RNA
ggcaggcggtctggacgcactcc

SEQ ID NO: 56205 - RNA, 23 nt, synthetic construct
  source 1..23: mol_type = other RNA
aggcaggcggtctggacgcactc

SEQ ID NO: 56206 - RNA, 23 nt, synthetic construct
  source 1..23: mol_type = other RNA
ggccatcgggcgtgaggcaggcg

SEQ ID NO: 56207 - RNA, 23 nt, synthetic construct
  source 1..23: mol_type = other RNA
tacttggacgctccggggcagga

SEQ ID NO: 56208 - RNA, 23 nt, synthetic construct
  source 1..23: mol_type = other RNA
tgagccgttaggacagtgcaagg

SEQ ID NO: 56209 - RNA, 23 nt, synthetic construct
  source 1..23: mol_type = other RNA
ggctgagccgttaggacagtgca

SEQ ID NO: 56210 - RNA, 23 nt, synthetic construct
  source 1..23: mol_type = other RNA
gtgttgcacacgcacaccgtctc

SEQ ID NO: 56211 - RNA, 23 nt, synthetic construct
  source 1..23: mol_type = other RNA
tgaccttgatgtagtccccgctc

SEQ ID NO: 56212 - RNA, 23 nt, synthetic construct
  source 1..23: mol_type = other RNA
agtgcgtggcactccgcaaaggc

SEQ ID NO: 56213 - RNA, 23 nt, synthetic construct
  source 1..23: mol_type = other RNA
aggctgagcgtcaccgctttcag

SEQ ID NO: 56214 - RNA, 23 nt, synthetic construct
  source 1..23: mol_type = other RNA
ccacgtaggcgtagcgctgggac

SEQ ID NO: 56215 - RNA, 23 nt, synthetic construct
  source 1..23: mol_type = other RNA
ttagcttcccacccgtacatgaa

SEQ ID NO: 56216 - RNA, 23 nt, synthetic construct
  source 1..23: mol_type = other RNA
gtatcttgtagggtgggtcccca

SEQ ID NO: 56217 - RNA, 23 nt, synthetic construct
  source 1..23: mol_type = other RNA
gaggcgtgagtgccgtccctggg

SEQ ID NO: 56218 - RNA, 23 nt, synthetic construct
  source 1..23: mol_type = other RNA
actggaagcgtgcgtgccgtccc

SEQ ID NO: 56219 - RNA, 23 nt, synthetic construct
  source 1..23: mol_type = other RNA
gaggcgtgagtgccgtccctggg

SEQ ID NO: 56220 - RNA, 23 nt, synthetic construct
  source 1..23: mol_type = other RNA
gaggcgtgagtgccgtccctggg

SEQ ID NO: 56221 - RNA, 23 nt, synthetic construct
  source 1..23: mol_type = other RNA
ctcagtgaggatccgggtcgtcc

SEQ ID NO: 56222 - RNA, 23 nt, synthetic construct
  source 1..23: mol_type = other RNA
tggtcgctgatgcaggcgttgaa

SEQ ID NO: 56223 - RNA, 23 nt, synthetic construct
  source 1..23: mol_type = other RNA
aggtacacggtgcagttgtccac

SEQ ID NO: 56224 - RNA, 23 nt, synthetic construct
  source 1..23: mol_type = other RNA
gagtacttggacgctccggggca

SEQ ID NO: 56225 - RNA, 23 nt, synthetic construct
  source 1..23: mol_type = other RNA
ggaacaaagctcacgcgccgggt

SEQ ID NO: 56226 - RNA, 23 nt, synthetic construct
  source 1..23: mol_type = other RNA
atcacggtggctatagtgctcgg

SEQ ID NO: 56227 - RNA, 23 nt, synthetic construct
  source 1..23: mol_type = other RNA
cgccgcccggcactcgatgtcag

SEQ ID NO: 56228 - RNA, 23 nt, synthetic construct
  source 1..23: mol_type = other RNA
gtggtctgtgataggcgggtcca

SEQ ID NO: 56229 - RNA, 23 nt, synthetic construct
  source 1..23: mol_type = other RNA
tgggtggtaccggtggttgctgc

SEQ ID NO: 56230 - RNA, 23 nt, synthetic construct
  source 1..23: mol_type = other RNA
gtggtctgtgataggcgggtcca

SEQ ID NO: 56231 - RNA, 23 nt, synthetic construct
  source 1..23: mol_type = other RNA
tccacactggaagcgtgcgtgcc

SEQ ID NO: 56232 - RNA, 23 nt, synthetic construct
  source 1..23: mol_type = other RNA
tgggtggtaccggtggttgctgc

SEQ ID NO: 56233 - RNA, 23 nt, synthetic construct
  source 1..23: mol_type = other RNA
gtggtctgtgataggcgggtcca

SEQ ID NO: 56234 - RNA, 23 nt, synthetic construct
  source 1..23: mol_type = other RNA
gtggtctgtgataggcgggtcca

SEQ ID NO: 56235 - RNA, 23 nt, synthetic construct
  source 1..23: mol_type = other RNA
tgggtggtaccggtggttgctgc

SEQ ID NO: 56236 - RNA, 23 nt, synthetic construct
  source 1..23: mol_type = other RNA
gtggtctgtgataggcgggtcca

SEQ ID NO: 56237 - RNA, 23 nt, synthetic construct
  source 1..23: mol_type = other RNA
cactcatccacgtgggtgtaggt

SEQ ID NO: 56238 - RNA, 23 nt, synthetic construct
  source 1..23: mol_type = other RNA
gccagtgcggctgtaaggcagct

SEQ ID NO: 56239 - RNA, 23 nt, synthetic construct
  source 1..23: mol_type = other RNA
tgcgtggcactccgcaaaggccg

SEQ ID NO: 56240 - RNA, 23 nt, synthetic construct
  source 1..23: mol_type = other RNA
gtcattgaggaaggtgcccgcgg

SEQ ID NO: 56241 - RNA, 23 nt, synthetic construct
  source 1..23: mol_type = other RNA
agtgctgggtggtaccggtggtt

SEQ ID NO: 56242 - RNA, 23 nt, synthetic construct
  source 1..23: mol_type = other RNA
ccggccgcacggatgttggagta

SEQ ID NO: 56243 - RNA, 23 nt, synthetic construct
  source 1..23: mol_type = other RNA
cacggtggctgtagtgctcggct

SEQ ID NO: 56244 - RNA, 23 nt, synthetic construct
  source 1..23: mol_type = other RNA
agtgctgggtggtaccggtggtt

SEQ ID NO: 56245 - RNA, 23 nt, synthetic construct
  source 1..23: mol_type = other RNA
ccggccgcacggatgttggagta

SEQ ID NO: 56246 - RNA, 23 nt, synthetic construct
  source 1..23: mol_type = other RNA
ccggccgcacggatgttggagta

SEQ ID NO: 56247 - RNA, 23 nt, synthetic construct
  source 1..23: mol_type = other RNA
cacggtggctgtagtgctcggct

SEQ ID NO: 56248 - RNA, 23 nt, synthetic construct
  source 1..23: mol_type = other RNA
agtgctgggtggtaccggtggtt

SEQ ID NO: 56249 - RNA, 23 nt, synthetic construct
  source 1..23: mol_type = other RNA
ccggccgcacggatgttggagta

SEQ ID NO: 56250 - RNA, 23 nt, synthetic construct
  source 1..23: mol_type = other RNA
cacggtggctgtagtgctcggct

SEQ ID NO: 56251 - RNA, 23 nt, synthetic construct
  source 1..23: mol_type = other RNA
tcagcactctggcggtgtgggtg

SEQ ID NO: 56252 - RNA, 23 nt, synthetic construct
  source 1..23: mol_type = other RNA
tctgtgctgggacggtccacgtg

SEQ ID NO: 56253 - RNA, 23 nt, synthetic construct
  source 1..23: mol_type = other RNA
tggcagccggctcggtcggtctt

SEQ ID NO: 56254 - RNA, 23 nt, synthetic construct
  source 1..23: mol_type = other RNA
gacactgaaccctcgtcacacac

SEQ ID NO: 56255 - RNA, 23 nt, synthetic construct
  source 1..23: mol_type = other RNA
tcacagaggtacacggtgcagtt

SEQ ID NO: 56256 - RNA, 23 nt, synthetic construct
  source 1..23: mol_type = other RNA
acataggcccgcacatgcttagt

SEQ ID NO: 56257 - RNA, 23 nt, synthetic construct
  source 1..23: mol_type = other RNA
gtggaacaaagctcacgcgccgg

SEQ ID NO: 56258 - RNA, 23 nt, synthetic construct
  source 1..23: mol_type = other RNA
ctgtccaccagtgcgtggcactc

SEQ ID NO: 56259 - RNA, 23 nt, synthetic construct
  source 1..23: mol_type = other RNA
tccaggctgagcgtcaccgcttt

SEQ ID NO: 56260 - RNA, 23 nt, synthetic construct
  source 1..23: mol_type = other RNA
tggcgaaggctgcgcccgtggcc

SEQ ID NO: 56261 - RNA, 23 nt, synthetic construct
  source 1..23: mol_type = other RNA
gtacatgaacacacggcgccctc

SEQ ID NO: 56262 - RNA, 23 nt, synthetic construct
  source 1..23: mol_type = other RNA
gctgtggggtcagcaaatggact

SEQ ID NO: 56263 - RNA, 23 nt, synthetic construct
  source 1..23: mol_type = other RNA
caaacgtctcaaagtctccgcct

SEQ ID NO: 56264 - RNA, 23 nt, synthetic construct
  source 1..23: mol_type = other RNA
gggccccggcatggggtagctgt

SEQ ID NO: 56265 - RNA, 23 nt, synthetic construct
  source 1..23: mol_type = other RNA
gggccccggcatggggtagctgt

SEQ ID NO: 56266 - RNA, 23 nt, synthetic construct
  source 1..23: mol_type = other RNA
gggccccggcatggggtagctgt

SEQ ID NO: 56267 - RNA, 23 nt, synthetic construct
  source 1..23: mol_type = other RNA
gggccccggcatggggtagctgt

SEQ ID NO: 56268 - RNA, 23 nt, synthetic construct
  source 1..23: mol_type = other RNA
ttaggaaacccatcgggtcccac

SEQ ID NO: 56269 - RNA, 23 nt, synthetic construct
  source 1..23: mol_type = other RNA
atggctgagccgttaggacagtg

SEQ ID NO: 56270 - RNA, 23 nt, synthetic construct
  source 1..23: mol_type = other RNA
ccagcgtccggcacgcgctcggg

SEQ ID NO: 56271 - RNA, 23 nt, synthetic construct
  source 1..23: mol_type = other RNA
tgtccaccagtgcgtggcactcc

SEQ ID NO: 56272 - RNA, 23 nt, synthetic construct
  source 1..23: mol_type = other RNA
caggcggccaggtacgcagtgct

SEQ ID NO: 56273 - RNA, 23 nt, synthetic construct
  source 1..23: mol_type = other RNA
gagttgaggaacacgccgccgtc

SEQ ID NO: 56274 - RNA, 23 nt, synthetic construct
  source 1..23: mol_type = other RNA
atcggtcaggcgcgagcaccagt

SEQ ID NO: 56275 - RNA, 23 nt, synthetic construct
  source 1..23: mol_type = other RNA
agcgcgagaaggcactgttggga

SEQ ID NO: 56276 - RNA, 23 nt, synthetic construct
  source 1..23: mol_type = other RNA
cacggcgccctcgtcgtgcacca

SEQ ID NO: 56277 - RNA, 23 nt, synthetic construct
  source 1..23: mol_type = other RNA
agctgtagcgatcgccatcaaag

SEQ ID NO: 56278 - RNA, 23 nt, synthetic construct
  source 1..23: mol_type = other RNA
gttggctgttggcgcacatcagc

SEQ ID NO: 56279 - RNA, 23 nt, synthetic construct
  source 1..23: mol_type = other RNA
tcgtgacagagcgggggactctg

SEQ ID NO: 56280 - RNA, 23 nt, synthetic construct
  source 1..23: mol_type = other RNA
tcgcagcagagaacccgcagctc

SEQ ID NO: 56281 - RNA, 23 nt, synthetic construct
  source 1..23: mol_type = other RNA
gggtcacccatagggtggtcttt

SEQ ID NO: 56282 - RNA, 23 nt, synthetic construct
  source 1..23: mol_type = other RNA
gggccgccgtcgaccggatgctc

SEQ ID NO: 56283 - RNA, 23 nt, synthetic construct
  source 1..23: mol_type = other RNA
aagaggggatgggtgtaacgctg

SEQ ID NO: 56284 - RNA, 23 nt, synthetic construct
  source 1..23: mol_type = other RNA
tggccgtggcggtaagcactgtg

SEQ ID NO: 56285 - RNA, 23 nt, synthetic construct
  source 1..23: mol_type = other RNA
agccggtggccccggttgtggtg

SEQ ID NO: 56286 - RNA, 23 nt, synthetic construct
  source 1..23: mol_type = other RNA
gcccgtggttgtggtagtcggca

SEQ ID NO: 56287 - RNA, 23 nt, synthetic construct
  source 1..23: mol_type = other RNA
gcccgtggttgtggtagtcggca

SEQ ID NO: 56288 - RNA, 23 nt, synthetic construct
  source 1..23: mol_type = other RNA
tggccgtggcggtaagcactgtg

SEQ ID NO: 56289 - RNA, 23 nt, synthetic construct
  source 1..23: mol_type = other RNA
agccggtggccccggttgtggtg

SEQ ID NO: 56290 - RNA, 23 nt, synthetic construct
  source 1..23: mol_type = other RNA
gcccgtggttgtggtagtcggca

SEQ ID NO: 56291 - RNA, 23 nt, synthetic construct
  source 1..23: mol_type = other RNA
cggtggccgtggaaccggtgggc

SEQ ID NO: 56292 - RNA, 23 nt, synthetic construct
  source 1..23: mol_type = other RNA
attgcacactgcgtagaaatggc

SEQ ID NO: 56293 - RNA, 23 nt, synthetic construct
  source 1..23: mol_type = other RNA
tggttgtccaggtagaggctgag

SEQ ID NO: 56294 - RNA, 23 nt, synthetic construct
  source 1..23: mol_type = other RNA
ggcagagctctgcgtaagcctcc

SEQ ID NO: 56295 - RNA, 23 nt, synthetic construct
  source 1..23: mol_type = other RNA
cggcagagctctgcgtaagcctc

SEQ ID NO: 56296 - RNA, 23 nt, synthetic construct
  source 1..23: mol_type = other RNA
aggaaacccatcgggtcccacgc

SEQ ID NO: 56297 - RNA, 23 nt, synthetic construct
  source 1..23: mol_type = other RNA
cctggtcacggttacgaagccgg

SEQ ID NO: 56298 - RNA, 23 nt, synthetic construct
  source 1..23: mol_type = other RNA
gtcgtgttgatgcggacttgaca

SEQ ID NO: 56299 - RNA, 23 nt, synthetic construct
  source 1..23: mol_type = other RNA
gccacaggatggtcgtgttgatg

SEQ ID NO: 56300 - RNA, 23 nt, synthetic construct
  source 1..23: mol_type = other RNA
gctgagccgttaggacagtgcaa

SEQ ID NO: 56301 - RNA, 23 nt, synthetic construct
  source 1..23: mol_type = other RNA
cggcacgcgctcggggcacccat

SEQ ID NO: 56302 - RNA, 23 nt, synthetic construct
  source 1..23: mol_type = other RNA
tggagcccactaggcctcggcgt

SEQ ID NO: 56303 - RNA, 23 nt, synthetic construct
  source 1..23: mol_type = other RNA
gacggagccgttggacgcctcca

SEQ ID NO: 56304 - RNA, 23 nt, synthetic construct
  source 1..23: mol_type = other RNA
gaggacggagccgttggacgcct

SEQ ID NO: 56305 - RNA, 23 nt, synthetic construct
  source 1..23: mol_type = other RNA
gaggccagtgcggctgtaaggca

SEQ ID NO: 56306 - RNA, 23 nt, synthetic construct
  source 1..23: mol_type = other RNA
ggaggccgttgaagtccccacac

SEQ ID NO: 56307 - RNA, 23 nt, synthetic construct
  source 1..23: mol_type = other RNA
cctcctcgtccgtgcagttgccg

SEQ ID NO: 56308 - RNA, 23 nt, synthetic construct
  source 1..23: mol_type = other RNA
gccctcctcgtccgtgcagttgc

SEQ ID NO: 56309 - RNA, 23 nt, synthetic construct
  source 1..23: mol_type = other RNA
attccacaaaggtggcacacggg

SEQ ID NO: 56310 - RNA, 23 nt, synthetic construct
  source 1..23: mol_type = other RNA
cagccagagtgcgtgatgtcatc

SEQ ID NO: 56311 - RNA, 23 nt, synthetic construct
  source 1..23: mol_type = other RNA
ggaggtgcccgggctgtaggtgc

SEQ ID NO: 56312 - RNA, 23 nt, synthetic construct
  source 1..23: mol_type = other RNA
agtttctcatcataggtggagat

SEQ ID NO: 56313 - RNA, 23 nt, synthetic construct
  source 1..23: mol_type = other RNA
ctcagccagcacggtgaagctgc

SEQ ID NO: 56314 - RNA, 23 nt, synthetic construct
  source 1..23: mol_type = other RNA
cgcttggacccggatggccgtgt

SEQ ID NO: 56315 - RNA, 23 nt, synthetic construct
  source 1..23: mol_type = other RNA
cgccgccgtccgcttggacccgg

SEQ ID NO: 56316 - RNA, 23 nt, synthetic construct
  source 1..23: mol_type = other RNA
aacacctgcatgagtggcaccag

SEQ ID NO: 56317 - RNA, 23 nt, synthetic construct
  source 1..23: mol_type = other RNA
gcttcccacccgtacatgaacac

SEQ ID NO: 56318 - RNA, 23 nt, synthetic construct
  source 1..23: mol_type = other RNA
aagctgtagcgatcgccatcaaa

SEQ ID NO: 56319 - RNA, 23 nt, synthetic construct
  source 1..23: mol_type = other RNA
tcctgggccaagatgtactcgca

SEQ ID NO: 56320 - RNA, 23 nt, synthetic construct
  source 1..23: mol_type = other RNA
ggatgaacacgctggtcttccgg

SEQ ID NO: 56321 - RNA, 23 nt, synthetic construct
  source 1..23: mol_type = other RNA
tcatagtagtttccgtccttgtc

SEQ ID NO: 56322 - RNA, 23 nt, synthetic construct
  source 1..23: mol_type = other RNA
acccttgcaccgacgtcatagta

SEQ ID NO: 56323 - RNA, 23 nt, synthetic construct
  source 1..23: mol_type = other RNA
agatggcgatcaagcaggcgcca

SEQ ID NO: 56324 - RNA, 23 nt, synthetic construct
  source 1..23: mol_type = other RNA
gccgcccggcactcgatgtcagc

SEQ ID NO: 56325 - RNA, 23 nt, synthetic construct
  source 1..23: mol_type = other RNA
ttggctgttggcgcacatcagcc

SEQ ID NO: 56326 - RNA, 23 nt, synthetic construct
  source 1..23: mol_type = other RNA
agggccgccgtcgaccggatgct

SEQ ID NO: 56327 - RNA, 23 nt, synthetic construct
  source 1..23: mol_type = other RNA
gagggccgccgtcgaccggatgc

SEQ ID NO: 56328 - RNA, 23 nt, synthetic construct
  source 1..23: mol_type = other RNA
ccagcggccctgatcttatcgta

SEQ ID NO: 56329 - RNA, 23 nt, synthetic construct
  source 1..23: mol_type = other RNA
taggctgcggcgttgagaacagg

SEQ ID NO: 56330 - RNA, 23 nt, synthetic construct
  source 1..23: mol_type = other RNA
gctgtgaggggcgccatgtgccc

SEQ ID NO: 56331 - RNA, 23 nt, synthetic construct
  source 1..23: mol_type = other RNA
gctgtgcctgtcgggcgagctct

SEQ ID NO: 56332 - RNA, 23 nt, synthetic construct
  source 1..23: mol_type = other RNA
cagcggctctttggaagcggtgc

SEQ ID NO: 56333 - RNA, 23 nt, synthetic construct
  source 1..23: mol_type = other RNA
ctggaagggcggttgcagtccct

SEQ ID NO: 56334 - RNA, 23 nt, synthetic construct
  source 1..23: mol_type = other RNA
gtgtggtggtctgtgataggcgg

SEQ ID NO: 56335 - RNA, 23 nt, synthetic construct
  source 1..23: mol_type = other RNA
tggtagttggcactttggtagtg

SEQ ID NO: 56336 - RNA, 23 nt, synthetic construct
  source 1..23: mol_type = other RNA
gtaccggtggttgctgctagggt

SEQ ID NO: 56337 - RNA, 23 nt, synthetic construct
  source 1..23: mol_type = other RNA
ggtaccggtggttgctgctaggg

SEQ ID NO: 56338 - RNA, 23 nt, synthetic construct
  source 1..23: mol_type = other RNA
ggtcgaggtgcgggtcttgctgg

SEQ ID NO: 56339 - RNA, 23 nt, synthetic construct
  source 1..23: mol_type = other RNA
ctgggcacggcactcgaggccca

SEQ ID NO: 56340 - RNA, 23 nt, synthetic construct
  source 1..23: mol_type = other RNA
ctggaagggcggttgcagtccct

SEQ ID NO: 56341 - RNA, 23 nt, synthetic construct
  source 1..23: mol_type = other RNA
gtgtggtggtctgtgataggcgg

SEQ ID NO: 56342 - RNA, 23 nt, synthetic construct
  source 1..23: mol_type = other RNA
gagggggtcaccgtggaacctct

SEQ ID NO: 56343 - RNA, 23 nt, synthetic construct
  source 1..23: mol_type = other RNA
ggtcgaggtgcgggtcttgctgg

SEQ ID NO: 56344 - RNA, 23 nt, synthetic construct
  source 1..23: mol_type = other RNA
ctgggcacggcactcgaggccca

SEQ ID NO: 56345 - RNA, 23 nt, synthetic construct
  source 1..23: mol_type = other RNA
gggtgtaaagctggtagctgtgg

SEQ ID NO: 56346 - RNA, 23 nt, synthetic construct
  source 1..23: mol_type = other RNA
ctggaagggcggttgcagtccct

SEQ ID NO: 56347 - RNA, 23 nt, synthetic construct
  source 1..23: mol_type = other RNA
gtgtggtggtctgtgataggcgg

SEQ ID NO: 56348 - RNA, 23 nt, synthetic construct
  source 1..23: mol_type = other RNA
tagtcggcactttggtagtgtga

SEQ ID NO: 56349 - RNA, 23 nt, synthetic construct
  source 1..23: mol_type = other RNA
ggtcgaggtgcgggtcttgctgg

SEQ ID NO: 56350 - RNA, 23 nt, synthetic construct
  source 1..23: mol_type = other RNA
cagcccgtggtcaccaccgtggt

SEQ ID NO: 56351 - RNA, 23 nt, synthetic construct
  source 1..23: mol_type = other RNA
ctgggcacggcactcgaggccca

SEQ ID NO: 56352 - RNA, 23 nt, synthetic construct
  source 1..23: mol_type = other RNA
ctggaagggcggttgcagtccct

SEQ ID NO: 56353 - RNA, 23 nt, synthetic construct
  source 1..23: mol_type = other RNA
gtgtggtggtctgtgataggcgg

SEQ ID NO: 56354 - RNA, 23 nt, synthetic construct
  source 1..23: mol_type = other RNA
tagtcggcactttggtagtgtga

SEQ ID NO: 56355 - RNA, 23 nt, synthetic construct
  source 1..23: mol_type = other RNA
cactggaggcgtgcgtgccgtcc

SEQ ID NO: 56356 - RNA, 23 nt, synthetic construct
  source 1..23: mol_type = other RNA
ggtcgaggtgcgggtcttgctgg

SEQ ID NO: 56357 - RNA, 23 nt, synthetic construct
  source 1..23: mol_type = other RNA
cagcccgtggtcaccaccgtggt

SEQ ID NO: 56358 - RNA, 23 nt, synthetic construct
  source 1..23: mol_type = other RNA
ctgggcacggcactcgaggccca

SEQ ID NO: 56359 - RNA, 23 nt, synthetic construct
  source 1..23: mol_type = other RNA
agggggtggacgtggaactggtg

SEQ ID NO: 56360 - RNA, 23 nt, synthetic construct
  source 1..23: mol_type = other RNA
gtgtggtggtctgtgataggcgg

SEQ ID NO: 56361 - RNA, 23 nt, synthetic construct
  source 1..23: mol_type = other RNA
tagtcggcactttggtagtgtga

SEQ ID NO: 56362 - RNA, 23 nt, synthetic construct
  source 1..23: mol_type = other RNA
gggtgtaaagctggtagctgtgg

SEQ ID NO: 56363 - RNA, 23 nt, synthetic construct
  source 1..23: mol_type = other RNA
cttccccgggcgagaaaaactgt

SEQ ID NO: 56364 - RNA, 23 nt, synthetic construct
  source 1..23: mol_type = other RNA
tgacttccccgggcgagaaaaac

SEQ ID NO: 56365 - RNA, 23 nt, synthetic construct
  source 1..23: mol_type = other RNA
gaaatggcagccggctcggtcgg

SEQ ID NO: 56366 - RNA, 23 nt, synthetic construct
  source 1..23: mol_type = other RNA
agaaatggcagccggctcggtcg

SEQ ID NO: 56367 - RNA, 23 nt, synthetic construct
  source 1..23: mol_type = other RNA
gaagcggtcaatgtcacagtgct

SEQ ID NO: 56368 - RNA, 23 nt, synthetic construct
  source 1..23: mol_type = other RNA
gacagcggggcggaggacactgg

SEQ ID NO: 56369 - RNA, 23 nt, synthetic construct
  source 1..23: mol_type = other RNA
gattcccaaagcgtgcatggatc

SEQ ID NO: 56370 - RNA, 23 nt, synthetic construct
  source 1..23: mol_type = other RNA
gacagtgaggacgatatccatgg

SEQ ID NO: 56371 - RNA, 23 nt, synthetic construct
  source 1..23: mol_type = other RNA
cattgaaggtgacgctcacgccc

SEQ ID NO: 56372 - RNA, 23 nt, synthetic construct
  source 1..23: mol_type = other RNA
gccattgaaggtgacgctcacgc

SEQ ID NO: 56373 - RNA, 23 nt, synthetic construct
  source 1..23: mol_type = other RNA
tgtccttgcaactggcggcagtg

SEQ ID NO: 56374 - RNA, 23 nt, synthetic construct
  source 1..23: mol_type = other RNA
atgtccttgcaactggcggcagt

SEQ ID NO: 56375 - RNA, 23 nt, synthetic construct
  source 1..23: mol_type = other RNA
ggtgggtgtgctagacaccgggg

SEQ ID NO: 56376 - RNA, 23 nt, synthetic construct
  source 1..23: mol_type = other RNA
ggggcacaaggttgtggcactca

SEQ ID NO: 56377 - RNA, 23 nt, synthetic construct
  source 1..23: mol_type = other RNA
ctgcagtggtcgctgatgcaggc

SEQ ID NO: 56378 - RNA, 23 nt, synthetic construct
  source 1..23: mol_type = other RNA
cagagctctgcgtaagcctccag

SEQ ID NO: 56379 - RNA, 23 nt, synthetic construct
  source 1..23: mol_type = other RNA
tcgggtcccacgcaggggcaggc

SEQ ID NO: 56380 - RNA, 23 nt, synthetic construct
  source 1..23: mol_type = other RNA
ctgaaccctcgtcacacacgcag

SEQ ID NO: 56381 - RNA, 23 nt, synthetic construct
  source 1..23: mol_type = other RNA
ggcctggtcacggttacgaagcc

SEQ ID NO: 56382 - RNA, 23 nt, synthetic construct
  source 1..23: mol_type = other RNA
ggggcctggtcacggttacgaag

SEQ ID NO: 56383 - RNA, 23 nt, synthetic construct
  source 1..23: mol_type = other RNA
cacaggatggtcgtgttgatgcg

SEQ ID NO: 56384 - RNA, 23 nt, synthetic construct
  source 1..23: mol_type = other RNA
tggctgagccgttaggacagtgc

SEQ ID NO: 56385 - RNA, 23 nt, synthetic construct
  source 1..23: mol_type = other RNA
ccgcagaggaggcccaaggtttt

SEQ ID NO: 56386 - RNA, 23 nt, synthetic construct
  source 1..23: mol_type = other RNA
ggcgccctcccgaaaggggtcct

SEQ ID NO: 56387 - RNA, 23 nt, synthetic construct
  source 1..23: mol_type = other RNA
cagggacacataggcccgcacat

SEQ ID NO: 56388 - RNA, 23 nt, synthetic construct
  source 1..23: mol_type = other RNA
acgcgctcggggcacccatcctg

SEQ ID NO: 56389 - RNA, 23 nt, synthetic construct
  source 1..23: mol_type = other RNA
cacgcgctcggggcacccatcct

SEQ ID NO: 56390 - RNA, 23 nt, synthetic construct
  source 1..23: mol_type = other RNA
cgtccggcacgcgctcggggcac

SEQ ID NO: 56391 - RNA, 23 nt, synthetic construct
  source 1..23: mol_type = other RNA
tggccgccagagccaacaccagc

SEQ ID NO: 56392 - RNA, 23 nt, synthetic construct
  source 1..23: mol_type = other RNA
atggccgccagagccaacaccag

SEQ ID NO: 56393 - RNA, 23 nt, synthetic construct
  source 1..23: mol_type = other RNA
caccacgagcatggccgccagag

SEQ ID NO: 56394 - RNA, 23 nt, synthetic construct
  source 1..23: mol_type = other RNA
gcaccacgagcatggccgccaga

SEQ ID NO: 56395 - RNA, 23 nt, synthetic construct
  source 1..23: mol_type = other RNA
tctgcctgcggcaccacgagcat

SEQ ID NO: 56396 - RNA, 23 nt, synthetic construct
  source 1..23: mol_type = other RNA
ctctgcctgcggcaccacgagca

SEQ ID NO: 56397 - RNA, 23 nt, synthetic construct
  source 1..23: mol_type = other RNA
gcaccgccatccatggtgtgccc

SEQ ID NO: 56398 - RNA, 23 nt, synthetic construct
  source 1..23: mol_type = other RNA
tcggggcaccgccatccatggtg

SEQ ID NO: 56399 - RNA, 23 nt, synthetic construct
  source 1..23: mol_type = other RNA
ctcacgcgccgggtgggcgagga

SEQ ID NO: 56400 - RNA, 23 nt, synthetic construct
  source 1..23: mol_type = other RNA
cgtagttgcaaaggccagggaag

SEQ ID NO: 56401 - RNA, 23 nt, synthetic construct
  source 1..23: mol_type = other RNA
acgtagttgcaaaggccagggaa

SEQ ID NO: 56402 - RNA, 23 nt, synthetic construct
  source 1..23: mol_type = other RNA
gagcccactaggcctcggcgtag

SEQ ID NO: 56403 - RNA, 23 nt, synthetic construct
  source 1..23: mol_type = other RNA
cggagccgttggacgcctccagc

SEQ ID NO: 56404 - RNA, 23 nt, synthetic construct
  source 1..23: mol_type = other RNA
acggagccgttggacgcctccag

SEQ ID NO: 56405 - RNA, 23 nt, synthetic construct
  source 1..23: mol_type = other RNA
gatgaggacggagccgttggacg

SEQ ID NO: 56406 - RNA, 23 nt, synthetic construct
  source 1..23: mol_type = other RNA
aggccagtgcggctgtaaggcag

SEQ ID NO: 56407 - RNA, 23 nt, synthetic construct
  source 1..23: mol_type = other RNA
gaatgtcagcaccagccggatgc

SEQ ID NO: 56408 - RNA, 23 nt, synthetic construct
  source 1..23: mol_type = other RNA
ttggcgtatttgggatccagctc

SEQ ID NO: 56409 - RNA, 23 nt, synthetic construct
  source 1..23: mol_type = other RNA
ggttggcgtatttgggatccagc

SEQ ID NO: 56410 - RNA, 23 nt, synthetic construct
  source 1..23: mol_type = other RNA
actcgttgaaggccgggaggccg

SEQ ID NO: 56411 - RNA, 23 nt, synthetic construct
  source 1..23: mol_type = other RNA
aactcgttgaaggccgggaggcc

SEQ ID NO: 56412 - RNA, 23 nt, synthetic construct
  source 1..23: mol_type = other RNA
cctggcgttgtgggcatagaact

SEQ ID NO: 56413 - RNA, 23 nt, synthetic construct
  source 1..23: mol_type = other RNA
caaactggagcggggtcagcctg

SEQ ID NO: 56414 - RNA, 23 nt, synthetic construct
  source 1..23: mol_type = other RNA
agttgccggccggcaagggcagc

SEQ ID NO: 56415 - RNA, 23 nt, synthetic construct
  source 1..23: mol_type = other RNA
tgcagttgccggccggcaagggc

SEQ ID NO: 56416 - RNA, 23 nt, synthetic construct
  source 1..23: mol_type = other RNA
cgtgcagttgccggccggcaagg

SEQ ID NO: 56417 - RNA, 23 nt, synthetic construct
  source 1..23: mol_type = other RNA
gtccaccagtgcgtggcactccg

SEQ ID NO: 56418 - RNA, 23 nt, synthetic construct
  source 1..23: mol_type = other RNA
gctgtccaccagtgcgtggcact

SEQ ID NO: 56419 - RNA, 23 nt, synthetic construct
  source 1..23: mol_type = other RNA
ccaggtacgcagtgctgtccacc

SEQ ID NO: 56420 - RNA, 23 nt, synthetic construct
  source 1..23: mol_type = other RNA
cggccaggtacgcagtgctgtcc

SEQ ID NO: 56421 - RNA, 23 nt, synthetic construct
  source 1..23: mol_type = other RNA
ggcggccaggtacgcagtgctgt

SEQ ID NO: 56422 - RNA, 23 nt, synthetic construct
  source 1..23: mol_type = other RNA
caaaggtggcacacgggcaggtg

SEQ ID NO: 56423 - RNA, 23 nt, synthetic construct
  source 1..23: mol_type = other RNA
tattccacaaaggtggcacacgg

SEQ ID NO: 56424 - RNA, 23 nt, synthetic construct
  source 1..23: mol_type = other RNA
gtattccacaaaggtggcacacg

SEQ ID NO: 56425 - RNA, 23 nt, synthetic construct
  source 1..23: mol_type = other RNA
tccagttccgcggctggcccccc

SEQ ID NO: 56426 - RNA, 23 nt, synthetic construct
  source 1..23: mol_type = other RNA
cctccagttccgcggctggcccc

SEQ ID NO: 56427 - RNA, 23 nt, synthetic construct
  source 1..23: mol_type = other RNA
catgttgagggggcaggtccggg

SEQ ID NO: 56428 - RNA, 23 nt, synthetic construct
  source 1..23: mol_type = other RNA
gcatgttgagggggcaggtccgg

SEQ ID NO: 56429 - RNA, 23 nt, synthetic construct
  source 1..23: mol_type = other RNA
tgctgcatgttgagggggcaggt

SEQ ID NO: 56430 - RNA, 23 nt, synthetic construct
  source 1..23: mol_type = other RNA
caggtgtccgtgcagggtgagcc

SEQ ID NO: 56431 - RNA, 23 nt, synthetic construct
  source 1..23: mol_type = other RNA
gccatagccccccggagcaggtg

SEQ ID NO: 56432 - RNA, 23 nt, synthetic construct
  source 1..23: mol_type = other RNA
tcctggcactgccatagcccccc

SEQ ID NO: 56433 - RNA, 23 nt, synthetic construct
  source 1..23: mol_type = other RNA
tcataggtggagatgtgggcccc

SEQ ID NO: 56434 - RNA, 23 nt, synthetic construct
  source 1..23: mol_type = other RNA
tcatcataggtggagatgtgggc

SEQ ID NO: 56435 - RNA, 23 nt, synthetic construct
  source 1..23: mol_type = other RNA
tctcatcataggtggagatgtgg

SEQ ID NO: 56436 - RNA, 23 nt, synthetic construct
  source 1..23: mol_type = other RNA
caggtcgtagagtttctcatcat

SEQ ID NO: 56437 - RNA, 23 nt, synthetic construct
  source 1..23: mol_type = other RNA
aacgtagctgcagtcaccatgca

SEQ ID NO: 56438 - RNA, 23 nt, synthetic construct
  source 1..23: mol_type = other RNA
cgtcaggccgcacttccgcagct

SEQ ID NO: 56439 - RNA, 23 nt, synthetic construct
  source 1..23: mol_type = other RNA
ctcgttgtccgtcaggccgcact

SEQ ID NO: 56440 - RNA, 23 nt, synthetic construct
  source 1..23: mol_type = other RNA
tctcgttgtccgtcaggccgcac

SEQ ID NO: 56441 - RNA, 23 nt, synthetic construct
  source 1..23: mol_type = other RNA
agttctcgttgtccgtcaggccg

SEQ ID NO: 56442 - RNA, 23 nt, synthetic construct
  source 1..23: mol_type = other RNA
caccgctttcaggcagttctcgt

SEQ ID NO: 56443 - RNA, 23 nt, synthetic construct
  source 1..23: mol_type = other RNA
cgtcaccgctttcaggcagttct

SEQ ID NO: 56444 - RNA, 23 nt, synthetic construct
  source 1..23: mol_type = other RNA
ggctgagcgtcaccgctttcagg

SEQ ID NO: 56445 - RNA, 23 nt, synthetic construct
  source 1..23: mol_type = other RNA
tccgcttggacccggatggccgt

SEQ ID NO: 56446 - RNA, 23 nt, synthetic construct
  source 1..23: mol_type = other RNA
ccgccgtccgcttggacccggat

SEQ ID NO: 56447 - RNA, 23 nt, synthetic construct
  source 1..23: mol_type = other RNA
ctgcaccacgatgaagaagctcg

SEQ ID NO: 56448 - RNA, 23 nt, synthetic construct
  source 1..23: mol_type = other RNA
aaacacctgcatgagtggcacca

SEQ ID NO: 56449 - RNA, 23 nt, synthetic construct
  source 1..23: mol_type = other RNA
ccgctgagggccgtgaagtcgtc

SEQ ID NO: 56450 - RNA, 23 nt, synthetic construct
  source 1..23: mol_type = other RNA
accccgctgagggccgtgaagtc

SEQ ID NO: 56451 - RNA, 23 nt, synthetic construct
  source 1..23: mol_type = other RNA
gcgaaggctgcgcccgtggcctc

SEQ ID NO: 56452 - RNA, 23 nt, synthetic construct
  source 1..23: mol_type = other RNA
cgcgagaaggcactgttgggatc

SEQ ID NO: 56453 - RNA, 23 nt, synthetic construct
  source 1..23: mol_type = other RNA
gcagcgcgagaaggcactgttgg

SEQ ID NO: 56454 - RNA, 23 nt, synthetic construct
  source 1..23: mol_type = other RNA
ctcactcaggccgcggcaagtgg

SEQ ID NO: 56455 - RNA, 23 nt, synthetic construct
  source 1..23: mol_type = other RNA
gtgagcgtagcaggggcactcct

SEQ ID NO: 56456 - RNA, 23 nt, synthetic construct
  source 1..23: mol_type = other RNA
gccgtgagcgtagcaggggcact

SEQ ID NO: 56457 - RNA, 23 nt, synthetic construct
  source 1..23: mol_type = other RNA
ccagcacggtgccgtgagcgtag

SEQ ID NO: 56458 - RNA, 23 nt, synthetic construct
  source 1..23: mol_type = other RNA
gagccagcacggtgccgtgagcg

SEQ ID NO: 56459 - RNA, 23 nt, synthetic construct
  source 1..23: mol_type = other RNA
ctcgtcgtgcaccacctctccag

SEQ ID NO: 56460 - RNA, 23 nt, synthetic construct
  source 1..23: mol_type = other RNA
cctcgtcgtgcaccacctctcca

SEQ ID NO: 56461 - RNA, 23 nt, synthetic construct
  source 1..23: mol_type = other RNA
tgaacacacggcgccctcgtcgt

SEQ ID NO: 56462 - RNA, 23 nt, synthetic construct
  source 1..23: mol_type = other RNA
atgaacacacggcgccctcgtcg

SEQ ID NO: 56463 - RNA, 23 nt, synthetic construct
  source 1..23: mol_type = other RNA
catgaacacacggcgccctcgtc

SEQ ID NO: 56464 - RNA, 23 nt, synthetic construct
  source 1..23: mol_type = other RNA
agcttcccacccgtacatgaaca

SEQ ID NO: 56465 - RNA, 23 nt, synthetic construct
  source 1..23: mol_type = other RNA
caggtacaccatgggggctgcac

SEQ ID NO: 56466 - RNA, 23 nt, synthetic construct
  source 1..23: mol_type = other RNA
ccaggtacaccatgggggctgca

SEQ ID NO: 56467 - RNA, 23 nt, synthetic construct
  source 1..23: mol_type = other RNA
tccaggtacaccatgggggctgc

SEQ ID NO: 56468 - RNA, 23 nt, synthetic construct
  source 1..23: mol_type = other RNA
agtcctcctcggcaatgcagccc

SEQ ID NO: 56469 - RNA, 23 nt, synthetic construct
  source 1..23: mol_type = other RNA
ctgtagcgatcgccatcaaaggt

SEQ ID NO: 56470 - RNA, 23 nt, synthetic construct
  source 1..23: mol_type = other RNA
aaagctgtagcgatcgccatcaa

SEQ ID NO: 56471 - RNA, 23 nt, synthetic construct
  source 1..23: mol_type = other RNA
caaagctgtagcgatcgccatca

SEQ ID NO: 56472 - RNA, 23 nt, synthetic construct
  source 1..23: mol_type = other RNA
ccaagatgtactcgcagctgcct

SEQ ID NO: 56473 - RNA, 23 nt, synthetic construct
  source 1..23: mol_type = other RNA
cgccttaaaggtcccctcttgga

SEQ ID NO: 56474 - RNA, 23 nt, synthetic construct
  source 1..23: mol_type = other RNA
tcgccaccgccttaaaggtcccc

SEQ ID NO: 56475 - RNA, 23 nt, synthetic construct
  source 1..23: mol_type = other RNA
gtagggtgggtccccacccggcc

SEQ ID NO: 56476 - RNA, 23 nt, synthetic construct
  source 1..23: mol_type = other RNA
gtgggtctcgatgaccaggaaga

SEQ ID NO: 56477 - RNA, 23 nt, synthetic construct
  source 1..23: mol_type = other RNA
acggccatcccgtgggtctcgat

SEQ ID NO: 56478 - RNA, 23 nt, synthetic construct
  source 1..23: mol_type = other RNA
gtgcagtcggatgaacacgctgg

SEQ ID NO: 56479 - RNA, 23 nt, synthetic construct
  source 1..23: mol_type = other RNA
gggtgccagggcgtccgggcagg

SEQ ID NO: 56480 - RNA, 23 nt, synthetic construct
  source 1..23: mol_type = other RNA
cgccacccgagtcgcaggcacac

SEQ ID NO: 56481 - RNA, 23 nt, synthetic construct
  source 1..23: mol_type = other RNA
gcagtcgccacccgagtcgcagg

SEQ ID NO: 56482 - RNA, 23 nt, synthetic construct
  source 1..23: mol_type = other RNA
gaacaaggggcaggtgtccggag

SEQ ID NO: 56483 - RNA, 23 nt, synthetic construct
  source 1..23: mol_type = other RNA
agcccccatgtgggttgtagaag

SEQ ID NO: 56484 - RNA, 23 nt, synthetic construct
  source 1..23: mol_type = other RNA
cagcccccatgtgggttgtagaa

SEQ ID NO: 56485 - RNA, 23 nt, synthetic construct
  source 1..23: mol_type = other RNA
tagtagtttccgtccttgtcgta

SEQ ID NO: 56486 - RNA, 23 nt, synthetic construct
  source 1..23: mol_type = other RNA
ctgtggggacccttgcaccgacg

SEQ ID NO: 56487 - RNA, 23 nt, synthetic construct
  source 1..23: mol_type = other RNA
tgggtgtgcagttacagctctgg

SEQ ID NO: 56488 - RNA, 23 nt, synthetic construct
  source 1..23: mol_type = other RNA
ggtagctgtaggtcctgtcctca

SEQ ID NO: 56489 - RNA, 23 nt, synthetic construct
  source 1..23: mol_type = other RNA
agcaggcgccaagcccatcggtg

SEQ ID NO: 56490 - RNA, 23 nt, synthetic construct
  source 1..23: mol_type = other RNA
tggtgccgttgcttccgcagatg

SEQ ID NO: 56491 - RNA, 23 nt, synthetic construct
  source 1..23: mol_type = other RNA
atgatggtgccgttgcttccgca

SEQ ID NO: 56492 - RNA, 23 nt, synthetic construct
  source 1..23: mol_type = other RNA
gatgatggtgccgttgcttccgc

SEQ ID NO: 56493 - RNA, 23 nt, synthetic construct
  source 1..23: mol_type = other RNA
aaggtgaatggcgttgtggctgg

SEQ ID NO: 56494 - RNA, 23 nt, synthetic construct
  source 1..23: mol_type = other RNA
gtctcaaagtctccgcctcccag

SEQ ID NO: 56495 - RNA, 23 nt, synthetic construct
  source 1..23: mol_type = other RNA
cgtctcaaagtctccgcctccca

SEQ ID NO: 56496 - RNA, 23 nt, synthetic construct
  source 1..23: mol_type = other RNA
gcccccgcatgcggtcacagtcc

SEQ ID NO: 56497 - RNA, 23 nt, synthetic construct
  source 1..23: mol_type = other RNA
catcagcccccgcatgcggtcac

SEQ ID NO: 56498 - RNA, 23 nt, synthetic construct
  source 1..23: mol_type = other RNA
ggcgcacatcagcccccgcatgc

SEQ ID NO: 56499 - RNA, 23 nt, synthetic construct
  source 1..23: mol_type = other RNA
tggcgcacatcagcccccgcatg

SEQ ID NO: 56500 - RNA, 23 nt, synthetic construct
  source 1..23: mol_type = other RNA
gttggcgcacatcagcccccgca

SEQ ID NO: 56501 - RNA, 23 nt, synthetic construct
  source 1..23: mol_type = other RNA
gtgacagagcgggggactctgtt

SEQ ID NO: 56502 - RNA, 23 nt, synthetic construct
  source 1..23: mol_type = other RNA
agtcgtgacagagcgggggactc

SEQ ID NO: 56503 - RNA, 23 nt, synthetic construct
  source 1..23: mol_type = other RNA
ggcacgtattcgcagcagagaac

SEQ ID NO: 56504 - RNA, 23 nt, synthetic construct
  source 1..23: mol_type = other RNA
tggggtaggcacagcaggctccg

SEQ ID NO: 56505 - RNA, 23 nt, synthetic construct
  source 1..23: mol_type = other RNA
agctggacccagtctgcgaggtg

SEQ ID NO: 56506 - RNA, 23 nt, synthetic construct
  source 1..23: mol_type = other RNA
gtggtacctggggccgagggggt

SEQ ID NO: 56507 - RNA, 23 nt, synthetic construct
  source 1..23: mol_type = other RNA
gctggcataagtgccctccagcg

SEQ ID NO: 56508 - RNA, 23 nt, synthetic construct
  source 1..23: mol_type = other RNA
ctgctggcataagtgccctccag

SEQ ID NO: 56509 - RNA, 23 nt, synthetic construct
  source 1..23: mol_type = other RNA
cgaagtggacgtcacagtgcacc

SEQ ID NO: 56510 - RNA, 23 nt, synthetic construct
  source 1..23: mol_type = other RNA
ccgaagtggacgtcacagtgcac

SEQ ID NO: 56511 - RNA, 23 nt, synthetic construct
  source 1..23: mol_type = other RNA
tgcggcgttgagaacagggcctg

SEQ ID NO: 56512 - RNA, 23 nt, synthetic construct
  source 1..23: mol_type = other RNA
atgtcagtccttctgagagggtg

SEQ ID NO: 56513 - RNA, 23 nt, synthetic construct
  source 1..23: mol_type = other RNA
tgtgtatctgggggatgtcagtc

SEQ ID NO: 56514 - RNA, 23 nt, synthetic construct
  source 1..23: mol_type = other RNA
cgtggggcctcccgtggtggctg

SEQ ID NO: 56515 - RNA, 23 nt, synthetic construct
  source 1..23: mol_type = other RNA
aggcgtcgtggggcctcccgtgg

SEQ ID NO: 56516 - RNA, 23 nt, synthetic construct
  source 1..23: mol_type = other RNA
tccccgtcgtccctggaagggct

SEQ ID NO: 56517 - RNA, 23 nt, synthetic construct
  source 1..23: mol_type = other RNA
ctgtgaggggcgccatgtgccca

SEQ ID NO: 56518 - RNA, 23 nt, synthetic construct
  source 1..23: mol_type = other RNA
ggctgtgaggggcgccatgtgcc

SEQ ID NO: 56519 - RNA, 23 nt, synthetic construct
  source 1..23: mol_type = other RNA
gttgttggggccagcgtgggtgg

SEQ ID NO: 56520 - RNA, 23 nt, synthetic construct
  source 1..23: mol_type = other RNA
ccattgttgttggggccagcgtg

SEQ ID NO: 56521 - RNA, 23 nt, synthetic construct
  source 1..23: mol_type = other RNA
gggcgagctctggaggttgccat

SEQ ID NO: 56522 - RNA, 23 nt, synthetic construct
  source 1..23: mol_type = other RNA
gtcgggcgagctctggaggttgc

SEQ ID NO: 56523 - RNA, 23 nt, synthetic construct
  source 1..23: mol_type = other RNA
tggtcagcggctctttggaagcg

SEQ ID NO: 56524 - RNA, 23 nt, synthetic construct
  source 1..23: mol_type = other RNA
gtggtcagcggctctttggaagc

SEQ ID NO: 56525 - RNA, 23 nt, synthetic construct
  source 1..23: mol_type = other RNA
tcgtggtcagcggctctttggaa

SEQ ID NO: 56526 - RNA, 23 nt, synthetic construct
  source 1..23: mol_type = other RNA
tggcgccaggctcgtggtcagcg

SEQ ID NO: 56527 - RNA, 23 nt, synthetic construct
  source 1..23: mol_type = other RNA
gttggcgccaggctcgtggtcag

SEQ ID NO: 56528 - RNA, 23 nt, synthetic construct
  source 1..23: mol_type = other RNA
ggacagctcgctcgtgagtgttg

SEQ ID NO: 56529 - RNA, 23 nt, synthetic construct
  source 1..23: mol_type = other RNA
tggtctcggcctgagaggtggac

SEQ ID NO: 56530 - RNA, 23 nt, synthetic construct
  source 1..23: mol_type = other RNA
cgtgctggtctcggcctgagagg

SEQ ID NO: 56531 - RNA, 23 nt, synthetic construct
  source 1..23: mol_type = other RNA
gggcgtgctggtctcggcctgag

SEQ ID NO: 56532 - RNA, 23 nt, synthetic construct
  source 1..23: mol_type = other RNA
aaggggctcattgtcgtctctgt

SEQ ID NO: 56533 - RNA, 23 nt, synthetic construct
  source 1..23: mol_type = other RNA
taacgctggtagctgtgggtgtg

SEQ ID NO: 56534 - RNA, 23 nt, synthetic construct
  source 1..23: mol_type = other RNA
ggtctgtgataggcgggtccagg

SEQ ID NO: 56535 - RNA, 23 nt, synthetic construct
  source 1..23: mol_type = other RNA
gtggccgtgggtgtggtggtctg

SEQ ID NO: 56536 - RNA, 23 nt, synthetic construct
  source 1..23: mol_type = other RNA
gtaagcactgtggaggtgtgggc

SEQ ID NO: 56537 - RNA, 23 nt, synthetic construct
  source 1..23: mol_type = other RNA
cccgtggttgtggtagttggcac

SEQ ID NO: 56538 - RNA, 23 nt, synthetic construct
  source 1..23: mol_type = other RNA
gaagcccgtggttgtggtagttg

SEQ ID NO: 56539 - RNA, 23 nt, synthetic construct
  source 1..23: mol_type = other RNA
ctgtgaagcccgtggttgtggta

SEQ ID NO: 56540 - RNA, 23 nt, synthetic construct
  source 1..23: mol_type = other RNA
aggcgtgagtgccgtccctgggc

SEQ ID NO: 56541 - RNA, 23 nt, synthetic construct
  source 1..23: mol_type = other RNA
tgatccacactggaggcgtgagt

SEQ ID NO: 56542 - RNA, 23 nt, synthetic construct
  source 1..23: mol_type = other RNA
ccgtggagcctctggttgtgggt

SEQ ID NO: 56543 - RNA, 23 nt, synthetic construct
  source 1..23: mol_type = other RNA
gtgggtggtccccgggatggagg

SEQ ID NO: 56544 - RNA, 23 nt, synthetic construct
  source 1..23: mol_type = other RNA
tggtcagcactgtggcggtgtgg

SEQ ID NO: 56545 - RNA, 23 nt, synthetic construct
  source 1..23: mol_type = other RNA
tagaaccagtggccacagttgtg

SEQ ID NO: 56546 - RNA, 23 nt, synthetic construct
  source 1..23: mol_type = other RNA
actggtctgtgtgctagaggagg

SEQ ID NO: 56547 - RNA, 23 nt, synthetic construct
  source 1..23: mol_type = other RNA
ggtggtcagtgatgggggagtac

SEQ ID NO: 56548 - RNA, 23 nt, synthetic construct
  source 1..23: mol_type = other RNA
cggtggccgtgatcgtagtggcc

SEQ ID NO: 56549 - RNA, 23 nt, synthetic construct
  source 1..23: mol_type = other RNA
tgttcggcactgggggtgtgtgg

SEQ ID NO: 56550 - RNA, 23 nt, synthetic construct
  source 1..23: mol_type = other RNA
ggtgttcggcactgggggtgtgt

SEQ ID NO: 56551 - RNA, 23 nt, synthetic construct
  source 1..23: mol_type = other RNA
tcgcccgtgtgtggtggccatgg

SEQ ID NO: 56552 - RNA, 23 nt, synthetic construct
  source 1..23: mol_type = other RNA
gggcagggatcgcccgtgtgtgg

SEQ ID NO: 56553 - RNA, 23 nt, synthetic construct
  source 1..23: mol_type = other RNA
gggggcagggatcgcccgtgtgt

SEQ ID NO: 56554 - RNA, 23 nt, synthetic construct
  source 1..23: mol_type = other RNA
gtgcgcaccgtgtggggactgct

SEQ ID NO: 56555 - RNA, 23 nt, synthetic construct
  source 1..23: mol_type = other RNA
tgtgcgcaccgtgtggggactgc

SEQ ID NO: 56556 - RNA, 23 nt, synthetic construct
  source 1..23: mol_type = other RNA
atgcccgaggtggccgaagtcca

SEQ ID NO: 56557 - RNA, 23 nt, synthetic construct
  source 1..23: mol_type = other RNA
gtgatgtgggtggtgcccaagat

SEQ ID NO: 56558 - RNA, 23 nt, synthetic construct
  source 1..23: mol_type = other RNA
gctggagtcgagtgctgggtggt

SEQ ID NO: 56559 - RNA, 23 nt, synthetic construct
  source 1..23: mol_type = other RNA
tggttctgctgctagggtgaggg

SEQ ID NO: 56560 - RNA, 23 nt, synthetic construct
  source 1..23: mol_type = other RNA
ggtgactcggtggttctgctgct

SEQ ID NO: 56561 - RNA, 23 nt, synthetic construct
  source 1..23: mol_type = other RNA
agaagggggtgactcggtggttc

SEQ ID NO: 56562 - RNA, 23 nt, synthetic construct
  source 1..23: mol_type = other RNA
tggcccggggtggtcgtccctgg

SEQ ID NO: 56563 - RNA, 23 nt, synthetic construct
  source 1..23: mol_type = other RNA
ccgtggtgtggcccggggtggtc

SEQ ID NO: 56564 - RNA, 23 nt, synthetic construct
  source 1..23: mol_type = other RNA
ggtcttgctgggtgtggccgtgg

SEQ ID NO: 56565 - RNA, 23 nt, synthetic construct
  source 1..23: mol_type = other RNA
atgggggccgatgtggggctgct

SEQ ID NO: 56566 - RNA, 23 nt, synthetic construct
  source 1..23: mol_type = other RNA
ggttatgggggccgatgtggggc

SEQ ID NO: 56567 - RNA, 23 nt, synthetic construct
  source 1..23: mol_type = other RNA
accaccgtggttatgggggccga

SEQ ID NO: 56568 - RNA, 23 nt, synthetic construct
  source 1..23: mol_type = other RNA
tcaccaccgtggttatgggggcc

SEQ ID NO: 56569 - RNA, 23 nt, synthetic construct
  source 1..23: mol_type = other RNA
gtagctgtagtccagccactctg

SEQ ID NO: 56570 - RNA, 23 nt, synthetic construct
  source 1..23: mol_type = other RNA
ccggcatggggtagctgtagtcc

SEQ ID NO: 56571 - RNA, 23 nt, synthetic construct
  source 1..23: mol_type = other RNA
gcacggatgttggagtaggtgtc

SEQ ID NO: 56572 - RNA, 23 nt, synthetic construct
  source 1..23: mol_type = other RNA
tgctcacagacggcccctccggc

SEQ ID NO: 56573 - RNA, 23 nt, synthetic construct
  source 1..23: mol_type = other RNA
gagggcatggccgtagagctggt

SEQ ID NO: 56574 - RNA, 23 nt, synthetic construct
  source 1..23: mol_type = other RNA
ggctgtagtgctcggctctgtga

SEQ ID NO: 56575 - RNA, 23 nt, synthetic construct
  source 1..23: mol_type = other RNA
ggtggctgtagtgctcggctctg

SEQ ID NO: 56576 - RNA, 23 nt, synthetic construct
  source 1..23: mol_type = other RNA
ggcaccgtcacggtggctgtagt

SEQ ID NO: 56577 - RNA, 23 nt, synthetic construct
  source 1..23: mol_type = other RNA
gggcaccgtcacggtggctgtag

SEQ ID NO: 56578 - RNA, 23 nt, synthetic construct
  source 1..23: mol_type = other RNA
atccggtgggcaccgtcacggtg

SEQ ID NO: 56579 - RNA, 23 nt, synthetic construct
  source 1..23: mol_type = other RNA
ggccgtggatccggtgggcaccg

SEQ ID NO: 56580 - RNA, 23 nt, synthetic construct
  source 1..23: mol_type = other RNA
tggccgtggatccggtgggcacc

SEQ ID NO: 56581 - RNA, 23 nt, synthetic construct
  source 1..23: mol_type = other RNA
cggtggccgtggatccggtgggc

SEQ ID NO: 56582 - RNA, 23 nt, synthetic construct
  source 1..23: mol_type = other RNA
tggggtgccagcagttgcctggg

SEQ ID NO: 56583 - RNA, 23 nt, synthetic construct
  source 1..23: mol_type = other RNA
ggggatggctgtaaagctggtag

SEQ ID NO: 56584 - RNA, 23 nt, synthetic construct
  source 1..23: mol_type = other RNA
ggtctgtgataggcgggtccagg

SEQ ID NO: 56585 - RNA, 23 nt, synthetic construct
  source 1..23: mol_type = other RNA
gtggccgtgggtgtggtggtctg

SEQ ID NO: 56586 - RNA, 23 nt, synthetic construct
  source 1..23: mol_type = other RNA
gtggaggtgtggacagtctctgg

SEQ ID NO: 56587 - RNA, 23 nt, synthetic construct
  source 1..23: mol_type = other RNA
gtaagcactgtggaggtgtggac

SEQ ID NO: 56588 - RNA, 23 nt, synthetic construct
  source 1..23: mol_type = other RNA
gcccgtggttgtggtagtcagca

SEQ ID NO: 56589 - RNA, 23 nt, synthetic construct
  source 1..23: mol_type = other RNA
gaagcccgtggttgtggtagtca

SEQ ID NO: 56590 - RNA, 23 nt, synthetic construct
  source 1..23: mol_type = other RNA
ctgtgaagcccgtggttgtggta

SEQ ID NO: 56591 - RNA, 23 nt, synthetic construct
  source 1..23: mol_type = other RNA
cacactggaagcgtgcgtgccgt

SEQ ID NO: 56592 - RNA, 23 nt, synthetic construct
  source 1..23: mol_type = other RNA
ccacactggaagcgtgcgtgccg

SEQ ID NO: 56593 - RNA, 23 nt, synthetic construct
  source 1..23: mol_type = other RNA
ggggtcaccgtggaacctctggt

SEQ ID NO: 56594 - RNA, 23 nt, synthetic construct
  source 1..23: mol_type = other RNA
gggggtcaccgtggaacctctgg

SEQ ID NO: 56595 - RNA, 23 nt, synthetic construct
  source 1..23: mol_type = other RNA
gtgggtggtccccgggatggagg

SEQ ID NO: 56596 - RNA, 23 nt, synthetic construct
  source 1..23: mol_type = other RNA
tagaaccagtggccacagttgtg

SEQ ID NO: 56597 - RNA, 23 nt, synthetic construct
  source 1..23: mol_type = other RNA
actggtctgtgtgctagaggagg

SEQ ID NO: 56598 - RNA, 23 nt, synthetic construct
  source 1..23: mol_type = other RNA
ggtggtcagtgatgggggagtac

SEQ ID NO: 56599 - RNA, 23 nt, synthetic construct
  source 1..23: mol_type = other RNA
cggtggccgtgatcgtagtggcc

SEQ ID NO: 56600 - RNA, 23 nt, synthetic construct
  source 1..23: mol_type = other RNA
gggggataggtgttgtccctgga

SEQ ID NO: 56601 - RNA, 23 nt, synthetic construct
  source 1..23: mol_type = other RNA
agcactggggggataggtgttgt

SEQ ID NO: 56602 - RNA, 23 nt, synthetic construct
  source 1..23: mol_type = other RNA
tgttcggcactgggggtgtgtgg

SEQ ID NO: 56603 - RNA, 23 nt, synthetic construct
  source 1..23: mol_type = other RNA
ggtgttcggcactgggggtgtgt

SEQ ID NO: 56604 - RNA, 23 nt, synthetic construct
  source 1..23: mol_type = other RNA
tggccgtggtgttcggcactggg

SEQ ID NO: 56605 - RNA, 23 nt, synthetic construct
  source 1..23: mol_type = other RNA
gtgcgcaccgtgtggggactgct

SEQ ID NO: 56606 - RNA, 23 nt, synthetic construct
  source 1..23: mol_type = other RNA
tgtgcgcaccgtgtggggactgc

SEQ ID NO: 56607 - RNA, 23 nt, synthetic construct
  source 1..23: mol_type = other RNA
gtgatgtgggtggtgcccaaggt

SEQ ID NO: 56608 - RNA, 23 nt, synthetic construct
  source 1..23: mol_type = other RNA
gtaccggtggttgctgctggggt

SEQ ID NO: 56609 - RNA, 23 nt, synthetic construct
  source 1..23: mol_type = other RNA
gctggagtcgagtgctgggtggt

SEQ ID NO: 56610 - RNA, 23 nt, synthetic construct
  source 1..23: mol_type = other RNA
agaagggggtgactcggtggtcc

SEQ ID NO: 56611 - RNA, 23 nt, synthetic construct
  source 1..23: mol_type = other RNA
tggcccggggtggtcgtccctgg

SEQ ID NO: 56612 - RNA, 23 nt, synthetic construct
  source 1..23: mol_type = other RNA
ggtcttgctgggtgtggccgtgg

SEQ ID NO: 56613 - RNA, 23 nt, synthetic construct
  source 1..23: mol_type = other RNA
tggttattggggccgatgtgggg

SEQ ID NO: 56614 - RNA, 23 nt, synthetic construct
  source 1..23: mol_type = other RNA
accaccgtggttattggggccga

SEQ ID NO: 56615 - RNA, 23 nt, synthetic construct
  source 1..23: mol_type = other RNA
gtagctgtagtccagccactctg

SEQ ID NO: 56616 - RNA, 23 nt, synthetic construct
  source 1..23: mol_type = other RNA
ccggcatggggtagctgtagtcc

SEQ ID NO: 56617 - RNA, 23 nt, synthetic construct
  source 1..23: mol_type = other RNA
gcacggatgttggagtaggtgtc

SEQ ID NO: 56618 - RNA, 23 nt, synthetic construct
  source 1..23: mol_type = other RNA
tgctcacagacggcccctccggc

SEQ ID NO: 56619 - RNA, 23 nt, synthetic construct
  source 1..23: mol_type = other RNA
tggttgcggtcgtagtggctgct

SEQ ID NO: 56620 - RNA, 23 nt, synthetic construct
  source 1..23: mol_type = other RNA
agtggttgcggtcgtagtggctg

SEQ ID NO: 56621 - RNA, 23 nt, synthetic construct
  source 1..23: mol_type = other RNA
cactggaagggtggttgcagtcc

SEQ ID NO: 56622 - RNA, 23 nt, synthetic construct
  source 1..23: mol_type = other RNA
aggggatgggtgtaaagctggta

SEQ ID NO: 56623 - RNA, 23 nt, synthetic construct
  source 1..23: mol_type = other RNA
gaggggatgggtgtaaagctggt

SEQ ID NO: 56624 - RNA, 23 nt, synthetic construct
  source 1..23: mol_type = other RNA
gtggtctgttctgggagggtccc

SEQ ID NO: 56625 - RNA, 23 nt, synthetic construct
  source 1..23: mol_type = other RNA
tgggtggtctccggagtggagga

SEQ ID NO: 56626 - RNA, 23 nt, synthetic construct
  source 1..23: mol_type = other RNA
gccttcgtggtcagcactgtgga

SEQ ID NO: 56627 - RNA, 23 nt, synthetic construct
  source 1..23: mol_type = other RNA
gtggccttcgtggtcagcactgt

SEQ ID NO: 56628 - RNA, 23 nt, synthetic construct
  source 1..23: mol_type = other RNA
aactggtggcccttgtcgtggtg

SEQ ID NO: 56629 - RNA, 23 nt, synthetic construct
  source 1..23: mol_type = other RNA
ggcaccgtcacggtggctgtagt

SEQ ID NO: 56630 - RNA, 23 nt, synthetic construct
  source 1..23: mol_type = other RNA
gggcaccgtcacggtggctgtag

SEQ ID NO: 56631 - RNA, 23 nt, synthetic construct
  source 1..23: mol_type = other RNA
atccggtgggcaccgtcacggtg

SEQ ID NO: 56632 - RNA, 23 nt, synthetic construct
  source 1..23: mol_type = other RNA
ggccgtggatccggtgggcaccg

SEQ ID NO: 56633 - RNA, 23 nt, synthetic construct
  source 1..23: mol_type = other RNA
tggccgtggatccggtgggcacc

SEQ ID NO: 56634 - RNA, 23 nt, synthetic construct
  source 1..23: mol_type = other RNA
cggtggccgtggatccggtgggc

SEQ ID NO: 56635 - RNA, 23 nt, synthetic construct
  source 1..23: mol_type = other RNA
cagcagttgcccgggtggaggag

SEQ ID NO: 56636 - RNA, 23 nt, synthetic construct
  source 1..23: mol_type = other RNA
taacgctggtagctgtgggtgtg

SEQ ID NO: 56637 - RNA, 23 nt, synthetic construct
  source 1..23: mol_type = other RNA
ggtctgtgataggcgggtccagg

SEQ ID NO: 56638 - RNA, 23 nt, synthetic construct
  source 1..23: mol_type = other RNA
gtggccgtgggtgtggtggtctg

SEQ ID NO: 56639 - RNA, 23 nt, synthetic construct
  source 1..23: mol_type = other RNA
tggacagtctctggagtagagga

SEQ ID NO: 56640 - RNA, 23 nt, synthetic construct
  source 1..23: mol_type = other RNA
gtggaggtgtggacagtctctgg

SEQ ID NO: 56641 - RNA, 23 nt, synthetic construct
  source 1..23: mol_type = other RNA
gtaagcactgtggaggtgtggac

SEQ ID NO: 56642 - RNA, 23 nt, synthetic construct
  source 1..23: mol_type = other RNA
gaagcccgtggttgtggtagtcg

SEQ ID NO: 56643 - RNA, 23 nt, synthetic construct
  source 1..23: mol_type = other RNA
ctgtgaagcccgtggttgtggta

SEQ ID NO: 56644 - RNA, 23 nt, synthetic construct
  source 1..23: mol_type = other RNA
aggcgtgagtgccgtccctgggc

SEQ ID NO: 56645 - RNA, 23 nt, synthetic construct
  source 1..23: mol_type = other RNA
tgatccacactggaggcgtgagt

SEQ ID NO: 56646 - RNA, 23 nt, synthetic construct
  source 1..23: mol_type = other RNA
ccgtggagcctctggttgtgggt

SEQ ID NO: 56647 - RNA, 23 nt, synthetic construct
  source 1..23: mol_type = other RNA
gtgggtggtccccgggatggagg

SEQ ID NO: 56648 - RNA, 23 nt, synthetic construct
  source 1..23: mol_type = other RNA
tggtcagcactgtggcggtgtgg

SEQ ID NO: 56649 - RNA, 23 nt, synthetic construct
  source 1..23: mol_type = other RNA
tagaaccagtggccacagttgtg

SEQ ID NO: 56650 - RNA, 23 nt, synthetic construct
  source 1..23: mol_type = other RNA
actggtctgtgtgctagaggagg

SEQ ID NO: 56651 - RNA, 23 nt, synthetic construct
  source 1..23: mol_type = other RNA
ggtggtcagtgatgggggagtac

SEQ ID NO: 56652 - RNA, 23 nt, synthetic construct
  source 1..23: mol_type = other RNA
ccggtggctgtgatcgtagtggc

SEQ ID NO: 56653 - RNA, 23 nt, synthetic construct
  source 1..23: mol_type = other RNA
tgttcggcactgggggtgtgtgg

SEQ ID NO: 56654 - RNA, 23 nt, synthetic construct
  source 1..23: mol_type = other RNA
ggtgttcggcactgggggtgtgt

SEQ ID NO: 56655 - RNA, 23 nt, synthetic construct
  source 1..23: mol_type = other RNA
tggccgtggtgttcggcactggg

SEQ ID NO: 56656 - RNA, 23 nt, synthetic construct
  source 1..23: mol_type = other RNA
gtgcgcaccgtgtggggactgct

SEQ ID NO: 56657 - RNA, 23 nt, synthetic construct
  source 1..23: mol_type = other RNA
tgtgcgcaccgtgtggggactgc

SEQ ID NO: 56658 - RNA, 23 nt, synthetic construct
  source 1..23: mol_type = other RNA
atgcccgaggtggccgaagtcca

SEQ ID NO: 56659 - RNA, 23 nt, synthetic construct
  source 1..23: mol_type = other RNA
gtgatgtgggtggtgcccaagat

SEQ ID NO: 56660 - RNA, 23 nt, synthetic construct
  source 1..23: mol_type = other RNA
gagtgctgggtggtactggtggt

SEQ ID NO: 56661 - RNA, 23 nt, synthetic construct
  source 1..23: mol_type = other RNA
gctggagtcgagtgctgggtggt

SEQ ID NO: 56662 - RNA, 23 nt, synthetic construct
  source 1..23: mol_type = other RNA
agaagggggtgactcggtggtcc

SEQ ID NO: 56663 - RNA, 23 nt, synthetic construct
  source 1..23: mol_type = other RNA
tggcccggggtggtcgtccctgg

SEQ ID NO: 56664 - RNA, 23 nt, synthetic construct
  source 1..23: mol_type = other RNA
atgggggccgatgtggggctgct

SEQ ID NO: 56665 - RNA, 23 nt, synthetic construct
  source 1..23: mol_type = other RNA
ggttatgggggccgatgtggggc

SEQ ID NO: 56666 - RNA, 23 nt, synthetic construct
  source 1..23: mol_type = other RNA
accaccgtggttatgggggccga

SEQ ID NO: 56667 - RNA, 23 nt, synthetic construct
  source 1..23: mol_type = other RNA
tcaccaccgtggttatgggggcc

SEQ ID NO: 56668 - RNA, 23 nt, synthetic construct
  source 1..23: mol_type = other RNA
ggggctcacagcccgtggtcacc

SEQ ID NO: 56669 - RNA, 23 nt, synthetic construct
  source 1..23: mol_type = other RNA
gtagctgtagtccagccactctg

SEQ ID NO: 56670 - RNA, 23 nt, synthetic construct
  source 1..23: mol_type = other RNA
ccggcatggggtagctgtagtcc

SEQ ID NO: 56671 - RNA, 23 nt, synthetic construct
  source 1..23: mol_type = other RNA
gcacggatgttggagtaggtgtc

SEQ ID NO: 56672 - RNA, 23 nt, synthetic construct
  source 1..23: mol_type = other RNA
ggctgtagtgctcggctctgtga

SEQ ID NO: 56673 - RNA, 23 nt, synthetic construct
  source 1..23: mol_type = other RNA
ggtggctgtagtgctcggctctg

SEQ ID NO: 56674 - RNA, 23 nt, synthetic construct
  source 1..23: mol_type = other RNA
ggcaccgtcacggtggctgtagt

SEQ ID NO: 56675 - RNA, 23 nt, synthetic construct
  source 1..23: mol_type = other RNA
gggcaccgtcacggtggctgtag

SEQ ID NO: 56676 - RNA, 23 nt, synthetic construct
  source 1..23: mol_type = other RNA
atccggtgggcaccgtcacggtg

SEQ ID NO: 56677 - RNA, 23 nt, synthetic construct
  source 1..23: mol_type = other RNA
ggccgtggatccggtgggcaccg

SEQ ID NO: 56678 - RNA, 23 nt, synthetic construct
  source 1..23: mol_type = other RNA
tggccgtggatccggtgggcacc

SEQ ID NO: 56679 - RNA, 23 nt, synthetic construct
  source 1..23: mol_type = other RNA
cggtggccgtggatccggtgggc

SEQ ID NO: 56680 - RNA, 23 nt, synthetic construct
  source 1..23: mol_type = other RNA
tggggtgccagcagttgcctggg

SEQ ID NO: 56681 - RNA, 23 nt, synthetic construct
  source 1..23: mol_type = other RNA
ggggatggctgtaaagctggtag

SEQ ID NO: 56682 - RNA, 23 nt, synthetic construct
  source 1..23: mol_type = other RNA
ggtctgtgataggcgggtccagg

SEQ ID NO: 56683 - RNA, 23 nt, synthetic construct
  source 1..23: mol_type = other RNA
gtggccgtgggtgtggtggtctg

SEQ ID NO: 56684 - RNA, 23 nt, synthetic construct
  source 1..23: mol_type = other RNA
gtaagcactgtggaggtgtgggc

SEQ ID NO: 56685 - RNA, 23 nt, synthetic construct
  source 1..23: mol_type = other RNA
gaagcccgtggttgtggtagtcg

SEQ ID NO: 56686 - RNA, 23 nt, synthetic construct
  source 1..23: mol_type = other RNA
ctgtgaagcccgtggttgtggta

SEQ ID NO: 56687 - RNA, 23 nt, synthetic construct
  source 1..23: mol_type = other RNA
gggtgactgtgaagcccgtggtt

SEQ ID NO: 56688 - RNA, 23 nt, synthetic construct
  source 1..23: mol_type = other RNA
acactggaggcgtgcgtgccgtc

SEQ ID NO: 56689 - RNA, 23 nt, synthetic construct
  source 1..23: mol_type = other RNA
ccacactggaggcgtgcgtgccg

SEQ ID NO: 56690 - RNA, 23 nt, synthetic construct
  source 1..23: mol_type = other RNA
gatccacactggaggcgtgcgtg

SEQ ID NO: 56691 - RNA, 23 nt, synthetic construct
  source 1..23: mol_type = other RNA
tgatccacactggaggcgtgcgt

SEQ ID NO: 56692 - RNA, 23 nt, synthetic construct
  source 1..23: mol_type = other RNA
gagccactggttgtgggtgtggt

SEQ ID NO: 56693 - RNA, 23 nt, synthetic construct
  source 1..23: mol_type = other RNA
gtgggtggtccccgggacggagg

SEQ ID NO: 56694 - RNA, 23 nt, synthetic construct
  source 1..23: mol_type = other RNA
tagaaccagtggccacagttgtg

SEQ ID NO: 56695 - RNA, 23 nt, synthetic construct
  source 1..23: mol_type = other RNA
actggtctgtgtgctagaggagg

SEQ ID NO: 56696 - RNA, 23 nt, synthetic construct
  source 1..23: mol_type = other RNA
cggtggccgtgatcgtagtggcc

SEQ ID NO: 56697 - RNA, 23 nt, synthetic construct
  source 1..23: mol_type = other RNA
gggggataggtgttgtccctgga

SEQ ID NO: 56698 - RNA, 23 nt, synthetic construct
  source 1..23: mol_type = other RNA
agcactggggggataggtgttgt

SEQ ID NO: 56699 - RNA, 23 nt, synthetic construct
  source 1..23: mol_type = other RNA
tgttcggcactgggggtgtgtgg

SEQ ID NO: 56700 - RNA, 23 nt, synthetic construct
  source 1..23: mol_type = other RNA
ggtgttcggcactgggggtgtgt

SEQ ID NO: 56701 - RNA, 23 nt, synthetic construct
  source 1..23: mol_type = other RNA
tggccgtggtgttcggcactggg

SEQ ID NO: 56702 - RNA, 23 nt, synthetic construct
  source 1..23: mol_type = other RNA
gtgcgcaccgtgtggggactgct

SEQ ID NO: 56703 - RNA, 23 nt, synthetic construct
  source 1..23: mol_type = other RNA
tgtgcgcaccgtgtggggactgc

SEQ ID NO: 56704 - RNA, 23 nt, synthetic construct
  source 1..23: mol_type = other RNA
gtgatgtgggtggtgcccaaggt

SEQ ID NO: 56705 - RNA, 23 nt, synthetic construct
  source 1..23: mol_type = other RNA
gtaccggtggttgctgctggggt

SEQ ID NO: 56706 - RNA, 23 nt, synthetic construct
  source 1..23: mol_type = other RNA
gctggagtcgagtgctgggtggt

SEQ ID NO: 56707 - RNA, 23 nt, synthetic construct
  source 1..23: mol_type = other RNA
ggaagggggtgactcggtggtcc

SEQ ID NO: 56708 - RNA, 23 nt, synthetic construct
  source 1..23: mol_type = other RNA
ggggaagggggtgactcggtggt

SEQ ID NO: 56709 - RNA, 23 nt, synthetic construct
  source 1..23: mol_type = other RNA
tggcccggggtggtcgtccctgg

SEQ ID NO: 56710 - RNA, 23 nt, synthetic construct
  source 1..23: mol_type = other RNA
ccgtggtgtggcccggggtggtc

SEQ ID NO: 56711 - RNA, 23 nt, synthetic construct
  source 1..23: mol_type = other RNA
ggtcttgctgggtgtggccgtgg

SEQ ID NO: 56712 - RNA, 23 nt, synthetic construct
  source 1..23: mol_type = other RNA
atgggggccgatgtggggctgct

SEQ ID NO: 56713 - RNA, 23 nt, synthetic construct
  source 1..23: mol_type = other RNA
ggttatgggggccgatgtggggc

SEQ ID NO: 56714 - RNA, 23 nt, synthetic construct
  source 1..23: mol_type = other RNA
accaccgtggttatgggggccga

SEQ ID NO: 56715 - RNA, 23 nt, synthetic construct
  source 1..23: mol_type = other RNA
tcaccaccgtggttatgggggcc

SEQ ID NO: 56716 - RNA, 23 nt, synthetic construct
  source 1..23: mol_type = other RNA
ggggctcacagcccgtggtcacc

SEQ ID NO: 56717 - RNA, 23 nt, synthetic construct
  source 1..23: mol_type = other RNA
gtagctgtagtccagccactctg

SEQ ID NO: 56718 - RNA, 23 nt, synthetic construct
  source 1..23: mol_type = other RNA
ccggcatggggtagctgtagtcc

SEQ ID NO: 56719 - RNA, 23 nt, synthetic construct
  source 1..23: mol_type = other RNA
gcacggatgttggagtaggtgtc

SEQ ID NO: 56720 - RNA, 23 nt, synthetic construct
  source 1..23: mol_type = other RNA
tgctcacagacggcccctccggc

SEQ ID NO: 56721 - RNA, 23 nt, synthetic construct
  source 1..23: mol_type = other RNA
gagggcatggccgtagagctggt

SEQ ID NO: 56722 - RNA, 23 nt, synthetic construct
  source 1..23: mol_type = other RNA
cactggaagggtggttgcagtcc

SEQ ID NO: 56723 - RNA, 23 nt, synthetic construct
  source 1..23: mol_type = other RNA
gtggtctgttctgggagggtccc

SEQ ID NO: 56724 - RNA, 23 nt, synthetic construct
  source 1..23: mol_type = other RNA
tgggtggtctccggagtggagga

SEQ ID NO: 56725 - RNA, 23 nt, synthetic construct
  source 1..23: mol_type = other RNA
gccttcgtggtcagcactgtgga

SEQ ID NO: 56726 - RNA, 23 nt, synthetic construct
  source 1..23: mol_type = other RNA
gtggccttcgtggtcagcactgt

SEQ ID NO: 56727 - RNA, 23 nt, synthetic construct
  source 1..23: mol_type = other RNA
aactggtggcccttgtcgtggtg

SEQ ID NO: 56728 - RNA, 23 nt, synthetic construct
  source 1..23: mol_type = other RNA
gagggggtggacgtggaactggt

SEQ ID NO: 56729 - RNA, 23 nt, synthetic construct
  source 1..23: mol_type = other RNA
ggctgtagtgctcggctctgtga

SEQ ID NO: 56730 - RNA, 23 nt, synthetic construct
  source 1..23: mol_type = other RNA
ggtggctgtagtgctcggctctg

SEQ ID NO: 56731 - RNA, 23 nt, synthetic construct
  source 1..23: mol_type = other RNA
ggcaccgtcacggtggctgtagt

SEQ ID NO: 56732 - RNA, 23 nt, synthetic construct
  source 1..23: mol_type = other RNA
gggcaccgtcacggtggctgtag

SEQ ID NO: 56733 - RNA, 23 nt, synthetic construct
  source 1..23: mol_type = other RNA
atccggtgggcaccgtcacggtg

SEQ ID NO: 56734 - RNA, 23 nt, synthetic construct
  source 1..23: mol_type = other RNA
ggccgtggatccggtgggcaccg

SEQ ID NO: 56735 - RNA, 23 nt, synthetic construct
  source 1..23: mol_type = other RNA
tggccgtggatccggtgggcacc

SEQ ID NO: 56736 - RNA, 23 nt, synthetic construct
  source 1..23: mol_type = other RNA
cggtggccgtggatccggtgggc

SEQ ID NO: 56737 - RNA, 23 nt, synthetic construct
  source 1..23: mol_type = other RNA
tggggtgccagcagttgcctggg

SEQ ID NO: 56738 - RNA, 23 nt, synthetic construct
  source 1..23: mol_type = other RNA
ggggatggctgtaaagctggtag

SEQ ID NO: 56739 - RNA, 23 nt, synthetic construct
  source 1..23: mol_type = other RNA
ggtctgtgataggcgggtccagg

SEQ ID NO: 56740 - RNA, 23 nt, synthetic construct
  source 1..23: mol_type = other RNA
gtggccgtgggtgtggtggtctg

SEQ ID NO: 56741 - RNA, 23 nt, synthetic construct
  source 1..23: mol_type = other RNA
gtggaggtgtggacagtctctgg

SEQ ID NO: 56742 - RNA, 23 nt, synthetic construct
  source 1..23: mol_type = other RNA
gtaagcactgtggaggtgtggac

SEQ ID NO: 56743 - RNA, 23 nt, synthetic construct
  source 1..23: mol_type = other RNA
gaagcccgtggttgtggtagtcg

SEQ ID NO: 56744 - RNA, 23 nt, synthetic construct
  source 1..23: mol_type = other RNA
ctgtgaagcccgtggttgtggta

SEQ ID NO: 56745 - RNA, 23 nt, synthetic construct
  source 1..23: mol_type = other RNA
aggcgtgagtgccgtccctgggc

SEQ ID NO: 56746 - RNA, 23 nt, synthetic construct
  source 1..23: mol_type = other RNA
tgatccacactggaggcgtgagt

SEQ ID NO: 56747 - RNA, 23 nt, synthetic construct
  source 1..23: mol_type = other RNA
gagccactggttgtgggtgtggt

SEQ ID NO: 56748 - RNA, 23 nt, synthetic construct
  source 1..23: mol_type = other RNA
gtgggtggtccccgggatggagg

SEQ ID NO: 56749 - RNA, 23 nt, synthetic construct
  source 1..23: mol_type = other RNA
tggtcagcactctggcggtgtgg

SEQ ID NO: 56750 - RNA, 23 nt, synthetic construct
  source 1..23: mol_type = other RNA
tagaaccagtggccacagttgtg

SEQ ID NO: 56751 - RNA, 23 nt, synthetic construct
  source 1..23: mol_type = other RNA
actggtctgtgtgctagaggagg

SEQ ID NO: 56752 - RNA, 23 nt, synthetic construct
  source 1..23: mol_type = other RNA
ggtggtcagtgatgggggagtac

SEQ ID NO: 56753 - RNA, 23 nt, synthetic construct
  source 1..23: mol_type = other RNA
cggtggccgtgatcgtagtggcc

SEQ ID NO: 56754 - RNA, 23 nt, synthetic construct
  source 1..23: mol_type = other RNA
cactggaagggtggttgcagtcc

SEQ ID NO: 56755 - RNA, 23 nt, synthetic construct
  source 1..23: mol_type = other RNA
aggggatgggtgtaaagctggta

SEQ ID NO: 56756 - RNA, 23 nt, synthetic construct
  source 1..23: mol_type = other RNA
gaggggatgggtgtaaagctggt

SEQ ID NO: 56757 - RNA, 23 nt, synthetic construct
  source 1..23: mol_type = other RNA
ggtctgtgctgggacggtccacg

SEQ ID NO: 56758 - RNA, 23 nt, synthetic construct
  source 1..23: mol_type = other RNA
agaggaggtgtggattgtggaca

SEQ ID NO: 56759 - RNA, 23 nt, synthetic construct
  source 1..23: mol_type = other RNA
gtagaggaggtgtggattgtgga

SEQ ID NO: 56760 - RNA, 23 nt, synthetic construct
  source 1..23: mol_type = other RNA
ctggagtagaggaggtgtggatt

SEQ ID NO: 56761 - RNA, 23 nt, synthetic construct
  source 1..23: mol_type = other RNA
gggtggtctctggagtagaggag

SEQ ID NO: 56762 - RNA, 23 nt, synthetic construct
  source 1..23: mol_type = other RNA
cgtggaattggtggcccttgtca

SEQ ID NO: 56763 - RNA, 23 nt, synthetic construct
  source 1..23: mol_type = other RNA
gggtgtggccgtggaattggtgg

SEQ ID NO: 56764 - RNA, 23 nt, synthetic construct
  source 1..23: mol_type = other RNA
ccgggtcgtccccagagtggagg

SEQ ID NO: 56765 - RNA, 23 nt, synthetic construct
  source 1..23: mol_type = other RNA
ggatccgggtcgtccccagagtg

SEQ ID NO: 56766 - RNA, 23 nt, synthetic construct
  source 1..23: mol_type = other RNA
cggtggctatagtgctcggctct

SEQ ID NO: 56767 - RNA, 23 nt, synthetic construct
  source 1..23: mol_type = other RNA
ggtgggcaccatcacggtggcta

SEQ ID NO: 56768 - RNA, 23 nt, synthetic construct
  source 1..23: mol_type = other RNA
ccggtgggcaccatcacggtggc

SEQ ID NO: 56769 - RNA, 23 nt, synthetic construct
  source 1..23: mol_type = other RNA
accactttgggggtgtgagctgt

SEQ ID NO: 56770 - RNA, 23 nt, synthetic construct
  source 1..23: mol_type = other RNA
acacgctgaaggttggcaggctg

SEQ ID NO: 56771 - RNA, 23 nt, synthetic construct
  source 1..23: mol_type = other RNA
gacacgctgaaggttggcaggct

SEQ ID NO: 56772 - RNA, 23 nt, synthetic construct
  source 1..23: mol_type = other RNA
gggcgagaaaaactgtccaaatg

SEQ ID NO: 56773 - RNA, 23 nt, synthetic construct
  source 1..23: mol_type = other RNA
cgggcgagaaaaactgtccaaat

SEQ ID NO: 56774 - RNA, 23 nt, synthetic construct
  source 1..23: mol_type = other RNA
ttattgtagatgacttccccggg

SEQ ID NO: 56775 - RNA, 23 nt, synthetic construct
  source 1..23: mol_type = other RNA
cacactgcgtagaaatggcagcc

SEQ ID NO: 56776 - RNA, 23 nt, synthetic construct
  source 1..23: mol_type = other RNA
tgctgattgcacactgcgtagaa

SEQ ID NO: 56777 - RNA, 23 nt, synthetic construct
  source 1..23: mol_type = other RNA
cacagtgctgattgcacactgcg

SEQ ID NO: 56778 - RNA, 23 nt, synthetic construct
  source 1..23: mol_type = other RNA
caatgtcacagtgctgattgcac

SEQ ID NO: 56779 - RNA, 23 nt, synthetic construct
  source 1..23: mol_type = other RNA
agcggtcaatgtcacagtgctga

SEQ ID NO: 56780 - RNA, 23 nt, synthetic construct
  source 1..23: mol_type = other RNA
aagcggtcaatgtcacagtgctg

SEQ ID NO: 56781 - RNA, 23 nt, synthetic construct
  source 1..23: mol_type = other RNA
ggtctcattcacctgccggagag

SEQ ID NO: 56782 - RNA, 23 nt, synthetic construct
  source 1..23: mol_type = other RNA
tggaatagtgggagccgccccac

SEQ ID NO: 56783 - RNA, 23 nt, synthetic construct
  source 1..23: mol_type = other RNA
ccccggaaggtgtaagaggtgcc

SEQ ID NO: 56784 - RNA, 23 nt, synthetic construct
  source 1..23: mol_type = other RNA
ttgccccggaaggtgtaagaggt

SEQ ID NO: 56785 - RNA, 23 nt, synthetic construct
  source 1..23: mol_type = other RNA
gcagttgccccggaaggtgtaag

SEQ ID NO: 56786 - RNA, 23 nt, synthetic construct
  source 1..23: mol_type = other RNA
cataggtgcagttgccccggaag

SEQ ID NO: 56787 - RNA, 23 nt, synthetic construct
  source 1..23: mol_type = other RNA
caaagcgtgcatggatctctctc

SEQ ID NO: 56788 - RNA, 23 nt, synthetic construct
  source 1..23: mol_type = other RNA
tgagattcccaaagcgtgcatgg

SEQ ID NO: 56789 - RNA, 23 nt, synthetic construct
  source 1..23: mol_type = other RNA
ctgagattcccaaagcgtgcatg

SEQ ID NO: 56790 - RNA, 23 nt, synthetic construct
  source 1..23: mol_type = other RNA
gaggccgtgcagtagtggttgtc

SEQ ID NO: 56791 - RNA, 23 nt, synthetic construct
  source 1..23: mol_type = other RNA
agaggccgtgcagtagtggttgt

SEQ ID NO: 56792 - RNA, 23 nt, synthetic construct
  source 1..23: mol_type = other RNA
cagaggccgtgcagtagtggttg

SEQ ID NO: 56793 - RNA, 23 nt, synthetic construct
  source 1..23: mol_type = other RNA
gacttgtagtggatgctgagggc

SEQ ID NO: 56794 - RNA, 23 nt, synthetic construct
  source 1..23: mol_type = other RNA
ccatggacttgtagtggatgctg

SEQ ID NO: 56795 - RNA, 23 nt, synthetic construct
  source 1..23: mol_type = other RNA
tccatggacttgtagtggatgct

SEQ ID NO: 56796 - RNA, 23 nt, synthetic construct
  source 1..23: mol_type = other RNA
atccatggacttgtagtggatgc

SEQ ID NO: 56797 - RNA, 23 nt, synthetic construct
  source 1..23: mol_type = other RNA
tgacagtgaggacgatatccatg

SEQ ID NO: 56798 - RNA, 23 nt, synthetic construct
  source 1..23: mol_type = other RNA
ttcccatgcaccatggtgacagt

SEQ ID NO: 56799 - RNA, 23 nt, synthetic construct
  source 1..23: mol_type = other RNA
aatgtccacacgcatggtggtgg

SEQ ID NO: 56800 - RNA, 23 nt, synthetic construct
  source 1..23: mol_type = other RNA
ggcaggaatgtccacacgcatgg

SEQ ID NO: 56801 - RNA, 23 nt, synthetic construct
  source 1..23: mol_type = other RNA
tgaaggtgacgctcacgcccagg

SEQ ID NO: 56802 - RNA, 23 nt, synthetic construct
  source 1..23: mol_type = other RNA
aactggcggcagtggttccgtcc

SEQ ID NO: 56803 - RNA, 23 nt, synthetic construct
  source 1..23: mol_type = other RNA
caactggcggcagtggttccgtc

SEQ ID NO: 56804 - RNA, 23 nt, synthetic construct
  source 1..23: mol_type = other RNA
tgcaactggcggcagtggttccg

SEQ ID NO: 56805 - RNA, 23 nt, synthetic construct
  source 1..23: mol_type = other RNA
ttgcaactggcggcagtggttcc

SEQ ID NO: 56806 - RNA, 23 nt, synthetic construct
  source 1..23: mol_type = other RNA
gtccttgcaactggcggcagtgg

SEQ ID NO: 56807 - RNA, 23 nt, synthetic construct
  source 1..23: mol_type = other RNA
agccacgtcttggccatgtcctt

SEQ ID NO: 56808 - RNA, 23 nt, synthetic construct
  source 1..23: mol_type = other RNA
cagccacgtcttggccatgtcct

SEQ ID NO: 56809 - RNA, 23 nt, synthetic construct
  source 1..23: mol_type = other RNA
ggaccagccacgtcttggccatg

SEQ ID NO: 56810 - RNA, 23 nt, synthetic construct
  source 1..23: mol_type = other RNA
gggaccagccacgtcttggccat

SEQ ID NO: 56811 - RNA, 23 nt, synthetic construct
  source 1..23: mol_type = other RNA
ctttctgctgtcggggaccagcc

SEQ ID NO: 56812 - RNA, 23 nt, synthetic construct
  source 1..23: mol_type = other RNA
ccatcctttctgctgtcggggac

SEQ ID NO: 56813 - RNA, 23 nt, synthetic construct
  source 1..23: mol_type = other RNA
ggggggtgtgccagtcggggccc

SEQ ID NO: 56814 - RNA, 23 nt, synthetic construct
  source 1..23: mol_type = other RNA
gtgggtgtgctagacaccggggc

SEQ ID NO: 56815 - RNA, 23 nt, synthetic construct
  source 1..23: mol_type = other RNA
agcatcagatcacagagcggctg

SEQ ID NO: 56816 - RNA, 23 nt, synthetic construct
  source 1..23: mol_type = other RNA
aggcgttgaagaatgggcccggg

SEQ ID NO: 56817 - RNA, 23 nt, synthetic construct
  source 1..23: mol_type = other RNA
gcaggcgttgaagaatgggcccg

SEQ ID NO: 56818 - RNA, 23 nt, synthetic construct
  source 1..23: mol_type = other RNA
gcagtggtcgctgatgcaggcgt

SEQ ID NO: 56819 - RNA, 23 nt, synthetic construct
  source 1..23: mol_type = other RNA
aaggcggcccctgcagtggtcgc

SEQ ID NO: 56820 - RNA, 23 nt, synthetic construct
  source 1..23: mol_type = other RNA
agctctgcgtaagcctccaggct

SEQ ID NO: 56821 - RNA, 23 nt, synthetic construct
  source 1..23: mol_type = other RNA
ggcgcggcagagctctgcgtaag

SEQ ID NO: 56822 - RNA, 23 nt, synthetic construct
  source 1..23: mol_type = other RNA
gggccgcatggcttgtacacttt

SEQ ID NO: 56823 - RNA, 23 nt, synthetic construct
  source 1..23: mol_type = other RNA
ggctgtatggggccgcatggctt

SEQ ID NO: 56824 - RNA, 23 nt, synthetic construct
  source 1..23: mol_type = other RNA
tggcaggctgtatggggccgcat

SEQ ID NO: 56825 - RNA, 23 nt, synthetic construct
  source 1..23: mol_type = other RNA
gtggcaggctgtatggggccgca

SEQ ID NO: 56826 - RNA, 23 nt, synthetic construct
  source 1..23: mol_type = other RNA
ctctggttcctagagttgcaggt

SEQ ID NO: 56827 - RNA, 23 nt, synthetic construct
  source 1..23: mol_type = other RNA
caggcctgcacgcagatgcccat

SEQ ID NO: 56828 - RNA, 23 nt, synthetic construct
  source 1..23: mol_type = other RNA
aatttaggaaacccatcgggtcc

SEQ ID NO: 56829 - RNA, 23 nt, synthetic construct
  source 1..23: mol_type = other RNA
ggaaatttaggaaacccatcggg

SEQ ID NO: 56830 - RNA, 23 nt, synthetic construct
  source 1..23: mol_type = other RNA
cagttgctgacccaccgctcccc

SEQ ID NO: 56831 - RNA, 23 nt, synthetic construct
  source 1..23: mol_type = other RNA
cgtcacacacgcaggactggcag

SEQ ID NO: 56832 - RNA, 23 nt, synthetic construct
  source 1..23: mol_type = other RNA
ctcgtcacacacgcaggactggc

SEQ ID NO: 56833 - RNA, 23 nt, synthetic construct
  source 1..23: mol_type = other RNA
actgaaccctcgtcacacacgca

SEQ ID NO: 56834 - RNA, 23 nt, synthetic construct
  source 1..23: mol_type = other RNA
cttgcactgcaccgacactgaac

SEQ ID NO: 56835 - RNA, 23 nt, synthetic construct
  source 1..23: mol_type = other RNA
ctgaccctgggcgtcacagggca

SEQ ID NO: 56836 - RNA, 23 nt, synthetic construct
  source 1..23: mol_type = other RNA
cacggttacgaagccgggacggt

SEQ ID NO: 56837 - RNA, 23 nt, synthetic construct
  source 1..23: mol_type = other RNA
gggcctggtcacggttacgaagc

SEQ ID NO: 56838 - RNA, 23 nt, synthetic construct
  source 1..23: mol_type = other RNA
ccggggcctggtcacggttacga

SEQ ID NO: 56839 - RNA, 23 nt, synthetic construct
  source 1..23: mol_type = other RNA
cgcacaccgtctcggggcagcag

SEQ ID NO: 56840 - RNA, 23 nt, synthetic construct
  source 1..23: mol_type = other RNA
aaggtgccattgtacgaacacag

SEQ ID NO: 56841 - RNA, 23 nt, synthetic construct
  source 1..23: mol_type = other RNA
ttgcaccaaccccgtagaaggtg

SEQ ID NO: 56842 - RNA, 23 nt, synthetic construct
  source 1..23: mol_type = other RNA
ctgggaaggttgcaccaaccccg

SEQ ID NO: 56843 - RNA, 23 nt, synthetic construct
  source 1..23: mol_type = other RNA
cctgggaaggttgcaccaacccc

SEQ ID NO: 56844 - RNA, 23 nt, synthetic construct
  source 1..23: mol_type = other RNA
gcctgggaaggttgcaccaaccc

SEQ ID NO: 56845 - RNA, 23 nt, synthetic construct
  source 1..23: mol_type = other RNA
aggtagtattgttgcaggcatcc

SEQ ID NO: 56846 - RNA, 23 nt, synthetic construct
  source 1..23: mol_type = other RNA
gggacaggtagtattgttgcagg

SEQ ID NO: 56847 - RNA, 23 nt, synthetic construct
  source 1..23: mol_type = other RNA
ggccactctcttgtactcaaagc

SEQ ID NO: 56848 - RNA, 23 nt, synthetic construct
  source 1..23: mol_type = other RNA
gtctggacgcactccccacagca

SEQ ID NO: 56849 - RNA, 23 nt, synthetic construct
  source 1..23: mol_type = other RNA
caggcggtctggacgcactcccc

SEQ ID NO: 56850 - RNA, 23 nt, synthetic construct
  source 1..23: mol_type = other RNA
tggccatcgggcgtgaggcaggc

SEQ ID NO: 56851 - RNA, 23 nt, synthetic construct
  source 1..23: mol_type = other RNA
tggctggccatcgggcgtgaggc

SEQ ID NO: 56852 - RNA, 23 nt, synthetic construct
  source 1..23: mol_type = other RNA
gctgttgacccaggtttcattca

SEQ ID NO: 56853 - RNA, 23 nt, synthetic construct
  source 1..23: mol_type = other RNA
gaggtacacggtgcagttgtcca

SEQ ID NO: 56854 - RNA, 23 nt, synthetic construct
  source 1..23: mol_type = other RNA
acagaggtacacggtgcagttgt

SEQ ID NO: 56855 - RNA, 23 nt, synthetic construct
  source 1..23: mol_type = other RNA
cacagaggtacacggtgcagttg

SEQ ID NO: 56856 - RNA, 23 nt, synthetic construct
  source 1..23: mol_type = other RNA
gcaaatggactccaccctcagcc

SEQ ID NO: 56857 - RNA, 23 nt, synthetic construct
  source 1..23: mol_type = other RNA
agcaaatggactccaccctcagc

SEQ ID NO: 56858 - RNA, 23 nt, synthetic construct
  source 1..23: mol_type = other RNA
tgttgatgcggacttgacaggag

SEQ ID NO: 56859 - RNA, 23 nt, synthetic construct
  source 1..23: mol_type = other RNA
gtgttgatgcggacttgacagga

SEQ ID NO: 56860 - RNA, 23 nt, synthetic construct
  source 1..23: mol_type = other RNA
cctcggtctcgcagccctggtgc

SEQ ID NO: 56861 - RNA, 23 nt, synthetic construct
  source 1..23: mol_type = other RNA
ccctcgcagaaggtgatgttgac

SEQ ID NO: 56862 - RNA, 23 nt, synthetic construct
  source 1..23: mol_type = other RNA
ttggacgctccggggcaggagcc

SEQ ID NO: 56863 - RNA, 23 nt, synthetic construct
  source 1..23: mol_type = other RNA
ctctgctgagtacttggacgctc

SEQ ID NO: 56864 - RNA, 23 nt, synthetic construct
  source 1..23: mol_type = other RNA
gggcctctgctgagtacttggac

SEQ ID NO: 56865 - RNA, 23 nt, synthetic construct
  source 1..23: mol_type = other RNA
ggatggctgagccgttaggacag

SEQ ID NO: 56866 - RNA, 23 nt, synthetic construct
  source 1..23: mol_type = other RNA
tgcaggatggctgagccgttagg

SEQ ID NO: 56867 - RNA, 23 nt, synthetic construct
  source 1..23: mol_type = other RNA
ctcatccacgtgggtgtaggtgt

SEQ ID NO: 56868 - RNA, 23 nt, synthetic construct
  source 1..23: mol_type = other RNA
actcatccacgtgggtgtaggtg

SEQ ID NO: 56869 - RNA, 23 nt, synthetic construct
  source 1..23: mol_type = other RNA
acactcatccacgtgggtgtagg

SEQ ID NO: 56870 - RNA, 23 nt, synthetic construct
  source 1..23: mol_type = other RNA
cgcggggtgccacacacaggccg

SEQ ID NO: 56871 - RNA, 23 nt, synthetic construct
  source 1..23: mol_type = other RNA
ccctcccgaaaggggtcctgctg

SEQ ID NO: 56872 - RNA, 23 nt, synthetic construct
  source 1..23: mol_type = other RNA
gtggcgccctcccgaaaggggtc

SEQ ID NO: 56873 - RNA, 23 nt, synthetic construct
  source 1..23: mol_type = other RNA
gagtggcgccctcccgaaagggg

SEQ ID NO: 56874 - RNA, 23 nt, synthetic construct
  source 1..23: mol_type = other RNA
ctgagtggcgccctcccgaaagg

SEQ ID NO: 56875 - RNA, 23 nt, synthetic construct
  source 1..23: mol_type = other RNA
tcccagggtaggactcctgagtg

SEQ ID NO: 56876 - RNA, 23 nt, synthetic construct
  source 1..23: mol_type = other RNA
cggccgtggcagggacacatagg

SEQ ID NO: 56877 - RNA, 23 nt, synthetic construct
  source 1..23: mol_type = other RNA
gacgtggccagctggaatccgtg

SEQ ID NO: 56878 - RNA, 23 nt, synthetic construct
  source 1..23: mol_type = other RNA
cggccggacgtggccagctggaa

SEQ ID NO: 56879 - RNA, 23 nt, synthetic construct
  source 1..23: mol_type = other RNA
gcggccgccttgcctgtcgcagc

SEQ ID NO: 56880 - RNA, 23 nt, synthetic construct
  source 1..23: mol_type = other RNA
caggcggccgccttgcctgtcgc

SEQ ID NO: 56881 - RNA, 23 nt, synthetic construct
  source 1..23: mol_type = other RNA
acctcagccctgagttaccctgc

SEQ ID NO: 56882 - RNA, 23 nt, synthetic construct
  source 1..23: mol_type = other RNA
ggccgtggtgctcacatgtgggg

SEQ ID NO: 56883 - RNA, 23 nt, synthetic construct
  source 1..23: mol_type = other RNA
ggccgtggtgctcacatgtgggg

SEQ ID NO: 56884 - RNA, 23 nt, synthetic construct
  source 1..23: mol_type = other RNA
ggccgtggtgctcacatgtgggg

SEQ ID NO: 56885 - RNA, 23 nt, synthetic construct
  source 1..23: mol_type = other RNA
ccatgtagcgtatcttgtagggt

SEQ ID NO: 56886 - RNA, 23 nt, synthetic construct
  source 1..23: mol_type = other RNA
cccgcagctcgtagtcgtgacag

SEQ ID NO: 56887 - RNA, 23 nt, synthetic construct
  source 1..23: mol_type = other RNA
atagggtggtcttttcggttgct

SEQ ID NO: 56888 - RNA, 23 nt, synthetic construct
  source 1..23: mol_type = other RNA
gctgtgatcgtagtggccgtggt

SEQ ID NO: 56889 - RNA, 23 nt, synthetic construct
  source 1..23: mol_type = other RNA
aggcagaacgttctcagacagca

SEQ ID NO: 56890 - RNA, 23 nt, synthetic construct
  source 1..23: mol_type = other RNA
gcagctcgtagtcgtgacagagc

SEQ ID NO: 56891 - RNA, 23 nt, synthetic construct
  source 1..23: mol_type = other RNA
ccgttccacaggaatgtcagcac

SEQ ID NO: 56892 - RNA, 23 nt, synthetic construct
  source 1..23: mol_type = other RNA
gccctcccgaaaggggtcctgct

SEQ ID NO: 56893 - RNA, 23 nt, synthetic construct
  source 1..23: mol_type = other RNA
tggaatccgtgctgcgcgggcgc

SEQ ID NO: 56894 - RNA, 23 nt, synthetic construct
  source 1..23: mol_type = other RNA
gctggaatccgtgctgcgcgggc

SEQ ID NO: 56895 - RNA, 23 nt, synthetic construct
  source 1..23: mol_type = other RNA
cctggccgttgcgacctcagccc

SEQ ID NO: 56896 - RNA, 23 nt, synthetic construct
  source 1..23: mol_type = other RNA
ggaatccgtgctgcgcgggcgct

SEQ ID NO: 56897 - RNA, 23 nt, synthetic construct
  source 1..23: mol_type = other RNA
ccatcgggtcccacgcaggggca

SEQ ID NO: 56898 - RNA, 23 nt, synthetic construct
  source 1..23: mol_type = other RNA
cagggatcgcccgtgtgtggtgg

SEQ ID NO: 56899 - RNA, 23 nt, synthetic construct
  source 1..23: mol_type = other RNA
cagggatcgcccgtgtgtggtgg

SEQ ID NO: 56900 - RNA, 23 nt, synthetic construct
  source 1..23: mol_type = other RNA
cagggatcgcccgtgtgtggtgg

SEQ ID NO: 56901 - RNA, 23 nt, synthetic construct
  source 1..23: mol_type = other RNA
gcctgtcgggcgagctctggagg

SEQ ID NO: 56902 - RNA, 23 nt, synthetic construct
  source 1..23: mol_type = other RNA
ggctggagtcgagtgctgggtgg

SEQ ID NO: 56903 - RNA, 23 nt, synthetic construct
  source 1..23: mol_type = other RNA
ccgtggatccggtgggcaccgtc

SEQ ID NO: 56904 - RNA, 23 nt, synthetic construct
  source 1..23: mol_type = other RNA
ggacagggatcgcccgtgtgtgg

SEQ ID NO: 56905 - RNA, 23 nt, synthetic construct
  source 1..23: mol_type = other RNA
ggctggagtcgagtgctgggtgg

SEQ ID NO: 56906 - RNA, 23 nt, synthetic construct
  source 1..23: mol_type = other RNA
ccgtggatccggtgggcaccgtc

SEQ ID NO: 56907 - RNA, 23 nt, synthetic construct
  source 1..23: mol_type = other RNA
gacagggatcgcccgtgtgtggt

SEQ ID NO: 56908 - RNA, 23 nt, synthetic construct
  source 1..23: mol_type = other RNA
gacagggatcgcccgtgtgtggt

SEQ ID NO: 56909 - RNA, 23 nt, synthetic construct
  source 1..23: mol_type = other RNA
tcactcaggccgcggcaagtggg

SEQ ID NO: 56910 - RNA, 23 nt, synthetic construct
  source 1..23: mol_type = other RNA
ggggctcattgtcgtctctgtcc

SEQ ID NO: 56911 - RNA, 23 nt, synthetic construct
  source 1..23: mol_type = other RNA
aagcccgtggttgtggtagttgg

SEQ ID NO: 56912 - RNA, 23 nt, synthetic construct
  source 1..23: mol_type = other RNA
aagcccgtggttgtggtagtcag

SEQ ID NO: 56913 - RNA, 23 nt, synthetic construct
  source 1..23: mol_type = other RNA
ggttgtggtagtcggcactttgg

SEQ ID NO: 56914 - RNA, 23 nt, synthetic construct
  source 1..23: mol_type = other RNA
aagcccgtggttgtggtagtcgg

SEQ ID NO: 56915 - RNA, 23 nt, synthetic construct
  source 1..23: mol_type = other RNA
ggttgtggtagtcggcactttgg

SEQ ID NO: 56916 - RNA, 23 nt, synthetic construct
  source 1..23: mol_type = other RNA
aagcccgtggttgtggtagtcgg

SEQ ID NO: 56917 - RNA, 23 nt, synthetic construct
  source 1..23: mol_type = other RNA
ggttgtggtagtcggcactttgg

SEQ ID NO: 56918 - RNA, 23 nt, synthetic construct
  source 1..23: mol_type = other RNA
aagcccgtggttgtggtagtcgg

SEQ ID NO: 56919 - RNA, 23 nt, synthetic construct
  source 1..23: mol_type = other RNA
tggggccgcatggcttgtacact

SEQ ID NO: 56920 - RNA, 23 nt, synthetic construct
  source 1..23: mol_type = other RNA
acctcggtctcgcagccctggtg

SEQ ID NO: 56921 - RNA, 23 nt, synthetic construct
  source 1..23: mol_type = other RNA
tggccagctggaatccgtgctgc

SEQ ID NO: 56922 - RNA, 23 nt, synthetic construct
  source 1..23: mol_type = other RNA
cgttgaaggccgggaggccgttg

SEQ ID NO: 56923 - RNA, 23 nt, synthetic construct
  source 1..23: mol_type = other RNA
tcctggtagctgtaggtcctgtc

SEQ ID NO: 56924 - RNA, 23 nt, synthetic construct
  source 1..23: mol_type = other RNA
tagttgtagcacatcttgaagac

SEQ ID NO: 56925 - RNA, 23 nt, synthetic construct
  source 1..23: mol_type = other RNA
agtcaaggggctcattgtcgtct

SEQ ID NO: 56926 - RNA, 23 nt, synthetic construct
  source 1..23: mol_type = other RNA
agcccgtggttgtggtagttggc

SEQ ID NO: 56927 - RNA, 23 nt, synthetic construct
  source 1..23: mol_type = other RNA
gtggtcagcactggggggatggg

SEQ ID NO: 56928 - RNA, 23 nt, synthetic construct
  source 1..23: mol_type = other RNA
gcagggatcgcccgtgtgtggtg

SEQ ID NO: 56929 - RNA, 23 nt, synthetic construct
  source 1..23: mol_type = other RNA
tccaggctgtgcgcaccgtgtgg

SEQ ID NO: 56930 - RNA, 23 nt, synthetic construct
  source 1..23: mol_type = other RNA
gtggtcagcactggggggatagg

SEQ ID NO: 56931 - RNA, 23 nt, synthetic construct
  source 1..23: mol_type = other RNA
acagggatcgcccgtgtgtggtg

SEQ ID NO: 56932 - RNA, 23 nt, synthetic construct
  source 1..23: mol_type = other RNA
tccaggctgtgcgcaccgtgtgg

SEQ ID NO: 56933 - RNA, 23 nt, synthetic construct
  source 1..23: mol_type = other RNA
gtgtgggaagtccccgtggaagg

SEQ ID NO: 56934 - RNA, 23 nt, synthetic construct
  source 1..23: mol_type = other RNA
gtggttgcagtccttggactgga

SEQ ID NO: 56935 - RNA, 23 nt, synthetic construct
  source 1..23: mol_type = other RNA
aaggaggggatgggtgtaaagct

SEQ ID NO: 56936 - RNA, 23 nt, synthetic construct
  source 1..23: mol_type = other RNA
gtcccggtggtcccaagggtgaa

SEQ ID NO: 56937 - RNA, 23 nt, synthetic construct
  source 1..23: mol_type = other RNA
gtggtcagcactggggggatggg

SEQ ID NO: 56938 - RNA, 23 nt, synthetic construct
  source 1..23: mol_type = other RNA
cagggaccgcccgtgtgtggtgg

SEQ ID NO: 56939 - RNA, 23 nt, synthetic construct
  source 1..23: mol_type = other RNA
tccaggctgtgcgcaccgtgtgg

SEQ ID NO: 56940 - RNA, 23 nt, synthetic construct
  source 1..23: mol_type = other RNA
gtggtcagcactggggggatagg

SEQ ID NO: 56941 - RNA, 23 nt, synthetic construct
  source 1..23: mol_type = other RNA
acagggatcgcccgtgtgtggtg

SEQ ID NO: 56942 - RNA, 23 nt, synthetic construct
  source 1..23: mol_type = other RNA
tccaggctgtgcgcaccgtgtgg

SEQ ID NO: 56943 - RNA, 23 nt, synthetic construct
  source 1..23: mol_type = other RNA
gtgtgggaagtccccgtggaagg

SEQ ID NO: 56944 - RNA, 23 nt, synthetic construct
  source 1..23: mol_type = other RNA
gtggttgcagtccttggactgga

SEQ ID NO: 56945 - RNA, 23 nt, synthetic construct
  source 1..23: mol_type = other RNA
gtcccggtggtcccaagggtgga

SEQ ID NO: 56946 - RNA, 23 nt, synthetic construct
  source 1..23: mol_type = other RNA
atgggtgttgtccctggagttga

SEQ ID NO: 56947 - RNA, 23 nt, synthetic construct
  source 1..23: mol_type = other RNA
gtggttgcagtccttggactgga

SEQ ID NO: 56948 - RNA, 23 nt, synthetic construct
  source 1..23: mol_type = other RNA
gaggaggggatgggtgtaaagct

SEQ ID NO: 56949 - RNA, 23 nt, synthetic construct
  source 1..23: mol_type = other RNA
tcaaacaggatcaggccctcctc

SEQ ID NO: 56950 - RNA, 23 nt, synthetic construct
  source 1..23: mol_type = other RNA
cagtggtcgctgatgcaggcgtt

SEQ ID NO: 56951 - RNA, 23 nt, synthetic construct
  source 1..23: mol_type = other RNA
acctcaaggcggcccctgcagtg

SEQ ID NO: 56952 - RNA, 23 nt, synthetic construct
  source 1..23: mol_type = other RNA
aggctgtatggggccgcatggct

SEQ ID NO: 56953 - RNA, 23 nt, synthetic construct
  source 1..23: mol_type = other RNA
ttcctagagttgcaggtggcagg

SEQ ID NO: 56954 - RNA, 23 nt, synthetic construct
  source 1..23: mol_type = other RNA
gcacgcagatgcccatgtgtgcg

SEQ ID NO: 56955 - RNA, 23 nt, synthetic construct
  source 1..23: mol_type = other RNA
ctgacccaccgctccccgggaaa

SEQ ID NO: 56956 - RNA, 23 nt, synthetic construct
  source 1..23: mol_type = other RNA
ctggtcacggttacgaagccggg

SEQ ID NO: 56957 - RNA, 23 nt, synthetic construct
  source 1..23: mol_type = other RNA
tcagcaaatggactccaccctca

SEQ ID NO: 56958 - RNA, 23 nt, synthetic construct
  source 1..23: mol_type = other RNA
ctcggtctcgcagccctggtgcc

SEQ ID NO: 56959 - RNA, 23 nt, synthetic construct
  source 1..23: mol_type = other RNA
ctctctgacctggccgttgcgac

SEQ ID NO: 56960 - RNA, 23 nt, synthetic construct
  source 1..23: mol_type = other RNA
ggctggagtcgagtgctgggtgg

SEQ ID NO: 56961 - RNA, 23 nt, synthetic construct
  source 1..23: mol_type = other RNA
ccgtggatccggtgggcaccgtc

SEQ ID NO: 56962 - RNA, 23 nt, synthetic construct
  source 1..23: mol_type = other RNA
ggacagggatcgcccgtgtgtgg

SEQ ID NO: 56963 - RNA, 23 nt, synthetic construct
  source 1..23: mol_type = other RNA
ggctggagtcgagtgctgggtgg

SEQ ID NO: 56964 - RNA, 23 nt, synthetic construct
  source 1..23: mol_type = other RNA
ttagtttgttccagggcgtccca

SEQ ID NO: 56965 - RNA, 23 nt, synthetic construct
  source 1..23: mol_type = other RNA
gcccactaggcctcggcgtagct

SEQ ID NO: 56966 - RNA, 23 nt, synthetic construct
  source 1..23: mol_type = other RNA
tgggcggtgcccattgtaccagc

SEQ ID NO: 56967 - RNA, 23 nt, synthetic construct
  source 1..23: mol_type = other RNA
ccgtggatccggtgggcaccgtc

SEQ ID NO: 56968 - RNA, 23 nt, synthetic construct
  source 1..23: mol_type = other RNA
tgggacggtccacgtggtccaca

SEQ ID NO: 56969 - RNA, 23 nt, synthetic construct
  source 1..23: mol_type = other RNA
gtgttggcgccaggctcgtggtc

SEQ ID NO: 56970 - RNA, 23 nt, synthetic construct
  source 1..23: mol_type = other RNA
ccttctggggccggtttcaccca

SEQ ID NO: 56971 - RNA, 23 nt, synthetic construct
  source 1..23: mol_type = other RNA
gtggtggtctgtgataggcgggt

SEQ ID NO: 56972 - RNA, 23 nt, synthetic construct
  source 1..23: mol_type = other RNA
gtggtggtctgtgataggcgggt

SEQ ID NO: 56973 - RNA, 23 nt, synthetic construct
  source 1..23: mol_type = other RNA
gtggtggtctgtgataggcgggt

SEQ ID NO: 56974 - RNA, 23 nt, synthetic construct
  source 1..23: mol_type = other RNA
gtggtggtctgtgataggcgggt

SEQ ID NO: 56975 - RNA, 23 nt, synthetic construct
  source 1..23: mol_type = other RNA
gtggtggtctgtgataggcgggt

SEQ ID NO: 56976 - RNA, 23 nt, synthetic construct
  source 1..23: mol_type = other RNA
aggtacacatgtggcagggaagg

SEQ ID NO: 56977 - RNA, 23 nt, synthetic construct
  source 1..23: mol_type = other RNA
ctccccgggaaatttaggaaacc

SEQ ID NO: 56978 - RNA, 23 nt, synthetic construct
  source 1..23: mol_type = other RNA
gtaggtgtcaaagtccccgccag

SEQ ID NO: 56979 - RNA, 23 nt, synthetic construct
  source 1..23: mol_type = other RNA
gtaggtgtcaaagtccccgccag

SEQ ID NO: 56980 - RNA, 23 nt, synthetic construct
  source 1..23: mol_type = other RNA
gtaggtgtcaaagtccccgccag

SEQ ID NO: 56981 - RNA, 23 nt, synthetic construct
  source 1..23: mol_type = other RNA
gtaggtgtcaaagtccccgccag

SEQ ID NO: 56982 - RNA, 23 nt, synthetic construct
  source 1..23: mol_type = other RNA
gcacgtcccctgcagtggtcgtc

SEQ ID NO: 56983 - RNA, 23 nt, synthetic construct
  source 1..23: mol_type = other RNA
gcggtaagcactgtggaggtgtg

SEQ ID NO: 56984 - RNA, 23 nt, synthetic construct
  source 1..23: mol_type = other RNA
gcggtaagcactgtggaggtgtg

SEQ ID NO: 56985 - RNA, 23 nt, synthetic construct
  source 1..23: mol_type = other RNA
ggctcgtggtcagcggctctttg

SEQ ID NO: 56986 - RNA, 23 nt, synthetic construct
  source 1..23: mol_type = other RNA
ccggccgtggcagggacacatag

SEQ ID NO: 56987 - RNA, 23 nt, synthetic construct
  source 1..23: mol_type = other RNA
atgttgacctcggtctcgcagcc

SEQ ID NO: 56988 - RNA, 23 nt, synthetic construct
  source 1..23: mol_type = other RNA
ccatcccgtgggtctcgatgacc

SEQ ID NO: 56989 - RNA, 23 nt, synthetic construct
  source 1..23: mol_type = other RNA
cactcgatgtcagccagcacagg

SEQ ID NO: 56990 - RNA, 23 nt, synthetic construct
  source 1..23: mol_type = other RNA
gctgagcgtgttggaagggtgga

SEQ ID NO: 56991 - RNA, 23 nt, synthetic construct
  source 1..23: mol_type = other RNA
cggtaagcactgtggaggtgtgg

SEQ ID NO: 56992 - RNA, 23 nt, synthetic construct
  source 1..23: mol_type = other RNA
caaagtccccgccagagggcccc

SEQ ID NO: 56993 - RNA, 23 nt, synthetic construct
  source 1..23: mol_type = other RNA
tggtaagcactgtggaggtgtgg

SEQ ID NO: 56994 - RNA, 23 nt, synthetic construct
  source 1..23: mol_type = other RNA
caaagtccccgccagagggcccc

SEQ ID NO: 56995 - RNA, 23 nt, synthetic construct
  source 1..23: mol_type = other RNA
tggtaagcactgtggaggtgtgg

SEQ ID NO: 56996 - RNA, 23 nt, synthetic construct
  source 1..23: mol_type = other RNA
caaagtccccgccagagggcccc

SEQ ID NO: 56997 - RNA, 23 nt, synthetic construct
  source 1..23: mol_type = other RNA
cgtatcttgtagggtgggtcccc

SEQ ID NO: 56998 - RNA, 23 nt, synthetic construct
  source 1..23: mol_type = other RNA
tggaagggcggttgcagtccctg

SEQ ID NO: 56999 - RNA, 23 nt, synthetic construct
  source 1..23: mol_type = other RNA
ctggggggcagggatcgcccgtg

SEQ ID NO: 57000 - RNA, 23 nt, synthetic construct
  source 1..23: mol_type = other RNA
gagaagggggtgactcggtggtt

SEQ ID NO: 57001 - RNA, 23 nt, synthetic construct
  source 1..23: mol_type = other RNA
tggaagggcggttgcagtccctg

SEQ ID NO: 57002 - RNA, 23 nt, synthetic construct
  source 1..23: mol_type = other RNA
agggggtgactcggtggtcctgc

SEQ ID NO: 57003 - RNA, 23 nt, synthetic construct
  source 1..23: mol_type = other RNA
gagaagggggtgactcggtggtc

SEQ ID NO: 57004 - RNA, 23 nt, synthetic construct
  source 1..23: mol_type = other RNA
tggaagggcggttgcagtccctg

SEQ ID NO: 57005 - RNA, 23 nt, synthetic construct
  source 1..23: mol_type = other RNA
agggggtgactcggtggtcctgc

SEQ ID NO: 57006 - RNA, 23 nt, synthetic construct
  source 1..23: mol_type = other RNA
gagaagggggtgactcggtggtc

SEQ ID NO: 57007 - RNA, 23 nt, synthetic construct
  source 1..23: mol_type = other RNA
tggaagggcggttgcagtccctg

SEQ ID NO: 57008 - RNA, 23 nt, synthetic construct
  source 1..23: mol_type = other RNA
agggggtgactcggtggtcctgc

SEQ ID NO: 57009 - RNA, 23 nt, synthetic construct
  source 1..23: mol_type = other RNA
ggtggccgtggaaccggtgggca

SEQ ID NO: 57010 - RNA, 23 nt, synthetic construct
  source 1..23: mol_type = other RNA
cgccttgcctgtcgcagcttcct

SEQ ID NO: 57011 - RNA, 23 nt, synthetic construct
  source 1..23: mol_type = other RNA
cggggcaccgccatccatggtgt

SEQ ID NO: 57012 - RNA, 23 nt, synthetic construct
  source 1..23: mol_type = other RNA
ttggcgcacatcagcccccgcat

SEQ ID NO: 57013 - RNA, 23 nt, synthetic construct
  source 1..23: mol_type = other RNA
gggatgggtgtaacgctggtagc

SEQ ID NO: 57014 - RNA, 23 nt, synthetic construct
  source 1..23: mol_type = other RNA
gggggtgactcggtggtcctgct

SEQ ID NO: 57015 - RNA, 23 nt, synthetic construct
  source 1..23: mol_type = other RNA
gggggtgactcggtggtcctgct

SEQ ID NO: 57016 - RNA, 23 nt, synthetic construct
  source 1..23: mol_type = other RNA
gggggtgactcggtggtcctgct

SEQ ID NO: 57017 - RNA, 23 nt, synthetic construct
  source 1..23: mol_type = other RNA
gggatgggtgtaacgctggtagc

SEQ ID NO: 57018 - RNA, 23 nt, synthetic construct
  source 1..23: mol_type = other RNA
tagtggatgctgagggcgcgggg

SEQ ID NO: 57019 - RNA, 23 nt, synthetic construct
  source 1..23: mol_type = other RNA
cacaggccaccggttgcacctcg

SEQ ID NO: 57020 - RNA, 23 nt, synthetic construct
  source 1..23: mol_type = other RNA
caccagcgtccggcacgcgctcg

SEQ ID NO: 57021 - RNA, 23 nt, synthetic construct
  source 1..23: mol_type = other RNA
ctcctcgtccgtgcagttgccgg

SEQ ID NO: 57022 - RNA, 23 nt, synthetic construct
  source 1..23: mol_type = other RNA
gagtttctcatcataggtggaga

SEQ ID NO: 57023 - RNA, 23 nt, synthetic construct
  source 1..23: mol_type = other RNA
agagtttctcatcataggtggag

SEQ ID NO: 57024 - RNA, 23 nt, synthetic construct
  source 1..23: mol_type = other RNA
tcagccagcacggtgaagctgct

SEQ ID NO: 57025 - RNA, 23 nt, synthetic construct
  source 1..23: mol_type = other RNA
gacaaacacctgcatgagtggca

SEQ ID NO: 57026 - RNA, 23 nt, synthetic construct
  source 1..23: mol_type = other RNA
cactcctgggcgggcacacaggc

SEQ ID NO: 57027 - RNA, 23 nt, synthetic construct
  source 1..23: mol_type = other RNA
tcctcggcaatgcagcccccact

SEQ ID NO: 57028 - RNA, 23 nt, synthetic construct
  source 1..23: mol_type = other RNA
tgcactcccacctccggttcctg

SEQ ID NO: 57029 - RNA, 23 nt, synthetic construct
  source 1..23: mol_type = other RNA
cgtgggtctcgatgaccaggaag

SEQ ID NO: 57030 - RNA, 23 nt, synthetic construct
  source 1..23: mol_type = other RNA
cactcgcagtcgccacccgagtc

SEQ ID NO: 57031 - RNA, 23 nt, synthetic construct
  source 1..23: mol_type = other RNA
cgcactggatgccactgggtgtg

SEQ ID NO: 57032 - RNA, 23 nt, synthetic construct
  source 1..23: mol_type = other RNA
tagatgacgtcctggtagctgta

SEQ ID NO: 57033 - RNA, 23 nt, synthetic construct
  source 1..23: mol_type = other RNA
caagcaggcgccaagcccatcgg

SEQ ID NO: 57034 - RNA, 23 nt, synthetic construct
  source 1..23: mol_type = other RNA
gggatgtcagtccttctgagagg

SEQ ID NO: 57035 - RNA, 23 nt, synthetic construct
  source 1..23: mol_type = other RNA
ccaagctccccgtcgtccctgga

SEQ ID NO: 57036 - RNA, 23 nt, synthetic construct
  source 1..23: mol_type = other RNA
tgtgggtggtccccgggatggag

SEQ ID NO: 57037 - RNA, 23 nt, synthetic construct
  source 1..23: mol_type = other RNA
tggttgctgctagggtgtgggaa

SEQ ID NO: 57038 - RNA, 23 nt, synthetic construct
  source 1..23: mol_type = other RNA
gccgtggtgtggcccggggtggt

SEQ ID NO: 57039 - RNA, 23 nt, synthetic construct
  source 1..23: mol_type = other RNA
gtggtaagcactgtggaggtgtg

SEQ ID NO: 57040 - RNA, 23 nt, synthetic construct
  source 1..23: mol_type = other RNA
tgtgggtggtccccgggatggag

SEQ ID NO: 57041 - RNA, 23 nt, synthetic construct
  source 1..23: mol_type = other RNA
ccaggtcgtccctggagtggagg

SEQ ID NO: 57042 - RNA, 23 nt, synthetic construct
  source 1..23: mol_type = other RNA
ggggatgggtgtaaagctggtag

SEQ ID NO: 57043 - RNA, 23 nt, synthetic construct
  source 1..23: mol_type = other RNA
gtggtaagcactgtggaggtgtg

SEQ ID NO: 57044 - RNA, 23 nt, synthetic construct
  source 1..23: mol_type = other RNA
tgtgggtggtccccgggatggag

SEQ ID NO: 57045 - RNA, 23 nt, synthetic construct
  source 1..23: mol_type = other RNA
actgcccctccggccgcacggat

SEQ ID NO: 57046 - RNA, 23 nt, synthetic construct
  source 1..23: mol_type = other RNA
gtggtaagcactgtggaggtgtg

SEQ ID NO: 57047 - RNA, 23 nt, synthetic construct
  source 1..23: mol_type = other RNA
gccgtggtgtggcccggggtggt

SEQ ID NO: 57048 - RNA, 23 nt, synthetic construct
  source 1..23: mol_type = other RNA
tgtgggtggtccccgggatggag

SEQ ID NO: 57049 - RNA, 23 nt, synthetic construct
  source 1..23: mol_type = other RNA
ggggatgggtgtaaagctggtag

SEQ ID NO: 57050 - RNA, 23 nt, synthetic construct
  source 1..23: mol_type = other RNA
ggagtagaggaggtgtggattgt

SEQ ID NO: 57051 - RNA, 23 nt, synthetic construct
  source 1..23: mol_type = other RNA
tggagtagaggaggtgtggattg

SEQ ID NO: 57052 - RNA, 23 nt, synthetic construct
  source 1..23: mol_type = other RNA
ccgtggaattggtggcccttgtc

SEQ ID NO: 57053 - RNA, 23 nt, synthetic construct
  source 1..23: mol_type = other RNA
tccttgcaactggcggcagtggt

SEQ ID NO: 57054 - RNA, 23 nt, synthetic construct
  source 1..23: mol_type = other RNA
gggggtgggtgtgctagacaccg

SEQ ID NO: 57055 - RNA, 23 nt, synthetic construct
  source 1..23: mol_type = other RNA
caggccaccggttgcacctcgcc

SEQ ID NO: 57056 - RNA, 23 nt, synthetic construct
  source 1..23: mol_type = other RNA
acccaccgctccccgggaaattt

SEQ ID NO: 57057 - RNA, 23 nt, synthetic construct
  source 1..23: mol_type = other RNA
caggactggcagttgctgaccca

SEQ ID NO: 57058 - RNA, 23 nt, synthetic construct
  source 1..23: mol_type = other RNA
cctcgtcacacacgcaggactgg

SEQ ID NO: 57059 - RNA, 23 nt, synthetic construct
  source 1..23: mol_type = other RNA
gctgaggtctgcagcggaaggtg

SEQ ID NO: 57060 - RNA, 23 nt, synthetic construct
  source 1..23: mol_type = other RNA
ttcattcagctggactggctggc

SEQ ID NO: 57061 - RNA, 23 nt, synthetic construct
  source 1..23: mol_type = other RNA
tggcgccctcccgaaaggggtcc

SEQ ID NO: 57062 - RNA, 23 nt, synthetic construct
  source 1..23: mol_type = other RNA
ctccgttccacaggaatgtcagc

SEQ ID NO: 57063 - RNA, 23 nt, synthetic construct
  source 1..23: mol_type = other RNA
aggtcgcacaggccaccggttgc

SEQ ID NO: 57064 - RNA, 23 nt, synthetic construct
  source 1..23: mol_type = other RNA
tggtaagcactgtggaggtgtgg

SEQ ID NO: 57065 - RNA, 23 nt, synthetic construct
  source 1..23: mol_type = other RNA
caaagtccccgccagagggcccc

SEQ ID NO: 57066 - RNA, 23 nt, synthetic construct
  source 1..23: mol_type = other RNA
cggtaagcactgtggaggtgtgg

SEQ ID NO: 57067 - RNA, 23 nt, synthetic construct
  source 1..23: mol_type = other RNA
gtgctgggacggtccacgtggtc

SEQ ID NO: 57068 - RNA, 23 nt, synthetic construct
  source 1..23: mol_type = other RNA
ccccgggaaatttaggaaaccca

SEQ ID NO: 57069 - RNA, 23 nt, synthetic construct
  source 1..23: mol_type = other RNA
gggagtaccactggtctgtgtgc

SEQ ID NO: 57070 - RNA, 23 nt, synthetic construct
  source 1..23: mol_type = other RNA
gggagtaccactggtctgtgtgc

SEQ ID NO: 57071 - RNA, 23 nt, synthetic construct
  source 1..23: mol_type = other RNA
gggagtaccactggtctgtgtgc

SEQ ID NO: 57072 - RNA, 23 nt, synthetic construct
  source 1..23: mol_type = other RNA
gggagtaccactggtctgtgtgc

SEQ ID NO: 57073 - RNA, 23 nt, synthetic construct
  source 1..23: mol_type = other RNA
gggagtaccactggtctgtgtgc

SEQ ID NO: 57074 - RNA, 23 nt, synthetic construct
  source 1..23: mol_type = other RNA
acccatcgggtcccacgcagggg

SEQ ID NO: 57075 - RNA, 23 nt, synthetic construct
  source 1..23: mol_type = other RNA
cccattgatgaggacggagccgt

SEQ ID NO: 57076 - RNA, 23 nt, synthetic construct
  source 1..23: mol_type = other RNA
gaacgttctcagacagcagtggc

SEQ ID NO: 57077 - RNA, 23 nt, synthetic construct
  source 1..23: mol_type = other RNA
gcttggacccggatggccgtgtc

SEQ ID NO: 57078 - RNA, 23 nt, synthetic construct
  source 1..23: mol_type = other RNA
cattgtcgtcgaagttcccgcac

SEQ ID NO: 57079 - RNA, 23 nt, synthetic construct
  source 1..23: mol_type = other RNA
tgtggcacgtcccctgcagtggt

SEQ ID NO: 57080 - RNA, 23 nt, synthetic construct
  source 1..23: mol_type = other RNA
caccgtggttatgggggccgatg

SEQ ID NO: 57081 - RNA, 23 nt, synthetic construct
  source 1..23: mol_type = other RNA
caccgtggttatgggggccgatg

SEQ ID NO: 57082 - RNA, 23 nt, synthetic construct
  source 1..23: mol_type = other RNA
caccgtggttatgggggccgatg

SEQ ID NO: 57083 - RNA, 23 nt, synthetic construct
  source 1..23: mol_type = other RNA
tcgtccgtgcagttgccggccgg

SEQ ID NO: 57084 - RNA, 23 nt, synthetic construct
  source 1..23: mol_type = other RNA
ggcattgtcgtcgaagttcccgc

SEQ ID NO: 57085 - RNA, 23 nt, synthetic construct
  source 1..23: mol_type = other RNA
atggccgtggatccagtggttgc

SEQ ID NO: 57086 - RNA, 23 nt, synthetic construct
  source 1..23: mol_type = other RNA
ctgggtgtgcagttacagctctg

SEQ ID NO: 57087 - RNA, 23 nt, synthetic construct
  source 1..23: mol_type = other RNA
gtggccgtggatccagtggacgc

SEQ ID NO: 57088 - RNA, 23 nt, synthetic construct
  source 1..23: mol_type = other RNA
acggcactcgaggcccaggggct

SEQ ID NO: 57089 - RNA, 23 nt, synthetic construct
  source 1..23: mol_type = other RNA
gtggccgtggatccagtggactc

SEQ ID NO: 57090 - RNA, 23 nt, synthetic construct
  source 1..23: mol_type = other RNA
caccgtggaacctctggttgtgg

SEQ ID NO: 57091 - RNA, 23 nt, synthetic construct
  source 1..23: mol_type = other RNA
gtcaccaccgtggttattggggc

SEQ ID NO: 57092 - RNA, 23 nt, synthetic construct
  source 1..23: mol_type = other RNA
acggcactcgaggcccaggggct

SEQ ID NO: 57093 - RNA, 23 nt, synthetic construct
  source 1..23: mol_type = other RNA
acggcactcgaggcccaggggct

SEQ ID NO: 57094 - RNA, 23 nt, synthetic construct
  source 1..23: mol_type = other RNA
gtggccgtggatccagtggactc

SEQ ID NO: 57095 - RNA, 23 nt, synthetic construct
  source 1..23: mol_type = other RNA
gcattgtcgtcgaagttcccgca

SEQ ID NO: 57096 - RNA, 23 nt, synthetic construct
  source 1..23: mol_type = other RNA
gtccgtgcagttgccggccggca

SEQ ID NO: 57097 - RNA, 23 nt, synthetic construct
  source 1..23: mol_type = other RNA
gccctctcgccaccgccttaaag

SEQ ID NO: 57098 - RNA, 23 nt, synthetic construct
  source 1..23: mol_type = other RNA
agggggtgaccgtcacggggcct

SEQ ID NO: 57099 - RNA, 23 nt, synthetic construct
  source 1..23: mol_type = other RNA
aggtgccattgtacgaacacagc

SEQ ID NO: 57100 - RNA, 23 nt, synthetic construct
  source 1..23: mol_type = other RNA
agtgctgtccaccagtgcgtggc

SEQ ID NO: 57101 - RNA, 23 nt, synthetic construct
  source 1..23: mol_type = other RNA
tgcccatgtgtgcgttgaagagg

SEQ ID NO: 57102 - RNA, 23 nt, synthetic construct
  source 1..23: mol_type = other RNA
ggcagtcctcctcggcaatgcag

SEQ ID NO: 57103 - RNA, 23 nt, synthetic construct
  source 1..23: mol_type = other RNA
tgggggacagggatcgcccgtgt

SEQ ID NO: 57104 - RNA, 23 nt, synthetic construct
  source 1..23: mol_type = other RNA
tgggggacagggatcgcccgtgt

SEQ ID NO: 57105 - RNA, 23 nt, synthetic construct
  source 1..23: mol_type = other RNA
ggctctcccagggtaggactcct

SEQ ID NO: 57106 - RNA, 23 nt, synthetic construct
  source 1..23: mol_type = other RNA
ggggcaccgccatccatggtgtg

SEQ ID NO: 57107 - RNA, 23 nt, synthetic construct
  source 1..23: mol_type = other RNA
ggtgggcgaggacgtcggggcac

SEQ ID NO: 57108 - RNA, 23 nt, synthetic construct
  source 1..23: mol_type = other RNA
aggcggccaggtacgcagtgctg

SEQ ID NO: 57109 - RNA, 23 nt, synthetic construct
  source 1..23: mol_type = other RNA
acctccagttccgcggctggccc

SEQ ID NO: 57110 - RNA, 23 nt, synthetic construct
  source 1..23: mol_type = other RNA
gaacacgccgccgtccgcttgga

SEQ ID NO: 57111 - RNA, 23 nt, synthetic construct
  source 1..23: mol_type = other RNA
cgctgagggccgtgaagtcgtca

SEQ ID NO: 57112 - RNA, 23 nt, synthetic construct
  source 1..23: mol_type = other RNA
aggcactgttgggatcggtcagg

SEQ ID NO: 57113 - RNA, 23 nt, synthetic construct
  source 1..23: mol_type = other RNA
cccaggcagcttagcttcccacc

SEQ ID NO: 57114 - RNA, 23 nt, synthetic construct
  source 1..23: mol_type = other RNA
taggtggcctcgttgtgcacaca

SEQ ID NO: 57115 - RNA, 23 nt, synthetic construct
  source 1..23: mol_type = other RNA
tggtagctgtaggtcctgtcctc

SEQ ID NO: 57116 - RNA, 23 nt, synthetic construct
  source 1..23: mol_type = other RNA
aggtgaatggcgttgtggctgga

SEQ ID NO: 57117 - RNA, 23 nt, synthetic construct
  source 1..23: mol_type = other RNA
gtggttgctgctagggtgtggga

SEQ ID NO: 57118 - RNA, 23 nt, synthetic construct
  source 1..23: mol_type = other RNA
ggatgttggagtaggtgtcaaag

SEQ ID NO: 57119 - RNA, 23 nt, synthetic construct
  source 1..23: mol_type = other RNA
ggatgttggagtaggtgtcaaag

SEQ ID NO: 57120 - RNA, 23 nt, synthetic construct
  source 1..23: mol_type = other RNA
ggatgttggagtaggtgtcaaag

SEQ ID NO: 57121 - RNA, 23 nt, synthetic construct
  source 1..23: mol_type = other RNA
ggatgttggagtaggtgtcaaag

SEQ ID NO: 57122 - RNA, 23 nt, synthetic construct
  source 1..23: mol_type = other RNA
tggggggtgtgccagtcggggcc

SEQ ID NO: 57123 - RNA, 23 nt, synthetic construct
  source 1..23: mol_type = other RNA
gcagagctctgcgtaagcctcca

SEQ ID NO: 57124 - RNA, 23 nt, synthetic construct
  source 1..23: mol_type = other RNA
gcacacgcacaccgtctcggggc

SEQ ID NO: 57125 - RNA, 23 nt, synthetic construct
  source 1..23: mol_type = other RNA
ccacactcatccacgtgggtgta

SEQ ID NO: 57126 - RNA, 23 nt, synthetic construct
  source 1..23: mol_type = other RNA
agcgtccggcacgcgctcggggc

SEQ ID NO: 57127 - RNA, 23 nt, synthetic construct
  source 1..23: mol_type = other RNA
gggcaccgccatccatggtgtgc

SEQ ID NO: 57128 - RNA, 23 nt, synthetic construct
  source 1..23: mol_type = other RNA
agtggaagtcaccccaggtgctg

SEQ ID NO: 57129 - RNA, 23 nt, synthetic construct
  source 1..23: mol_type = other RNA
atgaggacggagccgttggacgc

SEQ ID NO: 57130 - RNA, 23 nt, synthetic construct
  source 1..23: mol_type = other RNA
aatgtcagcaccagccggatgct

SEQ ID NO: 57131 - RNA, 23 nt, synthetic construct
  source 1..23: mol_type = other RNA
cacctccagttccgcggctggcc

SEQ ID NO: 57132 - RNA, 23 nt, synthetic construct
  source 1..23: mol_type = other RNA
ggcacctccagttccgcggctgg

SEQ ID NO: 57133 - RNA, 23 nt, synthetic construct
  source 1..23: mol_type = other RNA
aggaggtgcccgggctgtaggtg

SEQ ID NO: 57134 - RNA, 23 nt, synthetic construct
  source 1..23: mol_type = other RNA
cctgtctgcaccacgatgaagaa

SEQ ID NO: 57135 - RNA, 23 nt, synthetic construct
  source 1..23: mol_type = other RNA
ttcctggcattggcacaggcagc

SEQ ID NO: 57136 - RNA, 23 nt, synthetic construct
  source 1..23: mol_type = other RNA
gttcctggcattggcacaggcag

SEQ ID NO: 57137 - RNA, 23 nt, synthetic construct
  source 1..23: mol_type = other RNA
cttggaggatcagctcgtagctc

SEQ ID NO: 57138 - RNA, 23 nt, synthetic construct
  source 1..23: mol_type = other RNA
tcggatgaacacgctggtcttcc

SEQ ID NO: 57139 - RNA, 23 nt, synthetic construct
  source 1..23: mol_type = other RNA
acccgagtcgcaggcacacgcgt

SEQ ID NO: 57140 - RNA, 23 nt, synthetic construct
  source 1..23: mol_type = other RNA
cagaaacactcgcagtcgccacc

SEQ ID NO: 57141 - RNA, 23 nt, synthetic construct
  source 1..23: mol_type = other RNA
cgccaagcccatcggtggtgttg

SEQ ID NO: 57142 - RNA, 23 nt, synthetic construct
  source 1..23: mol_type = other RNA
gcaggcgccaagcccatcggtgg

SEQ ID NO: 57143 - RNA, 23 nt, synthetic construct
  source 1..23: mol_type = other RNA
cctcgcggacacacacggtggag

SEQ ID NO: 57144 - RNA, 23 nt, synthetic construct
  source 1..23: mol_type = other RNA
ggtgagggccgccgtcgaccgga

SEQ ID NO: 57145 - RNA, 23 nt, synthetic construct
  source 1..23: mol_type = other RNA
cgaggtgagggccgccgtcgacc

SEQ ID NO: 57146 - RNA, 23 nt, synthetic construct
  source 1..23: mol_type = other RNA
ggctgtgcctgtcgggcgagctc

SEQ ID NO: 57147 - RNA, 23 nt, synthetic construct
  source 1..23: mol_type = other RNA
tgggcgtgctggtctcggcctga

SEQ ID NO: 57148 - RNA, 23 nt, synthetic construct
  source 1..23: mol_type = other RNA
ggtgttagtcaaggggctcattg

SEQ ID NO: 57149 - RNA, 23 nt, synthetic construct
  source 1..23: mol_type = other RNA
tggtggtgttagtcaaggggctc

SEQ ID NO: 57150 - RNA, 23 nt, synthetic construct
  source 1..23: mol_type = other RNA
ctttggtagtgtgagctgttcct

SEQ ID NO: 57151 - RNA, 23 nt, synthetic construct
  source 1..23: mol_type = other RNA
cactttggtagtgtgagctgttc

SEQ ID NO: 57152 - RNA, 23 nt, synthetic construct
  source 1..23: mol_type = other RNA
gagggggtcaccgtggagcctct

SEQ ID NO: 57153 - RNA, 23 nt, synthetic construct
  source 1..23: mol_type = other RNA
tggtcagcactggggggatggga

SEQ ID NO: 57154 - RNA, 23 nt, synthetic construct
  source 1..23: mol_type = other RNA
gtgcgggtcttgctgggtgtggc

SEQ ID NO: 57155 - RNA, 23 nt, synthetic construct
  source 1..23: mol_type = other RNA
agggcatggccgtagagctggtg

SEQ ID NO: 57156 - RNA, 23 nt, synthetic construct
  source 1..23: mol_type = other RNA
gtggctgtagtgctcggctctgt

SEQ ID NO: 57157 - RNA, 23 nt, synthetic construct
  source 1..23: mol_type = other RNA
gcaccgtcacggtggctgtagtg

SEQ ID NO: 57158 - RNA, 23 nt, synthetic construct
  source 1..23: mol_type = other RNA
tgctcacatgtggggtgccagca

SEQ ID NO: 57159 - RNA, 23 nt, synthetic construct
  source 1..23: mol_type = other RNA
tggtgctcacatgtggggtgcca

SEQ ID NO: 57160 - RNA, 23 nt, synthetic construct
  source 1..23: mol_type = other RNA
ccgtggtgctcacatgtggggtg

SEQ ID NO: 57161 - RNA, 23 nt, synthetic construct
  source 1..23: mol_type = other RNA
gtggccgtggtgctcacatgtgg

SEQ ID NO: 57162 - RNA, 23 nt, synthetic construct
  source 1..23: mol_type = other RNA
ctttggtagtgtgagctgttcct

SEQ ID NO: 57163 - RNA, 23 nt, synthetic construct
  source 1..23: mol_type = other RNA
cactttggtagtgtgagctgttc

SEQ ID NO: 57164 - RNA, 23 nt, synthetic construct
  source 1..23: mol_type = other RNA
ccgtggttgtggtagtcagcact

SEQ ID NO: 57165 - RNA, 23 nt, synthetic construct
  source 1..23: mol_type = other RNA
ggtgttgtccctggagttgagga

SEQ ID NO: 57166 - RNA, 23 nt, synthetic construct
  source 1..23: mol_type = other RNA
tggtcagcactggggggataggt

SEQ ID NO: 57167 - RNA, 23 nt, synthetic construct
  source 1..23: mol_type = other RNA
gtgcgggtcttgctgggtgtggc

SEQ ID NO: 57168 - RNA, 23 nt, synthetic construct
  source 1..23: mol_type = other RNA
tcccggtggtcccaagggtgaag

SEQ ID NO: 57169 - RNA, 23 nt, synthetic construct
  source 1..23: mol_type = other RNA
tctgttctgggagggtcccggtg

SEQ ID NO: 57170 - RNA, 23 nt, synthetic construct
  source 1..23: mol_type = other RNA
aggaggggtggattgtggacatg

SEQ ID NO: 57171 - RNA, 23 nt, synthetic construct
  source 1..23: mol_type = other RNA
tggccttcgtggtcagcactgtg

SEQ ID NO: 57172 - RNA, 23 nt, synthetic construct
  source 1..23: mol_type = other RNA
gcaccgtcacggtggctgtagtg

SEQ ID NO: 57173 - RNA, 23 nt, synthetic construct
  source 1..23: mol_type = other RNA
ttgagggtgccagcagttgcccg

SEQ ID NO: 57174 - RNA, 23 nt, synthetic construct
  source 1..23: mol_type = other RNA
ctttggtagtgtgagctgttcct

SEQ ID NO: 57175 - RNA, 23 nt, synthetic construct
  source 1..23: mol_type = other RNA
cactttggtagtgtgagctgttc

SEQ ID NO: 57176 - RNA, 23 nt, synthetic construct
  source 1..23: mol_type = other RNA
gagggggtcaccgtggagcctct

SEQ ID NO: 57177 - RNA, 23 nt, synthetic construct
  source 1..23: mol_type = other RNA
tggtcagcactggggggatggga

SEQ ID NO: 57178 - RNA, 23 nt, synthetic construct
  source 1..23: mol_type = other RNA
gtgcgggtcttgctgggtgtggc

SEQ ID NO: 57179 - RNA, 23 nt, synthetic construct
  source 1..23: mol_type = other RNA
agcccgtggtcaccaccgtggtt

SEQ ID NO: 57180 - RNA, 23 nt, synthetic construct
  source 1..23: mol_type = other RNA
gtggctgtagtgctcggctctgt

SEQ ID NO: 57181 - RNA, 23 nt, synthetic construct
  source 1..23: mol_type = other RNA
gcaccgtcacggtggctgtagtg

SEQ ID NO: 57182 - RNA, 23 nt, synthetic construct
  source 1..23: mol_type = other RNA
tgctcacatgtggggtgccagca

SEQ ID NO: 57183 - RNA, 23 nt, synthetic construct
  source 1..23: mol_type = other RNA
tggtgctcacatgtggggtgcca

SEQ ID NO: 57184 - RNA, 23 nt, synthetic construct
  source 1..23: mol_type = other RNA
ccgtggtgctcacatgtggggtg

SEQ ID NO: 57185 - RNA, 23 nt, synthetic construct
  source 1..23: mol_type = other RNA
gtggccgtggtgctcacatgtgg

SEQ ID NO: 57186 - RNA, 23 nt, synthetic construct
  source 1..23: mol_type = other RNA
ctttggtagtgtgagctgttcct

SEQ ID NO: 57187 - RNA, 23 nt, synthetic construct
  source 1..23: mol_type = other RNA
cactttggtagtgtgagctgttc

SEQ ID NO: 57188 - RNA, 23 nt, synthetic construct
  source 1..23: mol_type = other RNA
agccactggttgtgggtgtggtg

SEQ ID NO: 57189 - RNA, 23 nt, synthetic construct
  source 1..23: mol_type = other RNA
agggggtcaccgtggagccactg

SEQ ID NO: 57190 - RNA, 23 nt, synthetic construct
  source 1..23: mol_type = other RNA
gagggggtcaccgtggagccact

SEQ ID NO: 57191 - RNA, 23 nt, synthetic construct
  source 1..23: mol_type = other RNA
ggtgatcagtgatgggggagtac

SEQ ID NO: 57192 - RNA, 23 nt, synthetic construct
  source 1..23: mol_type = other RNA
tggtgatcagtgatgggggagta

SEQ ID NO: 57193 - RNA, 23 nt, synthetic construct
  source 1..23: mol_type = other RNA
ggtgttgtccctggagttgagga

SEQ ID NO: 57194 - RNA, 23 nt, synthetic construct
  source 1..23: mol_type = other RNA
tggtcagcactggggggataggt

SEQ ID NO: 57195 - RNA, 23 nt, synthetic construct
  source 1..23: mol_type = other RNA
gtgcgggtcttgctgggtgtggc

SEQ ID NO: 57196 - RNA, 23 nt, synthetic construct
  source 1..23: mol_type = other RNA
agcccgtggtcaccaccgtggtt

SEQ ID NO: 57197 - RNA, 23 nt, synthetic construct
  source 1..23: mol_type = other RNA
agggcatggccgtagagctggtg

SEQ ID NO: 57198 - RNA, 23 nt, synthetic construct
  source 1..23: mol_type = other RNA
tcccggtggtcccaagggtggag

SEQ ID NO: 57199 - RNA, 23 nt, synthetic construct
  source 1..23: mol_type = other RNA
tctgttctgggagggtcccggtg

SEQ ID NO: 57200 - RNA, 23 nt, synthetic construct
  source 1..23: mol_type = other RNA
gccacgggtgtggtggtctgttc

SEQ ID NO: 57201 - RNA, 23 nt, synthetic construct
  source 1..23: mol_type = other RNA
aggaggggtggattgtggacatg

SEQ ID NO: 57202 - RNA, 23 nt, synthetic construct
  source 1..23: mol_type = other RNA
tggccttcgtggtcagcactgtg

SEQ ID NO: 57203 - RNA, 23 nt, synthetic construct
  source 1..23: mol_type = other RNA
gtggctgtagtgctcggctctgt

SEQ ID NO: 57204 - RNA, 23 nt, synthetic construct
  source 1..23: mol_type = other RNA
gcaccgtcacggtggctgtagtg

SEQ ID NO: 57205 - RNA, 23 nt, synthetic construct
  source 1..23: mol_type = other RNA
tgctcacatgtggggtgccagca

SEQ ID NO: 57206 - RNA, 23 nt, synthetic construct
  source 1..23: mol_type = other RNA
tggtgctcacatgtggggtgcca

SEQ ID NO: 57207 - RNA, 23 nt, synthetic construct
  source 1..23: mol_type = other RNA
ccgtggtgctcacatgtggggtg

SEQ ID NO: 57208 - RNA, 23 nt, synthetic construct
  source 1..23: mol_type = other RNA
gtggccgtggtgctcacatgtgg

SEQ ID NO: 57209 - RNA, 23 nt, synthetic construct
  source 1..23: mol_type = other RNA
tggaagggcagttgcagtccctg

SEQ ID NO: 57210 - RNA, 23 nt, synthetic construct
  source 1..23: mol_type = other RNA
ctttggtagtgtgagctgttcct

SEQ ID NO: 57211 - RNA, 23 nt, synthetic construct
  source 1..23: mol_type = other RNA
cactttggtagtgtgagctgttc

SEQ ID NO: 57212 - RNA, 23 nt, synthetic construct
  source 1..23: mol_type = other RNA
agccactggttgtgggtgtggtg

SEQ ID NO: 57213 - RNA, 23 nt, synthetic construct
  source 1..23: mol_type = other RNA
agggggtcaccgtggagccactg

SEQ ID NO: 57214 - RNA, 23 nt, synthetic construct
  source 1..23: mol_type = other RNA
gagggggtcaccgtggagccact

SEQ ID NO: 57215 - RNA, 23 nt, synthetic construct
  source 1..23: mol_type = other RNA
ggtgttgtccctggagttgagga

SEQ ID NO: 57216 - RNA, 23 nt, synthetic construct
  source 1..23: mol_type = other RNA
gggtgatgggtgttgtccctgga

SEQ ID NO: 57217 - RNA, 23 nt, synthetic construct
  source 1..23: mol_type = other RNA
gtctgtgctgggacggtccacgt

SEQ ID NO: 57218 - RNA, 23 nt, synthetic construct
  source 1..23: mol_type = other RNA
ttggtggcccttgtcatggtggc

SEQ ID NO: 57219 - RNA, 23 nt, synthetic construct
  source 1..23: mol_type = other RNA
aggatccgggtcgtccccagagt

SEQ ID NO: 57220 - RNA, 23 nt, synthetic construct
  source 1..23: mol_type = other RNA
caggcgccctggaagcggtcaat

SEQ ID NO: 57221 - RNA, 23 nt, synthetic construct
  source 1..23: mol_type = other RNA
tgggacaggcgccctggaagcgg

SEQ ID NO: 57222 - RNA, 23 nt, synthetic construct
  source 1..23: mol_type = other RNA
gctgagattcccaaagcgtgcat

SEQ ID NO: 57223 - RNA, 23 nt, synthetic construct
  source 1..23: mol_type = other RNA
tgtgctagacaccggggctgcgg

SEQ ID NO: 57224 - RNA, 23 nt, synthetic construct
  source 1..23: mol_type = other RNA
ggtgtgctagacaccggggctgc

SEQ ID NO: 57225 - RNA, 23 nt, synthetic construct
  source 1..23: mol_type = other RNA
ggcacaaggttgtggcactcagc

SEQ ID NO: 57226 - RNA, 23 nt, synthetic construct
  source 1..23: mol_type = other RNA
agtggtcgctgatgcaggcgttg

SEQ ID NO: 57227 - RNA, 23 nt, synthetic construct
  source 1..23: mol_type = other RNA
tcaaggcggcccctgcagtggtc

SEQ ID NO: 57228 - RNA, 23 nt, synthetic construct
  source 1..23: mol_type = other RNA
gggcgcggcagagctctgcgtaa

SEQ ID NO: 57229 - RNA, 23 nt, synthetic construct
  source 1..23: mol_type = other RNA
tgcaggtggcaggctgtatgggg

SEQ ID NO: 57230 - RNA, 23 nt, synthetic construct
  source 1..23: mol_type = other RNA
ttgcactgcaccgacactgaacc

SEQ ID NO: 57231 - RNA, 23 nt, synthetic construct
  source 1..23: mol_type = other RNA
ggctgaccctgggcgtcacaggg

SEQ ID NO: 57232 - RNA, 23 nt, synthetic construct
  source 1..23: mol_type = other RNA
ttgcacggcgggggctgaccctg

SEQ ID NO: 57233 - RNA, 23 nt, synthetic construct
  source 1..23: mol_type = other RNA
gatggactcctgccctggcgggc

SEQ ID NO: 57234 - RNA, 23 nt, synthetic construct
  source 1..23: mol_type = other RNA
caggtacacatgtggcagggaag

SEQ ID NO: 57235 - RNA, 23 nt, synthetic construct
  source 1..23: mol_type = other RNA
ttgacccaggtttcattcagctg

SEQ ID NO: 57236 - RNA, 23 nt, synthetic construct
  source 1..23: mol_type = other RNA
acacggtgcagttgtccacatgg

SEQ ID NO: 57237 - RNA, 23 nt, synthetic construct
  source 1..23: mol_type = other RNA
gcctctgctgagtacttggacgc

SEQ ID NO: 57238 - RNA, 23 nt, synthetic construct
  source 1..23: mol_type = other RNA
ggggccggtttcacccacggggt

SEQ ID NO: 57239 - RNA, 23 nt, synthetic construct
  source 1..23: mol_type = other RNA
gcgctccggccgtggcagggaca

SEQ ID NO: 57240 - RNA, 23 nt, synthetic construct
  source 1..23: mol_type = other RNA
agctggaatccgtgctgcgcggg

SEQ ID NO: 57241 - RNA, 23 nt, synthetic construct
  source 1..23: mol_type = other RNA
ggcgtagctggacgttgaagtcc

SEQ ID NO: 57242 - RNA, 23 nt, synthetic construct
  source 1..23: mol_type = other RNA
tgcgaggtgagggccgccgtcga

SEQ ID NO: 57243 - RNA, 23 nt, synthetic construct
  source 1..23: mol_type = other RNA
agctggacgttgaagtcctcgta

SEQ ID NO: 57244 - RNA, 23 nt, synthetic construct
  source 1..23: mol_type = other RNA
acggcactcgaggcccaggggct

SEQ ID NO: 57245 - RNA, 23 nt, synthetic construct
  source 1..23: mol_type = other RNA
gtggccgtggatccagtggatgc

SEQ ID NO: 57246 - RNA, 23 nt, synthetic construct
  source 1..23: mol_type = other RNA
gtggccgtggatccagtggacgc

SEQ ID NO: 57247 - RNA, 23 nt, synthetic construct
  source 1..23: mol_type = other RNA
tgttgacctcggtctcgcagccc

SEQ ID NO: 57248 - RNA, 23 nt, synthetic construct
  source 1..23: mol_type = other RNA
gtcgccacccgagtcgcaggcac

SEQ ID NO: 57249 - RNA, 23 nt, synthetic construct
  source 1..23: mol_type = other RNA
gcgcggggtgccacacacaggcc

SEQ ID NO: 57250 - RNA, 23 nt, synthetic construct
  source 1..23: mol_type = other RNA
gaacgtagctgcagtcaccatgc

SEQ ID NO: 57251 - RNA, 23 nt, synthetic construct
  source 1..23: mol_type = other RNA
cagtcgctgagctgtacgccctt

SEQ ID NO: 57252 - RNA, 23 nt, synthetic construct
  source 1..23: mol_type = other RNA
cttggacgctccggggcaggagc

SEQ ID NO: 57253 - RNA, 23 nt, synthetic construct
  source 1..23: mol_type = other RNA
gtacttggacgctccggggcagg

SEQ ID NO: 57254 - RNA, 23 nt, synthetic construct
  source 1..23: mol_type = other RNA
acccgtacatgaacacacggcgc

SEQ ID NO: 57255 - RNA, 23 nt, synthetic construct
  source 1..23: mol_type = other RNA
tggcgtatttgggatccagctcc

SEQ ID NO: 57256 - RNA, 23 nt, synthetic construct
  source 1..23: mol_type = other RNA
gacagcgggtcgtgccctggctg

SEQ ID NO: 57257 - RNA, 23 nt, synthetic construct
  source 1..23: mol_type = other RNA
ggtggctatagtgctcggctctg

SEQ ID NO: 57258 - RNA, 23 nt, synthetic construct
  source 1..23: mol_type = other RNA
ggacgtggccagctggaatccgt

SEQ ID NO: 57259 - RNA, 23 nt, synthetic construct
  source 1..23: mol_type = other RNA
cacgcacaccgtctcggggcagc

SEQ ID NO: 57260 - RNA, 23 nt, synthetic construct
  source 1..23: mol_type = other RNA
ggtcccgtgggtggtgttgtccc

SEQ ID NO: 57261 - RNA, 23 nt, synthetic construct
  source 1..23: mol_type = other RNA
cttgatgtagtccccgctctgct

SEQ ID NO: 57262 - RNA, 23 nt, synthetic construct
  source 1..23: mol_type = other RNA
tgctgtcggcacatttcttggac

SEQ ID NO: 57263 - RNA, 23 nt, synthetic construct
  source 1..23: mol_type = other RNA
tggccattgaaggtgacgctcac

SEQ ID NO: 57264 - RNA, 23 nt, synthetic construct
  source 1..23: mol_type = other RNA
tctgctgagtacttggacgctcc

SEQ ID NO: 57265 - RNA, 23 nt, synthetic construct
  source 1..23: mol_type = other RNA
ctggacgcactccccacagcact

SEQ ID NO: 57266 - RNA, 23 nt, synthetic construct
  source 1..23: mol_type = other RNA
gggataggtgttgtccctggagt

SEQ ID NO: 57267 - RNA, 23 nt, synthetic construct
  source 1..23: mol_type = other RNA
gggataggtgttgtccctggagt

SEQ ID NO: 57268 - RNA, 23 nt, synthetic construct
  source 1..23: mol_type = other RNA
tcggcacatttcttggacagaac

SEQ ID NO: 57269 - RNA, 23 nt, synthetic construct
  source 1..23: mol_type = other RNA
gatccggtgggcaccgtcacggt

SEQ ID NO: 57270 - RNA, 23 nt, synthetic construct
  source 1..23: mol_type = other RNA
gatccggtgggcaccgtcacggt

SEQ ID NO: 57271 - RNA, 23 nt, synthetic construct
  source 1..23: mol_type = other RNA
gatccggtgggcaccgtcacggt

SEQ ID NO: 57272 - RNA, 23 nt, synthetic construct
  source 1..23: mol_type = other RNA
gatccggtgggcaccgtcacggt

SEQ ID NO: 57273 - RNA, 23 nt, synthetic construct
  source 1..23: mol_type = other RNA
cgtgcatggatctctctcatgag

SEQ ID NO: 57274 - RNA, 23 nt, synthetic construct
  source 1..23: mol_type = other RNA
cactctggcggtgtgggtggtcc

SEQ ID NO: 57275 - RNA, 23 nt, synthetic construct
  source 1..23: mol_type = other RNA
aatagtgggagccgccccacatg

SEQ ID NO: 57276 - RNA, 23 nt, synthetic construct
  source 1..23: mol_type = other RNA
gatcaagcaggcgccaagcccat

SEQ ID NO: 57277 - RNA, 23 nt, synthetic construct
  source 1..23: mol_type = other RNA
gcgccatgtgcccaagctccccg

SEQ ID NO: 57278 - RNA, 23 nt, synthetic construct
  source 1..23: mol_type = other RNA
ggcgccatgtgcccaagctcccc

SEQ ID NO: 57279 - RNA, 23 nt, synthetic construct
  source 1..23: mol_type = other RNA
tttggaagcggtgctggctgtgc

SEQ ID NO: 57280 - RNA, 23 nt, synthetic construct
  source 1..23: mol_type = other RNA
gataggcgggtccaggtggtgcc

SEQ ID NO: 57281 - RNA, 23 nt, synthetic construct
  source 1..23: mol_type = other RNA
ggtaagcactgtggaggtgtggg

SEQ ID NO: 57282 - RNA, 23 nt, synthetic construct
  source 1..23: mol_type = other RNA
gataggcgggtccaggtggtgcc

SEQ ID NO: 57283 - RNA, 23 nt, synthetic construct
  source 1..23: mol_type = other RNA
ggtaagcactgtggaggtgtgga

SEQ ID NO: 57284 - RNA, 23 nt, synthetic construct
  source 1..23: mol_type = other RNA
tattggggccgatgtggggctgc

SEQ ID NO: 57285 - RNA, 23 nt, synthetic construct
  source 1..23: mol_type = other RNA
ggtaagcactgtggaggtgtgga

SEQ ID NO: 57286 - RNA, 23 nt, synthetic construct
  source 1..23: mol_type = other RNA
gacacggccatcccgtgggtctc

SEQ ID NO: 57287 - RNA, 23 nt, synthetic construct
  source 1..23: mol_type = other RNA
catgtgggttgtagaagtcacag

SEQ ID NO: 57288 - RNA, 23 nt, synthetic construct
  source 1..23: mol_type = other RNA
ccatgtgggttgtagaagtcaca

SEQ ID NO: 57289 - RNA, 23 nt, synthetic construct
  source 1..23: mol_type = other RNA
gctctttggaagcggtgctggct

SEQ ID NO: 57290 - RNA, 23 nt, synthetic construct
  source 1..23: mol_type = other RNA
tgactgtgggtgtcgtggccgtg

SEQ ID NO: 57291 - RNA, 23 nt, synthetic construct
  source 1..23: mol_type = other RNA
tgactgtgggtgtcgtggccgtg

SEQ ID NO: 57292 - RNA, 23 nt, synthetic construct
  source 1..23: mol_type = other RNA
tgactgtgggtgtcgtggccgtg

SEQ ID NO: 57293 - RNA, 23 nt, synthetic construct
  source 1..23: mol_type = other RNA
ttgatgtagtccccgctctgctc

SEQ ID NO: 57294 - RNA, 23 nt, synthetic construct
  source 1..23: mol_type = other RNA
tccgtgcagttgccggccggcaa

SEQ ID NO: 57295 - RNA, 23 nt, synthetic construct
  source 1..23: mol_type = other RNA
tggcagatgccctcctcgtccgt

SEQ ID NO: 57296 - RNA, 23 nt, synthetic construct
  source 1..23: mol_type = other RNA
ctgccatagccccccggagcagg

SEQ ID NO: 57297 - RNA, 23 nt, synthetic construct
  source 1..23: mol_type = other RNA
tgggcgggcacacaggcgcccgc

SEQ ID NO: 57298 - RNA, 23 nt, synthetic construct
  source 1..23: mol_type = other RNA
cagcacggtgccgtgagcgtagc

SEQ ID NO: 57299 - RNA, 23 nt, synthetic construct
  source 1..23: mol_type = other RNA
ttgggtgccagggcgtccgggca

SEQ ID NO: 57300 - RNA, 23 nt, synthetic construct
  source 1..23: mol_type = other RNA
gatggtgccgttgcttccgcaga

SEQ ID NO: 57301 - RNA, 23 nt, synthetic construct
  source 1..23: mol_type = other RNA
gcacaccaggccgaagtggacgt

SEQ ID NO: 57302 - RNA, 23 nt, synthetic construct
  source 1..23: mol_type = other RNA
ggctgagcgtgttggaagggtgg

SEQ ID NO: 57303 - RNA, 23 nt, synthetic construct
  source 1..23: mol_type = other RNA
cgtgagtgttggcgccaggctcg

SEQ ID NO: 57304 - RNA, 23 nt, synthetic construct
  source 1..23: mol_type = other RNA
tgagaggtggacagctcgctcgt

SEQ ID NO: 57305 - RNA, 23 nt, synthetic construct
  source 1..23: mol_type = other RNA
ctgtggacatggtggccgtgggt

SEQ ID NO: 57306 - RNA, 23 nt, synthetic construct
  source 1..23: mol_type = other RNA
gtagttggcactttggtagtgtg

SEQ ID NO: 57307 - RNA, 23 nt, synthetic construct
  source 1..23: mol_type = other RNA
tggtctgtgtgctagaggagggt

SEQ ID NO: 57308 - RNA, 23 nt, synthetic construct
  source 1..23: mol_type = other RNA
ctggtctgtgtgctagaggaggg

SEQ ID NO: 57309 - RNA, 23 nt, synthetic construct
  source 1..23: mol_type = other RNA
gtggtgtggcccggggtggtcgt

SEQ ID NO: 57310 - RNA, 23 nt, synthetic construct
  source 1..23: mol_type = other RNA
ccccggcatggggtagctgtagt

SEQ ID NO: 57311 - RNA, 23 nt, synthetic construct
  source 1..23: mol_type = other RNA
gtcaaagtccccgccagagggcc

SEQ ID NO: 57312 - RNA, 23 nt, synthetic construct
  source 1..23: mol_type = other RNA
ctgtggacatggtggccgtgggt

SEQ ID NO: 57313 - RNA, 23 nt, synthetic construct
  source 1..23: mol_type = other RNA
tggtctgtgtgctagaggagggt

SEQ ID NO: 57314 - RNA, 23 nt, synthetic construct
  source 1..23: mol_type = other RNA
ctggtctgtgtgctagaggaggg

SEQ ID NO: 57315 - RNA, 23 nt, synthetic construct
  source 1..23: mol_type = other RNA
ctggtgtggcccggggtggtcgt

SEQ ID NO: 57316 - RNA, 23 nt, synthetic construct
  source 1..23: mol_type = other RNA
ccccggcatggggtagctgtagt

SEQ ID NO: 57317 - RNA, 23 nt, synthetic construct
  source 1..23: mol_type = other RNA
gtcaaagtccccgccagagggcc

SEQ ID NO: 57318 - RNA, 23 nt, synthetic construct
  source 1..23: mol_type = other RNA
ggtgtaaagctggtagctgtgga

SEQ ID NO: 57319 - RNA, 23 nt, synthetic construct
  source 1..23: mol_type = other RNA
ctgtggacatggtggccgtgggt

SEQ ID NO: 57320 - RNA, 23 nt, synthetic construct
  source 1..23: mol_type = other RNA
gtcggcactttggtagtgtgagc

SEQ ID NO: 57321 - RNA, 23 nt, synthetic construct
  source 1..23: mol_type = other RNA
tggtctgtgtgctagaggagggt

SEQ ID NO: 57322 - RNA, 23 nt, synthetic construct
  source 1..23: mol_type = other RNA
ctggtctgtgtgctagaggaggg

SEQ ID NO: 57323 - RNA, 23 nt, synthetic construct
  source 1..23: mol_type = other RNA
ctggtgtggcccggggtggtcgt

SEQ ID NO: 57324 - RNA, 23 nt, synthetic construct
  source 1..23: mol_type = other RNA
ccccggcatggggtagctgtagt

SEQ ID NO: 57325 - RNA, 23 nt, synthetic construct
  source 1..23: mol_type = other RNA
gtcaaagtccccgccagagggcc

SEQ ID NO: 57326 - RNA, 23 nt, synthetic construct
  source 1..23: mol_type = other RNA
ctgtggacatggtggccgtgggt

SEQ ID NO: 57327 - RNA, 23 nt, synthetic construct
  source 1..23: mol_type = other RNA
gtcggcactttggtagtgtgagc

SEQ ID NO: 57328 - RNA, 23 nt, synthetic construct
  source 1..23: mol_type = other RNA
tggtctgtgtgctagaggagggt

SEQ ID NO: 57329 - RNA, 23 nt, synthetic construct
  source 1..23: mol_type = other RNA
ctggtctgtgtgctagaggaggg

SEQ ID NO: 57330 - RNA, 23 nt, synthetic construct
  source 1..23: mol_type = other RNA
gtggtgtggcccggggtggtcgt

SEQ ID NO: 57331 - RNA, 23 nt, synthetic construct
  source 1..23: mol_type = other RNA
ccccggcatggggtagctgtagt

SEQ ID NO: 57332 - RNA, 23 nt, synthetic construct
  source 1..23: mol_type = other RNA
gtcaaagtccccgccagagggcc

SEQ ID NO: 57333 - RNA, 23 nt, synthetic construct
  source 1..23: mol_type = other RNA
ctgtggacatggtggccgtgggt

SEQ ID NO: 57334 - RNA, 23 nt, synthetic construct
  source 1..23: mol_type = other RNA
gtcggcactttggtagtgtgagc

SEQ ID NO: 57335 - RNA, 23 nt, synthetic construct
  source 1..23: mol_type = other RNA
tggtctgtgtgctagaggagggt

SEQ ID NO: 57336 - RNA, 23 nt, synthetic construct
  source 1..23: mol_type = other RNA
ctggtctgtgtgctagaggaggg

SEQ ID NO: 57337 - RNA, 23 nt, synthetic construct
  source 1..23: mol_type = other RNA
ggtgtaaagctggtagctgtgga

SEQ ID NO: 57338 - RNA, 23 nt, synthetic construct
  source 1..23: mol_type = other RNA
gacaggcgccctggaagcggtca

SEQ ID NO: 57339 - RNA, 23 nt, synthetic construct
  source 1..23: mol_type = other RNA
cctttctgctgtcggggaccagc

SEQ ID NO: 57340 - RNA, 23 nt, synthetic construct
  source 1..23: mol_type = other RNA
tgcgttgaagaggatctggtcct

SEQ ID NO: 57341 - RNA, 23 nt, synthetic construct
  source 1..23: mol_type = other RNA
cccatgtgtgcgttgaagaggat

SEQ ID NO: 57342 - RNA, 23 nt, synthetic construct
  source 1..23: mol_type = other RNA
gtcagcaaatggactccaccctc

SEQ ID NO: 57343 - RNA, 23 nt, synthetic construct
  source 1..23: mol_type = other RNA
gagcacggagcgcggggtgccac

SEQ ID NO: 57344 - RNA, 23 nt, synthetic construct
  source 1..23: mol_type = other RNA
ctctcccagggtaggactcctga

SEQ ID NO: 57345 - RNA, 23 nt, synthetic construct
  source 1..23: mol_type = other RNA
caggctctcccagggtaggactc

SEQ ID NO: 57346 - RNA, 23 nt, synthetic construct
  source 1..23: mol_type = other RNA
cccagtgacatcagggaggggca

SEQ ID NO: 57347 - RNA, 23 nt, synthetic construct
  source 1..23: mol_type = other RNA
gataggcgggtccaggtggtgcc

SEQ ID NO: 57348 - RNA, 23 nt, synthetic construct
  source 1..23: mol_type = other RNA
ggtaagcactgtggaggtgtggg

SEQ ID NO: 57349 - RNA, 23 nt, synthetic construct
  source 1..23: mol_type = other RNA
ggggttgtggcacgtcccctgca

SEQ ID NO: 57350 - RNA, 23 nt, synthetic construct
  source 1..23: mol_type = other RNA
gataggcgggtccaggtggtgcc

SEQ ID NO: 57351 - RNA, 23 nt, synthetic construct
  source 1..23: mol_type = other RNA
caccgccatccatggtgtgccct

SEQ ID NO: 57352 - RNA, 23 nt, synthetic construct
  source 1..23: mol_type = other RNA
ggatggctgtaacgctggtagct

SEQ ID NO: 57353 - RNA, 23 nt, synthetic construct
  source 1..23: mol_type = other RNA
gggatggctgtaacgctggtagc

SEQ ID NO: 57354 - RNA, 23 nt, synthetic construct
  source 1..23: mol_type = other RNA
agggtaggactcctgagtggcgc

SEQ ID NO: 57355 - RNA, 23 nt, synthetic construct
  source 1..23: mol_type = other RNA
ggtaagcactgtggaggtgtgga

SEQ ID NO: 57356 - RNA, 23 nt, synthetic construct
  source 1..23: mol_type = other RNA
gtagtggttgtccaggtagaggc

SEQ ID NO: 57357 - RNA, 23 nt, synthetic construct
  source 1..23: mol_type = other RNA
acagggcacgtattcgcagcaga

SEQ ID NO: 57358 - RNA, 23 nt, synthetic construct
  source 1..23: mol_type = other RNA
gggtcaccgtggaacctctggtt

SEQ ID NO: 57359 - RNA, 23 nt, synthetic construct
  source 1..23: mol_type = other RNA
tggccgttgcgacctcagccctg

SEQ ID NO: 57360 - RNA, 23 nt, synthetic construct
  source 1..23: mol_type = other RNA
gtccgcttggacccggatggccg

SEQ ID NO: 57361 - RNA, 23 nt, synthetic construct
  source 1..23: mol_type = other RNA
ccgtggtgttcggcactgggggt

SEQ ID NO: 57362 - RNA, 23 nt, synthetic construct
  source 1..23: mol_type = other RNA
ccgtggtgttcggcactgggggt

SEQ ID NO: 57363 - RNA, 23 nt, synthetic construct
  source 1..23: mol_type = other RNA
ccgtggtgttcggcactgggggt

SEQ ID NO: 57364 - RNA, 23 nt, synthetic construct
  source 1..23: mol_type = other RNA
gtcaggccgcacttccgcagctc

SEQ ID NO: 57365 - RNA, 23 nt, synthetic construct
  source 1..23: mol_type = other RNA
cacacacggtggagaccgggagg

SEQ ID NO: 57366 - RNA, 23 nt, synthetic construct
  source 1..23: mol_type = other RNA
gtaggctgcggcgttgagaacag

SEQ ID NO: 57367 - RNA, 23 nt, synthetic construct
  source 1..23: mol_type = other RNA
ctgtatggggccgcatggcttgt

SEQ ID NO: 57368 - RNA, 23 nt, synthetic construct
  source 1..23: mol_type = other RNA
tgtccgtgcagggtgagccacac

SEQ ID NO: 57369 - RNA, 23 nt, synthetic construct
  source 1..23: mol_type = other RNA
cactggatgccactgggtgtgca

SEQ ID NO: 57370 - RNA, 23 nt, synthetic construct
  source 1..23: mol_type = other RNA
acgtcctggtagctgtaggtcct

SEQ ID NO: 57371 - RNA, 23 nt, synthetic construct
  source 1..23: mol_type = other RNA
tccgtcaggccgcacttccgcag

SEQ ID NO: 57372 - RNA, 23 nt, synthetic construct
  source 1..23: mol_type = other RNA
caggcatccaccacgtaggcgta

SEQ ID NO: 57373 - RNA, 23 nt, synthetic construct
  source 1..23: mol_type = other RNA
tgctgtccaccagtgcgtggcac

SEQ ID NO: 57374 - RNA, 23 nt, synthetic construct
  source 1..23: mol_type = other RNA
ggcactgccatagccccccggag

SEQ ID NO: 57375 - RNA, 23 nt, synthetic construct
  source 1..23: mol_type = other RNA
cagcagaggacccggatcctgta

SEQ ID NO: 57376 - RNA, 23 nt, synthetic construct
  source 1..23: mol_type = other RNA
ggttgtggcacgtcccctgcagt

SEQ ID NO: 57377 - RNA, 23 nt, synthetic construct
  source 1..23: mol_type = other RNA
gtcggggtggccgtggatccagt

SEQ ID NO: 57378 - RNA, 23 nt, synthetic construct
  source 1..23: mol_type = other RNA
gacggggtggccgtggatccagt

SEQ ID NO: 57379 - RNA, 23 nt, synthetic construct
  source 1..23: mol_type = other RNA
gacggggtggccgtggatccagt

SEQ ID NO: 57380 - RNA, 23 nt, synthetic construct
  source 1..23: mol_type = other RNA
gacggggtggccgtggatccagt

SEQ ID NO: 57381 - RNA, 23 nt, synthetic construct
  source 1..23: mol_type = other RNA
gacggggtggccgtggatccagt

SEQ ID NO: 57382 - RNA, 23 nt, synthetic construct
  source 1..23: mol_type = other RNA
tgcggcaccacgagcatggccgc

SEQ ID NO: 57383 - RNA, 23 nt, synthetic construct
  source 1..23: mol_type = other RNA
cgggtggaacaaagctcacgcgc

SEQ ID NO: 57384 - RNA, 23 nt, synthetic construct
  source 1..23: mol_type = other RNA
cgcggcagtgctcagagaacacg

SEQ ID NO: 57385 - RNA, 23 nt, synthetic construct
  source 1..23: mol_type = other RNA
gcggccaggtacgcagtgctgtc

SEQ ID NO: 57386 - RNA, 23 nt, synthetic construct
  source 1..23: mol_type = other RNA
aggccgcacttccgcagctcagc

SEQ ID NO: 57387 - RNA, 23 nt, synthetic construct
  source 1..23: mol_type = other RNA
ccgcttggacccggatggccgtg

SEQ ID NO: 57388 - RNA, 23 nt, synthetic construct
  source 1..23: mol_type = other RNA
ctgcatgagtggcaccagctgca

SEQ ID NO: 57389 - RNA, 23 nt, synthetic construct
  source 1..23: mol_type = other RNA
ggcgaaggctgcgcccgtggcct

SEQ ID NO: 57390 - RNA, 23 nt, synthetic construct
  source 1..23: mol_type = other RNA
cgtcggcctcactcaggccgcgg

SEQ ID NO: 57391 - RNA, 23 nt, synthetic construct
  source 1..23: mol_type = other RNA
cattgaggaaggtgcccgcgggg

SEQ ID NO: 57392 - RNA, 23 nt, synthetic construct
  source 1..23: mol_type = other RNA
ccatccgacaccagccccggggg

SEQ ID NO: 57393 - RNA, 23 nt, synthetic construct
  source 1..23: mol_type = other RNA
cggggttgtggcacgtcccctgc

SEQ ID NO: 57394 - RNA, 23 nt, synthetic construct
  source 1..23: mol_type = other RNA
gaggtcggggtggccgtggatcc

SEQ ID NO: 57395 - RNA, 23 nt, synthetic construct
  source 1..23: mol_type = other RNA
atggtgttcggcactgggggtgt

SEQ ID NO: 57396 - RNA, 23 nt, synthetic construct
  source 1..23: mol_type = other RNA
tcgaggtgcgggtcttgctgggt

SEQ ID NO: 57397 - RNA, 23 nt, synthetic construct
  source 1..23: mol_type = other RNA
ctggggctcacagcccatggtca

SEQ ID NO: 57398 - RNA, 23 nt, synthetic construct
  source 1..23: mol_type = other RNA
ccgtagagctggtggccggggtg

SEQ ID NO: 57399 - RNA, 23 nt, synthetic construct
  source 1..23: mol_type = other RNA
agtcagcactttggtagtgtgag

SEQ ID NO: 57400 - RNA, 23 nt, synthetic construct
  source 1..23: mol_type = other RNA
gtggtgttcggcactgggggtgt

SEQ ID NO: 57401 - RNA, 23 nt, synthetic construct
  source 1..23: mol_type = other RNA
tggtcctgctgctagggtgaggg

SEQ ID NO: 57402 - RNA, 23 nt, synthetic construct
  source 1..23: mol_type = other RNA
tcgaggtgcgggtcttgctgggt

SEQ ID NO: 57403 - RNA, 23 nt, synthetic construct
  source 1..23: mol_type = other RNA
ctggggctcacagcccatggtca

SEQ ID NO: 57404 - RNA, 23 nt, synthetic construct
  source 1..23: mol_type = other RNA
ccgtagagctggtggccggggtg

SEQ ID NO: 57405 - RNA, 23 nt, synthetic construct
  source 1..23: mol_type = other RNA
gggagctgttcccggggtggagg

SEQ ID NO: 57406 - RNA, 23 nt, synthetic construct
  source 1..23: mol_type = other RNA
ggggagctgttcccggggtggag

SEQ ID NO: 57407 - RNA, 23 nt, synthetic construct
  source 1..23: mol_type = other RNA
gcagtccttggactggaggagga

SEQ ID NO: 57408 - RNA, 23 nt, synthetic construct
  source 1..23: mol_type = other RNA
gcactggaagggtggttgcagtc

SEQ ID NO: 57409 - RNA, 23 nt, synthetic construct
  source 1..23: mol_type = other RNA
tcggcactttggtagtgtgagct

SEQ ID NO: 57410 - RNA, 23 nt, synthetic construct
  source 1..23: mol_type = other RNA
gtggtgttcggcactgggggtgt

SEQ ID NO: 57411 - RNA, 23 nt, synthetic construct
  source 1..23: mol_type = other RNA
tggtcctgctgctagggtgaggg

SEQ ID NO: 57412 - RNA, 23 nt, synthetic construct
  source 1..23: mol_type = other RNA
tcgaggtgcgggtcttgctgggt

SEQ ID NO: 57413 - RNA, 23 nt, synthetic construct
  source 1..23: mol_type = other RNA
ccgtagagctggtggccggggtg

SEQ ID NO: 57414 - RNA, 23 nt, synthetic construct
  source 1..23: mol_type = other RNA
tcggcactttggtagtgtgagct

SEQ ID NO: 57415 - RNA, 23 nt, synthetic construct
  source 1..23: mol_type = other RNA
tggagccactggttgtgggtgtg

SEQ ID NO: 57416 - RNA, 23 nt, synthetic construct
  source 1..23: mol_type = other RNA
gtggtgttcggcactgggggtgt

SEQ ID NO: 57417 - RNA, 23 nt, synthetic construct
  source 1..23: mol_type = other RNA
tggtcctgctgctagggtgaggg

SEQ ID NO: 57418 - RNA, 23 nt, synthetic construct
  source 1..23: mol_type = other RNA
tcgaggtgcgggtcttgctgggt

SEQ ID NO: 57419 - RNA, 23 nt, synthetic construct
  source 1..23: mol_type = other RNA
ccgtagagctggtggccggggtg

SEQ ID NO: 57420 - RNA, 23 nt, synthetic construct
  source 1..23: mol_type = other RNA
gggagctgttcccggggtggagg

SEQ ID NO: 57421 - RNA, 23 nt, synthetic construct
  source 1..23: mol_type = other RNA
ggggagctgttcccggggtggag

SEQ ID NO: 57422 - RNA, 23 nt, synthetic construct
  source 1..23: mol_type = other RNA
gcagtccttggactggaggagga

SEQ ID NO: 57423 - RNA, 23 nt, synthetic construct
  source 1..23: mol_type = other RNA
gcactggaagggtggttgcagtc

SEQ ID NO: 57424 - RNA, 23 nt, synthetic construct
  source 1..23: mol_type = other RNA
tcggcactttggtagtgtgagct

SEQ ID NO: 57425 - RNA, 23 nt, synthetic construct
  source 1..23: mol_type = other RNA
tggagccactggttgtgggtgtg

SEQ ID NO: 57426 - RNA, 23 nt, synthetic construct
  source 1..23: mol_type = other RNA
gcagtccttggactggaggagga

SEQ ID NO: 57427 - RNA, 23 nt, synthetic construct
  source 1..23: mol_type = other RNA
gcactggaagggtggttgcagtc

SEQ ID NO: 57428 - RNA, 23 nt, synthetic construct
  source 1..23: mol_type = other RNA
gcatcagatcacagagcggctgt

SEQ ID NO: 57429 - RNA, 23 nt, synthetic construct
  source 1..23: mol_type = other RNA
gcacggcgggggctgaccctggg

SEQ ID NO: 57430 - RNA, 23 nt, synthetic construct
  source 1..23: mol_type = other RNA
tgccacaggatggtcgtgttgat

SEQ ID NO: 57431 - RNA, 23 nt, synthetic construct
  source 1..23: mol_type = other RNA
tcggtctcgcagccctggtgcca

SEQ ID NO: 57432 - RNA, 23 nt, synthetic construct
  source 1..23: mol_type = other RNA
gtttgttccagggcgtcccagtg

SEQ ID NO: 57433 - RNA, 23 nt, synthetic construct
  source 1..23: mol_type = other RNA
ggcgccaagcccatcggtggtgt

SEQ ID NO: 57434 - RNA, 23 nt, synthetic construct
  source 1..23: mol_type = other RNA
ccttaggctgctggcataagtgc

SEQ ID NO: 57435 - RNA, 23 nt, synthetic construct
  source 1..23: mol_type = other RNA
gatgcccgaggtggccgaagtcc

SEQ ID NO: 57436 - RNA, 23 nt, synthetic construct
  source 1..23: mol_type = other RNA
gatgcccgaggtggccgaagtcc

SEQ ID NO: 57437 - RNA, 23 nt, synthetic construct
  source 1..23: mol_type = other RNA
gcgcactggatgccactgggtgt

SEQ ID NO: 57438 - RNA, 23 nt, synthetic construct
  source 1..23: mol_type = other RNA
accgtggttatgggggccgatgt

SEQ ID NO: 57439 - RNA, 23 nt, synthetic construct
  source 1..23: mol_type = other RNA
accgtggttatgggggccgatgt

SEQ ID NO: 57440 - RNA, 23 nt, synthetic construct
  source 1..23: mol_type = other RNA
accgtggttatgggggccgatgt

SEQ ID NO: 57441 - RNA, 23 nt, synthetic construct
  source 1..23: mol_type = other RNA
acgtctcaaagtctccgcctccc

SEQ ID NO: 57442 - RNA, 23 nt, synthetic construct
  source 1..23: mol_type = other RNA
ccagcggcatgtcgggaagctgc

SEQ ID NO: 57443 - RNA, 23 nt, synthetic construct
  source 1..23: mol_type = other RNA
agttgtagcacatcttgaagacg

SEQ ID NO: 57444 - RNA, 23 nt, synthetic construct
  source 1..23: mol_type = other RNA
gctagggtgtgggaagtcaccgt

SEQ ID NO: 57445 - RNA, 23 nt, synthetic construct
  source 1..23: mol_type = other RNA
gcgcgagcaccagtgccgggcgt

SEQ ID NO: 57446 - RNA, 23 nt, synthetic construct
  source 1..23: mol_type = other RNA
aaacccatcgggtcccacgcagg

SEQ ID NO: 57447 - RNA, 23 nt, synthetic construct
  source 1..23: mol_type = other RNA
caggcacgaaggaaacgctgcag

SEQ ID NO: 57448 - RNA, 23 nt, synthetic construct
  source 1..23: mol_type = other RNA
cagaacgttctcagacagcagtg

SEQ ID NO: 57449 - RNA, 23 nt, synthetic construct
  source 1..23: mol_type = other RNA
atagtgggagccgccccacatgc

SEQ ID NO: 57450 - RNA, 23 nt, synthetic construct
  source 1..23: mol_type = other RNA
cccggccactctcttgtactcaa

SEQ ID NO: 57451 - RNA, 23 nt, synthetic construct
  source 1..23: mol_type = other RNA
tcatccacgtgggtgtaggtgtg

SEQ ID NO: 57452 - RNA, 23 nt, synthetic construct
  source 1..23: mol_type = other RNA
ccgtggttgtggtagttggcact

SEQ ID NO: 57453 - RNA, 23 nt, synthetic construct
  source 1..23: mol_type = other RNA
ggtcagccccgggctactcgtag

SEQ ID NO: 57454 - RNA, 23 nt, synthetic construct
  source 1..23: mol_type = other RNA
ggtcaccaccgtggttattgggg

SEQ ID NO: 57455 - RNA, 23 nt, synthetic construct
  source 1..23: mol_type = other RNA
tggtcaccaccgtggttattggg

SEQ ID NO: 57456 - RNA, 23 nt, synthetic construct
  source 1..23: mol_type = other RNA
gcactctggcggtgtgggtggtc

SEQ ID NO: 57457 - RNA, 23 nt, synthetic construct
  source 1..23: mol_type = other RNA
acgcaggtgacgttggccacagg

SEQ ID NO: 57458 - RNA, 23 nt, synthetic construct
  source 1..23: mol_type = other RNA
atcaagcaggcgccaagcccatc

SEQ ID NO: 57459 - RNA, 23 nt, synthetic construct
  source 1..23: mol_type = other RNA
cgttgcttccgcagatggcgatc

SEQ ID NO: 57460 - RNA, 23 nt, synthetic construct
  source 1..23: mol_type = other RNA
tccagcggcatgtcgggaagctg

SEQ ID NO: 57461 - RNA, 23 nt, synthetic construct
  source 1..23: mol_type = other RNA
cacaccaggccgaagtggacgtc

SEQ ID NO: 57462 - RNA, 23 nt, synthetic construct
  source 1..23: mol_type = other RNA
tggccgtggtgctcacatgtggg

SEQ ID NO: 57463 - RNA, 23 nt, synthetic construct
  source 1..23: mol_type = other RNA
gaacctctggttgtgggtgtggt

SEQ ID NO: 57464 - RNA, 23 nt, synthetic construct
  source 1..23: mol_type = other RNA
gcttgtcagcactggaagggtgg

SEQ ID NO: 57465 - RNA, 23 nt, synthetic construct
  source 1..23: mol_type = other RNA
tcacggtggctgtagtgctcggc

SEQ ID NO: 57466 - RNA, 23 nt, synthetic construct
  source 1..23: mol_type = other RNA
tcacggtggctgtagtgctcggc

SEQ ID NO: 57467 - RNA, 23 nt, synthetic construct
  source 1..23: mol_type = other RNA
tcacggtggctgtagtgctcggc

SEQ ID NO: 57468 - RNA, 23 nt, synthetic construct
  source 1..23: mol_type = other RNA
taggaaacccatcgggtcccacg

SEQ ID NO: 57469 - RNA, 23 nt, synthetic construct
  source 1..23: mol_type = other RNA
gaagccgggacggttgcacggcg

SEQ ID NO: 57470 - RNA, 23 nt, synthetic construct
  source 1..23: mol_type = other RNA
gtgggtggtctccggagtggagg

SEQ ID NO: 57471 - RNA, 23 nt, synthetic construct
  source 1..23: mol_type = other RNA
tgactgtgaagcccgtggttgtg

SEQ ID NO: 57472 - RNA, 23 nt, synthetic construct
  source 1..23: mol_type = other RNA
gtgggtggtctccggagtggagg

SEQ ID NO: 57473 - RNA, 23 nt, synthetic construct
  source 1..23: mol_type = other RNA
cacactcatccacgtgggtgtag

SEQ ID NO: 57474 - RNA, 23 nt, synthetic construct
  source 1..23: mol_type = other RNA
gtgggcgaggacgtcggggcacc

SEQ ID NO: 57475 - RNA, 23 nt, synthetic construct
  source 1..23: mol_type = other RNA
caagatgtactcgcagctgcctt

SEQ ID NO: 57476 - RNA, 23 nt, synthetic construct
  source 1..23: mol_type = other RNA
ggacacggccatcccgtgggtct

SEQ ID NO: 57477 - RNA, 23 nt, synthetic construct
  source 1..23: mol_type = other RNA
aggacacggccatcccgtgggtc

SEQ ID NO: 57478 - RNA, 23 nt, synthetic construct
  source 1..23: mol_type = other RNA
ctccagcggcatgtcgggaagct

SEQ ID NO: 57479 - RNA, 23 nt, synthetic construct
  source 1..23: mol_type = other RNA
tgacagcgggtcgtgccctggct

SEQ ID NO: 57480 - RNA, 23 nt, synthetic construct
  source 1..23: mol_type = other RNA
gtggccatggtgttcggcactgg

SEQ ID NO: 57481 - RNA, 23 nt, synthetic construct
  source 1..23: mol_type = other RNA
ccagagggccccggcatggggta

SEQ ID NO: 57482 - RNA, 23 nt, synthetic construct
  source 1..23: mol_type = other RNA
tgggcacggcactcgaggcccag

SEQ ID NO: 57483 - RNA, 23 nt, synthetic construct
  source 1..23: mol_type = other RNA
ccagagggccccggcatggggta

SEQ ID NO: 57484 - RNA, 23 nt, synthetic construct
  source 1..23: mol_type = other RNA
tgggcacggcactcgaggcccag

SEQ ID NO: 57485 - RNA, 23 nt, synthetic construct
  source 1..23: mol_type = other RNA
cgtggatccagtggttgcggtcg

SEQ ID NO: 57486 - RNA, 23 nt, synthetic construct
  source 1..23: mol_type = other RNA
ccagagggccccggcatggggta

SEQ ID NO: 57487 - RNA, 23 nt, synthetic construct
  source 1..23: mol_type = other RNA
tgggcacggcactcgaggcccag

SEQ ID NO: 57488 - RNA, 23 nt, synthetic construct
  source 1..23: mol_type = other RNA
ccagagggccccggcatggggta

SEQ ID NO: 57489 - RNA, 23 nt, synthetic construct
  source 1..23: mol_type = other RNA
tgggcacggcactcgaggcccag

SEQ ID NO: 57490 - RNA, 23 nt, synthetic construct
  source 1..23: mol_type = other RNA
agcactctggcggtgtgggtggt

SEQ ID NO: 57491 - RNA, 23 nt, synthetic construct
  source 1..23: mol_type = other RNA
tcgtcacacacgcaggactggca

SEQ ID NO: 57492 - RNA, 23 nt, synthetic construct
  source 1..23: mol_type = other RNA
gcgtccggcacgcgctcggggca

SEQ ID NO: 57493 - RNA, 23 nt, synthetic construct
  source 1..23: mol_type = other RNA
acgcgccgggtgggcgaggacgt

SEQ ID NO: 57494 - RNA, 23 nt, synthetic construct
  source 1..23: mol_type = other RNA
ggcgcggcagtgctcagagaaca

SEQ ID NO: 57495 - RNA, 23 nt, synthetic construct
  source 1..23: mol_type = other RNA
cggcgcggcagtgctcagagaac

SEQ ID NO: 57496 - RNA, 23 nt, synthetic construct
  source 1..23: mol_type = other RNA
gcggcgcggcagtgctcagagaa

SEQ ID NO: 57497 - RNA, 23 nt, synthetic construct
  source 1..23: mol_type = other RNA
cctcccgctgcccattgatgagg

SEQ ID NO: 57498 - RNA, 23 nt, synthetic construct
  source 1..23: mol_type = other RNA
tcctcccgctgcccattgatgag

SEQ ID NO: 57499 - RNA, 23 nt, synthetic construct
  source 1..23: mol_type = other RNA
atgtcagcaccagccggatgctg

SEQ ID NO: 57500 - RNA, 23 nt, synthetic construct
  source 1..23: mol_type = other RNA
ctcgttgaaggccgggaggccgt

SEQ ID NO: 57501 - RNA, 23 nt, synthetic construct
  source 1..23: mol_type = other RNA
agtattccacaaaggtggcacac

SEQ ID NO: 57502 - RNA, 23 nt, synthetic construct
  source 1..23: mol_type = other RNA
tgcatgttgagggggcaggtccg

SEQ ID NO: 57503 - RNA, 23 nt, synthetic construct
  source 1..23: mol_type = other RNA
gtgcagggtgagccacactcctg

SEQ ID NO: 57504 - RNA, 23 nt, synthetic construct
  source 1..23: mol_type = other RNA
agccagagtgcgtgatgtcatcc

SEQ ID NO: 57505 - RNA, 23 nt, synthetic construct
  source 1..23: mol_type = other RNA
tcaggccgcacttccgcagctca

SEQ ID NO: 57506 - RNA, 23 nt, synthetic construct
  source 1..23: mol_type = other RNA
cgtccaggctgagcgtcaccgct

SEQ ID NO: 57507 - RNA, 23 nt, synthetic construct
  source 1..23: mol_type = other RNA
tgagggccgtgaagtcgtcagcc

SEQ ID NO: 57508 - RNA, 23 nt, synthetic construct
  source 1..23: mol_type = other RNA
ctgagggccgtgaagtcgtcagc

SEQ ID NO: 57509 - RNA, 23 nt, synthetic construct
  source 1..23: mol_type = other RNA
caccccgctgagggccgtgaagt

SEQ ID NO: 57510 - RNA, 23 nt, synthetic construct
  source 1..23: mol_type = other RNA
aagctgttcctggcattggcaca

SEQ ID NO: 57511 - RNA, 23 nt, synthetic construct
  source 1..23: mol_type = other RNA
gcactgttgggatcggtcaggcg

SEQ ID NO: 57512 - RNA, 23 nt, synthetic construct
  source 1..23: mol_type = other RNA
atgcagttcgagtggaagggctt

SEQ ID NO: 57513 - RNA, 23 nt, synthetic construct
  source 1..23: mol_type = other RNA
cgtagcgctgggacttggggcag

SEQ ID NO: 57514 - RNA, 23 nt, synthetic construct
  source 1..23: mol_type = other RNA
aggccgcggcaagtgggctggca

SEQ ID NO: 57515 - RNA, 23 nt, synthetic construct
  source 1..23: mol_type = other RNA
caggccgcggcaagtgggctggc

SEQ ID NO: 57516 - RNA, 23 nt, synthetic construct
  source 1..23: mol_type = other RNA
aggcacgaaggaaacgctgcagg

SEQ ID NO: 57517 - RNA, 23 nt, synthetic construct
  source 1..23: mol_type = other RNA
aggtacaccatgggggctgcaca

SEQ ID NO: 57518 - RNA, 23 nt, synthetic construct
  source 1..23: mol_type = other RNA
ccaggacacggccatcccgtggg

SEQ ID NO: 57519 - RNA, 23 nt, synthetic construct
  source 1..23: mol_type = other RNA
tgcgtcccccaccacggaccggc

SEQ ID NO: 57520 - RNA, 23 nt, synthetic construct
  source 1..23: mol_type = other RNA
tcgccacccgagtcgcaggcaca

SEQ ID NO: 57521 - RNA, 23 nt, synthetic construct
  source 1..23: mol_type = other RNA
cgcgtcgtggcaggcctgggcgt

SEQ ID NO: 57522 - RNA, 23 nt, synthetic construct
  source 1..23: mol_type = other RNA
ccgcgtcgtggcaggcctgggcg

SEQ ID NO: 57523 - RNA, 23 nt, synthetic construct
  source 1..23: mol_type = other RNA
gctgtaggtcctgtcctcatagg

SEQ ID NO: 57524 - RNA, 23 nt, synthetic construct
  source 1..23: mol_type = other RNA
caggcgccaagcccatcggtggt

SEQ ID NO: 57525 - RNA, 23 nt, synthetic construct
  source 1..23: mol_type = other RNA
atggtgccgttgcttccgcagat

SEQ ID NO: 57526 - RNA, 23 nt, synthetic construct
  source 1..23: mol_type = other RNA
gcggacacacacggtggagaccg

SEQ ID NO: 57527 - RNA, 23 nt, synthetic construct
  source 1..23: mol_type = other RNA
gggggtgaccgtcacggggcctg

SEQ ID NO: 57528 - RNA, 23 nt, synthetic construct
  source 1..23: mol_type = other RNA
ggccgggggagccctggtcagcc

SEQ ID NO: 57529 - RNA, 23 nt, synthetic construct
  source 1..23: mol_type = other RNA
tctgggggatgtcagtccttctg

SEQ ID NO: 57530 - RNA, 23 nt, synthetic construct
  source 1..23: mol_type = other RNA
gcgtcgtggggcctcccgtggtg

SEQ ID NO: 57531 - RNA, 23 nt, synthetic construct
  source 1..23: mol_type = other RNA
cattgttgttggggccagcgtgg

SEQ ID NO: 57532 - RNA, 23 nt, synthetic construct
  source 1..23: mol_type = other RNA
aggctcgtggtcagcggctcttt

SEQ ID NO: 57533 - RNA, 23 nt, synthetic construct
  source 1..23: mol_type = other RNA
ggtctcggcctgagaggtggaca

SEQ ID NO: 57534 - RNA, 23 nt, synthetic construct
  source 1..23: mol_type = other RNA
ggtagttggcactttggtagtgt

SEQ ID NO: 57535 - RNA, 23 nt, synthetic construct
  source 1..23: mol_type = other RNA
gcccgtggttgtggtagttggca

SEQ ID NO: 57536 - RNA, 23 nt, synthetic construct
  source 1..23: mol_type = other RNA
gagcctctggttgtgggtgtggt

SEQ ID NO: 57537 - RNA, 23 nt, synthetic construct
  source 1..23: mol_type = other RNA
atgggggagtaccactggtctgt

SEQ ID NO: 57538 - RNA, 23 nt, synthetic construct
  source 1..23: mol_type = other RNA
gatcgtagtggccgtggtggtca

SEQ ID NO: 57539 - RNA, 23 nt, synthetic construct
  source 1..23: mol_type = other RNA
ggagccggtggccgtgatcgtag

SEQ ID NO: 57540 - RNA, 23 nt, synthetic construct
  source 1..23: mol_type = other RNA
gcggtggtggtcagcactggggg

SEQ ID NO: 57541 - RNA, 23 nt, synthetic construct
  source 1..23: mol_type = other RNA
ggtggccatggtgttcggcactg

SEQ ID NO: 57542 - RNA, 23 nt, synthetic construct
  source 1..23: mol_type = other RNA
gtgctgggtggtaccggtggttg

SEQ ID NO: 57543 - RNA, 23 nt, synthetic construct
  source 1..23: mol_type = other RNA
cagacggcccctccggccgcacg

SEQ ID NO: 57544 - RNA, 23 nt, synthetic construct
  source 1..23: mol_type = other RNA
tagtgctcggctctgtgaggatc

SEQ ID NO: 57545 - RNA, 23 nt, synthetic construct
  source 1..23: mol_type = other RNA
tgtggaggtgtggacagtctctg

SEQ ID NO: 57546 - RNA, 23 nt, synthetic construct
  source 1..23: mol_type = other RNA
cccgtggttgtggtagtcagcac

SEQ ID NO: 57547 - RNA, 23 nt, synthetic construct
  source 1..23: mol_type = other RNA
atgggggagtaccactggtctgt

SEQ ID NO: 57548 - RNA, 23 nt, synthetic construct
  source 1..23: mol_type = other RNA
gatcgtagtggccgtggtggtca

SEQ ID NO: 57549 - RNA, 23 nt, synthetic construct
  source 1..23: mol_type = other RNA
ggagccggtggccgtgatcgtag

SEQ ID NO: 57550 - RNA, 23 nt, synthetic construct
  source 1..23: mol_type = other RNA
gcggtggtggtcagcactggggg

SEQ ID NO: 57551 - RNA, 23 nt, synthetic construct
  source 1..23: mol_type = other RNA
gtgctgggtggtaccggtggttg

SEQ ID NO: 57552 - RNA, 23 nt, synthetic construct
  source 1..23: mol_type = other RNA
cagacggcccctccggccgcacg

SEQ ID NO: 57553 - RNA, 23 nt, synthetic construct
  source 1..23: mol_type = other RNA
agcactggaagggtggttgcagt

SEQ ID NO: 57554 - RNA, 23 nt, synthetic construct
  source 1..23: mol_type = other RNA
cttgtcagcactggaagggtggt

SEQ ID NO: 57555 - RNA, 23 nt, synthetic construct
  source 1..23: mol_type = other RNA
ggtcagcactgtggaggtgtggg

SEQ ID NO: 57556 - RNA, 23 nt, synthetic construct
  source 1..23: mol_type = other RNA
tcgtggtggccttcgtggtcagc

SEQ ID NO: 57557 - RNA, 23 nt, synthetic construct
  source 1..23: mol_type = other RNA
gctggtcagcactttgagggtgc

SEQ ID NO: 57558 - RNA, 23 nt, synthetic construct
  source 1..23: mol_type = other RNA
tgtggaggtgtggacagtctctg

SEQ ID NO: 57559 - RNA, 23 nt, synthetic construct
  source 1..23: mol_type = other RNA
gagcctctggttgtgggtgtggt

SEQ ID NO: 57560 - RNA, 23 nt, synthetic construct
  source 1..23: mol_type = other RNA
atgggggagtaccactggtctgt

SEQ ID NO: 57561 - RNA, 23 nt, synthetic construct
  source 1..23: mol_type = other RNA
gatcgtagtggccgtggtggtca

SEQ ID NO: 57562 - RNA, 23 nt, synthetic construct
  source 1..23: mol_type = other RNA
agccggtggctgtgatcgtagtg

SEQ ID NO: 57563 - RNA, 23 nt, synthetic construct
  source 1..23: mol_type = other RNA
gcggtggtggtcagcactggggg

SEQ ID NO: 57564 - RNA, 23 nt, synthetic construct
  source 1..23: mol_type = other RNA
acagcccgtggtcaccaccgtgg

SEQ ID NO: 57565 - RNA, 23 nt, synthetic construct
  source 1..23: mol_type = other RNA
tagtgctcggctctgtgaggatc

SEQ ID NO: 57566 - RNA, 23 nt, synthetic construct
  source 1..23: mol_type = other RNA
gtgactgtgaagcccgtggttgt

SEQ ID NO: 57567 - RNA, 23 nt, synthetic construct
  source 1..23: mol_type = other RNA
atgggggagtaccactggtctgt

SEQ ID NO: 57568 - RNA, 23 nt, synthetic construct
  source 1..23: mol_type = other RNA
ggagccggtggccgtgatcgtag

SEQ ID NO: 57569 - RNA, 23 nt, synthetic construct
  source 1..23: mol_type = other RNA
gcggtggtggtcagcactggggg

SEQ ID NO: 57570 - RNA, 23 nt, synthetic construct
  source 1..23: mol_type = other RNA
gtgctgggtggtaccggtggttg

SEQ ID NO: 57571 - RNA, 23 nt, synthetic construct
  source 1..23: mol_type = other RNA
acagcccgtggtcaccaccgtgg

SEQ ID NO: 57572 - RNA, 23 nt, synthetic construct
  source 1..23: mol_type = other RNA
cagacggcccctccggccgcacg

SEQ ID NO: 57573 - RNA, 23 nt, synthetic construct
  source 1..23: mol_type = other RNA
agcactggaagggtggttgcagt

SEQ ID NO: 57574 - RNA, 23 nt, synthetic construct
  source 1..23: mol_type = other RNA
cttgtcagcactggaagggtggt

SEQ ID NO: 57575 - RNA, 23 nt, synthetic construct
  source 1..23: mol_type = other RNA
ggtcagcactgtggaggtgtggg

SEQ ID NO: 57576 - RNA, 23 nt, synthetic construct
  source 1..23: mol_type = other RNA
tcgtggtggccttcgtggtcagc

SEQ ID NO: 57577 - RNA, 23 nt, synthetic construct
  source 1..23: mol_type = other RNA
gggggtggacgtggaactggtgg

SEQ ID NO: 57578 - RNA, 23 nt, synthetic construct
  source 1..23: mol_type = other RNA
tagtgctcggctctgtgaggatc

SEQ ID NO: 57579 - RNA, 23 nt, synthetic construct
  source 1..23: mol_type = other RNA
tgtggaggtgtggacagtctctg

SEQ ID NO: 57580 - RNA, 23 nt, synthetic construct
  source 1..23: mol_type = other RNA
atgggggagtaccactggtctgt

SEQ ID NO: 57581 - RNA, 23 nt, synthetic construct
  source 1..23: mol_type = other RNA
gatcgtagtggccgtggtggtca

SEQ ID NO: 57582 - RNA, 23 nt, synthetic construct
  source 1..23: mol_type = other RNA
ggagccggtggccgtgatcgtag

SEQ ID NO: 57583 - RNA, 23 nt, synthetic construct
  source 1..23: mol_type = other RNA
agcactggaagggtggttgcagt

SEQ ID NO: 57584 - RNA, 23 nt, synthetic construct
  source 1..23: mol_type = other RNA
cttgtcagcactggaagggtggt

SEQ ID NO: 57585 - RNA, 23 nt, synthetic construct
  source 1..23: mol_type = other RNA
ggtcagcactgtggaggtgtggg

SEQ ID NO: 57586 - RNA, 23 nt, synthetic construct
  source 1..23: mol_type = other RNA
atccgggtcgtccccagagtgga

SEQ ID NO: 57587 - RNA, 23 nt, synthetic construct
  source 1..23: mol_type = other RNA
tagtgctcggctctgtgaggatc

SEQ ID NO: 57588 - RNA, 23 nt, synthetic construct
  source 1..23: mol_type = other RNA
cgggtggtccccacggtggacga

SEQ ID NO: 57589 - RNA, 23 nt, synthetic construct
  source 1..23: mol_type = other RNA
ggacacgctgaaggttggcaggc

SEQ ID NO: 57590 - RNA, 23 nt, synthetic construct
  source 1..23: mol_type = other RNA
catgcaccatggtgacagtgagg

SEQ ID NO: 57591 - RNA, 23 nt, synthetic construct
  source 1..23: mol_type = other RNA
ccattgaaggtgacgctcacgcc

SEQ ID NO: 57592 - RNA, 23 nt, synthetic construct
  source 1..23: mol_type = other RNA
ggcccagcagccatcctttctgc

SEQ ID NO: 57593 - RNA, 23 nt, synthetic construct
  source 1..23: mol_type = other RNA
gttgaagaatgggcccgggggca

SEQ ID NO: 57594 - RNA, 23 nt, synthetic construct
  source 1..23: mol_type = other RNA
tgaggtcgcacaggccaccggtt

SEQ ID NO: 57595 - RNA, 23 nt, synthetic construct
  source 1..23: mol_type = other RNA
gtcacacacgcaggactggcagt

SEQ ID NO: 57596 - RNA, 23 nt, synthetic construct
  source 1..23: mol_type = other RNA
tggttgtgttgcacacgcacacc

SEQ ID NO: 57597 - RNA, 23 nt, synthetic construct
  source 1..23: mol_type = other RNA
tgaggtctgcagcggaaggtggg

SEQ ID NO: 57598 - RNA, 23 nt, synthetic construct
  source 1..23: mol_type = other RNA
tggggtcagcaaatggactccac

SEQ ID NO: 57599 - RNA, 23 nt, synthetic construct
  source 1..23: mol_type = other RNA
ctgggcctctgctgagtacttgg

SEQ ID NO: 57600 - RNA, 23 nt, synthetic construct
  source 1..23: mol_type = other RNA
catccacgtgggtgtaggtgtgc

SEQ ID NO: 57601 - RNA, 23 nt, synthetic construct
  source 1..23: mol_type = other RNA
tcatgatcagacaatgcacatcc

SEQ ID NO: 57602 - RNA, 23 nt, synthetic construct
  source 1..23: mol_type = other RNA
ttcatgatcagacaatgcacatc

SEQ ID NO: 57603 - RNA, 23 nt, synthetic construct
  source 1..23: mol_type = other RNA
cagaggaggcccaaggttttcat

SEQ ID NO: 57604 - RNA, 23 nt, synthetic construct
  source 1..23: mol_type = other RNA
tctggggccggtttcacccacgg

SEQ ID NO: 57605 - RNA, 23 nt, synthetic construct
  source 1..23: mol_type = other RNA
ctcacccttctggggccggtttc

SEQ ID NO: 57606 - RNA, 23 nt, synthetic construct
  source 1..23: mol_type = other RNA
cctgagtggcgccctcccgaaag

SEQ ID NO: 57607 - RNA, 23 nt, synthetic construct
  source 1..23: mol_type = other RNA
gctctcccagggtaggactcctg

SEQ ID NO: 57608 - RNA, 23 nt, synthetic construct
  source 1..23: mol_type = other RNA
catgcttagtttgttccagggcg

SEQ ID NO: 57609 - RNA, 23 nt, synthetic construct
  source 1..23: mol_type = other RNA
catggacaggcggccgccttgcc

SEQ ID NO: 57610 - RNA, 23 nt, synthetic construct
  source 1..23: mol_type = other RNA
gggtgtgctagacaccggggctg

SEQ ID NO: 57611 - RNA, 23 nt, synthetic construct
  source 1..23: mol_type = other RNA
gttccgcggctggccccccgcgt

SEQ ID NO: 57612 - RNA, 23 nt, synthetic construct
  source 1..23: mol_type = other RNA
ggttgtggtagttggcactttgg

SEQ ID NO: 57613 - RNA, 23 nt, synthetic construct
  source 1..23: mol_type = other RNA
gggtgttgccatagaaccagtgg

SEQ ID NO: 57614 - RNA, 23 nt, synthetic construct
  source 1..23: mol_type = other RNA
gggtgttgccatagaaccagtgg

SEQ ID NO: 57615 - RNA, 23 nt, synthetic construct
  source 1..23: mol_type = other RNA
gggtgttgccatagaaccagtgg

SEQ ID NO: 57616 - RNA, 23 nt, synthetic construct
  source 1..23: mol_type = other RNA
gggtgttgccatagaaccagtgg

SEQ ID NO: 57617 - RNA, 23 nt, synthetic construct
  source 1..23: mol_type = other RNA
gggtgttgccatagaaccagtgg

SEQ ID NO: 57618 - RNA, 23 nt, synthetic construct
  source 1..23: mol_type = other RNA
gacgctcacgcccagggcaggaa

SEQ ID NO: 57619 - RNA, 23 nt, synthetic construct
  source 1..23: mol_type = other RNA
cgttgaagaatgggcccgggggc

SEQ ID NO: 57620 - RNA, 23 nt, synthetic construct
  source 1..23: mol_type = other RNA
ggacaggcgccctggaagcggtc

SEQ ID NO: 57621 - RNA, 23 nt, synthetic construct
  source 1..23: mol_type = other RNA
tgggtgccagggcgtccgggcag

SEQ ID NO: 57622 - RNA, 23 nt, synthetic construct
  source 1..23: mol_type = other RNA
ggccctggttgtggtggtcgtgg

SEQ ID NO: 57623 - RNA, 23 nt, synthetic construct
  source 1..23: mol_type = other RNA
tggccgtggtgctcacatgtggg

SEQ ID NO: 57624 - RNA, 23 nt, synthetic construct
  source 1..23: mol_type = other RNA
gcttgtcagcactggaagggtgg

SEQ ID NO: 57625 - RNA, 23 nt, synthetic construct
  source 1..23: mol_type = other RNA
tggccgtggtgctcacatgtggg

SEQ ID NO: 57626 - RNA, 23 nt, synthetic construct
  source 1..23: mol_type = other RNA
atggcttgtacactttggtgggt

SEQ ID NO: 57627 - RNA, 23 nt, synthetic construct
  source 1..23: mol_type = other RNA
ccgggaggccgttgaagtcccca

SEQ ID NO: 57628 - RNA, 23 nt, synthetic construct
  source 1..23: mol_type = other RNA
tgttgagggggcaggtccggggg

SEQ ID NO: 57629 - RNA, 23 nt, synthetic construct
  source 1..23: mol_type = other RNA
aggctgcgcccgtggcctccacc

SEQ ID NO: 57630 - RNA, 23 nt, synthetic construct
  source 1..23: mol_type = other RNA
cgggctctgggcggtgcccattg

SEQ ID NO: 57631 - RNA, 23 nt, synthetic construct
  source 1..23: mol_type = other RNA
ttggaagggtggatgtggccacc

SEQ ID NO: 57632 - RNA, 23 nt, synthetic construct
  source 1..23: mol_type = other RNA
gtggtcgtccctggagaaggggg

SEQ ID NO: 57633 - RNA, 23 nt, synthetic construct
  source 1..23: mol_type = other RNA
gtggtcgtccctggagaaggggg

SEQ ID NO: 57634 - RNA, 23 nt, synthetic construct
  source 1..23: mol_type = other RNA
ggtctgttctgggagggtcccgg

SEQ ID NO: 57635 - RNA, 23 nt, synthetic construct
  source 1..23: mol_type = other RNA
gtggtcgtccctggagaaggggg

SEQ ID NO: 57636 - RNA, 23 nt, synthetic construct
  source 1..23: mol_type = other RNA
cagactgcccctccggccgcacg

SEQ ID NO: 57637 - RNA, 23 nt, synthetic construct
  source 1..23: mol_type = other RNA
ggtctgttctgggagggtcccgg

SEQ ID NO: 57638 - RNA, 23 nt, synthetic construct
  source 1..23: mol_type = other RNA
ggtggccacgggtgtggtggtct

SEQ ID NO: 57639 - RNA, 23 nt, synthetic construct
  source 1..23: mol_type = other RNA
ggacagcagtcgccctcctcctg

SEQ ID NO: 57640 - RNA, 23 nt, synthetic construct
  source 1..23: mol_type = other RNA
gcttgtcagcactggaagggtgg

SEQ ID NO: 57641 - RNA, 23 nt, synthetic construct
  source 1..23: mol_type = other RNA
tggacacgctgaaggttggcagg

SEQ ID NO: 57642 - RNA, 23 nt, synthetic construct
  source 1..23: mol_type = other RNA
tccgtccttgtcgtagcagccac

SEQ ID NO: 57643 - RNA, 23 nt, synthetic construct
  source 1..23: mol_type = other RNA
aagctcacgcgccgggtgggcga

SEQ ID NO: 57644 - RNA, 23 nt, synthetic construct
  source 1..23: mol_type = other RNA
catggtgtgccctgcattctccc

SEQ ID NO: 57645 - RNA, 23 nt, synthetic construct
  source 1..23: mol_type = other RNA
gaggggtggattgtggacatggt

SEQ ID NO: 57646 - RNA, 23 nt, synthetic construct
  source 1..23: mol_type = other RNA
gaggggtggattgtggacatggt

SEQ ID NO: 57647 - RNA, 23 nt, synthetic construct
  source 1..23: mol_type = other RNA
cacaaaggtggcacacgggcagg

SEQ ID NO: 57648 - RNA, 23 nt, synthetic construct
  source 1..23: mol_type = other RNA
ggaggcgtgagtgccgtccctgg

SEQ ID NO: 57649 - RNA, 23 nt, synthetic construct
  source 1..23: mol_type = other RNA
ggaggcgtgagtgccgtccctgg

SEQ ID NO: 57650 - RNA, 23 nt, synthetic construct
  source 1..23: mol_type = other RNA
gagctggacccagtctgcgaggt

SEQ ID NO: 57651 - RNA, 23 nt, synthetic construct
  source 1..23: mol_type = other RNA
atggtcaccaccgtggttatggg

SEQ ID NO: 57652 - RNA, 23 nt, synthetic construct
  source 1..23: mol_type = other RNA
atggtcaccaccgtggttattgg

SEQ ID NO: 57653 - RNA, 23 nt, synthetic construct
  source 1..23: mol_type = other RNA
gtggtcaccaccgtggttatggg

SEQ ID NO: 57654 - RNA, 23 nt, synthetic construct
  source 1..23: mol_type = other RNA
gtggtcaccaccgtggttatggg

SEQ ID NO: 57655 - RNA, 23 nt, synthetic construct
  source 1..23: mol_type = other RNA
actcctggtgctgcatgttgagg

SEQ ID NO: 57656 - RNA, 23 nt, synthetic construct
  source 1..23: mol_type = other RNA
gctgcgccgcccggcactcgatg

SEQ ID NO: 57657 - RNA, 23 nt, synthetic construct
  source 1..23: mol_type = other RNA
tgtcgtctctgtcctgggcgtgc

SEQ ID NO: 57658 - RNA, 23 nt, synthetic construct
  source 1..23: mol_type = other RNA
ggatgggagttgtcccaggagtt

SEQ ID NO: 57659 - RNA, 23 nt, synthetic construct
  source 1..23: mol_type = other RNA
ggtgtgggaagtccccgtggaag

SEQ ID NO: 57660 - RNA, 23 nt, synthetic construct
  source 1..23: mol_type = other RNA
ggaggaggggtggattgtggaca

SEQ ID NO: 57661 - RNA, 23 nt, synthetic construct
  source 1..23: mol_type = other RNA
ggtgtgggaagtccccgtggaag

SEQ ID NO: 57662 - RNA, 23 nt, synthetic construct
  source 1..23: mol_type = other RNA
ggaggaggggtggattgtggaca

SEQ ID NO: 57663 - RNA, 23 nt, synthetic construct
  source 1..23: mol_type = other RNA
tgatgggtgttgtccctggagtt

SEQ ID NO: 57664 - RNA, 23 nt, synthetic construct
  source 1..23: mol_type = other RNA
aggtagaggctgagattcccaaa

SEQ ID NO: 57665 - RNA, 23 nt, synthetic construct
  source 1..23: mol_type = other RNA
cctcacccttctggggccggttt

SEQ ID NO: 57666 - RNA, 23 nt, synthetic construct
  source 1..23: mol_type = other RNA
ggccagctggaatccgtgctgcg

SEQ ID NO: 57667 - RNA, 23 nt, synthetic construct
  source 1..23: mol_type = other RNA
cgcgagcaccagtgccgggcgta

SEQ ID NO: 57668 - RNA, 23 nt, synthetic construct
  source 1..23: mol_type = other RNA
agtaggtgtcaaagtccccgcca

SEQ ID NO: 57669 - RNA, 23 nt, synthetic construct
  source 1..23: mol_type = other RNA
agtaggtgtcaaagtccccgcca

SEQ ID NO: 57670 - RNA, 23 nt, synthetic construct
  source 1..23: mol_type = other RNA
agtaggtgtcaaagtccccgcca

SEQ ID NO: 57671 - RNA, 23 nt, synthetic construct
  source 1..23: mol_type = other RNA
ctgcccctccggccgcacggatg

SEQ ID NO: 57672 - RNA, 23 nt, synthetic construct
  source 1..23: mol_type = other RNA
agtaggtgtcaaagtccccgcca

SEQ ID NO: 57673 - RNA, 23 nt, synthetic construct
  source 1..23: mol_type = other RNA
aggactggcagttgctgacccac

SEQ ID NO: 57674 - RNA, 23 nt, synthetic construct
  source 1..23: mol_type = other RNA
ggaggcgtgagtgccgtccctgg

SEQ ID NO: 57675 - RNA, 23 nt, synthetic construct
  source 1..23: mol_type = other RNA
gaggatccgggtcgtccccagag

SEQ ID NO: 57676 - RNA, 23 nt, synthetic construct
  source 1..23: mol_type = other RNA
gtggacgtggaactggtggccct

SEQ ID NO: 57677 - RNA, 23 nt, synthetic construct
  source 1..23: mol_type = other RNA
ggagccggtggctgtgatcgtag

SEQ ID NO: 57678 - RNA, 23 nt, synthetic construct
  source 1..23: mol_type = other RNA
tagtgggagccgccccacatgct

SEQ ID NO: 57679 - RNA, 23 nt, synthetic construct
  source 1..23: mol_type = other RNA
agctcagggcacctccagttccg

SEQ ID NO: 57680 - RNA, 23 nt, synthetic construct
  source 1..23: mol_type = other RNA
cctgatgatggtgccgttgcttc

SEQ ID NO: 57681 - RNA, 23 nt, synthetic construct
  source 1..23: mol_type = other RNA
ctttggaagcggtgctggctgtg

SEQ ID NO: 57682 - RNA, 23 nt, synthetic construct
  source 1..23: mol_type = other RNA
ttggcactttggtagtgtgagct

SEQ ID NO: 57683 - RNA, 23 nt, synthetic construct
  source 1..23: mol_type = other RNA
acagtggacacgctgaaggttgg

SEQ ID NO: 57684 - RNA, 23 nt, synthetic construct
  source 1..23: mol_type = other RNA
cacatggctgttgacccaggttt

SEQ ID NO: 57685 - RNA, 23 nt, synthetic construct
  source 1..23: mol_type = other RNA
gtggggtcagcaaatggactcca

SEQ ID NO: 57686 - RNA, 23 nt, synthetic construct
  source 1..23: mol_type = other RNA
aggcatggacaggcggccgcctt

SEQ ID NO: 57687 - RNA, 23 nt, synthetic construct
  source 1..23: mol_type = other RNA
ccgtcaggccgcacttccgcagc

SEQ ID NO: 57688 - RNA, 23 nt, synthetic construct
  source 1..23: mol_type = other RNA
ggtgtgtgggtggtccctagggc

SEQ ID NO: 57689 - RNA, 23 nt, synthetic construct
  source 1..23: mol_type = other RNA
ggtgtgtgggtggtccctagggc

SEQ ID NO: 57690 - RNA, 23 nt, synthetic construct
  source 1..23: mol_type = other RNA
ggtgtgtgggtggtccctagggc

SEQ ID NO: 57691 - RNA, 23 nt, synthetic construct
  source 1..23: mol_type = other RNA
ggtgtgtgggtggtccctagggc

SEQ ID NO: 57692 - RNA, 23 nt, synthetic construct
  source 1..23: mol_type = other RNA
gtggccgtggaaccggtgggcac

SEQ ID NO: 57693 - RNA, 23 nt, synthetic construct
  source 1..23: mol_type = other RNA
gccttgcctgtcgcagcttcctg

SEQ ID NO: 57694 - RNA, 23 nt, synthetic construct
  source 1..23: mol_type = other RNA
ctgggcggtgcccattgtaccag

SEQ ID NO: 57695 - RNA, 23 nt, synthetic construct
  source 1..23: mol_type = other RNA
agggggtgactcggtggttctgc

SEQ ID NO: 57696 - RNA, 23 nt, synthetic construct
  source 1..23: mol_type = other RNA
aggtgcgggtcttgctgggtgtg

SEQ ID NO: 57697 - RNA, 23 nt, synthetic construct
  source 1..23: mol_type = other RNA
aggtgcgggtcttgctgggtgtg

SEQ ID NO: 57698 - RNA, 23 nt, synthetic construct
  source 1..23: mol_type = other RNA
ctggaagggtggttgcagtcctt

SEQ ID NO: 57699 - RNA, 23 nt, synthetic construct
  source 1..23: mol_type = other RNA
aggtgcgggtcttgctgggtgtg

SEQ ID NO: 57700 - RNA, 23 nt, synthetic construct
  source 1..23: mol_type = other RNA
aggtgcgggtcttgctgggtgtg

SEQ ID NO: 57701 - RNA, 23 nt, synthetic construct
  source 1..23: mol_type = other RNA
ctggaagggtggttgcagtcctt

SEQ ID NO: 57702 - RNA, 23 nt, synthetic construct
  source 1..23: mol_type = other RNA
ctggaagggtggttgcagtcctt

SEQ ID NO: 57703 - RNA, 23 nt, synthetic construct
  source 1..23: mol_type = other RNA
tttcattcagctggactggctgg

SEQ ID NO: 57704 - RNA, 23 nt, synthetic construct
  source 1..23: mol_type = other RNA
cgtcccagtgacatcagggaggg

SEQ ID NO: 57705 - RNA, 23 nt, synthetic construct
  source 1..23: mol_type = other RNA
aggtacgcagtgctgtccaccag

SEQ ID NO: 57706 - RNA, 23 nt, synthetic construct
  source 1..23: mol_type = other RNA
tggaggtgtggacagtctctgga

SEQ ID NO: 57707 - RNA, 23 nt, synthetic construct
  source 1..23: mol_type = other RNA
ggcccggggtggtcgtccctgga

SEQ ID NO: 57708 - RNA, 23 nt, synthetic construct
  source 1..23: mol_type = other RNA
ggcccggggtggtcgtccctgga

SEQ ID NO: 57709 - RNA, 23 nt, synthetic construct
  source 1..23: mol_type = other RNA
ggcccggggtggtcgtccctgga

SEQ ID NO: 57710 - RNA, 23 nt, synthetic construct
  source 1..23: mol_type = other RNA
ggcccggggtggtcgtccctggg

SEQ ID NO: 57711 - RNA, 23 nt, synthetic construct
  source 1..23: mol_type = other RNA
acaaaggtggcacacgggcaggt

SEQ ID NO: 57712 - RNA, 23 nt, synthetic construct
  source 1..23: mol_type = other RNA
gctcagtgaggatccgggtcgtc

SEQ ID NO: 57713 - RNA, 23 nt, synthetic construct
  source 1..23: mol_type = other RNA
ggggtcagcaaatggactccacc

SEQ ID NO: 57714 - RNA, 23 nt, synthetic construct
  source 1..23: mol_type = other RNA
ttctggggccggtttcacccacg

SEQ ID NO: 57715 - RNA, 23 nt, synthetic construct
  source 1..23: mol_type = other RNA
cgtccgtgcagttgccggccggc

SEQ ID NO: 57716 - RNA, 23 nt, synthetic construct
  source 1..23: mol_type = other RNA
gctgagggccgtgaagtcgtcag

SEQ ID NO: 57717 - RNA, 23 nt, synthetic construct
  source 1..23: mol_type = other RNA
gtgggtccccacccggccctctc

SEQ ID NO: 57718 - RNA, 23 nt, synthetic construct
  source 1..23: mol_type = other RNA
gtttccgtccttgtcgtagcagc

SEQ ID NO: 57719 - RNA, 23 nt, synthetic construct
  source 1..23: mol_type = other RNA
ggtggtggccgtctccagctctg

SEQ ID NO: 57720 - RNA, 23 nt, synthetic construct
  source 1..23: mol_type = other RNA
tggggcctcccgtggtggctgta

SEQ ID NO: 57721 - RNA, 23 nt, synthetic construct
  source 1..23: mol_type = other RNA
agggggtcaccgtggagcctctg

SEQ ID NO: 57722 - RNA, 23 nt, synthetic construct
  source 1..23: mol_type = other RNA
cagcactgtggcggtgtgggtgg

SEQ ID NO: 57723 - RNA, 23 nt, synthetic construct
  source 1..23: mol_type = other RNA
ccagtggccacagttgtggtggt

SEQ ID NO: 57724 - RNA, 23 nt, synthetic construct
  source 1..23: mol_type = other RNA
cggtggttgctgctagggtgtgg

SEQ ID NO: 57725 - RNA, 23 nt, synthetic construct
  source 1..23: mol_type = other RNA
ccggtggttgctgctagggtgtg

SEQ ID NO: 57726 - RNA, 23 nt, synthetic construct
  source 1..23: mol_type = other RNA
tggaggtggccgtggtgtggccc

SEQ ID NO: 57727 - RNA, 23 nt, synthetic construct
  source 1..23: mol_type = other RNA
gacggcccctccggccgcacgga

SEQ ID NO: 57728 - RNA, 23 nt, synthetic construct
  source 1..23: mol_type = other RNA
ccagtggccacagttgtggtggt

SEQ ID NO: 57729 - RNA, 23 nt, synthetic construct
  source 1..23: mol_type = other RNA
gtggtggccgtggtgttcggcac

SEQ ID NO: 57730 - RNA, 23 nt, synthetic construct
  source 1..23: mol_type = other RNA
gacggcccctccggccgcacgga

SEQ ID NO: 57731 - RNA, 23 nt, synthetic construct
  source 1..23: mol_type = other RNA
tgtaaagctggtagctgtggatt

SEQ ID NO: 57732 - RNA, 23 nt, synthetic construct
  source 1..23: mol_type = other RNA
gccggtggccctggttgtggtgg

SEQ ID NO: 57733 - RNA, 23 nt, synthetic construct
  source 1..23: mol_type = other RNA
agggggtcaccgtggagcctctg

SEQ ID NO: 57734 - RNA, 23 nt, synthetic construct
  source 1..23: mol_type = other RNA
cagcactgtggcggtgtgggtgg

SEQ ID NO: 57735 - RNA, 23 nt, synthetic construct
  source 1..23: mol_type = other RNA
ccagtggccacagttgtggtggt

SEQ ID NO: 57736 - RNA, 23 nt, synthetic construct
  source 1..23: mol_type = other RNA
ggggatgggagttgtccctggag

SEQ ID NO: 57737 - RNA, 23 nt, synthetic construct
  source 1..23: mol_type = other RNA
gtggtggccgtggtgttcggcac

SEQ ID NO: 57738 - RNA, 23 nt, synthetic construct
  source 1..23: mol_type = other RNA
gccggtggccctggttgtggtgg

SEQ ID NO: 57739 - RNA, 23 nt, synthetic construct
  source 1..23: mol_type = other RNA
gcacacgcgtcgttcacgcaggc

SEQ ID NO: 57740 - RNA, 23 nt, synthetic construct
  source 1..23: mol_type = other RNA
catttcttggacagaacgtagct

SEQ ID NO: 57741 - RNA, 23 nt, synthetic construct
  source 1..23: mol_type = other RNA
caggtctggttggcgtatttggg

SEQ ID NO: 57742 - RNA, 23 nt, synthetic construct
  source 1..23: mol_type = other RNA
ctgaaaccgctgctcaccggaat

SEQ ID NO: 57743 - RNA, 23 nt, synthetic construct
  source 1..23: mol_type = other RNA
tgggcatagaactcgttgaaggc

SEQ ID NO: 57744 - RNA, 23 nt, synthetic construct
  source 1..23: mol_type = other RNA
caccagtgccgggcgtagttctc

SEQ ID NO: 57745 - RNA, 23 nt, synthetic construct
  source 1..23: mol_type = other RNA
ccacaggggatgttctcggtgac

SEQ ID NO: 57746 - RNA, 23 nt, synthetic construct
  source 1..23: mol_type = other RNA
acatttcttggacagaacgtagc

SEQ ID NO: 57747 - RNA, 23 nt, synthetic construct
  source 1..23: mol_type = other RNA
acccggatcctgtagttgtagca

SEQ ID NO: 57748 - RNA, 23 nt, synthetic construct
  source 1..23: mol_type = other RNA
ttctcggtgacgatgcggaaggt

SEQ ID NO: 57749 - RNA, 23 nt, synthetic construct
  source 1..23: mol_type = other RNA
gcagttctcgttgtccgtcaggc

SEQ ID NO: 57750 - RNA, 23 nt, synthetic construct
  source 1..23: mol_type = other RNA
caggtgttgcagtcgaccctgat

SEQ ID NO: 57751 - RNA, 23 nt, synthetic construct
  source 1..23: mol_type = other RNA
gggccttccaggtgttggcgaag

SEQ ID NO: 57752 - RNA, 23 nt, synthetic construct
  source 1..23: mol_type = other RNA
aggcttgtaggtggcctcgttgt

SEQ ID NO: 57753 - RNA, 23 nt, synthetic construct
  source 1..23: mol_type = other RNA
tctccacgaagagcttgatggcc

SEQ ID NO: 57754 - RNA, 23 nt, synthetic construct
  source 1..23: mol_type = other RNA
ggaagtccacgtcaaaccactct

SEQ ID NO: 57755 - RNA, 23 nt, synthetic construct
  source 1..23: mol_type = other RNA
agccgtgcagaaacactcgcagt

SEQ ID NO: 57756 - RNA, 23 nt, synthetic construct
  source 1..23: mol_type = other RNA
cgtcgaagttcccgcacaggccg

SEQ ID NO: 57757 - RNA, 23 nt, synthetic construct
  source 1..23: mol_type = other RNA
ggctacgcgtggcaaagtcattg

SEQ ID NO: 57758 - RNA, 23 nt, synthetic construct
  source 1..23: mol_type = other RNA
gctacgcgtggcaaagtcattga

SEQ ID NO: 57759 - RNA, 23 nt, synthetic construct
  source 1..23: mol_type = other RNA
ccggaatttggtcaaacaggatc

SEQ ID NO: 57760 - RNA, 23 nt, synthetic construct
  source 1..23: mol_type = other RNA
tgaagaagctcgagggtgtgaac

SEQ ID NO: 57761 - RNA, 23 nt, synthetic construct
  source 1..23: mol_type = other RNA
agccggttttcctgaggctcccc

SEQ ID NO: 57762 - RNA, 23 nt, synthetic construct
  source 1..23: mol_type = other RNA
cggctacgcgtggcaaagtcatt

SEQ ID NO: 57763 - RNA, 23 nt, synthetic construct
  source 1..23: mol_type = other RNA
aagttgttcagacttggggtagt

SEQ ID NO: 57764 - RNA, 23 nt, synthetic construct
  source 1..23: mol_type = other RNA
aaggtgtaagaggtgccgtcaaa

SEQ ID NO: 57765 - RNA, 23 nt, synthetic construct
  source 1..23: mol_type = other RNA
tgcaggtgacgtcggcctcactc

SEQ ID NO: 57766 - RNA, 23 nt, synthetic construct
  source 1..23: mol_type = other RNA
cacacaggcgcccgcgtcattga

SEQ ID NO: 57767 - RNA, 23 nt, synthetic construct
  source 1..23: mol_type = other RNA
aggatcagctcgtagctctccac

SEQ ID NO: 57768 - RNA, 23 nt, synthetic construct
  source 1..23: mol_type = other RNA
ttttaggcagggtgccccgcagg

SEQ ID NO: 57769 - RNA, 23 nt, synthetic construct
  source 1..23: mol_type = other RNA
tccacgtcaaaccactctgtcca

SEQ ID NO: 57770 - RNA, 23 nt, synthetic construct
  source 1..23: mol_type = other RNA
ggtgatgttggctgccgacaggg

SEQ ID NO: 57771 - RNA, 23 nt, synthetic construct
  source 1..23: mol_type = other RNA
acaggtctggttggcgtatttgg

SEQ ID NO: 57772 - RNA, 23 nt, synthetic construct
  source 1..23: mol_type = other RNA
cacacgcgtcgttcacgcaggcc

SEQ ID NO: 57773 - RNA, 23 nt, synthetic construct
  source 1..23: mol_type = other RNA
agctcgtagctctccacgaagag

SEQ ID NO: 57774 - RNA, 23 nt, synthetic construct
  source 1..23: mol_type = other RNA
tttttaggcagggtgccccgcag

SEQ ID NO: 57775 - RNA, 23 nt, synthetic construct
  source 1..23: mol_type = other RNA
gcagacctcgcggacacacacgg

SEQ ID NO: 57776 - RNA, 23 nt, synthetic construct
  source 1..23: mol_type = other RNA
cactgctccgtgggcccatccaa

SEQ ID NO: 57777 - RNA, 23 nt, synthetic construct
  source 1..23: mol_type = other RNA
ggcactccgcaaaggccggcccc

SEQ ID NO: 57778 - RNA, 23 nt, synthetic construct
  source 1..23: mol_type = other RNA
cgcccgcgtcattgaggaaggtg

SEQ ID NO: 57779 - RNA, 23 nt, synthetic construct
  source 1..23: mol_type = other RNA
gacgatgcggaaggtcccgtggg

SEQ ID NO: 57780 - RNA, 23 nt, synthetic construct
  source 1..23: mol_type = other RNA
gaggatcagctcgtagctctcca

SEQ ID NO: 57781 - RNA, 23 nt, synthetic construct
  source 1..23: mol_type = other RNA
ggaggatcagctcgtagctctcc

SEQ ID NO: 57782 - RNA, 23 nt, synthetic construct
  source 1..23: mol_type = other RNA
cccactggggttccggcaggttt

SEQ ID NO: 57783 - RNA, 23 nt, synthetic construct
  source 1..23: mol_type = other RNA
tgcccactggggttccggcaggt

SEQ ID NO: 57784 - RNA, 23 nt, synthetic construct
  source 1..23: mol_type = other RNA
cttcatctggtcctcattgaaga

SEQ ID NO: 57785 - RNA, 23 nt, synthetic construct
  source 1..23: mol_type = other RNA
ggccacgcacttcatctggtcct

SEQ ID NO: 57786 - RNA, 23 nt, synthetic construct
  source 1..23: mol_type = other RNA
agttgttcagacttggggtagtc

SEQ ID NO: 57787 - RNA, 23 nt, synthetic construct
  source 1..23: mol_type = other RNA
tgatcttatcgtaggactcaacg

SEQ ID NO: 57788 - RNA, 23 nt, synthetic construct
  source 1..23: mol_type = other RNA
cgtggtggtcagcactttgggag

SEQ ID NO: 57789 - RNA, 23 nt, synthetic construct
  source 1..23: mol_type = other RNA
ctggttgttggtgcaggtgccgc

SEQ ID NO: 57790 - RNA, 23 nt, synthetic construct
  source 1..23: mol_type = other RNA
ctctcttgtactcaaagccctgg

SEQ ID NO: 57791 - RNA, 23 nt, synthetic construct
  source 1..23: mol_type = other RNA
ggggccacagggcacgtattcgc

SEQ ID NO: 57792 - RNA, 23 nt, synthetic construct
  source 1..23: mol_type = other RNA
atgcactcgcactcatagtggaa

SEQ ID NO: 57793 - RNA, 23 nt, synthetic construct
  source 1..23: mol_type = other RNA
gtcttccggtcccaggacacggc

SEQ ID NO: 57794 - RNA, 23 nt, synthetic construct
  source 1..23: mol_type = other RNA
ggggtgtgggaagtcaccgtgga

SEQ ID NO: 57795 - RNA, 23 nt, synthetic construct
  source 1..23: mol_type = other RNA
ggttccggcaggtttttaggcag

SEQ ID NO: 57796 - RNA, 23 nt, synthetic construct
  source 1..23: mol_type = other RNA
caggttcccaaactggagcgggg

SEQ ID NO: 57797 - RNA, 23 nt, synthetic construct
  source 1..23: mol_type = other RNA
acagacacagccggacacgcagt

SEQ ID NO: 57798 - RNA, 23 nt, synthetic construct
  source 1..23: mol_type = other RNA
caggtgcaggcctcaaggctgtg

SEQ ID NO: 57799 - RNA, 23 nt, synthetic construct
  source 1..23: mol_type = other RNA
gttgcagcagaacacacggattt

SEQ ID NO: 57800 - RNA, 23 nt, synthetic construct
  source 1..23: mol_type = other RNA
gttgcagcagaacacacggattt

SEQ ID NO: 57801 - RNA, 23 nt, synthetic construct
  source 1..23: mol_type = other RNA
gttgcagcagaacacacggattt

SEQ ID NO: 57802 - RNA, 23 nt, synthetic construct
  source 1..23: mol_type = other RNA
gttgcagcagaacacacggattt

SEQ ID NO: 57803 - RNA, 23 nt, synthetic construct
  source 1..23: mol_type = other RNA
ggccgtgtccccgccgtccaggc

SEQ ID NO: 57804 - RNA, 23 nt, synthetic construct
  source 1..23: mol_type = other RNA
tggccatccccgtaggccacgca

SEQ ID NO: 57805 - RNA, 23 nt, synthetic construct
  source 1..23: mol_type = other RNA
cgatgcggaaggtcccgtgggtg

SEQ ID NO: 57806 - RNA, 23 nt, synthetic construct
  source 1..23: mol_type = other RNA
acttggtggagtcaacctgggag

SEQ ID NO: 57807 - RNA, 23 nt, synthetic construct
  source 1..23: mol_type = other RNA
cgtcccctccaagttgttcagac

SEQ ID NO: 57808 - RNA, 23 nt, synthetic construct
  source 1..23: mol_type = other RNA
gggctgctcacagacggcccctc

SEQ ID NO: 57809 - RNA, 23 nt, synthetic construct
  source 1..23: mol_type = other RNA
gggctgctcacagacggcccctc

SEQ ID NO: 57810 - RNA, 23 nt, synthetic construct
  source 1..23: mol_type = other RNA
gggctgctcacagacggcccctc

SEQ ID NO: 57811 - RNA, 23 nt, synthetic construct
  source 1..23: mol_type = other RNA
agggtccaggtctcattcacctg

SEQ ID NO: 57812 - RNA, 23 nt, synthetic construct
  source 1..23: mol_type = other RNA
gtcctctccgttccacaggaatg

SEQ ID NO: 57813 - RNA, 23 nt, synthetic construct
  source 1..23: mol_type = other RNA
gtgggcccatccaacttctgcag

SEQ ID NO: 57814 - RNA, 23 nt, synthetic construct
  source 1..23: mol_type = other RNA
ccgtgggcccatccaacttctgc

SEQ ID NO: 57815 - RNA, 23 nt, synthetic construct
  source 1..23: mol_type = other RNA
ctgctccgtgggcccatccaact

SEQ ID NO: 57816 - RNA, 23 nt, synthetic construct
  source 1..23: mol_type = other RNA
gtgatgttggctgccgacagggg

SEQ ID NO: 57817 - RNA, 23 nt, synthetic construct
  source 1..23: mol_type = other RNA
gaagctcgagggtgtgaacaggg

SEQ ID NO: 57818 - RNA, 23 nt, synthetic construct
  source 1..23: mol_type = other RNA
gtcagcctggttctggttgaagt

SEQ ID NO: 57819 - RNA, 23 nt, synthetic construct
  source 1..23: mol_type = other RNA
ggacttggggcagttctgcatgt

SEQ ID NO: 57820 - RNA, 23 nt, synthetic construct
  source 1..23: mol_type = other RNA
caggtgcagccgtccacaggcac

SEQ ID NO: 57821 - RNA, 23 nt, synthetic construct
  source 1..23: mol_type = other RNA
gcacacaggcgcccgcgtcattg

SEQ ID NO: 57822 - RNA, 23 nt, synthetic construct
  source 1..23: mol_type = other RNA
cctgtgcttttctgcagagaggc

SEQ ID NO: 57823 - RNA, 23 nt, synthetic construct
  source 1..23: mol_type = other RNA
atcagctcgtagctctccacgaa

SEQ ID NO: 57824 - RNA, 23 nt, synthetic construct
  source 1..23: mol_type = other RNA
ccggtcccaggacacggccatcc

SEQ ID NO: 57825 - RNA, 23 nt, synthetic construct
  source 1..23: mol_type = other RNA
cgcgtggcaaagtcattgatggc

SEQ ID NO: 57826 - RNA, 23 nt, synthetic construct
  source 1..23: mol_type = other RNA
cgcaggcctcgtagtacttggtg

SEQ ID NO: 57827 - RNA, 23 nt, synthetic construct
  source 1..23: mol_type = other RNA
acacaggcccgcgtcgtggcagg

SEQ ID NO: 57828 - RNA, 23 nt, synthetic construct
  source 1..23: mol_type = other RNA
gtcctcataggtgcaggtgcagg

SEQ ID NO: 57829 - RNA, 23 nt, synthetic construct
  source 1..23: mol_type = other RNA
gtaggcacagcaggctccgtgct

SEQ ID NO: 57830 - RNA, 23 nt, synthetic construct
  source 1..23: mol_type = other RNA
cttggggtagtcctcatcaaacc

SEQ ID NO: 57831 - RNA, 23 nt, synthetic construct
  source 1..23: mol_type = other RNA
ttggggaagctctcggcctggca

SEQ ID NO: 57832 - RNA, 23 nt, synthetic construct
  source 1..23: mol_type = other RNA
tctgtccactcacacttcggttg

SEQ ID NO: 57833 - RNA, 23 nt, synthetic construct
  source 1..23: mol_type = other RNA
gtccacgtcaaaccactctgtcc

SEQ ID NO: 57834 - RNA, 23 nt, synthetic construct
  source 1..23: mol_type = other RNA
tggggtagctgtagtccagccac

SEQ ID NO: 57835 - RNA, 23 nt, synthetic construct
  source 1..23: mol_type = other RNA
tccaggctgcattccacgacctg

SEQ ID NO: 57836 - RNA, 23 nt, synthetic construct
  source 1..23: mol_type = other RNA
tggggtagctgtagtccagccac

SEQ ID NO: 57837 - RNA, 23 nt, synthetic construct
  source 1..23: mol_type = other RNA
tccaggctgcattccacgacctg

SEQ ID NO: 57838 - RNA, 23 nt, synthetic construct
  source 1..23: mol_type = other RNA
tggggtagctgtagtccagccac

SEQ ID NO: 57839 - RNA, 23 nt, synthetic construct
  source 1..23: mol_type = other RNA
tccaggctgcattccacgacctg

SEQ ID NO: 57840 - RNA, 23 nt, synthetic construct
  source 1..23: mol_type = other RNA
tggggtagctgtagtccagccac

SEQ ID NO: 57841 - RNA, 23 nt, synthetic construct
  source 1..23: mol_type = other RNA
tccaggctgcattccacgacctg

SEQ ID NO: 57842 - RNA, 23 nt, synthetic construct
  source 1..23: mol_type = other RNA
cacctggccaccgtgcagttctc

SEQ ID NO: 57843 - RNA, 23 nt, synthetic construct
  source 1..23: mol_type = other RNA
ttgtcacccacgcacctggccac

SEQ ID NO: 57844 - RNA, 23 nt, synthetic construct
  source 1..23: mol_type = other RNA
ggtgcttgttcacgcaggtgacg

SEQ ID NO: 57845 - RNA, 23 nt, synthetic construct
  source 1..23: mol_type = other RNA
gaaaccgctgctcaccggaattt

SEQ ID NO: 57846 - RNA, 23 nt, synthetic construct
  source 1..23: mol_type = other RNA
gctgaaaccgctgctcaccggaa

SEQ ID NO: 57847 - RNA, 23 nt, synthetic construct
  source 1..23: mol_type = other RNA
caggtgacgtcggcctcactcag

SEQ ID NO: 57848 - RNA, 23 nt, synthetic construct
  source 1..23: mol_type = other RNA
atgaggacataggtgcagttgcc

SEQ ID NO: 57849 - RNA, 23 nt, synthetic construct
  source 1..23: mol_type = other RNA
tcccaaactggagcggggtcagc

SEQ ID NO: 57850 - RNA, 23 nt, synthetic construct
  source 1..23: mol_type = other RNA
ggcctcgtagtacttggtggagt

SEQ ID NO: 57851 - RNA, 23 nt, synthetic construct
  source 1..23: mol_type = other RNA
gggttccggcaggtttttaggca

SEQ ID NO: 57852 - RNA, 23 nt, synthetic construct
  source 1..23: mol_type = other RNA
ccttccaggtgttggcgaaggct

SEQ ID NO: 57853 - RNA, 23 nt, synthetic construct
  source 1..23: mol_type = other RNA
aggcctcgtagtacttggtggag

SEQ ID NO: 57854 - RNA, 23 nt, synthetic construct
  source 1..23: mol_type = other RNA
tccagggtccaggtctcattcac

SEQ ID NO: 57855 - RNA, 23 nt, synthetic construct
  source 1..23: mol_type = other RNA
gtgaacagggtgatgttggctgc

SEQ ID NO: 57856 - RNA, 23 nt, synthetic construct
  source 1..23: mol_type = other RNA
ccgcgtcattgaggaaggtgccc

SEQ ID NO: 57857 - RNA, 23 nt, synthetic construct
  source 1..23: mol_type = other RNA
cccgcgtcattgaggaaggtgcc

SEQ ID NO: 57858 - RNA, 23 nt, synthetic construct
  source 1..23: mol_type = other RNA
gggtgatgttggctgccgacagg

SEQ ID NO: 57859 - RNA, 23 nt, synthetic construct
  source 1..23: mol_type = other RNA
cagccacactgggccacgcactt

SEQ ID NO: 57860 - RNA, 23 nt, synthetic construct
  source 1..23: mol_type = other RNA
aggagtagcagcagccggttttc

SEQ ID NO: 57861 - RNA, 23 nt, synthetic construct
  source 1..23: mol_type = other RNA
ggtctggttggcgtatttgggat

SEQ ID NO: 57862 - RNA, 23 nt, synthetic construct
  source 1..23: mol_type = other RNA
cgtagctctccacgaagagcttg

SEQ ID NO: 57863 - RNA, 23 nt, synthetic construct
  source 1..23: mol_type = other RNA
gcactgctccgtgggcccatcca

SEQ ID NO: 57864 - RNA, 23 nt, synthetic construct
  source 1..23: mol_type = other RNA
acaggggatgttctcggtgacga

SEQ ID NO: 57865 - RNA, 23 nt, synthetic construct
  source 1..23: mol_type = other RNA
gcaggtgacgtcggcctcactca

SEQ ID NO: 57866 - RNA, 23 nt, synthetic construct
  source 1..23: mol_type = other RNA
tccgtgggcccatccaacttctg

SEQ ID NO: 57867 - RNA, 23 nt, synthetic construct
  source 1..23: mol_type = other RNA
cttggggcagttctgcatgtact

SEQ ID NO: 57868 - RNA, 23 nt, synthetic construct
  source 1..23: mol_type = other RNA
acagccggacacgcagtgtgtgc

SEQ ID NO: 57869 - RNA, 23 nt, synthetic construct
  source 1..23: mol_type = other RNA
gtgggcatagaactcgttgaagg

SEQ ID NO: 57870 - RNA, 23 nt, synthetic construct
  source 1..23: mol_type = other RNA
gtggtgccggtggtcccacaggg

SEQ ID NO: 57871 - RNA, 23 nt, synthetic construct
  source 1..23: mol_type = other RNA
ctacgcgtggcaaagtcattgat

SEQ ID NO: 57872 - RNA, 23 nt, synthetic construct
  source 1..23: mol_type = other RNA
ggcagccacagccgtgcagaaac

SEQ ID NO: 57873 - RNA, 23 nt, synthetic construct
  source 1..23: mol_type = other RNA
ccactggggttccggcaggtttt

SEQ ID NO: 57874 - RNA, 23 nt, synthetic construct
  source 1..23: mol_type = other RNA
ttgtagatgacgtcctggtagct

SEQ ID NO: 57875 - RNA, 23 nt, synthetic construct
  source 1..23: mol_type = other RNA
tgtaaggcagctcctcccgctgc

SEQ ID NO: 57876 - RNA, 23 nt, synthetic construct
  source 1..23: mol_type = other RNA
ctgtaaggcagctcctcccgctg

SEQ ID NO: 57877 - RNA, 23 nt, synthetic construct
  source 1..23: mol_type = other RNA
gctgtaaggcagctcctcccgct

SEQ ID NO: 57878 - RNA, 23 nt, synthetic construct
  source 1..23: mol_type = other RNA
actgtcctctccgttccacagga

SEQ ID NO: 57879 - RNA, 23 nt, synthetic construct
  source 1..23: mol_type = other RNA
gtccgggcactgctccgtgggcc

SEQ ID NO: 57880 - RNA, 23 nt, synthetic construct
  source 1..23: mol_type = other RNA
gtgagtattccacaaaggtggca

SEQ ID NO: 57881 - RNA, 23 nt, synthetic construct
  source 1..23: mol_type = other RNA
cgtgagtattccacaaaggtggc

SEQ ID NO: 57882 - RNA, 23 nt, synthetic construct
  source 1..23: mol_type = other RNA
gcgtgggcgcactggcgtgagta

SEQ ID NO: 57883 - RNA, 23 nt, synthetic construct
  source 1..23: mol_type = other RNA
ccgcgtgggcgcactggcgtgag

SEQ ID NO: 57884 - RNA, 23 nt, synthetic construct
  source 1..23: mol_type = other RNA
cccgcgtgggcgcactggcgtga

SEQ ID NO: 57885 - RNA, 23 nt, synthetic construct
  source 1..23: mol_type = other RNA
ggcactgcccgaggggcaggcag

SEQ ID NO: 57886 - RNA, 23 nt, synthetic construct
  source 1..23: mol_type = other RNA
ccgccgtccaggctgagcgtcac

SEQ ID NO: 57887 - RNA, 23 nt, synthetic construct
  source 1..23: mol_type = other RNA
cccggatggccgtgtccccgccg

SEQ ID NO: 57888 - RNA, 23 nt, synthetic construct
  source 1..23: mol_type = other RNA
acccggatggccgtgtccccgcc

SEQ ID NO: 57889 - RNA, 23 nt, synthetic construct
  source 1..23: mol_type = other RNA
cacataggaggacagcgcggcgc

SEQ ID NO: 57890 - RNA, 23 nt, synthetic construct
  source 1..23: mol_type = other RNA
aacagcccacgtccagcgtgtgg

SEQ ID NO: 57891 - RNA, 23 nt, synthetic construct
  source 1..23: mol_type = other RNA
gcttgtaggtggcctcgttgtgc

SEQ ID NO: 57892 - RNA, 23 nt, synthetic construct
  source 1..23: mol_type = other RNA
tcgccatcaaaggtgatgaagtg

SEQ ID NO: 57893 - RNA, 23 nt, synthetic construct
  source 1..23: mol_type = other RNA
tcgatgaccaggaagatccccat

SEQ ID NO: 57894 - RNA, 23 nt, synthetic construct
  source 1..23: mol_type = other RNA
gtacttggtggagtcaacctggg

SEQ ID NO: 57895 - RNA, 23 nt, synthetic construct
  source 1..23: mol_type = other RNA
gagtccgccaggacacacacagg

SEQ ID NO: 57896 - RNA, 23 nt, synthetic construct
  source 1..23: mol_type = other RNA
ggagtccgccaggacacacacag

SEQ ID NO: 57897 - RNA, 23 nt, synthetic construct
  source 1..23: mol_type = other RNA
gccacgcacttcatctggtcctc

SEQ ID NO: 57898 - RNA, 23 nt, synthetic construct
  source 1..23: mol_type = other RNA
gtgttgtagatgacgtcctggta

SEQ ID NO: 57899 - RNA, 23 nt, synthetic construct
  source 1..23: mol_type = other RNA
gggtaggcacagcaggctccgtg

SEQ ID NO: 57900 - RNA, 23 nt, synthetic construct
  source 1..23: mol_type = other RNA
gacttggggtagtcctcatcaaa

SEQ ID NO: 57901 - RNA, 23 nt, synthetic construct
  source 1..23: mol_type = other RNA
caagttgttcagacttggggtag

SEQ ID NO: 57902 - RNA, 23 nt, synthetic construct
  source 1..23: mol_type = other RNA
gatcttatcgtaggactcaacgt

SEQ ID NO: 57903 - RNA, 23 nt, synthetic construct
  source 1..23: mol_type = other RNA
cctgtagttgtagcacatcttga

SEQ ID NO: 57904 - RNA, 23 nt, synthetic construct
  source 1..23: mol_type = other RNA
cgtcaaaccactctgtccactca

SEQ ID NO: 57905 - RNA, 23 nt, synthetic construct
  source 1..23: mol_type = other RNA
tccaggtctcattcacctgccgg

SEQ ID NO: 57906 - RNA, 23 nt, synthetic construct
  source 1..23: mol_type = other RNA
ctcaccggaatttggtcaaacag

SEQ ID NO: 57907 - RNA, 23 nt, synthetic construct
  source 1..23: mol_type = other RNA
ccctcggtgttgttgtggaagag

SEQ ID NO: 57908 - RNA, 23 nt, synthetic construct
  source 1..23: mol_type = other RNA
gcagcggaaggtgggacagcagt

SEQ ID NO: 57909 - RNA, 23 nt, synthetic construct
  source 1..23: mol_type = other RNA
ggctgtaaggcagctcctcccgc

SEQ ID NO: 57910 - RNA, 23 nt, synthetic construct
  source 1..23: mol_type = other RNA
gggcagcgggtccgggcactgct

SEQ ID NO: 57911 - RNA, 23 nt, synthetic construct
  source 1..23: mol_type = other RNA
ttggggcagttctgcatgtactt

SEQ ID NO: 57912 - RNA, 23 nt, synthetic construct
  source 1..23: mol_type = other RNA
cctgcccttgtagtcctggtgca

SEQ ID NO: 57913 - RNA, 23 nt, synthetic construct
  source 1..23: mol_type = other RNA
gcctcgtagtacttggtggagtc

SEQ ID NO: 57914 - RNA, 23 nt, synthetic construct
  source 1..23: mol_type = other RNA
gtgccccgcagggctggtagtgc

SEQ ID NO: 57915 - RNA, 23 nt, synthetic construct
  source 1..23: mol_type = other RNA
caaaccactctgtccactcacac

SEQ ID NO: 57916 - RNA, 23 nt, synthetic construct
  source 1..23: mol_type = other RNA
tctcatgaggacataggtgcagt

SEQ ID NO: 57917 - RNA, 23 nt, synthetic construct
  source 1..23: mol_type = other RNA
agatggagttgaggaacacgccg

SEQ ID NO: 57918 - RNA, 23 nt, synthetic construct
  source 1..23: mol_type = other RNA
ggggatgttctcggtgacgatgc

SEQ ID NO: 57919 - RNA, 23 nt, synthetic construct
  source 1..23: mol_type = other RNA
cgcgtgggcgcactggcgtgagt

SEQ ID NO: 57920 - RNA, 23 nt, synthetic construct
  source 1..23: mol_type = other RNA
gcgggcacacaggcgcccgcgtc

SEQ ID NO: 57921 - RNA, 23 nt, synthetic construct
  source 1..23: mol_type = other RNA
gcccacgtccagcgtgtggcagc

SEQ ID NO: 57922 - RNA, 23 nt, synthetic construct
  source 1..23: mol_type = other RNA
gcgtaggcagccacagccgtgca

SEQ ID NO: 57923 - RNA, 23 nt, synthetic construct
  source 1..23: mol_type = other RNA
gctggtctcggcctgagaggtgg

SEQ ID NO: 57924 - RNA, 23 nt, synthetic construct
  source 1..23: mol_type = other RNA
tgcactggtgctgcatggcctgg

SEQ ID NO: 57925 - RNA, 23 nt, synthetic construct
  source 1..23: mol_type = other RNA
gacccggatcctgtagttgtagc

SEQ ID NO: 57926 - RNA, 23 nt, synthetic construct
  source 1..23: mol_type = other RNA
gtgctggtctcggcctgagaggt

SEQ ID NO: 57927 - RNA, 23 nt, synthetic construct
  source 1..23: mol_type = other RNA
tagatggagttgaggaacacgcc

SEQ ID NO: 57928 - RNA, 23 nt, synthetic construct
  source 1..23: mol_type = other RNA
gggcagctgcgtgtagatggagt

SEQ ID NO: 57929 - RNA, 23 nt, synthetic construct
  source 1..23: mol_type = other RNA
gttggctgccgacaggggcagct

SEQ ID NO: 57930 - RNA, 23 nt, synthetic construct
  source 1..23: mol_type = other RNA
gggcaggtgcagccgtccacagg

SEQ ID NO: 57931 - RNA, 23 nt, synthetic construct
  source 1..23: mol_type = other RNA
ggcgggcacacaggcgcccgcgt

SEQ ID NO: 57932 - RNA, 23 nt, synthetic construct
  source 1..23: mol_type = other RNA
ccacgtccagcgtgtggcagctc

SEQ ID NO: 57933 - RNA, 23 nt, synthetic construct
  source 1..23: mol_type = other RNA
cagcccacgtccagcgtgtggca

SEQ ID NO: 57934 - RNA, 23 nt, synthetic construct
  source 1..23: mol_type = other RNA
gacacagccggacacgcagtgtg

SEQ ID NO: 57935 - RNA, 23 nt, synthetic construct
  source 1..23: mol_type = other RNA
aggggatgttctcggtgacgatg

SEQ ID NO: 57936 - RNA, 23 nt, synthetic construct
  source 1..23: mol_type = other RNA
gtgccggtggtcccacaggggat

SEQ ID NO: 57937 - RNA, 23 nt, synthetic construct
  source 1..23: mol_type = other RNA
gcagggtgccccgcagggctggt

SEQ ID NO: 57938 - RNA, 23 nt, synthetic construct
  source 1..23: mol_type = other RNA
actggggttccggcaggttttta

SEQ ID NO: 57939 - RNA, 23 nt, synthetic construct
  source 1..23: mol_type = other RNA
ggccgggcttgtcgtggagtggg

SEQ ID NO: 57940 - RNA, 23 nt, synthetic construct
  source 1..23: mol_type = other RNA
gggcctgagctggacccagtctg

SEQ ID NO: 57941 - RNA, 23 nt, synthetic construct
  source 1..23: mol_type = other RNA
ttcctgcacaccaggccgaagtg

SEQ ID NO: 57942 - RNA, 23 nt, synthetic construct
  source 1..23: mol_type = other RNA
gtggtggctgtaccaagggtgct

SEQ ID NO: 57943 - RNA, 23 nt, synthetic construct
  source 1..23: mol_type = other RNA
gttgcacctcgccagtcactgca

SEQ ID NO: 57944 - RNA, 23 nt, synthetic construct
  source 1..23: mol_type = other RNA
gtcctcctcacaggagtagcagc

SEQ ID NO: 57945 - RNA, 23 nt, synthetic construct
  source 1..23: mol_type = other RNA
aggggccacagggcacgtattcg

SEQ ID NO: 57946 - RNA, 23 nt, synthetic construct
  source 1..23: mol_type = other RNA
ggggcagctgcgtgtagatggag

SEQ ID NO: 57947 - RNA, 23 nt, synthetic construct
  source 1..23: mol_type = other RNA
ggcactgtcctctccgttccaca

SEQ ID NO: 57948 - RNA, 23 nt, synthetic construct
  source 1..23: mol_type = other RNA
gtgcaggtgttgcagtcgaccct

SEQ ID NO: 57949 - RNA, 23 nt, synthetic construct
  source 1..23: mol_type = other RNA
accaggaagatccccatgtagcg

SEQ ID NO: 57950 - RNA, 23 nt, synthetic construct
  source 1..23: mol_type = other RNA
ccacaggtctggttggcgtattt

SEQ ID NO: 57951 - RNA, 23 nt, synthetic construct
  source 1..23: mol_type = other RNA
aggggcagctgcgtgtagatgga

SEQ ID NO: 57952 - RNA, 23 nt, synthetic construct
  source 1..23: mol_type = other RNA
gctcgtagctctccacgaagagc

SEQ ID NO: 57953 - RNA, 23 nt, synthetic construct
  source 1..23: mol_type = other RNA
ggctgctcacagacggcccctcc

SEQ ID NO: 57954 - RNA, 23 nt, synthetic construct
  source 1..23: mol_type = other RNA
ggctgctcacagacggcccctcc

SEQ ID NO: 57955 - RNA, 23 nt, synthetic construct
  source 1..23: mol_type = other RNA
ggctgctcacagacggcccctcc

SEQ ID NO: 57956 - RNA, 23 nt, synthetic construct
  source 1..23: mol_type = other RNA
cttccaggtgttggcgaaggctg

SEQ ID NO: 57957 - RNA, 23 nt, synthetic construct
  source 1..23: mol_type = other RNA
gctctccacgaagagcttgatgg

SEQ ID NO: 57958 - RNA, 23 nt, synthetic construct
  source 1..23: mol_type = other RNA
ctcgtagctctccacgaagagct

SEQ ID NO: 57959 - RNA, 23 nt, synthetic construct
  source 1..23: mol_type = other RNA
gtggagtcaacctgggagcggca

SEQ ID NO: 57960 - RNA, 23 nt, synthetic construct
  source 1..23: mol_type = other RNA
gggcaggtgtccggagtccgcca

SEQ ID NO: 57961 - RNA, 23 nt, synthetic construct
  source 1..23: mol_type = other RNA
ggcagtgcccactggggttccgg

SEQ ID NO: 57962 - RNA, 23 nt, synthetic construct
  source 1..23: mol_type = other RNA
cggtggtgttgtagatgacgtcc

SEQ ID NO: 57963 - RNA, 23 nt, synthetic construct
  source 1..23: mol_type = other RNA
gggtggtcttttcggttgctgtg

SEQ ID NO: 57964 - RNA, 23 nt, synthetic construct
  source 1..23: mol_type = other RNA
gggaagtccacgtcaaaccactc

SEQ ID NO: 57965 - RNA, 23 nt, synthetic construct
  source 1..23: mol_type = other RNA
tgggaagtccacgtcaaaccact

SEQ ID NO: 57966 - RNA, 23 nt, synthetic construct
  source 1..23: mol_type = other RNA
ggggtagctgtagtccagccact

SEQ ID NO: 57967 - RNA, 23 nt, synthetic construct
  source 1..23: mol_type = other RNA
ggggtagctgtagtccagccact

SEQ ID NO: 57968 - RNA, 23 nt, synthetic construct
  source 1..23: mol_type = other RNA
ggggtagctgtagtccagccact

SEQ ID NO: 57969 - RNA, 23 nt, synthetic construct
  source 1..23: mol_type = other RNA
ggggtagctgtagtccagccact

SEQ ID NO: 57970 - RNA, 23 nt, synthetic construct
  source 1..23: mol_type = other RNA
ggcaggtgcttgttcacgcaggt

SEQ ID NO: 57971 - RNA, 23 nt, synthetic construct
  source 1..23: mol_type = other RNA
acaagcacgccgttcttgctgaa

SEQ ID NO: 57972 - RNA, 23 nt, synthetic construct
  source 1..23: mol_type = other RNA
gaagacagtgacgggtggaacaa

SEQ ID NO: 57973 - RNA, 23 nt, synthetic construct
  source 1..23: mol_type = other RNA
ggctcaggctggggaagacagtg

SEQ ID NO: 57974 - RNA, 23 nt, synthetic construct
  source 1..23: mol_type = other RNA
caggccacaggtctggttggcgt

SEQ ID NO: 57975 - RNA, 23 nt, synthetic construct
  source 1..23: mol_type = other RNA
actgctccgtgggcccatccaac

SEQ ID NO: 57976 - RNA, 23 nt, synthetic construct
  source 1..23: mol_type = other RNA
cgggtccgggcactgctccgtgg

SEQ ID NO: 57977 - RNA, 23 nt, synthetic construct
  source 1..23: mol_type = other RNA
gcgggtccgggcactgctccgtg

SEQ ID NO: 57978 - RNA, 23 nt, synthetic construct
  source 1..23: mol_type = other RNA
aagggcagcgggtccgggcactg

SEQ ID NO: 57979 - RNA, 23 nt, synthetic construct
  source 1..23: mol_type = other RNA
tggggcagcggcacaggtcctgg

SEQ ID NO: 57980 - RNA, 23 nt, synthetic construct
  source 1..23: mol_type = other RNA
ggcaggtggggcagcggcacagg

SEQ ID NO: 57981 - RNA, 23 nt, synthetic construct
  source 1..23: mol_type = other RNA
ggcaggcagccagagtgcgtgat

SEQ ID NO: 57982 - RNA, 23 nt, synthetic construct
  source 1..23: mol_type = other RNA
gtgccagggcacggcaggtcctg

SEQ ID NO: 57983 - RNA, 23 nt, synthetic construct
  source 1..23: mol_type = other RNA
gccgtccaggctgagcgtcaccg

SEQ ID NO: 57984 - RNA, 23 nt, synthetic construct
  source 1..23: mol_type = other RNA
ggcagctgcgtgtagatggagtt

SEQ ID NO: 57985 - RNA, 23 nt, synthetic construct
  source 1..23: mol_type = other RNA
tggctgccgacaggggcagctgc

SEQ ID NO: 57986 - RNA, 23 nt, synthetic construct
  source 1..23: mol_type = other RNA
gcctgacaaacacctgcatgagt

SEQ ID NO: 57987 - RNA, 23 nt, synthetic construct
  source 1..23: mol_type = other RNA
ttgaagttcccacacaggccgca

SEQ ID NO: 57988 - RNA, 23 nt, synthetic construct
  source 1..23: mol_type = other RNA
gttgaagttcccacacaggccgc

SEQ ID NO: 57989 - RNA, 23 nt, synthetic construct
  source 1..23: mol_type = other RNA
ggttgaagttcccacacaggccg

SEQ ID NO: 57990 - RNA, 23 nt, synthetic construct
  source 1..23: mol_type = other RNA
cctggttctggttgaagttccca

SEQ ID NO: 57991 - RNA, 23 nt, synthetic construct
  source 1..23: mol_type = other RNA
gcctggttctggttgaagttccc

SEQ ID NO: 57992 - RNA, 23 nt, synthetic construct
  source 1..23: mol_type = other RNA
ttccaggtgttggcgaaggctgc

SEQ ID NO: 57993 - RNA, 23 nt, synthetic construct
  source 1..23: mol_type = other RNA
cctgggccttccaggtgttggcg

SEQ ID NO: 57994 - RNA, 23 nt, synthetic construct
  source 1..23: mol_type = other RNA
gcctgggccttccaggtgttggc

SEQ ID NO: 57995 - RNA, 23 nt, synthetic construct
  source 1..23: mol_type = other RNA
aggcgtgcacataggaggacagc

SEQ ID NO: 57996 - RNA, 23 nt, synthetic construct
  source 1..23: mol_type = other RNA
caggcgtgcacataggaggacag

SEQ ID NO: 57997 - RNA, 23 nt, synthetic construct
  source 1..23: mol_type = other RNA
acaggcgtgcacataggaggaca

SEQ ID NO: 57998 - RNA, 23 nt, synthetic construct
  source 1..23: mol_type = other RNA
ggcacaggcgtgcacataggagg

SEQ ID NO: 57999 - RNA, 23 nt, synthetic construct
  source 1..23: mol_type = other RNA
cggcacaggcgtgcacataggag

SEQ ID NO: 58000 - RNA, 23 nt, synthetic construct
  source 1..23: mol_type = other RNA
gcggcacaggcgtgcacatagga

SEQ ID NO: 58001 - RNA, 23 nt, synthetic construct
  source 1..23: mol_type = other RNA
agttctgcatgtacttggtgcag

SEQ ID NO: 58002 - RNA, 23 nt, synthetic construct
  source 1..23: mol_type = other RNA
gcagttctgcatgtacttggtgc

SEQ ID NO: 58003 - RNA, 23 nt, synthetic construct
  source 1..23: mol_type = other RNA
cgggcacacaggcgcccgcgtca

SEQ ID NO: 58004 - RNA, 23 nt, synthetic construct
  source 1..23: mol_type = other RNA
cccacgtccagcgtgtggcagct

SEQ ID NO: 58005 - RNA, 23 nt, synthetic construct
  source 1..23: mol_type = other RNA
agcccacgtccagcgtgtggcag

SEQ ID NO: 58006 - RNA, 23 nt, synthetic construct
  source 1..23: mol_type = other RNA
gctgaaacagcccacgtccagcg

SEQ ID NO: 58007 - RNA, 23 nt, synthetic construct
  source 1..23: mol_type = other RNA
acacagccggacacgcagtgtgt

SEQ ID NO: 58008 - RNA, 23 nt, synthetic construct
  source 1..23: mol_type = other RNA
tccaggcttgtaggtggcctcgt

SEQ ID NO: 58009 - RNA, 23 nt, synthetic construct
  source 1..23: mol_type = other RNA
tctccaggcttgtaggtggcctc

SEQ ID NO: 58010 - RNA, 23 nt, synthetic construct
  source 1..23: mol_type = other RNA
ccacgcaggtgcccaggcagagc

SEQ ID NO: 58011 - RNA, 23 nt, synthetic construct
  source 1..23: mol_type = other RNA
tcaaaggtgatgaagtggccatc

SEQ ID NO: 58012 - RNA, 23 nt, synthetic construct
  source 1..23: mol_type = other RNA
tgcggaaggtcccgtgggtggtg

SEQ ID NO: 58013 - RNA, 23 nt, synthetic construct
  source 1..23: mol_type = other RNA
gttctcggtgacgatgcggaagg

SEQ ID NO: 58014 - RNA, 23 nt, synthetic construct
  source 1..23: mol_type = other RNA
gtggtcccacaggggatgttctc

SEQ ID NO: 58015 - RNA, 23 nt, synthetic construct
  source 1..23: mol_type = other RNA
ctccacgaagagcttgatggcct

SEQ ID NO: 58016 - RNA, 23 nt, synthetic construct
  source 1..23: mol_type = other RNA
ctctccacgaagagcttgatggc

SEQ ID NO: 58017 - RNA, 23 nt, synthetic construct
  source 1..23: mol_type = other RNA
tcgtagctctccacgaagagctt

SEQ ID NO: 58018 - RNA, 23 nt, synthetic construct
  source 1..23: mol_type = other RNA
gatcagctcgtagctctccacga

SEQ ID NO: 58019 - RNA, 23 nt, synthetic construct
  source 1..23: mol_type = other RNA
gggtctcgatgaccaggaagatc

SEQ ID NO: 58020 - RNA, 23 nt, synthetic construct
  source 1..23: mol_type = other RNA
ttgtagtcctggtgcagtcggat

SEQ ID NO: 58021 - RNA, 23 nt, synthetic construct
  source 1..23: mol_type = other RNA
gcagaccctgcccttgtagtcct

SEQ ID NO: 58022 - RNA, 23 nt, synthetic construct
  source 1..23: mol_type = other RNA
tggcaaagtcattgatggcattg

SEQ ID NO: 58023 - RNA, 23 nt, synthetic construct
  source 1..23: mol_type = other RNA
tagtacttggtggagtcaacctg

SEQ ID NO: 58024 - RNA, 23 nt, synthetic construct
  source 1..23: mol_type = other RNA
cctgggcgtaggcagccacagcc

SEQ ID NO: 58025 - RNA, 23 nt, synthetic construct
  source 1..23: mol_type = other RNA
gcctgggcgtaggcagccacagc

SEQ ID NO: 58026 - RNA, 23 nt, synthetic construct
  source 1..23: mol_type = other RNA
acacacaggcccgcgtcgtggca

SEQ ID NO: 58027 - RNA, 23 nt, synthetic construct
  source 1..23: mol_type = other RNA
gttgtagaagtcacagaacaagg

SEQ ID NO: 58028 - RNA, 23 nt, synthetic construct
  source 1..23: mol_type = other RNA
gctggtagtgccactcacagccc

SEQ ID NO: 58029 - RNA, 23 nt, synthetic construct
  source 1..23: mol_type = other RNA
ggggttccggcaggtttttaggc

SEQ ID NO: 58030 - RNA, 23 nt, synthetic construct
  source 1..23: mol_type = other RNA
tggggttccggcaggtttttagg

SEQ ID NO: 58031 - RNA, 23 nt, synthetic construct
  source 1..23: mol_type = other RNA
actgggccacgcacttcatctgg

SEQ ID NO: 58032 - RNA, 23 nt, synthetic construct
  source 1..23: mol_type = other RNA
ctgtcctcataggtgcaggtgca

SEQ ID NO: 58033 - RNA, 23 nt, synthetic construct
  source 1..23: mol_type = other RNA
gggctggcaggtggtggtacctg

SEQ ID NO: 58034 - RNA, 23 nt, synthetic construct
  source 1..23: mol_type = other RNA
tctgtccactgacaccggggctg

SEQ ID NO: 58035 - RNA, 23 nt, synthetic construct
  source 1..23: mol_type = other RNA
accactctgtccactgacaccgg

SEQ ID NO: 58036 - RNA, 23 nt, synthetic construct
  source 1..23: mol_type = other RNA
agacttggggtagtcctcatcaa

SEQ ID NO: 58037 - RNA, 23 nt, synthetic construct
  source 1..23: mol_type = other RNA
gtcccctccaagttgttcagact

SEQ ID NO: 58038 - RNA, 23 nt, synthetic construct
  source 1..23: mol_type = other RNA
atcttatcgtaggactcaacgtc

SEQ ID NO: 58039 - RNA, 23 nt, synthetic construct
  source 1..23: mol_type = other RNA
cactctatgtccttaggctgctg

SEQ ID NO: 58040 - RNA, 23 nt, synthetic construct
  source 1..23: mol_type = other RNA
actctgtccactcacacttcggt

SEQ ID NO: 58041 - RNA, 23 nt, synthetic construct
  source 1..23: mol_type = other RNA
cactctgtccactcacacttcgg

SEQ ID NO: 58042 - RNA, 23 nt, synthetic construct
  source 1..23: mol_type = other RNA
ggtgtgggaagtcaccgtggaag

SEQ ID NO: 58043 - RNA, 23 nt, synthetic construct
  source 1..23: mol_type = other RNA
cgcagggggacaccaggctgggc

SEQ ID NO: 58044 - RNA, 23 nt, synthetic construct
  source 1..23: mol_type = other RNA
tccacgacctggcccaactcccg

SEQ ID NO: 58045 - RNA, 23 nt, synthetic construct
  source 1..23: mol_type = other RNA
gaagcacatcttgaacttcccca

SEQ ID NO: 58046 - RNA, 23 nt, synthetic construct
  source 1..23: mol_type = other RNA
cgcagggggacaccaggctgggc

SEQ ID NO: 58047 - RNA, 23 nt, synthetic construct
  source 1..23: mol_type = other RNA
tccacgacctggcccaactcccg

SEQ ID NO: 58048 - RNA, 23 nt, synthetic construct
  source 1..23: mol_type = other RNA
gaagcacatcttgaacttcccca

SEQ ID NO: 58049 - RNA, 23 nt, synthetic construct
  source 1..23: mol_type = other RNA
ggtgtgggaagtcaccgtggaag

SEQ ID NO: 58050 - RNA, 23 nt, synthetic construct
  source 1..23: mol_type = other RNA
cgcagggggacaccaggctgggc

SEQ ID NO: 58051 - RNA, 23 nt, synthetic construct
  source 1..23: mol_type = other RNA
tccacgacctggcccaactcccg

SEQ ID NO: 58052 - RNA, 23 nt, synthetic construct
  source 1..23: mol_type = other RNA
gaagcacatcttgaacttcccca

SEQ ID NO: 58053 - RNA, 23 nt, synthetic construct
  source 1..23: mol_type = other RNA
tccacgacctggcccaactcccc

SEQ ID NO: 58054 - RNA, 23 nt, synthetic construct
  source 1..23: mol_type = other RNA
gaagcacatcttgaacttcccca

SEQ ID NO: 58055 - RNA, 23 nt, synthetic construct
  source 1..23: mol_type = other RNA
caggtctcattcacctgccggag

SEQ ID NO: 58056 - RNA, 23 nt, synthetic construct
  source 1..23: mol_type = other RNA
gggtccaggtctcattcacctgc

SEQ ID NO: 58057 - RNA, 23 nt, synthetic construct
  source 1..23: mol_type = other RNA
cagggtccaggtctcattcacct

SEQ ID NO: 58058 - RNA, 23 nt, synthetic construct
  source 1..23: mol_type = other RNA
ccagggtccaggtctcattcacc

SEQ ID NO: 58059 - RNA, 23 nt, synthetic construct
  source 1..23: mol_type = other RNA
gcaggtgcttgttcacgcaggtg

SEQ ID NO: 58060 - RNA, 23 nt, synthetic construct
  source 1..23: mol_type = other RNA
tgatgggcaggtgcttgttcacg

SEQ ID NO: 58061 - RNA, 23 nt, synthetic construct
  source 1..23: mol_type = other RNA
aggacataggtgcagttgccccg

SEQ ID NO: 58062 - RNA, 23 nt, synthetic construct
  source 1..23: mol_type = other RNA
gaggacataggtgcagttgcccc

SEQ ID NO: 58063 - RNA, 23 nt, synthetic construct
  source 1..23: mol_type = other RNA
ctctctcatgaggacataggtgc

SEQ ID NO: 58064 - RNA, 23 nt, synthetic construct
  source 1..23: mol_type = other RNA
aggctgtagggcagccgggcctg

SEQ ID NO: 58065 - RNA, 23 nt, synthetic construct
  source 1..23: mol_type = other RNA
gaggctgtagggcagccgggcct

SEQ ID NO: 58066 - RNA, 23 nt, synthetic construct
  source 1..23: mol_type = other RNA
ggccctcggtgttgttgtggaag

SEQ ID NO: 58067 - RNA, 23 nt, synthetic construct
  source 1..23: mol_type = other RNA
ggttgttggtgcaggtgccgcac

SEQ ID NO: 58068 - RNA, 23 nt, synthetic construct
  source 1..23: mol_type = other RNA
ccctctggttgttggtgcaggtg

SEQ ID NO: 58069 - RNA, 23 nt, synthetic construct
  source 1..23: mol_type = other RNA
agtcactgcacactccccgggcg

SEQ ID NO: 58070 - RNA, 23 nt, synthetic construct
  source 1..23: mol_type = other RNA
acacacgcaggactggcagttgc

SEQ ID NO: 58071 - RNA, 23 nt, synthetic construct
  source 1..23: mol_type = other RNA
agcagccggttttcctgaggctc

SEQ ID NO: 58072 - RNA, 23 nt, synthetic construct
  source 1..23: mol_type = other RNA
caggtgcactggtgctgcatggc

SEQ ID NO: 58073 - RNA, 23 nt, synthetic construct
  source 1..23: mol_type = other RNA
agggcaccgtctcctcgtggacc

SEQ ID NO: 58074 - RNA, 23 nt, synthetic construct
  source 1..23: mol_type = other RNA
gcacataggaggacagcgcggcg

SEQ ID NO: 58075 - RNA, 23 nt, synthetic construct
  source 1..23: mol_type = other RNA
cgccgtccaggctgagcgtcacc

SEQ ID NO: 58076 - RNA, 23 nt, synthetic construct
  source 1..23: mol_type = other RNA
tctctcatgaggacataggtgca

SEQ ID NO: 58077 - RNA, 23 nt, synthetic construct
  source 1..23: mol_type = other RNA
aggtgccgcactggccctcggtg

SEQ ID NO: 58078 - RNA, 23 nt, synthetic construct
  source 1..23: mol_type = other RNA
aagttcccgcacaggccgcagac

SEQ ID NO: 58079 - RNA, 23 nt, synthetic construct
  source 1..23: mol_type = other RNA
caggtgccgcactggccctcggt

SEQ ID NO: 58080 - RNA, 23 nt, synthetic construct
  source 1..23: mol_type = other RNA
cgtgcagaaacactcgcagtcgc

SEQ ID NO: 58081 - RNA, 23 nt, synthetic construct
  source 1..23: mol_type = other RNA
gcaggtgccgcactggccctcgg

SEQ ID NO: 58082 - RNA, 23 nt, synthetic construct
  source 1..23: mol_type = other RNA
tcgtcgaagttcccgcacaggcc

SEQ ID NO: 58083 - RNA, 23 nt, synthetic construct
  source 1..23: mol_type = other RNA
cgaagttcccgcacaggccgcag

SEQ ID NO: 58084 - RNA, 23 nt, synthetic construct
  source 1..23: mol_type = other RNA
cccacacaggccgcacatctggc

SEQ ID NO: 58085 - RNA, 23 nt, synthetic construct
  source 1..23: mol_type = other RNA
tcgaagttcccgcacaggccgca

SEQ ID NO: 58086 - RNA, 23 nt, synthetic construct
  source 1..23: mol_type = other RNA
gtcgaagttcccgcacaggccgc

SEQ ID NO: 58087 - RNA, 23 nt, synthetic construct
  source 1..23: mol_type = other RNA
acagccgtgcagaaacactcgca

SEQ ID NO: 58088 - RNA, 23 nt, synthetic construct
  source 1..23: mol_type = other RNA
gccacagccgtgcagaaacactc

SEQ ID NO: 58089 - RNA, 23 nt, synthetic construct
  source 1..23: mol_type = other RNA
ggcgtaggcagccacagccgtgc

SEQ ID NO: 58090 - RNA, 23 nt, synthetic construct
  source 1..23: mol_type = other RNA
aggacacacacaggcccgcgtcg

SEQ ID NO: 58091 - RNA, 23 nt, synthetic construct
  source 1..23: mol_type = other RNA
tgccccgcagggctggtagtgcc

SEQ ID NO: 58092 - RNA, 23 nt, synthetic construct
  source 1..23: mol_type = other RNA
tgcaggtgccgcactggccctcg

SEQ ID NO: 58093 - RNA, 23 nt, synthetic construct
  source 1..23: mol_type = other RNA
gtgcaggtgccgcactggccctc

SEQ ID NO: 58094 - RNA, 23 nt, synthetic construct
  source 1..23: mol_type = other RNA
tgttggtgcaggtgccgcactgg

SEQ ID NO: 58095 - RNA, 23 nt, synthetic construct
  source 1..23: mol_type = other RNA
tgcacctcgccagtcactgcaca

SEQ ID NO: 58096 - RNA, 23 nt, synthetic construct
  source 1..23: mol_type = other RNA
ttgcacctcgccagtcactgcac

SEQ ID NO: 58097 - RNA, 23 nt, synthetic construct
  source 1..23: mol_type = other RNA
accggaatttggtcaaacaggat

SEQ ID NO: 58098 - RNA, 23 nt, synthetic construct
  source 1..23: mol_type = other RNA
cactggggctcacagcccgtggt

SEQ ID NO: 58099 - RNA, 23 nt, synthetic construct
  source 1..23: mol_type = other RNA
cactggggctcacagcccgtggt

SEQ ID NO: 58100 - RNA, 23 nt, synthetic construct
  source 1..23: mol_type = other RNA
tcttttcggttgctgtggtctgg

SEQ ID NO: 58101 - RNA, 23 nt, synthetic construct
  source 1..23: mol_type = other RNA
gtatctgggggatgtcagtcctt

SEQ ID NO: 58102 - RNA, 23 nt, synthetic construct
  source 1..23: mol_type = other RNA
tccaggacatgccacagccttcc

SEQ ID NO: 58103 - RNA, 23 nt, synthetic construct
  source 1..23: mol_type = other RNA
actctatgtccttaggctgctgg

SEQ ID NO: 58104 - RNA, 23 nt, synthetic construct
  source 1..23: mol_type = other RNA
ctccgtgggcccatccaacttct

SEQ ID NO: 58105 - RNA, 23 nt, synthetic construct
  source 1..23: mol_type = other RNA
cctgacaaacacctgcatgagtg

SEQ ID NO: 58106 - RNA, 23 nt, synthetic construct
  source 1..23: mol_type = other RNA
ggtggagtcaacctgggagcggc

SEQ ID NO: 58107 - RNA, 23 nt, synthetic construct
  source 1..23: mol_type = other RNA
ggtcttttcggttgctgtggtct

SEQ ID NO: 58108 - RNA, 23 nt, synthetic construct
  source 1..23: mol_type = other RNA
tcaaaccactctgtccactgaca

SEQ ID NO: 58109 - RNA, 23 nt, synthetic construct
  source 1..23: mol_type = other RNA
aggcacactggggctcacagccc

SEQ ID NO: 58110 - RNA, 23 nt, synthetic construct
  source 1..23: mol_type = other RNA
aggcacactggggctcacagccc

SEQ ID NO: 58111 - RNA, 23 nt, synthetic construct
  source 1..23: mol_type = other RNA
aggcacactggggctcacagccc

SEQ ID NO: 58112 - RNA, 23 nt, synthetic construct
  source 1..23: mol_type = other RNA
aggcacactggggctcacagccc

SEQ ID NO: 58113 - RNA, 23 nt, synthetic construct
  source 1..23: mol_type = other RNA
tgacaccggggctggcaggtggt

SEQ ID NO: 58114 - RNA, 23 nt, synthetic construct
  source 1..23: mol_type = other RNA
ggtcctcattgaagaagggctgg

SEQ ID NO: 58115 - RNA, 23 nt, synthetic construct
  source 1..23: mol_type = other RNA
ttggtgcagacgccgtccctcca

SEQ ID NO: 58116 - RNA, 23 nt, synthetic construct
  source 1..23: mol_type = other RNA
acgacctggcccaactcccgcag

SEQ ID NO: 58117 - RNA, 23 nt, synthetic construct
  source 1..23: mol_type = other RNA
acgacctggcccaactcccgcag

SEQ ID NO: 58118 - RNA, 23 nt, synthetic construct
  source 1..23: mol_type = other RNA
acgacctggcccaactcccgcag

SEQ ID NO: 58119 - RNA, 23 nt, synthetic construct
  source 1..23: mol_type = other RNA
cttggtgcagacgccgtccctcc

SEQ ID NO: 58120 - RNA, 23 nt, synthetic construct
  source 1..23: mol_type = other RNA
tcctgtcctcataggtgcaggtg

SEQ ID NO: 58121 - RNA, 23 nt, synthetic construct
  source 1..23: mol_type = other RNA
ggtcagcactgtgggggtgtggg

SEQ ID NO: 58122 - RNA, 23 nt, synthetic construct
  source 1..23: mol_type = other RNA
ggtcagcactgtgggggtgtggg

SEQ ID NO: 58123 - RNA, 23 nt, synthetic construct
  source 1..23: mol_type = other RNA
tgcaggggcactgcccgaggggc

SEQ ID NO: 58124 - RNA, 23 nt, synthetic construct
  source 1..23: mol_type = other RNA
ctccaagttgttcagacttgggg

SEQ ID NO: 58125 - RNA, 23 nt, synthetic construct
  source 1..23: mol_type = other RNA
gaagctctcggcctggcactcta

SEQ ID NO: 58126 - RNA, 23 nt, synthetic construct
  source 1..23: mol_type = other RNA
ggaagctctcggcctggcactct

SEQ ID NO: 58127 - RNA, 23 nt, synthetic construct
  source 1..23: mol_type = other RNA
catggggtagctgtagtccagcc

SEQ ID NO: 58128 - RNA, 23 nt, synthetic construct
  source 1..23: mol_type = other RNA
catggggtagctgtagtccagcc

SEQ ID NO: 58129 - RNA, 23 nt, synthetic construct
  source 1..23: mol_type = other RNA
catggggtagctgtagtccagcc

SEQ ID NO: 58130 - RNA, 23 nt, synthetic construct
  source 1..23: mol_type = other RNA
catggggtagctgtagtccagcc

SEQ ID NO: 58131 - RNA, 23 nt, synthetic construct
  source 1..23: mol_type = other RNA
gtagatggagttgaggaacacgc

SEQ ID NO: 58132 - RNA, 23 nt, synthetic construct
  source 1..23: mol_type = other RNA
agaagctcgagggtgtgaacagg

SEQ ID NO: 58133 - RNA, 23 nt, synthetic construct
  source 1..23: mol_type = other RNA
cctggcactctatgtccttaggc

SEQ ID NO: 58134 - RNA, 23 nt, synthetic construct
  source 1..23: mol_type = other RNA
ggcacactggggctcacagccca

SEQ ID NO: 58135 - RNA, 23 nt, synthetic construct
  source 1..23: mol_type = other RNA
ggcacactggggctcacagccca

SEQ ID NO: 58136 - RNA, 23 nt, synthetic construct
  source 1..23: mol_type = other RNA
ggcacactggggctcacagcccg

SEQ ID NO: 58137 - RNA, 23 nt, synthetic construct
  source 1..23: mol_type = other RNA
ggcacactggggctcacagcccg

SEQ ID NO: 58138 - RNA, 23 nt, synthetic construct
  source 1..23: mol_type = other RNA
ctgtcctctccgttccacaggaa

SEQ ID NO: 58139 - RNA, 23 nt, synthetic construct
  source 1..23: mol_type = other RNA
cggctgtaaggcagctcctcccg

SEQ ID NO: 58140 - RNA, 23 nt, synthetic construct
  source 1..23: mol_type = other RNA
cagccccgggggacagacacagc

SEQ ID NO: 58141 - RNA, 23 nt, synthetic construct
  source 1..23: mol_type = other RNA
ccggagtccgccaggacacacac

SEQ ID NO: 58142 - RNA, 23 nt, synthetic construct
  source 1..23: mol_type = other RNA
gtggaagggcttggggttgatga

SEQ ID NO: 58143 - RNA, 23 nt, synthetic construct
  source 1..23: mol_type = other RNA
cagccacagccgtgcagaaacac

SEQ ID NO: 58144 - RNA, 23 nt, synthetic construct
  source 1..23: mol_type = other RNA
ccaggcaggtccaccaggcagtg

SEQ ID NO: 58145 - RNA, 23 nt, synthetic construct
  source 1..23: mol_type = other RNA
ccaggtctcattcacctgccgga

SEQ ID NO: 58146 - RNA, 23 nt, synthetic construct
  source 1..23: mol_type = other RNA
ggcccggggcctggtcacggtta

SEQ ID NO: 58147 - RNA, 23 nt, synthetic construct
  source 1..23: mol_type = other RNA
tcctcctcacaggagtagcagca

SEQ ID NO: 58148 - RNA, 23 nt, synthetic construct
  source 1..23: mol_type = other RNA
gcagggcactgtcctctccgttc

SEQ ID NO: 58149 - RNA, 23 nt, synthetic construct
  source 1..23: mol_type = other RNA
gtgcctggggggcagaagcagcc

SEQ ID NO: 58150 - RNA, 23 nt, synthetic construct
  source 1..23: mol_type = other RNA
gggcactgcccgaggggcaggca

SEQ ID NO: 58151 - RNA, 23 nt, synthetic construct
  source 1..23: mol_type = other RNA
gagcaggtgccagggcacggcag

SEQ ID NO: 58152 - RNA, 23 nt, synthetic construct
  source 1..23: mol_type = other RNA
cacaggcgtgcacataggaggac

SEQ ID NO: 58153 - RNA, 23 nt, synthetic construct
  source 1..23: mol_type = other RNA
gcacaggcgtgcacataggagga

SEQ ID NO: 58154 - RNA, 23 nt, synthetic construct
  source 1..23: mol_type = other RNA
ggttgtagaagtcacagaacaag

SEQ ID NO: 58155 - RNA, 23 nt, synthetic construct
  source 1..23: mol_type = other RNA
ctggtagtgccactcacagcccc

SEQ ID NO: 58156 - RNA, 23 nt, synthetic construct
  source 1..23: mol_type = other RNA
gggaggggccacagggcacgtat

SEQ ID NO: 58157 - RNA, 23 nt, synthetic construct
  source 1..23: mol_type = other RNA
accaggcacactggggctcacag

SEQ ID NO: 58158 - RNA, 23 nt, synthetic construct
  source 1..23: mol_type = other RNA
actcccgcagggggacaccaggc

SEQ ID NO: 58159 - RNA, 23 nt, synthetic construct
  source 1..23: mol_type = other RNA
accaggcacactggggctcacag

SEQ ID NO: 58160 - RNA, 23 nt, synthetic construct
  source 1..23: mol_type = other RNA
actcccgcagggggacaccaggc

SEQ ID NO: 58161 - RNA, 23 nt, synthetic construct
  source 1..23: mol_type = other RNA
accaggcacactggggctcacag

SEQ ID NO: 58162 - RNA, 23 nt, synthetic construct
  source 1..23: mol_type = other RNA
actcccgcagggggacaccaggc

SEQ ID NO: 58163 - RNA, 23 nt, synthetic construct
  source 1..23: mol_type = other RNA
accaggcacactggggctcacag

SEQ ID NO: 58164 - RNA, 23 nt, synthetic construct
  source 1..23: mol_type = other RNA
ggcagaagcagccctccgccatc

SEQ ID NO: 58165 - RNA, 23 nt, synthetic construct
  source 1..23: mol_type = other RNA
caggagtagcagcagccggtttt

SEQ ID NO: 58166 - RNA, 23 nt, synthetic construct
  source 1..23: mol_type = other RNA
caccgtctcctcgtggacccgcc

SEQ ID NO: 58167 - RNA, 23 nt, synthetic construct
  source 1..23: mol_type = other RNA
gcaccgtctcctcgtggacccgc

SEQ ID NO: 58168 - RNA, 23 nt, synthetic construct
  source 1..23: mol_type = other RNA
gggatggctgtaaagctggtagc

SEQ ID NO: 58169 - RNA, 23 nt, synthetic construct
  source 1..23: mol_type = other RNA
gggatggctgtaaagctggtagc

SEQ ID NO: 58170 - RNA, 23 nt, synthetic construct
  source 1..23: mol_type = other RNA
gggatggctgtaaagctggtagc

SEQ ID NO: 58171 - RNA, 23 nt, synthetic construct
  source 1..23: mol_type = other RNA
tggggtgtgggaagtcaccgtgg

SEQ ID NO: 58172 - RNA, 23 nt, synthetic construct
  source 1..23: mol_type = other RNA
gcacatttcttggacagaacgta

SEQ ID NO: 58173 - RNA, 23 nt, synthetic construct
  source 1..23: mol_type = other RNA
caggggcagctgcgtgtagatgg

SEQ ID NO: 58174 - RNA, 23 nt, synthetic construct
  source 1..23: mol_type = other RNA
ttctgcatgtacttggtgcagac

SEQ ID NO: 58175 - RNA, 23 nt, synthetic construct
  source 1..23: mol_type = other RNA
ggcccaactcccgcagggggaca

SEQ ID NO: 58176 - RNA, 23 nt, synthetic construct
  source 1..23: mol_type = other RNA
ggcccaactcccgcagggggaca

SEQ ID NO: 58177 - RNA, 23 nt, synthetic construct
  source 1..23: mol_type = other RNA
ggcccaactcccgcagggggaca

SEQ ID NO: 58178 - RNA, 23 nt, synthetic construct
  source 1..23: mol_type = other RNA
ggtgcaggggcactgcccgaggg

SEQ ID NO: 58179 - RNA, 23 nt, synthetic construct
  source 1..23: mol_type = other RNA
gtgtagatggagttgaggaacac

SEQ ID NO: 58180 - RNA, 23 nt, synthetic construct
  source 1..23: mol_type = other RNA
cctgtcctcataggtgcaggtgc

SEQ ID NO: 58181 - RNA, 23 nt, synthetic construct
  source 1..23: mol_type = other RNA
ggctggggaagacagtgacgggt

SEQ ID NO: 58182 - RNA, 23 nt, synthetic construct
  source 1..23: mol_type = other RNA
tggagtcaacctgggagcggcag

SEQ ID NO: 58183 - RNA, 23 nt, synthetic construct
  source 1..23: mol_type = other RNA
gccacactgggccacgcacttca

SEQ ID NO: 58184 - RNA, 23 nt, synthetic construct
  source 1..23: mol_type = other RNA
cagggagtagagaagtgggagct

SEQ ID NO: 58185 - RNA, 23 nt, synthetic construct
  source 1..23: mol_type = other RNA
tggtgcagacgccgtccctccag

SEQ ID NO: 58186 - RNA, 23 nt, synthetic construct
  source 1..23: mol_type = other RNA
gtcagcactgtgggggtgtgggt

SEQ ID NO: 58187 - RNA, 23 nt, synthetic construct
  source 1..23: mol_type = other RNA
gtcagcactgtgggggtgtgggt

SEQ ID NO: 58188 - RNA, 23 nt, synthetic construct
  source 1..23: mol_type = other RNA
gcacctggccaccgtgcagttct

SEQ ID NO: 58189 - RNA, 23 nt, synthetic construct
  source 1..23: mol_type = other RNA
gcaccgttgggtcctgggtgtcc

SEQ ID NO: 58190 - RNA, 23 nt, synthetic construct
  source 1..23: mol_type = other RNA
gcgtgagtattccacaaaggtgg

SEQ ID NO: 58191 - RNA, 23 nt, synthetic construct
  source 1..23: mol_type = other RNA
gggggccgatgtggggctgctgg

SEQ ID NO: 58192 - RNA, 23 nt, synthetic construct
  source 1..23: mol_type = other RNA
gggggccgatgtggggctgctgg

SEQ ID NO: 58193 - RNA, 23 nt, synthetic construct
  source 1..23: mol_type = other RNA
gggggccgatgtggggctgctgg

SEQ ID NO: 58194 - RNA, 23 nt, synthetic construct
  source 1..23: mol_type = other RNA
gggccgggcttgtcgtggagtgg

SEQ ID NO: 58195 - RNA, 23 nt, synthetic construct
  source 1..23: mol_type = other RNA
gctctcggcctggcactctatgt

SEQ ID NO: 58196 - RNA, 23 nt, synthetic construct
  source 1..23: mol_type = other RNA
ccaggaagatccccatgtagcgt

SEQ ID NO: 58197 - RNA, 23 nt, synthetic construct
  source 1..23: mol_type = other RNA
ctctgtccactgacaccggggct

SEQ ID NO: 58198 - RNA, 23 nt, synthetic construct
  source 1..23: mol_type = other RNA
gcaggttcccaaactggagcggg

SEQ ID NO: 58199 - RNA, 23 nt, synthetic construct
  source 1..23: mol_type = other RNA
gcaggtgccagggcacggcaggt

SEQ ID NO: 58200 - RNA, 23 nt, synthetic construct
  source 1..23: mol_type = other RNA
acttggggcagttctgcatgtac

SEQ ID NO: 58201 - RNA, 23 nt, synthetic construct
  source 1..23: mol_type = other RNA
gagccggtggctgcactcccacc

SEQ ID NO: 58202 - RNA, 23 nt, synthetic construct
  source 1..23: mol_type = other RNA
tccctagggcagaggagggagtc

SEQ ID NO: 58203 - RNA, 23 nt, synthetic construct
  source 1..23: mol_type = other RNA
tccctagggcagaggagggagtc

SEQ ID NO: 58204 - RNA, 23 nt, synthetic construct
  source 1..23: mol_type = other RNA
tccctagggcagaggagggagtc

SEQ ID NO: 58205 - RNA, 23 nt, synthetic construct
  source 1..23: mol_type = other RNA
tccctagggcagaggagggagtc

SEQ ID NO: 58206 - RNA, 23 nt, synthetic construct
  source 1..23: mol_type = other RNA
gcagggagtagagaagtgggagc

SEQ ID NO: 58207 - RNA, 23 nt, synthetic construct
  source 1..23: mol_type = other RNA
gacaggagtcctcctcacaggag

SEQ ID NO: 58208 - RNA, 23 nt, synthetic construct
  source 1..23: mol_type = other RNA
gtgcaggggcactgcccgagggg

SEQ ID NO: 58209 - RNA, 23 nt, synthetic construct
  source 1..23: mol_type = other RNA
aggccacaggtctggttggcgta

SEQ ID NO: 58210 - RNA, 23 nt, synthetic construct
  source 1..23: mol_type = other RNA
ggccacccctgggacagtgggtt

SEQ ID NO: 58211 - RNA, 23 nt, synthetic construct
  source 1..23: mol_type = other RNA
ggcagttctgcatgtacttggtg

SEQ ID NO: 58212 - RNA, 23 nt, synthetic construct
  source 1..23: mol_type = other RNA
aaacagcccacgtccagcgtgtg

SEQ ID NO: 58213 - RNA, 23 nt, synthetic construct
  source 1..23: mol_type = other RNA
ggggtaggcacagcaggctccgt

SEQ ID NO: 58214 - RNA, 23 nt, synthetic construct
  source 1..23: mol_type = other RNA
agcactgtgggggtgtgggtggt

SEQ ID NO: 58215 - RNA, 23 nt, synthetic construct
  source 1..23: mol_type = other RNA
agcactgtgggggtgtgggtggt

SEQ ID NO: 58216 - RNA, 23 nt, synthetic construct
  source 1..23: mol_type = other RNA
attccacgacctggcccaactcc

SEQ ID NO: 58217 - RNA, 23 nt, synthetic construct
  source 1..23: mol_type = other RNA
attccacgacctggcccaactcc

SEQ ID NO: 58218 - RNA, 23 nt, synthetic construct
  source 1..23: mol_type = other RNA
attccacgacctggcccaactcc

SEQ ID NO: 58219 - RNA, 23 nt, synthetic construct
  source 1..23: mol_type = other RNA
attccacgacctggcccaactcc

SEQ ID NO: 58220 - RNA, 23 nt, synthetic construct
  source 1..23: mol_type = other RNA
ctgcagatgcactcgcactcata

SEQ ID NO: 58221 - RNA, 23 nt, synthetic construct
  source 1..23: mol_type = other RNA
acacaggcgcccgcgtcattgag

SEQ ID NO: 58222 - RNA, 23 nt, synthetic construct
  source 1..23: mol_type = other RNA
tggccccccgcgtgggcgcactg

SEQ ID NO: 58223 - RNA, 23 nt, synthetic construct
  source 1..23: mol_type = other RNA
gcagttcgagtggaagggcttgg

SEQ ID NO: 58224 - RNA, 23 nt, synthetic construct
  source 1..23: mol_type = other RNA
gcaggtgcagccgtccacaggca

SEQ ID NO: 58225 - RNA, 23 nt, synthetic construct
  source 1..23: mol_type = other RNA
cgtcaaaggtggaatagtgggag

SEQ ID NO: 58226 - RNA, 23 nt, synthetic construct
  source 1..23: mol_type = other RNA
gggttcagggggctcaggctggg

SEQ ID NO: 58227 - RNA, 23 nt, synthetic construct
  source 1..23: mol_type = other RNA
ggcaggtgcagccgtccacaggc

SEQ ID NO: 58228 - RNA, 23 nt, synthetic construct
  source 1..23: mol_type = other RNA
cggtggtcccacaggggatgttc

SEQ ID NO: 58229 - RNA, 23 nt, synthetic construct
  source 1..23: mol_type = other RNA
ctcatgaggacataggtgcagtt

SEQ ID NO: 58230 - RNA, 23 nt, synthetic construct
  source 1..23: mol_type = other RNA
tcttgctgaaaccgctgctcacc

SEQ ID NO: 58231 - RNA, 23 nt, synthetic construct
  source 1..23: mol_type = other RNA
gaagaggctgtagggcagccggg

SEQ ID NO: 58232 - RNA, 23 nt, synthetic construct
  source 1..23: mol_type = other RNA
tcatgaggacataggtgcagttg

SEQ ID NO: 58233 - RNA, 23 nt, synthetic construct
  source 1..23: mol_type = other RNA
ggggcagaagcagccgtccacac

SEQ ID NO: 58234 - RNA, 23 nt, synthetic construct
  source 1..23: mol_type = other RNA
cactgcccgaggggcaggcagcc

SEQ ID NO: 58235 - RNA, 23 nt, synthetic construct
  source 1..23: mol_type = other RNA
cgcacatctggccctggtgggcg

SEQ ID NO: 58236 - RNA, 23 nt, synthetic construct
  source 1..23: mol_type = other RNA
gaaacagcccacgtccagcgtgt

SEQ ID NO: 58237 - RNA, 23 nt, synthetic construct
  source 1..23: mol_type = other RNA
caaaggtgatgaagtggccatcc

SEQ ID NO: 58238 - RNA, 23 nt, synthetic construct
  source 1..23: mol_type = other RNA
agcaggtggtgccggtggtccca

SEQ ID NO: 58239 - RNA, 23 nt, synthetic construct
  source 1..23: mol_type = other RNA
ccttccaggccaggcaggtccac

SEQ ID NO: 58240 - RNA, 23 nt, synthetic construct
  source 1..23: mol_type = other RNA
ggcctcaaggctgtgagcgcact

SEQ ID NO: 58241 - RNA, 23 nt, synthetic construct
  source 1..23: mol_type = other RNA
aggtgcaggcctcaaggctgtga

SEQ ID NO: 58242 - RNA, 23 nt, synthetic construct
  source 1..23: mol_type = other RNA
ccagctggaccagcggcagacct

SEQ ID NO: 58243 - RNA, 23 nt, synthetic construct
  source 1..23: mol_type = other RNA
ggcacagcaggctccgtgctggc

SEQ ID NO: 58244 - RNA, 23 nt, synthetic construct
  source 1..23: mol_type = other RNA
agctctcggcctggcactctatg

SEQ ID NO: 58245 - RNA, 23 nt, synthetic construct
  source 1..23: mol_type = other RNA
gctgctgggcagcagggtcgagg

SEQ ID NO: 58246 - RNA, 23 nt, synthetic construct
  source 1..23: mol_type = other RNA
gaccaggcacactggggctcaca

SEQ ID NO: 58247 - RNA, 23 nt, synthetic construct
  source 1..23: mol_type = other RNA
cccggagtggaggagggcatggc

SEQ ID NO: 58248 - RNA, 23 nt, synthetic construct
  source 1..23: mol_type = other RNA
gctgctgggcagcagggtcgagg

SEQ ID NO: 58249 - RNA, 23 nt, synthetic construct
  source 1..23: mol_type = other RNA
gaccaggcacactggggctcaca

SEQ ID NO: 58250 - RNA, 23 nt, synthetic construct
  source 1..23: mol_type = other RNA
gctgctgggcagcagggtcgagg

SEQ ID NO: 58251 - RNA, 23 nt, synthetic construct
  source 1..23: mol_type = other RNA
gaccaggcacactggggctcaca

SEQ ID NO: 58252 - RNA, 23 nt, synthetic construct
  source 1..23: mol_type = other RNA
gctgctgggcagcagggtcgagg

SEQ ID NO: 58253 - RNA, 23 nt, synthetic construct
  source 1..23: mol_type = other RNA
gaccaggcacactggggctcaca

SEQ ID NO: 58254 - RNA, 23 nt, synthetic construct
  source 1..23: mol_type = other RNA
cccggagtggaggagggcatggc

SEQ ID NO: 58255 - RNA, 23 nt, synthetic construct
  source 1..23: mol_type = other RNA
tccaaatgccctgcagaagcagg

SEQ ID NO: 58256 - RNA, 23 nt, synthetic construct
  source 1..23: mol_type = other RNA
ccagtcactgcacactccccggg

SEQ ID NO: 58257 - RNA, 23 nt, synthetic construct
  source 1..23: mol_type = other RNA
caggatgcaggctgtggggtcag

SEQ ID NO: 58258 - RNA, 23 nt, synthetic construct
  source 1..23: mol_type = other RNA
cgcacaggccgcagaccctgccc

SEQ ID NO: 58259 - RNA, 23 nt, synthetic construct
  source 1..23: mol_type = other RNA
gaagttcccgcacaggccgcaga

SEQ ID NO: 58260 - RNA, 23 nt, synthetic construct
  source 1..23: mol_type = other RNA
cccaactcccgcagggggacacc

SEQ ID NO: 58261 - RNA, 23 nt, synthetic construct
  source 1..23: mol_type = other RNA
gcccaactcccgcagggggacac

SEQ ID NO: 58262 - RNA, 23 nt, synthetic construct
  source 1..23: mol_type = other RNA
cccaactcccgcagggggacacc

SEQ ID NO: 58263 - RNA, 23 nt, synthetic construct
  source 1..23: mol_type = other RNA
gcccaactcccgcagggggacac

SEQ ID NO: 58264 - RNA, 23 nt, synthetic construct
  source 1..23: mol_type = other RNA
cccaactcccgcagggggacacc

SEQ ID NO: 58265 - RNA, 23 nt, synthetic construct
  source 1..23: mol_type = other RNA
gcccaactcccgcagggggacac

SEQ ID NO: 58266 - RNA, 23 nt, synthetic construct
  source 1..23: mol_type = other RNA
tggtgcaggtgccgcactggccc

SEQ ID NO: 58267 - RNA, 23 nt, synthetic construct
  source 1..23: mol_type = other RNA
tcccacacaggccgcacatctgg

SEQ ID NO: 58268 - RNA, 23 nt, synthetic construct
  source 1..23: mol_type = other RNA
gttggtgcaggtgccgcactggc

SEQ ID NO: 58269 - RNA, 23 nt, synthetic construct
  source 1..23: mol_type = other RNA
gcttttctgcagagaggctccca

SEQ ID NO: 58270 - RNA, 23 nt, synthetic construct
  source 1..23: mol_type = other RNA
gacctggctcagcatcagatcac

SEQ ID NO: 58271 - RNA, 23 nt, synthetic construct
  source 1..23: mol_type = other RNA
gttgaagcacatcttgaacttcc

SEQ ID NO: 58272 - RNA, 23 nt, synthetic construct
  source 1..23: mol_type = other RNA
gttgaagcacatcttgaacttcc

SEQ ID NO: 58273 - RNA, 23 nt, synthetic construct
  source 1..23: mol_type = other RNA
gttgaagcacatcttgaacttcc

SEQ ID NO: 58274 - RNA, 23 nt, synthetic construct
  source 1..23: mol_type = other RNA
gttgaagcacatcttgaacttcc

SEQ ID NO: 58275 - RNA, 23 nt, synthetic construct
  source 1..23: mol_type = other RNA
ggaccggctacgcgtggcaaagt

SEQ ID NO: 58276 - RNA, 23 nt, synthetic construct
  source 1..23: mol_type = other RNA
ttcacgcaggtgacgttggccac

SEQ ID NO: 58277 - RNA, 23 nt, synthetic construct
  source 1..23: mol_type = other RNA
ttgttcacgcaggtgacgttggc

SEQ ID NO: 58278 - RNA, 23 nt, synthetic construct
  source 1..23: mol_type = other RNA
cccccaccacggaccggctacgc

SEQ ID NO: 58279 - RNA, 23 nt, synthetic construct
  source 1..23: mol_type = other RNA
cagaacacacggatttcatagtt

SEQ ID NO: 58280 - RNA, 23 nt, synthetic construct
  source 1..23: mol_type = other RNA
cagaacacacggatttcatagtt

SEQ ID NO: 58281 - RNA, 23 nt, synthetic construct
  source 1..23: mol_type = other RNA
cagaacacacggatttcatagtt

SEQ ID NO: 58282 - RNA, 23 nt, synthetic construct
  source 1..23: mol_type = other RNA
cagaacacacggatttcatagtt

SEQ ID NO: 58283 - RNA, 23 nt, synthetic construct
  source 1..23: mol_type = other RNA
aacacacggatttcatagttgaa

SEQ ID NO: 58284 - RNA, 23 nt, synthetic construct
  source 1..23: mol_type = other RNA
aacacacggatttcatagttgaa

SEQ ID NO: 58285 - RNA, 23 nt, synthetic construct
  source 1..23: mol_type = other RNA
aacacacggatttcatagttgaa

SEQ ID NO: 58286 - RNA, 23 nt, synthetic construct
  source 1..23: mol_type = other RNA
aacacacggatttcatagttgaa

SEQ ID NO: 58287 - RNA, 23 nt, synthetic construct
  source 1..23: mol_type = other RNA
cgggtccgacactttgatgggca

SEQ ID NO: 58288 - RNA, 23 nt, synthetic construct
  source 1..23: mol_type = other RNA
ggcaggctgtatggggccgcatg

SEQ ID NO: 58289 - RNA, 23 nt, synthetic construct
  source 1..23: mol_type = other RNA
tcacgcaggtgacgttggccaca

SEQ ID NO: 58290 - RNA, 23 nt, synthetic construct
  source 1..23: mol_type = other RNA
gtacactttggtgggtgggcagg

SEQ ID NO: 58291 - RNA, 23 nt, synthetic construct
  source 1..23: mol_type = other RNA
tgcacactccccgggcgcggcag

SEQ ID NO: 58292 - RNA, 23 nt, synthetic construct
  source 1..23: mol_type = other RNA
agggacacagaagggcgtgcagc

SEQ ID NO: 58293 - RNA, 23 nt, synthetic construct
  source 1..23: mol_type = other RNA
tcccccaccacggaccggctacg

SEQ ID NO: 58294 - RNA, 23 nt, synthetic construct
  source 1..23: mol_type = other RNA
gtcccccaccacggaccggctac

SEQ ID NO: 58295 - RNA, 23 nt, synthetic construct
  source 1..23: mol_type = other RNA
aaggtgggccacaggctctccca

SEQ ID NO: 58296 - RNA, 23 nt, synthetic construct
  source 1..23: mol_type = other RNA
gcagaacacacggatttcatagt

SEQ ID NO: 58297 - RNA, 23 nt, synthetic construct
  source 1..23: mol_type = other RNA
gcagaacacacggatttcatagt

SEQ ID NO: 58298 - RNA, 23 nt, synthetic construct
  source 1..23: mol_type = other RNA
gcagaacacacggatttcatagt

SEQ ID NO: 58299 - RNA, 23 nt, synthetic construct
  source 1..23: mol_type = other RNA
gcagaacacacggatttcatagt

SEQ ID NO: 58300 - RNA, 23 nt, synthetic construct
  source 1..23: mol_type = other RNA
actgcacactccccgggcgcggc

SEQ ID NO: 58301 - RNA, 23 nt, synthetic construct
  source 1..23: mol_type = other RNA
gcttgtacactttggtgggtggg

SEQ ID NO: 58302 - RNA, 23 nt, synthetic construct
  source 1..23: mol_type = other RNA
gttgtgggcatagaactcgttga

SEQ ID NO: 58303 - RNA, 23 nt, synthetic construct
  source 1..23: mol_type = other RNA
cggttgtcacccacgcacctggc

SEQ ID NO: 58304 - RNA, 23 nt, synthetic construct
  source 1..23: mol_type = other RNA
cgccagagccaacaccagcgtcc

SEQ ID NO: 58305 - RNA, 23 nt, synthetic construct
  source 1..23: mol_type = other RNA
cacgcaggtgacgttggccacag

SEQ ID NO: 58306 - RNA, 23 nt, synthetic construct
  source 1..23: mol_type = other RNA
tccagcgtgtggcagctccggag

SEQ ID NO: 58307 - RNA, 23 nt, synthetic construct
  source 1..23: mol_type = other RNA
tgcggtcacagtccacctgctgg

SEQ ID NO: 58308 - RNA, 23 nt, synthetic construct
  source 1..23: mol_type = other RNA
ccgtcccgctggagacagtcgtc

SEQ ID NO: 58309 - RNA, 23 nt, synthetic construct
  source 1..23: mol_type = other RNA
caggggcttgcactgcaccgaca

SEQ ID NO: 58310 - RNA, 23 nt, synthetic construct
  source 1..23: mol_type = other RNA
atgggcgcagggacacagaaggg

SEQ ID NO: 58311 - RNA, 23 nt, synthetic construct
  source 1..23: mol_type = other RNA
agtcgtccctctggttgttggtg

SEQ ID NO: 58312 - RNA, 23 nt, synthetic construct
  source 1..23: mol_type = other RNA
ggcagctccggaggcactcggcc

SEQ ID NO: 58313 - RNA, 23 nt, synthetic construct
  source 1..23: mol_type = other RNA
gacacagtggacacgctgaaggt

SEQ ID NO: 58314 - RNA, 23 nt, synthetic construct
  source 1..23: mol_type = other RNA
ccacggaccggctacgcgtggca

SEQ ID NO: 58315 - RNA, 23 nt, synthetic construct
  source 1..23: mol_type = other RNA
gcgtcccccaccacggaccggct

SEQ ID NO: 58316 - RNA, 23 nt, synthetic construct
  source 1..23: mol_type = other RNA
tggcagctccggaggcactcggc

SEQ ID NO: 58317 - RNA, 23 nt, synthetic construct
  source 1..23: mol_type = other RNA
gccagagccaacaccagcgtccg

SEQ ID NO: 58318 - RNA, 23 nt, synthetic construct
  source 1..23: mol_type = other RNA
cgcacggatgttggagtaggtgt

SEQ ID NO: 58319 - RNA, 23 nt, synthetic construct
  source 1..23: mol_type = other RNA
cgcacggatgttggagtaggtgt

SEQ ID NO: 58320 - RNA, 23 nt, synthetic construct
  source 1..23: mol_type = other RNA
cgcacggatgttggagtaggtgt

SEQ ID NO: 58321 - RNA, 23 nt, synthetic construct
  source 1..23: mol_type = other RNA
cgcacggatgttggagtaggtgt

SEQ ID NO: 58322 - RNA, 23 nt, synthetic construct
  source 1..23: mol_type = other RNA
gggtccgacactttgatgggcag

SEQ ID NO: 58323 - RNA, 23 nt, synthetic construct
  source 1..23: mol_type = other RNA
ggagacagtcgtccctctggttg

SEQ ID NO: 58324 - RNA, 23 nt, synthetic construct
  source 1..23: mol_type = other RNA
cactgcacactccccgggcgcgg

SEQ ID NO: 58325 - RNA, 23 nt, synthetic construct
  source 1..23: mol_type = other RNA
cttgtacactttggtgggtgggc

SEQ ID NO: 58326 - RNA, 23 nt, synthetic construct
  source 1..23: mol_type = other RNA
cctgctggcccctcacccttctg

SEQ ID NO: 58327 - RNA, 23 nt, synthetic construct
  source 1..23: mol_type = other RNA
ctgggctgggttgagcagagggg

SEQ ID NO: 58328 - RNA, 23 nt, synthetic construct
  source 1..23: mol_type = other RNA
tgtacactttggtgggtgggcag

SEQ ID NO: 58329 - RNA, 23 nt, synthetic construct
  source 1..23: mol_type = other RNA
gcagctccggaggcactcggccc

SEQ ID NO: 58330 - RNA, 23 nt, synthetic construct
  source 1..23: mol_type = other RNA
cgtcccgctggagacagtcgtcc

SEQ ID NO: 58331 - RNA, 23 nt, synthetic construct
  source 1..23: mol_type = other RNA
tccagggcgtcccagtgacatca

SEQ ID NO: 58332 - RNA, 23 nt, synthetic construct
  source 1..23: mol_type = other RNA
cgtcccccaccacggaccggcta

SEQ ID NO: 58333 - RNA, 23 nt, synthetic construct
  source 1..23: mol_type = other RNA
ccagggcgtcccagtgacatcag

SEQ ID NO: 58334 - RNA, 23 nt, synthetic construct
  source 1..23: mol_type = other RNA
gaacacacggatttcatagttga

SEQ ID NO: 58335 - RNA, 23 nt, synthetic construct
  source 1..23: mol_type = other RNA
gaacacacggatttcatagttga

SEQ ID NO: 58336 - RNA, 23 nt, synthetic construct
  source 1..23: mol_type = other RNA
gaacacacggatttcatagttga

SEQ ID NO: 58337 - RNA, 23 nt, synthetic construct
  source 1..23: mol_type = other RNA
gaacacacggatttcatagttga

SEQ ID NO: 58338 - RNA, 23 nt, synthetic construct
  source 1..23: mol_type = other RNA
cagggacacagaagggcgtgcag

SEQ ID NO: 58339 - RNA, 23 nt, synthetic construct
  source 1..23: mol_type = other RNA
gccttgcctggaccagcctgtct

SEQ ID NO: 58340 - RNA, 23 nt, synthetic construct
  source 1..23: mol_type = other RNA
gcaggggcttgcactgcaccgac

SEQ ID NO: 58341 - RNA, 23 nt, synthetic construct
  source 1..23: mol_type = other RNA
tgtggcagctccggaggcactcg

SEQ ID NO: 58342 - RNA, 23 nt, synthetic construct
  source 1..23: mol_type = other RNA
gaggatccaggtggtccctgggg

SEQ ID NO: 58343 - RNA, 23 nt, synthetic construct
  source 1..23: mol_type = other RNA
tgaggatccaggtggtccctggg

SEQ ID NO: 58344 - RNA, 23 nt, synthetic construct
  source 1..23: mol_type = other RNA
gaggatccaggtggtccctgggg

SEQ ID NO: 58345 - RNA, 23 nt, synthetic construct
  source 1..23: mol_type = other RNA
tgaggatccaggtggtccctggg

SEQ ID NO: 58346 - RNA, 23 nt, synthetic construct
  source 1..23: mol_type = other RNA
gaggatccaggtggtccctgggg

SEQ ID NO: 58347 - RNA, 23 nt, synthetic construct
  source 1..23: mol_type = other RNA
tgaggatccaggtggtccctggg

SEQ ID NO: 58348 - RNA, 23 nt, synthetic construct
  source 1..23: mol_type = other RNA
gaggatccaggtggtccctgggg

SEQ ID NO: 58349 - RNA, 23 nt, synthetic construct
  source 1..23: mol_type = other RNA
tgaggatccaggtggtccctggg

SEQ ID NO: 58350 - RNA, 23 nt, synthetic construct
  source 1..23: mol_type = other RNA
gaggatccaggtggtccctgggg

SEQ ID NO: 58351 - RNA, 23 nt, synthetic construct
  source 1..23: mol_type = other RNA
tgaggatccaggtggtccctggg

SEQ ID NO: 58352 - RNA, 23 nt, synthetic construct
  source 1..23: mol_type = other RNA
gaggatccaggtggtccctgggg

SEQ ID NO: 58353 - RNA, 23 nt, synthetic construct
  source 1..23: mol_type = other RNA
tgaggatccaggtggtccctggg

SEQ ID NO: 58354 - RNA, 23 nt, synthetic construct
  source 1..23: mol_type = other RNA
ggcaggggcttgcactgcaccga

SEQ ID NO: 58355 - RNA, 23 nt, synthetic construct
  source 1..23: mol_type = other RNA
tgggcgcagggacacagaagggc

SEQ ID NO: 58356 - RNA, 23 nt, synthetic construct
  source 1..23: mol_type = other RNA
gtggcagctccggaggcactcgg

SEQ ID NO: 58357 - RNA, 23 nt, synthetic construct
  source 1..23: mol_type = other RNA
gtccagcgtgtggcagctccgga

SEQ ID NO: 58358 - RNA, 23 nt, synthetic construct
  source 1..23: mol_type = other RNA
agggcaggggcttgcactgcacc

SEQ ID NO: 58359 - RNA, 23 nt, synthetic construct
  source 1..23: mol_type = other RNA
ggccaaggtgggccacaggctct

SEQ ID NO: 58360 - RNA, 23 nt, synthetic construct
  source 1..23: mol_type = other RNA
gggcaaggccaaggtgggccaca

SEQ ID NO: 58361 - RNA, 23 nt, synthetic construct
  source 1..23: mol_type = other RNA
aatttggtcaaacaggatcaggc

SEQ ID NO: 58362 - RNA, 23 nt, synthetic construct
  source 1..23: mol_type = other RNA
tgggccacaggctctcccagggt

SEQ ID NO: 58363 - RNA, 23 nt, synthetic construct
  source 1..23: mol_type = other RNA
ccttgatgacaacacgggtgacc

SEQ ID NO: 58364 - RNA, 23 nt, synthetic construct
  source 1..23: mol_type = other RNA
tggggcagtggccgtagttgcag

SEQ ID NO: 58365 - RNA, 23 nt, synthetic construct
  source 1..23: mol_type = other RNA
tggggcagtggccgtagttgcag

SEQ ID NO: 58366 - RNA, 23 nt, synthetic construct
  source 1..23: mol_type = other RNA
tggggcagtggccgtagttgcag

SEQ ID NO: 58367 - RNA, 23 nt, synthetic construct
  source 1..23: mol_type = other RNA
tggggcagtggccgtagttgcag

SEQ ID NO: 58368 - RNA, 23 nt, synthetic construct
  source 1..23: mol_type = other RNA
gccccagttgtggtggccgtggc

SEQ ID NO: 58369 - RNA, 23 nt, synthetic construct
  source 1..23: mol_type = other RNA
gtacacggtgcagttgtccacat

SEQ ID NO: 58370 - RNA, 23 nt, synthetic construct
  source 1..23: mol_type = other RNA
caggtccgggggcagagctcagg

SEQ ID NO: 58371 - RNA, 23 nt, synthetic construct
  source 1..23: mol_type = other RNA
gaaacgctgcaggtgacgtcggc

SEQ ID NO: 58372 - RNA, 23 nt, synthetic construct
  source 1..23: mol_type = other RNA
ttttctgcagagaggctcccagg

SEQ ID NO: 58373 - RNA, 23 nt, synthetic construct
  source 1..23: mol_type = other RNA
ccccagttgtggtggccgtggcg

SEQ ID NO: 58374 - RNA, 23 nt, synthetic construct
  source 1..23: mol_type = other RNA
ttgtggtagtcagcactttggta

SEQ ID NO: 58375 - RNA, 23 nt, synthetic construct
  source 1..23: mol_type = other RNA
ggtggacgagctgggaaccgtgg

SEQ ID NO: 58376 - RNA, 23 nt, synthetic construct
  source 1..23: mol_type = other RNA
aggaaacgctgcaggtgacgtcg

SEQ ID NO: 58377 - RNA, 23 nt, synthetic construct
  source 1..23: mol_type = other RNA
cccaaactccagtgcgtccccca

SEQ ID NO: 58378 - RNA, 23 nt, synthetic construct
  source 1..23: mol_type = other RNA
ttgatgacaacacgggtgaccac

SEQ ID NO: 58379 - RNA, 23 nt, synthetic construct
  source 1..23: mol_type = other RNA
aggtccgggggcagagctcaggg

SEQ ID NO: 58380 - RNA, 23 nt, synthetic construct
  source 1..23: mol_type = other RNA
gggctgtaggtgcggccgccgtg

SEQ ID NO: 58381 - RNA, 23 nt, synthetic construct
  source 1..23: mol_type = other RNA
gtggccgtggtggtaagcactgt

SEQ ID NO: 58382 - RNA, 23 nt, synthetic construct
  source 1..23: mol_type = other RNA
tggtagtcagcactttggtagtg

SEQ ID NO: 58383 - RNA, 23 nt, synthetic construct
  source 1..23: mol_type = other RNA
gtggccgtggtggtaagcactgt

SEQ ID NO: 58384 - RNA, 23 nt, synthetic construct
  source 1..23: mol_type = other RNA
cagcggaaggtgggacagcagtc

SEQ ID NO: 58385 - RNA, 23 nt, synthetic construct
  source 1..23: mol_type = other RNA
ggtgctggggcagtggccgtagt

SEQ ID NO: 58386 - RNA, 23 nt, synthetic construct
  source 1..23: mol_type = other RNA
ggtgctggggcagtggccgtagt

SEQ ID NO: 58387 - RNA, 23 nt, synthetic construct
  source 1..23: mol_type = other RNA
ggtgctggggcagtggccgtagt

SEQ ID NO: 58388 - RNA, 23 nt, synthetic construct
  source 1..23: mol_type = other RNA
ggtgctggggcagtggccgtagt

SEQ ID NO: 58389 - RNA, 23 nt, synthetic construct
  source 1..23: mol_type = other RNA
cgggctgtaggtgcggccgccgt

SEQ ID NO: 58390 - RNA, 23 nt, synthetic construct
  source 1..23: mol_type = other RNA
ggccccagttgtggtggccgtgg

SEQ ID NO: 58391 - RNA, 23 nt, synthetic construct
  source 1..23: mol_type = other RNA
gttcccaaactccagtgcgtccc

SEQ ID NO: 58392 - RNA, 23 nt, synthetic construct
  source 1..23: mol_type = other RNA
ctggggcagtggccgtagttgca

SEQ ID NO: 58393 - RNA, 23 nt, synthetic construct
  source 1..23: mol_type = other RNA
ctggggcagtggccgtagttgca

SEQ ID NO: 58394 - RNA, 23 nt, synthetic construct
  source 1..23: mol_type = other RNA
ctggggcagtggccgtagttgca

SEQ ID NO: 58395 - RNA, 23 nt, synthetic construct
  source 1..23: mol_type = other RNA
ctggggcagtggccgtagttgca

SEQ ID NO: 58396 - RNA, 23 nt, synthetic construct
  source 1..23: mol_type = other RNA
tgggacagcagtcgccctcctcc

SEQ ID NO: 58397 - RNA, 23 nt, synthetic construct
  source 1..23: mol_type = other RNA
acacgggtgaccacaggcctgga

SEQ ID NO: 58398 - RNA, 23 nt, synthetic construct
  source 1..23: mol_type = other RNA
gtgcggccgccgtgggtgcaggg

SEQ ID NO: 58399 - RNA, 23 nt, synthetic construct
  source 1..23: mol_type = other RNA
ctgtaggtgcggccgccgtgggt

SEQ ID NO: 58400 - RNA, 23 nt, synthetic construct
  source 1..23: mol_type = other RNA
gctgtaggtgcggccgccgtggg

SEQ ID NO: 58401 - RNA, 23 nt, synthetic construct
  source 1..23: mol_type = other RNA
cagctctggcagttctccgctgt

SEQ ID NO: 58402 - RNA, 23 nt, synthetic construct
  source 1..23: mol_type = other RNA
acagctctggcagttctccgctg

SEQ ID NO: 58403 - RNA, 23 nt, synthetic construct
  source 1..23: mol_type = other RNA
tgggcagtctctggagtggagga

SEQ ID NO: 58404 - RNA, 23 nt, synthetic construct
  source 1..23: mol_type = other RNA
tgggcagtctctggagtggagga

SEQ ID NO: 58405 - RNA, 23 nt, synthetic construct
  source 1..23: mol_type = other RNA
gaagtcacagggctggctcgggt

SEQ ID NO: 58406 - RNA, 23 nt, synthetic construct
  source 1..23: mol_type = other RNA
gcaggtccgggggcagagctcag

SEQ ID NO: 58407 - RNA, 23 nt, synthetic construct
  source 1..23: mol_type = other RNA
ctcattctccacactgagggagc

SEQ ID NO: 58408 - RNA, 23 nt, synthetic construct
  source 1..23: mol_type = other RNA
ttctcattctccacactgaggga

SEQ ID NO: 58409 - RNA, 23 nt, synthetic construct
  source 1..23: mol_type = other RNA
gtgggacagcagtcgccctcctc

SEQ ID NO: 58410 - RNA, 23 nt, synthetic construct
  source 1..23: mol_type = other RNA
cactcatagtggaagtcacaggg

SEQ ID NO: 58411 - RNA, 23 nt, synthetic construct
  source 1..23: mol_type = other RNA
ggcactcgaggcccaggggctgc

SEQ ID NO: 58412 - RNA, 23 nt, synthetic construct
  source 1..23: mol_type = other RNA
ggcactcgaggcccaggggctgc

SEQ ID NO: 58413 - RNA, 23 nt, synthetic construct
  source 1..23: mol_type = other RNA
ggcactcgaggcccaggggctgc

SEQ ID NO: 58414 - RNA, 23 nt, synthetic construct
  source 1..23: mol_type = other RNA
ggcactcgaggcccaggggctgc

SEQ ID NO: 58415 - RNA, 23 nt, synthetic construct
  source 1..23: mol_type = other RNA
taggtgcggccgccgtgggtgca

SEQ ID NO: 58416 - RNA, 23 nt, synthetic construct
  source 1..23: mol_type = other RNA
caacacgggtgaccacaggcctg

SEQ ID NO: 58417 - RNA, 23 nt, synthetic construct
  source 1..23: mol_type = other RNA
actccagtgcgtcccccaccacg

SEQ ID NO: 58418 - RNA, 23 nt, synthetic construct
  source 1..23: mol_type = other RNA
cgccgtgggtgcaggggcactgc

SEQ ID NO: 58419 - RNA, 23 nt, synthetic construct
  source 1..23: mol_type = other RNA
tgtaggtgcggccgccgtgggtg

SEQ ID NO: 58420 - RNA, 23 nt, synthetic construct
  source 1..23: mol_type = other RNA
tggtggccgtggtggtaagcact

SEQ ID NO: 58421 - RNA, 23 nt, synthetic construct
  source 1..23: mol_type = other RNA
tggtggccgtggtggtaagcact

SEQ ID NO: 58422 - RNA, 23 nt, synthetic construct
  source 1..23: mol_type = other RNA
aagtcacagggctggctcgggtc

SEQ ID NO: 58423 - RNA, 23 nt, synthetic construct
  source 1..23: mol_type = other RNA
tgtgggggtgtgggtggtccccg

SEQ ID NO: 58424 - RNA, 23 nt, synthetic construct
  source 1..23: mol_type = other RNA
tgtgggggtgtgggtggtccccg

SEQ ID NO: 58425 - RNA, 23 nt, synthetic construct
  source 1..23: mol_type = other RNA
ccgcccattgtgcgccgggttca

SEQ ID NO: 58426 - RNA, 23 nt, synthetic construct
  source 1..23: mol_type = other RNA
tgtcggcacatttcttggacaga

SEQ ID NO: 58427 - RNA, 23 nt, synthetic construct
  source 1..23: mol_type = other RNA
ctgtacgcccttggcggcacagg

SEQ ID NO: 58428 - RNA, 23 nt, synthetic construct
  source 1..23: mol_type = other RNA
ccgacgtcatagtagtttccgtc

SEQ ID NO: 58429 - RNA, 23 nt, synthetic construct
  source 1..23: mol_type = other RNA
accgacgtcatagtagtttccgt

SEQ ID NO: 58430 - RNA, 23 nt, synthetic construct
  source 1..23: mol_type = other RNA
gtggctatagtgctcggctctgt

SEQ ID NO: 58431 - RNA, 23 nt, synthetic construct
  source 1..23: mol_type = other RNA
tacgaagccgggacggttgcacg

SEQ ID NO: 58432 - RNA, 23 nt, synthetic construct
  source 1..23: mol_type = other RNA
tggctatagtgctcggctctgtg

SEQ ID NO: 58433 - RNA, 23 nt, synthetic construct
  source 1..23: mol_type = other RNA
gctgtacgcccttggcggcacag

SEQ ID NO: 58434 - RNA, 23 nt, synthetic construct
  source 1..23: mol_type = other RNA
gcccattgtgcgccgggttcagg

SEQ ID NO: 58435 - RNA, 23 nt, synthetic construct
  source 1..23: mol_type = other RNA
cagggctggctcgggtccgacac

SEQ ID NO: 58436 - RNA, 23 nt, synthetic construct
  source 1..23: mol_type = other RNA
ggggatggaggcagaacgttctc

SEQ ID NO: 58437 - RNA, 23 nt, synthetic construct
  source 1..23: mol_type = other RNA
aggatggtcgtgttgatgcggac

SEQ ID NO: 58438 - RNA, 23 nt, synthetic construct
  source 1..23: mol_type = other RNA
actcaatgctcagggtttatttg

SEQ ID NO: 58439 - RNA, 23 nt, synthetic construct
  source 1..23: mol_type = other RNA
gcactttggtagtgtgagctgtt

SEQ ID NO: 58440 - RNA, 23 nt, synthetic construct
  source 1..23: mol_type = other RNA
gcactttggtagtgtgagctgtt

SEQ ID NO: 58441 - RNA, 23 nt, synthetic construct
  source 1..23: mol_type = other RNA
gcactttggtagtgtgagctgtt

SEQ ID NO: 58442 - RNA, 23 nt, synthetic construct
  source 1..23: mol_type = other RNA
gcactttggtagtgtgagctgtt

SEQ ID NO: 58443 - RNA, 23 nt, synthetic construct
  source 1..23: mol_type = other RNA
gcactttggtagtgtgagctgtt

SEQ ID NO: 58444 - RNA, 23 nt, synthetic construct
  source 1..23: mol_type = other RNA
cattgatggcattgtcgtcgaag

SEQ ID NO: 58445 - RNA, 23 nt, synthetic construct
  source 1..23: mol_type = other RNA
aggacgtcggggcaccgccatcc

SEQ ID NO: 58446 - RNA, 23 nt, synthetic construct
  source 1..23: mol_type = other RNA
cttcaaagctgtagcgatcgcca

SEQ ID NO: 58447 - RNA, 23 nt, synthetic construct
  source 1..23: mol_type = other RNA
attgatggcattgtcgtcgaagt

SEQ ID NO: 58448 - RNA, 23 nt, synthetic construct
  source 1..23: mol_type = other RNA
ggggatggctgtaacgctggtag

SEQ ID NO: 58449 - RNA, 23 nt, synthetic construct
  source 1..23: mol_type = other RNA
agggctggctcgggtccgacact

SEQ ID NO: 58450 - RNA, 23 nt, synthetic construct
  source 1..23: mol_type = other RNA
accaagggtgcttgtgtatctgg

SEQ ID NO: 58451 - RNA, 23 nt, synthetic construct
  source 1..23: mol_type = other RNA
gggcctgggcacggcactcgagg

SEQ ID NO: 58452 - RNA, 23 nt, synthetic construct
  source 1..23: mol_type = other RNA
aggagggcatggccgtagagctg

SEQ ID NO: 58453 - RNA, 23 nt, synthetic construct
  source 1..23: mol_type = other RNA
gggcctgggcacggcactcgagg

SEQ ID NO: 58454 - RNA, 23 nt, synthetic construct
  source 1..23: mol_type = other RNA
gggcctgggcacggcactcgagg

SEQ ID NO: 58455 - RNA, 23 nt, synthetic construct
  source 1..23: mol_type = other RNA
gggcctgggcacggcactcgagg

SEQ ID NO: 58456 - RNA, 23 nt, synthetic construct
  source 1..23: mol_type = other RNA
aggagggcatggccgtagagctg

SEQ ID NO: 58457 - RNA, 23 nt, synthetic construct
  source 1..23: mol_type = other RNA
acgtcccctgcagtggtcgtcac

SEQ ID NO: 58458 - RNA, 23 nt, synthetic construct
  source 1..23: mol_type = other RNA
cagccggctcggtcggtcttatt

SEQ ID NO: 58459 - RNA, 23 nt, synthetic construct
  source 1..23: mol_type = other RNA
cccatagggtggtcttttcggtt

SEQ ID NO: 58460 - RNA, 23 nt, synthetic construct
  source 1..23: mol_type = other RNA
gccgccgtcgaccggatgctcgg

SEQ ID NO: 58461 - RNA, 23 nt, synthetic construct
  source 1..23: mol_type = other RNA
acacgtagttgcaaaggccaggg

SEQ ID NO: 58462 - RNA, 23 nt, synthetic construct
  source 1..23: mol_type = other RNA
gcagggacacataggcccgcaca

SEQ ID NO: 58463 - RNA, 23 nt, synthetic construct
  source 1..23: mol_type = other RNA
aaacgtctcaaagtctccgcctc

SEQ ID NO: 58464 - RNA, 23 nt, synthetic construct
  source 1..23: mol_type = other RNA
aggccgttgaagtccccacacag

SEQ ID NO: 58465 - RNA, 23 nt, synthetic construct
  source 1..23: mol_type = other RNA
cgtgagcgtagcaggggcactcc

SEQ ID NO: 58466 - RNA, 23 nt, synthetic construct
  source 1..23: mol_type = other RNA
gggccaagatgtactcgcagctg

SEQ ID NO: 58467 - RNA, 23 nt, synthetic construct
  source 1..23: mol_type = other RNA
ggccgtggaattggtggcccttg

SEQ ID NO: 58468 - RNA, 23 nt, synthetic construct
  source 1..23: mol_type = other RNA
ggcagccggctcggtcggtctta

SEQ ID NO: 58469 - RNA, 23 nt, synthetic construct
  source 1..23: mol_type = other RNA
tagagtttctcatcataggtgga

SEQ ID NO: 58470 - RNA, 23 nt, synthetic construct
  source 1..23: mol_type = other RNA
actgttgggatcggtcaggcgcg

SEQ ID NO: 58471 - RNA, 23 nt, synthetic construct
  source 1..23: mol_type = other RNA
ggctgtgatcgtagtggccgtgg

SEQ ID NO: 58472 - RNA, 23 nt, synthetic construct
  source 1..23: mol_type = other RNA
tagaaatggcagccggctcggtc

SEQ ID NO: 58473 - RNA, 23 nt, synthetic construct
  source 1..23: mol_type = other RNA
aggtgatgttgacctcggtctcg

SEQ ID NO: 58474 - RNA, 23 nt, synthetic construct
  source 1..23: mol_type = other RNA
tgcagtcaccatgcaggtcgtag

SEQ ID NO: 58475 - RNA, 23 nt, synthetic construct
  source 1..23: mol_type = other RNA
tcagcggctctttggaagcggtg

SEQ ID NO: 58476 - RNA, 23 nt, synthetic construct
  source 1..23: mol_type = other RNA
gtggtccccacggtggacgagct

SEQ ID NO: 58477 - RNA, 23 nt, synthetic construct
  source 1..23: mol_type = other RNA
cggcccctgcagtggtcgctgat

SEQ ID NO: 58478 - RNA, 23 nt, synthetic construct
  source 1..23: mol_type = other RNA
gacctggccgttgcgacctcagc

SEQ ID NO: 58479 - RNA, 23 nt, synthetic construct
  source 1..23: mol_type = other RNA
gagtcgcaggcacacgcgtcgtt

SEQ ID NO: 58480 - RNA, 23 nt, synthetic construct
  source 1..23: mol_type = other RNA
ggctgagattcccaaagcgtgca

SEQ ID NO: 58481 - RNA, 23 nt, synthetic construct
  source 1..23: mol_type = other RNA
atggggccgcatggcttgtacac

SEQ ID NO: 58482 - RNA, 23 nt, synthetic construct
  source 1..23: mol_type = other RNA
agaaggtgatgttgacctcggtc

SEQ ID NO: 58483 - RNA, 23 nt, synthetic construct
  source 1..23: mol_type = other RNA
aggatggctgagccgttaggaca

SEQ ID NO: 58484 - RNA, 23 nt, synthetic construct
  source 1..23: mol_type = other RNA
gtgcaggatggctgagccgttag

SEQ ID NO: 58485 - RNA, 23 nt, synthetic construct
  source 1..23: mol_type = other RNA
cgttgaagtcctcgtaggcggcg

SEQ ID NO: 58486 - RNA, 23 nt, synthetic construct
  source 1..23: mol_type = other RNA
ttgaagtcctcgtaggcggcgcg

SEQ ID NO: 58487 - RNA, 23 nt, synthetic construct
  source 1..23: mol_type = other RNA
ttgtcgtcgaagttcccgcacag

SEQ ID NO: 58488 - RNA, 23 nt, synthetic construct
  source 1..23: mol_type = other RNA
tgcagaaacactcgcagtcgcca

SEQ ID NO: 58489 - RNA, 23 nt, synthetic construct
  source 1..23: mol_type = other RNA
caccggttgcacctcgccagtca

SEQ ID NO: 58490 - RNA, 23 nt, synthetic construct
  source 1..23: mol_type = other RNA
gtacgcccttggcggcacaggcg

SEQ ID NO: 58491 - RNA, 23 nt, synthetic construct
  source 1..23: mol_type = other RNA
agctgtacgcccttggcggcaca

SEQ ID NO: 58492 - RNA, 23 nt, synthetic construct
  source 1..23: mol_type = other RNA
gcttccgcagatggcgatcaagc

SEQ ID NO: 58493 - RNA, 23 nt, synthetic construct
  source 1..23: mol_type = other RNA
ggcgttgtggctggagttccagg

SEQ ID NO: 58494 - RNA, 23 nt, synthetic construct
  source 1..23: mol_type = other RNA
aaccggtgggcaccatcacggtg

SEQ ID NO: 58495 - RNA, 23 nt, synthetic construct
  source 1..23: mol_type = other RNA
ctgcgtagaaatggcagccggct

SEQ ID NO: 58496 - RNA, 23 nt, synthetic construct
  source 1..23: mol_type = other RNA
tctgcgtaagcctccaggctctg

SEQ ID NO: 58497 - RNA, 23 nt, synthetic construct
  source 1..23: mol_type = other RNA
agggcgtcccagtgacatcaggg

SEQ ID NO: 58498 - RNA, 23 nt, synthetic construct
  source 1..23: mol_type = other RNA
agcgcggggtgccacacacaggc

SEQ ID NO: 58499 - RNA, 23 nt, synthetic construct
  source 1..23: mol_type = other RNA
tggaaccggtgggcaccatcacg

SEQ ID NO: 58500 - RNA, 23 nt, synthetic construct
  source 1..23: mol_type = other RNA
gcggtcaatgtcacagtgctgat

SEQ ID NO: 58501 - RNA, 23 nt, synthetic construct
  source 1..23: mol_type = other RNA
tccgcagatggcgatcaagcagg

SEQ ID NO: 58502 - RNA, 23 nt, synthetic construct
  source 1..23: mol_type = other RNA
cactgcgtagaaatggcagccgg

SEQ ID NO: 58503 - RNA, 23 nt, synthetic construct
  source 1..23: mol_type = other RNA
ccttgcaactggcggcagtggtt

SEQ ID NO: 58504 - RNA, 23 nt, synthetic construct
  source 1..23: mol_type = other RNA
gggcgaggacgtcggggcaccgc

SEQ ID NO: 58505 - RNA, 23 nt, synthetic construct
  source 1..23: mol_type = other RNA
gaggtgcccgggctgtaggtgcg

SEQ ID NO: 58506 - RNA, 23 nt, synthetic construct
  source 1..23: mol_type = other RNA
gggcgtcccagtgacatcaggga

SEQ ID NO: 58507 - RNA, 23 nt, synthetic construct
  source 1..23: mol_type = other RNA
ggctgtgaagcccgtggttgtgg

SEQ ID NO: 58508 - RNA, 23 nt, synthetic construct
  source 1..23: mol_type = other RNA
ggctgtgaagcccgtggttgtgg

SEQ ID NO: 58509 - RNA, 23 nt, synthetic construct
  source 1..23: mol_type = other RNA
ggctgtgaagcccgtggttgtgg

SEQ ID NO: 58510 - RNA, 23 nt, synthetic construct
  source 1..23: mol_type = other RNA
ggctgtgaagcccgtggttgtgg

SEQ ID NO: 58511 - RNA, 23 nt, synthetic construct
  source 1..23: mol_type = other RNA
gcagaggacccggatcctgtagt

SEQ ID NO: 58512 - RNA, 23 nt, synthetic construct
  source 1..23: mol_type = other RNA
cgcccattgtgcgccgggttcag

SEQ ID NO: 58513 - RNA, 23 nt, synthetic construct
  source 1..23: mol_type = other RNA
tagtcctgggccaagatgtactc

SEQ ID NO: 58514 - RNA, 23 nt, synthetic construct
  source 1..23: mol_type = other RNA
ggagggcatggccgtagagctgg

SEQ ID NO: 58515 - RNA, 23 nt, synthetic construct
  source 1..23: mol_type = other RNA
ggagggcatggccgtagagctgg

SEQ ID NO: 58516 - RNA, 23 nt, synthetic construct
  source 1..23: mol_type = other RNA
acttccccgggcgagaaaaactg

SEQ ID NO: 58517 - RNA, 23 nt, synthetic construct
  source 1..23: mol_type = other RNA
caggtggcaggctgtatggggcc

SEQ ID NO: 58518 - RNA, 23 nt, synthetic construct
  source 1..23: mol_type = other RNA
actaggcctcggcgtagctggac

SEQ ID NO: 58519 - RNA, 23 nt, synthetic construct
  source 1..23: mol_type = other RNA
cattgtgcgccgggttcaggggg

SEQ ID NO: 58520 - RNA, 23 nt, synthetic construct
  source 1..23: mol_type = other RNA
ggcatagtggccatggtggtcac

SEQ ID NO: 58521 - RNA, 23 nt, synthetic construct
  source 1..23: mol_type = other RNA
ccgctttcaggcagttctcgttg

SEQ ID NO: 58522 - RNA, 23 nt, synthetic construct
  source 1..23: mol_type = other RNA
gtctggttggcgtatttgggatc

SEQ ID NO: 58523 - RNA, 23 nt, synthetic construct
  source 1..23: mol_type = other RNA
tcgcagtcgccacccgagtcgca

SEQ ID NO: 58524 - RNA, 23 nt, synthetic construct
  source 1..23: mol_type = other RNA
tggcgttgtggctggagttccag

SEQ ID NO: 58525 - RNA, 23 nt, synthetic construct
  source 1..23: mol_type = other RNA
cctgacattgcaccgttgggtcc

SEQ ID NO: 58526 - RNA, 23 nt, synthetic construct
  source 1..23: mol_type = other RNA
gccatcgggcgtgaggcaggcgg

SEQ ID NO: 58527 - RNA, 23 nt, synthetic construct
  source 1..23: mol_type = other RNA
gcgccaagcccatcggtggtgtt

SEQ ID NO: 58528 - RNA, 23 nt, synthetic construct
  source 1..23: mol_type = other RNA
tactcgtaggctgcggcgttgag

SEQ ID NO: 58529 - RNA, 23 nt, synthetic construct
  source 1..23: mol_type = other RNA
cgcccgtgtgtggtggccatggt

SEQ ID NO: 58530 - RNA, 23 nt, synthetic construct
  source 1..23: mol_type = other RNA
atcccgtgggtctcgatgaccag

SEQ ID NO: 58531 - RNA, 23 nt, synthetic construct
  source 1..23: mol_type = other RNA
ccgtggcagggacacataggccc

SEQ ID NO: 58532 - RNA, 23 nt, synthetic construct
  source 1..23: mol_type = other RNA
ctcgtaggctgcggcgttgagaa

SEQ ID NO: 58533 - RNA, 23 nt, synthetic construct
  source 1..23: mol_type = other RNA
tcctcctgacattgcaccgttgg

SEQ ID NO: 58534 - RNA, 23 nt, synthetic construct
  source 1..23: mol_type = other RNA
gagctgtacgcccttggcggcac

SEQ ID NO: 58535 - RNA, 23 nt, synthetic construct
  source 1..23: mol_type = other RNA
ctccagcggccctgatcttatcg

SEQ ID NO: 58536 - RNA, 23 nt, synthetic construct
  source 1..23: mol_type = other RNA
tggtcgtggtggtaagcactgtg

SEQ ID NO: 58537 - RNA, 23 nt, synthetic construct
  source 1..23: mol_type = other RNA
gttgcaccaaccccgtagaaggt

SEQ ID NO: 58538 - RNA, 23 nt, synthetic construct
  source 1..23: mol_type = other RNA
ccgagtcgcaggcacacgcgtcg

SEQ ID NO: 58539 - RNA, 23 nt, synthetic construct
  source 1..23: mol_type = other RNA
cccattgtgcgccgggttcaggg

SEQ ID NO: 58540 - RNA, 23 nt, synthetic construct
  source 1..23: mol_type = other RNA
ggcctcggcgtagctggacgttg

SEQ ID NO: 58541 - RNA, 23 nt, synthetic construct
  source 1..23: mol_type = other RNA
ttccgcagatggcgatcaagcag

SEQ ID NO: 58542 - RNA, 23 nt, synthetic construct
  source 1..23: mol_type = other RNA
attcgcagcagagaacccgcagc

SEQ ID NO: 58543 - RNA, 23 nt, synthetic construct
  source 1..23: mol_type = other RNA
ccaccgctccccgggaaatttag

SEQ ID NO: 58544 - RNA, 23 nt, synthetic construct
  source 1..23: mol_type = other RNA
cggagcgcggggtgccacacaca

SEQ ID NO: 58545 - RNA, 23 nt, synthetic construct
  source 1..23: mol_type = other RNA
catggccgccagagccaacacca

SEQ ID NO: 58546 - RNA, 23 nt, synthetic construct
  source 1..23: mol_type = other RNA
accacgagcatggccgccagagc

SEQ ID NO: 58547 - RNA, 23 nt, synthetic construct
  source 1..23: mol_type = other RNA
ctgggtctctgcctgcggcacca

SEQ ID NO: 58548 - RNA, 23 nt, synthetic construct
  source 1..23: mol_type = other RNA
gcgcggcagtgctcagagaacac

SEQ ID NO: 58549 - RNA, 23 nt, synthetic construct
  source 1..23: mol_type = other RNA
cctctccgttccacaggaatgtc

SEQ ID NO: 58550 - RNA, 23 nt, synthetic construct
  source 1..23: mol_type = other RNA
tctggttggcgtatttgggatcc

SEQ ID NO: 58551 - RNA, 23 nt, synthetic construct
  source 1..23: mol_type = other RNA
gcctggcgttgtgggcatagaac

SEQ ID NO: 58552 - RNA, 23 nt, synthetic construct
  source 1..23: mol_type = other RNA
gtgctgcatgttgagggggcagg

SEQ ID NO: 58553 - RNA, 23 nt, synthetic construct
  source 1..23: mol_type = other RNA
ggtgaagctgctgtcggcacatt

SEQ ID NO: 58554 - RNA, 23 nt, synthetic construct
  source 1..23: mol_type = other RNA
accacgatgaagaagctcgaggg

SEQ ID NO: 58555 - RNA, 23 nt, synthetic construct
  source 1..23: mol_type = other RNA
ctcaaagctgttcctggcattgg

SEQ ID NO: 58556 - RNA, 23 nt, synthetic construct
  source 1..23: mol_type = other RNA
ttgatgatggagtggcagcgcga

SEQ ID NO: 58557 - RNA, 23 nt, synthetic construct
  source 1..23: mol_type = other RNA
tgtacgcccttggcggcacaggc

SEQ ID NO: 58558 - RNA, 23 nt, synthetic construct
  source 1..23: mol_type = other RNA
ggtggtgttgtccccacagtagt

SEQ ID NO: 58559 - RNA, 23 nt, synthetic construct
  source 1..23: mol_type = other RNA
ttgtagggtgggtccccacccgg

SEQ ID NO: 58560 - RNA, 23 nt, synthetic construct
  source 1..23: mol_type = other RNA
cttgtagggtgggtccccacccg

SEQ ID NO: 58561 - RNA, 23 nt, synthetic construct
  source 1..23: mol_type = other RNA
aatggcgttgtggctggagttcc

SEQ ID NO: 58562 - RNA, 23 nt, synthetic construct
  source 1..23: mol_type = other RNA
agcggcatgtcgggaagctgcgc

SEQ ID NO: 58563 - RNA, 23 nt, synthetic construct
  source 1..23: mol_type = other RNA
gagggggtgaccgtcacggggcc

SEQ ID NO: 58564 - RNA, 23 nt, synthetic construct
  source 1..23: mol_type = other RNA
tggtggtacctggggccgagggg

SEQ ID NO: 58565 - RNA, 23 nt, synthetic construct
  source 1..23: mol_type = other RNA
ttgtagcacatcttgaagacgcc

SEQ ID NO: 58566 - RNA, 23 nt, synthetic construct
  source 1..23: mol_type = other RNA
ctggtcagccccgggctactcgt

SEQ ID NO: 58567 - RNA, 23 nt, synthetic construct
  source 1..23: mol_type = other RNA
tgggggatgtcagtccttctgag

SEQ ID NO: 58568 - RNA, 23 nt, synthetic construct
  source 1..23: mol_type = other RNA
tgtaccaagggtgcttgtgtatc

SEQ ID NO: 58569 - RNA, 23 nt, synthetic construct
  source 1..23: mol_type = other RNA
cgtgttggaagggtggatgtggc

SEQ ID NO: 58570 - RNA, 23 nt, synthetic construct
  source 1..23: mol_type = other RNA
gggcgccatgtgcccaagctccc

SEQ ID NO: 58571 - RNA, 23 nt, synthetic construct
  source 1..23: mol_type = other RNA
aggggcgccatgtgcccaagctc

SEQ ID NO: 58572 - RNA, 23 nt, synthetic construct
  source 1..23: mol_type = other RNA
gttgccattgttgttggggccag

SEQ ID NO: 58573 - RNA, 23 nt, synthetic construct
  source 1..23: mol_type = other RNA
gtctcggcctgagaggtggacag

SEQ ID NO: 58574 - RNA, 23 nt, synthetic construct
  source 1..23: mol_type = other RNA
gctgtgaagcccgtggttgtggt

SEQ ID NO: 58575 - RNA, 23 nt, synthetic construct
  source 1..23: mol_type = other RNA
gtggttgtgctgatccacactgg

SEQ ID NO: 58576 - RNA, 23 nt, synthetic construct
  source 1..23: mol_type = other RNA
ttgccatagaaccagtggccaca

SEQ ID NO: 58577 - RNA, 23 nt, synthetic construct
  source 1..23: mol_type = other RNA
gttgccatagaaccagtggccac

SEQ ID NO: 58578 - RNA, 23 nt, synthetic construct
  source 1..23: mol_type = other RNA
gatgggagttgtcccaggagttg

SEQ ID NO: 58579 - RNA, 23 nt, synthetic construct
  source 1..23: mol_type = other RNA
tggcggtggtggtcagcactggg

SEQ ID NO: 58580 - RNA, 23 nt, synthetic construct
  source 1..23: mol_type = other RNA
cgaagtccaggctgtgcgcaccg

SEQ ID NO: 58581 - RNA, 23 nt, synthetic construct
  source 1..23: mol_type = other RNA
tcggtggttctgctgctagggtg

SEQ ID NO: 58582 - RNA, 23 nt, synthetic construct
  source 1..23: mol_type = other RNA
tcaaagtccccgccagagggccc

SEQ ID NO: 58583 - RNA, 23 nt, synthetic construct
  source 1..23: mol_type = other RNA
cggatgttggagtaggtgtcaaa

SEQ ID NO: 58584 - RNA, 23 nt, synthetic construct
  source 1..23: mol_type = other RNA
aggaggggatggctgtaaagctg

SEQ ID NO: 58585 - RNA, 23 nt, synthetic construct
  source 1..23: mol_type = other RNA
gctgtgaagcccgtggttgtggt

SEQ ID NO: 58586 - RNA, 23 nt, synthetic construct
  source 1..23: mol_type = other RNA
gctgatccacactggaagcgtgc

SEQ ID NO: 58587 - RNA, 23 nt, synthetic construct
  source 1..23: mol_type = other RNA
gtggttgtgctgatccacactgg

SEQ ID NO: 58588 - RNA, 23 nt, synthetic construct
  source 1..23: mol_type = other RNA
ttgccatagaaccagtggccaca

SEQ ID NO: 58589 - RNA, 23 nt, synthetic construct
  source 1..23: mol_type = other RNA
gttgccatagaaccagtggccac

SEQ ID NO: 58590 - RNA, 23 nt, synthetic construct
  source 1..23: mol_type = other RNA
tggcggtggtggtcagcactggg

SEQ ID NO: 58591 - RNA, 23 nt, synthetic construct
  source 1..23: mol_type = other RNA
cgaagtccaggctgtgcgcaccg

SEQ ID NO: 58592 - RNA, 23 nt, synthetic construct
  source 1..23: mol_type = other RNA
ggaagtccccgtggaaggctctg

SEQ ID NO: 58593 - RNA, 23 nt, synthetic construct
  source 1..23: mol_type = other RNA
actcggtggtcctgctgctaggg

SEQ ID NO: 58594 - RNA, 23 nt, synthetic construct
  source 1..23: mol_type = other RNA
tcaaagtccccgccagagggccc

SEQ ID NO: 58595 - RNA, 23 nt, synthetic construct
  source 1..23: mol_type = other RNA
cggatgttggagtaggtgtcaaa

SEQ ID NO: 58596 - RNA, 23 nt, synthetic construct
  source 1..23: mol_type = other RNA
ggtcccggtggtcccaagggtga

SEQ ID NO: 58597 - RNA, 23 nt, synthetic construct
  source 1..23: mol_type = other RNA
gaactggtggcccttgtcgtggt

SEQ ID NO: 58598 - RNA, 23 nt, synthetic construct
  source 1..23: mol_type = other RNA
aggcgggtccaggcggtgcccag

SEQ ID NO: 58599 - RNA, 23 nt, synthetic construct
  source 1..23: mol_type = other RNA
gctgtgaagcccgtggttgtggt

SEQ ID NO: 58600 - RNA, 23 nt, synthetic construct
  source 1..23: mol_type = other RNA
gtggttgtgctgatccacactgg

SEQ ID NO: 58601 - RNA, 23 nt, synthetic construct
  source 1..23: mol_type = other RNA
ttgccatagaaccagtggccaca

SEQ ID NO: 58602 - RNA, 23 nt, synthetic construct
  source 1..23: mol_type = other RNA
gttgccatagaaccagtggccac

SEQ ID NO: 58603 - RNA, 23 nt, synthetic construct
  source 1..23: mol_type = other RNA
ggagttgtccctggagttgagga

SEQ ID NO: 58604 - RNA, 23 nt, synthetic construct
  source 1..23: mol_type = other RNA
tggcggtggtggtcagcactggg

SEQ ID NO: 58605 - RNA, 23 nt, synthetic construct
  source 1..23: mol_type = other RNA
cgaagtccaggctgtgcgcaccg

SEQ ID NO: 58606 - RNA, 23 nt, synthetic construct
  source 1..23: mol_type = other RNA
actcggtggtcctgctgctaggg

SEQ ID NO: 58607 - RNA, 23 nt, synthetic construct
  source 1..23: mol_type = other RNA
tcaaagtccccgccagagggccc

SEQ ID NO: 58608 - RNA, 23 nt, synthetic construct
  source 1..23: mol_type = other RNA
cggatgttggagtaggtgtcaaa

SEQ ID NO: 58609 - RNA, 23 nt, synthetic construct
  source 1..23: mol_type = other RNA
aggaggggatggctgtaaagctg

SEQ ID NO: 58610 - RNA, 23 nt, synthetic construct
  source 1..23: mol_type = other RNA
actgtgaagcccgtggttgtggt

SEQ ID NO: 58611 - RNA, 23 nt, synthetic construct
  source 1..23: mol_type = other RNA
gtggttgtgctgatccacactgg

SEQ ID NO: 58612 - RNA, 23 nt, synthetic construct
  source 1..23: mol_type = other RNA
ttgccatagaaccagtggccaca

SEQ ID NO: 58613 - RNA, 23 nt, synthetic construct
  source 1..23: mol_type = other RNA
gttgccatagaaccagtggccac

SEQ ID NO: 58614 - RNA, 23 nt, synthetic construct
  source 1..23: mol_type = other RNA
tggcggtggtggtcagcactggg

SEQ ID NO: 58615 - RNA, 23 nt, synthetic construct
  source 1..23: mol_type = other RNA
cgaagtccaggctgtgcgcaccg

SEQ ID NO: 58616 - RNA, 23 nt, synthetic construct
  source 1..23: mol_type = other RNA
ggaagtccccgtggaaggctctg

SEQ ID NO: 58617 - RNA, 23 nt, synthetic construct
  source 1..23: mol_type = other RNA
actcggtggtcctgctgctaggg

SEQ ID NO: 58618 - RNA, 23 nt, synthetic construct
  source 1..23: mol_type = other RNA
tcaaagtccccgccagagggccc

SEQ ID NO: 58619 - RNA, 23 nt, synthetic construct
  source 1..23: mol_type = other RNA
cggatgttggagtaggtgtcaaa

SEQ ID NO: 58620 - RNA, 23 nt, synthetic construct
  source 1..23: mol_type = other RNA
ggtcccggtggtcccaagggtgg

SEQ ID NO: 58621 - RNA, 23 nt, synthetic construct
  source 1..23: mol_type = other RNA
gaactggtggcccttgtcgtggt

SEQ ID NO: 58622 - RNA, 23 nt, synthetic construct
  source 1..23: mol_type = other RNA
aggaggggatggctgtaaagctg

SEQ ID NO: 58623 - RNA, 23 nt, synthetic construct
  source 1..23: mol_type = other RNA
gctgtgaagcccgtggttgtggt

SEQ ID NO: 58624 - RNA, 23 nt, synthetic construct
  source 1..23: mol_type = other RNA
gtggttgtgctgatccacactgg

SEQ ID NO: 58625 - RNA, 23 nt, synthetic construct
  source 1..23: mol_type = other RNA
ttgccatagaaccagtggccaca

SEQ ID NO: 58626 - RNA, 23 nt, synthetic construct
  source 1..23: mol_type = other RNA
gttgccatagaaccagtggccac

SEQ ID NO: 58627 - RNA, 23 nt, synthetic construct
  source 1..23: mol_type = other RNA
gctggtagctgtggattttgtgg

SEQ ID NO: 58628 - RNA, 23 nt, synthetic construct
  source 1..23: mol_type = other RNA
aggaggtgtggattgtggacatg

SEQ ID NO: 58629 - RNA, 23 nt, synthetic construct
  source 1..23: mol_type = other RNA
gaggaggtgtggattgtggacat

SEQ ID NO: 58630 - RNA, 23 nt, synthetic construct
  source 1..23: mol_type = other RNA
cgggtcgtccccagagtggagga

SEQ ID NO: 58631 - RNA, 23 nt, synthetic construct
  source 1..23: mol_type = other RNA
tttgggggtgtgagctgttccca

SEQ ID NO: 58632 - RNA, 23 nt, synthetic construct
  source 1..23: mol_type = other RNA
aaactgtccaaatgccctgcaga

SEQ ID NO: 58633 - RNA, 23 nt, synthetic construct
  source 1..23: mol_type = other RNA
tattgtagatgacttccccgggc

SEQ ID NO: 58634 - RNA, 23 nt, synthetic construct
  source 1..23: mol_type = other RNA
actgcgtagaaatggcagccggc

SEQ ID NO: 58635 - RNA, 23 nt, synthetic construct
  source 1..23: mol_type = other RNA
tttgggtccagcaggacgacacg

SEQ ID NO: 58636 - RNA, 23 nt, synthetic construct
  source 1..23: mol_type = other RNA
gtgacgttggccacaggctttgg

SEQ ID NO: 58637 - RNA, 23 nt, synthetic construct
  source 1..23: mol_type = other RNA
tgcatggatctctctcatgagga

SEQ ID NO: 58638 - RNA, 23 nt, synthetic construct
  source 1..23: mol_type = other RNA
gcgtgcatggatctctctcatga

SEQ ID NO: 58639 - RNA, 23 nt, synthetic construct
  source 1..23: mol_type = other RNA
aaacaggatcaggccctcctcct

SEQ ID NO: 58640 - RNA, 23 nt, synthetic construct
  source 1..23: mol_type = other RNA
caaacaggatcaggccctcctcc

SEQ ID NO: 58641 - RNA, 23 nt, synthetic construct
  source 1..23: mol_type = other RNA
acacgcatggtggtggtccccag

SEQ ID NO: 58642 - RNA, 23 nt, synthetic construct
  source 1..23: mol_type = other RNA
gtgctagacaccggggctgcggg

SEQ ID NO: 58643 - RNA, 23 nt, synthetic construct
  source 1..23: mol_type = other RNA
tgcaggcgttgaagaatgggccc

SEQ ID NO: 58644 - RNA, 23 nt, synthetic construct
  source 1..23: mol_type = other RNA
cgcagatgcccatgtgtgcgttg

SEQ ID NO: 58645 - RNA, 23 nt, synthetic construct
  source 1..23: mol_type = other RNA
gggaaggttgcaccaaccccgta

SEQ ID NO: 58646 - RNA, 23 nt, synthetic construct
  source 1..23: mol_type = other RNA
ggctggccatcgggcgtgaggca

SEQ ID NO: 58647 - RNA, 23 nt, synthetic construct
  source 1..23: mol_type = other RNA
ctggtggcccttgtcgtggtggc

SEQ ID NO: 58648 - RNA, 23 nt, synthetic construct
  source 1..23: mol_type = other RNA
ctggtggcccttgtcgtggtggc

SEQ ID NO: 58649 - RNA, 23 nt, synthetic construct
  source 1..23: mol_type = other RNA
ccaggccgaagtggacgtcacag

SEQ ID NO: 58650 - RNA, 23 nt, synthetic construct
  source 1..23: mol_type = other RNA
gggcaggaatgtccacacgcatg

SEQ ID NO: 58651 - RNA, 23 nt, synthetic construct
  source 1..23: mol_type = other RNA
agtggggggtgtgccagtcgggg

SEQ ID NO: 58652 - RNA, 23 nt, synthetic construct
  source 1..23: mol_type = other RNA
ccagctcggctccacagggccct

SEQ ID NO: 58653 - RNA, 23 nt, synthetic construct
  source 1..23: mol_type = other RNA
cccgcccattgtgcgccgggttc

SEQ ID NO: 58654 - RNA, 23 nt, synthetic construct
  source 1..23: mol_type = other RNA
aggtcccctcttggaggatcagc

SEQ ID NO: 58655 - RNA, 23 nt, synthetic construct
  source 1..23: mol_type = other RNA
atcttgtagggtgggtccccacc

SEQ ID NO: 58656 - RNA, 23 nt, synthetic construct
  source 1..23: mol_type = other RNA
acagagcgggggactctgttggc

SEQ ID NO: 58657 - RNA, 23 nt, synthetic construct
  source 1..23: mol_type = other RNA
cggtggcggggttgtggcacgtc

SEQ ID NO: 58658 - RNA, 23 nt, synthetic construct
  source 1..23: mol_type = other RNA
ctgggggatgtcagtccttctga

SEQ ID NO: 58659 - RNA, 23 nt, synthetic construct
  source 1..23: mol_type = other RNA
gtggccgaagtccaggctgtgcg

SEQ ID NO: 58660 - RNA, 23 nt, synthetic construct
  source 1..23: mol_type = other RNA
gctcacggttcctgcagaccagg

SEQ ID NO: 58661 - RNA, 23 nt, synthetic construct
  source 1..23: mol_type = other RNA
gtggccgaagtccaggctgtgcg

SEQ ID NO: 58662 - RNA, 23 nt, synthetic construct
  source 1..23: mol_type = other RNA
gggaagtccccgtggaaggctct

SEQ ID NO: 58663 - RNA, 23 nt, synthetic construct
  source 1..23: mol_type = other RNA
gctcacggttcctgcagaccagg

SEQ ID NO: 58664 - RNA, 23 nt, synthetic construct
  source 1..23: mol_type = other RNA
gtggccgaagtccaggctgtgcg

SEQ ID NO: 58665 - RNA, 23 nt, synthetic construct
  source 1..23: mol_type = other RNA
gctcacggttcctgcagaccagg

SEQ ID NO: 58666 - RNA, 23 nt, synthetic construct
  source 1..23: mol_type = other RNA
gtggccgaagtccaggctgtgcg

SEQ ID NO: 58667 - RNA, 23 nt, synthetic construct
  source 1..23: mol_type = other RNA
gggaagtccccgtggaaggctct

SEQ ID NO: 58668 - RNA, 23 nt, synthetic construct
  source 1..23: mol_type = other RNA
gctcacggttcctgcagaccagg

SEQ ID NO: 58669 - RNA, 23 nt, synthetic construct
  source 1..23: mol_type = other RNA
tgggaaggttgcaccaaccccgt

SEQ ID NO: 58670 - RNA, 23 nt, synthetic construct
  source 1..23: mol_type = other RNA
ctgttgacccaggtttcattcag

SEQ ID NO: 58671 - RNA, 23 nt, synthetic construct
  source 1..23: mol_type = other RNA
ttgcgacctcagccctgagttac

SEQ ID NO: 58672 - RNA, 23 nt, synthetic construct
  source 1..23: mol_type = other RNA
ctcaatgctcagggtttatttgc

SEQ ID NO: 58673 - RNA, 23 nt, synthetic construct
  source 1..23: mol_type = other RNA
agggtgtgggaagtcaccgtgga

SEQ ID NO: 58674 - RNA, 23 nt, synthetic construct
  source 1..23: mol_type = other RNA
tgtccgtcaggccgcacttccgc

SEQ ID NO: 58675 - RNA, 23 nt, synthetic construct
  source 1..23: mol_type = other RNA
gaaggaaacgctgcaggtgacgt

SEQ ID NO: 58676 - RNA, 23 nt, synthetic construct
  source 1..23: mol_type = other RNA
ctcccatccgacaccagccccgg

SEQ ID NO: 58677 - RNA, 23 nt, synthetic construct
  source 1..23: mol_type = other RNA
ctctccaggcttgtaggtggcct

SEQ ID NO: 58678 - RNA, 23 nt, synthetic construct
  source 1..23: mol_type = other RNA
agcagagaacccgcagctcgtag

SEQ ID NO: 58679 - RNA, 23 nt, synthetic construct
  source 1..23: mol_type = other RNA
gagggccccggcatggggtagct

SEQ ID NO: 58680 - RNA, 23 nt, synthetic construct
  source 1..23: mol_type = other RNA
gagggccccggcatggggtagct

SEQ ID NO: 58681 - RNA, 23 nt, synthetic construct
  source 1..23: mol_type = other RNA
gagggccccggcatggggtagct

SEQ ID NO: 58682 - RNA, 23 nt, synthetic construct
  source 1..23: mol_type = other RNA
gagggccccggcatggggtagct

SEQ ID NO: 58683 - RNA, 23 nt, synthetic construct
  source 1..23: mol_type = other RNA
ggtggtcagcactctggcggtgt

SEQ ID NO: 58684 - RNA, 23 nt, synthetic construct
  source 1..23: mol_type = other RNA
gtggggggtgtgccagtcggggc

SEQ ID NO: 58685 - RNA, 23 nt, synthetic construct
  source 1..23: mol_type = other RNA
atgcaggcgttgaagaatgggcc

SEQ ID NO: 58686 - RNA, 23 nt, synthetic construct
  source 1..23: mol_type = other RNA
ctctgcgtaagcctccaggctct

SEQ ID NO: 58687 - RNA, 23 nt, synthetic construct
  source 1..23: mol_type = other RNA
actggcagttgctgacccaccgc

SEQ ID NO: 58688 - RNA, 23 nt, synthetic construct
  source 1..23: mol_type = other RNA
ggtacacatgtggcagggaaggg

SEQ ID NO: 58689 - RNA, 23 nt, synthetic construct
  source 1..23: mol_type = other RNA
gacctcggtctcgcagccctggt

SEQ ID NO: 58690 - RNA, 23 nt, synthetic construct
  source 1..23: mol_type = other RNA
acacacggcgccctcgtcgtgca

SEQ ID NO: 58691 - RNA, 23 nt, synthetic construct
  source 1..23: mol_type = other RNA
actgccatagccccccggagcag

SEQ ID NO: 58692 - RNA, 23 nt, synthetic construct
  source 1..23: mol_type = other RNA
cgccctcgtcgtgcaccacctct

SEQ ID NO: 58693 - RNA, 23 nt, synthetic construct
  source 1..23: mol_type = other RNA
ttcccacccgtacatgaacacac

SEQ ID NO: 58694 - RNA, 23 nt, synthetic construct
  source 1..23: mol_type = other RNA
ccgccgtcgaccggatgctcggg

SEQ ID NO: 58695 - RNA, 23 nt, synthetic construct
  source 1..23: mol_type = other RNA
ggcactttggtagtgtgagctgt

SEQ ID NO: 58696 - RNA, 23 nt, synthetic construct
  source 1..23: mol_type = other RNA
cggcatggggtagctgtagtcca

SEQ ID NO: 58697 - RNA, 23 nt, synthetic construct
  source 1..23: mol_type = other RNA
agcactttggtagtgtgagctgt

SEQ ID NO: 58698 - RNA, 23 nt, synthetic construct
  source 1..23: mol_type = other RNA
cggcatggggtagctgtagtcca

SEQ ID NO: 58699 - RNA, 23 nt, synthetic construct
  source 1..23: mol_type = other RNA
ggcactttggtagtgtgagctgt

SEQ ID NO: 58700 - RNA, 23 nt, synthetic construct
  source 1..23: mol_type = other RNA
cggcatggggtagctgtagtcca

SEQ ID NO: 58701 - RNA, 23 nt, synthetic construct
  source 1..23: mol_type = other RNA
ggcactttggtagtgtgagctgt

SEQ ID NO: 58702 - RNA, 23 nt, synthetic construct
  source 1..23: mol_type = other RNA
cggcatggggtagctgtagtcca

SEQ ID NO: 58703 - RNA, 23 nt, synthetic construct
  source 1..23: mol_type = other RNA
ggcactttggtagtgtgagctgt

SEQ ID NO: 58704 - RNA, 23 nt, synthetic construct
  source 1..23: mol_type = other RNA
gctgggacggtccacgtggtcca

SEQ ID NO: 58705 - RNA, 23 nt, synthetic construct
  source 1..23: mol_type = other RNA
gcctgcggcaccacgagcatggc

SEQ ID NO: 58706 - RNA, 23 nt, synthetic construct
  source 1..23: mol_type = other RNA
accgccatccatggtgtgccctg

SEQ ID NO: 58707 - RNA, 23 nt, synthetic construct
  source 1..23: mol_type = other RNA
gctgctgtcggcacatttcttgg

SEQ ID NO: 58708 - RNA, 23 nt, synthetic construct
  source 1..23: mol_type = other RNA
ccgcggcaagtgggctggcaggc

SEQ ID NO: 58709 - RNA, 23 nt, synthetic construct
  source 1..23: mol_type = other RNA
cacaggcacgaaggaaacgctgc

SEQ ID NO: 58710 - RNA, 23 nt, synthetic construct
  source 1..23: mol_type = other RNA
actcctgggcgggcacacaggcg

SEQ ID NO: 58711 - RNA, 23 nt, synthetic construct
  source 1..23: mol_type = other RNA
gcgtagcaggggcactcctgggc

SEQ ID NO: 58712 - RNA, 23 nt, synthetic construct
  source 1..23: mol_type = other RNA
tgaatggcgttgtggctggagtt

SEQ ID NO: 58713 - RNA, 23 nt, synthetic construct
  source 1..23: mol_type = other RNA
accgtcacggggcctgagctgga

SEQ ID NO: 58714 - RNA, 23 nt, synthetic construct
  source 1..23: mol_type = other RNA
caccaggccgaagtggacgtcac

SEQ ID NO: 58715 - RNA, 23 nt, synthetic construct
  source 1..23: mol_type = other RNA
cagaggacccggatcctgtagtt

SEQ ID NO: 58716 - RNA, 23 nt, synthetic construct
  source 1..23: mol_type = other RNA
tgctagggtgagggctggacagg

SEQ ID NO: 58717 - RNA, 23 nt, synthetic construct
  source 1..23: mol_type = other RNA
gtcagcactgtggaggtgtgggt

SEQ ID NO: 58718 - RNA, 23 nt, synthetic construct
  source 1..23: mol_type = other RNA
cgtgctggtcagcactttgaggg

SEQ ID NO: 58719 - RNA, 23 nt, synthetic construct
  source 1..23: mol_type = other RNA
ggcagggaccgcccgtgtgtggt

SEQ ID NO: 58720 - RNA, 23 nt, synthetic construct
  source 1..23: mol_type = other RNA
tgctagggtgagggctggacagg

SEQ ID NO: 58721 - RNA, 23 nt, synthetic construct
  source 1..23: mol_type = other RNA
tgctagggtgagggctggacagg

SEQ ID NO: 58722 - RNA, 23 nt, synthetic construct
  source 1..23: mol_type = other RNA
gtcagcactgtggaggtgtgggt

SEQ ID NO: 58723 - RNA, 23 nt, synthetic construct
  source 1..23: mol_type = other RNA
gtcagcactgtggaggtgtgggt

SEQ ID NO: 58724 - RNA, 23 nt, synthetic construct
  source 1..23: mol_type = other RNA
tgcacactgcgtagaaatggcag

SEQ ID NO: 58725 - RNA, 23 nt, synthetic construct
  source 1..23: mol_type = other RNA
cagtgaggacgatatccatggac

SEQ ID NO: 58726 - RNA, 23 nt, synthetic construct
  source 1..23: mol_type = other RNA
gatcacagagcggctgtggtggg

SEQ ID NO: 58727 - RNA, 23 nt, synthetic construct
  source 1..23: mol_type = other RNA
gggcccgggggcacaaggttgtg

SEQ ID NO: 58728 - RNA, 23 nt, synthetic construct
  source 1..23: mol_type = other RNA
gctctgcgtaagcctccaggctc

SEQ ID NO: 58729 - RNA, 23 nt, synthetic construct
  source 1..23: mol_type = other RNA
caggtgaggtcgcacaggccacc

SEQ ID NO: 58730 - RNA, 23 nt, synthetic construct
  source 1..23: mol_type = other RNA
gaaatttaggaaacccatcgggt

SEQ ID NO: 58731 - RNA, 23 nt, synthetic construct
  source 1..23: mol_type = other RNA
ccatcgggcgtgaggcaggcggt

SEQ ID NO: 58732 - RNA, 23 nt, synthetic construct
  source 1..23: mol_type = other RNA
acttggacgctccggggcaggag

SEQ ID NO: 58733 - RNA, 23 nt, synthetic construct
  source 1..23: mol_type = other RNA
gccacactcatccacgtgggtgt

SEQ ID NO: 58734 - RNA, 23 nt, synthetic construct
  source 1..23: mol_type = other RNA
gaggaggcccaaggttttcatga

SEQ ID NO: 58735 - RNA, 23 nt, synthetic construct
  source 1..23: mol_type = other RNA
gcggccggacgtggccagctgga

SEQ ID NO: 58736 - RNA, 23 nt, synthetic construct
  source 1..23: mol_type = other RNA
gttctcagggtggaggtcggggt

SEQ ID NO: 58737 - RNA, 23 nt, synthetic construct
  source 1..23: mol_type = other RNA
accagcgtccggcacgcgctcgg

SEQ ID NO: 58738 - RNA, 23 nt, synthetic construct
  source 1..23: mol_type = other RNA
ttgtccgtcaggccgcacttccg

SEQ ID NO: 58739 - RNA, 23 nt, synthetic construct
  source 1..23: mol_type = other RNA
tatcttgtagggtgggtccccac

SEQ ID NO: 58740 - RNA, 23 nt, synthetic construct
  source 1..23: mol_type = other RNA
ggccgagggggtgaccgtcacgg

SEQ ID NO: 58741 - RNA, 23 nt, synthetic construct
  source 1..23: mol_type = other RNA
ggagcctgcaggcgtcgtggggc

SEQ ID NO: 58742 - RNA, 23 nt, synthetic construct
  source 1..23: mol_type = other RNA
gtggccgtggcggtaagcactgt

SEQ ID NO: 58743 - RNA, 23 nt, synthetic construct
  source 1..23: mol_type = other RNA
gtggccgtggcggtaagcactgt

SEQ ID NO: 58744 - RNA, 23 nt, synthetic construct
  source 1..23: mol_type = other RNA
cagcactggggggataggtgttg

SEQ ID NO: 58745 - RNA, 23 nt, synthetic construct
  source 1..23: mol_type = other RNA
cagcactggggggataggtgttg

SEQ ID NO: 58746 - RNA, 23 nt, synthetic construct
  source 1..23: mol_type = other RNA
gcggcagtggttccgtcccgctg

SEQ ID NO: 58747 - RNA, 23 nt, synthetic construct
  source 1..23: mol_type = other RNA
tattcgcagcagagaacccgcag

SEQ ID NO: 58748 - RNA, 23 nt, synthetic construct
  source 1..23: mol_type = other RNA
gagcctgcaggcgtcgtggggcc

SEQ ID NO: 58749 - RNA, 23 nt, synthetic construct
  source 1..23: mol_type = other RNA
atggatctctctcatgaggacat

SEQ ID NO: 58750 - RNA, 23 nt, synthetic construct
  source 1..23: mol_type = other RNA
ctggagcccactaggcctcggcg

SEQ ID NO: 58751 - RNA, 23 nt, synthetic construct
  source 1..23: mol_type = other RNA
caggctgagcgtcaccgctttca

SEQ ID NO: 58752 - RNA, 23 nt, synthetic construct
  source 1..23: mol_type = other RNA
tcgctgagctgtacgcccttggc

SEQ ID NO: 58753 - RNA, 23 nt, synthetic construct
  source 1..23: mol_type = other RNA
ctcaggttttcaaacgtctcaaa

SEQ ID NO: 58754 - RNA, 23 nt, synthetic construct
  source 1..23: mol_type = other RNA
gggccgagggggtgaccgtcacg

SEQ ID NO: 58755 - RNA, 23 nt, synthetic construct
  source 1..23: mol_type = other RNA
gcacatcttgaagacgccctcct

SEQ ID NO: 58756 - RNA, 23 nt, synthetic construct
  source 1..23: mol_type = other RNA
tggagcctgcaggcgtcgtgggg

SEQ ID NO: 58757 - RNA, 23 nt, synthetic construct
  source 1..23: mol_type = other RNA
ttgacagcgggtcgtgccctggc

SEQ ID NO: 58758 - RNA, 23 nt, synthetic construct
  source 1..23: mol_type = other RNA
gtggttgtggtagttggcacttt

SEQ ID NO: 58759 - RNA, 23 nt, synthetic construct
  source 1..23: mol_type = other RNA
gtcagcactgtggcggtgtgggt

SEQ ID NO: 58760 - RNA, 23 nt, synthetic construct
  source 1..23: mol_type = other RNA
actgtgggtgtcgtggccgtggt

SEQ ID NO: 58761 - RNA, 23 nt, synthetic construct
  source 1..23: mol_type = other RNA
gactgtgggtgtcgtggccgtgg

SEQ ID NO: 58762 - RNA, 23 nt, synthetic construct
  source 1..23: mol_type = other RNA
gtcagcactgtggcggtgtgggt

SEQ ID NO: 58763 - RNA, 23 nt, synthetic construct
  source 1..23: mol_type = other RNA
actgtgggtgtcgtggccgtggt

SEQ ID NO: 58764 - RNA, 23 nt, synthetic construct
  source 1..23: mol_type = other RNA
gactgtgggtgtcgtggccgtgg

SEQ ID NO: 58765 - RNA, 23 nt, synthetic construct
  source 1..23: mol_type = other RNA
actgtgggtgtcgtggccgtggt

SEQ ID NO: 58766 - RNA, 23 nt, synthetic construct
  source 1..23: mol_type = other RNA
gactgtgggtgtcgtggccgtgg

SEQ ID NO: 58767 - RNA, 23 nt, synthetic construct
  source 1..23: mol_type = other RNA
gcaccatcacggtggctatagtg

SEQ ID NO: 58768 - RNA, 23 nt, synthetic construct
  source 1..23: mol_type = other RNA
cagaggtacacggtgcagttgtc

SEQ ID NO: 58769 - RNA, 23 nt, synthetic construct
  source 1..23: mol_type = other RNA
cgcacatgcttagtttgttccag

SEQ ID NO: 58770 - RNA, 23 nt, synthetic construct
  source 1..23: mol_type = other RNA
cctgcggcaccacgagcatggcc

SEQ ID NO: 58771 - RNA, 23 nt, synthetic construct
  source 1..23: mol_type = other RNA
ggacgtcggggcaccgccatcca

SEQ ID NO: 58772 - RNA, 23 nt, synthetic construct
  source 1..23: mol_type = other RNA
gaggacgtcggggcaccgccatc

SEQ ID NO: 58773 - RNA, 23 nt, synthetic construct
  source 1..23: mol_type = other RNA
aggcggcgcggcagtgctcagag

SEQ ID NO: 58774 - RNA, 23 nt, synthetic construct
  source 1..23: mol_type = other RNA
gtcagcaccagccggatgctgac

SEQ ID NO: 58775 - RNA, 23 nt, synthetic construct
  source 1..23: mol_type = other RNA
ggccggcaagggcagcgggtccg

SEQ ID NO: 58776 - RNA, 23 nt, synthetic construct
  source 1..23: mol_type = other RNA
caccagtgcgtggcactccgcaa

SEQ ID NO: 58777 - RNA, 23 nt, synthetic construct
  source 1..23: mol_type = other RNA
tccaccagtgcgtggcactccgc

SEQ ID NO: 58778 - RNA, 23 nt, synthetic construct
  source 1..23: mol_type = other RNA
gtgcgtgatgtcatccagcaccg

SEQ ID NO: 58779 - RNA, 23 nt, synthetic construct
  source 1..23: mol_type = other RNA
gagtggcagcgcgagaaggcact

SEQ ID NO: 58780 - RNA, 23 nt, synthetic construct
  source 1..23: mol_type = other RNA
cgctgagctgtacgcccttggcg

SEQ ID NO: 58781 - RNA, 23 nt, synthetic construct
  source 1..23: mol_type = other RNA
ctcaggccgcggcaagtgggctg

SEQ ID NO: 58782 - RNA, 23 nt, synthetic construct
  source 1..23: mol_type = other RNA
acgtcggcctcactcaggccgcg

SEQ ID NO: 58783 - RNA, 23 nt, synthetic construct
  source 1..23: mol_type = other RNA
ccacaggcacgaaggaaacgctg

SEQ ID NO: 58784 - RNA, 23 nt, synthetic construct
  source 1..23: mol_type = other RNA
tgcagtccaggtacaccatgggg

SEQ ID NO: 58785 - RNA, 23 nt, synthetic construct
  source 1..23: mol_type = other RNA
ttgcagtcgaccctgatggtctc

SEQ ID NO: 58786 - RNA, 23 nt, synthetic construct
  source 1..23: mol_type = other RNA
gctggtcttccggtcccaggaca

SEQ ID NO: 58787 - RNA, 23 nt, synthetic construct
  source 1..23: mol_type = other RNA
gccacccgagtcgcaggcacacg

SEQ ID NO: 58788 - RNA, 23 nt, synthetic construct
  source 1..23: mol_type = other RNA
ctcgcagtcgccacccgagtcgc

SEQ ID NO: 58789 - RNA, 23 nt, synthetic construct
  source 1..23: mol_type = other RNA
gccgttgcttccgcagatggcga

SEQ ID NO: 58790 - RNA, 23 nt, synthetic construct
  source 1..23: mol_type = other RNA
tgccgttgcttccgcagatggcg

SEQ ID NO: 58791 - RNA, 23 nt, synthetic construct
  source 1..23: mol_type = other RNA
ggtgccgttgcttccgcagatgg

SEQ ID NO: 58792 - RNA, 23 nt, synthetic construct
  source 1..23: mol_type = other RNA
ggacacacacggtggagaccggg

SEQ ID NO: 58793 - RNA, 23 nt, synthetic construct
  source 1..23: mol_type = other RNA
cggacacacacggtggagaccgg

SEQ ID NO: 58794 - RNA, 23 nt, synthetic construct
  source 1..23: mol_type = other RNA
actcgtaggctgcggcgttgaga

SEQ ID NO: 58795 - RNA, 23 nt, synthetic construct
  source 1..23: mol_type = other RNA
tcgtggggcctcccgtggtggct

SEQ ID NO: 58796 - RNA, 23 nt, synthetic construct
  source 1..23: mol_type = other RNA
agcctgcaggcgtcgtggggcct

SEQ ID NO: 58797 - RNA, 23 nt, synthetic construct
  source 1..23: mol_type = other RNA
gggctgagcgtgttggaagggtg

SEQ ID NO: 58798 - RNA, 23 nt, synthetic construct
  source 1..23: mol_type = other RNA
cgggcgagctctggaggttgcca

SEQ ID NO: 58799 - RNA, 23 nt, synthetic construct
  source 1..23: mol_type = other RNA
cctgtcgggcgagctctggaggt

SEQ ID NO: 58800 - RNA, 23 nt, synthetic construct
  source 1..23: mol_type = other RNA
ggaagaggggatgggtgtaacgc

SEQ ID NO: 58801 - RNA, 23 nt, synthetic construct
  source 1..23: mol_type = other RNA
agagccggtggccccagttgtgg

SEQ ID NO: 58802 - RNA, 23 nt, synthetic construct
  source 1..23: mol_type = other RNA
tgaagcccgtggttgtggtagtt

SEQ ID NO: 58803 - RNA, 23 nt, synthetic construct
  source 1..23: mol_type = other RNA
tcaccgtggagcctctggttgtg

SEQ ID NO: 58804 - RNA, 23 nt, synthetic construct
  source 1..23: mol_type = other RNA
atagaaccagtggccacagttgt

SEQ ID NO: 58805 - RNA, 23 nt, synthetic construct
  source 1..23: mol_type = other RNA
ccatagaaccagtggccacagtt

SEQ ID NO: 58806 - RNA, 23 nt, synthetic construct
  source 1..23: mol_type = other RNA
gccatagaaccagtggccacagt

SEQ ID NO: 58807 - RNA, 23 nt, synthetic construct
  source 1..23: mol_type = other RNA
ctgctagggtgtgggaagtcacc

SEQ ID NO: 58808 - RNA, 23 nt, synthetic construct
  source 1..23: mol_type = other RNA
gggcagcagggtcgaggtgcggg

SEQ ID NO: 58809 - RNA, 23 nt, synthetic construct
  source 1..23: mol_type = other RNA
gccgtagagctggtggccggggt

SEQ ID NO: 58810 - RNA, 23 nt, synthetic construct
  source 1..23: mol_type = other RNA
ggccgtagagctggtggccgggg

SEQ ID NO: 58811 - RNA, 23 nt, synthetic construct
  source 1..23: mol_type = other RNA
gctgtagtgctcggctctgtgag

SEQ ID NO: 58812 - RNA, 23 nt, synthetic construct
  source 1..23: mol_type = other RNA
tccggtgggcaccgtcacggtgg

SEQ ID NO: 58813 - RNA, 23 nt, synthetic construct
  source 1..23: mol_type = other RNA
gaggcggtggccgtggatccggt

SEQ ID NO: 58814 - RNA, 23 nt, synthetic construct
  source 1..23: mol_type = other RNA
ggggtgccagcagttgcctgggt

SEQ ID NO: 58815 - RNA, 23 nt, synthetic construct
  source 1..23: mol_type = other RNA
acatgtggggtgccagcagttgc

SEQ ID NO: 58816 - RNA, 23 nt, synthetic construct
  source 1..23: mol_type = other RNA
gctggtgactgtgggtgtcgtgg

SEQ ID NO: 58817 - RNA, 23 nt, synthetic construct
  source 1..23: mol_type = other RNA
tgaagcccgtggttgtggtagtc

SEQ ID NO: 58818 - RNA, 23 nt, synthetic construct
  source 1..23: mol_type = other RNA
atagaaccagtggccacagttgt

SEQ ID NO: 58819 - RNA, 23 nt, synthetic construct
  source 1..23: mol_type = other RNA
ccatagaaccagtggccacagtt

SEQ ID NO: 58820 - RNA, 23 nt, synthetic construct
  source 1..23: mol_type = other RNA
gccatagaaccagtggccacagt

SEQ ID NO: 58821 - RNA, 23 nt, synthetic construct
  source 1..23: mol_type = other RNA
gtgcctgaggtggccgaagtcca

SEQ ID NO: 58822 - RNA, 23 nt, synthetic construct
  source 1..23: mol_type = other RNA
tcggtggtcctgctgctagggtg

SEQ ID NO: 58823 - RNA, 23 nt, synthetic construct
  source 1..23: mol_type = other RNA
gggcagcagggtcgaggtgcggg

SEQ ID NO: 58824 - RNA, 23 nt, synthetic construct
  source 1..23: mol_type = other RNA
gccgtagagctggtggccggggt

SEQ ID NO: 58825 - RNA, 23 nt, synthetic construct
  source 1..23: mol_type = other RNA
ggccgtagagctggtggccgggg

SEQ ID NO: 58826 - RNA, 23 nt, synthetic construct
  source 1..23: mol_type = other RNA
ggtggtctgttctgggagggtcc

SEQ ID NO: 58827 - RNA, 23 nt, synthetic construct
  source 1..23: mol_type = other RNA
gggtggattgtggacatggtggc

SEQ ID NO: 58828 - RNA, 23 nt, synthetic construct
  source 1..23: mol_type = other RNA
ccttgtcgtggtggccttcgtgg

SEQ ID NO: 58829 - RNA, 23 nt, synthetic construct
  source 1..23: mol_type = other RNA
tccggtgggcaccgtcacggtgg

SEQ ID NO: 58830 - RNA, 23 nt, synthetic construct
  source 1..23: mol_type = other RNA
gaggcggtggccgtggatccggt

SEQ ID NO: 58831 - RNA, 23 nt, synthetic construct
  source 1..23: mol_type = other RNA
agggtgccagcagttgcccgggt

SEQ ID NO: 58832 - RNA, 23 nt, synthetic construct
  source 1..23: mol_type = other RNA
aggggatggctgtaacgctggta

SEQ ID NO: 58833 - RNA, 23 nt, synthetic construct
  source 1..23: mol_type = other RNA
ttgtggtagtcggcactttggta

SEQ ID NO: 58834 - RNA, 23 nt, synthetic construct
  source 1..23: mol_type = other RNA
tgaagcccgtggttgtggtagtc

SEQ ID NO: 58835 - RNA, 23 nt, synthetic construct
  source 1..23: mol_type = other RNA
tcaccgtggagcctctggttgtg

SEQ ID NO: 58836 - RNA, 23 nt, synthetic construct
  source 1..23: mol_type = other RNA
atagaaccagtggccacagttgt

SEQ ID NO: 58837 - RNA, 23 nt, synthetic construct
  source 1..23: mol_type = other RNA
ccatagaaccagtggccacagtt

SEQ ID NO: 58838 - RNA, 23 nt, synthetic construct
  source 1..23: mol_type = other RNA
gccatagaaccagtggccacagt

SEQ ID NO: 58839 - RNA, 23 nt, synthetic construct
  source 1..23: mol_type = other RNA
tcggtggtcctgctgctagggtg

SEQ ID NO: 58840 - RNA, 23 nt, synthetic construct
  source 1..23: mol_type = other RNA
gggcagcagggtcgaggtgcggg

SEQ ID NO: 58841 - RNA, 23 nt, synthetic construct
  source 1..23: mol_type = other RNA
gccgtagagctggtggccggggt

SEQ ID NO: 58842 - RNA, 23 nt, synthetic construct
  source 1..23: mol_type = other RNA
ggccgtagagctggtggccgggg

SEQ ID NO: 58843 - RNA, 23 nt, synthetic construct
  source 1..23: mol_type = other RNA
gctgtagtgctcggctctgtgag

SEQ ID NO: 58844 - RNA, 23 nt, synthetic construct
  source 1..23: mol_type = other RNA
tccggtgggcaccgtcacggtgg

SEQ ID NO: 58845 - RNA, 23 nt, synthetic construct
  source 1..23: mol_type = other RNA
gaggcggtggccgtggatccggt

SEQ ID NO: 58846 - RNA, 23 nt, synthetic construct
  source 1..23: mol_type = other RNA
ggggtgccagcagttgcctgggt

SEQ ID NO: 58847 - RNA, 23 nt, synthetic construct
  source 1..23: mol_type = other RNA
acatgtggggtgccagcagttgc

SEQ ID NO: 58848 - RNA, 23 nt, synthetic construct
  source 1..23: mol_type = other RNA
gctggtgactgtgggtgtcgtgg

SEQ ID NO: 58849 - RNA, 23 nt, synthetic construct
  source 1..23: mol_type = other RNA
ttgtggtagtcggcactttggta

SEQ ID NO: 58850 - RNA, 23 nt, synthetic construct
  source 1..23: mol_type = other RNA
tgaagcccgtggttgtggtagtc

SEQ ID NO: 58851 - RNA, 23 nt, synthetic construct
  source 1..23: mol_type = other RNA
gccactggttgtgggtgtggtgg

SEQ ID NO: 58852 - RNA, 23 nt, synthetic construct
  source 1..23: mol_type = other RNA
atagaaccagtggccacagttgt

SEQ ID NO: 58853 - RNA, 23 nt, synthetic construct
  source 1..23: mol_type = other RNA
ccatagaaccagtggccacagtt

SEQ ID NO: 58854 - RNA, 23 nt, synthetic construct
  source 1..23: mol_type = other RNA
gccatagaaccagtggccacagt

SEQ ID NO: 58855 - RNA, 23 nt, synthetic construct
  source 1..23: mol_type = other RNA
gtgcctgaggtggccgaagtcca

SEQ ID NO: 58856 - RNA, 23 nt, synthetic construct
  source 1..23: mol_type = other RNA
tcggtggtcctgctgctagggtg

SEQ ID NO: 58857 - RNA, 23 nt, synthetic construct
  source 1..23: mol_type = other RNA
gggcagcagggtcgaggtgcggg

SEQ ID NO: 58858 - RNA, 23 nt, synthetic construct
  source 1..23: mol_type = other RNA
gccgtagagctggtggccggggt

SEQ ID NO: 58859 - RNA, 23 nt, synthetic construct
  source 1..23: mol_type = other RNA
ggccgtagagctggtggccgggg

SEQ ID NO: 58860 - RNA, 23 nt, synthetic construct
  source 1..23: mol_type = other RNA
ggtggtctgttctgggagggtcc

SEQ ID NO: 58861 - RNA, 23 nt, synthetic construct
  source 1..23: mol_type = other RNA
gggtggattgtggacatggtggc

SEQ ID NO: 58862 - RNA, 23 nt, synthetic construct
  source 1..23: mol_type = other RNA
ccttgtcgtggtggccttcgtgg

SEQ ID NO: 58863 - RNA, 23 nt, synthetic construct
  source 1..23: mol_type = other RNA
gctgtagtgctcggctctgtgag

SEQ ID NO: 58864 - RNA, 23 nt, synthetic construct
  source 1..23: mol_type = other RNA
tccggtgggcaccgtcacggtgg

SEQ ID NO: 58865 - RNA, 23 nt, synthetic construct
  source 1..23: mol_type = other RNA
gaggcggtggccgtggatccggt

SEQ ID NO: 58866 - RNA, 23 nt, synthetic construct
  source 1..23: mol_type = other RNA
ggggtgccagcagttgcctgggt

SEQ ID NO: 58867 - RNA, 23 nt, synthetic construct
  source 1..23: mol_type = other RNA
acatgtggggtgccagcagttgc

SEQ ID NO: 58868 - RNA, 23 nt, synthetic construct
  source 1..23: mol_type = other RNA
gctggtgactgtgggtgtcgtgg

SEQ ID NO: 58869 - RNA, 23 nt, synthetic construct
  source 1..23: mol_type = other RNA
ttgtggtagtcggcactttggta

SEQ ID NO: 58870 - RNA, 23 nt, synthetic construct
  source 1..23: mol_type = other RNA
tgaagcccgtggttgtggtagtc

SEQ ID NO: 58871 - RNA, 23 nt, synthetic construct
  source 1..23: mol_type = other RNA
gccactggttgtgggtgtggtgg

SEQ ID NO: 58872 - RNA, 23 nt, synthetic construct
  source 1..23: mol_type = other RNA
gtcagcactctggcggtgtgggt

SEQ ID NO: 58873 - RNA, 23 nt, synthetic construct
  source 1..23: mol_type = other RNA
atagaaccagtggccacagttgt

SEQ ID NO: 58874 - RNA, 23 nt, synthetic construct
  source 1..23: mol_type = other RNA
ccatagaaccagtggccacagtt

SEQ ID NO: 58875 - RNA, 23 nt, synthetic construct
  source 1..23: mol_type = other RNA
gccatagaaccagtggccacagt

SEQ ID NO: 58876 - RNA, 23 nt, synthetic construct
  source 1..23: mol_type = other RNA
actggggtgatgggtgttgtccc

SEQ ID NO: 58877 - RNA, 23 nt, synthetic construct
  source 1..23: mol_type = other RNA
ggcaccatcacggtggctatagt

SEQ ID NO: 58878 - RNA, 23 nt, synthetic construct
  source 1..23: mol_type = other RNA
cgtggaaccggtgggcaccatca

SEQ ID NO: 58879 - RNA, 23 nt, synthetic construct
  source 1..23: mol_type = other RNA
ccgtggaaccggtgggcaccatc

SEQ ID NO: 58880 - RNA, 23 nt, synthetic construct
  source 1..23: mol_type = other RNA
gccgtggaaccggtgggcaccat

SEQ ID NO: 58881 - RNA, 23 nt, synthetic construct
  source 1..23: mol_type = other RNA
catggtggtcaccactttggggg

SEQ ID NO: 58882 - RNA, 23 nt, synthetic construct
  source 1..23: mol_type = other RNA
agatgacttccccgggcgagaaa

SEQ ID NO: 58883 - RNA, 23 nt, synthetic construct
  source 1..23: mol_type = other RNA
gacgttggccacaggctttgggt

SEQ ID NO: 58884 - RNA, 23 nt, synthetic construct
  source 1..23: mol_type = other RNA
acagggctggctcgggtccgaca

SEQ ID NO: 58885 - RNA, 23 nt, synthetic construct
  source 1..23: mol_type = other RNA
acatgctgcagatgcactcgcac

SEQ ID NO: 58886 - RNA, 23 nt, synthetic construct
  source 1..23: mol_type = other RNA
gctgtcggggaccagccacgtct

SEQ ID NO: 58887 - RNA, 23 nt, synthetic construct
  source 1..23: mol_type = other RNA
tgggcccgggggcacaaggttgt

SEQ ID NO: 58888 - RNA, 23 nt, synthetic construct
  source 1..23: mol_type = other RNA
ctctggcagggcacctcaaggcg

SEQ ID NO: 58889 - RNA, 23 nt, synthetic construct
  source 1..23: mol_type = other RNA
gtgaggtcgcacaggccaccggt

SEQ ID NO: 58890 - RNA, 23 nt, synthetic construct
  source 1..23: mol_type = other RNA
ggtggcaggctgtatggggccgc

SEQ ID NO: 58891 - RNA, 23 nt, synthetic construct
  source 1..23: mol_type = other RNA
cgcctgggaaggttgcaccaacc

SEQ ID NO: 58892 - RNA, 23 nt, synthetic construct
  source 1..23: mol_type = other RNA
cctcctgacattgcaccgttggg

SEQ ID NO: 58893 - RNA, 23 nt, synthetic construct
  source 1..23: mol_type = other RNA
gcaggcggtctggacgcactccc

SEQ ID NO: 58894 - RNA, 23 nt, synthetic construct
  source 1..23: mol_type = other RNA
cagttgtccacatggctgttgac

SEQ ID NO: 58895 - RNA, 23 nt, synthetic construct
  source 1..23: mol_type = other RNA
tgcagctggacacatctgggcag

SEQ ID NO: 58896 - RNA, 23 nt, synthetic construct
  source 1..23: mol_type = other RNA
gccctcgcagaaggtgatgttga

SEQ ID NO: 58897 - RNA, 23 nt, synthetic construct
  source 1..23: mol_type = other RNA
gcagaggaggcccaaggttttca

SEQ ID NO: 58898 - RNA, 23 nt, synthetic construct
  source 1..23: mol_type = other RNA
ggtttcacccacggggtgggcag

SEQ ID NO: 58899 - RNA, 23 nt, synthetic construct
  source 1..23: mol_type = other RNA
cttctggggccggtttcacccac

SEQ ID NO: 58900 - RNA, 23 nt, synthetic construct
  source 1..23: mol_type = other RNA
tcctgagtggcgccctcccgaaa

SEQ ID NO: 58901 - RNA, 23 nt, synthetic construct
  source 1..23: mol_type = other RNA
ctcctgagtggcgccctcccgaa

SEQ ID NO: 58902 - RNA, 23 nt, synthetic construct
  source 1..23: mol_type = other RNA
agcaggcatggacaggcggccgc

SEQ ID NO: 58903 - RNA, 23 nt, synthetic construct
  source 1..23: mol_type = other RNA
tgtgggtggtctctggagtagag

SEQ ID NO: 58904 - RNA, 23 nt, synthetic construct
  source 1..23: mol_type = other RNA
gtggcggtgtgggtggtccccgg

SEQ ID NO: 58905 - RNA, 23 nt, synthetic construct
  source 1..23: mol_type = other RNA
gtggcggtgtgggtggtccccgg

SEQ ID NO: 58906 - RNA, 23 nt, synthetic construct
  source 1..23: mol_type = other RNA
ctggcggtgtgggtggtccccgg

SEQ ID NO: 58907 - RNA, 23 nt, synthetic construct
  source 1..23: mol_type = other RNA
ggccgggaggccgttgaagtccc

SEQ ID NO: 58908 - RNA, 23 nt, synthetic construct
  source 1..23: mol_type = other RNA
cggtgcagttgtccacatggctg

SEQ ID NO: 58909 - RNA, 23 nt, synthetic construct
  source 1..23: mol_type = other RNA
aggcagccagagtgcgtgatgtc

SEQ ID NO: 58910 - RNA, 23 nt, synthetic construct
  source 1..23: mol_type = other RNA
aggccgggaggccgttgaagtcc

SEQ ID NO: 58911 - RNA, 23 nt, synthetic construct
  source 1..23: mol_type = other RNA
gctttcaggcagttctcgttgtc

SEQ ID NO: 58912 - RNA, 23 nt, synthetic construct
  source 1..23: mol_type = other RNA
gcctgtctgcaccacgatgaaga

SEQ ID NO: 58913 - RNA, 23 nt, synthetic construct
  source 1..23: mol_type = other RNA
accttgatgtagtccccgctctg

SEQ ID NO: 58914 - RNA, 23 nt, synthetic construct
  source 1..23: mol_type = other RNA
ggtgtggccgtggaattggtggc

SEQ ID NO: 58915 - RNA, 23 nt, synthetic construct
  source 1..23: mol_type = other RNA
cagttgccccggaaggtgtaaga

SEQ ID NO: 58916 - RNA, 23 nt, synthetic construct
  source 1..23: mol_type = other RNA
tgacctggccgttgcgacctcag

SEQ ID NO: 58917 - RNA, 23 nt, synthetic construct
  source 1..23: mol_type = other RNA
ccctcagcctcacagaggtacac

SEQ ID NO: 58918 - RNA, 23 nt, synthetic construct
  source 1..23: mol_type = other RNA
agtcgcaggcacacgcgtcgttc

SEQ ID NO: 58919 - RNA, 23 nt, synthetic construct
  source 1..23: mol_type = other RNA
agtcctgggccaagatgtactcg

SEQ ID NO: 58920 - RNA, 23 nt, synthetic construct
  source 1..23: mol_type = other RNA
gtgctgcacacccgcccattgtg

SEQ ID NO: 58921 - RNA, 23 nt, synthetic construct
  source 1..23: mol_type = other RNA
tcctcgtccgtgcagttgccggc

SEQ ID NO: 58922 - RNA, 23 nt, synthetic construct
  source 1..23: mol_type = other RNA
ggggccgagggggtgaccgtcac

SEQ ID NO: 58923 - RNA, 23 nt, synthetic construct
  source 1..23: mol_type = other RNA
tgcctgtcgggcgagctctggag

SEQ ID NO: 58924 - RNA, 23 nt, synthetic construct
  source 1..23: mol_type = other RNA
ccggcacgcgctcggggcaccca

SEQ ID NO: 58925 - RNA, 23 nt, synthetic construct
  source 1..23: mol_type = other RNA
gtgggctggcaggcatccaccac

SEQ ID NO: 58926 - RNA, 23 nt, synthetic construct
  source 1..23: mol_type = other RNA
gctgttctcagggtggaggtcgg

SEQ ID NO: 58927 - RNA, 23 nt, synthetic construct
  source 1..23: mol_type = other RNA
tgtgggaagtccccgtggaaggc

SEQ ID NO: 58928 - RNA, 23 nt, synthetic construct
  source 1..23: mol_type = other RNA
gtggtcgtggtggtaagcactgt

SEQ ID NO: 58929 - RNA, 23 nt, synthetic construct
  source 1..23: mol_type = other RNA
acagactgcccctccggccgcac

SEQ ID NO: 58930 - RNA, 23 nt, synthetic construct
  source 1..23: mol_type = other RNA
tgtgggaagtccccgtggaaggc

SEQ ID NO: 58931 - RNA, 23 nt, synthetic construct
  source 1..23: mol_type = other RNA
tggacatgggtgtggtggtctgt

SEQ ID NO: 58932 - RNA, 23 nt, synthetic construct
  source 1..23: mol_type = other RNA
ggccgtggatccagtggctgcag

SEQ ID NO: 58933 - RNA, 23 nt, synthetic construct
  source 1..23: mol_type = other RNA
atggtgacagtgaggacgatatc

SEQ ID NO: 58934 - RNA, 23 nt, synthetic construct
  source 1..23: mol_type = other RNA
cgctcacgcccagggcaggaatg

SEQ ID NO: 58935 - RNA, 23 nt, synthetic construct
  source 1..23: mol_type = other RNA
tgcactgcaccgacactgaaccc

SEQ ID NO: 58936 - RNA, 23 nt, synthetic construct
  source 1..23: mol_type = other RNA
ctcccgaaaggggtcctgctggc

SEQ ID NO: 58937 - RNA, 23 nt, synthetic construct
  source 1..23: mol_type = other RNA
gtgcagttgccggccggcaaggg

SEQ ID NO: 58938 - RNA, 23 nt, synthetic construct
  source 1..23: mol_type = other RNA
ctggcacgggtggggggacgggg

SEQ ID NO: 58939 - RNA, 23 nt, synthetic construct
  source 1..23: mol_type = other RNA
cctgggcgtgctggtctcggcct

SEQ ID NO: 58940 - RNA, 23 nt, synthetic construct
  source 1..23: mol_type = other RNA
gggctggagtcgagtgctgggtg

SEQ ID NO: 58941 - RNA, 23 nt, synthetic construct
  source 1..23: mol_type = other RNA
gggctggagtcgagtgctgggtg

SEQ ID NO: 58942 - RNA, 23 nt, synthetic construct
  source 1..23: mol_type = other RNA
gggctggagtcgagtgctgggtg

SEQ ID NO: 58943 - RNA, 23 nt, synthetic construct
  source 1..23: mol_type = other RNA
gggctggagtcgagtgctgggtg

SEQ ID NO: 58944 - RNA, 23 nt, synthetic construct
  source 1..23: mol_type = other RNA
tgttcctggcattggcacaggca

SEQ ID NO: 58945 - RNA, 23 nt, synthetic construct
  source 1..23: mol_type = other RNA
tggagtaggtgtcaaagtccccg

SEQ ID NO: 58946 - RNA, 23 nt, synthetic construct
  source 1..23: mol_type = other RNA
tggagtaggtgtcaaagtccccg

SEQ ID NO: 58947 - RNA, 23 nt, synthetic construct
  source 1..23: mol_type = other RNA
tggagtaggtgtcaaagtccccg

SEQ ID NO: 58948 - RNA, 23 nt, synthetic construct
  source 1..23: mol_type = other RNA
tggagtaggtgtcaaagtccccg

SEQ ID NO: 58949 - RNA, 23 nt, synthetic construct
  source 1..23: mol_type = other RNA
tggtggccacgggtgtggtggtc

SEQ ID NO: 58950 - RNA, 23 nt, synthetic construct
  source 1..23: mol_type = other RNA
gtggaaccggtgggcaccatcac

SEQ ID NO: 58951 - RNA, 23 nt, synthetic construct
  source 1..23: mol_type = other RNA
ggtgcagttgtccacatggctgt

SEQ ID NO: 58952 - RNA, 23 nt, synthetic construct
  source 1..23: mol_type = other RNA
gctccggccgtggcagggacaca

SEQ ID NO: 58953 - RNA, 23 nt, synthetic construct
  source 1..23: mol_type = other RNA
acggcgccctcgtcgtgcaccac

SEQ ID NO: 58954 - RNA, 23 nt, synthetic construct
  source 1..23: mol_type = other RNA
gggaagggggtgactcggtggtc

SEQ ID NO: 58955 - RNA, 23 nt, synthetic construct
  source 1..23: mol_type = other RNA
cccctgcagtggtcgctgatgca

SEQ ID NO: 58956 - RNA, 23 nt, synthetic construct
  source 1..23: mol_type = other RNA
cgttccacaggaatgtcagcacc

SEQ ID NO: 58957 - RNA, 23 nt, synthetic construct
  source 1..23: mol_type = other RNA
ccaggctgagcgtcaccgctttc

SEQ ID NO: 58958 - RNA, 23 nt, synthetic construct
  source 1..23: mol_type = other RNA
gctgttcctggcattggcacagg

SEQ ID NO: 58959 - RNA, 23 nt, synthetic construct
  source 1..23: mol_type = other RNA
tcaccgtggaacctctggttgtg

SEQ ID NO: 58960 - RNA, 23 nt, synthetic construct
  source 1..23: mol_type = other RNA
gccgtggatccagtggttgcggt

SEQ ID NO: 58961 - RNA, 23 nt, synthetic construct
  source 1..23: mol_type = other RNA
gcaggtgaggtcgcacaggccac

SEQ ID NO: 58962 - RNA, 23 nt, synthetic construct
  source 1..23: mol_type = other RNA
ggcacgggtggggggacggggac

SEQ ID NO: 58963 - RNA, 23 nt, synthetic construct
  source 1..23: mol_type = other RNA
ggcagccagagtgcgtgatgtca

SEQ ID NO: 58964 - RNA, 23 nt, synthetic construct
  source 1..23: mol_type = other RNA
gaagctgctgtcggcacatttct

SEQ ID NO: 58965 - RNA, 23 nt, synthetic construct
  source 1..23: mol_type = other RNA
gatggagttgaggaacacgccgc

SEQ ID NO: 58966 - RNA, 23 nt, synthetic construct
  source 1..23: mol_type = other RNA
gctgcgcccgtggcctccaccac

SEQ ID NO: 58967 - RNA, 23 nt, synthetic construct
  source 1..23: mol_type = other RNA
ccgcatgcggtcacagtccacct

SEQ ID NO: 58968 - RNA, 23 nt, synthetic construct
  source 1..23: mol_type = other RNA
tggggccgagggggtgaccgtca

SEQ ID NO: 58969 - RNA, 23 nt, synthetic construct
  source 1..23: mol_type = other RNA
gtgctagaggagggtgttgccat

SEQ ID NO: 58970 - RNA, 23 nt, synthetic construct
  source 1..23: mol_type = other RNA
ctgtgtgctagaggagggtgttg

SEQ ID NO: 58971 - RNA, 23 nt, synthetic construct
  source 1..23: mol_type = other RNA
agggccccggcatggggtagctg

SEQ ID NO: 58972 - RNA, 23 nt, synthetic construct
  source 1..23: mol_type = other RNA
ctcacggttcctgcagaccaggc

SEQ ID NO: 58973 - RNA, 23 nt, synthetic construct
  source 1..23: mol_type = other RNA
gtgctagaggagggtgttgccat

SEQ ID NO: 58974 - RNA, 23 nt, synthetic construct
  source 1..23: mol_type = other RNA
ctgtgtgctagaggagggtgttg

SEQ ID NO: 58975 - RNA, 23 nt, synthetic construct
  source 1..23: mol_type = other RNA
agggccccggcatggggtagctg

SEQ ID NO: 58976 - RNA, 23 nt, synthetic construct
  source 1..23: mol_type = other RNA
ctcacggttcctgcagaccaggc

SEQ ID NO: 58977 - RNA, 23 nt, synthetic construct
  source 1..23: mol_type = other RNA
tggatttggtggctgtgcttgtc

SEQ ID NO: 58978 - RNA, 23 nt, synthetic construct
  source 1..23: mol_type = other RNA
aggtgtgggtggtctccggagtg

SEQ ID NO: 58979 - RNA, 23 nt, synthetic construct
  source 1..23: mol_type = other RNA
gaagaggggatggctgtaacgct

SEQ ID NO: 58980 - RNA, 23 nt, synthetic construct
  source 1..23: mol_type = other RNA
gtgctagaggagggtgttgccat

SEQ ID NO: 58981 - RNA, 23 nt, synthetic construct
  source 1..23: mol_type = other RNA
ctgtgtgctagaggagggtgttg

SEQ ID NO: 58982 - RNA, 23 nt, synthetic construct
  source 1..23: mol_type = other RNA
agggccccggcatggggtagctg

SEQ ID NO: 58983 - RNA, 23 nt, synthetic construct
  source 1..23: mol_type = other RNA
ctcacggttcctgcagaccaggc

SEQ ID NO: 58984 - RNA, 23 nt, synthetic construct
  source 1..23: mol_type = other RNA
gtgctagaggagggtgttgccat

SEQ ID NO: 58985 - RNA, 23 nt, synthetic construct
  source 1..23: mol_type = other RNA
ctgtgtgctagaggagggtgttg

SEQ ID NO: 58986 - RNA, 23 nt, synthetic construct
  source 1..23: mol_type = other RNA
agggccccggcatggggtagctg

SEQ ID NO: 58987 - RNA, 23 nt, synthetic construct
  source 1..23: mol_type = other RNA
ctcacggttcctgcagaccaggc

SEQ ID NO: 58988 - RNA, 23 nt, synthetic construct
  source 1..23: mol_type = other RNA
tggatttggtggctgtgcttgtc

SEQ ID NO: 58989 - RNA, 23 nt, synthetic construct
  source 1..23: mol_type = other RNA
aggtgtgggtggtctccggagtg

SEQ ID NO: 58990 - RNA, 23 nt, synthetic construct
  source 1..23: mol_type = other RNA
gtgctagaggagggtgttgccat

SEQ ID NO: 58991 - RNA, 23 nt, synthetic construct
  source 1..23: mol_type = other RNA
ctgtgtgctagaggagggtgttg

SEQ ID NO: 58992 - RNA, 23 nt, synthetic construct
  source 1..23: mol_type = other RNA
ctggggtgatgggtgttgtccct

SEQ ID NO: 58993 - RNA, 23 nt, synthetic construct
  source 1..23: mol_type = other RNA
gccatcctttctgctgtcgggga

SEQ ID NO: 58994 - RNA, 23 nt, synthetic construct
  source 1..23: mol_type = other RNA
cccagagaggcaggtacacatgt

SEQ ID NO: 58995 - RNA, 23 nt, synthetic construct
  source 1..23: mol_type = other RNA
aggctctcccagggtaggactcc

SEQ ID NO: 58996 - RNA, 23 nt, synthetic construct
  source 1..23: mol_type = other RNA
aacacgtagttgcaaaggccagg

SEQ ID NO: 58997 - RNA, 23 nt, synthetic construct
  source 1..23: mol_type = other RNA
tgctgggacggtccacgtggtcc

SEQ ID NO: 58998 - RNA, 23 nt, synthetic construct
  source 1..23: mol_type = other RNA
tgttgggatcggtcaggcgcgag

SEQ ID NO: 58999 - RNA, 23 nt, synthetic construct
  source 1..23: mol_type = other RNA
tgagcgtagcaggggcactcctg

SEQ ID NO: 59000 - RNA, 23 nt, synthetic construct
  source 1..23: mol_type = other RNA
ggtggtcgtggtggtaagcactg

SEQ ID NO: 59001 - RNA, 23 nt, synthetic construct
  source 1..23: mol_type = other RNA
gggtgcgggtggtccccacggtg

SEQ ID NO: 59002 - RNA, 23 nt, synthetic construct
  source 1..23: mol_type = other RNA
gtccttaggctgctggcataagt

SEQ ID NO: 59003 - RNA, 23 nt, synthetic construct
  source 1..23: mol_type = other RNA
tagcgatcgccatcaaaggtgat

SEQ ID NO: 59004 - RNA, 23 nt, synthetic construct
  source 1..23: mol_type = other RNA
gatgttgacctcggtctcgcagc

SEQ ID NO: 59005 - RNA, 23 nt, synthetic construct
  source 1..23: mol_type = other RNA
gcccccactcccatccgacacca

SEQ ID NO: 59006 - RNA, 23 nt, synthetic construct
  source 1..23: mol_type = other RNA
gtgccgttgcttccgcagatggc

SEQ ID NO: 59007 - RNA, 23 nt, synthetic construct
  source 1..23: mol_type = other RNA
tgttgcacacgcacaccgtctcg

SEQ ID NO: 59008 - RNA, 23 nt, synthetic construct
  source 1..23: mol_type = other RNA
ccctgcattctcccagctcggct

SEQ ID NO: 59009 - RNA, 23 nt, synthetic construct
  source 1..23: mol_type = other RNA
gctgcacacccgcccattgtgcg

SEQ ID NO: 59010 - RNA, 23 nt, synthetic construct
  source 1..23: mol_type = other RNA
gtctctccaggcttgtaggtggc

SEQ ID NO: 59011 - RNA, 23 nt, synthetic construct
  source 1..23: mol_type = other RNA
tggtggtctgtgataggcgggtc

SEQ ID NO: 59012 - RNA, 23 nt, synthetic construct
  source 1..23: mol_type = other RNA
ggcctgggcacggcactcgaggc

SEQ ID NO: 59013 - RNA, 23 nt, synthetic construct
  source 1..23: mol_type = other RNA
tggtggtctgtgataggcgggtc

SEQ ID NO: 59014 - RNA, 23 nt, synthetic construct
  source 1..23: mol_type = other RNA
ggcctgggcacggcactcgaggc

SEQ ID NO: 59015 - RNA, 23 nt, synthetic construct
  source 1..23: mol_type = other RNA
tggtggtctgtgataggcgggtc

SEQ ID NO: 59016 - RNA, 23 nt, synthetic construct
  source 1..23: mol_type = other RNA
ggcctgggcacggcactcgaggc

SEQ ID NO: 59017 - RNA, 23 nt, synthetic construct
  source 1..23: mol_type = other RNA
tggtggtctgtgataggcgggtc

SEQ ID NO: 59018 - RNA, 23 nt, synthetic construct
  source 1..23: mol_type = other RNA
ggcctgggcacggcactcgaggc

SEQ ID NO: 59019 - RNA, 23 nt, synthetic construct
  source 1..23: mol_type = other RNA
tggtggtctgtgataggcgggtc

SEQ ID NO: 59020 - RNA, 23 nt, synthetic construct
  source 1..23: mol_type = other RNA
gggtgggcaggtgaggtcgcaca

SEQ ID NO: 59021 - RNA, 23 nt, synthetic construct
  source 1..23: mol_type = other RNA
ccacccgtacatgaacacacggc

SEQ ID NO: 59022 - RNA, 23 nt, synthetic construct
  source 1..23: mol_type = other RNA
tgtacgaacacagctgaggtctg

SEQ ID NO: 59023 - RNA, 23 nt, synthetic construct
  source 1..23: mol_type = other RNA
tggggacccttgcaccgacgtca

SEQ ID NO: 59024 - RNA, 23 nt, synthetic construct
  source 1..23: mol_type = other RNA
tggggggcagggatcgcccgtgt

SEQ ID NO: 59025 - RNA, 23 nt, synthetic construct
  source 1..23: mol_type = other RNA
tccatggtgtgccctgcattctc

SEQ ID NO: 59026 - RNA, 23 nt, synthetic construct
  source 1..23: mol_type = other RNA
gtgcagccgtccacaggcacgaa

SEQ ID NO: 59027 - RNA, 23 nt, synthetic construct
  source 1..23: mol_type = other RNA
ctcggcaatgcagcccccactcc

SEQ ID NO: 59028 - RNA, 23 nt, synthetic construct
  source 1..23: mol_type = other RNA
tcgggcgagctctggaggttgcc

SEQ ID NO: 59029 - RNA, 23 nt, synthetic construct
  source 1..23: mol_type = other RNA
tcacatgtggggtgccagcagtt

SEQ ID NO: 59030 - RNA, 23 nt, synthetic construct
  source 1..23: mol_type = other RNA
gtcagcactggaagggtggttgc

SEQ ID NO: 59031 - RNA, 23 nt, synthetic construct
  source 1..23: mol_type = other RNA
agcagttgcccgggtggaggagg

SEQ ID NO: 59032 - RNA, 23 nt, synthetic construct
  source 1..23: mol_type = other RNA
tcacatgtggggtgccagcagtt

SEQ ID NO: 59033 - RNA, 23 nt, synthetic construct
  source 1..23: mol_type = other RNA
gtcagcactggaagggtggttgc

SEQ ID NO: 59034 - RNA, 23 nt, synthetic construct
  source 1..23: mol_type = other RNA
tcacatgtggggtgccagcagtt

SEQ ID NO: 59035 - RNA, 23 nt, synthetic construct
  source 1..23: mol_type = other RNA
gtcagcactggaagggtggttgc

SEQ ID NO: 59036 - RNA, 23 nt, synthetic construct
  source 1..23: mol_type = other RNA
ggggtgtgccagtcggggcccag

SEQ ID NO: 59037 - RNA, 23 nt, synthetic construct
  source 1..23: mol_type = other RNA
gggggtgtgccagtcggggccca

SEQ ID NO: 59038 - RNA, 23 nt, synthetic construct
  source 1..23: mol_type = other RNA
tcacccttctggggccggtttca

SEQ ID NO: 59039 - RNA, 23 nt, synthetic construct
  source 1..23: mol_type = other RNA
gtacgaacacagctgaggtctgc

SEQ ID NO: 59040 - RNA, 23 nt, synthetic construct
  source 1..23: mol_type = other RNA
cacggagcgcggggtgccacaca

SEQ ID NO: 59041 - RNA, 23 nt, synthetic construct
  source 1..23: mol_type = other RNA
agttgccccggaaggtgtaagag

SEQ ID NO: 59042 - RNA, 23 nt, synthetic construct
  source 1..23: mol_type = other RNA
ggtggtgttagtcaaggggctca

SEQ ID NO: 59043 - RNA, 23 nt, synthetic construct
  source 1..23: mol_type = other RNA
gtcaccaccgtggttatgggggc

SEQ ID NO: 59044 - RNA, 23 nt, synthetic construct
  source 1..23: mol_type = other RNA
gtcaccaccgtggttatgggggc

SEQ ID NO: 59045 - RNA, 23 nt, synthetic construct
  source 1..23: mol_type = other RNA
gtcaccaccgtggttatgggggc

SEQ ID NO: 59046 - RNA, 23 nt, synthetic construct
  source 1..23: mol_type = other RNA
ctgtcgggcgagctctggaggtt

SEQ ID NO: 59047 - RNA, 23 nt, synthetic construct
  source 1..23: mol_type = other RNA
gctggggtgtgggaagtcaccgt

SEQ ID NO: 59048 - RNA, 23 nt, synthetic construct
  source 1..23: mol_type = other RNA
cgggaaatttaggaaacccatcg

SEQ ID NO: 59049 - RNA, 23 nt, synthetic construct
  source 1..23: mol_type = other RNA
ctgggccaagatgtactcgcagc

SEQ ID NO: 59050 - RNA, 23 nt, synthetic construct
  source 1..23: mol_type = other RNA
ttgggtccagcaggacgacacgg

SEQ ID NO: 59051 - RNA, 23 nt, synthetic construct
  source 1..23: mol_type = other RNA
cacgtagttgcaaaggccaggga

SEQ ID NO: 59052 - RNA, 23 nt, synthetic construct
  source 1..23: mol_type = other RNA
gaacacgtagttgcaaaggccag

SEQ ID NO: 59053 - RNA, 23 nt, synthetic construct
  source 1..23: mol_type = other RNA
agaacacgtagttgcaaaggcca

SEQ ID NO: 59054 - RNA, 23 nt, synthetic construct
  source 1..23: mol_type = other RNA
gagaacacgtagttgcaaaggcc

SEQ ID NO: 59055 - RNA, 23 nt, synthetic construct
  source 1..23: mol_type = other RNA
ctgcccattgatgaggacggagc

SEQ ID NO: 59056 - RNA, 23 nt, synthetic construct
  source 1..23: mol_type = other RNA
ctcctcccgctgcccattgatga

SEQ ID NO: 59057 - RNA, 23 nt, synthetic construct
  source 1..23: mol_type = other RNA
tgcgcgcgctgggggttggagca

SEQ ID NO: 59058 - RNA, 23 nt, synthetic construct
  source 1..23: mol_type = other RNA
cagttctccgctgtggggaccct

SEQ ID NO: 59059 - RNA, 23 nt, synthetic construct
  source 1..23: mol_type = other RNA
ggagggtgttgccatagaaccag

SEQ ID NO: 59060 - RNA, 23 nt, synthetic construct
  source 1..23: mol_type = other RNA
gctgtagtccagccactctgacc

SEQ ID NO: 59061 - RNA, 23 nt, synthetic construct
  source 1..23: mol_type = other RNA
catgtggggtgccagcagttgcc

SEQ ID NO: 59062 - RNA, 23 nt, synthetic construct
  source 1..23: mol_type = other RNA
ggagggtgttgccatagaaccag

SEQ ID NO: 59063 - RNA, 23 nt, synthetic construct
  source 1..23: mol_type = other RNA
gctgtagtccagccactctgacc

SEQ ID NO: 59064 - RNA, 23 nt, synthetic construct
  source 1..23: mol_type = other RNA
gggtggttgcagtccttggactg

SEQ ID NO: 59065 - RNA, 23 nt, synthetic construct
  source 1..23: mol_type = other RNA
gggatgggtgtaaagctggtagc

SEQ ID NO: 59066 - RNA, 23 nt, synthetic construct
  source 1..23: mol_type = other RNA
ggagggtgttgccatagaaccag

SEQ ID NO: 59067 - RNA, 23 nt, synthetic construct
  source 1..23: mol_type = other RNA
gctgtagtccagccactctgacc

SEQ ID NO: 59068 - RNA, 23 nt, synthetic construct
  source 1..23: mol_type = other RNA
catgtggggtgccagcagttgcc

SEQ ID NO: 59069 - RNA, 23 nt, synthetic construct
  source 1..23: mol_type = other RNA
ggagggtgttgccatagaaccag

SEQ ID NO: 59070 - RNA, 23 nt, synthetic construct
  source 1..23: mol_type = other RNA
gctgtagtccagccactctgacc

SEQ ID NO: 59071 - RNA, 23 nt, synthetic construct
  source 1..23: mol_type = other RNA
gggtggttgcagtccttggactg

SEQ ID NO: 59072 - RNA, 23 nt, synthetic construct
  source 1..23: mol_type = other RNA
catgtggggtgccagcagttgcc

SEQ ID NO: 59073 - RNA, 23 nt, synthetic construct
  source 1..23: mol_type = other RNA
ggagggtgttgccatagaaccag

SEQ ID NO: 59074 - RNA, 23 nt, synthetic construct
  source 1..23: mol_type = other RNA
gggtggttgcagtccttggactg

SEQ ID NO: 59075 - RNA, 23 nt, synthetic construct
  source 1..23: mol_type = other RNA
gggatgggtgtaaagctggtagc

SEQ ID NO: 59076 - RNA, 23 nt, synthetic construct
  source 1..23: mol_type = other RNA
ggaagcggtcaatgtcacagtgc

SEQ ID NO: 59077 - RNA, 23 nt, synthetic construct
  source 1..23: mol_type = other RNA
ccccgggcgcggcagagctctgc

SEQ ID NO: 59078 - RNA, 23 nt, synthetic construct
  source 1..23: mol_type = other RNA
tgggctctggttcctagagttgc

SEQ ID NO: 59079 - RNA, 23 nt, synthetic construct
  source 1..23: mol_type = other RNA
ggtgatgttgacctcggtctcgc

SEQ ID NO: 59080 - RNA, 23 nt, synthetic construct
  source 1..23: mol_type = other RNA
gcaggcacacgcgtcgttcacgc

SEQ ID NO: 59081 - RNA, 23 nt, synthetic construct
  source 1..23: mol_type = other RNA
gtcattgatggcattgtcgtcga

SEQ ID NO: 59082 - RNA, 23 nt, synthetic construct
  source 1..23: mol_type = other RNA
gcagatgccctcctcgtccgtgc

SEQ ID NO: 59083 - RNA, 23 nt, synthetic construct
  source 1..23: mol_type = other RNA
gatgtcatccagcaccgtgcctg

SEQ ID NO: 59084 - RNA, 23 nt, synthetic construct
  source 1..23: mol_type = other RNA
tgagcgtcaccgctttcaggcag

SEQ ID NO: 59085 - RNA, 23 nt, synthetic construct
  source 1..23: mol_type = other RNA
ctgagcgtcaccgctttcaggca

SEQ ID NO: 59086 - RNA, 23 nt, synthetic construct
  source 1..23: mol_type = other RNA
ccgcagatggcgatcaagcaggc

SEQ ID NO: 59087 - RNA, 23 nt, synthetic construct
  source 1..23: mol_type = other RNA
gagccggtggccgtgatcgtagt

SEQ ID NO: 59088 - RNA, 23 nt, synthetic construct
  source 1..23: mol_type = other RNA
tggagaagggggtgactcggtgg

SEQ ID NO: 59089 - RNA, 23 nt, synthetic construct
  source 1..23: mol_type = other RNA
gagccggtggccgtgatcgtagt

SEQ ID NO: 59090 - RNA, 23 nt, synthetic construct
  source 1..23: mol_type = other RNA
tggagaagggggtgactcggtgg

SEQ ID NO: 59091 - RNA, 23 nt, synthetic construct
  source 1..23: mol_type = other RNA
gatgggtgtaaagctggtagctg

SEQ ID NO: 59092 - RNA, 23 nt, synthetic construct
  source 1..23: mol_type = other RNA
tggagaagggggtgactcggtgg

SEQ ID NO: 59093 - RNA, 23 nt, synthetic construct
  source 1..23: mol_type = other RNA
ccgtggtgatcagtgatggggga

SEQ ID NO: 59094 - RNA, 23 nt, synthetic construct
  source 1..23: mol_type = other RNA
gagccggtggccgtgatcgtagt

SEQ ID NO: 59095 - RNA, 23 nt, synthetic construct
  source 1..23: mol_type = other RNA
ccgggctggtcagcactttggga

SEQ ID NO: 59096 - RNA, 23 nt, synthetic construct
  source 1..23: mol_type = other RNA
gagccggtggccgtgatcgtagt

SEQ ID NO: 59097 - RNA, 23 nt, synthetic construct
  source 1..23: mol_type = other RNA
gatgggtgtaaagctggtagctg

SEQ ID NO: 59098 - RNA, 23 nt, synthetic construct
  source 1..23: mol_type = other RNA
agctcagtgaggatccgggtcgt

SEQ ID NO: 59099 - RNA, 23 nt, synthetic construct
  source 1..23: mol_type = other RNA
cgcacaggccaccggttgcacct

SEQ ID NO: 59100 - RNA, 23 nt, synthetic construct
  source 1..23: mol_type = other RNA
attgtacgaacacagctgaggtc

SEQ ID NO: 59101 - RNA, 23 nt, synthetic construct
  source 1..23: mol_type = other RNA
acacataggcccgcacatgctta

SEQ ID NO: 59102 - RNA, 23 nt, synthetic construct
  source 1..23: mol_type = other RNA
tctctgacctggccgttgcgacc

SEQ ID NO: 59103 - RNA, 23 nt, synthetic construct
  source 1..23: mol_type = other RNA
gtggaagtcaccccaggtgctgc

SEQ ID NO: 59104 - RNA, 23 nt, synthetic construct
  source 1..23: mol_type = other RNA
cagggaagcggaagacgtcgccg

SEQ ID NO: 59105 - RNA, 23 nt, synthetic construct
  source 1..23: mol_type = other RNA
ccagggaagcggaagacgtcgcc

SEQ ID NO: 59106 - RNA, 23 nt, synthetic construct
  source 1..23: mol_type = other RNA
ctcgtaggcggcgcggcagtgct

SEQ ID NO: 59107 - RNA, 23 nt, synthetic construct
  source 1..23: mol_type = other RNA
gcccattgatgaggacggagccg

SEQ ID NO: 59108 - RNA, 23 nt, synthetic construct
  source 1..23: mol_type = other RNA
tccgttccacaggaatgtcagca

SEQ ID NO: 59109 - RNA, 23 nt, synthetic construct
  source 1..23: mol_type = other RNA
tgaagtccccacacaggccacag

SEQ ID NO: 59110 - RNA, 23 nt, synthetic construct
  source 1..23: mol_type = other RNA
ttgaagtccccacacaggccaca

SEQ ID NO: 59111 - RNA, 23 nt, synthetic construct
  source 1..23: mol_type = other RNA
ggccgttgaagtccccacacagg

SEQ ID NO: 59112 - RNA, 23 nt, synthetic construct
  source 1..23: mol_type = other RNA
ccgcggctggccccccgcgtggg

SEQ ID NO: 59113 - RNA, 23 nt, synthetic construct
  source 1..23: mol_type = other RNA
gccacactcctggtgctgcatgt

SEQ ID NO: 59114 - RNA, 23 nt, synthetic construct
  source 1..23: mol_type = other RNA
gcgcgcgctgggggttggagcag

SEQ ID NO: 59115 - RNA, 23 nt, synthetic construct
  source 1..23: mol_type = other RNA
gtcggcacatttcttggacagaa

SEQ ID NO: 59116 - RNA, 23 nt, synthetic construct
  source 1..23: mol_type = other RNA
tgcaccacgatgaagaagctcga

SEQ ID NO: 59117 - RNA, 23 nt, synthetic construct
  source 1..23: mol_type = other RNA
accaccccgctgagggccgtgaa

SEQ ID NO: 59118 - RNA, 23 nt, synthetic construct
  source 1..23: mol_type = other RNA
ccctccagtcgctgagctgtacg

SEQ ID NO: 59119 - RNA, 23 nt, synthetic construct
  source 1..23: mol_type = other RNA
gcgctgggacttggggcagttct

SEQ ID NO: 59120 - RNA, 23 nt, synthetic construct
  source 1..23: mol_type = other RNA
gtgcccgccgagctgttgctgca

SEQ ID NO: 59121 - RNA, 23 nt, synthetic construct
  source 1..23: mol_type = other RNA
ggggtgcccgccgagctgttgct

SEQ ID NO: 59122 - RNA, 23 nt, synthetic construct
  source 1..23: mol_type = other RNA
atcgccatcaaaggtgatgaagt

SEQ ID NO: 59123 - RNA, 23 nt, synthetic construct
  source 1..23: mol_type = other RNA
gtcccgtgggtggtgttgtcccc

SEQ ID NO: 59124 - RNA, 23 nt, synthetic construct
  source 1..23: mol_type = other RNA
attgtcgtcgaagttcccgcaca

SEQ ID NO: 59125 - RNA, 23 nt, synthetic construct
  source 1..23: mol_type = other RNA
agtcattgatggcattgtcgtcg

SEQ ID NO: 59126 - RNA, 23 nt, synthetic construct
  source 1..23: mol_type = other RNA
caaagtcattgatggcattgtcg

SEQ ID NO: 59127 - RNA, 23 nt, synthetic construct
  source 1..23: mol_type = other RNA
agaaacactcgcagtcgccaccc

SEQ ID NO: 59128 - RNA, 23 nt, synthetic construct
  source 1..23: mol_type = other RNA
gagtgggggacccaggcggtggt

SEQ ID NO: 59129 - RNA, 23 nt, synthetic construct
  source 1..23: mol_type = other RNA
gtggacgtcacagtgcaccttct

SEQ ID NO: 59130 - RNA, 23 nt, synthetic construct
  source 1..23: mol_type = other RNA
catcttgaagacgccctcctgct

SEQ ID NO: 59131 - RNA, 23 nt, synthetic construct
  source 1..23: mol_type = other RNA
agtggtcgtcactgcagcagagg

SEQ ID NO: 59132 - RNA, 23 nt, synthetic construct
  source 1..23: mol_type = other RNA
gcagtggtcgtcactgcagcaga

SEQ ID NO: 59133 - RNA, 23 nt, synthetic construct
  source 1..23: mol_type = other RNA
cgtcgtggggcctcccgtggtgg

SEQ ID NO: 59134 - RNA, 23 nt, synthetic construct
  source 1..23: mol_type = other RNA
ccccgtcgtccctggaagggctg

SEQ ID NO: 59135 - RNA, 23 nt, synthetic construct
  source 1..23: mol_type = other RNA
attgttgttggggccagcgtggg

SEQ ID NO: 59136 - RNA, 23 nt, synthetic construct
  source 1..23: mol_type = other RNA
ggcctgagaggtggacagctcgc

SEQ ID NO: 59137 - RNA, 23 nt, synthetic construct
  source 1..23: mol_type = other RNA
gtgttagtcaaggggctcattgt

SEQ ID NO: 59138 - RNA, 23 nt, synthetic construct
  source 1..23: mol_type = other RNA
cgggtcgtgccctggctggtggt

SEQ ID NO: 59139 - RNA, 23 nt, synthetic construct
  source 1..23: mol_type = other RNA
ccggtggccccagttgtggtggc

SEQ ID NO: 59140 - RNA, 23 nt, synthetic construct
  source 1..23: mol_type = other RNA
ttggtagtgtgagctgttcctgg

SEQ ID NO: 59141 - RNA, 23 nt, synthetic construct
  source 1..23: mol_type = other RNA
gctgatccacactggaggcgtga

SEQ ID NO: 59142 - RNA, 23 nt, synthetic construct
  source 1..23: mol_type = other RNA
tgtgggtgtggtggttgtgctga

SEQ ID NO: 59143 - RNA, 23 nt, synthetic construct
  source 1..23: mol_type = other RNA
tgttgccatagaaccagtggcca

SEQ ID NO: 59144 - RNA, 23 nt, synthetic construct
  source 1..23: mol_type = other RNA
atgggagttgtcccaggagttga

SEQ ID NO: 59145 - RNA, 23 nt, synthetic construct
  source 1..23: mol_type = other RNA
cccaagatgcccgaggtggccga

SEQ ID NO: 59146 - RNA, 23 nt, synthetic construct
  source 1..23: mol_type = other RNA
ggtggtaccggtggttgctgcta

SEQ ID NO: 59147 - RNA, 23 nt, synthetic construct
  source 1..23: mol_type = other RNA
cggccgcacggatgttggagtag

SEQ ID NO: 59148 - RNA, 23 nt, synthetic construct
  source 1..23: mol_type = other RNA
tggccgtagagctggtggccggg

SEQ ID NO: 59149 - RNA, 23 nt, synthetic construct
  source 1..23: mol_type = other RNA
gaggacggggtggccgtggatcc

SEQ ID NO: 59150 - RNA, 23 nt, synthetic construct
  source 1..23: mol_type = other RNA
cgtggtgctcacatgtggggtgc

SEQ ID NO: 59151 - RNA, 23 nt, synthetic construct
  source 1..23: mol_type = other RNA
tgtggacagtctctggagtggag

SEQ ID NO: 59152 - RNA, 23 nt, synthetic construct
  source 1..23: mol_type = other RNA
gtgtggacagtctctggagtgga

SEQ ID NO: 59153 - RNA, 23 nt, synthetic construct
  source 1..23: mol_type = other RNA
ttggtagtgtgagctgttcctgg

SEQ ID NO: 59154 - RNA, 23 nt, synthetic construct
  source 1..23: mol_type = other RNA
tgtgggtgtggtggttgtgctga

SEQ ID NO: 59155 - RNA, 23 nt, synthetic construct
  source 1..23: mol_type = other RNA
tgttgccatagaaccagtggcca

SEQ ID NO: 59156 - RNA, 23 nt, synthetic construct
  source 1..23: mol_type = other RNA
ggtggtaccggtggttgctgctg

SEQ ID NO: 59157 - RNA, 23 nt, synthetic construct
  source 1..23: mol_type = other RNA
cggccgcacggatgttggagtag

SEQ ID NO: 59158 - RNA, 23 nt, synthetic construct
  source 1..23: mol_type = other RNA
tggccgtagagctggtggccggg

SEQ ID NO: 59159 - RNA, 23 nt, synthetic construct
  source 1..23: mol_type = other RNA
gctgctgtggtctgctctgtgag

SEQ ID NO: 59160 - RNA, 23 nt, synthetic construct
  source 1..23: mol_type = other RNA
ttgcagtccttggactggaggag

SEQ ID NO: 59161 - RNA, 23 nt, synthetic construct
  source 1..23: mol_type = other RNA
gcagttgcccgggtggaggaggc

SEQ ID NO: 59162 - RNA, 23 nt, synthetic construct
  source 1..23: mol_type = other RNA
tttgagggtgccagcagttgccc

SEQ ID NO: 59163 - RNA, 23 nt, synthetic construct
  source 1..23: mol_type = other RNA
actttgagggtgccagcagttgc

SEQ ID NO: 59164 - RNA, 23 nt, synthetic construct
  source 1..23: mol_type = other RNA
gctgtaacgctggtagctgtggg

SEQ ID NO: 59165 - RNA, 23 nt, synthetic construct
  source 1..23: mol_type = other RNA
gtgtggacagtctctggagtaga

SEQ ID NO: 59166 - RNA, 23 nt, synthetic construct
  source 1..23: mol_type = other RNA
ttggtagtgtgagctgttcctgg

SEQ ID NO: 59167 - RNA, 23 nt, synthetic construct
  source 1..23: mol_type = other RNA
gctgatccacactggaggcgtga

SEQ ID NO: 59168 - RNA, 23 nt, synthetic construct
  source 1..23: mol_type = other RNA
tgtgggtgtggtggttgtgctga

SEQ ID NO: 59169 - RNA, 23 nt, synthetic construct
  source 1..23: mol_type = other RNA
tgttgccatagaaccagtggcca

SEQ ID NO: 59170 - RNA, 23 nt, synthetic construct
  source 1..23: mol_type = other RNA
cccaagatgcccgaggtggccga

SEQ ID NO: 59171 - RNA, 23 nt, synthetic construct
  source 1..23: mol_type = other RNA
cggccgcacggatgttggagtag

SEQ ID NO: 59172 - RNA, 23 nt, synthetic construct
  source 1..23: mol_type = other RNA
tggccgtagagctggtggccggg

SEQ ID NO: 59173 - RNA, 23 nt, synthetic construct
  source 1..23: mol_type = other RNA
gaggacggggtggccgtggatcc

SEQ ID NO: 59174 - RNA, 23 nt, synthetic construct
  source 1..23: mol_type = other RNA
cgtggtgctcacatgtggggtgc

SEQ ID NO: 59175 - RNA, 23 nt, synthetic construct
  source 1..23: mol_type = other RNA
ttggtagtgtgagctgttcctgg

SEQ ID NO: 59176 - RNA, 23 nt, synthetic construct
  source 1..23: mol_type = other RNA
gctgatccacactggaggcgtgc

SEQ ID NO: 59177 - RNA, 23 nt, synthetic construct
  source 1..23: mol_type = other RNA
tgtgggtgtggtggttgtgctga

SEQ ID NO: 59178 - RNA, 23 nt, synthetic construct
  source 1..23: mol_type = other RNA
tgttgccatagaaccagtggcca

SEQ ID NO: 59179 - RNA, 23 nt, synthetic construct
  source 1..23: mol_type = other RNA
gtagtggccgtggtgatcagtga

SEQ ID NO: 59180 - RNA, 23 nt, synthetic construct
  source 1..23: mol_type = other RNA
ggtggtaccggtggttgctgctg

SEQ ID NO: 59181 - RNA, 23 nt, synthetic construct
  source 1..23: mol_type = other RNA
cggccgcacggatgttggagtag

SEQ ID NO: 59182 - RNA, 23 nt, synthetic construct
  source 1..23: mol_type = other RNA
tggccgtagagctggtggccggg

SEQ ID NO: 59183 - RNA, 23 nt, synthetic construct
  source 1..23: mol_type = other RNA
gaggacggggtggccgtggatcc

SEQ ID NO: 59184 - RNA, 23 nt, synthetic construct
  source 1..23: mol_type = other RNA
ttgcagtccttggactggaggag

SEQ ID NO: 59185 - RNA, 23 nt, synthetic construct
  source 1..23: mol_type = other RNA
tggccacgggtgtggtggtctgt

SEQ ID NO: 59186 - RNA, 23 nt, synthetic construct
  source 1..23: mol_type = other RNA
gaggacggggtggccgtggatcc

SEQ ID NO: 59187 - RNA, 23 nt, synthetic construct
  source 1..23: mol_type = other RNA
cgtggtgctcacatgtggggtgc

SEQ ID NO: 59188 - RNA, 23 nt, synthetic construct
  source 1..23: mol_type = other RNA
tgtggacagtctctggagtggag

SEQ ID NO: 59189 - RNA, 23 nt, synthetic construct
  source 1..23: mol_type = other RNA
gtgtggacagtctctggagtgga

SEQ ID NO: 59190 - RNA, 23 nt, synthetic construct
  source 1..23: mol_type = other RNA
ttggtagtgtgagctgttcctgg

SEQ ID NO: 59191 - RNA, 23 nt, synthetic construct
  source 1..23: mol_type = other RNA
gctgatccacactggaggcgtga

SEQ ID NO: 59192 - RNA, 23 nt, synthetic construct
  source 1..23: mol_type = other RNA
tgtgggtgtggtggttgtgctga

SEQ ID NO: 59193 - RNA, 23 nt, synthetic construct
  source 1..23: mol_type = other RNA
tgttgccatagaaccagtggcca

SEQ ID NO: 59194 - RNA, 23 nt, synthetic construct
  source 1..23: mol_type = other RNA
ttgcagtccttggactggaggag

SEQ ID NO: 59195 - RNA, 23 nt, synthetic construct
  source 1..23: mol_type = other RNA
gtggccgtggaattggtggccct

SEQ ID NO: 59196 - RNA, 23 nt, synthetic construct
  source 1..23: mol_type = other RNA
gcagtggctgtgggcatagtggc

SEQ ID NO: 59197 - RNA, 23 nt, synthetic construct
  source 1..23: mol_type = other RNA
aggggtgcgggtggtccccacgg

SEQ ID NO: 59198 - RNA, 23 nt, synthetic construct
  source 1..23: mol_type = other RNA
ggggagcactgcaggggtgcggg

SEQ ID NO: 59199 - RNA, 23 nt, synthetic construct
  source 1..23: mol_type = other RNA
ccctggaagcggtcaatgtcaca

SEQ ID NO: 59200 - RNA, 23 nt, synthetic construct
  source 1..23: mol_type = other RNA
aggcgccctggaagcggtcaatg

SEQ ID NO: 59201 - RNA, 23 nt, synthetic construct
  source 1..23: mol_type = other RNA
ggtggaatagtgggagccgcccc

SEQ ID NO: 59202 - RNA, 23 nt, synthetic construct
  source 1..23: mol_type = other RNA
ggtgcagttgccccggaaggtgt

SEQ ID NO: 59203 - RNA, 23 nt, synthetic construct
  source 1..23: mol_type = other RNA
aggtgcagttgccccggaaggtg

SEQ ID NO: 59204 - RNA, 23 nt, synthetic construct
  source 1..23: mol_type = other RNA
cgtgcagtagtggttgtccaggt

SEQ ID NO: 59205 - RNA, 23 nt, synthetic construct
  source 1..23: mol_type = other RNA
agtggatgctgagggcgcggggg

SEQ ID NO: 59206 - RNA, 23 nt, synthetic construct
  source 1..23: mol_type = other RNA
ccacacgcatggtggtggtcccc

SEQ ID NO: 59207 - RNA, 23 nt, synthetic construct
  source 1..23: mol_type = other RNA
ccagccacgtcttggccatgtcc

SEQ ID NO: 59208 - RNA, 23 nt, synthetic construct
  source 1..23: mol_type = other RNA
gcccgggggcacaaggttgtggc

SEQ ID NO: 59209 - RNA, 23 nt, synthetic construct
  source 1..23: mol_type = other RNA
ccgggcgcggcagagctctgcgt

SEQ ID NO: 59210 - RNA, 23 nt, synthetic construct
  source 1..23: mol_type = other RNA
tggcttgtacactttggtgggtg

SEQ ID NO: 59211 - RNA, 23 nt, synthetic construct
  source 1..23: mol_type = other RNA
gttcctagagttgcaggtggcag

SEQ ID NO: 59212 - RNA, 23 nt, synthetic construct
  source 1..23: mol_type = other RNA
ggttcctagagttgcaggtggca

SEQ ID NO: 59213 - RNA, 23 nt, synthetic construct
  source 1..23: mol_type = other RNA
ctggttcctagagttgcaggtgg

SEQ ID NO: 59214 - RNA, 23 nt, synthetic construct
  source 1..23: mol_type = other RNA
aagaggatctggtcctcagggca

SEQ ID NO: 59215 - RNA, 23 nt, synthetic construct
  source 1..23: mol_type = other RNA
tccccgggaaatttaggaaaccc

SEQ ID NO: 59216 - RNA, 23 nt, synthetic construct
  source 1..23: mol_type = other RNA
accctcgtcacacacgcaggact

SEQ ID NO: 59217 - RNA, 23 nt, synthetic construct
  source 1..23: mol_type = other RNA
gaggcaggtacacatgtggcagg

SEQ ID NO: 59218 - RNA, 23 nt, synthetic construct
  source 1..23: mol_type = other RNA
gacaggtagtattgttgcaggca

SEQ ID NO: 59219 - RNA, 23 nt, synthetic construct
  source 1..23: mol_type = other RNA
gagccctcgcagaaggtgatgtt

SEQ ID NO: 59220 - RNA, 23 nt, synthetic construct
  source 1..23: mol_type = other RNA
aggagccctcgcagaaggtgatg

SEQ ID NO: 59221 - RNA, 23 nt, synthetic construct
  source 1..23: mol_type = other RNA
ggacagtgcaagggcaccgtctc

SEQ ID NO: 59222 - RNA, 23 nt, synthetic construct
  source 1..23: mol_type = other RNA
gggaagccacgggtgtgtggggg

SEQ ID NO: 59223 - RNA, 23 nt, synthetic construct
  source 1..23: mol_type = other RNA
acaatgcacatcctggctccagg

SEQ ID NO: 59224 - RNA, 23 nt, synthetic construct
  source 1..23: mol_type = other RNA
gacaatgcacatcctggctccag

SEQ ID NO: 59225 - RNA, 23 nt, synthetic construct
  source 1..23: mol_type = other RNA
gcatggacaggcggccgccttgc

SEQ ID NO: 59226 - RNA, 23 nt, synthetic construct
  source 1..23: mol_type = other RNA
aggacagtgcaagggcaccgtct

SEQ ID NO: 59227 - RNA, 23 nt, synthetic construct
  source 1..23: mol_type = other RNA
gctgcgcgcgctgggggttggag

SEQ ID NO: 59228 - RNA, 23 nt, synthetic construct
  source 1..23: mol_type = other RNA
tcctgggcgggcacacaggcgcc

SEQ ID NO: 59229 - RNA, 23 nt, synthetic construct
  source 1..23: mol_type = other RNA
ggcacttcgggtagcagccttcc

SEQ ID NO: 59230 - RNA, 23 nt, synthetic construct
  source 1..23: mol_type = other RNA
gtccttgtcgtagcagccacact

SEQ ID NO: 59231 - RNA, 23 nt, synthetic construct
  source 1..23: mol_type = other RNA
agctgcgccgcccggcactcgat

SEQ ID NO: 59232 - RNA, 23 nt, synthetic construct
  source 1..23: mol_type = other RNA
agtctgcgaggtgagggccgccg

SEQ ID NO: 59233 - RNA, 23 nt, synthetic construct
  source 1..23: mol_type = other RNA
gtggtggtacctggggccgaggg

SEQ ID NO: 59234 - RNA, 23 nt, synthetic construct
  source 1..23: mol_type = other RNA
agtggacgtcacagtgcaccttc

SEQ ID NO: 59235 - RNA, 23 nt, synthetic construct
  source 1..23: mol_type = other RNA
agctccccgtcgtccctggaagg

SEQ ID NO: 59236 - RNA, 23 nt, synthetic construct
  source 1..23: mol_type = other RNA
cgtggttatgggggccgatgtgg

SEQ ID NO: 59237 - RNA, 23 nt, synthetic construct
  source 1..23: mol_type = other RNA
gggtgtgggaagtccccgtggaa

SEQ ID NO: 59238 - RNA, 23 nt, synthetic construct
  source 1..23: mol_type = other RNA
attggggccgatgtggggctgct

SEQ ID NO: 59239 - RNA, 23 nt, synthetic construct
  source 1..23: mol_type = other RNA
agggtcccggtggtcccaagggt

SEQ ID NO: 59240 - RNA, 23 nt, synthetic construct
  source 1..23: mol_type = other RNA
cgtggttatgggggccgatgtgg

SEQ ID NO: 59241 - RNA, 23 nt, synthetic construct
  source 1..23: mol_type = other RNA
gggtgtgggaagtccccgtggaa

SEQ ID NO: 59242 - RNA, 23 nt, synthetic construct
  source 1..23: mol_type = other RNA
cgtggttatgggggccgatgtgg

SEQ ID NO: 59243 - RNA, 23 nt, synthetic construct
  source 1..23: mol_type = other RNA
agggtcccggtggtcccaagggt

SEQ ID NO: 59244 - RNA, 23 nt, synthetic construct
  source 1..23: mol_type = other RNA
cgggaagccacgggtgtgtgggg

SEQ ID NO: 59245 - RNA, 23 nt, synthetic construct
  source 1..23: mol_type = other RNA
atagaactcgttgaaggccggga

SEQ ID NO: 59246 - RNA, 23 nt, synthetic construct
  source 1..23: mol_type = other RNA
ctgttgggatcggtcaggcgcga

SEQ ID NO: 59247 - RNA, 23 nt, synthetic construct
  source 1..23: mol_type = other RNA
gtggaggacgggatggccgtgga

SEQ ID NO: 59248 - RNA, 23 nt, synthetic construct
  source 1..23: mol_type = other RNA
gaaggaggggatgggtgtaaagc

SEQ ID NO: 59249 - RNA, 23 nt, synthetic construct
  source 1..23: mol_type = other RNA
cgttaggacagtgcaagggcacc

SEQ ID NO: 59250 - RNA, 23 nt, synthetic construct
  source 1..23: mol_type = other RNA
cctcggcaatgcagcccccactc

SEQ ID NO: 59251 - RNA, 23 nt, synthetic construct
  source 1..23: mol_type = other RNA
ttgtgcacacaggggcagtcctc

SEQ ID NO: 59252 - RNA, 23 nt, synthetic construct
  source 1..23: mol_type = other RNA
gggcacttcgggtagcagccttc

SEQ ID NO: 59253 - RNA, 23 nt, synthetic construct
  source 1..23: mol_type = other RNA
cgtccttgtcgtagcagccacac

SEQ ID NO: 59254 - RNA, 23 nt, synthetic construct
  source 1..23: mol_type = other RNA
acccatagggtggtcttttcggt

SEQ ID NO: 59255 - RNA, 23 nt, synthetic construct
  source 1..23: mol_type = other RNA
cagtctgcgaggtgagggccgcc

SEQ ID NO: 59256 - RNA, 23 nt, synthetic construct
  source 1..23: mol_type = other RNA
cagtggtcgtcactgcagcagag

SEQ ID NO: 59257 - RNA, 23 nt, synthetic construct
  source 1..23: mol_type = other RNA
tgctgatccacactggaggcgtg

SEQ ID NO: 59258 - RNA, 23 nt, synthetic construct
  source 1..23: mol_type = other RNA
tctgtgtgctagaggagggtgtt

SEQ ID NO: 59259 - RNA, 23 nt, synthetic construct
  source 1..23: mol_type = other RNA
gtgggtggtccctagggcagagg

SEQ ID NO: 59260 - RNA, 23 nt, synthetic construct
  source 1..23: mol_type = other RNA
aagatgcccgaggtggccgaagt

SEQ ID NO: 59261 - RNA, 23 nt, synthetic construct
  source 1..23: mol_type = other RNA
agctgtagtccagccactctgac

SEQ ID NO: 59262 - RNA, 23 nt, synthetic construct
  source 1..23: mol_type = other RNA
tctgtgtgctagaggagggtgtt

SEQ ID NO: 59263 - RNA, 23 nt, synthetic construct
  source 1..23: mol_type = other RNA
gtgggtggtccctagggcagagg

SEQ ID NO: 59264 - RNA, 23 nt, synthetic construct
  source 1..23: mol_type = other RNA
agctgtagtccagccactctgac

SEQ ID NO: 59265 - RNA, 23 nt, synthetic construct
  source 1..23: mol_type = other RNA
cagcactggaagggtggttgcag

SEQ ID NO: 59266 - RNA, 23 nt, synthetic construct
  source 1..23: mol_type = other RNA
tgataggcgggtccaggcggtgc

SEQ ID NO: 59267 - RNA, 23 nt, synthetic construct
  source 1..23: mol_type = other RNA
tgctgatccacactggaggcgtg

SEQ ID NO: 59268 - RNA, 23 nt, synthetic construct
  source 1..23: mol_type = other RNA
tctgtgtgctagaggagggtgtt

SEQ ID NO: 59269 - RNA, 23 nt, synthetic construct
  source 1..23: mol_type = other RNA
gtggagccggtggctgtgatcgt

SEQ ID NO: 59270 - RNA, 23 nt, synthetic construct
  source 1..23: mol_type = other RNA
gtgggtggtccctagggcagagg

SEQ ID NO: 59271 - RNA, 23 nt, synthetic construct
  source 1..23: mol_type = other RNA
aagatgcccgaggtggccgaagt

SEQ ID NO: 59272 - RNA, 23 nt, synthetic construct
  source 1..23: mol_type = other RNA
agctgtagtccagccactctgac

SEQ ID NO: 59273 - RNA, 23 nt, synthetic construct
  source 1..23: mol_type = other RNA
tgctgatccacactggaggcgtg

SEQ ID NO: 59274 - RNA, 23 nt, synthetic construct
  source 1..23: mol_type = other RNA
tctgtgtgctagaggagggtgtt

SEQ ID NO: 59275 - RNA, 23 nt, synthetic construct
  source 1..23: mol_type = other RNA
gtgggtggtccctagggcagagg

SEQ ID NO: 59276 - RNA, 23 nt, synthetic construct
  source 1..23: mol_type = other RNA
agctgtagtccagccactctgac

SEQ ID NO: 59277 - RNA, 23 nt, synthetic construct
  source 1..23: mol_type = other RNA
cagcactggaagggtggttgcag

SEQ ID NO: 59278 - RNA, 23 nt, synthetic construct
  source 1..23: mol_type = other RNA
tgctgatccacactggaggcgtg

SEQ ID NO: 59279 - RNA, 23 nt, synthetic construct
  source 1..23: mol_type = other RNA
tctgtgtgctagaggagggtgtt

SEQ ID NO: 59280 - RNA, 23 nt, synthetic construct
  source 1..23: mol_type = other RNA
cagcactggaagggtggttgcag

SEQ ID NO: 59281 - RNA, 23 nt, synthetic construct
  source 1..23: mol_type = other RNA
aggtgtgggtggtctctggagta

SEQ ID NO: 59282 - RNA, 23 nt, synthetic construct
  source 1..23: mol_type = other RNA
tggaggtgtgggtggtctctgga

SEQ ID NO: 59283 - RNA, 23 nt, synthetic construct
  source 1..23: mol_type = other RNA
ggtgaggtcgcacaggccaccgg

SEQ ID NO: 59284 - RNA, 23 nt, synthetic construct
  source 1..23: mol_type = other RNA
aaggttttcatgatcagacaatg

SEQ ID NO: 59285 - RNA, 23 nt, synthetic construct
  source 1..23: mol_type = other RNA
gggtgcccgccgagctgttgctg

SEQ ID NO: 59286 - RNA, 23 nt, synthetic construct
  source 1..23: mol_type = other RNA
ttctcatcataggtggagatgtg

SEQ ID NO: 59287 - RNA, 23 nt, synthetic construct
  source 1..23: mol_type = other RNA
tgatgttgacctcggtctcgcag

SEQ ID NO: 59288 - RNA, 23 nt, synthetic construct
  source 1..23: mol_type = other RNA
gtgctgtccaccagtgcgtggca

SEQ ID NO: 59289 - RNA, 23 nt, synthetic construct
  source 1..23: mol_type = other RNA
gtgggcacttcgggtagcagcct

SEQ ID NO: 59290 - RNA, 23 nt, synthetic construct
  source 1..23: mol_type = other RNA
ggcatgtcgggaagctgcgccgc

SEQ ID NO: 59291 - RNA, 23 nt, synthetic construct
  source 1..23: mol_type = other RNA
tggccgtggtggtcagtgatggg

SEQ ID NO: 59292 - RNA, 23 nt, synthetic construct
  source 1..23: mol_type = other RNA
tggccgtggtgtggcccggggtg

SEQ ID NO: 59293 - RNA, 23 nt, synthetic construct
  source 1..23: mol_type = other RNA
agggtcgaggtgcgggtcttgct

SEQ ID NO: 59294 - RNA, 23 nt, synthetic construct
  source 1..23: mol_type = other RNA
tggccgtggtggtcagtgatggg

SEQ ID NO: 59295 - RNA, 23 nt, synthetic construct
  source 1..23: mol_type = other RNA
agggtcgaggtgcgggtcttgct

SEQ ID NO: 59296 - RNA, 23 nt, synthetic construct
  source 1..23: mol_type = other RNA
tgtgggtggtctccggagtggag

SEQ ID NO: 59297 - RNA, 23 nt, synthetic construct
  source 1..23: mol_type = other RNA
tggccgtggtggtcagtgatggg

SEQ ID NO: 59298 - RNA, 23 nt, synthetic construct
  source 1..23: mol_type = other RNA
agggtcgaggtgcgggtcttgct

SEQ ID NO: 59299 - RNA, 23 nt, synthetic construct
  source 1..23: mol_type = other RNA
tggccgtggtgtggcccggggtg

SEQ ID NO: 59300 - RNA, 23 nt, synthetic construct
  source 1..23: mol_type = other RNA
agggtcgaggtgcgggtcttgct

SEQ ID NO: 59301 - RNA, 23 nt, synthetic construct
  source 1..23: mol_type = other RNA
ggaggaggggatgggtgtaacgc

SEQ ID NO: 59302 - RNA, 23 nt, synthetic construct
  source 1..23: mol_type = other RNA
tgtgggtggtctccggagtggag

SEQ ID NO: 59303 - RNA, 23 nt, synthetic construct
  source 1..23: mol_type = other RNA
tggccgtggtggtcagtgatggg

SEQ ID NO: 59304 - RNA, 23 nt, synthetic construct
  source 1..23: mol_type = other RNA
ggaggaggggatgggtgtaaagc

SEQ ID NO: 59305 - RNA, 23 nt, synthetic construct
  source 1..23: mol_type = other RNA
gaggcagaacgttctcagacagc

SEQ ID NO: 59306 - RNA, 23 nt, synthetic construct
  source 1..23: mol_type = other RNA
tgatgaggacggagccgttggac

SEQ ID NO: 59307 - RNA, 23 nt, synthetic construct
  source 1..23: mol_type = other RNA
cccgctgcccattgatgaggacg

SEQ ID NO: 59308 - RNA, 23 nt, synthetic construct
  source 1..23: mol_type = other RNA
ggaatgtcagcaccagccggatg

SEQ ID NO: 59309 - RNA, 23 nt, synthetic construct
  source 1..23: mol_type = other RNA
ccacactcctggtgctgcatgtt

SEQ ID NO: 59310 - RNA, 23 nt, synthetic construct
  source 1..23: mol_type = other RNA
gtccacacagtggtcctcgcaga

SEQ ID NO: 59311 - RNA, 23 nt, synthetic construct
  source 1..23: mol_type = other RNA
cgtgatgtcatccagcaccgtgc

SEQ ID NO: 59312 - RNA, 23 nt, synthetic construct
  source 1..23: mol_type = other RNA
tttctcatcataggtggagatgt

SEQ ID NO: 59313 - RNA, 23 nt, synthetic construct
  source 1..23: mol_type = other RNA
cagttctcgttgtccgtcaggcc

SEQ ID NO: 59314 - RNA, 23 nt, synthetic construct
  source 1..23: mol_type = other RNA
agcgtcaccgctttcaggcagtt

SEQ ID NO: 59315 - RNA, 23 nt, synthetic construct
  source 1..23: mol_type = other RNA
acgccgccgtccgcttggacccg

SEQ ID NO: 59316 - RNA, 23 nt, synthetic construct
  source 1..23: mol_type = other RNA
aggcctgtctgcaccacgatgaa

SEQ ID NO: 59317 - RNA, 23 nt, synthetic construct
  source 1..23: mol_type = other RNA
cctccagtcgctgagctgtacgc

SEQ ID NO: 59318 - RNA, 23 nt, synthetic construct
  source 1..23: mol_type = other RNA
ccctcgtcgtgcaccacctctcc

SEQ ID NO: 59319 - RNA, 23 nt, synthetic construct
  source 1..23: mol_type = other RNA
cgatcgccatcaaaggtgatgaa

SEQ ID NO: 59320 - RNA, 23 nt, synthetic construct
  source 1..23: mol_type = other RNA
cctgggccaagatgtactcgcag

SEQ ID NO: 59321 - RNA, 23 nt, synthetic construct
  source 1..23: mol_type = other RNA
gcccgcgtcgtggcaggcctggg

SEQ ID NO: 59322 - RNA, 23 nt, synthetic construct
  source 1..23: mol_type = other RNA
tagctgtaggtcctgtcctcata

SEQ ID NO: 59323 - RNA, 23 nt, synthetic construct
  source 1..23: mol_type = other RNA
cgcatgcggtcacagtccacctg

SEQ ID NO: 59324 - RNA, 23 nt, synthetic construct
  source 1..23: mol_type = other RNA
ggtggtggtacctggggccgagg

SEQ ID NO: 59325 - RNA, 23 nt, synthetic construct
  source 1..23: mol_type = other RNA
acaccaggccgaagtggacgtca

SEQ ID NO: 59326 - RNA, 23 nt, synthetic construct
  source 1..23: mol_type = other RNA
tggtcagccccgggctactcgta

SEQ ID NO: 59327 - RNA, 23 nt, synthetic construct
  source 1..23: mol_type = other RNA
ttgtgtatctgggggatgtcagt

SEQ ID NO: 59328 - RNA, 23 nt, synthetic construct
  source 1..23: mol_type = other RNA
ctggaagggctgagcgtgttgga

SEQ ID NO: 59329 - RNA, 23 nt, synthetic construct
  source 1..23: mol_type = other RNA
caagatgcccgaggtggccgaag

SEQ ID NO: 59330 - RNA, 23 nt, synthetic construct
  source 1..23: mol_type = other RNA
ggagaagggggtgactcggtggt

SEQ ID NO: 59331 - RNA, 23 nt, synthetic construct
  source 1..23: mol_type = other RNA
ggagaagggggtgactcggtggt

SEQ ID NO: 59332 - RNA, 23 nt, synthetic construct
  source 1..23: mol_type = other RNA
tgtggaggtgtgggtggtctccg

SEQ ID NO: 59333 - RNA, 23 nt, synthetic construct
  source 1..23: mol_type = other RNA
cgggtccaggcggtgcccaggga

SEQ ID NO: 59334 - RNA, 23 nt, synthetic construct
  source 1..23: mol_type = other RNA
caagatgcccgaggtggccgaag

SEQ ID NO: 59335 - RNA, 23 nt, synthetic construct
  source 1..23: mol_type = other RNA
ggagaagggggtgactcggtggt

SEQ ID NO: 59336 - RNA, 23 nt, synthetic construct
  source 1..23: mol_type = other RNA
cccaactcccccagggggacacc

SEQ ID NO: 59337 - RNA, 23 nt, synthetic construct
  source 1..23: mol_type = other RNA
tgtggaggtgtgggtggtctccg

SEQ ID NO: 59338 - RNA, 23 nt, synthetic construct
  source 1..23: mol_type = other RNA
tgtggaggtgtgggtggtctctg

SEQ ID NO: 59339 - RNA, 23 nt, synthetic construct
  source 1..23: mol_type = other RNA
gaggcggtggccgtggaaccggt

SEQ ID NO: 59340 - RNA, 23 nt, synthetic construct
  source 1..23: mol_type = other RNA
cctggaagcggtcaatgtcacag

SEQ ID NO: 59341 - RNA, 23 nt, synthetic construct
  source 1..23: mol_type = other RNA
gtgggacaggcgccctggaagcg

SEQ ID NO: 59342 - RNA, 23 nt, synthetic construct
  source 1..23: mol_type = other RNA
acagcggggcggaggacactggc

SEQ ID NO: 59343 - RNA, 23 nt, synthetic construct
  source 1..23: mol_type = other RNA
gcaggtgacgttggccacaggct

SEQ ID NO: 59344 - RNA, 23 nt, synthetic construct
  source 1..23: mol_type = other RNA
tcccaaagcgtgcatggatctct

SEQ ID NO: 59345 - RNA, 23 nt, synthetic construct
  source 1..23: mol_type = other RNA
accagccacgtcttggccatgtc

SEQ ID NO: 59346 - RNA, 23 nt, synthetic construct
  source 1..23: mol_type = other RNA
aggtgaggtcgcacaggccaccg

SEQ ID NO: 59347 - RNA, 23 nt, synthetic construct
  source 1..23: mol_type = other RNA
tctggttcctagagttgcaggtg

SEQ ID NO: 59348 - RNA, 23 nt, synthetic construct
  source 1..23: mol_type = other RNA
acaccgtctcggggcagcagggg

SEQ ID NO: 59349 - RNA, 23 nt, synthetic construct
  source 1..23: mol_type = other RNA
gggacagcagtcgccctcctcct

SEQ ID NO: 59350 - RNA, 23 nt, synthetic construct
  source 1..23: mol_type = other RNA
tcagcctcacagaggtacacggt

SEQ ID NO: 59351 - RNA, 23 nt, synthetic construct
  source 1..23: mol_type = other RNA
gtgggggagccatgggcgcaggg

SEQ ID NO: 59352 - RNA, 23 nt, synthetic construct
  source 1..23: mol_type = other RNA
acccttctggggccggtttcacc

SEQ ID NO: 59353 - RNA, 23 nt, synthetic construct
  source 1..23: mol_type = other RNA
cgggcgctccggccgtggcaggg

SEQ ID NO: 59354 - RNA, 23 nt, synthetic construct
  source 1..23: mol_type = other RNA
ccgtgctgcgcgggcgctccggc

SEQ ID NO: 59355 - RNA, 23 nt, synthetic construct
  source 1..23: mol_type = other RNA
cagcctgtctgccccagcggccg

SEQ ID NO: 59356 - RNA, 23 nt, synthetic construct
  source 1..23: mol_type = other RNA
cagcaggcatggacaggcggccg

SEQ ID NO: 59357 - RNA, 23 nt, synthetic construct
  source 1..23: mol_type = other RNA
ttctcgttgtccgtcaggccgca

SEQ ID NO: 59358 - RNA, 23 nt, synthetic construct
  source 1..23: mol_type = other RNA
tcaaagctgtagcgatcgccatc

SEQ ID NO: 59359 - RNA, 23 nt, synthetic construct
  source 1..23: mol_type = other RNA
ctctgggcggtgcccattgtacc

SEQ ID NO: 59360 - RNA, 23 nt, synthetic construct
  source 1..23: mol_type = other RNA
taggtgtcaaagtccccgccaga

SEQ ID NO: 59361 - RNA, 23 nt, synthetic construct
  source 1..23: mol_type = other RNA
taggtgtcaaagtccccgccaga

SEQ ID NO: 59362 - RNA, 23 nt, synthetic construct
  source 1..23: mol_type = other RNA
taggtgtcaaagtccccgccaga

SEQ ID NO: 59363 - RNA, 23 nt, synthetic construct
  source 1..23: mol_type = other RNA
taggtgtcaaagtccccgccaga

SEQ ID NO: 59364 - RNA, 23 nt, synthetic construct
  source 1..23: mol_type = other RNA
gctgaccttgatgtagtccccgc

SEQ ID NO: 59365 - RNA, 23 nt, synthetic construct
  source 1..23: mol_type = other RNA
ggcgcaggcggccaggtacgcag

SEQ ID NO: 59366 - RNA, 23 nt, synthetic construct
  source 1..23: mol_type = other RNA
gttgggatcggtcaggcgcgagc

SEQ ID NO: 59367 - RNA, 23 nt, synthetic construct
  source 1..23: mol_type = other RNA
gccctggggacaggtagtattgt

SEQ ID NO: 59368 - RNA, 23 nt, synthetic construct
  source 1..23: mol_type = other RNA
aaggtgatgttgacctcggtctc

SEQ ID NO: 59369 - RNA, 23 nt, synthetic construct
  source 1..23: mol_type = other RNA
tctgacctggccgttgcgacctc

SEQ ID NO: 59370 - RNA, 23 nt, synthetic construct
  source 1..23: mol_type = other RNA
cccactcccatccgacaccagcc

SEQ ID NO: 59371 - RNA, 23 nt, synthetic construct
  source 1..23: mol_type = other RNA
gcaggctgtatggggccgcatgg

SEQ ID NO: 59372 - RNA, 23 nt, synthetic construct
  source 1..23: mol_type = other RNA
gaggccgttgaagtccccacaca

SEQ ID NO: 59373 - RNA, 23 nt, synthetic construct
  source 1..23: mol_type = other RNA
cagatgccctcctcgtccgtgca

SEQ ID NO: 59374 - RNA, 23 nt, synthetic construct
  source 1..23: mol_type = other RNA
cacagtggtcctcgcagagctgc

SEQ ID NO: 59375 - RNA, 23 nt, synthetic construct
  source 1..23: mol_type = other RNA
aaggtcccgtgggtggtgttgtc

SEQ ID NO: 59376 - RNA, 23 nt, synthetic construct
  source 1..23: mol_type = other RNA
ggtgggcacttcgggtagcagcc

SEQ ID NO: 59377 - RNA, 23 nt, synthetic construct
  source 1..23: mol_type = other RNA
gggtgggcacttcgggtagcagc

SEQ ID NO: 59378 - RNA, 23 nt, synthetic construct
  source 1..23: mol_type = other RNA
ttgcttccgcagatggcgatcaa

SEQ ID NO: 59379 - RNA, 23 nt, synthetic construct
  source 1..23: mol_type = other RNA
tggctgtgcctgtcgggcgagct

SEQ ID NO: 59380 - RNA, 23 nt, synthetic construct
  source 1..23: mol_type = other RNA
ctggagaagggggtgactcggtg

SEQ ID NO: 59381 - RNA, 23 nt, synthetic construct
  source 1..23: mol_type = other RNA
gcccctccggccgcacggatgtt

SEQ ID NO: 59382 - RNA, 23 nt, synthetic construct
  source 1..23: mol_type = other RNA
ctggagaagggggtgactcggtg

SEQ ID NO: 59383 - RNA, 23 nt, synthetic construct
  source 1..23: mol_type = other RNA
gcccctccggccgcacggatgtt

SEQ ID NO: 59384 - RNA, 23 nt, synthetic construct
  source 1..23: mol_type = other RNA
ctggagaagggggtgactcggtg

SEQ ID NO: 59385 - RNA, 23 nt, synthetic construct
  source 1..23: mol_type = other RNA
gcccctccggccgcacggatgtt

SEQ ID NO: 59386 - RNA, 23 nt, synthetic construct
  source 1..23: mol_type = other RNA
gcccctccggccgcacggatgtt

SEQ ID NO: 59387 - RNA, 23 nt, synthetic construct
  source 1..23: mol_type = other RNA
aggaggggatgggtgtaacgctg

SEQ ID NO: 59388 - RNA, 23 nt, synthetic construct
  source 1..23: mol_type = other RNA
gcaggtggttgtgttgcacacgc

SEQ ID NO: 59389 - RNA, 23 nt, synthetic construct
  source 1..23: mol_type = other RNA
tgcacacccgcccattgtgcgcc

SEQ ID NO: 59390 - RNA, 23 nt, synthetic construct
  source 1..23: mol_type = other RNA
gccagggaagcggaagacgtcgc

SEQ ID NO: 59391 - RNA, 23 nt, synthetic construct
  source 1..23: mol_type = other RNA
aggcctcggcgtagctggacgtt

SEQ ID NO: 59392 - RNA, 23 nt, synthetic construct
  source 1..23: mol_type = other RNA
ggaggccagtgcggctgtaaggc

SEQ ID NO: 59393 - RNA, 23 nt, synthetic construct
  source 1..23: mol_type = other RNA
gaccttgatgtagtccccgctct

SEQ ID NO: 59394 - RNA, 23 nt, synthetic construct
  source 1..23: mol_type = other RNA
cgcaggcggccaggtacgcagtg

SEQ ID NO: 59395 - RNA, 23 nt, synthetic construct
  source 1..23: mol_type = other RNA
gcgcaggcggccaggtacgcagt

SEQ ID NO: 59396 - RNA, 23 nt, synthetic construct
  source 1..23: mol_type = other RNA
aaggaggtgcccgggctgtaggt

SEQ ID NO: 59397 - RNA, 23 nt, synthetic construct
  source 1..23: mol_type = other RNA
gtgaagctgctgtcggcacattt

SEQ ID NO: 59398 - RNA, 23 nt, synthetic construct
  source 1..23: mol_type = other RNA
gtccctccagtcgctgagctgta

SEQ ID NO: 59399 - RNA, 23 nt, synthetic construct
  source 1..23: mol_type = other RNA
tggcaggcatccaccacgtaggc

SEQ ID NO: 59400 - RNA, 23 nt, synthetic construct
  source 1..23: mol_type = other RNA
gctggcaggcatccaccacgtag

SEQ ID NO: 59401 - RNA, 23 nt, synthetic construct
  source 1..23: mol_type = other RNA
ctcccaggcagcttagcttccca

SEQ ID NO: 59402 - RNA, 23 nt, synthetic construct
  source 1..23: mol_type = other RNA
ccccactcccatccgacaccagc

SEQ ID NO: 59403 - RNA, 23 nt, synthetic construct
  source 1..23: mol_type = other RNA
tgccactgggtgtgcagttacag

SEQ ID NO: 59404 - RNA, 23 nt, synthetic construct
  source 1..23: mol_type = other RNA
cgggagggccgggcttgtcgtgg

SEQ ID NO: 59405 - RNA, 23 nt, synthetic construct
  source 1..23: mol_type = other RNA
tcaggttttcaaacgtctcaaag

SEQ ID NO: 59406 - RNA, 23 nt, synthetic construct
  source 1..23: mol_type = other RNA
agcccccgcatgcggtcacagtc

SEQ ID NO: 59407 - RNA, 23 nt, synthetic construct
  source 1..23: mol_type = other RNA
ggctgtaccaagggtgcttgtgt

SEQ ID NO: 59408 - RNA, 23 nt, synthetic construct
  source 1..23: mol_type = other RNA
gtggtggtgttagtcaaggggct

SEQ ID NO: 59409 - RNA, 23 nt, synthetic construct
  source 1..23: mol_type = other RNA
ctcagggtggaggtcggggtggc

SEQ ID NO: 59410 - RNA, 23 nt, synthetic construct
  source 1..23: mol_type = other RNA
aagggctggagtcgagtgctggg

SEQ ID NO: 59411 - RNA, 23 nt, synthetic construct
  source 1..23: mol_type = other RNA
cccctccggccgcacggatgttg

SEQ ID NO: 59412 - RNA, 23 nt, synthetic construct
  source 1..23: mol_type = other RNA
cagggctggagtcgagtgctggg

SEQ ID NO: 59413 - RNA, 23 nt, synthetic construct
  source 1..23: mol_type = other RNA
cccctccggccgcacggatgttg

SEQ ID NO: 59414 - RNA, 23 nt, synthetic construct
  source 1..23: mol_type = other RNA
cagggctggagtcgagtgctggg

SEQ ID NO: 59415 - RNA, 23 nt, synthetic construct
  source 1..23: mol_type = other RNA
cccctccggccgcacggatgttg

SEQ ID NO: 59416 - RNA, 23 nt, synthetic construct
  source 1..23: mol_type = other RNA
tagtggccgtggtgatcagtgat

SEQ ID NO: 59417 - RNA, 23 nt, synthetic construct
  source 1..23: mol_type = other RNA
cagggctggagtcgagtgctggg

SEQ ID NO: 59418 - RNA, 23 nt, synthetic construct
  source 1..23: mol_type = other RNA
cccctccggccgcacggatgttg

SEQ ID NO: 59419 - RNA, 23 nt, synthetic construct
  source 1..23: mol_type = other RNA
tggtggtcaccactttgggggtg

SEQ ID NO: 59420 - RNA, 23 nt, synthetic construct
  source 1..23: mol_type = other RNA
agctgggaaccgtggaggcagtg

SEQ ID NO: 59421 - RNA, 23 nt, synthetic construct
  source 1..23: mol_type = other RNA
ggtgacgttggccacaggctttg

SEQ ID NO: 59422 - RNA, 23 nt, synthetic construct
  source 1..23: mol_type = other RNA
ataggtgcagttgccccggaagg

SEQ ID NO: 59423 - RNA, 23 nt, synthetic construct
  source 1..23: mol_type = other RNA
gcggcccctgcagtggtcgctga

SEQ ID NO: 59424 - RNA, 23 nt, synthetic construct
  source 1..23: mol_type = other RNA
gagctctgcgtaagcctccaggc

SEQ ID NO: 59425 - RNA, 23 nt, synthetic construct
  source 1..23: mol_type = other RNA
agagctctgcgtaagcctccagg

SEQ ID NO: 59426 - RNA, 23 nt, synthetic construct
  source 1..23: mol_type = other RNA
gttgcacacgcacaccgtctcgg

SEQ ID NO: 59427 - RNA, 23 nt, synthetic construct
  source 1..23: mol_type = other RNA
acaggatggtcgtgttgatgcgg

SEQ ID NO: 59428 - RNA, 23 nt, synthetic construct
  source 1..23: mol_type = other RNA
cagaaggtgatgttgacctcggt

SEQ ID NO: 59429 - RNA, 23 nt, synthetic construct
  source 1..23: mol_type = other RNA
tggcacgggtggggggacgggga

SEQ ID NO: 59430 - RNA, 23 nt, synthetic construct
  source 1..23: mol_type = other RNA
cccatcctgggggctggcacggg

SEQ ID NO: 59431 - RNA, 23 nt, synthetic construct
  source 1..23: mol_type = other RNA
ggcaccacgagcatggccgccag

SEQ ID NO: 59432 - RNA, 23 nt, synthetic construct
  source 1..23: mol_type = other RNA
cctgcattctcccagctcggctc

SEQ ID NO: 59433 - RNA, 23 nt, synthetic construct
  source 1..23: mol_type = other RNA
ccatggtgtgccctgcattctcc

SEQ ID NO: 59434 - RNA, 23 nt, synthetic construct
  source 1..23: mol_type = other RNA
tgggcgaggacgtcggggcaccg

SEQ ID NO: 59435 - RNA, 23 nt, synthetic construct
  source 1..23: mol_type = other RNA
tgcgccgggttcagggggctcag

SEQ ID NO: 59436 - RNA, 23 nt, synthetic construct
  source 1..23: mol_type = other RNA
gcacacccgcccattgtgcgccg

SEQ ID NO: 59437 - RNA, 23 nt, synthetic construct
  source 1..23: mol_type = other RNA
ctgcacacccgcccattgtgcgc

SEQ ID NO: 59438 - RNA, 23 nt, synthetic construct
  source 1..23: mol_type = other RNA
ggccagggaagcggaagacgtcg

SEQ ID NO: 59439 - RNA, 23 nt, synthetic construct
  source 1..23: mol_type = other RNA
aggccagggaagcggaagacgtc

SEQ ID NO: 59440 - RNA, 23 nt, synthetic construct
  source 1..23: mol_type = other RNA
ggcagtgctcagagaacacgtag

SEQ ID NO: 59441 - RNA, 23 nt, synthetic construct
  source 1..23: mol_type = other RNA
taggcggcgcggcagtgctcaga

SEQ ID NO: 59442 - RNA, 23 nt, synthetic construct
  source 1..23: mol_type = other RNA
tcgtaggcggcgcggcagtgctc

SEQ ID NO: 59443 - RNA, 23 nt, synthetic construct
  source 1..23: mol_type = other RNA
attgatgaggacggagccgttgg

SEQ ID NO: 59444 - RNA, 23 nt, synthetic construct
  source 1..23: mol_type = other RNA
tgcccattgatgaggacggagcc

SEQ ID NO: 59445 - RNA, 23 nt, synthetic construct
  source 1..23: mol_type = other RNA
ctcccgctgcccattgatgagga

SEQ ID NO: 59446 - RNA, 23 nt, synthetic construct
  source 1..23: mol_type = other RNA
ttccacaggaatgtcagcaccag

SEQ ID NO: 59447 - RNA, 23 nt, synthetic construct
  source 1..23: mol_type = other RNA
tcctctccgttccacaggaatgt

SEQ ID NO: 59448 - RNA, 23 nt, synthetic construct
  source 1..23: mol_type = other RNA
cggcaagggcagcgggtccgggc

SEQ ID NO: 59449 - RNA, 23 nt, synthetic construct
  source 1..23: mol_type = other RNA
agcagggtgcggtggcagatgcc

SEQ ID NO: 59450 - RNA, 23 nt, synthetic construct
  source 1..23: mol_type = other RNA
tcctgggcgcaggcggccaggta

SEQ ID NO: 59451 - RNA, 23 nt, synthetic construct
  source 1..23: mol_type = other RNA
gcacctccagttccgcggctggc

SEQ ID NO: 59452 - RNA, 23 nt, synthetic construct
  source 1..23: mol_type = other RNA
tggagcaggtgtccgtgcagggt

SEQ ID NO: 59453 - RNA, 23 nt, synthetic construct
  source 1..23: mol_type = other RNA
agctgcgcgcgctgggggttgga

SEQ ID NO: 59454 - RNA, 23 nt, synthetic construct
  source 1..23: mol_type = other RNA
gcagaagcagccgtccacacagt

SEQ ID NO: 59455 - RNA, 23 nt, synthetic construct
  source 1..23: mol_type = other RNA
gtgatgtcatccagcaccgtgcc

SEQ ID NO: 59456 - RNA, 23 nt, synthetic construct
  source 1..23: mol_type = other RNA
tgcgtgatgtcatccagcaccgt

SEQ ID NO: 59457 - RNA, 23 nt, synthetic construct
  source 1..23: mol_type = other RNA
ggtgttgaaggaggtgcccgggc

SEQ ID NO: 59458 - RNA, 23 nt, synthetic construct
  source 1..23: mol_type = other RNA
tgtgggccccgccctgcacagag

SEQ ID NO: 59459 - RNA, 23 nt, synthetic construct
  source 1..23: mol_type = other RNA
ctcatcataggtggagatgtggg

SEQ ID NO: 59460 - RNA, 23 nt, synthetic construct
  source 1..23: mol_type = other RNA
agcacggtgaagctgctgtcggc

SEQ ID NO: 59461 - RNA, 23 nt, synthetic construct
  source 1..23: mol_type = other RNA
gttctcgttgtccgtcaggccgc

SEQ ID NO: 59462 - RNA, 23 nt, synthetic construct
  source 1..23: mol_type = other RNA
tttcaggcagttctcgttgtccg

SEQ ID NO: 59463 - RNA, 23 nt, synthetic construct
  source 1..23: mol_type = other RNA
caccacgatgaagaagctcgagg

SEQ ID NO: 59464 - RNA, 23 nt, synthetic construct
  source 1..23: mol_type = other RNA
cacctgcatgagtggcaccagct

SEQ ID NO: 59465 - RNA, 23 nt, synthetic construct
  source 1..23: mol_type = other RNA
tccaccaccccgctgagggccgt

SEQ ID NO: 59466 - RNA, 23 nt, synthetic construct
  source 1..23: mol_type = other RNA
ttggcgaaggctgcgcccgtggc

SEQ ID NO: 59467 - RNA, 23 nt, synthetic construct
  source 1..23: mol_type = other RNA
tggcagcgcgagaaggcactgtt

SEQ ID NO: 59468 - RNA, 23 nt, synthetic construct
  source 1..23: mol_type = other RNA
gtggcagcgcgagaaggcactgt

SEQ ID NO: 59469 - RNA, 23 nt, synthetic construct
  source 1..23: mol_type = other RNA
tggggttgatgatggagtggcag

SEQ ID NO: 59470 - RNA, 23 nt, synthetic construct
  source 1..23: mol_type = other RNA
ttggggttgatgatggagtggca

SEQ ID NO: 59471 - RNA, 23 nt, synthetic construct
  source 1..23: mol_type = other RNA
ctggcaggcatccaccacgtagg

SEQ ID NO: 59472 - RNA, 23 nt, synthetic construct
  source 1..23: mol_type = other RNA
ggctggcaggcatccaccacgta

SEQ ID NO: 59473 - RNA, 23 nt, synthetic construct
  source 1..23: mol_type = other RNA
gggctggcaggcatccaccacgt

SEQ ID NO: 59474 - RNA, 23 nt, synthetic construct
  source 1..23: mol_type = other RNA
aggtgcccgcggggcaggtgcag

SEQ ID NO: 59475 - RNA, 23 nt, synthetic construct
  source 1..23: mol_type = other RNA
aaggtgcccgcggggcaggtgca

SEQ ID NO: 59476 - RNA, 23 nt, synthetic construct
  source 1..23: mol_type = other RNA
tcattgaggaaggtgcccgcggg

SEQ ID NO: 59477 - RNA, 23 nt, synthetic construct
  source 1..23: mol_type = other RNA
tcccaggcagcttagcttcccac

SEQ ID NO: 59478 - RNA, 23 nt, synthetic construct
  source 1..23: mol_type = other RNA
agtccaggtacaccatgggggct

SEQ ID NO: 59479 - RNA, 23 nt, synthetic construct
  source 1..23: mol_type = other RNA
gcagtccaggtacaccatggggg

SEQ ID NO: 59480 - RNA, 23 nt, synthetic construct
  source 1..23: mol_type = other RNA
ctgcagtccaggtacaccatggg

SEQ ID NO: 59481 - RNA, 23 nt, synthetic construct
  source 1..23: mol_type = other RNA
aggggtgcccgccgagctgttgc

SEQ ID NO: 59482 - RNA, 23 nt, synthetic construct
  source 1..23: mol_type = other RNA
cggccccaggggtgcccgccgag

SEQ ID NO: 59483 - RNA, 23 nt, synthetic construct
  source 1..23: mol_type = other RNA
ggggcagtcctcctcggcaatgc

SEQ ID NO: 59484 - RNA, 23 nt, synthetic construct
  source 1..23: mol_type = other RNA
caggggcagtcctcctcggcaat

SEQ ID NO: 59485 - RNA, 23 nt, synthetic construct
  source 1..23: mol_type = other RNA
ggtctctccaggcttgtaggtgg

SEQ ID NO: 59486 - RNA, 23 nt, synthetic construct
  source 1..23: mol_type = other RNA
gatcgccatcaaaggtgatgaag

SEQ ID NO: 59487 - RNA, 23 nt, synthetic construct
  source 1..23: mol_type = other RNA
tgtactcgcagctgccttcaaag

SEQ ID NO: 59488 - RNA, 23 nt, synthetic construct
  source 1..23: mol_type = other RNA
gatgtactcgcagctgccttcaa

SEQ ID NO: 59489 - RNA, 23 nt, synthetic construct
  source 1..23: mol_type = other RNA
tgtccccacagtagtcctgggcc

SEQ ID NO: 59490 - RNA, 23 nt, synthetic construct
  source 1..23: mol_type = other RNA
tgggtggtgttgtccccacagta

SEQ ID NO: 59491 - RNA, 23 nt, synthetic construct
  source 1..23: mol_type = other RNA
gtgggtggtgttgtccccacagt

SEQ ID NO: 59492 - RNA, 23 nt, synthetic construct
  source 1..23: mol_type = other RNA
ccgtgggtggtgttgtccccaca

SEQ ID NO: 59493 - RNA, 23 nt, synthetic construct
  source 1..23: mol_type = other RNA
agggtgggtccccacccggccct

SEQ ID NO: 59494 - RNA, 23 nt, synthetic construct
  source 1..23: mol_type = other RNA
acacggccatcccgtgggtctcg

SEQ ID NO: 59495 - RNA, 23 nt, synthetic construct
  source 1..23: mol_type = other RNA
cggatgaacacgctggtcttccg

SEQ ID NO: 59496 - RNA, 23 nt, synthetic construct
  source 1..23: mol_type = other RNA
tccagtgcgtcccccaccacgga

SEQ ID NO: 59497 - RNA, 23 nt, synthetic construct
  source 1..23: mol_type = other RNA
ggggtccttgggtgccagggcgt

SEQ ID NO: 59498 - RNA, 23 nt, synthetic construct
  source 1..23: mol_type = other RNA
gtcgcaggcacacgcgtcgttca

SEQ ID NO: 59499 - RNA, 23 nt, synthetic construct
  source 1..23: mol_type = other RNA
ggcctgggcgtaggcagccacag

SEQ ID NO: 59500 - RNA, 23 nt, synthetic construct
  source 1..23: mol_type = other RNA
ggcccgcgtcgtggcaggcctgg

SEQ ID NO: 59501 - RNA, 23 nt, synthetic construct
  source 1..23: mol_type = other RNA
aggcccgcgtcgtggcaggcctg

SEQ ID NO: 59502 - RNA, 23 nt, synthetic construct
  source 1..23: mol_type = other RNA
agaagtcacagaacaaggggcag

SEQ ID NO: 59503 - RNA, 23 nt, synthetic construct
  source 1..23: mol_type = other RNA
gatgccactgggtgtgcagttac

SEQ ID NO: 59504 - RNA, 23 nt, synthetic construct
  source 1..23: mol_type = other RNA
cgcagatggcgatcaagcaggcg

SEQ ID NO: 59505 - RNA, 23 nt, synthetic construct
  source 1..23: mol_type = other RNA
tgatgatggtgccgttgcttccg

SEQ ID NO: 59506 - RNA, 23 nt, synthetic construct
  source 1..23: mol_type = other RNA
ctggagttccaggacatgccaca

SEQ ID NO: 59507 - RNA, 23 nt, synthetic construct
  source 1..23: mol_type = other RNA
acccaggcggtggtgaaggtgaa

SEQ ID NO: 59508 - RNA, 23 nt, synthetic construct
  source 1..23: mol_type = other RNA
gacacacacggtggagaccggga

SEQ ID NO: 59509 - RNA, 23 nt, synthetic construct
  source 1..23: mol_type = other RNA
agctcctccagcggcatgtcggg

SEQ ID NO: 59510 - RNA, 23 nt, synthetic construct
  source 1..23: mol_type = other RNA
cagctcctccagcggcatgtcgg

SEQ ID NO: 59511 - RNA, 23 nt, synthetic construct
  source 1..23: mol_type = other RNA
gcacatcagcccccgcatgcggt

SEQ ID NO: 59512 - RNA, 23 nt, synthetic construct
  source 1..23: mol_type = other RNA
gcagagaacccgcagctcgtagt

SEQ ID NO: 59513 - RNA, 23 nt, synthetic construct
  source 1..23: mol_type = other RNA
gctgtggtctgggttggggtagg

SEQ ID NO: 59514 - RNA, 23 nt, synthetic construct
  source 1..23: mol_type = other RNA
gaggtgagggccgccgtcgaccg

SEQ ID NO: 59515 - RNA, 23 nt, synthetic construct
  source 1..23: mol_type = other RNA
ctggggccgagggggtgaccgtc

SEQ ID NO: 59516 - RNA, 23 nt, synthetic construct
  source 1..23: mol_type = other RNA
cctggggccgagggggtgaccgt

SEQ ID NO: 59517 - RNA, 23 nt, synthetic construct
  source 1..23: mol_type = other RNA
tccagttggggaagctctcggcc

SEQ ID NO: 59518 - RNA, 23 nt, synthetic construct
  source 1..23: mol_type = other RNA
gggtccagttggggaagctctcg

SEQ ID NO: 59519 - RNA, 23 nt, synthetic construct
  source 1..23: mol_type = other RNA
cacctgtgccagggtccagttgg

SEQ ID NO: 59520 - RNA, 23 nt, synthetic construct
  source 1..23: mol_type = other RNA
caccttctgccccacctgtgcca

SEQ ID NO: 59521 - RNA, 23 nt, synthetic construct
  source 1..23: mol_type = other RNA
gcaccttctgccccacctgtgcc

SEQ ID NO: 59522 - RNA, 23 nt, synthetic construct
  source 1..23: mol_type = other RNA
tcctgcacaccaggccgaagtgg

SEQ ID NO: 59523 - RNA, 23 nt, synthetic construct
  source 1..23: mol_type = other RNA
ttgaagacgccctcctgctccca

SEQ ID NO: 59524 - RNA, 23 nt, synthetic construct
  source 1..23: mol_type = other RNA
cctggtcagccccgggctactcg

SEQ ID NO: 59525 - RNA, 23 nt, synthetic construct
  source 1..23: mol_type = other RNA
gctgtaccaagggtgcttgtgta

SEQ ID NO: 59526 - RNA, 23 nt, synthetic construct
  source 1..23: mol_type = other RNA
tggctgtaccaagggtgcttgtg

SEQ ID NO: 59527 - RNA, 23 nt, synthetic construct
  source 1..23: mol_type = other RNA
tgcaggcgtcgtggggcctcccg

SEQ ID NO: 59528 - RNA, 23 nt, synthetic construct
  source 1..23: mol_type = other RNA
gtggctgtgaggggcgccatgtg

SEQ ID NO: 59529 - RNA, 23 nt, synthetic construct
  source 1..23: mol_type = other RNA
ggccagcgtgggtggctgtgagg

SEQ ID NO: 59530 - RNA, 23 nt, synthetic construct
  source 1..23: mol_type = other RNA
ttgccattgttgttggggccagc

SEQ ID NO: 59531 - RNA, 23 nt, synthetic construct
  source 1..23: mol_type = other RNA
tctggaggttgccattgttgttg

SEQ ID NO: 59532 - RNA, 23 nt, synthetic construct
  source 1..23: mol_type = other RNA
gtcagcggctctttggaagcggt

SEQ ID NO: 59533 - RNA, 23 nt, synthetic construct
  source 1..23: mol_type = other RNA
ttggcgccaggctcgtggtcagc

SEQ ID NO: 59534 - RNA, 23 nt, synthetic construct
  source 1..23: mol_type = other RNA
gaggtggacagctcgctcgtgag

SEQ ID NO: 59535 - RNA, 23 nt, synthetic construct
  source 1..23: mol_type = other RNA
gcctgagaggtggacagctcgct

SEQ ID NO: 59536 - RNA, 23 nt, synthetic construct
  source 1..23: mol_type = other RNA
tcctgggcgtgctggtctcggcc

SEQ ID NO: 59537 - RNA, 23 nt, synthetic construct
  source 1..23: mol_type = other RNA
gtctctgtcctgggcgtgctggt

SEQ ID NO: 59538 - RNA, 23 nt, synthetic construct
  source 1..23: mol_type = other RNA
cgtctctgtcctgggcgtgctgg

SEQ ID NO: 59539 - RNA, 23 nt, synthetic construct
  source 1..23: mol_type = other RNA
ggccgtggatccagtggacgcag

SEQ ID NO: 59540 - RNA, 23 nt, synthetic construct
  source 1..23: mol_type = other RNA
gtaacgctggtagctgtgggtgt

SEQ ID NO: 59541 - RNA, 23 nt, synthetic construct
  source 1..23: mol_type = other RNA
tgtaacgctggtagctgtgggtg

SEQ ID NO: 59542 - RNA, 23 nt, synthetic construct
  source 1..23: mol_type = other RNA
cggtggccccagttgtggtggcc

SEQ ID NO: 59543 - RNA, 23 nt, synthetic construct
  source 1..23: mol_type = other RNA
cgtggttgtggtagttggcactt

SEQ ID NO: 59544 - RNA, 23 nt, synthetic construct
  source 1..23: mol_type = other RNA
gagggggtggctgtgaagcccgt

SEQ ID NO: 59545 - RNA, 23 nt, synthetic construct
  source 1..23: mol_type = other RNA
ccacactggaggcgtgagtgccg

SEQ ID NO: 59546 - RNA, 23 nt, synthetic construct
  source 1..23: mol_type = other RNA
tccacactggaggcgtgagtgcc

SEQ ID NO: 59547 - RNA, 23 nt, synthetic construct
  source 1..23: mol_type = other RNA
tggtggtggtggtcagcactgtg

SEQ ID NO: 59548 - RNA, 23 nt, synthetic construct
  source 1..23: mol_type = other RNA
gagggtgttgccatagaaccagt

SEQ ID NO: 59549 - RNA, 23 nt, synthetic construct
  source 1..23: mol_type = other RNA
tggagccggtggccgtgatcgta

SEQ ID NO: 59550 - RNA, 23 nt, synthetic construct
  source 1..23: mol_type = other RNA
gtggcggtggtggtcagcactgg

SEQ ID NO: 59551 - RNA, 23 nt, synthetic construct
  source 1..23: mol_type = other RNA
gaggagggagtcactgtgttgct

SEQ ID NO: 59552 - RNA, 23 nt, synthetic construct
  source 1..23: mol_type = other RNA
ctgggggtgtgtgggtggtccct

SEQ ID NO: 59553 - RNA, 23 nt, synthetic construct
  source 1..23: mol_type = other RNA
tggccatggtgttcggcactggg

SEQ ID NO: 59554 - RNA, 23 nt, synthetic construct
  source 1..23: mol_type = other RNA
cgcaccgtgtggggactgctggg

SEQ ID NO: 59555 - RNA, 23 nt, synthetic construct
  source 1..23: mol_type = other RNA
gtccaggctgtgcgcaccgtgtg

SEQ ID NO: 59556 - RNA, 23 nt, synthetic construct
  source 1..23: mol_type = other RNA
tggccgaagtccaggctgtgcgc

SEQ ID NO: 59557 - RNA, 23 nt, synthetic construct
  source 1..23: mol_type = other RNA
ccaagatgcccgaggtggccgaa

SEQ ID NO: 59558 - RNA, 23 nt, synthetic construct
  source 1..23: mol_type = other RNA
atgtgggtggtgcccaagatgcc

SEQ ID NO: 59559 - RNA, 23 nt, synthetic construct
  source 1..23: mol_type = other RNA
tgatgtgggtggtgcccaagatg

SEQ ID NO: 59560 - RNA, 23 nt, synthetic construct
  source 1..23: mol_type = other RNA
ggaagtcaccgtggaaggctctg

SEQ ID NO: 59561 - RNA, 23 nt, synthetic construct
  source 1..23: mol_type = other RNA
gtggttctgctgctagggtgagg

SEQ ID NO: 59562 - RNA, 23 nt, synthetic construct
  source 1..23: mol_type = other RNA
cctggagaagggggtgactcggt

SEQ ID NO: 59563 - RNA, 23 nt, synthetic construct
  source 1..23: mol_type = other RNA
ttggagtaggtgtcaaagtcccc

SEQ ID NO: 59564 - RNA, 23 nt, synthetic construct
  source 1..23: mol_type = other RNA
gttggagtaggtgtcaaagtccc

SEQ ID NO: 59565 - RNA, 23 nt, synthetic construct
  source 1..23: mol_type = other RNA
tgttggagtaggtgtcaaagtcc

SEQ ID NO: 59566 - RNA, 23 nt, synthetic construct
  source 1..23: mol_type = other RNA
gatgttggagtaggtgtcaaagt

SEQ ID NO: 59567 - RNA, 23 nt, synthetic construct
  source 1..23: mol_type = other RNA
acggcccctccggccgcacggat

SEQ ID NO: 59568 - RNA, 23 nt, synthetic construct
  source 1..23: mol_type = other RNA
tggaggagggcatggccgtagag

SEQ ID NO: 59569 - RNA, 23 nt, synthetic construct
  source 1..23: mol_type = other RNA
ggccgtggatccagtggactcag

SEQ ID NO: 59570 - RNA, 23 nt, synthetic construct
  source 1..23: mol_type = other RNA
tgggcaccgtcacggtggctgta

SEQ ID NO: 59571 - RNA, 23 nt, synthetic construct
  source 1..23: mol_type = other RNA
gtgggcaccgtcacggtggctgt

SEQ ID NO: 59572 - RNA, 23 nt, synthetic construct
  source 1..23: mol_type = other RNA
gtggacagtctctggagtggagg

SEQ ID NO: 59573 - RNA, 23 nt, synthetic construct
  source 1..23: mol_type = other RNA
cagagccggtggccccggttgtg

SEQ ID NO: 59574 - RNA, 23 nt, synthetic construct
  source 1..23: mol_type = other RNA
gtggttgtggtagtcagcacttt

SEQ ID NO: 59575 - RNA, 23 nt, synthetic construct
  source 1..23: mol_type = other RNA
gagggggtggctgtgaagcccgt

SEQ ID NO: 59576 - RNA, 23 nt, synthetic construct
  source 1..23: mol_type = other RNA
aggagggggtcaccgtggaacct

SEQ ID NO: 59577 - RNA, 23 nt, synthetic construct
  source 1..23: mol_type = other RNA
tggtggtggtggtcagcactgtg

SEQ ID NO: 59578 - RNA, 23 nt, synthetic construct
  source 1..23: mol_type = other RNA
gagggtgttgccatagaaccagt

SEQ ID NO: 59579 - RNA, 23 nt, synthetic construct
  source 1..23: mol_type = other RNA
tggagccggtggccgtgatcgta

SEQ ID NO: 59580 - RNA, 23 nt, synthetic construct
  source 1..23: mol_type = other RNA
gtggcggtggtggtcagcactgg

SEQ ID NO: 59581 - RNA, 23 nt, synthetic construct
  source 1..23: mol_type = other RNA
ctgggggtgtgtgggtggtccct

SEQ ID NO: 59582 - RNA, 23 nt, synthetic construct
  source 1..23: mol_type = other RNA
cgcaccgtgtggggactgctggg

SEQ ID NO: 59583 - RNA, 23 nt, synthetic construct
  source 1..23: mol_type = other RNA
gtccaggctgtgcgcaccgtgtg

SEQ ID NO: 59584 - RNA, 23 nt, synthetic construct
  source 1..23: mol_type = other RNA
tggccgaagtccaggctgtgcgc

SEQ ID NO: 59585 - RNA, 23 nt, synthetic construct
  source 1..23: mol_type = other RNA
aggtgcctgaggtggccgaagtc

SEQ ID NO: 59586 - RNA, 23 nt, synthetic construct
  source 1..23: mol_type = other RNA
tgatgtgggtggtgcccaaggtg

SEQ ID NO: 59587 - RNA, 23 nt, synthetic construct
  source 1..23: mol_type = other RNA
cctggagaagggggtgactcggt

SEQ ID NO: 59588 - RNA, 23 nt, synthetic construct
  source 1..23: mol_type = other RNA
ccctggtgtggcccggggtggtc

SEQ ID NO: 59589 - RNA, 23 nt, synthetic construct
  source 1..23: mol_type = other RNA
gccctggtgtggcccggggtggt

SEQ ID NO: 59590 - RNA, 23 nt, synthetic construct
  source 1..23: mol_type = other RNA
ttggagtaggtgtcaaagtcccc

SEQ ID NO: 59591 - RNA, 23 nt, synthetic construct
  source 1..23: mol_type = other RNA
gttggagtaggtgtcaaagtccc

SEQ ID NO: 59592 - RNA, 23 nt, synthetic construct
  source 1..23: mol_type = other RNA
tgttggagtaggtgtcaaagtcc

SEQ ID NO: 59593 - RNA, 23 nt, synthetic construct
  source 1..23: mol_type = other RNA
gatgttggagtaggtgtcaaagt

SEQ ID NO: 59594 - RNA, 23 nt, synthetic construct
  source 1..23: mol_type = other RNA
acggcccctccggccgcacggat

SEQ ID NO: 59595 - RNA, 23 nt, synthetic construct
  source 1..23: mol_type = other RNA
tccaggtcgtccctggagtggag

SEQ ID NO: 59596 - RNA, 23 nt, synthetic construct
  source 1..23: mol_type = other RNA
ggccgtggatccagtggttgcgg

SEQ ID NO: 59597 - RNA, 23 nt, synthetic construct
  source 1..23: mol_type = other RNA
tggccgtggatccagtggttgcg

SEQ ID NO: 59598 - RNA, 23 nt, synthetic construct
  source 1..23: mol_type = other RNA
tgtcagcactggaagggtggttg

SEQ ID NO: 59599 - RNA, 23 nt, synthetic construct
  source 1..23: mol_type = other RNA
tgaaggaggggatgggtgtaaag

SEQ ID NO: 59600 - RNA, 23 nt, synthetic construct
  source 1..23: mol_type = other RNA
tgggagggtcccggtggtcccaa

SEQ ID NO: 59601 - RNA, 23 nt, synthetic construct
  source 1..23: mol_type = other RNA
gaggaggggtggattgtggacat

SEQ ID NO: 59602 - RNA, 23 nt, synthetic construct
  source 1..23: mol_type = other RNA
gtgtgggtggtctccggagtgga

SEQ ID NO: 59603 - RNA, 23 nt, synthetic construct
  source 1..23: mol_type = other RNA
gtggaggtgtgggtggtctccgg

SEQ ID NO: 59604 - RNA, 23 nt, synthetic construct
  source 1..23: mol_type = other RNA
ggaactggtggcccttgtcgtgg

SEQ ID NO: 59605 - RNA, 23 nt, synthetic construct
  source 1..23: mol_type = other RNA
tggaactggtggcccttgtcgtg

SEQ ID NO: 59606 - RNA, 23 nt, synthetic construct
  source 1..23: mol_type = other RNA
tggccgtggggccagtggctgca

SEQ ID NO: 59607 - RNA, 23 nt, synthetic construct
  source 1..23: mol_type = other RNA
gctgggctctgtgaggatccagg

SEQ ID NO: 59608 - RNA, 23 nt, synthetic construct
  source 1..23: mol_type = other RNA
gtggctgtagtgctgggctctgt

SEQ ID NO: 59609 - RNA, 23 nt, synthetic construct
  source 1..23: mol_type = other RNA
tgggcaccgtcacggtggctgta

SEQ ID NO: 59610 - RNA, 23 nt, synthetic construct
  source 1..23: mol_type = other RNA
gtgggcaccgtcacggtggctgt

SEQ ID NO: 59611 - RNA, 23 nt, synthetic construct
  source 1..23: mol_type = other RNA
gccagcagttgcccgggtggagg

SEQ ID NO: 59612 - RNA, 23 nt, synthetic construct
  source 1..23: mol_type = other RNA
agcactttgagggtgccagcagt

SEQ ID NO: 59613 - RNA, 23 nt, synthetic construct
  source 1..23: mol_type = other RNA
gtaacgctggtagctgtgggtgt

SEQ ID NO: 59614 - RNA, 23 nt, synthetic construct
  source 1..23: mol_type = other RNA
tgtaacgctggtagctgtgggtg

SEQ ID NO: 59615 - RNA, 23 nt, synthetic construct
  source 1..23: mol_type = other RNA
gtggacagtctctggagtagagg

SEQ ID NO: 59616 - RNA, 23 nt, synthetic construct
  source 1..23: mol_type = other RNA
gtggtggtcgtggtggtaagcac

SEQ ID NO: 59617 - RNA, 23 nt, synthetic construct
  source 1..23: mol_type = other RNA
cgtggttgtggtagtcggcactt

SEQ ID NO: 59618 - RNA, 23 nt, synthetic construct
  source 1..23: mol_type = other RNA
gagggggtggctgtgaagcccgt

SEQ ID NO: 59619 - RNA, 23 nt, synthetic construct
  source 1..23: mol_type = other RNA
ccacactggaggcgtgagtgccg

SEQ ID NO: 59620 - RNA, 23 nt, synthetic construct
  source 1..23: mol_type = other RNA
tccacactggaggcgtgagtgcc

SEQ ID NO: 59621 - RNA, 23 nt, synthetic construct
  source 1..23: mol_type = other RNA
tggtggtggtggtcagcactgtg

SEQ ID NO: 59622 - RNA, 23 nt, synthetic construct
  source 1..23: mol_type = other RNA
gagggtgttgccatagaaccagt

SEQ ID NO: 59623 - RNA, 23 nt, synthetic construct
  source 1..23: mol_type = other RNA
gtggcggtggtggtcagcactgg

SEQ ID NO: 59624 - RNA, 23 nt, synthetic construct
  source 1..23: mol_type = other RNA
ctgggggtgtgtgggtggtccct

SEQ ID NO: 59625 - RNA, 23 nt, synthetic construct
  source 1..23: mol_type = other RNA
cgcaccgtgtggggactgctggg

SEQ ID NO: 59626 - RNA, 23 nt, synthetic construct
  source 1..23: mol_type = other RNA
gtccaggctgtgcgcaccgtgtg

SEQ ID NO: 59627 - RNA, 23 nt, synthetic construct
  source 1..23: mol_type = other RNA
tggccgaagtccaggctgtgcgc

SEQ ID NO: 59628 - RNA, 23 nt, synthetic construct
  source 1..23: mol_type = other RNA
ccaagatgcccgaggtggccgaa

SEQ ID NO: 59629 - RNA, 23 nt, synthetic construct
  source 1..23: mol_type = other RNA
atgtgggtggtgcccaagatgcc

SEQ ID NO: 59630 - RNA, 23 nt, synthetic construct
  source 1..23: mol_type = other RNA
tgatgtgggtggtgcccaagatg

SEQ ID NO: 59631 - RNA, 23 nt, synthetic construct
  source 1..23: mol_type = other RNA
ggaagtcaccgtggaaggctctg

SEQ ID NO: 59632 - RNA, 23 nt, synthetic construct
  source 1..23: mol_type = other RNA
tgggtggtactggtggttgctgc

SEQ ID NO: 59633 - RNA, 23 nt, synthetic construct
  source 1..23: mol_type = other RNA
cctggagaagggggtgactcggt

SEQ ID NO: 59634 - RNA, 23 nt, synthetic construct
  source 1..23: mol_type = other RNA
ccctggtgtggcccggggtggtc

SEQ ID NO: 59635 - RNA, 23 nt, synthetic construct
  source 1..23: mol_type = other RNA
cccctggtgtggcccggggtggt

SEQ ID NO: 59636 - RNA, 23 nt, synthetic construct
  source 1..23: mol_type = other RNA
ttggagtaggtgtcaaagtcccc

SEQ ID NO: 59637 - RNA, 23 nt, synthetic construct
  source 1..23: mol_type = other RNA
gttggagtaggtgtcaaagtccc

SEQ ID NO: 59638 - RNA, 23 nt, synthetic construct
  source 1..23: mol_type = other RNA
tgttggagtaggtgtcaaagtcc

SEQ ID NO: 59639 - RNA, 23 nt, synthetic construct
  source 1..23: mol_type = other RNA
gatgttggagtaggtgtcaaagt

SEQ ID NO: 59640 - RNA, 23 nt, synthetic construct
  source 1..23: mol_type = other RNA
ggctgctcacagactgcccctcc

SEQ ID NO: 59641 - RNA, 23 nt, synthetic construct
  source 1..23: mol_type = other RNA
gggctgctcacagactgcccctc

SEQ ID NO: 59642 - RNA, 23 nt, synthetic construct
  source 1..23: mol_type = other RNA
ggccgtggatccagtggactcag

SEQ ID NO: 59643 - RNA, 23 nt, synthetic construct
  source 1..23: mol_type = other RNA
tgggcaccgtcacggtggctgta

SEQ ID NO: 59644 - RNA, 23 nt, synthetic construct
  source 1..23: mol_type = other RNA
gtgggcaccgtcacggtggctgt

SEQ ID NO: 59645 - RNA, 23 nt, synthetic construct
  source 1..23: mol_type = other RNA
cgtggttgtggtagtcggcactt

SEQ ID NO: 59646 - RNA, 23 nt, synthetic construct
  source 1..23: mol_type = other RNA
ggggtgactgtgaagcccgtggt

SEQ ID NO: 59647 - RNA, 23 nt, synthetic construct
  source 1..23: mol_type = other RNA
agggggtgactgtgaagcccgtg

SEQ ID NO: 59648 - RNA, 23 nt, synthetic construct
  source 1..23: mol_type = other RNA
tggtccccgggacggaggagggg

SEQ ID NO: 59649 - RNA, 23 nt, synthetic construct
  source 1..23: mol_type = other RNA
gtggtccccgggacggaggaggg

SEQ ID NO: 59650 - RNA, 23 nt, synthetic construct
  source 1..23: mol_type = other RNA
gggtggtccccgggacggaggag

SEQ ID NO: 59651 - RNA, 23 nt, synthetic construct
  source 1..23: mol_type = other RNA
tggtggtggtggtcagcactgtg

SEQ ID NO: 59652 - RNA, 23 nt, synthetic construct
  source 1..23: mol_type = other RNA
gagggtgttgccatagaaccagt

SEQ ID NO: 59653 - RNA, 23 nt, synthetic construct
  source 1..23: mol_type = other RNA
agtggccgtggtgatcagtgatg

SEQ ID NO: 59654 - RNA, 23 nt, synthetic construct
  source 1..23: mol_type = other RNA
tggagccggtggccgtgatcgta

SEQ ID NO: 59655 - RNA, 23 nt, synthetic construct
  source 1..23: mol_type = other RNA
gtggcggtggtggtcagcactgg

SEQ ID NO: 59656 - RNA, 23 nt, synthetic construct
  source 1..23: mol_type = other RNA
ctgggggtgtgtgggtggtccct

SEQ ID NO: 59657 - RNA, 23 nt, synthetic construct
  source 1..23: mol_type = other RNA
cgcaccgtgtggggactgctggg

SEQ ID NO: 59658 - RNA, 23 nt, synthetic construct
  source 1..23: mol_type = other RNA
gtccaggctgtgcgcaccgtgtg

SEQ ID NO: 59659 - RNA, 23 nt, synthetic construct
  source 1..23: mol_type = other RNA
tggccgaagtccaggctgtgcgc

SEQ ID NO: 59660 - RNA, 23 nt, synthetic construct
  source 1..23: mol_type = other RNA
aggtgcctgaggtggccgaagtc

SEQ ID NO: 59661 - RNA, 23 nt, synthetic construct
  source 1..23: mol_type = other RNA
tgatgtgggtggtgcccaaggtg

SEQ ID NO: 59662 - RNA, 23 nt, synthetic construct
  source 1..23: mol_type = other RNA
tggggaagggggtgactcggtgg

SEQ ID NO: 59663 - RNA, 23 nt, synthetic construct
  source 1..23: mol_type = other RNA
ttggagtaggtgtcaaagtcccc

SEQ ID NO: 59664 - RNA, 23 nt, synthetic construct
  source 1..23: mol_type = other RNA
gttggagtaggtgtcaaagtccc

SEQ ID NO: 59665 - RNA, 23 nt, synthetic construct
  source 1..23: mol_type = other RNA
tgttggagtaggtgtcaaagtcc

SEQ ID NO: 59666 - RNA, 23 nt, synthetic construct
  source 1..23: mol_type = other RNA
gatgttggagtaggtgtcaaagt

SEQ ID NO: 59667 - RNA, 23 nt, synthetic construct
  source 1..23: mol_type = other RNA
acggcccctccggccgcacggat

SEQ ID NO: 59668 - RNA, 23 nt, synthetic construct
  source 1..23: mol_type = other RNA
cccagggggacaccaggctgggc

SEQ ID NO: 59669 - RNA, 23 nt, synthetic construct
  source 1..23: mol_type = other RNA
tggaggagggcatggccgtagag

SEQ ID NO: 59670 - RNA, 23 nt, synthetic construct
  source 1..23: mol_type = other RNA
tgtcagcactggaagggtggttg

SEQ ID NO: 59671 - RNA, 23 nt, synthetic construct
  source 1..23: mol_type = other RNA
tgtaacgctggtagctgtggatt

SEQ ID NO: 59672 - RNA, 23 nt, synthetic construct
  source 1..23: mol_type = other RNA
tggaggaggggatgggtgtaacg

SEQ ID NO: 59673 - RNA, 23 nt, synthetic construct
  source 1..23: mol_type = other RNA
tgggagggtcccggtggtcccaa

SEQ ID NO: 59674 - RNA, 23 nt, synthetic construct
  source 1..23: mol_type = other RNA
gaggaggggtggattgtggacat

SEQ ID NO: 59675 - RNA, 23 nt, synthetic construct
  source 1..23: mol_type = other RNA
gtgtgggtggtctccggagtgga

SEQ ID NO: 59676 - RNA, 23 nt, synthetic construct
  source 1..23: mol_type = other RNA
gtggaggtgtgggtggtctccgg

SEQ ID NO: 59677 - RNA, 23 nt, synthetic construct
  source 1..23: mol_type = other RNA
ggaactggtggcccttgtcgtgg

SEQ ID NO: 59678 - RNA, 23 nt, synthetic construct
  source 1..23: mol_type = other RNA
tggaactggtggcccttgtcgtg

SEQ ID NO: 59679 - RNA, 23 nt, synthetic construct
  source 1..23: mol_type = other RNA
tggccgtggggccagtggctgca

SEQ ID NO: 59680 - RNA, 23 nt, synthetic construct
  source 1..23: mol_type = other RNA
ggccgtggatccagtggacgcag

SEQ ID NO: 59681 - RNA, 23 nt, synthetic construct
  source 1..23: mol_type = other RNA
tgggcaccgtcacggtggctgta

SEQ ID NO: 59682 - RNA, 23 nt, synthetic construct
  source 1..23: mol_type = other RNA
gtgggcaccgtcacggtggctgt

SEQ ID NO: 59683 - RNA, 23 nt, synthetic construct
  source 1..23: mol_type = other RNA
ctggaagggcagttgcagtccct

SEQ ID NO: 59684 - RNA, 23 nt, synthetic construct
  source 1..23: mol_type = other RNA
gtggacagtctctggagtggagg

SEQ ID NO: 59685 - RNA, 23 nt, synthetic construct
  source 1..23: mol_type = other RNA
cagagccggtggccccggttgtg

SEQ ID NO: 59686 - RNA, 23 nt, synthetic construct
  source 1..23: mol_type = other RNA
cgtggttgtggtagtcggcactt

SEQ ID NO: 59687 - RNA, 23 nt, synthetic construct
  source 1..23: mol_type = other RNA
gagggggtggctgtgaagcccgt

SEQ ID NO: 59688 - RNA, 23 nt, synthetic construct
  source 1..23: mol_type = other RNA
ccacactggaggcgtgagtgccg

SEQ ID NO: 59689 - RNA, 23 nt, synthetic construct
  source 1..23: mol_type = other RNA
tccacactggaggcgtgagtgcc

SEQ ID NO: 59690 - RNA, 23 nt, synthetic construct
  source 1..23: mol_type = other RNA
tggtggtggtggtcagcactctg

SEQ ID NO: 59691 - RNA, 23 nt, synthetic construct
  source 1..23: mol_type = other RNA
gagggtgttgccatagaaccagt

SEQ ID NO: 59692 - RNA, 23 nt, synthetic construct
  source 1..23: mol_type = other RNA
tggagccggtggccgtgatcgta

SEQ ID NO: 59693 - RNA, 23 nt, synthetic construct
  source 1..23: mol_type = other RNA
tgtcagcactggaagggtggttg

SEQ ID NO: 59694 - RNA, 23 nt, synthetic construct
  source 1..23: mol_type = other RNA
tggaggaggggatgggtgtaaag

SEQ ID NO: 59695 - RNA, 23 nt, synthetic construct
  source 1..23: mol_type = other RNA
tccacgtggtccacagggtggag

SEQ ID NO: 59696 - RNA, 23 nt, synthetic construct
  source 1..23: mol_type = other RNA
acggtccacgtggtccacagggt

SEQ ID NO: 59697 - RNA, 23 nt, synthetic construct
  source 1..23: mol_type = other RNA
gacatggtggacatgggtgtggt

SEQ ID NO: 59698 - RNA, 23 nt, synthetic construct
  source 1..23: mol_type = other RNA
gtgtggattgtggacatggtgga

SEQ ID NO: 59699 - RNA, 23 nt, synthetic construct
  source 1..23: mol_type = other RNA
gtggaggtgtgggtggtctctgg

SEQ ID NO: 59700 - RNA, 23 nt, synthetic construct
  source 1..23: mol_type = other RNA
tggtggcccttgtcatggtggct

SEQ ID NO: 59701 - RNA, 23 nt, synthetic construct
  source 1..23: mol_type = other RNA
tggccgtggatccagtggctgca

SEQ ID NO: 59702 - RNA, 23 nt, synthetic construct
  source 1..23: mol_type = other RNA
gtgggcaccatcacggtggctat

SEQ ID NO: 59703 - RNA, 23 nt, synthetic construct
  source 1..23: mol_type = other RNA
tggtcaccactttgggggtgtga

SEQ ID NO: 59704 - RNA, 23 nt, synthetic construct
  source 1..23: mol_type = other RNA
gtggtcaccactttgggggtgtg

SEQ ID NO: 59705 - RNA, 23 nt, synthetic construct
  source 1..23: mol_type = other RNA
atggtggtcaccactttgggggt

SEQ ID NO: 59706 - RNA, 23 nt, synthetic construct
  source 1..23: mol_type = other RNA
gtggccatggtggtcaccacttt

SEQ ID NO: 59707 - RNA, 23 nt, synthetic construct
  source 1..23: mol_type = other RNA
tgggcatagtggccatggtggtc

SEQ ID NO: 59708 - RNA, 23 nt, synthetic construct
  source 1..23: mol_type = other RNA
gtgggcatagtggccatggtggt

SEQ ID NO: 59709 - RNA, 23 nt, synthetic construct
  source 1..23: mol_type = other RNA
tggtccccacggtggacgagctg

SEQ ID NO: 59710 - RNA, 23 nt, synthetic construct
  source 1..23: mol_type = other RNA
ggggtgcgggtggtccccacggt

SEQ ID NO: 59711 - RNA, 23 nt, synthetic construct
  source 1..23: mol_type = other RNA
aaaactgtccaaatgccctgcag

SEQ ID NO: 59712 - RNA, 23 nt, synthetic construct
  source 1..23: mol_type = other RNA
ggtcaatgtcacagtgctgattg

SEQ ID NO: 59713 - RNA, 23 nt, synthetic construct
  source 1..23: mol_type = other RNA
tggaagcggtcaatgtcacagtg

SEQ ID NO: 59714 - RNA, 23 nt, synthetic construct
  source 1..23: mol_type = other RNA
ctgccggagagggatggcattgt

SEQ ID NO: 59715 - RNA, 23 nt, synthetic construct
  source 1..23: mol_type = other RNA
tctcattcacctgccggagaggg

SEQ ID NO: 59716 - RNA, 23 nt, synthetic construct
  source 1..23: mol_type = other RNA
gtccagcaggacgacacggttgt

SEQ ID NO: 59717 - RNA, 23 nt, synthetic construct
  source 1..23: mol_type = other RNA
ttggccacaggctttgggtccag

SEQ ID NO: 59718 - RNA, 23 nt, synthetic construct
  source 1..23: mol_type = other RNA
caggtgacgttggccacaggctt

SEQ ID NO: 59719 - RNA, 23 nt, synthetic construct
  source 1..23: mol_type = other RNA
cgcaggtgacgttggccacaggc

SEQ ID NO: 59720 - RNA, 23 nt, synthetic construct
  source 1..23: mol_type = other RNA
cacatgctgcagatgcactcgca

SEQ ID NO: 59721 - RNA, 23 nt, synthetic construct
  source 1..23: mol_type = other RNA
gtggaatagtgggagccgcccca

SEQ ID NO: 59722 - RNA, 23 nt, synthetic construct
  source 1..23: mol_type = other RNA
aggtggaatagtgggagccgccc

SEQ ID NO: 59723 - RNA, 23 nt, synthetic construct
  source 1..23: mol_type = other RNA
taggtgcagttgccccggaaggt

SEQ ID NO: 59724 - RNA, 23 nt, synthetic construct
  source 1..23: mol_type = other RNA
acataggtgcagttgccccggaa

SEQ ID NO: 59725 - RNA, 23 nt, synthetic construct
  source 1..23: mol_type = other RNA
gacataggtgcagttgccccgga

SEQ ID NO: 59726 - RNA, 23 nt, synthetic construct
  source 1..23: mol_type = other RNA
ggacataggtgcagttgccccgg

SEQ ID NO: 59727 - RNA, 23 nt, synthetic construct
  source 1..23: mol_type = other RNA
aggctgagattcccaaagcgtgc

SEQ ID NO: 59728 - RNA, 23 nt, synthetic construct
  source 1..23: mol_type = other RNA
gttgtccaggtagaggctgagat

SEQ ID NO: 59729 - RNA, 23 nt, synthetic construct
  source 1..23: mol_type = other RNA
gtggttgtccaggtagaggctga

SEQ ID NO: 59730 - RNA, 23 nt, synthetic construct
  source 1..23: mol_type = other RNA
tggcagaggccgtgcagtagtgg

SEQ ID NO: 59731 - RNA, 23 nt, synthetic construct
  source 1..23: mol_type = other RNA
ttggtcaaacaggatcaggccct

SEQ ID NO: 59732 - RNA, 23 nt, synthetic construct
  source 1..23: mol_type = other RNA
cacacgcatggtggtggtcccca

SEQ ID NO: 59733 - RNA, 23 nt, synthetic construct
  source 1..23: mol_type = other RNA
cagggcaggaatgtccacacgca

SEQ ID NO: 59734 - RNA, 23 nt, synthetic construct
  source 1..23: mol_type = other RNA
ccagggcaggaatgtccacacgc

SEQ ID NO: 59735 - RNA, 23 nt, synthetic construct
  source 1..23: mol_type = other RNA
cccagggcaggaatgtccacacg

SEQ ID NO: 59736 - RNA, 23 nt, synthetic construct
  source 1..23: mol_type = other RNA
ttggccattgaaggtgacgctca

SEQ ID NO: 59737 - RNA, 23 nt, synthetic construct
  source 1..23: mol_type = other RNA
cgtcttggccatgtccttgcaac

SEQ ID NO: 59738 - RNA, 23 nt, synthetic construct
  source 1..23: mol_type = other RNA
atcctttctgctgtcggggacca

SEQ ID NO: 59739 - RNA, 23 nt, synthetic construct
  source 1..23: mol_type = other RNA
ttgtggcactcagcaaagacctg

SEQ ID NO: 59740 - RNA, 23 nt, synthetic construct
  source 1..23: mol_type = other RNA
cacaaggttgtggcactcagcaa

SEQ ID NO: 59741 - RNA, 23 nt, synthetic construct
  source 1..23: mol_type = other RNA
tgatgcaggcgttgaagaatggg

SEQ ID NO: 59742 - RNA, 23 nt, synthetic construct
  source 1..23: mol_type = other RNA
cgctgatgcaggcgttgaagaat

SEQ ID NO: 59743 - RNA, 23 nt, synthetic construct
  source 1..23: mol_type = other RNA
aggcggcccctgcagtggtcgct

SEQ ID NO: 59744 - RNA, 23 nt, synthetic construct
  source 1..23: mol_type = other RNA
acaggccaccggttgcacctcgc

SEQ ID NO: 59745 - RNA, 23 nt, synthetic construct
  source 1..23: mol_type = other RNA
gtgggctctggttcctagagttg

SEQ ID NO: 59746 - RNA, 23 nt, synthetic construct
  source 1..23: mol_type = other RNA
gggcaggcctgcacgcagatgcc

SEQ ID NO: 59747 - RNA, 23 nt, synthetic construct
  source 1..23: mol_type = other RNA
ggggcaggcctgcacgcagatgc

SEQ ID NO: 59748 - RNA, 23 nt, synthetic construct
  source 1..23: mol_type = other RNA
cgcaggggcaggcctgcacgcag

SEQ ID NO: 59749 - RNA, 23 nt, synthetic construct
  source 1..23: mol_type = other RNA
acgcaggggcaggcctgcacgca

SEQ ID NO: 59750 - RNA, 23 nt, synthetic construct
  source 1..23: mol_type = other RNA
cgggtcccacgcaggggcaggcc

SEQ ID NO: 59751 - RNA, 23 nt, synthetic construct
  source 1..23: mol_type = other RNA
gttgcacggcgggggctgaccct

SEQ ID NO: 59752 - RNA, 23 nt, synthetic construct
  source 1..23: mol_type = other RNA
gggcagcaggggttctcggcccg

SEQ ID NO: 59753 - RNA, 23 nt, synthetic construct
  source 1..23: mol_type = other RNA
cacaccgtctcggggcagcaggg

SEQ ID NO: 59754 - RNA, 23 nt, synthetic construct
  source 1..23: mol_type = other RNA
caggtggttgtgttgcacacgca

SEQ ID NO: 59755 - RNA, 23 nt, synthetic construct
  source 1..23: mol_type = other RNA
ctgggtgcagatggactcctgcc

SEQ ID NO: 59756 - RNA, 23 nt, synthetic construct
  source 1..23: mol_type = other RNA
tcctgggtgcagatggactcctg

SEQ ID NO: 59757 - RNA, 23 nt, synthetic construct
  source 1..23: mol_type = other RNA
ccctcctcctgggtgcagatgga

SEQ ID NO: 59758 - RNA, 23 nt, synthetic construct
  source 1..23: mol_type = other RNA
accccgtagaaggtgccattgta

SEQ ID NO: 59759 - RNA, 23 nt, synthetic construct
  source 1..23: mol_type = other RNA
tgcaggcatcctcctgacattgc

SEQ ID NO: 59760 - RNA, 23 nt, synthetic construct
  source 1..23: mol_type = other RNA
cgggcgtgaggcaggcggtctgg

SEQ ID NO: 59761 - RNA, 23 nt, synthetic construct
  source 1..23: mol_type = other RNA
gactggctggccatcgggcgtga

SEQ ID NO: 59762 - RNA, 23 nt, synthetic construct
  source 1..23: mol_type = other RNA
caggtttcattcagctggactgg

SEQ ID NO: 59763 - RNA, 23 nt, synthetic construct
  source 1..23: mol_type = other RNA
gttgacccaggtttcattcagct

SEQ ID NO: 59764 - RNA, 23 nt, synthetic construct
  source 1..23: mol_type = other RNA
acatggctgttgacccaggtttc

SEQ ID NO: 59765 - RNA, 23 nt, synthetic construct
  source 1..23: mol_type = other RNA
cctcagcctcacagaggtacacg

SEQ ID NO: 59766 - RNA, 23 nt, synthetic construct
  source 1..23: mol_type = other RNA
caggatggtcgtgttgatgcgga

SEQ ID NO: 59767 - RNA, 23 nt, synthetic construct
  source 1..23: mol_type = other RNA
cctctgctgagtacttggacgct

SEQ ID NO: 59768 - RNA, 23 nt, synthetic construct
  source 1..23: mol_type = other RNA
cgcctctcctggcagcaggtgca

SEQ ID NO: 59769 - RNA, 23 nt, synthetic construct
  source 1..23: mol_type = other RNA
tcctcgtggacccgcctctcctg

SEQ ID NO: 59770 - RNA, 23 nt, synthetic construct
  source 1..23: mol_type = other RNA
ctcctcgtggacccgcctctcct

SEQ ID NO: 59771 - RNA, 23 nt, synthetic construct
  source 1..23: mol_type = other RNA
gagccgttaggacagtgcaaggg

SEQ ID NO: 59772 - RNA, 23 nt, synthetic construct
  source 1..23: mol_type = other RNA
gtgtaggtgtgcaggatggctga

SEQ ID NO: 59773 - RNA, 23 nt, synthetic construct
  source 1..23: mol_type = other RNA
ggtgtaggtgtgcaggatggctg

SEQ ID NO: 59774 - RNA, 23 nt, synthetic construct
  source 1..23: mol_type = other RNA
atggaggcagaacgttctcagac

SEQ ID NO: 59775 - RNA, 23 nt, synthetic construct
  source 1..23: mol_type = other RNA
agacaatgcacatcctggctcca

SEQ ID NO: 59776 - RNA, 23 nt, synthetic construct
  source 1..23: mol_type = other RNA
ttttcatgatcagacaatgcaca

SEQ ID NO: 59777 - RNA, 23 nt, synthetic construct
  source 1..23: mol_type = other RNA
agaggaggcccaaggttttcatg

SEQ ID NO: 59778 - RNA, 23 nt, synthetic construct
  source 1..23: mol_type = other RNA
gggtgccacacacaggccggggg

SEQ ID NO: 59779 - RNA, 23 nt, synthetic construct
  source 1..23: mol_type = other RNA
ggggtgccacacacaggccgggg

SEQ ID NO: 59780 - RNA, 23 nt, synthetic construct
  source 1..23: mol_type = other RNA
acggagcgcggggtgccacacac

SEQ ID NO: 59781 - RNA, 23 nt, synthetic construct
  source 1..23: mol_type = other RNA
cgcgggcgctccggccgtggcag

SEQ ID NO: 59782 - RNA, 23 nt, synthetic construct
  source 1..23: mol_type = other RNA
gcctggaccagcctgtctgcccc

SEQ ID NO: 59783 - RNA, 23 nt, synthetic construct
  source 1..23: mol_type = other RNA
ccctgcagcaggcatggacaggc

SEQ ID NO: 59784 - RNA, 23 nt, synthetic construct
  source 1..23: mol_type = other RNA
accctgcagcaggcatggacagg

SEQ ID NO: 59785 - RNA, 23 nt, synthetic construct
  source 1..23: mol_type = other RNA
cagccctgagttaccctgcagca

SEQ ID NO: 59786 - RNA, 23 nt, synthetic construct
  source 1..23: mol_type = other RNA
gctcagagaacacgtagttgcaa

SEQ ID NO: 59787 - RNA, 23 nt, synthetic construct
  source 1..23: mol_type = other RNA
tcggcgtagctggacgttgaagt

SEQ ID NO: 59788 - RNA, 23 nt, synthetic construct
  source 1..23: mol_type = other RNA
caggcagcttagcttcccacccg

SEQ ID NO: 59789 - RNA, 23 nt, synthetic construct
  source 1..23: mol_type = other RNA
ccaggcagcttagcttcccaccc

SEQ ID NO: 59790 - RNA, 23 nt, synthetic construct
  source 1..23: mol_type = other RNA
aagtggctttggaactggtggct

SEQ ID NO: 59791 - RNA, 23 nt, synthetic construct
  source 1..23: mol_type = other RNA
aagtggctttggaactggtggct

SEQ ID NO: 59792 - RNA, 23 nt, synthetic construct
  source 1..23: mol_type = other RNA
tcttggccatgtccttgcaactg

SEQ ID NO: 59793 - RNA, 23 nt, synthetic construct
  source 1..23: mol_type = other RNA
tgctcagagaacacgtagttgca

SEQ ID NO: 59794 - RNA, 23 nt, synthetic construct
  source 1..23: mol_type = other RNA
agttctccgctgtggggaccctt

SEQ ID NO: 59795 - RNA, 23 nt, synthetic construct
  source 1..23: mol_type = other RNA
gaagtcctcgtaggcggcgcggc

SEQ ID NO: 59796 - RNA, 23 nt, synthetic construct
  source 1..23: mol_type = other RNA
tggtggtggtgttagtcaagggg

SEQ ID NO: 59797 - RNA, 23 nt, synthetic construct
  source 1..23: mol_type = other RNA
cgggcgcggcagagctctgcgta

SEQ ID NO: 59798 - RNA, 23 nt, synthetic construct
  source 1..23: mol_type = other RNA
cacggtgcagttgtccacatggc

SEQ ID NO: 59799 - RNA, 23 nt, synthetic construct
  source 1..23: mol_type = other RNA
cgtctccagctctgtggtcggtg

SEQ ID NO: 59800 - RNA, 23 nt, synthetic construct
  source 1..23: mol_type = other RNA
agtcctcgtaggcggcgcggcag

SEQ ID NO: 59801 - RNA, 23 nt, synthetic construct
  source 1..23: mol_type = other RNA
cacacagtggtcctcgcagagct

SEQ ID NO: 59802 - RNA, 23 nt, synthetic construct
  source 1..23: mol_type = other RNA
tgaagtcctcgtaggcggcgcgg

SEQ ID NO: 59803 - RNA, 23 nt, synthetic construct
  source 1..23: mol_type = other RNA
tccacacagtggtcctcgcagag

SEQ ID NO: 59804 - RNA, 23 nt, synthetic construct
  source 1..23: mol_type = other RNA
gctgggacttggggcagttctgc

SEQ ID NO: 59805 - RNA, 23 nt, synthetic construct
  source 1..23: mol_type = other RNA
gcagaaacactcgcagtcgccac

SEQ ID NO: 59806 - RNA, 23 nt, synthetic construct
  source 1..23: mol_type = other RNA
accaggccaaagtccaggctgca

SEQ ID NO: 59807 - RNA, 23 nt, synthetic construct
  source 1..23: mol_type = other RNA
accaggccaaagtccaggctgca

SEQ ID NO: 59808 - RNA, 23 nt, synthetic construct
  source 1..23: mol_type = other RNA
ccagtggctgcagttgtagtggc

SEQ ID NO: 59809 - RNA, 23 nt, synthetic construct
  source 1..23: mol_type = other RNA
accaggccaaagtccaggctgca

SEQ ID NO: 59810 - RNA, 23 nt, synthetic construct
  source 1..23: mol_type = other RNA
accaggccaaagtccaggctgca

SEQ ID NO: 59811 - RNA, 23 nt, synthetic construct
  source 1..23: mol_type = other RNA
ccagtggctgcagttgtagtggc

SEQ ID NO: 59812 - RNA, 23 nt, synthetic construct
  source 1..23: mol_type = other RNA
ccagtggctgcagttgtagtggc

SEQ ID NO: 59813 - RNA, 23 nt, synthetic construct
  source 1..23: mol_type = other RNA
atggactcctgccctggcgggca

SEQ ID NO: 59814 - RNA, 23 nt, synthetic construct
  source 1..23: mol_type = other RNA
gggcgctccggccgtggcaggga

SEQ ID NO: 59815 - RNA, 23 nt, synthetic construct
  source 1..23: mol_type = other RNA
gttgcgacctcagccctgagtta

SEQ ID NO: 59816 - RNA, 23 nt, synthetic construct
  source 1..23: mol_type = other RNA
cgcccgtgtgtggtggccgtggt

SEQ ID NO: 59817 - RNA, 23 nt, synthetic construct
  source 1..23: mol_type = other RNA
cgcccgtgtgtggtggccgtggt

SEQ ID NO: 59818 - RNA, 23 nt, synthetic construct
  source 1..23: mol_type = other RNA
cgcccgtgtgtggtggccgtggt

SEQ ID NO: 59819 - RNA, 23 nt, synthetic construct
  source 1..23: mol_type = other RNA
cagctctgtggtcggtggcgggg

SEQ ID NO: 59820 - RNA, 23 nt, synthetic construct
  source 1..23: mol_type = other RNA
ccacaaaggtggcacacgggcag

SEQ ID NO: 59821 - RNA, 23 nt, synthetic construct
  source 1..23: mol_type = other RNA
ttgaaggccgggaggccgttgaa

SEQ ID NO: 59822 - RNA, 23 nt, synthetic construct
  source 1..23: mol_type = other RNA
tcctggtgctgcatgttgagggg

SEQ ID NO: 59823 - RNA, 23 nt, synthetic construct
  source 1..23: mol_type = other RNA
gctgtgcgcaccgtgtggggact

SEQ ID NO: 59824 - RNA, 23 nt, synthetic construct
  source 1..23: mol_type = other RNA
gctgtgcgcaccgtgtggggact

SEQ ID NO: 59825 - RNA, 23 nt, synthetic construct
  source 1..23: mol_type = other RNA
gctgtgcgcaccgtgtggggact

SEQ ID NO: 59826 - RNA, 23 nt, synthetic construct
  source 1..23: mol_type = other RNA
gagggggtgactgtgaagcccgt

SEQ ID NO: 59827 - RNA, 23 nt, synthetic construct
  source 1..23: mol_type = other RNA
gctgtgcgcaccgtgtggggact

SEQ ID NO: 59828 - RNA, 23 nt, synthetic construct
  source 1..23: mol_type = other RNA
gtgagctgttcccagagtggagg

SEQ ID NO: 59829 - RNA, 23 nt, synthetic construct
  source 1..23: mol_type = other RNA
gggcaggtgaggtcgcacaggcc

SEQ ID NO: 59830 - RNA, 23 nt, synthetic construct
  source 1..23: mol_type = other RNA
tgcacggcgggggctgaccctgg

SEQ ID NO: 59831 - RNA, 23 nt, synthetic construct
  source 1..23: mol_type = other RNA
tgtggatttggtggctgtgcttg

SEQ ID NO: 59832 - RNA, 23 nt, synthetic construct
  source 1..23: mol_type = other RNA
tgtggatttggtggctgtgcttg

SEQ ID NO: 59833 - RNA, 23 nt, synthetic construct
  source 1..23: mol_type = other RNA
ccctgggcgtcacagggcagggg

SEQ ID NO: 59834 - RNA, 23 nt, synthetic construct
  source 1..23: mol_type = other RNA
acgaagccgggacggttgcacgg

SEQ ID NO: 59835 - RNA, 23 nt, synthetic construct
  source 1..23: mol_type = other RNA
aggagcacggagcgcggggtgcc

SEQ ID NO: 59836 - RNA, 23 nt, synthetic construct
  source 1..23: mol_type = other RNA
gccctcgtcgtgcaccacctctc

SEQ ID NO: 59837 - RNA, 23 nt, synthetic construct
  source 1..23: mol_type = other RNA
gtagttgcaaaggccagggaagc

SEQ ID NO: 59838 - RNA, 23 nt, synthetic construct
  source 1..23: mol_type = other RNA
gttgaaggccgggaggccgttga

SEQ ID NO: 59839 - RNA, 23 nt, synthetic construct
  source 1..23: mol_type = other RNA
caggcctgtctgcaccacgatga

SEQ ID NO: 59840 - RNA, 23 nt, synthetic construct
  source 1..23: mol_type = other RNA
taggcctcggcgtagctggacgt

SEQ ID NO: 59841 - RNA, 23 nt, synthetic construct
  source 1..23: mol_type = other RNA
gaatgtccacacgcatggtggtg

SEQ ID NO: 59842 - RNA, 23 nt, synthetic construct
  source 1..23: mol_type = other RNA
ccaggcctgtctgcaccacgatg

SEQ ID NO: 59843 - RNA, 23 nt, synthetic construct
  source 1..23: mol_type = other RNA
tctgttggctgttggcgcacatc

SEQ ID NO: 59844 - RNA, 23 nt, synthetic construct
  source 1..23: mol_type = other RNA
gtgttgccatagaaccagtggcc

SEQ ID NO: 59845 - RNA, 23 nt, synthetic construct
  source 1..23: mol_type = other RNA
gctgctagggtgtgggaagtcac

SEQ ID NO: 59846 - RNA, 23 nt, synthetic construct
  source 1..23: mol_type = other RNA
gtgttgccatagaaccagtggcc

SEQ ID NO: 59847 - RNA, 23 nt, synthetic construct
  source 1..23: mol_type = other RNA
gtgttgccatagaaccagtggcc

SEQ ID NO: 59848 - RNA, 23 nt, synthetic construct
  source 1..23: mol_type = other RNA
gtgttgccatagaaccagtggcc

SEQ ID NO: 59849 - RNA, 23 nt, synthetic construct
  source 1..23: mol_type = other RNA
gtgttgccatagaaccagtggcc

SEQ ID NO: 59850 - RNA, 23 nt, synthetic construct
  source 1..23: mol_type = other RNA
gacactggcggtggggaggtggg

SEQ ID NO: 59851 - RNA, 23 nt, synthetic construct
  source 1..23: mol_type = other RNA
gtgcatggatctctctcatgagg

SEQ ID NO: 59852 - RNA, 23 nt, synthetic construct
  source 1..23: mol_type = other RNA
ctcggggcagcaggggttctcgg

SEQ ID NO: 59853 - RNA, 23 nt, synthetic construct
  source 1..23: mol_type = other RNA
ggacgctccggggcaggagccct

SEQ ID NO: 59854 - RNA, 23 nt, synthetic construct
  source 1..23: mol_type = other RNA
agcacggagcgcggggtgccaca

SEQ ID NO: 59855 - RNA, 23 nt, synthetic construct
  source 1..23: mol_type = other RNA
gtgctcggctctgtgaggatcca

SEQ ID NO: 59856 - RNA, 23 nt, synthetic construct
  source 1..23: mol_type = other RNA
gtgctcggctctgtgaggatcca

SEQ ID NO: 59857 - RNA, 23 nt, synthetic construct
  source 1..23: mol_type = other RNA
gtgctcggctctgtgaggatcca

SEQ ID NO: 59858 - RNA, 23 nt, synthetic construct
  source 1..23: mol_type = other RNA
gtgctcggctctgtgaggatcca

SEQ ID NO: 59859 - RNA, 23 nt, synthetic construct
  source 1..23: mol_type = other RNA
gtggcactccgcaaaggccggcc

SEQ ID NO: 59860 - RNA, 23 nt, synthetic construct
  source 1..23: mol_type = other RNA
gtcagcactttggtagtgtgagc

SEQ ID NO: 59861 - RNA, 23 nt, synthetic construct
  source 1..23: mol_type = other RNA
gtgtgtgggtggtccctagggca

SEQ ID NO: 59862 - RNA, 23 nt, synthetic construct
  source 1..23: mol_type = other RNA
gtgtgtgggtggtccctagggca

SEQ ID NO: 59863 - RNA, 23 nt, synthetic construct
  source 1..23: mol_type = other RNA
gtgtgtgggtggtccctagggca

SEQ ID NO: 59864 - RNA, 23 nt, synthetic construct
  source 1..23: mol_type = other RNA
gtgtgtgggtggtccctagggca

SEQ ID NO: 59865 - RNA, 23 nt, synthetic construct
  source 1..23: mol_type = other RNA
ctgatgatggtgccgttgcttcc

SEQ ID NO: 59866 - RNA, 23 nt, synthetic construct
  source 1..23: mol_type = other RNA
accggatgctcggggtcacccat

SEQ ID NO: 59867 - RNA, 23 nt, synthetic construct
  source 1..23: mol_type = other RNA
gtattgttgcaggcatcctcctg

SEQ ID NO: 59868 - RNA, 23 nt, synthetic construct
  source 1..23: mol_type = other RNA
tggacaggcggccgccttgcctg

SEQ ID NO: 59869 - RNA, 23 nt, synthetic construct
  source 1..23: mol_type = other RNA
cacagtgcaccttctgccccacc

SEQ ID NO: 59870 - RNA, 23 nt, synthetic construct
  source 1..23: mol_type = other RNA
ctctggagtagaggaggtgtgga

SEQ ID NO: 59871 - RNA, 23 nt, synthetic construct
  source 1..23: mol_type = other RNA
agtgccgtccctgggctggagga

SEQ ID NO: 59872 - RNA, 23 nt, synthetic construct
  source 1..23: mol_type = other RNA
cgtgccgtccctgggctggagga

SEQ ID NO: 59873 - RNA, 23 nt, synthetic construct
  source 1..23: mol_type = other RNA
agtgccgtccctgggctggagga

SEQ ID NO: 59874 - RNA, 23 nt, synthetic construct
  source 1..23: mol_type = other RNA
gagccggtggctgtgatcgtagt

SEQ ID NO: 59875 - RNA, 23 nt, synthetic construct
  source 1..23: mol_type = other RNA
cgtgccgtccctgggctggagga

SEQ ID NO: 59876 - RNA, 23 nt, synthetic construct
  source 1..23: mol_type = other RNA
agtgccgtccctgggctggagga

SEQ ID NO: 59877 - RNA, 23 nt, synthetic construct
  source 1..23: mol_type = other RNA
acacacggtggagaccgggaggg

SEQ ID NO: 59878 - RNA, 23 nt, synthetic construct
  source 1..23: mol_type = other RNA
ggtcagcctggcgttgtgggcat

SEQ ID NO: 59879 - RNA, 23 nt, synthetic construct
  source 1..23: mol_type = other RNA
cactgccatagccccccggagca

SEQ ID NO: 59880 - RNA, 23 nt, synthetic construct
  source 1..23: mol_type = other RNA
tcagcactttggtagtgtgagct

SEQ ID NO: 59881 - RNA, 23 nt, synthetic construct
  source 1..23: mol_type = other RNA
tggttgcagtccttggactggag

SEQ ID NO: 59882 - RNA, 23 nt, synthetic construct
  source 1..23: mol_type = other RNA
gccacagagccggtggccctggt

SEQ ID NO: 59883 - RNA, 23 nt, synthetic construct
  source 1..23: mol_type = other RNA
gccacagagccggtggccctggt

SEQ ID NO: 59884 - RNA, 23 nt, synthetic construct
  source 1..23: mol_type = other RNA
tggttgcagtccttggactggag

SEQ ID NO: 59885 - RNA, 23 nt, synthetic construct
  source 1..23: mol_type = other RNA
tggttgcagtccttggactggag

SEQ ID NO: 59886 - RNA, 23 nt, synthetic construct
  source 1..23: mol_type = other RNA
tggtggtctgtgctgggacggtc

SEQ ID NO: 59887 - RNA, 23 nt, synthetic construct
  source 1..23: mol_type = other RNA
cagtggacacgctgaaggttggc

SEQ ID NO: 59888 - RNA, 23 nt, synthetic construct
  source 1..23: mol_type = other RNA
cttgtagtggatgctgagggcgc

SEQ ID NO: 59889 - RNA, 23 nt, synthetic construct
  source 1..23: mol_type = other RNA
cagcatcagatcacagagcggct

SEQ ID NO: 59890 - RNA, 23 nt, synthetic construct
  source 1..23: mol_type = other RNA
tgtgggctctggttcctagagtt

SEQ ID NO: 59891 - RNA, 23 nt, synthetic construct
  source 1..23: mol_type = other RNA
gctccgcagaggaggcccaaggt

SEQ ID NO: 59892 - RNA, 23 nt, synthetic construct
  source 1..23: mol_type = other RNA
gacctcagccctgagttaccctg

SEQ ID NO: 59893 - RNA, 23 nt, synthetic construct
  source 1..23: mol_type = other RNA
acacggcgccctcgtcgtgcacc

SEQ ID NO: 59894 - RNA, 23 nt, synthetic construct
  source 1..23: mol_type = other RNA
gtcagcactggggggataggtgt

SEQ ID NO: 59895 - RNA, 23 nt, synthetic construct
  source 1..23: mol_type = other RNA
gtcagcactggggggataggtgt

SEQ ID NO: 59896 - RNA, 23 nt, synthetic construct
  source 1..23: mol_type = other RNA
ccgttggacgcctccagcaccag

SEQ ID NO: 59897 - RNA, 23 nt, synthetic construct
  source 1..23: mol_type = other RNA
tcccgtgggtctcgatgaccagg

SEQ ID NO: 59898 - RNA, 23 nt, synthetic construct
  source 1..23: mol_type = other RNA
aagacgccctcctgctcccagtt

SEQ ID NO: 59899 - RNA, 23 nt, synthetic construct
  source 1..23: mol_type = other RNA
tagcacatcttgaagacgccctc

SEQ ID NO: 59900 - RNA, 23 nt, synthetic construct
  source 1..23: mol_type = other RNA
tggtcgtcactgcagcagaggac

SEQ ID NO: 59901 - RNA, 23 nt, synthetic construct
  source 1..23: mol_type = other RNA
gtggggcctcccgtggtggctgt

SEQ ID NO: 59902 - RNA, 23 nt, synthetic construct
  source 1..23: mol_type = other RNA
gagctggtgactgtgggtgtggt

SEQ ID NO: 59903 - RNA, 23 nt, synthetic construct
  source 1..23: mol_type = other RNA
ggaggtgtgggcagtctctggag

SEQ ID NO: 59904 - RNA, 23 nt, synthetic construct
  source 1..23: mol_type = other RNA
tggtggtcagtgatgggggagta

SEQ ID NO: 59905 - RNA, 23 nt, synthetic construct
  source 1..23: mol_type = other RNA
gcccgtgtgtggtggccatggtg

SEQ ID NO: 59906 - RNA, 23 nt, synthetic construct
  source 1..23: mol_type = other RNA
gagctggtgactgtgggtgtcgt

SEQ ID NO: 59907 - RNA, 23 nt, synthetic construct
  source 1..23: mol_type = other RNA
tggtggtcagtgatgggggagta

SEQ ID NO: 59908 - RNA, 23 nt, synthetic construct
  source 1..23: mol_type = other RNA
tggtggtcagtgatgggggagta

SEQ ID NO: 59909 - RNA, 23 nt, synthetic construct
  source 1..23: mol_type = other RNA
gagctggtgactgtgggtgtcgt

SEQ ID NO: 59910 - RNA, 23 nt, synthetic construct
  source 1..23: mol_type = other RNA
ggaggtgtgggcagtctctggag

SEQ ID NO: 59911 - RNA, 23 nt, synthetic construct
  source 1..23: mol_type = other RNA
gagctggtgactgtgggtgtcgt

SEQ ID NO: 59912 - RNA, 23 nt, synthetic construct
  source 1..23: mol_type = other RNA
agggcagttgcagtccctggact

SEQ ID NO: 59913 - RNA, 23 nt, synthetic construct
  source 1..23: mol_type = other RNA
tggtggtcagtgatgggggagta

SEQ ID NO: 59914 - RNA, 23 nt, synthetic construct
  source 1..23: mol_type = other RNA
agccctcgcagaaggtgatgttg

SEQ ID NO: 59915 - RNA, 23 nt, synthetic construct
  source 1..23: mol_type = other RNA
ctccggccgtggcagggacacat

SEQ ID NO: 59916 - RNA, 23 nt, synthetic construct
  source 1..23: mol_type = other RNA
cttgcctgtcgcagcttcctggc

SEQ ID NO: 59917 - RNA, 23 nt, synthetic construct
  source 1..23: mol_type = other RNA
ggcggcgcggcagtgctcagaga

SEQ ID NO: 59918 - RNA, 23 nt, synthetic construct
  source 1..23: mol_type = other RNA
ggtacgcagtgctgtccaccagt

SEQ ID NO: 59919 - RNA, 23 nt, synthetic construct
  source 1..23: mol_type = other RNA
gaggaggggatggctgtaaagct

SEQ ID NO: 59920 - RNA, 23 nt, synthetic construct
  source 1..23: mol_type = other RNA
gaggaggggatggctgtaaagct

SEQ ID NO: 59921 - RNA, 23 nt, synthetic construct
  source 1..23: mol_type = other RNA
gaggaggggatggctgtaaagct

SEQ ID NO: 59922 - RNA, 23 nt, synthetic construct
  source 1..23: mol_type = other RNA
cattgtacgaacacagctgaggt

SEQ ID NO: 59923 - RNA, 23 nt, synthetic construct
  source 1..23: mol_type = other RNA
caggctcgtggtcagcggctctt

SEQ ID NO: 59924 - RNA, 23 nt, synthetic construct
  source 1..23: mol_type = other RNA
ctgggaaccgtggaggcagtggc

SEQ ID NO: 59925 - RNA, 23 nt, synthetic construct
  source 1..23: mol_type = other RNA
ggtcgctgatgcaggcgttgaag

SEQ ID NO: 59926 - RNA, 23 nt, synthetic construct
  source 1..23: mol_type = other RNA
ggaacctctggttgtgggtgtgg

SEQ ID NO: 59927 - RNA, 23 nt, synthetic construct
  source 1..23: mol_type = other RNA
agctgctgtcggcacatttcttg

SEQ ID NO: 59928 - RNA, 23 nt, synthetic construct
  source 1..23: mol_type = other RNA
atgaacacgctggtcttccggtc

SEQ ID NO: 59929 - RNA, 23 nt, synthetic construct
  source 1..23: mol_type = other RNA
ctggatgccactgggtgtgcagt

SEQ ID NO: 59930 - RNA, 23 nt, synthetic construct
  source 1..23: mol_type = other RNA
gaatggcgttgtggctggagttc

SEQ ID NO: 59931 - RNA, 23 nt, synthetic construct
  source 1..23: mol_type = other RNA
tcgggaagctgcgccgcccggca

SEQ ID NO: 59932 - RNA, 23 nt, synthetic construct
  source 1..23: mol_type = other RNA
tgctagggtgagggctggaaagg

SEQ ID NO: 59933 - RNA, 23 nt, synthetic construct
  source 1..23: mol_type = other RNA
gtggatttggtggctgtgcttgt

SEQ ID NO: 59934 - RNA, 23 nt, synthetic construct
  source 1..23: mol_type = other RNA
ctggtcagcactttgagggtgcc

SEQ ID NO: 59935 - RNA, 23 nt, synthetic construct
  source 1..23: mol_type = other RNA
gtggatttggtggctgtgcttgt

SEQ ID NO: 59936 - RNA, 23 nt, synthetic construct
  source 1..23: mol_type = other RNA
caggggcaggcctgcacgcagat

SEQ ID NO: 59937 - RNA, 23 nt, synthetic construct
  source 1..23: mol_type = other RNA
catcgggcgtgaggcaggcggtc

SEQ ID NO: 59938 - RNA, 23 nt, synthetic construct
  source 1..23: mol_type = other RNA
gcaaaggccagggaagcggaaga

SEQ ID NO: 59939 - RNA, 23 nt, synthetic construct
  source 1..23: mol_type = other RNA
tgtggtggtctgttctgggaggg

SEQ ID NO: 59940 - RNA, 23 nt, synthetic construct
  source 1..23: mol_type = other RNA
tgtggtggtctgttctgggaggg

SEQ ID NO: 59941 - RNA, 23 nt, synthetic construct
  source 1..23: mol_type = other RNA
cggggcctggtcacggttacgaa

SEQ ID NO: 59942 - RNA, 23 nt, synthetic construct
  source 1..23: mol_type = other RNA
gccgtggcagggacacataggcc

SEQ ID NO: 59943 - RNA, 23 nt, synthetic construct
  source 1..23: mol_type = other RNA
tagttgcaaaggccagggaagcg

SEQ ID NO: 59944 - RNA, 23 nt, synthetic construct
  source 1..23: mol_type = other RNA
cattgatgaggacggagccgttg

SEQ ID NO: 59945 - RNA, 23 nt, synthetic construct
  source 1..23: mol_type = other RNA
gtcatccagcaccgtgcctgggg

SEQ ID NO: 59946 - RNA, 23 nt, synthetic construct
  source 1..23: mol_type = other RNA
ctgttcctggcattggcacaggc

SEQ ID NO: 59947 - RNA, 23 nt, synthetic construct
  source 1..23: mol_type = other RNA
ccactcccatccgacaccagccc

SEQ ID NO: 59948 - RNA, 23 nt, synthetic construct
  source 1..23: mol_type = other RNA
tagggtgggtccccacccggccc

SEQ ID NO: 59949 - RNA, 23 nt, synthetic construct
  source 1..23: mol_type = other RNA
acacggtggagaccgggagggcc

SEQ ID NO: 59950 - RNA, 23 nt, synthetic construct
  source 1..23: mol_type = other RNA
gtcagtccttctgagagggtggg

SEQ ID NO: 59951 - RNA, 23 nt, synthetic construct
  source 1..23: mol_type = other RNA
gtcgtggggcctcccgtggtggc

SEQ ID NO: 59952 - RNA, 23 nt, synthetic construct
  source 1..23: mol_type = other RNA
gtcgtccctggaagggctgagcg

SEQ ID NO: 59953 - RNA, 23 nt, synthetic construct
  source 1..23: mol_type = other RNA
acagcgggtcgtgccctggctgg

SEQ ID NO: 59954 - RNA, 23 nt, synthetic construct
  source 1..23: mol_type = other RNA
gtggaggtgtgggcagtctctgg

SEQ ID NO: 59955 - RNA, 23 nt, synthetic construct
  source 1..23: mol_type = other RNA
agagggccccggcatggggtagc

SEQ ID NO: 59956 - RNA, 23 nt, synthetic construct
  source 1..23: mol_type = other RNA
cttccccacctgctcacggttcc

SEQ ID NO: 59957 - RNA, 23 nt, synthetic construct
  source 1..23: mol_type = other RNA
gtggtgctcacatgtggggtgcc

SEQ ID NO: 59958 - RNA, 23 nt, synthetic construct
  source 1..23: mol_type = other RNA
agagggccccggcatggggtagc

SEQ ID NO: 59959 - RNA, 23 nt, synthetic construct
  source 1..23: mol_type = other RNA
cttccccacctgctcacggttcc

SEQ ID NO: 59960 - RNA, 23 nt, synthetic construct
  source 1..23: mol_type = other RNA
agagggccccggcatggggtagc

SEQ ID NO: 59961 - RNA, 23 nt, synthetic construct
  source 1..23: mol_type = other RNA
cttccccacctgctcacggttcc

SEQ ID NO: 59962 - RNA, 23 nt, synthetic construct
  source 1..23: mol_type = other RNA
gtggtgctcacatgtggggtgcc

SEQ ID NO: 59963 - RNA, 23 nt, synthetic construct
  source 1..23: mol_type = other RNA
gtggaggtgtgggcagtctctgg

SEQ ID NO: 59964 - RNA, 23 nt, synthetic construct
  source 1..23: mol_type = other RNA
agagggccccggcatggggtagc

SEQ ID NO: 59965 - RNA, 23 nt, synthetic construct
  source 1..23: mol_type = other RNA
cttccccacctgctcacggttcc

SEQ ID NO: 59966 - RNA, 23 nt, synthetic construct
  source 1..23: mol_type = other RNA
gtggtgctcacatgtggggtgcc

SEQ ID NO: 59967 - RNA, 23 nt, synthetic construct
  source 1..23: mol_type = other RNA
gtggtggtctgtgctgggacggt

SEQ ID NO: 59968 - RNA, 23 nt, synthetic construct
  source 1..23: mol_type = other RNA
tgagctgttcccagagtggagga

SEQ ID NO: 59969 - RNA, 23 nt, synthetic construct
  source 1..23: mol_type = other RNA
ccctgcagtggtcgctgatgcag

SEQ ID NO: 59970 - RNA, 23 nt, synthetic construct
  source 1..23: mol_type = other RNA
gcacctcaaggcggcccctgcag

SEQ ID NO: 59971 - RNA, 23 nt, synthetic construct
  source 1..23: mol_type = other RNA
ggccaccggttgcacctcgccag

SEQ ID NO: 59972 - RNA, 23 nt, synthetic construct
  source 1..23: mol_type = other RNA
aggtggcaggctgtatggggccg

SEQ ID NO: 59973 - RNA, 23 nt, synthetic construct
  source 1..23: mol_type = other RNA
gctgaccctgggcgtcacagggc

SEQ ID NO: 59974 - RNA, 23 nt, synthetic construct
  source 1..23: mol_type = other RNA
tagaaggtgccattgtacgaaca

SEQ ID NO: 59975 - RNA, 23 nt, synthetic construct
  source 1..23: mol_type = other RNA
tggggatggaggcagaacgttct

SEQ ID NO: 59976 - RNA, 23 nt, synthetic construct
  source 1..23: mol_type = other RNA
tcagccctgagttaccctgcagc

SEQ ID NO: 59977 - RNA, 23 nt, synthetic construct
  source 1..23: mol_type = other RNA
gactctgttggctgttggcgcac

SEQ ID NO: 59978 - RNA, 23 nt, synthetic construct
  source 1..23: mol_type = other RNA
acgggatggccgtggatccagtg

SEQ ID NO: 59979 - RNA, 23 nt, synthetic construct
  source 1..23: mol_type = other RNA
ctgggcgtcacagggcaggggct

SEQ ID NO: 59980 - RNA, 23 nt, synthetic construct
  source 1..23: mol_type = other RNA
cctgggcgtcacagggcaggggc

SEQ ID NO: 59981 - RNA, 23 nt, synthetic construct
  source 1..23: mol_type = other RNA
ctcggcccggggcctggtcacgg

SEQ ID NO: 59982 - RNA, 23 nt, synthetic construct
  source 1..23: mol_type = other RNA
tggtctgtgctgggacggtccac

SEQ ID NO: 59983 - RNA, 23 nt, synthetic construct
  source 1..23: mol_type = other RNA
ccactttgggggtgtgagctgtt

SEQ ID NO: 59984 - RNA, 23 nt, synthetic construct
  source 1..23: mol_type = other RNA
cctggagcccactaggcctcggc

SEQ ID NO: 59985 - RNA, 23 nt, synthetic construct
  source 1..23: mol_type = other RNA
tgggggacccaggcggtggtgaa

SEQ ID NO: 59986 - RNA, 23 nt, synthetic construct
  source 1..23: mol_type = other RNA
gaagcagccctccgccatcccct

SEQ ID NO: 59987 - RNA, 23 nt, synthetic construct
  source 1..23: mol_type = other RNA
cagctcggctccacagggccctg

SEQ ID NO: 59988 - RNA, 23 nt, synthetic construct
  source 1..23: mol_type = other RNA
tgttgctgcagtccaggtacacc

SEQ ID NO: 59989 - RNA, 23 nt, synthetic construct
  source 1..23: mol_type = other RNA
gctgtggacatggtggccgtggg

SEQ ID NO: 59990 - RNA, 23 nt, synthetic construct
  source 1..23: mol_type = other RNA
gctgtggacatggtggccgtggg

SEQ ID NO: 59991 - RNA, 23 nt, synthetic construct
  source 1..23: mol_type = other RNA
gctgtggacatggtggccgtggg

SEQ ID NO: 59992 - RNA, 23 nt, synthetic construct
  source 1..23: mol_type = other RNA
gctgtggacatggtggccgtggg

SEQ ID NO: 59993 - RNA, 23 nt, synthetic construct
  source 1..23: mol_type = other RNA
gctgtggacatggtggccgtggg

SEQ ID NO: 59994 - RNA, 23 nt, synthetic construct
  source 1..23: mol_type = other RNA
atggctgttgacccaggtttcat

SEQ ID NO: 59995 - RNA, 23 nt, synthetic construct
  source 1..23: mol_type = other RNA
tcctcgtaggcggcgcggcagtg

SEQ ID NO: 59996 - RNA, 23 nt, synthetic construct
  source 1..23: mol_type = other RNA
caggcccgcgtcgtggcaggcct

SEQ ID NO: 59997 - RNA, 23 nt, synthetic construct
  source 1..23: mol_type = other RNA
cctcgtaggcggcgcggcagtgc

SEQ ID NO: 59998 - RNA, 23 nt, synthetic construct
  source 1..23: mol_type = other RNA
cgtagagtttctcatcataggtg

SEQ ID NO: 59999 - RNA, 23 nt, synthetic construct
  source 1..23: mol_type = other RNA
ctgggcgggcacacaggcgcccg

SEQ ID NO: 60000 - RNA, 23 nt, synthetic construct
  source 1..23: mol_type = other RNA
ggtgttgccatagaaccagtggc

SEQ ID NO: 60001 - RNA, 23 nt, synthetic construct
  source 1..23: mol_type = other RNA
ggtgttgccatagaaccagtggc

SEQ ID NO: 60002 - RNA, 23 nt, synthetic construct
  source 1..23: mol_type = other RNA
ggtgttgccatagaaccagtggc

SEQ ID NO: 60003 - RNA, 23 nt, synthetic construct
  source 1..23: mol_type = other RNA
ggtgttgccatagaaccagtggc

SEQ ID NO: 60004 - RNA, 23 nt, synthetic construct
  source 1..23: mol_type = other RNA
ggtgttgccatagaaccagtggc

SEQ ID NO: 60005 - RNA, 23 nt, synthetic construct
  source 1..23: mol_type = other RNA
ggagcactgcaggggtgcgggtg

SEQ ID NO: 60006 - RNA, 23 nt, synthetic construct
  source 1..23: mol_type = other RNA
tcttattgtagatgacttccccg

SEQ ID NO: 60007 - RNA, 23 nt, synthetic construct
  source 1..23: mol_type = other RNA
gtcttattgtagatgacttcccc

SEQ ID NO: 60008 - RNA, 23 nt, synthetic construct
  source 1..23: mol_type = other RNA
tgaagaggatctggtcctcaggg

SEQ ID NO: 60009 - RNA, 23 nt, synthetic construct
  source 1..23: mol_type = other RNA
aggggttctcggcccggggcctg

SEQ ID NO: 60010 - RNA, 23 nt, synthetic construct
  source 1..23: mol_type = other RNA
gcagccgtccacacagtggtcct

SEQ ID NO: 60011 - RNA, 23 nt, synthetic construct
  source 1..23: mol_type = other RNA
gaagggcttggggttgatgatgg

SEQ ID NO: 60012 - RNA, 23 nt, synthetic construct
  source 1..23: mol_type = other RNA
tgtgcacacaggggcagtcctcc

SEQ ID NO: 60013 - RNA, 23 nt, synthetic construct
  source 1..23: mol_type = other RNA
agctgtaggtcctgtcctcatag

SEQ ID NO: 60014 - RNA, 23 nt, synthetic construct
  source 1..23: mol_type = other RNA
ggggcccagcagccatcctttct

SEQ ID NO: 60015 - RNA, 23 nt, synthetic construct
  source 1..23: mol_type = other RNA
aggtttcattcagctggactggc

SEQ ID NO: 60016 - RNA, 23 nt, synthetic construct
  source 1..23: mol_type = other RNA
tgtgcaggatggctgagccgtta

SEQ ID NO: 60017 - RNA, 23 nt, synthetic construct
  source 1..23: mol_type = other RNA
ctctccgttccacaggaatgtca

SEQ ID NO: 60018 - RNA, 23 nt, synthetic construct
  source 1..23: mol_type = other RNA
gtagagtttctcatcataggtgg

SEQ ID NO: 60019 - RNA, 23 nt, synthetic construct
  source 1..23: mol_type = other RNA
ggcagcttagcttcccacccgta

SEQ ID NO: 60020 - RNA, 23 nt, synthetic construct
  source 1..23: mol_type = other RNA
gtggccacgggtgtggtggtctg

SEQ ID NO: 60021 - RNA, 23 nt, synthetic construct
  source 1..23: mol_type = other RNA
gaagcagccgtccacacagtggt

SEQ ID NO: 60022 - RNA, 23 nt, synthetic construct
  source 1..23: mol_type = other RNA
acgtagctgcagtcaccatgcag

SEQ ID NO: 60023 - RNA, 23 nt, synthetic construct
  source 1..23: mol_type = other RNA
tgggggtgtgtgggtggtcccta

SEQ ID NO: 60024 - RNA, 23 nt, synthetic construct
  source 1..23: mol_type = other RNA
tgggggtgtgtgggtggtcccta

SEQ ID NO: 60025 - RNA, 23 nt, synthetic construct
  source 1..23: mol_type = other RNA
gctgttcccggggtggaggacgg

SEQ ID NO: 60026 - RNA, 23 nt, synthetic construct
  source 1..23: mol_type = other RNA
tctgggagggtcccggtggtccc

SEQ ID NO: 60027 - RNA, 23 nt, synthetic construct
  source 1..23: mol_type = other RNA
tgggggtgtgtgggtggtcccta

SEQ ID NO: 60028 - RNA, 23 nt, synthetic construct
  source 1..23: mol_type = other RNA
tgggggtgtgtgggtggtcccta

SEQ ID NO: 60029 - RNA, 23 nt, synthetic construct
  source 1..23: mol_type = other RNA
gctgttcccggggtggaggacgg

SEQ ID NO: 60030 - RNA, 23 nt, synthetic construct
  source 1..23: mol_type = other RNA
tctgggagggtcccggtggtccc

SEQ ID NO: 60031 - RNA, 23 nt, synthetic construct
  source 1..23: mol_type = other RNA
tctggcggtgtgggtggtccccg

SEQ ID NO: 60032 - RNA, 23 nt, synthetic construct
  source 1..23: mol_type = other RNA
tcctttctgctgtcggggaccag

SEQ ID NO: 60033 - RNA, 23 nt, synthetic construct
  source 1..23: mol_type = other RNA
cgcagaggaggcccaaggttttc

SEQ ID NO: 60034 - RNA, 23 nt, synthetic construct
  source 1..23: mol_type = other RNA
cagcccccgcatgcggtcacagt

SEQ ID NO: 60035 - RNA, 23 nt, synthetic construct
  source 1..23: mol_type = other RNA
attgaggaaggtgcccgcggggc

SEQ ID NO: 60036 - RNA, 23 nt, synthetic construct
  source 1..23: mol_type = other RNA
ccgtccttgtcgtagcagccaca

SEQ ID NO: 60037 - RNA, 23 nt, synthetic construct
  source 1..23: mol_type = other RNA
cttcctgatgatggtgccgttgc

SEQ ID NO: 60038 - RNA, 23 nt, synthetic construct
  source 1..23: mol_type = other RNA
agctctgtggtcggtggcggggt

SEQ ID NO: 60039 - RNA, 23 nt, synthetic construct
  source 1..23: mol_type = other RNA
ctctgctccaccaggaggccagt

SEQ ID NO: 60040 - RNA, 23 nt, synthetic construct
  source 1..23: mol_type = other RNA
agcagccgtccacacagtggtcc

SEQ ID NO: 60041 - RNA, 23 nt, synthetic construct
  source 1..23: mol_type = other RNA
cagaagcagccgtccacacagtg

SEQ ID NO: 60042 - RNA, 23 nt, synthetic construct
  source 1..23: mol_type = other RNA
ttgaggaaggtgcccgcggggca

SEQ ID NO: 60043 - RNA, 23 nt, synthetic construct
  source 1..23: mol_type = other RNA
accatgggggctgcacaccctgt

SEQ ID NO: 60044 - RNA, 23 nt, synthetic construct
  source 1..23: mol_type = other RNA
tgcacacaggggcagtcctcctc

SEQ ID NO: 60045 - RNA, 23 nt, synthetic construct
  source 1..23: mol_type = other RNA
gttgtccccacagtagtcctggg

SEQ ID NO: 60046 - RNA, 23 nt, synthetic construct
  source 1..23: mol_type = other RNA
aggggtccttgggtgccagggcg

SEQ ID NO: 60047 - RNA, 23 nt, synthetic construct
  source 1..23: mol_type = other RNA
gggctctgggcggtgcccattgt

SEQ ID NO: 60048 - RNA, 23 nt, synthetic construct
  source 1..23: mol_type = other RNA
ccagggtccagttggggaagctc

SEQ ID NO: 60049 - RNA, 23 nt, synthetic construct
  source 1..23: mol_type = other RNA
tcactgcagcagaggacccggat

SEQ ID NO: 60050 - RNA, 23 nt, synthetic construct
  source 1..23: mol_type = other RNA
tggaggtcggggtggccgtggat

SEQ ID NO: 60051 - RNA, 23 nt, synthetic construct
  source 1..23: mol_type = other RNA
gtggacatggtggccgtgggtgt

SEQ ID NO: 60052 - RNA, 23 nt, synthetic construct
  source 1..23: mol_type = other RNA
agccggtggccccagttgtggtg

SEQ ID NO: 60053 - RNA, 23 nt, synthetic construct
  source 1..23: mol_type = other RNA
tttggtagtgtgagctgttcctg

SEQ ID NO: 60054 - RNA, 23 nt, synthetic construct
  source 1..23: mol_type = other RNA
tggttgtggtagttggcactttg

SEQ ID NO: 60055 - RNA, 23 nt, synthetic construct
  source 1..23: mol_type = other RNA
tgtggcggtgtgggtggtccccg

SEQ ID NO: 60056 - RNA, 23 nt, synthetic construct
  source 1..23: mol_type = other RNA
tggtggcggtggtggtcagcact

SEQ ID NO: 60057 - RNA, 23 nt, synthetic construct
  source 1..23: mol_type = other RNA
ggtggttctgctgctagggtgag

SEQ ID NO: 60058 - RNA, 23 nt, synthetic construct
  source 1..23: mol_type = other RNA
cggtggttctgctgctagggtga

SEQ ID NO: 60059 - RNA, 23 nt, synthetic construct
  source 1..23: mol_type = other RNA
actcggtggttctgctgctaggg

SEQ ID NO: 60060 - RNA, 23 nt, synthetic construct
  source 1..23: mol_type = other RNA
ggtagctgtagtccagccactct

SEQ ID NO: 60061 - RNA, 23 nt, synthetic construct
  source 1..23: mol_type = other RNA
cagagggccccggcatggggtag

SEQ ID NO: 60062 - RNA, 23 nt, synthetic construct
  source 1..23: mol_type = other RNA
gtggacatggtggccgtgggtgt

SEQ ID NO: 60063 - RNA, 23 nt, synthetic construct
  source 1..23: mol_type = other RNA
ggacagtctctggagtggaggag

SEQ ID NO: 60064 - RNA, 23 nt, synthetic construct
  source 1..23: mol_type = other RNA
tttggtagtgtgagctgttcctg

SEQ ID NO: 60065 - RNA, 23 nt, synthetic construct
  source 1..23: mol_type = other RNA
tgtgctgatccacactggaagcg

SEQ ID NO: 60066 - RNA, 23 nt, synthetic construct
  source 1..23: mol_type = other RNA
tggtggcggtggtggtcagcact

SEQ ID NO: 60067 - RNA, 23 nt, synthetic construct
  source 1..23: mol_type = other RNA
cggtggttgctgctggggtgtgg

SEQ ID NO: 60068 - RNA, 23 nt, synthetic construct
  source 1..23: mol_type = other RNA
ggtagctgtagtccagccactct

SEQ ID NO: 60069 - RNA, 23 nt, synthetic construct
  source 1..23: mol_type = other RNA
cagagggccccggcatggggtag

SEQ ID NO: 60070 - RNA, 23 nt, synthetic construct
  source 1..23: mol_type = other RNA
ctgttcccggggtggaggacggg

SEQ ID NO: 60071 - RNA, 23 nt, synthetic construct
  source 1..23: mol_type = other RNA
gtggacatggtggccgtgggtgt

SEQ ID NO: 60072 - RNA, 23 nt, synthetic construct
  source 1..23: mol_type = other RNA
tttggtagtgtgagctgttcctg

SEQ ID NO: 60073 - RNA, 23 nt, synthetic construct
  source 1..23: mol_type = other RNA
tgtggcggtgtgggtggtccccg

SEQ ID NO: 60074 - RNA, 23 nt, synthetic construct
  source 1..23: mol_type = other RNA
gtggtggagccggtggctgtgat

SEQ ID NO: 60075 - RNA, 23 nt, synthetic construct
  source 1..23: mol_type = other RNA
tggtggcggtggtggtcagcact

SEQ ID NO: 60076 - RNA, 23 nt, synthetic construct
  source 1..23: mol_type = other RNA
tggtggttgctgctggggtgtgg

SEQ ID NO: 60077 - RNA, 23 nt, synthetic construct
  source 1..23: mol_type = other RNA
ggtagctgtagtccagccactct

SEQ ID NO: 60078 - RNA, 23 nt, synthetic construct
  source 1..23: mol_type = other RNA
cagagggccccggcatggggtag

SEQ ID NO: 60079 - RNA, 23 nt, synthetic construct
  source 1..23: mol_type = other RNA
gtggacatggtggccgtgggtgt

SEQ ID NO: 60080 - RNA, 23 nt, synthetic construct
  source 1..23: mol_type = other RNA
tttggtagtgtgagctgttcctg

SEQ ID NO: 60081 - RNA, 23 nt, synthetic construct
  source 1..23: mol_type = other RNA
tggtggcggtggtggtcagcact

SEQ ID NO: 60082 - RNA, 23 nt, synthetic construct
  source 1..23: mol_type = other RNA
cggtggttgctgctggggtgtgg

SEQ ID NO: 60083 - RNA, 23 nt, synthetic construct
  source 1..23: mol_type = other RNA
ggtagctgtagtccagccactct

SEQ ID NO: 60084 - RNA, 23 nt, synthetic construct
  source 1..23: mol_type = other RNA
cagagggccccggcatggggtag

SEQ ID NO: 60085 - RNA, 23 nt, synthetic construct
  source 1..23: mol_type = other RNA
ctgttcccggggtggaggacggg

SEQ ID NO: 60086 - RNA, 23 nt, synthetic construct
  source 1..23: mol_type = other RNA
gtggacatggtggccgtgggtgt

SEQ ID NO: 60087 - RNA, 23 nt, synthetic construct
  source 1..23: mol_type = other RNA
ggacagtctctggagtggaggag

SEQ ID NO: 60088 - RNA, 23 nt, synthetic construct
  source 1..23: mol_type = other RNA
tttggtagtgtgagctgttcctg

SEQ ID NO: 60089 - RNA, 23 nt, synthetic construct
  source 1..23: mol_type = other RNA
cttattgtagatgacttccccgg

SEQ ID NO: 60090 - RNA, 23 nt, synthetic construct
  source 1..23: mol_type = other RNA
ctggcgggcacacaggcaggctc

SEQ ID NO: 60091 - RNA, 23 nt, synthetic construct
  source 1..23: mol_type = other RNA
ctgcagcggaaggtgggacagca

SEQ ID NO: 60092 - RNA, 23 nt, synthetic construct
  source 1..23: mol_type = other RNA
gaggtgtgggtggtctccggagt

SEQ ID NO: 60093 - RNA, 23 nt, synthetic construct
  source 1..23: mol_type = other RNA
gaggtgtgggtggtctccggagt

SEQ ID NO: 60094 - RNA, 23 nt, synthetic construct
  source 1..23: mol_type = other RNA
gtcagcctggcgttgtgggcata

SEQ ID NO: 60095 - RNA, 23 nt, synthetic construct
  source 1..23: mol_type = other RNA
gtggaggaggggtggattgtgga

SEQ ID NO: 60096 - RNA, 23 nt, synthetic construct
  source 1..23: mol_type = other RNA
gtggaggaggggtggattgtgga

SEQ ID NO: 60097 - RNA, 23 nt, synthetic construct
  source 1..23: mol_type = other RNA
ggcaggtgaggtcgcacaggcca

SEQ ID NO: 60098 - RNA, 23 nt, synthetic construct
  source 1..23: mol_type = other RNA
tctgccccagcggccggacgtgg

SEQ ID NO: 60099 - RNA, 23 nt, synthetic construct
  source 1..23: mol_type = other RNA
gcgccgggtgggcgaggacgtcg

SEQ ID NO: 60100 - RNA, 23 nt, synthetic construct
  source 1..23: mol_type = other RNA
ggcctgtctgcaccacgatgaag

SEQ ID NO: 60101 - RNA, 23 nt, synthetic construct
  source 1..23: mol_type = other RNA
tgggaaccgtggaggcagtggct

SEQ ID NO: 60102 - RNA, 23 nt, synthetic construct
  source 1..23: mol_type = other RNA
gggtctctgcctgcggcaccacg

SEQ ID NO: 60103 - RNA, 23 nt, synthetic construct
  source 1..23: mol_type = other RNA
ccctcacccttctggggccggtt

SEQ ID NO: 60104 - RNA, 23 nt, synthetic construct
  source 1..23: mol_type = other RNA
gcagccagagtgcgtgatgtcat

SEQ ID NO: 60105 - RNA, 23 nt, synthetic construct
  source 1..23: mol_type = other RNA
gtcgtgcaccacctctccaggag

SEQ ID NO: 60106 - RNA, 23 nt, synthetic construct
  source 1..23: mol_type = other RNA
gtgaagcccgtggttgtggtagt

SEQ ID NO: 60107 - RNA, 23 nt, synthetic construct
  source 1..23: mol_type = other RNA
gtgaagcccgtggttgtggtagt

SEQ ID NO: 60108 - RNA, 23 nt, synthetic construct
  source 1..23: mol_type = other RNA
gtgaagcccgtggttgtggtagt

SEQ ID NO: 60109 - RNA, 23 nt, synthetic construct
  source 1..23: mol_type = other RNA
gtgaagcccgtggttgtggtagt

SEQ ID NO: 60110 - RNA, 23 nt, synthetic construct
  source 1..23: mol_type = other RNA
gtgaagcccgtggttgtggtagt

SEQ ID NO: 60111 - RNA, 23 nt, synthetic construct
  source 1..23: mol_type = other RNA
gggaaccgtggaggcagtggctg

SEQ ID NO: 60112 - RNA, 23 nt, synthetic construct
  source 1..23: mol_type = other RNA
tctgggcggtgcccattgtacca

SEQ ID NO: 60113 - RNA, 23 nt, synthetic construct
  source 1..23: mol_type = other RNA
acacgctggtcttccggtcccag

SEQ ID NO: 60114 - RNA, 23 nt, synthetic construct
  source 1..23: mol_type = other RNA
gccgggggagccctggtcagccc

SEQ ID NO: 60115 - RNA, 23 nt, synthetic construct
  source 1..23: mol_type = other RNA
tggccacaggctttgggtccagc

SEQ ID NO: 60116 - RNA, 23 nt, synthetic construct
  source 1..23: mol_type = other RNA
tcgatgtcagccagcacagggca

SEQ ID NO: 60117 - RNA, 23 nt, synthetic construct
  source 1..23: mol_type = other RNA
tgctgtggtctgggttggggtag

SEQ ID NO: 60118 - RNA, 23 nt, synthetic construct
  source 1..23: mol_type = other RNA
gtctgcgaggtgagggccgccgt

SEQ ID NO: 60119 - RNA, 23 nt, synthetic construct
  source 1..23: mol_type = other RNA
cactgcagcagaggacccggatc

SEQ ID NO: 60120 - RNA, 23 nt, synthetic construct
  source 1..23: mol_type = other RNA
ggagggtcccggtggtcccaagg

SEQ ID NO: 60121 - RNA, 23 nt, synthetic construct
  source 1..23: mol_type = other RNA
ggagggtcccggtggtcccaagg

SEQ ID NO: 60122 - RNA, 23 nt, synthetic construct
  source 1..23: mol_type = other RNA
gcgtcacagggcaggggcttgca

SEQ ID NO: 60123 - RNA, 23 nt, synthetic construct
  source 1..23: mol_type = other RNA
atggacaggcggccgccttgcct

SEQ ID NO: 60124 - RNA, 23 nt, synthetic construct
  source 1..23: mol_type = other RNA
tggggccgatgtggggctgctgg

SEQ ID NO: 60125 - RNA, 23 nt, synthetic construct
  source 1..23: mol_type = other RNA
ctgggagggtcccggtggtccca

SEQ ID NO: 60126 - RNA, 23 nt, synthetic construct
  source 1..23: mol_type = other RNA
ctgggagggtcccggtggtccca

SEQ ID NO: 60127 - RNA, 23 nt, synthetic construct
  source 1..23: mol_type = other RNA
cctccagcggcatgtcgggaagc

SEQ ID NO: 60128 - RNA, 23 nt, synthetic construct
  source 1..23: mol_type = other RNA
tagggtgtgggaagtcaccgtgg

SEQ ID NO: 60129 - RNA, 23 nt, synthetic construct
  source 1..23: mol_type = other RNA
aggtcggggtggccgtggatcca

SEQ ID NO: 60130 - RNA, 23 nt, synthetic construct
  source 1..23: mol_type = other RNA
ccatggtgttcggcactgggggt

SEQ ID NO: 60131 - RNA, 23 nt, synthetic construct
  source 1..23: mol_type = other RNA
gtgtgggaagtcaccgtggaagg

SEQ ID NO: 60132 - RNA, 23 nt, synthetic construct
  source 1..23: mol_type = other RNA
gtcttgctgggtgtggccgtggc

SEQ ID NO: 60133 - RNA, 23 nt, synthetic construct
  source 1..23: mol_type = other RNA
gtcttgctgggtgtggccgtggc

SEQ ID NO: 60134 - RNA, 23 nt, synthetic construct
  source 1..23: mol_type = other RNA
gtgtgggaagtcaccgtggaagg

SEQ ID NO: 60135 - RNA, 23 nt, synthetic construct
  source 1..23: mol_type = other RNA
gtcttgctgggtgtggccgtggc

SEQ ID NO: 60136 - RNA, 23 nt, synthetic construct
  source 1..23: mol_type = other RNA
ggtcaccactttgggggtgtgag

SEQ ID NO: 60137 - RNA, 23 nt, synthetic construct
  source 1..23: mol_type = other RNA
ggctccgcagaggaggcccaagg

SEQ ID NO: 60138 - RNA, 23 nt, synthetic construct
  source 1..23: mol_type = other RNA
tgggcagcagggtcgaggtgcgg

SEQ ID NO: 60139 - RNA, 23 nt, synthetic construct
  source 1..23: mol_type = other RNA
tgggcagcagggtcgaggtgcgg

SEQ ID NO: 60140 - RNA, 23 nt, synthetic construct
  source 1..23: mol_type = other RNA
tgggcagcagggtcgaggtgcgg

SEQ ID NO: 60141 - RNA, 23 nt, synthetic construct
  source 1..23: mol_type = other RNA
tgggcagcagggtcgaggtgcgg

SEQ ID NO: 60142 - RNA, 23 nt, synthetic construct
  source 1..23: mol_type = other RNA
cccccactcccatccgacaccag

SEQ ID NO: 60143 - RNA, 23 nt, synthetic construct
  source 1..23: mol_type = other RNA
tggtgctgcatgttgagggggca

SEQ ID NO: 60144 - RNA, 23 nt, synthetic construct
  source 1..23: mol_type = other RNA
tggcactgccatagccccccgga

SEQ ID NO: 60145 - RNA, 23 nt, synthetic construct
  source 1..23: mol_type = other RNA
ggagccactggttgtgggtgtgg

SEQ ID NO: 60146 - RNA, 23 nt, synthetic construct
  source 1..23: mol_type = other RNA
ggagccactggttgtgggtgtgg

SEQ ID NO: 60147 - RNA, 23 nt, synthetic construct
  source 1..23: mol_type = other RNA
cgggtggggggacggggacgggc

SEQ ID NO: 60148 - RNA, 23 nt, synthetic construct
  source 1..23: mol_type = other RNA
gagcaggtgtccgtgcagggtga

SEQ ID NO: 60149 - RNA, 23 nt, synthetic construct
  source 1..23: mol_type = other RNA
ggggttggagcaggtgtccgtgc

SEQ ID NO: 60150 - RNA, 23 nt, synthetic construct
  source 1..23: mol_type = other RNA
ctgcagtcaccatgcaggtcgta

SEQ ID NO: 60151 - RNA, 23 nt, synthetic construct
  source 1..23: mol_type = other RNA
cgctttcaggcagttctcgttgt

SEQ ID NO: 60152 - RNA, 23 nt, synthetic construct
  source 1..23: mol_type = other RNA
tggcctccaccaccccgctgagg

SEQ ID NO: 60153 - RNA, 23 nt, synthetic construct
  source 1..23: mol_type = other RNA
acagcccccatgtgggttgtaga

SEQ ID NO: 60154 - RNA, 23 nt, synthetic construct
  source 1..23: mol_type = other RNA
agccttcctgatgatggtgccgt

SEQ ID NO: 60155 - RNA, 23 nt, synthetic construct
  source 1..23: mol_type = other RNA
tggcactgagggagggctgaggg

SEQ ID NO: 60156 - RNA, 23 nt, synthetic construct
  source 1..23: mol_type = other RNA
gtctgggttggggtaggcacagc

SEQ ID NO: 60157 - RNA, 23 nt, synthetic construct
  source 1..23: mol_type = other RNA
ggttgccattgttgttggggcca

SEQ ID NO: 60158 - RNA, 23 nt, synthetic construct
  source 1..23: mol_type = other RNA
aggttgccattgttgttggggcc

SEQ ID NO: 60159 - RNA, 23 nt, synthetic construct
  source 1..23: mol_type = other RNA
ctctggaggttgccattgttgtt

SEQ ID NO: 60160 - RNA, 23 nt, synthetic construct
  source 1..23: mol_type = other RNA
ggaggtcggggtggccgtggatc

SEQ ID NO: 60161 - RNA, 23 nt, synthetic construct
  source 1..23: mol_type = other RNA
gtgggtgtggtggttgtgctgat

SEQ ID NO: 60162 - RNA, 23 nt, synthetic construct
  source 1..23: mol_type = other RNA
agtggccacagttgtggtggtgg

SEQ ID NO: 60163 - RNA, 23 nt, synthetic construct
  source 1..23: mol_type = other RNA
gggggatgggagttgtcccagga

SEQ ID NO: 60164 - RNA, 23 nt, synthetic construct
  source 1..23: mol_type = other RNA
tgtgggaagtcaccgtggaaggc

SEQ ID NO: 60165 - RNA, 23 nt, synthetic construct
  source 1..23: mol_type = other RNA
cggcccctccggccgcacggatg

SEQ ID NO: 60166 - RNA, 23 nt, synthetic construct
  source 1..23: mol_type = other RNA
gtgggtgtggtggttgtgctgat

SEQ ID NO: 60167 - RNA, 23 nt, synthetic construct
  source 1..23: mol_type = other RNA
agtggccacagttgtggtggtgg

SEQ ID NO: 60168 - RNA, 23 nt, synthetic construct
  source 1..23: mol_type = other RNA
cggcccctccggccgcacggatg

SEQ ID NO: 60169 - RNA, 23 nt, synthetic construct
  source 1..23: mol_type = other RNA
gggagggggagctgttcccgggg

SEQ ID NO: 60170 - RNA, 23 nt, synthetic construct
  source 1..23: mol_type = other RNA
gtgggtgtggtggttgtgctgat

SEQ ID NO: 60171 - RNA, 23 nt, synthetic construct
  source 1..23: mol_type = other RNA
agtggccacagttgtggtggtgg

SEQ ID NO: 60172 - RNA, 23 nt, synthetic construct
  source 1..23: mol_type = other RNA
tgtgggaagtcaccgtggaaggc

SEQ ID NO: 60173 - RNA, 23 nt, synthetic construct
  source 1..23: mol_type = other RNA
gtgggtgtggtggttgtgctgat

SEQ ID NO: 60174 - RNA, 23 nt, synthetic construct
  source 1..23: mol_type = other RNA
gtggagccactggttgtgggtgt

SEQ ID NO: 60175 - RNA, 23 nt, synthetic construct
  source 1..23: mol_type = other RNA
agtggccacagttgtggtggtgg

SEQ ID NO: 60176 - RNA, 23 nt, synthetic construct
  source 1..23: mol_type = other RNA
gtggtgatcagtgatgggggagt

SEQ ID NO: 60177 - RNA, 23 nt, synthetic construct
  source 1..23: mol_type = other RNA
cggcccctccggccgcacggatg

SEQ ID NO: 60178 - RNA, 23 nt, synthetic construct
  source 1..23: mol_type = other RNA
gggagggggagctgttcccgggg

SEQ ID NO: 60179 - RNA, 23 nt, synthetic construct
  source 1..23: mol_type = other RNA
tggacgtggaactggtggccctt

SEQ ID NO: 60180 - RNA, 23 nt, synthetic construct
  source 1..23: mol_type = other RNA
gctggaagggcagttgcagtccc

SEQ ID NO: 60181 - RNA, 23 nt, synthetic construct
  source 1..23: mol_type = other RNA
gtgggtgtggtggttgtgctgat

SEQ ID NO: 60182 - RNA, 23 nt, synthetic construct
  source 1..23: mol_type = other RNA
gtggagccactggttgtgggtgt

SEQ ID NO: 60183 - RNA, 23 nt, synthetic construct
  source 1..23: mol_type = other RNA
agtggccacagttgtggtggtgg

SEQ ID NO: 60184 - RNA, 23 nt, synthetic construct
  source 1..23: mol_type = other RNA
tcacagggctggctcgggtccga

SEQ ID NO: 60185 - RNA, 23 nt, synthetic construct
  source 1..23: mol_type = other RNA
tggatgctgagggcgcgggggca

SEQ ID NO: 60186 - RNA, 23 nt, synthetic construct
  source 1..23: mol_type = other RNA
gtcggggaccagccacgtcttgg

SEQ ID NO: 60187 - RNA, 23 nt, synthetic construct
  source 1..23: mol_type = other RNA
cccgggcgcggcagagctctgcg

SEQ ID NO: 60188 - RNA, 23 nt, synthetic construct
  source 1..23: mol_type = other RNA
gccatcccctccagctgtgggct

SEQ ID NO: 60189 - RNA, 23 nt, synthetic construct
  source 1..23: mol_type = other RNA
gggtcccacgcaggggcaggcct

SEQ ID NO: 60190 - RNA, 23 nt, synthetic construct
  source 1..23: mol_type = other RNA
cctgggtgcagatggactcctgc

SEQ ID NO: 60191 - RNA, 23 nt, synthetic construct
  source 1..23: mol_type = other RNA
tctcctcgtggacccgcctctcc

SEQ ID NO: 60192 - RNA, 23 nt, synthetic construct
  source 1..23: mol_type = other RNA
gggtgggcagcaggagcacggag

SEQ ID NO: 60193 - RNA, 23 nt, synthetic construct
  source 1..23: mol_type = other RNA
aggcggccgccttgcctgtcgca

SEQ ID NO: 60194 - RNA, 23 nt, synthetic construct
  source 1..23: mol_type = other RNA
gacaggcggccgccttgcctgtc

SEQ ID NO: 60195 - RNA, 23 nt, synthetic construct
  source 1..23: mol_type = other RNA
ggcatggacaggcggccgccttg

SEQ ID NO: 60196 - RNA, 23 nt, synthetic construct
  source 1..23: mol_type = other RNA
cgtggtcaccaccgtggttatgg

SEQ ID NO: 60197 - RNA, 23 nt, synthetic construct
  source 1..23: mol_type = other RNA
cgtggtcaccaccgtggttatgg

SEQ ID NO: 60198 - RNA, 23 nt, synthetic construct
  source 1..23: mol_type = other RNA
gtcctgggcgcaggcggccaggt

SEQ ID NO: 60199 - RNA, 23 nt, synthetic construct
  source 1..23: mol_type = other RNA
agtgctcggctctgtgaggatcc

SEQ ID NO: 60200 - RNA, 23 nt, synthetic construct
  source 1..23: mol_type = other RNA
agtgctcggctctgtgaggatcc

SEQ ID NO: 60201 - RNA, 23 nt, synthetic construct
  source 1..23: mol_type = other RNA
agtgctcggctctgtgaggatcc

SEQ ID NO: 60202 - RNA, 23 nt, synthetic construct
  source 1..23: mol_type = other RNA
tggacatggtggacatgggtgtg

SEQ ID NO: 60203 - RNA, 23 nt, synthetic construct
  source 1..23: mol_type = other RNA
agtgctcggctctgtgaggatcc

SEQ ID NO: 60204 - RNA, 23 nt, synthetic construct
  source 1..23: mol_type = other RNA
gctgggaaccgtggaggcagtgg

SEQ ID NO: 60205 - RNA, 23 nt, synthetic construct
  source 1..23: mol_type = other RNA
gtggtctccggagtggaggaggg

SEQ ID NO: 60206 - RNA, 23 nt, synthetic construct
  source 1..23: mol_type = other RNA
ccccagggggacaccaggctggg

SEQ ID NO: 60207 - RNA, 23 nt, synthetic construct
  source 1..23: mol_type = other RNA
gtggtctccggagtggaggaggg

SEQ ID NO: 60208 - RNA, 23 nt, synthetic construct
  source 1..23: mol_type = other RNA
tggctgtgaagcccgtggttgtg

SEQ ID NO: 60209 - RNA, 23 nt, synthetic construct
  source 1..23: mol_type = other RNA
tggctgtgaagcccgtggttgtg

SEQ ID NO: 60210 - RNA, 23 nt, synthetic construct
  source 1..23: mol_type = other RNA
tggctgtgaagcccgtggttgtg

SEQ ID NO: 60211 - RNA, 23 nt, synthetic construct
  source 1..23: mol_type = other RNA
tggctgtgaagcccgtggttgtg

SEQ ID NO: 60212 - RNA, 23 nt, synthetic construct
  source 1..23: mol_type = other RNA
aaggctgcgcccgtggcctccac

SEQ ID NO: 60213 - RNA, 23 nt, synthetic construct
  source 1..23: mol_type = other RNA
tggctttggagctggtggctgcg

SEQ ID NO: 60214 - RNA, 23 nt, synthetic construct
  source 1..23: mol_type = other RNA
caggacacggccatcccgtgggt

SEQ ID NO: 60215 - RNA, 23 nt, synthetic construct
  source 1..23: mol_type = other RNA
ggtcagcactggggggataggtg

SEQ ID NO: 60216 - RNA, 23 nt, synthetic construct
  source 1..23: mol_type = other RNA
ggtcagcactggggggataggtg

SEQ ID NO: 60217 - RNA, 23 nt, synthetic construct
  source 1..23: mol_type = other RNA
gctcgtggtcagcggctctttgg

SEQ ID NO: 60218 - RNA, 23 nt, synthetic construct
  source 1..23: mol_type = other RNA
gtcaccgtggagcctctggttgt

SEQ ID NO: 60219 - RNA, 23 nt, synthetic construct
  source 1..23: mol_type = other RNA
gtcaccgtggagcctctggttgt

SEQ ID NO: 60220 - RNA, 23 nt, synthetic construct
  source 1..23: mol_type = other RNA
gtccccgggacggaggagggggt

SEQ ID NO: 60221 - RNA, 23 nt, synthetic construct
  source 1..23: mol_type = other RNA
gtgggtggtctctggagtagagg

SEQ ID NO: 60222 - RNA, 23 nt, synthetic construct
  source 1..23: mol_type = other RNA
gtgtgagctgttcccagagtgga

SEQ ID NO: 60223 - RNA, 23 nt, synthetic construct
  source 1..23: mol_type = other RNA
ggaagccagtgggtctcagggtg

SEQ ID NO: 60224 - RNA, 23 nt, synthetic construct
  source 1..23: mol_type = other RNA
tgcaccatggtgacagtgaggac

SEQ ID NO: 60225 - RNA, 23 nt, synthetic construct
  source 1..23: mol_type = other RNA
tggctgttgacccaggtttcatt

SEQ ID NO: 60226 - RNA, 23 nt, synthetic construct
  source 1..23: mol_type = other RNA
cttagtttgttccagggcgtccc

SEQ ID NO: 60227 - RNA, 23 nt, synthetic construct
  source 1..23: mol_type = other RNA
cagcctcacagaggtacacggtg

SEQ ID NO: 60228 - RNA, 23 nt, synthetic construct
  source 1..23: mol_type = other RNA
ggatgggtgtaaagctggtagct

SEQ ID NO: 60229 - RNA, 23 nt, synthetic construct
  source 1..23: mol_type = other RNA
ggatgggtgtaaagctggtagct

SEQ ID NO: 60230 - RNA, 23 nt, synthetic construct
  source 1..23: mol_type = other RNA
tccggcacgcgctcggggcaccc

SEQ ID NO: 60231 - RNA, 23 nt, synthetic construct
  source 1..23: mol_type = other RNA
cggggtcagcctggcgttgtggg

SEQ ID NO: 60232 - RNA, 23 nt, synthetic construct
  source 1..23: mol_type = other RNA
gcggggtcagcctggcgttgtgg

SEQ ID NO: 60233 - RNA, 23 nt, synthetic construct
  source 1..23: mol_type = other RNA
aaagctgttcctggcattggcac

SEQ ID NO: 60234 - RNA, 23 nt, synthetic construct
  source 1..23: mol_type = other RNA
tacaccatgggggctgcacaccc

SEQ ID NO: 60235 - RNA, 23 nt, synthetic construct
  source 1..23: mol_type = other RNA
acacaggggcagtcctcctcggc

SEQ ID NO: 60236 - RNA, 23 nt, synthetic construct
  source 1..23: mol_type = other RNA
cacacaggggcagtcctcctcgg

SEQ ID NO: 60237 - RNA, 23 nt, synthetic construct
  source 1..23: mol_type = other RNA
tggctgggtgggcacttcgggta

SEQ ID NO: 60238 - RNA, 23 nt, synthetic construct
  source 1..23: mol_type = other RNA
tggatgccactgggtgtgcagtt

SEQ ID NO: 60239 - RNA, 23 nt, synthetic construct
  source 1..23: mol_type = other RNA
ccctggtcagccccgggctactc

SEQ ID NO: 60240 - RNA, 23 nt, synthetic construct
  source 1..23: mol_type = other RNA
tcgtccctggaagggctgagcgt

SEQ ID NO: 60241 - RNA, 23 nt, synthetic construct
  source 1..23: mol_type = other RNA
tggtggctgtgcttctcagtgct

SEQ ID NO: 60242 - RNA, 23 nt, synthetic construct
  source 1..23: mol_type = other RNA
ggccgtggtggtcagtgatgggg

SEQ ID NO: 60243 - RNA, 23 nt, synthetic construct
  source 1..23: mol_type = other RNA
gtggccgtggtggtcagtgatgg

SEQ ID NO: 60244 - RNA, 23 nt, synthetic construct
  source 1..23: mol_type = other RNA
ggtggagccggtggccgtgatcg

SEQ ID NO: 60245 - RNA, 23 nt, synthetic construct
  source 1..23: mol_type = other RNA
tgtcgtggccgtggtgctcacat

SEQ ID NO: 60246 - RNA, 23 nt, synthetic construct
  source 1..23: mol_type = other RNA
tggtggctgtgcttctcagtgct

SEQ ID NO: 60247 - RNA, 23 nt, synthetic construct
  source 1..23: mol_type = other RNA
ggccgtggtggtcagtgatgggg

SEQ ID NO: 60248 - RNA, 23 nt, synthetic construct
  source 1..23: mol_type = other RNA
gtggccgtggtggtcagtgatgg

SEQ ID NO: 60249 - RNA, 23 nt, synthetic construct
  source 1..23: mol_type = other RNA
ggtggagccggtggccgtgatcg

SEQ ID NO: 60250 - RNA, 23 nt, synthetic construct
  source 1..23: mol_type = other RNA
tggtggctgtgcttctcagtgct

SEQ ID NO: 60251 - RNA, 23 nt, synthetic construct
  source 1..23: mol_type = other RNA
ggccgtggtggtcagtgatgggg

SEQ ID NO: 60252 - RNA, 23 nt, synthetic construct
  source 1..23: mol_type = other RNA
gtggccgtggtggtcagtgatgg

SEQ ID NO: 60253 - RNA, 23 nt, synthetic construct
  source 1..23: mol_type = other RNA
ctgggtggtactggtggttgctg

SEQ ID NO: 60254 - RNA, 23 nt, synthetic construct
  source 1..23: mol_type = other RNA
tgtcgtggccgtggtgctcacat

SEQ ID NO: 60255 - RNA, 23 nt, synthetic construct
  source 1..23: mol_type = other RNA
tggtggctgtgcttctcagtgct

SEQ ID NO: 60256 - RNA, 23 nt, synthetic construct
  source 1..23: mol_type = other RNA
ggtggagccggtggccgtgatcg

SEQ ID NO: 60257 - RNA, 23 nt, synthetic construct
  source 1..23: mol_type = other RNA
tgtcgtggccgtggtgctcacat

SEQ ID NO: 60258 - RNA, 23 nt, synthetic construct
  source 1..23: mol_type = other RNA
ctcagtgctggaagggcagttgc

SEQ ID NO: 60259 - RNA, 23 nt, synthetic construct
  source 1..23: mol_type = other RNA
tggtggctgtgcttctcagtgct

SEQ ID NO: 60260 - RNA, 23 nt, synthetic construct
  source 1..23: mol_type = other RNA
ggccgtggtggtcagtgatgggg

SEQ ID NO: 60261 - RNA, 23 nt, synthetic construct
  source 1..23: mol_type = other RNA
gtggccgtggtggtcagtgatgg

SEQ ID NO: 60262 - RNA, 23 nt, synthetic construct
  source 1..23: mol_type = other RNA
ggtggagccggtggccgtgatcg

SEQ ID NO: 60263 - RNA, 23 nt, synthetic construct
  source 1..23: mol_type = other RNA
tgtggattttgtggctgtgcttg

SEQ ID NO: 60264 - RNA, 23 nt, synthetic construct
  source 1..23: mol_type = other RNA
ggaggtgggacaggcgccctgga

SEQ ID NO: 60265 - RNA, 23 nt, synthetic construct
  source 1..23: mol_type = other RNA
agtgggagccgccccacatgctg

SEQ ID NO: 60266 - RNA, 23 nt, synthetic construct
  source 1..23: mol_type = other RNA
agaagcagccctccgccatcccc

SEQ ID NO: 60267 - RNA, 23 nt, synthetic construct
  source 1..23: mol_type = other RNA
tcctgggccgggaagccacgggt

SEQ ID NO: 60268 - RNA, 23 nt, synthetic construct
  source 1..23: mol_type = other RNA
ttgctgcagtccaggtacaccat

SEQ ID NO: 60269 - RNA, 23 nt, synthetic construct
  source 1..23: mol_type = other RNA
aacactcgcagtcgccacccgag

SEQ ID NO: 60270 - RNA, 23 nt, synthetic construct
  source 1..23: mol_type = other RNA
tttcaaacgtctcaaagtctccg

SEQ ID NO: 60271 - RNA, 23 nt, synthetic construct
  source 1..23: mol_type = other RNA
caagggtgcttgtgtatctgggg

SEQ ID NO: 60272 - RNA, 23 nt, synthetic construct
  source 1..23: mol_type = other RNA
gtccccgtggaaggctctgtgat

SEQ ID NO: 60273 - RNA, 23 nt, synthetic construct
  source 1..23: mol_type = other RNA
gtccccgtggaaggctctgtgat

SEQ ID NO: 60274 - RNA, 23 nt, synthetic construct
  source 1..23: mol_type = other RNA
cctgcacgcagatgcccatgtgt

SEQ ID NO: 60275 - RNA, 23 nt, synthetic construct
  source 1..23: mol_type = other RNA
ctctggcggtgtgggtggtcccc

SEQ ID NO: 60276 - RNA, 23 nt, synthetic construct
  source 1..23: mol_type = other RNA
catggtcaccaccgtggttatgg

SEQ ID NO: 60277 - RNA, 23 nt, synthetic construct
  source 1..23: mol_type = other RNA
catggtcaccaccgtggttattg

SEQ ID NO: 60278 - RNA, 23 nt, synthetic construct
  source 1..23: mol_type = other RNA
tccgcggctggccccccgcgtgg

SEQ ID NO: 60279 - RNA, 23 nt, synthetic construct
  source 1..23: mol_type = other RNA
tgggttggggtaggcacagcagg

SEQ ID NO: 60280 - RNA, 23 nt, synthetic construct
  source 1..23: mol_type = other RNA
ctggccgggggagccctggtcag

SEQ ID NO: 60281 - RNA, 23 nt, synthetic construct
  source 1..23: mol_type = other RNA
ggagagggatggcattgtcacag

SEQ ID NO: 60282 - RNA, 23 nt, synthetic construct
  source 1..23: mol_type = other RNA
ggcacctcaaggcggcccctgca

SEQ ID NO: 60283 - RNA, 23 nt, synthetic construct
  source 1..23: mol_type = other RNA
atccacgtgggtgtaggtgtgca

SEQ ID NO: 60284 - RNA, 23 nt, synthetic construct
  source 1..23: mol_type = other RNA
gagggtgtggccgtggaattggt

SEQ ID NO: 60285 - RNA, 23 nt, synthetic construct
  source 1..23: mol_type = other RNA
gtcttgtagtggaagtcacccca

SEQ ID NO: 60286 - RNA, 23 nt, synthetic construct
  source 1..23: mol_type = other RNA
agccgttggacgcctccagcacc

SEQ ID NO: 60287 - RNA, 23 nt, synthetic construct
  source 1..23: mol_type = other RNA
gcaggtgtccgtgcagggtgagc

SEQ ID NO: 60288 - RNA, 23 nt, synthetic construct
  source 1..23: mol_type = other RNA
gtggtgttgaaggaggtgcccgg

SEQ ID NO: 60289 - RNA, 23 nt, synthetic construct
  source 1..23: mol_type = other RNA
agcaggggcactcctgggcgggc

SEQ ID NO: 60290 - RNA, 23 nt, synthetic construct
  source 1..23: mol_type = other RNA
gcacacaggggcagtcctcctcg

SEQ ID NO: 60291 - RNA, 23 nt, synthetic construct
  source 1..23: mol_type = other RNA
cacagcccccatgtgggttgtag

SEQ ID NO: 60292 - RNA, 23 nt, synthetic construct
  source 1..23: mol_type = other RNA
tgggcacttcgggtagcagcctt

SEQ ID NO: 60293 - RNA, 23 nt, synthetic construct
  source 1..23: mol_type = other RNA
gcactggatgccactgggtgtgc

SEQ ID NO: 60294 - RNA, 23 nt, synthetic construct
  source 1..23: mol_type = other RNA
ggagttgaggaggggttggtggt

SEQ ID NO: 60295 - RNA, 23 nt, synthetic construct
  source 1..23: mol_type = other RNA
tggtggccatggtgttcggcact

SEQ ID NO: 60296 - RNA, 23 nt, synthetic construct
  source 1..23: mol_type = other RNA
ggagttgaggaggggttggtggt

SEQ ID NO: 60297 - RNA, 23 nt, synthetic construct
  source 1..23: mol_type = other RNA
ggacggggtggccgtggggccag

SEQ ID NO: 60298 - RNA, 23 nt, synthetic construct
  source 1..23: mol_type = other RNA
ggagttgaggaggggttggtggt

SEQ ID NO: 60299 - RNA, 23 nt, synthetic construct
  source 1..23: mol_type = other RNA
cgagtgctgggtggtactggtgg

SEQ ID NO: 60300 - RNA, 23 nt, synthetic construct
  source 1..23: mol_type = other RNA
tggccctggttgtggtggccgtg

SEQ ID NO: 60301 - RNA, 23 nt, synthetic construct
  source 1..23: mol_type = other RNA
cgtagtggccgtggtgatcagtg

SEQ ID NO: 60302 - RNA, 23 nt, synthetic construct
  source 1..23: mol_type = other RNA
ggagttgaggaggggttggtggt

SEQ ID NO: 60303 - RNA, 23 nt, synthetic construct
  source 1..23: mol_type = other RNA
ggacggggtggccgtggggccag

SEQ ID NO: 60304 - RNA, 23 nt, synthetic construct
  source 1..23: mol_type = other RNA
ggagttgaggaggggttggtggt

SEQ ID NO: 60305 - RNA, 23 nt, synthetic construct
  source 1..23: mol_type = other RNA
gggcgaggacagcggggcggagg

SEQ ID NO: 60306 - RNA, 23 nt, synthetic construct
  source 1..23: mol_type = other RNA
gcaggggttctcggcccggggcc

SEQ ID NO: 60307 - RNA, 23 nt, synthetic construct
  source 1..23: mol_type = other RNA
ctggggccggtttcacccacggg

SEQ ID NO: 60308 - RNA, 23 nt, synthetic construct
  source 1..23: mol_type = other RNA
ccgtccaggctgagcgtcaccgc

SEQ ID NO: 60309 - RNA, 23 nt, synthetic construct
  source 1..23: mol_type = other RNA
ctgtggcggtgtgggtggtcccc

SEQ ID NO: 60310 - RNA, 23 nt, synthetic construct
  source 1..23: mol_type = other RNA
ctgtggcggtgtgggtggtcccc

SEQ ID NO: 60311 - RNA, 23 nt, synthetic construct
  source 1..23: mol_type = other RNA
ggtggtccccgggacggaggagg

SEQ ID NO: 60312 - RNA, 23 nt, synthetic construct
  source 1..23: mol_type = other RNA
tgttgtccccacagtagtcctgg

SEQ ID NO: 60313 - RNA, 23 nt, synthetic construct
  source 1..23: mol_type = other RNA
ctcttggaggatcagctcgtagc

SEQ ID NO: 60314 - RNA, 23 nt, synthetic construct
  source 1..23: mol_type = other RNA
gtgtgggtggtccccgggatgga

SEQ ID NO: 60315 - RNA, 23 nt, synthetic construct
  source 1..23: mol_type = other RNA
tggtggtcagcactgtggcggtg

SEQ ID NO: 60316 - RNA, 23 nt, synthetic construct
  source 1..23: mol_type = other RNA
gtgtgggtggtccccgggatgga

SEQ ID NO: 60317 - RNA, 23 nt, synthetic construct
  source 1..23: mol_type = other RNA
ctgtggaggtgtgggtggtctcc

SEQ ID NO: 60318 - RNA, 23 nt, synthetic construct
  source 1..23: mol_type = other RNA
gtgtgggtggtccccgggatgga

SEQ ID NO: 60319 - RNA, 23 nt, synthetic construct
  source 1..23: mol_type = other RNA
tggtggtcagcactgtggcggtg

SEQ ID NO: 60320 - RNA, 23 nt, synthetic construct
  source 1..23: mol_type = other RNA
ctgtggaggtgtgggtggtctcc

SEQ ID NO: 60321 - RNA, 23 nt, synthetic construct
  source 1..23: mol_type = other RNA
gtgtgggtggtccccgggatgga

SEQ ID NO: 60322 - RNA, 23 nt, synthetic construct
  source 1..23: mol_type = other RNA
ctgtggaggtgtgggtggtctct

SEQ ID NO: 60323 - RNA, 23 nt, synthetic construct
  source 1..23: mol_type = other RNA
gggggctggcacgggtgggggga

SEQ ID NO: 60324 - RNA, 23 nt, synthetic construct
  source 1..23: mol_type = other RNA
cgctcggggcacccatcctgggg

SEQ ID NO: 60325 - RNA, 23 nt, synthetic construct
  source 1..23: mol_type = other RNA
gagcatggccgccagagccaaca

SEQ ID NO: 60326 - RNA, 23 nt, synthetic construct
  source 1..23: mol_type = other RNA
ttgcaaaggccagggaagcggaa

SEQ ID NO: 60327 - RNA, 23 nt, synthetic construct
  source 1..23: mol_type = other RNA
gctgcccattgatgaggacggag

SEQ ID NO: 60328 - RNA, 23 nt, synthetic construct
  source 1..23: mol_type = other RNA
cccacacaggccacaggtctggt

SEQ ID NO: 60329 - RNA, 23 nt, synthetic construct
  source 1..23: mol_type = other RNA
ccccacacaggccacaggtctgg

SEQ ID NO: 60330 - RNA, 23 nt, synthetic construct
  source 1..23: mol_type = other RNA
ccgttgaagtccccacacaggcc

SEQ ID NO: 60331 - RNA, 23 nt, synthetic construct
  source 1..23: mol_type = other RNA
ccggcaagggcagcgggtccggg

SEQ ID NO: 60332 - RNA, 23 nt, synthetic construct
  source 1..23: mol_type = other RNA
gtgcggtggcagatgccctcctc

SEQ ID NO: 60333 - RNA, 23 nt, synthetic construct
  source 1..23: mol_type = other RNA
tggcacacgggcaggtggggcag

SEQ ID NO: 60334 - RNA, 23 nt, synthetic construct
  source 1..23: mol_type = other RNA
gagccacactcctggtgctgcat

SEQ ID NO: 60335 - RNA, 23 nt, synthetic construct
  source 1..23: mol_type = other RNA
tcctcgcagagctgcgcgcgctg

SEQ ID NO: 60336 - RNA, 23 nt, synthetic construct
  source 1..23: mol_type = other RNA
gaaggctgcgcccgtggcctcca

SEQ ID NO: 60337 - RNA, 23 nt, synthetic construct
  source 1..23: mol_type = other RNA
aacatgcagttcgagtggaaggg

SEQ ID NO: 60338 - RNA, 23 nt, synthetic construct
  source 1..23: mol_type = other RNA
tgcccgcggggcaggtgcagccg

SEQ ID NO: 60339 - RNA, 23 nt, synthetic construct
  source 1..23: mol_type = other RNA
gcgtccgggcaggagggggagag

SEQ ID NO: 60340 - RNA, 23 nt, synthetic construct
  source 1..23: mol_type = other RNA
gctgggtgggcacttcgggtagc

SEQ ID NO: 60341 - RNA, 23 nt, synthetic construct
  source 1..23: mol_type = other RNA
ctggctgggtgggcacttcgggt

SEQ ID NO: 60342 - RNA, 23 nt, synthetic construct
  source 1..23: mol_type = other RNA
tggagttccaggacatgccacag

SEQ ID NO: 60343 - RNA, 23 nt, synthetic construct
  source 1..23: mol_type = other RNA
gggacccaggcggtggtgaaggt

SEQ ID NO: 60344 - RNA, 23 nt, synthetic construct
  source 1..23: mol_type = other RNA
caggccgggctctgggcggtgcc

SEQ ID NO: 60345 - RNA, 23 nt, synthetic construct
  source 1..23: mol_type = other RNA
cgcacatcagcccccgcatgcgg

SEQ ID NO: 60346 - RNA, 23 nt, synthetic construct
  source 1..23: mol_type = other RNA
actctgttggctgttggcgcaca

SEQ ID NO: 60347 - RNA, 23 nt, synthetic construct
  source 1..23: mol_type = other RNA
ttggggtaggcacagcaggctcc

SEQ ID NO: 60348 - RNA, 23 nt, synthetic construct
  source 1..23: mol_type = other RNA
atcttgaagacgccctcctgctc

SEQ ID NO: 60349 - RNA, 23 nt, synthetic construct
  source 1..23: mol_type = other RNA
tctccagctctgtggtcggtggc

SEQ ID NO: 60350 - RNA, 23 nt, synthetic construct
  source 1..23: mol_type = other RNA
gccgtctccagctctgtggtcgg

SEQ ID NO: 60351 - RNA, 23 nt, synthetic construct
  source 1..23: mol_type = other RNA
agtccttctgagagggtggggac

SEQ ID NO: 60352 - RNA, 23 nt, synthetic construct
  source 1..23: mol_type = other RNA
tggaagggtggatgtggccaccc

SEQ ID NO: 60353 - RNA, 23 nt, synthetic construct
  source 1..23: mol_type = other RNA
tccctggactggaggagggagtg

SEQ ID NO: 60354 - RNA, 23 nt, synthetic construct
  source 1..23: mol_type = other RNA
ggtgtggtggctgtgcttctcag

SEQ ID NO: 60355 - RNA, 23 nt, synthetic construct
  source 1..23: mol_type = other RNA
tgggtgtggtggctgtgcttctc

SEQ ID NO: 60356 - RNA, 23 nt, synthetic construct
  source 1..23: mol_type = other RNA
gagggtgtggctgtggacatggt

SEQ ID NO: 60357 - RNA, 23 nt, synthetic construct
  source 1..23: mol_type = other RNA
gtgggcagtctctggagtggagg

SEQ ID NO: 60358 - RNA, 23 nt, synthetic construct
  source 1..23: mol_type = other RNA
tgtggaggtgtgggcagtctctg

SEQ ID NO: 60359 - RNA, 23 nt, synthetic construct
  source 1..23: mol_type = other RNA
gtggtcagcactgtggcggtgtg

SEQ ID NO: 60360 - RNA, 23 nt, synthetic construct
  source 1..23: mol_type = other RNA
gtggtggtcagcactgtggcggt

SEQ ID NO: 60361 - RNA, 23 nt, synthetic construct
  source 1..23: mol_type = other RNA
gtggtggtggtggtcagcactgt

SEQ ID NO: 60362 - RNA, 23 nt, synthetic construct
  source 1..23: mol_type = other RNA
ggggggatgggagttgtcccagg

SEQ ID NO: 60363 - RNA, 23 nt, synthetic construct
  source 1..23: mol_type = other RNA
tggggggatgggagttgtcccag

SEQ ID NO: 60364 - RNA, 23 nt, synthetic construct
  source 1..23: mol_type = other RNA
tgctggggggcagggatcgcccg

SEQ ID NO: 60365 - RNA, 23 nt, synthetic construct
  source 1..23: mol_type = other RNA
aaggctctgtgatgtgggtggtg

SEQ ID NO: 60366 - RNA, 23 nt, synthetic construct
  source 1..23: mol_type = other RNA
gctggaaagggctggagtcgagt

SEQ ID NO: 60367 - RNA, 23 nt, synthetic construct
  source 1..23: mol_type = other RNA
ggtgcgggtcttgctgggtgtgg

SEQ ID NO: 60368 - RNA, 23 nt, synthetic construct
  source 1..23: mol_type = other RNA
agcccatggtcaccaccgtggtt

SEQ ID NO: 60369 - RNA, 23 nt, synthetic construct
  source 1..23: mol_type = other RNA
actggggctcacagcccatggtc

SEQ ID NO: 60370 - RNA, 23 nt, synthetic construct
  source 1..23: mol_type = other RNA
ggtgtcaaagtccccgccagagg

SEQ ID NO: 60371 - RNA, 23 nt, synthetic construct
  source 1..23: mol_type = other RNA
cggtgggcaccgtcacggtggct

SEQ ID NO: 60372 - RNA, 23 nt, synthetic construct
  source 1..23: mol_type = other RNA
ggtgtggtggctgtgcttctcag

SEQ ID NO: 60373 - RNA, 23 nt, synthetic construct
  source 1..23: mol_type = other RNA
tgggtgtggtggctgtgcttctc

SEQ ID NO: 60374 - RNA, 23 nt, synthetic construct
  source 1..23: mol_type = other RNA
ggaggaggggatggctgtaaagc

SEQ ID NO: 60375 - RNA, 23 nt, synthetic construct
  source 1..23: mol_type = other RNA
gagggtgtggctgtggacatggt

SEQ ID NO: 60376 - RNA, 23 nt, synthetic construct
  source 1..23: mol_type = other RNA
acagagccggtggccccggttgt

SEQ ID NO: 60377 - RNA, 23 nt, synthetic construct
  source 1..23: mol_type = other RNA
gtggtggtggtggtcagcactgt

SEQ ID NO: 60378 - RNA, 23 nt, synthetic construct
  source 1..23: mol_type = other RNA
aaggctctgtgatgtgggtggtg

SEQ ID NO: 60379 - RNA, 23 nt, synthetic construct
  source 1..23: mol_type = other RNA
tggttgctgctggggtgtgggaa

SEQ ID NO: 60380 - RNA, 23 nt, synthetic construct
  source 1..23: mol_type = other RNA
ggtgcgggtcttgctgggtgtgg

SEQ ID NO: 60381 - RNA, 23 nt, synthetic construct
  source 1..23: mol_type = other RNA
agcccatggtcaccaccgtggtt

SEQ ID NO: 60382 - RNA, 23 nt, synthetic construct
  source 1..23: mol_type = other RNA
actggggctcacagcccatggtc

SEQ ID NO: 60383 - RNA, 23 nt, synthetic construct
  source 1..23: mol_type = other RNA
ggtgtcaaagtccccgccagagg

SEQ ID NO: 60384 - RNA, 23 nt, synthetic construct
  source 1..23: mol_type = other RNA
tgttcccggggtggaggacggga

SEQ ID NO: 60385 - RNA, 23 nt, synthetic construct
  source 1..23: mol_type = other RNA
tgggagggggagctgttcccggg

SEQ ID NO: 60386 - RNA, 23 nt, synthetic construct
  source 1..23: mol_type = other RNA
catgggtgtggtggtctgttctg

SEQ ID NO: 60387 - RNA, 23 nt, synthetic construct
  source 1..23: mol_type = other RNA
agcactgtggaggtgtgggtggt

SEQ ID NO: 60388 - RNA, 23 nt, synthetic construct
  source 1..23: mol_type = other RNA
cagtggctgcagttgtagtggct

SEQ ID NO: 60389 - RNA, 23 nt, synthetic construct
  source 1..23: mol_type = other RNA
ggtggctgtagtgctgggctctg

SEQ ID NO: 60390 - RNA, 23 nt, synthetic construct
  source 1..23: mol_type = other RNA
cggtgggcaccgtcacggtggct

SEQ ID NO: 60391 - RNA, 23 nt, synthetic construct
  source 1..23: mol_type = other RNA
ctgatgactgtgggtgtggtggc

SEQ ID NO: 60392 - RNA, 23 nt, synthetic construct
  source 1..23: mol_type = other RNA
tccctggactggaggagggagtg

SEQ ID NO: 60393 - RNA, 23 nt, synthetic construct
  source 1..23: mol_type = other RNA
ggtgtggtggctgtgcttctcag

SEQ ID NO: 60394 - RNA, 23 nt, synthetic construct
  source 1..23: mol_type = other RNA
tgggtgtggtggctgtgcttctc

SEQ ID NO: 60395 - RNA, 23 nt, synthetic construct
  source 1..23: mol_type = other RNA
gagggtgtggctgtggacatggt

SEQ ID NO: 60396 - RNA, 23 nt, synthetic construct
  source 1..23: mol_type = other RNA
ctctggagtagaggagggtgtgg

SEQ ID NO: 60397 - RNA, 23 nt, synthetic construct
  source 1..23: mol_type = other RNA
tggtggtcgtggtggtaagcact

SEQ ID NO: 60398 - RNA, 23 nt, synthetic construct
  source 1..23: mol_type = other RNA
gtggtcagcactgtggcggtgtg

SEQ ID NO: 60399 - RNA, 23 nt, synthetic construct
  source 1..23: mol_type = other RNA
gtggtggtcagcactgtggcggt

SEQ ID NO: 60400 - RNA, 23 nt, synthetic construct
  source 1..23: mol_type = other RNA
gtggtggtggtggtcagcactgt

SEQ ID NO: 60401 - RNA, 23 nt, synthetic construct
  source 1..23: mol_type = other RNA
gggggatgggagttgtccctgga

SEQ ID NO: 60402 - RNA, 23 nt, synthetic construct
  source 1..23: mol_type = other RNA
ggggggatgggagttgtccctgg

SEQ ID NO: 60403 - RNA, 23 nt, synthetic construct
  source 1..23: mol_type = other RNA
tggggggatgggagttgtccctg

SEQ ID NO: 60404 - RNA, 23 nt, synthetic construct
  source 1..23: mol_type = other RNA
aaggctctgtgatgtgggtggtg

SEQ ID NO: 60405 - RNA, 23 nt, synthetic construct
  source 1..23: mol_type = other RNA
tggttgctgctggggtgtgggaa

SEQ ID NO: 60406 - RNA, 23 nt, synthetic construct
  source 1..23: mol_type = other RNA
gggtggtactggtggttgctgct

SEQ ID NO: 60407 - RNA, 23 nt, synthetic construct
  source 1..23: mol_type = other RNA
ggtgcgggtcttgctgggtgtgg

SEQ ID NO: 60408 - RNA, 23 nt, synthetic construct
  source 1..23: mol_type = other RNA
ggtgtcaaagtccccgccagagg

SEQ ID NO: 60409 - RNA, 23 nt, synthetic construct
  source 1..23: mol_type = other RNA
cggtgggcaccgtcacggtggct

SEQ ID NO: 60410 - RNA, 23 nt, synthetic construct
  source 1..23: mol_type = other RNA
ggtgtggtggctgtgcttctcag

SEQ ID NO: 60411 - RNA, 23 nt, synthetic construct
  source 1..23: mol_type = other RNA
tgggtgtggtggctgtgcttctc

SEQ ID NO: 60412 - RNA, 23 nt, synthetic construct
  source 1..23: mol_type = other RNA
ggaggaggggatggctgtaaagc

SEQ ID NO: 60413 - RNA, 23 nt, synthetic construct
  source 1..23: mol_type = other RNA
gagggtgtggctgtggacatggt

SEQ ID NO: 60414 - RNA, 23 nt, synthetic construct
  source 1..23: mol_type = other RNA
gtgggcagtctctggagtggagg

SEQ ID NO: 60415 - RNA, 23 nt, synthetic construct
  source 1..23: mol_type = other RNA
tgtggaggtgtgggcagtctctg

SEQ ID NO: 60416 - RNA, 23 nt, synthetic construct
  source 1..23: mol_type = other RNA
cgggacggaggagggggtcaccg

SEQ ID NO: 60417 - RNA, 23 nt, synthetic construct
  source 1..23: mol_type = other RNA
ggtccccgggacggaggaggggg

SEQ ID NO: 60418 - RNA, 23 nt, synthetic construct
  source 1..23: mol_type = other RNA
gtggtggtggtggtcagcactgt

SEQ ID NO: 60419 - RNA, 23 nt, synthetic construct
  source 1..23: mol_type = other RNA
aaggctctgtgatgtgggtggtg

SEQ ID NO: 60420 - RNA, 23 nt, synthetic construct
  source 1..23: mol_type = other RNA
tggttgctgctggggtgtgggaa

SEQ ID NO: 60421 - RNA, 23 nt, synthetic construct
  source 1..23: mol_type = other RNA
ctggggaagggggtgactcggtg

SEQ ID NO: 60422 - RNA, 23 nt, synthetic construct
  source 1..23: mol_type = other RNA
ggtgcgggtcttgctgggtgtgg

SEQ ID NO: 60423 - RNA, 23 nt, synthetic construct
  source 1..23: mol_type = other RNA
ggtgtcaaagtccccgccagagg

SEQ ID NO: 60424 - RNA, 23 nt, synthetic construct
  source 1..23: mol_type = other RNA
ggccgtggatccagtggatgcag

SEQ ID NO: 60425 - RNA, 23 nt, synthetic construct
  source 1..23: mol_type = other RNA
tggccgtggatccagtggatgca

SEQ ID NO: 60426 - RNA, 23 nt, synthetic construct
  source 1..23: mol_type = other RNA
tgttcccggggtggaggacgggg

SEQ ID NO: 60427 - RNA, 23 nt, synthetic construct
  source 1..23: mol_type = other RNA
tgggagggggagctgttcccggg

SEQ ID NO: 60428 - RNA, 23 nt, synthetic construct
  source 1..23: mol_type = other RNA
agcactgtggaggtgtgggtggt

SEQ ID NO: 60429 - RNA, 23 nt, synthetic construct
  source 1..23: mol_type = other RNA
cagtggctgcagttgtagtggct

SEQ ID NO: 60430 - RNA, 23 nt, synthetic construct
  source 1..23: mol_type = other RNA
cggtgggcaccgtcacggtggct

SEQ ID NO: 60431 - RNA, 23 nt, synthetic construct
  source 1..23: mol_type = other RNA
tccctggactggaggagggagtg

SEQ ID NO: 60432 - RNA, 23 nt, synthetic construct
  source 1..23: mol_type = other RNA
ggtgtggtggctgtgcttctcag

SEQ ID NO: 60433 - RNA, 23 nt, synthetic construct
  source 1..23: mol_type = other RNA
tgggtgtggtggctgtgcttctc

SEQ ID NO: 60434 - RNA, 23 nt, synthetic construct
  source 1..23: mol_type = other RNA
ggaggaggggatggctgtaaagc

SEQ ID NO: 60435 - RNA, 23 nt, synthetic construct
  source 1..23: mol_type = other RNA
gagggtgtggctgtggacatggt

SEQ ID NO: 60436 - RNA, 23 nt, synthetic construct
  source 1..23: mol_type = other RNA
acagagccggtggccccggttgt

SEQ ID NO: 60437 - RNA, 23 nt, synthetic construct
  source 1..23: mol_type = other RNA
gtggtggtggtggtcagcactct

SEQ ID NO: 60438 - RNA, 23 nt, synthetic construct
  source 1..23: mol_type = other RNA
agcactgtggaggtgtgggtggt

SEQ ID NO: 60439 - RNA, 23 nt, synthetic construct
  source 1..23: mol_type = other RNA
cagtggctgcagttgtagtggct

SEQ ID NO: 60440 - RNA, 23 nt, synthetic construct
  source 1..23: mol_type = other RNA
gggtgtgagctgttcccagagtg

SEQ ID NO: 60441 - RNA, 23 nt, synthetic construct
  source 1..23: mol_type = other RNA
gaaggttggcaggctgctgggga

SEQ ID NO: 60442 - RNA, 23 nt, synthetic construct
  source 1..23: mol_type = other RNA
ggtccagcaggacgacacggttg

SEQ ID NO: 60443 - RNA, 23 nt, synthetic construct
  source 1..23: mol_type = other RNA
tggtccccagcacagacacaagc

SEQ ID NO: 60444 - RNA, 23 nt, synthetic construct
  source 1..23: mol_type = other RNA
cggggctggcagtggggggtgtg

SEQ ID NO: 60445 - RNA, 23 nt, synthetic construct
  source 1..23: mol_type = other RNA
gtgggggtgggtgtgctagacac

SEQ ID NO: 60446 - RNA, 23 nt, synthetic construct
  source 1..23: mol_type = other RNA
acaaggttgtggcactcagcaaa

SEQ ID NO: 60447 - RNA, 23 nt, synthetic construct
  source 1..23: mol_type = other RNA
ggcggcccctgcagtggtcgctg

SEQ ID NO: 60448 - RNA, 23 nt, synthetic construct
  source 1..23: mol_type = other RNA
tatggggccgcatggcttgtaca

SEQ ID NO: 60449 - RNA, 23 nt, synthetic construct
  source 1..23: mol_type = other RNA
agagttgcaggtggcaggctgta

SEQ ID NO: 60450 - RNA, 23 nt, synthetic construct
  source 1..23: mol_type = other RNA
ttgaagaggatctggtcctcagg

SEQ ID NO: 60451 - RNA, 23 nt, synthetic construct
  source 1..23: mol_type = other RNA
gcaggggcaggcctgcacgcaga

SEQ ID NO: 60452 - RNA, 23 nt, synthetic construct
  source 1..23: mol_type = other RNA
atcgggtcccacgcaggggcagg

SEQ ID NO: 60453 - RNA, 23 nt, synthetic construct
  source 1..23: mol_type = other RNA
cagtcgccctcctcctgggtgca

SEQ ID NO: 60454 - RNA, 23 nt, synthetic construct
  source 1..23: mol_type = other RNA
cagctgaggtctgcagcggaagg

SEQ ID NO: 60455 - RNA, 23 nt, synthetic construct
  source 1..23: mol_type = other RNA
gcaggtacacatgtggcagggaa

SEQ ID NO: 60456 - RNA, 23 nt, synthetic construct
  source 1..23: mol_type = other RNA
tcgggcgtgaggcaggcggtctg

SEQ ID NO: 60457 - RNA, 23 nt, synthetic construct
  source 1..23: mol_type = other RNA
ggggcaggagccctcgcagaagg

SEQ ID NO: 60458 - RNA, 23 nt, synthetic construct
  source 1..23: mol_type = other RNA
gctccggggcaggagccctcgca

SEQ ID NO: 60459 - RNA, 23 nt, synthetic construct
  source 1..23: mol_type = other RNA
cctgggcctctgctgagtacttg

SEQ ID NO: 60460 - RNA, 23 nt, synthetic construct
  source 1..23: mol_type = other RNA
gcctgggcctctgctgagtactt

SEQ ID NO: 60461 - RNA, 23 nt, synthetic construct
  source 1..23: mol_type = other RNA
gcctctcctggcagcaggtgcac

SEQ ID NO: 60462 - RNA, 23 nt, synthetic construct
  source 1..23: mol_type = other RNA
cggggtgccacacacaggccggg

SEQ ID NO: 60463 - RNA, 23 nt, synthetic construct
  source 1..23: mol_type = other RNA
cagcaggagcacggagcgcgggg

SEQ ID NO: 60464 - RNA, 23 nt, synthetic construct
  source 1..23: mol_type = other RNA
ctcagagaacacgtagttgcaaa

SEQ ID NO: 60465 - RNA, 23 nt, synthetic construct
  source 1..23: mol_type = other RNA
cagagaacacgtagttgcaaagg

SEQ ID NO: 60466 - RNA, 23 nt, synthetic construct
  source 1..23: mol_type = other RNA
gtgctcagagaacacgtagttgc

SEQ ID NO: 60467 - RNA, 23 nt, synthetic construct
  source 1..23: mol_type = other RNA
aggcagcttagcttcccacccgt

SEQ ID NO: 60468 - RNA, 23 nt, synthetic construct
  source 1..23: mol_type = other RNA
tcagagaacacgtagttgcaaag

SEQ ID NO: 60469 - RNA, 23 nt, synthetic construct
  source 1..23: mol_type = other RNA
tggtcctcgcagagctgcgcgcg

SEQ ID NO: 60470 - RNA, 23 nt, synthetic construct
  source 1..23: mol_type = other RNA
acctgtgccagggtccagttggg

SEQ ID NO: 60471 - RNA, 23 nt, synthetic construct
  source 1..23: mol_type = other RNA
caggaggccagtgcggctgtaag

SEQ ID NO: 60472 - RNA, 23 nt, synthetic construct
  source 1..23: mol_type = other RNA
ctggtcagcactggggtgatggg

SEQ ID NO: 60473 - RNA, 23 nt, synthetic construct
  source 1..23: mol_type = other RNA
ggcacacgggcaggtggggcagc

SEQ ID NO: 60474 - RNA, 23 nt, synthetic construct
  source 1..23: mol_type = other RNA
gggcgcctgggaaggttgcacca

SEQ ID NO: 60475 - RNA, 23 nt, synthetic construct
  source 1..23: mol_type = other RNA
ctggaaagggctggagtcgagtg

SEQ ID NO: 60476 - RNA, 23 nt, synthetic construct
  source 1..23: mol_type = other RNA
tggtggagccggtggctgtgatc

SEQ ID NO: 60477 - RNA, 23 nt, synthetic construct
  source 1..23: mol_type = other RNA
gtctccagctctgtggtcggtgg

SEQ ID NO: 60478 - RNA, 23 nt, synthetic construct
  source 1..23: mol_type = other RNA
ctgctggggggcagggatcgccc

SEQ ID NO: 60479 - RNA, 23 nt, synthetic construct
  source 1..23: mol_type = other RNA
tgtggtggccgtggtgttcggca

SEQ ID NO: 60480 - RNA, 23 nt, synthetic construct
  source 1..23: mol_type = other RNA
tggagccggtggctgtgatcgta

SEQ ID NO: 60481 - RNA, 23 nt, synthetic construct
  source 1..23: mol_type = other RNA
tgtggtggccgtggtgttcggca

SEQ ID NO: 60482 - RNA, 23 nt, synthetic construct
  source 1..23: mol_type = other RNA
tgtggtggccgtggtgttcggca

SEQ ID NO: 60483 - RNA, 23 nt, synthetic construct
  source 1..23: mol_type = other RNA
aggacagggtggccgtggatcca

SEQ ID NO: 60484 - RNA, 23 nt, synthetic construct
  source 1..23: mol_type = other RNA
cactggggctcacagcccatggt

SEQ ID NO: 60485 - RNA, 23 nt, synthetic construct
  source 1..23: mol_type = other RNA
cactggggctcacagcccatggt

SEQ ID NO: 60486 - RNA, 23 nt, synthetic construct
  source 1..23: mol_type = other RNA
catggtgttcggcactgggggtg

SEQ ID NO: 60487 - RNA, 23 nt, synthetic construct
  source 1..23: mol_type = other RNA
gaagggcgcctgggaaggttgca

SEQ ID NO: 60488 - RNA, 23 nt, synthetic construct
  source 1..23: mol_type = other RNA
tgatgtagtccccgctctgctcc

SEQ ID NO: 60489 - RNA, 23 nt, synthetic construct
  source 1..23: mol_type = other RNA
cagtcggggcccagcagccatcc

SEQ ID NO: 60490 - RNA, 23 nt, synthetic construct
  source 1..23: mol_type = other RNA
cgggcacacaggcaggctctggg

SEQ ID NO: 60491 - RNA, 23 nt, synthetic construct
  source 1..23: mol_type = other RNA
tggcctcgttgtgcacacagggg

SEQ ID NO: 60492 - RNA, 23 nt, synthetic construct
  source 1..23: mol_type = other RNA
gtggcctcgttgtgcacacaggg

SEQ ID NO: 60493 - RNA, 23 nt, synthetic construct
  source 1..23: mol_type = other RNA
ctgcacgcagatgcccatgtgtg

SEQ ID NO: 60494 - RNA, 23 nt, synthetic construct
  source 1..23: mol_type = other RNA
agcactgtggcggtgtgggtggt

SEQ ID NO: 60495 - RNA, 23 nt, synthetic construct
  source 1..23: mol_type = other RNA
agcactgtggcggtgtgggtggt

SEQ ID NO: 60496 - RNA, 23 nt, synthetic construct
  source 1..23: mol_type = other RNA
gcactgtggcggtgtgggtggtc

SEQ ID NO: 60497 - RNA, 23 nt, synthetic construct
  source 1..23: mol_type = other RNA
gttgaggaggggttggtggtgga

SEQ ID NO: 60498 - RNA, 23 nt, synthetic construct
  source 1..23: mol_type = other RNA
gttgaggaggggttggtggtgga

SEQ ID NO: 60499 - RNA, 23 nt, synthetic construct
  source 1..23: mol_type = other RNA
gcactgtggcggtgtgggtggtc

SEQ ID NO: 60500 - RNA, 23 nt, synthetic construct
  source 1..23: mol_type = other RNA
gttgaggaggggttggtggtgga

SEQ ID NO: 60501 - RNA, 23 nt, synthetic construct
  source 1..23: mol_type = other RNA
gttgaggaggggttggtggtgga

SEQ ID NO: 60502 - RNA, 23 nt, synthetic construct
  source 1..23: mol_type = other RNA
gttgaggaggggttggtggtgga

SEQ ID NO: 60503 - RNA, 23 nt, synthetic construct
  source 1..23: mol_type = other RNA
cacgcgtcgttcacgcaggcctc

SEQ ID NO: 60504 - RNA, 23 nt, synthetic construct
  source 1..23: mol_type = other RNA
cgttcacgcaggcctcgtagtac

SEQ ID NO: 60505 - RNA, 23 nt, synthetic construct
  source 1..23: mol_type = other RNA
tggaggtgtggacagtctctgga

SEQ ID NO: 60506 - RNA, 23 nt, synthetic construct
  source 1..23: mol_type = other RNA
tggaggtgtggacagtctctgga

SEQ ID NO: 60507 - RNA, 23 nt, synthetic construct
  source 1..23: mol_type = other RNA
acacgcgtcgttcacgcaggcct

SEQ ID NO: 60508 - RNA, 23 nt, synthetic construct
  source 1..23: mol_type = other RNA
acgcgtcgttcacgcaggcctcg

SEQ ID NO: 60509 - RNA, 23 nt, synthetic construct
  source 1..23: mol_type = other RNA
gtggccatccccgtaggccacgc

SEQ ID NO: 60510 - RNA, 23 nt, synthetic construct
  source 1..23: mol_type = other RNA
gctccgtgggcccatccaacttc

SEQ ID NO: 60511 - RNA, 23 nt, synthetic construct
  source 1..23: mol_type = other RNA
ctggttctggttgaagttcccac

SEQ ID NO: 60512 - RNA, 23 nt, synthetic construct
  source 1..23: mol_type = other RNA
aggacagcgcggcgcacaggcag

SEQ ID NO: 60513 - RNA, 23 nt, synthetic construct
  source 1..23: mol_type = other RNA
acgcaggcctcgtagtacttggt

SEQ ID NO: 60514 - RNA, 23 nt, synthetic construct
  source 1..23: mol_type = other RNA
gttcacgcaggcctcgtagtact

SEQ ID NO: 60515 - RNA, 23 nt, synthetic construct
  source 1..23: mol_type = other RNA
gtccaggctgcattccacgacct

SEQ ID NO: 60516 - RNA, 23 nt, synthetic construct
  source 1..23: mol_type = other RNA
gtccaggctgcattccacgacct

SEQ ID NO: 60517 - RNA, 23 nt, synthetic construct
  source 1..23: mol_type = other RNA
gtccaggctgcattccacgacct

SEQ ID NO: 60518 - RNA, 23 nt, synthetic construct
  source 1..23: mol_type = other RNA
gtccaggctgcattccacgacct

SEQ ID NO: 60519 - RNA, 23 nt, synthetic construct
  source 1..23: mol_type = other RNA
tgctccgtgggcccatccaactt

SEQ ID NO: 60520 - RNA, 23 nt, synthetic construct
  source 1..23: mol_type = other RNA
acagggtgatgttggctgccgac

SEQ ID NO: 60521 - RNA, 23 nt, synthetic construct
  source 1..23: mol_type = other RNA
gaagttcccacacaggccgcaca

SEQ ID NO: 60522 - RNA, 23 nt, synthetic construct
  source 1..23: mol_type = other RNA
tgaagttcccacacaggccgcac

SEQ ID NO: 60523 - RNA, 23 nt, synthetic construct
  source 1..23: mol_type = other RNA
cagcgcggcgcacaggcagtcct

SEQ ID NO: 60524 - RNA, 23 nt, synthetic construct
  source 1..23: mol_type = other RNA
acagcgcggcgcacaggcagtcc

SEQ ID NO: 60525 - RNA, 23 nt, synthetic construct
  source 1..23: mol_type = other RNA
gacagcgcggcgcacaggcagtc

SEQ ID NO: 60526 - RNA, 23 nt, synthetic construct
  source 1..23: mol_type = other RNA
gaggacagcgcggcgcacaggca

SEQ ID NO: 60527 - RNA, 23 nt, synthetic construct
  source 1..23: mol_type = other RNA
aggaggacagcgcggcgcacagg

SEQ ID NO: 60528 - RNA, 23 nt, synthetic construct
  source 1..23: mol_type = other RNA
ttggcggcacaggcgtgcacata

SEQ ID NO: 60529 - RNA, 23 nt, synthetic construct
  source 1..23: mol_type = other RNA
cttggcggcacaggcgtgcacat

SEQ ID NO: 60530 - RNA, 23 nt, synthetic construct
  source 1..23: mol_type = other RNA
cgcccttggcggcacaggcgtgc

SEQ ID NO: 60531 - RNA, 23 nt, synthetic construct
  source 1..23: mol_type = other RNA
ctccaggcttgtaggtggcctcg

SEQ ID NO: 60532 - RNA, 23 nt, synthetic construct
  source 1..23: mol_type = other RNA
tcgttcacgcaggcctcgtagta

SEQ ID NO: 60533 - RNA, 23 nt, synthetic construct
  source 1..23: mol_type = other RNA
gtcgttcacgcaggcctcgtagt

SEQ ID NO: 60534 - RNA, 23 nt, synthetic construct
  source 1..23: mol_type = other RNA
cgcgtcgttcacgcaggcctcgt

SEQ ID NO: 60535 - RNA, 23 nt, synthetic construct
  source 1..23: mol_type = other RNA
agtccacgtcaaaccactctgtc

SEQ ID NO: 60536 - RNA, 23 nt, synthetic construct
  source 1..23: mol_type = other RNA
aagtccacgtcaaaccactctgt

SEQ ID NO: 60537 - RNA, 23 nt, synthetic construct
  source 1..23: mol_type = other RNA
gaagtccacgtcaaaccactctg

SEQ ID NO: 60538 - RNA, 23 nt, synthetic construct
  source 1..23: mol_type = other RNA
tgctgaaaccgctgctcaccgga

SEQ ID NO: 60539 - RNA, 23 nt, synthetic construct
  source 1..23: mol_type = other RNA
ccagtgccgggcgtagttctcat

SEQ ID NO: 60540 - RNA, 23 nt, synthetic construct
  source 1..23: mol_type = other RNA
ttgcggaaggggttggccgtgca

SEQ ID NO: 60541 - RNA, 23 nt, synthetic construct
  source 1..23: mol_type = other RNA
gagcaccagtgccgggcgtagtt

SEQ ID NO: 60542 - RNA, 23 nt, synthetic construct
  source 1..23: mol_type = other RNA
gcagtcctcgctccgctcacagt

SEQ ID NO: 60543 - RNA, 23 nt, synthetic construct
  source 1..23: mol_type = other RNA
cgcggcgcacaggcagtcctcgc

SEQ ID NO: 60544 - RNA, 23 nt, synthetic construct
  source 1..23: mol_type = other RNA
gaggatgctgcactgcttctggg

SEQ ID NO: 60545 - RNA, 23 nt, synthetic construct
  source 1..23: mol_type = other RNA
actcacacttcggttgacagcgg

SEQ ID NO: 60546 - RNA, 23 nt, synthetic construct
  source 1..23: mol_type = other RNA
cacctccggttcctgcaggtgca

SEQ ID NO: 60547 - RNA, 23 nt, synthetic construct
  source 1..23: mol_type = other RNA
cactgttgggatcggtcaggcgc

SEQ ID NO: 60548 - RNA, 23 nt, synthetic construct
  source 1..23: mol_type = other RNA
ccagtgcggctgtaaggcagctc

SEQ ID NO: 60549 - RNA, 23 nt, synthetic construct
  source 1..23: mol_type = other RNA
ccgtgtccccgccgtccaggctg

SEQ ID NO: 60550 - RNA, 23 nt, synthetic construct
  source 1..23: mol_type = other RNA
tcctgtagttgtagcacatcttg

SEQ ID NO: 60551 - RNA, 23 nt, synthetic construct
  source 1..23: mol_type = other RNA
gtgtgctgaaacagcccacgtcc

SEQ ID NO: 60552 - RNA, 23 nt, synthetic construct
  source 1..23: mol_type = other RNA
ttgctgaaaccgctgctcaccgg

SEQ ID NO: 60553 - RNA, 23 nt, synthetic construct
  source 1..23: mol_type = other RNA
cagctgcgtgtagatggagttga

SEQ ID NO: 60554 - RNA, 23 nt, synthetic construct
  source 1..23: mol_type = other RNA
cctctggttgttggtgcaggtgc

SEQ ID NO: 60555 - RNA, 23 nt, synthetic construct
  source 1..23: mol_type = other RNA
ctgcccttgtagtcctggtgcag

SEQ ID NO: 60556 - RNA, 23 nt, synthetic construct
  source 1..23: mol_type = other RNA
tgctggtctcggcctgagaggtg

SEQ ID NO: 60557 - RNA, 23 nt, synthetic construct
  source 1..23: mol_type = other RNA
gcagcagaacacacggatttcat

SEQ ID NO: 60558 - RNA, 23 nt, synthetic construct
  source 1..23: mol_type = other RNA
gcagcagaacacacggatttcat

SEQ ID NO: 60559 - RNA, 23 nt, synthetic construct
  source 1..23: mol_type = other RNA
gcagcagaacacacggatttcat

SEQ ID NO: 60560 - RNA, 23 nt, synthetic construct
  source 1..23: mol_type = other RNA
gcagcagaacacacggatttcat

SEQ ID NO: 60561 - RNA, 23 nt, synthetic construct
  source 1..23: mol_type = other RNA
gccctgatcttatcgtaggactc

SEQ ID NO: 60562 - RNA, 23 nt, synthetic construct
  source 1..23: mol_type = other RNA
gggctcaggctggggaagacagt

SEQ ID NO: 60563 - RNA, 23 nt, synthetic construct
  source 1..23: mol_type = other RNA
ggctggtagtgccactcacagcc

SEQ ID NO: 60564 - RNA, 23 nt, synthetic construct
  source 1..23: mol_type = other RNA
gcagtgcccactggggttccggc

SEQ ID NO: 60565 - RNA, 23 nt, synthetic construct
  source 1..23: mol_type = other RNA
gatggctgtaaagctggtagctg

SEQ ID NO: 60566 - RNA, 23 nt, synthetic construct
  source 1..23: mol_type = other RNA
gatggctgtaaagctggtagctg

SEQ ID NO: 60567 - RNA, 23 nt, synthetic construct
  source 1..23: mol_type = other RNA
gatggctgtaaagctggtagctg

SEQ ID NO: 60568 - RNA, 23 nt, synthetic construct
  source 1..23: mol_type = other RNA
gcccttggcggcacaggcgtgca

SEQ ID NO: 60569 - RNA, 23 nt, synthetic construct
  source 1..23: mol_type = other RNA
cactggccctcggtgttgttgtg

SEQ ID NO: 60570 - RNA, 23 nt, synthetic construct
  source 1..23: mol_type = other RNA
cacgcaggcctcgtagtacttgg

SEQ ID NO: 60571 - RNA, 23 nt, synthetic construct
  source 1..23: mol_type = other RNA
actggccctcggtgttgttgtgg

SEQ ID NO: 60572 - RNA, 23 nt, synthetic construct
  source 1..23: mol_type = other RNA
aagttcccacacaggccgcacat

SEQ ID NO: 60573 - RNA, 23 nt, synthetic construct
  source 1..23: mol_type = other RNA
gtcctcgctccgctcacagttgc

SEQ ID NO: 60574 - RNA, 23 nt, synthetic construct
  source 1..23: mol_type = other RNA
cccttggcggcacaggcgtgcac

SEQ ID NO: 60575 - RNA, 23 nt, synthetic construct
  source 1..23: mol_type = other RNA
ccacgaagagcttgatggccttg

SEQ ID NO: 60576 - RNA, 23 nt, synthetic construct
  source 1..23: mol_type = other RNA
cagggctggtagtgccactcaca

SEQ ID NO: 60577 - RNA, 23 nt, synthetic construct
  source 1..23: mol_type = other RNA
gcactggccctcggtgttgttgt

SEQ ID NO: 60578 - RNA, 23 nt, synthetic construct
  source 1..23: mol_type = other RNA
agttcccacacaggccgcacatc

SEQ ID NO: 60579 - RNA, 23 nt, synthetic construct
  source 1..23: mol_type = other RNA
ggccttccaggtgttggcgaagg

SEQ ID NO: 60580 - RNA, 23 nt, synthetic construct
  source 1..23: mol_type = other RNA
cgctccgctcacagttgcaggtg

SEQ ID NO: 60581 - RNA, 23 nt, synthetic construct
  source 1..23: mol_type = other RNA
tcgctccgctcacagttgcaggt

SEQ ID NO: 60582 - RNA, 23 nt, synthetic construct
  source 1..23: mol_type = other RNA
ctcgctccgctcacagttgcagg

SEQ ID NO: 60583 - RNA, 23 nt, synthetic construct
  source 1..23: mol_type = other RNA
cctcgctccgctcacagttgcag

SEQ ID NO: 60584 - RNA, 23 nt, synthetic construct
  source 1..23: mol_type = other RNA
tcctcgctccgctcacagttgca

SEQ ID NO: 60585 - RNA, 23 nt, synthetic construct
  source 1..23: mol_type = other RNA
cagtcctcgctccgctcacagtt

SEQ ID NO: 60586 - RNA, 23 nt, synthetic construct
  source 1..23: mol_type = other RNA
ggcagtcctcgctccgctcacag

SEQ ID NO: 60587 - RNA, 23 nt, synthetic construct
  source 1..23: mol_type = other RNA
gcggcgcacaggcagtcctcgct

SEQ ID NO: 60588 - RNA, 23 nt, synthetic construct
  source 1..23: mol_type = other RNA
acgcccttggcggcacaggcgtg

SEQ ID NO: 60589 - RNA, 23 nt, synthetic construct
  source 1..23: mol_type = other RNA
tccacgaagagcttgatggcctt

SEQ ID NO: 60590 - RNA, 23 nt, synthetic construct
  source 1..23: mol_type = other RNA
gtggcaaagtcattgatggcatt

SEQ ID NO: 60591 - RNA, 23 nt, synthetic construct
  source 1..23: mol_type = other RNA
ggttggccgtgcaggggtccttg

SEQ ID NO: 60592 - RNA, 23 nt, synthetic construct
  source 1..23: mol_type = other RNA
ggggttggccgtgcaggggtcct

SEQ ID NO: 60593 - RNA, 23 nt, synthetic construct
  source 1..23: mol_type = other RNA
cttgcggaaggggttggccgtgc

SEQ ID NO: 60594 - RNA, 23 nt, synthetic construct
  source 1..23: mol_type = other RNA
gacttgcggaaggggttggccgt

SEQ ID NO: 60595 - RNA, 23 nt, synthetic construct
  source 1..23: mol_type = other RNA
caggacttgcggaaggggttggc

SEQ ID NO: 60596 - RNA, 23 nt, synthetic construct
  source 1..23: mol_type = other RNA
ttctgggcccaggacttgcggaa

SEQ ID NO: 60597 - RNA, 23 nt, synthetic construct
  source 1..23: mol_type = other RNA
agccacagccgtgcagaaacact

SEQ ID NO: 60598 - RNA, 23 nt, synthetic construct
  source 1..23: mol_type = other RNA
gcagggctggtagtgccactcac

SEQ ID NO: 60599 - RNA, 23 nt, synthetic construct
  source 1..23: mol_type = other RNA
gccccgcagggctggtagtgcca

SEQ ID NO: 60600 - RNA, 23 nt, synthetic construct
  source 1..23: mol_type = other RNA
gtgcagttctccagggtccaggt

SEQ ID NO: 60601 - RNA, 23 nt, synthetic construct
  source 1..23: mol_type = other RNA
ccaccgtgcagttctccagggtc

SEQ ID NO: 60602 - RNA, 23 nt, synthetic construct
  source 1..23: mol_type = other RNA
tggccctcggtgttgttgtggaa

SEQ ID NO: 60603 - RNA, 23 nt, synthetic construct
  source 1..23: mol_type = other RNA
ctggccctcggtgttgttgtgga

SEQ ID NO: 60604 - RNA, 23 nt, synthetic construct
  source 1..23: mol_type = other RNA
cgcactggccctcggtgttgttg

SEQ ID NO: 60605 - RNA, 23 nt, synthetic construct
  source 1..23: mol_type = other RNA
ccgcactggccctcggtgttgtt

SEQ ID NO: 60606 - RNA, 23 nt, synthetic construct
  source 1..23: mol_type = other RNA
gccgcactggccctcggtgttgt

SEQ ID NO: 60607 - RNA, 23 nt, synthetic construct
  source 1..23: mol_type = other RNA
ggtgccgcactggccctcggtgt

SEQ ID NO: 60608 - RNA, 23 nt, synthetic construct
  source 1..23: mol_type = other RNA
cctggctcagcatcagatcacag

SEQ ID NO: 60609 - RNA, 23 nt, synthetic construct
  source 1..23: mol_type = other RNA
tcttgtactcaaagccctgggga

SEQ ID NO: 60610 - RNA, 23 nt, synthetic construct
  source 1..23: mol_type = other RNA
cgtcagcctggttctggttgaag

SEQ ID NO: 60611 - RNA, 23 nt, synthetic construct
  source 1..23: mol_type = other RNA
tgtcctctccgttccacaggaat

SEQ ID NO: 60612 - RNA, 23 nt, synthetic construct
  source 1..23: mol_type = other RNA
agcgcggcgcacaggcagtcctc

SEQ ID NO: 60613 - RNA, 23 nt, synthetic construct
  source 1..23: mol_type = other RNA
gccagtcactgcacactccccgg

SEQ ID NO: 60614 - RNA, 23 nt, synthetic construct
  source 1..23: mol_type = other RNA
ggtgcagacgccgtccctccagt

SEQ ID NO: 60615 - RNA, 23 nt, synthetic construct
  source 1..23: mol_type = other RNA
ctgggcaggatgcaggctgtggg

SEQ ID NO: 60616 - RNA, 23 nt, synthetic construct
  source 1..23: mol_type = other RNA
ataggaggacagcgcggcgcaca

SEQ ID NO: 60617 - RNA, 23 nt, synthetic construct
  source 1..23: mol_type = other RNA
gaccaggaagatccccatgtagc

SEQ ID NO: 60618 - RNA, 23 nt, synthetic construct
  source 1..23: mol_type = other RNA
tgaccaggaagatccccatgtag

SEQ ID NO: 60619 - RNA, 23 nt, synthetic construct
  source 1..23: mol_type = other RNA
agcagccacactgggccacgcac

SEQ ID NO: 60620 - RNA, 23 nt, synthetic construct
  source 1..23: mol_type = other RNA
gcagcagccggttttcctgaggc

SEQ ID NO: 60621 - RNA, 23 nt, synthetic construct
  source 1..23: mol_type = other RNA
tggaagaggctgtagggcagccg

SEQ ID NO: 60622 - RNA, 23 nt, synthetic construct
  source 1..23: mol_type = other RNA
tggctcagcatcagatcacagag

SEQ ID NO: 60623 - RNA, 23 nt, synthetic construct
  source 1..23: mol_type = other RNA
agaccctgcccttgtagtcctgg

SEQ ID NO: 60624 - RNA, 23 nt, synthetic construct
  source 1..23: mol_type = other RNA
tctgcaggttcccaaactggagc

SEQ ID NO: 60625 - RNA, 23 nt, synthetic construct
  source 1..23: mol_type = other RNA
gctccgctcacagttgcaggtgt

SEQ ID NO: 60626 - RNA, 23 nt, synthetic construct
  source 1..23: mol_type = other RNA
ctgggcgtaggcagccacagccg

SEQ ID NO: 60627 - RNA, 23 nt, synthetic construct
  source 1..23: mol_type = other RNA
cactctgtccactgacaccgggg

SEQ ID NO: 60628 - RNA, 23 nt, synthetic construct
  source 1..23: mol_type = other RNA
caggagccagcacggtgccgtga

SEQ ID NO: 60629 - RNA, 23 nt, synthetic construct
  source 1..23: mol_type = other RNA
gctggaccagcggcagacctcgc

SEQ ID NO: 60630 - RNA, 23 nt, synthetic construct
  source 1..23: mol_type = other RNA
ctggcccaactcccgcaggggga

SEQ ID NO: 60631 - RNA, 23 nt, synthetic construct
  source 1..23: mol_type = other RNA
ctggcccaactcccgcaggggga

SEQ ID NO: 60632 - RNA, 23 nt, synthetic construct
  source 1..23: mol_type = other RNA
ctggcccaactcccgcaggggga

SEQ ID NO: 60633 - RNA, 23 nt, synthetic construct
  source 1..23: mol_type = other RNA
gaaggtgaatggcgttgtggctg

SEQ ID NO: 60634 - RNA, 23 nt, synthetic construct
  source 1..23: mol_type = other RNA
cagcaccgtgcctggggggcaga

SEQ ID NO: 60635 - RNA, 23 nt, synthetic construct
  source 1..23: mol_type = other RNA
tcacgcaggcctcgtagtacttg

SEQ ID NO: 60636 - RNA, 23 nt, synthetic construct
  source 1..23: mol_type = other RNA
tgggcccaggacttgcggaaggg

SEQ ID NO: 60637 - RNA, 23 nt, synthetic construct
  source 1..23: mol_type = other RNA
gggctggtagtgccactcacagc

SEQ ID NO: 60638 - RNA, 23 nt, synthetic construct
  source 1..23: mol_type = other RNA
agggctggtagtgccactcacag

SEQ ID NO: 60639 - RNA, 23 nt, synthetic construct
  source 1..23: mol_type = other RNA
tgccgcactggccctcggtgttg

SEQ ID NO: 60640 - RNA, 23 nt, synthetic construct
  source 1..23: mol_type = other RNA
gtgccgcactggccctcggtgtt

SEQ ID NO: 60641 - RNA, 23 nt, synthetic construct
  source 1..23: mol_type = other RNA
gggcagaagcagccctccgccat

SEQ ID NO: 60642 - RNA, 23 nt, synthetic construct
  source 1..23: mol_type = other RNA
cttgtactcaaagccctggggac

SEQ ID NO: 60643 - RNA, 23 nt, synthetic construct
  source 1..23: mol_type = other RNA
gggagtagagaagtgggagctgg

SEQ ID NO: 60644 - RNA, 23 nt, synthetic construct
  source 1..23: mol_type = other RNA
atttggtcaaacaggatcaggcc

SEQ ID NO: 60645 - RNA, 23 nt, synthetic construct
  source 1..23: mol_type = other RNA
ttcatagttgaagcacatcttga

SEQ ID NO: 60646 - RNA, 23 nt, synthetic construct
  source 1..23: mol_type = other RNA
ttcatagttgaagcacatcttga

SEQ ID NO: 60647 - RNA, 23 nt, synthetic construct
  source 1..23: mol_type = other RNA
ttcatagttgaagcacatcttga

SEQ ID NO: 60648 - RNA, 23 nt, synthetic construct
  source 1..23: mol_type = other RNA
ttcatagttgaagcacatcttga

SEQ ID NO: 60649 - RNA, 23 nt, synthetic construct
  source 1..23: mol_type = other RNA
ctccggaggcactcggccccagg

SEQ ID NO: 60650 - RNA, 23 nt, synthetic construct
  source 1..23: mol_type = other RNA
tgcacgcagatgcccatgtgtgc

SEQ ID NO: 60651 - RNA, 23 nt, synthetic construct
  source 1..23: mol_type = other RNA
tggagacagtcgtccctctggtt

SEQ ID NO: 60652 - RNA, 23 nt, synthetic construct
  source 1..23: mol_type = other RNA
caaggtgggccacaggctctccc

SEQ ID NO: 60653 - RNA, 23 nt, synthetic construct
  source 1..23: mol_type = other RNA
ctccagtgcgtcccccaccacgg

SEQ ID NO: 60654 - RNA, 23 nt, synthetic construct
  source 1..23: mol_type = other RNA
gtcacagggctggctcgggtccg

SEQ ID NO: 60655 - RNA, 23 nt, synthetic construct
  source 1..23: mol_type = other RNA
gaaggtgggacagcagtcgccct

SEQ ID NO: 60656 - RNA, 23 nt, synthetic construct
  source 1..23: mol_type = other RNA
gggcagtggccgtagttgcagca

SEQ ID NO: 60657 - RNA, 23 nt, synthetic construct
  source 1..23: mol_type = other RNA
gggcagtggccgtagttgcagca

SEQ ID NO: 60658 - RNA, 23 nt, synthetic construct
  source 1..23: mol_type = other RNA
gggcagtggccgtagttgcagca

SEQ ID NO: 60659 - RNA, 23 nt, synthetic construct
  source 1..23: mol_type = other RNA
gggcagtggccgtagttgcagca

SEQ ID NO: 60660 - RNA, 23 nt, synthetic construct
  source 1..23: mol_type = other RNA
ctcatagtggaagtcacagggct

SEQ ID NO: 60661 - RNA, 23 nt, synthetic construct
  source 1..23: mol_type = other RNA
gaaggtcttgtagtggaagtcac

SEQ ID NO: 60662 - RNA, 23 nt, synthetic construct
  source 1..23: mol_type = other RNA
tcgaaggtcttgtagtggaagtc

SEQ ID NO: 60663 - RNA, 23 nt, synthetic construct
  source 1..23: mol_type = other RNA
gtcgaaggtcttgtagtggaagt

SEQ ID NO: 60664 - RNA, 23 nt, synthetic construct
  source 1..23: mol_type = other RNA
tctcattctccacactgagggag

SEQ ID NO: 60665 - RNA, 23 nt, synthetic construct
  source 1..23: mol_type = other RNA
gggcagtctctggagtggaggag

SEQ ID NO: 60666 - RNA, 23 nt, synthetic construct
  source 1..23: mol_type = other RNA
gggcagtctctggagtggaggag

SEQ ID NO: 60667 - RNA, 23 nt, synthetic construct
  source 1..23: mol_type = other RNA
gatgacaacacgggtgaccacag

SEQ ID NO: 60668 - RNA, 23 nt, synthetic construct
  source 1..23: mol_type = other RNA
gtagatgacttccccgggcgaga

SEQ ID NO: 60669 - RNA, 23 nt, synthetic construct
  source 1..23: mol_type = other RNA
caggtagtattgttgcaggcatc

SEQ ID NO: 60670 - RNA, 23 nt, synthetic construct
  source 1..23: mol_type = other RNA
gaacaaagctcacgcgccgggtg

SEQ ID NO: 60671 - RNA, 23 nt, synthetic construct
  source 1..23: mol_type = other RNA
agagaacccgcagctcgtagtcg

SEQ ID NO: 60672 - RNA, 23 nt, synthetic construct
  source 1..23: mol_type = other RNA
ggcatccaccacgtaggcgtagc

SEQ ID NO: 60673 - RNA, 23 nt, synthetic construct
  source 1..23: mol_type = other RNA
actggctggccatcgggcgtgag

SEQ ID NO: 60674 - RNA, 23 nt, synthetic construct
  source 1..23: mol_type = other RNA
acgtcgccgtcgaaggtcttgta

SEQ ID NO: 60675 - RNA, 23 nt, synthetic construct
  source 1..23: mol_type = other RNA
tcgccgtcgaaggtcttgtagtg

SEQ ID NO: 60676 - RNA, 23 nt, synthetic construct
  source 1..23: mol_type = other RNA
agacgtcgccgtcgaaggtcttg

SEQ ID NO: 60677 - RNA, 23 nt, synthetic construct
  source 1..23: mol_type = other RNA
gggaagcggaagacgtcgccgtc

SEQ ID NO: 60678 - RNA, 23 nt, synthetic construct
  source 1..23: mol_type = other RNA
tgacgttggccacaggctttggg

SEQ ID NO: 60679 - RNA, 23 nt, synthetic construct
  source 1..23: mol_type = other RNA
agccatcctttctgctgtcgggg

SEQ ID NO: 60680 - RNA, 23 nt, synthetic construct
  source 1..23: mol_type = other RNA
cttggccatgtccttgcaactgg

SEQ ID NO: 60681 - RNA, 23 nt, synthetic construct
  source 1..23: mol_type = other RNA
tagatgacttccccgggcgagaa

SEQ ID NO: 60682 - RNA, 23 nt, synthetic construct
  source 1..23: mol_type = other RNA
ggggcagcaggggttctcggccc

SEQ ID NO: 60683 - RNA, 23 nt, synthetic construct
  source 1..23: mol_type = other RNA
cggggcagcaggggttctcggcc

SEQ ID NO: 60684 - RNA, 23 nt, synthetic construct
  source 1..23: mol_type = other RNA
gggcgcaggcggccaggtacgca

SEQ ID NO: 60685 - RNA, 23 nt, synthetic construct
  source 1..23: mol_type = other RNA
aggggcagtcctcctcggcaatg

SEQ ID NO: 60686 - RNA, 23 nt, synthetic construct
  source 1..23: mol_type = other RNA
cccgtgggtggtgttgtccccac

SEQ ID NO: 60687 - RNA, 23 nt, synthetic construct
  source 1..23: mol_type = other RNA
gcggcgaaggtggggccgtggag

SEQ ID NO: 60688 - RNA, 23 nt, synthetic construct
  source 1..23: mol_type = other RNA
acttccccacctgctcacggttc

SEQ ID NO: 60689 - RNA, 23 nt, synthetic construct
  source 1..23: mol_type = other RNA
acttccccacctgctcacggttc

SEQ ID NO: 60690 - RNA, 23 nt, synthetic construct
  source 1..23: mol_type = other RNA
acttccccacctgctcacggttc

SEQ ID NO: 60691 - RNA, 23 nt, synthetic construct
  source 1..23: mol_type = other RNA
acttccccacctgctcacggttc

SEQ ID NO: 60692 - RNA, 23 nt, synthetic construct
  source 1..23: mol_type = other RNA
ggtccacgtggtccacagggtgg

SEQ ID NO: 60693 - RNA, 23 nt, synthetic construct
  source 1..23: mol_type = other RNA
gtcaccactttgggggtgtgagc

SEQ ID NO: 60694 - RNA, 23 nt, synthetic construct
  source 1..23: mol_type = other RNA
gcatagtggccatggtggtcacc

SEQ ID NO: 60695 - RNA, 23 nt, synthetic construct
  source 1..23: mol_type = other RNA
ctgcaggggtgcgggtggtcccc

SEQ ID NO: 60696 - RNA, 23 nt, synthetic construct
  source 1..23: mol_type = other RNA
tgtagatgacttccccgggcgag

SEQ ID NO: 60697 - RNA, 23 nt, synthetic construct
  source 1..23: mol_type = other RNA
ttgtagatgacttccccgggcga

SEQ ID NO: 60698 - RNA, 23 nt, synthetic construct
  source 1..23: mol_type = other RNA
attgtagatgacttccccgggcg

SEQ ID NO: 60699 - RNA, 23 nt, synthetic construct
  source 1..23: mol_type = other RNA
tggacacatctgggcaggatgca

SEQ ID NO: 60700 - RNA, 23 nt, synthetic construct
  source 1..23: mol_type = other RNA
cggggcaggagccctcgcagaag

SEQ ID NO: 60701 - RNA, 23 nt, synthetic construct
  source 1..23: mol_type = other RNA
gttgttcagacttggggtagtcc

SEQ ID NO: 60702 - RNA, 23 nt, synthetic construct
  source 1..23: mol_type = other RNA
aggcagttctcgttgtccgtcag

SEQ ID NO: 60703 - RNA, 23 nt, synthetic construct
  source 1..23: mol_type = other RNA
ctgctgagtacttggacgctccg

SEQ ID NO: 60704 - RNA, 23 nt, synthetic construct
  source 1..23: mol_type = other RNA
ctgacctggccgttgcgacctca

SEQ ID NO: 60705 - RNA, 23 nt, synthetic construct
  source 1..23: mol_type = other RNA
aggggcactcctgggcgggcaca

SEQ ID NO: 60706 - RNA, 23 nt, synthetic construct
  source 1..23: mol_type = other RNA
tggcaggcctgggcgtaggcagc

SEQ ID NO: 60707 - RNA, 23 nt, synthetic construct
  source 1..23: mol_type = other RNA
gccttcaaagctgtagcgatcgc

SEQ ID NO: 60708 - RNA, 23 nt, synthetic construct
  source 1..23: mol_type = other RNA
ctgaccttgatgtagtccccgct

SEQ ID NO: 60709 - RNA, 23 nt, synthetic construct
  source 1..23: mol_type = other RNA
cattgcaccgttgggtcctgggt

SEQ ID NO: 60710 - RNA, 23 nt, synthetic construct
  source 1..23: mol_type = other RNA
cagcagccggttttcctgaggct

SEQ ID NO: 60711 - RNA, 23 nt, synthetic construct
  source 1..23: mol_type = other RNA
gctggctcgggtccgacactttg

SEQ ID NO: 60712 - RNA, 23 nt, synthetic construct
  source 1..23: mol_type = other RNA
atccagtggttgcggtcgtagtg

SEQ ID NO: 60713 - RNA, 23 nt, synthetic construct
  source 1..23: mol_type = other RNA
aggaatgtccacacgcatggtgg

SEQ ID NO: 60714 - RNA, 23 nt, synthetic construct
  source 1..23: mol_type = other RNA
gtgtgctagaggagggtgttgcc

SEQ ID NO: 60715 - RNA, 23 nt, synthetic construct
  source 1..23: mol_type = other RNA
ctgtgctgggacggtccacgtgg

SEQ ID NO: 60716 - RNA, 23 nt, synthetic construct
  source 1..23: mol_type = other RNA
aatggcagccggctcggtcggtc

SEQ ID NO: 60717 - RNA, 23 nt, synthetic construct
  source 1..23: mol_type = other RNA
gcccctgcagtggtcgctgatgc

SEQ ID NO: 60718 - RNA, 23 nt, synthetic construct
  source 1..23: mol_type = other RNA
tcccctgcagtggtcgtcactgc

SEQ ID NO: 60719 - RNA, 23 nt, synthetic construct
  source 1..23: mol_type = other RNA
gaaggtgtaagaggtgccgtcaa

SEQ ID NO: 60720 - RNA, 23 nt, synthetic construct
  source 1..23: mol_type = other RNA
aagctgctgtcggcacatttctt

SEQ ID NO: 60721 - RNA, 23 nt, synthetic construct
  source 1..23: mol_type = other RNA
gcgccctcgtcgtgcaccacctc

SEQ ID NO: 60722 - RNA, 23 nt, synthetic construct
  source 1..23: mol_type = other RNA
ggacccttgcaccgacgtcatag

SEQ ID NO: 60723 - RNA, 23 nt, synthetic construct
  source 1..23: mol_type = other RNA
gggctcattgtcgtctctgtcct

SEQ ID NO: 60724 - RNA, 23 nt, synthetic construct
  source 1..23: mol_type = other RNA
gggacggtccacgtggtccacag

SEQ ID NO: 60725 - RNA, 23 nt, synthetic construct
  source 1..23: mol_type = other RNA
catcctttctgctgtcggggacc

SEQ ID NO: 60726 - RNA, 23 nt, synthetic construct
  source 1..23: mol_type = other RNA
catggcttgtacactttggtggg

SEQ ID NO: 60727 - RNA, 23 nt, synthetic construct
  source 1..23: mol_type = other RNA
agaggtacacggtgcagttgtcc

SEQ ID NO: 60728 - RNA, 23 nt, synthetic construct
  source 1..23: mol_type = other RNA
ctgcattctcccagctcggctcc

SEQ ID NO: 60729 - RNA, 23 nt, synthetic construct
  source 1..23: mol_type = other RNA
aggacggagccgttggacgcctc

SEQ ID NO: 60730 - RNA, 23 nt, synthetic construct
  source 1..23: mol_type = other RNA
gagctgcgcgcgctgggggttgg

SEQ ID NO: 60731 - RNA, 23 nt, synthetic construct
  source 1..23: mol_type = other RNA
tgggtctcgatgaccaggaagat

SEQ ID NO: 60732 - RNA, 23 nt, synthetic construct
  source 1..23: mol_type = other RNA
tctcaaagtctccgcctcccagg

SEQ ID NO: 60733 - RNA, 23 nt, synthetic construct
  source 1..23: mol_type = other RNA
cgtgacagagcgggggactctgt

SEQ ID NO: 60734 - RNA, 23 nt, synthetic construct
  source 1..23: mol_type = other RNA
gctggacccagtctgcgaggtga

SEQ ID NO: 60735 - RNA, 23 nt, synthetic construct
  source 1..23: mol_type = other RNA
cgagggggtgaccgtcacggggc

SEQ ID NO: 60736 - RNA, 23 nt, synthetic construct
  source 1..23: mol_type = other RNA
gcagcagaggacccggatcctgt

SEQ ID NO: 60737 - RNA, 23 nt, synthetic construct
  source 1..23: mol_type = other RNA
tgtcagtccttctgagagggtgg

SEQ ID NO: 60738 - RNA, 23 nt, synthetic construct
  source 1..23: mol_type = other RNA
gctcacatgtggggtgccagcag

SEQ ID NO: 60739 - RNA, 23 nt, synthetic construct
  source 1..23: mol_type = other RNA
ggaggggtggattgtggacatgg

SEQ ID NO: 60740 - RNA, 23 nt, synthetic construct
  source 1..23: mol_type = other RNA
gtggcccttgtcgtggtggcctt

SEQ ID NO: 60741 - RNA, 23 nt, synthetic construct
  source 1..23: mol_type = other RNA
gctcacatgtggggtgccagcag

SEQ ID NO: 60742 - RNA, 23 nt, synthetic construct
  source 1..23: mol_type = other RNA
ggaggggtggattgtggacatgg

SEQ ID NO: 60743 - RNA, 23 nt, synthetic construct
  source 1..23: mol_type = other RNA
gtggcccttgtcgtggtggcctt

SEQ ID NO: 60744 - RNA, 23 nt, synthetic construct
  source 1..23: mol_type = other RNA
gctcacatgtggggtgccagcag

SEQ ID NO: 60745 - RNA, 23 nt, synthetic construct
  source 1..23: mol_type = other RNA
ggaattggtggcccttgtcatgg

SEQ ID NO: 60746 - RNA, 23 nt, synthetic construct
  source 1..23: mol_type = other RNA
acagtgctgattgcacactgcgt

SEQ ID NO: 60747 - RNA, 23 nt, synthetic construct
  source 1..23: mol_type = other RNA
tcacagtgctgattgcacactgc

SEQ ID NO: 60748 - RNA, 23 nt, synthetic construct
  source 1..23: mol_type = other RNA
ggaggggatggctgtaaagctgg

SEQ ID NO: 60749 - RNA, 23 nt, synthetic construct
  source 1..23: mol_type = other RNA
ggaggggatggctgtaaagctgg

SEQ ID NO: 60750 - RNA, 23 nt, synthetic construct
  source 1..23: mol_type = other RNA
ggaggggatggctgtaaagctgg

SEQ ID NO: 60751 - RNA, 23 nt, synthetic construct
  source 1..23: mol_type = other RNA
ccagcaggacgacacggttgtca

SEQ ID NO: 60752 - RNA, 23 nt, synthetic construct
  source 1..23: mol_type = other RNA
ctttcaggcagttctcgttgtcc

SEQ ID NO: 60753 - RNA, 23 nt, synthetic construct
  source 1..23: mol_type = other RNA
cacccgtacatgaacacacggcg

SEQ ID NO: 60754 - RNA, 23 nt, synthetic construct
  source 1..23: mol_type = other RNA
ctgtgcgcaccgtgtggggactg

SEQ ID NO: 60755 - RNA, 23 nt, synthetic construct
  source 1..23: mol_type = other RNA
ctcacatgtggggtgccagcagt

SEQ ID NO: 60756 - RNA, 23 nt, synthetic construct
  source 1..23: mol_type = other RNA
ctgtgcgcaccgtgtggggactg

SEQ ID NO: 60757 - RNA, 23 nt, synthetic construct
  source 1..23: mol_type = other RNA
ctgtgcgcaccgtgtggggactg

SEQ ID NO: 60758 - RNA, 23 nt, synthetic construct
  source 1..23: mol_type = other RNA
ctcacatgtggggtgccagcagt

SEQ ID NO: 60759 - RNA, 23 nt, synthetic construct
  source 1..23: mol_type = other RNA
ctgtgcgcaccgtgtggggactg

SEQ ID NO: 60760 - RNA, 23 nt, synthetic construct
  source 1..23: mol_type = other RNA
ctcacatgtggggtgccagcagt

SEQ ID NO: 60761 - RNA, 23 nt, synthetic construct
  source 1..23: mol_type = other RNA
cggagagggatggcattgtcaca

SEQ ID NO: 60762 - RNA, 23 nt, synthetic construct
  source 1..23: mol_type = other RNA
gctttgggtccagcaggacgaca

SEQ ID NO: 60763 - RNA, 23 nt, synthetic construct
  source 1..23: mol_type = other RNA
ggcatcctcctgacattgcaccg

SEQ ID NO: 60764 - RNA, 23 nt, synthetic construct
  source 1..23: mol_type = other RNA
ctggcccaactcccccaggggga

SEQ ID NO: 60765 - RNA, 23 nt, synthetic construct
  source 1..23: mol_type = other RNA
aaaggtggaatagtgggagccgc

SEQ ID NO: 60766 - RNA, 23 nt, synthetic construct
  source 1..23: mol_type = other RNA
caggagcacggagcgcggggtgc

SEQ ID NO: 60767 - RNA, 23 nt, synthetic construct
  source 1..23: mol_type = other RNA
cggcagtgctcagagaacacgta

SEQ ID NO: 60768 - RNA, 23 nt, synthetic construct
  source 1..23: mol_type = other RNA
ctccagtcgctgagctgtacgcc

SEQ ID NO: 60769 - RNA, 23 nt, synthetic construct
  source 1..23: mol_type = other RNA
actcccatccgacaccagccccg

SEQ ID NO: 60770 - RNA, 23 nt, synthetic construct
  source 1..23: mol_type = other RNA
gcagcagggtcgaggtgcgggtc

SEQ ID NO: 60771 - RNA, 23 nt, synthetic construct
  source 1..23: mol_type = other RNA
acctgctcacggttcctgcagac

SEQ ID NO: 60772 - RNA, 23 nt, synthetic construct
  source 1..23: mol_type = other RNA
gcagcagggtcgaggtgcgggtc

SEQ ID NO: 60773 - RNA, 23 nt, synthetic construct
  source 1..23: mol_type = other RNA
acctgctcacggttcctgcagac

SEQ ID NO: 60774 - RNA, 23 nt, synthetic construct
  source 1..23: mol_type = other RNA
gcagcagggtcgaggtgcgggtc

SEQ ID NO: 60775 - RNA, 23 nt, synthetic construct
  source 1..23: mol_type = other RNA
acctgctcacggttcctgcagac

SEQ ID NO: 60776 - RNA, 23 nt, synthetic construct
  source 1..23: mol_type = other RNA
gcagcagggtcgaggtgcgggtc

SEQ ID NO: 60777 - RNA, 23 nt, synthetic construct
  source 1..23: mol_type = other RNA
acctgctcacggttcctgcagac

SEQ ID NO: 60778 - RNA, 23 nt, synthetic construct
  source 1..23: mol_type = other RNA
aggacgggatggccgtggatcca

SEQ ID NO: 60779 - RNA, 23 nt, synthetic construct
  source 1..23: mol_type = other RNA
ccagcagttgcccgggtggagga

SEQ ID NO: 60780 - RNA, 23 nt, synthetic construct
  source 1..23: mol_type = other RNA
cggcagtggttccgtcccgctgg

SEQ ID NO: 60781 - RNA, 23 nt, synthetic construct
  source 1..23: mol_type = other RNA
cctcacagaggtacacggtgcag

SEQ ID NO: 60782 - RNA, 23 nt, synthetic construct
  source 1..23: mol_type = other RNA
gcagtgctcagagaacacgtagt

SEQ ID NO: 60783 - RNA, 23 nt, synthetic construct
  source 1..23: mol_type = other RNA
cctcaaagctgttcctggcattg

SEQ ID NO: 60784 - RNA, 23 nt, synthetic construct
  source 1..23: mol_type = other RNA
gtccagttggggaagctctcggc

SEQ ID NO: 60785 - RNA, 23 nt, synthetic construct
  source 1..23: mol_type = other RNA
cctggactggaggagggagtggc

SEQ ID NO: 60786 - RNA, 23 nt, synthetic construct
  source 1..23: mol_type = other RNA
aggaagaggggatgggtgtaacg

SEQ ID NO: 60787 - RNA, 23 nt, synthetic construct
  source 1..23: mol_type = other RNA
gctcacagacggcccctccggcc

SEQ ID NO: 60788 - RNA, 23 nt, synthetic construct
  source 1..23: mol_type = other RNA
gtggccccggttgtggtggccgt

SEQ ID NO: 60789 - RNA, 23 nt, synthetic construct
  source 1..23: mol_type = other RNA
gctcacagacggcccctccggcc

SEQ ID NO: 60790 - RNA, 23 nt, synthetic construct
  source 1..23: mol_type = other RNA
cctggactggaggagggagtggc

SEQ ID NO: 60791 - RNA, 23 nt, synthetic construct
  source 1..23: mol_type = other RNA
gggctcacagcccgtggtcacca

SEQ ID NO: 60792 - RNA, 23 nt, synthetic construct
  source 1..23: mol_type = other RNA
ctcacagactgcccctccggccg

SEQ ID NO: 60793 - RNA, 23 nt, synthetic construct
  source 1..23: mol_type = other RNA
gggctcacagcccgtggtcacca

SEQ ID NO: 60794 - RNA, 23 nt, synthetic construct
  source 1..23: mol_type = other RNA
gctcacagacggcccctccggcc

SEQ ID NO: 60795 - RNA, 23 nt, synthetic construct
  source 1..23: mol_type = other RNA
cctggactggaggagggagtggc

SEQ ID NO: 60796 - RNA, 23 nt, synthetic construct
  source 1..23: mol_type = other RNA
tcagtgctggaagggcagttgca

SEQ ID NO: 60797 - RNA, 23 nt, synthetic construct
  source 1..23: mol_type = other RNA
gtggccccggttgtggtggccgt

SEQ ID NO: 60798 - RNA, 23 nt, synthetic construct
  source 1..23: mol_type = other RNA
gctctggcagggcacctcaaggc

SEQ ID NO: 60799 - RNA, 23 nt, synthetic construct
  source 1..23: mol_type = other RNA
caggagccctcgcagaaggtgat

SEQ ID NO: 60800 - RNA, 23 nt, synthetic construct
  source 1..23: mol_type = other RNA
gcaggtgtcaaacatgcagttcg

SEQ ID NO: 60801 - RNA, 23 nt, synthetic construct
  source 1..23: mol_type = other RNA
tgtcaaacatgcagttcgagtgg

SEQ ID NO: 60802 - RNA, 23 nt, synthetic construct
  source 1..23: mol_type = other RNA
gtgtcaaacatgcagttcgagtg

SEQ ID NO: 60803 - RNA, 23 nt, synthetic construct
  source 1..23: mol_type = other RNA
ggaagcggaagacgtcgccgtcg

SEQ ID NO: 60804 - RNA, 23 nt, synthetic construct
  source 1..23: mol_type = other RNA
agagaacacgtagttgcaaaggc

SEQ ID NO: 60805 - RNA, 23 nt, synthetic construct
  source 1..23: mol_type = other RNA
gtctgcaccacgatgaagaagct

SEQ ID NO: 60806 - RNA, 23 nt, synthetic construct
  source 1..23: mol_type = other RNA
gctctgggcggtgcccattgtac

SEQ ID NO: 60807 - RNA, 23 nt, synthetic construct
  source 1..23: mol_type = other RNA
aaggtcttgtagtggaagtcacc

SEQ ID NO: 60808 - RNA, 23 nt, synthetic construct
  source 1..23: mol_type = other RNA
cgccgtcgaaggtcttgtagtgg

SEQ ID NO: 60809 - RNA, 23 nt, synthetic construct
  source 1..23: mol_type = other RNA
gtcgccgtcgaaggtcttgtagt

SEQ ID NO: 60810 - RNA, 23 nt, synthetic construct
  source 1..23: mol_type = other RNA
gacgtcgccgtcgaaggtcttgt

SEQ ID NO: 60811 - RNA, 23 nt, synthetic construct
  source 1..23: mol_type = other RNA
tgggcgcaggcggccaggtacgc

SEQ ID NO: 60812 - RNA, 23 nt, synthetic construct
  source 1..23: mol_type = other RNA
ctggcactgccatagccccccgg

SEQ ID NO: 60813 - RNA, 23 nt, synthetic construct
  source 1..23: mol_type = other RNA
caaacatgcagttcgagtggaag

SEQ ID NO: 60814 - RNA, 23 nt, synthetic construct
  source 1..23: mol_type = other RNA
tcaaacatgcagttcgagtggaa

SEQ ID NO: 60815 - RNA, 23 nt, synthetic construct
  source 1..23: mol_type = other RNA
caggtgtcaaacatgcagttcga

SEQ ID NO: 60816 - RNA, 23 nt, synthetic construct
  source 1..23: mol_type = other RNA
tgcaggtgtcaaacatgcagttc

SEQ ID NO: 60817 - RNA, 23 nt, synthetic construct
  source 1..23: mol_type = other RNA
ttgcaggtgtcaaacatgcagtt

SEQ ID NO: 60818 - RNA, 23 nt, synthetic construct
  source 1..23: mol_type = other RNA
ggccgtggaggatgctgcactgc

SEQ ID NO: 60819 - RNA, 23 nt, synthetic construct
  source 1..23: mol_type = other RNA
aggcggtggtgaaggtgaatggc

SEQ ID NO: 60820 - RNA, 23 nt, synthetic construct
  source 1..23: mol_type = other RNA
ggctctgggcggtgcccattgta

SEQ ID NO: 60821 - RNA, 23 nt, synthetic construct
  source 1..23: mol_type = other RNA
ctgtggtctgggttggggtaggc

SEQ ID NO: 60822 - RNA, 23 nt, synthetic construct
  source 1..23: mol_type = other RNA
ggggagccctggtcagccccggg

SEQ ID NO: 60823 - RNA, 23 nt, synthetic construct
  source 1..23: mol_type = other RNA
gggtggtcgtccctggagaaggg

SEQ ID NO: 60824 - RNA, 23 nt, synthetic construct
  source 1..23: mol_type = other RNA
gggtggtcgtccctggagaaggg

SEQ ID NO: 60825 - RNA, 23 nt, synthetic construct
  source 1..23: mol_type = other RNA
gggtggtcgtccctggagaaggg

SEQ ID NO: 60826 - RNA, 23 nt, synthetic construct
  source 1..23: mol_type = other RNA
ggtggtggtggtcagcactctgg

SEQ ID NO: 60827 - RNA, 23 nt, synthetic construct
  source 1..23: mol_type = other RNA
gccagtcggggcccagcagccat

SEQ ID NO: 60828 - RNA, 23 nt, synthetic construct
  source 1..23: mol_type = other RNA
aaggttgtggcactcagcaaaga

SEQ ID NO: 60829 - RNA, 23 nt, synthetic construct
  source 1..23: mol_type = other RNA
agcacatcttgaagacgccctcc

SEQ ID NO: 60830 - RNA, 23 nt, synthetic construct
  source 1..23: mol_type = other RNA
cgtcactgcagcagaggacccgg

SEQ ID NO: 60831 - RNA, 23 nt, synthetic construct
  source 1..23: mol_type = other RNA
gggactgctgtggtgctggccgg

SEQ ID NO: 60832 - RNA, 23 nt, synthetic construct
  source 1..23: mol_type = other RNA
ctggtgccacaggatggtcgtgt

SEQ ID NO: 60833 - RNA, 23 nt, synthetic construct
  source 1..23: mol_type = other RNA
aggcggcgaaggtggggccgtgg

SEQ ID NO: 60834 - RNA, 23 nt, synthetic construct
  source 1..23: mol_type = other RNA
ctgtgggctctggttcctagagt

SEQ ID NO: 60835 - RNA, 23 nt, synthetic construct
  source 1..23: mol_type = other RNA
tacgcccttggcggcacaggcgt

SEQ ID NO: 60836 - RNA, 23 nt, synthetic construct
  source 1..23: mol_type = other RNA
gccgttgaagtccccacacaggc

SEQ ID NO: 60837 - RNA, 23 nt, synthetic construct
  source 1..23: mol_type = other RNA
ggcggcgaaggtggggccgtgga

SEQ ID NO: 60838 - RNA, 23 nt, synthetic construct
  source 1..23: mol_type = other RNA
ggcaggcggcgaaggtggggccg

SEQ ID NO: 60839 - RNA, 23 nt, synthetic construct
  source 1..23: mol_type = other RNA
tgtggtggtcgtggtggtaagca

SEQ ID NO: 60840 - RNA, 23 nt, synthetic construct
  source 1..23: mol_type = other RNA
ttgtccacatggctgttgaccca

SEQ ID NO: 60841 - RNA, 23 nt, synthetic construct
  source 1..23: mol_type = other RNA
atggggatggaggcagaacgttc

SEQ ID NO: 60842 - RNA, 23 nt, synthetic construct
  source 1..23: mol_type = other RNA
gtgtgctagaggagggtgttgcc

SEQ ID NO: 60843 - RNA, 23 nt, synthetic construct
  source 1..23: mol_type = other RNA
gttggcactttggtagtgtgagc

SEQ ID NO: 60844 - RNA, 23 nt, synthetic construct
  source 1..23: mol_type = other RNA
gtgtgctagacaccggggctgcg

SEQ ID NO: 60845 - RNA, 23 nt, synthetic construct
  source 1..23: mol_type = other RNA
ctgccctggcgggcacacaggca

SEQ ID NO: 60846 - RNA, 23 nt, synthetic construct
  source 1..23: mol_type = other RNA
gctcacagactgcccctccggcc

SEQ ID NO: 60847 - RNA, 23 nt, synthetic construct
  source 1..23: mol_type = other RNA
gggcagtcctcctcggcaatgca

SEQ ID NO: 60848 - RNA, 23 nt, synthetic construct
  source 1..23: mol_type = other RNA
gcagcaggcatggacaggcggcc

SEQ ID NO: 60849 - RNA, 23 nt, synthetic construct
  source 1..23: mol_type = other RNA
gcagcaggggttctcggcccggg

SEQ ID NO: 60850 - RNA, 23 nt, synthetic construct
  source 1..23: mol_type = other RNA
ggcagcaggggttctcggcccgg

SEQ ID NO: 60851 - RNA, 23 nt, synthetic construct
  source 1..23: mol_type = other RNA
atgtcatccagcaccgtgcctgg

SEQ ID NO: 60852 - RNA, 23 nt, synthetic construct
  source 1..23: mol_type = other RNA
aagcagccgtccacacagtggtc

SEQ ID NO: 60853 - RNA, 23 nt, synthetic construct
  source 1..23: mol_type = other RNA
agggcttggggttgatgatggag

SEQ ID NO: 60854 - RNA, 23 nt, synthetic construct
  source 1..23: mol_type = other RNA
aagggcttggggttgatgatgga

SEQ ID NO: 60855 - RNA, 23 nt, synthetic construct
  source 1..23: mol_type = other RNA
gggtagctgtagtccagccactc

SEQ ID NO: 60856 - RNA, 23 nt, synthetic construct
  source 1..23: mol_type = other RNA
gggtagctgtagtccagccactc

SEQ ID NO: 60857 - RNA, 23 nt, synthetic construct
  source 1..23: mol_type = other RNA
gggtagctgtagtccagccactc

SEQ ID NO: 60858 - RNA, 23 nt, synthetic construct
  source 1..23: mol_type = other RNA
gggtagctgtagtccagccactc

SEQ ID NO: 60859 - RNA, 23 nt, synthetic construct
  source 1..23: mol_type = other RNA
tgccagtcggggcccagcagcca

SEQ ID NO: 60860 - RNA, 23 nt, synthetic construct
  source 1..23: mol_type = other RNA
gtgccagtcggggcccagcagcc

SEQ ID NO: 60861 - RNA, 23 nt, synthetic construct
  source 1..23: mol_type = other RNA
gccgtggatccagtggctgcagt

SEQ ID NO: 60862 - RNA, 23 nt, synthetic construct
  source 1..23: mol_type = other RNA
gtggcaggcctgggcgtaggcag

SEQ ID NO: 60863 - RNA, 23 nt, synthetic construct
  source 1..23: mol_type = other RNA
cgctggtcttccggtcccaggac

SEQ ID NO: 60864 - RNA, 23 nt, synthetic construct
  source 1..23: mol_type = other RNA
cgcagcagagaacccgcagctcg

SEQ ID NO: 60865 - RNA, 23 nt, synthetic construct
  source 1..23: mol_type = other RNA
ccgtccacaggcacgaaggaaac

SEQ ID NO: 60866 - RNA, 23 nt, synthetic construct
  source 1..23: mol_type = other RNA
ccctggagaagggggtgactcgg

SEQ ID NO: 60867 - RNA, 23 nt, synthetic construct
  source 1..23: mol_type = other RNA
ccctggagaagggggtgactcgg

SEQ ID NO: 60868 - RNA, 23 nt, synthetic construct
  source 1..23: mol_type = other RNA
ccctggagaagggggtgactcgg

SEQ ID NO: 60869 - RNA, 23 nt, synthetic construct
  source 1..23: mol_type = other RNA
gaggtgggacaggcgccctggaa

SEQ ID NO: 60870 - RNA, 23 nt, synthetic construct
  source 1..23: mol_type = other RNA
ggcaggcctgggcgtaggcagcc

SEQ ID NO: 60871 - RNA, 23 nt, synthetic construct
  source 1..23: mol_type = other RNA
tccggttcctgcaggtgcaggtg

SEQ ID NO: 60872 - RNA, 23 nt, synthetic construct
  source 1..23: mol_type = other RNA
cctgcaggcgtcgtggggcctcc

SEQ ID NO: 60873 - RNA, 23 nt, synthetic construct
  source 1..23: mol_type = other RNA
gtgctgatccacactggaggcgt

SEQ ID NO: 60874 - RNA, 23 nt, synthetic construct
  source 1..23: mol_type = other RNA
gtggcccggggtggtcgtccctg

SEQ ID NO: 60875 - RNA, 23 nt, synthetic construct
  source 1..23: mol_type = other RNA
gtggcccggggtggtcgtccctg

SEQ ID NO: 60876 - RNA, 23 nt, synthetic construct
  source 1..23: mol_type = other RNA
gtgctgatccacactggaggcgt

SEQ ID NO: 60877 - RNA, 23 nt, synthetic construct
  source 1..23: mol_type = other RNA
gtggcccggggtggtcgtccctg

SEQ ID NO: 60878 - RNA, 23 nt, synthetic construct
  source 1..23: mol_type = other RNA
gtgctgatccacactggaggcgt

SEQ ID NO: 60879 - RNA, 23 nt, synthetic construct
  source 1..23: mol_type = other RNA
gtggcccggggtggtcgtccctg

SEQ ID NO: 60880 - RNA, 23 nt, synthetic construct
  source 1..23: mol_type = other RNA
gtgctgatccacactggaggcgt

SEQ ID NO: 60881 - RNA, 23 nt, synthetic construct
  source 1..23: mol_type = other RNA
tctcccagggtaggactcctgag

SEQ ID NO: 60882 - RNA, 23 nt, synthetic construct
  source 1..23: mol_type = other RNA
aggacggggtggccgtggggcca

SEQ ID NO: 60883 - RNA, 23 nt, synthetic construct
  source 1..23: mol_type = other RNA
aggacggggtggccgtggggcca

SEQ ID NO: 60884 - RNA, 23 nt, synthetic construct
  source 1..23: mol_type = other RNA
tgaggggcgccatgtgcccaagc

SEQ ID NO: 60885 - RNA, 23 nt, synthetic construct
  source 1..23: mol_type = other RNA
ctccagttccgcggctggccccc

SEQ ID NO: 60886 - RNA, 23 nt, synthetic construct
  source 1..23: mol_type = other RNA
tgcagcaggcatggacaggcggc

SEQ ID NO: 60887 - RNA, 23 nt, synthetic construct
  source 1..23: mol_type = other RNA
gctggctgggtgggcacttcggg

SEQ ID NO: 60888 - RNA, 23 nt, synthetic construct
  source 1..23: mol_type = other RNA
gggacgggcagggagggagccgg

SEQ ID NO: 60889 - RNA, 23 nt, synthetic construct
  source 1..23: mol_type = other RNA
aaaggtggcacacgggcaggtgg

SEQ ID NO: 60890 - RNA, 23 nt, synthetic construct
  source 1..23: mol_type = other RNA
tcacagtgcaccttctgccccac

SEQ ID NO: 60891 - RNA, 23 nt, synthetic construct
  source 1..23: mol_type = other RNA
ggagggggtggacgtggaactgg

SEQ ID NO: 60892 - RNA, 23 nt, synthetic construct
  source 1..23: mol_type = other RNA
gctctggttcctagagttgcagg

SEQ ID NO: 60893 - RNA, 23 nt, synthetic construct
  source 1..23: mol_type = other RNA
gcagcaggagcacggagcgcggg

SEQ ID NO: 60894 - RNA, 23 nt, synthetic construct
  source 1..23: mol_type = other RNA
ctggcccctcacccttctggggc

SEQ ID NO: 60895 - RNA, 23 nt, synthetic construct
  source 1..23: mol_type = other RNA
agggaagcggaagacgtcgccgt

SEQ ID NO: 60896 - RNA, 23 nt, synthetic construct
  source 1..23: mol_type = other RNA
aggggttggtggtggagccggtg

SEQ ID NO: 60897 - RNA, 23 nt, synthetic construct
  source 1..23: mol_type = other RNA
aggggttggtggtggagccggtg

SEQ ID NO: 60898 - RNA, 23 nt, synthetic construct
  source 1..23: mol_type = other RNA
aggggttggtggtggagccggtg

SEQ ID NO: 60899 - RNA, 23 nt, synthetic construct
  source 1..23: mol_type = other RNA
aggggttggtggtggagccggtg

SEQ ID NO: 60900 - RNA, 23 nt, synthetic construct
  source 1..23: mol_type = other RNA
aggggttggtggtggagccggtg

SEQ ID NO: 60901 - RNA, 23 nt, synthetic construct
  source 1..23: mol_type = other RNA
ccagtggccacagttgtggtggt

SEQ ID NO: 60902 - RNA, 23 nt, synthetic construct
  source 1..23: mol_type = other RNA
gtggtggccgtggtgttcggcac

SEQ ID NO: 60903 - RNA, 23 nt, synthetic construct
  source 1..23: mol_type = other RNA
tggaggtggccgtggtgtggccc

SEQ ID NO: 60904 - RNA, 23 nt, synthetic construct
  source 1..23: mol_type = other RNA
gacggcccctccggccgcacgga

SEQ ID NO: 60905 - RNA, 23 nt, synthetic construct
  source 1..23: mol_type = other RNA
cacgggtgtggtggtctgttctg

SEQ ID NO: 60906 - RNA, 23 nt, synthetic construct
  source 1..23: mol_type = other RNA
ccagtggccacagttgtggtggt

SEQ ID NO: 60907 - RNA, 23 nt, synthetic construct
  source 1..23: mol_type = other RNA
tgtaaagctggtagctgtggatt

SEQ ID NO: 60908 - RNA, 23 nt, synthetic construct
  source 1..23: mol_type = other RNA
tggccgtggaaccggtgggcacc

SEQ ID NO: 60909 - RNA, 23 nt, synthetic construct
  source 1..23: mol_type = other RNA
ccaggtagaggctgagattccca

SEQ ID NO: 60910 - RNA, 23 nt, synthetic construct
  source 1..23: mol_type = other RNA
ggttgtccaggtagaggctgaga

SEQ ID NO: 60911 - RNA, 23 nt, synthetic construct
  source 1..23: mol_type = other RNA
gggcacaaggttgtggcactcag

SEQ ID NO: 60912 - RNA, 23 nt, synthetic construct
  source 1..23: mol_type = other RNA
gcagccctccgccatcccctcca

SEQ ID NO: 60913 - RNA, 23 nt, synthetic construct
  source 1..23: mol_type = other RNA
ggcaggcctgcacgcagatgccc

SEQ ID NO: 60914 - RNA, 23 nt, synthetic construct
  source 1..23: mol_type = other RNA
cccacgcaggggcaggcctgcac

SEQ ID NO: 60915 - RNA, 23 nt, synthetic construct
  source 1..23: mol_type = other RNA
ttgcacacgcacaccgtctcggg

SEQ ID NO: 60916 - RNA, 23 nt, synthetic construct
  source 1..23: mol_type = other RNA
cagagaggcaggtacacatgtgg

SEQ ID NO: 60917 - RNA, 23 nt, synthetic construct
  source 1..23: mol_type = other RNA
ggtcagcaaatggactccaccct

SEQ ID NO: 60918 - RNA, 23 nt, synthetic construct
  source 1..23: mol_type = other RNA
gggtcagcaaatggactccaccc

SEQ ID NO: 60919 - RNA, 23 nt, synthetic construct
  source 1..23: mol_type = other RNA
gtgccacacacaggccggggggc

SEQ ID NO: 60920 - RNA, 23 nt, synthetic construct
  source 1..23: mol_type = other RNA
tggggccggtttcacccacgggg

SEQ ID NO: 60921 - RNA, 23 nt, synthetic construct
  source 1..23: mol_type = other RNA
gacatcagggaggggcaaggcca

SEQ ID NO: 60922 - RNA, 23 nt, synthetic construct
  source 1..23: mol_type = other RNA
gcgggcgctccggccgtggcagg

SEQ ID NO: 60923 - RNA, 23 nt, synthetic construct
  source 1..23: mol_type = other RNA
cctctctgacctggccgttgcga

SEQ ID NO: 60924 - RNA, 23 nt, synthetic construct
  source 1..23: mol_type = other RNA
aagtcctcgtaggcggcgcggca

SEQ ID NO: 60925 - RNA, 23 nt, synthetic construct
  source 1..23: mol_type = other RNA
tggaagggtggttgcagtccttg

SEQ ID NO: 60926 - RNA, 23 nt, synthetic construct
  source 1..23: mol_type = other RNA
tggaagggtggttgcagtccttg

SEQ ID NO: 60927 - RNA, 23 nt, synthetic construct
  source 1..23: mol_type = other RNA
tggaagggtggttgcagtccttg

SEQ ID NO: 60928 - RNA, 23 nt, synthetic construct
  source 1..23: mol_type = other RNA
atgtagtccccgctctgctccac

SEQ ID NO: 60929 - RNA, 23 nt, synthetic construct
  source 1..23: mol_type = other RNA
cgtggtgatcagtgatgggggag

SEQ ID NO: 60930 - RNA, 23 nt, synthetic construct
  source 1..23: mol_type = other RNA
gggttgtggcacgtcccctgcag

SEQ ID NO: 60931 - RNA, 23 nt, synthetic construct
  source 1..23: mol_type = other RNA
gtgtgctagaggagggtgttgcc

SEQ ID NO: 60932 - RNA, 23 nt, synthetic construct
  source 1..23: mol_type = other RNA
gtgtgctagaggagggtgttgcc

SEQ ID NO: 60933 - RNA, 23 nt, synthetic construct
  source 1..23: mol_type = other RNA
gtgtgctagaggagggtgttgcc

SEQ ID NO: 60934 - RNA, 23 nt, synthetic construct
  source 1..23: mol_type = other RNA
ttgacctcggtctcgcagccctg

SEQ ID NO: 60935 - RNA, 23 nt, synthetic construct
  source 1..23: mol_type = other RNA
gcacacgggcaggtggggcagcg

SEQ ID NO: 60936 - RNA, 23 nt, synthetic construct
  source 1..23: mol_type = other RNA
caccacggaccggctacgcgtgg

SEQ ID NO: 60937 - RNA, 23 nt, synthetic construct
  source 1..23: mol_type = other RNA
ccgcacggatgttggagtaggtg

SEQ ID NO: 60938 - RNA, 23 nt, synthetic construct
  source 1..23: mol_type = other RNA
ccgcacggatgttggagtaggtg

SEQ ID NO: 60939 - RNA, 23 nt, synthetic construct
  source 1..23: mol_type = other RNA
ccgcacggatgttggagtaggtg

SEQ ID NO: 60940 - RNA, 23 nt, synthetic construct
  source 1..23: mol_type = other RNA
ccgcacggatgttggagtaggtg

SEQ ID NO: 60941 - RNA, 23 nt, synthetic construct
  source 1..23: mol_type = other RNA
gccgcacggatgttggagtaggt

SEQ ID NO: 60942 - RNA, 23 nt, synthetic construct
  source 1..23: mol_type = other RNA
gccgcacggatgttggagtaggt

SEQ ID NO: 60943 - RNA, 23 nt, synthetic construct
  source 1..23: mol_type = other RNA
gccgcacggatgttggagtaggt

SEQ ID NO: 60944 - RNA, 23 nt, synthetic construct
  source 1..23: mol_type = other RNA
gccgcacggatgttggagtaggt

SEQ ID NO: 60945 - RNA, 23 nt, synthetic construct
  source 1..23: mol_type = other RNA
tcgagtgctgggtggtaccggtg

SEQ ID NO: 60946 - RNA, 23 nt, synthetic construct
  source 1..23: mol_type = other RNA
tcgagtgctgggtggtaccggtg

SEQ ID NO: 60947 - RNA, 23 nt, synthetic construct
  source 1..23: mol_type = other RNA
tcgagtgctgggtggtaccggtg

SEQ ID NO: 60948 - RNA, 23 nt, synthetic construct
  source 1..23: mol_type = other RNA
gtgcgttgaagaggatctggtcc

SEQ ID NO: 60949 - RNA, 23 nt, synthetic construct
  source 1..23: mol_type = other RNA
ggttattggggccgatgtggggc

SEQ ID NO: 60950 - RNA, 23 nt, synthetic construct
  source 1..23: mol_type = other RNA
gctatagtgctcggctctgtgag

SEQ ID NO: 60951 - RNA, 23 nt, synthetic construct
  source 1..23: mol_type = other RNA
agcgtatcttgtagggtgggtcc

SEQ ID NO: 60952 - RNA, 23 nt, synthetic construct
  source 1..23: mol_type = other RNA
gtattcgcagcagagaacccgca

SEQ ID NO: 60953 - RNA, 23 nt, synthetic construct
  source 1..23: mol_type = other RNA
ggccgaagtggacgtcacagtgc

SEQ ID NO: 60954 - RNA, 23 nt, synthetic construct
  source 1..23: mol_type = other RNA
gccgttaggacagtgcaagggca

SEQ ID NO: 60955 - RNA, 23 nt, synthetic construct
  source 1..23: mol_type = other RNA
aacgtctcaaagtctccgcctcc

SEQ ID NO: 60956 - RNA, 23 nt, synthetic construct
  source 1..23: mol_type = other RNA
gcggtctggacgcactccccaca

SEQ ID NO: 60957 - RNA, 23 nt, synthetic construct
  source 1..23: mol_type = other RNA
cgtgatcgtagtggccgtggtgg

SEQ ID NO: 60958 - RNA, 23 nt, synthetic construct
  source 1..23: mol_type = other RNA
cgtgatcgtagtggccgtggtgg

SEQ ID NO: 60959 - RNA, 23 nt, synthetic construct
  source 1..23: mol_type = other RNA
tgtgatcgtagtggccgtggtgg

SEQ ID NO: 60960 - RNA, 23 nt, synthetic construct
  source 1..23: mol_type = other RNA
cgtgatcgtagtggccgtggtga

SEQ ID NO: 60961 - RNA, 23 nt, synthetic construct
  source 1..23: mol_type = other RNA
cgtgatcgtagtggccgtggtgg

SEQ ID NO: 60962 - RNA, 23 nt, synthetic construct
  source 1..23: mol_type = other RNA
gccgggacggttgcacggcgggg

SEQ ID NO: 60963 - RNA, 23 nt, synthetic construct
  source 1..23: mol_type = other RNA
gacagctcgctcgtgagtgttgg

SEQ ID NO: 60964 - RNA, 23 nt, synthetic construct
  source 1..23: mol_type = other RNA
ctggttggcgtatttgggatcca

SEQ ID NO: 60965 - RNA, 23 nt, synthetic construct
  source 1..23: mol_type = other RNA
ctgcgtaagcctccaggctctgg

SEQ ID NO: 60966 - RNA, 23 nt, synthetic construct
  source 1..23: mol_type = other RNA
ggtcccctcttggaggatcagct

SEQ ID NO: 60967 - RNA, 23 nt, synthetic construct
  source 1..23: mol_type = other RNA
ggcgttgagaacagggcctgggt

SEQ ID NO: 60968 - RNA, 23 nt, synthetic construct
  source 1..23: mol_type = other RNA
cggcgttgagaacagggcctggg

SEQ ID NO: 60969 - RNA, 23 nt, synthetic construct
  source 1..23: mol_type = other RNA
tcgagtgctgggtggtactggtg

SEQ ID NO: 60970 - RNA, 23 nt, synthetic construct
  source 1..23: mol_type = other RNA
ttcccaaagcgtgcatggatctc

SEQ ID NO: 60971 - RNA, 23 nt, synthetic construct
  source 1..23: mol_type = other RNA
tgtgtgcgttgaagaggatctgg

SEQ ID NO: 60972 - RNA, 23 nt, synthetic construct
  source 1..23: mol_type = other RNA
tgtatggggccgcatggcttgta

SEQ ID NO: 60973 - RNA, 23 nt, synthetic construct
  source 1..23: mol_type = other RNA
ccgtgagcgtagcaggggcactc

SEQ ID NO: 60974 - RNA, 23 nt, synthetic construct
  source 1..23: mol_type = other RNA
tcgttgtgcacacaggggcagtc

SEQ ID NO: 60975 - RNA, 23 nt, synthetic construct
  source 1..23: mol_type = other RNA
gggtcgtccccagagtggaggag

SEQ ID NO: 60976 - RNA, 23 nt, synthetic construct
  source 1..23: mol_type = other RNA
tgagcgtgttggaagggtggatg

SEQ ID NO: 60977 - RNA, 23 nt, synthetic construct
  source 1..23: mol_type = other RNA
ctcgctcgtgagtgttggcgcca

SEQ ID NO: 60978 - RNA, 23 nt, synthetic construct
  source 1..23: mol_type = other RNA
tcgctcgtgagtgttggcgccag

SEQ ID NO: 60979 - RNA, 23 nt, synthetic construct
  source 1..23: mol_type = other RNA
tcgttgtccgtcaggccgcactt

SEQ ID NO: 60980 - RNA, 23 nt, synthetic construct
  source 1..23: mol_type = other RNA
gttatgggggccgatgtggggct

SEQ ID NO: 60981 - RNA, 23 nt, synthetic construct
  source 1..23: mol_type = other RNA
gttatgggggccgatgtggggct

SEQ ID NO: 60982 - RNA, 23 nt, synthetic construct
  source 1..23: mol_type = other RNA
gttatgggggccgatgtggggct

SEQ ID NO: 60983 - RNA, 23 nt, synthetic construct
  source 1..23: mol_type = other RNA
ttgtcgtggtggccttcgtggtc

SEQ ID NO: 60984 - RNA, 23 nt, synthetic construct
  source 1..23: mol_type = other RNA
ttgtcgtggtggccttcgtggtc

SEQ ID NO: 60985 - RNA, 23 nt, synthetic construct
  source 1..23: mol_type = other RNA
cccacccgtacatgaacacacgg

SEQ ID NO: 60986 - RNA, 23 nt, synthetic construct
  source 1..23: mol_type = other RNA
gcgttgagaacagggcctgggtg

SEQ ID NO: 60987 - RNA, 23 nt, synthetic construct
  source 1..23: mol_type = other RNA
ccaccgtggttattggggccgat

SEQ ID NO: 60988 - RNA, 23 nt, synthetic construct
  source 1..23: mol_type = other RNA
tgcgtagaaatggcagccggctc

SEQ ID NO: 60989 - RNA, 23 nt, synthetic construct
  source 1..23: mol_type = other RNA
cacgtcttggccatgtccttgca

SEQ ID NO: 60990 - RNA, 23 nt, synthetic construct
  source 1..23: mol_type = other RNA
cacggcgggggctgaccctgggc

SEQ ID NO: 60991 - RNA, 23 nt, synthetic construct
  source 1..23: mol_type = other RNA
tcaccaccgtggttattggggcc

SEQ ID NO: 60992 - RNA, 23 nt, synthetic construct
  source 1..23: mol_type = other RNA
agaacgtagctgcagtcaccatg

SEQ ID NO: 60993 - RNA, 23 nt, synthetic construct
  source 1..23: mol_type = other RNA
agcgtgcatggatctctctcatg

SEQ ID NO: 60994 - RNA, 23 nt, synthetic construct
  source 1..23: mol_type = other RNA
gcgtagcgctgggacttggggca

SEQ ID NO: 60995 - RNA, 23 nt, synthetic construct
  source 1..23: mol_type = other RNA
ttgtcgtagcagccacactgggc

SEQ ID NO: 60996 - RNA, 23 nt, synthetic construct
  source 1..23: mol_type = other RNA
gtagcgctgggacttggggcagt

SEQ ID NO: 60997 - RNA, 23 nt, synthetic construct
  source 1..23: mol_type = other RNA
ttggggtagtcctcatcaaacca

SEQ ID NO: 60998 - RNA, 23 nt, synthetic construct
  source 1..23: mol_type = other RNA
gggcaggtgcttgttcacgcagg

SEQ ID NO: 60999 - RNA, 23 nt, synthetic construct
  source 1..23: mol_type = other RNA
gtcgtccccggagtggaggaggg

SEQ ID NO: 61000 - RNA, 23 nt, synthetic construct
  source 1..23: mol_type = other RNA
tcagacttggggtagtcctcatc

SEQ ID NO: 61001 - RNA, 23 nt, synthetic construct
  source 1..23: mol_type = other RNA
tgtccactcacacttcggttgac

SEQ ID NO: 61002 - RNA, 23 nt, synthetic construct
  source 1..23: mol_type = other RNA
gccggtttcacccacggggtggg

SEQ ID NO: 61003 - RNA, 23 nt, synthetic construct
  source 1..23: mol_type = other RNA
gcctcgttgtgcacacaggggca

SEQ ID NO: 61004 - RNA, 23 nt, synthetic construct
  source 1..23: mol_type = other RNA
gcccatccaacttctgcaggttc

SEQ ID NO: 61005 - RNA, 23 nt, synthetic construct
  source 1..23: mol_type = other RNA
cgtggtgttcggcactgggggtg

SEQ ID NO: 61006 - RNA, 23 nt, synthetic construct
  source 1..23: mol_type = other RNA
gcagcgggtccgggcactgctcc

SEQ ID NO: 61007 - RNA, 23 nt, synthetic construct
  source 1..23: mol_type = other RNA
cgtggtgttcggcactgggggtg

SEQ ID NO: 61008 - RNA, 23 nt, synthetic construct
  source 1..23: mol_type = other RNA
atggccgtgtccccgccgtccag

SEQ ID NO: 61009 - RNA, 23 nt, synthetic construct
  source 1..23: mol_type = other RNA
cgtggtgttcggcactgggggtg

SEQ ID NO: 61010 - RNA, 23 nt, synthetic construct
  source 1..23: mol_type = other RNA
agcgcactggatgccactgggtg

SEQ ID NO: 61011 - RNA, 23 nt, synthetic construct
  source 1..23: mol_type = other RNA
cgggcgtagttctcattctccac

SEQ ID NO: 61012 - RNA, 23 nt, synthetic construct
  source 1..23: mol_type = other RNA
gaatgggcccgggggcacaaggt

SEQ ID NO: 61013 - RNA, 23 nt, synthetic construct
  source 1..23: mol_type = other RNA
tcttggacagaacgtagctgcag

SEQ ID NO: 61014 - RNA, 23 nt, synthetic construct
  source 1..23: mol_type = other RNA
ggatggctgtaaagctggtagct

SEQ ID NO: 61015 - RNA, 23 nt, synthetic construct
  source 1..23: mol_type = other RNA
ggatggctgtaaagctggtagct

SEQ ID NO: 61016 - RNA, 23 nt, synthetic construct
  source 1..23: mol_type = other RNA
ggatggctgtaaagctggtagct

SEQ ID NO: 61017 - RNA, 23 nt, synthetic construct
  source 1..23: mol_type = other RNA
gggcccatccaacttctgcaggt

SEQ ID NO: 61018 - RNA, 23 nt, synthetic construct
  source 1..23: mol_type = other RNA
tgtgaacagggtgatgttggctg

SEQ ID NO: 61019 - RNA, 23 nt, synthetic construct
  source 1..23: mol_type = other RNA
caggtgccagggcacggcaggtc

SEQ ID NO: 61020 - RNA, 23 nt, synthetic construct
  source 1..23: mol_type = other RNA
ccgaggggcaggcagccagagtg

SEQ ID NO: 61021 - RNA, 23 nt, synthetic construct
  source 1..23: mol_type = other RNA
agtcgtcagcctggttctggttg

SEQ ID NO: 61022 - RNA, 23 nt, synthetic construct
  source 1..23: mol_type = other RNA
atctgggggatgtcagtccttct

SEQ ID NO: 61023 - RNA, 23 nt, synthetic construct
  source 1..23: mol_type = other RNA
aggggctgctcacagacggcccc

SEQ ID NO: 61024 - RNA, 23 nt, synthetic construct
  source 1..23: mol_type = other RNA
aggctgcattccacgacctggcc

SEQ ID NO: 61025 - RNA, 23 nt, synthetic construct
  source 1..23: mol_type = other RNA
tgtccactgacaccggggctggc

SEQ ID NO: 61026 - RNA, 23 nt, synthetic construct
  source 1..23: mol_type = other RNA
aggggctgctcacagacggcccc

SEQ ID NO: 61027 - RNA, 23 nt, synthetic construct
  source 1..23: mol_type = other RNA
aggctgcattccacgacctggcc

SEQ ID NO: 61028 - RNA, 23 nt, synthetic construct
  source 1..23: mol_type = other RNA
cgtccctctggttgttggtgcag

SEQ ID NO: 61029 - RNA, 23 nt, synthetic construct
  source 1..23: mol_type = other RNA
aggctgcattccacgacctggcc

SEQ ID NO: 61030 - RNA, 23 nt, synthetic construct
  source 1..23: mol_type = other RNA
tggtgaaggtgaatggcgttgtg

SEQ ID NO: 61031 - RNA, 23 nt, synthetic construct
  source 1..23: mol_type = other RNA
aggggctgctcacagacggcccc

SEQ ID NO: 61032 - RNA, 23 nt, synthetic construct
  source 1..23: mol_type = other RNA
aggctgcattccacgacctggcc

SEQ ID NO: 61033 - RNA, 23 nt, synthetic construct
  source 1..23: mol_type = other RNA
tagttgcagcagaacacacggat

SEQ ID NO: 61034 - RNA, 23 nt, synthetic construct
  source 1..23: mol_type = other RNA
aaagacctggctcagcatcagat

SEQ ID NO: 61035 - RNA, 23 nt, synthetic construct
  source 1..23: mol_type = other RNA
atgggcccgggggcacaaggttg

SEQ ID NO: 61036 - RNA, 23 nt, synthetic construct
  source 1..23: mol_type = other RNA
cagcgggtccgggcactgctccg

SEQ ID NO: 61037 - RNA, 23 nt, synthetic construct
  source 1..23: mol_type = other RNA
gctgcattccacgacctggccca

SEQ ID NO: 61038 - RNA, 23 nt, synthetic construct
  source 1..23: mol_type = other RNA
gctgcattccacgacctggccca

SEQ ID NO: 61039 - RNA, 23 nt, synthetic construct
  source 1..23: mol_type = other RNA
gctgcattccacgacctggccca

SEQ ID NO: 61040 - RNA, 23 nt, synthetic construct
  source 1..23: mol_type = other RNA
gctgcattccacgacctggccca

SEQ ID NO: 61041 - RNA, 23 nt, synthetic construct
  source 1..23: mol_type = other RNA
tagttgcagcagaacacacggat

SEQ ID NO: 61042 - RNA, 23 nt, synthetic construct
  source 1..23: mol_type = other RNA
ctcgccagtcactgcacactccc

SEQ ID NO: 61043 - RNA, 23 nt, synthetic construct
  source 1..23: mol_type = other RNA
ggttcccaaactggagcggggtc

SEQ ID NO: 61044 - RNA, 23 nt, synthetic construct
  source 1..23: mol_type = other RNA
tgggcccatccaacttctgcagg

SEQ ID NO: 61045 - RNA, 23 nt, synthetic construct
  source 1..23: mol_type = other RNA
gggcagcggcacaggtcctgggc

SEQ ID NO: 61046 - RNA, 23 nt, synthetic construct
  source 1..23: mol_type = other RNA
cggatggccgtgtccccgccgtc

SEQ ID NO: 61047 - RNA, 23 nt, synthetic construct
  source 1..23: mol_type = other RNA
tagttgcagcagaacacacggat

SEQ ID NO: 61048 - RNA, 23 nt, synthetic construct
  source 1..23: mol_type = other RNA
tagttgcagcagaacacacggat

SEQ ID NO: 61049 - RNA, 23 nt, synthetic construct
  source 1..23: mol_type = other RNA
gtcgtccccggagtggaggaggg

SEQ ID NO: 61050 - RNA, 23 nt, synthetic construct
  source 1..23: mol_type = other RNA
taggccacgcaggtgcccaggca

SEQ ID NO: 61051 - RNA, 23 nt, synthetic construct
  source 1..23: mol_type = other RNA
atgaagtggccatccccgtaggc

SEQ ID NO: 61052 - RNA, 23 nt, synthetic construct
  source 1..23: mol_type = other RNA
atgcggaaggtcccgtgggtggt

SEQ ID NO: 61053 - RNA, 23 nt, synthetic construct
  source 1..23: mol_type = other RNA
agttccaggacatgccacagcct

SEQ ID NO: 61054 - RNA, 23 nt, synthetic construct
  source 1..23: mol_type = other RNA
gtcctggtgcagtcggatgaaca

SEQ ID NO: 61055 - RNA, 23 nt, synthetic construct
  source 1..23: mol_type = other RNA
acgcacctggccaccgtgcagtt

SEQ ID NO: 61056 - RNA, 23 nt, synthetic construct
  source 1..23: mol_type = other RNA
cggcaggtttttaggcagggtgc

SEQ ID NO: 61057 - RNA, 23 nt, synthetic construct
  source 1..23: mol_type = other RNA
tgagcgcactggatgccactggg

SEQ ID NO: 61058 - RNA, 23 nt, synthetic construct
  source 1..23: mol_type = other RNA
tgttgtagatgacgtcctggtag

SEQ ID NO: 61059 - RNA, 23 nt, synthetic construct
  source 1..23: mol_type = other RNA
ggtccgggcactgctccgtgggc

SEQ ID NO: 61060 - RNA, 23 nt, synthetic construct
  source 1..23: mol_type = other RNA
ccggcaggtttttaggcagggtg

SEQ ID NO: 61061 - RNA, 23 nt, synthetic construct
  source 1..23: mol_type = other RNA
gctgttggcgcacatcagccccc

SEQ ID NO: 61062 - RNA, 23 nt, synthetic construct
  source 1..23: mol_type = other RNA
aggtgatgaagtggccatccccg

SEQ ID NO: 61063 - RNA, 23 nt, synthetic construct
  source 1..23: mol_type = other RNA
tccactgacaccggggctggcag

SEQ ID NO: 61064 - RNA, 23 nt, synthetic construct
  source 1..23: mol_type = other RNA
agcacatcttgaacttccccacc

SEQ ID NO: 61065 - RNA, 23 nt, synthetic construct
  source 1..23: mol_type = other RNA
agcacatcttgaacttccccacc

SEQ ID NO: 61066 - RNA, 23 nt, synthetic construct
  source 1..23: mol_type = other RNA
agcacatcttgaacttccccacc

SEQ ID NO: 61067 - RNA, 23 nt, synthetic construct
  source 1..23: mol_type = other RNA
agcacatcttgaacttccccacc

SEQ ID NO: 61068 - RNA, 23 nt, synthetic construct
  source 1..23: mol_type = other RNA
ctgtccaaatgccctgcagaagc

SEQ ID NO: 61069 - RNA, 23 nt, synthetic construct
  source 1..23: mol_type = other RNA
gctgtagggcagccgggcctgga

SEQ ID NO: 61070 - RNA, 23 nt, synthetic construct
  source 1..23: mol_type = other RNA
gtgcccactggggttccggcagg

SEQ ID NO: 61071 - RNA, 23 nt, synthetic construct
  source 1..23: mol_type = other RNA
agtcctcctcacaggagtagcag

SEQ ID NO: 61072 - RNA, 23 nt, synthetic construct
  source 1..23: mol_type = other RNA
ggacagacacagccggacacgca

SEQ ID NO: 61073 - RNA, 23 nt, synthetic construct
  source 1..23: mol_type = other RNA
ccccacagtagtcctgggccaag

SEQ ID NO: 61074 - RNA, 23 nt, synthetic construct
  source 1..23: mol_type = other RNA
caagggcaccgtctcctcgtgga

SEQ ID NO: 61075 - RNA, 23 nt, synthetic construct
  source 1..23: mol_type = other RNA
ggggaagctctcggcctggcact

SEQ ID NO: 61076 - RNA, 23 nt, synthetic construct
  source 1..23: mol_type = other RNA
ccagcggcagacctcgcggacac

SEQ ID NO: 61077 - RNA, 23 nt, synthetic construct
  source 1..23: mol_type = other RNA
ggatggccgtgtccccgccgtcc

SEQ ID NO: 61078 - RNA, 23 nt, synthetic construct
  source 1..23: mol_type = other RNA
taggcacagcaggctccgtgctg

SEQ ID NO: 61079 - RNA, 23 nt, synthetic construct
  source 1..23: mol_type = other RNA
caaggctgtgagcgcactggatg

SEQ ID NO: 61080 - RNA, 23 nt, synthetic construct
  source 1..23: mol_type = other RNA
ggtgaaggtgaatggcgttgtgg

SEQ ID NO: 61081 - RNA, 23 nt, synthetic construct
  source 1..23: mol_type = other RNA
cgggcactgctccgtgggcccat

SEQ ID NO: 61082 - RNA, 23 nt, synthetic construct
  source 1..23: mol_type = other RNA
actggggctcacagcccgtggtc

SEQ ID NO: 61083 - RNA, 23 nt, synthetic construct
  source 1..23: mol_type = other RNA
actggggctcacagcccgtggtc

SEQ ID NO: 61084 - RNA, 23 nt, synthetic construct
  source 1..23: mol_type = other RNA
tctggttgttggtgcaggtgccg

SEQ ID NO: 61085 - RNA, 23 nt, synthetic construct
  source 1..23: mol_type = other RNA
gactcaacgtcccctccaagttg

SEQ ID NO: 61086 - RNA, 23 nt, synthetic construct
  source 1..23: mol_type = other RNA
gcaggtgtccggagtccgccagg

SEQ ID NO: 61087 - RNA, 23 nt, synthetic construct
  source 1..23: mol_type = other RNA
tcgcactcatagtggaagtcaca

SEQ ID NO: 61088 - RNA, 23 nt, synthetic construct
  source 1..23: mol_type = other RNA
tggccaccgtgcagttctccagg

SEQ ID NO: 61089 - RNA, 23 nt, synthetic construct
  source 1..23: mol_type = other RNA
agccccgggggacagacacagcc

SEQ ID NO: 61090 - RNA, 23 nt, synthetic construct
  source 1..23: mol_type = other RNA
ctggggttccggcaggtttttag

SEQ ID NO: 61091 - RNA, 23 nt, synthetic construct
  source 1..23: mol_type = other RNA
gtgggttctgtggagcctgcagg

SEQ ID NO: 61092 - RNA, 23 nt, synthetic construct
  source 1..23: mol_type = other RNA
ttgatgggcaggtgcttgttcac

SEQ ID NO: 61093 - RNA, 23 nt, synthetic construct
  source 1..23: mol_type = other RNA
gtccctctggttgttggtgcagg

SEQ ID NO: 61094 - RNA, 23 nt, synthetic construct
  source 1..23: mol_type = other RNA
gtccccacagtagtcctgggcca

SEQ ID NO: 61095 - RNA, 23 nt, synthetic construct
  source 1..23: mol_type = other RNA
ctggttgaagttcccacacaggc

SEQ ID NO: 61096 - RNA, 23 nt, synthetic construct
  source 1..23: mol_type = other RNA
gctgcgtgtagatggagttgagg

SEQ ID NO: 61097 - RNA, 23 nt, synthetic construct
  source 1..23: mol_type = other RNA
aggtggtgccggtggtcccacag

SEQ ID NO: 61098 - RNA, 23 nt, synthetic construct
  source 1..23: mol_type = other RNA
agcggcagacctcgcggacacac

SEQ ID NO: 61099 - RNA, 23 nt, synthetic construct
  source 1..23: mol_type = other RNA
gaggggccacagggcacgtattc

SEQ ID NO: 61100 - RNA, 23 nt, synthetic construct
  source 1..23: mol_type = other RNA
agtgggttctgtggagcctgcag

SEQ ID NO: 61101 - RNA, 23 nt, synthetic construct
  source 1..23: mol_type = other RNA
ggacagtgggttctgtggagcct

SEQ ID NO: 61102 - RNA, 23 nt, synthetic construct
  source 1..23: mol_type = other RNA
atctggtcctcattgaagaaggg

SEQ ID NO: 61103 - RNA, 23 nt, synthetic construct
  source 1..23: mol_type = other RNA
cacgacctggcccaactcccgca

SEQ ID NO: 61104 - RNA, 23 nt, synthetic construct
  source 1..23: mol_type = other RNA
tcatcaaaccactctgtccactg

SEQ ID NO: 61105 - RNA, 23 nt, synthetic construct
  source 1..23: mol_type = other RNA
ccggatggccgtgtccccgccgt

SEQ ID NO: 61106 - RNA, 23 nt, synthetic construct
  source 1..23: mol_type = other RNA
cacgacctggcccaactcccgca

SEQ ID NO: 61107 - RNA, 23 nt, synthetic construct
  source 1..23: mol_type = other RNA
cacgacctggcccaactcccgca

SEQ ID NO: 61108 - RNA, 23 nt, synthetic construct
  source 1..23: mol_type = other RNA
ggtggtccctagggcagaggagg

SEQ ID NO: 61109 - RNA, 23 nt, synthetic construct
  source 1..23: mol_type = other RNA
acgtcacagtgcaccttctgccc

SEQ ID NO: 61110 - RNA, 23 nt, synthetic construct
  source 1..23: mol_type = other RNA
gggcactgctccgtgggcccatc

SEQ ID NO: 61111 - RNA, 23 nt, synthetic construct
  source 1..23: mol_type = other RNA
gtgagcgcactggatgccactgg

SEQ ID NO: 61112 - RNA, 23 nt, synthetic construct
  source 1..23: mol_type = other RNA
acctcgccagtcactgcacactc

SEQ ID NO: 61113 - RNA, 23 nt, synthetic construct
  source 1..23: mol_type = other RNA
ggacagaacgtagctgcagtcac

SEQ ID NO: 61114 - RNA, 23 nt, synthetic construct
  source 1..23: mol_type = other RNA
ggtgcagccgtccacaggcacga

SEQ ID NO: 61115 - RNA, 23 nt, synthetic construct
  source 1..23: mol_type = other RNA
gctggcaggtggtggtacctggg

SEQ ID NO: 61116 - RNA, 23 nt, synthetic construct
  source 1..23: mol_type = other RNA
ttaggcagggtgccccgcagggc

SEQ ID NO: 61117 - RNA, 23 nt, synthetic construct
  source 1..23: mol_type = other RNA
ggtggtccctagggcagaggagg

SEQ ID NO: 61118 - RNA, 23 nt, synthetic construct
  source 1..23: mol_type = other RNA
ggtggtccctagggcagaggagg

SEQ ID NO: 61119 - RNA, 23 nt, synthetic construct
  source 1..23: mol_type = other RNA
ggtggtccctagggcagaggagg

SEQ ID NO: 61120 - RNA, 23 nt, synthetic construct
  source 1..23: mol_type = other RNA
gcgcactggcgtgagtattccac

SEQ ID NO: 61121 - RNA, 23 nt, synthetic construct
  source 1..23: mol_type = other RNA
gccgtcaaaggtggaatagtggg

SEQ ID NO: 61122 - RNA, 23 nt, synthetic construct
  source 1..23: mol_type = other RNA
atccccgtaggccacgcaggtgc

SEQ ID NO: 61123 - RNA, 23 nt, synthetic construct
  source 1..23: mol_type = other RNA
gtgggttgtagaagtcacagaac

SEQ ID NO: 61124 - RNA, 23 nt, synthetic construct
  source 1..23: mol_type = other RNA
ctggggtgtgggaagtcaccgtg

SEQ ID NO: 61125 - RNA, 23 nt, synthetic construct
  source 1..23: mol_type = other RNA
ggttgtcacccacgcacctggcc

SEQ ID NO: 61126 - RNA, 23 nt, synthetic construct
  source 1..23: mol_type = other RNA
ctgcaggtgacgtcggcctcact

SEQ ID NO: 61127 - RNA, 23 nt, synthetic construct
  source 1..23: mol_type = other RNA
ggtggtcttttcggttgctgtgg

SEQ ID NO: 61128 - RNA, 23 nt, synthetic construct
  source 1..23: mol_type = other RNA
tcctcattgaagaagggctggct

SEQ ID NO: 61129 - RNA, 23 nt, synthetic construct
  source 1..23: mol_type = other RNA
cacgggtgaccacaggcctggag

SEQ ID NO: 61130 - RNA, 23 nt, synthetic construct
  source 1..23: mol_type = other RNA
cggtggctgcactcccacctccg

SEQ ID NO: 61131 - RNA, 23 nt, synthetic construct
  source 1..23: mol_type = other RNA
gtcgtagcagccacactgggcca

SEQ ID NO: 61132 - RNA, 23 nt, synthetic construct
  source 1..23: mol_type = other RNA
ttccggtcccaggacacggccat

SEQ ID NO: 61133 - RNA, 23 nt, synthetic construct
  source 1..23: mol_type = other RNA
tgacgggtggaacaaagctcacg

SEQ ID NO: 61134 - RNA, 23 nt, synthetic construct
  source 1..23: mol_type = other RNA
acaggagtcctcctcacaggagt

SEQ ID NO: 61135 - RNA, 23 nt, synthetic construct
  source 1..23: mol_type = other RNA
gccgtagttgcagcagaacacac

SEQ ID NO: 61136 - RNA, 23 nt, synthetic construct
  source 1..23: mol_type = other RNA
gccgtagttgcagcagaacacac

SEQ ID NO: 61137 - RNA, 23 nt, synthetic construct
  source 1..23: mol_type = other RNA
gccgtagttgcagcagaacacac

SEQ ID NO: 61138 - RNA, 23 nt, synthetic construct
  source 1..23: mol_type = other RNA
gccgtagttgcagcagaacacac

SEQ ID NO: 61139 - RNA, 23 nt, synthetic construct
  source 1..23: mol_type = other RNA
aatgggcccgggggcacaaggtt

SEQ ID NO: 61140 - RNA, 23 nt, synthetic construct
  source 1..23: mol_type = other RNA
agccatgggcgcagggacacaga

SEQ ID NO: 61141 - RNA, 23 nt, synthetic construct
  source 1..23: mol_type = other RNA
gtgacgggtggaacaaagctcac

SEQ ID NO: 61142 - RNA, 23 nt, synthetic construct
  source 1..23: mol_type = other RNA
cactcgcactcatagtggaagtc

SEQ ID NO: 61143 - RNA, 23 nt, synthetic construct
  source 1..23: mol_type = other RNA
cacgcacctggccaccgtgcagt

SEQ ID NO: 61144 - RNA, 23 nt, synthetic construct
  source 1..23: mol_type = other RNA
ctgacaccggggctggcaggtgg

SEQ ID NO: 61145 - RNA, 23 nt, synthetic construct
  source 1..23: mol_type = other RNA
tgcattccacgacctggcccaac

SEQ ID NO: 61146 - RNA, 23 nt, synthetic construct
  source 1..23: mol_type = other RNA
acgccgttcttgctgaaaccgct

SEQ ID NO: 61147 - RNA, 23 nt, synthetic construct
  source 1..23: mol_type = other RNA
tgcattccacgacctggcccaac

SEQ ID NO: 61148 - RNA, 23 nt, synthetic construct
  source 1..23: mol_type = other RNA
gctggccccccgcgtgggcgcac

SEQ ID NO: 61149 - RNA, 23 nt, synthetic construct
  source 1..23: mol_type = other RNA
tggacccggatggccgtgtcccc

SEQ ID NO: 61150 - RNA, 23 nt, synthetic construct
  source 1..23: mol_type = other RNA
tgcattccacgacctggcccaac

SEQ ID NO: 61151 - RNA, 23 nt, synthetic construct
  source 1..23: mol_type = other RNA
agacacagccggacacgcagtgt

SEQ ID NO: 61152 - RNA, 23 nt, synthetic construct
  source 1..23: mol_type = other RNA
tgcattccacgacctggcccaac

SEQ ID NO: 61153 - RNA, 23 nt, synthetic construct
  source 1..23: mol_type = other RNA
cagttcgagtggaagggcttggg

SEQ ID NO: 61154 - RNA, 23 nt, synthetic construct
  source 1..23: mol_type = other RNA
gccgatgtggggctgctgggcag

SEQ ID NO: 61155 - RNA, 23 nt, synthetic construct
  source 1..23: mol_type = other RNA
gccgatgtggggctgctgggcag

SEQ ID NO: 61156 - RNA, 23 nt, synthetic construct
  source 1..23: mol_type = other RNA
cagggcacggcaggtcctggcac

SEQ ID NO: 61157 - RNA, 23 nt, synthetic construct
  source 1..23: mol_type = other RNA
gccgatgtggggctgctgggcag

SEQ ID NO: 61158 - RNA, 23 nt, synthetic construct
  source 1..23: mol_type = other RNA
tctggttgaagttcccacacagg

SEQ ID NO: 61159 - RNA, 23 nt, synthetic construct
  source 1..23: mol_type = other RNA
ccctgcccttgtagtcctggtgc

SEQ ID NO: 61160 - RNA, 23 nt, synthetic construct
  source 1..23: mol_type = other RNA
gccgatgtggggctgctgggcag

SEQ ID NO: 61161 - RNA, 23 nt, synthetic construct
  source 1..23: mol_type = other RNA
cagctcgtagctctccacgaaga

SEQ ID NO: 61162 - RNA, 23 nt, synthetic construct
  source 1..23: mol_type = other RNA
aggctccgtgctggcactgaggg

SEQ ID NO: 61163 - RNA, 23 nt, synthetic construct
  source 1..23: mol_type = other RNA
atcaaaccactctgtccactgac

SEQ ID NO: 61164 - RNA, 23 nt, synthetic construct
  source 1..23: mol_type = other RNA
tatctgggggatgtcagtccttc

SEQ ID NO: 61165 - RNA, 23 nt, synthetic construct
  source 1..23: mol_type = other RNA
gtcaaaccactctgtccactcac

SEQ ID NO: 61166 - RNA, 23 nt, synthetic construct
  source 1..23: mol_type = other RNA
cgtagttgcagcagaacacacgg

SEQ ID NO: 61167 - RNA, 23 nt, synthetic construct
  source 1..23: mol_type = other RNA
gtaaagctggtagctgtgggtgt

SEQ ID NO: 61168 - RNA, 23 nt, synthetic construct
  source 1..23: mol_type = other RNA
cgtagttgcagcagaacacacgg

SEQ ID NO: 61169 - RNA, 23 nt, synthetic construct
  source 1..23: mol_type = other RNA
cgtagttgcagcagaacacacgg

SEQ ID NO: 61170 - RNA, 23 nt, synthetic construct
  source 1..23: mol_type = other RNA
gtaaagctggtagctgtgggtgt

SEQ ID NO: 61171 - RNA, 23 nt, synthetic construct
  source 1..23: mol_type = other RNA
cgtagttgcagcagaacacacgg

SEQ ID NO: 61172 - RNA, 23 nt, synthetic construct
  source 1..23: mol_type = other RNA
gtaaagctggtagctgtgggtgt

SEQ ID NO: 61173 - RNA, 23 nt, synthetic construct
  source 1..23: mol_type = other RNA
cgttgggtcctgggtgtccccag

SEQ ID NO: 61174 - RNA, 23 nt, synthetic construct
  source 1..23: mol_type = other RNA
ccaagcccatcggtggtgttgta

SEQ ID NO: 61175 - RNA, 23 nt, synthetic construct
  source 1..23: mol_type = other RNA
tgaacagggtgatgttggctgcc

SEQ ID NO: 61176 - RNA, 23 nt, synthetic construct
  source 1..23: mol_type = other RNA
gctgctcacagacggcccctccg

SEQ ID NO: 61177 - RNA, 23 nt, synthetic construct
  source 1..23: mol_type = other RNA
gacgtcggcctcactcaggccgc

SEQ ID NO: 61178 - RNA, 23 nt, synthetic construct
  source 1..23: mol_type = other RNA
gctgctcacagacggcccctccg

SEQ ID NO: 61179 - RNA, 23 nt, synthetic construct
  source 1..23: mol_type = other RNA
gacacgcagtgtgtgctgaaaca

SEQ ID NO: 61180 - RNA, 23 nt, synthetic construct
  source 1..23: mol_type = other RNA
tggtcttccggtcccaggacacg

SEQ ID NO: 61181 - RNA, 23 nt, synthetic construct
  source 1..23: mol_type = other RNA
gctgctcacagacggcccctccg

SEQ ID NO: 61182 - RNA, 23 nt, synthetic construct
  source 1..23: mol_type = other RNA
tggttgaagttcccacacaggcc

SEQ ID NO: 61183 - RNA, 23 nt, synthetic construct
  source 1..23: mol_type = other RNA
gcctggcactctatgtccttagg

SEQ ID NO: 61184 - RNA, 23 nt, synthetic construct
  source 1..23: mol_type = other RNA
tgtccggagtccgccaggacaca

SEQ ID NO: 61185 - RNA, 23 nt, synthetic construct
  source 1..23: mol_type = other RNA
gcggcagacctcgcggacacaca

SEQ ID NO: 61186 - RNA, 23 nt, synthetic construct
  source 1..23: mol_type = other RNA
cacagtccacctgctggcccagc

SEQ ID NO: 61187 - RNA, 23 nt, synthetic construct
  source 1..23: mol_type = other RNA
ccactgacaccggggctggcagg

SEQ ID NO: 61188 - RNA, 23 nt, synthetic construct
  source 1..23: mol_type = other RNA
gttcttgctgaaaccgctgctca

SEQ ID NO: 61189 - RNA, 23 nt, synthetic construct
  source 1..23: mol_type = other RNA
agtagcagcagccggttttcctg

SEQ ID NO: 61190 - RNA, 23 nt, synthetic construct
  source 1..23: mol_type = other RNA
ggtgtgaacagggtgatgttggc

SEQ ID NO: 61191 - RNA, 23 nt, synthetic construct
  source 1..23: mol_type = other RNA
gagtcaacctgggagcggcaggc

SEQ ID NO: 61192 - RNA, 23 nt, synthetic construct
  source 1..23: mol_type = other RNA
agtcctcatcaaaccactctgtc

SEQ ID NO: 61193 - RNA, 23 nt, synthetic construct
  source 1..23: mol_type = other RNA
ctgaggaggacacagtggacacg

SEQ ID NO: 61194 - RNA, 23 nt, synthetic construct
  source 1..23: mol_type = other RNA
aagcagggagtagagaagtggga

SEQ ID NO: 61195 - RNA, 23 nt, synthetic construct
  source 1..23: mol_type = other RNA
cctggccaccgtgcagttctcca

SEQ ID NO: 61196 - RNA, 23 nt, synthetic construct
  source 1..23: mol_type = other RNA
gacactttgatgggcaggtgctt

SEQ ID NO: 61197 - RNA, 23 nt, synthetic construct
  source 1..23: mol_type = other RNA
cggcacaggtcctgggcgcaggc

SEQ ID NO: 61198 - RNA, 23 nt, synthetic construct
  source 1..23: mol_type = other RNA
cacctcgccagtcactgcacact

SEQ ID NO: 61199 - RNA, 23 nt, synthetic construct
  source 1..23: mol_type = other RNA
cggctggccccccgcgtgggcgc

SEQ ID NO: 61200 - RNA, 23 nt, synthetic construct
  source 1..23: mol_type = other RNA
gagtagcagcagccggttttcct

SEQ ID NO: 61201 - RNA, 23 nt, synthetic construct
  source 1..23: mol_type = other RNA
caggtgttggcgaaggctgcgcc

SEQ ID NO: 61202 - RNA, 23 nt, synthetic construct
  source 1..23: mol_type = other RNA
gggtgtgaacagggtgatgttgg

SEQ ID NO: 61203 - RNA, 23 nt, synthetic construct
  source 1..23: mol_type = other RNA
gtccagcctgacaaacacctgca

SEQ ID NO: 61204 - RNA, 23 nt, synthetic construct
  source 1..23: mol_type = other RNA
cagcctggttctggttgaagttc

SEQ ID NO: 61205 - RNA, 23 nt, synthetic construct
  source 1..23: mol_type = other RNA
tggtcttttcggttgctgtggtc

SEQ ID NO: 61206 - RNA, 23 nt, synthetic construct
  source 1..23: mol_type = other RNA
ggccaccgtgcagttctccaggg

SEQ ID NO: 61207 - RNA, 23 nt, synthetic construct
  source 1..23: mol_type = other RNA
ggtcccacaggggatgttctcgg

SEQ ID NO: 61208 - RNA, 23 nt, synthetic construct
  source 1..23: mol_type = other RNA
cctcattgaagaagggctggctg

SEQ ID NO: 61209 - RNA, 23 nt, synthetic construct
  source 1..23: mol_type = other RNA
cgcactggcgtgagtattccaca

SEQ ID NO: 61210 - RNA, 23 nt, synthetic construct
  source 1..23: mol_type = other RNA
gagggccgggcttgtcgtggagt

SEQ ID NO: 61211 - RNA, 23 nt, synthetic construct
  source 1..23: mol_type = other RNA
cctcataggtgcaggtgcaggcc

SEQ ID NO: 61212 - RNA, 23 nt, synthetic construct
  source 1..23: mol_type = other RNA
gctccgtgctggcactgagggag

SEQ ID NO: 61213 - RNA, 23 nt, synthetic construct
  source 1..23: mol_type = other RNA
gcacatcttgaacttccccacct

SEQ ID NO: 61214 - RNA, 23 nt, synthetic construct
  source 1..23: mol_type = other RNA
ggcctggcactctatgtccttag

SEQ ID NO: 61215 - RNA, 23 nt, synthetic construct
  source 1..23: mol_type = other RNA
tggggaagctctcggcctggcac

SEQ ID NO: 61216 - RNA, 23 nt, synthetic construct
  source 1..23: mol_type = other RNA
gcacatcttgaacttccccacct

SEQ ID NO: 61217 - RNA, 23 nt, synthetic construct
  source 1..23: mol_type = other RNA
ccaggctcgtggtcagcggctct

SEQ ID NO: 61218 - RNA, 23 nt, synthetic construct
  source 1..23: mol_type = other RNA
gcacatcttgaacttccccacct

SEQ ID NO: 61219 - RNA, 23 nt, synthetic construct
  source 1..23: mol_type = other RNA
gcacatcttgaacttccccacct

SEQ ID NO: 61220 - RNA, 23 nt, synthetic construct
  source 1..23: mol_type = other RNA
aaagctggtagctgtgggtgtgg

SEQ ID NO: 61221 - RNA, 23 nt, synthetic construct
  source 1..23: mol_type = other RNA
cactgtgggggtgtgggtggtcc

SEQ ID NO: 61222 - RNA, 23 nt, synthetic construct
  source 1..23: mol_type = other RNA
ccgtagttgcagcagaacacacg

SEQ ID NO: 61223 - RNA, 23 nt, synthetic construct
  source 1..23: mol_type = other RNA
ccgtagttgcagcagaacacacg

SEQ ID NO: 61224 - RNA, 23 nt, synthetic construct
  source 1..23: mol_type = other RNA
ccgtagttgcagcagaacacacg

SEQ ID NO: 61225 - RNA, 23 nt, synthetic construct
  source 1..23: mol_type = other RNA
ccgtagttgcagcagaacacacg

SEQ ID NO: 61226 - RNA, 23 nt, synthetic construct
  source 1..23: mol_type = other RNA
aaagctggtagctgtgggtgtgg

SEQ ID NO: 61227 - RNA, 23 nt, synthetic construct
  source 1..23: mol_type = other RNA
cactgtgggggtgtgggtggtcc

SEQ ID NO: 61228 - RNA, 23 nt, synthetic construct
  source 1..23: mol_type = other RNA
gcaaaggccggccccagcagggt

SEQ ID NO: 61229 - RNA, 23 nt, synthetic construct
  source 1..23: mol_type = other RNA
tccgcaaaggccggccccagcag

SEQ ID NO: 61230 - RNA, 23 nt, synthetic construct
  source 1..23: mol_type = other RNA
aaagctggtagctgtgggtgtgg

SEQ ID NO: 61231 - RNA, 23 nt, synthetic construct
  source 1..23: mol_type = other RNA
agtagagaagtgggagctgggga

SEQ ID NO: 61232 - RNA, 23 nt, synthetic construct
  source 1..23: mol_type = other RNA
actcgcactcatagtggaagtca

SEQ ID NO: 61233 - RNA, 23 nt, synthetic construct
  source 1..23: mol_type = other RNA
gcacaggtcctgggcgcaggcgg

SEQ ID NO: 61234 - RNA, 23 nt, synthetic construct
  source 1..23: mol_type = other RNA
gtagcagcagccggttttcctga

SEQ ID NO: 61235 - RNA, 23 nt, synthetic construct
  source 1..23: mol_type = other RNA
gcaccgtgcctggggggcagaag

SEQ ID NO: 61236 - RNA, 23 nt, synthetic construct
  source 1..23: mol_type = other RNA
tgccgacaggggcagctgcgtgt

SEQ ID NO: 61237 - RNA, 23 nt, synthetic construct
  source 1..23: mol_type = other RNA
ggtggctgcactcccacctccgg

SEQ ID NO: 61238 - RNA, 23 nt, synthetic construct
  source 1..23: mol_type = other RNA
aggtgttggcgaaggctgcgccc

SEQ ID NO: 61239 - RNA, 23 nt, synthetic construct
  source 1..23: mol_type = other RNA
tggctgtaaagctggtagctgtg

SEQ ID NO: 61240 - RNA, 23 nt, synthetic construct
  source 1..23: mol_type = other RNA
tggctgtaaagctggtagctgtg

SEQ ID NO: 61241 - RNA, 23 nt, synthetic construct
  source 1..23: mol_type = other RNA
tggctgtaaagctggtagctgtg

SEQ ID NO: 61242 - RNA, 23 nt, synthetic construct
  source 1..23: mol_type = other RNA
catccccgtaggccacgcaggtg

SEQ ID NO: 61243 - RNA, 23 nt, synthetic construct
  source 1..23: mol_type = other RNA
tccctctggttgttggtgcaggt

SEQ ID NO: 61244 - RNA, 23 nt, synthetic construct
  source 1..23: mol_type = other RNA
gcagttacagctctggcagttct

SEQ ID NO: 61245 - RNA, 23 nt, synthetic construct
  source 1..23: mol_type = other RNA
tgcagttacagctctggcagttc

SEQ ID NO: 61246 - RNA, 23 nt, synthetic construct
  source 1..23: mol_type = other RNA
tggtaccctctctgcctcaggtt

SEQ ID NO: 61247 - RNA, 23 nt, synthetic construct
  source 1..23: mol_type = other RNA
gtcctcatcaaaccactctgtcc

SEQ ID NO: 61248 - RNA, 23 nt, synthetic construct
  source 1..23: mol_type = other RNA
ccacccctgggacagtgggttct

SEQ ID NO: 61249 - RNA, 23 nt, synthetic construct
  source 1..23: mol_type = other RNA
tgtcgtagcagccacactgggcc

SEQ ID NO: 61250 - RNA, 23 nt, synthetic construct
  source 1..23: mol_type = other RNA
gtgtgaacagggtgatgttggct

SEQ ID NO: 61251 - RNA, 23 nt, synthetic construct
  source 1..23: mol_type = other RNA
tgaccaggcacactggggctcac

SEQ ID NO: 61252 - RNA, 23 nt, synthetic construct
  source 1..23: mol_type = other RNA
tcaacctgggagcggcaggcggc

SEQ ID NO: 61253 - RNA, 23 nt, synthetic construct
  source 1..23: mol_type = other RNA
cgagggtgtgaacagggtgatgt

SEQ ID NO: 61254 - RNA, 23 nt, synthetic construct
  source 1..23: mol_type = other RNA
cgtcacagtgcaccttctgcccc

SEQ ID NO: 61255 - RNA, 23 nt, synthetic construct
  source 1..23: mol_type = other RNA
gcattccacgacctggcccaact

SEQ ID NO: 61256 - RNA, 23 nt, synthetic construct
  source 1..23: mol_type = other RNA
cgcagtgtgtgctgaaacagccc

SEQ ID NO: 61257 - RNA, 23 nt, synthetic construct
  source 1..23: mol_type = other RNA
tgaccaggcacactggggctcac

SEQ ID NO: 61258 - RNA, 23 nt, synthetic construct
  source 1..23: mol_type = other RNA
gcattccacgacctggcccaact

SEQ ID NO: 61259 - RNA, 23 nt, synthetic construct
  source 1..23: mol_type = other RNA
tgaccaggcacactggggctcac

SEQ ID NO: 61260 - RNA, 23 nt, synthetic construct
  source 1..23: mol_type = other RNA
gcattccacgacctggcccaact

SEQ ID NO: 61261 - RNA, 23 nt, synthetic construct
  source 1..23: mol_type = other RNA
tgaccaggcacactggggctcac

SEQ ID NO: 61262 - RNA, 23 nt, synthetic construct
  source 1..23: mol_type = other RNA
gcattccacgacctggcccaact

SEQ ID NO: 61263 - RNA, 23 nt, synthetic construct
  source 1..23: mol_type = other RNA
tgaagaatgggcccgggggcaca

SEQ ID NO: 61264 - RNA, 23 nt, synthetic construct
  source 1..23: mol_type = other RNA
gtggctgcactcccacctccggt

SEQ ID NO: 61265 - RNA, 23 nt, synthetic construct
  source 1..23: mol_type = other RNA
acacgcaggactggcagttgctg

SEQ ID NO: 61266 - RNA, 23 nt, synthetic construct
  source 1..23: mol_type = other RNA
cactggtgctgcatggcctgggc

SEQ ID NO: 61267 - RNA, 23 nt, synthetic construct
  source 1..23: mol_type = other RNA
ggcgtgcagccacactcatccac

SEQ ID NO: 61268 - RNA, 23 nt, synthetic construct
  source 1..23: mol_type = other RNA
ggacgtcacagtgcaccttctgc

SEQ ID NO: 61269 - RNA, 23 nt, synthetic construct
  source 1..23: mol_type = other RNA
tgcggctgtaaggcagctcctcc

SEQ ID NO: 61270 - RNA, 23 nt, synthetic construct
  source 1..23: mol_type = other RNA
cgtagcagccacactgggccacg

SEQ ID NO: 61271 - RNA, 23 nt, synthetic construct
  source 1..23: mol_type = other RNA
tcaggcagttctcgttgtccgtc

SEQ ID NO: 61272 - RNA, 23 nt, synthetic construct
  source 1..23: mol_type = other RNA
gtaggccacgcaggtgcccaggc

SEQ ID NO: 61273 - RNA, 23 nt, synthetic construct
  source 1..23: mol_type = other RNA
cgacctggcccaactcccgcagg

SEQ ID NO: 61274 - RNA, 23 nt, synthetic construct
  source 1..23: mol_type = other RNA
cgacctggcccaactcccgcagg

SEQ ID NO: 61275 - RNA, 23 nt, synthetic construct
  source 1..23: mol_type = other RNA
cgacctggcccaactcccgcagg

SEQ ID NO: 61276 - RNA, 23 nt, synthetic construct
  source 1..23: mol_type = other RNA
ggtagtgccactcacagccccca

SEQ ID NO: 61277 - RNA, 23 nt, synthetic construct
  source 1..23: mol_type = other RNA
acctggcccaactcccgcagggg

SEQ ID NO: 61278 - RNA, 23 nt, synthetic construct
  source 1..23: mol_type = other RNA
gacctggcccaactcccgcaggg

SEQ ID NO: 61279 - RNA, 23 nt, synthetic construct
  source 1..23: mol_type = other RNA
cctcaaggctgtgagcgcactgg

SEQ ID NO: 61280 - RNA, 23 nt, synthetic construct
  source 1..23: mol_type = other RNA
acctggcccaactcccgcagggg

SEQ ID NO: 61281 - RNA, 23 nt, synthetic construct
  source 1..23: mol_type = other RNA
gacctggcccaactcccgcaggg

SEQ ID NO: 61282 - RNA, 23 nt, synthetic construct
  source 1..23: mol_type = other RNA
ctcccgcagggggacaccaggct

SEQ ID NO: 61283 - RNA, 23 nt, synthetic construct
  source 1..23: mol_type = other RNA
acctggcccaactcccgcagggg

SEQ ID NO: 61284 - RNA, 23 nt, synthetic construct
  source 1..23: mol_type = other RNA
gacctggcccaactcccgcaggg

SEQ ID NO: 61285 - RNA, 23 nt, synthetic construct
  source 1..23: mol_type = other RNA
ctcccgcagggggacaccaggct

SEQ ID NO: 61286 - RNA, 23 nt, synthetic construct
  source 1..23: mol_type = other RNA
cctggagtggaggagggcgtggc

SEQ ID NO: 61287 - RNA, 23 nt, synthetic construct
  source 1..23: mol_type = other RNA
ctcccgcagggggacaccaggct

SEQ ID NO: 61288 - RNA, 23 nt, synthetic construct
  source 1..23: mol_type = other RNA
gaagaatgggcccgggggcacaa

SEQ ID NO: 61289 - RNA, 23 nt, synthetic construct
  source 1..23: mol_type = other RNA
ggccgcacatctggccctggtgg

SEQ ID NO: 61290 - RNA, 23 nt, synthetic construct
  source 1..23: mol_type = other RNA
aggagtcctcctcacaggagtag

SEQ ID NO: 61291 - RNA, 23 nt, synthetic construct
  source 1..23: mol_type = other RNA
gaagtggccatccccgtaggcca

SEQ ID NO: 61292 - RNA, 23 nt, synthetic construct
  source 1..23: mol_type = other RNA
gtcgtggagtgggggacccaggc

SEQ ID NO: 61293 - RNA, 23 nt, synthetic construct
  source 1..23: mol_type = other RNA
tgtagatgacgtcctggtagctg

SEQ ID NO: 61294 - RNA, 23 nt, synthetic construct
  source 1..23: mol_type = other RNA
tcgtccctctggttgttggtgca

SEQ ID NO: 61295 - RNA, 23 nt, synthetic construct
  source 1..23: mol_type = other RNA
tcgtccccggagtggaggagggc

SEQ ID NO: 61296 - RNA, 23 nt, synthetic construct
  source 1..23: mol_type = other RNA
ccacactgggccacgcacttcat

SEQ ID NO: 61297 - RNA, 23 nt, synthetic construct
  source 1..23: mol_type = other RNA
tcgtccccggagtggaggagggg

SEQ ID NO: 61298 - RNA, 23 nt, synthetic construct
  source 1..23: mol_type = other RNA
cccctgggacagtgggttctgtg

SEQ ID NO: 61299 - RNA, 23 nt, synthetic construct
  source 1..23: mol_type = other RNA
tcgtccccggagtggaggagggc

SEQ ID NO: 61300 - RNA, 23 nt, synthetic construct
  source 1..23: mol_type = other RNA
tcgtccccggagtggaggagggg

SEQ ID NO: 61301 - RNA, 23 nt, synthetic construct
  source 1..23: mol_type = other RNA
gtccaaatgccctgcagaagcag

SEQ ID NO: 61302 - RNA, 23 nt, synthetic construct
  source 1..23: mol_type = other RNA
caggctctggcagggcacctcaa

SEQ ID NO: 61303 - RNA, 23 nt, synthetic construct
  source 1..23: mol_type = other RNA
caggtggtgccggtggtcccaca

SEQ ID NO: 61304 - RNA, 23 nt, synthetic construct
  source 1..23: mol_type = other RNA
taccagctggaccagcggcagac

SEQ ID NO: 61305 - RNA, 23 nt, synthetic construct
  source 1..23: mol_type = other RNA
ggcagcggcacaggtcctgggcg

SEQ ID NO: 61306 - RNA, 23 nt, synthetic construct
  source 1..23: mol_type = other RNA
ggctggccccccgcgtgggcgca

SEQ ID NO: 61307 - RNA, 23 nt, synthetic construct
  source 1..23: mol_type = other RNA
aggggcactgcccgaggggcagg

SEQ ID NO: 61308 - RNA, 23 nt, synthetic construct
  source 1..23: mol_type = other RNA
aggtgccagggcacggcaggtcc

SEQ ID NO: 61309 - RNA, 23 nt, synthetic construct
  source 1..23: mol_type = other RNA
gggtccagcctgacaaacacctg

SEQ ID NO: 61310 - RNA, 23 nt, synthetic construct
  source 1..23: mol_type = other RNA
ggcggggtccagcctgacaaaca

SEQ ID NO: 61311 - RNA, 23 nt, synthetic construct
  source 1..23: mol_type = other RNA
gccgcacatctggccctggtggg

SEQ ID NO: 61312 - RNA, 23 nt, synthetic construct
  source 1..23: mol_type = other RNA
ggaggcactcggccccaggggtg

SEQ ID NO: 61313 - RNA, 23 nt, synthetic construct
  source 1..23: mol_type = other RNA
ccgggggacagacacagccggac

SEQ ID NO: 61314 - RNA, 23 nt, synthetic construct
  source 1..23: mol_type = other RNA
ggagcaggtggtgccggtggtcc

SEQ ID NO: 61315 - RNA, 23 nt, synthetic construct
  source 1..23: mol_type = other RNA
agggtgccccgcagggctggtag

SEQ ID NO: 61316 - RNA, 23 nt, synthetic construct
  source 1..23: mol_type = other RNA
aggtttttaggcagggtgccccg

SEQ ID NO: 61317 - RNA, 23 nt, synthetic construct
  source 1..23: mol_type = other RNA
ggacatgccacagccttcctgat

SEQ ID NO: 61318 - RNA, 23 nt, synthetic construct
  source 1..23: mol_type = other RNA
gtaccagctggaccagcggcaga

SEQ ID NO: 61319 - RNA, 23 nt, synthetic construct
  source 1..23: mol_type = other RNA
ggtaccctctctgcctcaggttt

SEQ ID NO: 61320 - RNA, 23 nt, synthetic construct
  source 1..23: mol_type = other RNA
gggacagtgggttctgtggagcc

SEQ ID NO: 61321 - RNA, 23 nt, synthetic construct
  source 1..23: mol_type = other RNA
ctgtaaagctggtagctgtgggt

SEQ ID NO: 61322 - RNA, 23 nt, synthetic construct
  source 1..23: mol_type = other RNA
ccgtggccgtggtcctggaggtg

SEQ ID NO: 61323 - RNA, 23 nt, synthetic construct
  source 1..23: mol_type = other RNA
gccgtggccgtggtcctggaggt

SEQ ID NO: 61324 - RNA, 23 nt, synthetic construct
  source 1..23: mol_type = other RNA
ggccgtggccgtggtcctggagg

SEQ ID NO: 61325 - RNA, 23 nt, synthetic construct
  source 1..23: mol_type = other RNA
tggccgtggccgtggtcctggag

SEQ ID NO: 61326 - RNA, 23 nt, synthetic construct
  source 1..23: mol_type = other RNA
ctgtaaagctggtagctgtgggt

SEQ ID NO: 61327 - RNA, 23 nt, synthetic construct
  source 1..23: mol_type = other RNA
ccgtggccgtggtcctggaggtg

SEQ ID NO: 61328 - RNA, 23 nt, synthetic construct
  source 1..23: mol_type = other RNA
gccgtggccgtggtcctggaggt

SEQ ID NO: 61329 - RNA, 23 nt, synthetic construct
  source 1..23: mol_type = other RNA
ggccgtggccgtggtcctggagg

SEQ ID NO: 61330 - RNA, 23 nt, synthetic construct
  source 1..23: mol_type = other RNA
tggccgtggccgtggtcctggag

SEQ ID NO: 61331 - RNA, 23 nt, synthetic construct
  source 1..23: mol_type = other RNA
ctgtaaagctggtagctgtgggt

SEQ ID NO: 61332 - RNA, 23 nt, synthetic construct
  source 1..23: mol_type = other RNA
tttgatgggcaggtgcttgttca

SEQ ID NO: 61333 - RNA, 23 nt, synthetic construct
  source 1..23: mol_type = other RNA
ccaggctctggcagggcacctca

SEQ ID NO: 61334 - RNA, 23 nt, synthetic construct
  source 1..23: mol_type = other RNA
gaggctccccctgcagctggaca

SEQ ID NO: 61335 - RNA, 23 nt, synthetic construct
  source 1..23: mol_type = other RNA
gcaggtggtggtacctggggccg

SEQ ID NO: 61336 - RNA, 23 nt, synthetic construct
  source 1..23: mol_type = other RNA
caggtgcccaggcagagccggtg

SEQ ID NO: 61337 - RNA, 23 nt, synthetic construct
  source 1..23: mol_type = other RNA
ttgtcacagccaggggcagggga

SEQ ID NO: 61338 - RNA, 23 nt, synthetic construct
  source 1..23: mol_type = other RNA
gggggacagacacagccggacac

SEQ ID NO: 61339 - RNA, 23 nt, synthetic construct
  source 1..23: mol_type = other RNA
ccggacacgcagtgtgtgctgaa

SEQ ID NO: 61340 - RNA, 23 nt, synthetic construct
  source 1..23: mol_type = other RNA
gacaccaggctgggcctgggcac

SEQ ID NO: 61341 - RNA, 23 nt, synthetic construct
  source 1..23: mol_type = other RNA
gacaccaggctgggcctgggcac

SEQ ID NO: 61342 - RNA, 23 nt, synthetic construct
  source 1..23: mol_type = other RNA
gacaccaggctgggcctgggcac

SEQ ID NO: 61343 - RNA, 23 nt, synthetic construct
  source 1..23: mol_type = other RNA
gacaccaggctgggcctgggcac

SEQ ID NO: 61344 - RNA, 23 nt, synthetic construct
  source 1..23: mol_type = other RNA
agacagtcgtccctctggttgtt

SEQ ID NO: 61345 - RNA, 23 nt, synthetic construct
  source 1..23: mol_type = other RNA
acggaccggctacgcgtggcaaa

SEQ ID NO: 61346 - RNA, 23 nt, synthetic construct
  source 1..23: mol_type = other RNA
tggcgttgtgggcatagaactcg

SEQ ID NO: 61347 - RNA, 23 nt, synthetic construct
  source 1..23: mol_type = other RNA
gtggttccgtcccgctggagaca

SEQ ID NO: 61348 - RNA, 23 nt, synthetic construct
  source 1..23: mol_type = other RNA
cagaagggcgtgcagccacactc

SEQ ID NO: 61349 - RNA, 23 nt, synthetic construct
  source 1..23: mol_type = other RNA
gagccaacaccagcgtccggcac

SEQ ID NO: 61350 - RNA, 23 nt, synthetic construct
  source 1..23: mol_type = other RNA
ccaccacggaccggctacgcgtg

SEQ ID NO: 61351 - RNA, 23 nt, synthetic construct
  source 1..23: mol_type = other RNA
acagtcgtccctctggttgttgg

SEQ ID NO: 61352 - RNA, 23 nt, synthetic construct
  source 1..23: mol_type = other RNA
gaggacacagtggacacgctgaa

SEQ ID NO: 61353 - RNA, 23 nt, synthetic construct
  source 1..23: mol_type = other RNA
ggttgagcagagggggctttggg

SEQ ID NO: 61354 - RNA, 23 nt, synthetic construct
  source 1..23: mol_type = other RNA
cggaccggctacgcgtggcaaag

SEQ ID NO: 61355 - RNA, 23 nt, synthetic construct
  source 1..23: mol_type = other RNA
atgcggtcacagtccacctgctg

SEQ ID NO: 61356 - RNA, 23 nt, synthetic construct
  source 1..23: mol_type = other RNA
gtccgacactttgatgggcaggt

SEQ ID NO: 61357 - RNA, 23 nt, synthetic construct
  source 1..23: mol_type = other RNA
ggtccgacactttgatgggcagg

SEQ ID NO: 61358 - RNA, 23 nt, synthetic construct
  source 1..23: mol_type = other RNA
gaagggcgtgcagccacactcat

SEQ ID NO: 61359 - RNA, 23 nt, synthetic construct
  source 1..23: mol_type = other RNA
ttgttccagggcgtcccagtgac

SEQ ID NO: 61360 - RNA, 23 nt, synthetic construct
  source 1..23: mol_type = other RNA
ctgtgaggatccaggtggtccct

SEQ ID NO: 61361 - RNA, 23 nt, synthetic construct
  source 1..23: mol_type = other RNA
ctgtgaggatccaggtggtccct

SEQ ID NO: 61362 - RNA, 23 nt, synthetic construct
  source 1..23: mol_type = other RNA
ctgtgaggatccaggtggtccct

SEQ ID NO: 61363 - RNA, 23 nt, synthetic construct
  source 1..23: mol_type = other RNA
ctgtgaggatccaggtggtccct

SEQ ID NO: 61364 - RNA, 23 nt, synthetic construct
  source 1..23: mol_type = other RNA
ctgtgaggatccaggtggtccct

SEQ ID NO: 61365 - RNA, 23 nt, synthetic construct
  source 1..23: mol_type = other RNA
ctgtgaggatccaggtggtccct

SEQ ID NO: 61366 - RNA, 23 nt, synthetic construct
  source 1..23: mol_type = other RNA
tccaggtggacagagcatgggga

SEQ ID NO: 61367 - RNA, 23 nt, synthetic construct
  source 1..23: mol_type = other RNA
ggctcgggtccgacactttgatg

SEQ ID NO: 61368 - RNA, 23 nt, synthetic construct
  source 1..23: mol_type = other RNA
ctcgggtccgacactttgatggg

SEQ ID NO: 61369 - RNA, 23 nt, synthetic construct
  source 1..23: mol_type = other RNA
ttccagggcgtcccagtgacatc

SEQ ID NO: 61370 - RNA, 23 nt, synthetic construct
  source 1..23: mol_type = other RNA
gctccaggtggacagagcatggg

SEQ ID NO: 61371 - RNA, 23 nt, synthetic construct
  source 1..23: mol_type = other RNA
cggatttcatagttgaagcacat

SEQ ID NO: 61372 - RNA, 23 nt, synthetic construct
  source 1..23: mol_type = other RNA
cggatttcatagttgaagcacat

SEQ ID NO: 61373 - RNA, 23 nt, synthetic construct
  source 1..23: mol_type = other RNA
cggatttcatagttgaagcacat

SEQ ID NO: 61374 - RNA, 23 nt, synthetic construct
  source 1..23: mol_type = other RNA
cggatttcatagttgaagcacat

SEQ ID NO: 61375 - RNA, 23 nt, synthetic construct
  source 1..23: mol_type = other RNA
ttgcctggaccagcctgtctgcc

SEQ ID NO: 61376 - RNA, 23 nt, synthetic construct
  source 1..23: mol_type = other RNA
agaagggcgtgcagccacactca

SEQ ID NO: 61377 - RNA, 23 nt, synthetic construct
  source 1..23: mol_type = other RNA
ccaacaccagcgtccggcacgcg

SEQ ID NO: 61378 - RNA, 23 nt, synthetic construct
  source 1..23: mol_type = other RNA
ggtcgtccctggagtggaggagg

SEQ ID NO: 61379 - RNA, 23 nt, synthetic construct
  source 1..23: mol_type = other RNA
gcacactccccgggcgcggcaga

SEQ ID NO: 61380 - RNA, 23 nt, synthetic construct
  source 1..23: mol_type = other RNA
caggtggacagagcatggggatg

SEQ ID NO: 61381 - RNA, 23 nt, synthetic construct
  source 1..23: mol_type = other RNA
gaggaggacacagtggacacgct

SEQ ID NO: 61382 - RNA, 23 nt, synthetic construct
  source 1..23: mol_type = other RNA
agccaacaccagcgtccggcacg

SEQ ID NO: 61383 - RNA, 23 nt, synthetic construct
  source 1..23: mol_type = other RNA
agagccaacaccagcgtccggca

SEQ ID NO: 61384 - RNA, 23 nt, synthetic construct
  source 1..23: mol_type = other RNA
cagagccaacaccagcgtccggc

SEQ ID NO: 61385 - RNA, 23 nt, synthetic construct
  source 1..23: mol_type = other RNA
cgtgtggcagctccggaggcact

SEQ ID NO: 61386 - RNA, 23 nt, synthetic construct
  source 1..23: mol_type = other RNA
aggtcgtccctggagtggaggag

SEQ ID NO: 61387 - RNA, 23 nt, synthetic construct
  source 1..23: mol_type = other RNA
cactttggtgggtgggcaggtga

SEQ ID NO: 61388 - RNA, 23 nt, synthetic construct
  source 1..23: mol_type = other RNA
tggctccaggtggacagagcatg

SEQ ID NO: 61389 - RNA, 23 nt, synthetic construct
  source 1..23: mol_type = other RNA
aggatccaggtggtccctggggt

SEQ ID NO: 61390 - RNA, 23 nt, synthetic construct
  source 1..23: mol_type = other RNA
aggatccaggtggtccctggggt

SEQ ID NO: 61391 - RNA, 23 nt, synthetic construct
  source 1..23: mol_type = other RNA
aggatccaggtggtccctggggt

SEQ ID NO: 61392 - RNA, 23 nt, synthetic construct
  source 1..23: mol_type = other RNA
aggatccaggtggtccctggggt

SEQ ID NO: 61393 - RNA, 23 nt, synthetic construct
  source 1..23: mol_type = other RNA
aggatccaggtggtccctggggt

SEQ ID NO: 61394 - RNA, 23 nt, synthetic construct
  source 1..23: mol_type = other RNA
aggatccaggtggtccctggggt

SEQ ID NO: 61395 - RNA, 23 nt, synthetic construct
  source 1..23: mol_type = other RNA
gcgtgtggcagctccggaggcac

SEQ ID NO: 61396 - RNA, 23 nt, synthetic construct
  source 1..23: mol_type = other RNA
tgttccagggcgtcccagtgaca

SEQ ID NO: 61397 - RNA, 23 nt, synthetic construct
  source 1..23: mol_type = other RNA
gtgtggcagctccggaggcactc

SEQ ID NO: 61398 - RNA, 23 nt, synthetic construct
  source 1..23: mol_type = other RNA
acacagaagggcgtgcagccaca

SEQ ID NO: 61399 - RNA, 23 nt, synthetic construct
  source 1..23: mol_type = other RNA
tttcatagttgaagcacatcttg

SEQ ID NO: 61400 - RNA, 23 nt, synthetic construct
  source 1..23: mol_type = other RNA
tttcatagttgaagcacatcttg

SEQ ID NO: 61401 - RNA, 23 nt, synthetic construct
  source 1..23: mol_type = other RNA
tttggaactggtggctgtgggtg

SEQ ID NO: 61402 - RNA, 23 nt, synthetic construct
  source 1..23: mol_type = other RNA
tttcatagttgaagcacatcttg

SEQ ID NO: 61403 - RNA, 23 nt, synthetic construct
  source 1..23: mol_type = other RNA
tttcatagttgaagcacatcttg

SEQ ID NO: 61404 - RNA, 23 nt, synthetic construct
  source 1..23: mol_type = other RNA
tttggaactggtggctgtgggtg

SEQ ID NO: 61405 - RNA, 23 nt, synthetic construct
  source 1..23: mol_type = other RNA
gtcgtccccagagtggaggaggg

SEQ ID NO: 61406 - RNA, 23 nt, synthetic construct
  source 1..23: mol_type = other RNA
gagcatggggatggaggcagaac

SEQ ID NO: 61407 - RNA, 23 nt, synthetic construct
  source 1..23: mol_type = other RNA
aaaggggtcctgctggcccctca

SEQ ID NO: 61408 - RNA, 23 nt, synthetic construct
  source 1..23: mol_type = other RNA
ggtggccgtggtggtaagcactg

SEQ ID NO: 61409 - RNA, 23 nt, synthetic construct
  source 1..23: mol_type = other RNA
ggtggccgtggtggtaagcactg

SEQ ID NO: 61410 - RNA, 23 nt, synthetic construct
  source 1..23: mol_type = other RNA
ctgggccttgatgacaacacggg

SEQ ID NO: 61411 - RNA, 23 nt, synthetic construct
  source 1..23: mol_type = other RNA
gcgtagttctcattctccacact

SEQ ID NO: 61412 - RNA, 23 nt, synthetic construct
  source 1..23: mol_type = other RNA
cttgatgacaacacgggtgacca

SEQ ID NO: 61413 - RNA, 23 nt, synthetic construct
  source 1..23: mol_type = other RNA
ggacagggctggagtcgagtgct

SEQ ID NO: 61414 - RNA, 23 nt, synthetic construct
  source 1..23: mol_type = other RNA
ggacagggctggagtcgagtgct

SEQ ID NO: 61415 - RNA, 23 nt, synthetic construct
  source 1..23: mol_type = other RNA
ggacagggctggagtcgagtgct

SEQ ID NO: 61416 - RNA, 23 nt, synthetic construct
  source 1..23: mol_type = other RNA
tggacgagctgggaaccgtggag

SEQ ID NO: 61417 - RNA, 23 nt, synthetic construct
  source 1..23: mol_type = other RNA
agttctcattctccacactgagg

SEQ ID NO: 61418 - RNA, 23 nt, synthetic construct
  source 1..23: mol_type = other RNA
gccgtggtggtaagcactgtgga

SEQ ID NO: 61419 - RNA, 23 nt, synthetic construct
  source 1..23: mol_type = other RNA
gccgtggtggtaagcactgtgga

SEQ ID NO: 61420 - RNA, 23 nt, synthetic construct
  source 1..23: mol_type = other RNA
actcatagtggaagtcacagggc

SEQ ID NO: 61421 - RNA, 23 nt, synthetic construct
  source 1..23: mol_type = other RNA
ccgccgtgggtgcaggggcactg

SEQ ID NO: 61422 - RNA, 23 nt, synthetic construct
  source 1..23: mol_type = other RNA
gacgagctgggaaccgtggaggc

SEQ ID NO: 61423 - RNA, 23 nt, synthetic construct
  source 1..23: mol_type = other RNA
ggacgagctgggaaccgtggagg

SEQ ID NO: 61424 - RNA, 23 nt, synthetic construct
  source 1..23: mol_type = other RNA
gtggtagtcagcactttggtagt

SEQ ID NO: 61425 - RNA, 23 nt, synthetic construct
  source 1..23: mol_type = other RNA
ttcggttgctgtggtctgggttg

SEQ ID NO: 61426 - RNA, 23 nt, synthetic construct
  source 1..23: mol_type = other RNA
ccctgggccttgatgacaacacg

SEQ ID NO: 61427 - RNA, 23 nt, synthetic construct
  source 1..23: mol_type = other RNA
ggtgcggccgccgtgggtgcagg

SEQ ID NO: 61428 - RNA, 23 nt, synthetic construct
  source 1..23: mol_type = other RNA
agtcacagggctggctcgggtcc

SEQ ID NO: 61429 - RNA, 23 nt, synthetic construct
  source 1..23: mol_type = other RNA
gtgtgagctgttcctggggtgga

SEQ ID NO: 61430 - RNA, 23 nt, synthetic construct
  source 1..23: mol_type = other RNA
gtgtgagctgttcctggggtgga

SEQ ID NO: 61431 - RNA, 23 nt, synthetic construct
  source 1..23: mol_type = other RNA
gtgtgagctgttcctggggtgga

SEQ ID NO: 61432 - RNA, 23 nt, synthetic construct
  source 1..23: mol_type = other RNA
gtgtgagctgttcctggggtgga

SEQ ID NO: 61433 - RNA, 23 nt, synthetic construct
  source 1..23: mol_type = other RNA
gtgtgagctgttcctggggtgga

SEQ ID NO: 61434 - RNA, 23 nt, synthetic construct
  source 1..23: mol_type = other RNA
agtggccgtagttgcagcagaac

SEQ ID NO: 61435 - RNA, 23 nt, synthetic construct
  source 1..23: mol_type = other RNA
agtggccgtagttgcagcagaac

SEQ ID NO: 61436 - RNA, 23 nt, synthetic construct
  source 1..23: mol_type = other RNA
agtggccgtagttgcagcagaac

SEQ ID NO: 61437 - RNA, 23 nt, synthetic construct
  source 1..23: mol_type = other RNA
agtggccgtagttgcagcagaac

SEQ ID NO: 61438 - RNA, 23 nt, synthetic construct
  source 1..23: mol_type = other RNA
ggtcggtcttattgtagatgact

SEQ ID NO: 61439 - RNA, 23 nt, synthetic construct
  source 1..23: mol_type = other RNA
cgttgtccgtcaggccgcacttc

SEQ ID NO: 61440 - RNA, 23 nt, synthetic construct
  source 1..23: mol_type = other RNA
ggtggccgtgatcgtagtggccg

SEQ ID NO: 61441 - RNA, 23 nt, synthetic construct
  source 1..23: mol_type = other RNA
ggtggccgtgatcgtagtggccg

SEQ ID NO: 61442 - RNA, 23 nt, synthetic construct
  source 1..23: mol_type = other RNA
ggtggccgtgatcgtagtggccg

SEQ ID NO: 61443 - RNA, 23 nt, synthetic construct
  source 1..23: mol_type = other RNA
ggtggccgtgatcgtagtggccg

SEQ ID NO: 61444 - RNA, 23 nt, synthetic construct
  source 1..23: mol_type = other RNA
tgcaccgacactgaaccctcgtc

SEQ ID NO: 61445 - RNA, 23 nt, synthetic construct
  source 1..23: mol_type = other RNA
gttgtccgtcaggccgcacttcc

SEQ ID NO: 61446 - RNA, 23 nt, synthetic construct
  source 1..23: mol_type = other RNA
tcaaggggctcattgtcgtctct

SEQ ID NO: 61447 - RNA, 23 nt, synthetic construct
  source 1..23: mol_type = other RNA
gagtgttggcgccaggctcgtgg

SEQ ID NO: 61448 - RNA, 23 nt, synthetic construct
  source 1..23: mol_type = other RNA
accagtgcgtggcactccgcaaa

SEQ ID NO: 61449 - RNA, 23 nt, synthetic construct
  source 1..23: mol_type = other RNA
acatcagcccccgcatgcggtca

SEQ ID NO: 61450 - RNA, 23 nt, synthetic construct
  source 1..23: mol_type = other RNA
ggatccagtggactcagtcgtag

SEQ ID NO: 61451 - RNA, 23 nt, synthetic construct
  source 1..23: mol_type = other RNA
ggatccagtggactcagtcgtag

SEQ ID NO: 61452 - RNA, 23 nt, synthetic construct
  source 1..23: mol_type = other RNA
tgctcggggtcacccatagggtg

SEQ ID NO: 61453 - RNA, 23 nt, synthetic construct
  source 1..23: mol_type = other RNA
ggaaagggctggagtcgagtgct

SEQ ID NO: 61454 - RNA, 23 nt, synthetic construct
  source 1..23: mol_type = other RNA
gagccggtggccccggttgtggt

SEQ ID NO: 61455 - RNA, 23 nt, synthetic construct
  source 1..23: mol_type = other RNA
ctgatccacactggaagcgtgcg

SEQ ID NO: 61456 - RNA, 23 nt, synthetic construct
  source 1..23: mol_type = other RNA
gagccggtggccccggttgtggt

SEQ ID NO: 61457 - RNA, 23 nt, synthetic construct
  source 1..23: mol_type = other RNA
caggaatgtccacacgcatggtg

SEQ ID NO: 61458 - RNA, 23 nt, synthetic construct
  source 1..23: mol_type = other RNA
gcccccatgtgggttgtagaagt

SEQ ID NO: 61459 - RNA, 23 nt, synthetic construct
  source 1..23: mol_type = other RNA
ggaggagggcatggccgtagagc

SEQ ID NO: 61460 - RNA, 23 nt, synthetic construct
  source 1..23: mol_type = other RNA
ggaggagggcatggccgtagagc

SEQ ID NO: 61461 - RNA, 23 nt, synthetic construct
  source 1..23: mol_type = other RNA
ccagtggactcagtcgtagtggc

SEQ ID NO: 61462 - RNA, 23 nt, synthetic construct
  source 1..23: mol_type = other RNA
ccagtggactcagtcgtagtggc

SEQ ID NO: 61463 - RNA, 23 nt, synthetic construct
  source 1..23: mol_type = other RNA
gcatggggtagctgtagtccagc

SEQ ID NO: 61464 - RNA, 23 nt, synthetic construct
  source 1..23: mol_type = other RNA
gcatggggtagctgtagtccagc

SEQ ID NO: 61465 - RNA, 23 nt, synthetic construct
  source 1..23: mol_type = other RNA
gcatggggtagctgtagtccagc

SEQ ID NO: 61466 - RNA, 23 nt, synthetic construct
  source 1..23: mol_type = other RNA
gcatggggtagctgtagtccagc

SEQ ID NO: 61467 - RNA, 23 nt, synthetic construct
  source 1..23: mol_type = other RNA
tgaggacggagccgttggacgcc

SEQ ID NO: 61468 - RNA, 23 nt, synthetic construct
  source 1..23: mol_type = other RNA
cacggcactcgaggcccaggggc

SEQ ID NO: 61469 - RNA, 23 nt, synthetic construct
  source 1..23: mol_type = other RNA
cacggcactcgaggcccaggggc

SEQ ID NO: 61470 - RNA, 23 nt, synthetic construct
  source 1..23: mol_type = other RNA
cacggcactcgaggcccaggggc

SEQ ID NO: 61471 - RNA, 23 nt, synthetic construct
  source 1..23: mol_type = other RNA
cacggcactcgaggcccaggggc

SEQ ID NO: 61472 - RNA, 23 nt, synthetic construct
  source 1..23: mol_type = other RNA
gcgtatcttgtagggtgggtccc

SEQ ID NO: 61473 - RNA, 23 nt, synthetic construct
  source 1..23: mol_type = other RNA
gccgaagtggacgtcacagtgca

SEQ ID NO: 61474 - RNA, 23 nt, synthetic construct
  source 1..23: mol_type = other RNA
gcgatcaagcaggcgccaagccc

SEQ ID NO: 61475 - RNA, 23 nt, synthetic construct
  source 1..23: mol_type = other RNA
cgtcggggcaccgccatccatgg

SEQ ID NO: 61476 - RNA, 23 nt, synthetic construct
  source 1..23: mol_type = other RNA
gcgtgcgtgccgtccctgggctg

SEQ ID NO: 61477 - RNA, 23 nt, synthetic construct
  source 1..23: mol_type = other RNA
gcgtgcgtgccgtccctgggctg

SEQ ID NO: 61478 - RNA, 23 nt, synthetic construct
  source 1..23: mol_type = other RNA
aatccgtgctgcgcgggcgctcc

SEQ ID NO: 61479 - RNA, 23 nt, synthetic construct
  source 1..23: mol_type = other RNA
cgatcaagcaggcgccaagccca

SEQ ID NO: 61480 - RNA, 23 nt, synthetic construct
  source 1..23: mol_type = other RNA
tgatgcggacttgacaggagtcc

SEQ ID NO: 61481 - RNA, 23 nt, synthetic construct
  source 1..23: mol_type = other RNA
caccgccttaaaggtcccctctt

SEQ ID NO: 61482 - RNA, 23 nt, synthetic construct
  source 1..23: mol_type = other RNA
acgtcttggccatgtccttgcaa

SEQ ID NO: 61483 - RNA, 23 nt, synthetic construct
  source 1..23: mol_type = other RNA
cccaagctccccgtcgtccctgg

SEQ ID NO: 61484 - RNA, 23 nt, synthetic construct
  source 1..23: mol_type = other RNA
taaaggtcccctcttggaggatc

SEQ ID NO: 61485 - RNA, 23 nt, synthetic construct
  source 1..23: mol_type = other RNA
caggtcgtccccggagtggagga

SEQ ID NO: 61486 - RNA, 23 nt, synthetic construct
  source 1..23: mol_type = other RNA
caggtcgtccccggagtggagga

SEQ ID NO: 61487 - RNA, 23 nt, synthetic construct
  source 1..23: mol_type = other RNA
caggtcgtccccggagtggagga

SEQ ID NO: 61488 - RNA, 23 nt, synthetic construct
  source 1..23: mol_type = other RNA
caggtcgtccccggagtggagga

SEQ ID NO: 61489 - RNA, 23 nt, synthetic construct
  source 1..23: mol_type = other RNA
cttgcaactggcggcagtggttc

SEQ ID NO: 61490 - RNA, 23 nt, synthetic construct
  source 1..23: mol_type = other RNA
tgacattgcaccgttgggtcctg

SEQ ID NO: 61491 - RNA, 23 nt, synthetic construct
  source 1..23: mol_type = other RNA
tgtaggtcctgtcctcataggtg

SEQ ID NO: 61492 - RNA, 23 nt, synthetic construct
  source 1..23: mol_type = other RNA
aggaacacgccgccgtccgcttg

SEQ ID NO: 61493 - RNA, 23 nt, synthetic construct
  source 1..23: mol_type = other RNA
ctcggggtcacccatagggtggt

SEQ ID NO: 61494 - RNA, 23 nt, synthetic construct
  source 1..23: mol_type = other RNA
cagccgtccacaggcacgaagga

SEQ ID NO: 61495 - RNA, 23 nt, synthetic construct
  source 1..23: mol_type = other RNA
cggctctttggaagcggtgctgg

SEQ ID NO: 61496 - RNA, 23 nt, synthetic construct
  source 1..23: mol_type = other RNA
ctcagtgctggaagggcggttgc

SEQ ID NO: 61497 - RNA, 23 nt, synthetic construct
  source 1..23: mol_type = other RNA
ctcagtgctggaagggcggttgc

SEQ ID NO: 61498 - RNA, 23 nt, synthetic construct
  source 1..23: mol_type = other RNA
ggagggcgtggccgtagagctgg

SEQ ID NO: 61499 - RNA, 23 nt, synthetic construct
  source 1..23: mol_type = other RNA
ctcagtgctggaagggcggttgc

SEQ ID NO: 61500 - RNA, 23 nt, synthetic construct
  source 1..23: mol_type = other RNA
ggagggcgtggccgtagagctgg

SEQ ID NO: 61501 - RNA, 23 nt, synthetic construct
  source 1..23: mol_type = other RNA
ctcagtgctggaagggcggttgc

SEQ ID NO: 61502 - RNA, 23 nt, synthetic construct
  source 1..23: mol_type = other RNA
caccatcacggtggctatagtgc

SEQ ID NO: 61503 - RNA, 23 nt, synthetic construct
  source 1..23: mol_type = other RNA
cagatgcccatgtgtgcgttgaa

SEQ ID NO: 61504 - RNA, 23 nt, synthetic construct
  source 1..23: mol_type = other RNA
cagtagtcctgggccaagatgta

SEQ ID NO: 61505 - RNA, 23 nt, synthetic construct
  source 1..23: mol_type = other RNA
gctcggggtcacccatagggtgg

SEQ ID NO: 61506 - RNA, 23 nt, synthetic construct
  source 1..23: mol_type = other RNA
gatgctcggggtcacccataggg

SEQ ID NO: 61507 - RNA, 23 nt, synthetic construct
  source 1..23: mol_type = other RNA
gcctgggcacggcactcgaggcc

SEQ ID NO: 61508 - RNA, 23 nt, synthetic construct
  source 1..23: mol_type = other RNA
gcctgggcacggcactcgaggcc

SEQ ID NO: 61509 - RNA, 23 nt, synthetic construct
  source 1..23: mol_type = other RNA
gcctgggcacggcactcgaggcc

SEQ ID NO: 61510 - RNA, 23 nt, synthetic construct
  source 1..23: mol_type = other RNA
gcctgggcacggcactcgaggcc

SEQ ID NO: 61511 - RNA, 23 nt, synthetic construct
  source 1..23: mol_type = other RNA
tgagggccgccgtcgaccggatg

SEQ ID NO: 61512 - RNA, 23 nt, synthetic construct
  source 1..23: mol_type = other RNA
ctcggctctgtgaggatccaggt

SEQ ID NO: 61513 - RNA, 23 nt, synthetic construct
  source 1..23: mol_type = other RNA
ctcggctctgtgaggatccaggt

SEQ ID NO: 61514 - RNA, 23 nt, synthetic construct
  source 1..23: mol_type = other RNA
ctcggctctgtgaggatccaggt

SEQ ID NO: 61515 - RNA, 23 nt, synthetic construct
  source 1..23: mol_type = other RNA
ctcggctctgtgaggatccaggt

SEQ ID NO: 61516 - RNA, 23 nt, synthetic construct
  source 1..23: mol_type = other RNA
cagggcacgtattcgcagcagag

SEQ ID NO: 61517 - RNA, 23 nt, synthetic construct
  source 1..23: mol_type = other RNA
ccggtttcacccacggggtgggc

SEQ ID NO: 61518 - RNA, 23 nt, synthetic construct
  source 1..23: mol_type = other RNA
cgtcgtccctggaagggctgagc

SEQ ID NO: 61519 - RNA, 23 nt, synthetic construct
  source 1..23: mol_type = other RNA
ggttgcggtcgtagtggctgctg

SEQ ID NO: 61520 - RNA, 23 nt, synthetic construct
  source 1..23: mol_type = other RNA
gacattgcaccgttgggtcctgg

SEQ ID NO: 61521 - RNA, 23 nt, synthetic construct
  source 1..23: mol_type = other RNA
acgctggtcttccggtcccagga

SEQ ID NO: 61522 - RNA, 23 nt, synthetic construct
  source 1..23: mol_type = other RNA
gatccacactggaggcgtgagtg

SEQ ID NO: 61523 - RNA, 23 nt, synthetic construct
  source 1..23: mol_type = other RNA
gatccacactggaggcgtgagtg

SEQ ID NO: 61524 - RNA, 23 nt, synthetic construct
  source 1..23: mol_type = other RNA
gatccacactggaggcgtgagtg

SEQ ID NO: 61525 - RNA, 23 nt, synthetic construct
  source 1..23: mol_type = other RNA
tgggtccagcaggacgacacggt

SEQ ID NO: 61526 - RNA, 23 nt, synthetic construct
  source 1..23: mol_type = other RNA
cgtcccctgcagtggtcgtcact

SEQ ID NO: 61527 - RNA, 23 nt, synthetic construct
  source 1..23: mol_type = other RNA
cactgcaccgacactgaaccctc

SEQ ID NO: 61528 - RNA, 23 nt, synthetic construct
  source 1..23: mol_type = other RNA
agtggactcagtcgtagtggctg

SEQ ID NO: 61529 - RNA, 23 nt, synthetic construct
  source 1..23: mol_type = other RNA
agtggactcagtcgtagtggctg

SEQ ID NO: 61530 - RNA, 23 nt, synthetic construct
  source 1..23: mol_type = other RNA
acgaaggaaacgctgcaggtgac

SEQ ID NO: 61531 - RNA, 23 nt, synthetic construct
  source 1..23: mol_type = other RNA
gagcgtgttggaagggtggatgt

SEQ ID NO: 61532 - RNA, 23 nt, synthetic construct
  source 1..23: mol_type = other RNA
agcgtgcgtgccgtccctgggct

SEQ ID NO: 61533 - RNA, 23 nt, synthetic construct
  source 1..23: mol_type = other RNA
ggcgtgcgtgccgtccctgggct

SEQ ID NO: 61534 - RNA, 23 nt, synthetic construct
  source 1..23: mol_type = other RNA
gtcaccgtggaacctctggttgt

SEQ ID NO: 61535 - RNA, 23 nt, synthetic construct
  source 1..23: mol_type = other RNA
cacctcaaggcggcccctgcagt

SEQ ID NO: 61536 - RNA, 23 nt, synthetic construct
  source 1..23: mol_type = other RNA
taccaagggtgcttgtgtatctg

SEQ ID NO: 61537 - RNA, 23 nt, synthetic construct
  source 1..23: mol_type = other RNA
cattcacctgccggagagggatg

SEQ ID NO: 61538 - RNA, 23 nt, synthetic construct
  source 1..23: mol_type = other RNA
cacatgcttagtttgttccaggg

SEQ ID NO: 61539 - RNA, 23 nt, synthetic construct
  source 1..23: mol_type = other RNA
gcgtatttgggatccagctccag

SEQ ID NO: 61540 - RNA, 23 nt, synthetic construct
  source 1..23: mol_type = other RNA
aggcgtgcgtgccgtccctgggc

SEQ ID NO: 61541 - RNA, 23 nt, synthetic construct
  source 1..23: mol_type = other RNA
ctcgtccgtgcagttgccggccg

SEQ ID NO: 61542 - RNA, 23 nt, synthetic construct
  source 1..23: mol_type = other RNA
tagtttccgtccttgtcgtagca

SEQ ID NO: 61543 - RNA, 23 nt, synthetic construct
  source 1..23: mol_type = other RNA
gtgcgtcccccaccacggaccgg

SEQ ID NO: 61544 - RNA, 23 nt, synthetic construct
  source 1..23: mol_type = other RNA
gtaggcgtagcgctgggacttgg

SEQ ID NO: 61545 - RNA, 23 nt, synthetic construct
  source 1..23: mol_type = other RNA
gggggagtaccactggtctgtgt

SEQ ID NO: 61546 - RNA, 23 nt, synthetic construct
  source 1..23: mol_type = other RNA
gggggagtaccactggtctgtgt

SEQ ID NO: 61547 - RNA, 23 nt, synthetic construct
  source 1..23: mol_type = other RNA
gggggagtaccactggtctgtgt

SEQ ID NO: 61548 - RNA, 23 nt, synthetic construct
  source 1..23: mol_type = other RNA
gggggagtaccactggtctgtgt

SEQ ID NO: 61549 - RNA, 23 nt, synthetic construct
  source 1..23: mol_type = other RNA
gggggagtaccactggtctgtgt

SEQ ID NO: 61550 - RNA, 23 nt, synthetic construct
  source 1..23: mol_type = other RNA
gacctcgcggacacacacggtgg

SEQ ID NO: 61551 - RNA, 23 nt, synthetic construct
  source 1..23: mol_type = other RNA
agcgggggactctgttggctgtt

SEQ ID NO: 61552 - RNA, 23 nt, synthetic construct
  source 1..23: mol_type = other RNA
gtcgagtgctgggtggtaccggt

SEQ ID NO: 61553 - RNA, 23 nt, synthetic construct
  source 1..23: mol_type = other RNA
gtcgagtgctgggtggtaccggt

SEQ ID NO: 61554 - RNA, 23 nt, synthetic construct
  source 1..23: mol_type = other RNA
gtcgagtgctgggtggtaccggt

SEQ ID NO: 61555 - RNA, 23 nt, synthetic construct
  source 1..23: mol_type = other RNA
tcggtcttattgtagatgacttc

SEQ ID NO: 61556 - RNA, 23 nt, synthetic construct
  source 1..23: mol_type = other RNA
caggcgcgagcaccagtgccggg

SEQ ID NO: 61557 - RNA, 23 nt, synthetic construct
  source 1..23: mol_type = other RNA
agttgaggaacacgccgccgtcc

SEQ ID NO: 61558 - RNA, 23 nt, synthetic construct
  source 1..23: mol_type = other RNA
gccgcggcaagtgggctggcagg

SEQ ID NO: 61559 - RNA, 23 nt, synthetic construct
  source 1..23: mol_type = other RNA
gcccaagctccccgtcgtccctg

SEQ ID NO: 61560 - RNA, 23 nt, synthetic construct
  source 1..23: mol_type = other RNA
caaccccgtagaaggtgccattg

SEQ ID NO: 61561 - RNA, 23 nt, synthetic construct
  source 1..23: mol_type = other RNA
aagggcggttgcagtccctggac

SEQ ID NO: 61562 - RNA, 23 nt, synthetic construct
  source 1..23: mol_type = other RNA
gactcagtcgtagtggctgttgt

SEQ ID NO: 61563 - RNA, 23 nt, synthetic construct
  source 1..23: mol_type = other RNA
aagggcggttgcagtccctggac

SEQ ID NO: 61564 - RNA, 23 nt, synthetic construct
  source 1..23: mol_type = other RNA
aagggcggttgcagtccctggac

SEQ ID NO: 61565 - RNA, 23 nt, synthetic construct
  source 1..23: mol_type = other RNA
gactcagtcgtagtggctgttgt

SEQ ID NO: 61566 - RNA, 23 nt, synthetic construct
  source 1..23: mol_type = other RNA
aagggcggttgcagtccctggac

SEQ ID NO: 61567 - RNA, 23 nt, synthetic construct
  source 1..23: mol_type = other RNA
cgccctcccgaaaggggtcctgc

SEQ ID NO: 61568 - RNA, 23 nt, synthetic construct
  source 1..23: mol_type = other RNA
cgaaggaaacgctgcaggtgacg

SEQ ID NO: 61569 - RNA, 23 nt, synthetic construct
  source 1..23: mol_type = other RNA
gtgcctgtcgggcgagctctgga

SEQ ID NO: 61570 - RNA, 23 nt, synthetic construct
  source 1..23: mol_type = other RNA
aggtcgtccccggagtggaggag

SEQ ID NO: 61571 - RNA, 23 nt, synthetic construct
  source 1..23: mol_type = other RNA
atccccatgtagcgtatcttgta

SEQ ID NO: 61572 - RNA, 23 nt, synthetic construct
  source 1..23: mol_type = other RNA
tggtgcagtcggatgaacacgct

SEQ ID NO: 61573 - RNA, 23 nt, synthetic construct
  source 1..23: mol_type = other RNA
ctcgccaccgccttaaaggtccc

SEQ ID NO: 61574 - RNA, 23 nt, synthetic construct
  source 1..23: mol_type = other RNA
tgtggtcggtggcggggttgtgg

SEQ ID NO: 61575 - RNA, 23 nt, synthetic construct
  source 1..23: mol_type = other RNA
gagtgcgtgatgtcatccagcac

SEQ ID NO: 61576 - RNA, 23 nt, synthetic construct
  source 1..23: mol_type = other RNA
cacgctggtcttccggtcccagg

SEQ ID NO: 61577 - RNA, 23 nt, synthetic construct
  source 1..23: mol_type = other RNA
gcggtgtgggtggtccccgggat

SEQ ID NO: 61578 - RNA, 23 nt, synthetic construct
  source 1..23: mol_type = other RNA
gcggtgtgggtggtccccgggat

SEQ ID NO: 61579 - RNA, 23 nt, synthetic construct
  source 1..23: mol_type = other RNA
gcggtgtgggtggtccccgggat

SEQ ID NO: 61580 - RNA, 23 nt, synthetic construct
  source 1..23: mol_type = other RNA
aaggtgacgctcacgcccagggc

SEQ ID NO: 61581 - RNA, 23 nt, synthetic construct
  source 1..23: mol_type = other RNA
acggttgcacggcgggggctgac

SEQ ID NO: 61582 - RNA, 23 nt, synthetic construct
  source 1..23: mol_type = other RNA
atgcggacttgacaggagtcctc

SEQ ID NO: 61583 - RNA, 23 nt, synthetic construct
  source 1..23: mol_type = other RNA
ggcgtcccagtgacatcagggag

SEQ ID NO: 61584 - RNA, 23 nt, synthetic construct
  source 1..23: mol_type = other RNA
gagccgttggacgcctccagcac

SEQ ID NO: 61585 - RNA, 23 nt, synthetic construct
  source 1..23: mol_type = other RNA
gcgtcaccgctttcaggcagttc

SEQ ID NO: 61586 - RNA, 23 nt, synthetic construct
  source 1..23: mol_type = other RNA
ttgaggaacacgccgccgtccgc

SEQ ID NO: 61587 - RNA, 23 nt, synthetic construct
  source 1..23: mol_type = other RNA
gtgaagtcgtcagcctggttctg

SEQ ID NO: 61588 - RNA, 23 nt, synthetic construct
  source 1..23: mol_type = other RNA
gtcaggcgcgagcaccagtgccg

SEQ ID NO: 61589 - RNA, 23 nt, synthetic construct
  source 1..23: mol_type = other RNA
gccagcacggtgccgtgagcgta

SEQ ID NO: 61590 - RNA, 23 nt, synthetic construct
  source 1..23: mol_type = other RNA
ttaaaggtcccctcttggaggat

SEQ ID NO: 61591 - RNA, 23 nt, synthetic construct
  source 1..23: mol_type = other RNA
tcttgtagggtgggtccccaccc

SEQ ID NO: 61592 - RNA, 23 nt, synthetic construct
  source 1..23: mol_type = other RNA
tcggggtcacccatagggtggtc

SEQ ID NO: 61593 - RNA, 23 nt, synthetic construct
  source 1..23: mol_type = other RNA
tgcttgtgtatctgggggatgtc

SEQ ID NO: 61594 - RNA, 23 nt, synthetic construct
  source 1..23: mol_type = other RNA
ctgcaggcgtcgtggggcctccc

SEQ ID NO: 61595 - RNA, 23 nt, synthetic construct
  source 1..23: mol_type = other RNA
gaggggcgccatgtgcccaagct

SEQ ID NO: 61596 - RNA, 23 nt, synthetic construct
  source 1..23: mol_type = other RNA
ggttgtgctgatccacactggag

SEQ ID NO: 61597 - RNA, 23 nt, synthetic construct
  source 1..23: mol_type = other RNA
tggttgtgctgatccacactgga

SEQ ID NO: 61598 - RNA, 23 nt, synthetic construct
  source 1..23: mol_type = other RNA
gccgtggatccggtgggcaccgt

SEQ ID NO: 61599 - RNA, 23 nt, synthetic construct
  source 1..23: mol_type = other RNA
aagcgtgcgtgccgtccctgggc

SEQ ID NO: 61600 - RNA, 23 nt, synthetic construct
  source 1..23: mol_type = other RNA
ggttgtgctgatccacactggaa

SEQ ID NO: 61601 - RNA, 23 nt, synthetic construct
  source 1..23: mol_type = other RNA
tggttgtgctgatccacactgga

SEQ ID NO: 61602 - RNA, 23 nt, synthetic construct
  source 1..23: mol_type = other RNA
gccgtggatccggtgggcaccgt

SEQ ID NO: 61603 - RNA, 23 nt, synthetic construct
  source 1..23: mol_type = other RNA
ggttgtgctgatccacactggag

SEQ ID NO: 61604 - RNA, 23 nt, synthetic construct
  source 1..23: mol_type = other RNA
tggttgtgctgatccacactgga

SEQ ID NO: 61605 - RNA, 23 nt, synthetic construct
  source 1..23: mol_type = other RNA
gccgtggatccggtgggcaccgt

SEQ ID NO: 61606 - RNA, 23 nt, synthetic construct
  source 1..23: mol_type = other RNA
ggttgtgctgatccacactggag

SEQ ID NO: 61607 - RNA, 23 nt, synthetic construct
  source 1..23: mol_type = other RNA
tggttgtgctgatccacactgga

SEQ ID NO: 61608 - RNA, 23 nt, synthetic construct
  source 1..23: mol_type = other RNA
ccggtggtcccaagggtggagga

SEQ ID NO: 61609 - RNA, 23 nt, synthetic construct
  source 1..23: mol_type = other RNA
gccgtggatccggtgggcaccgt

SEQ ID NO: 61610 - RNA, 23 nt, synthetic construct
  source 1..23: mol_type = other RNA
ggttgtgctgatccacactggag

SEQ ID NO: 61611 - RNA, 23 nt, synthetic construct
  source 1..23: mol_type = other RNA
tggttgtgctgatccacactgga

SEQ ID NO: 61612 - RNA, 23 nt, synthetic construct
  source 1..23: mol_type = other RNA
cgaggacgtcggggcaccgccat

SEQ ID NO: 61613 - RNA, 23 nt, synthetic construct
  source 1..23: mol_type = other RNA
gggaggccgttgaagtccccaca

SEQ ID NO: 61614 - RNA, 23 nt, synthetic construct
  source 1..23: mol_type = other RNA
gtggcagatgccctcctcgtccg

SEQ ID NO: 61615 - RNA, 23 nt, synthetic construct
  source 1..23: mol_type = other RNA
gtgttggcgaaggctgcgcccgt

SEQ ID NO: 61616 - RNA, 23 nt, synthetic construct
  source 1..23: mol_type = other RNA
ctgagctgtacgcccttggcggc

SEQ ID NO: 61617 - RNA, 23 nt, synthetic construct
  source 1..23: mol_type = other RNA
agtcgctgagctgtacgcccttg

SEQ ID NO: 61618 - RNA, 23 nt, synthetic construct
  source 1..23: mol_type = other RNA
agccgtccacaggcacgaaggaa

SEQ ID NO: 61619 - RNA, 23 nt, synthetic construct
  source 1..23: mol_type = other RNA
cccggccctctcgccaccgcctt

SEQ ID NO: 61620 - RNA, 23 nt, synthetic construct
  source 1..23: mol_type = other RNA
cacccgagtcgcaggcacacgcg

SEQ ID NO: 61621 - RNA, 23 nt, synthetic construct
  source 1..23: mol_type = other RNA
gcgttgtggctggagttccagga

SEQ ID NO: 61622 - RNA, 23 nt, synthetic construct
  source 1..23: mol_type = other RNA
ggcatacctggtaccctctctgc

SEQ ID NO: 61623 - RNA, 23 nt, synthetic construct
  source 1..23: mol_type = other RNA
gggcatacctggtaccctctctg

SEQ ID NO: 61624 - RNA, 23 nt, synthetic construct
  source 1..23: mol_type = other RNA
gccagcacagggcatacctggta

SEQ ID NO: 61625 - RNA, 23 nt, synthetic construct
  source 1..23: mol_type = other RNA
agccagcacagggcatacctggt

SEQ ID NO: 61626 - RNA, 23 nt, synthetic construct
  source 1..23: mol_type = other RNA
ggtggtacctggggccgaggggg

SEQ ID NO: 61627 - RNA, 23 nt, synthetic construct
  source 1..23: mol_type = other RNA
cctccagcggccctgatcttatc

SEQ ID NO: 61628 - RNA, 23 nt, synthetic construct
  source 1..23: mol_type = other RNA
gctgctggcataagtgccctcca

SEQ ID NO: 61629 - RNA, 23 nt, synthetic construct
  source 1..23: mol_type = other RNA
gtagcacatcttgaagacgccct

SEQ ID NO: 61630 - RNA, 23 nt, synthetic construct
  source 1..23: mol_type = other RNA
gcctcccgtggtggctgtaccaa

SEQ ID NO: 61631 - RNA, 23 nt, synthetic construct
  source 1..23: mol_type = other RNA
tgtggagcctgcaggcgtcgtgg

SEQ ID NO: 61632 - RNA, 23 nt, synthetic construct
  source 1..23: mol_type = other RNA
tgcccaagctccccgtcgtccct

SEQ ID NO: 61633 - RNA, 23 nt, synthetic construct
  source 1..23: mol_type = other RNA
aggtggacagctcgctcgtgagt

SEQ ID NO: 61634 - RNA, 23 nt, synthetic construct
  source 1..23: mol_type = other RNA
cctgagaggtggacagctcgctc

SEQ ID NO: 61635 - RNA, 23 nt, synthetic construct
  source 1..23: mol_type = other RNA
ggtggtctgtgataggcgggtcc

SEQ ID NO: 61636 - RNA, 23 nt, synthetic construct
  source 1..23: mol_type = other RNA
tgtgaagcccgtggttgtggtag

SEQ ID NO: 61637 - RNA, 23 nt, synthetic construct
  source 1..23: mol_type = other RNA
actggaggcgtgagtgccgtccc

SEQ ID NO: 61638 - RNA, 23 nt, synthetic construct
  source 1..23: mol_type = other RNA
acactggaggcgtgagtgccgtc

SEQ ID NO: 61639 - RNA, 23 nt, synthetic construct
  source 1..23: mol_type = other RNA
gaggagggggtcaccgtggagcc

SEQ ID NO: 61640 - RNA, 23 nt, synthetic construct
  source 1..23: mol_type = other RNA
gtgtcaaagtccccgccagaggg

SEQ ID NO: 61641 - RNA, 23 nt, synthetic construct
  source 1..23: mol_type = other RNA
gcacggcactcgaggcccagggg

SEQ ID NO: 61642 - RNA, 23 nt, synthetic construct
  source 1..23: mol_type = other RNA
ggcacggcactcgaggcccaggg

SEQ ID NO: 61643 - RNA, 23 nt, synthetic construct
  source 1..23: mol_type = other RNA
gggcacggcactcgaggcccagg

SEQ ID NO: 61644 - RNA, 23 nt, synthetic construct
  source 1..23: mol_type = other RNA
ccaggtcgtccccggagtggagg

SEQ ID NO: 61645 - RNA, 23 nt, synthetic construct
  source 1..23: mol_type = other RNA
cggtggctgtagtgctcggctct

SEQ ID NO: 61646 - RNA, 23 nt, synthetic construct
  source 1..23: mol_type = other RNA
acggtggctgtagtgctcggctc

SEQ ID NO: 61647 - RNA, 23 nt, synthetic construct
  source 1..23: mol_type = other RNA
ggtggtctgtgataggcgggtcc

SEQ ID NO: 61648 - RNA, 23 nt, synthetic construct
  source 1..23: mol_type = other RNA
ccggtggccccggttgtggtggc

SEQ ID NO: 61649 - RNA, 23 nt, synthetic construct
  source 1..23: mol_type = other RNA
gccggtggccccggttgtggtgg

SEQ ID NO: 61650 - RNA, 23 nt, synthetic construct
  source 1..23: mol_type = other RNA
tgtgaagcccgtggttgtggtag

SEQ ID NO: 61651 - RNA, 23 nt, synthetic construct
  source 1..23: mol_type = other RNA
gaggagggggtcaccgtggaacc

SEQ ID NO: 61652 - RNA, 23 nt, synthetic construct
  source 1..23: mol_type = other RNA
tcgcccgtgtgtggtggccgtgg

SEQ ID NO: 61653 - RNA, 23 nt, synthetic construct
  source 1..23: mol_type = other RNA
gtgtcaaagtccccgccagaggg

SEQ ID NO: 61654 - RNA, 23 nt, synthetic construct
  source 1..23: mol_type = other RNA
gcacggcactcgaggcccagggg

SEQ ID NO: 61655 - RNA, 23 nt, synthetic construct
  source 1..23: mol_type = other RNA
ggcacggcactcgaggcccaggg

SEQ ID NO: 61656 - RNA, 23 nt, synthetic construct
  source 1..23: mol_type = other RNA
gggcacggcactcgaggcccagg

SEQ ID NO: 61657 - RNA, 23 nt, synthetic construct
  source 1..23: mol_type = other RNA
gagggcgtggccgtagagctggt

SEQ ID NO: 61658 - RNA, 23 nt, synthetic construct
  source 1..23: mol_type = other RNA
gaggagggcgtggccgtagagct

SEQ ID NO: 61659 - RNA, 23 nt, synthetic construct
  source 1..23: mol_type = other RNA
gcggtcgtagtggctgctgtggt

SEQ ID NO: 61660 - RNA, 23 nt, synthetic construct
  source 1..23: mol_type = other RNA
ggacgggatggccgtggatccag

SEQ ID NO: 61661 - RNA, 23 nt, synthetic construct
  source 1..23: mol_type = other RNA
ccaggtcgtccccggagtggagg

SEQ ID NO: 61662 - RNA, 23 nt, synthetic construct
  source 1..23: mol_type = other RNA
gtgccagcagttgcccgggtgga

SEQ ID NO: 61663 - RNA, 23 nt, synthetic construct
  source 1..23: mol_type = other RNA
ggtggtctgtgataggcgggtcc

SEQ ID NO: 61664 - RNA, 23 nt, synthetic construct
  source 1..23: mol_type = other RNA
gagccggtggccctggttgtggt

SEQ ID NO: 61665 - RNA, 23 nt, synthetic construct
  source 1..23: mol_type = other RNA
tgtgaagcccgtggttgtggtag

SEQ ID NO: 61666 - RNA, 23 nt, synthetic construct
  source 1..23: mol_type = other RNA
actggaggcgtgagtgccgtccc

SEQ ID NO: 61667 - RNA, 23 nt, synthetic construct
  source 1..23: mol_type = other RNA
acactggaggcgtgagtgccgtc

SEQ ID NO: 61668 - RNA, 23 nt, synthetic construct
  source 1..23: mol_type = other RNA
gaggagggggtcaccgtggagcc

SEQ ID NO: 61669 - RNA, 23 nt, synthetic construct
  source 1..23: mol_type = other RNA
gtggctgtgatcgtagtggccgt

SEQ ID NO: 61670 - RNA, 23 nt, synthetic construct
  source 1..23: mol_type = other RNA
ccgcccgtgtgtggtggccgtgg

SEQ ID NO: 61671 - RNA, 23 nt, synthetic construct
  source 1..23: mol_type = other RNA
gtgtcaaagtccccgccagaggg

SEQ ID NO: 61672 - RNA, 23 nt, synthetic construct
  source 1..23: mol_type = other RNA
gcacggcactcgaggcccagggg

SEQ ID NO: 61673 - RNA, 23 nt, synthetic construct
  source 1..23: mol_type = other RNA
ggcacggcactcgaggcccaggg

SEQ ID NO: 61674 - RNA, 23 nt, synthetic construct
  source 1..23: mol_type = other RNA
gggcacggcactcgaggcccagg

SEQ ID NO: 61675 - RNA, 23 nt, synthetic construct
  source 1..23: mol_type = other RNA
gagggcgtggccgtagagctggt

SEQ ID NO: 61676 - RNA, 23 nt, synthetic construct
  source 1..23: mol_type = other RNA
gaggagggcgtggccgtagagct

SEQ ID NO: 61677 - RNA, 23 nt, synthetic construct
  source 1..23: mol_type = other RNA
cggtggctgtagtgctcggctct

SEQ ID NO: 61678 - RNA, 23 nt, synthetic construct
  source 1..23: mol_type = other RNA
acggtggctgtagtgctcggctc

SEQ ID NO: 61679 - RNA, 23 nt, synthetic construct
  source 1..23: mol_type = other RNA
ggtggtctgtgataggcgggtcc

SEQ ID NO: 61680 - RNA, 23 nt, synthetic construct
  source 1..23: mol_type = other RNA
gagccggtggccctggttgtggt

SEQ ID NO: 61681 - RNA, 23 nt, synthetic construct
  source 1..23: mol_type = other RNA
tgtgaagcccgtggttgtggtag

SEQ ID NO: 61682 - RNA, 23 nt, synthetic construct
  source 1..23: mol_type = other RNA
gaggagggggtcaccgtggagcc

SEQ ID NO: 61683 - RNA, 23 nt, synthetic construct
  source 1..23: mol_type = other RNA
tcgcccgtgtgtggtggccgtgg

SEQ ID NO: 61684 - RNA, 23 nt, synthetic construct
  source 1..23: mol_type = other RNA
gtgtcaaagtccccgccagaggg

SEQ ID NO: 61685 - RNA, 23 nt, synthetic construct
  source 1..23: mol_type = other RNA
gcacggcactcgaggcccagggg

SEQ ID NO: 61686 - RNA, 23 nt, synthetic construct
  source 1..23: mol_type = other RNA
ggcacggcactcgaggcccaggg

SEQ ID NO: 61687 - RNA, 23 nt, synthetic construct
  source 1..23: mol_type = other RNA
gggcacggcactcgaggcccagg

SEQ ID NO: 61688 - RNA, 23 nt, synthetic construct
  source 1..23: mol_type = other RNA
ccaggtcgtccccggagtggagg

SEQ ID NO: 61689 - RNA, 23 nt, synthetic construct
  source 1..23: mol_type = other RNA
ccaggtcgtccccggagtggagg

SEQ ID NO: 61690 - RNA, 23 nt, synthetic construct
  source 1..23: mol_type = other RNA
cggtggctgtagtgctcggctct

SEQ ID NO: 61691 - RNA, 23 nt, synthetic construct
  source 1..23: mol_type = other RNA
acggtggctgtagtgctcggctc

SEQ ID NO: 61692 - RNA, 23 nt, synthetic construct
  source 1..23: mol_type = other RNA
ggtggtctgtgataggcgggtcc

SEQ ID NO: 61693 - RNA, 23 nt, synthetic construct
  source 1..23: mol_type = other RNA
ccggtggccccggttgtggtggc

SEQ ID NO: 61694 - RNA, 23 nt, synthetic construct
  source 1..23: mol_type = other RNA
gccggtggccccggttgtggtgg

SEQ ID NO: 61695 - RNA, 23 nt, synthetic construct
  source 1..23: mol_type = other RNA
tgtgaagcccgtggttgtggtag

SEQ ID NO: 61696 - RNA, 23 nt, synthetic construct
  source 1..23: mol_type = other RNA
actggaggcgtgagtgccgtccc

SEQ ID NO: 61697 - RNA, 23 nt, synthetic construct
  source 1..23: mol_type = other RNA
acactggaggcgtgagtgccgtc

SEQ ID NO: 61698 - RNA, 23 nt, synthetic construct
  source 1..23: mol_type = other RNA
gaggagggggtcaccgtggagcc

SEQ ID NO: 61699 - RNA, 23 nt, synthetic construct
  source 1..23: mol_type = other RNA
cagcactctggcggtgtgggtgg

SEQ ID NO: 61700 - RNA, 23 nt, synthetic construct
  source 1..23: mol_type = other RNA
ggtcagcactctggcggtgtggg

SEQ ID NO: 61701 - RNA, 23 nt, synthetic construct
  source 1..23: mol_type = other RNA
agtggacacgctgaaggttggca

SEQ ID NO: 61702 - RNA, 23 nt, synthetic construct
  source 1..23: mol_type = other RNA
ggggaagccagtgggtctcaggg

SEQ ID NO: 61703 - RNA, 23 nt, synthetic construct
  source 1..23: mol_type = other RNA
cggtcaatgtcacagtgctgatt

SEQ ID NO: 61704 - RNA, 23 nt, synthetic construct
  source 1..23: mol_type = other RNA
ccggagagggatggcattgtcac

SEQ ID NO: 61705 - RNA, 23 nt, synthetic construct
  source 1..23: mol_type = other RNA
tcattcacctgccggagagggat

SEQ ID NO: 61706 - RNA, 23 nt, synthetic construct
  source 1..23: mol_type = other RNA
gtcaaacaggatcaggccctcct

SEQ ID NO: 61707 - RNA, 23 nt, synthetic construct
  source 1..23: mol_type = other RNA
ggaatgtccacacgcatggtggt

SEQ ID NO: 61708 - RNA, 23 nt, synthetic construct
  source 1..23: mol_type = other RNA
gtggcactcagcaaagacctggc

SEQ ID NO: 61709 - RNA, 23 nt, synthetic construct
  source 1..23: mol_type = other RNA
tcgctgatgcaggcgttgaagaa

SEQ ID NO: 61710 - RNA, 23 nt, synthetic construct
  source 1..23: mol_type = other RNA
gtcgctgatgcaggcgttgaaga

SEQ ID NO: 61711 - RNA, 23 nt, synthetic construct
  source 1..23: mol_type = other RNA
ggtgggcaggtgaggtcgcacag

SEQ ID NO: 61712 - RNA, 23 nt, synthetic construct
  source 1..23: mol_type = other RNA
gatgcccatgtgtgcgttgaaga

SEQ ID NO: 61713 - RNA, 23 nt, synthetic construct
  source 1..23: mol_type = other RNA
aggcctgcacgcagatgcccatg

SEQ ID NO: 61714 - RNA, 23 nt, synthetic construct
  source 1..23: mol_type = other RNA
agcaggggttctcggcccggggc

SEQ ID NO: 61715 - RNA, 23 nt, synthetic construct
  source 1..23: mol_type = other RNA
gggcgtgaggcaggcggtctgga

SEQ ID NO: 61716 - RNA, 23 nt, synthetic construct
  source 1..23: mol_type = other RNA
ttaggacagtgcaagggcaccgt

SEQ ID NO: 61717 - RNA, 23 nt, synthetic construct
  source 1..23: mol_type = other RNA
tggaggcagaacgttctcagaca

SEQ ID NO: 61718 - RNA, 23 nt, synthetic construct
  source 1..23: mol_type = other RNA
gcacatgcttagtttgttccagg

SEQ ID NO: 61719 - RNA, 23 nt, synthetic construct
  source 1..23: mol_type = other RNA
tccggccgtggcagggacacata

SEQ ID NO: 61720 - RNA, 23 nt, synthetic construct
  source 1..23: mol_type = other RNA
gtggccagctggaatccgtgctg

SEQ ID NO: 61721 - RNA, 23 nt, synthetic construct
  source 1..23: mol_type = other RNA
cgtggccagctggaatccgtgct

SEQ ID NO: 61722 - RNA, 23 nt, synthetic construct
  source 1..23: mol_type = other RNA
ccctctctgacctggccgttgcg

SEQ ID NO: 61723 - RNA, 23 nt, synthetic construct
  source 1..23: mol_type = other RNA
ccattgatgaggacggagccgtt

SEQ ID NO: 61724 - RNA, 23 nt, synthetic construct
  source 1..23: mol_type = other RNA
gcagtcaccatgcaggtcgtaga

SEQ ID NO: 61725 - RNA, 23 nt, synthetic construct
  source 1..23: mol_type = other RNA
ccttgggtgccagggcgtccggg

SEQ ID NO: 61726 - RNA, 23 nt, synthetic construct
  source 1..23: mol_type = other RNA
ctgtaggtcctgtcctcataggt

SEQ ID NO: 61727 - RNA, 23 nt, synthetic construct
  source 1..23: mol_type = other RNA
gccaagcccatcggtggtgttgt

SEQ ID NO: 61728 - RNA, 23 nt, synthetic construct
  source 1..23: mol_type = other RNA
cagatggcgatcaagcaggcgcc

SEQ ID NO: 61729 - RNA, 23 nt, synthetic construct
  source 1..23: mol_type = other RNA
tggtcggtggcggggttgtggca

SEQ ID NO: 61730 - RNA, 23 nt, synthetic construct
  source 1..23: mol_type = other RNA
gtggctgtgaagcccgtggttgt

SEQ ID NO: 61731 - RNA, 23 nt, synthetic construct
  source 1..23: mol_type = other RNA
agaaccagtggccacagttgtgg

SEQ ID NO: 61732 - RNA, 23 nt, synthetic construct
  source 1..23: mol_type = other RNA
gctgggtggtaccggtggttgct

SEQ ID NO: 61733 - RNA, 23 nt, synthetic construct
  source 1..23: mol_type = other RNA
tgctgggtggtaccggtggttgc

SEQ ID NO: 61734 - RNA, 23 nt, synthetic construct
  source 1..23: mol_type = other RNA
gtggctgtgaagcccgtggttgt

SEQ ID NO: 61735 - RNA, 23 nt, synthetic construct
  source 1..23: mol_type = other RNA
agaaccagtggccacagttgtgg

SEQ ID NO: 61736 - RNA, 23 nt, synthetic construct
  source 1..23: mol_type = other RNA
ggggggataggtgttgtccctgg

SEQ ID NO: 61737 - RNA, 23 nt, synthetic construct
  source 1..23: mol_type = other RNA
gctgggtggtaccggtggttgct

SEQ ID NO: 61738 - RNA, 23 nt, synthetic construct
  source 1..23: mol_type = other RNA
tgctgggtggtaccggtggttgc

SEQ ID NO: 61739 - RNA, 23 nt, synthetic construct
  source 1..23: mol_type = other RNA
gtggctgtgaagcccgtggttgt

SEQ ID NO: 61740 - RNA, 23 nt, synthetic construct
  source 1..23: mol_type = other RNA
agaaccagtggccacagttgtgg

SEQ ID NO: 61741 - RNA, 23 nt, synthetic construct
  source 1..23: mol_type = other RNA
agaaccagtggccacagttgtgg

SEQ ID NO: 61742 - RNA, 23 nt, synthetic construct
  source 1..23: mol_type = other RNA
ggggggataggtgttgtccctgg

SEQ ID NO: 61743 - RNA, 23 nt, synthetic construct
  source 1..23: mol_type = other RNA
gctgggtggtaccggtggttgct

SEQ ID NO: 61744 - RNA, 23 nt, synthetic construct
  source 1..23: mol_type = other RNA
tgctgggtggtaccggtggttgc

SEQ ID NO: 61745 - RNA, 23 nt, synthetic construct
  source 1..23: mol_type = other RNA
gtggctgtgaagcccgtggttgt

SEQ ID NO: 61746 - RNA, 23 nt, synthetic construct
  source 1..23: mol_type = other RNA
agaaccagtggccacagttgtgg

SEQ ID NO: 61747 - RNA, 23 nt, synthetic construct
  source 1..23: mol_type = other RNA
tcagtgaggatccgggtcgtccc

SEQ ID NO: 61748 - RNA, 23 nt, synthetic construct
  source 1..23: mol_type = other RNA
gatgacttccccgggcgagaaaa

SEQ ID NO: 61749 - RNA, 23 nt, synthetic construct
  source 1..23: mol_type = other RNA
ttgtgttgcacacgcacaccgtc

SEQ ID NO: 61750 - RNA, 23 nt, synthetic construct
  source 1..23: mol_type = other RNA
ggtggttgtgttgcacacgcaca

SEQ ID NO: 61751 - RNA, 23 nt, synthetic construct
  source 1..23: mol_type = other RNA
ggctgttgacccaggtttcattc

SEQ ID NO: 61752 - RNA, 23 nt, synthetic construct
  source 1..23: mol_type = other RNA
acgcagtgctgtccaccagtgcg

SEQ ID NO: 61753 - RNA, 23 nt, synthetic construct
  source 1..23: mol_type = other RNA
ggtgcccgccgagctgttgctgc

SEQ ID NO: 61754 - RNA, 23 nt, synthetic construct
  source 1..23: mol_type = other RNA
gtcctcctcggcaatgcagcccc

SEQ ID NO: 61755 - RNA, 23 nt, synthetic construct
  source 1..23: mol_type = other RNA
gcttgtgtatctgggggatgtca

SEQ ID NO: 61756 - RNA, 23 nt, synthetic construct
  source 1..23: mol_type = other RNA
ctgggtggtaccggtggttgctg

SEQ ID NO: 61757 - RNA, 23 nt, synthetic construct
  source 1..23: mol_type = other RNA
gatccagtggactcagtcgtagt

SEQ ID NO: 61758 - RNA, 23 nt, synthetic construct
  source 1..23: mol_type = other RNA
gtggccgtggatccggtgggcac

SEQ ID NO: 61759 - RNA, 23 nt, synthetic construct
  source 1..23: mol_type = other RNA
ctgggtggtaccggtggttgctg

SEQ ID NO: 61760 - RNA, 23 nt, synthetic construct
  source 1..23: mol_type = other RNA
ggtggcccttgtcgtggtggcct

SEQ ID NO: 61761 - RNA, 23 nt, synthetic construct
  source 1..23: mol_type = other RNA
gtggccgtggatccggtgggcac

SEQ ID NO: 61762 - RNA, 23 nt, synthetic construct
  source 1..23: mol_type = other RNA
ataggcgggtccaggcggtgccc

SEQ ID NO: 61763 - RNA, 23 nt, synthetic construct
  source 1..23: mol_type = other RNA
gctgttgtggtcagctttgtgag

SEQ ID NO: 61764 - RNA, 23 nt, synthetic construct
  source 1..23: mol_type = other RNA
gatccagtggactcagtcgtagt

SEQ ID NO: 61765 - RNA, 23 nt, synthetic construct
  source 1..23: mol_type = other RNA
gtggccgtggatccggtgggcac

SEQ ID NO: 61766 - RNA, 23 nt, synthetic construct
  source 1..23: mol_type = other RNA
ctgggtggtaccggtggttgctg

SEQ ID NO: 61767 - RNA, 23 nt, synthetic construct
  source 1..23: mol_type = other RNA
ggtggcccttgtcgtggtggcct

SEQ ID NO: 61768 - RNA, 23 nt, synthetic construct
  source 1..23: mol_type = other RNA
gtggccgtggatccggtgggcac

SEQ ID NO: 61769 - RNA, 23 nt, synthetic construct
  source 1..23: mol_type = other RNA
cccggaaggtgtaagaggtgccg

SEQ ID NO: 61770 - RNA, 23 nt, synthetic construct
  source 1..23: mol_type = other RNA
tgtccacacgcatggtggtggtc

SEQ ID NO: 61771 - RNA, 23 nt, synthetic construct
  source 1..23: mol_type = other RNA
gatgcggacttgacaggagtcct

SEQ ID NO: 61772 - RNA, 23 nt, synthetic construct
  source 1..23: mol_type = other RNA
cccgctgagggccgtgaagtcgt

SEQ ID NO: 61773 - RNA, 23 nt, synthetic construct
  source 1..23: mol_type = other RNA
ggtcaggcgcgagcaccagtgcc

SEQ ID NO: 61774 - RNA, 23 nt, synthetic construct
  source 1..23: mol_type = other RNA
gtcgaccctgatggtctctccag

SEQ ID NO: 61775 - RNA, 23 nt, synthetic construct
  source 1..23: mol_type = other RNA
gtcctgggccaagatgtactcgc

SEQ ID NO: 61776 - RNA, 23 nt, synthetic construct
  source 1..23: mol_type = other RNA
tcagtccttctgagagggtgggg

SEQ ID NO: 61777 - RNA, 23 nt, synthetic construct
  source 1..23: mol_type = other RNA
gcctgcaggcgtcgtggggcctc

SEQ ID NO: 61778 - RNA, 23 nt, synthetic construct
  source 1..23: mol_type = other RNA
gaagggcggttgcagtccctgga

SEQ ID NO: 61779 - RNA, 23 nt, synthetic construct
  source 1..23: mol_type = other RNA
ggaagggcggttgcagtccctgg

SEQ ID NO: 61780 - RNA, 23 nt, synthetic construct
  source 1..23: mol_type = other RNA
gctggaagggcggttgcagtccc

SEQ ID NO: 61781 - RNA, 23 nt, synthetic construct
  source 1..23: mol_type = other RNA
gtgagtgccgtccctgggctgga

SEQ ID NO: 61782 - RNA, 23 nt, synthetic construct
  source 1..23: mol_type = other RNA
caggctgtgcgcaccgtgtgggg

SEQ ID NO: 61783 - RNA, 23 nt, synthetic construct
  source 1..23: mol_type = other RNA
ccaggctgtgcgcaccgtgtggg

SEQ ID NO: 61784 - RNA, 23 nt, synthetic construct
  source 1..23: mol_type = other RNA
gttctgctgctagggtgagggct

SEQ ID NO: 61785 - RNA, 23 nt, synthetic construct
  source 1..23: mol_type = other RNA
ccggggtggtcgtccctggagaa

SEQ ID NO: 61786 - RNA, 23 nt, synthetic construct
  source 1..23: mol_type = other RNA
cacagacggcccctccggccgca

SEQ ID NO: 61787 - RNA, 23 nt, synthetic construct
  source 1..23: mol_type = other RNA
tcacagacggcccctccggccgc

SEQ ID NO: 61788 - RNA, 23 nt, synthetic construct
  source 1..23: mol_type = other RNA
tccagtggactcagtcgtagtgg

SEQ ID NO: 61789 - RNA, 23 nt, synthetic construct
  source 1..23: mol_type = other RNA
gtgactgtgggtgtcgtggccgt

SEQ ID NO: 61790 - RNA, 23 nt, synthetic construct
  source 1..23: mol_type = other RNA
gaagggcggttgcagtccctgga

SEQ ID NO: 61791 - RNA, 23 nt, synthetic construct
  source 1..23: mol_type = other RNA
ggaagggcggttgcagtccctgg

SEQ ID NO: 61792 - RNA, 23 nt, synthetic construct
  source 1..23: mol_type = other RNA
gctggaagggcggttgcagtccc

SEQ ID NO: 61793 - RNA, 23 nt, synthetic construct
  source 1..23: mol_type = other RNA
caggctgtgcgcaccgtgtgggg

SEQ ID NO: 61794 - RNA, 23 nt, synthetic construct
  source 1..23: mol_type = other RNA
ccaggctgtgcgcaccgtgtggg

SEQ ID NO: 61795 - RNA, 23 nt, synthetic construct
  source 1..23: mol_type = other RNA
tgggaagtccccgtggaaggctc

SEQ ID NO: 61796 - RNA, 23 nt, synthetic construct
  source 1..23: mol_type = other RNA
gtcctgctgctagggtgagggct

SEQ ID NO: 61797 - RNA, 23 nt, synthetic construct
  source 1..23: mol_type = other RNA
ggtggtcctgctgctagggtgag

SEQ ID NO: 61798 - RNA, 23 nt, synthetic construct
  source 1..23: mol_type = other RNA
cggtggtcctgctgctagggtga

SEQ ID NO: 61799 - RNA, 23 nt, synthetic construct
  source 1..23: mol_type = other RNA
ccggggtggtcgtccctggagaa

SEQ ID NO: 61800 - RNA, 23 nt, synthetic construct
  source 1..23: mol_type = other RNA
cacagacggcccctccggccgca

SEQ ID NO: 61801 - RNA, 23 nt, synthetic construct
  source 1..23: mol_type = other RNA
tcacagacggcccctccggccgc

SEQ ID NO: 61802 - RNA, 23 nt, synthetic construct
  source 1..23: mol_type = other RNA
ggcgtggccgtagagctggtggc

SEQ ID NO: 61803 - RNA, 23 nt, synthetic construct
  source 1..23: mol_type = other RNA
gggggtggacatggaactggtgg

SEQ ID NO: 61804 - RNA, 23 nt, synthetic construct
  source 1..23: mol_type = other RNA
gagggggtggacatggaactggt

SEQ ID NO: 61805 - RNA, 23 nt, synthetic construct
  source 1..23: mol_type = other RNA
cactttgagggtgccagcagttg

SEQ ID NO: 61806 - RNA, 23 nt, synthetic construct
  source 1..23: mol_type = other RNA
gaagggcggttgcagtccctgga

SEQ ID NO: 61807 - RNA, 23 nt, synthetic construct
  source 1..23: mol_type = other RNA
ggaagggcggttgcagtccctgg

SEQ ID NO: 61808 - RNA, 23 nt, synthetic construct
  source 1..23: mol_type = other RNA
gctggaagggcggttgcagtccc

SEQ ID NO: 61809 - RNA, 23 nt, synthetic construct
  source 1..23: mol_type = other RNA
gtgagtgccgtccctgggctgga

SEQ ID NO: 61810 - RNA, 23 nt, synthetic construct
  source 1..23: mol_type = other RNA
caggctgtgcgcaccgtgtgggg

SEQ ID NO: 61811 - RNA, 23 nt, synthetic construct
  source 1..23: mol_type = other RNA
ccaggctgtgcgcaccgtgtggg

SEQ ID NO: 61812 - RNA, 23 nt, synthetic construct
  source 1..23: mol_type = other RNA
gtcctgctgctagggtgagggct

SEQ ID NO: 61813 - RNA, 23 nt, synthetic construct
  source 1..23: mol_type = other RNA
ggtggtcctgctgctagggtgag

SEQ ID NO: 61814 - RNA, 23 nt, synthetic construct
  source 1..23: mol_type = other RNA
cggtggtcctgctgctagggtga

SEQ ID NO: 61815 - RNA, 23 nt, synthetic construct
  source 1..23: mol_type = other RNA
ccggggtggtcgtccctggagaa

SEQ ID NO: 61816 - RNA, 23 nt, synthetic construct
  source 1..23: mol_type = other RNA
ggcgtggccgtagagctggtggc

SEQ ID NO: 61817 - RNA, 23 nt, synthetic construct
  source 1..23: mol_type = other RNA
tccagtggactcagtcgtagtgg

SEQ ID NO: 61818 - RNA, 23 nt, synthetic construct
  source 1..23: mol_type = other RNA
gtgactgtgggtgtcgtggccgt

SEQ ID NO: 61819 - RNA, 23 nt, synthetic construct
  source 1..23: mol_type = other RNA
gaagggcggttgcagtccctgga

SEQ ID NO: 61820 - RNA, 23 nt, synthetic construct
  source 1..23: mol_type = other RNA
ggaagggcggttgcagtccctgg

SEQ ID NO: 61821 - RNA, 23 nt, synthetic construct
  source 1..23: mol_type = other RNA
gctggaagggcggttgcagtccc

SEQ ID NO: 61822 - RNA, 23 nt, synthetic construct
  source 1..23: mol_type = other RNA
caggctgtgcgcaccgtgtgggg

SEQ ID NO: 61823 - RNA, 23 nt, synthetic construct
  source 1..23: mol_type = other RNA
ccaggctgtgcgcaccgtgtggg

SEQ ID NO: 61824 - RNA, 23 nt, synthetic construct
  source 1..23: mol_type = other RNA
tgggaagtccccgtggaaggctc

SEQ ID NO: 61825 - RNA, 23 nt, synthetic construct
  source 1..23: mol_type = other RNA
gtcctgctgctagggtgagggct

SEQ ID NO: 61826 - RNA, 23 nt, synthetic construct
  source 1..23: mol_type = other RNA
ggtggtcctgctgctagggtgag

SEQ ID NO: 61827 - RNA, 23 nt, synthetic construct
  source 1..23: mol_type = other RNA
cggtggtcctgctgctagggtga

SEQ ID NO: 61828 - RNA, 23 nt, synthetic construct
  source 1..23: mol_type = other RNA
cacagacggcccctccggccgca

SEQ ID NO: 61829 - RNA, 23 nt, synthetic construct
  source 1..23: mol_type = other RNA
tcacagacggcccctccggccgc

SEQ ID NO: 61830 - RNA, 23 nt, synthetic construct
  source 1..23: mol_type = other RNA
gtgactgtgggtgtcgtggccgt

SEQ ID NO: 61831 - RNA, 23 nt, synthetic construct
  source 1..23: mol_type = other RNA
gtgagtgccgtccctgggctgga

SEQ ID NO: 61832 - RNA, 23 nt, synthetic construct
  source 1..23: mol_type = other RNA
agtgaggatccgggtcgtcccca

SEQ ID NO: 61833 - RNA, 23 nt, synthetic construct
  source 1..23: mol_type = other RNA
ggggaccagccacgtcttggcca

SEQ ID NO: 61834 - RNA, 23 nt, synthetic construct
  source 1..23: mol_type = other RNA
cactctcttgtactcaaagccct

SEQ ID NO: 61835 - RNA, 23 nt, synthetic construct
  source 1..23: mol_type = other RNA
ctggctggccatcgggcgtgagg

SEQ ID NO: 61836 - RNA, 23 nt, synthetic construct
  source 1..23: mol_type = other RNA
ggagccctcgcagaaggtgatgt

SEQ ID NO: 61837 - RNA, 23 nt, synthetic construct
  source 1..23: mol_type = other RNA
cagccacactcatccacgtgggt

SEQ ID NO: 61838 - RNA, 23 nt, synthetic construct
  source 1..23: mol_type = other RNA
atgcttagtttgttccagggcgt

SEQ ID NO: 61839 - RNA, 23 nt, synthetic construct
  source 1..23: mol_type = other RNA
ctgccccagcggccggacgtggc

SEQ ID NO: 61840 - RNA, 23 nt, synthetic construct
  source 1..23: mol_type = other RNA
cgcgctcggggcacccatcctgg

SEQ ID NO: 61841 - RNA, 23 nt, synthetic construct
  source 1..23: mol_type = other RNA
gtaggcggcgcggcagtgctcag

SEQ ID NO: 61842 - RNA, 23 nt, synthetic construct
  source 1..23: mol_type = other RNA
gtagtccccgctctgctccacca

SEQ ID NO: 61843 - RNA, 23 nt, synthetic construct
  source 1..23: mol_type = other RNA
aaactggagcggggtcagcctgg

SEQ ID NO: 61844 - RNA, 23 nt, synthetic construct
  source 1..23: mol_type = other RNA
gtggcacacgggcaggtggggca

SEQ ID NO: 61845 - RNA, 23 nt, synthetic construct
  source 1..23: mol_type = other RNA
gaaggaggtgcccgggctgtagg

SEQ ID NO: 61846 - RNA, 23 nt, synthetic construct
  source 1..23: mol_type = other RNA
atgcaggtcgtagagtttctcat

SEQ ID NO: 61847 - RNA, 23 nt, synthetic construct
  source 1..23: mol_type = other RNA
cggcacatttcttggacagaacg

SEQ ID NO: 61848 - RNA, 23 nt, synthetic construct
  source 1..23: mol_type = other RNA
ctgacaaacacctgcatgagtgg

SEQ ID NO: 61849 - RNA, 23 nt, synthetic construct
  source 1..23: mol_type = other RNA
cgtgaagtcgtcagcctggttct

SEQ ID NO: 61850 - RNA, 23 nt, synthetic construct
  source 1..23: mol_type = other RNA
tgttggcgaaggctgcgcccgtg

SEQ ID NO: 61851 - RNA, 23 nt, synthetic construct
  source 1..23: mol_type = other RNA
tcaggcgcgagcaccagtgccgg

SEQ ID NO: 61852 - RNA, 23 nt, synthetic construct
  source 1..23: mol_type = other RNA
gctgagctgtacgcccttggcgg

SEQ ID NO: 61853 - RNA, 23 nt, synthetic construct
  source 1..23: mol_type = other RNA
cggcctcactcaggccgcggcaa

SEQ ID NO: 61854 - RNA, 23 nt, synthetic construct
  source 1..23: mol_type = other RNA
tcggcctcactcaggccgcggca

SEQ ID NO: 61855 - RNA, 23 nt, synthetic construct
  source 1..23: mol_type = other RNA
agccagcacggtgccgtgagcgt

SEQ ID NO: 61856 - RNA, 23 nt, synthetic construct
  source 1..23: mol_type = other RNA
cccgtgggtctcgatgaccagga

SEQ ID NO: 61857 - RNA, 23 nt, synthetic construct
  source 1..23: mol_type = other RNA
ccacccgagtcgcaggcacacgc

SEQ ID NO: 61858 - RNA, 23 nt, synthetic construct
  source 1..23: mol_type = other RNA
ccgctgtggggacccttgcaccg

SEQ ID NO: 61859 - RNA, 23 nt, synthetic construct
  source 1..23: mol_type = other RNA
cctggtagctgtaggtcctgtcc

SEQ ID NO: 61860 - RNA, 23 nt, synthetic construct
  source 1..23: mol_type = other RNA
tgacgtcctggtagctgtaggtc

SEQ ID NO: 61861 - RNA, 23 nt, synthetic construct
  source 1..23: mol_type = other RNA
gtgaatggcgttgtggctggagt

SEQ ID NO: 61862 - RNA, 23 nt, synthetic construct
  source 1..23: mol_type = other RNA
ggcggtgcccattgtaccagctg

SEQ ID NO: 61863 - RNA, 23 nt, synthetic construct
  source 1..23: mol_type = other RNA
cgtattcgcagcagagaacccgc

SEQ ID NO: 61864 - RNA, 23 nt, synthetic construct
  source 1..23: mol_type = other RNA
tggcataagtgccctccagcggc

SEQ ID NO: 61865 - RNA, 23 nt, synthetic construct
  source 1..23: mol_type = other RNA
tgctggcataagtgccctccagc

SEQ ID NO: 61866 - RNA, 23 nt, synthetic construct
  source 1..23: mol_type = other RNA
ggtccagttggggaagctctcgg

SEQ ID NO: 61867 - RNA, 23 nt, synthetic construct
  source 1..23: mol_type = other RNA
gtgccagggtccagttggggaag

SEQ ID NO: 61868 - RNA, 23 nt, synthetic construct
  source 1..23: mol_type = other RNA
tctgagagggtggggactgctgt

SEQ ID NO: 61869 - RNA, 23 nt, synthetic construct
  source 1..23: mol_type = other RNA
ggcgtcgtggggcctcccgtggt

SEQ ID NO: 61870 - RNA, 23 nt, synthetic construct
  source 1..23: mol_type = other RNA
caggcgtcgtggggcctcccgtg

SEQ ID NO: 61871 - RNA, 23 nt, synthetic construct
  source 1..23: mol_type = other RNA
gccatgtgcccaagctccccgtc

SEQ ID NO: 61872 - RNA, 23 nt, synthetic construct
  source 1..23: mol_type = other RNA
gcgtgctggtctcggcctgagag

SEQ ID NO: 61873 - RNA, 23 nt, synthetic construct
  source 1..23: mol_type = other RNA
gtcgtctctgtcctgggcgtgct

SEQ ID NO: 61874 - RNA, 23 nt, synthetic construct
  source 1..23: mol_type = other RNA
gagccggtggccccagttgtggt

SEQ ID NO: 61875 - RNA, 23 nt, synthetic construct
  source 1..23: mol_type = other RNA
tggtagtgtgagctgttcctggg

SEQ ID NO: 61876 - RNA, 23 nt, synthetic construct
  source 1..23: mol_type = other RNA
cactggaggcgtgagtgccgtcc

SEQ ID NO: 61877 - RNA, 23 nt, synthetic construct
  source 1..23: mol_type = other RNA
tcagtgatgggggagtaccactg

SEQ ID NO: 61878 - RNA, 23 nt, synthetic construct
  source 1..23: mol_type = other RNA
gtggtcagtgatgggggagtacc

SEQ ID NO: 61879 - RNA, 23 nt, synthetic construct
  source 1..23: mol_type = other RNA
gttcggcactgggggtgtgtggg

SEQ ID NO: 61880 - RNA, 23 nt, synthetic construct
  source 1..23: mol_type = other RNA
tgctagggtgtgggaagtcaccg

SEQ ID NO: 61881 - RNA, 23 nt, synthetic construct
  source 1..23: mol_type = other RNA
gtcgaggtgcgggtcttgctggg

SEQ ID NO: 61882 - RNA, 23 nt, synthetic construct
  source 1..23: mol_type = other RNA
ctgtagtccagccactctgacca

SEQ ID NO: 61883 - RNA, 23 nt, synthetic construct
  source 1..23: mol_type = other RNA
gtggactcagtcgtagtggctgt

SEQ ID NO: 61884 - RNA, 23 nt, synthetic construct
  source 1..23: mol_type = other RNA
tgctcggctctgtgaggatccag

SEQ ID NO: 61885 - RNA, 23 nt, synthetic construct
  source 1..23: mol_type = other RNA
gcggtggccgtggatccggtggg

SEQ ID NO: 61886 - RNA, 23 nt, synthetic construct
  source 1..23: mol_type = other RNA
ggcggtggccgtggatccggtgg

SEQ ID NO: 61887 - RNA, 23 nt, synthetic construct
  source 1..23: mol_type = other RNA
tgtggggtgccagcagttgcctg

SEQ ID NO: 61888 - RNA, 23 nt, synthetic construct
  source 1..23: mol_type = other RNA
ggtgctcacatgtggggtgccag

SEQ ID NO: 61889 - RNA, 23 nt, synthetic construct
  source 1..23: mol_type = other RNA
tggtagtgtgagctgttcctggg

SEQ ID NO: 61890 - RNA, 23 nt, synthetic construct
  source 1..23: mol_type = other RNA
tcagtgatgggggagtaccactg

SEQ ID NO: 61891 - RNA, 23 nt, synthetic construct
  source 1..23: mol_type = other RNA
gtggtcagtgatgggggagtacc

SEQ ID NO: 61892 - RNA, 23 nt, synthetic construct
  source 1..23: mol_type = other RNA
gttcggcactgggggtgtgtggg

SEQ ID NO: 61893 - RNA, 23 nt, synthetic construct
  source 1..23: mol_type = other RNA
ggtgcctgaggtggccgaagtcc

SEQ ID NO: 61894 - RNA, 23 nt, synthetic construct
  source 1..23: mol_type = other RNA
aagtccccgtggaaggctctgtg

SEQ ID NO: 61895 - RNA, 23 nt, synthetic construct
  source 1..23: mol_type = other RNA
gtcgaggtgcgggtcttgctggg

SEQ ID NO: 61896 - RNA, 23 nt, synthetic construct
  source 1..23: mol_type = other RNA
ctgtagtccagccactctgacca

SEQ ID NO: 61897 - RNA, 23 nt, synthetic construct
  source 1..23: mol_type = other RNA
gggcgtggccgtagagctggtgg

SEQ ID NO: 61898 - RNA, 23 nt, synthetic construct
  source 1..23: mol_type = other RNA
ggatggccgtggatccagtggtt

SEQ ID NO: 61899 - RNA, 23 nt, synthetic construct
  source 1..23: mol_type = other RNA
cggggtggaggacgggatggccg

SEQ ID NO: 61900 - RNA, 23 nt, synthetic construct
  source 1..23: mol_type = other RNA
ccggggtggaggacgggatggcc

SEQ ID NO: 61901 - RNA, 23 nt, synthetic construct
  source 1..23: mol_type = other RNA
gcggtggccgtggatccggtggg

SEQ ID NO: 61902 - RNA, 23 nt, synthetic construct
  source 1..23: mol_type = other RNA
ggcggtggccgtggatccggtgg

SEQ ID NO: 61903 - RNA, 23 nt, synthetic construct
  source 1..23: mol_type = other RNA
tggtagtgtgagctgttcctggg

SEQ ID NO: 61904 - RNA, 23 nt, synthetic construct
  source 1..23: mol_type = other RNA
cactggaggcgtgagtgccgtcc

SEQ ID NO: 61905 - RNA, 23 nt, synthetic construct
  source 1..23: mol_type = other RNA
tcagtgatgggggagtaccactg

SEQ ID NO: 61906 - RNA, 23 nt, synthetic construct
  source 1..23: mol_type = other RNA
gtggtcagtgatgggggagtacc

SEQ ID NO: 61907 - RNA, 23 nt, synthetic construct
  source 1..23: mol_type = other RNA
gttcggcactgggggtgtgtggg

SEQ ID NO: 61908 - RNA, 23 nt, synthetic construct
  source 1..23: mol_type = other RNA
gtcgaggtgcgggtcttgctggg

SEQ ID NO: 61909 - RNA, 23 nt, synthetic construct
  source 1..23: mol_type = other RNA
ctgtagtccagccactctgacca

SEQ ID NO: 61910 - RNA, 23 nt, synthetic construct
  source 1..23: mol_type = other RNA
tgctcacagactgcccctccggc

SEQ ID NO: 61911 - RNA, 23 nt, synthetic construct
  source 1..23: mol_type = other RNA
gggcgtggccgtagagctggtgg

SEQ ID NO: 61912 - RNA, 23 nt, synthetic construct
  source 1..23: mol_type = other RNA
gtggactcagtcgtagtggctgt

SEQ ID NO: 61913 - RNA, 23 nt, synthetic construct
  source 1..23: mol_type = other RNA
tgctcggctctgtgaggatccag

SEQ ID NO: 61914 - RNA, 23 nt, synthetic construct
  source 1..23: mol_type = other RNA
gcggtggccgtggatccggtggg

SEQ ID NO: 61915 - RNA, 23 nt, synthetic construct
  source 1..23: mol_type = other RNA
ggcggtggccgtggatccggtgg

SEQ ID NO: 61916 - RNA, 23 nt, synthetic construct
  source 1..23: mol_type = other RNA
tgtggggtgccagcagttgcctg

SEQ ID NO: 61917 - RNA, 23 nt, synthetic construct
  source 1..23: mol_type = other RNA
ggtgctcacatgtggggtgccag

SEQ ID NO: 61918 - RNA, 23 nt, synthetic construct
  source 1..23: mol_type = other RNA
tggtagtgtgagctgttcctggg

SEQ ID NO: 61919 - RNA, 23 nt, synthetic construct
  source 1..23: mol_type = other RNA
tcagtgatgggggagtaccactg

SEQ ID NO: 61920 - RNA, 23 nt, synthetic construct
  source 1..23: mol_type = other RNA
gatcgtagtggccgtggtgatca

SEQ ID NO: 61921 - RNA, 23 nt, synthetic construct
  source 1..23: mol_type = other RNA
gttcggcactgggggtgtgtggg

SEQ ID NO: 61922 - RNA, 23 nt, synthetic construct
  source 1..23: mol_type = other RNA
ggtgcctgaggtggccgaagtcc

SEQ ID NO: 61923 - RNA, 23 nt, synthetic construct
  source 1..23: mol_type = other RNA
aagtccccgtggaaggctctgtg

SEQ ID NO: 61924 - RNA, 23 nt, synthetic construct
  source 1..23: mol_type = other RNA
gtcgaggtgcgggtcttgctggg

SEQ ID NO: 61925 - RNA, 23 nt, synthetic construct
  source 1..23: mol_type = other RNA
ctgtagtccagccactctgacca

SEQ ID NO: 61926 - RNA, 23 nt, synthetic construct
  source 1..23: mol_type = other RNA
ggacgtggaactggtggcccttg

SEQ ID NO: 61927 - RNA, 23 nt, synthetic construct
  source 1..23: mol_type = other RNA
tgctcggctctgtgaggatccag

SEQ ID NO: 61928 - RNA, 23 nt, synthetic construct
  source 1..23: mol_type = other RNA
gcggtggccgtggatccggtggg

SEQ ID NO: 61929 - RNA, 23 nt, synthetic construct
  source 1..23: mol_type = other RNA
ggcggtggccgtggatccggtgg

SEQ ID NO: 61930 - RNA, 23 nt, synthetic construct
  source 1..23: mol_type = other RNA
tgtggggtgccagcagttgcctg

SEQ ID NO: 61931 - RNA, 23 nt, synthetic construct
  source 1..23: mol_type = other RNA
ggtgctcacatgtggggtgccag

SEQ ID NO: 61932 - RNA, 23 nt, synthetic construct
  source 1..23: mol_type = other RNA
ggaagggcagttgcagtccctgg

SEQ ID NO: 61933 - RNA, 23 nt, synthetic construct
  source 1..23: mol_type = other RNA
tggtagtgtgagctgttcctggg

SEQ ID NO: 61934 - RNA, 23 nt, synthetic construct
  source 1..23: mol_type = other RNA
cactggaggcgtgagtgccgtcc

SEQ ID NO: 61935 - RNA, 23 nt, synthetic construct
  source 1..23: mol_type = other RNA
gtggtcagcactctggcggtgtg

SEQ ID NO: 61936 - RNA, 23 nt, synthetic construct
  source 1..23: mol_type = other RNA
tcagtgatgggggagtaccactg

SEQ ID NO: 61937 - RNA, 23 nt, synthetic construct
  source 1..23: mol_type = other RNA
gtggtcagtgatgggggagtacc

SEQ ID NO: 61938 - RNA, 23 nt, synthetic construct
  source 1..23: mol_type = other RNA
gtggtctgtgctgggacggtcca

SEQ ID NO: 61939 - RNA, 23 nt, synthetic construct
  source 1..23: mol_type = other RNA
tgcagttgtagtggctgttgtgg

SEQ ID NO: 61940 - RNA, 23 nt, synthetic construct
  source 1..23: mol_type = other RNA
tgctcggctctgtgaggatccag

SEQ ID NO: 61941 - RNA, 23 nt, synthetic construct
  source 1..23: mol_type = other RNA
ccacggtggacgagctgggaacc

SEQ ID NO: 61942 - RNA, 23 nt, synthetic construct
  source 1..23: mol_type = other RNA
cagtgctgattgcacactgcgta

SEQ ID NO: 61943 - RNA, 23 nt, synthetic construct
  source 1..23: mol_type = other RNA
cagcggggcggaggacactggcg

SEQ ID NO: 61944 - RNA, 23 nt, synthetic construct
  source 1..23: mol_type = other RNA
aaggtggaatagtgggagccgcc

SEQ ID NO: 61945 - RNA, 23 nt, synthetic construct
  source 1..23: mol_type = other RNA
tgcagttgccccggaaggtgtaa

SEQ ID NO: 61946 - RNA, 23 nt, synthetic construct
  source 1..23: mol_type = other RNA
attcccaaagcgtgcatggatct

SEQ ID NO: 61947 - RNA, 23 nt, synthetic construct
  source 1..23: mol_type = other RNA
tcccatgcaccatggtgacagtg

SEQ ID NO: 61948 - RNA, 23 nt, synthetic construct
  source 1..23: mol_type = other RNA
gacttggccattgaaggtgacgc

SEQ ID NO: 61949 - RNA, 23 nt, synthetic construct
  source 1..23: mol_type = other RNA
gggggcacaaggttgtggcactc

SEQ ID NO: 61950 - RNA, 23 nt, synthetic construct
  source 1..23: mol_type = other RNA
gctgtatggggccgcatggcttg

SEQ ID NO: 61951 - RNA, 23 nt, synthetic construct
  source 1..23: mol_type = other RNA
catgtgtgcgttgaagaggatct

SEQ ID NO: 61952 - RNA, 23 nt, synthetic construct
  source 1..23: mol_type = other RNA
aggcaggtacacatgtggcaggg

SEQ ID NO: 61953 - RNA, 23 nt, synthetic construct
  source 1..23: mol_type = other RNA
ctgacattgcaccgttgggtcct

SEQ ID NO: 61954 - RNA, 23 nt, synthetic construct
  source 1..23: mol_type = other RNA
cggccactctcttgtactcaaag

SEQ ID NO: 61955 - RNA, 23 nt, synthetic construct
  source 1..23: mol_type = other RNA
gcccggccactctcttgtactca

SEQ ID NO: 61956 - RNA, 23 nt, synthetic construct
  source 1..23: mol_type = other RNA
cacagcactgcccggccactctc

SEQ ID NO: 61957 - RNA, 23 nt, synthetic construct
  source 1..23: mol_type = other RNA
ggtttcattcagctggactggct

SEQ ID NO: 61958 - RNA, 23 nt, synthetic construct
  source 1..23: mol_type = other RNA
aggttttcatgatcagacaatgc

SEQ ID NO: 61959 - RNA, 23 nt, synthetic construct
  source 1..23: mol_type = other RNA
acatgcttagtttgttccagggc

SEQ ID NO: 61960 - RNA, 23 nt, synthetic construct
  source 1..23: mol_type = other RNA
cggacgtggccagctggaatccg

SEQ ID NO: 61961 - RNA, 23 nt, synthetic construct
  source 1..23: mol_type = other RNA
caggcatggacaggcggccgcct

SEQ ID NO: 61962 - RNA, 23 nt, synthetic construct
  source 1..23: mol_type = other RNA
gcaggaatgtccacacgcatggt

SEQ ID NO: 61963 - RNA, 23 nt, synthetic construct
  source 1..23: mol_type = other RNA
tgggtgtgctagacaccggggct

SEQ ID NO: 61964 - RNA, 23 nt, synthetic construct
  source 1..23: mol_type = other RNA
tggctgtagtgctcggctctgtg

SEQ ID NO: 61965 - RNA, 23 nt, synthetic construct
  source 1..23: mol_type = other RNA
tggctgtagtgctcggctctgtg

SEQ ID NO: 61966 - RNA, 23 nt, synthetic construct
  source 1..23: mol_type = other RNA
tggctgtagtgctcggctctgtg

SEQ ID NO: 61967 - RNA, 23 nt, synthetic construct
  source 1..23: mol_type = other RNA
tgaggatccgggtcgtccccaga

SEQ ID NO: 61968 - RNA, 23 nt, synthetic construct
  source 1..23: mol_type = other RNA
ggtgcagtcggatgaacacgctg

SEQ ID NO: 61969 - RNA, 23 nt, synthetic construct
  source 1..23: mol_type = other RNA
ttcacccacggggtgggcagcag

SEQ ID NO: 61970 - RNA, 23 nt, synthetic construct
  source 1..23: mol_type = other RNA
gctcattgtcgtctctgtcctgg

SEQ ID NO: 61971 - RNA, 23 nt, synthetic construct
  source 1..23: mol_type = other RNA
ctgtggtcggtggcggggttgtg

SEQ ID NO: 61972 - RNA, 23 nt, synthetic construct
  source 1..23: mol_type = other RNA
ggggagtaccactggtctgtgtg

SEQ ID NO: 61973 - RNA, 23 nt, synthetic construct
  source 1..23: mol_type = other RNA
ggggagtaccactggtctgtgtg

SEQ ID NO: 61974 - RNA, 23 nt, synthetic construct
  source 1..23: mol_type = other RNA
ggggagtaccactggtctgtgtg

SEQ ID NO: 61975 - RNA, 23 nt, synthetic construct
  source 1..23: mol_type = other RNA
ggggagtaccactggtctgtgtg

SEQ ID NO: 61976 - RNA, 23 nt, synthetic construct
  source 1..23: mol_type = other RNA
ggggagtaccactggtctgtgtg

SEQ ID NO: 61977 - RNA, 23 nt, synthetic construct
  source 1..23: mol_type = other RNA
agctgcagtcaccatgcaggtcg

SEQ ID NO: 61978 - RNA, 23 nt, synthetic construct
  source 1..23: mol_type = other RNA
acctgcatgagtggcaccagctg

SEQ ID NO: 61979 - RNA, 23 nt, synthetic construct
  source 1..23: mol_type = other RNA
agtgatgggggagtaccactggt

SEQ ID NO: 61980 - RNA, 23 nt, synthetic construct
  source 1..23: mol_type = other RNA
tcacggttcctgcagaccaggcc

SEQ ID NO: 61981 - RNA, 23 nt, synthetic construct
  source 1..23: mol_type = other RNA
ggtgtggacagtctctggagtgg

SEQ ID NO: 61982 - RNA, 23 nt, synthetic construct
  source 1..23: mol_type = other RNA
agtgatgggggagtaccactggt

SEQ ID NO: 61983 - RNA, 23 nt, synthetic construct
  source 1..23: mol_type = other RNA
tcacggttcctgcagaccaggcc

SEQ ID NO: 61984 - RNA, 23 nt, synthetic construct
  source 1..23: mol_type = other RNA
ggtgtggacagtctctggagtag

SEQ ID NO: 61985 - RNA, 23 nt, synthetic construct
  source 1..23: mol_type = other RNA
agtgatgggggagtaccactggt

SEQ ID NO: 61986 - RNA, 23 nt, synthetic construct
  source 1..23: mol_type = other RNA
tcacggttcctgcagaccaggcc

SEQ ID NO: 61987 - RNA, 23 nt, synthetic construct
  source 1..23: mol_type = other RNA
agtgatgggggagtaccactggt

SEQ ID NO: 61988 - RNA, 23 nt, synthetic construct
  source 1..23: mol_type = other RNA
tcacggttcctgcagaccaggcc

SEQ ID NO: 61989 - RNA, 23 nt, synthetic construct
  source 1..23: mol_type = other RNA
ggtgtggacagtctctggagtgg

SEQ ID NO: 61990 - RNA, 23 nt, synthetic construct
  source 1..23: mol_type = other RNA
agtgatgggggagtaccactggt

SEQ ID NO: 61991 - RNA, 23 nt, synthetic construct
  source 1..23: mol_type = other RNA
atggcattgtcgtcgaagttccc

SEQ ID NO: 61992 - RNA, 23 nt, synthetic construct
  source 1..23: mol_type = other RNA
gtttctcatcataggtggagatg

SEQ ID NO: 61993 - RNA, 23 nt, synthetic construct
  source 1..23: mol_type = other RNA
aaaggtcccctcttggaggatca

SEQ ID NO: 61994 - RNA, 23 nt, synthetic construct
  source 1..23: mol_type = other RNA
gaagtccccgtggaaggctctgt

SEQ ID NO: 61995 - RNA, 23 nt, synthetic construct
  source 1..23: mol_type = other RNA
gaagtccccgtggaaggctctgt

SEQ ID NO: 61996 - RNA, 23 nt, synthetic construct
  source 1..23: mol_type = other RNA
gagtagaggaggtgtggattgtg

SEQ ID NO: 61997 - RNA, 23 nt, synthetic construct
  source 1..23: mol_type = other RNA
ccccacatgctgcagatgcactc

SEQ ID NO: 61998 - RNA, 23 nt, synthetic construct
  source 1..23: mol_type = other RNA
tgcccggccactctcttgtactc

SEQ ID NO: 61999 - RNA, 23 nt, synthetic construct
  source 1..23: mol_type = other RNA
ggcacgcgctcggggcacccatc

SEQ ID NO: 62000 - RNA, 23 nt, synthetic construct
  source 1..23: mol_type = other RNA
ggtggtgttgaaggaggtgcccg

SEQ ID NO: 62001 - RNA, 23 nt, synthetic construct
  source 1..23: mol_type = other RNA
gtccaggctgagcgtcaccgctt

SEQ ID NO: 62002 - RNA, 23 nt, synthetic construct
  source 1..23: mol_type = other RNA
ggtgtgcagttacagctctggca

SEQ ID NO: 62003 - RNA, 23 nt, synthetic construct
  source 1..23: mol_type = other RNA
gtgagggccgccgtcgaccggat

SEQ ID NO: 62004 - RNA, 23 nt, synthetic construct
  source 1..23: mol_type = other RNA
tggaagggctgagcgtgttggaa

SEQ ID NO: 62005 - RNA, 23 nt, synthetic construct
  source 1..23: mol_type = other RNA
ggagctgttctcagggtggaggt

SEQ ID NO: 62006 - RNA, 23 nt, synthetic construct
  source 1..23: mol_type = other RNA
tggacagtctctggagtggagga

SEQ ID NO: 62007 - RNA, 23 nt, synthetic construct
  source 1..23: mol_type = other RNA
tggccgtgctggtcagcactttg

SEQ ID NO: 62008 - RNA, 23 nt, synthetic construct
  source 1..23: mol_type = other RNA
gctgtagtgctgggctctgtgag

SEQ ID NO: 62009 - RNA, 23 nt, synthetic construct
  source 1..23: mol_type = other RNA
tggccgtgctggtcagcactttg

SEQ ID NO: 62010 - RNA, 23 nt, synthetic construct
  source 1..23: mol_type = other RNA
gtgatcagtgatgggggagtacc

SEQ ID NO: 62011 - RNA, 23 nt, synthetic construct
  source 1..23: mol_type = other RNA
tggacagtctctggagtggagga

SEQ ID NO: 62012 - RNA, 23 nt, synthetic construct
  source 1..23: mol_type = other RNA
tggccgtgctggtcagcactggg

SEQ ID NO: 62013 - RNA, 23 nt, synthetic construct
  source 1..23: mol_type = other RNA
gagctgggaaccgtggaggcagt

SEQ ID NO: 62014 - RNA, 23 nt, synthetic construct
  source 1..23: mol_type = other RNA
ggtagaggctgagattcccaaag

SEQ ID NO: 62015 - RNA, 23 nt, synthetic construct
  source 1..23: mol_type = other RNA
gctcacgcccagggcaggaatgt

SEQ ID NO: 62016 - RNA, 23 nt, synthetic construct
  source 1..23: mol_type = other RNA
ggacaggtagtattgttgcaggc

SEQ ID NO: 62017 - RNA, 23 nt, synthetic construct
  source 1..23: mol_type = other RNA
actctcttgtactcaaagccctg

SEQ ID NO: 62018 - RNA, 23 nt, synthetic construct
  source 1..23: mol_type = other RNA
cagcaaatggactccaccctcag

SEQ ID NO: 62019 - RNA, 23 nt, synthetic construct
  source 1..23: mol_type = other RNA
cagtggactcagtcgtagtggct

SEQ ID NO: 62020 - RNA, 23 nt, synthetic construct
  source 1..23: mol_type = other RNA
cagtggactcagtcgtagtggct

SEQ ID NO: 62021 - RNA, 23 nt, synthetic construct
  source 1..23: mol_type = other RNA
gagggtgccagcagttgcccggg

SEQ ID NO: 62022 - RNA, 23 nt, synthetic construct
  source 1..23: mol_type = other RNA
gctagacaccggggctgcggggc

SEQ ID NO: 62023 - RNA, 23 nt, synthetic construct
  source 1..23: mol_type = other RNA
ccgtgggtctcgatgaccaggaa

SEQ ID NO: 62024 - RNA, 23 nt, synthetic construct
  source 1..23: mol_type = other RNA
atgtgtgcgttgaagaggatctg

SEQ ID NO: 62025 - RNA, 23 nt, synthetic construct
  source 1..23: mol_type = other RNA
acaccagcgtccggcacgcgctc

SEQ ID NO: 62026 - RNA, 23 nt, synthetic construct
  source 1..23: mol_type = other RNA
acacctgcatgagtggcaccagc

SEQ ID NO: 62027 - RNA, 23 nt, synthetic construct
  source 1..23: mol_type = other RNA
tggccccggttgtggtggccgtg

SEQ ID NO: 62028 - RNA, 23 nt, synthetic construct
  source 1..23: mol_type = other RNA
tggccccggttgtggtggccgtg

SEQ ID NO: 62029 - RNA, 23 nt, synthetic construct
  source 1..23: mol_type = other RNA
gccgccttgcctgtcgcagcttc

SEQ ID NO: 62030 - RNA, 23 nt, synthetic construct
  source 1..23: mol_type = other RNA
tgatgggggagtaccactggtct

SEQ ID NO: 62031 - RNA, 23 nt, synthetic construct
  source 1..23: mol_type = other RNA
tgatgggggagtaccactggtct

SEQ ID NO: 62032 - RNA, 23 nt, synthetic construct
  source 1..23: mol_type = other RNA
tgatgggggagtaccactggtct

SEQ ID NO: 62033 - RNA, 23 nt, synthetic construct
  source 1..23: mol_type = other RNA
tgatgggggagtaccactggtct

SEQ ID NO: 62034 - RNA, 23 nt, synthetic construct
  source 1..23: mol_type = other RNA
tgatgggggagtaccactggtct

SEQ ID NO: 62035 - RNA, 23 nt, synthetic construct
  source 1..23: mol_type = other RNA
cagtgaggatccgggtcgtcccc

SEQ ID NO: 62036 - RNA, 23 nt, synthetic construct
  source 1..23: mol_type = other RNA
gaggtctgcagcggaaggtggga

SEQ ID NO: 62037 - RNA, 23 nt, synthetic construct
  source 1..23: mol_type = other RNA
gcatagaactcgttgaaggccgg

SEQ ID NO: 62038 - RNA, 23 nt, synthetic construct
  source 1..23: mol_type = other RNA
cagcctggcgttgtgggcataga

SEQ ID NO: 62039 - RNA, 23 nt, synthetic construct
  source 1..23: mol_type = other RNA
actggaagggtggttgcagtcct

SEQ ID NO: 62040 - RNA, 23 nt, synthetic construct
  source 1..23: mol_type = other RNA
atgggagttgtccctggagttga

SEQ ID NO: 62041 - RNA, 23 nt, synthetic construct
  source 1..23: mol_type = other RNA
actggaagggtggttgcagtcct

SEQ ID NO: 62042 - RNA, 23 nt, synthetic construct
  source 1..23: mol_type = other RNA
actggaagggtggttgcagtcct

SEQ ID NO: 62043 - RNA, 23 nt, synthetic construct
  source 1..23: mol_type = other RNA
acagaacgtagctgcagtcacca

SEQ ID NO: 62044 - RNA, 23 nt, synthetic construct
  source 1..23: mol_type = other RNA
tgacaaacacctgcatgagtggc

SEQ ID NO: 62045 - RNA, 23 nt, synthetic construct
  source 1..23: mol_type = other RNA
tgcacaccctgtgcttttctgca

SEQ ID NO: 62046 - RNA, 23 nt, synthetic construct
  source 1..23: mol_type = other RNA
ctgcacaccctgtgcttttctgc

SEQ ID NO: 62047 - RNA, 23 nt, synthetic construct
  source 1..23: mol_type = other RNA
ccccaggggtgcccgccgagctg

SEQ ID NO: 62048 - RNA, 23 nt, synthetic construct
  source 1..23: mol_type = other RNA
ggatgctcggggtcacccatagg

SEQ ID NO: 62049 - RNA, 23 nt, synthetic construct
  source 1..23: mol_type = other RNA
ggccgtgggtgtggtggtctgtg

SEQ ID NO: 62050 - RNA, 23 nt, synthetic construct
  source 1..23: mol_type = other RNA
gctggggggcagggatcgcccgt

SEQ ID NO: 62051 - RNA, 23 nt, synthetic construct
  source 1..23: mol_type = other RNA
ggccgtgggtgtggtggtctgtg

SEQ ID NO: 62052 - RNA, 23 nt, synthetic construct
  source 1..23: mol_type = other RNA
aggtgttgtccctggagttgagg

SEQ ID NO: 62053 - RNA, 23 nt, synthetic construct
  source 1..23: mol_type = other RNA
cagtccttggactggaggaggaa

SEQ ID NO: 62054 - RNA, 23 nt, synthetic construct
  source 1..23: mol_type = other RNA
ggccgtgggtgtggtggtctgtg

SEQ ID NO: 62055 - RNA, 23 nt, synthetic construct
  source 1..23: mol_type = other RNA
ggccgtgggtgtggtggtctgtg

SEQ ID NO: 62056 - RNA, 23 nt, synthetic construct
  source 1..23: mol_type = other RNA
aggtgttgtccctggagttgagg

SEQ ID NO: 62057 - RNA, 23 nt, synthetic construct
  source 1..23: mol_type = other RNA
cagtccttggactggaggaggaa

SEQ ID NO: 62058 - RNA, 23 nt, synthetic construct
  source 1..23: mol_type = other RNA
ggccgtgggtgtggtggtctgtg

SEQ ID NO: 62059 - RNA, 23 nt, synthetic construct
  source 1..23: mol_type = other RNA
gggtgttgtccctggagttgagg

SEQ ID NO: 62060 - RNA, 23 nt, synthetic construct
  source 1..23: mol_type = other RNA
cagtccttggactggaggaggaa

SEQ ID NO: 62061 - RNA, 23 nt, synthetic construct
  source 1..23: mol_type = other RNA
caggggtgcgggtggtccccacg

SEQ ID NO: 62062 - RNA, 23 nt, synthetic construct
  source 1..23: mol_type = other RNA
gacccaccgctccccgggaaatt

SEQ ID NO: 62063 - RNA, 23 nt, synthetic construct
  source 1..23: mol_type = other RNA
ccgtagaaggtgccattgtacga

SEQ ID NO: 62064 - RNA, 23 nt, synthetic construct
  source 1..23: mol_type = other RNA
cccgtagaaggtgccattgtacg

SEQ ID NO: 62065 - RNA, 23 nt, synthetic construct
  source 1..23: mol_type = other RNA
ccagcggccggacgtggccagct

SEQ ID NO: 62066 - RNA, 23 nt, synthetic construct
  source 1..23: mol_type = other RNA
tggcattgtcgtcgaagttcccg

SEQ ID NO: 62067 - RNA, 23 nt, synthetic construct
  source 1..23: mol_type = other RNA
gccccggttgtggtggccgtggt

SEQ ID NO: 62068 - RNA, 23 nt, synthetic construct
  source 1..23: mol_type = other RNA
gccccggttgtggtggccgtggc

SEQ ID NO: 62069 - RNA, 23 nt, synthetic construct
  source 1..23: mol_type = other RNA
tcgtagagtttctcatcataggt

SEQ ID NO: 62070 - RNA, 23 nt, synthetic construct
  source 1..23: mol_type = other RNA
gtgggtgtcgtggccgtggtgct

SEQ ID NO: 62071 - RNA, 23 nt, synthetic construct
  source 1..23: mol_type = other RNA
gtgggtgtcgtggccgtggtgct

SEQ ID NO: 62072 - RNA, 23 nt, synthetic construct
  source 1..23: mol_type = other RNA
gtgggtgtcgtggccgtggtgct

SEQ ID NO: 62073 - RNA, 23 nt, synthetic construct
  source 1..23: mol_type = other RNA
ccgtgcagttgccggccggcaag

SEQ ID NO: 62074 - RNA, 23 nt, synthetic construct
  source 1..23: mol_type = other RNA
aagggtggttgcagtccttggac

SEQ ID NO: 62075 - RNA, 23 nt, synthetic construct
  source 1..23: mol_type = other RNA
aagggtggttgcagtccttggac

SEQ ID NO: 62076 - RNA, 23 nt, synthetic construct
  source 1..23: mol_type = other RNA
aagggtggttgcagtccttggac

SEQ ID NO: 62077 - RNA, 23 nt, synthetic construct
  source 1..23: mol_type = other RNA
gtggccgtggatccagtggctgc

SEQ ID NO: 62078 - RNA, 23 nt, synthetic construct
  source 1..23: mol_type = other RNA
tacctggtaccctctctgcctca

SEQ ID NO: 62079 - RNA, 23 nt, synthetic construct
  source 1..23: mol_type = other RNA
ggtggaggacgggatggccgtgg

SEQ ID NO: 62080 - RNA, 23 nt, synthetic construct
  source 1..23: mol_type = other RNA
gtcggggcaccgccatccatggt

SEQ ID NO: 62081 - RNA, 23 nt, synthetic construct
  source 1..23: mol_type = other RNA
gagtattccacaaaggtggcaca

SEQ ID NO: 62082 - RNA, 23 nt, synthetic construct
  source 1..23: mol_type = other RNA
cacggccatcccgtgggtctcga

SEQ ID NO: 62083 - RNA, 23 nt, synthetic construct
  source 1..23: mol_type = other RNA
gcgagctctggaggttgccattg

SEQ ID NO: 62084 - RNA, 23 nt, synthetic construct
  source 1..23: mol_type = other RNA
tggtggccgtggcggtaagcact

SEQ ID NO: 62085 - RNA, 23 nt, synthetic construct
  source 1..23: mol_type = other RNA
aggagggtgttgccatagaacca

SEQ ID NO: 62086 - RNA, 23 nt, synthetic construct
  source 1..23: mol_type = other RNA
ggagttgtcccaggagttgagga

SEQ ID NO: 62087 - RNA, 23 nt, synthetic construct
  source 1..23: mol_type = other RNA
ggggatgggagttgtcccaggag

SEQ ID NO: 62088 - RNA, 23 nt, synthetic construct
  source 1..23: mol_type = other RNA
aggagggtgttgccatagaacca

SEQ ID NO: 62089 - RNA, 23 nt, synthetic construct
  source 1..23: mol_type = other RNA
acagggctggagtcgagtgctgg

SEQ ID NO: 62090 - RNA, 23 nt, synthetic construct
  source 1..23: mol_type = other RNA
aggagggcgtggccgtagagctg

SEQ ID NO: 62091 - RNA, 23 nt, synthetic construct
  source 1..23: mol_type = other RNA
ctttgagggtgccagcagttgcc

SEQ ID NO: 62092 - RNA, 23 nt, synthetic construct
  source 1..23: mol_type = other RNA
aggagggtgttgccatagaacca

SEQ ID NO: 62093 - RNA, 23 nt, synthetic construct
  source 1..23: mol_type = other RNA
acagggctggagtcgagtgctgg

SEQ ID NO: 62094 - RNA, 23 nt, synthetic construct
  source 1..23: mol_type = other RNA
aggagggcgtggccgtagagctg

SEQ ID NO: 62095 - RNA, 23 nt, synthetic construct
  source 1..23: mol_type = other RNA
aggagggtgttgccatagaacca

SEQ ID NO: 62096 - RNA, 23 nt, synthetic construct
  source 1..23: mol_type = other RNA
acagggctggagtcgagtgctgg

SEQ ID NO: 62097 - RNA, 23 nt, synthetic construct
  source 1..23: mol_type = other RNA
tggtggccgtggcggtaagcact

SEQ ID NO: 62098 - RNA, 23 nt, synthetic construct
  source 1..23: mol_type = other RNA
aggagggtgttgccatagaacca

SEQ ID NO: 62099 - RNA, 23 nt, synthetic construct
  source 1..23: mol_type = other RNA
cagctcagtgaggatccgggtcg

SEQ ID NO: 62100 - RNA, 23 nt, synthetic construct
  source 1..23: mol_type = other RNA
agctgttcccagagtggaggagg

SEQ ID NO: 62101 - RNA, 23 nt, synthetic construct
  source 1..23: mol_type = other RNA
gggctctggttcctagagttgca

SEQ ID NO: 62102 - RNA, 23 nt, synthetic construct
  source 1..23: mol_type = other RNA
cactgcccggccactctcttgta

SEQ ID NO: 62103 - RNA, 23 nt, synthetic construct
  source 1..23: mol_type = other RNA
agcactgcccggccactctcttg

SEQ ID NO: 62104 - RNA, 23 nt, synthetic construct
  source 1..23: mol_type = other RNA
cccaggtttcattcagctggact

SEQ ID NO: 62105 - RNA, 23 nt, synthetic construct
  source 1..23: mol_type = other RNA
ctcagcctcacagaggtacacgg

SEQ ID NO: 62106 - RNA, 23 nt, synthetic construct
  source 1..23: mol_type = other RNA
taggacagtgcaagggcaccgtc

SEQ ID NO: 62107 - RNA, 23 nt, synthetic construct
  source 1..23: mol_type = other RNA
ccgggaagccacgggtgtgtggg

SEQ ID NO: 62108 - RNA, 23 nt, synthetic construct
  source 1..23: mol_type = other RNA
ggcgctccggccgtggcagggac

SEQ ID NO: 62109 - RNA, 23 nt, synthetic construct
  source 1..23: mol_type = other RNA
gtgtgccctgcattctcccagct

SEQ ID NO: 62110 - RNA, 23 nt, synthetic construct
  source 1..23: mol_type = other RNA
caggttttcaaacgtctcaaagt

SEQ ID NO: 62111 - RNA, 23 nt, synthetic construct
  source 1..23: mol_type = other RNA
acatcttgaagacgccctcctgc

SEQ ID NO: 62112 - RNA, 23 nt, synthetic construct
  source 1..23: mol_type = other RNA
ggccgaagtccaggctgtgcgca

SEQ ID NO: 62113 - RNA, 23 nt, synthetic construct
  source 1..23: mol_type = other RNA
ggccgaagtccaggctgtgcgca

SEQ ID NO: 62114 - RNA, 23 nt, synthetic construct
  source 1..23: mol_type = other RNA
ggccgaagtccaggctgtgcgca

SEQ ID NO: 62115 - RNA, 23 nt, synthetic construct
  source 1..23: mol_type = other RNA
ggccgaagtccaggctgtgcgca

SEQ ID NO: 62116 - RNA, 23 nt, synthetic construct
  source 1..23: mol_type = other RNA
gacgtggaactggtggcccttgt

SEQ ID NO: 62117 - RNA, 23 nt, synthetic construct
  source 1..23: mol_type = other RNA
ccgccatccatggtgtgccctgc

SEQ ID NO: 62118 - RNA, 23 nt, synthetic construct
  source 1..23: mol_type = other RNA
ggtggccccggttgtggtggccg

SEQ ID NO: 62119 - RNA, 23 nt, synthetic construct
  source 1..23: mol_type = other RNA
ggtggccccggttgtggtggccg

SEQ ID NO: 62120 - RNA, 23 nt, synthetic construct
  source 1..23: mol_type = other RNA
tgacccaggtttcattcagctgg

SEQ ID NO: 62121 - RNA, 23 nt, synthetic construct
  source 1..23: mol_type = other RNA
aggttttcaaacgtctcaaagtc

SEQ ID NO: 62122 - RNA, 23 nt, synthetic construct
  source 1..23: mol_type = other RNA
ggggggcagggatcgcccgtgtg

SEQ ID NO: 62123 - RNA, 23 nt, synthetic construct
  source 1..23: mol_type = other RNA
ggccgtggtgtggcccggggtgg

SEQ ID NO: 62124 - RNA, 23 nt, synthetic construct
  source 1..23: mol_type = other RNA
ggccgtggtgtggcccggggtgg

SEQ ID NO: 62125 - RNA, 23 nt, synthetic construct
  source 1..23: mol_type = other RNA
tagtggaagtcaccccaggtgct

SEQ ID NO: 62126 - RNA, 23 nt, synthetic construct
  source 1..23: mol_type = other RNA
gtcgtagagtttctcatcatagg

SEQ ID NO: 62127 - RNA, 23 nt, synthetic construct
  source 1..23: mol_type = other RNA
gtcggcctcactcaggccgcggc

SEQ ID NO: 62128 - RNA, 23 nt, synthetic construct
  source 1..23: mol_type = other RNA
gcactcccacctccggttcctgc

SEQ ID NO: 62129 - RNA, 23 nt, synthetic construct
  source 1..23: mol_type = other RNA
ggggcaggtgtccggagtccgcc

SEQ ID NO: 62130 - RNA, 23 nt, synthetic construct
  source 1..23: mol_type = other RNA
gtagctgtaggtcctgtcctcat

SEQ ID NO: 62131 - RNA, 23 nt, synthetic construct
  source 1..23: mol_type = other RNA
gcatacctggtaccctctctgcc

SEQ ID NO: 62132 - RNA, 23 nt, synthetic construct
  source 1..23: mol_type = other RNA
gcactcgatgtcagccagcacag

SEQ ID NO: 62133 - RNA, 23 nt, synthetic construct
  source 1..23: mol_type = other RNA
ccagtctgcgaggtgagggccgc

SEQ ID NO: 62134 - RNA, 23 nt, synthetic construct
  source 1..23: mol_type = other RNA
ccctccagcggccctgatcttat

SEQ ID NO: 62135 - RNA, 23 nt, synthetic construct
  source 1..23: mol_type = other RNA
ctgcagtggtcgtcactgcagca

SEQ ID NO: 62136 - RNA, 23 nt, synthetic construct
  source 1..23: mol_type = other RNA
ggcacgtcccctgcagtggtcgt

SEQ ID NO: 62137 - RNA, 23 nt, synthetic construct
  source 1..23: mol_type = other RNA
tggaagcggtgctggctgtgcct

SEQ ID NO: 62138 - RNA, 23 nt, synthetic construct
  source 1..23: mol_type = other RNA
gccgtggatccagtggacgcagt

SEQ ID NO: 62139 - RNA, 23 nt, synthetic construct
  source 1..23: mol_type = other RNA
cacactggaggcgtgagtgccgt

SEQ ID NO: 62140 - RNA, 23 nt, synthetic construct
  source 1..23: mol_type = other RNA
tgtgggtggtgcccaagatgccc

SEQ ID NO: 62141 - RNA, 23 nt, synthetic construct
  source 1..23: mol_type = other RNA
cccggcatggggtagctgtagtc

SEQ ID NO: 62142 - RNA, 23 nt, synthetic construct
  source 1..23: mol_type = other RNA
gtgctcacatgtggggtgccagc

SEQ ID NO: 62143 - RNA, 23 nt, synthetic construct
  source 1..23: mol_type = other RNA
ggccccggttgtggtggccgtgg

SEQ ID NO: 62144 - RNA, 23 nt, synthetic construct
  source 1..23: mol_type = other RNA
taggtgttgtccctggagttgag

SEQ ID NO: 62145 - RNA, 23 nt, synthetic construct
  source 1..23: mol_type = other RNA
cccggcatggggtagctgtagtc

SEQ ID NO: 62146 - RNA, 23 nt, synthetic construct
  source 1..23: mol_type = other RNA
ggaagggtggttgcagtccttgg

SEQ ID NO: 62147 - RNA, 23 nt, synthetic construct
  source 1..23: mol_type = other RNA
ctgtggatttggtggctgtgctt

SEQ ID NO: 62148 - RNA, 23 nt, synthetic construct
  source 1..23: mol_type = other RNA
cccttgtcgtggtggccttcgtg

SEQ ID NO: 62149 - RNA, 23 nt, synthetic construct
  source 1..23: mol_type = other RNA
cacactggaggcgtgagtgccgt

SEQ ID NO: 62150 - RNA, 23 nt, synthetic construct
  source 1..23: mol_type = other RNA
tgtgggtggtgcccaagatgccc

SEQ ID NO: 62151 - RNA, 23 nt, synthetic construct
  source 1..23: mol_type = other RNA
cccggcatggggtagctgtagtc

SEQ ID NO: 62152 - RNA, 23 nt, synthetic construct
  source 1..23: mol_type = other RNA
gtgctcacatgtggggtgccagc

SEQ ID NO: 62153 - RNA, 23 nt, synthetic construct
  source 1..23: mol_type = other RNA
taggtgttgtccctggagttgag

SEQ ID NO: 62154 - RNA, 23 nt, synthetic construct
  source 1..23: mol_type = other RNA
cccggcatggggtagctgtagtc

SEQ ID NO: 62155 - RNA, 23 nt, synthetic construct
  source 1..23: mol_type = other RNA
ggaagggtggttgcagtccttgg

SEQ ID NO: 62156 - RNA, 23 nt, synthetic construct
  source 1..23: mol_type = other RNA
ctgtggatttggtggctgtgctt

SEQ ID NO: 62157 - RNA, 23 nt, synthetic construct
  source 1..23: mol_type = other RNA
cccttgtcgtggtggccttcgtg

SEQ ID NO: 62158 - RNA, 23 nt, synthetic construct
  source 1..23: mol_type = other RNA
gccgtggatccagtggacgcagt

SEQ ID NO: 62159 - RNA, 23 nt, synthetic construct
  source 1..23: mol_type = other RNA
gtgctcacatgtggggtgccagc

SEQ ID NO: 62160 - RNA, 23 nt, synthetic construct
  source 1..23: mol_type = other RNA
ggccccggttgtggtggccgtgg

SEQ ID NO: 62161 - RNA, 23 nt, synthetic construct
  source 1..23: mol_type = other RNA
cacactggaggcgtgagtgccgt

SEQ ID NO: 62162 - RNA, 23 nt, synthetic construct
  source 1..23: mol_type = other RNA
ggaagggtggttgcagtccttgg

SEQ ID NO: 62163 - RNA, 23 nt, synthetic construct
  source 1..23: mol_type = other RNA
ggaaggtgtaagaggtgccgtca

SEQ ID NO: 62164 - RNA, 23 nt, synthetic construct
  source 1..23: mol_type = other RNA
atggacttgtagtggatgctgag

SEQ ID NO: 62165 - RNA, 23 nt, synthetic construct
  source 1..23: mol_type = other RNA
ggttgcacggcgggggctgaccc

SEQ ID NO: 62166 - RNA, 23 nt, synthetic construct
  source 1..23: mol_type = other RNA
gaggcaggcggtctggacgcact

SEQ ID NO: 62167 - RNA, 23 nt, synthetic construct
  source 1..23: mol_type = other RNA
gtaggtgtgcaggatggctgagc

SEQ ID NO: 62168 - RNA, 23 nt, synthetic construct
  source 1..23: mol_type = other RNA
cacccttctggggccggtttcac

SEQ ID NO: 62169 - RNA, 23 nt, synthetic construct
  source 1..23: mol_type = other RNA
cctgtcgcagcttcctggcagca

SEQ ID NO: 62170 - RNA, 23 nt, synthetic construct
  source 1..23: mol_type = other RNA
gctgttcccagagtggaggaggc

SEQ ID NO: 62171 - RNA, 23 nt, synthetic construct
  source 1..23: mol_type = other RNA
ggttgcaccaaccccgtagaagg

SEQ ID NO: 62172 - RNA, 23 nt, synthetic construct
  source 1..23: mol_type = other RNA
ccgccttaaaggtcccctcttgg

SEQ ID NO: 62173 - RNA, 23 nt, synthetic construct
  source 1..23: mol_type = other RNA
catgtcgggaagctgcgccgccc

SEQ ID NO: 62174 - RNA, 23 nt, synthetic construct
  source 1..23: mol_type = other RNA
gtcgtggtggtaagcactgtgga

SEQ ID NO: 62175 - RNA, 23 nt, synthetic construct
  source 1..23: mol_type = other RNA
catggccgtagagctggtggccg

SEQ ID NO: 62176 - RNA, 23 nt, synthetic construct
  source 1..23: mol_type = other RNA
catggccgtagagctggtggccg

SEQ ID NO: 62177 - RNA, 23 nt, synthetic construct
  source 1..23: mol_type = other RNA
ccaaccccgtagaaggtgccatt

SEQ ID NO: 62178 - RNA, 23 nt, synthetic construct
  source 1..23: mol_type = other RNA
gtcgtcactgcagcagaggaccc

SEQ ID NO: 62179 - RNA, 23 nt, synthetic construct
  source 1..23: mol_type = other RNA
cttgtcgtggtggccttcgtggt

SEQ ID NO: 62180 - RNA, 23 nt, synthetic construct
  source 1..23: mol_type = other RNA
cttgtcgtggtggccttcgtggt

SEQ ID NO: 62181 - RNA, 23 nt, synthetic construct
  source 1..23: mol_type = other RNA
cggttgacagcgggtcgtgccct

SEQ ID NO: 62182 - RNA, 23 nt, synthetic construct
  source 1..23: mol_type = other RNA
agagtgcgtgatgtcatccagca

SEQ ID NO: 62183 - RNA, 23 nt, synthetic construct
  source 1..23: mol_type = other RNA
gtgtcgtggccgtggtgctcaca

SEQ ID NO: 62184 - RNA, 23 nt, synthetic construct
  source 1..23: mol_type = other RNA
gtgtcgtggccgtggtgctcaca

SEQ ID NO: 62185 - RNA, 23 nt, synthetic construct
  source 1..23: mol_type = other RNA
gtgtcgtggccgtggtgctcaca

SEQ ID NO: 62186 - RNA, 23 nt, synthetic construct
  source 1..23: mol_type = other RNA
gtcgtggtggccttcgtggtcag

SEQ ID NO: 62187 - RNA, 23 nt, synthetic construct
  source 1..23: mol_type = other RNA
gtcgtggtggccttcgtggtcag

SEQ ID NO: 62188 - RNA, 23 nt, synthetic construct
  source 1..23: mol_type = other RNA
acgagctgggaaccgtggaggca

SEQ ID NO: 62189 - RNA, 23 nt, synthetic construct
  source 1..23: mol_type = other RNA
cacgcatggtggtggtccccagc

SEQ ID NO: 62190 - RNA, 23 nt, synthetic construct
  source 1..23: mol_type = other RNA
gtagtattgttgcaggcatcctc

SEQ ID NO: 62191 - RNA, 23 nt, synthetic construct
  source 1..23: mol_type = other RNA
gtggttgtgttgcacacgcacac

SEQ ID NO: 62192 - RNA, 23 nt, synthetic construct
  source 1..23: mol_type = other RNA
tggcggtgtgggtggtccccggg

SEQ ID NO: 62193 - RNA, 23 nt, synthetic construct
  source 1..23: mol_type = other RNA
tggcggtgtgggtggtccccggg

SEQ ID NO: 62194 - RNA, 23 nt, synthetic construct
  source 1..23: mol_type = other RNA
tggcggtgtgggtggtccccggg

SEQ ID NO: 62195 - RNA, 23 nt, synthetic construct
  source 1..23: mol_type = other RNA
tgcgtaagcctccaggctctggc

SEQ ID NO: 62196 - RNA, 23 nt, synthetic construct
  source 1..23: mol_type = other RNA
gcgctcggggcacccatcctggg

SEQ ID NO: 62197 - RNA, 23 nt, synthetic construct
  source 1..23: mol_type = other RNA
gaagggtggttgcagtccttgga

SEQ ID NO: 62198 - RNA, 23 nt, synthetic construct
  source 1..23: mol_type = other RNA
gaagggtggttgcagtccttgga

SEQ ID NO: 62199 - RNA, 23 nt, synthetic construct
  source 1..23: mol_type = other RNA
gaagggtggttgcagtccttgga

SEQ ID NO: 62200 - RNA, 23 nt, synthetic construct
  source 1..23: mol_type = other RNA
gggggtgactcggtggttctgct

SEQ ID NO: 62201 - RNA, 23 nt, synthetic construct
  source 1..23: mol_type = other RNA
cagtgcgtcccccaccacggacc

SEQ ID NO: 62202 - RNA, 23 nt, synthetic construct
  source 1..23: mol_type = other RNA
cgccatgtgcccaagctccccgt

SEQ ID NO: 62203 - RNA, 23 nt, synthetic construct
  source 1..23: mol_type = other RNA
gttgctgctagggtgtgggaagt

SEQ ID NO: 62204 - RNA, 23 nt, synthetic construct
  source 1..23: mol_type = other RNA
tggtcgtccctggggaagggggt

SEQ ID NO: 62205 - RNA, 23 nt, synthetic construct
  source 1..23: mol_type = other RNA
gtagctgcagtcaccatgcaggt

SEQ ID NO: 62206 - RNA, 23 nt, synthetic construct
  source 1..23: mol_type = other RNA
cccatgtgggttgtagaagtcac

SEQ ID NO: 62207 - RNA, 23 nt, synthetic construct
  source 1..23: mol_type = other RNA
agggtgttgccatagaaccagtg

SEQ ID NO: 62208 - RNA, 23 nt, synthetic construct
  source 1..23: mol_type = other RNA
gaggagggtgttgccatagaacc

SEQ ID NO: 62209 - RNA, 23 nt, synthetic construct
  source 1..23: mol_type = other RNA
gggtgtcgtggccgtggtgctca

SEQ ID NO: 62210 - RNA, 23 nt, synthetic construct
  source 1..23: mol_type = other RNA
agggtgttgccatagaaccagtg

SEQ ID NO: 62211 - RNA, 23 nt, synthetic construct
  source 1..23: mol_type = other RNA
gaggagggtgttgccatagaacc

SEQ ID NO: 62212 - RNA, 23 nt, synthetic construct
  source 1..23: mol_type = other RNA
agggtgttgccatagaaccagtg

SEQ ID NO: 62213 - RNA, 23 nt, synthetic construct
  source 1..23: mol_type = other RNA
gaggagggtgttgccatagaacc

SEQ ID NO: 62214 - RNA, 23 nt, synthetic construct
  source 1..23: mol_type = other RNA
gggtgtcgtggccgtggtgctca

SEQ ID NO: 62215 - RNA, 23 nt, synthetic construct
  source 1..23: mol_type = other RNA
agggtgttgccatagaaccagtg

SEQ ID NO: 62216 - RNA, 23 nt, synthetic construct
  source 1..23: mol_type = other RNA
gaggagggtgttgccatagaacc

SEQ ID NO: 62217 - RNA, 23 nt, synthetic construct
  source 1..23: mol_type = other RNA
gggtgtcgtggccgtggtgctca

SEQ ID NO: 62218 - RNA, 23 nt, synthetic construct
  source 1..23: mol_type = other RNA
agggtgttgccatagaaccagtg

SEQ ID NO: 62219 - RNA, 23 nt, synthetic construct
  source 1..23: mol_type = other RNA
gaggagggtgttgccatagaacc

SEQ ID NO: 62220 - RNA, 23 nt, synthetic construct
  source 1..23: mol_type = other RNA
agtgcgtcccccaccacggaccg

SEQ ID NO: 62221 - RNA, 23 nt, synthetic construct
  source 1..23: mol_type = other RNA
gtaccaagggtgcttgtgtatct

SEQ ID NO: 62222 - RNA, 23 nt, synthetic construct
  source 1..23: mol_type = other RNA
tagttggcactttggtagtgtga

SEQ ID NO: 62223 - RNA, 23 nt, synthetic construct
  source 1..23: mol_type = other RNA
ggcgggtccaggcggtgcccagg

SEQ ID NO: 62224 - RNA, 23 nt, synthetic construct
  source 1..23: mol_type = other RNA
cttgggtgccagggcgtccgggc

SEQ ID NO: 62225 - RNA, 23 nt, synthetic construct
  source 1..23: mol_type = other RNA
ggggtgatgggtgttgtccctgg

SEQ ID NO: 62226 - RNA, 23 nt, synthetic construct
  source 1..23: mol_type = other RNA
cggtcttattgtagatgacttcc

SEQ ID NO: 62227 - RNA, 23 nt, synthetic construct
  source 1..23: mol_type = other RNA
cccgtggtggctgtaccaagggt

SEQ ID NO: 62228 - RNA, 23 nt, synthetic construct
  source 1..23: mol_type = other RNA
cggttgcacggcgggggctgacc

SEQ ID NO: 62229 - RNA, 23 nt, synthetic construct
  source 1..23: mol_type = other RNA
cctcgtccgtgcagttgccggcc

SEQ ID NO: 62230 - RNA, 23 nt, synthetic construct
  source 1..23: mol_type = other RNA
catagccccccggagcaggtgca

SEQ ID NO: 62231 - RNA, 23 nt, synthetic construct
  source 1..23: mol_type = other RNA
cgtagctgcagtcaccatgcagg

SEQ ID NO: 62232 - RNA, 23 nt, synthetic construct
  source 1..23: mol_type = other RNA
gcatgagtggcaccagctgcacc

SEQ ID NO: 62233 - RNA, 23 nt, synthetic construct
  source 1..23: mol_type = other RNA
gagaaggcactgttgggatcggt

SEQ ID NO: 62234 - RNA, 23 nt, synthetic construct
  source 1..23: mol_type = other RNA
ggagtggcagcgcgagaaggcac

SEQ ID NO: 62235 - RNA, 23 nt, synthetic construct
  source 1..23: mol_type = other RNA
ccaggggtgcccgccgagctgtt

SEQ ID NO: 62236 - RNA, 23 nt, synthetic construct
  source 1..23: mol_type = other RNA
cctcctcggcaatgcagccccca

SEQ ID NO: 62237 - RNA, 23 nt, synthetic construct
  source 1..23: mol_type = other RNA
gtcctggtagctgtaggtcctgt

SEQ ID NO: 62238 - RNA, 23 nt, synthetic construct
  source 1..23: mol_type = other RNA
tcaaagtctccgcctcccaggcc

SEQ ID NO: 62239 - RNA, 23 nt, synthetic construct
  source 1..23: mol_type = other RNA
gagtaccactggtctgtgtgcta

SEQ ID NO: 62240 - RNA, 23 nt, synthetic construct
  source 1..23: mol_type = other RNA
gggatgggagttgtcccaggagt

SEQ ID NO: 62241 - RNA, 23 nt, synthetic construct
  source 1..23: mol_type = other RNA
gcagggtcgaggtgcgggtcttg

SEQ ID NO: 62242 - RNA, 23 nt, synthetic construct
  source 1..23: mol_type = other RNA
atgtggggtgccagcagttgcct

SEQ ID NO: 62243 - RNA, 23 nt, synthetic construct
  source 1..23: mol_type = other RNA
tggtgactgtgggtgtcgtggcc

SEQ ID NO: 62244 - RNA, 23 nt, synthetic construct
  source 1..23: mol_type = other RNA
gtggtggtaagcactgtggaggt

SEQ ID NO: 62245 - RNA, 23 nt, synthetic construct
  source 1..23: mol_type = other RNA
acactggaagcgtgcgtgccgtc

SEQ ID NO: 62246 - RNA, 23 nt, synthetic construct
  source 1..23: mol_type = other RNA
gagtaccactggtctgtgtgcta

SEQ ID NO: 62247 - RNA, 23 nt, synthetic construct
  source 1..23: mol_type = other RNA
gcagggtcgaggtgcgggtcttg

SEQ ID NO: 62248 - RNA, 23 nt, synthetic construct
  source 1..23: mol_type = other RNA
tggtctgctctgtgaggatccag

SEQ ID NO: 62249 - RNA, 23 nt, synthetic construct
  source 1..23: mol_type = other RNA
ggagctgttcccggggtggagga

SEQ ID NO: 62250 - RNA, 23 nt, synthetic construct
  source 1..23: mol_type = other RNA
gtggtggtaagcactgtggaggt

SEQ ID NO: 62251 - RNA, 23 nt, synthetic construct
  source 1..23: mol_type = other RNA
gagtaccactggtctgtgtgcta

SEQ ID NO: 62252 - RNA, 23 nt, synthetic construct
  source 1..23: mol_type = other RNA
gccggtggctgtgatcgtagtgg

SEQ ID NO: 62253 - RNA, 23 nt, synthetic construct
  source 1..23: mol_type = other RNA
gcagggtcgaggtgcgggtcttg

SEQ ID NO: 62254 - RNA, 23 nt, synthetic construct
  source 1..23: mol_type = other RNA
atgtggggtgccagcagttgcct

SEQ ID NO: 62255 - RNA, 23 nt, synthetic construct
  source 1..23: mol_type = other RNA
tggtgactgtgggtgtcgtggcc

SEQ ID NO: 62256 - RNA, 23 nt, synthetic construct
  source 1..23: mol_type = other RNA
gtggtggtaagcactgtggaggt

SEQ ID NO: 62257 - RNA, 23 nt, synthetic construct
  source 1..23: mol_type = other RNA
gagtaccactggtctgtgtgcta

SEQ ID NO: 62258 - RNA, 23 nt, synthetic construct
  source 1..23: mol_type = other RNA
gcagggtcgaggtgcgggtcttg

SEQ ID NO: 62259 - RNA, 23 nt, synthetic construct
  source 1..23: mol_type = other RNA
ggagctgttcccggggtggagga

SEQ ID NO: 62260 - RNA, 23 nt, synthetic construct
  source 1..23: mol_type = other RNA
cccggtggtcccaagggtggagg

SEQ ID NO: 62261 - RNA, 23 nt, synthetic construct
  source 1..23: mol_type = other RNA
atgtggggtgccagcagttgcct

SEQ ID NO: 62262 - RNA, 23 nt, synthetic construct
  source 1..23: mol_type = other RNA
tggtgactgtgggtgtcgtggcc

SEQ ID NO: 62263 - RNA, 23 nt, synthetic construct
  source 1..23: mol_type = other RNA
gagtaccactggtctgtgtgcta

SEQ ID NO: 62264 - RNA, 23 nt, synthetic construct
  source 1..23: mol_type = other RNA
ggtggcccttgtcatggtggctg

SEQ ID NO: 62265 - RNA, 23 nt, synthetic construct
  source 1..23: mol_type = other RNA
gaggacactggcggtggggaggt

SEQ ID NO: 62266 - RNA, 23 nt, synthetic construct
  source 1..23: mol_type = other RNA
ccgtctcctcgtggacccgcctc

SEQ ID NO: 62267 - RNA, 23 nt, synthetic construct
  source 1..23: mol_type = other RNA
cgtggcagggacacataggcccg

SEQ ID NO: 62268 - RNA, 23 nt, synthetic construct
  source 1..23: mol_type = other RNA
ggactcagtcgtagtggctgttg

SEQ ID NO: 62269 - RNA, 23 nt, synthetic construct
  source 1..23: mol_type = other RNA
ggactcagtcgtagtggctgttg

SEQ ID NO: 62270 - RNA, 23 nt, synthetic construct
  source 1..23: mol_type = other RNA
cctagagttgcaggtggcaggct

SEQ ID NO: 62271 - RNA, 23 nt, synthetic construct
  source 1..23: mol_type = other RNA
acaggcacgaaggaaacgctgca

SEQ ID NO: 62272 - RNA, 23 nt, synthetic construct
  source 1..23: mol_type = other RNA
tgggggagtaccactggtctgtg

SEQ ID NO: 62273 - RNA, 23 nt, synthetic construct
  source 1..23: mol_type = other RNA
tgggggagtaccactggtctgtg

SEQ ID NO: 62274 - RNA, 23 nt, synthetic construct
  source 1..23: mol_type = other RNA
tgggggagtaccactggtctgtg

SEQ ID NO: 62275 - RNA, 23 nt, synthetic construct
  source 1..23: mol_type = other RNA
tgggggagtaccactggtctgtg

SEQ ID NO: 62276 - RNA, 23 nt, synthetic construct
  source 1..23: mol_type = other RNA
tgggggagtaccactggtctgtg

SEQ ID NO: 62277 - RNA, 23 nt, synthetic construct
  source 1..23: mol_type = other RNA
gtgcgccgggttcagggggctca

SEQ ID NO: 62278 - RNA, 23 nt, synthetic construct
  source 1..23: mol_type = other RNA
cacagggcatacctggtaccctc

SEQ ID NO: 62279 - RNA, 23 nt, synthetic construct
  source 1..23: mol_type = other RNA
gacgtcggggcaccgccatccat

SEQ ID NO: 62280 - RNA, 23 nt, synthetic construct
  source 1..23: mol_type = other RNA
gcccttgtcgtggtggccttcgt

SEQ ID NO: 62281 - RNA, 23 nt, synthetic construct
  source 1..23: mol_type = other RNA
gcccttgtcgtggtggccttcgt

SEQ ID NO: 62282 - RNA, 23 nt, synthetic construct
  source 1..23: mol_type = other RNA
gcaactggcggcagtggttccgt

SEQ ID NO: 62283 - RNA, 23 nt, synthetic construct
  source 1..23: mol_type = other RNA
acgcagatgcccatgtgtgcgtt

SEQ ID NO: 62284 - RNA, 23 nt, synthetic construct
  source 1..23: mol_type = other RNA
cccgaaaggggtcctgctggccc

SEQ ID NO: 62285 - RNA, 23 nt, synthetic construct
  source 1..23: mol_type = other RNA
ctgcgccgcccggcactcgatgt

SEQ ID NO: 62286 - RNA, 23 nt, synthetic construct
  source 1..23: mol_type = other RNA
tcggcctgagaggtggacagctc

SEQ ID NO: 62287 - RNA, 23 nt, synthetic construct
  source 1..23: mol_type = other RNA
cgtaggctgcggcgttgagaaca

SEQ ID NO: 62288 - RNA, 23 nt, synthetic construct
  source 1..23: mol_type = other RNA
ggaggcgtgcgtgccgtccctgg

SEQ ID NO: 62289 - RNA, 23 nt, synthetic construct
  source 1..23: mol_type = other RNA
ggtctgcagcggaaggtgggaca

SEQ ID NO: 62290 - RNA, 23 nt, synthetic construct
  source 1..23: mol_type = other RNA
cttggggttgatgatggagtggc

SEQ ID NO: 62291 - RNA, 23 nt, synthetic construct
  source 1..23: mol_type = other RNA
gtcccctgcagtggtcgtcactg

SEQ ID NO: 62292 - RNA, 23 nt, synthetic construct
  source 1..23: mol_type = other RNA
tctctgtcctgggcgtgctggtc

SEQ ID NO: 62293 - RNA, 23 nt, synthetic construct
  source 1..23: mol_type = other RNA
taagcactgtggaggtgtgggca

SEQ ID NO: 62294 - RNA, 23 nt, synthetic construct
  source 1..23: mol_type = other RNA
cccagttgtggtggccgtggcgg

SEQ ID NO: 62295 - RNA, 23 nt, synthetic construct
  source 1..23: mol_type = other RNA
taagcactgtggaggtgtggaca

SEQ ID NO: 62296 - RNA, 23 nt, synthetic construct
  source 1..23: mol_type = other RNA
taagcactgtggaggtgtggaca

SEQ ID NO: 62297 - RNA, 23 nt, synthetic construct
  source 1..23: mol_type = other RNA
taagcactgtggaggtgtgggca

SEQ ID NO: 62298 - RNA, 23 nt, synthetic construct
  source 1..23: mol_type = other RNA
taagcactgtggaggtgtggaca

SEQ ID NO: 62299 - RNA, 23 nt, synthetic construct
  source 1..23: mol_type = other RNA
tgctgcagatgcactcgcactca

SEQ ID NO: 62300 - RNA, 23 nt, synthetic construct
  source 1..23: mol_type = other RNA
tcagcatcagatcacagagcggc

SEQ ID NO: 62301 - RNA, 23 nt, synthetic construct
  source 1..23: mol_type = other RNA
gccgggaagccacgggtgtgtgg

SEQ ID NO: 62302 - RNA, 23 nt, synthetic construct
  source 1..23: mol_type = other RNA
cacacggtggagaccgggagggc

SEQ ID NO: 62303 - RNA, 23 nt, synthetic construct
  source 1..23: mol_type = other RNA
tggtctgggttggggtaggcaca

SEQ ID NO: 62304 - RNA, 23 nt, synthetic construct
  source 1..23: mol_type = other RNA
gacccctctctgacctggccgtt

SEQ ID NO: 62305 - RNA, 23 nt, synthetic construct
  source 1..23: mol_type = other RNA
gtccgtcaggccgcacttccgca

SEQ ID NO: 62306 - RNA, 23 nt, synthetic construct
  source 1..23: mol_type = other RNA
ggagcctctggttgtgggtgtgg

SEQ ID NO: 62307 - RNA, 23 nt, synthetic construct
  source 1..23: mol_type = other RNA
ccgtggatccagtggactcagtc

SEQ ID NO: 62308 - RNA, 23 nt, synthetic construct
  source 1..23: mol_type = other RNA
ttctgggagggtcccggtggtcc

SEQ ID NO: 62309 - RNA, 23 nt, synthetic construct
  source 1..23: mol_type = other RNA
ggagcctctggttgtgggtgtgg

SEQ ID NO: 62310 - RNA, 23 nt, synthetic construct
  source 1..23: mol_type = other RNA
tgttgtggtcagctttgtgagga

SEQ ID NO: 62311 - RNA, 23 nt, synthetic construct
  source 1..23: mol_type = other RNA
ccgtggatccagtggactcagtc

SEQ ID NO: 62312 - RNA, 23 nt, synthetic construct
  source 1..23: mol_type = other RNA
ttctgggagggtcccggtggtcc

SEQ ID NO: 62313 - RNA, 23 nt, synthetic construct
  source 1..23: mol_type = other RNA
cagggtaggactcctgagtggcg

SEQ ID NO: 62314 - RNA, 23 nt, synthetic construct
  source 1..23: mol_type = other RNA
gggtcagcctggcgttgtgggca

SEQ ID NO: 62315 - RNA, 23 nt, synthetic construct
  source 1..23: mol_type = other RNA
ggtgcccgcggggcaggtgcagc

SEQ ID NO: 62316 - RNA, 23 nt, synthetic construct
  source 1..23: mol_type = other RNA
ctcctcggcaatgcagcccccac

SEQ ID NO: 62317 - RNA, 23 nt, synthetic construct
  source 1..23: mol_type = other RNA
cactcacagcccccatgtgggtt

SEQ ID NO: 62318 - RNA, 23 nt, synthetic construct
  source 1..23: mol_type = other RNA
gggcggtgcccattgtaccagct

SEQ ID NO: 62319 - RNA, 23 nt, synthetic construct
  source 1..23: mol_type = other RNA
gcaggcgtcgtggggcctcccgt

SEQ ID NO: 62320 - RNA, 23 nt, synthetic construct
  source 1..23: mol_type = other RNA
ttggaagcggtgctggctgtgcc

SEQ ID NO: 62321 - RNA, 23 nt, synthetic construct
  source 1..23: mol_type = other RNA
gggcatggccgtagagctggtgg

SEQ ID NO: 62322 - RNA, 23 nt, synthetic construct
  source 1..23: mol_type = other RNA
gggagggtcccggtggtcccaag

SEQ ID NO: 62323 - RNA, 23 nt, synthetic construct
  source 1..23: mol_type = other RNA
gggcatggccgtagagctggtgg

SEQ ID NO: 62324 - RNA, 23 nt, synthetic construct
  source 1..23: mol_type = other RNA
gggagggtcccggtggtcccaag

SEQ ID NO: 62325 - RNA, 23 nt, synthetic construct
  source 1..23: mol_type = other RNA
gtggaattggtggcccttgtcat

SEQ ID NO: 62326 - RNA, 23 nt, synthetic construct
  source 1..23: mol_type = other RNA
ctcagggtggtgaggactgagga

SEQ ID NO: 62327 - RNA, 23 nt, synthetic construct
  source 1..23: mol_type = other RNA
tgggagccgccccacatgctgca

SEQ ID NO: 62328 - RNA, 23 nt, synthetic construct
  source 1..23: mol_type = other RNA
tgtggggtcagcaaatggactcc

SEQ ID NO: 62329 - RNA, 23 nt, synthetic construct
  source 1..23: mol_type = other RNA
ctccgcagaggaggcccaaggtt

SEQ ID NO: 62330 - RNA, 23 nt, synthetic construct
  source 1..23: mol_type = other RNA
gggcagcaggagcacggagcgcg

SEQ ID NO: 62331 - RNA, 23 nt, synthetic construct
  source 1..23: mol_type = other RNA
tgctggcccctcacccttctggg

SEQ ID NO: 62332 - RNA, 23 nt, synthetic construct
  source 1..23: mol_type = other RNA
tttgggatgctgacccctctctg

SEQ ID NO: 62333 - RNA, 23 nt, synthetic construct
  source 1..23: mol_type = other RNA
gacgtcctggtagctgtaggtcc

SEQ ID NO: 62334 - RNA, 23 nt, synthetic construct
  source 1..23: mol_type = other RNA
tggcgatcaagcaggcgccaagc

SEQ ID NO: 62335 - RNA, 23 nt, synthetic construct
  source 1..23: mol_type = other RNA
gcgcctgggaaggttgcaccaac

SEQ ID NO: 62336 - RNA, 23 nt, synthetic construct
  source 1..23: mol_type = other RNA
agggcggttgcagtccctggact

SEQ ID NO: 62337 - RNA, 23 nt, synthetic construct
  source 1..23: mol_type = other RNA
agggcggttgcagtccctggact

SEQ ID NO: 62338 - RNA, 23 nt, synthetic construct
  source 1..23: mol_type = other RNA
agggcggttgcagtccctggact

SEQ ID NO: 62339 - RNA, 23 nt, synthetic construct
  source 1..23: mol_type = other RNA
agggcggttgcagtccctggact

SEQ ID NO: 62340 - RNA, 23 nt, synthetic construct
  source 1..23: mol_type = other RNA
cccgtacatgaacacacggcgcc

SEQ ID NO: 62341 - RNA, 23 nt, synthetic construct
  source 1..23: mol_type = other RNA
cgctcgtgagtgttggcgccagg

SEQ ID NO: 62342 - RNA, 23 nt, synthetic construct
  source 1..23: mol_type = other RNA
gccggacgtggccagctggaatc

SEQ ID NO: 62343 - RNA, 23 nt, synthetic construct
  source 1..23: mol_type = other RNA
ggccggacgtggccagctggaat

SEQ ID NO: 62344 - RNA, 23 nt, synthetic construct
  source 1..23: mol_type = other RNA
tgagttaccctgcagcaggcatg

SEQ ID NO: 62345 - RNA, 23 nt, synthetic construct
  source 1..23: mol_type = other RNA
ctgagcgtgttggaagggtggat

SEQ ID NO: 62346 - RNA, 23 nt, synthetic construct
  source 1..23: mol_type = other RNA
tggcggtaagcactgtggaggtg

SEQ ID NO: 62347 - RNA, 23 nt, synthetic construct
  source 1..23: mol_type = other RNA
tggcggtaagcactgtggaggtg

SEQ ID NO: 62348 - RNA, 23 nt, synthetic construct
  source 1..23: mol_type = other RNA
ggtctggacgcactccccacagc

SEQ ID NO: 62349 - RNA, 23 nt, synthetic construct
  source 1..23: mol_type = other RNA
gtggtcgtccctggggaaggggg

SEQ ID NO: 62350 - RNA, 23 nt, synthetic construct
  source 1..23: mol_type = other RNA
gagcgggggactctgttggctgt

SEQ ID NO: 62351 - RNA, 23 nt, synthetic construct
  source 1..23: mol_type = other RNA
acggtggacgagctgggaaccgt

SEQ ID NO: 62352 - RNA, 23 nt, synthetic construct
  source 1..23: mol_type = other RNA
actcgcagctgccttcaaagctg

SEQ ID NO: 62353 - RNA, 23 nt, synthetic construct
  source 1..23: mol_type = other RNA
tgataggcgggtccaggtggtgc

SEQ ID NO: 62354 - RNA, 23 nt, synthetic construct
  source 1..23: mol_type = other RNA
tgataggcgggtccaggtggtgc

SEQ ID NO: 62355 - RNA, 23 nt, synthetic construct
  source 1..23: mol_type = other RNA
tgataggcgggtccaggtggtgc

SEQ ID NO: 62356 - RNA, 23 nt, synthetic construct
  source 1..23: mol_type = other RNA
tgataggcgggtccaggtggtgc

SEQ ID NO: 62357 - RNA, 23 nt, synthetic construct
  source 1..23: mol_type = other RNA
gcggggcggaggacactggcggt

SEQ ID NO: 62358 - RNA, 23 nt, synthetic construct
  source 1..23: mol_type = other RNA
tcccatccgacaccagccccggg

SEQ ID NO: 62359 - RNA, 23 nt, synthetic construct
  source 1..23: mol_type = other RNA
gggtgtgcagttacagctctggc

SEQ ID NO: 62360 - RNA, 23 nt, synthetic construct
  source 1..23: mol_type = other RNA
cagggcatacctggtaccctctc

SEQ ID NO: 62361 - RNA, 23 nt, synthetic construct
  source 1..23: mol_type = other RNA
ataagtgccctccagcggccctg

SEQ ID NO: 62362 - RNA, 23 nt, synthetic construct
  source 1..23: mol_type = other RNA
cgggatggccgtggatccagtgg

SEQ ID NO: 62363 - RNA, 23 nt, synthetic construct
  source 1..23: mol_type = other RNA
cacggtggacgagctgggaaccg

SEQ ID NO: 62364 - RNA, 23 nt, synthetic construct
  source 1..23: mol_type = other RNA
caaggcggcccctgcagtggtcg

SEQ ID NO: 62365 - RNA, 23 nt, synthetic construct
  source 1..23: mol_type = other RNA
tcgcagaaggtgatgttgacctc

SEQ ID NO: 62366 - RNA, 23 nt, synthetic construct
  source 1..23: mol_type = other RNA
gtcggtggcggggttgtggcacg

SEQ ID NO: 62367 - RNA, 23 nt, synthetic construct
  source 1..23: mol_type = other RNA
tcgtgagtgttggcgccaggctc

SEQ ID NO: 62368 - RNA, 23 nt, synthetic construct
  source 1..23: mol_type = other RNA
gaagggggtgactcggtggttct

SEQ ID NO: 62369 - RNA, 23 nt, synthetic construct
  source 1..23: mol_type = other RNA
gaagggggtgactcggtggtcct

SEQ ID NO: 62370 - RNA, 23 nt, synthetic construct
  source 1..23: mol_type = other RNA
gaagggggtgactcggtggtcct

SEQ ID NO: 62371 - RNA, 23 nt, synthetic construct
  source 1..23: mol_type = other RNA
gaagggggtgactcggtggtcct

SEQ ID NO: 62372 - RNA, 23 nt, synthetic construct
  source 1..23: mol_type = other RNA
cgtgagtgccgtccctgggctgg

SEQ ID NO: 62373 - RNA, 23 nt, synthetic construct
  source 1..23: mol_type = other RNA
cgtgagtgccgtccctgggctgg

SEQ ID NO: 62374 - RNA, 23 nt, synthetic construct
  source 1..23: mol_type = other RNA
cgtgagtgccgtccctgggctgg

SEQ ID NO: 62375 - RNA, 23 nt, synthetic construct
  source 1..23: mol_type = other RNA
gaggaacacgccgccgtccgctt

SEQ ID NO: 62376 - RNA, 23 nt, synthetic construct
  source 1..23: mol_type = other RNA
gtggggacccttgcaccgacgtc

SEQ ID NO: 62377 - RNA, 23 nt, synthetic construct
  source 1..23: mol_type = other RNA
ccggatgctcggggtcacccata

SEQ ID NO: 62378 - RNA, 23 nt, synthetic construct
  source 1..23: mol_type = other RNA
gctcgtgagtgttggcgccaggc

SEQ ID NO: 62379 - RNA, 23 nt, synthetic construct
  source 1..23: mol_type = other RNA
tggtcaccaccgtggttatgggg

SEQ ID NO: 62380 - RNA, 23 nt, synthetic construct
  source 1..23: mol_type = other RNA
tggtcaccaccgtggttatgggg

SEQ ID NO: 62381 - RNA, 23 nt, synthetic construct
  source 1..23: mol_type = other RNA
tggtcaccaccgtggttatgggg

SEQ ID NO: 62382 - RNA, 23 nt, synthetic construct
  source 1..23: mol_type = other RNA
cggtctggacgcactccccacag

SEQ ID NO: 62383 - RNA, 23 nt, synthetic construct
  source 1..23: mol_type = other RNA
ctgcctgcggcaccacgagcatg

SEQ ID NO: 62384 - RNA, 23 nt, synthetic construct
  source 1..23: mol_type = other RNA
ttggacccggatggccgtgtccc

SEQ ID NO: 62385 - RNA, 23 nt, synthetic construct
  source 1..23: mol_type = other RNA
cacgaaggaaacgctgcaggtga

SEQ ID NO: 62386 - RNA, 23 nt, synthetic construct
  source 1..23: mol_type = other RNA
tactcgcagctgccttcaaagct

SEQ ID NO: 62387 - RNA, 23 nt, synthetic construct
  source 1..23: mol_type = other RNA
gtactcgcagctgccttcaaagc

SEQ ID NO: 62388 - RNA, 23 nt, synthetic construct
  source 1..23: mol_type = other RNA
ccttgtcgtagcagccacactgg

SEQ ID NO: 62389 - RNA, 23 nt, synthetic construct
  source 1..23: mol_type = other RNA
tgtgcctgtcgggcgagctctgg

SEQ ID NO: 62390 - RNA, 23 nt, synthetic construct
  source 1..23: mol_type = other RNA
tgcgcaccgtgtggggactgctg

SEQ ID NO: 62391 - RNA, 23 nt, synthetic construct
  source 1..23: mol_type = other RNA
gcatggccgtagagctggtggcc

SEQ ID NO: 62392 - RNA, 23 nt, synthetic construct
  source 1..23: mol_type = other RNA
ggcatggccgtagagctggtggc

SEQ ID NO: 62393 - RNA, 23 nt, synthetic construct
  source 1..23: mol_type = other RNA
tgcgcaccgtgtggggactgctg

SEQ ID NO: 62394 - RNA, 23 nt, synthetic construct
  source 1..23: mol_type = other RNA
ccggtggtcccaagggtgaagga

SEQ ID NO: 62395 - RNA, 23 nt, synthetic construct
  source 1..23: mol_type = other RNA
tgcgcaccgtgtggggactgctg

SEQ ID NO: 62396 - RNA, 23 nt, synthetic construct
  source 1..23: mol_type = other RNA
tgcgcaccgtgtggggactgctg

SEQ ID NO: 62397 - RNA, 23 nt, synthetic construct
  source 1..23: mol_type = other RNA
gcatggccgtagagctggtggcc

SEQ ID NO: 62398 - RNA, 23 nt, synthetic construct
  source 1..23: mol_type = other RNA
ggcatggccgtagagctggtggc

SEQ ID NO: 62399 - RNA, 23 nt, synthetic construct
  source 1..23: mol_type = other RNA
ggtggacgtggaactggtggccc

SEQ ID NO: 62400 - RNA, 23 nt, synthetic construct
  source 1..23: mol_type = other RNA
acctgccggagagggatggcatt

SEQ ID NO: 62401 - RNA, 23 nt, synthetic construct
  source 1..23: mol_type = other RNA
ccacgtcttggccatgtccttgc

SEQ ID NO: 62402 - RNA, 23 nt, synthetic construct
  source 1..23: mol_type = other RNA
cccgggaaatttaggaaacccat

SEQ ID NO: 62403 - RNA, 23 nt, synthetic construct
  source 1..23: mol_type = other RNA
gacgcactccccacagcactgcc

SEQ ID NO: 62404 - RNA, 23 nt, synthetic construct
  source 1..23: mol_type = other RNA
atgatcagacaatgcacatcctg

SEQ ID NO: 62405 - RNA, 23 nt, synthetic construct
  source 1..23: mol_type = other RNA
ccggacgtggccagctggaatcc

SEQ ID NO: 62406 - RNA, 23 nt, synthetic construct
  source 1..23: mol_type = other RNA
ctcgcagagctgcgcgcgctggg

SEQ ID NO: 62407 - RNA, 23 nt, synthetic construct
  source 1..23: mol_type = other RNA
gtcaccatgcaggtcgtagagtt

SEQ ID NO: 62408 - RNA, 23 nt, synthetic construct
  source 1..23: mol_type = other RNA
ccgcacttccgcagctcagccag

SEQ ID NO: 62409 - RNA, 23 nt, synthetic construct
  source 1..23: mol_type = other RNA
cgaaggctgcgcccgtggcctcc

SEQ ID NO: 62410 - RNA, 23 nt, synthetic construct
  source 1..23: mol_type = other RNA
atgatggagtggcagcgcgagaa

SEQ ID NO: 62411 - RNA, 23 nt, synthetic construct
  source 1..23: mol_type = other RNA
gtcgctgagctgtacgcccttgg

SEQ ID NO: 62412 - RNA, 23 nt, synthetic construct
  source 1..23: mol_type = other RNA
tgaggaaggtgcccgcggggcag

SEQ ID NO: 62413 - RNA, 23 nt, synthetic construct
  source 1..23: mol_type = other RNA
ctgcactcccacctccggttcct

SEQ ID NO: 62414 - RNA, 23 nt, synthetic construct
  source 1..23: mol_type = other RNA
ggtgttgtccccacagtagtcct

SEQ ID NO: 62415 - RNA, 23 nt, synthetic construct
  source 1..23: mol_type = other RNA
gtgccagggcgtccgggcaggag

SEQ ID NO: 62416 - RNA, 23 nt, synthetic construct
  source 1..23: mol_type = other RNA
acagggcatacctggtaccctct

SEQ ID NO: 62417 - RNA, 23 nt, synthetic construct
  source 1..23: mol_type = other RNA
cgatgtcagccagcacagggcat

SEQ ID NO: 62418 - RNA, 23 nt, synthetic construct
  source 1..23: mol_type = other RNA
tggtacctggggccgagggggtg

SEQ ID NO: 62419 - RNA, 23 nt, synthetic construct
  source 1..23: mol_type = other RNA
tgtgccagggtccagttggggaa

SEQ ID NO: 62420 - RNA, 23 nt, synthetic construct
  source 1..23: mol_type = other RNA
cgttgagaacagggcctgggtgg

SEQ ID NO: 62421 - RNA, 23 nt, synthetic construct
  source 1..23: mol_type = other RNA
cctcccgtggtggctgtaccaag

SEQ ID NO: 62422 - RNA, 23 nt, synthetic construct
  source 1..23: mol_type = other RNA
gccattgttgttggggccagcgt

SEQ ID NO: 62423 - RNA, 23 nt, synthetic construct
  source 1..23: mol_type = other RNA
cagtgctggaagggcggttgcag

SEQ ID NO: 62424 - RNA, 23 nt, synthetic construct
  source 1..23: mol_type = other RNA
gaagaggggatgggtgtaacgct

SEQ ID NO: 62425 - RNA, 23 nt, synthetic construct
  source 1..23: mol_type = other RNA
tgtggtggtctgtgataggcggg

SEQ ID NO: 62426 - RNA, 23 nt, synthetic construct
  source 1..23: mol_type = other RNA
ggtggccgtgggtgtggtggtct

SEQ ID NO: 62427 - RNA, 23 nt, synthetic construct
  source 1..23: mol_type = other RNA
tggaggtgtgggcagtctctgga

SEQ ID NO: 62428 - RNA, 23 nt, synthetic construct
  source 1..23: mol_type = other RNA
ggtctgtgtgctagaggagggtg

SEQ ID NO: 62429 - RNA, 23 nt, synthetic construct
  source 1..23: mol_type = other RNA
gccggtggccgtgatcgtagtgg

SEQ ID NO: 62430 - RNA, 23 nt, synthetic construct
  source 1..23: mol_type = other RNA
gcactggggggatgggagttgtc

SEQ ID NO: 62431 - RNA, 23 nt, synthetic construct
  source 1..23: mol_type = other RNA
gcccaagatgcccgaggtggccg

SEQ ID NO: 62432 - RNA, 23 nt, synthetic construct
  source 1..23: mol_type = other RNA
tgtggcccggggtggtcgtccct

SEQ ID NO: 62433 - RNA, 23 nt, synthetic construct
  source 1..23: mol_type = other RNA
tccccacctgctcacggttcctg

SEQ ID NO: 62434 - RNA, 23 nt, synthetic construct
  source 1..23: mol_type = other RNA
accgtcacggtggctgtagtgct

SEQ ID NO: 62435 - RNA, 23 nt, synthetic construct
  source 1..23: mol_type = other RNA
cagtgctggaagggcggttgcag

SEQ ID NO: 62436 - RNA, 23 nt, synthetic construct
  source 1..23: mol_type = other RNA
tgtggtggtctgtgataggcggg

SEQ ID NO: 62437 - RNA, 23 nt, synthetic construct
  source 1..23: mol_type = other RNA
ggtggccgtgggtgtggtggtct

SEQ ID NO: 62438 - RNA, 23 nt, synthetic construct
  source 1..23: mol_type = other RNA
gatccacactggaagcgtgcgtg

SEQ ID NO: 62439 - RNA, 23 nt, synthetic construct
  source 1..23: mol_type = other RNA
ggtctgtgtgctagaggagggtg

SEQ ID NO: 62440 - RNA, 23 nt, synthetic construct
  source 1..23: mol_type = other RNA
gccggtggccgtgatcgtagtgg

SEQ ID NO: 62441 - RNA, 23 nt, synthetic construct
  source 1..23: mol_type = other RNA
ggtggccgtggtgttcggcactg

SEQ ID NO: 62442 - RNA, 23 nt, synthetic construct
  source 1..23: mol_type = other RNA
cctgaggtggccgaagtccaggc

SEQ ID NO: 62443 - RNA, 23 nt, synthetic construct
  source 1..23: mol_type = other RNA
tgtggcccggggtggtcgtccct

SEQ ID NO: 62444 - RNA, 23 nt, synthetic construct
  source 1..23: mol_type = other RNA
tccccacctgctcacggttcctg

SEQ ID NO: 62445 - RNA, 23 nt, synthetic construct
  source 1..23: mol_type = other RNA
gtgctggtcagcactttgggagg

SEQ ID NO: 62446 - RNA, 23 nt, synthetic construct
  source 1..23: mol_type = other RNA
tgtgcttgtcagcactggaaggg

SEQ ID NO: 62447 - RNA, 23 nt, synthetic construct
  source 1..23: mol_type = other RNA
cacggtggctgtagtgctgggct

SEQ ID NO: 62448 - RNA, 23 nt, synthetic construct
  source 1..23: mol_type = other RNA
accgtcacggtggctgtagtgct

SEQ ID NO: 62449 - RNA, 23 nt, synthetic construct
  source 1..23: mol_type = other RNA
cagtgctggaagggcggttgcag

SEQ ID NO: 62450 - RNA, 23 nt, synthetic construct
  source 1..23: mol_type = other RNA
tgtggtggtctgtgataggcggg

SEQ ID NO: 62451 - RNA, 23 nt, synthetic construct
  source 1..23: mol_type = other RNA
ggtggccgtgggtgtggtggtct

SEQ ID NO: 62452 - RNA, 23 nt, synthetic construct
  source 1..23: mol_type = other RNA
ggtctgtgtgctagaggagggtg

SEQ ID NO: 62453 - RNA, 23 nt, synthetic construct
  source 1..23: mol_type = other RNA
gcactggggggatgggagttgtc

SEQ ID NO: 62454 - RNA, 23 nt, synthetic construct
  source 1..23: mol_type = other RNA
ggtggccgtggtgttcggcactg

SEQ ID NO: 62455 - RNA, 23 nt, synthetic construct
  source 1..23: mol_type = other RNA
ggggcagggaccgcccgtgtgtg

SEQ ID NO: 62456 - RNA, 23 nt, synthetic construct
  source 1..23: mol_type = other RNA
gcccaagatgcccgaggtggccg

SEQ ID NO: 62457 - RNA, 23 nt, synthetic construct
  source 1..23: mol_type = other RNA
tgtggcccggggtggtcgtccct

SEQ ID NO: 62458 - RNA, 23 nt, synthetic construct
  source 1..23: mol_type = other RNA
tccccacctgctcacggttcctg

SEQ ID NO: 62459 - RNA, 23 nt, synthetic construct
  source 1..23: mol_type = other RNA
accgtcacggtggctgtagtgct

SEQ ID NO: 62460 - RNA, 23 nt, synthetic construct
  source 1..23: mol_type = other RNA
cagtgctggaagggcggttgcag

SEQ ID NO: 62461 - RNA, 23 nt, synthetic construct
  source 1..23: mol_type = other RNA
tgtggtggtctgtgataggcggg

SEQ ID NO: 62462 - RNA, 23 nt, synthetic construct
  source 1..23: mol_type = other RNA
ggtggccgtgggtgtggtggtct

SEQ ID NO: 62463 - RNA, 23 nt, synthetic construct
  source 1..23: mol_type = other RNA
tggaggtgtgggcagtctctgga

SEQ ID NO: 62464 - RNA, 23 nt, synthetic construct
  source 1..23: mol_type = other RNA
ggtcaccgtggagccactggttg

SEQ ID NO: 62465 - RNA, 23 nt, synthetic construct
  source 1..23: mol_type = other RNA
ggtctgtgtgctagaggagggtg

SEQ ID NO: 62466 - RNA, 23 nt, synthetic construct
  source 1..23: mol_type = other RNA
gccggtggccgtgatcgtagtgg

SEQ ID NO: 62467 - RNA, 23 nt, synthetic construct
  source 1..23: mol_type = other RNA
ggtggccgtggtgttcggcactg

SEQ ID NO: 62468 - RNA, 23 nt, synthetic construct
  source 1..23: mol_type = other RNA
cctgaggtggccgaagtccaggc

SEQ ID NO: 62469 - RNA, 23 nt, synthetic construct
  source 1..23: mol_type = other RNA
tgtggcccggggtggtcgtccct

SEQ ID NO: 62470 - RNA, 23 nt, synthetic construct
  source 1..23: mol_type = other RNA
tccccacctgctcacggttcctg

SEQ ID NO: 62471 - RNA, 23 nt, synthetic construct
  source 1..23: mol_type = other RNA
tgtgcttgtcagcactggaaggg

SEQ ID NO: 62472 - RNA, 23 nt, synthetic construct
  source 1..23: mol_type = other RNA
accgtcacggtggctgtagtgct

SEQ ID NO: 62473 - RNA, 23 nt, synthetic construct
  source 1..23: mol_type = other RNA
tgtggtggtctgtgataggcggg

SEQ ID NO: 62474 - RNA, 23 nt, synthetic construct
  source 1..23: mol_type = other RNA
ggtggccgtgggtgtggtggtct

SEQ ID NO: 62475 - RNA, 23 nt, synthetic construct
  source 1..23: mol_type = other RNA
ggtcaccgtggagccactggttg

SEQ ID NO: 62476 - RNA, 23 nt, synthetic construct
  source 1..23: mol_type = other RNA
ggtctgtgtgctagaggagggtg

SEQ ID NO: 62477 - RNA, 23 nt, synthetic construct
  source 1..23: mol_type = other RNA
gccggtggccgtgatcgtagtgg

SEQ ID NO: 62478 - RNA, 23 nt, synthetic construct
  source 1..23: mol_type = other RNA
tgtgcttgtcagcactggaaggg

SEQ ID NO: 62479 - RNA, 23 nt, synthetic construct
  source 1..23: mol_type = other RNA
gattttgtggctgtgcttgtcag

SEQ ID NO: 62480 - RNA, 23 nt, synthetic construct
  source 1..23: mol_type = other RNA
tctcagggtggtgaggactgagg

SEQ ID NO: 62481 - RNA, 23 nt, synthetic construct
  source 1..23: mol_type = other RNA
atgtcacagtgctgattgcacac

SEQ ID NO: 62482 - RNA, 23 nt, synthetic construct
  source 1..23: mol_type = other RNA
ggcgccctggaagcggtcaatgt

SEQ ID NO: 62483 - RNA, 23 nt, synthetic construct
  source 1..23: mol_type = other RNA
accatggtgacagtgaggacgat

SEQ ID NO: 62484 - RNA, 23 nt, synthetic construct
  source 1..23: mol_type = other RNA
ccttcccatgcaccatggtgaca

SEQ ID NO: 62485 - RNA, 23 nt, synthetic construct
  source 1..23: mol_type = other RNA
ggtcaaacaggatcaggccctcc

SEQ ID NO: 62486 - RNA, 23 nt, synthetic construct
  source 1..23: mol_type = other RNA
cgcccagggcaggaatgtccaca

SEQ ID NO: 62487 - RNA, 23 nt, synthetic construct
  source 1..23: mol_type = other RNA
tggccatgtccttgcaactggcg

SEQ ID NO: 62488 - RNA, 23 nt, synthetic construct
  source 1..23: mol_type = other RNA
atcagatcacagagcggctgtgg

SEQ ID NO: 62489 - RNA, 23 nt, synthetic construct
  source 1..23: mol_type = other RNA
ggctctggcagggcacctcaagg

SEQ ID NO: 62490 - RNA, 23 nt, synthetic construct
  source 1..23: mol_type = other RNA
agttgctgacccaccgctccccg

SEQ ID NO: 62491 - RNA, 23 nt, synthetic construct
  source 1..23: mol_type = other RNA
gtggcagggaagggcgcctggga

SEQ ID NO: 62492 - RNA, 23 nt, synthetic construct
  source 1..23: mol_type = other RNA
agaggcaggtacacatgtggcag

SEQ ID NO: 62493 - RNA, 23 nt, synthetic construct
  source 1..23: mol_type = other RNA
agagaggcaggtacacatgtggc

SEQ ID NO: 62494 - RNA, 23 nt, synthetic construct
  source 1..23: mol_type = other RNA
cgtgaggcaggcggtctggacgc

SEQ ID NO: 62495 - RNA, 23 nt, synthetic construct
  source 1..23: mol_type = other RNA
tgggcctctgctgagtacttgga

SEQ ID NO: 62496 - RNA, 23 nt, synthetic construct
  source 1..23: mol_type = other RNA
ggccgggaagccacgggtgtgtg

SEQ ID NO: 62497 - RNA, 23 nt, synthetic construct
  source 1..23: mol_type = other RNA
acgttctcagacagcagtggcct

SEQ ID NO: 62498 - RNA, 23 nt, synthetic construct
  source 1..23: mol_type = other RNA
ggatggaggcagaacgttctcag

SEQ ID NO: 62499 - RNA, 23 nt, synthetic construct
  source 1..23: mol_type = other RNA
tagtttgttccagggcgtcccag

SEQ ID NO: 62500 - RNA, 23 nt, synthetic construct
  source 1..23: mol_type = other RNA
ctaggcctcggcgtagctggacg

SEQ ID NO: 62501 - RNA, 23 nt, synthetic construct
  source 1..23: mol_type = other RNA
tcaccatgcaggtcgtagagttt

SEQ ID NO: 62502 - RNA, 23 nt, synthetic construct
  source 1..23: mol_type = other RNA
gctcagccagcacggtgaagctg

SEQ ID NO: 62503 - RNA, 23 nt, synthetic construct
  source 1..23: mol_type = other RNA
gttggcgaaggctgcgcccgtgg

SEQ ID NO: 62504 - RNA, 23 nt, synthetic construct
  source 1..23: mol_type = other RNA
tgtagcacatcttgaagacgccc

SEQ ID NO: 62505 - RNA, 23 nt, synthetic construct
  source 1..23: mol_type = other RNA
aggggctcattgtcgtctctgtc

SEQ ID NO: 62506 - RNA, 23 nt, synthetic construct
  source 1..23: mol_type = other RNA
ggcggtgtgggtggtccccggga

SEQ ID NO: 62507 - RNA, 23 nt, synthetic construct
  source 1..23: mol_type = other RNA
ccgtggtggtcagtgatggggga

SEQ ID NO: 62508 - RNA, 23 nt, synthetic construct
  source 1..23: mol_type = other RNA
tgctgctagggtgtgggaagtca

SEQ ID NO: 62509 - RNA, 23 nt, synthetic construct
  source 1..23: mol_type = other RNA
acagacggcccctccggccgcac

SEQ ID NO: 62510 - RNA, 23 nt, synthetic construct
  source 1..23: mol_type = other RNA
ccgtggtggtcagtgatggggga

SEQ ID NO: 62511 - RNA, 23 nt, synthetic construct
  source 1..23: mol_type = other RNA
acagacggcccctccggccgcac

SEQ ID NO: 62512 - RNA, 23 nt, synthetic construct
  source 1..23: mol_type = other RNA
agggcgtggccgtagagctggtg

SEQ ID NO: 62513 - RNA, 23 nt, synthetic construct
  source 1..23: mol_type = other RNA
tagctgtggatttggtggctgtg

SEQ ID NO: 62514 - RNA, 23 nt, synthetic construct
  source 1..23: mol_type = other RNA
cccggtggtcccaagggtgaagg

SEQ ID NO: 62515 - RNA, 23 nt, synthetic construct
  source 1..23: mol_type = other RNA
ggcggtgtgggtggtccccggga

SEQ ID NO: 62516 - RNA, 23 nt, synthetic construct
  source 1..23: mol_type = other RNA
ccgtggtggtcagtgatggggga

SEQ ID NO: 62517 - RNA, 23 nt, synthetic construct
  source 1..23: mol_type = other RNA
agggcgtggccgtagagctggtg

SEQ ID NO: 62518 - RNA, 23 nt, synthetic construct
  source 1..23: mol_type = other RNA
ggccgtggtgatcagtgatgggg

SEQ ID NO: 62519 - RNA, 23 nt, synthetic construct
  source 1..23: mol_type = other RNA
acagacggcccctccggccgcac

SEQ ID NO: 62520 - RNA, 23 nt, synthetic construct
  source 1..23: mol_type = other RNA
cacgacctggcccaactccccca

SEQ ID NO: 62521 - RNA, 23 nt, synthetic construct
  source 1..23: mol_type = other RNA
tagctgtggatttggtggctgtg

SEQ ID NO: 62522 - RNA, 23 nt, synthetic construct
  source 1..23: mol_type = other RNA
ggcggtgtgggtggtccccggga

SEQ ID NO: 62523 - RNA, 23 nt, synthetic construct
  source 1..23: mol_type = other RNA
ccgtggtggtcagtgatggggga

SEQ ID NO: 62524 - RNA, 23 nt, synthetic construct
  source 1..23: mol_type = other RNA
gtgacagtgaggacgatatccat

SEQ ID NO: 62525 - RNA, 23 nt, synthetic construct
  source 1..23: mol_type = other RNA
ggctctggttcctagagttgcag

SEQ ID NO: 62526 - RNA, 23 nt, synthetic construct
  source 1..23: mol_type = other RNA
ggcgtgaggcaggcggtctggac

SEQ ID NO: 62527 - RNA, 23 nt, synthetic construct
  source 1..23: mol_type = other RNA
ctgtggggtcagcaaatggactc

SEQ ID NO: 62528 - RNA, 23 nt, synthetic construct
  source 1..23: mol_type = other RNA
tttcacccacggggtgggcagca

SEQ ID NO: 62529 - RNA, 23 nt, synthetic construct
  source 1..23: mol_type = other RNA
tcgttgaaggccgggaggccgtt

SEQ ID NO: 62530 - RNA, 23 nt, synthetic construct
  source 1..23: mol_type = other RNA
tgcagttcgagtggaagggcttg

SEQ ID NO: 62531 - RNA, 23 nt, synthetic construct
  source 1..23: mol_type = other RNA
aggcatccaccacgtaggcgtag

SEQ ID NO: 62532 - RNA, 23 nt, synthetic construct
  source 1..23: mol_type = other RNA
cactcaggccgcggcaagtgggc

SEQ ID NO: 62533 - RNA, 23 nt, synthetic construct
  source 1..23: mol_type = other RNA
cgtagcaggggcactcctgggcg

SEQ ID NO: 62534 - RNA, 23 nt, synthetic construct
  source 1..23: mol_type = other RNA
ggcgccctcgtcgtgcaccacct

SEQ ID NO: 62535 - RNA, 23 nt, synthetic construct
  source 1..23: mol_type = other RNA
ctctttggaagcggtgctggctg

SEQ ID NO: 62536 - RNA, 23 nt, synthetic construct
  source 1..23: mol_type = other RNA
gggtgccagcagttgcctgggtg

SEQ ID NO: 62537 - RNA, 23 nt, synthetic construct
  source 1..23: mol_type = other RNA
gtggccgtggtgttcggcactgg

SEQ ID NO: 62538 - RNA, 23 nt, synthetic construct
  source 1..23: mol_type = other RNA
cctggtgtggcccggggtggtcg

SEQ ID NO: 62539 - RNA, 23 nt, synthetic construct
  source 1..23: mol_type = other RNA
gcgggtccaggcggtgcccaggg

SEQ ID NO: 62540 - RNA, 23 nt, synthetic construct
  source 1..23: mol_type = other RNA
gtggccgtggtgttcggcactgg

SEQ ID NO: 62541 - RNA, 23 nt, synthetic construct
  source 1..23: mol_type = other RNA
cctggtgtggcccggggtggtcg

SEQ ID NO: 62542 - RNA, 23 nt, synthetic construct
  source 1..23: mol_type = other RNA
gggtgccagcagttgcctgggtg

SEQ ID NO: 62543 - RNA, 23 nt, synthetic construct
  source 1..23: mol_type = other RNA
gggtcaccgtggagccactggtt

SEQ ID NO: 62544 - RNA, 23 nt, synthetic construct
  source 1..23: mol_type = other RNA
gtggccgtggtgttcggcactgg

SEQ ID NO: 62545 - RNA, 23 nt, synthetic construct
  source 1..23: mol_type = other RNA
gggtgccagcagttgcctgggtg

SEQ ID NO: 62546 - RNA, 23 nt, synthetic construct
  source 1..23: mol_type = other RNA
gggtcaccgtggagccactggtt

SEQ ID NO: 62547 - RNA, 23 nt, synthetic construct
  source 1..23: mol_type = other RNA
tggctgtgggcatagtggccatg

SEQ ID NO: 62548 - RNA, 23 nt, synthetic construct
  source 1..23: mol_type = other RNA
gggtaggactcctgagtggcgcc

SEQ ID NO: 62549 - RNA, 23 nt, synthetic construct
  source 1..23: mol_type = other RNA
caacaccagcgtccggcacgcgc

SEQ ID NO: 62550 - RNA, 23 nt, synthetic construct
  source 1..23: mol_type = other RNA
gcggcaccacgagcatggccgcc

SEQ ID NO: 62551 - RNA, 23 nt, synthetic construct
  source 1..23: mol_type = other RNA
acgggtggaacaaagctcacgcg

SEQ ID NO: 62552 - RNA, 23 nt, synthetic construct
  source 1..23: mol_type = other RNA
agctgcaggtggtgttgaaggag

SEQ ID NO: 62553 - RNA, 23 nt, synthetic construct
  source 1..23: mol_type = other RNA
aagtgggctggcaggcatccacc

SEQ ID NO: 62554 - RNA, 23 nt, synthetic construct
  source 1..23: mol_type = other RNA
acaggcccgcgtcgtggcaggcc

SEQ ID NO: 62555 - RNA, 23 nt, synthetic construct
  source 1..23: mol_type = other RNA
tgtggggacccttgcaccgacgt

SEQ ID NO: 62556 - RNA, 23 nt, synthetic construct
  source 1..23: mol_type = other RNA
aggcgccaagcccatcggtggtg

SEQ ID NO: 62557 - RNA, 23 nt, synthetic construct
  source 1..23: mol_type = other RNA
gcatgtcgggaagctgcgccgcc

SEQ ID NO: 62558 - RNA, 23 nt, synthetic construct
  source 1..23: mol_type = other RNA
ggggtgaccgtcacggggcctga

SEQ ID NO: 62559 - RNA, 23 nt, synthetic construct
  source 1..23: mol_type = other RNA
ctctgtggtcggtggcggggttg

SEQ ID NO: 62560 - RNA, 23 nt, synthetic construct
  source 1..23: mol_type = other RNA
gtggtggccgtctccagctctgt

SEQ ID NO: 62561 - RNA, 23 nt, synthetic construct
  source 1..23: mol_type = other RNA
gttgacagcgggtcgtgccctgg

SEQ ID NO: 62562 - RNA, 23 nt, synthetic construct
  source 1..23: mol_type = other RNA
gacatggtggccgtgggtgtggt

SEQ ID NO: 62563 - RNA, 23 nt, synthetic construct
  source 1..23: mol_type = other RNA
ggggtgtgtgggtggtccctagg

SEQ ID NO: 62564 - RNA, 23 nt, synthetic construct
  source 1..23: mol_type = other RNA
cccggggtggtcgtccctggaga

SEQ ID NO: 62565 - RNA, 23 nt, synthetic construct
  source 1..23: mol_type = other RNA
gcccggggtggtcgtccctggag

SEQ ID NO: 62566 - RNA, 23 nt, synthetic construct
  source 1..23: mol_type = other RNA
gacatggtggccgtgggtgtggt

SEQ ID NO: 62567 - RNA, 23 nt, synthetic construct
  source 1..23: mol_type = other RNA
ggggtgtgtgggtggtccctagg

SEQ ID NO: 62568 - RNA, 23 nt, synthetic construct
  source 1..23: mol_type = other RNA
ccgtgtgtggtggccgtggtgtt

SEQ ID NO: 62569 - RNA, 23 nt, synthetic construct
  source 1..23: mol_type = other RNA
ggtcctgctgctagggtgagggc

SEQ ID NO: 62570 - RNA, 23 nt, synthetic construct
  source 1..23: mol_type = other RNA
cccggggtggtcgtccctggaga

SEQ ID NO: 62571 - RNA, 23 nt, synthetic construct
  source 1..23: mol_type = other RNA
gcccggggtggtcgtccctggag

SEQ ID NO: 62572 - RNA, 23 nt, synthetic construct
  source 1..23: mol_type = other RNA
ggcccttgtcgtggtggccttcg

SEQ ID NO: 62573 - RNA, 23 nt, synthetic construct
  source 1..23: mol_type = other RNA
tggcccttgtcgtggtggccttc

SEQ ID NO: 62574 - RNA, 23 nt, synthetic construct
  source 1..23: mol_type = other RNA
gacatggtggccgtgggtgtggt

SEQ ID NO: 62575 - RNA, 23 nt, synthetic construct
  source 1..23: mol_type = other RNA
ggggtgtgtgggtggtccctagg

SEQ ID NO: 62576 - RNA, 23 nt, synthetic construct
  source 1..23: mol_type = other RNA
ccgtgtgtggtggccgtggtgtt

SEQ ID NO: 62577 - RNA, 23 nt, synthetic construct
  source 1..23: mol_type = other RNA
ggtcctgctgctagggtgagggc

SEQ ID NO: 62578 - RNA, 23 nt, synthetic construct
  source 1..23: mol_type = other RNA
cccggggtggtcgtccctggaga

SEQ ID NO: 62579 - RNA, 23 nt, synthetic construct
  source 1..23: mol_type = other RNA
gcccggggtggtcgtccctggag

SEQ ID NO: 62580 - RNA, 23 nt, synthetic construct
  source 1..23: mol_type = other RNA
gcccgtggtcaccaccgtggtta

SEQ ID NO: 62581 - RNA, 23 nt, synthetic construct
  source 1..23: mol_type = other RNA
gacatggtggccgtgggtgtggt

SEQ ID NO: 62582 - RNA, 23 nt, synthetic construct
  source 1..23: mol_type = other RNA
ggggtgtgtgggtggtccctagg

SEQ ID NO: 62583 - RNA, 23 nt, synthetic construct
  source 1..23: mol_type = other RNA
ccgtgtgtggtggccgtggtgtt

SEQ ID NO: 62584 - RNA, 23 nt, synthetic construct
  source 1..23: mol_type = other RNA
ggtcctgctgctagggtgagggc

SEQ ID NO: 62585 - RNA, 23 nt, synthetic construct
  source 1..23: mol_type = other RNA
cccggggtggtcgtccctgggga

SEQ ID NO: 62586 - RNA, 23 nt, synthetic construct
  source 1..23: mol_type = other RNA
gcccggggtggtcgtccctgggg

SEQ ID NO: 62587 - RNA, 23 nt, synthetic construct
  source 1..23: mol_type = other RNA
gcccgtggtcaccaccgtggtta

SEQ ID NO: 62588 - RNA, 23 nt, synthetic construct
  source 1..23: mol_type = other RNA
ggcccttgtcgtggtggccttcg

SEQ ID NO: 62589 - RNA, 23 nt, synthetic construct
  source 1..23: mol_type = other RNA
tggcccttgtcgtggtggccttc

SEQ ID NO: 62590 - RNA, 23 nt, synthetic construct
  source 1..23: mol_type = other RNA
gacatggtggccgtgggtgtggt

SEQ ID NO: 62591 - RNA, 23 nt, synthetic construct
  source 1..23: mol_type = other RNA
tggtggtggtcagcactctggcg

SEQ ID NO: 62592 - RNA, 23 nt, synthetic construct
  source 1..23: mol_type = other RNA
aggtgtggattgtggacatggtg

SEQ ID NO: 62593 - RNA, 23 nt, synthetic construct
  source 1..23: mol_type = other RNA
gtgtggccgtggaattggtggcc

SEQ ID NO: 62594 - RNA, 23 nt, synthetic construct
  source 1..23: mol_type = other RNA
agggtgtggccgtggaattggtg

SEQ ID NO: 62595 - RNA, 23 nt, synthetic construct
  source 1..23: mol_type = other RNA
gtgaggatccgggtcgtccccag

SEQ ID NO: 62596 - RNA, 23 nt, synthetic construct
  source 1..23: mol_type = other RNA
gccctggaagcggtcaatgtcac

SEQ ID NO: 62597 - RNA, 23 nt, synthetic construct
  source 1..23: mol_type = other RNA
gccggagagggatggcattgtca

SEQ ID NO: 62598 - RNA, 23 nt, synthetic construct
  source 1..23: mol_type = other RNA
attgaaggtgacgctcacgccca

SEQ ID NO: 62599 - RNA, 23 nt, synthetic construct
  source 1..23: mol_type = other RNA
gctgatgcaggcgttgaagaatg

SEQ ID NO: 62600 - RNA, 23 nt, synthetic construct
  source 1..23: mol_type = other RNA
tgtgccctgcattctcccagctc

SEQ ID NO: 62601 - RNA, 23 nt, synthetic construct
  source 1..23: mol_type = other RNA
cacgcgccgggtgggcgaggacg

SEQ ID NO: 62602 - RNA, 23 nt, synthetic construct
  source 1..23: mol_type = other RNA
tcacgcgccgggtgggcgaggac

SEQ ID NO: 62603 - RNA, 23 nt, synthetic construct
  source 1..23: mol_type = other RNA
tgtgcgccgggttcagggggctc

SEQ ID NO: 62604 - RNA, 23 nt, synthetic construct
  source 1..23: mol_type = other RNA
ccggatgctgaccttgatgtagt

SEQ ID NO: 62605 - RNA, 23 nt, synthetic construct
  source 1..23: mol_type = other RNA
gccggatgctgaccttgatgtag

SEQ ID NO: 62606 - RNA, 23 nt, synthetic construct
  source 1..23: mol_type = other RNA
caccagccggatgctgaccttga

SEQ ID NO: 62607 - RNA, 23 nt, synthetic construct
  source 1..23: mol_type = other RNA
gccccagcagggtgcggtggcag

SEQ ID NO: 62608 - RNA, 23 nt, synthetic construct
  source 1..23: mol_type = other RNA
atagccccccggagcaggtgcag

SEQ ID NO: 62609 - RNA, 23 nt, synthetic construct
  source 1..23: mol_type = other RNA
tgggccccgccctgcacagagca

SEQ ID NO: 62610 - RNA, 23 nt, synthetic construct
  source 1..23: mol_type = other RNA
catcataggtggagatgtgggcc

SEQ ID NO: 62611 - RNA, 23 nt, synthetic construct
  source 1..23: mol_type = other RNA
cagccagcacggtgaagctgctg

SEQ ID NO: 62612 - RNA, 23 nt, synthetic construct
  source 1..23: mol_type = other RNA
ctgtctgcaccacgatgaagaag

SEQ ID NO: 62613 - RNA, 23 nt, synthetic construct
  source 1..23: mol_type = other RNA
tgcatgagtggcaccagctgcac

SEQ ID NO: 62614 - RNA, 23 nt, synthetic construct
  source 1..23: mol_type = other RNA
gagggccgtgaagtcgtcagcct

SEQ ID NO: 62615 - RNA, 23 nt, synthetic construct
  source 1..23: mol_type = other RNA
gcgagaaggcactgttgggatcg

SEQ ID NO: 62616 - RNA, 23 nt, synthetic construct
  source 1..23: mol_type = other RNA
tcaggccgcggcaagtgggctgg

SEQ ID NO: 62617 - RNA, 23 nt, synthetic construct
  source 1..23: mol_type = other RNA
gtagcaggggcactcctgggcgg

SEQ ID NO: 62618 - RNA, 23 nt, synthetic construct
  source 1..23: mol_type = other RNA
atccgacaccagccccgggggac

SEQ ID NO: 62619 - RNA, 23 nt, synthetic construct
  source 1..23: mol_type = other RNA
catccgacaccagccccggggga

SEQ ID NO: 62620 - RNA, 23 nt, synthetic construct
  source 1..23: mol_type = other RNA
tgcagtcgaccctgatggtctct

SEQ ID NO: 62621 - RNA, 23 nt, synthetic construct
  source 1..23: mol_type = other RNA
ctcgcagctgccttcaaagctgt

SEQ ID NO: 62622 - RNA, 23 nt, synthetic construct
  source 1..23: mol_type = other RNA
tggtgttgtccccacagtagtcc

SEQ ID NO: 62623 - RNA, 23 nt, synthetic construct
  source 1..23: mol_type = other RNA
tcccctcttggaggatcagctcg

SEQ ID NO: 62624 - RNA, 23 nt, synthetic construct
  source 1..23: mol_type = other RNA
aaagtcattgatggcattgtcgt

SEQ ID NO: 62625 - RNA, 23 nt, synthetic construct
  source 1..23: mol_type = other RNA
ggcaaagtcattgatggcattgt

SEQ ID NO: 62626 - RNA, 23 nt, synthetic construct
  source 1..23: mol_type = other RNA
cgtcgtggcaggcctgggcgtag

SEQ ID NO: 62627 - RNA, 23 nt, synthetic construct
  source 1..23: mol_type = other RNA
gcgtcgtggcaggcctgggcgta

SEQ ID NO: 62628 - RNA, 23 nt, synthetic construct
  source 1..23: mol_type = other RNA
acaaggggcaggtgtccggagtc

SEQ ID NO: 62629 - RNA, 23 nt, synthetic construct
  source 1..23: mol_type = other RNA
tccttgtcgtagcagccacactg

SEQ ID NO: 62630 - RNA, 23 nt, synthetic construct
  source 1..23: mol_type = other RNA
gctgtggggacccttgcaccgac

SEQ ID NO: 62631 - RNA, 23 nt, synthetic construct
  source 1..23: mol_type = other RNA
cactgggtgtgcagttacagctc

SEQ ID NO: 62632 - RNA, 23 nt, synthetic construct
  source 1..23: mol_type = other RNA
ggtgcccattgtaccagctggac

SEQ ID NO: 62633 - RNA, 23 nt, synthetic construct
  source 1..23: mol_type = other RNA
atgtcgggaagctgcgccgcccg

SEQ ID NO: 62634 - RNA, 23 nt, synthetic construct
  source 1..23: mol_type = other RNA
gcgggggactctgttggctgttg

SEQ ID NO: 62635 - RNA, 23 nt, synthetic construct
  source 1..23: mol_type = other RNA
ctgggttggggtaggcacagcag

SEQ ID NO: 62636 - RNA, 23 nt, synthetic construct
  source 1..23: mol_type = other RNA
ctggacccagtctgcgaggtgag

SEQ ID NO: 62637 - RNA, 23 nt, synthetic construct
  source 1..23: mol_type = other RNA
ggctgctggcataagtgccctcc

SEQ ID NO: 62638 - RNA, 23 nt, synthetic construct
  source 1..23: mol_type = other RNA
cttaggctgctggcataagtgcc

SEQ ID NO: 62639 - RNA, 23 nt, synthetic construct
  source 1..23: mol_type = other RNA
ctatgtccttaggctgctggcat

SEQ ID NO: 62640 - RNA, 23 nt, synthetic construct
  source 1..23: mol_type = other RNA
gaagacgccctcctgctcccagt

SEQ ID NO: 62641 - RNA, 23 nt, synthetic construct
  source 1..23: mol_type = other RNA
cagtccttctgagagggtgggga

SEQ ID NO: 62642 - RNA, 23 nt, synthetic construct
  source 1..23: mol_type = other RNA
ggatgtcagtccttctgagaggg

SEQ ID NO: 62643 - RNA, 23 nt, synthetic construct
  source 1..23: mol_type = other RNA
gggggatgtcagtccttctgaga

SEQ ID NO: 62644 - RNA, 23 nt, synthetic construct
  source 1..23: mol_type = other RNA
ctgtaccaagggtgcttgtgtat

SEQ ID NO: 62645 - RNA, 23 nt, synthetic construct
  source 1..23: mol_type = other RNA
ctgtggagcctgcaggcgtcgtg

SEQ ID NO: 62646 - RNA, 23 nt, synthetic construct
  source 1..23: mol_type = other RNA
ggaagggtggatgtggccacccc

SEQ ID NO: 62647 - RNA, 23 nt, synthetic construct
  source 1..23: mol_type = other RNA
tgttggaagggtggatgtggcca

SEQ ID NO: 62648 - RNA, 23 nt, synthetic construct
  source 1..23: mol_type = other RNA
ctccccgtcgtccctggaagggc

SEQ ID NO: 62649 - RNA, 23 nt, synthetic construct
  source 1..23: mol_type = other RNA
atgtgcccaagctccccgtcgtc

SEQ ID NO: 62650 - RNA, 23 nt, synthetic construct
  source 1..23: mol_type = other RNA
ggggcgccatgtgcccaagctcc

SEQ ID NO: 62651 - RNA, 23 nt, synthetic construct
  source 1..23: mol_type = other RNA
ctgtgcctgtcgggcgagctctg

SEQ ID NO: 62652 - RNA, 23 nt, synthetic construct
  source 1..23: mol_type = other RNA
tgagtgttggcgccaggctcgtg

SEQ ID NO: 62653 - RNA, 23 nt, synthetic construct
  source 1..23: mol_type = other RNA
gtgagtgttggcgccaggctcgt

SEQ ID NO: 62654 - RNA, 23 nt, synthetic construct
  source 1..23: mol_type = other RNA
tggtgttagtcaaggggctcatt

SEQ ID NO: 62655 - RNA, 23 nt, synthetic construct
  source 1..23: mol_type = other RNA
cagcgggtcgtgccctggctggt

SEQ ID NO: 62656 - RNA, 23 nt, synthetic construct
  source 1..23: mol_type = other RNA
tggtggtcagcactttgggaggg

SEQ ID NO: 62657 - RNA, 23 nt, synthetic construct
  source 1..23: mol_type = other RNA
gggcggttgcagtccctggactg

SEQ ID NO: 62658 - RNA, 23 nt, synthetic construct
  source 1..23: mol_type = other RNA
ggcggtaagcactgtggaggtgt

SEQ ID NO: 62659 - RNA, 23 nt, synthetic construct
  source 1..23: mol_type = other RNA
ggtagtgtgagctgttcctgggg

SEQ ID NO: 62660 - RNA, 23 nt, synthetic construct
  source 1..23: mol_type = other RNA
tgagtgccgtccctgggctggag

SEQ ID NO: 62661 - RNA, 23 nt, synthetic construct
  source 1..23: mol_type = other RNA
ggaggagggggtcaccgtggagc

SEQ ID NO: 62662 - RNA, 23 nt, synthetic construct
  source 1..23: mol_type = other RNA
cggtgtgggtggtccccgggatg

SEQ ID NO: 62663 - RNA, 23 nt, synthetic construct
  source 1..23: mol_type = other RNA
gtggtggagccggtggccgtgat

SEQ ID NO: 62664 - RNA, 23 nt, synthetic construct
  source 1..23: mol_type = other RNA
gtcccaggagttgaggaggggtt

SEQ ID NO: 62665 - RNA, 23 nt, synthetic construct
  source 1..23: mol_type = other RNA
cgtgtgtggtggccatggtgttc

SEQ ID NO: 62666 - RNA, 23 nt, synthetic construct
  source 1..23: mol_type = other RNA
atcgcccgtgtgtggtggccatg

SEQ ID NO: 62667 - RNA, 23 nt, synthetic construct
  source 1..23: mol_type = other RNA
caccgtgtggggactgctggggg

SEQ ID NO: 62668 - RNA, 23 nt, synthetic construct
  source 1..23: mol_type = other RNA
gcgcaccgtgtggggactgctgg

SEQ ID NO: 62669 - RNA, 23 nt, synthetic construct
  source 1..23: mol_type = other RNA
ccgaagtccaggctgtgcgcacc

SEQ ID NO: 62670 - RNA, 23 nt, synthetic construct
  source 1..23: mol_type = other RNA
gcccgaggtggccgaagtccagg

SEQ ID NO: 62671 - RNA, 23 nt, synthetic construct
  source 1..23: mol_type = other RNA
tgcccgaggtggccgaagtccag

SEQ ID NO: 62672 - RNA, 23 nt, synthetic construct
  source 1..23: mol_type = other RNA
ggtgcccaagatgcccgaggtgg

SEQ ID NO: 62673 - RNA, 23 nt, synthetic construct
  source 1..23: mol_type = other RNA
cgtggaaggctctgtgatgtggg

SEQ ID NO: 62674 - RNA, 23 nt, synthetic construct
  source 1..23: mol_type = other RNA
ccgtggaaggctctgtgatgtgg

SEQ ID NO: 62675 - RNA, 23 nt, synthetic construct
  source 1..23: mol_type = other RNA
ggtggttgctgctagggtgtggg

SEQ ID NO: 62676 - RNA, 23 nt, synthetic construct
  source 1..23: mol_type = other RNA
ccagccactctgaccaggcacac

SEQ ID NO: 62677 - RNA, 23 nt, synthetic construct
  source 1..23: mol_type = other RNA
gccccggcatggggtagctgtag

SEQ ID NO: 62678 - RNA, 23 nt, synthetic construct
  source 1..23: mol_type = other RNA
gtccccgccagagggccccggca

SEQ ID NO: 62679 - RNA, 23 nt, synthetic construct
  source 1..23: mol_type = other RNA
cacggatgttggagtaggtgtca

SEQ ID NO: 62680 - RNA, 23 nt, synthetic construct
  source 1..23: mol_type = other RNA
cacggttcctgcagaccaggcca

SEQ ID NO: 62681 - RNA, 23 nt, synthetic construct
  source 1..23: mol_type = other RNA
cttgaacttccccacctgctcac

SEQ ID NO: 62682 - RNA, 23 nt, synthetic construct
  source 1..23: mol_type = other RNA
gaggagggcatggccgtagagct

SEQ ID NO: 62683 - RNA, 23 nt, synthetic construct
  source 1..23: mol_type = other RNA
gctcggctctgtgaggatccagg

SEQ ID NO: 62684 - RNA, 23 nt, synthetic construct
  source 1..23: mol_type = other RNA
ccggtgggcaccgtcacggtggc

SEQ ID NO: 62685 - RNA, 23 nt, synthetic construct
  source 1..23: mol_type = other RNA
ggtgccagcagttgcctgggtgg

SEQ ID NO: 62686 - RNA, 23 nt, synthetic construct
  source 1..23: mol_type = other RNA
ggtgactgtgggtgtcgtggccg

SEQ ID NO: 62687 - RNA, 23 nt, synthetic construct
  source 1..23: mol_type = other RNA
gggcggttgcagtccctggactg

SEQ ID NO: 62688 - RNA, 23 nt, synthetic construct
  source 1..23: mol_type = other RNA
ggtagtgtgagctgttcctgggg

SEQ ID NO: 62689 - RNA, 23 nt, synthetic construct
  source 1..23: mol_type = other RNA
ggtcaccgtggaacctctggttg

SEQ ID NO: 62690 - RNA, 23 nt, synthetic construct
  source 1..23: mol_type = other RNA
ggaggagggggtcaccgtggaac

SEQ ID NO: 62691 - RNA, 23 nt, synthetic construct
  source 1..23: mol_type = other RNA
gggtgtgggtggtccccgggatg

SEQ ID NO: 62692 - RNA, 23 nt, synthetic construct
  source 1..23: mol_type = other RNA
gtggtggagccggtggccgtgat

SEQ ID NO: 62693 - RNA, 23 nt, synthetic construct
  source 1..23: mol_type = other RNA
gggagtcactgtgctgctggtgg

SEQ ID NO: 62694 - RNA, 23 nt, synthetic construct
  source 1..23: mol_type = other RNA
atcgcccgtgtgtggtggccgtg

SEQ ID NO: 62695 - RNA, 23 nt, synthetic construct
  source 1..23: mol_type = other RNA
caccgtgtggggactgctggggg

SEQ ID NO: 62696 - RNA, 23 nt, synthetic construct
  source 1..23: mol_type = other RNA
gcgcaccgtgtggggactgctgg

SEQ ID NO: 62697 - RNA, 23 nt, synthetic construct
  source 1..23: mol_type = other RNA
ccgaagtccaggctgtgcgcacc

SEQ ID NO: 62698 - RNA, 23 nt, synthetic construct
  source 1..23: mol_type = other RNA
gcctgaggtggccgaagtccagg

SEQ ID NO: 62699 - RNA, 23 nt, synthetic construct
  source 1..23: mol_type = other RNA
tgcctgaggtggccgaagtccag

SEQ ID NO: 62700 - RNA, 23 nt, synthetic construct
  source 1..23: mol_type = other RNA
ggtgcccaaggtgcctgaggtgg

SEQ ID NO: 62701 - RNA, 23 nt, synthetic construct
  source 1..23: mol_type = other RNA
gggtggtgcccaaggtgcctgag

SEQ ID NO: 62702 - RNA, 23 nt, synthetic construct
  source 1..23: mol_type = other RNA
cgtggaaggctctgtgatgtggg

SEQ ID NO: 62703 - RNA, 23 nt, synthetic construct
  source 1..23: mol_type = other RNA
ccgtggaaggctctgtgatgtgg

SEQ ID NO: 62704 - RNA, 23 nt, synthetic construct
  source 1..23: mol_type = other RNA
ccagccactctgaccaggcacac

SEQ ID NO: 62705 - RNA, 23 nt, synthetic construct
  source 1..23: mol_type = other RNA
gccccggcatggggtagctgtag

SEQ ID NO: 62706 - RNA, 23 nt, synthetic construct
  source 1..23: mol_type = other RNA
gtccccgccagagggccccggca

SEQ ID NO: 62707 - RNA, 23 nt, synthetic construct
  source 1..23: mol_type = other RNA
cacggatgttggagtaggtgtca

SEQ ID NO: 62708 - RNA, 23 nt, synthetic construct
  source 1..23: mol_type = other RNA
cacggttcctgcagaccaggcca

SEQ ID NO: 62709 - RNA, 23 nt, synthetic construct
  source 1..23: mol_type = other RNA
cttgaacttccccacctgctcac

SEQ ID NO: 62710 - RNA, 23 nt, synthetic construct
  source 1..23: mol_type = other RNA
ggtctgctctgtgaggatccagg

SEQ ID NO: 62711 - RNA, 23 nt, synthetic construct
  source 1..23: mol_type = other RNA
gtcgtagtggctgctgtggtctg

SEQ ID NO: 62712 - RNA, 23 nt, synthetic construct
  source 1..23: mol_type = other RNA
gtggctttggaactggtggctgt

SEQ ID NO: 62713 - RNA, 23 nt, synthetic construct
  source 1..23: mol_type = other RNA
ctggtagctgtggatttggtggc

SEQ ID NO: 62714 - RNA, 23 nt, synthetic construct
  source 1..23: mol_type = other RNA
gtaaagctggtagctgtggattt

SEQ ID NO: 62715 - RNA, 23 nt, synthetic construct
  source 1..23: mol_type = other RNA
cggtggtcccaagggtgaaggag

SEQ ID NO: 62716 - RNA, 23 nt, synthetic construct
  source 1..23: mol_type = other RNA
gattgtggacatggtggccatgg

SEQ ID NO: 62717 - RNA, 23 nt, synthetic construct
  source 1..23: mol_type = other RNA
ggattgtggacatggtggccatg

SEQ ID NO: 62718 - RNA, 23 nt, synthetic construct
  source 1..23: mol_type = other RNA
ggggtggattgtggacatggtgg

SEQ ID NO: 62719 - RNA, 23 nt, synthetic construct
  source 1..23: mol_type = other RNA
ggtctccggagtggaggaggggt

SEQ ID NO: 62720 - RNA, 23 nt, synthetic construct
  source 1..23: mol_type = other RNA
ttcgtggtcagcactgtggaggt

SEQ ID NO: 62721 - RNA, 23 nt, synthetic construct
  source 1..23: mol_type = other RNA
acatggaactggtggcccttgtc

SEQ ID NO: 62722 - RNA, 23 nt, synthetic construct
  source 1..23: mol_type = other RNA
ggctgtagtgctgggctctgtga

SEQ ID NO: 62723 - RNA, 23 nt, synthetic construct
  source 1..23: mol_type = other RNA
tcacggtggctgtagtgctgggc

SEQ ID NO: 62724 - RNA, 23 nt, synthetic construct
  source 1..23: mol_type = other RNA
ccggtgggcaccgtcacggtggc

SEQ ID NO: 62725 - RNA, 23 nt, synthetic construct
  source 1..23: mol_type = other RNA
gggcggttgcagtccctggactg

SEQ ID NO: 62726 - RNA, 23 nt, synthetic construct
  source 1..23: mol_type = other RNA
taggcgggtccaggcggtgccca

SEQ ID NO: 62727 - RNA, 23 nt, synthetic construct
  source 1..23: mol_type = other RNA
ggtagtgtgagctgttcctgggg

SEQ ID NO: 62728 - RNA, 23 nt, synthetic construct
  source 1..23: mol_type = other RNA
tgagtgccgtccctgggctggag

SEQ ID NO: 62729 - RNA, 23 nt, synthetic construct
  source 1..23: mol_type = other RNA
ggaggagggggtcaccgtggagc

SEQ ID NO: 62730 - RNA, 23 nt, synthetic construct
  source 1..23: mol_type = other RNA
cggtgtgggtggtccccgggatg

SEQ ID NO: 62731 - RNA, 23 nt, synthetic construct
  source 1..23: mol_type = other RNA
cggtggctgtgatcgtagtggcc

SEQ ID NO: 62732 - RNA, 23 nt, synthetic construct
  source 1..23: mol_type = other RNA
gggagtcactgtgctgctggtgg

SEQ ID NO: 62733 - RNA, 23 nt, synthetic construct
  source 1..23: mol_type = other RNA
caccgtgtggggactgctggggg

SEQ ID NO: 62734 - RNA, 23 nt, synthetic construct
  source 1..23: mol_type = other RNA
gcgcaccgtgtggggactgctgg

SEQ ID NO: 62735 - RNA, 23 nt, synthetic construct
  source 1..23: mol_type = other RNA
ccgaagtccaggctgtgcgcacc

SEQ ID NO: 62736 - RNA, 23 nt, synthetic construct
  source 1..23: mol_type = other RNA
gcccgaggtggccgaagtccagg

SEQ ID NO: 62737 - RNA, 23 nt, synthetic construct
  source 1..23: mol_type = other RNA
tgcccgaggtggccgaagtccag

SEQ ID NO: 62738 - RNA, 23 nt, synthetic construct
  source 1..23: mol_type = other RNA
ggtgcccaagatgcccgaggtgg

SEQ ID NO: 62739 - RNA, 23 nt, synthetic construct
  source 1..23: mol_type = other RNA
cgtggaaggctctgtgatgtggg

SEQ ID NO: 62740 - RNA, 23 nt, synthetic construct
  source 1..23: mol_type = other RNA
ccgtggaaggctctgtgatgtgg

SEQ ID NO: 62741 - RNA, 23 nt, synthetic construct
  source 1..23: mol_type = other RNA
ggtcttgctgggtgtggctgtgg

SEQ ID NO: 62742 - RNA, 23 nt, synthetic construct
  source 1..23: mol_type = other RNA
ccgtggtcaccaccgtggttatg

SEQ ID NO: 62743 - RNA, 23 nt, synthetic construct
  source 1..23: mol_type = other RNA
cacagcccgtggtcaccaccgtg

SEQ ID NO: 62744 - RNA, 23 nt, synthetic construct
  source 1..23: mol_type = other RNA
ctggggctcacagcccgtggtca

SEQ ID NO: 62745 - RNA, 23 nt, synthetic construct
  source 1..23: mol_type = other RNA
ccagccactctgaccaggcacac

SEQ ID NO: 62746 - RNA, 23 nt, synthetic construct
  source 1..23: mol_type = other RNA
gccccggcatggggtagctgtag

SEQ ID NO: 62747 - RNA, 23 nt, synthetic construct
  source 1..23: mol_type = other RNA
gtccccgccagagggccccggca

SEQ ID NO: 62748 - RNA, 23 nt, synthetic construct
  source 1..23: mol_type = other RNA
cacggatgttggagtaggtgtca

SEQ ID NO: 62749 - RNA, 23 nt, synthetic construct
  source 1..23: mol_type = other RNA
cacagactgcccctccggccgca

SEQ ID NO: 62750 - RNA, 23 nt, synthetic construct
  source 1..23: mol_type = other RNA
tcacagactgcccctccggccgc

SEQ ID NO: 62751 - RNA, 23 nt, synthetic construct
  source 1..23: mol_type = other RNA
cacggttcctgcagaccaggcca

SEQ ID NO: 62752 - RNA, 23 nt, synthetic construct
  source 1..23: mol_type = other RNA
cttgaacttccccacctgctcac

SEQ ID NO: 62753 - RNA, 23 nt, synthetic construct
  source 1..23: mol_type = other RNA
gctcggctctgtgaggatccagg

SEQ ID NO: 62754 - RNA, 23 nt, synthetic construct
  source 1..23: mol_type = other RNA
ccggtgggcaccgtcacggtggc

SEQ ID NO: 62755 - RNA, 23 nt, synthetic construct
  source 1..23: mol_type = other RNA
ggtgccagcagttgcctgggtgg

SEQ ID NO: 62756 - RNA, 23 nt, synthetic construct
  source 1..23: mol_type = other RNA
ggtgactgtgggtgtcgtggccg

SEQ ID NO: 62757 - RNA, 23 nt, synthetic construct
  source 1..23: mol_type = other RNA
gggcggttgcagtccctggactg

SEQ ID NO: 62758 - RNA, 23 nt, synthetic construct
  source 1..23: mol_type = other RNA
tgttcctggggtggaagaggggg

SEQ ID NO: 62759 - RNA, 23 nt, synthetic construct
  source 1..23: mol_type = other RNA
ggtagtgtgagctgttcctgggg

SEQ ID NO: 62760 - RNA, 23 nt, synthetic construct
  source 1..23: mol_type = other RNA
ggtgactgtgaagcccgtggttg

SEQ ID NO: 62761 - RNA, 23 nt, synthetic construct
  source 1..23: mol_type = other RNA
gtcaccgtggagccactggttgt

SEQ ID NO: 62762 - RNA, 23 nt, synthetic construct
  source 1..23: mol_type = other RNA
ggaggagggggtcaccgtggagc

SEQ ID NO: 62763 - RNA, 23 nt, synthetic construct
  source 1..23: mol_type = other RNA
gggtgtgggtggtccccgggacg

SEQ ID NO: 62764 - RNA, 23 nt, synthetic construct
  source 1..23: mol_type = other RNA
gtggtggagccggtggccgtgat

SEQ ID NO: 62765 - RNA, 23 nt, synthetic construct
  source 1..23: mol_type = other RNA
gggagtcactgtgctgctggtgg

SEQ ID NO: 62766 - RNA, 23 nt, synthetic construct
  source 1..23: mol_type = other RNA
atcgcccgtgtgtggtggccgtg

SEQ ID NO: 62767 - RNA, 23 nt, synthetic construct
  source 1..23: mol_type = other RNA
caccgtgtggggactgctggggg

SEQ ID NO: 62768 - RNA, 23 nt, synthetic construct
  source 1..23: mol_type = other RNA
gcgcaccgtgtggggactgctgg

SEQ ID NO: 62769 - RNA, 23 nt, synthetic construct
  source 1..23: mol_type = other RNA
ccgaagtccaggctgtgcgcacc

SEQ ID NO: 62770 - RNA, 23 nt, synthetic construct
  source 1..23: mol_type = other RNA
gcctgaggtggccgaagtccagg

SEQ ID NO: 62771 - RNA, 23 nt, synthetic construct
  source 1..23: mol_type = other RNA
tgcctgaggtggccgaagtccag

SEQ ID NO: 62772 - RNA, 23 nt, synthetic construct
  source 1..23: mol_type = other RNA
ggtgcccaaggtgcctgaggtgg

SEQ ID NO: 62773 - RNA, 23 nt, synthetic construct
  source 1..23: mol_type = other RNA
gggtggtgcccaaggtgcctgag

SEQ ID NO: 62774 - RNA, 23 nt, synthetic construct
  source 1..23: mol_type = other RNA
cgtggaaggctctgtgatgtggg

SEQ ID NO: 62775 - RNA, 23 nt, synthetic construct
  source 1..23: mol_type = other RNA
ccgtggaaggctctgtgatgtgg

SEQ ID NO: 62776 - RNA, 23 nt, synthetic construct
  source 1..23: mol_type = other RNA
ggtggtcgtccctggggaagggg

SEQ ID NO: 62777 - RNA, 23 nt, synthetic construct
  source 1..23: mol_type = other RNA
ccggggtggtcgtccctggggaa

SEQ ID NO: 62778 - RNA, 23 nt, synthetic construct
  source 1..23: mol_type = other RNA
ccgtggtcaccaccgtggttatg

SEQ ID NO: 62779 - RNA, 23 nt, synthetic construct
  source 1..23: mol_type = other RNA
cacagcccgtggtcaccaccgtg

SEQ ID NO: 62780 - RNA, 23 nt, synthetic construct
  source 1..23: mol_type = other RNA
ctggggctcacagcccgtggtca

SEQ ID NO: 62781 - RNA, 23 nt, synthetic construct
  source 1..23: mol_type = other RNA
ccagccactctgaccaggcacac

SEQ ID NO: 62782 - RNA, 23 nt, synthetic construct
  source 1..23: mol_type = other RNA
gccccggcatggggtagctgtag

SEQ ID NO: 62783 - RNA, 23 nt, synthetic construct
  source 1..23: mol_type = other RNA
gtccccgccagagggccccggca

SEQ ID NO: 62784 - RNA, 23 nt, synthetic construct
  source 1..23: mol_type = other RNA
cacggatgttggagtaggtgtca

SEQ ID NO: 62785 - RNA, 23 nt, synthetic construct
  source 1..23: mol_type = other RNA
cacggttcctgcagaccaggcca

SEQ ID NO: 62786 - RNA, 23 nt, synthetic construct
  source 1..23: mol_type = other RNA
cttgaacttccccacctgctcac

SEQ ID NO: 62787 - RNA, 23 nt, synthetic construct
  source 1..23: mol_type = other RNA
gaggagggcatggccgtagagct

SEQ ID NO: 62788 - RNA, 23 nt, synthetic construct
  source 1..23: mol_type = other RNA
gtggctttggaactggtggctgt

SEQ ID NO: 62789 - RNA, 23 nt, synthetic construct
  source 1..23: mol_type = other RNA
ctggtagctgtggatttggtggc

SEQ ID NO: 62790 - RNA, 23 nt, synthetic construct
  source 1..23: mol_type = other RNA
acgctggtagctgtggatttggt

SEQ ID NO: 62791 - RNA, 23 nt, synthetic construct
  source 1..23: mol_type = other RNA
taacgctggtagctgtggatttg

SEQ ID NO: 62792 - RNA, 23 nt, synthetic construct
  source 1..23: mol_type = other RNA
gattgtggacatggtggccacgg

SEQ ID NO: 62793 - RNA, 23 nt, synthetic construct
  source 1..23: mol_type = other RNA
ggattgtggacatggtggccacg

SEQ ID NO: 62794 - RNA, 23 nt, synthetic construct
  source 1..23: mol_type = other RNA
ggggtggattgtggacatggtgg

SEQ ID NO: 62795 - RNA, 23 nt, synthetic construct
  source 1..23: mol_type = other RNA
ggtctccggagtggaggaggggt

SEQ ID NO: 62796 - RNA, 23 nt, synthetic construct
  source 1..23: mol_type = other RNA
ttcgtggtcagcactgtggaggt

SEQ ID NO: 62797 - RNA, 23 nt, synthetic construct
  source 1..23: mol_type = other RNA
gctcggctctgtgaggatccagg

SEQ ID NO: 62798 - RNA, 23 nt, synthetic construct
  source 1..23: mol_type = other RNA
ccggtgggcaccgtcacggtggc

SEQ ID NO: 62799 - RNA, 23 nt, synthetic construct
  source 1..23: mol_type = other RNA
ggtgccagcagttgcctgggtgg

SEQ ID NO: 62800 - RNA, 23 nt, synthetic construct
  source 1..23: mol_type = other RNA
ggtgactgtgggtgtcgtggccg

SEQ ID NO: 62801 - RNA, 23 nt, synthetic construct
  source 1..23: mol_type = other RNA
gaagggcagttgcagtccctgga

SEQ ID NO: 62802 - RNA, 23 nt, synthetic construct
  source 1..23: mol_type = other RNA
ggcggtaagcactgtggaggtgt

SEQ ID NO: 62803 - RNA, 23 nt, synthetic construct
  source 1..23: mol_type = other RNA
ggtagtgtgagctgttcctgggg

SEQ ID NO: 62804 - RNA, 23 nt, synthetic construct
  source 1..23: mol_type = other RNA
tgagtgccgtccctgggctggag

SEQ ID NO: 62805 - RNA, 23 nt, synthetic construct
  source 1..23: mol_type = other RNA
gtcaccgtggagccactggttgt

SEQ ID NO: 62806 - RNA, 23 nt, synthetic construct
  source 1..23: mol_type = other RNA
ggaggagggggtcaccgtggagc

SEQ ID NO: 62807 - RNA, 23 nt, synthetic construct
  source 1..23: mol_type = other RNA
cggtgtgggtggtccccgggatg

SEQ ID NO: 62808 - RNA, 23 nt, synthetic construct
  source 1..23: mol_type = other RNA
gtggtggagccggtggccgtgat

SEQ ID NO: 62809 - RNA, 23 nt, synthetic construct
  source 1..23: mol_type = other RNA
ggtgatgggtgttgtccctggag

SEQ ID NO: 62810 - RNA, 23 nt, synthetic construct
  source 1..23: mol_type = other RNA
ttttgtggctgtgcttgtcagca

SEQ ID NO: 62811 - RNA, 23 nt, synthetic construct
  source 1..23: mol_type = other RNA
ggtagctgtggattttgtggctg

SEQ ID NO: 62812 - RNA, 23 nt, synthetic construct
  source 1..23: mol_type = other RNA
gtaaagctggtagctgtggattt

SEQ ID NO: 62813 - RNA, 23 nt, synthetic construct
  source 1..23: mol_type = other RNA
ggtggtctgtgctgggacggtcc

SEQ ID NO: 62814 - RNA, 23 nt, synthetic construct
  source 1..23: mol_type = other RNA
ggattgtggacatggtggacatg

SEQ ID NO: 62815 - RNA, 23 nt, synthetic construct
  source 1..23: mol_type = other RNA
ggtgtggattgtggacatggtgg

SEQ ID NO: 62816 - RNA, 23 nt, synthetic construct
  source 1..23: mol_type = other RNA
ggaggtgtggattgtggacatgg

SEQ ID NO: 62817 - RNA, 23 nt, synthetic construct
  source 1..23: mol_type = other RNA
tagaggaggtgtggattgtggac

SEQ ID NO: 62818 - RNA, 23 nt, synthetic construct
  source 1..23: mol_type = other RNA
gcccttgtcatggtggctgtggt

SEQ ID NO: 62819 - RNA, 23 nt, synthetic construct
  source 1..23: mol_type = other RNA
gatccagtggctgcagttgtagt

SEQ ID NO: 62820 - RNA, 23 nt, synthetic construct
  source 1..23: mol_type = other RNA
ggaggacagggtggccgtggatc

SEQ ID NO: 62821 - RNA, 23 nt, synthetic construct
  source 1..23: mol_type = other RNA
gctcggctctgtgaggatccagg

SEQ ID NO: 62822 - RNA, 23 nt, synthetic construct
  source 1..23: mol_type = other RNA
ctatagtgctcggctctgtgagg

SEQ ID NO: 62823 - RNA, 23 nt, synthetic construct
  source 1..23: mol_type = other RNA
accggtgggcaccatcacggtgg

SEQ ID NO: 62824 - RNA, 23 nt, synthetic construct
  source 1..23: mol_type = other RNA
gggcatagtggccatggtggtca

SEQ ID NO: 62825 - RNA, 23 nt, synthetic construct
  source 1..23: mol_type = other RNA
gctgtgggcatagtggccatggt

SEQ ID NO: 62826 - RNA, 23 nt, synthetic construct
  source 1..23: mol_type = other RNA
ggctgtgggcatagtggccatgg

SEQ ID NO: 62827 - RNA, 23 nt, synthetic construct
  source 1..23: mol_type = other RNA
cggtggacgagctgggaaccgtg

SEQ ID NO: 62828 - RNA, 23 nt, synthetic construct
  source 1..23: mol_type = other RNA
cccacggtggacgagctgggaac

SEQ ID NO: 62829 - RNA, 23 nt, synthetic construct
  source 1..23: mol_type = other RNA
tccccacggtggacgagctggga

SEQ ID NO: 62830 - RNA, 23 nt, synthetic construct
  source 1..23: mol_type = other RNA
ggtccccacggtggacgagctgg

SEQ ID NO: 62831 - RNA, 23 nt, synthetic construct
  source 1..23: mol_type = other RNA
gcgggtggtccccacggtggacg

SEQ ID NO: 62832 - RNA, 23 nt, synthetic construct
  source 1..23: mol_type = other RNA
cagtgggtctcagggtggtgagg

SEQ ID NO: 62833 - RNA, 23 nt, synthetic construct
  source 1..23: mol_type = other RNA
gcgagaaaaactgtccaaatgcc

SEQ ID NO: 62834 - RNA, 23 nt, synthetic construct
  source 1..23: mol_type = other RNA
ggacactggcggtggggaggtgg

SEQ ID NO: 62835 - RNA, 23 nt, synthetic construct
  source 1..23: mol_type = other RNA
cacctgccggagagggatggcat

SEQ ID NO: 62836 - RNA, 23 nt, synthetic construct
  source 1..23: mol_type = other RNA
gcggcagtggcagaggccgtgca

SEQ ID NO: 62837 - RNA, 23 nt, synthetic construct
  source 1..23: mol_type = other RNA
atgcaccatggtgacagtgagga

SEQ ID NO: 62838 - RNA, 23 nt, synthetic construct
  source 1..23: mol_type = other RNA
cttcccatgcaccatggtgacag

SEQ ID NO: 62839 - RNA, 23 nt, synthetic construct
  source 1..23: mol_type = other RNA
acgcatggtggtggtccccagca

SEQ ID NO: 62840 - RNA, 23 nt, synthetic construct
  source 1..23: mol_type = other RNA
gtccacacgcatggtggtggtcc

SEQ ID NO: 62841 - RNA, 23 nt, synthetic construct
  source 1..23: mol_type = other RNA
ctggaagacttggccattgaagg

SEQ ID NO: 62842 - RNA, 23 nt, synthetic construct
  source 1..23: mol_type = other RNA
ccgggcctggaagacttggccat

SEQ ID NO: 62843 - RNA, 23 nt, synthetic construct
  source 1..23: mol_type = other RNA
gccacgtcttggccatgtccttg

SEQ ID NO: 62844 - RNA, 23 nt, synthetic construct
  source 1..23: mol_type = other RNA
catcagatcacagagcggctgtg

SEQ ID NO: 62845 - RNA, 23 nt, synthetic construct
  source 1..23: mol_type = other RNA
gcatggcttgtacactttggtgg

SEQ ID NO: 62846 - RNA, 23 nt, synthetic construct
  source 1..23: mol_type = other RNA
ctagagttgcaggtggcaggctg

SEQ ID NO: 62847 - RNA, 23 nt, synthetic construct
  source 1..23: mol_type = other RNA
ctccgccatcccctccagctgtg

SEQ ID NO: 62848 - RNA, 23 nt, synthetic construct
  source 1..23: mol_type = other RNA
gcagttgctgacccaccgctccc

SEQ ID NO: 62849 - RNA, 23 nt, synthetic construct
  source 1..23: mol_type = other RNA
ggttctcggcccggggcctggtc

SEQ ID NO: 62850 - RNA, 23 nt, synthetic construct
  source 1..23: mol_type = other RNA
caggcatcctcctgacattgcac

SEQ ID NO: 62851 - RNA, 23 nt, synthetic construct
  source 1..23: mol_type = other RNA
ccggccactctcttgtactcaaa

SEQ ID NO: 62852 - RNA, 23 nt, synthetic construct
  source 1..23: mol_type = other RNA
ggactccaccctcagcctcacag

SEQ ID NO: 62853 - RNA, 23 nt, synthetic construct
  source 1..23: mol_type = other RNA
ctgcagctggacacatctgggca

SEQ ID NO: 62854 - RNA, 23 nt, synthetic construct
  source 1..23: mol_type = other RNA
tggacgctccggggcaggagccc

SEQ ID NO: 62855 - RNA, 23 nt, synthetic construct
  source 1..23: mol_type = other RNA
tcgtggacccgcctctcctggca

SEQ ID NO: 62856 - RNA, 23 nt, synthetic construct
  source 1..23: mol_type = other RNA
ctcgtggacccgcctctcctggc

SEQ ID NO: 62857 - RNA, 23 nt, synthetic construct
  source 1..23: mol_type = other RNA
cgtctcctcgtggacccgcctct

SEQ ID NO: 62858 - RNA, 23 nt, synthetic construct
  source 1..23: mol_type = other RNA
gaagccacgggtgtgtgggggag

SEQ ID NO: 62859 - RNA, 23 nt, synthetic construct
  source 1..23: mol_type = other RNA
ggaagccacgggtgtgtggggga

SEQ ID NO: 62860 - RNA, 23 nt, synthetic construct
  source 1..23: mol_type = other RNA
atcagacaatgcacatcctggct

SEQ ID NO: 62861 - RNA, 23 nt, synthetic construct
  source 1..23: mol_type = other RNA
gatcagacaatgcacatcctggc

SEQ ID NO: 62862 - RNA, 23 nt, synthetic construct
  source 1..23: mol_type = other RNA
gcccaaggttttcatgatcagac

SEQ ID NO: 62863 - RNA, 23 nt, synthetic construct
  source 1..23: mol_type = other RNA
gaggcccaaggttttcatgatca

SEQ ID NO: 62864 - RNA, 23 nt, synthetic construct
  source 1..23: mol_type = other RNA
ctcccagggtaggactcctgagt

SEQ ID NO: 62865 - RNA, 23 nt, synthetic construct
  source 1..23: mol_type = other RNA
cagctggaatccgtgctgcgcgg

SEQ ID NO: 62866 - RNA, 23 nt, synthetic construct
  source 1..23: mol_type = other RNA
cagcggccggacgtggccagctg

SEQ ID NO: 62867 - RNA, 23 nt, synthetic construct
  source 1..23: mol_type = other RNA
gccccagcggccggacgtggcca

SEQ ID NO: 62868 - RNA, 23 nt, synthetic construct
  source 1..23: mol_type = other RNA
cctcagccctgagttaccctgca

SEQ ID NO: 62869 - RNA, 23 nt, synthetic construct
  source 1..23: mol_type = other RNA
tgacccctctctgacctggccgt

SEQ ID NO: 62870 - RNA, 23 nt, synthetic construct
  source 1..23: mol_type = other RNA
ttgggatgctgacccctctctga

SEQ ID NO: 62871 - RNA, 23 nt, synthetic construct
  source 1..23: mol_type = other RNA
tgctcagggtttatttgcaaaac

SEQ ID NO: 62872 - RNA, 23 nt, synthetic construct
  source 1..23: mol_type = other RNA
gggatgggagttgtccctggagt

SEQ ID NO: 62873 - RNA, 23 nt, synthetic construct
  source 1..23: mol_type = other RNA
tggggtgatgggtgttgtccctg

SEQ ID NO: 62874 - RNA, 23 nt, synthetic construct
  source 1..23: mol_type = other RNA
ggcacccatcctgggggctggca

SEQ ID NO: 62875 - RNA, 23 nt, synthetic construct
  source 1..23: mol_type = other RNA
tgatggcattgtcgtcgaagttc

SEQ ID NO: 62876 - RNA, 23 nt, synthetic construct
  source 1..23: mol_type = other RNA
ctcaaagtctccgcctcccaggc

SEQ ID NO: 62877 - RNA, 23 nt, synthetic construct
  source 1..23: mol_type = other RNA
tagagttgcaggtggcaggctgt

SEQ ID NO: 62878 - RNA, 23 nt, synthetic construct
  source 1..23: mol_type = other RNA
attcacctgccggagagggatgg

SEQ ID NO: 62879 - RNA, 23 nt, synthetic construct
  source 1..23: mol_type = other RNA
caccaccccgctgagggccgtga

SEQ ID NO: 62880 - RNA, 23 nt, synthetic construct
  source 1..23: mol_type = other RNA
ggtcttattgtagatgacttccc

SEQ ID NO: 62881 - RNA, 23 nt, synthetic construct
  source 1..23: mol_type = other RNA
ccaggtttcattcagctggactg

SEQ ID NO: 62882 - RNA, 23 nt, synthetic construct
  source 1..23: mol_type = other RNA
acaggctctcccagggtaggact

SEQ ID NO: 62883 - RNA, 23 nt, synthetic construct
  source 1..23: mol_type = other RNA
cagaacgtagctgcagtcaccat

SEQ ID NO: 62884 - RNA, 23 nt, synthetic construct
  source 1..23: mol_type = other RNA
agctcggctccacagggccctgg

SEQ ID NO: 62885 - RNA, 23 nt, synthetic construct
  source 1..23: mol_type = other RNA
agggctgagcgtgttggaagggt

SEQ ID NO: 62886 - RNA, 23 nt, synthetic construct
  source 1..23: mol_type = other RNA
ggaagggctgagcgtgttggaag

SEQ ID NO: 62887 - RNA, 23 nt, synthetic construct
  source 1..23: mol_type = other RNA
tctcagggtggaggtcggggtgg

SEQ ID NO: 62888 - RNA, 23 nt, synthetic construct
  source 1..23: mol_type = other RNA
tggccctggtgtggcccggggtg

SEQ ID NO: 62889 - RNA, 23 nt, synthetic construct
  source 1..23: mol_type = other RNA
agggtggttgcagtccttggact

SEQ ID NO: 62890 - RNA, 23 nt, synthetic construct
  source 1..23: mol_type = other RNA
agactgcccctccggccgcacgg

SEQ ID NO: 62891 - RNA, 23 nt, synthetic construct
  source 1..23: mol_type = other RNA
agggtggttgcagtccttggact

SEQ ID NO: 62892 - RNA, 23 nt, synthetic construct
  source 1..23: mol_type = other RNA
agggtggttgcagtccttggact

SEQ ID NO: 62893 - RNA, 23 nt, synthetic construct
  source 1..23: mol_type = other RNA
ggggttctcggcccggggcctgg

SEQ ID NO: 62894 - RNA, 23 nt, synthetic construct
  source 1..23: mol_type = other RNA
cctggcgggcacacaggcaggct

SEQ ID NO: 62895 - RNA, 23 nt, synthetic construct
  source 1..23: mol_type = other RNA
ggtgtgccctgcattctcccagc

SEQ ID NO: 62896 - RNA, 23 nt, synthetic construct
  source 1..23: mol_type = other RNA
caaggttttcatgatcagacaat

SEQ ID NO: 62897 - RNA, 23 nt, synthetic construct
  source 1..23: mol_type = other RNA
gtcctcgtaggcggcgcggcagt

SEQ ID NO: 62898 - RNA, 23 nt, synthetic construct
  source 1..23: mol_type = other RNA
gatgtagtccccgctctgctcca

SEQ ID NO: 62899 - RNA, 23 nt, synthetic construct
  source 1..23: mol_type = other RNA
gcagggtgagccacactcctggt

SEQ ID NO: 62900 - RNA, 23 nt, synthetic construct
  source 1..23: mol_type = other RNA
cccaggggtgcccgccgagctgt

SEQ ID NO: 62901 - RNA, 23 nt, synthetic construct
  source 1..23: mol_type = other RNA
cgttgtgcacacaggggcagtcc

SEQ ID NO: 62902 - RNA, 23 nt, synthetic construct
  source 1..23: mol_type = other RNA
ggtgccagggcgtccgggcagga

SEQ ID NO: 62903 - RNA, 23 nt, synthetic construct
  source 1..23: mol_type = other RNA
ggaagctgcgccgcccggcactc

SEQ ID NO: 62904 - RNA, 23 nt, synthetic construct
  source 1..23: mol_type = other RNA
ggttggggtaggcacagcaggct

SEQ ID NO: 62905 - RNA, 23 nt, synthetic construct
  source 1..23: mol_type = other RNA
tcggcactgggggtgtgtgggtg

SEQ ID NO: 62906 - RNA, 23 nt, synthetic construct
  source 1..23: mol_type = other RNA
tcggcactgggggtgtgtgggtg

SEQ ID NO: 62907 - RNA, 23 nt, synthetic construct
  source 1..23: mol_type = other RNA
gtctccggagtggaggaggggtg

SEQ ID NO: 62908 - RNA, 23 nt, synthetic construct
  source 1..23: mol_type = other RNA
tcggcactgggggtgtgtgggtg

SEQ ID NO: 62909 - RNA, 23 nt, synthetic construct
  source 1..23: mol_type = other RNA
gaggtgcccctggtgtggcccgg

SEQ ID NO: 62910 - RNA, 23 nt, synthetic construct
  source 1..23: mol_type = other RNA
tcggcactgggggtgtgtgggtg

SEQ ID NO: 62911 - RNA, 23 nt, synthetic construct
  source 1..23: mol_type = other RNA
ggcccaactcccccagggggaca

SEQ ID NO: 62912 - RNA, 23 nt, synthetic construct
  source 1..23: mol_type = other RNA
gtctccggagtggaggaggggtg

SEQ ID NO: 62913 - RNA, 23 nt, synthetic construct
  source 1..23: mol_type = other RNA
ctccttcccatgcaccatggtga

SEQ ID NO: 62914 - RNA, 23 nt, synthetic construct
  source 1..23: mol_type = other RNA
gggttctcggcccggggcctggt

SEQ ID NO: 62915 - RNA, 23 nt, synthetic construct
  source 1..23: mol_type = other RNA
ggcgggcacacaggcaggctctg

SEQ ID NO: 62916 - RNA, 23 nt, synthetic construct
  source 1..23: mol_type = other RNA
gcactgcccggccactctcttgt

SEQ ID NO: 62917 - RNA, 23 nt, synthetic construct
  source 1..23: mol_type = other RNA
gccgtgctggtcagcactggggt

SEQ ID NO: 62918 - RNA, 23 nt, synthetic construct
  source 1..23: mol_type = other RNA
tgggtggtccccgggatggagga

SEQ ID NO: 62919 - RNA, 23 nt, synthetic construct
  source 1..23: mol_type = other RNA
tgggtggtccccgggatggagga

SEQ ID NO: 62920 - RNA, 23 nt, synthetic construct
  source 1..23: mol_type = other RNA
tgggtggtccccgggatggagga

SEQ ID NO: 62921 - RNA, 23 nt, synthetic construct
  source 1..23: mol_type = other RNA
tgggtggtccccgggatggagga

SEQ ID NO: 62922 - RNA, 23 nt, synthetic construct
  source 1..23: mol_type = other RNA
gtcccagtgacatcagggagggg

SEQ ID NO: 62923 - RNA, 23 nt, synthetic construct
  source 1..23: mol_type = other RNA
cacccggccctctcgccaccgcc

SEQ ID NO: 62924 - RNA, 23 nt, synthetic construct
  source 1..23: mol_type = other RNA
ccaccccgctgagggccgtgaag

SEQ ID NO: 62925 - RNA, 23 nt, synthetic construct
  source 1..23: mol_type = other RNA
aaccagtggccacagttgtggtg

SEQ ID NO: 62926 - RNA, 23 nt, synthetic construct
  source 1..23: mol_type = other RNA
aaccagtggccacagttgtggtg

SEQ ID NO: 62927 - RNA, 23 nt, synthetic construct
  source 1..23: mol_type = other RNA
aaccagtggccacagttgtggtg

SEQ ID NO: 62928 - RNA, 23 nt, synthetic construct
  source 1..23: mol_type = other RNA
aaccagtggccacagttgtggtg

SEQ ID NO: 62929 - RNA, 23 nt, synthetic construct
  source 1..23: mol_type = other RNA
aaccagtggccacagttgtggtg

SEQ ID NO: 62930 - RNA, 23 nt, synthetic construct
  source 1..23: mol_type = other RNA
ctgcgaggtgagggccgccgtcg

SEQ ID NO: 62931 - RNA, 23 nt, synthetic construct
  source 1..23: mol_type = other RNA
cagtgatgggggagtaccactgg

SEQ ID NO: 62932 - RNA, 23 nt, synthetic construct
  source 1..23: mol_type = other RNA
cagtgatgggggagtaccactgg

SEQ ID NO: 62933 - RNA, 23 nt, synthetic construct
  source 1..23: mol_type = other RNA
tgggtgtggtggtctgttctggg

SEQ ID NO: 62934 - RNA, 23 nt, synthetic construct
  source 1..23: mol_type = other RNA
ggaggtgtgggtggtctccggag

SEQ ID NO: 62935 - RNA, 23 nt, synthetic construct
  source 1..23: mol_type = other RNA
cagtgatgggggagtaccactgg

SEQ ID NO: 62936 - RNA, 23 nt, synthetic construct
  source 1..23: mol_type = other RNA
cagtgatgggggagtaccactgg

SEQ ID NO: 62937 - RNA, 23 nt, synthetic construct
  source 1..23: mol_type = other RNA
gaggaggggatgggtgtaacgct

SEQ ID NO: 62938 - RNA, 23 nt, synthetic construct
  source 1..23: mol_type = other RNA
cgggtgtggtggtctgttctggg

SEQ ID NO: 62939 - RNA, 23 nt, synthetic construct
  source 1..23: mol_type = other RNA
ggaggtgtgggtggtctccggag

SEQ ID NO: 62940 - RNA, 23 nt, synthetic construct
  source 1..23: mol_type = other RNA
cagtgatgggggagtaccactgg

SEQ ID NO: 62941 - RNA, 23 nt, synthetic construct
  source 1..23: mol_type = other RNA
tctgctgtcggggaccagccacg

SEQ ID NO: 62942 - RNA, 23 nt, synthetic construct
  source 1..23: mol_type = other RNA
gcagtggggggtgtgccagtcgg

SEQ ID NO: 62943 - RNA, 23 nt, synthetic construct
  source 1..23: mol_type = other RNA
cgcggacacacacggtggagacc

SEQ ID NO: 62944 - RNA, 23 nt, synthetic construct
  source 1..23: mol_type = other RNA
ctggctgtgcctgtcgggcgagc

SEQ ID NO: 62945 - RNA, 23 nt, synthetic construct
  source 1..23: mol_type = other RNA
gtcacggtggctgtagtgctcgg

SEQ ID NO: 62946 - RNA, 23 nt, synthetic construct
  source 1..23: mol_type = other RNA
gtcacggtggctgtagtgctggg

SEQ ID NO: 62947 - RNA, 23 nt, synthetic construct
  source 1..23: mol_type = other RNA
gtcacggtggctgtagtgctcgg

SEQ ID NO: 62948 - RNA, 23 nt, synthetic construct
  source 1..23: mol_type = other RNA
gtcacggtggctgtagtgctcgg

SEQ ID NO: 62949 - RNA, 23 nt, synthetic construct
  source 1..23: mol_type = other RNA
ctgctgtcggggaccagccacgt

SEQ ID NO: 62950 - RNA, 23 nt, synthetic construct
  source 1..23: mol_type = other RNA
cactcccacctccggttcctgca

SEQ ID NO: 62951 - RNA, 23 nt, synthetic construct
  source 1..23: mol_type = other RNA
tgctgatccacactggaagcgtg

SEQ ID NO: 62952 - RNA, 23 nt, synthetic construct
  source 1..23: mol_type = other RNA
gggtggtccccacggtggacgag

SEQ ID NO: 62953 - RNA, 23 nt, synthetic construct
  source 1..23: mol_type = other RNA
cactgtggcggtgtgggtggtcc

SEQ ID NO: 62954 - RNA, 23 nt, synthetic construct
  source 1..23: mol_type = other RNA
ctgctgctagggtgagggctgga

SEQ ID NO: 62955 - RNA, 23 nt, synthetic construct
  source 1..23: mol_type = other RNA
ctgctgctagggtgagggctgga

SEQ ID NO: 62956 - RNA, 23 nt, synthetic construct
  source 1..23: mol_type = other RNA
cactgtggcggtgtgggtggtcc

SEQ ID NO: 62957 - RNA, 23 nt, synthetic construct
  source 1..23: mol_type = other RNA
gtactggtggttgctgctggggt

SEQ ID NO: 62958 - RNA, 23 nt, synthetic construct
  source 1..23: mol_type = other RNA
ctgctgctagggtgagggctgga

SEQ ID NO: 62959 - RNA, 23 nt, synthetic construct
  source 1..23: mol_type = other RNA
ctgctgctagggtgagggctgga

SEQ ID NO: 62960 - RNA, 23 nt, synthetic construct
  source 1..23: mol_type = other RNA
ccgccccacatgctgcagatgca

SEQ ID NO: 62961 - RNA, 23 nt, synthetic construct
  source 1..23: mol_type = other RNA
gtggatgctgagggcgcgggggc

SEQ ID NO: 62962 - RNA, 23 nt, synthetic construct
  source 1..23: mol_type = other RNA
tttctgctgtcggggaccagcca

SEQ ID NO: 62963 - RNA, 23 nt, synthetic construct
  source 1..23: mol_type = other RNA
gggcacctccagttccgcggctg

SEQ ID NO: 62964 - RNA, 23 nt, synthetic construct
  source 1..23: mol_type = other RNA
ggccccgccctgcacagagcagg

SEQ ID NO: 62965 - RNA, 23 nt, synthetic construct
  source 1..23: mol_type = other RNA
atgagtggcaccagctgcaccag

SEQ ID NO: 62966 - RNA, 23 nt, synthetic construct
  source 1..23: mol_type = other RNA
cattggcacaggcagcctgggcc

SEQ ID NO: 62967 - RNA, 23 nt, synthetic construct
  source 1..23: mol_type = other RNA
caggggtgcccgccgagctgttg

SEQ ID NO: 62968 - RNA, 23 nt, synthetic construct
  source 1..23: mol_type = other RNA
tgtgcagttacagctctggcagt

SEQ ID NO: 62969 - RNA, 23 nt, synthetic construct
  source 1..23: mol_type = other RNA
agggtccagttggggaagctctc

SEQ ID NO: 62970 - RNA, 23 nt, synthetic construct
  source 1..23: mol_type = other RNA
gtggatgtggccacccctgggac

SEQ ID NO: 62971 - RNA, 23 nt, synthetic construct
  source 1..23: mol_type = other RNA
gggccagcgtgggtggctgtgag

SEQ ID NO: 62972 - RNA, 23 nt, synthetic construct
  source 1..23: mol_type = other RNA
agctgttctcagggtggaggtcg

SEQ ID NO: 62973 - RNA, 23 nt, synthetic construct
  source 1..23: mol_type = other RNA
agggagtggctttggagctggtg

SEQ ID NO: 62974 - RNA, 23 nt, synthetic construct
  source 1..23: mol_type = other RNA
acatggtggccgtgggtgtggtg

SEQ ID NO: 62975 - RNA, 23 nt, synthetic construct
  source 1..23: mol_type = other RNA
cactgtgttgctggtggctgcag

SEQ ID NO: 62976 - RNA, 23 nt, synthetic construct
  source 1..23: mol_type = other RNA
tctgctgctagggtgagggctgg

SEQ ID NO: 62977 - RNA, 23 nt, synthetic construct
  source 1..23: mol_type = other RNA
gggtcttgctgggtgtggccgtg

SEQ ID NO: 62978 - RNA, 23 nt, synthetic construct
  source 1..23: mol_type = other RNA
tccccgccagagggccccggcat

SEQ ID NO: 62979 - RNA, 23 nt, synthetic construct
  source 1..23: mol_type = other RNA
gcagaccaggccaaagtccaggc

SEQ ID NO: 62980 - RNA, 23 nt, synthetic construct
  source 1..23: mol_type = other RNA
agggagtggctttggagctggtg

SEQ ID NO: 62981 - RNA, 23 nt, synthetic construct
  source 1..23: mol_type = other RNA
acatggtggccgtgggtgtggtg

SEQ ID NO: 62982 - RNA, 23 nt, synthetic construct
  source 1..23: mol_type = other RNA
cctgctgctagggtgagggctgg

SEQ ID NO: 62983 - RNA, 23 nt, synthetic construct
  source 1..23: mol_type = other RNA
gggtcttgctgggtgtggccgtg

SEQ ID NO: 62984 - RNA, 23 nt, synthetic construct
  source 1..23: mol_type = other RNA
tccccgccagagggccccggcat

SEQ ID NO: 62985 - RNA, 23 nt, synthetic construct
  source 1..23: mol_type = other RNA
gcagaccaggccaaagtccaggc

SEQ ID NO: 62986 - RNA, 23 nt, synthetic construct
  source 1..23: mol_type = other RNA
gtctgctctgtgaggatccaggt

SEQ ID NO: 62987 - RNA, 23 nt, synthetic construct
  source 1..23: mol_type = other RNA
tgtcgtggtggccttcgtggtca

SEQ ID NO: 62988 - RNA, 23 nt, synthetic construct
  source 1..23: mol_type = other RNA
acatggtggccgtgggtgtggtg

SEQ ID NO: 62989 - RNA, 23 nt, synthetic construct
  source 1..23: mol_type = other RNA
cctgctgctagggtgagggctgg

SEQ ID NO: 62990 - RNA, 23 nt, synthetic construct
  source 1..23: mol_type = other RNA
gggtcttgctgggtgtggctgtg

SEQ ID NO: 62991 - RNA, 23 nt, synthetic construct
  source 1..23: mol_type = other RNA
cccgtggtcaccaccgtggttat

SEQ ID NO: 62992 - RNA, 23 nt, synthetic construct
  source 1..23: mol_type = other RNA
tccccgccagagggccccggcat

SEQ ID NO: 62993 - RNA, 23 nt, synthetic construct
  source 1..23: mol_type = other RNA
gcagaccaggccaaagtccaggc

SEQ ID NO: 62994 - RNA, 23 nt, synthetic construct
  source 1..23: mol_type = other RNA
agggagtggctttggagctggtg

SEQ ID NO: 62995 - RNA, 23 nt, synthetic construct
  source 1..23: mol_type = other RNA
acatggtggccgtgggtgtggtg

SEQ ID NO: 62996 - RNA, 23 nt, synthetic construct
  source 1..23: mol_type = other RNA
ccctggttgtggtggccgtggtg

SEQ ID NO: 62997 - RNA, 23 nt, synthetic construct
  source 1..23: mol_type = other RNA
cctgctgctagggtgagggctgg

SEQ ID NO: 62998 - RNA, 23 nt, synthetic construct
  source 1..23: mol_type = other RNA
gggtcttgctgggtgtggccgtg

SEQ ID NO: 62999 - RNA, 23 nt, synthetic construct
  source 1..23: mol_type = other RNA
cccgtggtcaccaccgtggttat

SEQ ID NO: 63000 - RNA, 23 nt, synthetic construct
  source 1..23: mol_type = other RNA
tccccgccagagggccccggcat

SEQ ID NO: 63001 - RNA, 23 nt, synthetic construct
  source 1..23: mol_type = other RNA
gcagaccaggccaaagtccaggc

SEQ ID NO: 63002 - RNA, 23 nt, synthetic construct
  source 1..23: mol_type = other RNA
tgtcgtggtggccttcgtggtca

SEQ ID NO: 63003 - RNA, 23 nt, synthetic construct
  source 1..23: mol_type = other RNA
agggagtggctttggagctggtg

SEQ ID NO: 63004 - RNA, 23 nt, synthetic construct
  source 1..23: mol_type = other RNA
acatggtggccgtgggtgtggtg

SEQ ID NO: 63005 - RNA, 23 nt, synthetic construct
  source 1..23: mol_type = other RNA
ccgtgctggtcagcactggggtg

SEQ ID NO: 63006 - RNA, 23 nt, synthetic construct
  source 1..23: mol_type = other RNA
tgcgggtgtggtggccgtgctgg

SEQ ID NO: 63007 - RNA, 23 nt, synthetic construct
  source 1..23: mol_type = other RNA
ggaggtgtgggtggtctctggag

SEQ ID NO: 63008 - RNA, 23 nt, synthetic construct
  source 1..23: mol_type = other RNA
gagctgttcccagagtggaggag

SEQ ID NO: 63009 - RNA, 23 nt, synthetic construct
  source 1..23: mol_type = other RNA
gtggctgtgggcatagtggccat

SEQ ID NO: 63010 - RNA, 23 nt, synthetic construct
  source 1..23: mol_type = other RNA
cgagctgggaaccgtggaggcag

SEQ ID NO: 63011 - RNA, 23 nt, synthetic construct
  source 1..23: mol_type = other RNA
acgctgaaggttggcaggctgct

SEQ ID NO: 63012 - RNA, 23 nt, synthetic construct
  source 1..23: mol_type = other RNA
gtgacgctcacgcccagggcagg

SEQ ID NO: 63013 - RNA, 23 nt, synthetic construct
  source 1..23: mol_type = other RNA
ggcagtggggggtgtgccagtcg

SEQ ID NO: 63014 - RNA, 23 nt, synthetic construct
  source 1..23: mol_type = other RNA
cagagcggctgtggtgggcatgg

SEQ ID NO: 63015 - RNA, 23 nt, synthetic construct
  source 1..23: mol_type = other RNA
cacgcagatgcccatgtgtgcgt

SEQ ID NO: 63016 - RNA, 23 nt, synthetic construct
  source 1..23: mol_type = other RNA
ccagggtaggactcctgagtggc

SEQ ID NO: 63017 - RNA, 23 nt, synthetic construct
  source 1..23: mol_type = other RNA
tgcttagtttgttccagggcgtc

SEQ ID NO: 63018 - RNA, 23 nt, synthetic construct
  source 1..23: mol_type = other RNA
cctgtctgccccagcggccggac

SEQ ID NO: 63019 - RNA, 23 nt, synthetic construct
  source 1..23: mol_type = other RNA
agcctgtctgccccagcggccgg

SEQ ID NO: 63020 - RNA, 23 nt, synthetic construct
  source 1..23: mol_type = other RNA
agggggctttgggatgctgaccc

SEQ ID NO: 63021 - RNA, 23 nt, synthetic construct
  source 1..23: mol_type = other RNA
gaggtggccgaagtccaggctgt

SEQ ID NO: 63022 - RNA, 23 nt, synthetic construct
  source 1..23: mol_type = other RNA
gaggtggccgaagtccaggctgt

SEQ ID NO: 63023 - RNA, 23 nt, synthetic construct
  source 1..23: mol_type = other RNA
gaggtggccgaagtccaggctgt

SEQ ID NO: 63024 - RNA, 23 nt, synthetic construct
  source 1..23: mol_type = other RNA
gaggtggccgaagtccaggctgt

SEQ ID NO: 63025 - RNA, 23 nt, synthetic construct
  source 1..23: mol_type = other RNA
ctggtcctcagggcagaagcagc

SEQ ID NO: 63026 - RNA, 23 nt, synthetic construct
  source 1..23: mol_type = other RNA
ggtaggactcctgagtggcgccc

SEQ ID NO: 63027 - RNA, 23 nt, synthetic construct
  source 1..23: mol_type = other RNA
cgacctggcccaactcccccagg

SEQ ID NO: 63028 - RNA, 23 nt, synthetic construct
  source 1..23: mol_type = other RNA
acggcgggggctgaccctgggcg

SEQ ID NO: 63029 - RNA, 23 nt, synthetic construct
  source 1..23: mol_type = other RNA
ggcccctcacccttctggggccg

SEQ ID NO: 63030 - RNA, 23 nt, synthetic construct
  source 1..23: mol_type = other RNA
ctcgttgtgcacacaggggcagt

SEQ ID NO: 63031 - RNA, 23 nt, synthetic construct
  source 1..23: mol_type = other RNA
acgcccagggcaggaatgtccac

SEQ ID NO: 63032 - RNA, 23 nt, synthetic construct
  source 1..23: mol_type = other RNA
gccgtggatccagtggactcagt

SEQ ID NO: 63033 - RNA, 23 nt, synthetic construct
  source 1..23: mol_type = other RNA
gccgtggatccagtggactcagt

SEQ ID NO: 63034 - RNA, 23 nt, synthetic construct
  source 1..23: mol_type = other RNA
tcaaaggtggaatagtgggagcc

SEQ ID NO: 63035 - RNA, 23 nt, synthetic construct
  source 1..23: mol_type = other RNA
tctccgctgtggggacccttgca

SEQ ID NO: 63036 - RNA, 23 nt, synthetic construct
  source 1..23: mol_type = other RNA
ttgctgtggtctgggttggggta

SEQ ID NO: 63037 - RNA, 23 nt, synthetic construct
  source 1..23: mol_type = other RNA
gtgaggggcgccatgtgcccaag

SEQ ID NO: 63038 - RNA, 23 nt, synthetic construct
  source 1..23: mol_type = other RNA
cggcgggggctgaccctgggcgt

SEQ ID NO: 63039 - RNA, 23 nt, synthetic construct
  source 1..23: mol_type = other RNA
gtgcaagggcaccgtctcctcgt

SEQ ID NO: 63040 - RNA, 23 nt, synthetic construct
  source 1..23: mol_type = other RNA
tgatcagacaatgcacatcctgg

SEQ ID NO: 63041 - RNA, 23 nt, synthetic construct
  source 1..23: mol_type = other RNA
aaagtccccgccagagggccccg

SEQ ID NO: 63042 - RNA, 23 nt, synthetic construct
  source 1..23: mol_type = other RNA
aaagtccccgccagagggccccg

SEQ ID NO: 63043 - RNA, 23 nt, synthetic construct
  source 1..23: mol_type = other RNA
aaagtccccgccagagggccccg

SEQ ID NO: 63044 - RNA, 23 nt, synthetic construct
  source 1..23: mol_type = other RNA
aaagtccccgccagagggccccg

SEQ ID NO: 63045 - RNA, 23 nt, synthetic construct
  source 1..23: mol_type = other RNA
cggatgctcggggtcacccatag

SEQ ID NO: 63046 - RNA, 23 nt, synthetic construct
  source 1..23: mol_type = other RNA
gacagaacgtagctgcagtcacc

SEQ ID NO: 63047 - RNA, 23 nt, synthetic construct
  source 1..23: mol_type = other RNA
gctccccgtcgtccctggaaggg

SEQ ID NO: 63048 - RNA, 23 nt, synthetic construct
  source 1..23: mol_type = other RNA
gcacgcgctcggggcacccatcc

SEQ ID NO: 63049 - RNA, 23 nt, synthetic construct
  source 1..23: mol_type = other RNA
ttcctgatgatggtgccgttgct

SEQ ID NO: 63050 - RNA, 23 nt, synthetic construct
  source 1..23: mol_type = other RNA
aggctgctggcataagtgccctc

SEQ ID NO: 63051 - RNA, 23 nt, synthetic construct
  source 1..23: mol_type = other RNA
aggtggccgaagtccaggctgtg

SEQ ID NO: 63052 - RNA, 23 nt, synthetic construct
  source 1..23: mol_type = other RNA
cgaggtgcgggtcttgctgggtg

SEQ ID NO: 63053 - RNA, 23 nt, synthetic construct
  source 1..23: mol_type = other RNA
aggtggccgaagtccaggctgtg

SEQ ID NO: 63054 - RNA, 23 nt, synthetic construct
  source 1..23: mol_type = other RNA
tggggtgtgggaagtccccgtgg

SEQ ID NO: 63055 - RNA, 23 nt, synthetic construct
  source 1..23: mol_type = other RNA
ggtgactcggtggtcctgctgct

SEQ ID NO: 63056 - RNA, 23 nt, synthetic construct
  source 1..23: mol_type = other RNA
cgaggtgcgggtcttgctgggtg

SEQ ID NO: 63057 - RNA, 23 nt, synthetic construct
  source 1..23: mol_type = other RNA
aggtggccgaagtccaggctgtg

SEQ ID NO: 63058 - RNA, 23 nt, synthetic construct
  source 1..23: mol_type = other RNA
ggtgactcggtggtcctgctgct

SEQ ID NO: 63059 - RNA, 23 nt, synthetic construct
  source 1..23: mol_type = other RNA
gtgcccctggtgtggcccggggt

SEQ ID NO: 63060 - RNA, 23 nt, synthetic construct
  source 1..23: mol_type = other RNA
ggtgcccctggtgtggcccgggg

SEQ ID NO: 63061 - RNA, 23 nt, synthetic construct
  source 1..23: mol_type = other RNA
cgaggtgcgggtcttgctgggtg

SEQ ID NO: 63062 - RNA, 23 nt, synthetic construct
  source 1..23: mol_type = other RNA
aggtggccgaagtccaggctgtg

SEQ ID NO: 63063 - RNA, 23 nt, synthetic construct
  source 1..23: mol_type = other RNA
tggggtgtgggaagtccccgtgg

SEQ ID NO: 63064 - RNA, 23 nt, synthetic construct
  source 1..23: mol_type = other RNA
ggtgactcggtggtcctgctgct

SEQ ID NO: 63065 - RNA, 23 nt, synthetic construct
  source 1..23: mol_type = other RNA
cgaggtgcgggtcttgctgggtg

SEQ ID NO: 63066 - RNA, 23 nt, synthetic construct
  source 1..23: mol_type = other RNA
cctggcccaactcccccaggggg

SEQ ID NO: 63067 - RNA, 23 nt, synthetic construct
  source 1..23: mol_type = other RNA
gtttcattcagctggactggctg

SEQ ID NO: 63068 - RNA, 23 nt, synthetic construct
  source 1..23: mol_type = other RNA
agcaggagcacggagcgcggggt

SEQ ID NO: 63069 - RNA, 23 nt, synthetic construct
  source 1..23: mol_type = other RNA
gcaggcggccaggtacgcagtgc

SEQ ID NO: 63070 - RNA, 23 nt, synthetic construct
  source 1..23: mol_type = other RNA
tgtgggtggtccccgggacggag

SEQ ID NO: 63071 - RNA, 23 nt, synthetic construct
  source 1..23: mol_type = other RNA
taggactcctgagtggcgccctc

SEQ ID NO: 63072 - RNA, 23 nt, synthetic construct
  source 1..23: mol_type = other RNA
atttgggatccagctccagcagg

SEQ ID NO: 63073 - RNA, 23 nt, synthetic construct
  source 1..23: mol_type = other RNA
cataggtggagatgtgggccccg

SEQ ID NO: 63074 - RNA, 23 nt, synthetic construct
  source 1..23: mol_type = other RNA
cgcacttccgcagctcagccagc

SEQ ID NO: 63075 - RNA, 23 nt, synthetic construct
  source 1..23: mol_type = other RNA
gttctccgctgtggggacccttg

SEQ ID NO: 63076 - RNA, 23 nt, synthetic construct
  source 1..23: mol_type = other RNA
gggtcaccgtggagcctctggtt

SEQ ID NO: 63077 - RNA, 23 nt, synthetic construct
  source 1..23: mol_type = other RNA
gtgtggtggccatggtgttcggc

SEQ ID NO: 63078 - RNA, 23 nt, synthetic construct
  source 1..23: mol_type = other RNA
ctgctgtggtctgctctgtgagg

SEQ ID NO: 63079 - RNA, 23 nt, synthetic construct
  source 1..23: mol_type = other RNA
gggtggacatggaactggtggcc

SEQ ID NO: 63080 - RNA, 23 nt, synthetic construct
  source 1..23: mol_type = other RNA
gggtcaccgtggagcctctggtt

SEQ ID NO: 63081 - RNA, 23 nt, synthetic construct
  source 1..23: mol_type = other RNA
tggggctcacagcccgtggtcac

SEQ ID NO: 63082 - RNA, 23 nt, synthetic construct
  source 1..23: mol_type = other RNA
ggggtggtcgtccctggggaagg

SEQ ID NO: 63083 - RNA, 23 nt, synthetic construct
  source 1..23: mol_type = other RNA
tggggctcacagcccgtggtcac

SEQ ID NO: 63084 - RNA, 23 nt, synthetic construct
  source 1..23: mol_type = other RNA
acgtggaactggtggcccttgtc

SEQ ID NO: 63085 - RNA, 23 nt, synthetic construct
  source 1..23: mol_type = other RNA
ctagacaccggggctgcggggct

SEQ ID NO: 63086 - RNA, 23 nt, synthetic construct
  source 1..23: mol_type = other RNA
ctcgcagccctggtgccacagga

SEQ ID NO: 63087 - RNA, 23 nt, synthetic construct
  source 1..23: mol_type = other RNA
cccagcggccggacgtggccagc

SEQ ID NO: 63088 - RNA, 23 nt, synthetic construct
  source 1..23: mol_type = other RNA
gaccagcctgtctgccccagcgg

SEQ ID NO: 63089 - RNA, 23 nt, synthetic construct
  source 1..23: mol_type = other RNA
ggatgctgacccctctctgacct

SEQ ID NO: 63090 - RNA, 23 nt, synthetic construct
  source 1..23: mol_type = other RNA
gcgaggtgagggccgccgtcgac

SEQ ID NO: 63091 - RNA, 23 nt, synthetic construct
  source 1..23: mol_type = other RNA
tggcacgtcccctgcagtggtcg

SEQ ID NO: 63092 - RNA, 23 nt, synthetic construct
  source 1..23: mol_type = other RNA
aggtgtggacagtctctggagtg

SEQ ID NO: 63093 - RNA, 23 nt, synthetic construct
  source 1..23: mol_type = other RNA
aggtgtggacagtctctggagta

SEQ ID NO: 63094 - RNA, 23 nt, synthetic construct
  source 1..23: mol_type = other RNA
aggtgtggacagtctctggagtg

SEQ ID NO: 63095 - RNA, 23 nt, synthetic construct
  source 1..23: mol_type = other RNA
ccggttcctgcaggtgcaggtgt

SEQ ID NO: 63096 - RNA, 23 nt, synthetic construct
  source 1..23: mol_type = other RNA
gtcacccatagggtggtcttttc

SEQ ID NO: 63097 - RNA, 23 nt, synthetic construct
  source 1..23: mol_type = other RNA
tatgtccttaggctgctggcata

SEQ ID NO: 63098 - RNA, 23 nt, synthetic construct
  source 1..23: mol_type = other RNA
ccccggttgtggtggccgtggtg

SEQ ID NO: 63099 - RNA, 23 nt, synthetic construct
  source 1..23: mol_type = other RNA
ccccggttgtggtggccgtggcg

SEQ ID NO: 63100 - RNA, 23 nt, synthetic construct
  source 1..23: mol_type = other RNA
acgctcacgcccagggcaggaat

SEQ ID NO: 63101 - RNA, 23 nt, synthetic construct
  source 1..23: mol_type = other RNA
gcacaaggttgtggcactcagca

SEQ ID NO: 63102 - RNA, 23 nt, synthetic construct
  source 1..23: mol_type = other RNA
gcctggagcccactaggcctcgg

SEQ ID NO: 63103 - RNA, 23 nt, synthetic construct
  source 1..23: mol_type = other RNA
caagtgggctggcaggcatccac

SEQ ID NO: 63104 - RNA, 23 nt, synthetic construct
  source 1..23: mol_type = other RNA
cccattgtaccagctggaccagc

SEQ ID NO: 63105 - RNA, 23 nt, synthetic construct
  source 1..23: mol_type = other RNA
cagccagcacagggcatacctgg

SEQ ID NO: 63106 - RNA, 23 nt, synthetic construct
  source 1..23: mol_type = other RNA
tgcacaccaggccgaagtggacg

SEQ ID NO: 63107 - RNA, 23 nt, synthetic construct
  source 1..23: mol_type = other RNA
acgctggtagctgtgggtgtggt

SEQ ID NO: 63108 - RNA, 23 nt, synthetic construct
  source 1..23: mol_type = other RNA
tcagcactgtggcggtgtgggtg

SEQ ID NO: 63109 - RNA, 23 nt, synthetic construct
  source 1..23: mol_type = other RNA
tggtcagtgatgggggagtacca

SEQ ID NO: 63110 - RNA, 23 nt, synthetic construct
  source 1..23: mol_type = other RNA
tcgtggccgtggtgctcacatgt

SEQ ID NO: 63111 - RNA, 23 nt, synthetic construct
  source 1..23: mol_type = other RNA
tggtcagtgatgggggagtacca

SEQ ID NO: 63112 - RNA, 23 nt, synthetic construct
  source 1..23: mol_type = other RNA
tgcttgtcagcactggaagggtg

SEQ ID NO: 63113 - RNA, 23 nt, synthetic construct
  source 1..23: mol_type = other RNA
acgctggtagctgtgggtgtggt

SEQ ID NO: 63114 - RNA, 23 nt, synthetic construct
  source 1..23: mol_type = other RNA
agccggtggccctggttgtggtg

SEQ ID NO: 63115 - RNA, 23 nt, synthetic construct
  source 1..23: mol_type = other RNA
tcagcactgtggcggtgtgggtg

SEQ ID NO: 63116 - RNA, 23 nt, synthetic construct
  source 1..23: mol_type = other RNA
tggtcagtgatgggggagtacca

SEQ ID NO: 63117 - RNA, 23 nt, synthetic construct
  source 1..23: mol_type = other RNA
tcgtggccgtggtgctcacatgt

SEQ ID NO: 63118 - RNA, 23 nt, synthetic construct
  source 1..23: mol_type = other RNA
agccggtggccctggttgtggtg

SEQ ID NO: 63119 - RNA, 23 nt, synthetic construct
  source 1..23: mol_type = other RNA
gggggtgactgtgaagcccgtgg

SEQ ID NO: 63120 - RNA, 23 nt, synthetic construct
  source 1..23: mol_type = other RNA
gtggccgggctggtcagcacttt

SEQ ID NO: 63121 - RNA, 23 nt, synthetic construct
  source 1..23: mol_type = other RNA
tgcttgtcagcactggaagggtg

SEQ ID NO: 63122 - RNA, 23 nt, synthetic construct
  source 1..23: mol_type = other RNA
tcgtggccgtggtgctcacatgt

SEQ ID NO: 63123 - RNA, 23 nt, synthetic construct
  source 1..23: mol_type = other RNA
tggtcagtgatgggggagtacca

SEQ ID NO: 63124 - RNA, 23 nt, synthetic construct
  source 1..23: mol_type = other RNA
tgcttgtcagcactggaagggtg

SEQ ID NO: 63125 - RNA, 23 nt, synthetic construct
  source 1..23: mol_type = other RNA
tggtagctgtggattttgtggct

SEQ ID NO: 63126 - RNA, 23 nt, synthetic construct
  source 1..23: mol_type = other RNA
gacagggtggccgtggatccagt

SEQ ID NO: 63127 - RNA, 23 nt, synthetic construct
  source 1..23: mol_type = other RNA
cggtgggcaccatcacggtggct

SEQ ID NO: 63128 - RNA, 23 nt, synthetic construct
  source 1..23: mol_type = other RNA
cagtggggggtgtgccagtcggg

SEQ ID NO: 63129 - RNA, 23 nt, synthetic construct
  source 1..23: mol_type = other RNA
gggcacctcaaggcggcccctgc

SEQ ID NO: 63130 - RNA, 23 nt, synthetic construct
  source 1..23: mol_type = other RNA
tccccgggcgcggcagagctctg

SEQ ID NO: 63131 - RNA, 23 nt, synthetic construct
  source 1..23: mol_type = other RNA
gttgcaggtggcaggctgtatgg

SEQ ID NO: 63132 - RNA, 23 nt, synthetic construct
  source 1..23: mol_type = other RNA
aggtctgcagcggaaggtgggac

SEQ ID NO: 63133 - RNA, 23 nt, synthetic construct
  source 1..23: mol_type = other RNA
acatctgggcaggatgcaggctg

SEQ ID NO: 63134 - RNA, 23 nt, synthetic construct
  source 1..23: mol_type = other RNA
ggggagccatgggcgcagggaca

SEQ ID NO: 63135 - RNA, 23 nt, synthetic construct
  source 1..23: mol_type = other RNA
gggggagccatgggcgcagggac

SEQ ID NO: 63136 - RNA, 23 nt, synthetic construct
  source 1..23: mol_type = other RNA
cgggaagctgcgccgcccggcac

SEQ ID NO: 63137 - RNA, 23 nt, synthetic construct
  source 1..23: mol_type = other RNA
ggagggagtggctttggagctgg

SEQ ID NO: 63138 - RNA, 23 nt, synthetic construct
  source 1..23: mol_type = other RNA
tggaaagggctggagtcgagtgc

SEQ ID NO: 63139 - RNA, 23 nt, synthetic construct
  source 1..23: mol_type = other RNA
ggagggagtggctttggagctgg

SEQ ID NO: 63140 - RNA, 23 nt, synthetic construct
  source 1..23: mol_type = other RNA
cactgcaggggtgcgggtggtcc

SEQ ID NO: 63141 - RNA, 23 nt, synthetic construct
  source 1..23: mol_type = other RNA
gttgctgacccaccgctccccgg

SEQ ID NO: 63142 - RNA, 23 nt, synthetic construct
  source 1..23: mol_type = other RNA
tccacgtgggtgtaggtgtgcag

SEQ ID NO: 63143 - RNA, 23 nt, synthetic construct
  source 1..23: mol_type = other RNA
gggatggaggcagaacgttctca

SEQ ID NO: 63144 - RNA, 23 nt, synthetic construct
  source 1..23: mol_type = other RNA
ttgccggccggcaagggcagcgg

SEQ ID NO: 63145 - RNA, 23 nt, synthetic construct
  source 1..23: mol_type = other RNA
aagggggtgactcggtggttctg

SEQ ID NO: 63146 - RNA, 23 nt, synthetic construct
  source 1..23: mol_type = other RNA
cagtctctggagtagaggagggt

SEQ ID NO: 63147 - RNA, 23 nt, synthetic construct
  source 1..23: mol_type = other RNA
tgggcaccatcacggtggctata

SEQ ID NO: 63148 - RNA, 23 nt, synthetic construct
  source 1..23: mol_type = other RNA
gtggtccccagcacagacacaag

SEQ ID NO: 63149 - RNA, 23 nt, synthetic construct
  source 1..23: mol_type = other RNA
gttgaagaggatctggtcctcag

SEQ ID NO: 63150 - RNA, 23 nt, synthetic construct
  source 1..23: mol_type = other RNA
cagcactgcccggccactctctt

SEQ ID NO: 63151 - RNA, 23 nt, synthetic construct
  source 1..23: mol_type = other RNA
gacttgacaggagtcctcctcac

SEQ ID NO: 63152 - RNA, 23 nt, synthetic construct
  source 1..23: mol_type = other RNA
tgtagtggaagtcaccccaggtg

SEQ ID NO: 63153 - RNA, 23 nt, synthetic construct
  source 1..23: mol_type = other RNA
gcctcactcaggccgcggcaagt

SEQ ID NO: 63154 - RNA, 23 nt, synthetic construct
  source 1..23: mol_type = other RNA
gcagtcctcctcggcaatgcagc

SEQ ID NO: 63155 - RNA, 23 nt, synthetic construct
  source 1..23: mol_type = other RNA
ctggtagctgtaggtcctgtcct

SEQ ID NO: 63156 - RNA, 23 nt, synthetic construct
  source 1..23: mol_type = other RNA
tcaagcaggcgccaagcccatcg

SEQ ID NO: 63157 - RNA, 23 nt, synthetic construct
  source 1..23: mol_type = other RNA
catacctggtaccctctctgcct

SEQ ID NO: 63158 - RNA, 23 nt, synthetic construct
  source 1..23: mol_type = other RNA
tctgcgaggtgagggccgccgtc

SEQ ID NO: 63159 - RNA, 23 nt, synthetic construct
  source 1..23: mol_type = other RNA
gccctccagcggccctgatctta

SEQ ID NO: 63160 - RNA, 23 nt, synthetic construct
  source 1..23: mol_type = other RNA
tgtccttaggctgctggcataag

SEQ ID NO: 63161 - RNA, 23 nt, synthetic construct
  source 1..23: mol_type = other RNA
tccagctctgtggtcggtggcgg

SEQ ID NO: 63162 - RNA, 23 nt, synthetic construct
  source 1..23: mol_type = other RNA
gaagggctgagcgtgttggaagg

SEQ ID NO: 63163 - RNA, 23 nt, synthetic construct
  source 1..23: mol_type = other RNA
ggtggctgtgaagcccgtggttg

SEQ ID NO: 63164 - RNA, 23 nt, synthetic construct
  source 1..23: mol_type = other RNA
cgtggtggtcagtgatgggggag

SEQ ID NO: 63165 - RNA, 23 nt, synthetic construct
  source 1..23: mol_type = other RNA
ggtggtggtcagcactgggggga

SEQ ID NO: 63166 - RNA, 23 nt, synthetic construct
  source 1..23: mol_type = other RNA
tgtggtggccatggtgttcggca

SEQ ID NO: 63167 - RNA, 23 nt, synthetic construct
  source 1..23: mol_type = other RNA
agaccaggccaaagtccaggctg

SEQ ID NO: 63168 - RNA, 23 nt, synthetic construct
  source 1..23: mol_type = other RNA
ggtggctgtgaagcccgtggttg

SEQ ID NO: 63169 - RNA, 23 nt, synthetic construct
  source 1..23: mol_type = other RNA
cgtggtggtcagtgatgggggag

SEQ ID NO: 63170 - RNA, 23 nt, synthetic construct
  source 1..23: mol_type = other RNA
ggtggtggtcagcactgggggga

SEQ ID NO: 63171 - RNA, 23 nt, synthetic construct
  source 1..23: mol_type = other RNA
agaccaggccaaagtccaggctg

SEQ ID NO: 63172 - RNA, 23 nt, synthetic construct
  source 1..23: mol_type = other RNA
ggtggctgtgaagcccgtggttg

SEQ ID NO: 63173 - RNA, 23 nt, synthetic construct
  source 1..23: mol_type = other RNA
cgtggtggtcagtgatgggggag

SEQ ID NO: 63174 - RNA, 23 nt, synthetic construct
  source 1..23: mol_type = other RNA
ggtggtggtcagcactgggggga

SEQ ID NO: 63175 - RNA, 23 nt, synthetic construct
  source 1..23: mol_type = other RNA
agaccaggccaaagtccaggctg

SEQ ID NO: 63176 - RNA, 23 nt, synthetic construct
  source 1..23: mol_type = other RNA
ggtggtggtcagcactgggggga

SEQ ID NO: 63177 - RNA, 23 nt, synthetic construct
  source 1..23: mol_type = other RNA
ctcccccagggggacaccaggct

SEQ ID NO: 63178 - RNA, 23 nt, synthetic construct
  source 1..23: mol_type = other RNA
caactcccccagggggacaccag

SEQ ID NO: 63179 - RNA, 23 nt, synthetic construct
  source 1..23: mol_type = other RNA
agaccaggccaaagtccaggctg

SEQ ID NO: 63180 - RNA, 23 nt, synthetic construct
  source 1..23: mol_type = other RNA
ggtggctgtgaagcccgtggttg

SEQ ID NO: 63181 - RNA, 23 nt, synthetic construct
  source 1..23: mol_type = other RNA
cgtggtggtcagtgatgggggag

SEQ ID NO: 63182 - RNA, 23 nt, synthetic construct
  source 1..23: mol_type = other RNA
gatgggtgttgtccctggagttg

SEQ ID NO: 63183 - RNA, 23 nt, synthetic construct
  source 1..23: mol_type = other RNA
cctgccggagagggatggcattg

SEQ ID NO: 63184 - RNA, 23 nt, synthetic construct
  source 1..23: mol_type = other RNA
ttcacctgccggagagggatggc

SEQ ID NO: 63185 - RNA, 23 nt, synthetic construct
  source 1..23: mol_type = other RNA
tgacatcagggaggggcaaggcc

SEQ ID NO: 63186 - RNA, 23 nt, synthetic construct
  source 1..23: mol_type = other RNA
gcacccatcctgggggctggcac

SEQ ID NO: 63187 - RNA, 23 nt, synthetic construct
  source 1..23: mol_type = other RNA
ccacgagcatggccgccagagcc

SEQ ID NO: 63188 - RNA, 23 nt, synthetic construct
  source 1..23: mol_type = other RNA
gtagtggaagtcaccccaggtgc

SEQ ID NO: 63189 - RNA, 23 nt, synthetic construct
  source 1..23: mol_type = other RNA
ttgtagtggaagtcaccccaggt

SEQ ID NO: 63190 - RNA, 23 nt, synthetic construct
  source 1..23: mol_type = other RNA
cgtaggcggcgcggcagtgctca

SEQ ID NO: 63191 - RNA, 23 nt, synthetic construct
  source 1..23: mol_type = other RNA
tcccgctgcccattgatgaggac

SEQ ID NO: 63192 - RNA, 23 nt, synthetic construct
  source 1..23: mol_type = other RNA
tgtagtccccgctctgctccacc

SEQ ID NO: 63193 - RNA, 23 nt, synthetic construct
  source 1..23: mol_type = other RNA
cacacgggcaggtggggcagcgg

SEQ ID NO: 63194 - RNA, 23 nt, synthetic construct
  source 1..23: mol_type = other RNA
ctgcatgttgagggggcaggtcc

SEQ ID NO: 63195 - RNA, 23 nt, synthetic construct
  source 1..23: mol_type = other RNA
gctgcatgttgagggggcaggtc

SEQ ID NO: 63196 - RNA, 23 nt, synthetic construct
  source 1..23: mol_type = other RNA
agggtgagccacactcctggtgc

SEQ ID NO: 63197 - RNA, 23 nt, synthetic construct
  source 1..23: mol_type = other RNA
cagggtgagccacactcctggtg

SEQ ID NO: 63198 - RNA, 23 nt, synthetic construct
  source 1..23: mol_type = other RNA
ataggtggagatgtgggccccgc

SEQ ID NO: 63199 - RNA, 23 nt, synthetic construct
  source 1..23: mol_type = other RNA
agccagcacggtgaagctgctgt

SEQ ID NO: 63200 - RNA, 23 nt, synthetic construct
  source 1..23: mol_type = other RNA
caatgcagcccccactcccatcc

SEQ ID NO: 63201 - RNA, 23 nt, synthetic construct
  source 1..23: mol_type = other RNA
ctccggttcctgcaggtgcaggt

SEQ ID NO: 63202 - RNA, 23 nt, synthetic construct
  source 1..23: mol_type = other RNA
ggtccccacccggccctctcgcc

SEQ ID NO: 63203 - RNA, 23 nt, synthetic construct
  source 1..23: mol_type = other RNA
caaggggcaggtgtccggagtcc

SEQ ID NO: 63204 - RNA, 23 nt, synthetic construct
  source 1..23: mol_type = other RNA
tagaagtcacagaacaaggggca

SEQ ID NO: 63205 - RNA, 23 nt, synthetic construct
  source 1..23: mol_type = other RNA
ttctccgctgtggggacccttgc

SEQ ID NO: 63206 - RNA, 23 nt, synthetic construct
  source 1..23: mol_type = other RNA
ggacccaggcggtggtgaaggtg

SEQ ID NO: 63207 - RNA, 23 nt, synthetic construct
  source 1..23: mol_type = other RNA
gcccattgtaccagctggaccag

SEQ ID NO: 63208 - RNA, 23 nt, synthetic construct
  source 1..23: mol_type = other RNA
gggaagctgcgccgcccggcact

SEQ ID NO: 63209 - RNA, 23 nt, synthetic construct
  source 1..23: mol_type = other RNA
gttgctgtggtctgggttggggt

SEQ ID NO: 63210 - RNA, 23 nt, synthetic construct
  source 1..23: mol_type = other RNA
gacgccctcctgctcccagttcc

SEQ ID NO: 63211 - RNA, 23 nt, synthetic construct
  source 1..23: mol_type = other RNA
tgaagacgccctcctgctcccag

SEQ ID NO: 63212 - RNA, 23 nt, synthetic construct
  source 1..23: mol_type = other RNA
ggggcctcccgtggtggctgtac

SEQ ID NO: 63213 - RNA, 23 nt, synthetic construct
  source 1..23: mol_type = other RNA
ggtggatgtggccacccctggga

SEQ ID NO: 63214 - RNA, 23 nt, synthetic construct
  source 1..23: mol_type = other RNA
gggtggatgtggccacccctggg

SEQ ID NO: 63215 - RNA, 23 nt, synthetic construct
  source 1..23: mol_type = other RNA
tgtcgggcgagctctggaggttg

SEQ ID NO: 63216 - RNA, 23 nt, synthetic construct
  source 1..23: mol_type = other RNA
ggctcattgtcgtctctgtcctg

SEQ ID NO: 63217 - RNA, 23 nt, synthetic construct
  source 1..23: mol_type = other RNA
ccgtggatccagtggacgcagtc

SEQ ID NO: 63218 - RNA, 23 nt, synthetic construct
  source 1..23: mol_type = other RNA
ttgcagtccctggactggaggag

SEQ ID NO: 63219 - RNA, 23 nt, synthetic construct
  source 1..23: mol_type = other RNA
tgtggacatggtggccgtgggtg

SEQ ID NO: 63220 - RNA, 23 nt, synthetic construct
  source 1..23: mol_type = other RNA
ggggtcaccgtggagcctctggt

SEQ ID NO: 63221 - RNA, 23 nt, synthetic construct
  source 1..23: mol_type = other RNA
tggtgcccaagatgcccgaggtg

SEQ ID NO: 63222 - RNA, 23 nt, synthetic construct
  source 1..23: mol_type = other RNA
gtcgtccctggagaagggggtga

SEQ ID NO: 63223 - RNA, 23 nt, synthetic construct
  source 1..23: mol_type = other RNA
ggaggtggccgtggtgtggcccg

SEQ ID NO: 63224 - RNA, 23 nt, synthetic construct
  source 1..23: mol_type = other RNA
ggttcctgcagaccaggccaaag

SEQ ID NO: 63225 - RNA, 23 nt, synthetic construct
  source 1..23: mol_type = other RNA
gaacttccccacctgctcacggt

SEQ ID NO: 63226 - RNA, 23 nt, synthetic construct
  source 1..23: mol_type = other RNA
ggtggccgtggatccggtgggca

SEQ ID NO: 63227 - RNA, 23 nt, synthetic construct
  source 1..23: mol_type = other RNA
ttgcagtccctggactggagaag

SEQ ID NO: 63228 - RNA, 23 nt, synthetic construct
  source 1..23: mol_type = other RNA
tgtggacatggtggccgtgggtg

SEQ ID NO: 63229 - RNA, 23 nt, synthetic construct
  source 1..23: mol_type = other RNA
gaggtgtggacagtctctggagt

SEQ ID NO: 63230 - RNA, 23 nt, synthetic construct
  source 1..23: mol_type = other RNA
ggaggtgtggacagtctctggag

SEQ ID NO: 63231 - RNA, 23 nt, synthetic construct
  source 1..23: mol_type = other RNA
gtgtggtggccgtggtgttcggc

SEQ ID NO: 63232 - RNA, 23 nt, synthetic construct
  source 1..23: mol_type = other RNA
gtgtgtggtggccgtggtgttcg

SEQ ID NO: 63233 - RNA, 23 nt, synthetic construct
  source 1..23: mol_type = other RNA
cgtgtgtggtggccgtggtgttc

SEQ ID NO: 63234 - RNA, 23 nt, synthetic construct
  source 1..23: mol_type = other RNA
gtcgtccctggagaagggggtga

SEQ ID NO: 63235 - RNA, 23 nt, synthetic construct
  source 1..23: mol_type = other RNA
ggttcctgcagaccaggccaaag

SEQ ID NO: 63236 - RNA, 23 nt, synthetic construct
  source 1..23: mol_type = other RNA
gaacttccccacctgctcacggt

SEQ ID NO: 63237 - RNA, 23 nt, synthetic construct
  source 1..23: mol_type = other RNA
tgcagtccttggactggaggagg

SEQ ID NO: 63238 - RNA, 23 nt, synthetic construct
  source 1..23: mol_type = other RNA
aagctggtagctgtggatttggt

SEQ ID NO: 63239 - RNA, 23 nt, synthetic construct
  source 1..23: mol_type = other RNA
gtgtaaagctggtagctgtggat

SEQ ID NO: 63240 - RNA, 23 nt, synthetic construct
  source 1..23: mol_type = other RNA
ggtggtctccggagtggaggagg

SEQ ID NO: 63241 - RNA, 23 nt, synthetic construct
  source 1..23: mol_type = other RNA
gggtggtctccggagtggaggag

SEQ ID NO: 63242 - RNA, 23 nt, synthetic construct
  source 1..23: mol_type = other RNA
cagttgtagtggctgctgtggtc

SEQ ID NO: 63243 - RNA, 23 nt, synthetic construct
  source 1..23: mol_type = other RNA
ggtggccgtggatccggtgggca

SEQ ID NO: 63244 - RNA, 23 nt, synthetic construct
  source 1..23: mol_type = other RNA
tgatgactgtgggtgtggtggcc

SEQ ID NO: 63245 - RNA, 23 nt, synthetic construct
  source 1..23: mol_type = other RNA
gaggagggagtggctctggagct

SEQ ID NO: 63246 - RNA, 23 nt, synthetic construct
  source 1..23: mol_type = other RNA
ttgcagtccctggactggaggag

SEQ ID NO: 63247 - RNA, 23 nt, synthetic construct
  source 1..23: mol_type = other RNA
tgtggacatggtggccgtgggtg

SEQ ID NO: 63248 - RNA, 23 nt, synthetic construct
  source 1..23: mol_type = other RNA
gaggtgtggacagtctctggagt

SEQ ID NO: 63249 - RNA, 23 nt, synthetic construct
  source 1..23: mol_type = other RNA
ggaggtgtggacagtctctggag

SEQ ID NO: 63250 - RNA, 23 nt, synthetic construct
  source 1..23: mol_type = other RNA
ggggtcaccgtggagcctctggt

SEQ ID NO: 63251 - RNA, 23 nt, synthetic construct
  source 1..23: mol_type = other RNA
gtgtggtggccgtggtgttcggc

SEQ ID NO: 63252 - RNA, 23 nt, synthetic construct
  source 1..23: mol_type = other RNA
gtgtgtggtggccgtggtgttcg

SEQ ID NO: 63253 - RNA, 23 nt, synthetic construct
  source 1..23: mol_type = other RNA
cgtgtgtggtggccgtggtgttc

SEQ ID NO: 63254 - RNA, 23 nt, synthetic construct
  source 1..23: mol_type = other RNA
tggtgcccaagatgcccgaggtg

SEQ ID NO: 63255 - RNA, 23 nt, synthetic construct
  source 1..23: mol_type = other RNA
gtcgtccctggagaagggggtga

SEQ ID NO: 63256 - RNA, 23 nt, synthetic construct
  source 1..23: mol_type = other RNA
aggtgcccctggtgtggcccggg

SEQ ID NO: 63257 - RNA, 23 nt, synthetic construct
  source 1..23: mol_type = other RNA
aggggctgctcacagactgcccc

SEQ ID NO: 63258 - RNA, 23 nt, synthetic construct
  source 1..23: mol_type = other RNA
ggttcctgcagaccaggccaaag

SEQ ID NO: 63259 - RNA, 23 nt, synthetic construct
  source 1..23: mol_type = other RNA
gaacttccccacctgctcacggt

SEQ ID NO: 63260 - RNA, 23 nt, synthetic construct
  source 1..23: mol_type = other RNA
ggtggccgtggatccggtgggca

SEQ ID NO: 63261 - RNA, 23 nt, synthetic construct
  source 1..23: mol_type = other RNA
ttgcagtccctggactggagaag

SEQ ID NO: 63262 - RNA, 23 nt, synthetic construct
  source 1..23: mol_type = other RNA
tgtggacatggtggccgtgggtg

SEQ ID NO: 63263 - RNA, 23 nt, synthetic construct
  source 1..23: mol_type = other RNA
gaagagggggtggccacagagcc

SEQ ID NO: 63264 - RNA, 23 nt, synthetic construct
  source 1..23: mol_type = other RNA
gtgtggtggccgtggtgttcggc

SEQ ID NO: 63265 - RNA, 23 nt, synthetic construct
  source 1..23: mol_type = other RNA
gtgtgtggtggccgtggtgttcg

SEQ ID NO: 63266 - RNA, 23 nt, synthetic construct
  source 1..23: mol_type = other RNA
cgtgtgtggtggccgtggtgttc

SEQ ID NO: 63267 - RNA, 23 nt, synthetic construct
  source 1..23: mol_type = other RNA
ggaggtggccgtggtgtggcccg

SEQ ID NO: 63268 - RNA, 23 nt, synthetic construct
  source 1..23: mol_type = other RNA
ggttcctgcagaccaggccaaag

SEQ ID NO: 63269 - RNA, 23 nt, synthetic construct
  source 1..23: mol_type = other RNA
gaacttccccacctgctcacggt

SEQ ID NO: 63270 - RNA, 23 nt, synthetic construct
  source 1..23: mol_type = other RNA
tgcagtccttggactggaggagg

SEQ ID NO: 63271 - RNA, 23 nt, synthetic construct
  source 1..23: mol_type = other RNA
ggccacgggtgtggtggtctgtt

SEQ ID NO: 63272 - RNA, 23 nt, synthetic construct
  source 1..23: mol_type = other RNA
ggtggtctccggagtggaggagg

SEQ ID NO: 63273 - RNA, 23 nt, synthetic construct
  source 1..23: mol_type = other RNA
gggtggtctccggagtggaggag

SEQ ID NO: 63274 - RNA, 23 nt, synthetic construct
  source 1..23: mol_type = other RNA
cagttgtagtggctgctgtggtc

SEQ ID NO: 63275 - RNA, 23 nt, synthetic construct
  source 1..23: mol_type = other RNA
ccgtggatccagtggacgcagtc

SEQ ID NO: 63276 - RNA, 23 nt, synthetic construct
  source 1..23: mol_type = other RNA
ggtggccgtggatccggtgggca

SEQ ID NO: 63277 - RNA, 23 nt, synthetic construct
  source 1..23: mol_type = other RNA
ttgcagtccctggactggaggag

SEQ ID NO: 63278 - RNA, 23 nt, synthetic construct
  source 1..23: mol_type = other RNA
tgtggacatggtggccgtgggtg

SEQ ID NO: 63279 - RNA, 23 nt, synthetic construct
  source 1..23: mol_type = other RNA
gaggtgtggacagtctctggagt

SEQ ID NO: 63280 - RNA, 23 nt, synthetic construct
  source 1..23: mol_type = other RNA
ggaggtgtggacagtctctggag

SEQ ID NO: 63281 - RNA, 23 nt, synthetic construct
  source 1..23: mol_type = other RNA
tgcagtccttggactggaggagg

SEQ ID NO: 63282 - RNA, 23 nt, synthetic construct
  source 1..23: mol_type = other RNA
aagctggtagctgtggattttgt

SEQ ID NO: 63283 - RNA, 23 nt, synthetic construct
  source 1..23: mol_type = other RNA
gtgtaaagctggtagctgtggat

SEQ ID NO: 63284 - RNA, 23 nt, synthetic construct
  source 1..23: mol_type = other RNA
gacatgggtgtggtggtctgtgc

SEQ ID NO: 63285 - RNA, 23 nt, synthetic construct
  source 1..23: mol_type = other RNA
ggtggtctctggagtagaggagg

SEQ ID NO: 63286 - RNA, 23 nt, synthetic construct
  source 1..23: mol_type = other RNA
gaggtgtgggtggtctctggagt

SEQ ID NO: 63287 - RNA, 23 nt, synthetic construct
  source 1..23: mol_type = other RNA
ggcccttgtcatggtggctgtgg

SEQ ID NO: 63288 - RNA, 23 nt, synthetic construct
  source 1..23: mol_type = other RNA
tccgggtcgtccccagagtggag

SEQ ID NO: 63289 - RNA, 23 nt, synthetic construct
  source 1..23: mol_type = other RNA
ctgttgtggtcagctcagtgagg

SEQ ID NO: 63290 - RNA, 23 nt, synthetic construct
  source 1..23: mol_type = other RNA
agtggccatggtggtcaccactt

SEQ ID NO: 63291 - RNA, 23 nt, synthetic construct
  source 1..23: mol_type = other RNA
acaggcgccctggaagcggtcaa

SEQ ID NO: 63292 - RNA, 23 nt, synthetic construct
  source 1..23: mol_type = other RNA
ggtgggacaggcgccctggaagc

SEQ ID NO: 63293 - RNA, 23 nt, synthetic construct
  source 1..23: mol_type = other RNA
ggcgaggacagcggggcggagga

SEQ ID NO: 63294 - RNA, 23 nt, synthetic construct
  source 1..23: mol_type = other RNA
gggagccgccccacatgctgcag

SEQ ID NO: 63295 - RNA, 23 nt, synthetic construct
  source 1..23: mol_type = other RNA
gcatggtggtggtccccagcaca

SEQ ID NO: 63296 - RNA, 23 nt, synthetic construct
  source 1..23: mol_type = other RNA
tgacccaccgctccccgggaaat

SEQ ID NO: 63297 - RNA, 23 nt, synthetic construct
  source 1..23: mol_type = other RNA
ggcgggggctgaccctgggcgtc

SEQ ID NO: 63298 - RNA, 23 nt, synthetic construct
  source 1..23: mol_type = other RNA
accgtctcggggcagcaggggtt

SEQ ID NO: 63299 - RNA, 23 nt, synthetic construct
  source 1..23: mol_type = other RNA
tggcgggcacacaggcaggctct

SEQ ID NO: 63300 - RNA, 23 nt, synthetic construct
  source 1..23: mol_type = other RNA
gccctggcgggcacacaggcagg

SEQ ID NO: 63301 - RNA, 23 nt, synthetic construct
  source 1..23: mol_type = other RNA
acttgacaggagtcctcctcaca

SEQ ID NO: 63302 - RNA, 23 nt, synthetic construct
  source 1..23: mol_type = other RNA
cgcagccctggtgccacaggatg

SEQ ID NO: 63303 - RNA, 23 nt, synthetic construct
  source 1..23: mol_type = other RNA
cacgggtgtgtgggggagccatg

SEQ ID NO: 63304 - RNA, 23 nt, synthetic construct
  source 1..23: mol_type = other RNA
ggggggctccgcagaggaggccc

SEQ ID NO: 63305 - RNA, 23 nt, synthetic construct
  source 1..23: mol_type = other RNA
acccctctctgacctggccgttg

SEQ ID NO: 63306 - RNA, 23 nt, synthetic construct
  source 1..23: mol_type = other RNA
gatgctgacccctctctgacctg

SEQ ID NO: 63307 - RNA, 23 nt, synthetic construct
  source 1..23: mol_type = other RNA
ggtctctgcctgcggcaccacga

SEQ ID NO: 63308 - RNA, 23 nt, synthetic construct
  source 1..23: mol_type = other RNA
aggctttgggtccagcaggacga

SEQ ID NO: 63309 - RNA, 23 nt, synthetic construct
  source 1..23: mol_type = other RNA
taggctgctggcataagtgccct

SEQ ID NO: 63310 - RNA, 23 nt, synthetic construct
  source 1..23: mol_type = other RNA
agggcgcctgggaaggttgcacc

SEQ ID NO: 63311 - RNA, 23 nt, synthetic construct
  source 1..23: mol_type = other RNA
gtgatgggtgttgtccctggagt

SEQ ID NO: 63312 - RNA, 23 nt, synthetic construct
  source 1..23: mol_type = other RNA
gcagagctgcgcgcgctgggggt

SEQ ID NO: 63313 - RNA, 23 nt, synthetic construct
  source 1..23: mol_type = other RNA
gagctgttcccggggtggaggac

SEQ ID NO: 63314 - RNA, 23 nt, synthetic construct
  source 1..23: mol_type = other RNA
gagctgttcccggggtggaggac

SEQ ID NO: 63315 - RNA, 23 nt, synthetic construct
  source 1..23: mol_type = other RNA
gccatccatggtgtgccctgcat

SEQ ID NO: 63316 - RNA, 23 nt, synthetic construct
  source 1..23: mol_type = other RNA
ggtgtgcaggatggctgagccgt

SEQ ID NO: 63317 - RNA, 23 nt, synthetic construct
  source 1..23: mol_type = other RNA
catgcagttcgagtggaagggct

SEQ ID NO: 63318 - RNA, 23 nt, synthetic construct
  source 1..23: mol_type = other RNA
acatgcagttcgagtggaagggc

SEQ ID NO: 63319 - RNA, 23 nt, synthetic construct
  source 1..23: mol_type = other RNA
aagatgtactcgcagctgccttc

SEQ ID NO: 63320 - RNA, 23 nt, synthetic construct
  source 1..23: mol_type = other RNA
accgtggttattggggccgatgt

SEQ ID NO: 63321 - RNA, 23 nt, synthetic construct
  source 1..23: mol_type = other RNA
cttcgtggtcagcactgtggagg

SEQ ID NO: 63322 - RNA, 23 nt, synthetic construct
  source 1..23: mol_type = other RNA
cttcgtggtcagcactgtggagg

SEQ ID NO: 63323 - RNA, 23 nt, synthetic construct
  source 1..23: mol_type = other RNA
ggcagttgctgacccaccgctcc

SEQ ID NO: 63324 - RNA, 23 nt, synthetic construct
  source 1..23: mol_type = other RNA
gtgcttctcagtgctggaagggc

SEQ ID NO: 63325 - RNA, 23 nt, synthetic construct
  source 1..23: mol_type = other RNA
gtgcttctcagtgctggaagggc

SEQ ID NO: 63326 - RNA, 23 nt, synthetic construct
  source 1..23: mol_type = other RNA
gtgcttctcagtgctggaagggc

SEQ ID NO: 63327 - RNA, 23 nt, synthetic construct
  source 1..23: mol_type = other RNA
gtgcttctcagtgctggaagggc

SEQ ID NO: 63328 - RNA, 23 nt, synthetic construct
  source 1..23: mol_type = other RNA
gtgcttctcagtgctggaagggc

SEQ ID NO: 63329 - RNA, 23 nt, synthetic construct
  source 1..23: mol_type = other RNA
catgggggctgcacaccctgtgc

SEQ ID NO: 63330 - RNA, 23 nt, synthetic construct
  source 1..23: mol_type = other RNA
ccacccggccctctcgccaccgc

SEQ ID NO: 63331 - RNA, 23 nt, synthetic construct
  source 1..23: mol_type = other RNA
gcacttccgcagctcagccagca

SEQ ID NO: 63332 - RNA, 23 nt, synthetic construct
  source 1..23: mol_type = other RNA
ccatgggtgtggtggtctgttct

SEQ ID NO: 63333 - RNA, 23 nt, synthetic construct
  source 1..23: mol_type = other RNA
acatgggtgtggtggtctgtgct

SEQ ID NO: 63334 - RNA, 23 nt, synthetic construct
  source 1..23: mol_type = other RNA
gtacttggtgcagacgccgtccc

SEQ ID NO: 63335 - RNA, 23 nt, synthetic construct
  source 1..23: mol_type = other RNA
taggtcctgtcctcataggtgca

SEQ ID NO: 63336 - RNA, 23 nt, synthetic construct
  source 1..23: mol_type = other RNA
gccacaggtctggttggcgtatt

SEQ ID NO: 63337 - RNA, 23 nt, synthetic construct
  source 1..23: mol_type = other RNA
tgcacataggaggacagcgcggc

SEQ ID NO: 63338 - RNA, 23 nt, synthetic construct
  source 1..23: mol_type = other RNA
gatctctctcatgaggacatagg

SEQ ID NO: 63339 - RNA, 23 nt, synthetic construct
  source 1..23: mol_type = other RNA
acactttgatgggcaggtgcttg

SEQ ID NO: 63340 - RNA, 23 nt, synthetic construct
  source 1..23: mol_type = other RNA
tgttcagacttggggtagtcctc

SEQ ID NO: 63341 - RNA, 23 nt, synthetic construct
  source 1..23: mol_type = other RNA
tgtgtgctgaaacagcccacgtc

SEQ ID NO: 63342 - RNA, 23 nt, synthetic construct
  source 1..23: mol_type = other RNA
cagaccctgcccttgtagtcctg

SEQ ID NO: 63343 - RNA, 23 nt, synthetic construct
  source 1..23: mol_type = other RNA
gtcttttcggttgctgtggtctg

SEQ ID NO: 63344 - RNA, 23 nt, synthetic construct
  source 1..23: mol_type = other RNA
ggccgtggtggtcagcactttgg

SEQ ID NO: 63345 - RNA, 23 nt, synthetic construct
  source 1..23: mol_type = other RNA
agccggtggctgcactcccacct

SEQ ID NO: 63346 - RNA, 23 nt, synthetic construct
  source 1..23: mol_type = other RNA
ccggttttcctgaggctccccct

SEQ ID NO: 63347 - RNA, 23 nt, synthetic construct
  source 1..23: mol_type = other RNA
agcaccgtgcctggggggcagaa

SEQ ID NO: 63348 - RNA, 23 nt, synthetic construct
  source 1..23: mol_type = other RNA
gggagcaggggtcctcaaagctg

SEQ ID NO: 63349 - RNA, 23 nt, synthetic construct
  source 1..23: mol_type = other RNA
ccgtaggccacgcaggtgcccag

SEQ ID NO: 63350 - RNA, 23 nt, synthetic construct
  source 1..23: mol_type = other RNA
ccttgtagtcctggtgcagtcgg

SEQ ID NO: 63351 - RNA, 23 nt, synthetic construct
  source 1..23: mol_type = other RNA
gggcttgtcgtggagtgggggac

SEQ ID NO: 63352 - RNA, 23 nt, synthetic construct
  source 1..23: mol_type = other RNA
cgggcttgtcgtggagtggggga

SEQ ID NO: 63353 - RNA, 23 nt, synthetic construct
  source 1..23: mol_type = other RNA
ggccgatgtggggctgctgggca

SEQ ID NO: 63354 - RNA, 23 nt, synthetic construct
  source 1..23: mol_type = other RNA
ggccgatgtggggctgctgggca

SEQ ID NO: 63355 - RNA, 23 nt, synthetic construct
  source 1..23: mol_type = other RNA
ggccgatgtggggctgctgggca

SEQ ID NO: 63356 - RNA, 23 nt, synthetic construct
  source 1..23: mol_type = other RNA
ggccgatgtggggctgctgggca

SEQ ID NO: 63357 - RNA, 23 nt, synthetic construct
  source 1..23: mol_type = other RNA
ggatctctctcatgaggacatag

SEQ ID NO: 63358 - RNA, 23 nt, synthetic construct
  source 1..23: mol_type = other RNA
tccccagagaggcaggtacacat

SEQ ID NO: 63359 - RNA, 23 nt, synthetic construct
  source 1..23: mol_type = other RNA
ccgttgggtcctgggtgtcccca

SEQ ID NO: 63360 - RNA, 23 nt, synthetic construct
  source 1..23: mol_type = other RNA
ccgcaaaggccggccccagcagg

SEQ ID NO: 63361 - RNA, 23 nt, synthetic construct
  source 1..23: mol_type = other RNA
ccgggcttgtcgtggagtggggg

SEQ ID NO: 63362 - RNA, 23 nt, synthetic construct
  source 1..23: mol_type = other RNA
ccatgggcgcagggacacagaag

SEQ ID NO: 63363 - RNA, 23 nt, synthetic construct
  source 1..23: mol_type = other RNA
ggtgcaggcctcaaggctgtgag

SEQ ID NO: 63364 - RNA, 23 nt, synthetic construct
  source 1..23: mol_type = other RNA
ctggtcttccggtcccaggacac

SEQ ID NO: 63365 - RNA, 23 nt, synthetic construct
  source 1..23: mol_type = other RNA
ctggggaagacagtgacgggtgg

SEQ ID NO: 63366 - RNA, 23 nt, synthetic construct
  source 1..23: mol_type = other RNA
cccatccaacttctgcaggttcc

SEQ ID NO: 63367 - RNA, 23 nt, synthetic construct
  source 1..23: mol_type = other RNA
gcaggcagccagagtgcgtgatg

SEQ ID NO: 63368 - RNA, 23 nt, synthetic construct
  source 1..23: mol_type = other RNA
agcctggttctggttgaagttcc

SEQ ID NO: 63369 - RNA, 23 nt, synthetic construct
  source 1..23: mol_type = other RNA
cacacaggcccgcgtcgtggcag

SEQ ID NO: 63370 - RNA, 23 nt, synthetic construct
  source 1..23: mol_type = other RNA
gtggtgaaggtgaatggcgttgt

SEQ ID NO: 63371 - RNA, 23 nt, synthetic construct
  source 1..23: mol_type = other RNA
agttggggaagctctcggcctgg

SEQ ID NO: 63372 - RNA, 23 nt, synthetic construct
  source 1..23: mol_type = other RNA
ggctctgtgatgtgggtggtgcc

SEQ ID NO: 63373 - RNA, 23 nt, synthetic construct
  source 1..23: mol_type = other RNA
ggctctgtgatgtgggtggtgcc

SEQ ID NO: 63374 - RNA, 23 nt, synthetic construct
  source 1..23: mol_type = other RNA
ggctctgtgatgtgggtggtgcc

SEQ ID NO: 63375 - RNA, 23 nt, synthetic construct
  source 1..23: mol_type = other RNA
ggctctgtgatgtgggtggtgcc

SEQ ID NO: 63376 - RNA, 23 nt, synthetic construct
  source 1..23: mol_type = other RNA
tcggtgttgttgtggaagaggct

SEQ ID NO: 63377 - RNA, 23 nt, synthetic construct
  source 1..23: mol_type = other RNA
tgaagcacatcttgaacttcccc

SEQ ID NO: 63378 - RNA, 23 nt, synthetic construct
  source 1..23: mol_type = other RNA
tgaagcacatcttgaacttcccc

SEQ ID NO: 63379 - RNA, 23 nt, synthetic construct
  source 1..23: mol_type = other RNA
tgaagcacatcttgaacttcccc

SEQ ID NO: 63380 - RNA, 23 nt, synthetic construct
  source 1..23: mol_type = other RNA
tgaagcacatcttgaacttcccc

SEQ ID NO: 63381 - RNA, 23 nt, synthetic construct
  source 1..23: mol_type = other RNA
tcgtcagcctggttctggttgaa

SEQ ID NO: 63382 - RNA, 23 nt, synthetic construct
  source 1..23: mol_type = other RNA
ggtttttaggcagggtgccccgc

SEQ ID NO: 63383 - RNA, 23 nt, synthetic construct
  source 1..23: mol_type = other RNA
ctggcactctatgtccttaggct

SEQ ID NO: 63384 - RNA, 23 nt, synthetic construct
  source 1..23: mol_type = other RNA
ggtccctagggcagaggagggag

SEQ ID NO: 63385 - RNA, 23 nt, synthetic construct
  source 1..23: mol_type = other RNA
ggggctgctcacagacggcccct

SEQ ID NO: 63386 - RNA, 23 nt, synthetic construct
  source 1..23: mol_type = other RNA
tccccggagtggaggagggcatg

SEQ ID NO: 63387 - RNA, 23 nt, synthetic construct
  source 1..23: mol_type = other RNA
ggtccctagggcagaggagggag

SEQ ID NO: 63388 - RNA, 23 nt, synthetic construct
  source 1..23: mol_type = other RNA
gtggccgtggccgtggtcctgga

SEQ ID NO: 63389 - RNA, 23 nt, synthetic construct
  source 1..23: mol_type = other RNA
ggggctgctcacagacggcccct

SEQ ID NO: 63390 - RNA, 23 nt, synthetic construct
  source 1..23: mol_type = other RNA
ggtccctagggcagaggagggag

SEQ ID NO: 63391 - RNA, 23 nt, synthetic construct
  source 1..23: mol_type = other RNA
ggtccctagggcagaggagggag

SEQ ID NO: 63392 - RNA, 23 nt, synthetic construct
  source 1..23: mol_type = other RNA
gtggccgtggccgtggtcctgga

SEQ ID NO: 63393 - RNA, 23 nt, synthetic construct
  source 1..23: mol_type = other RNA
ggggctgctcacagacggcccct

SEQ ID NO: 63394 - RNA, 23 nt, synthetic construct
  source 1..23: mol_type = other RNA
tccccggagtggaggagggcatg

SEQ ID NO: 63395 - RNA, 23 nt, synthetic construct
  source 1..23: mol_type = other RNA
actttgatgggcaggtgcttgtt

SEQ ID NO: 63396 - RNA, 23 nt, synthetic construct
  source 1..23: mol_type = other RNA
cggttttcctgaggctccccctg

SEQ ID NO: 63397 - RNA, 23 nt, synthetic construct
  source 1..23: mol_type = other RNA
cttgtagtcctggtgcagtcgga

SEQ ID NO: 63398 - RNA, 23 nt, synthetic construct
  source 1..23: mol_type = other RNA
ggcaagggcagcgggtccgggca

SEQ ID NO: 63399 - RNA, 23 nt, synthetic construct
  source 1..23: mol_type = other RNA
tgggacagtgggttctgtggagc

SEQ ID NO: 63400 - RNA, 23 nt, synthetic construct
  source 1..23: mol_type = other RNA
gcttgtcgtggagtgggggaccc

SEQ ID NO: 63401 - RNA, 23 nt, synthetic construct
  source 1..23: mol_type = other RNA
cggcagacctcgcggacacacac

SEQ ID NO: 63402 - RNA, 23 nt, synthetic construct
  source 1..23: mol_type = other RNA
caggtggtggtacctggggccga

SEQ ID NO: 63403 - RNA, 23 nt, synthetic construct
  source 1..23: mol_type = other RNA
cacatttcttggacagaacgtag

SEQ ID NO: 63404 - RNA, 23 nt, synthetic construct
  source 1..23: mol_type = other RNA
agccacactgggccacgcacttc

SEQ ID NO: 63405 - RNA, 23 nt, synthetic construct
  source 1..23: mol_type = other RNA
ctcatcaaaccactctgtccact

SEQ ID NO: 63406 - RNA, 23 nt, synthetic construct
  source 1..23: mol_type = other RNA
cctcatcaaaccactctgtccac

SEQ ID NO: 63407 - RNA, 23 nt, synthetic construct
  source 1..23: mol_type = other RNA
ctggctcagcatcagatcacaga

SEQ ID NO: 63408 - RNA, 23 nt, synthetic construct
  source 1..23: mol_type = other RNA
ctcaggctggggaagacagtgac

SEQ ID NO: 63409 - RNA, 23 nt, synthetic construct
  source 1..23: mol_type = other RNA
gcccactggggttccggcaggtt

SEQ ID NO: 63410 - RNA, 23 nt, synthetic construct
  source 1..23: mol_type = other RNA
ttgcagcagaacacacggatttc

SEQ ID NO: 63411 - RNA, 23 nt, synthetic construct
  source 1..23: mol_type = other RNA
ttgcagcagaacacacggatttc

SEQ ID NO: 63412 - RNA, 23 nt, synthetic construct
  source 1..23: mol_type = other RNA
ttgcagcagaacacacggatttc

SEQ ID NO: 63413 - RNA, 23 nt, synthetic construct
  source 1..23: mol_type = other RNA
ttgcagcagaacacacggatttc

SEQ ID NO: 63414 - RNA, 23 nt, synthetic construct
  source 1..23: mol_type = other RNA
ctgccgacaggggcagctgcgtg

SEQ ID NO: 63415 - RNA, 23 nt, synthetic construct
  source 1..23: mol_type = other RNA
gctgccgacaggggcagctgcgt

SEQ ID NO: 63416 - RNA, 23 nt, synthetic construct
  source 1..23: mol_type = other RNA
gggtggtccctagggcagaggag

SEQ ID NO: 63417 - RNA, 23 nt, synthetic construct
  source 1..23: mol_type = other RNA
gggtggtccctagggcagaggag

SEQ ID NO: 63418 - RNA, 23 nt, synthetic construct
  source 1..23: mol_type = other RNA
gggtggtccctagggcagaggag

SEQ ID NO: 63419 - RNA, 23 nt, synthetic construct
  source 1..23: mol_type = other RNA
gggtggtccctagggcagaggag

SEQ ID NO: 63420 - RNA, 23 nt, synthetic construct
  source 1..23: mol_type = other RNA
ccaggcttgtaggtggcctcgtt

SEQ ID NO: 63421 - RNA, 23 nt, synthetic construct
  source 1..23: mol_type = other RNA
catcaaaggtgatgaagtggcca

SEQ ID NO: 63422 - RNA, 23 nt, synthetic construct
  source 1..23: mol_type = other RNA
tccggtcccaggacacggccatc

SEQ ID NO: 63423 - RNA, 23 nt, synthetic construct
  source 1..23: mol_type = other RNA
ttcatctggtcctcattgaagaa

SEQ ID NO: 63424 - RNA, 23 nt, synthetic construct
  source 1..23: mol_type = other RNA
gtgcaggtgcaggcctcaaggct

SEQ ID NO: 63425 - RNA, 23 nt, synthetic construct
  source 1..23: mol_type = other RNA
tgggtggtccctagggcagagga

SEQ ID NO: 63426 - RNA, 23 nt, synthetic construct
  source 1..23: mol_type = other RNA
tgggtggtccctagggcagagga

SEQ ID NO: 63427 - RNA, 23 nt, synthetic construct
  source 1..23: mol_type = other RNA
tgggtggtccctagggcagagga

SEQ ID NO: 63428 - RNA, 23 nt, synthetic construct
  source 1..23: mol_type = other RNA
tgggtggtccctagggcagagga

SEQ ID NO: 63429 - RNA, 23 nt, synthetic construct
  source 1..23: mol_type = other RNA
gtggtgaggactgaggaggacac

SEQ ID NO: 63430 - RNA, 23 nt, synthetic construct
  source 1..23: mol_type = other RNA
agcagggagtagagaagtgggag

SEQ ID NO: 63431 - RNA, 23 nt, synthetic construct
  source 1..23: mol_type = other RNA
cagtcactgcacactccccgggc

SEQ ID NO: 63432 - RNA, 23 nt, synthetic construct
  source 1..23: mol_type = other RNA
tgggccttccaggtgttggcgaa

SEQ ID NO: 63433 - RNA, 23 nt, synthetic construct
  source 1..23: mol_type = other RNA
gtaggcagccacagccgtgcaga

SEQ ID NO: 63434 - RNA, 23 nt, synthetic construct
  source 1..23: mol_type = other RNA
ggtgttgtagatgacgtcctggt

SEQ ID NO: 63435 - RNA, 23 nt, synthetic construct
  source 1..23: mol_type = other RNA
gcactctatgtccttaggctgct

SEQ ID NO: 63436 - RNA, 23 nt, synthetic construct
  source 1..23: mol_type = other RNA
tctcttgtactcaaagccctggg

SEQ ID NO: 63437 - RNA, 23 nt, synthetic construct
  source 1..23: mol_type = other RNA
aagggcaccgtctcctcgtggac

SEQ ID NO: 63438 - RNA, 23 nt, synthetic construct
  source 1..23: mol_type = other RNA
gagccatgggcgcagggacacag

SEQ ID NO: 63439 - RNA, 23 nt, synthetic construct
  source 1..23: mol_type = other RNA
tctctctcatgaggacataggtg

SEQ ID NO: 63440 - RNA, 23 nt, synthetic construct
  source 1..23: mol_type = other RNA
gtagctctccacgaagagcttga

SEQ ID NO: 63441 - RNA, 23 nt, synthetic construct
  source 1..23: mol_type = other RNA
ggagttccaggacatgccacagc

SEQ ID NO: 63442 - RNA, 23 nt, synthetic construct
  source 1..23: mol_type = other RNA
cagacttggggtagtcctcatca

SEQ ID NO: 63443 - RNA, 23 nt, synthetic construct
  source 1..23: mol_type = other RNA
gcccttgtagtcctggtgcagtc

SEQ ID NO: 63444 - RNA, 23 nt, synthetic construct
  source 1..23: mol_type = other RNA
ctggtcctcattgaagaagggct

SEQ ID NO: 63445 - RNA, 23 nt, synthetic construct
  source 1..23: mol_type = other RNA
ccgtgctggcactgagggagggc

SEQ ID NO: 63446 - RNA, 23 nt, synthetic construct
  source 1..23: mol_type = other RNA
gaatttggtcaaacaggatcagg

SEQ ID NO: 63447 - RNA, 23 nt, synthetic construct
  source 1..23: mol_type = other RNA
acataggaggacagcgcggcgca

SEQ ID NO: 63448 - RNA, 23 nt, synthetic construct
  source 1..23: mol_type = other RNA
ggtggtgccggtggtcccacagg

SEQ ID NO: 63449 - RNA, 23 nt, synthetic construct
  source 1..23: mol_type = other RNA
aagagcttgatggccttggagca

SEQ ID NO: 63450 - RNA, 23 nt, synthetic construct
  source 1..23: mol_type = other RNA
cgtggcaaagtcattgatggcat

SEQ ID NO: 63451 - RNA, 23 nt, synthetic construct
  source 1..23: mol_type = other RNA
agtcaacctgggagcggcaggcg

SEQ ID NO: 63452 - RNA, 23 nt, synthetic construct
  source 1..23: mol_type = other RNA
gggtgccccgcagggctggtagt

SEQ ID NO: 63453 - RNA, 23 nt, synthetic construct
  source 1..23: mol_type = other RNA
ccagttcctgcacaccaggccga

SEQ ID NO: 63454 - RNA, 23 nt, synthetic construct
  source 1..23: mol_type = other RNA
aagtccaggctgcattccacgac

SEQ ID NO: 63455 - RNA, 23 nt, synthetic construct
  source 1..23: mol_type = other RNA
aagtccaggctgcattccacgac

SEQ ID NO: 63456 - RNA, 23 nt, synthetic construct
  source 1..23: mol_type = other RNA
aagtccaggctgcattccacgac

SEQ ID NO: 63457 - RNA, 23 nt, synthetic construct
  source 1..23: mol_type = other RNA
aagtccaggctgcattccacgac

SEQ ID NO: 63458 - RNA, 23 nt, synthetic construct
  source 1..23: mol_type = other RNA
aactgtccaaatgccctgcagaa

SEQ ID NO: 63459 - RNA, 23 nt, synthetic construct
  source 1..23: mol_type = other RNA
gccaccgtgcagttctccagggt

SEQ ID NO: 63460 - RNA, 23 nt, synthetic construct
  source 1..23: mol_type = other RNA
tgggcaggtgcttgttcacgcag

SEQ ID NO: 63461 - RNA, 23 nt, synthetic construct
  source 1..23: mol_type = other RNA
atgggcaggtgcttgttcacgca

SEQ ID NO: 63462 - RNA, 23 nt, synthetic construct
  source 1..23: mol_type = other RNA
agaggtgccgtcaaaggtggaat

SEQ ID NO: 63463 - RNA, 23 nt, synthetic construct
  source 1..23: mol_type = other RNA
cccgcagggggacaccaggctgg

SEQ ID NO: 63464 - RNA, 23 nt, synthetic construct
  source 1..23: mol_type = other RNA
cccgcagggggacaccaggctgg

SEQ ID NO: 63465 - RNA, 23 nt, synthetic construct
  source 1..23: mol_type = other RNA
cccgcagggggacaccaggctgg

SEQ ID NO: 63466 - RNA, 23 nt, synthetic construct
  source 1..23: mol_type = other RNA
catccaacttctgcaggttccca

SEQ ID NO: 63467 - RNA, 23 nt, synthetic construct
  source 1..23: mol_type = other RNA
ggtcctcaaagctgttcctggca

SEQ ID NO: 63468 - RNA, 23 nt, synthetic construct
  source 1..23: mol_type = other RNA
ccaagttgttcagacttggggta

SEQ ID NO: 63469 - RNA, 23 nt, synthetic construct
  source 1..23: mol_type = other RNA
tgggggttggagcaggtgtccgt

SEQ ID NO: 63470 - RNA, 23 nt, synthetic construct
  source 1..23: mol_type = other RNA
atccaacttctgcaggttcccaa

SEQ ID NO: 63471 - RNA, 23 nt, synthetic construct
  source 1..23: mol_type = other RNA
aacagggtgatgttggctgccga

SEQ ID NO: 63472 - RNA, 23 nt, synthetic construct
  source 1..23: mol_type = other RNA
ccaggtgttggcgaaggctgcgc

SEQ ID NO: 63473 - RNA, 23 nt, synthetic construct
  source 1..23: mol_type = other RNA
ggtccaggtctcattcacctgcc

SEQ ID NO: 63474 - RNA, 23 nt, synthetic construct
  source 1..23: mol_type = other RNA
gcgtgcacataggaggacagcgc

SEQ ID NO: 63475 - RNA, 23 nt, synthetic construct
  source 1..23: mol_type = other RNA
ggcttgtcgtggagtgggggacc

SEQ ID NO: 63476 - RNA, 23 nt, synthetic construct
  source 1..23: mol_type = other RNA
gccgggcttgtcgtggagtgggg

SEQ ID NO: 63477 - RNA, 23 nt, synthetic construct
  source 1..23: mol_type = other RNA
ggtcacagtccacctgctggccc

SEQ ID NO: 63478 - RNA, 23 nt, synthetic construct
  source 1..23: mol_type = other RNA
tcccgcagggggacaccaggctg

SEQ ID NO: 63479 - RNA, 23 nt, synthetic construct
  source 1..23: mol_type = other RNA
tcccgcagggggacaccaggctg

SEQ ID NO: 63480 - RNA, 23 nt, synthetic construct
  source 1..23: mol_type = other RNA
tcccgcagggggacaccaggctg

SEQ ID NO: 63481 - RNA, 23 nt, synthetic construct
  source 1..23: mol_type = other RNA
ggtgaggactgaggaggacacag

SEQ ID NO: 63482 - RNA, 23 nt, synthetic construct
  source 1..23: mol_type = other RNA
cggggtccagcctgacaaacacc

SEQ ID NO: 63483 - RNA, 23 nt, synthetic construct
  source 1..23: mol_type = other RNA
ggcgtgcacataggaggacagcg

SEQ ID NO: 63484 - RNA, 23 nt, synthetic construct
  source 1..23: mol_type = other RNA
cggtcccaggacacggccatccc

SEQ ID NO: 63485 - RNA, 23 nt, synthetic construct
  source 1..23: mol_type = other RNA
cgtgcagttctccagggtccagg

SEQ ID NO: 63486 - RNA, 23 nt, synthetic construct
  source 1..23: mol_type = other RNA
caaagacctggctcagcatcaga

SEQ ID NO: 63487 - RNA, 23 nt, synthetic construct
  source 1..23: mol_type = other RNA
gtggccgtggtggtcagcacttt

SEQ ID NO: 63488 - RNA, 23 nt, synthetic construct
  source 1..23: mol_type = other RNA
gccagggcacggcaggtcctggc

SEQ ID NO: 63489 - RNA, 23 nt, synthetic construct
  source 1..23: mol_type = other RNA
gagtggaagggcttggggttgat

SEQ ID NO: 63490 - RNA, 23 nt, synthetic construct
  source 1..23: mol_type = other RNA
gctagaggagggtgttgccatag

SEQ ID NO: 63491 - RNA, 23 nt, synthetic construct
  source 1..23: mol_type = other RNA
gctagaggagggtgttgccatag

SEQ ID NO: 63492 - RNA, 23 nt, synthetic construct
  source 1..23: mol_type = other RNA
gctagaggagggtgttgccatag

SEQ ID NO: 63493 - RNA, 23 nt, synthetic construct
  source 1..23: mol_type = other RNA
gctagaggagggtgttgccatag

SEQ ID NO: 63494 - RNA, 23 nt, synthetic construct
  source 1..23: mol_type = other RNA
gctagaggagggtgttgccatag

SEQ ID NO: 63495 - RNA, 23 nt, synthetic construct
  source 1..23: mol_type = other RNA
tcacacacgcaggactggcagtt

SEQ ID NO: 63496 - RNA, 23 nt, synthetic construct
  source 1..23: mol_type = other RNA
ctccagcagggcactgtcctctc

SEQ ID NO: 63497 - RNA, 23 nt, synthetic construct
  source 1..23: mol_type = other RNA
ggcacggcaggtcctggcactgc

SEQ ID NO: 63498 - RNA, 23 nt, synthetic construct
  source 1..23: mol_type = other RNA
acacaggccgcacatctggccct

SEQ ID NO: 63499 - RNA, 23 nt, synthetic construct
  source 1..23: mol_type = other RNA
gggcgggcacacaggcgcccgcg

SEQ ID NO: 63500 - RNA, 23 nt, synthetic construct
  source 1..23: mol_type = other RNA
tccccacagtagtcctgggccaa

SEQ ID NO: 63501 - RNA, 23 nt, synthetic construct
  source 1..23: mol_type = other RNA
caggggatgttctcggtgacgat

SEQ ID NO: 63502 - RNA, 23 nt, synthetic construct
  source 1..23: mol_type = other RNA
gccaggcaggtccaccaggcagt

SEQ ID NO: 63503 - RNA, 23 nt, synthetic construct
  source 1..23: mol_type = other RNA
tgtgagcgcactggatgccactg

SEQ ID NO: 63504 - RNA, 23 nt, synthetic construct
  source 1..23: mol_type = other RNA
cctccaagttgttcagacttggg

SEQ ID NO: 63505 - RNA, 23 nt, synthetic construct
  source 1..23: mol_type = other RNA
tcttgaacttccccacctgctca

SEQ ID NO: 63506 - RNA, 23 nt, synthetic construct
  source 1..23: mol_type = other RNA
atggctgtaaagctggtagctgt

SEQ ID NO: 63507 - RNA, 23 nt, synthetic construct
  source 1..23: mol_type = other RNA
tcttgaacttccccacctgctca

SEQ ID NO: 63508 - RNA, 23 nt, synthetic construct
  source 1..23: mol_type = other RNA
tcttgaacttccccacctgctca

SEQ ID NO: 63509 - RNA, 23 nt, synthetic construct
  source 1..23: mol_type = other RNA
atggctgtaaagctggtagctgt

SEQ ID NO: 63510 - RNA, 23 nt, synthetic construct
  source 1..23: mol_type = other RNA
tcttgaacttccccacctgctca

SEQ ID NO: 63511 - RNA, 23 nt, synthetic construct
  source 1..23: mol_type = other RNA
atggctgtaaagctggtagctgt

SEQ ID NO: 63512 - RNA, 23 nt, synthetic construct
  source 1..23: mol_type = other RNA
tccaacttctgcaggttcccaaa

SEQ ID NO: 63513 - RNA, 23 nt, synthetic construct
  source 1..23: mol_type = other RNA
gcaggtggggcagcggcacaggt

SEQ ID NO: 63514 - RNA, 23 nt, synthetic construct
  source 1..23: mol_type = other RNA
gggcaggcagccagagtgcgtga

SEQ ID NO: 63515 - RNA, 23 nt, synthetic construct
  source 1..23: mol_type = other RNA
gcaggggcactgcccgaggggca

SEQ ID NO: 63516 - RNA, 23 nt, synthetic construct
  source 1..23: mol_type = other RNA
cccgccgtccaggctgagcgtca

SEQ ID NO: 63517 - RNA, 23 nt, synthetic construct
  source 1..23: mol_type = other RNA
gttctggttgaagttcccacaca

SEQ ID NO: 63518 - RNA, 23 nt, synthetic construct
  source 1..23: mol_type = other RNA
ggttctggttgaagttcccacac

SEQ ID NO: 63519 - RNA, 23 nt, synthetic construct
  source 1..23: mol_type = other RNA
caggggtcctcaaagctgttcct

SEQ ID NO: 63520 - RNA, 23 nt, synthetic construct
  source 1..23: mol_type = other RNA
cagttctgcatgtacttggtgca

SEQ ID NO: 63521 - RNA, 23 nt, synthetic construct
  source 1..23: mol_type = other RNA
acagcccacgtccagcgtgtggc

SEQ ID NO: 63522 - RNA, 23 nt, synthetic construct
  source 1..23: mol_type = other RNA
ggcagagccggtggctgcactcc

SEQ ID NO: 63523 - RNA, 23 nt, synthetic construct
  source 1..23: mol_type = other RNA
atcaaaggtgatgaagtggccat

SEQ ID NO: 63524 - RNA, 23 nt, synthetic construct
  source 1..23: mol_type = other RNA
gagcttgatggccttggagcagg

SEQ ID NO: 63525 - RNA, 23 nt, synthetic construct
  source 1..23: mol_type = other RNA
caggcagtgcccactggggttcc

SEQ ID NO: 63526 - RNA, 23 nt, synthetic construct
  source 1..23: mol_type = other RNA
acttcatctggtcctcattgaag

SEQ ID NO: 63527 - RNA, 23 nt, synthetic construct
  source 1..23: mol_type = other RNA
gcagccacactgggccacgcact

SEQ ID NO: 63528 - RNA, 23 nt, synthetic construct
  source 1..23: mol_type = other RNA
aggcctcaaggctgtgagcgcac

SEQ ID NO: 63529 - RNA, 23 nt, synthetic construct
  source 1..23: mol_type = other RNA
tctctgcctcaggttttcaaacg

SEQ ID NO: 63530 - RNA, 23 nt, synthetic construct
  source 1..23: mol_type = other RNA
ctctctgcctcaggttttcaaac

SEQ ID NO: 63531 - RNA, 23 nt, synthetic construct
  source 1..23: mol_type = other RNA
gtgctggcactgagggagggctg

SEQ ID NO: 63532 - RNA, 23 nt, synthetic construct
  source 1..23: mol_type = other RNA
agcaggctccgtgctggcactga

SEQ ID NO: 63533 - RNA, 23 nt, synthetic construct
  source 1..23: mol_type = other RNA
ccactctgtccactcacacttcg

SEQ ID NO: 63534 - RNA, 23 nt, synthetic construct
  source 1..23: mol_type = other RNA
agtccaggctgcattccacgacc

SEQ ID NO: 63535 - RNA, 23 nt, synthetic construct
  source 1..23: mol_type = other RNA
tgtggccgtggccgtggtcctgg

SEQ ID NO: 63536 - RNA, 23 nt, synthetic construct
  source 1..23: mol_type = other RNA
agtccaggctgcattccacgacc

SEQ ID NO: 63537 - RNA, 23 nt, synthetic construct
  source 1..23: mol_type = other RNA
agtccaggctgcattccacgacc

SEQ ID NO: 63538 - RNA, 23 nt, synthetic construct
  source 1..23: mol_type = other RNA
tgtggccgtggccgtggtcctgg

SEQ ID NO: 63539 - RNA, 23 nt, synthetic construct
  source 1..23: mol_type = other RNA
agtccaggctgcattccacgacc

SEQ ID NO: 63540 - RNA, 23 nt, synthetic construct
  source 1..23: mol_type = other RNA
gttgttggtgcaggtgccgcact

SEQ ID NO: 63541 - RNA, 23 nt, synthetic construct
  source 1..23: mol_type = other RNA
tgctgcatggcctgggcctctgc

SEQ ID NO: 63542 - RNA, 23 nt, synthetic construct
  source 1..23: mol_type = other RNA
ggagccatgggcgcagggacaca

SEQ ID NO: 63543 - RNA, 23 nt, synthetic construct
  source 1..23: mol_type = other RNA
gcaggcctcgtagtacttggtgg

SEQ ID NO: 63544 - RNA, 23 nt, synthetic construct
  source 1..23: mol_type = other RNA
cagcggcacaggtcctgggcgca

SEQ ID NO: 63545 - RNA, 23 nt, synthetic construct
  source 1..23: mol_type = other RNA
tgccagggcacggcaggtcctgg

SEQ ID NO: 63546 - RNA, 23 nt, synthetic construct
  source 1..23: mol_type = other RNA
tccaggtgttggcgaaggctgcg

SEQ ID NO: 63547 - RNA, 23 nt, synthetic construct
  source 1..23: mol_type = other RNA
aggggtcctcaaagctgttcctg

SEQ ID NO: 63548 - RNA, 23 nt, synthetic construct
  source 1..23: mol_type = other RNA
caggcctcgtagtacttggtgga

SEQ ID NO: 63549 - RNA, 23 nt, synthetic construct
  source 1..23: mol_type = other RNA
agctggaccagcggcagacctcg

SEQ ID NO: 63550 - RNA, 23 nt, synthetic construct
  source 1..23: mol_type = other RNA
cccagttcctgcacaccaggccg

SEQ ID NO: 63551 - RNA, 23 nt, synthetic construct
  source 1..23: mol_type = other RNA
ggtccagcctgacaaacacctgc

SEQ ID NO: 63552 - RNA, 23 nt, synthetic construct
  source 1..23: mol_type = other RNA
tgggacttggggcagttctgcat

SEQ ID NO: 63553 - RNA, 23 nt, synthetic construct
  source 1..23: mol_type = other RNA
ctgggacttggggcagttctgca

SEQ ID NO: 63554 - RNA, 23 nt, synthetic construct
  source 1..23: mol_type = other RNA
tagctctccacgaagagcttgat

SEQ ID NO: 63555 - RNA, 23 nt, synthetic construct
  source 1..23: mol_type = other RNA
tcccctccaagttgttcagactt

SEQ ID NO: 63556 - RNA, 23 nt, synthetic construct
  source 1..23: mol_type = other RNA
ctctggttgttggtgcaggtgcc

SEQ ID NO: 63557 - RNA, 23 nt, synthetic construct
  source 1..23: mol_type = other RNA
aggttcccaaactggagcggggt

SEQ ID NO: 63558 - RNA, 23 nt, synthetic construct
  source 1..23: mol_type = other RNA
agggcagcgggtccgggcactgc

SEQ ID NO: 63559 - RNA, 23 nt, synthetic construct
  source 1..23: mol_type = other RNA
actccgcaaaggccggccccagc

SEQ ID NO: 63560 - RNA, 23 nt, synthetic construct
  source 1..23: mol_type = other RNA
tccagcaccgtgcctggggggca

SEQ ID NO: 63561 - RNA, 23 nt, synthetic construct
  source 1..23: mol_type = other RNA
gggcacggcaggtcctggcactg

SEQ ID NO: 63562 - RNA, 23 nt, synthetic construct
  source 1..23: mol_type = other RNA
cagggtgatgttggctgccgaca

SEQ ID NO: 63563 - RNA, 23 nt, synthetic construct
  source 1..23: mol_type = other RNA
agcctgacaaacacctgcatgag

SEQ ID NO: 63564 - RNA, 23 nt, synthetic construct
  source 1..23: mol_type = other RNA
tggtgggcggggtccagcctgac

SEQ ID NO: 63565 - RNA, 23 nt, synthetic construct
  source 1..23: mol_type = other RNA
tgagggagcaggggtcctcaaag

SEQ ID NO: 63566 - RNA, 23 nt, synthetic construct
  source 1..23: mol_type = other RNA
gggcgtagttctcattctccaca

SEQ ID NO: 63567 - RNA, 23 nt, synthetic construct
  source 1..23: mol_type = other RNA
ggggcagttctgcatgtacttgg

SEQ ID NO: 63568 - RNA, 23 nt, synthetic construct
  source 1..23: mol_type = other RNA
tggggcagttctgcatgtacttg

SEQ ID NO: 63569 - RNA, 23 nt, synthetic construct
  source 1..23: mol_type = other RNA
ccagccccgggggacagacacag

SEQ ID NO: 63570 - RNA, 23 nt, synthetic construct
  source 1..23: mol_type = other RNA
ccatcaaaggtgatgaagtggcc

SEQ ID NO: 63571 - RNA, 23 nt, synthetic construct
  source 1..23: mol_type = other RNA
cccacaggggatgttctcggtga

SEQ ID NO: 63572 - RNA, 23 nt, synthetic construct
  source 1..23: mol_type = other RNA
agctctccacgaagagcttgatg

SEQ ID NO: 63573 - RNA, 23 nt, synthetic construct
  source 1..23: mol_type = other RNA
tcagctcgtagctctccacgaag

SEQ ID NO: 63574 - RNA, 23 nt, synthetic construct
  source 1..23: mol_type = other RNA
cccttgtagtcctggtgcagtcg

SEQ ID NO: 63575 - RNA, 23 nt, synthetic construct
  source 1..23: mol_type = other RNA
gcgtggcaaagtcattgatggca

SEQ ID NO: 63576 - RNA, 23 nt, synthetic construct
  source 1..23: mol_type = other RNA
tgcaggtgcaggcctcaaggctg

SEQ ID NO: 63577 - RNA, 23 nt, synthetic construct
  source 1..23: mol_type = other RNA
tcataggtgcaggtgcaggcctc

SEQ ID NO: 63578 - RNA, 23 nt, synthetic construct
  source 1..23: mol_type = other RNA
tcctcataggtgcaggtgcaggc

SEQ ID NO: 63579 - RNA, 23 nt, synthetic construct
  source 1..23: mol_type = other RNA
tggggactgctgtggtgctggcc

SEQ ID NO: 63580 - RNA, 23 nt, synthetic construct
  source 1..23: mol_type = other RNA
cagtgggttctgtggagcctgca

SEQ ID NO: 63581 - RNA, 23 nt, synthetic construct
  source 1..23: mol_type = other RNA
accactctgtccactcacacttc

SEQ ID NO: 63582 - RNA, 23 nt, synthetic construct
  source 1..23: mol_type = other RNA
tggtagctgtgggtgtggtggct

SEQ ID NO: 63583 - RNA, 23 nt, synthetic construct
  source 1..23: mol_type = other RNA
ctggtagctgtgggtgtggtggc

SEQ ID NO: 63584 - RNA, 23 nt, synthetic construct
  source 1..23: mol_type = other RNA
tctgaccaggcacactggggctc

SEQ ID NO: 63585 - RNA, 23 nt, synthetic construct
  source 1..23: mol_type = other RNA
atcttgaacttccccacctgctc

SEQ ID NO: 63586 - RNA, 23 nt, synthetic construct
  source 1..23: mol_type = other RNA
tggtagctgtgggtgtggtggct

SEQ ID NO: 63587 - RNA, 23 nt, synthetic construct
  source 1..23: mol_type = other RNA
ctggtagctgtgggtgtggtggc

SEQ ID NO: 63588 - RNA, 23 nt, synthetic construct
  source 1..23: mol_type = other RNA
tctgaccaggcacactggggctc

SEQ ID NO: 63589 - RNA, 23 nt, synthetic construct
  source 1..23: mol_type = other RNA
atcttgaacttccccacctgctc

SEQ ID NO: 63590 - RNA, 23 nt, synthetic construct
  source 1..23: mol_type = other RNA
tggtagctgtgggtgtggtggct

SEQ ID NO: 63591 - RNA, 23 nt, synthetic construct
  source 1..23: mol_type = other RNA
ctggtagctgtgggtgtggtggc

SEQ ID NO: 63592 - RNA, 23 nt, synthetic construct
  source 1..23: mol_type = other RNA
tctgaccaggcacactggggctc

SEQ ID NO: 63593 - RNA, 23 nt, synthetic construct
  source 1..23: mol_type = other RNA
atcttgaacttccccacctgctc

SEQ ID NO: 63594 - RNA, 23 nt, synthetic construct
  source 1..23: mol_type = other RNA
tggtagctgtgggtgtggtggct

SEQ ID NO: 63595 - RNA, 23 nt, synthetic construct
  source 1..23: mol_type = other RNA
ctggtagctgtgggtgtggtggc

SEQ ID NO: 63596 - RNA, 23 nt, synthetic construct
  source 1..23: mol_type = other RNA
tctgaccaggcacactggggctc

SEQ ID NO: 63597 - RNA, 23 nt, synthetic construct
  source 1..23: mol_type = other RNA
atcttgaacttccccacctgctc

SEQ ID NO: 63598 - RNA, 23 nt, synthetic construct
  source 1..23: mol_type = other RNA
tggtagctgtgggtgtggtggct

SEQ ID NO: 63599 - RNA, 23 nt, synthetic construct
  source 1..23: mol_type = other RNA
ctggtagctgtgggtgtggtggc

SEQ ID NO: 63600 - RNA, 23 nt, synthetic construct
  source 1..23: mol_type = other RNA
gtccaggtctcattcacctgccg

SEQ ID NO: 63601 - RNA, 23 nt, synthetic construct
  source 1..23: mol_type = other RNA
gcagttctccagggtccaggtct

SEQ ID NO: 63602 - RNA, 23 nt, synthetic construct
  source 1..23: mol_type = other RNA
caggtgcttgttcacgcaggtga

SEQ ID NO: 63603 - RNA, 23 nt, synthetic construct
  source 1..23: mol_type = other RNA
atctctctcatgaggacataggt

SEQ ID NO: 63604 - RNA, 23 nt, synthetic construct
  source 1..23: mol_type = other RNA
ggaatttggtcaaacaggatcag

SEQ ID NO: 63605 - RNA, 23 nt, synthetic construct
  source 1..23: mol_type = other RNA
agaggctgtagggcagccgggcc

SEQ ID NO: 63606 - RNA, 23 nt, synthetic construct
  source 1..23: mol_type = other RNA
aagaggctgtagggcagccgggc

SEQ ID NO: 63607 - RNA, 23 nt, synthetic construct
  source 1..23: mol_type = other RNA
tccaggctctggcagggcacctc

SEQ ID NO: 63608 - RNA, 23 nt, synthetic construct
  source 1..23: mol_type = other RNA
cacacacgcaggactggcagttg

SEQ ID NO: 63609 - RNA, 23 nt, synthetic construct
  source 1..23: mol_type = other RNA
aggtgcactggtgctgcatggcc

SEQ ID NO: 63610 - RNA, 23 nt, synthetic construct
  source 1..23: mol_type = other RNA
atgcaggctgtggggtcagcaaa

SEQ ID NO: 63611 - RNA, 23 nt, synthetic construct
  source 1..23: mol_type = other RNA
ctccagggtccaggtctcattca

SEQ ID NO: 63612 - RNA, 23 nt, synthetic construct
  source 1..23: mol_type = other RNA
gtgcacataggaggacagcgcgg

SEQ ID NO: 63613 - RNA, 23 nt, synthetic construct
  source 1..23: mol_type = other RNA
ccgtgcagaaacactcgcagtcg

SEQ ID NO: 63614 - RNA, 23 nt, synthetic construct
  source 1..23: mol_type = other RNA
agttcccgcacaggccgcagacc

SEQ ID NO: 63615 - RNA, 23 nt, synthetic construct
  source 1..23: mol_type = other RNA
gcaggtttttaggcagggtgccc

SEQ ID NO: 63616 - RNA, 23 nt, synthetic construct
  source 1..23: mol_type = other RNA
ccccgggggacagacacagccgg

SEQ ID NO: 63617 - RNA, 23 nt, synthetic construct
  source 1..23: mol_type = other RNA
gccgtgcagaaacactcgcagtc

SEQ ID NO: 63618 - RNA, 23 nt, synthetic construct
  source 1..23: mol_type = other RNA
cacagccgtgcagaaacactcgc

SEQ ID NO: 63619 - RNA, 23 nt, synthetic construct
  source 1..23: mol_type = other RNA
caggacacacacaggcccgcgtc

SEQ ID NO: 63620 - RNA, 23 nt, synthetic construct
  source 1..23: mol_type = other RNA
tgggcggggtccagcctgacaaa

SEQ ID NO: 63621 - RNA, 23 nt, synthetic construct
  source 1..23: mol_type = other RNA
ccacacaggccgcacatctggcc

SEQ ID NO: 63622 - RNA, 23 nt, synthetic construct
  source 1..23: mol_type = other RNA
ccacagccgtgcagaaacactcg

SEQ ID NO: 63623 - RNA, 23 nt, synthetic construct
  source 1..23: mol_type = other RNA
gggcgtaggcagccacagccgtg

SEQ ID NO: 63624 - RNA, 23 nt, synthetic construct
  source 1..23: mol_type = other RNA
gtaccctctctgcctcaggtttt

SEQ ID NO: 63625 - RNA, 23 nt, synthetic construct
  source 1..23: mol_type = other RNA
gaggtgccgtcaaaggtggaata

SEQ ID NO: 63626 - RNA, 23 nt, synthetic construct
  source 1..23: mol_type = other RNA
acctggtaccctctctgcctcag

SEQ ID NO: 63627 - RNA, 23 nt, synthetic construct
  source 1..23: mol_type = other RNA
catgggcgcagggacacagaagg

SEQ ID NO: 63628 - RNA, 23 nt, synthetic construct
  source 1..23: mol_type = other RNA
aaggtgatgaagtggccatcccc

SEQ ID NO: 63629 - RNA, 23 nt, synthetic construct
  source 1..23: mol_type = other RNA
ggggaagacagtgacgggtggaa

SEQ ID NO: 63630 - RNA, 23 nt, synthetic construct
  source 1..23: mol_type = other RNA
ggtgcactggtgctgcatggcct

SEQ ID NO: 63631 - RNA, 23 nt, synthetic construct
  source 1..23: mol_type = other RNA
gagggagcaggggtcctcaaagc

SEQ ID NO: 63632 - RNA, 23 nt, synthetic construct
  source 1..23: mol_type = other RNA
cacgcagtgtgtgctgaaacagc

SEQ ID NO: 63633 - RNA, 23 nt, synthetic construct
  source 1..23: mol_type = other RNA
gtggtcttttcggttgctgtggt

SEQ ID NO: 63634 - RNA, 23 nt, synthetic construct
  source 1..23: mol_type = other RNA
gccgtgggtgcaggggcactgcc

SEQ ID NO: 63635 - RNA, 23 nt, synthetic construct
  source 1..23: mol_type = other RNA
gtttttaggcagggtgccccgca

SEQ ID NO: 63636 - RNA, 23 nt, synthetic construct
  source 1..23: mol_type = other RNA
ggttgggaagtccacgtcaaacc

SEQ ID NO: 63637 - RNA, 23 nt, synthetic construct
  source 1..23: mol_type = other RNA
tacgcgtggcaaagtcattgatg

SEQ ID NO: 63638 - RNA, 23 nt, synthetic construct
  source 1..23: mol_type = other RNA
catccagcaccgtgcctgggggg

SEQ ID NO: 63639 - RNA, 23 nt, synthetic construct
  source 1..23: mol_type = other RNA
caccgttgggtcctgggtgtccc

SEQ ID NO: 63640 - RNA, 23 nt, synthetic construct
  source 1..23: mol_type = other RNA
tgacaggagtcctcctcacagga

SEQ ID NO: 63641 - RNA, 23 nt, synthetic construct
  source 1..23: mol_type = other RNA
ctggtaccctctctgcctcaggt

SEQ ID NO: 63642 - RNA, 23 nt, synthetic construct
  source 1..23: mol_type = other RNA
taaggcagctcctcccgctgccc

SEQ ID NO: 63643 - RNA, 23 nt, synthetic construct
  source 1..23: mol_type = other RNA
ccgtgcctggggggcagaagcag

SEQ ID NO: 63644 - RNA, 23 nt, synthetic construct
  source 1..23: mol_type = other RNA
accgtgcctggggggcagaagca

SEQ ID NO: 63645 - RNA, 23 nt, synthetic construct
  source 1..23: mol_type = other RNA
gatggccgtgtccccgccgtcca

SEQ ID NO: 63646 - RNA, 23 nt, synthetic construct
  source 1..23: mol_type = other RNA
gctctgtgatgtgggtggtgccc

SEQ ID NO: 63647 - RNA, 23 nt, synthetic construct
  source 1..23: mol_type = other RNA
gctctgtgatgtgggtggtgccc

SEQ ID NO: 63648 - RNA, 23 nt, synthetic construct
  source 1..23: mol_type = other RNA
gctctgtgatgtgggtggtgccc

SEQ ID NO: 63649 - RNA, 23 nt, synthetic construct
  source 1..23: mol_type = other RNA
gctctgtgatgtgggtggtgccc

SEQ ID NO: 63650 - RNA, 23 nt, synthetic construct
  source 1..23: mol_type = other RNA
ggtgatgaagtggccatccccgt

SEQ ID NO: 63651 - RNA, 23 nt, synthetic construct
  source 1..23: mol_type = other RNA
aacgtcccctccaagttgttcag

SEQ ID NO: 63652 - RNA, 23 nt, synthetic construct
  source 1..23: mol_type = other RNA
aggtctggttggcgtatttggga

SEQ ID NO: 63653 - RNA, 23 nt, synthetic construct
  source 1..23: mol_type = other RNA
gtcgtcagcctggttctggttga

SEQ ID NO: 63654 - RNA, 23 nt, synthetic construct
  source 1..23: mol_type = other RNA
ccggtggctgcactcccacctcc

SEQ ID NO: 63655 - RNA, 23 nt, synthetic construct
  source 1..23: mol_type = other RNA
gtgaccacaggcctggagcccac

SEQ ID NO: 63656 - RNA, 23 nt, synthetic construct
  source 1..23: mol_type = other RNA
acgggtgaccacaggcctggagc

SEQ ID NO: 63657 - RNA, 23 nt, synthetic construct
  source 1..23: mol_type = other RNA
caagggcagcgggtccgggcact

SEQ ID NO: 63658 - RNA, 23 nt, synthetic construct
  source 1..23: mol_type = other RNA
aaaggccggccccagcagggtgc

SEQ ID NO: 63659 - RNA, 23 nt, synthetic construct
  source 1..23: mol_type = other RNA
gcactccgcaaaggccggcccca

SEQ ID NO: 63660 - RNA, 23 nt, synthetic construct
  source 1..23: mol_type = other RNA
gggtgcaggggcactgcccgagg

SEQ ID NO: 63661 - RNA, 23 nt, synthetic construct
  source 1..23: mol_type = other RNA
caggcagagccggtggctgcact

SEQ ID NO: 63662 - RNA, 23 nt, synthetic construct
  source 1..23: mol_type = other RNA
ggcagacctcgcggacacacacg

SEQ ID NO: 63663 - RNA, 23 nt, synthetic construct
  source 1..23: mol_type = other RNA
tcctcatcaaaccactctgtcca

SEQ ID NO: 63664 - RNA, 23 nt, synthetic construct
  source 1..23: mol_type = other RNA
agtccccgccagagggccccggc

SEQ ID NO: 63665 - RNA, 23 nt, synthetic construct
  source 1..23: mol_type = other RNA
taaagctggtagctgtgggtgtg

SEQ ID NO: 63666 - RNA, 23 nt, synthetic construct
  source 1..23: mol_type = other RNA
agtccccgccagagggccccggc

SEQ ID NO: 63667 - RNA, 23 nt, synthetic construct
  source 1..23: mol_type = other RNA
agtccccgccagagggccccggc

SEQ ID NO: 63668 - RNA, 23 nt, synthetic construct
  source 1..23: mol_type = other RNA
taaagctggtagctgtgggtgtg

SEQ ID NO: 63669 - RNA, 23 nt, synthetic construct
  source 1..23: mol_type = other RNA
agtccccgccagagggccccggc

SEQ ID NO: 63670 - RNA, 23 nt, synthetic construct
  source 1..23: mol_type = other RNA
taaagctggtagctgtgggtgtg

SEQ ID NO: 63671 - RNA, 23 nt, synthetic construct
  source 1..23: mol_type = other RNA
cactccccacagcactgcccggc

SEQ ID NO: 63672 - RNA, 23 nt, synthetic construct
  source 1..23: mol_type = other RNA
aagctctcggcctggcactctat

SEQ ID NO: 63673 - RNA, 23 nt, synthetic construct
  source 1..23: mol_type = other RNA
agttgcagcagaacacacggatt

SEQ ID NO: 63674 - RNA, 23 nt, synthetic construct
  source 1..23: mol_type = other RNA
agttgcagcagaacacacggatt

SEQ ID NO: 63675 - RNA, 23 nt, synthetic construct
  source 1..23: mol_type = other RNA
agttgcagcagaacacacggatt

SEQ ID NO: 63676 - RNA, 23 nt, synthetic construct
  source 1..23: mol_type = other RNA
agttgcagcagaacacacggatt

SEQ ID NO: 63677 - RNA, 23 nt, synthetic construct
  source 1..23: mol_type = other RNA
gtagtcctggtgcagtcggatga

SEQ ID NO: 63678 - RNA, 23 nt, synthetic construct
  source 1..23: mol_type = other RNA
aagtccccgccagagggccccgg

SEQ ID NO: 63679 - RNA, 23 nt, synthetic construct
  source 1..23: mol_type = other RNA
aagtccccgccagagggccccgg

SEQ ID NO: 63680 - RNA, 23 nt, synthetic construct
  source 1..23: mol_type = other RNA
aagtccccgccagagggccccgg

SEQ ID NO: 63681 - RNA, 23 nt, synthetic construct
  source 1..23: mol_type = other RNA
aagtccccgccagagggccccgg

SEQ ID NO: 63682 - RNA, 23 nt, synthetic construct
  source 1..23: mol_type = other RNA
gcactggtgctgcatggcctggg

SEQ ID NO: 63683 - RNA, 23 nt, synthetic construct
  source 1..23: mol_type = other RNA
ggctgtgagcgcactggatgcca

SEQ ID NO: 63684 - RNA, 23 nt, synthetic construct
  source 1..23: mol_type = other RNA
cgtaggccacgcaggtgcccagg

SEQ ID NO: 63685 - RNA, 23 nt, synthetic construct
  source 1..23: mol_type = other RNA
gggtgtccccagagaggcaggta

SEQ ID NO: 63686 - RNA, 23 nt, synthetic construct
  source 1..23: mol_type = other RNA
gcgtgcagccacactcatccacg

SEQ ID NO: 63687 - RNA, 23 nt, synthetic construct
  source 1..23: mol_type = other RNA
cagggcactgtcctctccgttcc

SEQ ID NO: 63688 - RNA, 23 nt, synthetic construct
  source 1..23: mol_type = other RNA
aggacatgccacagccttcctga

SEQ ID NO: 63689 - RNA, 23 nt, synthetic construct
  source 1..23: mol_type = other RNA
ggtgttgttgtggaagaggctgt

SEQ ID NO: 63690 - RNA, 23 nt, synthetic construct
  source 1..23: mol_type = other RNA
ttccaggacatgccacagccttc

SEQ ID NO: 63691 - RNA, 23 nt, synthetic construct
  source 1..23: mol_type = other RNA
tggtggctgtaccaagggtgctt

SEQ ID NO: 63692 - RNA, 23 nt, synthetic construct
  source 1..23: mol_type = other RNA
ccgtggtggtcagcactttggga

SEQ ID NO: 63693 - RNA, 23 nt, synthetic construct
  source 1..23: mol_type = other RNA
ggggtcctcaaagctgttcctgg

SEQ ID NO: 63694 - RNA, 23 nt, synthetic construct
  source 1..23: mol_type = other RNA
ctgctcccagttcctgcacacca

SEQ ID NO: 63695 - RNA, 23 nt, synthetic construct
  source 1..23: mol_type = other RNA
gtagttgcagcagaacacacgga

SEQ ID NO: 63696 - RNA, 23 nt, synthetic construct
  source 1..23: mol_type = other RNA
gtagttgcagcagaacacacgga

SEQ ID NO: 63697 - RNA, 23 nt, synthetic construct
  source 1..23: mol_type = other RNA
gtagttgcagcagaacacacgga

SEQ ID NO: 63698 - RNA, 23 nt, synthetic construct
  source 1..23: mol_type = other RNA
gtagttgcagcagaacacacgga

SEQ ID NO: 63699 - RNA, 23 nt, synthetic construct
  source 1..23: mol_type = other RNA
tggagcaggtggtgccggtggtc

SEQ ID NO: 63700 - RNA, 23 nt, synthetic construct
  source 1..23: mol_type = other RNA
ctttgatgggcaggtgcttgttc

SEQ ID NO: 63701 - RNA, 23 nt, synthetic construct
  source 1..23: mol_type = other RNA
cttggtggagtcaacctgggagc

SEQ ID NO: 63702 - RNA, 23 nt, synthetic construct
  source 1..23: mol_type = other RNA
cagagtggaggagggtgtggccg

SEQ ID NO: 63703 - RNA, 23 nt, synthetic construct
  source 1..23: mol_type = other RNA
cacttcatctggtcctcattgaa

SEQ ID NO: 63704 - RNA, 23 nt, synthetic construct
  source 1..23: mol_type = other RNA
tccccacagcactgcccggccac

SEQ ID NO: 63705 - RNA, 23 nt, synthetic construct
  source 1..23: mol_type = other RNA
gggcactgtcctctccgttccac

SEQ ID NO: 63706 - RNA, 23 nt, synthetic construct
  source 1..23: mol_type = other RNA
tcatctggtcctcattgaagaag

SEQ ID NO: 63707 - RNA, 23 nt, synthetic construct
  source 1..23: mol_type = other RNA
aaccactctgtccactgacaccg

SEQ ID NO: 63708 - RNA, 23 nt, synthetic construct
  source 1..23: mol_type = other RNA
gtggccacccctgggacagtggg

SEQ ID NO: 63709 - RNA, 23 nt, synthetic construct
  source 1..23: mol_type = other RNA
tgtcacccacgcacctggccacc

SEQ ID NO: 63710 - RNA, 23 nt, synthetic construct
  source 1..23: mol_type = other RNA
cgtgcctggggggcagaagcagc

SEQ ID NO: 63711 - RNA, 23 nt, synthetic construct
  source 1..23: mol_type = other RNA
tcatccagcaccgtgcctggggg

SEQ ID NO: 63712 - RNA, 23 nt, synthetic construct
  source 1..23: mol_type = other RNA
gttctgcatgtacttggtgcaga

SEQ ID NO: 63713 - RNA, 23 nt, synthetic construct
  source 1..23: mol_type = other RNA
tcattgaagaagggctggctggg

SEQ ID NO: 63714 - RNA, 23 nt, synthetic construct
  source 1..23: mol_type = other RNA
ctcattgaagaagggctggctgg

SEQ ID NO: 63715 - RNA, 23 nt, synthetic construct
  source 1..23: mol_type = other RNA
ctgtgagcgcactggatgccact

SEQ ID NO: 63716 - RNA, 23 nt, synthetic construct
  source 1..23: mol_type = other RNA
cttgtcgtggagtgggggaccca

SEQ ID NO: 63717 - RNA, 23 nt, synthetic construct
  source 1..23: mol_type = other RNA
cacccctgggacagtgggttctg

SEQ ID NO: 63718 - RNA, 23 nt, synthetic construct
  source 1..23: mol_type = other RNA
atgtggccacccctgggacagtg

SEQ ID NO: 63719 - RNA, 23 nt, synthetic construct
  source 1..23: mol_type = other RNA
tcaaaccactctgtccactcaca

SEQ ID NO: 63720 - RNA, 23 nt, synthetic construct
  source 1..23: mol_type = other RNA
gctggtagctgtgggtgtggtgg

SEQ ID NO: 63721 - RNA, 23 nt, synthetic construct
  source 1..23: mol_type = other RNA
tctgtgatgtgggtggtgcccaa

SEQ ID NO: 63722 - RNA, 23 nt, synthetic construct
  source 1..23: mol_type = other RNA
ttgaagcacatcttgaacttccc

SEQ ID NO: 63723 - RNA, 23 nt, synthetic construct
  source 1..23: mol_type = other RNA
gctggtagctgtgggtgtggtgg

SEQ ID NO: 63724 - RNA, 23 nt, synthetic construct
  source 1..23: mol_type = other RNA
gcactgtgggggtgtgggtggtc

SEQ ID NO: 63725 - RNA, 23 nt, synthetic construct
  source 1..23: mol_type = other RNA
tctgtgatgtgggtggtgcccaa

SEQ ID NO: 63726 - RNA, 23 nt, synthetic construct
  source 1..23: mol_type = other RNA
ttgaagcacatcttgaacttccc

SEQ ID NO: 63727 - RNA, 23 nt, synthetic construct
  source 1..23: mol_type = other RNA
tggtggctgtgcttgtcagcact

SEQ ID NO: 63728 - RNA, 23 nt, synthetic construct
  source 1..23: mol_type = other RNA
gctggtagctgtgggtgtggtgg

SEQ ID NO: 63729 - RNA, 23 nt, synthetic construct
  source 1..23: mol_type = other RNA
tctgtgatgtgggtggtgcccaa

SEQ ID NO: 63730 - RNA, 23 nt, synthetic construct
  source 1..23: mol_type = other RNA
ttgaagcacatcttgaacttccc

SEQ ID NO: 63731 - RNA, 23 nt, synthetic construct
  source 1..23: mol_type = other RNA
gctggtagctgtgggtgtggtgg

SEQ ID NO: 63732 - RNA, 23 nt, synthetic construct
  source 1..23: mol_type = other RNA
gcactgtgggggtgtgggtggtc

SEQ ID NO: 63733 - RNA, 23 nt, synthetic construct
  source 1..23: mol_type = other RNA
tctgtgatgtgggtggtgcccaa

SEQ ID NO: 63734 - RNA, 23 nt, synthetic construct
  source 1..23: mol_type = other RNA
ttgaagcacatcttgaacttccc

SEQ ID NO: 63735 - RNA, 23 nt, synthetic construct
  source 1..23: mol_type = other RNA
tggtggctgtgcttgtcagcact

SEQ ID NO: 63736 - RNA, 23 nt, synthetic construct
  source 1..23: mol_type = other RNA
gctggtagctgtgggtgtggtgg

SEQ ID NO: 63737 - RNA, 23 nt, synthetic construct
  source 1..23: mol_type = other RNA
atggcattgtcacagccaggggc

SEQ ID NO: 63738 - RNA, 23 nt, synthetic construct
  source 1..23: mol_type = other RNA
ggatggcattgtcacagccaggg

SEQ ID NO: 63739 - RNA, 23 nt, synthetic construct
  source 1..23: mol_type = other RNA
gggatggcattgtcacagccagg

SEQ ID NO: 63740 - RNA, 23 nt, synthetic construct
  source 1..23: mol_type = other RNA
gagggatggcattgtcacagcca

SEQ ID NO: 63741 - RNA, 23 nt, synthetic construct
  source 1..23: mol_type = other RNA
gtgtaagaggtgccgtcaaaggt

SEQ ID NO: 63742 - RNA, 23 nt, synthetic construct
  source 1..23: mol_type = other RNA
agacctggctcagcatcagatca

SEQ ID NO: 63743 - RNA, 23 nt, synthetic construct
  source 1..23: mol_type = other RNA
aagacctggctcagcatcagatc

SEQ ID NO: 63744 - RNA, 23 nt, synthetic construct
  source 1..23: mol_type = other RNA
gcaaagacctggctcagcatcag

SEQ ID NO: 63745 - RNA, 23 nt, synthetic construct
  source 1..23: mol_type = other RNA
gttgggtcctgggtgtccccaga

SEQ ID NO: 63746 - RNA, 23 nt, synthetic construct
  source 1..23: mol_type = other RNA
ttttcctgaggctccccctgcag

SEQ ID NO: 63747 - RNA, 23 nt, synthetic construct
  source 1..23: mol_type = other RNA
ggagtcaacctgggagcggcagg

SEQ ID NO: 63748 - RNA, 23 nt, synthetic construct
  source 1..23: mol_type = other RNA
ggctggcaggtggtggtacctgg

SEQ ID NO: 63749 - RNA, 23 nt, synthetic construct
  source 1..23: mol_type = other RNA
tggtgaggactgaggaggacaca

SEQ ID NO: 63750 - RNA, 23 nt, synthetic construct
  source 1..23: mol_type = other RNA
tggaagggcttggggttgatgat

SEQ ID NO: 63751 - RNA, 23 nt, synthetic construct
  source 1..23: mol_type = other RNA
tggtcagcactgtgggggtgtgg

SEQ ID NO: 63752 - RNA, 23 nt, synthetic construct
  source 1..23: mol_type = other RNA
tggtcagcactgtgggggtgtgg

SEQ ID NO: 63753 - RNA, 23 nt, synthetic construct
  source 1..23: mol_type = other RNA
agtggaagggcttggggttgatg

SEQ ID NO: 63754 - RNA, 23 nt, synthetic construct
  source 1..23: mol_type = other RNA
cggagtccgccaggacacacaca

SEQ ID NO: 63755 - RNA, 23 nt, synthetic construct
  source 1..23: mol_type = other RNA
ccaacttctgcaggttcccaaac

SEQ ID NO: 63756 - RNA, 23 nt, synthetic construct
  source 1..23: mol_type = other RNA
caggccgcacatctggccctggt

SEQ ID NO: 63757 - RNA, 23 nt, synthetic construct
  source 1..23: mol_type = other RNA
gcattgtcacagccaggggcagg

SEQ ID NO: 63758 - RNA, 23 nt, synthetic construct
  source 1..23: mol_type = other RNA
gtggggcagcggcacaggtcctg

SEQ ID NO: 63759 - RNA, 23 nt, synthetic construct
  source 1..23: mol_type = other RNA
ccgggttcagggggctcaggctg

SEQ ID NO: 63760 - RNA, 23 nt, synthetic construct
  source 1..23: mol_type = other RNA
agcaggtgccagggcacggcagg

SEQ ID NO: 63761 - RNA, 23 nt, synthetic construct
  source 1..23: mol_type = other RNA
ggaagggcttggggttgatgatg

SEQ ID NO: 63762 - RNA, 23 nt, synthetic construct
  source 1..23: mol_type = other RNA
gacaccagccccgggggacagac

SEQ ID NO: 63763 - RNA, 23 nt, synthetic construct
  source 1..23: mol_type = other RNA
gcagccacagccgtgcagaaaca

SEQ ID NO: 63764 - RNA, 23 nt, synthetic construct
  source 1..23: mol_type = other RNA
aggcagccacagccgtgcagaaa

SEQ ID NO: 63765 - RNA, 23 nt, synthetic construct
  source 1..23: mol_type = other RNA
ccacgcacttcatctggtcctca

SEQ ID NO: 63766 - RNA, 23 nt, synthetic construct
  source 1..23: mol_type = other RNA
gagttccaggacatgccacagcc

SEQ ID NO: 63767 - RNA, 23 nt, synthetic construct
  source 1..23: mol_type = other RNA
ccgttcttgctgaaaccgctgct

SEQ ID NO: 63768 - RNA, 23 nt, synthetic construct
  source 1..23: mol_type = other RNA
tcccagttcctgcacaccaggcc

SEQ ID NO: 63769 - RNA, 23 nt, synthetic construct
  source 1..23: mol_type = other RNA
gtgtccccagagaggcaggtaca

SEQ ID NO: 63770 - RNA, 23 nt, synthetic construct
  source 1..23: mol_type = other RNA
ggaagaggctgtagggcagccgg

SEQ ID NO: 63771 - RNA, 23 nt, synthetic construct
  source 1..23: mol_type = other RNA
ctcccagttcctgcacaccaggc

SEQ ID NO: 63772 - RNA, 23 nt, synthetic construct
  source 1..23: mol_type = other RNA
ggtggtgaggactgaggaggaca

SEQ ID NO: 63773 - RNA, 23 nt, synthetic construct
  source 1..23: mol_type = other RNA
ctggcagcaggtgcactggtgct

SEQ ID NO: 63774 - RNA, 23 nt, synthetic construct
  source 1..23: mol_type = other RNA
agcaccagcccctgggccttgat

SEQ ID NO: 63775 - RNA, 23 nt, synthetic construct
  source 1..23: mol_type = other RNA
tccagcctgacaaacacctgcat

SEQ ID NO: 63776 - RNA, 23 nt, synthetic construct
  source 1..23: mol_type = other RNA
gccacgcaggtgcccaggcagag

SEQ ID NO: 63777 - RNA, 23 nt, synthetic construct
  source 1..23: mol_type = other RNA
agagcttgatggccttggagcag

SEQ ID NO: 63778 - RNA, 23 nt, synthetic construct
  source 1..23: mol_type = other RNA
taggcagccacagccgtgcagaa

SEQ ID NO: 63779 - RNA, 23 nt, synthetic construct
  source 1..23: mol_type = other RNA
caccggggctggcaggtggtggt

SEQ ID NO: 63780 - RNA, 23 nt, synthetic construct
  source 1..23: mol_type = other RNA
tgggttctgtggagcctgcaggc

SEQ ID NO: 63781 - RNA, 23 nt, synthetic construct
  source 1..23: mol_type = other RNA
gtccccagagaggcaggtacaca

SEQ ID NO: 63782 - RNA, 23 nt, synthetic construct
  source 1..23: mol_type = other RNA
cctcctcacaggagtagcagcag

SEQ ID NO: 63783 - RNA, 23 nt, synthetic construct
  source 1..23: mol_type = other RNA
gggcaccgtctcctcgtggaccc

SEQ ID NO: 63784 - RNA, 23 nt, synthetic construct
  source 1..23: mol_type = other RNA
ctgaccaggcacactggggctca

SEQ ID NO: 63785 - RNA, 23 nt, synthetic construct
  source 1..23: mol_type = other RNA
cacatcttgaacttccccacctg

SEQ ID NO: 63786 - RNA, 23 nt, synthetic construct
  source 1..23: mol_type = other RNA
ctgaccaggcacactggggctca

SEQ ID NO: 63787 - RNA, 23 nt, synthetic construct
  source 1..23: mol_type = other RNA
cacatcttgaacttccccacctg

SEQ ID NO: 63788 - RNA, 23 nt, synthetic construct
  source 1..23: mol_type = other RNA
ctgaccaggcacactggggctca

SEQ ID NO: 63789 - RNA, 23 nt, synthetic construct
  source 1..23: mol_type = other RNA
cacatcttgaacttccccacctg

SEQ ID NO: 63790 - RNA, 23 nt, synthetic construct
  source 1..23: mol_type = other RNA
ctgaccaggcacactggggctca

SEQ ID NO: 63791 - RNA, 23 nt, synthetic construct
  source 1..23: mol_type = other RNA
cacatcttgaacttccccacctg

SEQ ID NO: 63792 - RNA, 23 nt, synthetic construct
  source 1..23: mol_type = other RNA
cgtcattgaggaaggtgcccgcg

SEQ ID NO: 63793 - RNA, 23 nt, synthetic construct
  source 1..23: mol_type = other RNA
tgtagatggagttgaggaacacg

SEQ ID NO: 63794 - RNA, 23 nt, synthetic construct
  source 1..23: mol_type = other RNA
cacaggccacaggtctggttggc

SEQ ID NO: 63795 - RNA, 23 nt, synthetic construct
  source 1..23: mol_type = other RNA
cctggtaccctctctgcctcagg

SEQ ID NO: 63796 - RNA, 23 nt, synthetic construct
  source 1..23: mol_type = other RNA
ggatgtggccacccctgggacag

SEQ ID NO: 63797 - RNA, 23 nt, synthetic construct
  source 1..23: mol_type = other RNA
gagggtgtgaacagggtgatgtt

SEQ ID NO: 63798 - RNA, 23 nt, synthetic construct
  source 1..23: mol_type = other RNA
agggtgtgaacagggtgatgttg

SEQ ID NO: 63799 - RNA, 23 nt, synthetic construct
  source 1..23: mol_type = other RNA
gttcgagtggaagggcttggggt

SEQ ID NO: 63800 - RNA, 23 nt, synthetic construct
  source 1..23: mol_type = other RNA
agttcgagtggaagggcttgggg

SEQ ID NO: 63801 - RNA, 23 nt, synthetic construct
  source 1..23: mol_type = other RNA
gacatgccacagccttcctgatg

SEQ ID NO: 63802 - RNA, 23 nt, synthetic construct
  source 1..23: mol_type = other RNA
gacaccggggctggcaggtggtg

SEQ ID NO: 63803 - RNA, 23 nt, synthetic construct
  source 1..23: mol_type = other RNA
gtgcagttacagctctggcagtt

SEQ ID NO: 63804 - RNA, 23 nt, synthetic construct
  source 1..23: mol_type = other RNA
gtgttgttgtggaagaggctgta

SEQ ID NO: 63805 - RNA, 23 nt, synthetic construct
  source 1..23: mol_type = other RNA
caggcctcaaggctgtgagcgca

SEQ ID NO: 63806 - RNA, 23 nt, synthetic construct
  source 1..23: mol_type = other RNA
aagctggtagctgtgggtgtggt

SEQ ID NO: 63807 - RNA, 23 nt, synthetic construct
  source 1..23: mol_type = other RNA
aagctggtagctgtgggtgtggt

SEQ ID NO: 63808 - RNA, 23 nt, synthetic construct
  source 1..23: mol_type = other RNA
aagctggtagctgtgggtgtggt

SEQ ID NO: 63809 - RNA, 23 nt, synthetic construct
  source 1..23: mol_type = other RNA
caccaggcagtgcccactggggt

SEQ ID NO: 63810 - RNA, 23 nt, synthetic construct
  source 1..23: mol_type = other RNA
aggtggggcagcggcacaggtcc

SEQ ID NO: 63811 - RNA, 23 nt, synthetic construct
  source 1..23: mol_type = other RNA
gcaggctccgtgctggcactgag

SEQ ID NO: 63812 - RNA, 23 nt, synthetic construct
  source 1..23: mol_type = other RNA
gctcaggctggggaagacagtga

SEQ ID NO: 63813 - RNA, 23 nt, synthetic construct
  source 1..23: mol_type = other RNA
gccgggttcagggggctcaggct

SEQ ID NO: 63814 - RNA, 23 nt, synthetic construct
  source 1..23: mol_type = other RNA
gggtgaccacaggcctggagccc

SEQ ID NO: 63815 - RNA, 23 nt, synthetic construct
  source 1..23: mol_type = other RNA
cgggtgaccacaggcctggagcc

SEQ ID NO: 63816 - RNA, 23 nt, synthetic construct
  source 1..23: mol_type = other RNA
ccagcaccgtgcctggggggcag

SEQ ID NO: 63817 - RNA, 23 nt, synthetic construct
  source 1..23: mol_type = other RNA
ccagggcacggcaggtcctggca

SEQ ID NO: 63818 - RNA, 23 nt, synthetic construct
  source 1..23: mol_type = other RNA
gcagtgtgtgctgaaacagccca

SEQ ID NO: 63819 - RNA, 23 nt, synthetic construct
  source 1..23: mol_type = other RNA
tggtcccacaggggatgttctcg

SEQ ID NO: 63820 - RNA, 23 nt, synthetic construct
  source 1..23: mol_type = other RNA
aacctgggagcggcaggcggcga

SEQ ID NO: 63821 - RNA, 23 nt, synthetic construct
  source 1..23: mol_type = other RNA
ggtccaccaggcagtgcccactg

SEQ ID NO: 63822 - RNA, 23 nt, synthetic construct
  source 1..23: mol_type = other RNA
aggtccaccaggcagtgcccact

SEQ ID NO: 63823 - RNA, 23 nt, synthetic construct
  source 1..23: mol_type = other RNA
gttccaggacatgccacagcctt

SEQ ID NO: 63824 - RNA, 23 nt, synthetic construct
  source 1..23: mol_type = other RNA
ctcctgctcccagttcctgcaca

SEQ ID NO: 63825 - RNA, 23 nt, synthetic construct
  source 1..23: mol_type = other RNA
gagggtggggactgctgtggtgc

SEQ ID NO: 63826 - RNA, 23 nt, synthetic construct
  source 1..23: mol_type = other RNA
gatgtggccacccctgggacagt

SEQ ID NO: 63827 - RNA, 23 nt, synthetic construct
  source 1..23: mol_type = other RNA
gtccctagggcagaggagggagt

SEQ ID NO: 63828 - RNA, 23 nt, synthetic construct
  source 1..23: mol_type = other RNA
gtccctagggcagaggagggagt

SEQ ID NO: 63829 - RNA, 23 nt, synthetic construct
  source 1..23: mol_type = other RNA
gtccctagggcagaggagggagt

SEQ ID NO: 63830 - RNA, 23 nt, synthetic construct
  source 1..23: mol_type = other RNA
gtccctagggcagaggagggagt

SEQ ID NO: 63831 - RNA, 23 nt, synthetic construct
  source 1..23: mol_type = other RNA
gactgaggaggacacagtggaca

SEQ ID NO: 63832 - RNA, 23 nt, synthetic construct
  source 1..23: mol_type = other RNA
gcactcatagtggaagtcacagg

SEQ ID NO: 63833 - RNA, 23 nt, synthetic construct
  source 1..23: mol_type = other RNA
ggctcagcatcagatcacagagc

SEQ ID NO: 63834 - RNA, 23 nt, synthetic construct
  source 1..23: mol_type = other RNA
cgtaggcagccacagccgtgcag

SEQ ID NO: 63835 - RNA, 23 nt, synthetic construct
  source 1..23: mol_type = other RNA
caggagtcctcctcacaggagta

SEQ ID NO: 63836 - RNA, 23 nt, synthetic construct
  source 1..23: mol_type = other RNA
gccatcaaaggtgatgaagtggc

SEQ ID NO: 63837 - RNA, 23 nt, synthetic construct
  source 1..23: mol_type = other RNA
ggagtcctcctcacaggagtagc

SEQ ID NO: 63838 - RNA, 23 nt, synthetic construct
  source 1..23: mol_type = other RNA
gcactcggccccaggggtgcccg

SEQ ID NO: 63839 - RNA, 23 nt, synthetic construct
  source 1..23: mol_type = other RNA
ggtcgtccccggagtggaggagg

SEQ ID NO: 63840 - RNA, 23 nt, synthetic construct
  source 1..23: mol_type = other RNA
ggtcgtccccggagtggaggagg

SEQ ID NO: 63841 - RNA, 23 nt, synthetic construct
  source 1..23: mol_type = other RNA
ggtcgtccccggagtggaggagg

SEQ ID NO: 63842 - RNA, 23 nt, synthetic construct
  source 1..23: mol_type = other RNA
ggtcgtccccggagtggaggagg

SEQ ID NO: 63843 - RNA, 23 nt, synthetic construct
  source 1..23: mol_type = other RNA
tggtgccggtggtcccacagggg

SEQ ID NO: 63844 - RNA, 23 nt, synthetic construct
  source 1..23: mol_type = other RNA
cctggtgggcggggtccagcctg

SEQ ID NO: 63845 - RNA, 23 nt, synthetic construct
  source 1..23: mol_type = other RNA
cataggaggacagcgcggcgcac

SEQ ID NO: 63846 - RNA, 23 nt, synthetic construct
  source 1..23: mol_type = other RNA
gccggtggctgcactcccacctc

SEQ ID NO: 63847 - RNA, 23 nt, synthetic construct
  source 1..23: mol_type = other RNA
gggttgtagaagtcacagaacaa

SEQ ID NO: 63848 - RNA, 23 nt, synthetic construct
  source 1..23: mol_type = other RNA
tgggttgtagaagtcacagaaca

SEQ ID NO: 63849 - RNA, 23 nt, synthetic construct
  source 1..23: mol_type = other RNA
agtgtgtgctgaaacagcccacg

SEQ ID NO: 63850 - RNA, 23 nt, synthetic construct
  source 1..23: mol_type = other RNA
gccatgggcgcagggacacagaa

SEQ ID NO: 63851 - RNA, 23 nt, synthetic construct
  source 1..23: mol_type = other RNA
agcggcacaggtcctgggcgcag

SEQ ID NO: 63852 - RNA, 23 nt, synthetic construct
  source 1..23: mol_type = other RNA
ggtgggcggggtccagcctgaca

SEQ ID NO: 63853 - RNA, 23 nt, synthetic construct
  source 1..23: mol_type = other RNA
catcttgaacttccccacctgct

SEQ ID NO: 63854 - RNA, 23 nt, synthetic construct
  source 1..23: mol_type = other RNA
catcttgaacttccccacctgct

SEQ ID NO: 63855 - RNA, 23 nt, synthetic construct
  source 1..23: mol_type = other RNA
catcttgaacttccccacctgct

SEQ ID NO: 63856 - RNA, 23 nt, synthetic construct
  source 1..23: mol_type = other RNA
catcttgaacttccccacctgct

SEQ ID NO: 63857 - RNA, 23 nt, synthetic construct
  source 1..23: mol_type = other RNA
tccagcagggcactgtcctctcc

SEQ ID NO: 63858 - RNA, 23 nt, synthetic construct
  source 1..23: mol_type = other RNA
gcaagggcagcgggtccgggcac

SEQ ID NO: 63859 - RNA, 23 nt, synthetic construct
  source 1..23: mol_type = other RNA
ctggtgggcggggtccagcctga

SEQ ID NO: 63860 - RNA, 23 nt, synthetic construct
  source 1..23: mol_type = other RNA
gtgcttttctgcagagaggctcc

SEQ ID NO: 63861 - RNA, 23 nt, synthetic construct
  source 1..23: mol_type = other RNA
cactcggccccaggggtgcccgc

SEQ ID NO: 63862 - RNA, 23 nt, synthetic construct
  source 1..23: mol_type = other RNA
acagtgggttctgtggagcctgc

SEQ ID NO: 63863 - RNA, 23 nt, synthetic construct
  source 1..23: mol_type = other RNA
gcagaagcagggagtagagaagt

SEQ ID NO: 63864 - RNA, 23 nt, synthetic construct
  source 1..23: mol_type = other RNA
ctgtagggcagccgggcctggaa

SEQ ID NO: 63865 - RNA, 23 nt, synthetic construct
  source 1..23: mol_type = other RNA
gagtcctcctcacaggagtagca

SEQ ID NO: 63866 - RNA, 23 nt, synthetic construct
  source 1..23: mol_type = other RNA
ttgtcgtggagtgggggacccag

SEQ ID NO: 63867 - RNA, 23 nt, synthetic construct
  source 1..23: mol_type = other RNA
aaaccgctgctcaccggaatttg

SEQ ID NO: 63868 - RNA, 23 nt, synthetic construct
  source 1..23: mol_type = other RNA
gtcctggaggtggccgtggtgtg

SEQ ID NO: 63869 - RNA, 23 nt, synthetic construct
  source 1..23: mol_type = other RNA
gtcctggaggtggccgtggtgtg

SEQ ID NO: 63870 - RNA, 23 nt, synthetic construct
  source 1..23: mol_type = other RNA
accctgcccttgtagtcctggtg

SEQ ID NO: 63871 - RNA, 23 nt, synthetic construct
  source 1..23: mol_type = other RNA
tgaccacaggcctggagcccact

SEQ ID NO: 63872 - RNA, 23 nt, synthetic construct
  source 1..23: mol_type = other RNA
tccggcaggtttttaggcagggt

SEQ ID NO: 63873 - RNA, 23 nt, synthetic construct
  source 1..23: mol_type = other RNA
cagccttccaggccaggcaggtc

SEQ ID NO: 63874 - RNA, 23 nt, synthetic construct
  source 1..23: mol_type = other RNA
tccaagttgttcagacttggggt

SEQ ID NO: 63875 - RNA, 23 nt, synthetic construct
  source 1..23: mol_type = other RNA
gacagtgggttctgtggagcctg

SEQ ID NO: 63876 - RNA, 23 nt, synthetic construct
  source 1..23: mol_type = other RNA
cctggcccaactcccgcaggggg

SEQ ID NO: 63877 - RNA, 23 nt, synthetic construct
  source 1..23: mol_type = other RNA
cctggcccaactcccgcaggggg

SEQ ID NO: 63878 - RNA, 23 nt, synthetic construct
  source 1..23: mol_type = other RNA
cctggcccaactcccgcaggggg

SEQ ID NO: 63879 - RNA, 23 nt, synthetic construct
  source 1..23: mol_type = other RNA
cattgtcacagccaggggcaggg

SEQ ID NO: 63880 - RNA, 23 nt, synthetic construct
  source 1..23: mol_type = other RNA
ctcctcacaggagtagcagcagc

SEQ ID NO: 63881 - RNA, 23 nt, synthetic construct
  source 1..23: mol_type = other RNA
attgtcacagccaggggcagggg

SEQ ID NO: 63882 - RNA, 23 nt, synthetic construct
  source 1..23: mol_type = other RNA
cacaggggatgttctcggtgacg

SEQ ID NO: 63883 - RNA, 23 nt, synthetic construct
  source 1..23: mol_type = other RNA
gggacaccaggctgggcctgggc

SEQ ID NO: 63884 - RNA, 23 nt, synthetic construct
  source 1..23: mol_type = other RNA
gggacaccaggctgggcctgggc

SEQ ID NO: 63885 - RNA, 23 nt, synthetic construct
  source 1..23: mol_type = other RNA
gggacaccaggctgggcctgggc

SEQ ID NO: 63886 - RNA, 23 nt, synthetic construct
  source 1..23: mol_type = other RNA
gggacaccaggctgggcctgggc

SEQ ID NO: 63887 - RNA, 23 nt, synthetic construct
  source 1..23: mol_type = other RNA
tccaggagccagcacggtgccgt

SEQ ID NO: 63888 - RNA, 23 nt, synthetic construct
  source 1..23: mol_type = other RNA
aggccacgcaggtgcccaggcag

SEQ ID NO: 63889 - RNA, 23 nt, synthetic construct
  source 1..23: mol_type = other RNA
gtagtgccactcacagcccccat

SEQ ID NO: 63890 - RNA, 23 nt, synthetic construct
  source 1..23: mol_type = other RNA
agcagccttccaggccaggcagg

SEQ ID NO: 63891 - RNA, 23 nt, synthetic construct
  source 1..23: mol_type = other RNA
cacactggggctcacagcccgtg

SEQ ID NO: 63892 - RNA, 23 nt, synthetic construct
  source 1..23: mol_type = other RNA
cacactggggctcacagcccgtg

SEQ ID NO: 63893 - RNA, 23 nt, synthetic construct
  source 1..23: mol_type = other RNA
agggatggcattgtcacagccag

SEQ ID NO: 63894 - RNA, 23 nt, synthetic construct
  source 1..23: mol_type = other RNA
gttgttgtggaagaggctgtagg

SEQ ID NO: 63895 - RNA, 23 nt, synthetic construct
  source 1..23: mol_type = other RNA
tgggtgtccccagagaggcaggt

SEQ ID NO: 63896 - RNA, 23 nt, synthetic construct
  source 1..23: mol_type = other RNA
gggcaggatgcaggctgtggggt

SEQ ID NO: 63897 - RNA, 23 nt, synthetic construct
  source 1..23: mol_type = other RNA
ggttttcctgaggctccccctgc

SEQ ID NO: 63898 - RNA, 23 nt, synthetic construct
  source 1..23: mol_type = other RNA
acaggccgcacatctggccctgg

SEQ ID NO: 63899 - RNA, 23 nt, synthetic construct
  source 1..23: mol_type = other RNA
aagtggccatccccgtaggccac

SEQ ID NO: 63900 - RNA, 23 nt, synthetic construct
  source 1..23: mol_type = other RNA
tctcgatgaccaggaagatcccc

SEQ ID NO: 63901 - RNA, 23 nt, synthetic construct
  source 1..23: mol_type = other RNA
tggccgtggtggtcagcactttg

SEQ ID NO: 63902 - RNA, 23 nt, synthetic construct
  source 1..23: mol_type = other RNA
cgcaaaggccggccccagcaggg

SEQ ID NO: 63903 - RNA, 23 nt, synthetic construct
  source 1..23: mol_type = other RNA
gggacagacacagccggacacgc

SEQ ID NO: 63904 - RNA, 23 nt, synthetic construct
  source 1..23: mol_type = other RNA
atgaccaggaagatccccatgta

SEQ ID NO: 63905 - RNA, 23 nt, synthetic construct
  source 1..23: mol_type = other RNA
ggcaggtggtggtacctggggcc

SEQ ID NO: 63906 - RNA, 23 nt, synthetic construct
  source 1..23: mol_type = other RNA
ggttcagggggctcaggctgggg

SEQ ID NO: 63907 - RNA, 23 nt, synthetic construct
  source 1..23: mol_type = other RNA
tacttggtggagtcaacctggga

SEQ ID NO: 63908 - RNA, 23 nt, synthetic construct
  source 1..23: mol_type = other RNA
ccggagtggaggagggcatggcc

SEQ ID NO: 63909 - RNA, 23 nt, synthetic construct
  source 1..23: mol_type = other RNA
cagcactgtgggggtgtgggtgg

SEQ ID NO: 63910 - RNA, 23 nt, synthetic construct
  source 1..23: mol_type = other RNA
cagcactgtgggggtgtgggtgg

SEQ ID NO: 63911 - RNA, 23 nt, synthetic construct
  source 1..23: mol_type = other RNA
ccggagtggaggagggcatggcc

SEQ ID NO: 63912 - RNA, 23 nt, synthetic construct
  source 1..23: mol_type = other RNA
cttccggtcccaggacacggcca

SEQ ID NO: 63913 - RNA, 23 nt, synthetic construct
  source 1..23: mol_type = other RNA
gatgggcaggtgcttgttcacgc

SEQ ID NO: 63914 - RNA, 23 nt, synthetic construct
  source 1..23: mol_type = other RNA
caggctggggaagacagtgacgg

SEQ ID NO: 63915 - RNA, 23 nt, synthetic construct
  source 1..23: mol_type = other RNA
cgggttcagggggctcaggctgg

SEQ ID NO: 63916 - RNA, 23 nt, synthetic construct
  source 1..23: mol_type = other RNA
ccagccggatgctgaccttgatg

SEQ ID NO: 63917 - RNA, 23 nt, synthetic construct
  source 1..23: mol_type = other RNA
accagccggatgctgaccttgat

SEQ ID NO: 63918 - RNA, 23 nt, synthetic construct
  source 1..23: mol_type = other RNA
tgggtgcaggggcactgcccgag

SEQ ID NO: 63919 - RNA, 23 nt, synthetic construct
  source 1..23: mol_type = other RNA
gtgtccccgccgtccaggctgag

SEQ ID NO: 63920 - RNA, 23 nt, synthetic construct
  source 1..23: mol_type = other RNA
gcggggtccagcctgacaaacac

SEQ ID NO: 63921 - RNA, 23 nt, synthetic construct
  source 1..23: mol_type = other RNA
tcctcaaagctgttcctggcatt

SEQ ID NO: 63922 - RNA, 23 nt, synthetic construct
  source 1..23: mol_type = other RNA
gtcctcaaagctgttcctggcat

SEQ ID NO: 63923 - RNA, 23 nt, synthetic construct
  source 1..23: mol_type = other RNA
gcgtcattgaggaaggtgcccgc

SEQ ID NO: 63924 - RNA, 23 nt, synthetic construct
  source 1..23: mol_type = other RNA
cgcgtcattgaggaaggtgcccg

SEQ ID NO: 63925 - RNA, 23 nt, synthetic construct
  source 1..23: mol_type = other RNA
agcttgatggccttggagcaggt

SEQ ID NO: 63926 - RNA, 23 nt, synthetic construct
  source 1..23: mol_type = other RNA
gaagagcttgatggccttggagc

SEQ ID NO: 63927 - RNA, 23 nt, synthetic construct
  source 1..23: mol_type = other RNA
tcgggtagcagccttccaggcca

SEQ ID NO: 63928 - RNA, 23 nt, synthetic construct
  source 1..23: mol_type = other RNA
cagttacagctctggcagttctc

SEQ ID NO: 63929 - RNA, 23 nt, synthetic construct
  source 1..23: mol_type = other RNA
aggcacagcaggctccgtgctgg

SEQ ID NO: 63930 - RNA, 23 nt, synthetic construct
  source 1..23: mol_type = other RNA
ggggcctgagctggacccagtct

SEQ ID NO: 63931 - RNA, 23 nt, synthetic construct
  source 1..23: mol_type = other RNA
gtccactgacaccggggctggca

SEQ ID NO: 63932 - RNA, 23 nt, synthetic construct
  source 1..23: mol_type = other RNA
cccctccaagttgttcagacttg

SEQ ID NO: 63933 - RNA, 23 nt, synthetic construct
  source 1..23: mol_type = other RNA
cagttcctgcacaccaggccgaa

SEQ ID NO: 63934 - RNA, 23 nt, synthetic construct
  source 1..23: mol_type = other RNA
gccacccctgggacagtgggttc

SEQ ID NO: 63935 - RNA, 23 nt, synthetic construct
  source 1..23: mol_type = other RNA
tggatgtggccacccctgggaca

SEQ ID NO: 63936 - RNA, 23 nt, synthetic construct
  source 1..23: mol_type = other RNA
agctctggaggttgccattgttg

SEQ ID NO: 63937 - RNA, 23 nt, synthetic construct
  source 1..23: mol_type = other RNA
gtggtcctggaggtggccgtggt

SEQ ID NO: 63938 - RNA, 23 nt, synthetic construct
  source 1..23: mol_type = other RNA
caggcacactggggctcacagcc

SEQ ID NO: 63939 - RNA, 23 nt, synthetic construct
  source 1..23: mol_type = other RNA
gtccccggagtggaggagggcat

SEQ ID NO: 63940 - RNA, 23 nt, synthetic construct
  source 1..23: mol_type = other RNA
caggcacactggggctcacagcc

SEQ ID NO: 63941 - RNA, 23 nt, synthetic construct
  source 1..23: mol_type = other RNA
caggcacactggggctcacagcc

SEQ ID NO: 63942 - RNA, 23 nt, synthetic construct
  source 1..23: mol_type = other RNA
gtggtcctggaggtggccgtggt

SEQ ID NO: 63943 - RNA, 23 nt, synthetic construct
  source 1..23: mol_type = other RNA
caggcacactggggctcacagcc

SEQ ID NO: 63944 - RNA, 23 nt, synthetic construct
  source 1..23: mol_type = other RNA
gtccccggagtggaggagggcat

SEQ ID NO: 63945 - RNA, 23 nt, synthetic construct
  source 1..23: mol_type = other RNA
gagaagtgggagctggggaagcc

SEQ ID NO: 63946 - RNA, 23 nt, synthetic construct
  source 1..23: mol_type = other RNA
gtagagaagtgggagctggggaa

SEQ ID NO: 63947 - RNA, 23 nt, synthetic construct
  source 1..23: mol_type = other RNA
caaatgccctgcagaagcaggga

SEQ ID NO: 63948 - RNA, 23 nt, synthetic construct
  source 1..23: mol_type = other RNA
gttgtggaagaggctgtagggca

SEQ ID NO: 63949 - RNA, 23 nt, synthetic construct
  source 1..23: mol_type = other RNA
tcgccagtcactgcacactcccc

SEQ ID NO: 63950 - RNA, 23 nt, synthetic construct
  source 1..23: mol_type = other RNA
ttgggtcctgggtgtccccagag

SEQ ID NO: 63951 - RNA, 23 nt, synthetic construct
  source 1..23: mol_type = other RNA
tcctcacaggagtagcagcagcc

SEQ ID NO: 63952 - RNA, 23 nt, synthetic construct
  source 1..23: mol_type = other RNA
ctgcatggcctgggcctctgctg

SEQ ID NO: 63953 - RNA, 23 nt, synthetic construct
  source 1..23: mol_type = other RNA
gtccccgccgtccaggctgagcg

SEQ ID NO: 63954 - RNA, 23 nt, synthetic construct
  source 1..23: mol_type = other RNA
ggtgccccgcagggctggtagtg

SEQ ID NO: 63955 - RNA, 23 nt, synthetic construct
  source 1..23: mol_type = other RNA
cgtgtccccgccgtccaggctga

SEQ ID NO: 63956 - RNA, 23 nt, synthetic construct
  source 1..23: mol_type = other RNA
aggcaggtccaccaggcagtgcc

SEQ ID NO: 63957 - RNA, 23 nt, synthetic construct
  source 1..23: mol_type = other RNA
caaaccactctgtccactgacac

SEQ ID NO: 63958 - RNA, 23 nt, synthetic construct
  source 1..23: mol_type = other RNA
tagttgaagcacatcttgaactt

SEQ ID NO: 63959 - RNA, 23 nt, synthetic construct
  source 1..23: mol_type = other RNA
tagttgaagcacatcttgaactt

SEQ ID NO: 63960 - RNA, 23 nt, synthetic construct
  source 1..23: mol_type = other RNA
tagttgaagcacatcttgaactt

SEQ ID NO: 63961 - RNA, 23 nt, synthetic construct
  source 1..23: mol_type = other RNA
tagttgaagcacatcttgaactt

SEQ ID NO: 63962 - RNA, 23 nt, synthetic construct
  source 1..23: mol_type = other RNA
cagctccagcagggcactgtcct

SEQ ID NO: 63963 - RNA, 23 nt, synthetic construct
  source 1..23: mol_type = other RNA
tgcaggttcccaaactggagcgg

SEQ ID NO: 63964 - RNA, 23 nt, synthetic construct
  source 1..23: mol_type = other RNA
gcagcggcacaggtcctgggcgc

SEQ ID NO: 63965 - RNA, 23 nt, synthetic construct
  source 1..23: mol_type = other RNA
cgtgcacataggaggacagcgcg

SEQ ID NO: 63966 - RNA, 23 nt, synthetic construct
  source 1..23: mol_type = other RNA
cggacacgcagtgtgtgctgaaa

SEQ ID NO: 63967 - RNA, 23 nt, synthetic construct
  source 1..23: mol_type = other RNA
gtgcaggcctcaaggctgtgagc

SEQ ID NO: 63968 - RNA, 23 nt, synthetic construct
  source 1..23: mol_type = other RNA
gcagggggacaccaggctgggcc

SEQ ID NO: 63969 - RNA, 23 nt, synthetic construct
  source 1..23: mol_type = other RNA
gcagggggacaccaggctgggcc

SEQ ID NO: 63970 - RNA, 23 nt, synthetic construct
  source 1..23: mol_type = other RNA
gcagggggacaccaggctgggcc

SEQ ID NO: 63971 - RNA, 23 nt, synthetic construct
  source 1..23: mol_type = other RNA
cgtggtcctggaggtggccgtgg

SEQ ID NO: 63972 - RNA, 23 nt, synthetic construct
  source 1..23: mol_type = other RNA
acaggccacaggtctggttggcg

SEQ ID NO: 63973 - RNA, 23 nt, synthetic construct
  source 1..23: mol_type = other RNA
acgggcaggtggggcagcggcac

SEQ ID NO: 63974 - RNA, 23 nt, synthetic construct
  source 1..23: mol_type = other RNA
tggtggccgtggtggtcagcact

SEQ ID NO: 63975 - RNA, 23 nt, synthetic construct
  source 1..23: mol_type = other RNA
ccccgccgtccaggctgagcgtc

SEQ ID NO: 63976 - RNA, 23 nt, synthetic construct
  source 1..23: mol_type = other RNA
gaagcagggagtagagaagtggg

SEQ ID NO: 63977 - RNA, 23 nt, synthetic construct
  source 1..23: mol_type = other RNA
aacttctgcaggttcccaaactg

SEQ ID NO: 63978 - RNA, 23 nt, synthetic construct
  source 1..23: mol_type = other RNA
ggcacaggtcctgggcgcaggcg

SEQ ID NO: 63979 - RNA, 23 nt, synthetic construct
  source 1..23: mol_type = other RNA
tgtccccgccgtccaggctgagc

SEQ ID NO: 63980 - RNA, 23 nt, synthetic construct
  source 1..23: mol_type = other RNA
gggtcctcaaagctgttcctggc

SEQ ID NO: 63981 - RNA, 23 nt, synthetic construct
  source 1..23: mol_type = other RNA
tgtgcttttctgcagagaggctc

SEQ ID NO: 63982 - RNA, 23 nt, synthetic construct
  source 1..23: mol_type = other RNA
tggctgcactcccacctccggtt

SEQ ID NO: 63983 - RNA, 23 nt, synthetic construct
  source 1..23: mol_type = other RNA
ccaggacatgccacagccttcct

SEQ ID NO: 63984 - RNA, 23 nt, synthetic construct
  source 1..23: mol_type = other RNA
acttggggtagtcctcatcaaac

SEQ ID NO: 63985 - RNA, 23 nt, synthetic construct
  source 1..23: mol_type = other RNA
gagctctggaggttgccattgtt

SEQ ID NO: 63986 - RNA, 23 nt, synthetic construct
  source 1..23: mol_type = other RNA
tagaggagggtgttgccatagaa

SEQ ID NO: 63987 - RNA, 23 nt, synthetic construct
  source 1..23: mol_type = other RNA
tggtcctggaggtggccgtggtg

SEQ ID NO: 63988 - RNA, 23 nt, synthetic construct
  source 1..23: mol_type = other RNA
tagaggagggtgttgccatagaa

SEQ ID NO: 63989 - RNA, 23 nt, synthetic construct
  source 1..23: mol_type = other RNA
tagaggagggtgttgccatagaa

SEQ ID NO: 63990 - RNA, 23 nt, synthetic construct
  source 1..23: mol_type = other RNA
tagaggagggtgttgccatagaa

SEQ ID NO: 63991 - RNA, 23 nt, synthetic construct
  source 1..23: mol_type = other RNA
tggtcctggaggtggccgtggtg

SEQ ID NO: 63992 - RNA, 23 nt, synthetic construct
  source 1..23: mol_type = other RNA
tagaggagggtgttgccatagaa

SEQ ID NO: 63993 - RNA, 23 nt, synthetic construct
  source 1..23: mol_type = other RNA
gttcctgcacaccaggccgaagt

SEQ ID NO: 63994 - RNA, 23 nt, synthetic construct
  source 1..23: mol_type = other RNA
aaaccactctgtccactcacact

SEQ ID NO: 63995 - RNA, 23 nt, synthetic construct
  source 1..23: mol_type = other RNA
tctggtcctcattgaagaagggc

SEQ ID NO: 63996 - RNA, 23 nt, synthetic construct
  source 1..23: mol_type = other RNA
tgttggctgccgacaggggcagc

SEQ ID NO: 63997 - RNA, 23 nt, synthetic construct
  source 1..23: mol_type = other RNA
cacacaggccgcacatctggccc

SEQ ID NO: 63998 - RNA, 23 nt, synthetic construct
  source 1..23: mol_type = other RNA
cttgctgaaaccgctgctcaccg

SEQ ID NO: 63999 - RNA, 23 nt, synthetic construct
  source 1..23: mol_type = other RNA
cacgcaggactggcagttgctga

SEQ ID NO: 64000 - RNA, 23 nt, synthetic construct
  source 1..23: mol_type = other RNA
ggggctcaggctggggaagacag

SEQ ID NO: 64001 - RNA, 23 nt, synthetic construct
  source 1..23: mol_type = other RNA
gcaggtgcaggagctgcaggtgg

SEQ ID NO: 64002 - RNA, 23 nt, synthetic construct
  source 1..23: mol_type = other RNA
tccccgccgtccaggctgagcgt

SEQ ID NO: 64003 - RNA, 23 nt, synthetic construct
  source 1..23: mol_type = other RNA
gccgacaggggcagctgcgtgta

SEQ ID NO: 64004 - RNA, 23 nt, synthetic construct
  source 1..23: mol_type = other RNA
ctgggccttccaggtgttggcga

SEQ ID NO: 64005 - RNA, 23 nt, synthetic construct
  source 1..23: mol_type = other RNA
ggcgtagttctcattctccacac

SEQ ID NO: 64006 - RNA, 23 nt, synthetic construct
  source 1..23: mol_type = other RNA
cacaccctgtgcttttctgcaga

SEQ ID NO: 64007 - RNA, 23 nt, synthetic construct
  source 1..23: mol_type = other RNA
aggcagagccggtggctgcactc

SEQ ID NO: 64008 - RNA, 23 nt, synthetic construct
  source 1..23: mol_type = other RNA
acctgggagcggcaggcggcgaa

SEQ ID NO: 64009 - RNA, 23 nt, synthetic construct
  source 1..23: mol_type = other RNA
tgctcccagttcctgcacaccag

SEQ ID NO: 64010 - RNA, 23 nt, synthetic construct
  source 1..23: mol_type = other RNA
ctggaggagggggtggctgtgaa

SEQ ID NO: 64011 - RNA, 23 nt, synthetic construct
  source 1..23: mol_type = other RNA
ctggaggagggggtggctgtgaa

SEQ ID NO: 64012 - RNA, 23 nt, synthetic construct
  source 1..23: mol_type = other RNA
ctggagtggaggagggcgtggcc

SEQ ID NO: 64013 - RNA, 23 nt, synthetic construct
  source 1..23: mol_type = other RNA
tccctggagtggaggagggcgtg

SEQ ID NO: 64014 - RNA, 23 nt, synthetic construct
  source 1..23: mol_type = other RNA
ctggaggagggggtggctgtgaa

SEQ ID NO: 64015 - RNA, 23 nt, synthetic construct
  source 1..23: mol_type = other RNA
gatgggagttgtccctggagttg

SEQ ID NO: 64016 - RNA, 23 nt, synthetic construct
  source 1..23: mol_type = other RNA
ctggaggagggggtggctgtgaa

SEQ ID NO: 64017 - RNA, 23 nt, synthetic construct
  source 1..23: mol_type = other RNA
cccagagtggaggagggtgtggc

SEQ ID NO: 64018 - RNA, 23 nt, synthetic construct
  source 1..23: mol_type = other RNA
ctgcagaagcagggagtagagaa

SEQ ID NO: 64019 - RNA, 23 nt, synthetic construct
  source 1..23: mol_type = other RNA
ttgttgtggaagaggctgtaggg

SEQ ID NO: 64020 - RNA, 23 nt, synthetic construct
  source 1..23: mol_type = other RNA
ggggggcagaagcagccgtccac

SEQ ID NO: 64021 - RNA, 23 nt, synthetic construct
  source 1..23: mol_type = other RNA
gaggggcaggcagccagagtgcg

SEQ ID NO: 64022 - RNA, 23 nt, synthetic construct
  source 1..23: mol_type = other RNA
ttcaggcagttctcgttgtccgt

SEQ ID NO: 64023 - RNA, 23 nt, synthetic construct
  source 1..23: mol_type = other RNA
cgtgtagatggagttgaggaaca

SEQ ID NO: 64024 - RNA, 23 nt, synthetic construct
  source 1..23: mol_type = other RNA
ccgacaggggcagctgcgtgtag

SEQ ID NO: 64025 - RNA, 23 nt, synthetic construct
  source 1..23: mol_type = other RNA
ttggctgccgacaggggcagctg

SEQ ID NO: 64026 - RNA, 23 nt, synthetic construct
  source 1..23: mol_type = other RNA
agggtgatgttggctgccgacag

SEQ ID NO: 64027 - RNA, 23 nt, synthetic construct
  source 1..23: mol_type = other RNA
gccttccaggtgttggcgaaggc

SEQ ID NO: 64028 - RNA, 23 nt, synthetic construct
  source 1..23: mol_type = other RNA
ggggcaggtgcagccgtccacag

SEQ ID NO: 64029 - RNA, 23 nt, synthetic construct
  source 1..23: mol_type = other RNA
ccaggagccagcacggtgccgtg

SEQ ID NO: 64030 - RNA, 23 nt, synthetic construct
  source 1..23: mol_type = other RNA
ctcggccccaggggtgcccgccg

SEQ ID NO: 64031 - RNA, 23 nt, synthetic construct
  source 1..23: mol_type = other RNA
ggggacagacacagccggacacg

SEQ ID NO: 64032 - RNA, 23 nt, synthetic construct
  source 1..23: mol_type = other RNA
gagcaggtggtgccggtggtccc

SEQ ID NO: 64033 - RNA, 23 nt, synthetic construct
  source 1..23: mol_type = other RNA
gatgaccaggaagatccccatgt

SEQ ID NO: 64034 - RNA, 23 nt, synthetic construct
  source 1..23: mol_type = other RNA
ggcagggtgccccgcagggctgg

SEQ ID NO: 64035 - RNA, 23 nt, synthetic construct
  source 1..23: mol_type = other RNA
ccaccaggcagtgcccactgggg

SEQ ID NO: 64036 - RNA, 23 nt, synthetic construct
  source 1..23: mol_type = other RNA
ccaggccaggcaggtccaccagg

SEQ ID NO: 64037 - RNA, 23 nt, synthetic construct
  source 1..23: mol_type = other RNA
gccttccaggccaggcaggtcca

SEQ ID NO: 64038 - RNA, 23 nt, synthetic construct
  source 1..23: mol_type = other RNA
acgcacttcatctggtcctcatt

SEQ ID NO: 64039 - RNA, 23 nt, synthetic construct
  source 1..23: mol_type = other RNA
gttggggaagctctcggcctggc

SEQ ID NO: 64040 - RNA, 23 nt, synthetic construct
  source 1..23: mol_type = other RNA
ggtggggactgctgtggtgctgg

SEQ ID NO: 64041 - RNA, 23 nt, synthetic construct
  source 1..23: mol_type = other RNA
ccctgggacagtgggttctgtgg

SEQ ID NO: 64042 - RNA, 23 nt, synthetic construct
  source 1..23: mol_type = other RNA
gtggtggccgtggtggtcagcac

SEQ ID NO: 64043 - RNA, 23 nt, synthetic construct
  source 1..23: mol_type = other RNA
gtgggtgtggtggctgtgcttct

SEQ ID NO: 64044 - RNA, 23 nt, synthetic construct
  source 1..23: mol_type = other RNA
caggggctgctcacagacggccc

SEQ ID NO: 64045 - RNA, 23 nt, synthetic construct
  source 1..23: mol_type = other RNA
aggcccaggggctgctcacagac

SEQ ID NO: 64046 - RNA, 23 nt, synthetic construct
  source 1..23: mol_type = other RNA
acatcttgaacttccccacctgc

SEQ ID NO: 64047 - RNA, 23 nt, synthetic construct
  source 1..23: mol_type = other RNA
gtgggtgtggtggctgtgcttct

SEQ ID NO: 64048 - RNA, 23 nt, synthetic construct
  source 1..23: mol_type = other RNA
gtggccgtggtcctggaggtggc

SEQ ID NO: 64049 - RNA, 23 nt, synthetic construct
  source 1..23: mol_type = other RNA
caggggctgctcacagacggccc

SEQ ID NO: 64050 - RNA, 23 nt, synthetic construct
  source 1..23: mol_type = other RNA
aggcccaggggctgctcacagac

SEQ ID NO: 64051 - RNA, 23 nt, synthetic construct
  source 1..23: mol_type = other RNA
acatcttgaacttccccacctgc

SEQ ID NO: 64052 - RNA, 23 nt, synthetic construct
  source 1..23: mol_type = other RNA
gtgggtgtggtggctgtgcttct

SEQ ID NO: 64053 - RNA, 23 nt, synthetic construct
  source 1..23: mol_type = other RNA
aggcccaggggctgctcacagac

SEQ ID NO: 64054 - RNA, 23 nt, synthetic construct
  source 1..23: mol_type = other RNA
acatcttgaacttccccacctgc

SEQ ID NO: 64055 - RNA, 23 nt, synthetic construct
  source 1..23: mol_type = other RNA
gtgggtgtggtggctgtgcttct

SEQ ID NO: 64056 - RNA, 23 nt, synthetic construct
  source 1..23: mol_type = other RNA
gtggccgtggtcctggaggtggc

SEQ ID NO: 64057 - RNA, 23 nt, synthetic construct
  source 1..23: mol_type = other RNA
caggggctgctcacagacggccc

SEQ ID NO: 64058 - RNA, 23 nt, synthetic construct
  source 1..23: mol_type = other RNA
aggcccaggggctgctcacagac

SEQ ID NO: 64059 - RNA, 23 nt, synthetic construct
  source 1..23: mol_type = other RNA
acatcttgaacttccccacctgc

SEQ ID NO: 64060 - RNA, 23 nt, synthetic construct
  source 1..23: mol_type = other RNA
gtgggtgtggtggctgtgcttct

SEQ ID NO: 64061 - RNA, 23 nt, synthetic construct
  source 1..23: mol_type = other RNA
ccccagagtggaggagggtgtgg

SEQ ID NO: 64062 - RNA, 23 nt, synthetic construct
  source 1..23: mol_type = other RNA
ccctgcagaagcagggagtagag

SEQ ID NO: 64063 - RNA, 23 nt, synthetic construct
  source 1..23: mol_type = other RNA
ttgtggaagaggctgtagggcag

SEQ ID NO: 64064 - RNA, 23 nt, synthetic construct
  source 1..23: mol_type = other RNA
gcaggtgcactggtgctgcatgg

SEQ ID NO: 64065 - RNA, 23 nt, synthetic construct
  source 1..23: mol_type = other RNA
gggagccatgggcgcagggacac

SEQ ID NO: 64066 - RNA, 23 nt, synthetic construct
  source 1..23: mol_type = other RNA
ccgggcactgctccgtgggccca

SEQ ID NO: 64067 - RNA, 23 nt, synthetic construct
  source 1..23: mol_type = other RNA
ggtgccagggcacggcaggtcct

SEQ ID NO: 64068 - RNA, 23 nt, synthetic construct
  source 1..23: mol_type = other RNA
ttctggttgaagttcccacacag

SEQ ID NO: 64069 - RNA, 23 nt, synthetic construct
  source 1..23: mol_type = other RNA
tcggccccaggggtgcccgccga

SEQ ID NO: 64070 - RNA, 23 nt, synthetic construct
  source 1..23: mol_type = other RNA
aggtgcaggtgttgcagtcgacc

SEQ ID NO: 64071 - RNA, 23 nt, synthetic construct
  source 1..23: mol_type = other RNA
ttggagcaggtggtgccggtggt

SEQ ID NO: 64072 - RNA, 23 nt, synthetic construct
  source 1..23: mol_type = other RNA
tcccaggacacggccatcccgtg

SEQ ID NO: 64073 - RNA, 23 nt, synthetic construct
  source 1..23: mol_type = other RNA
ccaggcagtgcccactggggttc

SEQ ID NO: 64074 - RNA, 23 nt, synthetic construct
  source 1..23: mol_type = other RNA
agttgaagcacatcttgaacttc

SEQ ID NO: 64075 - RNA, 23 nt, synthetic construct
  source 1..23: mol_type = other RNA
tcagcactgtgggggtgtgggtg

SEQ ID NO: 64076 - RNA, 23 nt, synthetic construct
  source 1..23: mol_type = other RNA
agttgaagcacatcttgaacttc

SEQ ID NO: 64077 - RNA, 23 nt, synthetic construct
  source 1..23: mol_type = other RNA
agttgaagcacatcttgaacttc

SEQ ID NO: 64078 - RNA, 23 nt, synthetic construct
  source 1..23: mol_type = other RNA
tcagcactgtgggggtgtgggtg

SEQ ID NO: 64079 - RNA, 23 nt, synthetic construct
  source 1..23: mol_type = other RNA
agttgaagcacatcttgaacttc

SEQ ID NO: 64080 - RNA, 23 nt, synthetic construct
  source 1..23: mol_type = other RNA
cggtgttgttgtggaagaggctg

SEQ ID NO: 64081 - RNA, 23 nt, synthetic construct
  source 1..23: mol_type = other RNA
ttcagggggctcaggctggggaa

SEQ ID NO: 64082 - RNA, 23 nt, synthetic construct
  source 1..23: mol_type = other RNA
gcactgtcctctccgttccacag

SEQ ID NO: 64083 - RNA, 23 nt, synthetic construct
  source 1..23: mol_type = other RNA
ggtgcaggtgttgcagtcgaccc

SEQ ID NO: 64084 - RNA, 23 nt, synthetic construct
  source 1..23: mol_type = other RNA
gcaggtggtgccggtggtcccac

SEQ ID NO: 64085 - RNA, 23 nt, synthetic construct
  source 1..23: mol_type = other RNA
tccgtgctggcactgagggaggg

SEQ ID NO: 64086 - RNA, 23 nt, synthetic construct
  source 1..23: mol_type = other RNA
ttgggaagtccacgtcaaaccac

SEQ ID NO: 64087 - RNA, 23 nt, synthetic construct
  source 1..23: mol_type = other RNA
tgtggaagaggctgtagggcagc

SEQ ID NO: 64088 - RNA, 23 nt, synthetic construct
  source 1..23: mol_type = other RNA
tgtccccagagaggcaggtacac

SEQ ID NO: 64089 - RNA, 23 nt, synthetic construct
  source 1..23: mol_type = other RNA
gcggcacaggtcctgggcgcagg

SEQ ID NO: 64090 - RNA, 23 nt, synthetic construct
  source 1..23: mol_type = other RNA
ggtggggcagcggcacaggtcct

SEQ ID NO: 64091 - RNA, 23 nt, synthetic construct
  source 1..23: mol_type = other RNA
tggccctggtgggcggggtccag

SEQ ID NO: 64092 - RNA, 23 nt, synthetic construct
  source 1..23: mol_type = other RNA
tgaaacagcccacgtccagcgtg

SEQ ID NO: 64093 - RNA, 23 nt, synthetic construct
  source 1..23: mol_type = other RNA
cgccatcaaaggtgatgaagtgg

SEQ ID NO: 64094 - RNA, 23 nt, synthetic construct
  source 1..23: mol_type = other RNA
acgaagagcttgatggccttgga

SEQ ID NO: 64095 - RNA, 23 nt, synthetic construct
  source 1..23: mol_type = other RNA
tgcccttgtagtcctggtgcagt

SEQ ID NO: 64096 - RNA, 23 nt, synthetic construct
  source 1..23: mol_type = other RNA
gcaggtccaccaggcagtgccca

SEQ ID NO: 64097 - RNA, 23 nt, synthetic construct
  source 1..23: mol_type = other RNA
ggccaggcaggtccaccaggcag

SEQ ID NO: 64098 - RNA, 23 nt, synthetic construct
  source 1..23: mol_type = other RNA
caggccaggcaggtccaccaggc

SEQ ID NO: 64099 - RNA, 23 nt, synthetic construct
  source 1..23: mol_type = other RNA
cagctggaccagcggcagacctc

SEQ ID NO: 64100 - RNA, 23 nt, synthetic construct
  source 1..23: mol_type = other RNA
accagctggaccagcggcagacc

SEQ ID NO: 64101 - RNA, 23 nt, synthetic construct
  source 1..23: mol_type = other RNA
tgggctggaggagggggtggctg

SEQ ID NO: 64102 - RNA, 23 nt, synthetic construct
  source 1..23: mol_type = other RNA
gtggtccctagggcagaggaggg

SEQ ID NO: 64103 - RNA, 23 nt, synthetic construct
  source 1..23: mol_type = other RNA
tgggctggaggagggggtggctg

SEQ ID NO: 64104 - RNA, 23 nt, synthetic construct
  source 1..23: mol_type = other RNA
gtggtccctagggcagaggaggg

SEQ ID NO: 64105 - RNA, 23 nt, synthetic construct
  source 1..23: mol_type = other RNA
tgggctggaggagggggtggctg

SEQ ID NO: 64106 - RNA, 23 nt, synthetic construct
  source 1..23: mol_type = other RNA
gtggtccctagggcagaggaggg

SEQ ID NO: 64107 - RNA, 23 nt, synthetic construct
  source 1..23: mol_type = other RNA
gtggtccctagggcagaggaggg

SEQ ID NO: 64108 - RNA, 23 nt, synthetic construct
  source 1..23: mol_type = other RNA
tgggctggaggagggggtggctg

SEQ ID NO: 64109 - RNA, 23 nt, synthetic construct
  source 1..23: mol_type = other RNA
cagaagcagggagtagagaagtg

SEQ ID NO: 64110 - RNA, 23 nt, synthetic construct
  source 1..23: mol_type = other RNA
tgcagaagcagggagtagagaag

SEQ ID NO: 64111 - RNA, 23 nt, synthetic construct
  source 1..23: mol_type = other RNA
gttctccagggtccaggtctcat

SEQ ID NO: 64112 - RNA, 23 nt, synthetic construct
  source 1..23: mol_type = other RNA
tggtgctgcatggcctgggcctc

SEQ ID NO: 64113 - RNA, 23 nt, synthetic construct
  source 1..23: mol_type = other RNA
ctggtgctgcatggcctgggcct

SEQ ID NO: 64114 - RNA, 23 nt, synthetic construct
  source 1..23: mol_type = other RNA
cagcaggtgcactggtgctgcat

SEQ ID NO: 64115 - RNA, 23 nt, synthetic construct
  source 1..23: mol_type = other RNA
gctggggaagacagtgacgggtg

SEQ ID NO: 64116 - RNA, 23 nt, synthetic construct
  source 1..23: mol_type = other RNA
aggctggggaagacagtgacggg

SEQ ID NO: 64117 - RNA, 23 nt, synthetic construct
  source 1..23: mol_type = other RNA
tcaggctggggaagacagtgacg

SEQ ID NO: 64118 - RNA, 23 nt, synthetic construct
  source 1..23: mol_type = other RNA
gggggctcaggctggggaagaca

SEQ ID NO: 64119 - RNA, 23 nt, synthetic construct
  source 1..23: mol_type = other RNA
gttcagggggctcaggctgggga

SEQ ID NO: 64120 - RNA, 23 nt, synthetic construct
  source 1..23: mol_type = other RNA
gaccacaggcctggagcccacta

SEQ ID NO: 64121 - RNA, 23 nt, synthetic construct
  source 1..23: mol_type = other RNA
ggtgaccacaggcctggagccca

SEQ ID NO: 64122 - RNA, 23 nt, synthetic construct
  source 1..23: mol_type = other RNA
agcccctgggccttgatgacaac

SEQ ID NO: 64123 - RNA, 23 nt, synthetic construct
  source 1..23: mol_type = other RNA
cagcccctgggccttgatgacaa

SEQ ID NO: 64124 - RNA, 23 nt, synthetic construct
  source 1..23: mol_type = other RNA
ccagcccctgggccttgatgaca

SEQ ID NO: 64125 - RNA, 23 nt, synthetic construct
  source 1..23: mol_type = other RNA
aggcagctcctcccgctgcccat

SEQ ID NO: 64126 - RNA, 23 nt, synthetic construct
  source 1..23: mol_type = other RNA
aaggcagctcctcccgctgccca

SEQ ID NO: 64127 - RNA, 23 nt, synthetic construct
  source 1..23: mol_type = other RNA
gctccagcagggcactgtcctct

SEQ ID NO: 64128 - RNA, 23 nt, synthetic construct
  source 1..23: mol_type = other RNA
cgggcaggtggggcagcggcaca

SEQ ID NO: 64129 - RNA, 23 nt, synthetic construct
  source 1..23: mol_type = other RNA
cacgggcaggtggggcagcggca

SEQ ID NO: 64130 - RNA, 23 nt, synthetic construct
  source 1..23: mol_type = other RNA
ctgggggttggagcaggtgtccg

SEQ ID NO: 64131 - RNA, 23 nt, synthetic construct
  source 1..23: mol_type = other RNA
gctgggggttggagcaggtgtcc

SEQ ID NO: 64132 - RNA, 23 nt, synthetic construct
  source 1..23: mol_type = other RNA
cgctgggggttggagcaggtgtc

SEQ ID NO: 64133 - RNA, 23 nt, synthetic construct
  source 1..23: mol_type = other RNA
cgcgctgggggttggagcaggtg

SEQ ID NO: 64134 - RNA, 23 nt, synthetic construct
  source 1..23: mol_type = other RNA
tgcctggggggcagaagcagccg

SEQ ID NO: 64135 - RNA, 23 nt, synthetic construct
  source 1..23: mol_type = other RNA
ggggcaggcagccagagtgcgtg

SEQ ID NO: 64136 - RNA, 23 nt, synthetic construct
  source 1..23: mol_type = other RNA
aggggcaggcagccagagtgcgt

SEQ ID NO: 64137 - RNA, 23 nt, synthetic construct
  source 1..23: mol_type = other RNA
actgcccgaggggcaggcagcca

SEQ ID NO: 64138 - RNA, 23 nt, synthetic construct
  source 1..23: mol_type = other RNA
gcactgcccgaggggcaggcagc

SEQ ID NO: 64139 - RNA, 23 nt, synthetic construct
  source 1..23: mol_type = other RNA
ggggcactgcccgaggggcaggc

SEQ ID NO: 64140 - RNA, 23 nt, synthetic construct
  source 1..23: mol_type = other RNA
caggggcactgcccgaggggcag

SEQ ID NO: 64141 - RNA, 23 nt, synthetic construct
  source 1..23: mol_type = other RNA
aggagctgcaggtggtgttgaag

SEQ ID NO: 64142 - RNA, 23 nt, synthetic construct
  source 1..23: mol_type = other RNA
aggtgcaggagctgcaggtggtg

SEQ ID NO: 64143 - RNA, 23 nt, synthetic construct
  source 1..23: mol_type = other RNA
caggtgcaggagctgcaggtggt

SEQ ID NO: 64144 - RNA, 23 nt, synthetic construct
  source 1..23: mol_type = other RNA
acggcaggtcctggcactgccat

SEQ ID NO: 64145 - RNA, 23 nt, synthetic construct
  source 1..23: mol_type = other RNA
gatgtgggccccgccctgcacag

SEQ ID NO: 64146 - RNA, 23 nt, synthetic construct
  source 1..23: mol_type = other RNA
cgacaggggcagctgcgtgtaga

SEQ ID NO: 64147 - RNA, 23 nt, synthetic construct
  source 1..23: mol_type = other RNA
ctgcaccagcagctgcagcccca

SEQ ID NO: 64148 - RNA, 23 nt, synthetic construct
  source 1..23: mol_type = other RNA
gcaccagctgcaccagcagctgc

SEQ ID NO: 64149 - RNA, 23 nt, synthetic construct
  source 1..23: mol_type = other RNA
ggggtccagcctgacaaacacct

SEQ ID NO: 64150 - RNA, 23 nt, synthetic construct
  source 1..23: mol_type = other RNA
gtgggcggggtccagcctgacaa

SEQ ID NO: 64151 - RNA, 23 nt, synthetic construct
  source 1..23: mol_type = other RNA
ggccctggtgggcggggtccagc

SEQ ID NO: 64152 - RNA, 23 nt, synthetic construct
  source 1..23: mol_type = other RNA
atctggccctggtgggcggggtc

SEQ ID NO: 64153 - RNA, 23 nt, synthetic construct
  source 1..23: mol_type = other RNA
gcacatctggccctggtgggcgg

SEQ ID NO: 64154 - RNA, 23 nt, synthetic construct
  source 1..23: mol_type = other RNA
cacaggccgcacatctggccctg

SEQ ID NO: 64155 - RNA, 23 nt, synthetic construct
  source 1..23: mol_type = other RNA
agggagcaggggtcctcaaagct

SEQ ID NO: 64156 - RNA, 23 nt, synthetic construct
  source 1..23: mol_type = other RNA
ctgagggagcaggggtcctcaaa

SEQ ID NO: 64157 - RNA, 23 nt, synthetic construct
  source 1..23: mol_type = other RNA
cgagtggaagggcttggggttga

SEQ ID NO: 64158 - RNA, 23 nt, synthetic construct
  source 1..23: mol_type = other RNA
tcgagtggaagggcttggggttg

SEQ ID NO: 64159 - RNA, 23 nt, synthetic construct
  source 1..23: mol_type = other RNA
tctgcatgtacttggtgcagacg

SEQ ID NO: 64160 - RNA, 23 nt, synthetic construct
  source 1..23: mol_type = other RNA
gggacttggggcagttctgcatg

SEQ ID NO: 64161 - RNA, 23 nt, synthetic construct
  source 1..23: mol_type = other RNA
ctctccaggagccagcacggtgc

SEQ ID NO: 64162 - RNA, 23 nt, synthetic construct
  source 1..23: mol_type = other RNA
cctctccaggagccagcacggtg

SEQ ID NO: 64163 - RNA, 23 nt, synthetic construct
  source 1..23: mol_type = other RNA
acctctccaggagccagcacggt

SEQ ID NO: 64164 - RNA, 23 nt, synthetic construct
  source 1..23: mol_type = other RNA
acaccctgtgcttttctgcagag

SEQ ID NO: 64165 - RNA, 23 nt, synthetic construct
  source 1..23: mol_type = other RNA
cggaggcactcggccccaggggt

SEQ ID NO: 64166 - RNA, 23 nt, synthetic construct
  source 1..23: mol_type = other RNA
cgggggacagacacagccggaca

SEQ ID NO: 64167 - RNA, 23 nt, synthetic construct
  source 1..23: mol_type = other RNA
cccgggggacagacacagccgga

SEQ ID NO: 64168 - RNA, 23 nt, synthetic construct
  source 1..23: mol_type = other RNA
ggctgcactcccacctccggttc

SEQ ID NO: 64169 - RNA, 23 nt, synthetic construct
  source 1..23: mol_type = other RNA
cccaggcagagccggtggctgca

SEQ ID NO: 64170 - RNA, 23 nt, synthetic construct
  source 1..23: mol_type = other RNA
gcccaggcagagccggtggctgc

SEQ ID NO: 64171 - RNA, 23 nt, synthetic construct
  source 1..23: mol_type = other RNA
tgcccaggcagagccggtggctg

SEQ ID NO: 64172 - RNA, 23 nt, synthetic construct
  source 1..23: mol_type = other RNA
gcaggtgcccaggcagagccggt

SEQ ID NO: 64173 - RNA, 23 nt, synthetic construct
  source 1..23: mol_type = other RNA
cgcaggtgcccaggcagagccgg

SEQ ID NO: 64174 - RNA, 23 nt, synthetic construct
  source 1..23: mol_type = other RNA
cacgcaggtgcccaggcagagcc

SEQ ID NO: 64175 - RNA, 23 nt, synthetic construct
  source 1..23: mol_type = other RNA
ggccacgcaggtgcccaggcaga

SEQ ID NO: 64176 - RNA, 23 nt, synthetic construct
  source 1..23: mol_type = other RNA
cgaagagcttgatggccttggag

SEQ ID NO: 64177 - RNA, 23 nt, synthetic construct
  source 1..23: mol_type = other RNA
gtctcgatgaccaggaagatccc

SEQ ID NO: 64178 - RNA, 23 nt, synthetic construct
  source 1..23: mol_type = other RNA
ggtctcgatgaccaggaagatcc

SEQ ID NO: 64179 - RNA, 23 nt, synthetic construct
  source 1..23: mol_type = other RNA
gtcccaggacacggccatcccgt

SEQ ID NO: 64180 - RNA, 23 nt, synthetic construct
  source 1..23: mol_type = other RNA
ggtcccaggacacggccatcccg

SEQ ID NO: 64181 - RNA, 23 nt, synthetic construct
  source 1..23: mol_type = other RNA
tgtagtcctggtgcagtcggatg

SEQ ID NO: 64182 - RNA, 23 nt, synthetic construct
  source 1..23: mol_type = other RNA
ggagcggcaggcggcgaaggtgg

SEQ ID NO: 64183 - RNA, 23 nt, synthetic construct
  source 1..23: mol_type = other RNA
cctgggagcggcaggcggcgaag

SEQ ID NO: 64184 - RNA, 23 nt, synthetic construct
  source 1..23: mol_type = other RNA
cagggtgccccgcagggctggta

SEQ ID NO: 64185 - RNA, 23 nt, synthetic construct
  source 1..23: mol_type = other RNA
accaggcagtgcccactggggtt

SEQ ID NO: 64186 - RNA, 23 nt, synthetic construct
  source 1..23: mol_type = other RNA
caggtccaccaggcagtgcccac

SEQ ID NO: 64187 - RNA, 23 nt, synthetic construct
  source 1..23: mol_type = other RNA
caggcaggtccaccaggcagtgc

SEQ ID NO: 64188 - RNA, 23 nt, synthetic construct
  source 1..23: mol_type = other RNA
aggccaggcaggtccaccaggca

SEQ ID NO: 64189 - RNA, 23 nt, synthetic construct
  source 1..23: mol_type = other RNA
ttccaggccaggcaggtccacca

SEQ ID NO: 64190 - RNA, 23 nt, synthetic construct
  source 1..23: mol_type = other RNA
cttccaggccaggcaggtccacc

SEQ ID NO: 64191 - RNA, 23 nt, synthetic construct
  source 1..23: mol_type = other RNA
agccttccaggccaggcaggtcc

SEQ ID NO: 64192 - RNA, 23 nt, synthetic construct
  source 1..23: mol_type = other RNA
gcagccttccaggccaggcaggt

SEQ ID NO: 64193 - RNA, 23 nt, synthetic construct
  source 1..23: mol_type = other RNA
tgaagaagggctggctgggtggg

SEQ ID NO: 64194 - RNA, 23 nt, synthetic construct
  source 1..23: mol_type = other RNA
cattgaagaagggctggctgggt

SEQ ID NO: 64195 - RNA, 23 nt, synthetic construct
  source 1..23: mol_type = other RNA
cgcacttcatctggtcctcattg

SEQ ID NO: 64196 - RNA, 23 nt, synthetic construct
  source 1..23: mol_type = other RNA
gcaggtgcaggcctcaaggctgt

SEQ ID NO: 64197 - RNA, 23 nt, synthetic construct
  source 1..23: mol_type = other RNA
ggtgcaggtgcaggcctcaaggc

SEQ ID NO: 64198 - RNA, 23 nt, synthetic construct
  source 1..23: mol_type = other RNA
caggacatgccacagccttcctg

SEQ ID NO: 64199 - RNA, 23 nt, synthetic construct
  source 1..23: mol_type = other RNA
ggagggccgggcttgtcgtggag

SEQ ID NO: 64200 - RNA, 23 nt, synthetic construct
  source 1..23: mol_type = other RNA
gggagggccgggcttgtcgtgga

SEQ ID NO: 64201 - RNA, 23 nt, synthetic construct
  source 1..23: mol_type = other RNA
gtccacctgctggcccagctcct

SEQ ID NO: 64202 - RNA, 23 nt, synthetic construct
  source 1..23: mol_type = other RNA
agtccacctgctggcccagctcc

SEQ ID NO: 64203 - RNA, 23 nt, synthetic construct
  source 1..23: mol_type = other RNA
cagtccacctgctggcccagctc

SEQ ID NO: 64204 - RNA, 23 nt, synthetic construct
  source 1..23: mol_type = other RNA
acagtccacctgctggcccagct

SEQ ID NO: 64205 - RNA, 23 nt, synthetic construct
  source 1..23: mol_type = other RNA
gctggcactgagggagggctgag

SEQ ID NO: 64206 - RNA, 23 nt, synthetic construct
  source 1..23: mol_type = other RNA
cgtgctggcactgagggagggct

SEQ ID NO: 64207 - RNA, 23 nt, synthetic construct
  source 1..23: mol_type = other RNA
ctggcaggtggtggtacctgggg

SEQ ID NO: 64208 - RNA, 23 nt, synthetic construct
  source 1..23: mol_type = other RNA
ccggggctggcaggtggtggtac

SEQ ID NO: 64209 - RNA, 23 nt, synthetic construct
  source 1..23: mol_type = other RNA
acaccggggctggcaggtggtgg

SEQ ID NO: 64210 - RNA, 23 nt, synthetic construct
  source 1..23: mol_type = other RNA
ccctccaagttgttcagacttgg

SEQ ID NO: 64211 - RNA, 23 nt, synthetic construct
  source 1..23: mol_type = other RNA
agttcctgcacaccaggccgaag

SEQ ID NO: 64212 - RNA, 23 nt, synthetic construct
  source 1..23: mol_type = other RNA
cctgctcccagttcctgcacacc

SEQ ID NO: 64213 - RNA, 23 nt, synthetic construct
  source 1..23: mol_type = other RNA
ggtggtggtggtggccgtctcca

SEQ ID NO: 64214 - RNA, 23 nt, synthetic construct
  source 1..23: mol_type = other RNA
agagggtggggactgctgtggtg

SEQ ID NO: 64215 - RNA, 23 nt, synthetic construct
  source 1..23: mol_type = other RNA
gagagggtggggactgctgtggt

SEQ ID NO: 64216 - RNA, 23 nt, synthetic construct
  source 1..23: mol_type = other RNA
cctgggacagtgggttctgtgga

SEQ ID NO: 64217 - RNA, 23 nt, synthetic construct
  source 1..23: mol_type = other RNA
tggccacccctgggacagtgggt

SEQ ID NO: 64218 - RNA, 23 nt, synthetic construct
  source 1..23: mol_type = other RNA
tgtgggtgtggtggctgtgcttc

SEQ ID NO: 64219 - RNA, 23 nt, synthetic construct
  source 1..23: mol_type = other RNA
ggtagctgtgggtgtggtggctg

SEQ ID NO: 64220 - RNA, 23 nt, synthetic construct
  source 1..23: mol_type = other RNA
gctggaggagggggtggctgtga

SEQ ID NO: 64221 - RNA, 23 nt, synthetic construct
  source 1..23: mol_type = other RNA
ggctggaggagggggtggctgtg

SEQ ID NO: 64222 - RNA, 23 nt, synthetic construct
  source 1..23: mol_type = other RNA
gggctggaggagggggtggctgt

SEQ ID NO: 64223 - RNA, 23 nt, synthetic construct
  source 1..23: mol_type = other RNA
ctgggctggaggagggggtggct

SEQ ID NO: 64224 - RNA, 23 nt, synthetic construct
  source 1..23: mol_type = other RNA
ggtggctgcaggtgtggtggcgg

SEQ ID NO: 64225 - RNA, 23 nt, synthetic construct
  source 1..23: mol_type = other RNA
tggtggctgcaggtgtggtggcg

SEQ ID NO: 64226 - RNA, 23 nt, synthetic construct
  source 1..23: mol_type = other RNA
ctggtggctgcaggtgtggtggc

SEQ ID NO: 64227 - RNA, 23 nt, synthetic construct
  source 1..23: mol_type = other RNA
gctggtggctgcaggtgtggtgg

SEQ ID NO: 64228 - RNA, 23 nt, synthetic construct
  source 1..23: mol_type = other RNA
ctgggcagcagggtcgaggtgcg

SEQ ID NO: 64229 - RNA, 23 nt, synthetic construct
  source 1..23: mol_type = other RNA
gctgggcagcagggtcgaggtgc

SEQ ID NO: 64230 - RNA, 23 nt, synthetic construct
  source 1..23: mol_type = other RNA
tgctgggcagcagggtcgaggtg

SEQ ID NO: 64231 - RNA, 23 nt, synthetic construct
  source 1..23: mol_type = other RNA
ctgctgggcagcagggtcgaggt

SEQ ID NO: 64232 - RNA, 23 nt, synthetic construct
  source 1..23: mol_type = other RNA
tgtggggctgctgggcagcaggg

SEQ ID NO: 64233 - RNA, 23 nt, synthetic construct
  source 1..23: mol_type = other RNA
gatgtggggctgctgggcagcag

SEQ ID NO: 64234 - RNA, 23 nt, synthetic construct
  source 1..23: mol_type = other RNA
cgatgtggggctgctgggcagca

SEQ ID NO: 64235 - RNA, 23 nt, synthetic construct
  source 1..23: mol_type = other RNA
tgggggccgatgtggggctgctg

SEQ ID NO: 64236 - RNA, 23 nt, synthetic construct
  source 1..23: mol_type = other RNA
gcacactggggctcacagcccat

SEQ ID NO: 64237 - RNA, 23 nt, synthetic construct
  source 1..23: mol_type = other RNA
ccaggcacactggggctcacagc

SEQ ID NO: 64238 - RNA, 23 nt, synthetic construct
  source 1..23: mol_type = other RNA
ggcccaggggctgctcacagacg

SEQ ID NO: 64239 - RNA, 23 nt, synthetic construct
  source 1..23: mol_type = other RNA
ggacaccaggctgggcctgggca

SEQ ID NO: 64240 - RNA, 23 nt, synthetic construct
  source 1..23: mol_type = other RNA
ggggacaccaggctgggcctggg

SEQ ID NO: 64241 - RNA, 23 nt, synthetic construct
  source 1..23: mol_type = other RNA
aagcacatcttgaacttccccac

SEQ ID NO: 64242 - RNA, 23 nt, synthetic construct
  source 1..23: mol_type = other RNA
gtggccggggtgctggggcagtg

SEQ ID NO: 64243 - RNA, 23 nt, synthetic construct
  source 1..23: mol_type = other RNA
tggtggccggggtgctggggcag

SEQ ID NO: 64244 - RNA, 23 nt, synthetic construct
  source 1..23: mol_type = other RNA
ctggtggccggggtgctggggca

SEQ ID NO: 64245 - RNA, 23 nt, synthetic construct
  source 1..23: mol_type = other RNA
cgtccccggagtggaggagggca

SEQ ID NO: 64246 - RNA, 23 nt, synthetic construct
  source 1..23: mol_type = other RNA
tgtgggtgtggtggctgtgcttc

SEQ ID NO: 64247 - RNA, 23 nt, synthetic construct
  source 1..23: mol_type = other RNA
ggtagctgtgggtgtggtggctg

SEQ ID NO: 64248 - RNA, 23 nt, synthetic construct
  source 1..23: mol_type = other RNA
gctggaggagggggtggctgtga

SEQ ID NO: 64249 - RNA, 23 nt, synthetic construct
  source 1..23: mol_type = other RNA
ggctggaggagggggtggctgtg

SEQ ID NO: 64250 - RNA, 23 nt, synthetic construct
  source 1..23: mol_type = other RNA
gggctggaggagggggtggctgt

SEQ ID NO: 64251 - RNA, 23 nt, synthetic construct
  source 1..23: mol_type = other RNA
ctgggctggaggagggggtggct

SEQ ID NO: 64252 - RNA, 23 nt, synthetic construct
  source 1..23: mol_type = other RNA
ggtggctgcaggtgtggtggcgg

SEQ ID NO: 64253 - RNA, 23 nt, synthetic construct
  source 1..23: mol_type = other RNA
tggtggctgcaggtgtggtggcg

SEQ ID NO: 64254 - RNA, 23 nt, synthetic construct
  source 1..23: mol_type = other RNA
ctggtggctgcaggtgtggtggc

SEQ ID NO: 64255 - RNA, 23 nt, synthetic construct
  source 1..23: mol_type = other RNA
gctggtggctgcaggtgtggtgg

SEQ ID NO: 64256 - RNA, 23 nt, synthetic construct
  source 1..23: mol_type = other RNA
ggccgtggtcctggaggtggccc

SEQ ID NO: 64257 - RNA, 23 nt, synthetic construct
  source 1..23: mol_type = other RNA
tggccgtggtcctggaggtggcc

SEQ ID NO: 64258 - RNA, 23 nt, synthetic construct
  source 1..23: mol_type = other RNA
ctgggcagcagggtcgaggtgcg

SEQ ID NO: 64259 - RNA, 23 nt, synthetic construct
  source 1..23: mol_type = other RNA
gctgggcagcagggtcgaggtgc

SEQ ID NO: 64260 - RNA, 23 nt, synthetic construct
  source 1..23: mol_type = other RNA
tgctgggcagcagggtcgaggtg

SEQ ID NO: 64261 - RNA, 23 nt, synthetic construct
  source 1..23: mol_type = other RNA
ctgctgggcagcagggtcgaggt

SEQ ID NO: 64262 - RNA, 23 nt, synthetic construct
  source 1..23: mol_type = other RNA
tgtggggctgctgggcagcaggg

SEQ ID NO: 64263 - RNA, 23 nt, synthetic construct
  source 1..23: mol_type = other RNA
gatgtggggctgctgggcagcag

SEQ ID NO: 64264 - RNA, 23 nt, synthetic construct
  source 1..23: mol_type = other RNA
cgatgtggggctgctgggcagca

SEQ ID NO: 64265 - RNA, 23 nt, synthetic construct
  source 1..23: mol_type = other RNA
gcacactggggctcacagcccat

SEQ ID NO: 64266 - RNA, 23 nt, synthetic construct
  source 1..23: mol_type = other RNA
ccaggcacactggggctcacagc

SEQ ID NO: 64267 - RNA, 23 nt, synthetic construct
  source 1..23: mol_type = other RNA
ggcccaggggctgctcacagacg

SEQ ID NO: 64268 - RNA, 23 nt, synthetic construct
  source 1..23: mol_type = other RNA
ggacaccaggctgggcctgggca

SEQ ID NO: 64269 - RNA, 23 nt, synthetic construct
  source 1..23: mol_type = other RNA
ggggacaccaggctgggcctggg

SEQ ID NO: 64270 - RNA, 23 nt, synthetic construct
  source 1..23: mol_type = other RNA
aagcacatcttgaacttccccac

SEQ ID NO: 64271 - RNA, 23 nt, synthetic construct
  source 1..23: mol_type = other RNA
gtggccggggtgctggggcagtg

SEQ ID NO: 64272 - RNA, 23 nt, synthetic construct
  source 1..23: mol_type = other RNA
tggtggccggggtgctggggcag

SEQ ID NO: 64273 - RNA, 23 nt, synthetic construct
  source 1..23: mol_type = other RNA
ctggtggccggggtgctggggca

SEQ ID NO: 64274 - RNA, 23 nt, synthetic construct
  source 1..23: mol_type = other RNA
gagtggaggagggcgtggccgta

SEQ ID NO: 64275 - RNA, 23 nt, synthetic construct
  source 1..23: mol_type = other RNA
ggagtggaggagggcgtggccgt

SEQ ID NO: 64276 - RNA, 23 nt, synthetic construct
  source 1..23: mol_type = other RNA
cgtccccggagtggaggaggggg

SEQ ID NO: 64277 - RNA, 23 nt, synthetic construct
  source 1..23: mol_type = other RNA
tgtgggtgtggtggctgtgcttc

SEQ ID NO: 64278 - RNA, 23 nt, synthetic construct
  source 1..23: mol_type = other RNA
ggtagctgtgggtgtggtggctg

SEQ ID NO: 64279 - RNA, 23 nt, synthetic construct
  source 1..23: mol_type = other RNA
gctggaggagggggtggctgtga

SEQ ID NO: 64280 - RNA, 23 nt, synthetic construct
  source 1..23: mol_type = other RNA
ggctggaggagggggtggctgtg

SEQ ID NO: 64281 - RNA, 23 nt, synthetic construct
  source 1..23: mol_type = other RNA
gggctggaggagggggtggctgt

SEQ ID NO: 64282 - RNA, 23 nt, synthetic construct
  source 1..23: mol_type = other RNA
ctgggctggaggagggggtggct

SEQ ID NO: 64283 - RNA, 23 nt, synthetic construct
  source 1..23: mol_type = other RNA
ggtggctgcaggtgtggtggcgg

SEQ ID NO: 64284 - RNA, 23 nt, synthetic construct
  source 1..23: mol_type = other RNA
tggtggctgcaggtgtggtggcg

SEQ ID NO: 64285 - RNA, 23 nt, synthetic construct
  source 1..23: mol_type = other RNA
ctggtggctgcaggtgtggtggc

SEQ ID NO: 64286 - RNA, 23 nt, synthetic construct
  source 1..23: mol_type = other RNA
gctggtggctgcaggtgtggtgg

SEQ ID NO: 64287 - RNA, 23 nt, synthetic construct
  source 1..23: mol_type = other RNA
ctgggcagcagggtcgaggtgcg

SEQ ID NO: 64288 - RNA, 23 nt, synthetic construct
  source 1..23: mol_type = other RNA
gctgggcagcagggtcgaggtgc

SEQ ID NO: 64289 - RNA, 23 nt, synthetic construct
  source 1..23: mol_type = other RNA
tgctgggcagcagggtcgaggtg

SEQ ID NO: 64290 - RNA, 23 nt, synthetic construct
  source 1..23: mol_type = other RNA
ctgctgggcagcagggtcgaggt

SEQ ID NO: 64291 - RNA, 23 nt, synthetic construct
  source 1..23: mol_type = other RNA
tgtggggctgctgggcagcaggg

SEQ ID NO: 64292 - RNA, 23 nt, synthetic construct
  source 1..23: mol_type = other RNA
gatgtggggctgctgggcagcag

SEQ ID NO: 64293 - RNA, 23 nt, synthetic construct
  source 1..23: mol_type = other RNA
cgatgtggggctgctgggcagca

SEQ ID NO: 64294 - RNA, 23 nt, synthetic construct
  source 1..23: mol_type = other RNA
tgggggccgatgtggggctgctg

SEQ ID NO: 64295 - RNA, 23 nt, synthetic construct
  source 1..23: mol_type = other RNA
gcacactggggctcacagcccgt

SEQ ID NO: 64296 - RNA, 23 nt, synthetic construct
  source 1..23: mol_type = other RNA
ccaggcacactggggctcacagc

SEQ ID NO: 64297 - RNA, 23 nt, synthetic construct
  source 1..23: mol_type = other RNA
ggcccaggggctgctcacagact

SEQ ID NO: 64298 - RNA, 23 nt, synthetic construct
  source 1..23: mol_type = other RNA
ggacaccaggctgggcctgggca

SEQ ID NO: 64299 - RNA, 23 nt, synthetic construct
  source 1..23: mol_type = other RNA
ggggacaccaggctgggcctggg

SEQ ID NO: 64300 - RNA, 23 nt, synthetic construct
  source 1..23: mol_type = other RNA
aagcacatcttgaacttccccac

SEQ ID NO: 64301 - RNA, 23 nt, synthetic construct
  source 1..23: mol_type = other RNA
gtggccggggtgctggggcagtg

SEQ ID NO: 64302 - RNA, 23 nt, synthetic construct
  source 1..23: mol_type = other RNA
tggtggccggggtgctggggcag

SEQ ID NO: 64303 - RNA, 23 nt, synthetic construct
  source 1..23: mol_type = other RNA
ctggtggccggggtgctggggca

SEQ ID NO: 64304 - RNA, 23 nt, synthetic construct
  source 1..23: mol_type = other RNA
tgtgggtgtggtggctgtgcttc

SEQ ID NO: 64305 - RNA, 23 nt, synthetic construct
  source 1..23: mol_type = other RNA
ggtagctgtgggtgtggtggctg

SEQ ID NO: 64306 - RNA, 23 nt, synthetic construct
  source 1..23: mol_type = other RNA
ggtggctgcaggtgtggtggcgg

SEQ ID NO: 64307 - RNA, 23 nt, synthetic construct
  source 1..23: mol_type = other RNA
tggtggctgcaggtgtggtggcg

SEQ ID NO: 64308 - RNA, 23 nt, synthetic construct
  source 1..23: mol_type = other RNA
ctggtggctgcaggtgtggtggc

SEQ ID NO: 64309 - RNA, 23 nt, synthetic construct
  source 1..23: mol_type = other RNA
gctggtggctgcaggtgtggtgg

SEQ ID NO: 64310 - RNA, 23 nt, synthetic construct
  source 1..23: mol_type = other RNA
ccgtggtcctggaggtggccgtg

SEQ ID NO: 64311 - RNA, 23 nt, synthetic construct
  source 1..23: mol_type = other RNA
ggccgtggtcctggaggtggccg

SEQ ID NO: 64312 - RNA, 23 nt, synthetic construct
  source 1..23: mol_type = other RNA
tggccgtggtcctggaggtggcc

SEQ ID NO: 64313 - RNA, 23 nt, synthetic construct
  source 1..23: mol_type = other RNA
ctgggcagcagggtcgaggtgcg

SEQ ID NO: 64314 - RNA, 23 nt, synthetic construct
  source 1..23: mol_type = other RNA
gctgggcagcagggtcgaggtgc

SEQ ID NO: 64315 - RNA, 23 nt, synthetic construct
  source 1..23: mol_type = other RNA
tgctgggcagcagggtcgaggtg

SEQ ID NO: 64316 - RNA, 23 nt, synthetic construct
  source 1..23: mol_type = other RNA
ctgctgggcagcagggtcgaggt

SEQ ID NO: 64317 - RNA, 23 nt, synthetic construct
  source 1..23: mol_type = other RNA
tgtggggctgctgggcagcaggg

SEQ ID NO: 64318 - RNA, 23 nt, synthetic construct
  source 1..23: mol_type = other RNA
gatgtggggctgctgggcagcag

SEQ ID NO: 64319 - RNA, 23 nt, synthetic construct
  source 1..23: mol_type = other RNA
cgatgtggggctgctgggcagca

SEQ ID NO: 64320 - RNA, 23 nt, synthetic construct
  source 1..23: mol_type = other RNA
tgggggccgatgtggggctgctg

SEQ ID NO: 64321 - RNA, 23 nt, synthetic construct
  source 1..23: mol_type = other RNA
gcacactggggctcacagcccgt

SEQ ID NO: 64322 - RNA, 23 nt, synthetic construct
  source 1..23: mol_type = other RNA
ccaggcacactggggctcacagc

SEQ ID NO: 64323 - RNA, 23 nt, synthetic construct
  source 1..23: mol_type = other RNA
ggcccaggggctgctcacagacg

SEQ ID NO: 64324 - RNA, 23 nt, synthetic construct
  source 1..23: mol_type = other RNA
ggacaccaggctgggcctgggca

SEQ ID NO: 64325 - RNA, 23 nt, synthetic construct
  source 1..23: mol_type = other RNA
ggggacaccaggctgggcctggg

SEQ ID NO: 64326 - RNA, 23 nt, synthetic construct
  source 1..23: mol_type = other RNA
aagcacatcttgaacttccccac

SEQ ID NO: 64327 - RNA, 23 nt, synthetic construct
  source 1..23: mol_type = other RNA
gtggccggggtgctggggcagtg

SEQ ID NO: 64328 - RNA, 23 nt, synthetic construct
  source 1..23: mol_type = other RNA
tggtggccggggtgctggggcag

SEQ ID NO: 64329 - RNA, 23 nt, synthetic construct
  source 1..23: mol_type = other RNA
ctggtggccggggtgctggggca

SEQ ID NO: 64330 - RNA, 23 nt, synthetic construct
  source 1..23: mol_type = other RNA
cgtccccggagtggaggagggca

SEQ ID NO: 64331 - RNA, 23 nt, synthetic construct
  source 1..23: mol_type = other RNA
cgtccccggagtggaggaggggg

SEQ ID NO: 64332 - RNA, 23 nt, synthetic construct
  source 1..23: mol_type = other RNA
tgtgggtgtggtggctgtgcttc

SEQ ID NO: 64333 - RNA, 23 nt, synthetic construct
  source 1..23: mol_type = other RNA
ggtagctgtgggtgtggtggctg

SEQ ID NO: 64334 - RNA, 23 nt, synthetic construct
  source 1..23: mol_type = other RNA
gctggaggagggggtggctgtga

SEQ ID NO: 64335 - RNA, 23 nt, synthetic construct
  source 1..23: mol_type = other RNA
ggctggaggagggggtggctgtg

SEQ ID NO: 64336 - RNA, 23 nt, synthetic construct
  source 1..23: mol_type = other RNA
gggctggaggagggggtggctgt

SEQ ID NO: 64337 - RNA, 23 nt, synthetic construct
  source 1..23: mol_type = other RNA
ctgggctggaggagggggtggct

SEQ ID NO: 64338 - RNA, 23 nt, synthetic construct
  source 1..23: mol_type = other RNA
agagtggaggagggtgtggccgt

SEQ ID NO: 64339 - RNA, 23 nt, synthetic construct
  source 1..23: mol_type = other RNA
ccagagtggaggagggtgtggcc

SEQ ID NO: 64340 - RNA, 23 nt, synthetic construct
  source 1..23: mol_type = other RNA
gcaggctgctggggagcactgca

SEQ ID NO: 64341 - RNA, 23 nt, synthetic construct
  source 1..23: mol_type = other RNA
tggcaggctgctggggagcactg

SEQ ID NO: 64342 - RNA, 23 nt, synthetic construct
  source 1..23: mol_type = other RNA
actgaggaggacacagtggacac

SEQ ID NO: 64343 - RNA, 23 nt, synthetic construct
  source 1..23: mol_type = other RNA
tgaggactgaggaggacacagtg

SEQ ID NO: 64344 - RNA, 23 nt, synthetic construct
  source 1..23: mol_type = other RNA
tagagaagtgggagctggggaag

SEQ ID NO: 64345 - RNA, 23 nt, synthetic construct
  source 1..23: mol_type = other RNA
agaagcagggagtagagaagtgg

SEQ ID NO: 64346 - RNA, 23 nt, synthetic construct
  source 1..23: mol_type = other RNA
gccctgcagaagcagggagtaga

SEQ ID NO: 64347 - RNA, 23 nt, synthetic construct
  source 1..23: mol_type = other RNA
tgccctgcagaagcagggagtag

SEQ ID NO: 64348 - RNA, 23 nt, synthetic construct
  source 1..23: mol_type = other RNA
aatgccctgcagaagcagggagt

SEQ ID NO: 64349 - RNA, 23 nt, synthetic construct
  source 1..23: mol_type = other RNA
ccaaatgccctgcagaagcaggg

SEQ ID NO: 64350 - RNA, 23 nt, synthetic construct
  source 1..23: mol_type = other RNA
acagccaggggcaggggagggcg

SEQ ID NO: 64351 - RNA, 23 nt, synthetic construct
  source 1..23: mol_type = other RNA
cacagccaggggcaggggagggc

SEQ ID NO: 64352 - RNA, 23 nt, synthetic construct
  source 1..23: mol_type = other RNA
tcacagccaggggcaggggaggg

SEQ ID NO: 64353 - RNA, 23 nt, synthetic construct
  source 1..23: mol_type = other RNA
tggcattgtcacagccaggggca

SEQ ID NO: 64354 - RNA, 23 nt, synthetic construct
  source 1..23: mol_type = other RNA
cagttctccagggtccaggtctc

SEQ ID NO: 64355 - RNA, 23 nt, synthetic construct
  source 1..23: mol_type = other RNA
cgcacctggccaccgtgcagttc

SEQ ID NO: 64356 - RNA, 23 nt, synthetic construct
  source 1..23: mol_type = other RNA
cggaatttggtcaaacaggatca

SEQ ID NO: 64357 - RNA, 23 nt, synthetic construct
  source 1..23: mol_type = other RNA
tgtagggcagccgggcctggaag

SEQ ID NO: 64358 - RNA, 23 nt, synthetic construct
  source 1..23: mol_type = other RNA
gctcagcatcagatcacagagcg

SEQ ID NO: 64359 - RNA, 23 nt, synthetic construct
  source 1..23: mol_type = other RNA
acctggctcagcatcagatcaca

SEQ ID NO: 64360 - RNA, 23 nt, synthetic construct
  source 1..23: mol_type = other RNA
cctccaggctctggcagggcacc

SEQ ID NO: 64361 - RNA, 23 nt, synthetic construct
  source 1..23: mol_type = other RNA
gcctccaggctctggcagggcac

SEQ ID NO: 64362 - RNA, 23 nt, synthetic construct
  source 1..23: mol_type = other RNA
cacacgcaggactggcagttgct

SEQ ID NO: 64363 - RNA, 23 nt, synthetic construct
  source 1..23: mol_type = other RNA
tcctgggtgtccccagagaggca

SEQ ID NO: 64364 - RNA, 23 nt, synthetic construct
  source 1..23: mol_type = other RNA
gtcctgggtgtccccagagaggc

SEQ ID NO: 64365 - RNA, 23 nt, synthetic construct
  source 1..23: mol_type = other RNA
ctcttgtactcaaagccctgggg

SEQ ID NO: 64366 - RNA, 23 nt, synthetic construct
  source 1..23: mol_type = other RNA
actccccacagcactgcccggcc

SEQ ID NO: 64367 - RNA, 23 nt, synthetic construct
  source 1..23: mol_type = other RNA
caggctgtggggtcagcaaatgg

SEQ ID NO: 64368 - RNA, 23 nt, synthetic construct
  source 1..23: mol_type = other RNA
gatgcaggctgtggggtcagcaa

SEQ ID NO: 64369 - RNA, 23 nt, synthetic construct
  source 1..23: mol_type = other RNA
aggatgcaggctgtggggtcagc

SEQ ID NO: 64370 - RNA, 23 nt, synthetic construct
  source 1..23: mol_type = other RNA
gcaggatgcaggctgtggggtca

SEQ ID NO: 64371 - RNA, 23 nt, synthetic construct
  source 1..23: mol_type = other RNA
ggcaggatgcaggctgtggggtc

SEQ ID NO: 64372 - RNA, 23 nt, synthetic construct
  source 1..23: mol_type = other RNA
ggctccccctgcagctggacaca

SEQ ID NO: 64373 - RNA, 23 nt, synthetic construct
  source 1..23: mol_type = other RNA
tgaggctccccctgcagctggac

SEQ ID NO: 64374 - RNA, 23 nt, synthetic construct
  source 1..23: mol_type = other RNA
gttttcctgaggctccccctgca

SEQ ID NO: 64375 - RNA, 23 nt, synthetic construct
  source 1..23: mol_type = other RNA
gctgcatggcctgggcctctgct

SEQ ID NO: 64376 - RNA, 23 nt, synthetic construct
  source 1..23: mol_type = other RNA
gtgctgcatggcctgggcctctg

SEQ ID NO: 64377 - RNA, 23 nt, synthetic construct
  source 1..23: mol_type = other RNA
ggtgctgcatggcctgggcctct

SEQ ID NO: 64378 - RNA, 23 nt, synthetic construct
  source 1..23: mol_type = other RNA
gtgcactggtgctgcatggcctg

SEQ ID NO: 64379 - RNA, 23 nt, synthetic construct
  source 1..23: mol_type = other RNA
tggcagcaggtgcactggtgctg

SEQ ID NO: 64380 - RNA, 23 nt, synthetic construct
  source 1..23: mol_type = other RNA
cctggcagcaggtgcactggtgc

SEQ ID NO: 64381 - RNA, 23 nt, synthetic construct
  source 1..23: mol_type = other RNA
ctctcctggcagcaggtgcactg

SEQ ID NO: 64382 - RNA, 23 nt, synthetic construct
  source 1..23: mol_type = other RNA
caccagccccgggggacagacac

SEQ ID NO: 64383 - RNA, 23 nt, synthetic construct
  source 1..23: mol_type = other RNA
ttctgcaggttcccaaactggag

SEQ ID NO: 64384 - RNA, 23 nt, synthetic construct
  source 1..23: mol_type = other RNA
ccaactcccgcagggggacacca

SEQ ID NO: 64385 - RNA, 23 nt, synthetic construct
  source 1..23: mol_type = other RNA
ccaactcccgcagggggacacca

SEQ ID NO: 64386 - RNA, 23 nt, synthetic construct
  source 1..23: mol_type = other RNA
ccaactcccgcagggggacacca

SEQ ID NO: 64387 - RNA, 23 nt, synthetic construct
  source 1..23: mol_type = other RNA
tctgggcaggatgcaggctgtgg

SEQ ID NO: 64388 - RNA, 23 nt, synthetic construct
  source 1..23: mol_type = other RNA
gtccaccaggcagtgcccactgg

SEQ ID NO: 64389 - RNA, 23 nt, synthetic construct
  source 1..23: mol_type = other RNA
gtccctgggctggaggagggggt

SEQ ID NO: 64390 - RNA, 23 nt, synthetic construct
  source 1..23: mol_type = other RNA
gtccctgggctggaggagggggt

SEQ ID NO: 64391 - RNA, 23 nt, synthetic construct
  source 1..23: mol_type = other RNA
gtccctgggctggaggagggggt

SEQ ID NO: 64392 - RNA, 23 nt, synthetic construct
  source 1..23: mol_type = other RNA
gtccctgggctggaggagggggt

SEQ ID NO: 64393 - RNA, 23 nt, synthetic construct
  source 1..23: mol_type = other RNA
gtccctgggctggaggagggggt

SEQ ID NO: 64394 - RNA, 23 nt, synthetic construct
  source 1..23: mol_type = other RNA
aggctccccctgcagctggacac

SEQ ID NO: 64395 - RNA, 23 nt, synthetic construct
  source 1..23: mol_type = other RNA
ttctccagggtccaggtctcatt

SEQ ID NO: 64396 - RNA, 23 nt, synthetic construct
  source 1..23: mol_type = other RNA
tgggcgtaggcagccacagccgt

SEQ ID NO: 64397 - RNA, 23 nt, synthetic construct
  source 1..23: mol_type = other RNA
tctccagggtccaggtctcattc

SEQ ID NO: 64398 - RNA, 23 nt, synthetic construct
  source 1..23: mol_type = other RNA
ggtgcccaggcagagccggtggc

SEQ ID NO: 64399 - RNA, 23 nt, synthetic construct
  source 1..23: mol_type = other RNA
aggtgcccaggcagagccggtgg

SEQ ID NO: 64400 - RNA, 23 nt, synthetic construct
  source 1..23: mol_type = other RNA
gggtcctgggtgtccccagagag

SEQ ID NO: 64401 - RNA, 23 nt, synthetic construct
  source 1..23: mol_type = other RNA
gtgcaggagctgcaggtggtgtt

SEQ ID NO: 64402 - RNA, 23 nt, synthetic construct
  source 1..23: mol_type = other RNA
ggtgcaggagctgcaggtggtgt

SEQ ID NO: 64403 - RNA, 23 nt, synthetic construct
  source 1..23: mol_type = other RNA
tgggtcctgggtgtccccagaga

SEQ ID NO: 64404 - RNA, 23 nt, synthetic construct
  source 1..23: mol_type = other RNA
cctgaggctccccctgcagctgg

SEQ ID NO: 64405 - RNA, 23 nt, synthetic construct
  source 1..23: mol_type = other RNA
ctcgatgaccaggaagatcccca

SEQ ID NO: 64406 - RNA, 23 nt, synthetic construct
  source 1..23: mol_type = other RNA
caggtttttaggcagggtgcccc

SEQ ID NO: 64407 - RNA, 23 nt, synthetic construct
  source 1..23: mol_type = other RNA
accagccccgggggacagacaca

SEQ ID NO: 64408 - RNA, 23 nt, synthetic construct
  source 1..23: mol_type = other RNA
tgtaccagctggaccagcggcag

SEQ ID NO: 64409 - RNA, 23 nt, synthetic construct
  source 1..23: mol_type = other RNA
ttgttggtgcaggtgccgcactg

SEQ ID NO: 64410 - RNA, 23 nt, synthetic construct
  source 1..23: mol_type = other RNA
ttgtaccagctggaccagcggca

SEQ ID NO: 64411 - RNA, 23 nt, synthetic construct
  source 1..23: mol_type = other RNA
ggtgcaggtgccgcactggccct

SEQ ID NO: 64412 - RNA, 23 nt, synthetic construct
  source 1..23: mol_type = other RNA
gccccgggggacagacacagccg

SEQ ID NO: 64413 - RNA, 23 nt, synthetic construct
  source 1..23: mol_type = other RNA
acaccagccccgggggacagaca

SEQ ID NO: 64414 - RNA, 23 nt, synthetic construct
  source 1..23: mol_type = other RNA
gttcccgcacaggccgcagaccc

SEQ ID NO: 64415 - RNA, 23 nt, synthetic construct
  source 1..23: mol_type = other RNA
cagggggctcaggctggggaaga

SEQ ID NO: 64416 - RNA, 23 nt, synthetic construct
  source 1..23: mol_type = other RNA
tccagctccagcagggcactgtc

SEQ ID NO: 64417 - RNA, 23 nt, synthetic construct
  source 1..23: mol_type = other RNA
cttctgcaggttcccaaactgga

SEQ ID NO: 64418 - RNA, 23 nt, synthetic construct
  source 1..23: mol_type = other RNA
acttctgcaggttcccaaactgg

SEQ ID NO: 64419 - RNA, 23 nt, synthetic construct
  source 1..23: mol_type = other RNA
gcaggagctgcaggtggtgttga

SEQ ID NO: 64420 - RNA, 23 nt, synthetic construct
  source 1..23: mol_type = other RNA
aggccgcacatctggccctggtg

SEQ ID NO: 64421 - RNA, 23 nt, synthetic construct
  source 1..23: mol_type = other RNA
acgcaggtgcccaggcagagccg

SEQ ID NO: 64422 - RNA, 23 nt, synthetic construct
  source 1..23: mol_type = other RNA
ccgcacaggccgcagaccctgcc

SEQ ID NO: 64423 - RNA, 23 nt, synthetic construct
  source 1..23: mol_type = other RNA
tcccgcacaggccgcagaccctg

SEQ ID NO: 64424 - RNA, 23 nt, synthetic construct
  source 1..23: mol_type = other RNA
aggcagggtgccccgcagggctg

SEQ ID NO: 64425 - RNA, 23 nt, synthetic construct
  source 1..23: mol_type = other RNA
caggggcaggggagggcgaggac

SEQ ID NO: 64426 - RNA, 23 nt, synthetic construct
  source 1..23: mol_type = other RNA
acaggagtagcagcagccggttt

SEQ ID NO: 64427 - RNA, 23 nt, synthetic construct
  source 1..23: mol_type = other RNA
gacaggggcagctgcgtgtagat

SEQ ID NO: 64428 - RNA, 23 nt, synthetic construct
  source 1..23: mol_type = other RNA
cctgggtgtccccagagaggcag

SEQ ID NO: 64429 - RNA, 23 nt, synthetic construct
  source 1..23: mol_type = other RNA
agtggaggagggcgtggccgtag

SEQ ID NO: 64430 - RNA, 23 nt, synthetic construct
  source 1..23: mol_type = other RNA
ccaggcagagccggtggctgcac

SEQ ID NO: 64431 - RNA, 23 nt, synthetic construct
  source 1..23: mol_type = other RNA
ttgaagaagggctggctgggtgg

SEQ ID NO: 64432 - RNA, 23 nt, synthetic construct
  source 1..23: mol_type = other RNA
gccgtggtcctggaggtggccct

SEQ ID NO: 64433 - RNA, 23 nt, synthetic construct
  source 1..23: mol_type = other RNA
gccgtggtcctggaggtggccgt

SEQ ID NO: 64434 - RNA, 23 nt, synthetic construct
  source 1..23: mol_type = other RNA
tgttgtggaagaggctgtagggc

SEQ ID NO: 64435 - RNA, 23 nt, synthetic construct
  source 1..23: mol_type = other RNA
attgaagaagggctggctgggtg

SEQ ID NO: 64436 - RNA, 23 nt, synthetic construct
  source 1..23: mol_type = other RNA
cacgcacttcatctggtcctcat

SEQ ID NO: 64437 - RNA, 23 nt, synthetic construct
  source 1..23: mol_type = other RNA
acactggggctcacagcccgtgg

SEQ ID NO: 64438 - RNA, 23 nt, synthetic construct
  source 1..23: mol_type = other RNA
acactggggctcacagcccgtgg

SEQ ID NO: 64439 - RNA, 23 nt, synthetic construct
  source 1..23: mol_type = other RNA
cagccaggggcaggggagggcga

SEQ ID NO: 64440 - RNA, 23 nt, synthetic construct
  source 1..23: mol_type = other RNA
acaggggcagctgcgtgtagatg

SEQ ID NO: 64441 - RNA, 23 nt, synthetic construct
  source 1..23: mol_type = other RNA
tgcttttctgcagagaggctccc

SEQ ID NO: 64442 - RNA, 23 nt, synthetic construct
  source 1..23: mol_type = other RNA
aagaagggctggctgggtgggca

SEQ ID NO: 64443 - RNA, 23 nt, synthetic construct
  source 1..23: mol_type = other RNA
gaagaagggctggctgggtgggc

SEQ ID NO: 64444 - RNA, 23 nt, synthetic construct
  source 1..23: mol_type = other RNA
gagtagagaagtgggagctgggg

SEQ ID NO: 64445 - RNA, 23 nt, synthetic construct
  source 1..23: mol_type = other RNA
tgttgttgtggaagaggctgtag

SEQ ID NO: 64446 - RNA, 23 nt, synthetic construct
  source 1..23: mol_type = other RNA
ctgggtgtccccagagaggcagg

SEQ ID NO: 64447 - RNA, 23 nt, synthetic construct
  source 1..23: mol_type = other RNA
gggagcggcaggcggcgaaggtg

SEQ ID NO: 64448 - RNA, 23 nt, synthetic construct
  source 1..23: mol_type = other RNA
cgtgcagccacactcatccacgt

SEQ ID NO: 64449 - RNA, 23 nt, synthetic construct
  source 1..23: mol_type = other RNA
ccgatgtggggctgctgggcagc

SEQ ID NO: 64450 - RNA, 23 nt, synthetic construct
  source 1..23: mol_type = other RNA
ccgatgtggggctgctgggcagc

SEQ ID NO: 64451 - RNA, 23 nt, synthetic construct
  source 1..23: mol_type = other RNA
ccgatgtggggctgctgggcagc

SEQ ID NO: 64452 - RNA, 23 nt, synthetic construct
  source 1..23: mol_type = other RNA
ccgatgtggggctgctgggcagc

SEQ ID NO: 64453 - RNA, 23 nt, synthetic construct
  source 1..23: mol_type = other RNA
tgggagcggcaggcggcgaaggt

SEQ ID NO: 64454 - RNA, 23 nt, synthetic construct
  source 1..23: mol_type = other RNA
cctcctgctcccagttcctgcac

SEQ ID NO: 64455 - RNA, 23 nt, synthetic construct
  source 1..23: mol_type = other RNA
gccctcctgctcccagttcctgc

SEQ ID NO: 64456 - RNA, 23 nt, synthetic construct
  source 1..23: mol_type = other RNA
tgcaggagctgcaggtggtgttg

SEQ ID NO: 64457 - RNA, 23 nt, synthetic construct
  source 1..23: mol_type = other RNA
ctgggagcggcaggcggcgaagg

SEQ ID NO: 64458 - RNA, 23 nt, synthetic construct
  source 1..23: mol_type = other RNA
gctggtggccggggtgctggggc

SEQ ID NO: 64459 - RNA, 23 nt, synthetic construct
  source 1..23: mol_type = other RNA
gctggtggccggggtgctggggc

SEQ ID NO: 64460 - RNA, 23 nt, synthetic construct
  source 1..23: mol_type = other RNA
gctggtggccggggtgctggggc

SEQ ID NO: 64461 - RNA, 23 nt, synthetic construct
  source 1..23: mol_type = other RNA
gctggtggccggggtgctggggc

SEQ ID NO: 64462 - RNA, 23 nt, synthetic construct
  source 1..23: mol_type = other RNA
agccaggggcaggggagggcgag

SEQ ID NO: 64463 - RNA, 23 nt, synthetic construct
  source 1..23: mol_type = other RNA
actggtgctgcatggcctgggcc

SEQ ID NO: 64464 - RNA, 23 nt, synthetic construct
  source 1..23: mol_type = other RNA
aggtgcaggtgcaggcctcaagg

SEQ ID NO: 64465 - RNA, 23 nt, synthetic construct
  source 1..23: mol_type = other RNA
accacggaccggctacgcgtggc

SEQ ID NO: 64466 - RNA, 23 nt, synthetic construct
  source 1..23: mol_type = other RNA
ctctgtgaggatccaggtggtcc

SEQ ID NO: 64467 - RNA, 23 nt, synthetic construct
  source 1..23: mol_type = other RNA
ctctgtgaggatccaggtggtcc

SEQ ID NO: 64468 - RNA, 23 nt, synthetic construct
  source 1..23: mol_type = other RNA
ctctgtgaggatccaggtggtcc

SEQ ID NO: 64469 - RNA, 23 nt, synthetic construct
  source 1..23: mol_type = other RNA
ctctgtgaggatccaggtggtcc

SEQ ID NO: 64470 - RNA, 23 nt, synthetic construct
  source 1..23: mol_type = other RNA
ctctgtgaggatccaggtggtcc

SEQ ID NO: 64471 - RNA, 23 nt, synthetic construct
  source 1..23: mol_type = other RNA
ctctgtgaggatccaggtggtcc

SEQ ID NO: 64472 - RNA, 23 nt, synthetic construct
  source 1..23: mol_type = other RNA
ttatttgcaaaactgggctgggt

SEQ ID NO: 64473 - RNA, 23 nt, synthetic construct
  source 1..23: mol_type = other RNA
gggttgagcagagggggctttgg

SEQ ID NO: 64474 - RNA, 23 nt, synthetic construct
  source 1..23: mol_type = other RNA
cggctctgtgaggatccaggtgg

SEQ ID NO: 64475 - RNA, 23 nt, synthetic construct
  source 1..23: mol_type = other RNA
gggctctgtgaggatccaggtgg

SEQ ID NO: 64476 - RNA, 23 nt, synthetic construct
  source 1..23: mol_type = other RNA
cggctctgtgaggatccaggtgg

SEQ ID NO: 64477 - RNA, 23 nt, synthetic construct
  source 1..23: mol_type = other RNA
cggctctgtgaggatccaggtgg

SEQ ID NO: 64478 - RNA, 23 nt, synthetic construct
  source 1..23: mol_type = other RNA
cggctctgtgaggatccaggtgg

SEQ ID NO: 64479 - RNA, 23 nt, synthetic construct
  source 1..23: mol_type = other RNA
ccaaggtgggccacaggctctcc

SEQ ID NO: 64480 - RNA, 23 nt, synthetic construct
  source 1..23: mol_type = other RNA
cacagaagggcgtgcagccacac

SEQ ID NO: 64481 - RNA, 23 nt, synthetic construct
  source 1..23: mol_type = other RNA
tgggctgggttgagcagaggggg

SEQ ID NO: 64482 - RNA, 23 nt, synthetic construct
  source 1..23: mol_type = other RNA
gctctgtgaggatccaggtggtc

SEQ ID NO: 64483 - RNA, 23 nt, synthetic construct
  source 1..23: mol_type = other RNA
gctctgtgaggatccaggtggtc

SEQ ID NO: 64484 - RNA, 23 nt, synthetic construct
  source 1..23: mol_type = other RNA
gctctgtgaggatccaggtggtc

SEQ ID NO: 64485 - RNA, 23 nt, synthetic construct
  source 1..23: mol_type = other RNA
gctctgtgaggatccaggtggtc

SEQ ID NO: 64486 - RNA, 23 nt, synthetic construct
  source 1..23: mol_type = other RNA
gctctgtgaggatccaggtggtc

SEQ ID NO: 64487 - RNA, 23 nt, synthetic construct
  source 1..23: mol_type = other RNA
gctctgtgaggatccaggtggtc

SEQ ID NO: 64488 - RNA, 23 nt, synthetic construct
  source 1..23: mol_type = other RNA
gctgggttgagcagagggggctt

SEQ ID NO: 64489 - RNA, 23 nt, synthetic construct
  source 1..23: mol_type = other RNA
tttgcaaaactgggctgggttga

SEQ ID NO: 64490 - RNA, 23 nt, synthetic construct
  source 1..23: mol_type = other RNA
tctgtgaggatccaggtggtccc

SEQ ID NO: 64491 - RNA, 23 nt, synthetic construct
  source 1..23: mol_type = other RNA
tctgtgaggatccaggtggtccc

SEQ ID NO: 64492 - RNA, 23 nt, synthetic construct
  source 1..23: mol_type = other RNA
tctgtgaggatccaggtggtccc

SEQ ID NO: 64493 - RNA, 23 nt, synthetic construct
  source 1..23: mol_type = other RNA
tctgtgaggatccaggtggtccc

SEQ ID NO: 64494 - RNA, 23 nt, synthetic construct
  source 1..23: mol_type = other RNA
tctgtgaggatccaggtggtccc

SEQ ID NO: 64495 - RNA, 23 nt, synthetic construct
  source 1..23: mol_type = other RNA
tctgtgaggatccaggtggtccc

SEQ ID NO: 64496 - RNA, 23 nt, synthetic construct
  source 1..23: mol_type = other RNA
atagttgaagcacatcttgaact

SEQ ID NO: 64497 - RNA, 23 nt, synthetic construct
  source 1..23: mol_type = other RNA
atagttgaagcacatcttgaact

SEQ ID NO: 64498 - RNA, 23 nt, synthetic construct
  source 1..23: mol_type = other RNA
atagttgaagcacatcttgaact

SEQ ID NO: 64499 - RNA, 23 nt, synthetic construct
  source 1..23: mol_type = other RNA
atagttgaagcacatcttgaact

SEQ ID NO: 64500 - RNA, 23 nt, synthetic construct
  source 1..23: mol_type = other RNA
ggacacagtggacacgctgaagg

SEQ ID NO: 64501 - RNA, 23 nt, synthetic construct
  source 1..23: mol_type = other RNA
tcatagttgaagcacatcttgaa

SEQ ID NO: 64502 - RNA, 23 nt, synthetic construct
  source 1..23: mol_type = other RNA
tcatagttgaagcacatcttgaa

SEQ ID NO: 64503 - RNA, 23 nt, synthetic construct
  source 1..23: mol_type = other RNA
tcatagttgaagcacatcttgaa

SEQ ID NO: 64504 - RNA, 23 nt, synthetic construct
  source 1..23: mol_type = other RNA
tcatagttgaagcacatcttgaa

SEQ ID NO: 64505 - RNA, 23 nt, synthetic construct
  source 1..23: mol_type = other RNA
acagaagggcgtgcagccacact

SEQ ID NO: 64506 - RNA, 23 nt, synthetic construct
  source 1..23: mol_type = other RNA
ccgacactttgatgggcaggtgc

SEQ ID NO: 64507 - RNA, 23 nt, synthetic construct
  source 1..23: mol_type = other RNA
ctgggttgagcagagggggcttt

SEQ ID NO: 64508 - RNA, 23 nt, synthetic construct
  source 1..23: mol_type = other RNA
atttgcaaaactgggctgggttg

SEQ ID NO: 64509 - RNA, 23 nt, synthetic construct
  source 1..23: mol_type = other RNA
tcgggtccgacactttgatgggc

SEQ ID NO: 64510 - RNA, 23 nt, synthetic construct
  source 1..23: mol_type = other RNA
cgacactttgatgggcaggtgct

SEQ ID NO: 64511 - RNA, 23 nt, synthetic construct
  source 1..23: mol_type = other RNA
actccccgggcgcggcagagctc

SEQ ID NO: 64512 - RNA, 23 nt, synthetic construct
  source 1..23: mol_type = other RNA
tgggttgagcagagggggctttg

SEQ ID NO: 64513 - RNA, 23 nt, synthetic construct
  source 1..23: mol_type = other RNA
gctcgggtccgacactttgatgg

SEQ ID NO: 64514 - RNA, 23 nt, synthetic construct
  source 1..23: mol_type = other RNA
ctccaggtggacagagcatgggg

SEQ ID NO: 64515 - RNA, 23 nt, synthetic construct
  source 1..23: mol_type = other RNA
agggcgtgcagccacactcatcc

SEQ ID NO: 64516 - RNA, 23 nt, synthetic construct
  source 1..23: mol_type = other RNA
acagagcatggggatggaggcag

SEQ ID NO: 64517 - RNA, 23 nt, synthetic construct
  source 1..23: mol_type = other RNA
gggctgggttgagcagagggggc

SEQ ID NO: 64518 - RNA, 23 nt, synthetic construct
  source 1..23: mol_type = other RNA
aagggcgtgcagccacactcatc

SEQ ID NO: 64519 - RNA, 23 nt, synthetic construct
  source 1..23: mol_type = other RNA
gcagagggggctttgggatgctg

SEQ ID NO: 64520 - RNA, 23 nt, synthetic construct
  source 1..23: mol_type = other RNA
tgtgaggatccaggtggtccctg

SEQ ID NO: 64521 - RNA, 23 nt, synthetic construct
  source 1..23: mol_type = other RNA
tgtgaggatccaggtggtccctg

SEQ ID NO: 64522 - RNA, 23 nt, synthetic construct
  source 1..23: mol_type = other RNA
tgtgaggatccaggtggtccctg

SEQ ID NO: 64523 - RNA, 23 nt, synthetic construct
  source 1..23: mol_type = other RNA
tgtgaggatccaggtggtccctg

SEQ ID NO: 64524 - RNA, 23 nt, synthetic construct
  source 1..23: mol_type = other RNA
tgtgaggatccaggtggtccctg

SEQ ID NO: 64525 - RNA, 23 nt, synthetic construct
  source 1..23: mol_type = other RNA
tgtgaggatccaggtggtccctg

SEQ ID NO: 64526 - RNA, 23 nt, synthetic construct
  source 1..23: mol_type = other RNA
aactgggctgggttgagcagagg

SEQ ID NO: 64527 - RNA, 23 nt, synthetic construct
  source 1..23: mol_type = other RNA
cttgcctggaccagcctgtctgc

SEQ ID NO: 64528 - RNA, 23 nt, synthetic construct
  source 1..23: mol_type = other RNA
gctctgtgaggatccaggtcgtc

SEQ ID NO: 64529 - RNA, 23 nt, synthetic construct
  source 1..23: mol_type = other RNA
gtgaggatccaggtggtccctgg

SEQ ID NO: 64530 - RNA, 23 nt, synthetic construct
  source 1..23: mol_type = other RNA
gctctgtgaggatccaggtcgtc

SEQ ID NO: 64531 - RNA, 23 nt, synthetic construct
  source 1..23: mol_type = other RNA
gctctgtgaggatccaggtcgtc

SEQ ID NO: 64532 - RNA, 23 nt, synthetic construct
  source 1..23: mol_type = other RNA
gtgaggatccaggtggtccctgg

SEQ ID NO: 64533 - RNA, 23 nt, synthetic construct
  source 1..23: mol_type = other RNA
gtgaggatccaggtggtccctgg

SEQ ID NO: 64534 - RNA, 23 nt, synthetic construct
  source 1..23: mol_type = other RNA
gctctgtgaggatccaggtcgtc

SEQ ID NO: 64535 - RNA, 23 nt, synthetic construct
  source 1..23: mol_type = other RNA
gctctgtgaggatccaggtcgtc

SEQ ID NO: 64536 - RNA, 23 nt, synthetic construct
  source 1..23: mol_type = other RNA
gtgaggatccaggtggtccctgg

SEQ ID NO: 64537 - RNA, 23 nt, synthetic construct
  source 1..23: mol_type = other RNA
gtgaggatccaggtggtccctgg

SEQ ID NO: 64538 - RNA, 23 nt, synthetic construct
  source 1..23: mol_type = other RNA
gtgaggatccaggtggtccctgg

SEQ ID NO: 64539 - RNA, 23 nt, synthetic construct
  source 1..23: mol_type = other RNA
tacactttggtgggtgggcaggt

SEQ ID NO: 64540 - RNA, 23 nt, synthetic construct
  source 1..23: mol_type = other RNA
ggggcttgcactgcaccgacact

SEQ ID NO: 64541 - RNA, 23 nt, synthetic construct
  source 1..23: mol_type = other RNA
ccaggtggacagagcatggggat

SEQ ID NO: 64542 - RNA, 23 nt, synthetic construct
  source 1..23: mol_type = other RNA
ctggctccaggtggacagagcat

SEQ ID NO: 64543 - RNA, 23 nt, synthetic construct
  source 1..23: mol_type = other RNA
aggcccaaggttttcatgatcag

SEQ ID NO: 64544 - RNA, 23 nt, synthetic construct
  source 1..23: mol_type = other RNA
ccttgcctggaccagcctgtctg

SEQ ID NO: 64545 - RNA, 23 nt, synthetic construct
  source 1..23: mol_type = other RNA
ggccttgcctggaccagcctgtc

SEQ ID NO: 64546 - RNA, 23 nt, synthetic construct
  source 1..23: mol_type = other RNA
gcaaaactgggctgggttgagca

SEQ ID NO: 64547 - RNA, 23 nt, synthetic construct
  source 1..23: mol_type = other RNA
ggaggacacagtggacacgctga

SEQ ID NO: 64548 - RNA, 23 nt, synthetic construct
  source 1..23: mol_type = other RNA
ggctccaggtggacagagcatgg

SEQ ID NO: 64549 - RNA, 23 nt, synthetic construct
  source 1..23: mol_type = other RNA
ggggcaaggccaaggtgggccac

SEQ ID NO: 64550 - RNA, 23 nt, synthetic construct
  source 1..23: mol_type = other RNA
gttgagcagagggggctttggga

SEQ ID NO: 64551 - RNA, 23 nt, synthetic construct
  source 1..23: mol_type = other RNA
gccgccagagccaacaccagcgt

SEQ ID NO: 64552 - RNA, 23 nt, synthetic construct
  source 1..23: mol_type = other RNA
gtcgtccctggagtggaggaggg

SEQ ID NO: 64553 - RNA, 23 nt, synthetic construct
  source 1..23: mol_type = other RNA
ggacagagcatggggatggaggc

SEQ ID NO: 64554 - RNA, 23 nt, synthetic construct
  source 1..23: mol_type = other RNA
acactccccgggcgcggcagagc

SEQ ID NO: 64555 - RNA, 23 nt, synthetic construct
  source 1..23: mol_type = other RNA
actggtggctgtgggtgtggtgg

SEQ ID NO: 64556 - RNA, 23 nt, synthetic construct
  source 1..23: mol_type = other RNA
gaactggtggctgtgggtgtggt

SEQ ID NO: 64557 - RNA, 23 nt, synthetic construct
  source 1..23: mol_type = other RNA
actggtggctgtgggtgtggtgg

SEQ ID NO: 64558 - RNA, 23 nt, synthetic construct
  source 1..23: mol_type = other RNA
gaactggtggctgtgggtgtggt

SEQ ID NO: 64559 - RNA, 23 nt, synthetic construct
  source 1..23: mol_type = other RNA
ttgagcagagggggctttgggat

SEQ ID NO: 64560 - RNA, 23 nt, synthetic construct
  source 1..23: mol_type = other RNA
gcaaggccaaggtgggccacagg

SEQ ID NO: 64561 - RNA, 23 nt, synthetic construct
  source 1..23: mol_type = other RNA
gctccggaggcactcggccccag

SEQ ID NO: 64562 - RNA, 23 nt, synthetic construct
  source 1..23: mol_type = other RNA
aggtggacagagcatggggatgg

SEQ ID NO: 64563 - RNA, 23 nt, synthetic construct
  source 1..23: mol_type = other RNA
tcctggctccaggtggacagagc

SEQ ID NO: 64564 - RNA, 23 nt, synthetic construct
  source 1..23: mol_type = other RNA
ctcctgccctggcgggcacacag

SEQ ID NO: 64565 - RNA, 23 nt, synthetic construct
  source 1..23: mol_type = other RNA
gggcgcagggacacagaagggcg

SEQ ID NO: 64566 - RNA, 23 nt, synthetic construct
  source 1..23: mol_type = other RNA
tggacagagcatggggatggagg

SEQ ID NO: 64567 - RNA, 23 nt, synthetic construct
  source 1..23: mol_type = other RNA
aggggcaaggccaaggtgggcca

SEQ ID NO: 64568 - RNA, 23 nt, synthetic construct
  source 1..23: mol_type = other RNA
gcatggggatggaggcagaacgt

SEQ ID NO: 64569 - RNA, 23 nt, synthetic construct
  source 1..23: mol_type = other RNA
agcatggggatggaggcagaacg

SEQ ID NO: 64570 - RNA, 23 nt, synthetic construct
  source 1..23: mol_type = other RNA
agagcatggggatggaggcagaa

SEQ ID NO: 64571 - RNA, 23 nt, synthetic construct
  source 1..23: mol_type = other RNA
aggacacagtggacacgctgaag

SEQ ID NO: 64572 - RNA, 23 nt, synthetic construct
  source 1..23: mol_type = other RNA
catagttgaagcacatcttgaac

SEQ ID NO: 64573 - RNA, 23 nt, synthetic construct
  source 1..23: mol_type = other RNA
catagttgaagcacatcttgaac

SEQ ID NO: 64574 - RNA, 23 nt, synthetic construct
  source 1..23: mol_type = other RNA
catagttgaagcacatcttgaac

SEQ ID NO: 64575 - RNA, 23 nt, synthetic construct
  source 1..23: mol_type = other RNA
catagttgaagcacatcttgaac

SEQ ID NO: 64576 - RNA, 23 nt, synthetic construct
  source 1..23: mol_type = other RNA
aaggggtcctgctggcccctcac

SEQ ID NO: 64577 - RNA, 23 nt, synthetic construct
  source 1..23: mol_type = other RNA
cgtccagcgtgtggcagctccgg

SEQ ID NO: 64578 - RNA, 23 nt, synthetic construct
  source 1..23: mol_type = other RNA
agtggaggagggtgtggccgtgg

SEQ ID NO: 64579 - RNA, 23 nt, synthetic construct
  source 1..23: mol_type = other RNA
cgctggagacagtcgtccctctg

SEQ ID NO: 64580 - RNA, 23 nt, synthetic construct
  source 1..23: mol_type = other RNA
gcagggacacagaagggcgtgca

SEQ ID NO: 64581 - RNA, 23 nt, synthetic construct
  source 1..23: mol_type = other RNA
ggtggacagagcatggggatgga

SEQ ID NO: 64582 - RNA, 23 nt, synthetic construct
  source 1..23: mol_type = other RNA
ggggtcctgctggcccctcaccc

SEQ ID NO: 64583 - RNA, 23 nt, synthetic construct
  source 1..23: mol_type = other RNA
aggccaaggtgggccacaggctc

SEQ ID NO: 64584 - RNA, 23 nt, synthetic construct
  source 1..23: mol_type = other RNA
ttgcaaaactgggctgggttgag

SEQ ID NO: 64585 - RNA, 23 nt, synthetic construct
  source 1..23: mol_type = other RNA
gccaaggtgggccacaggctctc

SEQ ID NO: 64586 - RNA, 23 nt, synthetic construct
  source 1..23: mol_type = other RNA
gtggaggagggtgtggctgtgga

SEQ ID NO: 64587 - RNA, 23 nt, synthetic construct
  source 1..23: mol_type = other RNA
agtggaggagggcatggccgtag

SEQ ID NO: 64588 - RNA, 23 nt, synthetic construct
  source 1..23: mol_type = other RNA
gtggaggagggtgtggctgtgga

SEQ ID NO: 64589 - RNA, 23 nt, synthetic construct
  source 1..23: mol_type = other RNA
gtggaggagggtgtggctgtgga

SEQ ID NO: 64590 - RNA, 23 nt, synthetic construct
  source 1..23: mol_type = other RNA
agtggaggagggcatggccgtag

SEQ ID NO: 64591 - RNA, 23 nt, synthetic construct
  source 1..23: mol_type = other RNA
gtggaggagggtgtggctgtgga

SEQ ID NO: 64592 - RNA, 23 nt, synthetic construct
  source 1..23: mol_type = other RNA
cactccccgggcgcggcagagct

SEQ ID NO: 64593 - RNA, 23 nt, synthetic construct
  source 1..23: mol_type = other RNA
tcactgcacactccccgggcgcg

SEQ ID NO: 64594 - RNA, 23 nt, synthetic construct
  source 1..23: mol_type = other RNA
cggcccggggcctggtcacggtt

SEQ ID NO: 64595 - RNA, 23 nt, synthetic construct
  source 1..23: mol_type = other RNA
ccagagccaacaccagcgtccgg

SEQ ID NO: 64596 - RNA, 23 nt, synthetic construct
  source 1..23: mol_type = other RNA
agggccctgggtctctgcctgcg

SEQ ID NO: 64597 - RNA, 23 nt, synthetic construct
  source 1..23: mol_type = other RNA
agtggaggagggtgtggctgtgg

SEQ ID NO: 64598 - RNA, 23 nt, synthetic construct
  source 1..23: mol_type = other RNA
gagtggaggagggtgtggctgtg

SEQ ID NO: 64599 - RNA, 23 nt, synthetic construct
  source 1..23: mol_type = other RNA
ggagtggaggagggtgtggctgt

SEQ ID NO: 64600 - RNA, 23 nt, synthetic construct
  source 1..23: mol_type = other RNA
ctggagtggaggagggtgtggct

SEQ ID NO: 64601 - RNA, 23 nt, synthetic construct
  source 1..23: mol_type = other RNA
ggtggtccctggggtggaggacg

SEQ ID NO: 64602 - RNA, 23 nt, synthetic construct
  source 1..23: mol_type = other RNA
gatccaggtggtccctggggtgg

SEQ ID NO: 64603 - RNA, 23 nt, synthetic construct
  source 1..23: mol_type = other RNA
ggatccaggtggtccctggggtg

SEQ ID NO: 64604 - RNA, 23 nt, synthetic construct
  source 1..23: mol_type = other RNA
agtggaggagggtgtggctgtgg

SEQ ID NO: 64605 - RNA, 23 nt, synthetic construct
  source 1..23: mol_type = other RNA
gagtggaggagggtgtggctgtg

SEQ ID NO: 64606 - RNA, 23 nt, synthetic construct
  source 1..23: mol_type = other RNA
ggagtggaggagggtgtggctgt

SEQ ID NO: 64607 - RNA, 23 nt, synthetic construct
  source 1..23: mol_type = other RNA
ctggagtggaggagggtgtggct

SEQ ID NO: 64608 - RNA, 23 nt, synthetic construct
  source 1..23: mol_type = other RNA
cgtccctggagtggaggagggcg

SEQ ID NO: 64609 - RNA, 23 nt, synthetic construct
  source 1..23: mol_type = other RNA
tcgtccctggagtggaggagggc

SEQ ID NO: 64610 - RNA, 23 nt, synthetic construct
  source 1..23: mol_type = other RNA
aactggtggctgtgggtgtggtg

SEQ ID NO: 64611 - RNA, 23 nt, synthetic construct
  source 1..23: mol_type = other RNA
ggtggtccctggggtggaggacg

SEQ ID NO: 64612 - RNA, 23 nt, synthetic construct
  source 1..23: mol_type = other RNA
gatccaggtggtccctggggtgg

SEQ ID NO: 64613 - RNA, 23 nt, synthetic construct
  source 1..23: mol_type = other RNA
ggatccaggtggtccctggggtg

SEQ ID NO: 64614 - RNA, 23 nt, synthetic construct
  source 1..23: mol_type = other RNA
ggtggtccctggggtggaggacg

SEQ ID NO: 64615 - RNA, 23 nt, synthetic construct
  source 1..23: mol_type = other RNA
gatccaggtggtccctggggtgg

SEQ ID NO: 64616 - RNA, 23 nt, synthetic construct
  source 1..23: mol_type = other RNA
ggatccaggtggtccctggggtg

SEQ ID NO: 64617 - RNA, 23 nt, synthetic construct
  source 1..23: mol_type = other RNA
agtggaggagggtgtggctgtgg

SEQ ID NO: 64618 - RNA, 23 nt, synthetic construct
  source 1..23: mol_type = other RNA
gagtggaggagggtgtggctgtg

SEQ ID NO: 64619 - RNA, 23 nt, synthetic construct
  source 1..23: mol_type = other RNA
ggagtggaggagggtgtggctgt

SEQ ID NO: 64620 - RNA, 23 nt, synthetic construct
  source 1..23: mol_type = other RNA
ctggagtggaggagggtgtggct

SEQ ID NO: 64621 - RNA, 23 nt, synthetic construct
  source 1..23: mol_type = other RNA
aactggtggctgtgggtgtggtg

SEQ ID NO: 64622 - RNA, 23 nt, synthetic construct
  source 1..23: mol_type = other RNA
ggtggtccctggggtggaggacg

SEQ ID NO: 64623 - RNA, 23 nt, synthetic construct
  source 1..23: mol_type = other RNA
gatccaggtggtccctggggtgg

SEQ ID NO: 64624 - RNA, 23 nt, synthetic construct
  source 1..23: mol_type = other RNA
ggatccaggtggtccctggggtg

SEQ ID NO: 64625 - RNA, 23 nt, synthetic construct
  source 1..23: mol_type = other RNA
ggtggtccctggggtggaggacg

SEQ ID NO: 64626 - RNA, 23 nt, synthetic construct
  source 1..23: mol_type = other RNA
gatccaggtggtccctggggtgg

SEQ ID NO: 64627 - RNA, 23 nt, synthetic construct
  source 1..23: mol_type = other RNA
ggatccaggtggtccctggggtg

SEQ ID NO: 64628 - RNA, 23 nt, synthetic construct
  source 1..23: mol_type = other RNA
agtggaggagggtgtggctgtgg

SEQ ID NO: 64629 - RNA, 23 nt, synthetic construct
  source 1..23: mol_type = other RNA
gagtggaggagggtgtggctgtg

SEQ ID NO: 64630 - RNA, 23 nt, synthetic construct
  source 1..23: mol_type = other RNA
ggagtggaggagggtgtggctgt

SEQ ID NO: 64631 - RNA, 23 nt, synthetic construct
  source 1..23: mol_type = other RNA
ctggagtggaggagggtgtggct

SEQ ID NO: 64632 - RNA, 23 nt, synthetic construct
  source 1..23: mol_type = other RNA
tggaggagggtgtggccgtggaa

SEQ ID NO: 64633 - RNA, 23 nt, synthetic construct
  source 1..23: mol_type = other RNA
gtggaggagggtgtggccgtgga

SEQ ID NO: 64634 - RNA, 23 nt, synthetic construct
  source 1..23: mol_type = other RNA
gagtggaggagggtgtggccgtg

SEQ ID NO: 64635 - RNA, 23 nt, synthetic construct
  source 1..23: mol_type = other RNA
tccccagagtggaggagggtgtg

SEQ ID NO: 64636 - RNA, 23 nt, synthetic construct
  source 1..23: mol_type = other RNA
ggtcgtccccagagtggaggagg

SEQ ID NO: 64637 - RNA, 23 nt, synthetic construct
  source 1..23: mol_type = other RNA
ggtggtccctggggtggaggaca

SEQ ID NO: 64638 - RNA, 23 nt, synthetic construct
  source 1..23: mol_type = other RNA
gatccaggtggtccctggggtgg

SEQ ID NO: 64639 - RNA, 23 nt, synthetic construct
  source 1..23: mol_type = other RNA
ggatccaggtggtccctggggtg

SEQ ID NO: 64640 - RNA, 23 nt, synthetic construct
  source 1..23: mol_type = other RNA
tgaggaggacacagtggacacgc

SEQ ID NO: 64641 - RNA, 23 nt, synthetic construct
  source 1..23: mol_type = other RNA
tttggtgggtgggcaggtgaggt

SEQ ID NO: 64642 - RNA, 23 nt, synthetic construct
  source 1..23: mol_type = other RNA
gggcaggggcttgcactgcaccg

SEQ ID NO: 64643 - RNA, 23 nt, synthetic construct
  source 1..23: mol_type = other RNA
tcacagggcaggggcttgcactg

SEQ ID NO: 64644 - RNA, 23 nt, synthetic construct
  source 1..23: mol_type = other RNA
actcctgccctggcgggcacaca

SEQ ID NO: 64645 - RNA, 23 nt, synthetic construct
  source 1..23: mol_type = other RNA
gcgcagggacacagaagggcgtg

SEQ ID NO: 64646 - RNA, 23 nt, synthetic construct
  source 1..23: mol_type = other RNA
ggcgcagggacacagaagggcgt

SEQ ID NO: 64647 - RNA, 23 nt, synthetic construct
  source 1..23: mol_type = other RNA
cagagcatggggatggaggcaga

SEQ ID NO: 64648 - RNA, 23 nt, synthetic construct
  source 1..23: mol_type = other RNA
gtggacagagcatggggatggag

SEQ ID NO: 64649 - RNA, 23 nt, synthetic construct
  source 1..23: mol_type = other RNA
gtcctgctggcccctcacccttc

SEQ ID NO: 64650 - RNA, 23 nt, synthetic construct
  source 1..23: mol_type = other RNA
gggtcctgctggcccctcaccct

SEQ ID NO: 64651 - RNA, 23 nt, synthetic construct
  source 1..23: mol_type = other RNA
gaaaggggtcctgctggcccctc

SEQ ID NO: 64652 - RNA, 23 nt, synthetic construct
  source 1..23: mol_type = other RNA
ggtgggccacaggctctcccagg

SEQ ID NO: 64653 - RNA, 23 nt, synthetic construct
  source 1..23: mol_type = other RNA
aaggccaaggtgggccacaggct

SEQ ID NO: 64654 - RNA, 23 nt, synthetic construct
  source 1..23: mol_type = other RNA
caaggccaaggtgggccacaggc

SEQ ID NO: 64655 - RNA, 23 nt, synthetic construct
  source 1..23: mol_type = other RNA
gagcagagggggctttgggatgc

SEQ ID NO: 64656 - RNA, 23 nt, synthetic construct
  source 1..23: mol_type = other RNA
ggctgggttgagcagagggggct

SEQ ID NO: 64657 - RNA, 23 nt, synthetic construct
  source 1..23: mol_type = other RNA
tgagcagagggggctttgggatg

SEQ ID NO: 64658 - RNA, 23 nt, synthetic construct
  source 1..23: mol_type = other RNA
tggaactggtggctgtgggtgtg

SEQ ID NO: 64659 - RNA, 23 nt, synthetic construct
  source 1..23: mol_type = other RNA
ttggaactggtggctgtgggtgt

SEQ ID NO: 64660 - RNA, 23 nt, synthetic construct
  source 1..23: mol_type = other RNA
tggaactggtggctgtgggtgtg

SEQ ID NO: 64661 - RNA, 23 nt, synthetic construct
  source 1..23: mol_type = other RNA
ttggaactggtggctgtgggtgt

SEQ ID NO: 64662 - RNA, 23 nt, synthetic construct
  source 1..23: mol_type = other RNA
tggaggagggtgtggctgtggac

SEQ ID NO: 64663 - RNA, 23 nt, synthetic construct
  source 1..23: mol_type = other RNA
gttcctggggtggaggagggggt

SEQ ID NO: 64664 - RNA, 23 nt, synthetic construct
  source 1..23: mol_type = other RNA
tggaggagggtgtggctgtggac

SEQ ID NO: 64665 - RNA, 23 nt, synthetic construct
  source 1..23: mol_type = other RNA
gttcctggggtggaggagggggt

SEQ ID NO: 64666 - RNA, 23 nt, synthetic construct
  source 1..23: mol_type = other RNA
gttcctggggtggaggagggggt

SEQ ID NO: 64667 - RNA, 23 nt, synthetic construct
  source 1..23: mol_type = other RNA
tggaggagggtgtggctgtggac

SEQ ID NO: 64668 - RNA, 23 nt, synthetic construct
  source 1..23: mol_type = other RNA
tggaggagggtgtggctgtggac

SEQ ID NO: 64669 - RNA, 23 nt, synthetic construct
  source 1..23: mol_type = other RNA
gttcctggggtggaggagggggt

SEQ ID NO: 64670 - RNA, 23 nt, synthetic construct
  source 1..23: mol_type = other RNA
gtgggccacaggctctcccaggg

SEQ ID NO: 64671 - RNA, 23 nt, synthetic construct
  source 1..23: mol_type = other RNA
ggaggagggtgtggctgtggaca

SEQ ID NO: 64672 - RNA, 23 nt, synthetic construct
  source 1..23: mol_type = other RNA
ggaggagggtgtggctgtggaca

SEQ ID NO: 64673 - RNA, 23 nt, synthetic construct
  source 1..23: mol_type = other RNA
ggtggctgtgggtgtggtggccg

SEQ ID NO: 64674 - RNA, 23 nt, synthetic construct
  source 1..23: mol_type = other RNA
ggaggagggtgtggctgtggaca

SEQ ID NO: 64675 - RNA, 23 nt, synthetic construct
  source 1..23: mol_type = other RNA
ggtggctgtgggtgtggtggccg

SEQ ID NO: 64676 - RNA, 23 nt, synthetic construct
  source 1..23: mol_type = other RNA
ggaggagggtgtggctgtggaca

SEQ ID NO: 64677 - RNA, 23 nt, synthetic construct
  source 1..23: mol_type = other RNA
gtccccagagtggaggagggtgt

SEQ ID NO: 64678 - RNA, 23 nt, synthetic construct
  source 1..23: mol_type = other RNA
tagtcagcactttggtagtgtga

SEQ ID NO: 64679 - RNA, 23 nt, synthetic construct
  source 1..23: mol_type = other RNA
gccgccgtgggtgcaggggcact

SEQ ID NO: 64680 - RNA, 23 nt, synthetic construct
  source 1..23: mol_type = other RNA
ggcagttctccgctgtggggacc

SEQ ID NO: 64681 - RNA, 23 nt, synthetic construct
  source 1..23: mol_type = other RNA
ggccttgatgacaacacgggtga

SEQ ID NO: 64682 - RNA, 23 nt, synthetic construct
  source 1..23: mol_type = other RNA
tgggccttgatgacaacacgggt

SEQ ID NO: 64683 - RNA, 23 nt, synthetic construct
  source 1..23: mol_type = other RNA
ctgttcccaaactccagtgcgtc

SEQ ID NO: 64684 - RNA, 23 nt, synthetic construct
  source 1..23: mol_type = other RNA
acgctgcaggtgacgtcggcctc

SEQ ID NO: 64685 - RNA, 23 nt, synthetic construct
  source 1..23: mol_type = other RNA
tggacagggctggagtcgagtgc

SEQ ID NO: 64686 - RNA, 23 nt, synthetic construct
  source 1..23: mol_type = other RNA
tggacagggctggagtcgagtgc

SEQ ID NO: 64687 - RNA, 23 nt, synthetic construct
  source 1..23: mol_type = other RNA
tggacagggctggagtcgagtgc

SEQ ID NO: 64688 - RNA, 23 nt, synthetic construct
  source 1..23: mol_type = other RNA
gtagttctcattctccacactga

SEQ ID NO: 64689 - RNA, 23 nt, synthetic construct
  source 1..23: mol_type = other RNA
gcagttctccgctgtggggaccc

SEQ ID NO: 64690 - RNA, 23 nt, synthetic construct
  source 1..23: mol_type = other RNA
tcatagtggaagtcacagggctg

SEQ ID NO: 64691 - RNA, 23 nt, synthetic construct
  source 1..23: mol_type = other RNA
agtgtgagctgttcctggggtgg

SEQ ID NO: 64692 - RNA, 23 nt, synthetic construct
  source 1..23: mol_type = other RNA
agtgtgagctgttcctggggtgg

SEQ ID NO: 64693 - RNA, 23 nt, synthetic construct
  source 1..23: mol_type = other RNA
agtgtgagctgttcctggggtgg

SEQ ID NO: 64694 - RNA, 23 nt, synthetic construct
  source 1..23: mol_type = other RNA
agtgtgagctgttcctggggtgg

SEQ ID NO: 64695 - RNA, 23 nt, synthetic construct
  source 1..23: mol_type = other RNA
agtgtgagctgttcctggggtgg

SEQ ID NO: 64696 - RNA, 23 nt, synthetic construct
  source 1..23: mol_type = other RNA
tgctggggcagtggccgtagttg

SEQ ID NO: 64697 - RNA, 23 nt, synthetic construct
  source 1..23: mol_type = other RNA
tgctggggcagtggccgtagttg

SEQ ID NO: 64698 - RNA, 23 nt, synthetic construct
  source 1..23: mol_type = other RNA
tgctggggcagtggccgtagttg

SEQ ID NO: 64699 - RNA, 23 nt, synthetic construct
  source 1..23: mol_type = other RNA
tgctggggcagtggccgtagttg

SEQ ID NO: 64700 - RNA, 23 nt, synthetic construct
  source 1..23: mol_type = other RNA
cactgagggagcaggggtcctca

SEQ ID NO: 64701 - RNA, 23 nt, synthetic construct
  source 1..23: mol_type = other RNA
tgttcccaaactccagtgcgtcc

SEQ ID NO: 64702 - RNA, 23 nt, synthetic construct
  source 1..23: mol_type = other RNA
gctggggcagtggccgtagttgc

SEQ ID NO: 64703 - RNA, 23 nt, synthetic construct
  source 1..23: mol_type = other RNA
gtgctggggcagtggccgtagtt

SEQ ID NO: 64704 - RNA, 23 nt, synthetic construct
  source 1..23: mol_type = other RNA
gctggggcagtggccgtagttgc

SEQ ID NO: 64705 - RNA, 23 nt, synthetic construct
  source 1..23: mol_type = other RNA
gtgctggggcagtggccgtagtt

SEQ ID NO: 64706 - RNA, 23 nt, synthetic construct
  source 1..23: mol_type = other RNA
gctggggcagtggccgtagttgc

SEQ ID NO: 64707 - RNA, 23 nt, synthetic construct
  source 1..23: mol_type = other RNA
gtgctggggcagtggccgtagtt

SEQ ID NO: 64708 - RNA, 23 nt, synthetic construct
  source 1..23: mol_type = other RNA
gctggggcagtggccgtagttgc

SEQ ID NO: 64709 - RNA, 23 nt, synthetic construct
  source 1..23: mol_type = other RNA
gtgctggggcagtggccgtagtt

SEQ ID NO: 64710 - RNA, 23 nt, synthetic construct
  source 1..23: mol_type = other RNA
ggaaggtgggacagcagtcgccc

SEQ ID NO: 64711 - RNA, 23 nt, synthetic construct
  source 1..23: mol_type = other RNA
cgctgcaggtgacgtcggcctca

SEQ ID NO: 64712 - RNA, 23 nt, synthetic construct
  source 1..23: mol_type = other RNA
gcggccgccgtgggtgcaggggc

SEQ ID NO: 64713 - RNA, 23 nt, synthetic construct
  source 1..23: mol_type = other RNA
cattctccacactgagggagcag

SEQ ID NO: 64714 - RNA, 23 nt, synthetic construct
  source 1..23: mol_type = other RNA
cggccgccgtgggtgcaggggca

SEQ ID NO: 64715 - RNA, 23 nt, synthetic construct
  source 1..23: mol_type = other RNA
ggctgtaggtgcggccgccgtgg

SEQ ID NO: 64716 - RNA, 23 nt, synthetic construct
  source 1..23: mol_type = other RNA
tttctgcagagaggctcccaggc

SEQ ID NO: 64717 - RNA, 23 nt, synthetic construct
  source 1..23: mol_type = other RNA
ggcagtctctggagtggaggagg

SEQ ID NO: 64718 - RNA, 23 nt, synthetic construct
  source 1..23: mol_type = other RNA
ggcagtctctggagtggaggagg

SEQ ID NO: 64719 - RNA, 23 nt, synthetic construct
  source 1..23: mol_type = other RNA
ttgtgggtgtggtggttgtgggt

SEQ ID NO: 64720 - RNA, 23 nt, synthetic construct
  source 1..23: mol_type = other RNA
gtggaagtcacagggctggctcg

SEQ ID NO: 64721 - RNA, 23 nt, synthetic construct
  source 1..23: mol_type = other RNA
tggaagtcacagggctggctcgg

SEQ ID NO: 64722 - RNA, 23 nt, synthetic construct
  source 1..23: mol_type = other RNA
catagtggaagtcacagggctgg

SEQ ID NO: 64723 - RNA, 23 nt, synthetic construct
  source 1..23: mol_type = other RNA
atgacaacacgggtgaccacagg

SEQ ID NO: 64724 - RNA, 23 nt, synthetic construct
  source 1..23: mol_type = other RNA
aaggtgggacagcagtcgccctc

SEQ ID NO: 64725 - RNA, 23 nt, synthetic construct
  source 1..23: mol_type = other RNA
cttttctgcagagaggctcccag

SEQ ID NO: 64726 - RNA, 23 nt, synthetic construct
  source 1..23: mol_type = other RNA
atagtggaagtcacagggctggc

SEQ ID NO: 64727 - RNA, 23 nt, synthetic construct
  source 1..23: mol_type = other RNA
tgacaacacgggtgaccacaggc

SEQ ID NO: 64728 - RNA, 23 nt, synthetic construct
  source 1..23: mol_type = other RNA
cactcgaggcccaggggctgctc

SEQ ID NO: 64729 - RNA, 23 nt, synthetic construct
  source 1..23: mol_type = other RNA
ccggggtgctggggcagtggccg

SEQ ID NO: 64730 - RNA, 23 nt, synthetic construct
  source 1..23: mol_type = other RNA
cactcgaggcccaggggctgctc

SEQ ID NO: 64731 - RNA, 23 nt, synthetic construct
  source 1..23: mol_type = other RNA
ccggggtgctggggcagtggccg

SEQ ID NO: 64732 - RNA, 23 nt, synthetic construct
  source 1..23: mol_type = other RNA
cactcgaggcccaggggctgctc

SEQ ID NO: 64733 - RNA, 23 nt, synthetic construct
  source 1..23: mol_type = other RNA
ccggggtgctggggcagtggccg

SEQ ID NO: 64734 - RNA, 23 nt, synthetic construct
  source 1..23: mol_type = other RNA
cactcgaggcccaggggctgctc

SEQ ID NO: 64735 - RNA, 23 nt, synthetic construct
  source 1..23: mol_type = other RNA
ccggggtgctggggcagtggccg

SEQ ID NO: 64736 - RNA, 23 nt, synthetic construct
  source 1..23: mol_type = other RNA
cccctgggccttgatgacaacac

SEQ ID NO: 64737 - RNA, 23 nt, synthetic construct
  source 1..23: mol_type = other RNA
gggccttgatgacaacacgggtg

SEQ ID NO: 64738 - RNA, 23 nt, synthetic construct
  source 1..23: mol_type = other RNA
ggcagtggccgtagttgcagcag

SEQ ID NO: 64739 - RNA, 23 nt, synthetic construct
  source 1..23: mol_type = other RNA
ggcagtggccgtagttgcagcag

SEQ ID NO: 64740 - RNA, 23 nt, synthetic construct
  source 1..23: mol_type = other RNA
ggcagtggccgtagttgcagcag

SEQ ID NO: 64741 - RNA, 23 nt, synthetic construct
  source 1..23: mol_type = other RNA
ggcagtggccgtagttgcagcag

SEQ ID NO: 64742 - RNA, 23 nt, synthetic construct
  source 1..23: mol_type = other RNA
cagtccctggactggaggaggga

SEQ ID NO: 64743 - RNA, 23 nt, synthetic construct
  source 1..23: mol_type = other RNA
gcagtccctggactggaggaggg

SEQ ID NO: 64744 - RNA, 23 nt, synthetic construct
  source 1..23: mol_type = other RNA
gtgagctgttcctggggtggagg

SEQ ID NO: 64745 - RNA, 23 nt, synthetic construct
  source 1..23: mol_type = other RNA
gtgagctgttcctggggtggagg

SEQ ID NO: 64746 - RNA, 23 nt, synthetic construct
  source 1..23: mol_type = other RNA
cagtccctggactggaggaggga

SEQ ID NO: 64747 - RNA, 23 nt, synthetic construct
  source 1..23: mol_type = other RNA
gcagtccctggactggaggaggg

SEQ ID NO: 64748 - RNA, 23 nt, synthetic construct
  source 1..23: mol_type = other RNA
gtgagctgttcctggggtggagg

SEQ ID NO: 64749 - RNA, 23 nt, synthetic construct
  source 1..23: mol_type = other RNA
gtgagctgttcctggggtggaag

SEQ ID NO: 64750 - RNA, 23 nt, synthetic construct
  source 1..23: mol_type = other RNA
cagtccctggactggaggaggga

SEQ ID NO: 64751 - RNA, 23 nt, synthetic construct
  source 1..23: mol_type = other RNA
gcagtccctggactggaggaggg

SEQ ID NO: 64752 - RNA, 23 nt, synthetic construct
  source 1..23: mol_type = other RNA
gtgagctgttcctggggtggagg

SEQ ID NO: 64753 - RNA, 23 nt, synthetic construct
  source 1..23: mol_type = other RNA
tagtggaagtcacagggctggct

SEQ ID NO: 64754 - RNA, 23 nt, synthetic construct
  source 1..23: mol_type = other RNA
ctggggagcactgcaggggtgcg

SEQ ID NO: 64755 - RNA, 23 nt, synthetic construct
  source 1..23: mol_type = other RNA
gctgttcctggggtggaggaggg

SEQ ID NO: 64756 - RNA, 23 nt, synthetic construct
  source 1..23: mol_type = other RNA
gctgttcctggggtggaggaggg

SEQ ID NO: 64757 - RNA, 23 nt, synthetic construct
  source 1..23: mol_type = other RNA
gctgttcctggggtggaggaggg

SEQ ID NO: 64758 - RNA, 23 nt, synthetic construct
  source 1..23: mol_type = other RNA
gctgttcctggggtggaggaggg

SEQ ID NO: 64759 - RNA, 23 nt, synthetic construct
  source 1..23: mol_type = other RNA
ggggcaggtccgggggcagagct

SEQ ID NO: 64760 - RNA, 23 nt, synthetic construct
  source 1..23: mol_type = other RNA
ttctgcagagaggctcccaggca

SEQ ID NO: 64761 - RNA, 23 nt, synthetic construct
  source 1..23: mol_type = other RNA
gggtgctggggcagtggccgtag

SEQ ID NO: 64762 - RNA, 23 nt, synthetic construct
  source 1..23: mol_type = other RNA
gggtgctggggcagtggccgtag

SEQ ID NO: 64763 - RNA, 23 nt, synthetic construct
  source 1..23: mol_type = other RNA
gggtgctggggcagtggccgtag

SEQ ID NO: 64764 - RNA, 23 nt, synthetic construct
  source 1..23: mol_type = other RNA
gggtgctggggcagtggccgtag

SEQ ID NO: 64765 - RNA, 23 nt, synthetic construct
  source 1..23: mol_type = other RNA
tgagctgttcctggggtggagga

SEQ ID NO: 64766 - RNA, 23 nt, synthetic construct
  source 1..23: mol_type = other RNA
tgagctgttcctggggtggagga

SEQ ID NO: 64767 - RNA, 23 nt, synthetic construct
  source 1..23: mol_type = other RNA
tgagctgttcctggggtggagga

SEQ ID NO: 64768 - RNA, 23 nt, synthetic construct
  source 1..23: mol_type = other RNA
tgagctgttcctggggtggagga

SEQ ID NO: 64769 - RNA, 23 nt, synthetic construct
  source 1..23: mol_type = other RNA
tgctggggagcactgcaggggtg

SEQ ID NO: 64770 - RNA, 23 nt, synthetic construct
  source 1..23: mol_type = other RNA
ctgctggggagcactgcaggggt

SEQ ID NO: 64771 - RNA, 23 nt, synthetic construct
  source 1..23: mol_type = other RNA
gtccctggactggaggagggagt

SEQ ID NO: 64772 - RNA, 23 nt, synthetic construct
  source 1..23: mol_type = other RNA
gtctctggagtggaggagggtgt

SEQ ID NO: 64773 - RNA, 23 nt, synthetic construct
  source 1..23: mol_type = other RNA
gtctctggagtggaggagggtgt

SEQ ID NO: 64774 - RNA, 23 nt, synthetic construct
  source 1..23: mol_type = other RNA
gtccctggactggaggagggagt

SEQ ID NO: 64775 - RNA, 23 nt, synthetic construct
  source 1..23: mol_type = other RNA
gtctctggagtggaggagggtgt

SEQ ID NO: 64776 - RNA, 23 nt, synthetic construct
  source 1..23: mol_type = other RNA
gtccctggactggaggagggagt

SEQ ID NO: 64777 - RNA, 23 nt, synthetic construct
  source 1..23: mol_type = other RNA
gtctctggagtggaggagggtgt

SEQ ID NO: 64778 - RNA, 23 nt, synthetic construct
  source 1..23: mol_type = other RNA
cgcactccccacagcactgcccg

SEQ ID NO: 64779 - RNA, 23 nt, synthetic construct
  source 1..23: mol_type = other RNA
gggatggaggagggggtcaccgt

SEQ ID NO: 64780 - RNA, 23 nt, synthetic construct
  source 1..23: mol_type = other RNA
gggatggaggagggggtcaccgt

SEQ ID NO: 64781 - RNA, 23 nt, synthetic construct
  source 1..23: mol_type = other RNA
gggatggaggagggggtcaccgt

SEQ ID NO: 64782 - RNA, 23 nt, synthetic construct
  source 1..23: mol_type = other RNA
gggatggaggagggggtcaccgt

SEQ ID NO: 64783 - RNA, 23 nt, synthetic construct
  source 1..23: mol_type = other RNA
aggtgcggccgccgtgggtgcag

SEQ ID NO: 64784 - RNA, 23 nt, synthetic construct
  source 1..23: mol_type = other RNA
ctggacagggctggagtcgagtg

SEQ ID NO: 64785 - RNA, 23 nt, synthetic construct
  source 1..23: mol_type = other RNA
ctggacagggctggagtcgagtg

SEQ ID NO: 64786 - RNA, 23 nt, synthetic construct
  source 1..23: mol_type = other RNA
ctggacagggctggagtcgagtg

SEQ ID NO: 64787 - RNA, 23 nt, synthetic construct
  source 1..23: mol_type = other RNA
cccgggctgtaggtgcggccgcc

SEQ ID NO: 64788 - RNA, 23 nt, synthetic construct
  source 1..23: mol_type = other RNA
gcggaaggtgggacagcagtcgc

SEQ ID NO: 64789 - RNA, 23 nt, synthetic construct
  source 1..23: mol_type = other RNA
gtccgggggcagagctcagggca

SEQ ID NO: 64790 - RNA, 23 nt, synthetic construct
  source 1..23: mol_type = other RNA
ggtccgggggcagagctcagggc

SEQ ID NO: 64791 - RNA, 23 nt, synthetic construct
  source 1..23: mol_type = other RNA
gcccgggctgtaggtgcggccgc

SEQ ID NO: 64792 - RNA, 23 nt, synthetic construct
  source 1..23: mol_type = other RNA
cagagaggctcccaggcagctta

SEQ ID NO: 64793 - RNA, 23 nt, synthetic construct
  source 1..23: mol_type = other RNA
gcagagaggctcccaggcagctt

SEQ ID NO: 64794 - RNA, 23 nt, synthetic construct
  source 1..23: mol_type = other RNA
gcactcgaggcccaggggctgct

SEQ ID NO: 64795 - RNA, 23 nt, synthetic construct
  source 1..23: mol_type = other RNA
gcactcgaggcccaggggctgct

SEQ ID NO: 64796 - RNA, 23 nt, synthetic construct
  source 1..23: mol_type = other RNA
gcactcgaggcccaggggctgct

SEQ ID NO: 64797 - RNA, 23 nt, synthetic construct
  source 1..23: mol_type = other RNA
gcactcgaggcccaggggctgct

SEQ ID NO: 64798 - RNA, 23 nt, synthetic construct
  source 1..23: mol_type = other RNA
agcggaaggtgggacagcagtcg

SEQ ID NO: 64799 - RNA, 23 nt, synthetic construct
  source 1..23: mol_type = other RNA
tctccacactgagggagcagggg

SEQ ID NO: 64800 - RNA, 23 nt, synthetic construct
  source 1..23: mol_type = other RNA
tggccccagttgtggtggccgtg

SEQ ID NO: 64801 - RNA, 23 nt, synthetic construct
  source 1..23: mol_type = other RNA
ggttgtgggtgtggtggttgtgc

SEQ ID NO: 64802 - RNA, 23 nt, synthetic construct
  source 1..23: mol_type = other RNA
ggttgtgggtgtggtggttgtgc

SEQ ID NO: 64803 - RNA, 23 nt, synthetic construct
  source 1..23: mol_type = other RNA
ggttgtgggtgtggtggttgtgc

SEQ ID NO: 64804 - RNA, 23 nt, synthetic construct
  source 1..23: mol_type = other RNA
ggttgtgggtgtggtggttgtgc

SEQ ID NO: 64805 - RNA, 23 nt, synthetic construct
  source 1..23: mol_type = other RNA
ggttgtgggtgtggtggttgtgc

SEQ ID NO: 64806 - RNA, 23 nt, synthetic construct
  source 1..23: mol_type = other RNA
ggttgtgggtgtggtggttgtgg

SEQ ID NO: 64807 - RNA, 23 nt, synthetic construct
  source 1..23: mol_type = other RNA
tgcggccgccgtgggtgcagggg

SEQ ID NO: 64808 - RNA, 23 nt, synthetic construct
  source 1..23: mol_type = other RNA
gttctcattctccacactgaggg

SEQ ID NO: 64809 - RNA, 23 nt, synthetic construct
  source 1..23: mol_type = other RNA
cgtagttctcattctccacactg

SEQ ID NO: 64810 - RNA, 23 nt, synthetic construct
  source 1..23: mol_type = other RNA
tgtgagctgttcctggggtggag

SEQ ID NO: 64811 - RNA, 23 nt, synthetic construct
  source 1..23: mol_type = other RNA
tggttgtgggtgtggtggttgtg

SEQ ID NO: 64812 - RNA, 23 nt, synthetic construct
  source 1..23: mol_type = other RNA
tgtgagctgttcctggggtggag

SEQ ID NO: 64813 - RNA, 23 nt, synthetic construct
  source 1..23: mol_type = other RNA
tggttgtgggtgtggtggttgtg

SEQ ID NO: 64814 - RNA, 23 nt, synthetic construct
  source 1..23: mol_type = other RNA
tgtgagctgttcctggggtggag

SEQ ID NO: 64815 - RNA, 23 nt, synthetic construct
  source 1..23: mol_type = other RNA
tggttgtgggtgtggtggttgtg

SEQ ID NO: 64816 - RNA, 23 nt, synthetic construct
  source 1..23: mol_type = other RNA
tgtgagctgttcctggggtggaa

SEQ ID NO: 64817 - RNA, 23 nt, synthetic construct
  source 1..23: mol_type = other RNA
tggttgtgggtgtggtggttgtg

SEQ ID NO: 64818 - RNA, 23 nt, synthetic construct
  source 1..23: mol_type = other RNA
tgtgagctgttcctggggtggag

SEQ ID NO: 64819 - RNA, 23 nt, synthetic construct
  source 1..23: mol_type = other RNA
tggttgtgggtgtggtggttgtg

SEQ ID NO: 64820 - RNA, 23 nt, synthetic construct
  source 1..23: mol_type = other RNA
tggttgtgggtgtggtggttgtg

SEQ ID NO: 64821 - RNA, 23 nt, synthetic construct
  source 1..23: mol_type = other RNA
aggctgctggggagcactgcagg

SEQ ID NO: 64822 - RNA, 23 nt, synthetic construct
  source 1..23: mol_type = other RNA
ggaagtcacagggctggctcggg

SEQ ID NO: 64823 - RNA, 23 nt, synthetic construct
  source 1..23: mol_type = other RNA
ggctgctggggagcactgcaggg

SEQ ID NO: 64824 - RNA, 23 nt, synthetic construct
  source 1..23: mol_type = other RNA
agctgttcctggggtggaggagg

SEQ ID NO: 64825 - RNA, 23 nt, synthetic construct
  source 1..23: mol_type = other RNA
agctgttcctggggtggaggagg

SEQ ID NO: 64826 - RNA, 23 nt, synthetic construct
  source 1..23: mol_type = other RNA
agctgttcctggggtggaggagg

SEQ ID NO: 64827 - RNA, 23 nt, synthetic construct
  source 1..23: mol_type = other RNA
agctgttcctggggtggaggagg

SEQ ID NO: 64828 - RNA, 23 nt, synthetic construct
  source 1..23: mol_type = other RNA
actgagggagcaggggtcctcaa

SEQ ID NO: 64829 - RNA, 23 nt, synthetic construct
  source 1..23: mol_type = other RNA
cgaggcccaggggctgctcacag

SEQ ID NO: 64830 - RNA, 23 nt, synthetic construct
  source 1..23: mol_type = other RNA
cgaggcccaggggctgctcacag

SEQ ID NO: 64831 - RNA, 23 nt, synthetic construct
  source 1..23: mol_type = other RNA
cgaggcccaggggctgctcacag

SEQ ID NO: 64832 - RNA, 23 nt, synthetic construct
  source 1..23: mol_type = other RNA
cgaggcccaggggctgctcacag

SEQ ID NO: 64833 - RNA, 23 nt, synthetic construct
  source 1..23: mol_type = other RNA
aacacgggtgaccacaggcctgg

SEQ ID NO: 64834 - RNA, 23 nt, synthetic construct
  source 1..23: mol_type = other RNA
cctgggccttgatgacaacacgg

SEQ ID NO: 64835 - RNA, 23 nt, synthetic construct
  source 1..23: mol_type = other RNA
ggcaggtccgggggcagagctca

SEQ ID NO: 64836 - RNA, 23 nt, synthetic construct
  source 1..23: mol_type = other RNA
gtaggtgcggccgccgtgggtgc

SEQ ID NO: 64837 - RNA, 23 nt, synthetic construct
  source 1..23: mol_type = other RNA
acactgagggagcaggggtcctc

SEQ ID NO: 64838 - RNA, 23 nt, synthetic construct
  source 1..23: mol_type = other RNA
cacactgagggagcaggggtcct

SEQ ID NO: 64839 - RNA, 23 nt, synthetic construct
  source 1..23: mol_type = other RNA
attctccacactgagggagcagg

SEQ ID NO: 64840 - RNA, 23 nt, synthetic construct
  source 1..23: mol_type = other RNA
tcattctccacactgagggagca

SEQ ID NO: 64841 - RNA, 23 nt, synthetic construct
  source 1..23: mol_type = other RNA
tagttctcattctccacactgag

SEQ ID NO: 64842 - RNA, 23 nt, synthetic construct
  source 1..23: mol_type = other RNA
tgcagagaggctcccaggcagct

SEQ ID NO: 64843 - RNA, 23 nt, synthetic construct
  source 1..23: mol_type = other RNA
ctgcagagaggctcccaggcagc

SEQ ID NO: 64844 - RNA, 23 nt, synthetic construct
  source 1..23: mol_type = other RNA
gagctgttcctggggtggaggag

SEQ ID NO: 64845 - RNA, 23 nt, synthetic construct
  source 1..23: mol_type = other RNA
gttgtgggtgtggtggttgtgct

SEQ ID NO: 64846 - RNA, 23 nt, synthetic construct
  source 1..23: mol_type = other RNA
ctggttgtgggtgtggtggttgt

SEQ ID NO: 64847 - RNA, 23 nt, synthetic construct
  source 1..23: mol_type = other RNA
gaggcccaggggctgctcacaga

SEQ ID NO: 64848 - RNA, 23 nt, synthetic construct
  source 1..23: mol_type = other RNA
tcgaggcccaggggctgctcaca

SEQ ID NO: 64849 - RNA, 23 nt, synthetic construct
  source 1..23: mol_type = other RNA
actcgaggcccaggggctgctca

SEQ ID NO: 64850 - RNA, 23 nt, synthetic construct
  source 1..23: mol_type = other RNA
ggggtgctggggcagtggccgta

SEQ ID NO: 64851 - RNA, 23 nt, synthetic construct
  source 1..23: mol_type = other RNA
cggggtgctggggcagtggccgt

SEQ ID NO: 64852 - RNA, 23 nt, synthetic construct
  source 1..23: mol_type = other RNA
gccggggtgctggggcagtggcc

SEQ ID NO: 64853 - RNA, 23 nt, synthetic construct
  source 1..23: mol_type = other RNA
gagctgttcctggggtggaggag

SEQ ID NO: 64854 - RNA, 23 nt, synthetic construct
  source 1..23: mol_type = other RNA
gttgtgggtgtggtggttgtgct

SEQ ID NO: 64855 - RNA, 23 nt, synthetic construct
  source 1..23: mol_type = other RNA
ctggttgtgggtgtggtggttgt

SEQ ID NO: 64856 - RNA, 23 nt, synthetic construct
  source 1..23: mol_type = other RNA
actgtgggggtgtgggtggtccc

SEQ ID NO: 64857 - RNA, 23 nt, synthetic construct
  source 1..23: mol_type = other RNA
tgagggctggacagggctggagt

SEQ ID NO: 64858 - RNA, 23 nt, synthetic construct
  source 1..23: mol_type = other RNA
gtgagggctggacagggctggag

SEQ ID NO: 64859 - RNA, 23 nt, synthetic construct
  source 1..23: mol_type = other RNA
gaggcccaggggctgctcacaga

SEQ ID NO: 64860 - RNA, 23 nt, synthetic construct
  source 1..23: mol_type = other RNA
tcgaggcccaggggctgctcaca

SEQ ID NO: 64861 - RNA, 23 nt, synthetic construct
  source 1..23: mol_type = other RNA
actcgaggcccaggggctgctca

SEQ ID NO: 64862 - RNA, 23 nt, synthetic construct
  source 1..23: mol_type = other RNA
ggggtgctggggcagtggccgta

SEQ ID NO: 64863 - RNA, 23 nt, synthetic construct
  source 1..23: mol_type = other RNA
cggggtgctggggcagtggccgt

SEQ ID NO: 64864 - RNA, 23 nt, synthetic construct
  source 1..23: mol_type = other RNA
gccggggtgctggggcagtggcc

SEQ ID NO: 64865 - RNA, 23 nt, synthetic construct
  source 1..23: mol_type = other RNA
gagctgttcctggggtggaggag

SEQ ID NO: 64866 - RNA, 23 nt, synthetic construct
  source 1..23: mol_type = other RNA
gttgtgggtgtggtggttgtgct

SEQ ID NO: 64867 - RNA, 23 nt, synthetic construct
  source 1..23: mol_type = other RNA
ctggttgtgggtgtggtggttgt

SEQ ID NO: 64868 - RNA, 23 nt, synthetic construct
  source 1..23: mol_type = other RNA
tgagggctggacagggctggagt

SEQ ID NO: 64869 - RNA, 23 nt, synthetic construct
  source 1..23: mol_type = other RNA
gtgagggctggacagggctggag

SEQ ID NO: 64870 - RNA, 23 nt, synthetic construct
  source 1..23: mol_type = other RNA
gaggcccaggggctgctcacaga

SEQ ID NO: 64871 - RNA, 23 nt, synthetic construct
  source 1..23: mol_type = other RNA
tcgaggcccaggggctgctcaca

SEQ ID NO: 64872 - RNA, 23 nt, synthetic construct
  source 1..23: mol_type = other RNA
actcgaggcccaggggctgctca

SEQ ID NO: 64873 - RNA, 23 nt, synthetic construct
  source 1..23: mol_type = other RNA
ggggtgctggggcagtggccgta

SEQ ID NO: 64874 - RNA, 23 nt, synthetic construct
  source 1..23: mol_type = other RNA
cggggtgctggggcagtggccgt

SEQ ID NO: 64875 - RNA, 23 nt, synthetic construct
  source 1..23: mol_type = other RNA
gccggggtgctggggcagtggcc

SEQ ID NO: 64876 - RNA, 23 nt, synthetic construct
  source 1..23: mol_type = other RNA
gttgtgggtgtggtggttgtgct

SEQ ID NO: 64877 - RNA, 23 nt, synthetic construct
  source 1..23: mol_type = other RNA
ctggttgtgggtgtggtggttgt

SEQ ID NO: 64878 - RNA, 23 nt, synthetic construct
  source 1..23: mol_type = other RNA
actgtgggggtgtgggtggtccc

SEQ ID NO: 64879 - RNA, 23 nt, synthetic construct
  source 1..23: mol_type = other RNA
tgagggctggacagggctggagt

SEQ ID NO: 64880 - RNA, 23 nt, synthetic construct
  source 1..23: mol_type = other RNA
gtgagggctggacagggctggag

SEQ ID NO: 64881 - RNA, 23 nt, synthetic construct
  source 1..23: mol_type = other RNA
gaggcccaggggctgctcacaga

SEQ ID NO: 64882 - RNA, 23 nt, synthetic construct
  source 1..23: mol_type = other RNA
tcgaggcccaggggctgctcaca

SEQ ID NO: 64883 - RNA, 23 nt, synthetic construct
  source 1..23: mol_type = other RNA
actcgaggcccaggggctgctca

SEQ ID NO: 64884 - RNA, 23 nt, synthetic construct
  source 1..23: mol_type = other RNA
ggggtgctggggcagtggccgta

SEQ ID NO: 64885 - RNA, 23 nt, synthetic construct
  source 1..23: mol_type = other RNA
cggggtgctggggcagtggccgt

SEQ ID NO: 64886 - RNA, 23 nt, synthetic construct
  source 1..23: mol_type = other RNA
gccggggtgctggggcagtggcc

SEQ ID NO: 64887 - RNA, 23 nt, synthetic construct
  source 1..23: mol_type = other RNA
gagctgttcctggggtggaggag

SEQ ID NO: 64888 - RNA, 23 nt, synthetic construct
  source 1..23: mol_type = other RNA
gttgtgggtgtggtggttgtgct

SEQ ID NO: 64889 - RNA, 23 nt, synthetic construct
  source 1..23: mol_type = other RNA
gttgtgggtgtggtggttgtggg

SEQ ID NO: 64890 - RNA, 23 nt, synthetic construct
  source 1..23: mol_type = other RNA
ctggttgtgggtgtggtggttgt

SEQ ID NO: 64891 - RNA, 23 nt, synthetic construct
  source 1..23: mol_type = other RNA
agtggaagtcacagggctggctc

SEQ ID NO: 64892 - RNA, 23 nt, synthetic construct
  source 1..23: mol_type = other RNA
gcagtctctggagtggaggaggg

SEQ ID NO: 64893 - RNA, 23 nt, synthetic construct
  source 1..23: mol_type = other RNA
gcagtctctggagtggaggaggg

SEQ ID NO: 64894 - RNA, 23 nt, synthetic construct
  source 1..23: mol_type = other RNA
ctgtgggggtgtgggtggtcccc

SEQ ID NO: 64895 - RNA, 23 nt, synthetic construct
  source 1..23: mol_type = other RNA
ctgtgggggtgtgggtggtcccc

SEQ ID NO: 64896 - RNA, 23 nt, synthetic construct
  source 1..23: mol_type = other RNA
agtccctggactggaggagggag

SEQ ID NO: 64897 - RNA, 23 nt, synthetic construct
  source 1..23: mol_type = other RNA
agtccctggactggaggagggag

SEQ ID NO: 64898 - RNA, 23 nt, synthetic construct
  source 1..23: mol_type = other RNA
agtccctggactggaggagggag

SEQ ID NO: 64899 - RNA, 23 nt, synthetic construct
  source 1..23: mol_type = other RNA
cagtctctggagtggaggagggt

SEQ ID NO: 64900 - RNA, 23 nt, synthetic construct
  source 1..23: mol_type = other RNA
cagtctctggagtggaggagggt

SEQ ID NO: 64901 - RNA, 23 nt, synthetic construct
  source 1..23: mol_type = other RNA
cagtctctggagtggaggagggt

SEQ ID NO: 64902 - RNA, 23 nt, synthetic construct
  source 1..23: mol_type = other RNA
cagtctctggagtggaggagggt

SEQ ID NO: 64903 - RNA, 23 nt, synthetic construct
  source 1..23: mol_type = other RNA
gatcagtgatgggggagtaccac

SEQ ID NO: 64904 - RNA, 23 nt, synthetic construct
  source 1..23: mol_type = other RNA
cgcccggcactcgatgtcagcca

SEQ ID NO: 64905 - RNA, 23 nt, synthetic construct
  source 1..23: mol_type = other RNA
ggggacaggtagtattgttgcag

SEQ ID NO: 64906 - RNA, 23 nt, synthetic construct
  source 1..23: mol_type = other RNA
agacgccgtccctccagtcgctg

SEQ ID NO: 64907 - RNA, 23 nt, synthetic construct
  source 1..23: mol_type = other RNA
acacacacggtggagaccgggag

SEQ ID NO: 64908 - RNA, 23 nt, synthetic construct
  source 1..23: mol_type = other RNA
agatgcccatgtgtgcgttgaag

SEQ ID NO: 64909 - RNA, 23 nt, synthetic construct
  source 1..23: mol_type = other RNA
ggcaggcatccaccacgtaggcg

SEQ ID NO: 64910 - RNA, 23 nt, synthetic construct
  source 1..23: mol_type = other RNA
tgagggtgccagcagttgcccgg

SEQ ID NO: 64911 - RNA, 23 nt, synthetic construct
  source 1..23: mol_type = other RNA
gtcagccagcacagggcatacct

SEQ ID NO: 64912 - RNA, 23 nt, synthetic construct
  source 1..23: mol_type = other RNA
gtggggtgccagcagttgcctgg

SEQ ID NO: 64913 - RNA, 23 nt, synthetic construct
  source 1..23: mol_type = other RNA
gtggggtgccagcagttgcctgg

SEQ ID NO: 64914 - RNA, 23 nt, synthetic construct
  source 1..23: mol_type = other RNA
gtggggtgccagcagttgcctgg

SEQ ID NO: 64915 - RNA, 23 nt, synthetic construct
  source 1..23: mol_type = other RNA
gtagaaggtgccattgtacgaac

SEQ ID NO: 64916 - RNA, 23 nt, synthetic construct
  source 1..23: mol_type = other RNA
atggctgtaacgctggtagctgt

SEQ ID NO: 64917 - RNA, 23 nt, synthetic construct
  source 1..23: mol_type = other RNA
ctgcacaccaggccgaagtggac

SEQ ID NO: 64918 - RNA, 23 nt, synthetic construct
  source 1..23: mol_type = other RNA
cccgtcgtccctggaagggctga

SEQ ID NO: 64919 - RNA, 23 nt, synthetic construct
  source 1..23: mol_type = other RNA
tggactcagtcgtagtggctgtt

SEQ ID NO: 64920 - RNA, 23 nt, synthetic construct
  source 1..23: mol_type = other RNA
tggattgtggacatggtggccat

SEQ ID NO: 64921 - RNA, 23 nt, synthetic construct
  source 1..23: mol_type = other RNA
tggactcagtcgtagtggctgtt

SEQ ID NO: 64922 - RNA, 23 nt, synthetic construct
  source 1..23: mol_type = other RNA
tggattgtggacatggtggccac

SEQ ID NO: 64923 - RNA, 23 nt, synthetic construct
  source 1..23: mol_type = other RNA
gcaccgacactgaaccctcgtca

SEQ ID NO: 64924 - RNA, 23 nt, synthetic construct
  source 1..23: mol_type = other RNA
ggaaccggtgggcaccatcacgg

SEQ ID NO: 64925 - RNA, 23 nt, synthetic construct
  source 1..23: mol_type = other RNA
acaggtagtattgttgcaggcat

SEQ ID NO: 64926 - RNA, 23 nt, synthetic construct
  source 1..23: mol_type = other RNA
acccgcccattgtgcgccgggtt

SEQ ID NO: 64927 - RNA, 23 nt, synthetic construct
  source 1..23: mol_type = other RNA
gcaggcatccaccacgtaggcgt

SEQ ID NO: 64928 - RNA, 23 nt, synthetic construct
  source 1..23: mol_type = other RNA
ggggtcacccatagggtggtctt

SEQ ID NO: 64929 - RNA, 23 nt, synthetic construct
  source 1..23: mol_type = other RNA
agcagggtcgaggtgcgggtctt

SEQ ID NO: 64930 - RNA, 23 nt, synthetic construct
  source 1..23: mol_type = other RNA
agcagggtcgaggtgcgggtctt

SEQ ID NO: 64931 - RNA, 23 nt, synthetic construct
  source 1..23: mol_type = other RNA
agcagggtcgaggtgcgggtctt

SEQ ID NO: 64932 - RNA, 23 nt, synthetic construct
  source 1..23: mol_type = other RNA
agcagggtcgaggtgcgggtctt

SEQ ID NO: 64933 - RNA, 23 nt, synthetic construct
  source 1..23: mol_type = other RNA
agcggctctttggaagcggtgct

SEQ ID NO: 64934 - RNA, 23 nt, synthetic construct
  source 1..23: mol_type = other RNA
aggggatggctgtaaagctggta

SEQ ID NO: 64935 - RNA, 23 nt, synthetic construct
  source 1..23: mol_type = other RNA
aggggatggctgtaaagctggta

SEQ ID NO: 64936 - RNA, 23 nt, synthetic construct
  source 1..23: mol_type = other RNA
aggggatggctgtaaagctggta

SEQ ID NO: 64937 - RNA, 23 nt, synthetic construct
  source 1..23: mol_type = other RNA
gtgcccaagctccccgtcgtccc

SEQ ID NO: 64938 - RNA, 23 nt, synthetic construct
  source 1..23: mol_type = other RNA
agagccggtggccccggttgtgg

SEQ ID NO: 64939 - RNA, 23 nt, synthetic construct
  source 1..23: mol_type = other RNA
gtggtcctgctgctagggtgagg

SEQ ID NO: 64940 - RNA, 23 nt, synthetic construct
  source 1..23: mol_type = other RNA
gtggtcctgctgctagggtgagg

SEQ ID NO: 64941 - RNA, 23 nt, synthetic construct
  source 1..23: mol_type = other RNA
gtggtcctgctgctagggtgagg

SEQ ID NO: 64942 - RNA, 23 nt, synthetic construct
  source 1..23: mol_type = other RNA
agagccggtggccccggttgtgg

SEQ ID NO: 64943 - RNA, 23 nt, synthetic construct
  source 1..23: mol_type = other RNA
gctggccatcgggcgtgaggcag

SEQ ID NO: 64944 - RNA, 23 nt, synthetic construct
  source 1..23: mol_type = other RNA
ggcactcgatgtcagccagcaca

SEQ ID NO: 64945 - RNA, 23 nt, synthetic construct
  source 1..23: mol_type = other RNA
ccaaagtccaggctgcattccac

SEQ ID NO: 64946 - RNA, 23 nt, synthetic construct
  source 1..23: mol_type = other RNA
gccgtggtgctcacatgtggggt

SEQ ID NO: 64947 - RNA, 23 nt, synthetic construct
  source 1..23: mol_type = other RNA
ccaaagtccaggctgcattccac

SEQ ID NO: 64948 - RNA, 23 nt, synthetic construct
  source 1..23: mol_type = other RNA
ccaaagtccaggctgcattccac

SEQ ID NO: 64949 - RNA, 23 nt, synthetic construct
  source 1..23: mol_type = other RNA
gccgtggtgctcacatgtggggt

SEQ ID NO: 64950 - RNA, 23 nt, synthetic construct
  source 1..23: mol_type = other RNA
ccaaagtccaggctgcattccac

SEQ ID NO: 64951 - RNA, 23 nt, synthetic construct
  source 1..23: mol_type = other RNA
gccgtggtgctcacatgtggggt

SEQ ID NO: 64952 - RNA, 23 nt, synthetic construct
  source 1..23: mol_type = other RNA
atcctcctgacattgcaccgttg

SEQ ID NO: 64953 - RNA, 23 nt, synthetic construct
  source 1..23: mol_type = other RNA
catcctcctgacattgcaccgtt

SEQ ID NO: 64954 - RNA, 23 nt, synthetic construct
  source 1..23: mol_type = other RNA
gactcctgagtggcgccctcccg

SEQ ID NO: 64955 - RNA, 23 nt, synthetic construct
  source 1..23: mol_type = other RNA
ccagcacagggcatacctggtac

SEQ ID NO: 64956 - RNA, 23 nt, synthetic construct
  source 1..23: mol_type = other RNA
tggtggcccttgtcgtggtggcc

SEQ ID NO: 64957 - RNA, 23 nt, synthetic construct
  source 1..23: mol_type = other RNA
tggtggcccttgtcgtggtggcc

SEQ ID NO: 64958 - RNA, 23 nt, synthetic construct
  source 1..23: mol_type = other RNA
acgagcatggccgccagagccaa

SEQ ID NO: 64959 - RNA, 23 nt, synthetic construct
  source 1..23: mol_type = other RNA
gtgttgaaggaggtgcccgggct

SEQ ID NO: 64960 - RNA, 23 nt, synthetic construct
  source 1..23: mol_type = other RNA
caccgtggagcctctggttgtgg

SEQ ID NO: 64961 - RNA, 23 nt, synthetic construct
  source 1..23: mol_type = other RNA
gtcagtgatgggggagtaccact

SEQ ID NO: 64962 - RNA, 23 nt, synthetic construct
  source 1..23: mol_type = other RNA
gtcagtgatgggggagtaccact

SEQ ID NO: 64963 - RNA, 23 nt, synthetic construct
  source 1..23: mol_type = other RNA
caccgtggagcctctggttgtgg

SEQ ID NO: 64964 - RNA, 23 nt, synthetic construct
  source 1..23: mol_type = other RNA
gtcagtgatgggggagtaccact

SEQ ID NO: 64965 - RNA, 23 nt, synthetic construct
  source 1..23: mol_type = other RNA
atcagtgatgggggagtaccact

SEQ ID NO: 64966 - RNA, 23 nt, synthetic construct
  source 1..23: mol_type = other RNA
gtcagtgatgggggagtaccact

SEQ ID NO: 64967 - RNA, 23 nt, synthetic construct
  source 1..23: mol_type = other RNA
tccgtgcagggtgagccacactc

SEQ ID NO: 64968 - RNA, 23 nt, synthetic construct
  source 1..23: mol_type = other RNA
cgggggcacaaggttgtggcact

SEQ ID NO: 64969 - RNA, 23 nt, synthetic construct
  source 1..23: mol_type = other RNA
gtggtcgctgatgcaggcgttga

SEQ ID NO: 64970 - RNA, 23 nt, synthetic construct
  source 1..23: mol_type = other RNA
cagttccgcggctggccccccgc

SEQ ID NO: 64971 - RNA, 23 nt, synthetic construct
  source 1..23: mol_type = other RNA
ggcacatttcttggacagaacgt

SEQ ID NO: 64972 - RNA, 23 nt, synthetic construct
  source 1..23: mol_type = other RNA
ctgcgcccgtggcctccaccacc

SEQ ID NO: 64973 - RNA, 23 nt, synthetic construct
  source 1..23: mol_type = other RNA
tggcattggcacaggcagcctgg

SEQ ID NO: 64974 - RNA, 23 nt, synthetic construct
  source 1..23: mol_type = other RNA
tgctgcagtccaggtacaccatg

SEQ ID NO: 64975 - RNA, 23 nt, synthetic construct
  source 1..23: mol_type = other RNA
ttttcaaacgtctcaaagtctcc

SEQ ID NO: 64976 - RNA, 23 nt, synthetic construct
  source 1..23: mol_type = other RNA
tggtggccgtctccagctctgtg

SEQ ID NO: 64977 - RNA, 23 nt, synthetic construct
  source 1..23: mol_type = other RNA
ggtcagcggctctttggaagcgg

SEQ ID NO: 64978 - RNA, 23 nt, synthetic construct
  source 1..23: mol_type = other RNA
ctgctctgtgaggatccaggtcg

SEQ ID NO: 64979 - RNA, 23 nt, synthetic construct
  source 1..23: mol_type = other RNA
ggtcgtagtggctgctgtggtct

SEQ ID NO: 64980 - RNA, 23 nt, synthetic construct
  source 1..23: mol_type = other RNA
gatggccgtggatccagtggttg

SEQ ID NO: 64981 - RNA, 23 nt, synthetic construct
  source 1..23: mol_type = other RNA
ggccgtgctggtcagcactttgg

SEQ ID NO: 64982 - RNA, 23 nt, synthetic construct
  source 1..23: mol_type = other RNA
ggccgtgctggtcagcactttga

SEQ ID NO: 64983 - RNA, 23 nt, synthetic construct
  source 1..23: mol_type = other RNA
gggagttgtccctggagttgagg

SEQ ID NO: 64984 - RNA, 23 nt, synthetic construct
  source 1..23: mol_type = other RNA
gggggtcaccgtggagccactgg

SEQ ID NO: 64985 - RNA, 23 nt, synthetic construct
  source 1..23: mol_type = other RNA
gggggtcaccgtggagccactgg

SEQ ID NO: 64986 - RNA, 23 nt, synthetic construct
  source 1..23: mol_type = other RNA
gtgtgggtggtctctggagtaga

SEQ ID NO: 64987 - RNA, 23 nt, synthetic construct
  source 1..23: mol_type = other RNA
acgttggccacaggctttgggtc

SEQ ID NO: 64988 - RNA, 23 nt, synthetic construct
  source 1..23: mol_type = other RNA
gggcccagcagccatcctttctg

SEQ ID NO: 64989 - RNA, 23 nt, synthetic construct
  source 1..23: mol_type = other RNA
ctcagcaaagacctggctcagca

SEQ ID NO: 64990 - RNA, 23 nt, synthetic construct
  source 1..23: mol_type = other RNA
acacatgtggcagggaagggcgc

SEQ ID NO: 64991 - RNA, 23 nt, synthetic construct
  source 1..23: mol_type = other RNA
ggacgcactccccacagcactgc

SEQ ID NO: 64992 - RNA, 23 nt, synthetic construct
  source 1..23: mol_type = other RNA
tgttgacccaggtttcattcagc

SEQ ID NO: 64993 - RNA, 23 nt, synthetic construct
  source 1..23: mol_type = other RNA
ggactcctgagtggcgccctccc

SEQ ID NO: 64994 - RNA, 23 nt, synthetic construct
  source 1..23: mol_type = other RNA
tgaagtcgtcagcctggttctgg

SEQ ID NO: 64995 - RNA, 23 nt, synthetic construct
  source 1..23: mol_type = other RNA
tgagctgtacgcccttggcggca

SEQ ID NO: 64996 - RNA, 23 nt, synthetic construct
  source 1..23: mol_type = other RNA
cactgaaccctcgtcacacacgc

SEQ ID NO: 64997 - RNA, 23 nt, synthetic construct
  source 1..23: mol_type = other RNA
gggtgaccgtcacggggcctgag

SEQ ID NO: 64998 - RNA, 23 nt, synthetic construct
  source 1..23: mol_type = other RNA
accgtggagcctctggttgtggg

SEQ ID NO: 64999 - RNA, 23 nt, synthetic construct
  source 1..23: mol_type = other RNA
accgtggagcctctggttgtggg

SEQ ID NO: 65000 - RNA, 23 nt, synthetic construct
  source 1..23: mol_type = other RNA
ctggagtcgagtgctgggtggta

SEQ ID NO: 65001 - RNA, 23 nt, synthetic construct
  source 1..23: mol_type = other RNA
ctggagtcgagtgctgggtggta

SEQ ID NO: 65002 - RNA, 23 nt, synthetic construct
  source 1..23: mol_type = other RNA
ctggagtcgagtgctgggtggta

SEQ ID NO: 65003 - RNA, 23 nt, synthetic construct
  source 1..23: mol_type = other RNA
tgtggtcagctttgtgaggatcc

SEQ ID NO: 65004 - RNA, 23 nt, synthetic construct
  source 1..23: mol_type = other RNA
ctggagtcgagtgctgggtggta

SEQ ID NO: 65005 - RNA, 23 nt, synthetic construct
  source 1..23: mol_type = other RNA
gtacacatgtggcagggaagggc

SEQ ID NO: 65006 - RNA, 23 nt, synthetic construct
  source 1..23: mol_type = other RNA
acactgaaccctcgtcacacacg

SEQ ID NO: 65007 - RNA, 23 nt, synthetic construct
  source 1..23: mol_type = other RNA
gtaggactcctgagtggcgccct

SEQ ID NO: 65008 - RNA, 23 nt, synthetic construct
  source 1..23: mol_type = other RNA
ggttgcagtccttggactggagg

SEQ ID NO: 65009 - RNA, 23 nt, synthetic construct
  source 1..23: mol_type = other RNA
ggttgcagtccttggactggagg

SEQ ID NO: 65010 - RNA, 23 nt, synthetic construct
  source 1..23: mol_type = other RNA
ggttgcagtccttggactggagg

SEQ ID NO: 65011 - RNA, 23 nt, synthetic construct
  source 1..23: mol_type = other RNA
ctgctgtcggcacatttcttgga

SEQ ID NO: 65012 - RNA, 23 nt, synthetic construct
  source 1..23: mol_type = other RNA
atggaactggtggcccttgtcgt

SEQ ID NO: 65013 - RNA, 23 nt, synthetic construct
  source 1..23: mol_type = other RNA
ttgtggtcagctttgtgaggatc

SEQ ID NO: 65014 - RNA, 23 nt, synthetic construct
  source 1..23: mol_type = other RNA
gtggaactggtggcccttgtcgt

SEQ ID NO: 65015 - RNA, 23 nt, synthetic construct
  source 1..23: mol_type = other RNA
ggcctcccgtggtggctgtacca

SEQ ID NO: 65016 - RNA, 23 nt, synthetic construct
  source 1..23: mol_type = other RNA
ggaggtgcccctggtgtggcccg

SEQ ID NO: 65017 - RNA, 23 nt, synthetic construct
  source 1..23: mol_type = other RNA
gaagtggacgtcacagtgcacct

SEQ ID NO: 65018 - RNA, 23 nt, synthetic construct
  source 1..23: mol_type = other RNA
aggtcctgggcgcaggcggccag

SEQ ID NO: 65019 - RNA, 23 nt, synthetic construct
  source 1..23: mol_type = other RNA
aagtggacgtcacagtgcacctt

SEQ ID NO: 65020 - RNA, 23 nt, synthetic construct
  source 1..23: mol_type = other RNA
cagcactttgagggtgccagcag

SEQ ID NO: 65021 - RNA, 23 nt, synthetic construct
  source 1..23: mol_type = other RNA
acacccgcccattgtgcgccggg

SEQ ID NO: 65022 - RNA, 23 nt, synthetic construct
  source 1..23: mol_type = other RNA
cccagtctgcgaggtgagggccg

SEQ ID NO: 65023 - RNA, 23 nt, synthetic construct
  source 1..23: mol_type = other RNA
accaggccgaagtggacgtcaca

SEQ ID NO: 65024 - RNA, 23 nt, synthetic construct
  source 1..23: mol_type = other RNA
gtgcttgtgtatctgggggatgt

SEQ ID NO: 65025 - RNA, 23 nt, synthetic construct
  source 1..23: mol_type = other RNA
ggtgtggtggtctgtgataggcg

SEQ ID NO: 65026 - RNA, 23 nt, synthetic construct
  source 1..23: mol_type = other RNA
cagccactctgaccaggcacact

SEQ ID NO: 65027 - RNA, 23 nt, synthetic construct
  source 1..23: mol_type = other RNA
ggtgtggtggtctgtgataggcg

SEQ ID NO: 65028 - RNA, 23 nt, synthetic construct
  source 1..23: mol_type = other RNA
cagccactctgaccaggcacact

SEQ ID NO: 65029 - RNA, 23 nt, synthetic construct
  source 1..23: mol_type = other RNA
ctgggctctgtgaggatccaggt

SEQ ID NO: 65030 - RNA, 23 nt, synthetic construct
  source 1..23: mol_type = other RNA
ggtgtggtggtctgtgataggcg

SEQ ID NO: 65031 - RNA, 23 nt, synthetic construct
  source 1..23: mol_type = other RNA
cagccactctgaccaggcacact

SEQ ID NO: 65032 - RNA, 23 nt, synthetic construct
  source 1..23: mol_type = other RNA
ggtgtggtggtctgtgataggcg

SEQ ID NO: 65033 - RNA, 23 nt, synthetic construct
  source 1..23: mol_type = other RNA
cagccactctgaccaggcacact

SEQ ID NO: 65034 - RNA, 23 nt, synthetic construct
  source 1..23: mol_type = other RNA
ggtgtggtggtctgtgataggcg

SEQ ID NO: 65035 - RNA, 23 nt, synthetic construct
  source 1..23: mol_type = other RNA
gtctctggagtagaggaggtgtg

SEQ ID NO: 65036 - RNA, 23 nt, synthetic construct
  source 1..23: mol_type = other RNA
gagggggctttgggatgctgacc

SEQ ID NO: 65037 - RNA, 23 nt, synthetic construct
  source 1..23: mol_type = other RNA
gcattctcccagctcggctccac

SEQ ID NO: 65038 - RNA, 23 nt, synthetic construct
  source 1..23: mol_type = other RNA
aactggagcggggtcagcctggc

SEQ ID NO: 65039 - RNA, 23 nt, synthetic construct
  source 1..23: mol_type = other RNA
ttcgcagcagagaacccgcagct

SEQ ID NO: 65040 - RNA, 23 nt, synthetic construct
  source 1..23: mol_type = other RNA
ggtgctggctgtgcctgtcgggc

SEQ ID NO: 65041 - RNA, 23 nt, synthetic construct
  source 1..23: mol_type = other RNA
tgctagaggagggtgttgccata

SEQ ID NO: 65042 - RNA, 23 nt, synthetic construct
  source 1..23: mol_type = other RNA
aaagggctggagtcgagtgctgg

SEQ ID NO: 65043 - RNA, 23 nt, synthetic construct
  source 1..23: mol_type = other RNA
ggggctcacagcccatggtcacc

SEQ ID NO: 65044 - RNA, 23 nt, synthetic construct
  source 1..23: mol_type = other RNA
cactctgaccaggcacactgggg

SEQ ID NO: 65045 - RNA, 23 nt, synthetic construct
  source 1..23: mol_type = other RNA
tgggcctgggcacggcactcgag

SEQ ID NO: 65046 - RNA, 23 nt, synthetic construct
  source 1..23: mol_type = other RNA
tgctagaggagggtgttgccata

SEQ ID NO: 65047 - RNA, 23 nt, synthetic construct
  source 1..23: mol_type = other RNA
ggggctcacagcccatggtcacc

SEQ ID NO: 65048 - RNA, 23 nt, synthetic construct
  source 1..23: mol_type = other RNA
cactctgaccaggcacactgggg

SEQ ID NO: 65049 - RNA, 23 nt, synthetic construct
  source 1..23: mol_type = other RNA
tgggcctgggcacggcactcgag

SEQ ID NO: 65050 - RNA, 23 nt, synthetic construct
  source 1..23: mol_type = other RNA
aggatccaggtcgtccctggagt

SEQ ID NO: 65051 - RNA, 23 nt, synthetic construct
  source 1..23: mol_type = other RNA
agggggagctgttcccggggtgg

SEQ ID NO: 65052 - RNA, 23 nt, synthetic construct
  source 1..23: mol_type = other RNA
tggtggtctgttctgggagggtc

SEQ ID NO: 65053 - RNA, 23 nt, synthetic construct
  source 1..23: mol_type = other RNA
tcagcactttgagggtgccagca

SEQ ID NO: 65054 - RNA, 23 nt, synthetic construct
  source 1..23: mol_type = other RNA
tgctagaggagggtgttgccata

SEQ ID NO: 65055 - RNA, 23 nt, synthetic construct
  source 1..23: mol_type = other RNA
cactctgaccaggcacactgggg

SEQ ID NO: 65056 - RNA, 23 nt, synthetic construct
  source 1..23: mol_type = other RNA
tgggcctgggcacggcactcgag

SEQ ID NO: 65057 - RNA, 23 nt, synthetic construct
  source 1..23: mol_type = other RNA
actggaggcgtgcgtgccgtccc

SEQ ID NO: 65058 - RNA, 23 nt, synthetic construct
  source 1..23: mol_type = other RNA
tgctagaggagggtgttgccata

SEQ ID NO: 65059 - RNA, 23 nt, synthetic construct
  source 1..23: mol_type = other RNA
cactctgaccaggcacactgggg

SEQ ID NO: 65060 - RNA, 23 nt, synthetic construct
  source 1..23: mol_type = other RNA
tgggcctgggcacggcactcgag

SEQ ID NO: 65061 - RNA, 23 nt, synthetic construct
  source 1..23: mol_type = other RNA
agggggagctgttcccggggtgg

SEQ ID NO: 65062 - RNA, 23 nt, synthetic construct
  source 1..23: mol_type = other RNA
tggtggtctgttctgggagggtc

SEQ ID NO: 65063 - RNA, 23 nt, synthetic construct
  source 1..23: mol_type = other RNA
ttgtggacatggtggccacgggt

SEQ ID NO: 65064 - RNA, 23 nt, synthetic construct
  source 1..23: mol_type = other RNA
tggtggtcagcactctggcggtg

SEQ ID NO: 65065 - RNA, 23 nt, synthetic construct
  source 1..23: mol_type = other RNA
tgctagaggagggtgttgccata

SEQ ID NO: 65066 - RNA, 23 nt, synthetic construct
  source 1..23: mol_type = other RNA
tgctgacccaccgctccccggga

SEQ ID NO: 65067 - RNA, 23 nt, synthetic construct
  source 1..23: mol_type = other RNA
tgccctggcgggcacacaggcag

SEQ ID NO: 65068 - RNA, 23 nt, synthetic construct
  source 1..23: mol_type = other RNA
gccactctcttgtactcaaagcc

SEQ ID NO: 65069 - RNA, 23 nt, synthetic construct
  source 1..23: mol_type = other RNA
cctggtgctgcatgttgaggggg

SEQ ID NO: 65070 - RNA, 23 nt, synthetic construct
  source 1..23: mol_type = other RNA
ggtgcttgtgtatctgggggatg

SEQ ID NO: 65071 - RNA, 23 nt, synthetic construct
  source 1..23: mol_type = other RNA
ctcattcacctgccggagaggga

SEQ ID NO: 65072 - RNA, 23 nt, synthetic construct
  source 1..23: mol_type = other RNA
atggagtggcagcgcgagaaggc

SEQ ID NO: 65073 - RNA, 23 nt, synthetic construct
  source 1..23: mol_type = other RNA
ggctcacagcccgtggtcaccac

SEQ ID NO: 65074 - RNA, 23 nt, synthetic construct
  source 1..23: mol_type = other RNA
ggctcacagcccgtggtcaccac

SEQ ID NO: 65075 - RNA, 23 nt, synthetic construct
  source 1..23: mol_type = other RNA
caaatggactccaccctcagcct

SEQ ID NO: 65076 - RNA, 23 nt, synthetic construct
  source 1..23: mol_type = other RNA
gtttcacccacggggtgggcagc

SEQ ID NO: 65077 - RNA, 23 nt, synthetic construct
  source 1..23: mol_type = other RNA
caggtcctgggcgcaggcggcca

SEQ ID NO: 65078 - RNA, 23 nt, synthetic construct
  source 1..23: mol_type = other RNA
cgcagctgccttcaaagctgtag

SEQ ID NO: 65079 - RNA, 23 nt, synthetic construct
  source 1..23: mol_type = other RNA
cttgtgtatctgggggatgtcag

SEQ ID NO: 65080 - RNA, 23 nt, synthetic construct
  source 1..23: mol_type = other RNA
gggtgtgtgggtggtccctaggg

SEQ ID NO: 65081 - RNA, 23 nt, synthetic construct
  source 1..23: mol_type = other RNA
tatgggggccgatgtggggctgc

SEQ ID NO: 65082 - RNA, 23 nt, synthetic construct
  source 1..23: mol_type = other RNA
tggggctcacagcccatggtcac

SEQ ID NO: 65083 - RNA, 23 nt, synthetic construct
  source 1..23: mol_type = other RNA
gggtgtgtgggtggtccctaggg

SEQ ID NO: 65084 - RNA, 23 nt, synthetic construct
  source 1..23: mol_type = other RNA
tggggctcacagcccatggtcac

SEQ ID NO: 65085 - RNA, 23 nt, synthetic construct
  source 1..23: mol_type = other RNA
gggtgtgtgggtggtccctaggg

SEQ ID NO: 65086 - RNA, 23 nt, synthetic construct
  source 1..23: mol_type = other RNA
tatgggggccgatgtggggctgc

SEQ ID NO: 65087 - RNA, 23 nt, synthetic construct
  source 1..23: mol_type = other RNA
gggtgtgtgggtggtccctaggg

SEQ ID NO: 65088 - RNA, 23 nt, synthetic construct
  source 1..23: mol_type = other RNA
tatgggggccgatgtggggctgc

SEQ ID NO: 65089 - RNA, 23 nt, synthetic construct
  source 1..23: mol_type = other RNA
gggtgtgccagtcggggcccagc

SEQ ID NO: 65090 - RNA, 23 nt, synthetic construct
  source 1..23: mol_type = other RNA
ggggtgggtgtgctagacaccgg

SEQ ID NO: 65091 - RNA, 23 nt, synthetic construct
  source 1..23: mol_type = other RNA
tgcctgcggcaccacgagcatgg

SEQ ID NO: 65092 - RNA, 23 nt, synthetic construct
  source 1..23: mol_type = other RNA
cacacccgcccattgtgcgccgg

SEQ ID NO: 65093 - RNA, 23 nt, synthetic construct
  source 1..23: mol_type = other RNA
ccacaggaatgtcagcaccagcc

SEQ ID NO: 65094 - RNA, 23 nt, synthetic construct
  source 1..23: mol_type = other RNA
tccacaggaatgtcagcaccagc

SEQ ID NO: 65095 - RNA, 23 nt, synthetic construct
  source 1..23: mol_type = other RNA
agtgcgtgatgtcatccagcacc

SEQ ID NO: 65096 - RNA, 23 nt, synthetic construct
  source 1..23: mol_type = other RNA
ggtgcccgggctgtaggtgcggc

SEQ ID NO: 65097 - RNA, 23 nt, synthetic construct
  source 1..23: mol_type = other RNA
agggccgtgaagtcgtcagcctg

SEQ ID NO: 65098 - RNA, 23 nt, synthetic construct
  source 1..23: mol_type = other RNA
gacgccgtccctccagtcgctga

SEQ ID NO: 65099 - RNA, 23 nt, synthetic construct
  source 1..23: mol_type = other RNA
cggaaggtcccgtgggtggtgtt

SEQ ID NO: 65100 - RNA, 23 nt, synthetic construct
  source 1..23: mol_type = other RNA
cccctcttggaggatcagctcgt

SEQ ID NO: 65101 - RNA, 23 nt, synthetic construct
  source 1..23: mol_type = other RNA
aacaaggggcaggtgtccggagt

SEQ ID NO: 65102 - RNA, 23 nt, synthetic construct
  source 1..23: mol_type = other RNA
cagcagagaacccgcagctcgta

SEQ ID NO: 65103 - RNA, 23 nt, synthetic construct
  source 1..23: mol_type = other RNA
atgctcggggtcacccatagggt

SEQ ID NO: 65104 - RNA, 23 nt, synthetic construct
  source 1..23: mol_type = other RNA
gatgtcagtccttctgagagggt

SEQ ID NO: 65105 - RNA, 23 nt, synthetic construct
  source 1..23: mol_type = other RNA
gggtgcttgtgtatctgggggat

SEQ ID NO: 65106 - RNA, 23 nt, synthetic construct
  source 1..23: mol_type = other RNA
gttggggccagcgtgggtggctg

SEQ ID NO: 65107 - RNA, 23 nt, synthetic construct
  source 1..23: mol_type = other RNA
ttgttggggccagcgtgggtggc

SEQ ID NO: 65108 - RNA, 23 nt, synthetic construct
  source 1..23: mol_type = other RNA
cgtggtcagcggctctttggaag

SEQ ID NO: 65109 - RNA, 23 nt, synthetic construct
  source 1..23: mol_type = other RNA
gagaggtggacagctcgctcgtg

SEQ ID NO: 65110 - RNA, 23 nt, synthetic construct
  source 1..23: mol_type = other RNA
gggagggggagctgttctcaggg

SEQ ID NO: 65111 - RNA, 23 nt, synthetic construct
  source 1..23: mol_type = other RNA
gccatggtgttcggcactggggg

SEQ ID NO: 65112 - RNA, 23 nt, synthetic construct
  source 1..23: mol_type = other RNA
gaaggctctgtgatgtgggtggt

SEQ ID NO: 65113 - RNA, 23 nt, synthetic construct
  source 1..23: mol_type = other RNA
ggaaggctctgtgatgtgggtgg

SEQ ID NO: 65114 - RNA, 23 nt, synthetic construct
  source 1..23: mol_type = other RNA
accgtggaaggctctgtgatgtg

SEQ ID NO: 65115 - RNA, 23 nt, synthetic construct
  source 1..23: mol_type = other RNA
gaagtcaccgtggaaggctctgt

SEQ ID NO: 65116 - RNA, 23 nt, synthetic construct
  source 1..23: mol_type = other RNA
ttctgctgctagggtgagggctg

SEQ ID NO: 65117 - RNA, 23 nt, synthetic construct
  source 1..23: mol_type = other RNA
ttatgggggccgatgtggggctg

SEQ ID NO: 65118 - RNA, 23 nt, synthetic construct
  source 1..23: mol_type = other RNA
ctgctcacggttcctgcagacca

SEQ ID NO: 65119 - RNA, 23 nt, synthetic construct
  source 1..23: mol_type = other RNA
atggccgtagagctggtggccgg

SEQ ID NO: 65120 - RNA, 23 nt, synthetic construct
  source 1..23: mol_type = other RNA
tggactggagaagggagtggctt

SEQ ID NO: 65121 - RNA, 23 nt, synthetic construct
  source 1..23: mol_type = other RNA
gaaggctctgtgatgtgggtggt

SEQ ID NO: 65122 - RNA, 23 nt, synthetic construct
  source 1..23: mol_type = other RNA
ggaaggctctgtgatgtgggtgg

SEQ ID NO: 65123 - RNA, 23 nt, synthetic construct
  source 1..23: mol_type = other RNA
cccgtggaaggctctgtgatgtg

SEQ ID NO: 65124 - RNA, 23 nt, synthetic construct
  source 1..23: mol_type = other RNA
ctgctcacggttcctgcagacca

SEQ ID NO: 65125 - RNA, 23 nt, synthetic construct
  source 1..23: mol_type = other RNA
gtggccgtagagctggtggccgg

SEQ ID NO: 65126 - RNA, 23 nt, synthetic construct
  source 1..23: mol_type = other RNA
tgtggtctgctctgtgaggatcc

SEQ ID NO: 65127 - RNA, 23 nt, synthetic construct
  source 1..23: mol_type = other RNA
ggggtggaggacgggatggccgt

SEQ ID NO: 65128 - RNA, 23 nt, synthetic construct
  source 1..23: mol_type = other RNA
gtgtggtggtctgttctgggagg

SEQ ID NO: 65129 - RNA, 23 nt, synthetic construct
  source 1..23: mol_type = other RNA
tggacatggtggccatgggtgtg

SEQ ID NO: 65130 - RNA, 23 nt, synthetic construct
  source 1..23: mol_type = other RNA
gaaggctctgtgatgtgggtggt

SEQ ID NO: 65131 - RNA, 23 nt, synthetic construct
  source 1..23: mol_type = other RNA
ggaaggctctgtgatgtgggtgg

SEQ ID NO: 65132 - RNA, 23 nt, synthetic construct
  source 1..23: mol_type = other RNA
accgtggaaggctctgtgatgtg

SEQ ID NO: 65133 - RNA, 23 nt, synthetic construct
  source 1..23: mol_type = other RNA
gaagtcaccgtggaaggctctgt

SEQ ID NO: 65134 - RNA, 23 nt, synthetic construct
  source 1..23: mol_type = other RNA
ttatgggggccgatgtggggctg

SEQ ID NO: 65135 - RNA, 23 nt, synthetic construct
  source 1..23: mol_type = other RNA
ctgctcacggttcctgcagacca

SEQ ID NO: 65136 - RNA, 23 nt, synthetic construct
  source 1..23: mol_type = other RNA
gtggccgtagagctggtggccgg

SEQ ID NO: 65137 - RNA, 23 nt, synthetic construct
  source 1..23: mol_type = other RNA
tggactggagaagggagtggctt

SEQ ID NO: 65138 - RNA, 23 nt, synthetic construct
  source 1..23: mol_type = other RNA
tggccgtggtgatcagtgatggg

SEQ ID NO: 65139 - RNA, 23 nt, synthetic construct
  source 1..23: mol_type = other RNA
gaaggctctgtgatgtgggtggt

SEQ ID NO: 65140 - RNA, 23 nt, synthetic construct
  source 1..23: mol_type = other RNA
ggaaggctctgtgatgtgggtgg

SEQ ID NO: 65141 - RNA, 23 nt, synthetic construct
  source 1..23: mol_type = other RNA
cccgtggaaggctctgtgatgtg

SEQ ID NO: 65142 - RNA, 23 nt, synthetic construct
  source 1..23: mol_type = other RNA
ttatgggggccgatgtggggctg

SEQ ID NO: 65143 - RNA, 23 nt, synthetic construct
  source 1..23: mol_type = other RNA
ctgctcacggttcctgcagacca

SEQ ID NO: 65144 - RNA, 23 nt, synthetic construct
  source 1..23: mol_type = other RNA
atggccgtagagctggtggccgg

SEQ ID NO: 65145 - RNA, 23 nt, synthetic construct
  source 1..23: mol_type = other RNA
gtgtggtggtctgttctgggagg

SEQ ID NO: 65146 - RNA, 23 nt, synthetic construct
  source 1..23: mol_type = other RNA
ccacgtggtccacagggtggagg

SEQ ID NO: 65147 - RNA, 23 nt, synthetic construct
  source 1..23: mol_type = other RNA
gctgtggtggtcagcactgtgga

SEQ ID NO: 65148 - RNA, 23 nt, synthetic construct
  source 1..23: mol_type = other RNA
cagggtggccgtggatccagtgg

SEQ ID NO: 65149 - RNA, 23 nt, synthetic construct
  source 1..23: mol_type = other RNA
gggtctcagggtggtgaggactg

SEQ ID NO: 65150 - RNA, 23 nt, synthetic construct
  source 1..23: mol_type = other RNA
gaggctgagattcccaaagcgtg

SEQ ID NO: 65151 - RNA, 23 nt, synthetic construct
  source 1..23: mol_type = other RNA
cgcatggcttgtacactttggtg

SEQ ID NO: 65152 - RNA, 23 nt, synthetic construct
  source 1..23: mol_type = other RNA
ctgaggtctgcagcggaaggtgg

SEQ ID NO: 65153 - RNA, 23 nt, synthetic construct
  source 1..23: mol_type = other RNA
ccccagagaggcaggtacacatg

SEQ ID NO: 65154 - RNA, 23 nt, synthetic construct
  source 1..23: mol_type = other RNA
ccactctcttgtactcaaagccc

SEQ ID NO: 65155 - RNA, 23 nt, synthetic construct
  source 1..23: mol_type = other RNA
ggacttgacaggagtcctcctca

SEQ ID NO: 65156 - RNA, 23 nt, synthetic construct
  source 1..23: mol_type = other RNA
ccctggtgccacaggatggtcgt

SEQ ID NO: 65157 - RNA, 23 nt, synthetic construct
  source 1..23: mol_type = other RNA
tgcaagggcaccgtctcctcgtg

SEQ ID NO: 65158 - RNA, 23 nt, synthetic construct
  source 1..23: mol_type = other RNA
tgtgggggagccatgggcgcagg

SEQ ID NO: 65159 - RNA, 23 nt, synthetic construct
  source 1..23: mol_type = other RNA
tccgtgctgcgcgggcgctccgg

SEQ ID NO: 65160 - RNA, 23 nt, synthetic construct
  source 1..23: mol_type = other RNA
tgcctgtcgcagcttcctggcag

SEQ ID NO: 65161 - RNA, 23 nt, synthetic construct
  source 1..23: mol_type = other RNA
ccaagggtgcttgtgtatctggg

SEQ ID NO: 65162 - RNA, 23 nt, synthetic construct
  source 1..23: mol_type = other RNA
ccagtcgctgagctgtacgccct

SEQ ID NO: 65163 - RNA, 23 nt, synthetic construct
  source 1..23: mol_type = other RNA
ccgggtgggcgaggacgtcgggg

SEQ ID NO: 65164 - RNA, 23 nt, synthetic construct
  source 1..23: mol_type = other RNA
ccgtggaacctctggttgtgggt

SEQ ID NO: 65165 - RNA, 23 nt, synthetic construct
  source 1..23: mol_type = other RNA
cactggggggataggtgttgtcc

SEQ ID NO: 65166 - RNA, 23 nt, synthetic construct
  source 1..23: mol_type = other RNA
cactggggggataggtgttgtcc

SEQ ID NO: 65167 - RNA, 23 nt, synthetic construct
  source 1..23: mol_type = other RNA
tgggtgggcaggtgaggtcgcac

SEQ ID NO: 65168 - RNA, 23 nt, synthetic construct
  source 1..23: mol_type = other RNA
agctgaggtctgcagcggaaggt

SEQ ID NO: 65169 - RNA, 23 nt, synthetic construct
  source 1..23: mol_type = other RNA
ccccatgtgggttgtagaagtca

SEQ ID NO: 65170 - RNA, 23 nt, synthetic construct
  source 1..23: mol_type = other RNA
tgctcacggttcctgcagaccag

SEQ ID NO: 65171 - RNA, 23 nt, synthetic construct
  source 1..23: mol_type = other RNA
tgctcacggttcctgcagaccag

SEQ ID NO: 65172 - RNA, 23 nt, synthetic construct
  source 1..23: mol_type = other RNA
tgctcacggttcctgcagaccag

SEQ ID NO: 65173 - RNA, 23 nt, synthetic construct
  source 1..23: mol_type = other RNA
tgctcacggttcctgcagaccag

SEQ ID NO: 65174 - RNA, 23 nt, synthetic construct
  source 1..23: mol_type = other RNA
aaaaactgtccaaatgccctgca

SEQ ID NO: 65175 - RNA, 23 nt, synthetic construct
  source 1..23: mol_type = other RNA
atggtgtgccctgcattctccca

SEQ ID NO: 65176 - RNA, 23 nt, synthetic construct
  source 1..23: mol_type = other RNA
cagcacagggcatacctggtacc

SEQ ID NO: 65177 - RNA, 23 nt, synthetic construct
  source 1..23: mol_type = other RNA
aggtgtgggcagtctctggagtg

SEQ ID NO: 65178 - RNA, 23 nt, synthetic construct
  source 1..23: mol_type = other RNA
ctgctagggtgagggctggaaag

SEQ ID NO: 65179 - RNA, 23 nt, synthetic construct
  source 1..23: mol_type = other RNA
ctgctagggtgagggctggacag

SEQ ID NO: 65180 - RNA, 23 nt, synthetic construct
  source 1..23: mol_type = other RNA
ctgtagtgctgggctctgtgagg

SEQ ID NO: 65181 - RNA, 23 nt, synthetic construct
  source 1..23: mol_type = other RNA
cagttgcccgggtggaggaggcg

SEQ ID NO: 65182 - RNA, 23 nt, synthetic construct
  source 1..23: mol_type = other RNA
ctgctagggtgagggctggacag

SEQ ID NO: 65183 - RNA, 23 nt, synthetic construct
  source 1..23: mol_type = other RNA
aggtgtgggcagtctctggagtg

SEQ ID NO: 65184 - RNA, 23 nt, synthetic construct
  source 1..23: mol_type = other RNA
ctgctagggtgagggctggacag

SEQ ID NO: 65185 - RNA, 23 nt, synthetic construct
  source 1..23: mol_type = other RNA
tgggtgttgtccctggagttgag

SEQ ID NO: 65186 - RNA, 23 nt, synthetic construct
  source 1..23: mol_type = other RNA
gcatggccgccagagccaacacc

SEQ ID NO: 65187 - RNA, 23 nt, synthetic construct
  source 1..23: mol_type = other RNA
cccccatgtgggttgtagaagtc

SEQ ID NO: 65188 - RNA, 23 nt, synthetic construct
  source 1..23: mol_type = other RNA
ggcagggacacataggcccgcac

SEQ ID NO: 65189 - RNA, 23 nt, synthetic construct
  source 1..23: mol_type = other RNA
caagggtgaaggaggggatgggt

SEQ ID NO: 65190 - RNA, 23 nt, synthetic construct
  source 1..23: mol_type = other RNA
ggaggttgccattgttgttgggg

SEQ ID NO: 65191 - RNA, 23 nt, synthetic construct
  source 1..23: mol_type = other RNA
tcaccgctttcaggcagttctcg

SEQ ID NO: 65192 - RNA, 23 nt, synthetic construct
  source 1..23: mol_type = other RNA
tggaggttgccattgttgttggg

SEQ ID NO: 65193 - RNA, 23 nt, synthetic construct
  source 1..23: mol_type = other RNA
aggggtggattgtggacatggtg

SEQ ID NO: 65194 - RNA, 23 nt, synthetic construct
  source 1..23: mol_type = other RNA
aggggtggattgtggacatggtg

SEQ ID NO: 65195 - RNA, 23 nt, synthetic construct
  source 1..23: mol_type = other RNA
tgccccagcggccggacgtggcc

SEQ ID NO: 65196 - RNA, 23 nt, synthetic construct
  source 1..23: mol_type = other RNA
ctggaggttgccattgttgttgg

SEQ ID NO: 65197 - RNA, 23 nt, synthetic construct
  source 1..23: mol_type = other RNA
cccgagtcgcaggcacacgcgtc

SEQ ID NO: 65198 - RNA, 23 nt, synthetic construct
  source 1..23: mol_type = other RNA
ttggtgggtgggcaggtgaggtc

SEQ ID NO: 65199 - RNA, 23 nt, synthetic construct
  source 1..23: mol_type = other RNA
tcctagagttgcaggtggcaggc

SEQ ID NO: 65200 - RNA, 23 nt, synthetic construct
  source 1..23: mol_type = other RNA
ggtggtcaccactttgggggtgt

SEQ ID NO: 65201 - RNA, 23 nt, synthetic construct
  source 1..23: mol_type = other RNA
acgaacacagctgaggtctgcag

SEQ ID NO: 65202 - RNA, 23 nt, synthetic construct
  source 1..23: mol_type = other RNA
gccgtccctccagtcgctgagct

SEQ ID NO: 65203 - RNA, 23 nt, synthetic construct
  source 1..23: mol_type = other RNA
ggctgttgtggtcagctttgtga

SEQ ID NO: 65204 - RNA, 23 nt, synthetic construct
  source 1..23: mol_type = other RNA
ttgaaggaggtgcccgggctgta

SEQ ID NO: 65205 - RNA, 23 nt, synthetic construct
  source 1..23: mol_type = other RNA
tctgtggtcggtggcggggttgt

SEQ ID NO: 65206 - RNA, 23 nt, synthetic construct
  source 1..23: mol_type = other RNA
gtggtggtcagcactttgggagg

SEQ ID NO: 65207 - RNA, 23 nt, synthetic construct
  source 1..23: mol_type = other RNA
gtggtggctgtgcttctcagtgc

SEQ ID NO: 65208 - RNA, 23 nt, synthetic construct
  source 1..23: mol_type = other RNA
cgccagagggccccggcatgggg

SEQ ID NO: 65209 - RNA, 23 nt, synthetic construct
  source 1..23: mol_type = other RNA
gtggtggctgtgcttctcagtgc

SEQ ID NO: 65210 - RNA, 23 nt, synthetic construct
  source 1..23: mol_type = other RNA
ctgctggggtgtgggaagtcccc

SEQ ID NO: 65211 - RNA, 23 nt, synthetic construct
  source 1..23: mol_type = other RNA
cgccagagggccccggcatgggg

SEQ ID NO: 65212 - RNA, 23 nt, synthetic construct
  source 1..23: mol_type = other RNA
gtggtggctgtgcttctcagtgc

SEQ ID NO: 65213 - RNA, 23 nt, synthetic construct
  source 1..23: mol_type = other RNA
tctggagtagaggagggtgtggc

SEQ ID NO: 65214 - RNA, 23 nt, synthetic construct
  source 1..23: mol_type = other RNA
ctgctggggtgtgggaagtcacc

SEQ ID NO: 65215 - RNA, 23 nt, synthetic construct
  source 1..23: mol_type = other RNA
cgccagagggccccggcatgggg

SEQ ID NO: 65216 - RNA, 23 nt, synthetic construct
  source 1..23: mol_type = other RNA
gtggtggctgtgcttctcagtgc

SEQ ID NO: 65217 - RNA, 23 nt, synthetic construct
  source 1..23: mol_type = other RNA
ctgctggggtgtgggaagtcccc

SEQ ID NO: 65218 - RNA, 23 nt, synthetic construct
  source 1..23: mol_type = other RNA
cgccagagggccccggcatgggg

SEQ ID NO: 65219 - RNA, 23 nt, synthetic construct
  source 1..23: mol_type = other RNA
gtggtggctgtgcttctcagtgc

SEQ ID NO: 65220 - RNA, 23 nt, synthetic construct
  source 1..23: mol_type = other RNA
ctcctccttcccatgcaccatgg

SEQ ID NO: 65221 - RNA, 23 nt, synthetic construct
  source 1..23: mol_type = other RNA
tggtggtccccagcacagacaca

SEQ ID NO: 65222 - RNA, 23 nt, synthetic construct
  source 1..23: mol_type = other RNA
tcctgccctggcgggcacacagg

SEQ ID NO: 65223 - RNA, 23 nt, synthetic construct
  source 1..23: mol_type = other RNA
cggtctcgcagccctggtgccac

SEQ ID NO: 65224 - RNA, 23 nt, synthetic construct
  source 1..23: mol_type = other RNA
agggtttatttgcaaaactgggc

SEQ ID NO: 65225 - RNA, 23 nt, synthetic construct
  source 1..23: mol_type = other RNA
gcatgcggtcacagtccacctgc

SEQ ID NO: 65226 - RNA, 23 nt, synthetic construct
  source 1..23: mol_type = other RNA
gactgcccctccggccgcacgga

SEQ ID NO: 65227 - RNA, 23 nt, synthetic construct
  source 1..23: mol_type = other RNA
ctttgggtccagcaggacgacac

SEQ ID NO: 65228 - RNA, 23 nt, synthetic construct
  source 1..23: mol_type = other RNA
ggcagtggctgtgggcatagtgg

SEQ ID NO: 65229 - RNA, 23 nt, synthetic construct
  source 1..23: mol_type = other RNA
gcagccacactcatccacgtggg

SEQ ID NO: 65230 - RNA, 23 nt, synthetic construct
  source 1..23: mol_type = other RNA
tgtggtcagctcagtgaggatcc

SEQ ID NO: 65231 - RNA, 23 nt, synthetic construct
  source 1..23: mol_type = other RNA
gtggtcagctcagtgaggatccg

SEQ ID NO: 65232 - RNA, 23 nt, synthetic construct
  source 1..23: mol_type = other RNA
gccccaggggtgcccgccgagct

SEQ ID NO: 65233 - RNA, 23 nt, synthetic construct
  source 1..23: mol_type = other RNA
tgggagttgtccctggagttgag

SEQ ID NO: 65234 - RNA, 23 nt, synthetic construct
  source 1..23: mol_type = other RNA
attgtggacatggtggccacggg

SEQ ID NO: 65235 - RNA, 23 nt, synthetic construct
  source 1..23: mol_type = other RNA
acatcagggaggggcaaggccaa

SEQ ID NO: 65236 - RNA, 23 nt, synthetic construct
  source 1..23: mol_type = other RNA
ggagcggggtcagcctggcgttg

SEQ ID NO: 65237 - RNA, 23 nt, synthetic construct
  source 1..23: mol_type = other RNA
ccactgggtgtgcagttacagct

SEQ ID NO: 65238 - RNA, 23 nt, synthetic construct
  source 1..23: mol_type = other RNA
ctctgcctcaggttttcaaacgt

SEQ ID NO: 65239 - RNA, 23 nt, synthetic construct
  source 1..23: mol_type = other RNA
gtgtgtggtggccatggtgttcg

SEQ ID NO: 65240 - RNA, 23 nt, synthetic construct
  source 1..23: mol_type = other RNA
tcagcaaagacctggctcagcat

SEQ ID NO: 65241 - RNA, 23 nt, synthetic construct
  source 1..23: mol_type = other RNA
ggccccaggggtgcccgccgagc

SEQ ID NO: 65242 - RNA, 23 nt, synthetic construct
  source 1..23: mol_type = other RNA
ctggactggctggccatcgggcg

SEQ ID NO: 65243 - RNA, 23 nt, synthetic construct
  source 1..23: mol_type = other RNA
ccccacctgctcacggttcctgc

SEQ ID NO: 65244 - RNA, 23 nt, synthetic construct
  source 1..23: mol_type = other RNA
cggtggccccggttgtggtggcc

SEQ ID NO: 65245 - RNA, 23 nt, synthetic construct
  source 1..23: mol_type = other RNA
ccccacctgctcacggttcctgc

SEQ ID NO: 65246 - RNA, 23 nt, synthetic construct
  source 1..23: mol_type = other RNA
ccccacctgctcacggttcctgc

SEQ ID NO: 65247 - RNA, 23 nt, synthetic construct
  source 1..23: mol_type = other RNA
ccccacctgctcacggttcctgc

SEQ ID NO: 65248 - RNA, 23 nt, synthetic construct
  source 1..23: mol_type = other RNA
cggtggccccggttgtggtggcc

SEQ ID NO: 65249 - RNA, 23 nt, synthetic construct
  source 1..23: mol_type = other RNA
acagtggtcctcgcagagctgcg

SEQ ID NO: 65250 - RNA, 23 nt, synthetic construct
  source 1..23: mol_type = other RNA
gtgtgggtggtccctagggcaga

SEQ ID NO: 65251 - RNA, 23 nt, synthetic construct
  source 1..23: mol_type = other RNA
gtgtgggtggtccctagggcaga

SEQ ID NO: 65252 - RNA, 23 nt, synthetic construct
  source 1..23: mol_type = other RNA
gtgtgggtggtccctagggcaga

SEQ ID NO: 65253 - RNA, 23 nt, synthetic construct
  source 1..23: mol_type = other RNA
gtgtgggtggtccctagggcaga

SEQ ID NO: 65254 - RNA, 23 nt, synthetic construct
  source 1..23: mol_type = other RNA
gcaggcatggacaggcggccgcc

SEQ ID NO: 65255 - RNA, 23 nt, synthetic construct
  source 1..23: mol_type = other RNA
cctgggtctctgcctgcggcacc

SEQ ID NO: 65256 - RNA, 23 nt, synthetic construct
  source 1..23: mol_type = other RNA
ccgggggagccctggtcagcccc

SEQ ID NO: 65257 - RNA, 23 nt, synthetic construct
  source 1..23: mol_type = other RNA
cagagccggtggccccagttgtg

SEQ ID NO: 65258 - RNA, 23 nt, synthetic construct
  source 1..23: mol_type = other RNA
aggagggagtcactgtgttgctg

SEQ ID NO: 65259 - RNA, 23 nt, synthetic construct
  source 1..23: mol_type = other RNA
gggtgactcggtggttctgctgc

SEQ ID NO: 65260 - RNA, 23 nt, synthetic construct
  source 1..23: mol_type = other RNA
gacagtctctggagtagaggagg

SEQ ID NO: 65261 - RNA, 23 nt, synthetic construct
  source 1..23: mol_type = other RNA
tgggtggtctctggagtagagga

SEQ ID NO: 65262 - RNA, 23 nt, synthetic construct
  source 1..23: mol_type = other RNA
gtctcagggtggtgaggactgag

SEQ ID NO: 65263 - RNA, 23 nt, synthetic construct
  source 1..23: mol_type = other RNA
gaagtccccacacaggccacagg

SEQ ID NO: 65264 - RNA, 23 nt, synthetic construct
  source 1..23: mol_type = other RNA
tgcggtggcagatgccctcctcg

SEQ ID NO: 65265 - RNA, 23 nt, synthetic construct
  source 1..23: mol_type = other RNA
cagccgtccacacagtggtcctc

SEQ ID NO: 65266 - RNA, 23 nt, synthetic construct
  source 1..23: mol_type = other RNA
catgagtggcaccagctgcacca

SEQ ID NO: 65267 - RNA, 23 nt, synthetic construct
  source 1..23: mol_type = other RNA
gccgtgaagtcgtcagcctggtt

SEQ ID NO: 65268 - RNA, 23 nt, synthetic construct
  source 1..23: mol_type = other RNA
tccttaggctgctggcataagtg

SEQ ID NO: 65269 - RNA, 23 nt, synthetic construct
  source 1..23: mol_type = other RNA
agggtgcttgtgtatctggggga

SEQ ID NO: 65270 - RNA, 23 nt, synthetic construct
  source 1..23: mol_type = other RNA
agggtggatgtggccacccctgg

SEQ ID NO: 65271 - RNA, 23 nt, synthetic construct
  source 1..23: mol_type = other RNA
agcgtgttggaagggtggatgtg

SEQ ID NO: 65272 - RNA, 23 nt, synthetic construct
  source 1..23: mol_type = other RNA
ttgtggtggccgtggcggtaagc

SEQ ID NO: 65273 - RNA, 23 nt, synthetic construct
  source 1..23: mol_type = other RNA
gagttgtcccaggagttgaggag

SEQ ID NO: 65274 - RNA, 23 nt, synthetic construct
  source 1..23: mol_type = other RNA
caccgtcacggtggctgtagtgc

SEQ ID NO: 65275 - RNA, 23 nt, synthetic construct
  source 1..23: mol_type = other RNA
ggtggttgcagtccttggactgg

SEQ ID NO: 65276 - RNA, 23 nt, synthetic construct
  source 1..23: mol_type = other RNA
ccaagggtgaaggaggggatggg

SEQ ID NO: 65277 - RNA, 23 nt, synthetic construct
  source 1..23: mol_type = other RNA
ggtgtggtggtctgttctgggag

SEQ ID NO: 65278 - RNA, 23 nt, synthetic construct
  source 1..23: mol_type = other RNA
caccgtcacggtggctgtagtgc

SEQ ID NO: 65279 - RNA, 23 nt, synthetic construct
  source 1..23: mol_type = other RNA
caccgtcacggtggctgtagtgc

SEQ ID NO: 65280 - RNA, 23 nt, synthetic construct
  source 1..23: mol_type = other RNA
ggtggttgcagtccttggactgg

SEQ ID NO: 65281 - RNA, 23 nt, synthetic construct
  source 1..23: mol_type = other RNA
ggtgtggtggtctgttctgggag

SEQ ID NO: 65282 - RNA, 23 nt, synthetic construct
  source 1..23: mol_type = other RNA
caccgtcacggtggctgtagtgc

SEQ ID NO: 65283 - RNA, 23 nt, synthetic construct
  source 1..23: mol_type = other RNA
ttgtggtggccgtggcggtaagc

SEQ ID NO: 65284 - RNA, 23 nt, synthetic construct
  source 1..23: mol_type = other RNA
ggtggttgcagtccttggactgg

SEQ ID NO: 65285 - RNA, 23 nt, synthetic construct
  source 1..23: mol_type = other RNA
tcagatcacagagcggctgtggt

SEQ ID NO: 65286 - RNA, 23 nt, synthetic construct
  source 1..23: mol_type = other RNA
cagcaggggttctcggcccgggg

SEQ ID NO: 65287 - RNA, 23 nt, synthetic construct
  source 1..23: mol_type = other RNA
ggggtgtgggaagtccccgtgga

SEQ ID NO: 65288 - RNA, 23 nt, synthetic construct
  source 1..23: mol_type = other RNA
ccgtggttgtggtagtcggcact

SEQ ID NO: 65289 - RNA, 23 nt, synthetic construct
  source 1..23: mol_type = other RNA
ccgtggttgtggtagtcggcact

SEQ ID NO: 65290 - RNA, 23 nt, synthetic construct
  source 1..23: mol_type = other RNA
ggggtcaccgtggagccactggt

SEQ ID NO: 65291 - RNA, 23 nt, synthetic construct
  source 1..23: mol_type = other RNA
ggggtgtgggaagtccccgtgga

SEQ ID NO: 65292 - RNA, 23 nt, synthetic construct
  source 1..23: mol_type = other RNA
ccgtggttgtggtagtcggcact

SEQ ID NO: 65293 - RNA, 23 nt, synthetic construct
  source 1..23: mol_type = other RNA
ggggtcaccgtggagccactggt

SEQ ID NO: 65294 - RNA, 23 nt, synthetic construct
  source 1..23: mol_type = other RNA
cctcgcagaaggtgatgttgacc

SEQ ID NO: 65295 - RNA, 23 nt, synthetic construct
  source 1..23: mol_type = other RNA
atcagcccccgcatgcggtcaca

SEQ ID NO: 65296 - RNA, 23 nt, synthetic construct
  source 1..23: mol_type = other RNA
gccgggtgggcgaggacgtcggg

SEQ ID NO: 65297 - RNA, 23 nt, synthetic construct
  source 1..23: mol_type = other RNA
ccatgcaggtcgtagagtttctc

SEQ ID NO: 65298 - RNA, 23 nt, synthetic construct
  source 1..23: mol_type = other RNA
gttttcaaacgtctcaaagtctc

SEQ ID NO: 65299 - RNA, 23 nt, synthetic construct
  source 1..23: mol_type = other RNA
gggtgtggtggtctgttctggga

SEQ ID NO: 65300 - RNA, 23 nt, synthetic construct
  source 1..23: mol_type = other RNA
ccaactcccccagggggacacca

SEQ ID NO: 65301 - RNA, 23 nt, synthetic construct
  source 1..23: mol_type = other RNA
gggtgtggtggtctgttctggga

SEQ ID NO: 65302 - RNA, 23 nt, synthetic construct
  source 1..23: mol_type = other RNA
gggcaccatcacggtggctatag

SEQ ID NO: 65303 - RNA, 23 nt, synthetic construct
  source 1..23: mol_type = other RNA
ggtggtccccacggtggacgagc

SEQ ID NO: 65304 - RNA, 23 nt, synthetic construct
  source 1..23: mol_type = other RNA
tggttcctagagttgcaggtggc

SEQ ID NO: 65305 - RNA, 23 nt, synthetic construct
  source 1..23: mol_type = other RNA
gacagtgcaagggcaccgtctcc

SEQ ID NO: 65306 - RNA, 23 nt, synthetic construct
  source 1..23: mol_type = other RNA
gtccggcacgcgctcggggcacc

SEQ ID NO: 65307 - RNA, 23 nt, synthetic construct
  source 1..23: mol_type = other RNA
gcgccgggttcagggggctcagg

SEQ ID NO: 65308 - RNA, 23 nt, synthetic construct
  source 1..23: mol_type = other RNA
agccgtccacacagtggtcctcg

SEQ ID NO: 65309 - RNA, 23 nt, synthetic construct
  source 1..23: mol_type = other RNA
tgcccgggctgtaggtgcggccg

SEQ ID NO: 65310 - RNA, 23 nt, synthetic construct
  source 1..23: mol_type = other RNA
gccccgccctgcacagagcaggt

SEQ ID NO: 65311 - RNA, 23 nt, synthetic construct
  source 1..23: mol_type = other RNA
catgcaggtcgtagagtttctca

SEQ ID NO: 65312 - RNA, 23 nt, synthetic construct
  source 1..23: mol_type = other RNA
ggccaagatgtactcgcagctgc

SEQ ID NO: 65313 - RNA, 23 nt, synthetic construct
  source 1..23: mol_type = other RNA
gcacttcgggtagcagccttcca

SEQ ID NO: 65314 - RNA, 23 nt, synthetic construct
  source 1..23: mol_type = other RNA
agatgacgtcctggtagctgtag

SEQ ID NO: 65315 - RNA, 23 nt, synthetic construct
  source 1..23: mol_type = other RNA
ggcgtgctggtctcggcctgaga

SEQ ID NO: 65316 - RNA, 23 nt, synthetic construct
  source 1..23: mol_type = other RNA
gcgggtcgtgccctggctggtgg

SEQ ID NO: 65317 - RNA, 23 nt, synthetic construct
  source 1..23: mol_type = other RNA
ggtggccgtggatccagtggacg

SEQ ID NO: 65318 - RNA, 23 nt, synthetic construct
  source 1..23: mol_type = other RNA
ggagtaccactggtctgtgtgct

SEQ ID NO: 65319 - RNA, 23 nt, synthetic construct
  source 1..23: mol_type = other RNA
gggagttgtcccaggagttgagg

SEQ ID NO: 65320 - RNA, 23 nt, synthetic construct
  source 1..23: mol_type = other RNA
ggtggccgtggatccagtggact

SEQ ID NO: 65321 - RNA, 23 nt, synthetic construct
  source 1..23: mol_type = other RNA
ggagtaccactggtctgtgtgct

SEQ ID NO: 65322 - RNA, 23 nt, synthetic construct
  source 1..23: mol_type = other RNA
gcactggggggataggtgttgtc

SEQ ID NO: 65323 - RNA, 23 nt, synthetic construct
  source 1..23: mol_type = other RNA
ggagtaccactggtctgtgtgct

SEQ ID NO: 65324 - RNA, 23 nt, synthetic construct
  source 1..23: mol_type = other RNA
ggtggccgtggatccagtggact

SEQ ID NO: 65325 - RNA, 23 nt, synthetic construct
  source 1..23: mol_type = other RNA
ggagtaccactggtctgtgtgct

SEQ ID NO: 65326 - RNA, 23 nt, synthetic construct
  source 1..23: mol_type = other RNA
gcactggggggataggtgttgtc

SEQ ID NO: 65327 - RNA, 23 nt, synthetic construct
  source 1..23: mol_type = other RNA
ggtggccgtggatccagtggatg

SEQ ID NO: 65328 - RNA, 23 nt, synthetic construct
  source 1..23: mol_type = other RNA
ggtggccgtggatccagtggacg

SEQ ID NO: 65329 - RNA, 23 nt, synthetic construct
  source 1..23: mol_type = other RNA
cagttgcagtccctggactggag

SEQ ID NO: 65330 - RNA, 23 nt, synthetic construct
  source 1..23: mol_type = other RNA
ggagtaccactggtctgtgtgct

SEQ ID NO: 65331 - RNA, 23 nt, synthetic construct
  source 1..23: mol_type = other RNA
ggctgcgggtgtggtggccgtgc

SEQ ID NO: 65332 - RNA, 23 nt, synthetic construct
  source 1..23: mol_type = other RNA
ctgcagttgtagtggctgttgtg

SEQ ID NO: 65333 - RNA, 23 nt, synthetic construct
  source 1..23: mol_type = other RNA
ggtggccgtggatccagtggctg

SEQ ID NO: 65334 - RNA, 23 nt, synthetic construct
  source 1..23: mol_type = other RNA
tcagggtggtgaggactgaggag

SEQ ID NO: 65335 - RNA, 23 nt, synthetic construct
  source 1..23: mol_type = other RNA
ggctttgggtccagcaggacgac

SEQ ID NO: 65336 - RNA, 23 nt, synthetic construct
  source 1..23: mol_type = other RNA
ctcacgcccagggcaggaatgtc

SEQ ID NO: 65337 - RNA, 23 nt, synthetic construct
  source 1..23: mol_type = other RNA
aagacttggccattgaaggtgac

SEQ ID NO: 65338 - RNA, 23 nt, synthetic construct
  source 1..23: mol_type = other RNA
actcagcaaagacctggctcagc

SEQ ID NO: 65339 - RNA, 23 nt, synthetic construct
  source 1..23: mol_type = other RNA
gcagatgcccatgtgtgcgttga

SEQ ID NO: 65340 - RNA, 23 nt, synthetic construct
  source 1..23: mol_type = other RNA
tgaggcaggcggtctggacgcac

SEQ ID NO: 65341 - RNA, 23 nt, synthetic construct
  source 1..23: mol_type = other RNA
gtgaggcaggcggtctggacgca

SEQ ID NO: 65342 - RNA, 23 nt, synthetic construct
  source 1..23: mol_type = other RNA
cctggtgccacaggatggtcgtg

SEQ ID NO: 65343 - RNA, 23 nt, synthetic construct
  source 1..23: mol_type = other RNA
gtctcctcgtggacccgcctctc

SEQ ID NO: 65344 - RNA, 23 nt, synthetic construct
  source 1..23: mol_type = other RNA
agccacactcatccacgtgggtg

SEQ ID NO: 65345 - RNA, 23 nt, synthetic construct
  source 1..23: mol_type = other RNA
caatgcacatcctggctccaggt

SEQ ID NO: 65346 - RNA, 23 nt, synthetic construct
  source 1..23: mol_type = other RNA
ggtgccacacacaggccgggggg

SEQ ID NO: 65347 - RNA, 23 nt, synthetic construct
  source 1..23: mol_type = other RNA
gcgcacatcagcccccgcatgcg

SEQ ID NO: 65348 - RNA, 23 nt, synthetic construct
  source 1..23: mol_type = other RNA
ctgtggaggtgtggacagtctct

SEQ ID NO: 65349 - RNA, 23 nt, synthetic construct
  source 1..23: mol_type = other RNA
acggtggctgtagtgctgggctc

SEQ ID NO: 65350 - RNA, 23 nt, synthetic construct
  source 1..23: mol_type = other RNA
ctgtggaggtgtggacagtctct

SEQ ID NO: 65351 - RNA, 23 nt, synthetic construct
  source 1..23: mol_type = other RNA
ctggtggttgctgctggggtgtg

SEQ ID NO: 65352 - RNA, 23 nt, synthetic construct
  source 1..23: mol_type = other RNA
ctgtggaggtgtggacagtctct

SEQ ID NO: 65353 - RNA, 23 nt, synthetic construct
  source 1..23: mol_type = other RNA
ggtgtgggtggtctctggagtag

SEQ ID NO: 65354 - RNA, 23 nt, synthetic construct
  source 1..23: mol_type = other RNA
aaccctcgtcacacacgcaggac

SEQ ID NO: 65355 - RNA, 23 nt, synthetic construct
  source 1..23: mol_type = other RNA
gggttggggtaggcacagcaggc

SEQ ID NO: 65356 - RNA, 23 nt, synthetic construct
  source 1..23: mol_type = other RNA
acagcactgcccggccactctct

SEQ ID NO: 65357 - RNA, 23 nt, synthetic construct
  source 1..23: mol_type = other RNA
cctgagttaccctgcagcaggca

SEQ ID NO: 65358 - RNA, 23 nt, synthetic construct
  source 1..23: mol_type = other RNA
ctcagggcacctccagttccgcg

SEQ ID NO: 65359 - RNA, 23 nt, synthetic construct
  source 1..23: mol_type = other RNA
aaacactcgcagtcgccacccga

SEQ ID NO: 65360 - RNA, 23 nt, synthetic construct
  source 1..23: mol_type = other RNA
gtgggtggctgtgaggggcgcca

SEQ ID NO: 65361 - RNA, 23 nt, synthetic construct
  source 1..23: mol_type = other RNA
gggggagctgttcccggggtgga

SEQ ID NO: 65362 - RNA, 23 nt, synthetic construct
  source 1..23: mol_type = other RNA
gggggagctgttcccggggtgga

SEQ ID NO: 65363 - RNA, 23 nt, synthetic construct
  source 1..23: mol_type = other RNA
ttgcaggcatcctcctgacattg

SEQ ID NO: 65364 - RNA, 23 nt, synthetic construct
  source 1..23: mol_type = other RNA
ggctgtggacatggtggccgtgg

SEQ ID NO: 65365 - RNA, 23 nt, synthetic construct
  source 1..23: mol_type = other RNA
ggctgtggacatggtggccgtgg

SEQ ID NO: 65366 - RNA, 23 nt, synthetic construct
  source 1..23: mol_type = other RNA
ggctgtggacatggtggccgtgg

SEQ ID NO: 65367 - RNA, 23 nt, synthetic construct
  source 1..23: mol_type = other RNA
ggctgtggacatggtggccgtgg

SEQ ID NO: 65368 - RNA, 23 nt, synthetic construct
  source 1..23: mol_type = other RNA
ggctgtggacatggtggccgtgg

SEQ ID NO: 65369 - RNA, 23 nt, synthetic construct
  source 1..23: mol_type = other RNA
agtgctgattgcacactgcgtag

SEQ ID NO: 65370 - RNA, 23 nt, synthetic construct
  source 1..23: mol_type = other RNA
ccctgagttaccctgcagcaggc

SEQ ID NO: 65371 - RNA, 23 nt, synthetic construct
  source 1..23: mol_type = other RNA
cagtgctcagagaacacgtagtt

SEQ ID NO: 65372 - RNA, 23 nt, synthetic construct
  source 1..23: mol_type = other RNA
gaaccctcgtcacacacgcagga

SEQ ID NO: 65373 - RNA, 23 nt, synthetic construct
  source 1..23: mol_type = other RNA
caggcagcctgggccttccaggt

SEQ ID NO: 65374 - RNA, 23 nt, synthetic construct
  source 1..23: mol_type = other RNA
ctggcataagtgccctccagcgg

SEQ ID NO: 65375 - RNA, 23 nt, synthetic construct
  source 1..23: mol_type = other RNA
ccctggagttgaggaggggttgg

SEQ ID NO: 65376 - RNA, 23 nt, synthetic construct
  source 1..23: mol_type = other RNA
agtccccgtggaaggctctgtga

SEQ ID NO: 65377 - RNA, 23 nt, synthetic construct
  source 1..23: mol_type = other RNA
ccctggagttgaggaggggttgg

SEQ ID NO: 65378 - RNA, 23 nt, synthetic construct
  source 1..23: mol_type = other RNA
ccctggagttgaggaggggttgg

SEQ ID NO: 65379 - RNA, 23 nt, synthetic construct
  source 1..23: mol_type = other RNA
agtccccgtggaaggctctgtga

SEQ ID NO: 65380 - RNA, 23 nt, synthetic construct
  source 1..23: mol_type = other RNA
ccctggagttgaggaggggttgg

SEQ ID NO: 65381 - RNA, 23 nt, synthetic construct
  source 1..23: mol_type = other RNA
cccaaagcgtgcatggatctctc

SEQ ID NO: 65382 - RNA, 23 nt, synthetic construct
  source 1..23: mol_type = other RNA
agcagtcgccctcctcctgggtg

SEQ ID NO: 65383 - RNA, 23 nt, synthetic construct
  source 1..23: mol_type = other RNA
cggcaccacgagcatggccgcca

SEQ ID NO: 65384 - RNA, 23 nt, synthetic construct
  source 1..23: mol_type = other RNA
agctgccttcaaagctgtagcga

SEQ ID NO: 65385 - RNA, 23 nt, synthetic construct
  source 1..23: mol_type = other RNA
ggggtggtcgtccctggagaagg

SEQ ID NO: 65386 - RNA, 23 nt, synthetic construct
  source 1..23: mol_type = other RNA
ggggtggtcgtccctggagaagg

SEQ ID NO: 65387 - RNA, 23 nt, synthetic construct
  source 1..23: mol_type = other RNA
gctgggtggtactggtggttgct

SEQ ID NO: 65388 - RNA, 23 nt, synthetic construct
  source 1..23: mol_type = other RNA
ggggtggtcgtccctggagaagg

SEQ ID NO: 65389 - RNA, 23 nt, synthetic construct
  source 1..23: mol_type = other RNA
ggcctgcacgcagatgcccatgt

SEQ ID NO: 65390 - RNA, 23 nt, synthetic construct
  source 1..23: mol_type = other RNA
caagctccccgtcgtccctggaa

SEQ ID NO: 65391 - RNA, 23 nt, synthetic construct
  source 1..23: mol_type = other RNA
cagcagggtgcggtggcagatgc

SEQ ID NO: 65392 - RNA, 23 nt, synthetic construct
  source 1..23: mol_type = other RNA
gttgtgcacacaggggcagtcct

SEQ ID NO: 65393 - RNA, 23 nt, synthetic construct
  source 1..23: mol_type = other RNA
ggtggttgtgctgatccacactg

SEQ ID NO: 65394 - RNA, 23 nt, synthetic construct
  source 1..23: mol_type = other RNA
cggggtggtcgtccctggagaag

SEQ ID NO: 65395 - RNA, 23 nt, synthetic construct
  source 1..23: mol_type = other RNA
ggtggttgtgctgatccacactg

SEQ ID NO: 65396 - RNA, 23 nt, synthetic construct
  source 1..23: mol_type = other RNA
cggggtggtcgtccctggagaag

SEQ ID NO: 65397 - RNA, 23 nt, synthetic construct
  source 1..23: mol_type = other RNA
ggtggttgtgctgatccacactg

SEQ ID NO: 65398 - RNA, 23 nt, synthetic construct
  source 1..23: mol_type = other RNA
cggggtggtcgtccctggagaag

SEQ ID NO: 65399 - RNA, 23 nt, synthetic construct
  source 1..23: mol_type = other RNA
ggtggttgtgctgatccacactg

SEQ ID NO: 65400 - RNA, 23 nt, synthetic construct
  source 1..23: mol_type = other RNA
ggtggttgtgctgatccacactg

SEQ ID NO: 65401 - RNA, 23 nt, synthetic construct
  source 1..23: mol_type = other RNA
gctgacccaccgctccccgggaa

SEQ ID NO: 65402 - RNA, 23 nt, synthetic construct
  source 1..23: mol_type = other RNA
accgtctcctcgtggacccgcct

SEQ ID NO: 65403 - RNA, 23 nt, synthetic construct
  source 1..23: mol_type = other RNA
gctcggggcacccatcctggggg

SEQ ID NO: 65404 - RNA, 23 nt, synthetic construct
  source 1..23: mol_type = other RNA
cccgctctgctccaccaggaggc

SEQ ID NO: 65405 - RNA, 23 nt, synthetic construct
  source 1..23: mol_type = other RNA
gctcagggcacctccagttccgc

SEQ ID NO: 65406 - RNA, 23 nt, synthetic construct
  source 1..23: mol_type = other RNA
gccgtccacacagtggtcctcgc

SEQ ID NO: 65407 - RNA, 23 nt, synthetic construct
  source 1..23: mol_type = other RNA
ctcctgggcgggcacacaggcgc

SEQ ID NO: 65408 - RNA, 23 nt, synthetic construct
  source 1..23: mol_type = other RNA
ccttaaaggtcccctcttggagg

SEQ ID NO: 65409 - RNA, 23 nt, synthetic construct
  source 1..23: mol_type = other RNA
gttgtagcacatcttgaagacgc

SEQ ID NO: 65410 - RNA, 23 nt, synthetic construct
  source 1..23: mol_type = other RNA
ggtcggtggcggggttgtggcac

SEQ ID NO: 65411 - RNA, 23 nt, synthetic construct
  source 1..23: mol_type = other RNA
gtggctttggagctggtgactgt

SEQ ID NO: 65412 - RNA, 23 nt, synthetic construct
  source 1..23: mol_type = other RNA
agtggctttggagctggtgactg

SEQ ID NO: 65413 - RNA, 23 nt, synthetic construct
  source 1..23: mol_type = other RNA
tggccgtgggtgtggtggtctgt

SEQ ID NO: 65414 - RNA, 23 nt, synthetic construct
  source 1..23: mol_type = other RNA
ccgggatggaggagggggtcacc

SEQ ID NO: 65415 - RNA, 23 nt, synthetic construct
  source 1..23: mol_type = other RNA
tgggagttgtcccaggagttgag

SEQ ID NO: 65416 - RNA, 23 nt, synthetic construct
  source 1..23: mol_type = other RNA
gtggctttggagctggtgactgt

SEQ ID NO: 65417 - RNA, 23 nt, synthetic construct
  source 1..23: mol_type = other RNA
agtggctttggagctggtgactg

SEQ ID NO: 65418 - RNA, 23 nt, synthetic construct
  source 1..23: mol_type = other RNA
tggccgtgggtgtggtggtctgt

SEQ ID NO: 65419 - RNA, 23 nt, synthetic construct
  source 1..23: mol_type = other RNA
ccgggatggaggagggggtcacc

SEQ ID NO: 65420 - RNA, 23 nt, synthetic construct
  source 1..23: mol_type = other RNA
gagtggaggaggggtggattgtg

SEQ ID NO: 65421 - RNA, 23 nt, synthetic construct
  source 1..23: mol_type = other RNA
tggtcagcactttgagggtgcca

SEQ ID NO: 65422 - RNA, 23 nt, synthetic construct
  source 1..23: mol_type = other RNA
tggccgtgggtgtggtggtctgt

SEQ ID NO: 65423 - RNA, 23 nt, synthetic construct
  source 1..23: mol_type = other RNA
ccgggatggaggagggggtcacc

SEQ ID NO: 65424 - RNA, 23 nt, synthetic construct
  source 1..23: mol_type = other RNA
gtggctttggagctggtgactgt

SEQ ID NO: 65425 - RNA, 23 nt, synthetic construct
  source 1..23: mol_type = other RNA
agtggctttggagctggtgactg

SEQ ID NO: 65426 - RNA, 23 nt, synthetic construct
  source 1..23: mol_type = other RNA
tggccgtgggtgtggtggtctgt

SEQ ID NO: 65427 - RNA, 23 nt, synthetic construct
  source 1..23: mol_type = other RNA
gcccaactcccccagggggacac

SEQ ID NO: 65428 - RNA, 23 nt, synthetic construct
  source 1..23: mol_type = other RNA
gagtggaggaggggtggattgtg

SEQ ID NO: 65429 - RNA, 23 nt, synthetic construct
  source 1..23: mol_type = other RNA
gtggctttggagctggtgactgt

SEQ ID NO: 65430 - RNA, 23 nt, synthetic construct
  source 1..23: mol_type = other RNA
agtggctttggagctggtgactg

SEQ ID NO: 65431 - RNA, 23 nt, synthetic construct
  source 1..23: mol_type = other RNA
cagtgctggaagggcagttgcag

SEQ ID NO: 65432 - RNA, 23 nt, synthetic construct
  source 1..23: mol_type = other RNA
tggccgtgggtgtggtggtctgt

SEQ ID NO: 65433 - RNA, 23 nt, synthetic construct
  source 1..23: mol_type = other RNA
ccgggatggaggagggggtcacc

SEQ ID NO: 65434 - RNA, 23 nt, synthetic construct
  source 1..23: mol_type = other RNA
tgtgggcatagtggccatggtgg

SEQ ID NO: 65435 - RNA, 23 nt, synthetic construct
  source 1..23: mol_type = other RNA
gctgaaggttggcaggctgctgg

SEQ ID NO: 65436 - RNA, 23 nt, synthetic construct
  source 1..23: mol_type = other RNA
cgtagaaggtgccattgtacgaa

SEQ ID NO: 65437 - RNA, 23 nt, synthetic construct
  source 1..23: mol_type = other RNA
atccgtgctgcgcgggcgctccg

SEQ ID NO: 65438 - RNA, 23 nt, synthetic construct
  source 1..23: mol_type = other RNA
gctggcacgggtggggggacggg

SEQ ID NO: 65439 - RNA, 23 nt, synthetic construct
  source 1..23: mol_type = other RNA
ggctccacagggccctgggtctc

SEQ ID NO: 65440 - RNA, 23 nt, synthetic construct
  source 1..23: mol_type = other RNA
cgctgcccattgatgaggacgga

SEQ ID NO: 65441 - RNA, 23 nt, synthetic construct
  source 1..23: mol_type = other RNA
tcagcaccagccggatgctgacc

SEQ ID NO: 65442 - RNA, 23 nt, synthetic construct
  source 1..23: mol_type = other RNA
cgtatttgggatccagctccagc

SEQ ID NO: 65443 - RNA, 23 nt, synthetic construct
  source 1..23: mol_type = other RNA
tcagggcacctccagttccgcgg

SEQ ID NO: 65444 - RNA, 23 nt, synthetic construct
  source 1..23: mol_type = other RNA
ggtgtccgtgcagggtgagccac

SEQ ID NO: 65445 - RNA, 23 nt, synthetic construct
  source 1..23: mol_type = other RNA
aggtgtccgtgcagggtgagcca

SEQ ID NO: 65446 - RNA, 23 nt, synthetic construct
  source 1..23: mol_type = other RNA
ttggagcaggtgtccgtgcaggg

SEQ ID NO: 65447 - RNA, 23 nt, synthetic construct
  source 1..23: mol_type = other RNA
gtggtcctcgcagagctgcgcgc

SEQ ID NO: 65448 - RNA, 23 nt, synthetic construct
  source 1..23: mol_type = other RNA
cagctcagccagcacggtgaagc

SEQ ID NO: 65449 - RNA, 23 nt, synthetic construct
  source 1..23: mol_type = other RNA
agctgttcctggcattggcacag

SEQ ID NO: 65450 - RNA, 23 nt, synthetic construct
  source 1..23: mol_type = other RNA
ccgtccctccagtcgctgagctg

SEQ ID NO: 65451 - RNA, 23 nt, synthetic construct
  source 1..23: mol_type = other RNA
cgctgggacttggggcagttctg

SEQ ID NO: 65452 - RNA, 23 nt, synthetic construct
  source 1..23: mol_type = other RNA
tgggctggcaggcatccaccacg

SEQ ID NO: 65453 - RNA, 23 nt, synthetic construct
  source 1..23: mol_type = other RNA
caccatgggggctgcacaccctg

SEQ ID NO: 65454 - RNA, 23 nt, synthetic construct
  source 1..23: mol_type = other RNA
tcccgtgggtggtgttgtcccca

SEQ ID NO: 65455 - RNA, 23 nt, synthetic construct
  source 1..23: mol_type = other RNA
gagcggcaggcggcgaaggtggg

SEQ ID NO: 65456 - RNA, 23 nt, synthetic construct
  source 1..23: mol_type = other RNA
gctggagttccaggacatgccac

SEQ ID NO: 65457 - RNA, 23 nt, synthetic construct
  source 1..23: mol_type = other RNA
tcagccagcacagggcatacctg

SEQ ID NO: 65458 - RNA, 23 nt, synthetic construct
  source 1..23: mol_type = other RNA
gcgccgcccggcactcgatgtca

SEQ ID NO: 65459 - RNA, 23 nt, synthetic construct
  source 1..23: mol_type = other RNA
cctgtgccagggtccagttgggg

SEQ ID NO: 65460 - RNA, 23 nt, synthetic construct
  source 1..23: mol_type = other RNA
cccacctgtgccagggtccagtt

SEQ ID NO: 65461 - RNA, 23 nt, synthetic construct
  source 1..23: mol_type = other RNA
cttgaagacgccctcctgctccc

SEQ ID NO: 65462 - RNA, 23 nt, synthetic construct
  source 1..23: mol_type = other RNA
cccctgcagtggtcgtcactgca

SEQ ID NO: 65463 - RNA, 23 nt, synthetic construct
  source 1..23: mol_type = other RNA
tggtggtggccgtctccagctct

SEQ ID NO: 65464 - RNA, 23 nt, synthetic construct
  source 1..23: mol_type = other RNA
ggcgagctctggaggttgccatt

SEQ ID NO: 65465 - RNA, 23 nt, synthetic construct
  source 1..23: mol_type = other RNA
ggtggaggtcggggtggccgtgg

SEQ ID NO: 65466 - RNA, 23 nt, synthetic construct
  source 1..23: mol_type = other RNA
gggtgtggtggtctgtgataggc

SEQ ID NO: 65467 - RNA, 23 nt, synthetic construct
  source 1..23: mol_type = other RNA
agcactgtggaggtgtgggcagt

SEQ ID NO: 65468 - RNA, 23 nt, synthetic construct
  source 1..23: mol_type = other RNA
gtggtggccgtggcggtaagcac

SEQ ID NO: 65469 - RNA, 23 nt, synthetic construct
  source 1..23: mol_type = other RNA
agggggtggctgtgaagcccgtg

SEQ ID NO: 65470 - RNA, 23 nt, synthetic construct
  source 1..23: mol_type = other RNA
atccacactggaggcgtgagtgc

SEQ ID NO: 65471 - RNA, 23 nt, synthetic construct
  source 1..23: mol_type = other RNA
taccactggtctgtgtgctagag

SEQ ID NO: 65472 - RNA, 23 nt, synthetic construct
  source 1..23: mol_type = other RNA
gtcactgtgttgctggtggctgc

SEQ ID NO: 65473 - RNA, 23 nt, synthetic construct
  source 1..23: mol_type = other RNA
agtccaggctgtgcgcaccgtgt

SEQ ID NO: 65474 - RNA, 23 nt, synthetic construct
  source 1..23: mol_type = other RNA
gtggccgtggtgtggcccggggt

SEQ ID NO: 65475 - RNA, 23 nt, synthetic construct
  source 1..23: mol_type = other RNA
ggtggccgtggtgtggcccgggg

SEQ ID NO: 65476 - RNA, 23 nt, synthetic construct
  source 1..23: mol_type = other RNA
ctgggcctgggcacggcactcga

SEQ ID NO: 65477 - RNA, 23 nt, synthetic construct
  source 1..23: mol_type = other RNA
gctgggcctgggcacggcactcg

SEQ ID NO: 65478 - RNA, 23 nt, synthetic construct
  source 1..23: mol_type = other RNA
tccaggtcgtccccggagtggag

SEQ ID NO: 65479 - RNA, 23 nt, synthetic construct
  source 1..23: mol_type = other RNA
tggaggacggggtggccgtggat

SEQ ID NO: 65480 - RNA, 23 nt, synthetic construct
  source 1..23: mol_type = other RNA
gtggaggacggggtggccgtgga

SEQ ID NO: 65481 - RNA, 23 nt, synthetic construct
  source 1..23: mol_type = other RNA
ggtgggcaccgtcacggtggctg

SEQ ID NO: 65482 - RNA, 23 nt, synthetic construct
  source 1..23: mol_type = other RNA
gggtgtggtggtctgtgataggc

SEQ ID NO: 65483 - RNA, 23 nt, synthetic construct
  source 1..23: mol_type = other RNA
agggggtggctgtgaagcccgtg

SEQ ID NO: 65484 - RNA, 23 nt, synthetic construct
  source 1..23: mol_type = other RNA
gtggtcagcactgtgggggtgtg

SEQ ID NO: 65485 - RNA, 23 nt, synthetic construct
  source 1..23: mol_type = other RNA
taccactggtctgtgtgctagag

SEQ ID NO: 65486 - RNA, 23 nt, synthetic construct
  source 1..23: mol_type = other RNA
actggggggataggtgttgtccc

SEQ ID NO: 65487 - RNA, 23 nt, synthetic construct
  source 1..23: mol_type = other RNA
ctgggggacagggatcgcccgtg

SEQ ID NO: 65488 - RNA, 23 nt, synthetic construct
  source 1..23: mol_type = other RNA
agtccaggctgtgcgcaccgtgt

SEQ ID NO: 65489 - RNA, 23 nt, synthetic construct
  source 1..23: mol_type = other RNA
ccggtggttgctgctggggtgtg

SEQ ID NO: 65490 - RNA, 23 nt, synthetic construct
  source 1..23: mol_type = other RNA
gggtgactcggtggtcctgctgc

SEQ ID NO: 65491 - RNA, 23 nt, synthetic construct
  source 1..23: mol_type = other RNA
ctgggcctgggcacggcactcga

SEQ ID NO: 65492 - RNA, 23 nt, synthetic construct
  source 1..23: mol_type = other RNA
gctgggcctgggcacggcactcg

SEQ ID NO: 65493 - RNA, 23 nt, synthetic construct
  source 1..23: mol_type = other RNA
atccaggtcgtccctggagtgga

SEQ ID NO: 65494 - RNA, 23 nt, synthetic construct
  source 1..23: mol_type = other RNA
gtctgttctgggagggtcccggt

SEQ ID NO: 65495 - RNA, 23 nt, synthetic construct
  source 1..23: mol_type = other RNA
tccaggtcgtccccggagtggag

SEQ ID NO: 65496 - RNA, 23 nt, synthetic construct
  source 1..23: mol_type = other RNA
tggaggacggggtggccgtgggg

SEQ ID NO: 65497 - RNA, 23 nt, synthetic construct
  source 1..23: mol_type = other RNA
gtggaggacggggtggccgtggg

SEQ ID NO: 65498 - RNA, 23 nt, synthetic construct
  source 1..23: mol_type = other RNA
ggtgggcaccgtcacggtggctg

SEQ ID NO: 65499 - RNA, 23 nt, synthetic construct
  source 1..23: mol_type = other RNA
gtcagcactttgagggtgccagc

SEQ ID NO: 65500 - RNA, 23 nt, synthetic construct
  source 1..23: mol_type = other RNA
ggagtggctctggagctgatgac

SEQ ID NO: 65501 - RNA, 23 nt, synthetic construct
  source 1..23: mol_type = other RNA
gggtgtggtggtctgtgataggc

SEQ ID NO: 65502 - RNA, 23 nt, synthetic construct
  source 1..23: mol_type = other RNA
agggggtggctgtgaagcccgtg

SEQ ID NO: 65503 - RNA, 23 nt, synthetic construct
  source 1..23: mol_type = other RNA
atccacactggaggcgtgagtgc

SEQ ID NO: 65504 - RNA, 23 nt, synthetic construct
  source 1..23: mol_type = other RNA
taccactggtctgtgtgctagag

SEQ ID NO: 65505 - RNA, 23 nt, synthetic construct
  source 1..23: mol_type = other RNA
agtccaggctgtgcgcaccgtgt

SEQ ID NO: 65506 - RNA, 23 nt, synthetic construct
  source 1..23: mol_type = other RNA
gggtgactcggtggtcctgctgc

SEQ ID NO: 65507 - RNA, 23 nt, synthetic construct
  source 1..23: mol_type = other RNA
ctgggcctgggcacggcactcga

SEQ ID NO: 65508 - RNA, 23 nt, synthetic construct
  source 1..23: mol_type = other RNA
gctgggcctgggcacggcactcg

SEQ ID NO: 65509 - RNA, 23 nt, synthetic construct
  source 1..23: mol_type = other RNA
tggaggacggggtggccgtggat

SEQ ID NO: 65510 - RNA, 23 nt, synthetic construct
  source 1..23: mol_type = other RNA
gtggaggacggggtggccgtgga

SEQ ID NO: 65511 - RNA, 23 nt, synthetic construct
  source 1..23: mol_type = other RNA
ggtgggcaccgtcacggtggctg

SEQ ID NO: 65512 - RNA, 23 nt, synthetic construct
  source 1..23: mol_type = other RNA
gggtgtggtggtctgtgataggc

SEQ ID NO: 65513 - RNA, 23 nt, synthetic construct
  source 1..23: mol_type = other RNA
agcactgtggaggtgtgggcagt

SEQ ID NO: 65514 - RNA, 23 nt, synthetic construct
  source 1..23: mol_type = other RNA
ggctggaggagggggtgactgtg

SEQ ID NO: 65515 - RNA, 23 nt, synthetic construct
  source 1..23: mol_type = other RNA
cgtggagccactggttgtgggtg

SEQ ID NO: 65516 - RNA, 23 nt, synthetic construct
  source 1..23: mol_type = other RNA
gtggtcagcactgtgggggtgtg

SEQ ID NO: 65517 - RNA, 23 nt, synthetic construct
  source 1..23: mol_type = other RNA
taccactggtctgtgtgctagag

SEQ ID NO: 65518 - RNA, 23 nt, synthetic construct
  source 1..23: mol_type = other RNA
actggggggataggtgttgtccc

SEQ ID NO: 65519 - RNA, 23 nt, synthetic construct
  source 1..23: mol_type = other RNA
ctgggggacagggatcgcccgtg

SEQ ID NO: 65520 - RNA, 23 nt, synthetic construct
  source 1..23: mol_type = other RNA
agtccaggctgtgcgcaccgtgt

SEQ ID NO: 65521 - RNA, 23 nt, synthetic construct
  source 1..23: mol_type = other RNA
ccggtggttgctgctggggtgtg

SEQ ID NO: 65522 - RNA, 23 nt, synthetic construct
  source 1..23: mol_type = other RNA
gggtgactcggtggtcctgctgc

SEQ ID NO: 65523 - RNA, 23 nt, synthetic construct
  source 1..23: mol_type = other RNA
gtggccgtggtgtggcccggggt

SEQ ID NO: 65524 - RNA, 23 nt, synthetic construct
  source 1..23: mol_type = other RNA
ggtggccgtggtgtggcccgggg

SEQ ID NO: 65525 - RNA, 23 nt, synthetic construct
  source 1..23: mol_type = other RNA
ctgggcctgggcacggcactcga

SEQ ID NO: 65526 - RNA, 23 nt, synthetic construct
  source 1..23: mol_type = other RNA
gctgggcctgggcacggcactcg

SEQ ID NO: 65527 - RNA, 23 nt, synthetic construct
  source 1..23: mol_type = other RNA
tccaggtcgtccccggagtggag

SEQ ID NO: 65528 - RNA, 23 nt, synthetic construct
  source 1..23: mol_type = other RNA
tggaggacggggtggccgtggat

SEQ ID NO: 65529 - RNA, 23 nt, synthetic construct
  source 1..23: mol_type = other RNA
gtggaggacggggtggccgtgga

SEQ ID NO: 65530 - RNA, 23 nt, synthetic construct
  source 1..23: mol_type = other RNA
gtgggtgtggtggccgggctggt

SEQ ID NO: 65531 - RNA, 23 nt, synthetic construct
  source 1..23: mol_type = other RNA
gtctgttctgggagggtcccggt

SEQ ID NO: 65532 - RNA, 23 nt, synthetic construct
  source 1..23: mol_type = other RNA
tccaggtcgtccccggagtggag

SEQ ID NO: 65533 - RNA, 23 nt, synthetic construct
  source 1..23: mol_type = other RNA
tggaggacggggtggccgtgggg

SEQ ID NO: 65534 - RNA, 23 nt, synthetic construct
  source 1..23: mol_type = other RNA
gtggaggacggggtggccgtggg

SEQ ID NO: 65535 - RNA, 23 nt, synthetic construct
  source 1..23: mol_type = other RNA
tggaggacggggtggccgtggat

SEQ ID NO: 65536 - RNA, 23 nt, synthetic construct
  source 1..23: mol_type = other RNA
gtggaggacggggtggccgtgga

SEQ ID NO: 65537 - RNA, 23 nt, synthetic construct
  source 1..23: mol_type = other RNA
ggtgggcaccgtcacggtggctg

SEQ ID NO: 65538 - RNA, 23 nt, synthetic construct
  source 1..23: mol_type = other RNA
gggtgtggtggtctgtgataggc

SEQ ID NO: 65539 - RNA, 23 nt, synthetic construct
  source 1..23: mol_type = other RNA
gtggtggccgtggcggtaagcac

SEQ ID NO: 65540 - RNA, 23 nt, synthetic construct
  source 1..23: mol_type = other RNA
agggggtggctgtgaagcccgtg

SEQ ID NO: 65541 - RNA, 23 nt, synthetic construct
  source 1..23: mol_type = other RNA
atccacactggaggcgtgagtgc

SEQ ID NO: 65542 - RNA, 23 nt, synthetic construct
  source 1..23: mol_type = other RNA
cgtggagccactggttgtgggtg

SEQ ID NO: 65543 - RNA, 23 nt, synthetic construct
  source 1..23: mol_type = other RNA
taccactggtctgtgtgctagag

SEQ ID NO: 65544 - RNA, 23 nt, synthetic construct
  source 1..23: mol_type = other RNA
aattggtggcccttgtcatggtg

SEQ ID NO: 65545 - RNA, 23 nt, synthetic construct
  source 1..23: mol_type = other RNA
ggagggtgtggccgtggaattgg

SEQ ID NO: 65546 - RNA, 23 nt, synthetic construct
  source 1..23: mol_type = other RNA
tcagctcagtgaggatccgggtc

SEQ ID NO: 65547 - RNA, 23 nt, synthetic construct
  source 1..23: mol_type = other RNA
gtggaggacagggtggccgtgga

SEQ ID NO: 65548 - RNA, 23 nt, synthetic construct
  source 1..23: mol_type = other RNA
tcaccactttgggggtgtgagct

SEQ ID NO: 65549 - RNA, 23 nt, synthetic construct
  source 1..23: mol_type = other RNA
ccatggtggtcaccactttgggg

SEQ ID NO: 65550 - RNA, 23 nt, synthetic construct
  source 1..23: mol_type = other RNA
ggccatggtggtcaccactttgg

SEQ ID NO: 65551 - RNA, 23 nt, synthetic construct
  source 1..23: mol_type = other RNA
agcactgcaggggtgcgggtggt

SEQ ID NO: 65552 - RNA, 23 nt, synthetic construct
  source 1..23: mol_type = other RNA
atggcagccggctcggtcggtct

SEQ ID NO: 65553 - RNA, 23 nt, synthetic construct
  source 1..23: mol_type = other RNA
tggggaggtgggacaggcgccct

SEQ ID NO: 65554 - RNA, 23 nt, synthetic construct
  source 1..23: mol_type = other RNA
ggacagcggggcggaggacactg

SEQ ID NO: 65555 - RNA, 23 nt, synthetic construct
  source 1..23: mol_type = other RNA
gttggccacaggctttgggtcca

SEQ ID NO: 65556 - RNA, 23 nt, synthetic construct
  source 1..23: mol_type = other RNA
gtgggagccgccccacatgctgc

SEQ ID NO: 65557 - RNA, 23 nt, synthetic construct
  source 1..23: mol_type = other RNA
ggacttgtagtggatgctgaggg

SEQ ID NO: 65558 - RNA, 23 nt, synthetic construct
  source 1..23: mol_type = other RNA
tcggggaccagccacgtcttggc

SEQ ID NO: 65559 - RNA, 23 nt, synthetic construct
  source 1..23: mol_type = other RNA
tgggggtgggtgtgctagacacc

SEQ ID NO: 65560 - RNA, 23 nt, synthetic construct
  source 1..23: mol_type = other RNA
ggtgggggtgggtgtgctagaca

SEQ ID NO: 65561 - RNA, 23 nt, synthetic construct
  source 1..23: mol_type = other RNA
tgtggcactcagcaaagacctgg

SEQ ID NO: 65562 - RNA, 23 nt, synthetic construct
  source 1..23: mol_type = other RNA
gttgtggcactcagcaaagacct

SEQ ID NO: 65563 - RNA, 23 nt, synthetic construct
  source 1..23: mol_type = other RNA
ttgcaggtggcaggctgtatggg

SEQ ID NO: 65564 - RNA, 23 nt, synthetic construct
  source 1..23: mol_type = other RNA
aggtggttgtgttgcacacgcac

SEQ ID NO: 65565 - RNA, 23 nt, synthetic construct
  source 1..23: mol_type = other RNA
tgcagcggaaggtgggacagcag

SEQ ID NO: 65566 - RNA, 23 nt, synthetic construct
  source 1..23: mol_type = other RNA
tgttgcaggcatcctcctgacat

SEQ ID NO: 65567 - RNA, 23 nt, synthetic construct
  source 1..23: mol_type = other RNA
agccctggggacaggtagtattg

SEQ ID NO: 65568 - RNA, 23 nt, synthetic construct
  source 1..23: mol_type = other RNA
aagccctggggacaggtagtatt

SEQ ID NO: 65569 - RNA, 23 nt, synthetic construct
  source 1..23: mol_type = other RNA
tggactggctggccatcgggcgt

SEQ ID NO: 65570 - RNA, 23 nt, synthetic construct
  source 1..23: mol_type = other RNA
gtccacatggctgttgacccagg

SEQ ID NO: 65571 - RNA, 23 nt, synthetic construct
  source 1..23: mol_type = other RNA
acccacggggtgggcagcaggag

SEQ ID NO: 65572 - RNA, 23 nt, synthetic construct
  source 1..23: mol_type = other RNA
cacaggctctcccagggtaggac

SEQ ID NO: 65573 - RNA, 23 nt, synthetic construct
  source 1..23: mol_type = other RNA
accgggagggccgggcttgtcgt

SEQ ID NO: 65574 - RNA, 23 nt, synthetic construct
  source 1..23: mol_type = other RNA
gggtgtggtggttgtgctgatcc

SEQ ID NO: 65575 - RNA, 23 nt, synthetic construct
  source 1..23: mol_type = other RNA
aggagggggtcaccgtggagcct

SEQ ID NO: 65576 - RNA, 23 nt, synthetic construct
  source 1..23: mol_type = other RNA
gtgatgggggagtaccactggtc

SEQ ID NO: 65577 - RNA, 23 nt, synthetic construct
  source 1..23: mol_type = other RNA
tgtgatgtgggtggtgcccaaga

SEQ ID NO: 65578 - RNA, 23 nt, synthetic construct
  source 1..23: mol_type = other RNA
gggtgtggtggttgtgctgatcc

SEQ ID NO: 65579 - RNA, 23 nt, synthetic construct
  source 1..23: mol_type = other RNA
gtgatgggggagtaccactggtc

SEQ ID NO: 65580 - RNA, 23 nt, synthetic construct
  source 1..23: mol_type = other RNA
tgtgatgtgggtggtgcccaagg

SEQ ID NO: 65581 - RNA, 23 nt, synthetic construct
  source 1..23: mol_type = other RNA
ggtcagcactttgagggtgccag

SEQ ID NO: 65582 - RNA, 23 nt, synthetic construct
  source 1..23: mol_type = other RNA
gggtgtggtggttgtgctgatcc

SEQ ID NO: 65583 - RNA, 23 nt, synthetic construct
  source 1..23: mol_type = other RNA
aggagggggtcaccgtggagcct

SEQ ID NO: 65584 - RNA, 23 nt, synthetic construct
  source 1..23: mol_type = other RNA
gtgatgggggagtaccactggtc

SEQ ID NO: 65585 - RNA, 23 nt, synthetic construct
  source 1..23: mol_type = other RNA
tgtgatgtgggtggtgcccaaga

SEQ ID NO: 65586 - RNA, 23 nt, synthetic construct
  source 1..23: mol_type = other RNA
gggtgtggtggttgtgctgatcc

SEQ ID NO: 65587 - RNA, 23 nt, synthetic construct
  source 1..23: mol_type = other RNA
aggagggggtcaccgtggagcca

SEQ ID NO: 65588 - RNA, 23 nt, synthetic construct
  source 1..23: mol_type = other RNA
gtgatgggggagtaccactggtc

SEQ ID NO: 65589 - RNA, 23 nt, synthetic construct
  source 1..23: mol_type = other RNA
tgtgatgtgggtggtgcccaagg

SEQ ID NO: 65590 - RNA, 23 nt, synthetic construct
  source 1..23: mol_type = other RNA
aggagggggtggacgtggaactg

SEQ ID NO: 65591 - RNA, 23 nt, synthetic construct
  source 1..23: mol_type = other RNA
gggtgtggtggttgtgctgatcc

SEQ ID NO: 65592 - RNA, 23 nt, synthetic construct
  source 1..23: mol_type = other RNA
aggagggggtcaccgtggagcca

SEQ ID NO: 65593 - RNA, 23 nt, synthetic construct
  source 1..23: mol_type = other RNA
gtgatgggggagtaccactggtc

SEQ ID NO: 65594 - RNA, 23 nt, synthetic construct
  source 1..23: mol_type = other RNA
ttgtggtcagctcagtgaggatc

SEQ ID NO: 65595 - RNA, 23 nt, synthetic construct
  source 1..23: mol_type = other RNA
ctttgggggtgtgagctgttccc

SEQ ID NO: 65596 - RNA, 23 nt, synthetic construct
  source 1..23: mol_type = other RNA
aggtgggacaggcgccctggaag

SEQ ID NO: 65597 - RNA, 23 nt, synthetic construct
  source 1..23: mol_type = other RNA
cacagggctggctcgggtccgac

SEQ ID NO: 65598 - RNA, 23 nt, synthetic construct
  source 1..23: mol_type = other RNA
gcagaagcagccctccgccatcc

SEQ ID NO: 65599 - RNA, 23 nt, synthetic construct
  source 1..23: mol_type = other RNA
tggtcctcagggcagaagcagcc

SEQ ID NO: 65600 - RNA, 23 nt, synthetic construct
  source 1..23: mol_type = other RNA
gaagaggatctggtcctcagggc

SEQ ID NO: 65601 - RNA, 23 nt, synthetic construct
  source 1..23: mol_type = other RNA
acaggtcctgggcgcaggcggcc

SEQ ID NO: 65602 - RNA, 23 nt, synthetic construct
  source 1..23: mol_type = other RNA
agggggcaggtccgggggcagag

SEQ ID NO: 65603 - RNA, 23 nt, synthetic construct
  source 1..23: mol_type = other RNA
tctgcaccacgatgaagaagctc

SEQ ID NO: 65604 - RNA, 23 nt, synthetic construct
  source 1..23: mol_type = other RNA
ggctcccaggcagcttagcttcc

SEQ ID NO: 65605 - RNA, 23 nt, synthetic construct
  source 1..23: mol_type = other RNA
ttgtggctggagttccaggacat

SEQ ID NO: 65606 - RNA, 23 nt, synthetic construct
  source 1..23: mol_type = other RNA
ccgggagggccgggcttgtcgtg

SEQ ID NO: 65607 - RNA, 23 nt, synthetic construct
  source 1..23: mol_type = other RNA
ctgttctcagggtggaggtcggg

SEQ ID NO: 65608 - RNA, 23 nt, synthetic construct
  source 1..23: mol_type = other RNA
gtccaggtggtgcccagggagga

SEQ ID NO: 65609 - RNA, 23 nt, synthetic construct
  source 1..23: mol_type = other RNA
gcactgtggaggtgtgggcagtc

SEQ ID NO: 65610 - RNA, 23 nt, synthetic construct
  source 1..23: mol_type = other RNA
cccacctgctcacggttcctgca

SEQ ID NO: 65611 - RNA, 23 nt, synthetic construct
  source 1..23: mol_type = other RNA
gtccaggtggtgcccagggagga

SEQ ID NO: 65612 - RNA, 23 nt, synthetic construct
  source 1..23: mol_type = other RNA
cccacctgctcacggttcctgca

SEQ ID NO: 65613 - RNA, 23 nt, synthetic construct
  source 1..23: mol_type = other RNA
cccacctgctcacggttcctgca

SEQ ID NO: 65614 - RNA, 23 nt, synthetic construct
  source 1..23: mol_type = other RNA
gtccaggtggtgcccagggagga

SEQ ID NO: 65615 - RNA, 23 nt, synthetic construct
  source 1..23: mol_type = other RNA
gcactgtggaggtgtgggcagtc

SEQ ID NO: 65616 - RNA, 23 nt, synthetic construct
  source 1..23: mol_type = other RNA
cccacctgctcacggttcctgca

SEQ ID NO: 65617 - RNA, 23 nt, synthetic construct
  source 1..23: mol_type = other RNA
gtccaggtggtgcccagggagga

SEQ ID NO: 65618 - RNA, 23 nt, synthetic construct
  source 1..23: mol_type = other RNA
gttgtggtcagctcagtgaggat

SEQ ID NO: 65619 - RNA, 23 nt, synthetic construct
  source 1..23: mol_type = other RNA
agcctcacagaggtacacggtgc

SEQ ID NO: 65620 - RNA, 23 nt, synthetic construct
  source 1..23: mol_type = other RNA
cgcagtgctgtccaccagtgcgt

SEQ ID NO: 65621 - RNA, 23 nt, synthetic construct
  source 1..23: mol_type = other RNA
agttccgcggctggccccccgcg

SEQ ID NO: 65622 - RNA, 23 nt, synthetic construct
  source 1..23: mol_type = other RNA
ggcaagtgggctggcaggcatcc

SEQ ID NO: 65623 - RNA, 23 nt, synthetic construct
  source 1..23: mol_type = other RNA
ggcactcctgggcgggcacacag

SEQ ID NO: 65624 - RNA, 23 nt, synthetic construct
  source 1..23: mol_type = other RNA
tcctcctcggcaatgcagccccc

SEQ ID NO: 65625 - RNA, 23 nt, synthetic construct
  source 1..23: mol_type = other RNA
atggtctctccaggcttgtaggt

SEQ ID NO: 65626 - RNA, 23 nt, synthetic construct
  source 1..23: mol_type = other RNA
cgtgggtggtgttgtccccacag

SEQ ID NO: 65627 - RNA, 23 nt, synthetic construct
  source 1..23: mol_type = other RNA
tcggggtggccgtggatccagtg

SEQ ID NO: 65628 - RNA, 23 nt, synthetic construct
  source 1..23: mol_type = other RNA
gtggtggttgtgctgatccacac

SEQ ID NO: 65629 - RNA, 23 nt, synthetic construct
  source 1..23: mol_type = other RNA
aacttccccacctgctcacggtt

SEQ ID NO: 65630 - RNA, 23 nt, synthetic construct
  source 1..23: mol_type = other RNA
acggggtggccgtggatccagtg

SEQ ID NO: 65631 - RNA, 23 nt, synthetic construct
  source 1..23: mol_type = other RNA
cgtggccgtggtgctcacatgtg

SEQ ID NO: 65632 - RNA, 23 nt, synthetic construct
  source 1..23: mol_type = other RNA
gaggggatggctgtaaagctggt

SEQ ID NO: 65633 - RNA, 23 nt, synthetic construct
  source 1..23: mol_type = other RNA
gtggtggttgtgctgatccacac

SEQ ID NO: 65634 - RNA, 23 nt, synthetic construct
  source 1..23: mol_type = other RNA
ggggtgtgggtggtccccgggat

SEQ ID NO: 65635 - RNA, 23 nt, synthetic construct
  source 1..23: mol_type = other RNA
ggtggttgctgctggggtgtggg

SEQ ID NO: 65636 - RNA, 23 nt, synthetic construct
  source 1..23: mol_type = other RNA
ggccctggtgtggcccggggtgg

SEQ ID NO: 65637 - RNA, 23 nt, synthetic construct
  source 1..23: mol_type = other RNA
aacttccccacctgctcacggtt

SEQ ID NO: 65638 - RNA, 23 nt, synthetic construct
  source 1..23: mol_type = other RNA
gtggacatggaactggtggccct

SEQ ID NO: 65639 - RNA, 23 nt, synthetic construct
  source 1..23: mol_type = other RNA
gtggtggttgtgctgatccacac

SEQ ID NO: 65640 - RNA, 23 nt, synthetic construct
  source 1..23: mol_type = other RNA
ggtggttgctgctggggtgtggg

SEQ ID NO: 65641 - RNA, 23 nt, synthetic construct
  source 1..23: mol_type = other RNA
aacttccccacctgctcacggtt

SEQ ID NO: 65642 - RNA, 23 nt, synthetic construct
  source 1..23: mol_type = other RNA
acggggtggccgtggatccagtg

SEQ ID NO: 65643 - RNA, 23 nt, synthetic construct
  source 1..23: mol_type = other RNA
cgtggccgtggtgctcacatgtg

SEQ ID NO: 65644 - RNA, 23 nt, synthetic construct
  source 1..23: mol_type = other RNA
gaggggatggctgtaaagctggt

SEQ ID NO: 65645 - RNA, 23 nt, synthetic construct
  source 1..23: mol_type = other RNA
gtggtggttgtgctgatccacac

SEQ ID NO: 65646 - RNA, 23 nt, synthetic construct
  source 1..23: mol_type = other RNA
ggggtgtgggtggtccccgggac

SEQ ID NO: 65647 - RNA, 23 nt, synthetic construct
  source 1..23: mol_type = other RNA
ggtggttgctgctggggtgtggg

SEQ ID NO: 65648 - RNA, 23 nt, synthetic construct
  source 1..23: mol_type = other RNA
aacttccccacctgctcacggtt

SEQ ID NO: 65649 - RNA, 23 nt, synthetic construct
  source 1..23: mol_type = other RNA
acggggtggccgtggatccagtg

SEQ ID NO: 65650 - RNA, 23 nt, synthetic construct
  source 1..23: mol_type = other RNA
acggggtggccgtggatccagtg

SEQ ID NO: 65651 - RNA, 23 nt, synthetic construct
  source 1..23: mol_type = other RNA
cgtggccgtggtgctcacatgtg

SEQ ID NO: 65652 - RNA, 23 nt, synthetic construct
  source 1..23: mol_type = other RNA
gaggggatggctgtaaagctggt

SEQ ID NO: 65653 - RNA, 23 nt, synthetic construct
  source 1..23: mol_type = other RNA
gtggtggttgtgctgatccacac

SEQ ID NO: 65654 - RNA, 23 nt, synthetic construct
  source 1..23: mol_type = other RNA
tggtcagctcagtgaggatccgg

SEQ ID NO: 65655 - RNA, 23 nt, synthetic construct
  source 1..23: mol_type = other RNA
acagggtggccgtggatccagtg

SEQ ID NO: 65656 - RNA, 23 nt, synthetic construct
  source 1..23: mol_type = other RNA
tgcaggggtgcgggtggtcccca

SEQ ID NO: 65657 - RNA, 23 nt, synthetic construct
  source 1..23: mol_type = other RNA
cggaaggtgtaagaggtgccgtc

SEQ ID NO: 65658 - RNA, 23 nt, synthetic construct
  source 1..23: mol_type = other RNA
ccggaaggtgtaagaggtgccgt

SEQ ID NO: 65659 - RNA, 23 nt, synthetic construct
  source 1..23: mol_type = other RNA
ctgatgcaggcgttgaagaatgg

SEQ ID NO: 65660 - RNA, 23 nt, synthetic construct
  source 1..23: mol_type = other RNA
gtgcagatggactcctgccctgg

SEQ ID NO: 65661 - RNA, 23 nt, synthetic construct
  source 1..23: mol_type = other RNA
gggtgcagatggactcctgccct

SEQ ID NO: 65662 - RNA, 23 nt, synthetic construct
  source 1..23: mol_type = other RNA
ccccacagcactgcccggccact

SEQ ID NO: 65663 - RNA, 23 nt, synthetic construct
  source 1..23: mol_type = other RNA
atggactccaccctcagcctcac

SEQ ID NO: 65664 - RNA, 23 nt, synthetic construct
  source 1..23: mol_type = other RNA
tgtgtgggggagccatgggcgca

SEQ ID NO: 65665 - RNA, 23 nt, synthetic construct
  source 1..23: mol_type = other RNA
ggaggcagaacgttctcagacag

SEQ ID NO: 65666 - RNA, 23 nt, synthetic construct
  source 1..23: mol_type = other RNA
tgctgcgcgggcgctccggccgt

SEQ ID NO: 65667 - RNA, 23 nt, synthetic construct
  source 1..23: mol_type = other RNA
acccatcctgggggctggcacgg

SEQ ID NO: 65668 - RNA, 23 nt, synthetic construct
  source 1..23: mol_type = other RNA
agttgcaaaggccagggaagcgg

SEQ ID NO: 65669 - RNA, 23 nt, synthetic construct
  source 1..23: mol_type = other RNA
tgctgaccttgatgtagtccccg

SEQ ID NO: 65670 - RNA, 23 nt, synthetic construct
  source 1..23: mol_type = other RNA
gggtgcggtggcagatgccctcc

SEQ ID NO: 65671 - RNA, 23 nt, synthetic construct
  source 1..23: mol_type = other RNA
cgcggctggccccccgcgtgggc

SEQ ID NO: 65672 - RNA, 23 nt, synthetic construct
  source 1..23: mol_type = other RNA
cactcctggtgctgcatgttgag

SEQ ID NO: 65673 - RNA, 23 nt, synthetic construct
  source 1..23: mol_type = other RNA
gggttggagcaggtgtccgtgca

SEQ ID NO: 65674 - RNA, 23 nt, synthetic construct
  source 1..23: mol_type = other RNA
gggcagaagcagccgtccacaca

SEQ ID NO: 65675 - RNA, 23 nt, synthetic construct
  source 1..23: mol_type = other RNA
gtgcccgggctgtaggtgcggcc

SEQ ID NO: 65676 - RNA, 23 nt, synthetic construct
  source 1..23: mol_type = other RNA
gcacggtgaagctgctgtcggca

SEQ ID NO: 65677 - RNA, 23 nt, synthetic construct
  source 1..23: mol_type = other RNA
gcagcctgggccttccaggtgtt

SEQ ID NO: 65678 - RNA, 23 nt, synthetic construct
  source 1..23: mol_type = other RNA
tccacaggcacgaaggaaacgct

SEQ ID NO: 65679 - RNA, 23 nt, synthetic construct
  source 1..23: mol_type = other RNA
gtgcccgcggggcaggtgcagcc

SEQ ID NO: 65680 - RNA, 23 nt, synthetic construct
  source 1..23: mol_type = other RNA
ggggcactcctgggcgggcacac

SEQ ID NO: 65681 - RNA, 23 nt, synthetic construct
  source 1..23: mol_type = other RNA
agcccccactcccatccgacacc

SEQ ID NO: 65682 - RNA, 23 nt, synthetic construct
  source 1..23: mol_type = other RNA
acaggggcagtcctcctcggcaa

SEQ ID NO: 65683 - RNA, 23 nt, synthetic construct
  source 1..23: mol_type = other RNA
aggtggcctcgttgtgcacacag

SEQ ID NO: 65684 - RNA, 23 nt, synthetic construct
  source 1..23: mol_type = other RNA
agtcgaccctgatggtctctcca

SEQ ID NO: 65685 - RNA, 23 nt, synthetic construct
  source 1..23: mol_type = other RNA
gcagctgccttcaaagctgtagc

SEQ ID NO: 65686 - RNA, 23 nt, synthetic construct
  source 1..23: mol_type = other RNA
ccctcttggaggatcagctcgta

SEQ ID NO: 65687 - RNA, 23 nt, synthetic construct
  source 1..23: mol_type = other RNA
tgcaggggtccttgggtgccagg

SEQ ID NO: 65688 - RNA, 23 nt, synthetic construct
  source 1..23: mol_type = other RNA
tcacagcccccatgtgggttgta

SEQ ID NO: 65689 - RNA, 23 nt, synthetic construct
  source 1..23: mol_type = other RNA
atgccactgggtgtgcagttaca

SEQ ID NO: 65690 - RNA, 23 nt, synthetic construct
  source 1..23: mol_type = other RNA
gtggctggagttccaggacatgc

SEQ ID NO: 65691 - RNA, 23 nt, synthetic construct
  source 1..23: mol_type = other RNA
tgtggctggagttccaggacatg

SEQ ID NO: 65692 - RNA, 23 nt, synthetic construct
  source 1..23: mol_type = other RNA
gaagctgcgccgcccggcactcg

SEQ ID NO: 65693 - RNA, 23 nt, synthetic construct
  source 1..23: mol_type = other RNA
gtggtctgggttggggtaggcac

SEQ ID NO: 65694 - RNA, 23 nt, synthetic construct
  source 1..23: mol_type = other RNA
tgtggtctgggttggggtaggca

SEQ ID NO: 65695 - RNA, 23 nt, synthetic construct
  source 1..23: mol_type = other RNA
tgccagggtccagttggggaagc

SEQ ID NO: 65696 - RNA, 23 nt, synthetic construct
  source 1..23: mol_type = other RNA
tgcaccttctgccccacctgtgc

SEQ ID NO: 65697 - RNA, 23 nt, synthetic construct
  source 1..23: mol_type = other RNA
agtgcaccttctgccccacctgt

SEQ ID NO: 65698 - RNA, 23 nt, synthetic construct
  source 1..23: mol_type = other RNA
ccctgcagtggtcgtcactgcag

SEQ ID NO: 65699 - RNA, 23 nt, synthetic construct
  source 1..23: mol_type = other RNA
tggtgctggccgggggagccctg

SEQ ID NO: 65700 - RNA, 23 nt, synthetic construct
  source 1..23: mol_type = other RNA
gggtggccgtggatccagtggac

SEQ ID NO: 65701 - RNA, 23 nt, synthetic construct
  source 1..23: mol_type = other RNA
ggggtggccgtggatccagtgga

SEQ ID NO: 65702 - RNA, 23 nt, synthetic construct
  source 1..23: mol_type = other RNA
cggggtggccgtggatccagtgg

SEQ ID NO: 65703 - RNA, 23 nt, synthetic construct
  source 1..23: mol_type = other RNA
gtgtaacgctggtagctgtgggt

SEQ ID NO: 65704 - RNA, 23 nt, synthetic construct
  source 1..23: mol_type = other RNA
ggtgtgggcagtctctggagtgg

SEQ ID NO: 65705 - RNA, 23 nt, synthetic construct
  source 1..23: mol_type = other RNA
aagcactgtggaggtgtgggcag

SEQ ID NO: 65706 - RNA, 23 nt, synthetic construct
  source 1..23: mol_type = other RNA
acagagccggtggccccagttgt

SEQ ID NO: 65707 - RNA, 23 nt, synthetic construct
  source 1..23: mol_type = other RNA
ttgtgggtgtggtggttgtgctg

SEQ ID NO: 65708 - RNA, 23 nt, synthetic construct
  source 1..23: mol_type = other RNA
tggtccccgggatggaggagggg

SEQ ID NO: 65709 - RNA, 23 nt, synthetic construct
  source 1..23: mol_type = other RNA
gtggtggtggtcagcactgtggc

SEQ ID NO: 65710 - RNA, 23 nt, synthetic construct
  source 1..23: mol_type = other RNA
tggccacagttgtggtggtggtg

SEQ ID NO: 65711 - RNA, 23 nt, synthetic construct
  source 1..23: mol_type = other RNA
accactggtctgtgtgctagagg

SEQ ID NO: 65712 - RNA, 23 nt, synthetic construct
  source 1..23: mol_type = other RNA
gtggagccggtggccgtgatcgt

SEQ ID NO: 65713 - RNA, 23 nt, synthetic construct
  source 1..23: mol_type = other RNA
cccaggagttgaggaggggttgg

SEQ ID NO: 65714 - RNA, 23 nt, synthetic construct
  source 1..23: mol_type = other RNA
gagggagtcactgtgttgctggt

SEQ ID NO: 65715 - RNA, 23 nt, synthetic construct
  source 1..23: mol_type = other RNA
agaggagggagtcactgtgttgc

SEQ ID NO: 65716 - RNA, 23 nt, synthetic construct
  source 1..23: mol_type = other RNA
gtggaaggctctgtgatgtgggt

SEQ ID NO: 65717 - RNA, 23 nt, synthetic construct
  source 1..23: mol_type = other RNA
gtgtggccgtggctgtggtcctg

SEQ ID NO: 65718 - RNA, 23 nt, synthetic construct
  source 1..23: mol_type = other RNA
tgcgggtcttgctgggtgtggcc

SEQ ID NO: 65719 - RNA, 23 nt, synthetic construct
  source 1..23: mol_type = other RNA
ctctgaccaggcacactggggct

SEQ ID NO: 65720 - RNA, 23 nt, synthetic construct
  source 1..23: mol_type = other RNA
ccgccagagggccccggcatggg

SEQ ID NO: 65721 - RNA, 23 nt, synthetic construct
  source 1..23: mol_type = other RNA
cccgccagagggccccggcatgg

SEQ ID NO: 65722 - RNA, 23 nt, synthetic construct
  source 1..23: mol_type = other RNA
ccccgccagagggccccggcatg

SEQ ID NO: 65723 - RNA, 23 nt, synthetic construct
  source 1..23: mol_type = other RNA
gccaaagtccaggctgcattcca

SEQ ID NO: 65724 - RNA, 23 nt, synthetic construct
  source 1..23: mol_type = other RNA
ggccaaagtccaggctgcattcc

SEQ ID NO: 65725 - RNA, 23 nt, synthetic construct
  source 1..23: mol_type = other RNA
gggtggccgtggatccagtggac

SEQ ID NO: 65726 - RNA, 23 nt, synthetic construct
  source 1..23: mol_type = other RNA
ggggtggccgtggatccagtgga

SEQ ID NO: 65727 - RNA, 23 nt, synthetic construct
  source 1..23: mol_type = other RNA
cggggtggccgtggatccagtgg

SEQ ID NO: 65728 - RNA, 23 nt, synthetic construct
  source 1..23: mol_type = other RNA
ctggggtggaggacggggtggcc

SEQ ID NO: 65729 - RNA, 23 nt, synthetic construct
  source 1..23: mol_type = other RNA
cagcagttgcctgggtggaggag

SEQ ID NO: 65730 - RNA, 23 nt, synthetic construct
  source 1..23: mol_type = other RNA
aggaggaggggatggctgtaaag

SEQ ID NO: 65731 - RNA, 23 nt, synthetic construct
  source 1..23: mol_type = other RNA
gacagtctctggagtggaggagg

SEQ ID NO: 65732 - RNA, 23 nt, synthetic construct
  source 1..23: mol_type = other RNA
ttgtgggtgtggtggttgtgctg

SEQ ID NO: 65733 - RNA, 23 nt, synthetic construct
  source 1..23: mol_type = other RNA
tggtccccgggatggaggagggg

SEQ ID NO: 65734 - RNA, 23 nt, synthetic construct
  source 1..23: mol_type = other RNA
gtggtggtggtcagcactgtggg

SEQ ID NO: 65735 - RNA, 23 nt, synthetic construct
  source 1..23: mol_type = other RNA
tggccacagttgtggtggtggtg

SEQ ID NO: 65736 - RNA, 23 nt, synthetic construct
  source 1..23: mol_type = other RNA
accactggtctgtgtgctagagg

SEQ ID NO: 65737 - RNA, 23 nt, synthetic construct
  source 1..23: mol_type = other RNA
gtggagccggtggccgtgatcgt

SEQ ID NO: 65738 - RNA, 23 nt, synthetic construct
  source 1..23: mol_type = other RNA
gtggaaggctctgtgatgtgggt

SEQ ID NO: 65739 - RNA, 23 nt, synthetic construct
  source 1..23: mol_type = other RNA
gggtgagggctggacagggctgg

SEQ ID NO: 65740 - RNA, 23 nt, synthetic construct
  source 1..23: mol_type = other RNA
tgcgggtcttgctgggtgtggcc

SEQ ID NO: 65741 - RNA, 23 nt, synthetic construct
  source 1..23: mol_type = other RNA
ctctgaccaggcacactggggct

SEQ ID NO: 65742 - RNA, 23 nt, synthetic construct
  source 1..23: mol_type = other RNA
ccgccagagggccccggcatggg

SEQ ID NO: 65743 - RNA, 23 nt, synthetic construct
  source 1..23: mol_type = other RNA
cccgccagagggccccggcatgg

SEQ ID NO: 65744 - RNA, 23 nt, synthetic construct
  source 1..23: mol_type = other RNA
ccccgccagagggccccggcatg

SEQ ID NO: 65745 - RNA, 23 nt, synthetic construct
  source 1..23: mol_type = other RNA
gccaaagtccaggctgcattcca

SEQ ID NO: 65746 - RNA, 23 nt, synthetic construct
  source 1..23: mol_type = other RNA
ggccaaagtccaggctgcattcc

SEQ ID NO: 65747 - RNA, 23 nt, synthetic construct
  source 1..23: mol_type = other RNA
cccggggtggaggacgggatggc

SEQ ID NO: 65748 - RNA, 23 nt, synthetic construct
  source 1..23: mol_type = other RNA
tcccggggtggaggacgggatgg

SEQ ID NO: 65749 - RNA, 23 nt, synthetic construct
  source 1..23: mol_type = other RNA
gtggtggccgtgctggtcagcac

SEQ ID NO: 65750 - RNA, 23 nt, synthetic construct
  source 1..23: mol_type = other RNA
gctgtggatttggtggctgtgct

SEQ ID NO: 65751 - RNA, 23 nt, synthetic construct
  source 1..23: mol_type = other RNA
aggaggggatgggtgtaaagctg

SEQ ID NO: 65752 - RNA, 23 nt, synthetic construct
  source 1..23: mol_type = other RNA
gggtgaaggaggggatgggtgta

SEQ ID NO: 65753 - RNA, 23 nt, synthetic construct
  source 1..23: mol_type = other RNA
gagggtcccggtggtcccaaggg

SEQ ID NO: 65754 - RNA, 23 nt, synthetic construct
  source 1..23: mol_type = other RNA
gttctgggagggtcccggtggtc

SEQ ID NO: 65755 - RNA, 23 nt, synthetic construct
  source 1..23: mol_type = other RNA
tggaggaggggtggattgtggac

SEQ ID NO: 65756 - RNA, 23 nt, synthetic construct
  source 1..23: mol_type = other RNA
ggagtggaggaggggtggattgt

SEQ ID NO: 65757 - RNA, 23 nt, synthetic construct
  source 1..23: mol_type = other RNA
cagcactgtggaggtgtgggtgg

SEQ ID NO: 65758 - RNA, 23 nt, synthetic construct
  source 1..23: mol_type = other RNA
ggccgtggggccagtggctgcag

SEQ ID NO: 65759 - RNA, 23 nt, synthetic construct
  source 1..23: mol_type = other RNA
ctggggtggaggacggggtggcc

SEQ ID NO: 65760 - RNA, 23 nt, synthetic construct
  source 1..23: mol_type = other RNA
gtggtggccgtgctggtcagcac

SEQ ID NO: 65761 - RNA, 23 nt, synthetic construct
  source 1..23: mol_type = other RNA
gtggctctggagctgatgactgt

SEQ ID NO: 65762 - RNA, 23 nt, synthetic construct
  source 1..23: mol_type = other RNA
ctgtaacgctggtagctgtgggt

SEQ ID NO: 65763 - RNA, 23 nt, synthetic construct
  source 1..23: mol_type = other RNA
agtagaggagggtgtggctgtgg

SEQ ID NO: 65764 - RNA, 23 nt, synthetic construct
  source 1..23: mol_type = other RNA
ttgtgggtgtggtggttgtgctg

SEQ ID NO: 65765 - RNA, 23 nt, synthetic construct
  source 1..23: mol_type = other RNA
tggtccccgggatggaggagggg

SEQ ID NO: 65766 - RNA, 23 nt, synthetic construct
  source 1..23: mol_type = other RNA
gtggtggtggtcagcactgtggc

SEQ ID NO: 65767 - RNA, 23 nt, synthetic construct
  source 1..23: mol_type = other RNA
tggccacagttgtggtggtggtg

SEQ ID NO: 65768 - RNA, 23 nt, synthetic construct
  source 1..23: mol_type = other RNA
accactggtctgtgtgctagagg

SEQ ID NO: 65769 - RNA, 23 nt, synthetic construct
  source 1..23: mol_type = other RNA
gtggaaggctctgtgatgtgggt

SEQ ID NO: 65770 - RNA, 23 nt, synthetic construct
  source 1..23: mol_type = other RNA
tgctggggtgtgggaagtcaccg

SEQ ID NO: 65771 - RNA, 23 nt, synthetic construct
  source 1..23: mol_type = other RNA
gtgctgggtggtactggtggttg

SEQ ID NO: 65772 - RNA, 23 nt, synthetic construct
  source 1..23: mol_type = other RNA
agtgctgggtggtactggtggtt

SEQ ID NO: 65773 - RNA, 23 nt, synthetic construct
  source 1..23: mol_type = other RNA
gggtgagggctggacagggctgg

SEQ ID NO: 65774 - RNA, 23 nt, synthetic construct
  source 1..23: mol_type = other RNA
tgcgggtcttgctgggtgtggct

SEQ ID NO: 65775 - RNA, 23 nt, synthetic construct
  source 1..23: mol_type = other RNA
ctctgaccaggcacactggggct

SEQ ID NO: 65776 - RNA, 23 nt, synthetic construct
  source 1..23: mol_type = other RNA
ccgccagagggccccggcatggg

SEQ ID NO: 65777 - RNA, 23 nt, synthetic construct
  source 1..23: mol_type = other RNA
cccgccagagggccccggcatgg

SEQ ID NO: 65778 - RNA, 23 nt, synthetic construct
  source 1..23: mol_type = other RNA
ccccgccagagggccccggcatg

SEQ ID NO: 65779 - RNA, 23 nt, synthetic construct
  source 1..23: mol_type = other RNA
gccaaagtccaggctgcattcca

SEQ ID NO: 65780 - RNA, 23 nt, synthetic construct
  source 1..23: mol_type = other RNA
ggccaaagtccaggctgcattcc

SEQ ID NO: 65781 - RNA, 23 nt, synthetic construct
  source 1..23: mol_type = other RNA
gtcagctttgtgaggatccaggt

SEQ ID NO: 65782 - RNA, 23 nt, synthetic construct
  source 1..23: mol_type = other RNA
ggtcagctttgtgaggatccagg

SEQ ID NO: 65783 - RNA, 23 nt, synthetic construct
  source 1..23: mol_type = other RNA
gggtggccgtggatccagtggac

SEQ ID NO: 65784 - RNA, 23 nt, synthetic construct
  source 1..23: mol_type = other RNA
ggggtggccgtggatccagtgga

SEQ ID NO: 65785 - RNA, 23 nt, synthetic construct
  source 1..23: mol_type = other RNA
cggggtggccgtggatccagtgg

SEQ ID NO: 65786 - RNA, 23 nt, synthetic construct
  source 1..23: mol_type = other RNA
ctggggtggaggacggggtggcc

SEQ ID NO: 65787 - RNA, 23 nt, synthetic construct
  source 1..23: mol_type = other RNA
cagcagttgcctgggtggaggag

SEQ ID NO: 65788 - RNA, 23 nt, synthetic construct
  source 1..23: mol_type = other RNA
aggaggaggggatggctgtaaag

SEQ ID NO: 65789 - RNA, 23 nt, synthetic construct
  source 1..23: mol_type = other RNA
ggtgtgggcagtctctggagtgg

SEQ ID NO: 65790 - RNA, 23 nt, synthetic construct
  source 1..23: mol_type = other RNA
aagcactgtggaggtgtgggcag

SEQ ID NO: 65791 - RNA, 23 nt, synthetic construct
  source 1..23: mol_type = other RNA
ttgtgggtgtggtggttgtgctg

SEQ ID NO: 65792 - RNA, 23 nt, synthetic construct
  source 1..23: mol_type = other RNA
ggacggaggagggggtcaccgtg

SEQ ID NO: 65793 - RNA, 23 nt, synthetic construct
  source 1..23: mol_type = other RNA
gtggtggtggtcagcactgtggg

SEQ ID NO: 65794 - RNA, 23 nt, synthetic construct
  source 1..23: mol_type = other RNA
tggccacagttgtggtggtggtg

SEQ ID NO: 65795 - RNA, 23 nt, synthetic construct
  source 1..23: mol_type = other RNA
accactggtctgtgtgctagagg

SEQ ID NO: 65796 - RNA, 23 nt, synthetic construct
  source 1..23: mol_type = other RNA
gtggagccggtggccgtgatcgt

SEQ ID NO: 65797 - RNA, 23 nt, synthetic construct
  source 1..23: mol_type = other RNA
gtggaaggctctgtgatgtgggt

SEQ ID NO: 65798 - RNA, 23 nt, synthetic construct
  source 1..23: mol_type = other RNA
gggtgagggctggacagggctgg

SEQ ID NO: 65799 - RNA, 23 nt, synthetic construct
  source 1..23: mol_type = other RNA
gggtggtcgtccctggggaaggg

SEQ ID NO: 65800 - RNA, 23 nt, synthetic construct
  source 1..23: mol_type = other RNA
tgcgggtcttgctgggtgtggcc

SEQ ID NO: 65801 - RNA, 23 nt, synthetic construct
  source 1..23: mol_type = other RNA
ctctgaccaggcacactggggct

SEQ ID NO: 65802 - RNA, 23 nt, synthetic construct
  source 1..23: mol_type = other RNA
ccgccagagggccccggcatggg

SEQ ID NO: 65803 - RNA, 23 nt, synthetic construct
  source 1..23: mol_type = other RNA
cccgccagagggccccggcatgg

SEQ ID NO: 65804 - RNA, 23 nt, synthetic construct
  source 1..23: mol_type = other RNA
ccccgccagagggccccggcatg

SEQ ID NO: 65805 - RNA, 23 nt, synthetic construct
  source 1..23: mol_type = other RNA
gccaaagtccaggctgcattcca

SEQ ID NO: 65806 - RNA, 23 nt, synthetic construct
  source 1..23: mol_type = other RNA
ggccaaagtccaggctgcattcc

SEQ ID NO: 65807 - RNA, 23 nt, synthetic construct
  source 1..23: mol_type = other RNA
ccgtggatccagtggatgcagtc

SEQ ID NO: 65808 - RNA, 23 nt, synthetic construct
  source 1..23: mol_type = other RNA
gggtggccgtggatccagtggat

SEQ ID NO: 65809 - RNA, 23 nt, synthetic construct
  source 1..23: mol_type = other RNA
ggggtggccgtggatccagtgga

SEQ ID NO: 65810 - RNA, 23 nt, synthetic construct
  source 1..23: mol_type = other RNA
cggggtggccgtggatccagtgg

SEQ ID NO: 65811 - RNA, 23 nt, synthetic construct
  source 1..23: mol_type = other RNA
ccggggtggaggacggggtggcc

SEQ ID NO: 65812 - RNA, 23 nt, synthetic construct
  source 1..23: mol_type = other RNA
gctgtggatttggtggctgtgct

SEQ ID NO: 65813 - RNA, 23 nt, synthetic construct
  source 1..23: mol_type = other RNA
gtgtaacgctggtagctgtggat

SEQ ID NO: 65814 - RNA, 23 nt, synthetic construct
  source 1..23: mol_type = other RNA
gtggtcccaagggtggaggaggg

SEQ ID NO: 65815 - RNA, 23 nt, synthetic construct
  source 1..23: mol_type = other RNA
gagggtcccggtggtcccaaggg

SEQ ID NO: 65816 - RNA, 23 nt, synthetic construct
  source 1..23: mol_type = other RNA
gttctgggagggtcccggtggtc

SEQ ID NO: 65817 - RNA, 23 nt, synthetic construct
  source 1..23: mol_type = other RNA
tggaggaggggtggattgtggac

SEQ ID NO: 65818 - RNA, 23 nt, synthetic construct
  source 1..23: mol_type = other RNA
ggagtggaggaggggtggattgt

SEQ ID NO: 65819 - RNA, 23 nt, synthetic construct
  source 1..23: mol_type = other RNA
cagcactgtggaggtgtgggtgg

SEQ ID NO: 65820 - RNA, 23 nt, synthetic construct
  source 1..23: mol_type = other RNA
ggccgtggggccagtggctgcag

SEQ ID NO: 65821 - RNA, 23 nt, synthetic construct
  source 1..23: mol_type = other RNA
ctggggtggaggacggggtggcc

SEQ ID NO: 65822 - RNA, 23 nt, synthetic construct
  source 1..23: mol_type = other RNA
gggtggccgtggatccagtggac

SEQ ID NO: 65823 - RNA, 23 nt, synthetic construct
  source 1..23: mol_type = other RNA
ggggtggccgtggatccagtgga

SEQ ID NO: 65824 - RNA, 23 nt, synthetic construct
  source 1..23: mol_type = other RNA
cggggtggccgtggatccagtgg

SEQ ID NO: 65825 - RNA, 23 nt, synthetic construct
  source 1..23: mol_type = other RNA
ctggggtggaggacggggtggcc

SEQ ID NO: 65826 - RNA, 23 nt, synthetic construct
  source 1..23: mol_type = other RNA
cagcagttgcctgggtggaggag

SEQ ID NO: 65827 - RNA, 23 nt, synthetic construct
  source 1..23: mol_type = other RNA
aggaggaggggatggctgtaaag

SEQ ID NO: 65828 - RNA, 23 nt, synthetic construct
  source 1..23: mol_type = other RNA
gacagtctctggagtggaggagg

SEQ ID NO: 65829 - RNA, 23 nt, synthetic construct
  source 1..23: mol_type = other RNA
ttgtgggtgtggtggttgtgctg

SEQ ID NO: 65830 - RNA, 23 nt, synthetic construct
  source 1..23: mol_type = other RNA
tggtccccgggatggaggagggg

SEQ ID NO: 65831 - RNA, 23 nt, synthetic construct
  source 1..23: mol_type = other RNA
tggccacagttgtggtggtggtg

SEQ ID NO: 65832 - RNA, 23 nt, synthetic construct
  source 1..23: mol_type = other RNA
accactggtctgtgtgctagagg

SEQ ID NO: 65833 - RNA, 23 nt, synthetic construct
  source 1..23: mol_type = other RNA
gtggagccggtggccgtgatcgt

SEQ ID NO: 65834 - RNA, 23 nt, synthetic construct
  source 1..23: mol_type = other RNA
gtggtggccgtgctggtcagcac

SEQ ID NO: 65835 - RNA, 23 nt, synthetic construct
  source 1..23: mol_type = other RNA
tggtggctgcgggtgtggtggcc

SEQ ID NO: 65836 - RNA, 23 nt, synthetic construct
  source 1..23: mol_type = other RNA
ggagctggtggctgcgggtgtgg

SEQ ID NO: 65837 - RNA, 23 nt, synthetic construct
  source 1..23: mol_type = other RNA
ctgtggattttgtggctgtgctt

SEQ ID NO: 65838 - RNA, 23 nt, synthetic construct
  source 1..23: mol_type = other RNA
aggaggggatgggtgtaaagctg

SEQ ID NO: 65839 - RNA, 23 nt, synthetic construct
  source 1..23: mol_type = other RNA
cagcactgtggaggtgtgggtgg

SEQ ID NO: 65840 - RNA, 23 nt, synthetic construct
  source 1..23: mol_type = other RNA
cagttgtagtggctgttgtggtc

SEQ ID NO: 65841 - RNA, 23 nt, synthetic construct
  source 1..23: mol_type = other RNA
gcagttgtagtggctgttgtggt

SEQ ID NO: 65842 - RNA, 23 nt, synthetic construct
  source 1..23: mol_type = other RNA
gggtggccgtggatccagtggct

SEQ ID NO: 65843 - RNA, 23 nt, synthetic construct
  source 1..23: mol_type = other RNA
agggtggccgtggatccagtggc

SEQ ID NO: 65844 - RNA, 23 nt, synthetic construct
  source 1..23: mol_type = other RNA
tggccatggtggtcaccactttg

SEQ ID NO: 65845 - RNA, 23 nt, synthetic construct
  source 1..23: mol_type = other RNA
gcaggggtgcgggtggtccccac

SEQ ID NO: 65846 - RNA, 23 nt, synthetic construct
  source 1..23: mol_type = other RNA
aggtgacgttggccacaggcttt

SEQ ID NO: 65847 - RNA, 23 nt, synthetic construct
  source 1..23: mol_type = other RNA
cagcggcagtggcagaggccgtg

SEQ ID NO: 65848 - RNA, 23 nt, synthetic construct
  source 1..23: mol_type = other RNA
gccctcctccttcccatgcacca

SEQ ID NO: 65849 - RNA, 23 nt, synthetic construct
  source 1..23: mol_type = other RNA
ggtggtccccagcacagacacaa

SEQ ID NO: 65850 - RNA, 23 nt, synthetic construct
  source 1..23: mol_type = other RNA
agacttggccattgaaggtgacg

SEQ ID NO: 65851 - RNA, 23 nt, synthetic construct
  source 1..23: mol_type = other RNA
gcctggaagacttggccattgaa

SEQ ID NO: 65852 - RNA, 23 nt, synthetic construct
  source 1..23: mol_type = other RNA
tgctgtcggggaccagccacgtc

SEQ ID NO: 65853 - RNA, 23 nt, synthetic construct
  source 1..23: mol_type = other RNA
gcagccatcctttctgctgtcgg

SEQ ID NO: 65854 - RNA, 23 nt, synthetic construct
  source 1..23: mol_type = other RNA
gcggctgtggtgggcatggggtg

SEQ ID NO: 65855 - RNA, 23 nt, synthetic construct
  source 1..23: mol_type = other RNA
gatgcaggcgttgaagaatgggc

SEQ ID NO: 65856 - RNA, 23 nt, synthetic construct
  source 1..23: mol_type = other RNA
ccacgcaggggcaggcctgcacg

SEQ ID NO: 65857 - RNA, 23 nt, synthetic construct
  source 1..23: mol_type = other RNA
ggggcaggtggttgtgttgcaca

SEQ ID NO: 65858 - RNA, 23 nt, synthetic construct
  source 1..23: mol_type = other RNA
cagatggactcctgccctggcgg

SEQ ID NO: 65859 - RNA, 23 nt, synthetic construct
  source 1..23: mol_type = other RNA
tacgaacacagctgaggtctgca

SEQ ID NO: 65860 - RNA, 23 nt, synthetic construct
  source 1..23: mol_type = other RNA
ccagagaggcaggtacacatgtg

SEQ ID NO: 65861 - RNA, 23 nt, synthetic construct
  source 1..23: mol_type = other RNA
tattgttgcaggcatcctcctga

SEQ ID NO: 65862 - RNA, 23 nt, synthetic construct
  source 1..23: mol_type = other RNA
ctgcccggccactctcttgtact

SEQ ID NO: 65863 - RNA, 23 nt, synthetic construct
  source 1..23: mol_type = other RNA
cccacagcactgcccggccactc

SEQ ID NO: 65864 - RNA, 23 nt, synthetic construct
  source 1..23: mol_type = other RNA
ggctgtggggtcagcaaatggac

SEQ ID NO: 65865 - RNA, 23 nt, synthetic construct
  source 1..23: mol_type = other RNA
gtggcctcctgggccgggaagcc

SEQ ID NO: 65866 - RNA, 23 nt, synthetic construct
  source 1..23: mol_type = other RNA
aacgttctcagacagcagtggcc

SEQ ID NO: 65867 - RNA, 23 nt, synthetic construct
  source 1..23: mol_type = other RNA
cgtgctgcgcgggcgctccggcc

SEQ ID NO: 65868 - RNA, 23 nt, synthetic construct
  source 1..23: mol_type = other RNA
agcagctggccttgcctggacca

SEQ ID NO: 65869 - RNA, 23 nt, synthetic construct
  source 1..23: mol_type = other RNA
ggtttatttgcaaaactgggctg

SEQ ID NO: 65870 - RNA, 23 nt, synthetic construct
  source 1..23: mol_type = other RNA
atgctcagggtttatttgcaaaa

SEQ ID NO: 65871 - RNA, 23 nt, synthetic construct
  source 1..23: mol_type = other RNA
aatgctcagggtttatttgcaaa

SEQ ID NO: 65872 - RNA, 23 nt, synthetic construct
  source 1..23: mol_type = other RNA
gtgcagttgtccacatggctgtt

SEQ ID NO: 65873 - RNA, 23 nt, synthetic construct
  source 1..23: mol_type = other RNA
cccagagtggaggaggcggtggc

SEQ ID NO: 65874 - RNA, 23 nt, synthetic construct
  source 1..23: mol_type = other RNA
ggggctttgggatgctgacccct

SEQ ID NO: 65875 - RNA, 23 nt, synthetic construct
  source 1..23: mol_type = other RNA
agggggtggccacagagccggtg

SEQ ID NO: 65876 - RNA, 23 nt, synthetic construct
  source 1..23: mol_type = other RNA
agggggtggccacagagccggtg

SEQ ID NO: 65877 - RNA, 23 nt, synthetic construct
  source 1..23: mol_type = other RNA
agggggtggccacagagccggtg

SEQ ID NO: 65878 - RNA, 23 nt, synthetic construct
  source 1..23: mol_type = other RNA
agggggtggccacagagccggtg

SEQ ID NO: 65879 - RNA, 23 nt, synthetic construct
  source 1..23: mol_type = other RNA
agggggtggccacagagccggtg

SEQ ID NO: 65880 - RNA, 23 nt, synthetic construct
  source 1..23: mol_type = other RNA
gggtgggggtgggtgtgctagac

SEQ ID NO: 65881 - RNA, 23 nt, synthetic construct
  source 1..23: mol_type = other RNA
agcactttgggagggggagctgt

SEQ ID NO: 65882 - RNA, 23 nt, synthetic construct
  source 1..23: mol_type = other RNA
gagggggtggccacagagccggt

SEQ ID NO: 65883 - RNA, 23 nt, synthetic construct
  source 1..23: mol_type = other RNA
gagggggtggccacagagccggt

SEQ ID NO: 65884 - RNA, 23 nt, synthetic construct
  source 1..23: mol_type = other RNA
agcactttgggagggggagctgt

SEQ ID NO: 65885 - RNA, 23 nt, synthetic construct
  source 1..23: mol_type = other RNA
gagggggtggccacagagccggt

SEQ ID NO: 65886 - RNA, 23 nt, synthetic construct
  source 1..23: mol_type = other RNA
gagggggtggccacagagccggt

SEQ ID NO: 65887 - RNA, 23 nt, synthetic construct
  source 1..23: mol_type = other RNA
agcactttgggagggggagctgt

SEQ ID NO: 65888 - RNA, 23 nt, synthetic construct
  source 1..23: mol_type = other RNA
gagggggtggccacagagccggt

SEQ ID NO: 65889 - RNA, 23 nt, synthetic construct
  source 1..23: mol_type = other RNA
gttgaagtcctcgtaggcggcgc

SEQ ID NO: 65890 - RNA, 23 nt, synthetic construct
  source 1..23: mol_type = other RNA
gtgcagaaacactcgcagtcgcc

SEQ ID NO: 65891 - RNA, 23 nt, synthetic construct
  source 1..23: mol_type = other RNA
gctgcacaccctgtgcttttctg

SEQ ID NO: 65892 - RNA, 23 nt, synthetic construct
  source 1..23: mol_type = other RNA
ggctgcacaccctgtgcttttct

SEQ ID NO: 65893 - RNA, 23 nt, synthetic construct
  source 1..23: mol_type = other RNA
gaagtggctttggaactggtggc

SEQ ID NO: 65894 - RNA, 23 nt, synthetic construct
  source 1..23: mol_type = other RNA
gaagtggctttggaactggtggc

SEQ ID NO: 65895 - RNA, 23 nt, synthetic construct
  source 1..23: mol_type = other RNA
gggcactcctgggcgggcacaca

SEQ ID NO: 65896 - RNA, 23 nt, synthetic construct
  source 1..23: mol_type = other RNA
ggtggccctggtgtggcccgggg

SEQ ID NO: 65897 - RNA, 23 nt, synthetic construct
  source 1..23: mol_type = other RNA
tggaccagcctgtctgccccagc

SEQ ID NO: 65898 - RNA, 23 nt, synthetic construct
  source 1..23: mol_type = other RNA
tagacaccggggctgcggggctg

SEQ ID NO: 65899 - RNA, 23 nt, synthetic construct
  source 1..23: mol_type = other RNA
ggtggtggtgttagtcaaggggc

SEQ ID NO: 65900 - RNA, 23 nt, synthetic construct
  source 1..23: mol_type = other RNA
ggtgagggctggaaagggctgga

SEQ ID NO: 65901 - RNA, 23 nt, synthetic construct
  source 1..23: mol_type = other RNA
ttcaaacgtctcaaagtctccgc

SEQ ID NO: 65902 - RNA, 23 nt, synthetic construct
  source 1..23: mol_type = other RNA
ctcctccagcggcatgtcgggaa

SEQ ID NO: 65903 - RNA, 23 nt, synthetic construct
  source 1..23: mol_type = other RNA
ctggtggtggtgttagtcaaggg

SEQ ID NO: 65904 - RNA, 23 nt, synthetic construct
  source 1..23: mol_type = other RNA
ggtcttgtagtggaagtcacccc

SEQ ID NO: 65905 - RNA, 23 nt, synthetic construct
  source 1..23: mol_type = other RNA
ccacacagtggtcctcgcagagc

SEQ ID NO: 65906 - RNA, 23 nt, synthetic construct
  source 1..23: mol_type = other RNA
aagcggtgctggctgtgcctgtc

SEQ ID NO: 65907 - RNA, 23 nt, synthetic construct
  source 1..23: mol_type = other RNA
ccctggctggtggtggtgttagt

SEQ ID NO: 65908 - RNA, 23 nt, synthetic construct
  source 1..23: mol_type = other RNA
ggggtggctgtgaagcccgtggt

SEQ ID NO: 65909 - RNA, 23 nt, synthetic construct
  source 1..23: mol_type = other RNA
gggggtggctgtgaagcccgtgg

SEQ ID NO: 65910 - RNA, 23 nt, synthetic construct
  source 1..23: mol_type = other RNA
gggtgagggctggaaagggctgg

SEQ ID NO: 65911 - RNA, 23 nt, synthetic construct
  source 1..23: mol_type = other RNA
ggggtggctgtgaagcccgtggt

SEQ ID NO: 65912 - RNA, 23 nt, synthetic construct
  source 1..23: mol_type = other RNA
gggggtggctgtgaagcccgtgg

SEQ ID NO: 65913 - RNA, 23 nt, synthetic construct
  source 1..23: mol_type = other RNA
ggggtggctgtgaagcccgtggt

SEQ ID NO: 65914 - RNA, 23 nt, synthetic construct
  source 1..23: mol_type = other RNA
gggggtggctgtgaagcccgtgg

SEQ ID NO: 65915 - RNA, 23 nt, synthetic construct
  source 1..23: mol_type = other RNA
ggggtggctgtgaagcccgtggt

SEQ ID NO: 65916 - RNA, 23 nt, synthetic construct
  source 1..23: mol_type = other RNA
gggggtggctgtgaagcccgtgg

SEQ ID NO: 65917 - RNA, 23 nt, synthetic construct
  source 1..23: mol_type = other RNA
tcacgcccagggcaggaatgtcc

SEQ ID NO: 65918 - RNA, 23 nt, synthetic construct
  source 1..23: mol_type = other RNA
ccacaggctctcccagggtagga

SEQ ID NO: 65919 - RNA, 23 nt, synthetic construct
  source 1..23: mol_type = other RNA
tcgtcactgcagcagaggacccg

SEQ ID NO: 65920 - RNA, 23 nt, synthetic construct
  source 1..23: mol_type = other RNA
cattgtcgtctctgtcctgggcg

SEQ ID NO: 65921 - RNA, 23 nt, synthetic construct
  source 1..23: mol_type = other RNA
tcgtagtggccgtggtggtcagt

SEQ ID NO: 65922 - RNA, 23 nt, synthetic construct
  source 1..23: mol_type = other RNA
tcgtagtggccgtggtggtcagt

SEQ ID NO: 65923 - RNA, 23 nt, synthetic construct
  source 1..23: mol_type = other RNA
tcgtagtggccgtggtggtcagt

SEQ ID NO: 65924 - RNA, 23 nt, synthetic construct
  source 1..23: mol_type = other RNA
tcgtagtggccgtggtggtcagt

SEQ ID NO: 65925 - RNA, 23 nt, synthetic construct
  source 1..23: mol_type = other RNA
tggattgtggacatggtggacat

SEQ ID NO: 65926 - RNA, 23 nt, synthetic construct
  source 1..23: mol_type = other RNA
gaaccggtgggcaccatcacggt

SEQ ID NO: 65927 - RNA, 23 nt, synthetic construct
  source 1..23: mol_type = other RNA
gctgattgcacactgcgtagaaa

SEQ ID NO: 65928 - RNA, 23 nt, synthetic construct
  source 1..23: mol_type = other RNA
agtattgttgcaggcatcctcct

SEQ ID NO: 65929 - RNA, 23 nt, synthetic construct
  source 1..23: mol_type = other RNA
cgctccccgggaaatttaggaaa

SEQ ID NO: 65930 - RNA, 23 nt, synthetic construct
  source 1..23: mol_type = other RNA
gcgtaagcctccaggctctggca

SEQ ID NO: 65931 - RNA, 23 nt, synthetic construct
  source 1..23: mol_type = other RNA
gcccgtgtgtggtggccgtggtg

SEQ ID NO: 65932 - RNA, 23 nt, synthetic construct
  source 1..23: mol_type = other RNA
gcccgtgtgtggtggccgtggtg

SEQ ID NO: 65933 - RNA, 23 nt, synthetic construct
  source 1..23: mol_type = other RNA
gcccgtgtgtggtggccgtggtg

SEQ ID NO: 65934 - RNA, 23 nt, synthetic construct
  source 1..23: mol_type = other RNA
gtggcagggacacataggcccgc

SEQ ID NO: 65935 - RNA, 23 nt, synthetic construct
  source 1..23: mol_type = other RNA
cctgccctggcgggcacacaggc

SEQ ID NO: 65936 - RNA, 23 nt, synthetic construct
  source 1..23: mol_type = other RNA
agtagtcctgggccaagatgtac

SEQ ID NO: 65937 - RNA, 23 nt, synthetic construct
  source 1..23: mol_type = other RNA
cgtcctggtagctgtaggtcctg

SEQ ID NO: 65938 - RNA, 23 nt, synthetic construct
  source 1..23: mol_type = other RNA
tcccaggagttgaggaggggttg

SEQ ID NO: 65939 - RNA, 23 nt, synthetic construct
  source 1..23: mol_type = other RNA
ggagcacggagcgcggggtgcca

SEQ ID NO: 65940 - RNA, 23 nt, synthetic construct
  source 1..23: mol_type = other RNA
gtggtggtcagtgatgggggagt

SEQ ID NO: 65941 - RNA, 23 nt, synthetic construct
  source 1..23: mol_type = other RNA
gtggtggtcagtgatgggggagt

SEQ ID NO: 65942 - RNA, 23 nt, synthetic construct
  source 1..23: mol_type = other RNA
gtggtggtcagtgatgggggagt

SEQ ID NO: 65943 - RNA, 23 nt, synthetic construct
  source 1..23: mol_type = other RNA
gtggtggtcagtgatgggggagt

SEQ ID NO: 65944 - RNA, 23 nt, synthetic construct
  source 1..23: mol_type = other RNA
cgggtgggcgaggacgtcggggc

SEQ ID NO: 65945 - RNA, 23 nt, synthetic construct
  source 1..23: mol_type = other RNA
cccgcgtcgtggcaggcctgggc

SEQ ID NO: 65946 - RNA, 23 nt, synthetic construct
  source 1..23: mol_type = other RNA
cagaacaaggggcaggtgtccgg

SEQ ID NO: 65947 - RNA, 23 nt, synthetic construct
  source 1..23: mol_type = other RNA
gtcgggaagctgcgccgcccggc

SEQ ID NO: 65948 - RNA, 23 nt, synthetic construct
  source 1..23: mol_type = other RNA
gttgtcccaggagttgaggaggg

SEQ ID NO: 65949 - RNA, 23 nt, synthetic construct
  source 1..23: mol_type = other RNA
ctcagggtttatttgcaaaactg

SEQ ID NO: 65950 - RNA, 23 nt, synthetic construct
  source 1..23: mol_type = other RNA
gggtgggcgaggacgtcggggca

SEQ ID NO: 65951 - RNA, 23 nt, synthetic construct
  source 1..23: mol_type = other RNA
ggtcctggcactgccatagcccc

SEQ ID NO: 65952 - RNA, 23 nt, synthetic construct
  source 1..23: mol_type = other RNA
gtagtcctgggccaagatgtact

SEQ ID NO: 65953 - RNA, 23 nt, synthetic construct
  source 1..23: mol_type = other RNA
tgcccctggtgtggcccggggtg

SEQ ID NO: 65954 - RNA, 23 nt, synthetic construct
  source 1..23: mol_type = other RNA
tggggacaggtagtattgttgca

SEQ ID NO: 65955 - RNA, 23 nt, synthetic construct
  source 1..23: mol_type = other RNA
agttggcactttggtagtgtgag

SEQ ID NO: 65956 - RNA, 23 nt, synthetic construct
  source 1..23: mol_type = other RNA
aggtggtgttgaaggaggtgccc

SEQ ID NO: 65957 - RNA, 23 nt, synthetic construct
  source 1..23: mol_type = other RNA
agccactctgaccaggcacactg

SEQ ID NO: 65958 - RNA, 23 nt, synthetic construct
  source 1..23: mol_type = other RNA
agccactctgaccaggcacactg

SEQ ID NO: 65959 - RNA, 23 nt, synthetic construct
  source 1..23: mol_type = other RNA
tggaggtgcccctggtgtggccc

SEQ ID NO: 65960 - RNA, 23 nt, synthetic construct
  source 1..23: mol_type = other RNA
agccactctgaccaggcacactg

SEQ ID NO: 65961 - RNA, 23 nt, synthetic construct
  source 1..23: mol_type = other RNA
agccactctgaccaggcacactg

SEQ ID NO: 65962 - RNA, 23 nt, synthetic construct
  source 1..23: mol_type = other RNA
catggatctctctcatgaggaca

SEQ ID NO: 65963 - RNA, 23 nt, synthetic construct
  source 1..23: mol_type = other RNA
gtacgcagtgctgtccaccagtg

SEQ ID NO: 65964 - RNA, 23 nt, synthetic construct
  source 1..23: mol_type = other RNA
cttcccacccgtacatgaacaca

SEQ ID NO: 65965 - RNA, 23 nt, synthetic construct
  source 1..23: mol_type = other RNA
gaggggatggctgtaacgctggt

SEQ ID NO: 65966 - RNA, 23 nt, synthetic construct
  source 1..23: mol_type = other RNA
ccatgtccttgcaactggcggca

SEQ ID NO: 65967 - RNA, 23 nt, synthetic construct
  source 1..23: mol_type = other RNA
ggtgctgcatgttgagggggcag

SEQ ID NO: 65968 - RNA, 23 nt, synthetic construct
  source 1..23: mol_type = other RNA
aaagtccaggctgcattccacga

SEQ ID NO: 65969 - RNA, 23 nt, synthetic construct
  source 1..23: mol_type = other RNA
aaagtccaggctgcattccacga

SEQ ID NO: 65970 - RNA, 23 nt, synthetic construct
  source 1..23: mol_type = other RNA
aaagtccaggctgcattccacga

SEQ ID NO: 65971 - RNA, 23 nt, synthetic construct
  source 1..23: mol_type = other RNA
aaagtccaggctgcattccacga

SEQ ID NO: 65972 - RNA, 23 nt, synthetic construct
  source 1..23: mol_type = other RNA
ggctttggaactggtggctgtgg

SEQ ID NO: 65973 - RNA, 23 nt, synthetic construct
  source 1..23: mol_type = other RNA
ggctttggaactggtggctgtgg

SEQ ID NO: 65974 - RNA, 23 nt, synthetic construct
  source 1..23: mol_type = other RNA
ccagttccgcggctggccccccg

SEQ ID NO: 65975 - RNA, 23 nt, synthetic construct
  source 1..23: mol_type = other RNA
ctccgctgtggggacccttgcac

SEQ ID NO: 65976 - RNA, 23 nt, synthetic construct
  source 1..23: mol_type = other RNA
tttgggagggggagctgttctca

SEQ ID NO: 65977 - RNA, 23 nt, synthetic construct
  source 1..23: mol_type = other RNA
tgaacttccccacctgctcacgg

SEQ ID NO: 65978 - RNA, 23 nt, synthetic construct
  source 1..23: mol_type = other RNA
tgaacttccccacctgctcacgg

SEQ ID NO: 65979 - RNA, 23 nt, synthetic construct
  source 1..23: mol_type = other RNA
tttgggagggggagctgttcccg

SEQ ID NO: 65980 - RNA, 23 nt, synthetic construct
  source 1..23: mol_type = other RNA
tggagtagaggagggtgtggctg

SEQ ID NO: 65981 - RNA, 23 nt, synthetic construct
  source 1..23: mol_type = other RNA
tgaacttccccacctgctcacgg

SEQ ID NO: 65982 - RNA, 23 nt, synthetic construct
  source 1..23: mol_type = other RNA
gtggtcagctttgtgaggatcca

SEQ ID NO: 65983 - RNA, 23 nt, synthetic construct
  source 1..23: mol_type = other RNA
tgaacttccccacctgctcacgg

SEQ ID NO: 65984 - RNA, 23 nt, synthetic construct
  source 1..23: mol_type = other RNA
tttgggagggggagctgttcccg

SEQ ID NO: 65985 - RNA, 23 nt, synthetic construct
  source 1..23: mol_type = other RNA
catgtccttgcaactggcggcag

SEQ ID NO: 65986 - RNA, 23 nt, synthetic construct
  source 1..23: mol_type = other RNA
gaaccagtggccacagttgtggt

SEQ ID NO: 65987 - RNA, 23 nt, synthetic construct
  source 1..23: mol_type = other RNA
gaaccagtggccacagttgtggt

SEQ ID NO: 65988 - RNA, 23 nt, synthetic construct
  source 1..23: mol_type = other RNA
gaaccagtggccacagttgtggt

SEQ ID NO: 65989 - RNA, 23 nt, synthetic construct
  source 1..23: mol_type = other RNA
gaaccagtggccacagttgtggt

SEQ ID NO: 65990 - RNA, 23 nt, synthetic construct
  source 1..23: mol_type = other RNA
gaaccagtggccacagttgtggt

SEQ ID NO: 65991 - RNA, 23 nt, synthetic construct
  source 1..23: mol_type = other RNA
gtgttgtccctggagttgaggag

SEQ ID NO: 65992 - RNA, 23 nt, synthetic construct
  source 1..23: mol_type = other RNA
gtgttgtccctggagttgaggag

SEQ ID NO: 65993 - RNA, 23 nt, synthetic construct
  source 1..23: mol_type = other RNA
gtgttgtccctggagttgaggag

SEQ ID NO: 65994 - RNA, 23 nt, synthetic construct
  source 1..23: mol_type = other RNA
gccatgtccttgcaactggcggc

SEQ ID NO: 65995 - RNA, 23 nt, synthetic construct
  source 1..23: mol_type = other RNA
ctagggtgtgggaagtcaccgtg

SEQ ID NO: 65996 - RNA, 23 nt, synthetic construct
  source 1..23: mol_type = other RNA
ggaggagggcgtggccgtagagc

SEQ ID NO: 65997 - RNA, 23 nt, synthetic construct
  source 1..23: mol_type = other RNA
tgaggagggcgtggccgtagagc

SEQ ID NO: 65998 - RNA, 23 nt, synthetic construct
  source 1..23: mol_type = other RNA
tcccacctccggttcctgcaggt

SEQ ID NO: 65999 - RNA, 23 nt, synthetic construct
  source 1..23: mol_type = other RNA
cagggtgcggtggcagatgccct

SEQ ID NO: 66000 - RNA, 23 nt, synthetic construct
  source 1..23: mol_type = other RNA
cagctggacacatctgggcagga

SEQ ID NO: 66001 - RNA, 23 nt, synthetic construct
  source 1..23: mol_type = other RNA
tccgctgtggggacccttgcacc

SEQ ID NO: 66002 - RNA, 23 nt, synthetic construct
  source 1..23: mol_type = other RNA
ggtgtgggtggtctccggagtgg

SEQ ID NO: 66003 - RNA, 23 nt, synthetic construct
  source 1..23: mol_type = other RNA
ggtgtgggtggtctccggagtgg

SEQ ID NO: 66004 - RNA, 23 nt, synthetic construct
  source 1..23: mol_type = other RNA
gacatggtggccacgggtgtggt

SEQ ID NO: 66005 - RNA, 23 nt, synthetic construct
  source 1..23: mol_type = other RNA
ttctgagagggtggggactgctg

SEQ ID NO: 66006 - RNA, 23 nt, synthetic construct
  source 1..23: mol_type = other RNA
cacagagccggtggccctggttg

SEQ ID NO: 66007 - RNA, 23 nt, synthetic construct
  source 1..23: mol_type = other RNA
cacagagccggtggccctggttg

SEQ ID NO: 66008 - RNA, 23 nt, synthetic construct
  source 1..23: mol_type = other RNA
ggtctcagggtggtgaggactga

SEQ ID NO: 66009 - RNA, 23 nt, synthetic construct
  source 1..23: mol_type = other RNA
agagggatggcattgtcacagcc

SEQ ID NO: 66010 - RNA, 23 nt, synthetic construct
  source 1..23: mol_type = other RNA
gggaagggcgcctgggaaggttg

SEQ ID NO: 66011 - RNA, 23 nt, synthetic construct
  source 1..23: mol_type = other RNA
tgcaccacctctccaggagccag

SEQ ID NO: 66012 - RNA, 23 nt, synthetic construct
  source 1..23: mol_type = other RNA
ctcggcctgagaggtggacagct

SEQ ID NO: 66013 - RNA, 23 nt, synthetic construct
  source 1..23: mol_type = other RNA
cacagagccggtggccccggttg

SEQ ID NO: 66014 - RNA, 23 nt, synthetic construct
  source 1..23: mol_type = other RNA
ggaggacgggatggccgtggatc

SEQ ID NO: 66015 - RNA, 23 nt, synthetic construct
  source 1..23: mol_type = other RNA
tgccagcagttgcccgggtggag

SEQ ID NO: 66016 - RNA, 23 nt, synthetic construct
  source 1..23: mol_type = other RNA
gtccaggcggtgcccagggagga

SEQ ID NO: 66017 - RNA, 23 nt, synthetic construct
  source 1..23: mol_type = other RNA
cacagagccggtggccccggttg

SEQ ID NO: 66018 - RNA, 23 nt, synthetic construct
  source 1..23: mol_type = other RNA
gccgtggaattggtggcccttgt

SEQ ID NO: 66019 - RNA, 23 nt, synthetic construct
  source 1..23: mol_type = other RNA
ccgggggcacaaggttgtggcac

SEQ ID NO: 66020 - RNA, 23 nt, synthetic construct
  source 1..23: mol_type = other RNA
gaaggttgcaccaaccccgtaga

SEQ ID NO: 66021 - RNA, 23 nt, synthetic construct
  source 1..23: mol_type = other RNA
cacatgtggcagggaagggcgcc

SEQ ID NO: 66022 - RNA, 23 nt, synthetic construct
  source 1..23: mol_type = other RNA
ggacaggcggccgccttgcctgt

SEQ ID NO: 66023 - RNA, 23 nt, synthetic construct
  source 1..23: mol_type = other RNA
tgcgacctcagccctgagttacc

SEQ ID NO: 66024 - RNA, 23 nt, synthetic construct
  source 1..23: mol_type = other RNA
tacgcagtgctgtccaccagtgc

SEQ ID NO: 66025 - RNA, 23 nt, synthetic construct
  source 1..23: mol_type = other RNA
tggtgttgaaggaggtgcccggg

SEQ ID NO: 66026 - RNA, 23 nt, synthetic construct
  source 1..23: mol_type = other RNA
tgcaggtgtggtggcggtggtgg

SEQ ID NO: 66027 - RNA, 23 nt, synthetic construct
  source 1..23: mol_type = other RNA
tgcaggtgtggtggcggtggtgg

SEQ ID NO: 66028 - RNA, 23 nt, synthetic construct
  source 1..23: mol_type = other RNA
tgcaggtgtggtggcggtggtgg

SEQ ID NO: 66029 - RNA, 23 nt, synthetic construct
  source 1..23: mol_type = other RNA
tgcaggtgtggtggcggtggtgg

SEQ ID NO: 66030 - RNA, 23 nt, synthetic construct
  source 1..23: mol_type = other RNA
aggcatcctcctgacattgcacc

SEQ ID NO: 66031 - RNA, 23 nt, synthetic construct
  source 1..23: mol_type = other RNA
cgccgggttcagggggctcaggc

SEQ ID NO: 66032 - RNA, 23 nt, synthetic construct
  source 1..23: mol_type = other RNA
caccatgcaggtcgtagagtttc

SEQ ID NO: 66033 - RNA, 23 nt, synthetic construct
  source 1..23: mol_type = other RNA
gtacctggggccgagggggtgac

SEQ ID NO: 66034 - RNA, 23 nt, synthetic construct
  source 1..23: mol_type = other RNA
acgacctggcccaactcccccag

SEQ ID NO: 66035 - RNA, 23 nt, synthetic construct
  source 1..23: mol_type = other RNA
ggcctctgctgagtacttggacg

SEQ ID NO: 66036 - RNA, 23 nt, synthetic construct
  source 1..23: mol_type = other RNA
tccctccagtcgctgagctgtac

SEQ ID NO: 66037 - RNA, 23 nt, synthetic construct
  source 1..23: mol_type = other RNA
gtgggggacccaggcggtggtga

SEQ ID NO: 66038 - RNA, 23 nt, synthetic construct
  source 1..23: mol_type = other RNA
ggaggacggggtggccgtggatc

SEQ ID NO: 66039 - RNA, 23 nt, synthetic construct
  source 1..23: mol_type = other RNA
ggaggacggggtggccgtggggc

SEQ ID NO: 66040 - RNA, 23 nt, synthetic construct
  source 1..23: mol_type = other RNA
ggaggacggggtggccgtggatc

SEQ ID NO: 66041 - RNA, 23 nt, synthetic construct
  source 1..23: mol_type = other RNA
ggaggacggggtggccgtggatc

SEQ ID NO: 66042 - RNA, 23 nt, synthetic construct
  source 1..23: mol_type = other RNA
ggaggacggggtggccgtggggc

SEQ ID NO: 66043 - RNA, 23 nt, synthetic construct
  source 1..23: mol_type = other RNA
ggaggacggggtggccgtggatc

SEQ ID NO: 66044 - RNA, 23 nt, synthetic construct
  source 1..23: mol_type = other RNA
gccgggcctggaagacttggcca

SEQ ID NO: 66045 - RNA, 23 nt, synthetic construct
  source 1..23: mol_type = other RNA
tggtgtgccctgcattctcccag

SEQ ID NO: 66046 - RNA, 23 nt, synthetic construct
  source 1..23: mol_type = other RNA
ccatccatggtgtgccctgcatt

SEQ ID NO: 66047 - RNA, 23 nt, synthetic construct
  source 1..23: mol_type = other RNA
ccgtgcagggtgagccacactcc

SEQ ID NO: 66048 - RNA, 23 nt, synthetic construct
  source 1..23: mol_type = other RNA
cctcgcagagctgcgcgcgctgg

SEQ ID NO: 66049 - RNA, 23 nt, synthetic construct
  source 1..23: mol_type = other RNA
tgttgaaggaggtgcccgggctg

SEQ ID NO: 66050 - RNA, 23 nt, synthetic construct
  source 1..23: mol_type = other RNA
tggagatgtgggccccgccctgc

SEQ ID NO: 66051 - RNA, 23 nt, synthetic construct
  source 1..23: mol_type = other RNA
gttgatgatggagtggcagcgcg

SEQ ID NO: 66052 - RNA, 23 nt, synthetic construct
  source 1..23: mol_type = other RNA
ggccctctcgccaccgccttaaa

SEQ ID NO: 66053 - RNA, 23 nt, synthetic construct
  source 1..23: mol_type = other RNA
ggtgggtccccacccggccctct

SEQ ID NO: 66054 - RNA, 23 nt, synthetic construct
  source 1..23: mol_type = other RNA
acggggcctgagctggacccagt

SEQ ID NO: 66055 - RNA, 23 nt, synthetic construct
  source 1..23: mol_type = other RNA
ggttctgtggagcctgcaggcgt

SEQ ID NO: 66056 - RNA, 23 nt, synthetic construct
  source 1..23: mol_type = other RNA
ctctgtcctgggcgtgctggtct

SEQ ID NO: 66057 - RNA, 23 nt, synthetic construct
  source 1..23: mol_type = other RNA
ggggagctgttctcagggtggag

SEQ ID NO: 66058 - RNA, 23 nt, synthetic construct
  source 1..23: mol_type = other RNA
cacagagccggtggccccagttg

SEQ ID NO: 66059 - RNA, 23 nt, synthetic construct
  source 1..23: mol_type = other RNA
gggggtcaccgtggagcctctgg

SEQ ID NO: 66060 - RNA, 23 nt, synthetic construct
  source 1..23: mol_type = other RNA
atcgtagtggccgtggtggtcag

SEQ ID NO: 66061 - RNA, 23 nt, synthetic construct
  source 1..23: mol_type = other RNA
actggggggatgggagttgtccc

SEQ ID NO: 66062 - RNA, 23 nt, synthetic construct
  source 1..23: mol_type = other RNA
gccgaagtccaggctgtgcgcac

SEQ ID NO: 66063 - RNA, 23 nt, synthetic construct
  source 1..23: mol_type = other RNA
gctgctagggtgagggctggaaa

SEQ ID NO: 66064 - RNA, 23 nt, synthetic construct
  source 1..23: mol_type = other RNA
cacatgtggggtgccagcagttg

SEQ ID NO: 66065 - RNA, 23 nt, synthetic construct
  source 1..23: mol_type = other RNA
atcgtagtggccgtggtggtcag

SEQ ID NO: 66066 - RNA, 23 nt, synthetic construct
  source 1..23: mol_type = other RNA
ggagtcactgtgctgctggtggc

SEQ ID NO: 66067 - RNA, 23 nt, synthetic construct
  source 1..23: mol_type = other RNA
gccgaagtccaggctgtgcgcac

SEQ ID NO: 66068 - RNA, 23 nt, synthetic construct
  source 1..23: mol_type = other RNA
ccaaggtgcctgaggtggccgaa

SEQ ID NO: 66069 - RNA, 23 nt, synthetic construct
  source 1..23: mol_type = other RNA
gctgctagggtgagggctggaca

SEQ ID NO: 66070 - RNA, 23 nt, synthetic construct
  source 1..23: mol_type = other RNA
gcgtggccgtagagctggtggcc

SEQ ID NO: 66071 - RNA, 23 nt, synthetic construct
  source 1..23: mol_type = other RNA
tcgtagtggctgctgtggtctgc

SEQ ID NO: 66072 - RNA, 23 nt, synthetic construct
  source 1..23: mol_type = other RNA
gctggtagctgtggatttggtgg

SEQ ID NO: 66073 - RNA, 23 nt, synthetic construct
  source 1..23: mol_type = other RNA
gttgcccgggtggaggaggcggt

SEQ ID NO: 66074 - RNA, 23 nt, synthetic construct
  source 1..23: mol_type = other RNA
agagccggtggccctggttgtgg

SEQ ID NO: 66075 - RNA, 23 nt, synthetic construct
  source 1..23: mol_type = other RNA
gggggtcaccgtggagcctctgg

SEQ ID NO: 66076 - RNA, 23 nt, synthetic construct
  source 1..23: mol_type = other RNA
atcgtagtggccgtggtggtcag

SEQ ID NO: 66077 - RNA, 23 nt, synthetic construct
  source 1..23: mol_type = other RNA
actggggggatgggagttgtccc

SEQ ID NO: 66078 - RNA, 23 nt, synthetic construct
  source 1..23: mol_type = other RNA
ggagtcactgtgctgctggtggc

SEQ ID NO: 66079 - RNA, 23 nt, synthetic construct
  source 1..23: mol_type = other RNA
gccgaagtccaggctgtgcgcac

SEQ ID NO: 66080 - RNA, 23 nt, synthetic construct
  source 1..23: mol_type = other RNA
gctgctagggtgagggctggaca

SEQ ID NO: 66081 - RNA, 23 nt, synthetic construct
  source 1..23: mol_type = other RNA
gcgtggccgtagagctggtggcc

SEQ ID NO: 66082 - RNA, 23 nt, synthetic construct
  source 1..23: mol_type = other RNA
cacatgtggggtgccagcagttg

SEQ ID NO: 66083 - RNA, 23 nt, synthetic construct
  source 1..23: mol_type = other RNA
agagccggtggccctggttgtgg

SEQ ID NO: 66084 - RNA, 23 nt, synthetic construct
  source 1..23: mol_type = other RNA
atcgtagtggccgtggtgatcag

SEQ ID NO: 66085 - RNA, 23 nt, synthetic construct
  source 1..23: mol_type = other RNA
ggagtcactgtgctgctggtggc

SEQ ID NO: 66086 - RNA, 23 nt, synthetic construct
  source 1..23: mol_type = other RNA
gccgaagtccaggctgtgcgcac

SEQ ID NO: 66087 - RNA, 23 nt, synthetic construct
  source 1..23: mol_type = other RNA
ccaaggtgcctgaggtggccgaa

SEQ ID NO: 66088 - RNA, 23 nt, synthetic construct
  source 1..23: mol_type = other RNA
gctgctagggtgagggctggaca

SEQ ID NO: 66089 - RNA, 23 nt, synthetic construct
  source 1..23: mol_type = other RNA
gtcgtccctggggaagggggtga

SEQ ID NO: 66090 - RNA, 23 nt, synthetic construct
  source 1..23: mol_type = other RNA
ggtcgtccctggggaagggggtg

SEQ ID NO: 66091 - RNA, 23 nt, synthetic construct
  source 1..23: mol_type = other RNA
gctggtagctgtggatttggtgg

SEQ ID NO: 66092 - RNA, 23 nt, synthetic construct
  source 1..23: mol_type = other RNA
cacatgtggggtgccagcagttg

SEQ ID NO: 66093 - RNA, 23 nt, synthetic construct
  source 1..23: mol_type = other RNA
agtgctggaagggcagttgcagt

SEQ ID NO: 66094 - RNA, 23 nt, synthetic construct
  source 1..23: mol_type = other RNA
atcgtagtggccgtggtggtcag

SEQ ID NO: 66095 - RNA, 23 nt, synthetic construct
  source 1..23: mol_type = other RNA
ggtccacagggtggaggagggga

SEQ ID NO: 66096 - RNA, 23 nt, synthetic construct
  source 1..23: mol_type = other RNA
ggacatgggtgtggtggtctgtg

SEQ ID NO: 66097 - RNA, 23 nt, synthetic construct
  source 1..23: mol_type = other RNA
ggaggacactggcggtggggagg

SEQ ID NO: 66098 - RNA, 23 nt, synthetic construct
  source 1..23: mol_type = other RNA
gccgccccacatgctgcagatgc

SEQ ID NO: 66099 - RNA, 23 nt, synthetic construct
  source 1..23: mol_type = other RNA
gtagaggctgagattcccaaagc

SEQ ID NO: 66100 - RNA, 23 nt, synthetic construct
  source 1..23: mol_type = other RNA
cagtagtggttgtccaggtagag

SEQ ID NO: 66101 - RNA, 23 nt, synthetic construct
  source 1..23: mol_type = other RNA
agccgggcctggaagacttggcc

SEQ ID NO: 66102 - RNA, 23 nt, synthetic construct
  source 1..23: mol_type = other RNA
ggccatgtccttgcaactggcgg

SEQ ID NO: 66103 - RNA, 23 nt, synthetic construct
  source 1..23: mol_type = other RNA
gtgtgccagtcggggcccagcag

SEQ ID NO: 66104 - RNA, 23 nt, synthetic construct
  source 1..23: mol_type = other RNA
tcacagagcggctgtggtgggca

SEQ ID NO: 66105 - RNA, 23 nt, synthetic construct
  source 1..23: mol_type = other RNA
agatcacagagcggctgtggtgg

SEQ ID NO: 66106 - RNA, 23 nt, synthetic construct
  source 1..23: mol_type = other RNA
tctggcagggcacctcaaggcgg

SEQ ID NO: 66107 - RNA, 23 nt, synthetic construct
  source 1..23: mol_type = other RNA
gcagatggactcctgccctggcg

SEQ ID NO: 66108 - RNA, 23 nt, synthetic construct
  source 1..23: mol_type = other RNA
ctcaaagccctggggacaggtag

SEQ ID NO: 66109 - RNA, 23 nt, synthetic construct
  source 1..23: mol_type = other RNA
atcgggcgtgaggcaggcggtct

SEQ ID NO: 66110 - RNA, 23 nt, synthetic construct
  source 1..23: mol_type = other RNA
ggcccaaggttttcatgatcaga

SEQ ID NO: 66111 - RNA, 23 nt, synthetic construct
  source 1..23: mol_type = other RNA
cccagggtaggactcctgagtgg

SEQ ID NO: 66112 - RNA, 23 nt, synthetic construct
  source 1..23: mol_type = other RNA
cgttgcgacctcagccctgagtt

SEQ ID NO: 66113 - RNA, 23 nt, synthetic construct
  source 1..23: mol_type = other RNA
ctgcgcgcgctgggggttggagc

SEQ ID NO: 66114 - RNA, 23 nt, synthetic construct
  source 1..23: mol_type = other RNA
gtggtggccttcgtggtcagcac

SEQ ID NO: 66115 - RNA, 23 nt, synthetic construct
  source 1..23: mol_type = other RNA
gtggtggccttcgtggtcagcac

SEQ ID NO: 66116 - RNA, 23 nt, synthetic construct
  source 1..23: mol_type = other RNA
gtggtggtcagcactctggcggt

SEQ ID NO: 66117 - RNA, 23 nt, synthetic construct
  source 1..23: mol_type = other RNA
gaagggagtggctttggagctgg

SEQ ID NO: 66118 - RNA, 23 nt, synthetic construct
  source 1..23: mol_type = other RNA
gaagggagtggctttggagctgg

SEQ ID NO: 66119 - RNA, 23 nt, synthetic construct
  source 1..23: mol_type = other RNA
gggtggtgttgtccccacagtag

SEQ ID NO: 66120 - RNA, 23 nt, synthetic construct
  source 1..23: mol_type = other RNA
gtagagctggtggccggggtgct

SEQ ID NO: 66121 - RNA, 23 nt, synthetic construct
  source 1..23: mol_type = other RNA
gtagagctggtggccggggtgct

SEQ ID NO: 66122 - RNA, 23 nt, synthetic construct
  source 1..23: mol_type = other RNA
gtagagctggtggccggggtgct

SEQ ID NO: 66123 - RNA, 23 nt, synthetic construct
  source 1..23: mol_type = other RNA
acggaggagggggtcaccgtgga

SEQ ID NO: 66124 - RNA, 23 nt, synthetic construct
  source 1..23: mol_type = other RNA
gtagagctggtggccggggtgct

SEQ ID NO: 66125 - RNA, 23 nt, synthetic construct
  source 1..23: mol_type = other RNA
ggtggtggtcagcactctggcgg

SEQ ID NO: 66126 - RNA, 23 nt, synthetic construct
  source 1..23: mol_type = other RNA
gccgtgggtgtggtggtctgtga

SEQ ID NO: 66127 - RNA, 23 nt, synthetic construct
  source 1..23: mol_type = other RNA
tgctgctagggtgagggctggaa

SEQ ID NO: 66128 - RNA, 23 nt, synthetic construct
  source 1..23: mol_type = other RNA
gccgtgggtgtggtggtctgtga

SEQ ID NO: 66129 - RNA, 23 nt, synthetic construct
  source 1..23: mol_type = other RNA
tgctgctagggtgagggctggac

SEQ ID NO: 66130 - RNA, 23 nt, synthetic construct
  source 1..23: mol_type = other RNA
cggtcgtagtggctgctgtggtc

SEQ ID NO: 66131 - RNA, 23 nt, synthetic construct
  source 1..23: mol_type = other RNA
tggctttggaactggtggctgtg

SEQ ID NO: 66132 - RNA, 23 nt, synthetic construct
  source 1..23: mol_type = other RNA
gccgtgggtgtggtggtctgtga

SEQ ID NO: 66133 - RNA, 23 nt, synthetic construct
  source 1..23: mol_type = other RNA
ggacagtctctggagtagaggag

SEQ ID NO: 66134 - RNA, 23 nt, synthetic construct
  source 1..23: mol_type = other RNA
tgctgctagggtgagggctggac

SEQ ID NO: 66135 - RNA, 23 nt, synthetic construct
  source 1..23: mol_type = other RNA
gccgtgggtgtggtggtctgtga

SEQ ID NO: 66136 - RNA, 23 nt, synthetic construct
  source 1..23: mol_type = other RNA
tgctgctagggtgagggctggac

SEQ ID NO: 66137 - RNA, 23 nt, synthetic construct
  source 1..23: mol_type = other RNA
tggctttggaactggtggctgtg

SEQ ID NO: 66138 - RNA, 23 nt, synthetic construct
  source 1..23: mol_type = other RNA
gccgtgggtgtggtggtctgtga

SEQ ID NO: 66139 - RNA, 23 nt, synthetic construct
  source 1..23: mol_type = other RNA
cccagcagccatcctttctgctg

SEQ ID NO: 66140 - RNA, 23 nt, synthetic construct
  source 1..23: mol_type = other RNA
tgcagatggactcctgccctggc

SEQ ID NO: 66141 - RNA, 23 nt, synthetic construct
  source 1..23: mol_type = other RNA
acccaggtttcattcagctggac

SEQ ID NO: 66142 - RNA, 23 nt, synthetic construct
  source 1..23: mol_type = other RNA
gagcggggtcagcctggcgttgt

SEQ ID NO: 66143 - RNA, 23 nt, synthetic construct
  source 1..23: mol_type = other RNA
gtccagccactctgaccaggcac

SEQ ID NO: 66144 - RNA, 23 nt, synthetic construct
  source 1..23: mol_type = other RNA
gtccagccactctgaccaggcac

SEQ ID NO: 66145 - RNA, 23 nt, synthetic construct
  source 1..23: mol_type = other RNA
gtccagccactctgaccaggcac

SEQ ID NO: 66146 - RNA, 23 nt, synthetic construct
  source 1..23: mol_type = other RNA
gtccagccactctgaccaggcac

SEQ ID NO: 66147 - RNA, 23 nt, synthetic construct
  source 1..23: mol_type = other RNA
agccctccgccatcccctccagc

SEQ ID NO: 66148 - RNA, 23 nt, synthetic construct
  source 1..23: mol_type = other RNA
ccacctccggttcctgcaggtgc

SEQ ID NO: 66149 - RNA, 23 nt, synthetic construct
  source 1..23: mol_type = other RNA
acagaacaaggggcaggtgtccg

SEQ ID NO: 66150 - RNA, 23 nt, synthetic construct
  source 1..23: mol_type = other RNA
aaagtctccgcctcccaggccgg

SEQ ID NO: 66151 - RNA, 23 nt, synthetic construct
  source 1..23: mol_type = other RNA
gagaagggagtggctttggagct

SEQ ID NO: 66152 - RNA, 23 nt, synthetic construct
  source 1..23: mol_type = other RNA
tgtggacatggtggccatgggtg

SEQ ID NO: 66153 - RNA, 23 nt, synthetic construct
  source 1..23: mol_type = other RNA
gagaagggagtggctttggagct

SEQ ID NO: 66154 - RNA, 23 nt, synthetic construct
  source 1..23: mol_type = other RNA
gcaccatggtgacagtgaggacg

SEQ ID NO: 66155 - RNA, 23 nt, synthetic construct
  source 1..23: mol_type = other RNA
cttgacaggagtcctcctcacag

SEQ ID NO: 66156 - RNA, 23 nt, synthetic construct
  source 1..23: mol_type = other RNA
agctggccttgcctggaccagcc

SEQ ID NO: 66157 - RNA, 23 nt, synthetic construct
  source 1..23: mol_type = other RNA
caaaggccagggaagcggaagac

SEQ ID NO: 66158 - RNA, 23 nt, synthetic construct
  source 1..23: mol_type = other RNA
tgactgtgggtgtggtggccgtg

SEQ ID NO: 66159 - RNA, 23 nt, synthetic construct
  source 1..23: mol_type = other RNA
cgtggagcctctggttgtgggtg

SEQ ID NO: 66160 - RNA, 23 nt, synthetic construct
  source 1..23: mol_type = other RNA
ccactctgaccaggcacactggg

SEQ ID NO: 66161 - RNA, 23 nt, synthetic construct
  source 1..23: mol_type = other RNA
gtgcgtgccgtccctgggctgga

SEQ ID NO: 66162 - RNA, 23 nt, synthetic construct
  source 1..23: mol_type = other RNA
ccactctgaccaggcacactggg

SEQ ID NO: 66163 - RNA, 23 nt, synthetic construct
  source 1..23: mol_type = other RNA
cgtgctggtcagcactttgggag

SEQ ID NO: 66164 - RNA, 23 nt, synthetic construct
  source 1..23: mol_type = other RNA
ccgtgctggtcagcactttggga

SEQ ID NO: 66165 - RNA, 23 nt, synthetic construct
  source 1..23: mol_type = other RNA
ccgtgctggtcagcactttgagg

SEQ ID NO: 66166 - RNA, 23 nt, synthetic construct
  source 1..23: mol_type = other RNA
tgactgtgggtgtggtggccgtg

SEQ ID NO: 66167 - RNA, 23 nt, synthetic construct
  source 1..23: mol_type = other RNA
cgtggagcctctggttgtgggtg

SEQ ID NO: 66168 - RNA, 23 nt, synthetic construct
  source 1..23: mol_type = other RNA
ccactctgaccaggcacactggg

SEQ ID NO: 66169 - RNA, 23 nt, synthetic construct
  source 1..23: mol_type = other RNA
gtgcgtgccgtccctgggctgga

SEQ ID NO: 66170 - RNA, 23 nt, synthetic construct
  source 1..23: mol_type = other RNA
ccactctgaccaggcacactggg

SEQ ID NO: 66171 - RNA, 23 nt, synthetic construct
  source 1..23: mol_type = other RNA
gggaggtgggacaggcgccctgg

SEQ ID NO: 66172 - RNA, 23 nt, synthetic construct
  source 1..23: mol_type = other RNA
gcaggcatcctcctgacattgca

SEQ ID NO: 66173 - RNA, 23 nt, synthetic construct
  source 1..23: mol_type = other RNA
gagttaccctgcagcaggcatgg

SEQ ID NO: 66174 - RNA, 23 nt, synthetic construct
  source 1..23: mol_type = other RNA
cgtggtggctgtaccaagggtgc

SEQ ID NO: 66175 - RNA, 23 nt, synthetic construct
  source 1..23: mol_type = other RNA
ccgtgtgtggtggccatggtgtt

SEQ ID NO: 66176 - RNA, 23 nt, synthetic construct
  source 1..23: mol_type = other RNA
gtggatccagtggactcagtcgt

SEQ ID NO: 66177 - RNA, 23 nt, synthetic construct
  source 1..23: mol_type = other RNA
gtggatccagtggactcagtcgt

SEQ ID NO: 66178 - RNA, 23 nt, synthetic construct
  source 1..23: mol_type = other RNA
ccccagcggccggacgtggccag

SEQ ID NO: 66179 - RNA, 23 nt, synthetic construct
  source 1..23: mol_type = other RNA
tcccagctcggctccacagggcc

SEQ ID NO: 66180 - RNA, 23 nt, synthetic construct
  source 1..23: mol_type = other RNA
tgccctgcattctcccagctcgg

SEQ ID NO: 66181 - RNA, 23 nt, synthetic construct
  source 1..23: mol_type = other RNA
cagagctgcgcgcgctgggggtt

SEQ ID NO: 66182 - RNA, 23 nt, synthetic construct
  source 1..23: mol_type = other RNA
cgccgagctgttgctgcagtcca

SEQ ID NO: 66183 - RNA, 23 nt, synthetic construct
  source 1..23: mol_type = other RNA
gaaggtcccgtgggtggtgttgt

SEQ ID NO: 66184 - RNA, 23 nt, synthetic construct
  source 1..23: mol_type = other RNA
caaagtctccgcctcccaggccg

SEQ ID NO: 66185 - RNA, 23 nt, synthetic construct
  source 1..23: mol_type = other RNA
agaggacccggatcctgtagttg

SEQ ID NO: 66186 - RNA, 23 nt, synthetic construct
  source 1..23: mol_type = other RNA
aacgctggtagctgtgggtgtgg

SEQ ID NO: 66187 - RNA, 23 nt, synthetic construct
  source 1..23: mol_type = other RNA
catggtggccgtgggtgtggtgg

SEQ ID NO: 66188 - RNA, 23 nt, synthetic construct
  source 1..23: mol_type = other RNA
cgtggcggtaagcactgtggagg

SEQ ID NO: 66189 - RNA, 23 nt, synthetic construct
  source 1..23: mol_type = other RNA
ggagtcactgtgttgctggtggc

SEQ ID NO: 66190 - RNA, 23 nt, synthetic construct
  source 1..23: mol_type = other RNA
aggctctgtgatgtgggtggtgc

SEQ ID NO: 66191 - RNA, 23 nt, synthetic construct
  source 1..23: mol_type = other RNA
gccagagggccccggcatggggt

SEQ ID NO: 66192 - RNA, 23 nt, synthetic construct
  source 1..23: mol_type = other RNA
catggtggccgtgggtgtggtgg

SEQ ID NO: 66193 - RNA, 23 nt, synthetic construct
  source 1..23: mol_type = other RNA
tgcgtgccgtccctgggctggag

SEQ ID NO: 66194 - RNA, 23 nt, synthetic construct
  source 1..23: mol_type = other RNA
aacctctggttgtgggtgtggtg

SEQ ID NO: 66195 - RNA, 23 nt, synthetic construct
  source 1..23: mol_type = other RNA
gtgcccaaggtgcctgaggtggc

SEQ ID NO: 66196 - RNA, 23 nt, synthetic construct
  source 1..23: mol_type = other RNA
aggctctgtgatgtgggtggtgc

SEQ ID NO: 66197 - RNA, 23 nt, synthetic construct
  source 1..23: mol_type = other RNA
gccagagggccccggcatggggt

SEQ ID NO: 66198 - RNA, 23 nt, synthetic construct
  source 1..23: mol_type = other RNA
gagggggagctgttcccggggtg

SEQ ID NO: 66199 - RNA, 23 nt, synthetic construct
  source 1..23: mol_type = other RNA
gacatggtggccatgggtgtggt

SEQ ID NO: 66200 - RNA, 23 nt, synthetic construct
  source 1..23: mol_type = other RNA
catggaactggtggcccttgtcg

SEQ ID NO: 66201 - RNA, 23 nt, synthetic construct
  source 1..23: mol_type = other RNA
aacgctggtagctgtgggtgtgg

SEQ ID NO: 66202 - RNA, 23 nt, synthetic construct
  source 1..23: mol_type = other RNA
catggtggccgtgggtgtggtgg

SEQ ID NO: 66203 - RNA, 23 nt, synthetic construct
  source 1..23: mol_type = other RNA
gtctctggagtagaggagggtgt

SEQ ID NO: 66204 - RNA, 23 nt, synthetic construct
  source 1..23: mol_type = other RNA
aggctctgtgatgtgggtggtgc

SEQ ID NO: 66205 - RNA, 23 nt, synthetic construct
  source 1..23: mol_type = other RNA
gccagagggccccggcatggggt

SEQ ID NO: 66206 - RNA, 23 nt, synthetic construct
  source 1..23: mol_type = other RNA
catggtggccgtgggtgtggtgg

SEQ ID NO: 66207 - RNA, 23 nt, synthetic construct
  source 1..23: mol_type = other RNA
tgcgtgccgtccctgggctggag

SEQ ID NO: 66208 - RNA, 23 nt, synthetic construct
  source 1..23: mol_type = other RNA
gtgcccaaggtgcctgaggtggc

SEQ ID NO: 66209 - RNA, 23 nt, synthetic construct
  source 1..23: mol_type = other RNA
aggctctgtgatgtgggtggtgc

SEQ ID NO: 66210 - RNA, 23 nt, synthetic construct
  source 1..23: mol_type = other RNA
gccagagggccccggcatggggt

SEQ ID NO: 66211 - RNA, 23 nt, synthetic construct
  source 1..23: mol_type = other RNA
gagggggagctgttcccggggtg

SEQ ID NO: 66212 - RNA, 23 nt, synthetic construct
  source 1..23: mol_type = other RNA
catggtggccgtgggtgtggtgg

SEQ ID NO: 66213 - RNA, 23 nt, synthetic construct
  source 1..23: mol_type = other RNA
cgtggcggtaagcactgtggagg

SEQ ID NO: 66214 - RNA, 23 nt, synthetic construct
  source 1..23: mol_type = other RNA
agttgtagtggctgttgtggtca

SEQ ID NO: 66215 - RNA, 23 nt, synthetic construct
  source 1..23: mol_type = other RNA
ccagtgggtctcagggtggtgag

SEQ ID NO: 66216 - RNA, 23 nt, synthetic construct
  source 1..23: mol_type = other RNA
agcggggcggaggacactggcgg

SEQ ID NO: 66217 - RNA, 23 nt, synthetic construct
  source 1..23: mol_type = other RNA
ctgtcggggaccagccacgtctt

SEQ ID NO: 66218 - RNA, 23 nt, synthetic construct
  source 1..23: mol_type = other RNA
ggaagggcgcctgggaaggttgc

SEQ ID NO: 66219 - RNA, 23 nt, synthetic construct
  source 1..23: mol_type = other RNA
gcagctggacacatctgggcagg

SEQ ID NO: 66220 - RNA, 23 nt, synthetic construct
  source 1..23: mol_type = other RNA
ctgacccctctctgacctggccg

SEQ ID NO: 66221 - RNA, 23 nt, synthetic construct
  source 1..23: mol_type = other RNA
tactcaatgctcagggtttattt

SEQ ID NO: 66222 - RNA, 23 nt, synthetic construct
  source 1..23: mol_type = other RNA
aaaggccagggaagcggaagacg

SEQ ID NO: 66223 - RNA, 23 nt, synthetic construct
  source 1..23: mol_type = other RNA
gccggccccagcagggtgcggtg

SEQ ID NO: 66224 - RNA, 23 nt, synthetic construct
  source 1..23: mol_type = other RNA
caggcagccagagtgcgtgatgt

SEQ ID NO: 66225 - RNA, 23 nt, synthetic construct
  source 1..23: mol_type = other RNA
ggcctcactcaggccgcggcaag

SEQ ID NO: 66226 - RNA, 23 nt, synthetic construct
  source 1..23: mol_type = other RNA
ccgacaccagccccgggggacag

SEQ ID NO: 66227 - RNA, 23 nt, synthetic construct
  source 1..23: mol_type = other RNA
tcggcaatgcagcccccactccc

SEQ ID NO: 66228 - RNA, 23 nt, synthetic construct
  source 1..23: mol_type = other RNA
aagtcattgatggcattgtcgtc

SEQ ID NO: 66229 - RNA, 23 nt, synthetic construct
  source 1..23: mol_type = other RNA
gtagaagtcacagaacaaggggc

SEQ ID NO: 66230 - RNA, 23 nt, synthetic construct
  source 1..23: mol_type = other RNA
cggggcctgagctggacccagtc

SEQ ID NO: 66231 - RNA, 23 nt, synthetic construct
  source 1..23: mol_type = other RNA
ggtacctggggccgagggggtga

SEQ ID NO: 66232 - RNA, 23 nt, synthetic construct
  source 1..23: mol_type = other RNA
aagtgccctccagcggccctgat

SEQ ID NO: 66233 - RNA, 23 nt, synthetic construct
  source 1..23: mol_type = other RNA
gtcactgcagcagaggacccgga

SEQ ID NO: 66234 - RNA, 23 nt, synthetic construct
  source 1..23: mol_type = other RNA
gtcagccccgggctactcgtagg

SEQ ID NO: 66235 - RNA, 23 nt, synthetic construct
  source 1..23: mol_type = other RNA
ccgtcgtccctggaagggctgag

SEQ ID NO: 66236 - RNA, 23 nt, synthetic construct
  source 1..23: mol_type = other RNA
tgttgttggggccagcgtgggtg

SEQ ID NO: 66237 - RNA, 23 nt, synthetic construct
  source 1..23: mol_type = other RNA
gctggtgactgtgggtgtggtgg

SEQ ID NO: 66238 - RNA, 23 nt, synthetic construct
  source 1..23: mol_type = other RNA
tgctggaagggcggttgcagtcc

SEQ ID NO: 66239 - RNA, 23 nt, synthetic construct
  source 1..23: mol_type = other RNA
tctcagtgctggaagggcggttg

SEQ ID NO: 66240 - RNA, 23 nt, synthetic construct
  source 1..23: mol_type = other RNA
gcctctggttgtgggtgtggtgg

SEQ ID NO: 66241 - RNA, 23 nt, synthetic construct
  source 1..23: mol_type = other RNA
tgctggaagggcggttgcagtcc

SEQ ID NO: 66242 - RNA, 23 nt, synthetic construct
  source 1..23: mol_type = other RNA
tctcagtgctggaagggcggttg

SEQ ID NO: 66243 - RNA, 23 nt, synthetic construct
  source 1..23: mol_type = other RNA
acctctggttgtgggtgtggtgg

SEQ ID NO: 66244 - RNA, 23 nt, synthetic construct
  source 1..23: mol_type = other RNA
gaggacgggatggccgtggatcc

SEQ ID NO: 66245 - RNA, 23 nt, synthetic construct
  source 1..23: mol_type = other RNA
tggaggacgggatggccgtggat

SEQ ID NO: 66246 - RNA, 23 nt, synthetic construct
  source 1..23: mol_type = other RNA
atttggtggctgtgcttgtcagc

SEQ ID NO: 66247 - RNA, 23 nt, synthetic construct
  source 1..23: mol_type = other RNA
cccaagggtgaaggaggggatgg

SEQ ID NO: 66248 - RNA, 23 nt, synthetic construct
  source 1..23: mol_type = other RNA
tgctggaagggcggttgcagtcc

SEQ ID NO: 66249 - RNA, 23 nt, synthetic construct
  source 1..23: mol_type = other RNA
tctcagtgctggaagggcggttg

SEQ ID NO: 66250 - RNA, 23 nt, synthetic construct
  source 1..23: mol_type = other RNA
gcctctggttgtgggtgtggtgg

SEQ ID NO: 66251 - RNA, 23 nt, synthetic construct
  source 1..23: mol_type = other RNA
tgctggaagggcggttgcagtcc

SEQ ID NO: 66252 - RNA, 23 nt, synthetic construct
  source 1..23: mol_type = other RNA
tctcagtgctggaagggcggttg

SEQ ID NO: 66253 - RNA, 23 nt, synthetic construct
  source 1..23: mol_type = other RNA
ctgtgggtgtggtggccgggctg

SEQ ID NO: 66254 - RNA, 23 nt, synthetic construct
  source 1..23: mol_type = other RNA
atttggtggctgtgcttgtcagc

SEQ ID NO: 66255 - RNA, 23 nt, synthetic construct
  source 1..23: mol_type = other RNA
attttgtggctgtgcttgtcagc

SEQ ID NO: 66256 - RNA, 23 nt, synthetic construct
  source 1..23: mol_type = other RNA
ggatccagtggctgcagttgtag

SEQ ID NO: 66257 - RNA, 23 nt, synthetic construct
  source 1..23: mol_type = other RNA
gtagaaatggcagccggctcggt

SEQ ID NO: 66258 - RNA, 23 nt, synthetic construct
  source 1..23: mol_type = other RNA
gcggtggggaggtgggacaggcg

SEQ ID NO: 66259 - RNA, 23 nt, synthetic construct
  source 1..23: mol_type = other RNA
ggatgctgagggcgcgggggcag

SEQ ID NO: 66260 - RNA, 23 nt, synthetic construct
  source 1..23: mol_type = other RNA
ttgtagtggatgctgagggcgcg

SEQ ID NO: 66261 - RNA, 23 nt, synthetic construct
  source 1..23: mol_type = other RNA
caccatggtgacagtgaggacga

SEQ ID NO: 66262 - RNA, 23 nt, synthetic construct
  source 1..23: mol_type = other RNA
tccttcccatgcaccatggtgac

SEQ ID NO: 66263 - RNA, 23 nt, synthetic construct
  source 1..23: mol_type = other RNA
ggcctggaagacttggccattga

SEQ ID NO: 66264 - RNA, 23 nt, synthetic construct
  source 1..23: mol_type = other RNA
ggcggcagtggttccgtcccgct

SEQ ID NO: 66265 - RNA, 23 nt, synthetic construct
  source 1..23: mol_type = other RNA
tggcactcagcaaagacctggct

SEQ ID NO: 66266 - RNA, 23 nt, synthetic construct
  source 1..23: mol_type = other RNA
gggctgaccctgggcgtcacagg

SEQ ID NO: 66267 - RNA, 23 nt, synthetic construct
  source 1..23: mol_type = other RNA
gcccggggcctggtcacggttac

SEQ ID NO: 66268 - RNA, 23 nt, synthetic construct
  source 1..23: mol_type = other RNA
aaggttgcaccaaccccgtagaa

SEQ ID NO: 66269 - RNA, 23 nt, synthetic construct
  source 1..23: mol_type = other RNA
catgtggcagggaagggcgcctg

SEQ ID NO: 66270 - RNA, 23 nt, synthetic construct
  source 1..23: mol_type = other RNA
ctggccatcgggcgtgaggcagg

SEQ ID NO: 66271 - RNA, 23 nt, synthetic construct
  source 1..23: mol_type = other RNA
ttgacaggagtcctcctcacagg

SEQ ID NO: 66272 - RNA, 23 nt, synthetic construct
  source 1..23: mol_type = other RNA
tcagacaatgcacatcctggctc

SEQ ID NO: 66273 - RNA, 23 nt, synthetic construct
  source 1..23: mol_type = other RNA
ccaaggttttcatgatcagacaa

SEQ ID NO: 66274 - RNA, 23 nt, synthetic construct
  source 1..23: mol_type = other RNA
cacacacaggccggggggctccg

SEQ ID NO: 66275 - RNA, 23 nt, synthetic construct
  source 1..23: mol_type = other RNA
gatggagtggcagcgcgagaagg

SEQ ID NO: 66276 - RNA, 23 nt, synthetic construct
  source 1..23: mol_type = other RNA
agcagaggacccggatcctgtag

SEQ ID NO: 66277 - RNA, 23 nt, synthetic construct
  source 1..23: mol_type = other RNA
gttgagaacagggcctgggtggt

SEQ ID NO: 66278 - RNA, 23 nt, synthetic construct
  source 1..23: mol_type = other RNA
ttgctgctagggtgtgggaagtc

SEQ ID NO: 66279 - RNA, 23 nt, synthetic construct
  source 1..23: mol_type = other RNA
cagcagggtcgaggtgcgggtct

SEQ ID NO: 66280 - RNA, 23 nt, synthetic construct
  source 1..23: mol_type = other RNA
cagcagggtcgaggtgcgggtct

SEQ ID NO: 66281 - RNA, 23 nt, synthetic construct
  source 1..23: mol_type = other RNA
cagcagggtcgaggtgcgggtct

SEQ ID NO: 66282 - RNA, 23 nt, synthetic construct
  source 1..23: mol_type = other RNA
cagcagggtcgaggtgcgggtct

SEQ ID NO: 66283 - RNA, 23 nt, synthetic construct
  source 1..23: mol_type = other RNA
ggcgagaaaaactgtccaaatgc

SEQ ID NO: 66284 - RNA, 23 nt, synthetic construct
  source 1..23: mol_type = other RNA
gcaggcctgcacgcagatgccca

SEQ ID NO: 66285 - RNA, 23 nt, synthetic construct
  source 1..23: mol_type = other RNA
cgtggtgtggcccggggtggtcg

SEQ ID NO: 66286 - RNA, 23 nt, synthetic construct
  source 1..23: mol_type = other RNA
cgtggtgtggcccggggtggtcg

SEQ ID NO: 66287 - RNA, 23 nt, synthetic construct
  source 1..23: mol_type = other RNA
gcgtgaggcaggcggtctggacg

SEQ ID NO: 66288 - RNA, 23 nt, synthetic construct
  source 1..23: mol_type = other RNA
ccacatggctgttgacccaggtt

SEQ ID NO: 66289 - RNA, 23 nt, synthetic construct
  source 1..23: mol_type = other RNA
cggacttgacaggagtcctcctc

SEQ ID NO: 66290 - RNA, 23 nt, synthetic construct
  source 1..23: mol_type = other RNA
accatgcaggtcgtagagtttct

SEQ ID NO: 66291 - RNA, 23 nt, synthetic construct
  source 1..23: mol_type = other RNA
gcggcaggcggcgaaggtggggc

SEQ ID NO: 66292 - RNA, 23 nt, synthetic construct
  source 1..23: mol_type = other RNA
cacggtggagaccgggagggccg

SEQ ID NO: 66293 - RNA, 23 nt, synthetic construct
  source 1..23: mol_type = other RNA
tcacccatagggtggtcttttcg

SEQ ID NO: 66294 - RNA, 23 nt, synthetic construct
  source 1..23: mol_type = other RNA
ctcgtggtcagcggctctttgga

SEQ ID NO: 66295 - RNA, 23 nt, synthetic construct
  source 1..23: mol_type = other RNA
ggtcaccgtggagcctctggttg

SEQ ID NO: 66296 - RNA, 23 nt, synthetic construct
  source 1..23: mol_type = other RNA
cactggtctgtgtgctagaggag

SEQ ID NO: 66297 - RNA, 23 nt, synthetic construct
  source 1..23: mol_type = other RNA
cacctgctcacggttcctgcaga

SEQ ID NO: 66298 - RNA, 23 nt, synthetic construct
  source 1..23: mol_type = other RNA
cactggtctgtgtgctagaggag

SEQ ID NO: 66299 - RNA, 23 nt, synthetic construct
  source 1..23: mol_type = other RNA
cacctgctcacggttcctgcaga

SEQ ID NO: 66300 - RNA, 23 nt, synthetic construct
  source 1..23: mol_type = other RNA
ttgtggacatggtggccatgggt

SEQ ID NO: 66301 - RNA, 23 nt, synthetic construct
  source 1..23: mol_type = other RNA
ggtcaccgtggagcctctggttg

SEQ ID NO: 66302 - RNA, 23 nt, synthetic construct
  source 1..23: mol_type = other RNA
cactggtctgtgtgctagaggag

SEQ ID NO: 66303 - RNA, 23 nt, synthetic construct
  source 1..23: mol_type = other RNA
cctggaggtgcccctggtgtggc

SEQ ID NO: 66304 - RNA, 23 nt, synthetic construct
  source 1..23: mol_type = other RNA
cacctgctcacggttcctgcaga

SEQ ID NO: 66305 - RNA, 23 nt, synthetic construct
  source 1..23: mol_type = other RNA
cactggtctgtgtgctagaggag

SEQ ID NO: 66306 - RNA, 23 nt, synthetic construct
  source 1..23: mol_type = other RNA
cacctgctcacggttcctgcaga

SEQ ID NO: 66307 - RNA, 23 nt, synthetic construct
  source 1..23: mol_type = other RNA
cggtggtcccaagggtggaggag

SEQ ID NO: 66308 - RNA, 23 nt, synthetic construct
  source 1..23: mol_type = other RNA
cactggtctgtgtgctagaggag

SEQ ID NO: 66309 - RNA, 23 nt, synthetic construct
  source 1..23: mol_type = other RNA
cgccctggaagcggtcaatgtca

SEQ ID NO: 66310 - RNA, 23 nt, synthetic construct
  source 1..23: mol_type = other RNA
ttggccatgtccttgcaactggc

SEQ ID NO: 66311 - RNA, 23 nt, synthetic construct
  source 1..23: mol_type = other RNA
cacagagcggctgtggtgggcat

SEQ ID NO: 66312 - RNA, 23 nt, synthetic construct
  source 1..23: mol_type = other RNA
ggcactcagcaaagacctggctc

SEQ ID NO: 66313 - RNA, 23 nt, synthetic construct
  source 1..23: mol_type = other RNA
gccagctggaatccgtgctgcgc

SEQ ID NO: 66314 - RNA, 23 nt, synthetic construct
  source 1..23: mol_type = other RNA
agcggccggacgtggccagctgg

SEQ ID NO: 66315 - RNA, 23 nt, synthetic construct
  source 1..23: mol_type = other RNA
cggctccacagggccctgggtct

SEQ ID NO: 66316 - RNA, 23 nt, synthetic construct
  source 1..23: mol_type = other RNA
gttgcaaaggccagggaagcgga

SEQ ID NO: 66317 - RNA, 23 nt, synthetic construct
  source 1..23: mol_type = other RNA
caggaatgtcagcaccagccgga

SEQ ID NO: 66318 - RNA, 23 nt, synthetic construct
  source 1..23: mol_type = other RNA
gttgaaggaggtgcccgggctgt

SEQ ID NO: 66319 - RNA, 23 nt, synthetic construct
  source 1..23: mol_type = other RNA
gcactgccatagccccccggagc

SEQ ID NO: 66320 - RNA, 23 nt, synthetic construct
  source 1..23: mol_type = other RNA
gtcctggcactgccatagccccc

SEQ ID NO: 66321 - RNA, 23 nt, synthetic construct
  source 1..23: mol_type = other RNA
gtccaggtacaccatgggggctg

SEQ ID NO: 66322 - RNA, 23 nt, synthetic construct
  source 1..23: mol_type = other RNA
tgtagggtgggtccccacccggc

SEQ ID NO: 66323 - RNA, 23 nt, synthetic construct
  source 1..23: mol_type = other RNA
gcacagggcatacctggtaccct

SEQ ID NO: 66324 - RNA, 23 nt, synthetic construct
  source 1..23: mol_type = other RNA
tgtcgggaagctgcgccgcccgg

SEQ ID NO: 66325 - RNA, 23 nt, synthetic construct
  source 1..23: mol_type = other RNA
taagtgccctccagcggccctga

SEQ ID NO: 66326 - RNA, 23 nt, synthetic construct
  source 1..23: mol_type = other RNA
agccctggtcagccccgggctac

SEQ ID NO: 66327 - RNA, 23 nt, synthetic construct
  source 1..23: mol_type = other RNA
cgggggagccctggtcagccccg

SEQ ID NO: 66328 - RNA, 23 nt, synthetic construct
  source 1..23: mol_type = other RNA
gaagggtggatgtggccacccct

SEQ ID NO: 66329 - RNA, 23 nt, synthetic construct
  source 1..23: mol_type = other RNA
gttggaagggtggatgtggccac

SEQ ID NO: 66330 - RNA, 23 nt, synthetic construct
  source 1..23: mol_type = other RNA
ccatgtgcccaagctccccgtcg

SEQ ID NO: 66331 - RNA, 23 nt, synthetic construct
  source 1..23: mol_type = other RNA
tctgtcctgggcgtgctggtctc

SEQ ID NO: 66332 - RNA, 23 nt, synthetic construct
  source 1..23: mol_type = other RNA
attgtcgtctctgtcctgggcgt

SEQ ID NO: 66333 - RNA, 23 nt, synthetic construct
  source 1..23: mol_type = other RNA
ctgtgggtgtggtggccgtggtg

SEQ ID NO: 66334 - RNA, 23 nt, synthetic construct
  source 1..23: mol_type = other RNA
actgtgggtgtggtggccgtggt

SEQ ID NO: 66335 - RNA, 23 nt, synthetic construct
  source 1..23: mol_type = other RNA
aggagggagtggctttggagctg

SEQ ID NO: 66336 - RNA, 23 nt, synthetic construct
  source 1..23: mol_type = other RNA
tgcttctcagtgctggaagggcg

SEQ ID NO: 66337 - RNA, 23 nt, synthetic construct
  source 1..23: mol_type = other RNA
gaggtgtgggcagtctctggagt

SEQ ID NO: 66338 - RNA, 23 nt, synthetic construct
  source 1..23: mol_type = other RNA
ccacagagccggtggccccagtt

SEQ ID NO: 66339 - RNA, 23 nt, synthetic construct
  source 1..23: mol_type = other RNA
gccacagagccggtggccccagt

SEQ ID NO: 66340 - RNA, 23 nt, synthetic construct
  source 1..23: mol_type = other RNA
ggtgtgggtggtccccgggatgg

SEQ ID NO: 66341 - RNA, 23 nt, synthetic construct
  source 1..23: mol_type = other RNA
catagaaccagtggccacagttg

SEQ ID NO: 66342 - RNA, 23 nt, synthetic construct
  source 1..23: mol_type = other RNA
caggagttgaggaggggttggtg

SEQ ID NO: 66343 - RNA, 23 nt, synthetic construct
  source 1..23: mol_type = other RNA
ttgtcccaggagttgaggagggg

SEQ ID NO: 66344 - RNA, 23 nt, synthetic construct
  source 1..23: mol_type = other RNA
agcactggggggatgggagttgt

SEQ ID NO: 66345 - RNA, 23 nt, synthetic construct
  source 1..23: mol_type = other RNA
accgtgtggggactgctgggggg

SEQ ID NO: 66346 - RNA, 23 nt, synthetic construct
  source 1..23: mol_type = other RNA
agggctggagtcgagtgctgggt

SEQ ID NO: 66347 - RNA, 23 nt, synthetic construct
  source 1..23: mol_type = other RNA
gcccatggtcaccaccgtggtta

SEQ ID NO: 66348 - RNA, 23 nt, synthetic construct
  source 1..23: mol_type = other RNA
actctgaccaggcacactggggc

SEQ ID NO: 66349 - RNA, 23 nt, synthetic construct
  source 1..23: mol_type = other RNA
ttcctgcagaccaggccaaagtc

SEQ ID NO: 66350 - RNA, 23 nt, synthetic construct
  source 1..23: mol_type = other RNA
ctgtagtgctcggctctgtgagg

SEQ ID NO: 66351 - RNA, 23 nt, synthetic construct
  source 1..23: mol_type = other RNA
cagtccctggactggagaaggga

SEQ ID NO: 66352 - RNA, 23 nt, synthetic construct
  source 1..23: mol_type = other RNA
gcagtccctggactggagaaggg

SEQ ID NO: 66353 - RNA, 23 nt, synthetic construct
  source 1..23: mol_type = other RNA
tgcttctcagtgctggaagggcg

SEQ ID NO: 66354 - RNA, 23 nt, synthetic construct
  source 1..23: mol_type = other RNA
gccacagagccggtggccccggt

SEQ ID NO: 66355 - RNA, 23 nt, synthetic construct
  source 1..23: mol_type = other RNA
cgtgcgtgccgtccctgggctgg

SEQ ID NO: 66356 - RNA, 23 nt, synthetic construct
  source 1..23: mol_type = other RNA
ggtgtgggtggtccccgggatgg

SEQ ID NO: 66357 - RNA, 23 nt, synthetic construct
  source 1..23: mol_type = other RNA
catagaaccagtggccacagttg

SEQ ID NO: 66358 - RNA, 23 nt, synthetic construct
  source 1..23: mol_type = other RNA
gataggtgttgtccctggagttg

SEQ ID NO: 66359 - RNA, 23 nt, synthetic construct
  source 1..23: mol_type = other RNA
tcactgtgctgctggtggctgca

SEQ ID NO: 66360 - RNA, 23 nt, synthetic construct
  source 1..23: mol_type = other RNA
gagtcactgtgctgctggtggct

SEQ ID NO: 66361 - RNA, 23 nt, synthetic construct
  source 1..23: mol_type = other RNA
accgtgtggggactgctggggga

SEQ ID NO: 66362 - RNA, 23 nt, synthetic construct
  source 1..23: mol_type = other RNA
gtggtgcccaaggtgcctgaggt

SEQ ID NO: 66363 - RNA, 23 nt, synthetic construct
  source 1..23: mol_type = other RNA
gtgggaagtccccgtggaaggct

SEQ ID NO: 66364 - RNA, 23 nt, synthetic construct
  source 1..23: mol_type = other RNA
agggctggagtcgagtgctgggt

SEQ ID NO: 66365 - RNA, 23 nt, synthetic construct
  source 1..23: mol_type = other RNA
ctcggtggtcctgctgctagggt

SEQ ID NO: 66366 - RNA, 23 nt, synthetic construct
  source 1..23: mol_type = other RNA
gcccatggtcaccaccgtggtta

SEQ ID NO: 66367 - RNA, 23 nt, synthetic construct
  source 1..23: mol_type = other RNA
actctgaccaggcacactggggc

SEQ ID NO: 66368 - RNA, 23 nt, synthetic construct
  source 1..23: mol_type = other RNA
ttcctgcagaccaggccaaagtc

SEQ ID NO: 66369 - RNA, 23 nt, synthetic construct
  source 1..23: mol_type = other RNA
gtagtggctgctgtggtctgctc

SEQ ID NO: 66370 - RNA, 23 nt, synthetic construct
  source 1..23: mol_type = other RNA
ctgtgggtgtggtggccgtgctg

SEQ ID NO: 66371 - RNA, 23 nt, synthetic construct
  source 1..23: mol_type = other RNA
gctgtgggtgtggtggccgtgct

SEQ ID NO: 66372 - RNA, 23 nt, synthetic construct
  source 1..23: mol_type = other RNA
ggtagctgtggatttggtggctg

SEQ ID NO: 66373 - RNA, 23 nt, synthetic construct
  source 1..23: mol_type = other RNA
tggtagctgtggatttggtggct

SEQ ID NO: 66374 - RNA, 23 nt, synthetic construct
  source 1..23: mol_type = other RNA
tccccggagtggaggagggggtg

SEQ ID NO: 66375 - RNA, 23 nt, synthetic construct
  source 1..23: mol_type = other RNA
ctgtgggtgtggtggccgtgctg

SEQ ID NO: 66376 - RNA, 23 nt, synthetic construct
  source 1..23: mol_type = other RNA
actgtgggtgtggtggccgtgct

SEQ ID NO: 66377 - RNA, 23 nt, synthetic construct
  source 1..23: mol_type = other RNA
tggctctggagctgatgactgtg

SEQ ID NO: 66378 - RNA, 23 nt, synthetic construct
  source 1..23: mol_type = other RNA
agtggctctggagctgatgactg

SEQ ID NO: 66379 - RNA, 23 nt, synthetic construct
  source 1..23: mol_type = other RNA
gagtggctctggagctgatgact

SEQ ID NO: 66380 - RNA, 23 nt, synthetic construct
  source 1..23: mol_type = other RNA
tgcttctcagtgctggaagggcg

SEQ ID NO: 66381 - RNA, 23 nt, synthetic construct
  source 1..23: mol_type = other RNA
ggagtagaggagggtgtggctgt

SEQ ID NO: 66382 - RNA, 23 nt, synthetic construct
  source 1..23: mol_type = other RNA
ccacagagccggtggccctggtt

SEQ ID NO: 66383 - RNA, 23 nt, synthetic construct
  source 1..23: mol_type = other RNA
gtggttgtggtagtcggcacttt

SEQ ID NO: 66384 - RNA, 23 nt, synthetic construct
  source 1..23: mol_type = other RNA
ggtgtgggtggtccccgggatgg

SEQ ID NO: 66385 - RNA, 23 nt, synthetic construct
  source 1..23: mol_type = other RNA
catagaaccagtggccacagttg

SEQ ID NO: 66386 - RNA, 23 nt, synthetic construct
  source 1..23: mol_type = other RNA
agcactggggggatgggagttgt

SEQ ID NO: 66387 - RNA, 23 nt, synthetic construct
  source 1..23: mol_type = other RNA
tcactgtgctgctggtggctgca

SEQ ID NO: 66388 - RNA, 23 nt, synthetic construct
  source 1..23: mol_type = other RNA
gagtcactgtgctgctggtggct

SEQ ID NO: 66389 - RNA, 23 nt, synthetic construct
  source 1..23: mol_type = other RNA
accgtgtggggactgctgggggg

SEQ ID NO: 66390 - RNA, 23 nt, synthetic construct
  source 1..23: mol_type = other RNA
tactggtggttgctgctggggtg

SEQ ID NO: 66391 - RNA, 23 nt, synthetic construct
  source 1..23: mol_type = other RNA
agggctggagtcgagtgctgggt

SEQ ID NO: 66392 - RNA, 23 nt, synthetic construct
  source 1..23: mol_type = other RNA
ctcggtggtcctgctgctagggt

SEQ ID NO: 66393 - RNA, 23 nt, synthetic construct
  source 1..23: mol_type = other RNA
actctgaccaggcacactggggc

SEQ ID NO: 66394 - RNA, 23 nt, synthetic construct
  source 1..23: mol_type = other RNA
ttcctgcagaccaggccaaagtc

SEQ ID NO: 66395 - RNA, 23 nt, synthetic construct
  source 1..23: mol_type = other RNA
ctgtagtgctcggctctgtgagg

SEQ ID NO: 66396 - RNA, 23 nt, synthetic construct
  source 1..23: mol_type = other RNA
cagtccctggactggagaaggga

SEQ ID NO: 66397 - RNA, 23 nt, synthetic construct
  source 1..23: mol_type = other RNA
gcagtccctggactggagaaggg

SEQ ID NO: 66398 - RNA, 23 nt, synthetic construct
  source 1..23: mol_type = other RNA
tgcttctcagtgctggaagggcg

SEQ ID NO: 66399 - RNA, 23 nt, synthetic construct
  source 1..23: mol_type = other RNA
gaggtgtgggcagtctctggagt

SEQ ID NO: 66400 - RNA, 23 nt, synthetic construct
  source 1..23: mol_type = other RNA
ccacagagccggtggccctggtt

SEQ ID NO: 66401 - RNA, 23 nt, synthetic construct
  source 1..23: mol_type = other RNA
gtggttgtggtagtcggcacttt

SEQ ID NO: 66402 - RNA, 23 nt, synthetic construct
  source 1..23: mol_type = other RNA
cgtgcgtgccgtccctgggctgg

SEQ ID NO: 66403 - RNA, 23 nt, synthetic construct
  source 1..23: mol_type = other RNA
ggtgtgggtggtccccgggacgg

SEQ ID NO: 66404 - RNA, 23 nt, synthetic construct
  source 1..23: mol_type = other RNA
catagaaccagtggccacagttg

SEQ ID NO: 66405 - RNA, 23 nt, synthetic construct
  source 1..23: mol_type = other RNA
gtggccgtggtgatcagtgatgg

SEQ ID NO: 66406 - RNA, 23 nt, synthetic construct
  source 1..23: mol_type = other RNA
gataggtgttgtccctggagttg

SEQ ID NO: 66407 - RNA, 23 nt, synthetic construct
  source 1..23: mol_type = other RNA
tcactgtgctgctggtggctgca

SEQ ID NO: 66408 - RNA, 23 nt, synthetic construct
  source 1..23: mol_type = other RNA
gagtcactgtgctgctggtggct

SEQ ID NO: 66409 - RNA, 23 nt, synthetic construct
  source 1..23: mol_type = other RNA
accgtgtggggactgctggggga

SEQ ID NO: 66410 - RNA, 23 nt, synthetic construct
  source 1..23: mol_type = other RNA
gtggtgcccaaggtgcctgaggt

SEQ ID NO: 66411 - RNA, 23 nt, synthetic construct
  source 1..23: mol_type = other RNA
gtgggaagtccccgtggaaggct

SEQ ID NO: 66412 - RNA, 23 nt, synthetic construct
  source 1..23: mol_type = other RNA
agggctggagtcgagtgctgggt

SEQ ID NO: 66413 - RNA, 23 nt, synthetic construct
  source 1..23: mol_type = other RNA
ctcggtggtcctgctgctagggt

SEQ ID NO: 66414 - RNA, 23 nt, synthetic construct
  source 1..23: mol_type = other RNA
actctgaccaggcacactggggc

SEQ ID NO: 66415 - RNA, 23 nt, synthetic construct
  source 1..23: mol_type = other RNA
cccccagggggacaccaggctgg

SEQ ID NO: 66416 - RNA, 23 nt, synthetic construct
  source 1..23: mol_type = other RNA
acctggcccaactcccccagggg

SEQ ID NO: 66417 - RNA, 23 nt, synthetic construct
  source 1..23: mol_type = other RNA
ttcctgcagaccaggccaaagtc

SEQ ID NO: 66418 - RNA, 23 nt, synthetic construct
  source 1..23: mol_type = other RNA
tggtggccgggctggtcagcact

SEQ ID NO: 66419 - RNA, 23 nt, synthetic construct
  source 1..23: mol_type = other RNA
ggtgtggtggccgggctggtcag

SEQ ID NO: 66420 - RNA, 23 nt, synthetic construct
  source 1..23: mol_type = other RNA
gctgtgggtgtggtggccgggct

SEQ ID NO: 66421 - RNA, 23 nt, synthetic construct
  source 1..23: mol_type = other RNA
ggtagctgtggatttggtggctg

SEQ ID NO: 66422 - RNA, 23 nt, synthetic construct
  source 1..23: mol_type = other RNA
tggtagctgtggatttggtggct

SEQ ID NO: 66423 - RNA, 23 nt, synthetic construct
  source 1..23: mol_type = other RNA
tccccggagtggaggagggggtg

SEQ ID NO: 66424 - RNA, 23 nt, synthetic construct
  source 1..23: mol_type = other RNA
ctgtagtgctcggctctgtgagg

SEQ ID NO: 66425 - RNA, 23 nt, synthetic construct
  source 1..23: mol_type = other RNA
aggagggagtggctttggagctg

SEQ ID NO: 66426 - RNA, 23 nt, synthetic construct
  source 1..23: mol_type = other RNA
tctcagtgctggaagggcagttg

SEQ ID NO: 66427 - RNA, 23 nt, synthetic construct
  source 1..23: mol_type = other RNA
tgcttctcagtgctggaagggca

SEQ ID NO: 66428 - RNA, 23 nt, synthetic construct
  source 1..23: mol_type = other RNA
gccacagagccggtggccccggt

SEQ ID NO: 66429 - RNA, 23 nt, synthetic construct
  source 1..23: mol_type = other RNA
gtggttgtggtagtcggcacttt

SEQ ID NO: 66430 - RNA, 23 nt, synthetic construct
  source 1..23: mol_type = other RNA
ggtgtgggtggtccccgggatgg

SEQ ID NO: 66431 - RNA, 23 nt, synthetic construct
  source 1..23: mol_type = other RNA
catagaaccagtggccacagttg

SEQ ID NO: 66432 - RNA, 23 nt, synthetic construct
  source 1..23: mol_type = other RNA
ggattttgtggctgtgcttgtca

SEQ ID NO: 66433 - RNA, 23 nt, synthetic construct
  source 1..23: mol_type = other RNA
gtccacagggtggaggaggggat

SEQ ID NO: 66434 - RNA, 23 nt, synthetic construct
  source 1..23: mol_type = other RNA
ggaaccgtggaggcagtggctgt

SEQ ID NO: 66435 - RNA, 23 nt, synthetic construct
  source 1..23: mol_type = other RNA
ccacaggctttgggtccagcagg

SEQ ID NO: 66436 - RNA, 23 nt, synthetic construct
  source 1..23: mol_type = other RNA
agtggcagaggccgtgcagtagt

SEQ ID NO: 66437 - RNA, 23 nt, synthetic construct
  source 1..23: mol_type = other RNA
cagtggcagaggccgtgcagtag

SEQ ID NO: 66438 - RNA, 23 nt, synthetic construct
  source 1..23: mol_type = other RNA
gatgctgagggcgcgggggcagc

SEQ ID NO: 66439 - RNA, 23 nt, synthetic construct
  source 1..23: mol_type = other RNA
acttgtagtggatgctgagggcg

SEQ ID NO: 66440 - RNA, 23 nt, synthetic construct
  source 1..23: mol_type = other RNA
gcccagggcaggaatgtccacac

SEQ ID NO: 66441 - RNA, 23 nt, synthetic construct
  source 1..23: mol_type = other RNA
ggaagacttggccattgaaggtg

SEQ ID NO: 66442 - RNA, 23 nt, synthetic construct
  source 1..23: mol_type = other RNA
gggcctggaagacttggccattg

SEQ ID NO: 66443 - RNA, 23 nt, synthetic construct
  source 1..23: mol_type = other RNA
gggtgggtgtgctagacaccggg

SEQ ID NO: 66444 - RNA, 23 nt, synthetic construct
  source 1..23: mol_type = other RNA
gcacacaggcaggctctgggggc

SEQ ID NO: 66445 - RNA, 23 nt, synthetic construct
  source 1..23: mol_type = other RNA
ctcctgacattgcaccgttgggt

SEQ ID NO: 66446 - RNA, 23 nt, synthetic construct
  source 1..23: mol_type = other RNA
tagtattgttgcaggcatcctcc

SEQ ID NO: 66447 - RNA, 23 nt, synthetic construct
  source 1..23: mol_type = other RNA
aatggactccaccctcagcctca

SEQ ID NO: 66448 - RNA, 23 nt, synthetic construct
  source 1..23: mol_type = other RNA
aaatggactccaccctcagcctc

SEQ ID NO: 66449 - RNA, 23 nt, synthetic construct
  source 1..23: mol_type = other RNA
ggtgtgtgggggagccatgggcg

SEQ ID NO: 66450 - RNA, 23 nt, synthetic construct
  source 1..23: mol_type = other RNA
tcagacagcagtggcctcctggg

SEQ ID NO: 66451 - RNA, 23 nt, synthetic construct
  source 1..23: mol_type = other RNA
aatgcacatcctggctccaggtg

SEQ ID NO: 66452 - RNA, 23 nt, synthetic construct
  source 1..23: mol_type = other RNA
cccaaggttttcatgatcagaca

SEQ ID NO: 66453 - RNA, 23 nt, synthetic construct
  source 1..23: mol_type = other RNA
acacaggccggggggctccgcag

SEQ ID NO: 66454 - RNA, 23 nt, synthetic construct
  source 1..23: mol_type = other RNA
gtgggcagcaggagcacggagcg

SEQ ID NO: 66455 - RNA, 23 nt, synthetic construct
  source 1..23: mol_type = other RNA
gcccctcacccttctggggccgg

SEQ ID NO: 66456 - RNA, 23 nt, synthetic construct
  source 1..23: mol_type = other RNA
ccgaaaggggtcctgctggcccc

SEQ ID NO: 66457 - RNA, 23 nt, synthetic construct
  source 1..23: mol_type = other RNA
actcctgagtggcgccctcccga

SEQ ID NO: 66458 - RNA, 23 nt, synthetic construct
  source 1..23: mol_type = other RNA
tggcagggacacataggcccgca

SEQ ID NO: 66459 - RNA, 23 nt, synthetic construct
  source 1..23: mol_type = other RNA
ttgcctgtcgcagcttcctggca

SEQ ID NO: 66460 - RNA, 23 nt, synthetic construct
  source 1..23: mol_type = other RNA
cagggtttatttgcaaaactggg

SEQ ID NO: 66461 - RNA, 23 nt, synthetic construct
  source 1..23: mol_type = other RNA
tggaggagggcgtggccgtagag

SEQ ID NO: 66462 - RNA, 23 nt, synthetic construct
  source 1..23: mol_type = other RNA
ttgaggagggcgtggccgtagag

SEQ ID NO: 66463 - RNA, 23 nt, synthetic construct
  source 1..23: mol_type = other RNA
cccttctggggccggtttcaccc

SEQ ID NO: 66464 - RNA, 23 nt, synthetic construct
  source 1..23: mol_type = other RNA
ggcccctgcagtggtcgctgatg

SEQ ID NO: 66465 - RNA, 23 nt, synthetic construct
  source 1..23: mol_type = other RNA
cattctcccagctcggctccaca

SEQ ID NO: 66466 - RNA, 23 nt, synthetic construct
  source 1..23: mol_type = other RNA
gccagggtccagttggggaagct

SEQ ID NO: 66467 - RNA, 23 nt, synthetic construct
  source 1..23: mol_type = other RNA
agccagtgggtctcagggtggtg

SEQ ID NO: 66468 - RNA, 23 nt, synthetic construct
  source 1..23: mol_type = other RNA
ctccggagtggaggaggggtgga

SEQ ID NO: 66469 - RNA, 23 nt, synthetic construct
  source 1..23: mol_type = other RNA
ctccggagtggaggaggggtgga

SEQ ID NO: 66470 - RNA, 23 nt, synthetic construct
  source 1..23: mol_type = other RNA
gggcgtcacagggcaggggcttg

SEQ ID NO: 66471 - RNA, 23 nt, synthetic construct
  source 1..23: mol_type = other RNA
agaaaaactgtccaaatgccctg

SEQ ID NO: 66472 - RNA, 23 nt, synthetic construct
  source 1..23: mol_type = other RNA
catcctgggggctggcacgggtg

SEQ ID NO: 66473 - RNA, 23 nt, synthetic construct
  source 1..23: mol_type = other RNA
tgacagagcgggggactctgttg

SEQ ID NO: 66474 - RNA, 23 nt, synthetic construct
  source 1..23: mol_type = other RNA
ttaccctgcagcaggcatggaca

SEQ ID NO: 66475 - RNA, 23 nt, synthetic construct
  source 1..23: mol_type = other RNA
ggggtgactcggtggtcctgctg

SEQ ID NO: 66476 - RNA, 23 nt, synthetic construct
  source 1..23: mol_type = other RNA
ggggtgactcggtggtcctgctg

SEQ ID NO: 66477 - RNA, 23 nt, synthetic construct
  source 1..23: mol_type = other RNA
ggggtgactcggtggtcctgctg

SEQ ID NO: 66478 - RNA, 23 nt, synthetic construct
  source 1..23: mol_type = other RNA
ctggcagggcacctcaaggcggc

SEQ ID NO: 66479 - RNA, 23 nt, synthetic construct
  source 1..23: mol_type = other RNA
gccactgggtgtgcagttacagc

SEQ ID NO: 66480 - RNA, 23 nt, synthetic construct
  source 1..23: mol_type = other RNA
cggatgctgaccttgatgtagtc

SEQ ID NO: 66481 - RNA, 23 nt, synthetic construct
  source 1..23: mol_type = other RNA
tgggggctggcacgggtgggggg

SEQ ID NO: 66482 - RNA, 23 nt, synthetic construct
  source 1..23: mol_type = other RNA
aagtcacagaacaaggggcaggt

SEQ ID NO: 66483 - RNA, 23 nt, synthetic construct
  source 1..23: mol_type = other RNA
ctcggtggttctgctgctagggt

SEQ ID NO: 66484 - RNA, 23 nt, synthetic construct
  source 1..23: mol_type = other RNA
cggggcggaggacactggcggtg

SEQ ID NO: 66485 - RNA, 23 nt, synthetic construct
  source 1..23: mol_type = other RNA
agcagccctccgccatcccctcc

SEQ ID NO: 66486 - RNA, 23 nt, synthetic construct
  source 1..23: mol_type = other RNA
agttgtcccaggagttgaggagg

SEQ ID NO: 66487 - RNA, 23 nt, synthetic construct
  source 1..23: mol_type = other RNA
ggacggggtggccgtggatccag

SEQ ID NO: 66488 - RNA, 23 nt, synthetic construct
  source 1..23: mol_type = other RNA
ggacggggtggccgtggatccag

SEQ ID NO: 66489 - RNA, 23 nt, synthetic construct
  source 1..23: mol_type = other RNA
ggacggggtggccgtggatccag

SEQ ID NO: 66490 - RNA, 23 nt, synthetic construct
  source 1..23: mol_type = other RNA
ggacggggtggccgtggatccag

SEQ ID NO: 66491 - RNA, 23 nt, synthetic construct
  source 1..23: mol_type = other RNA
gcggggtgccacacacaggccgg

SEQ ID NO: 66492 - RNA, 23 nt, synthetic construct
  source 1..23: mol_type = other RNA
aaggccagggaagcggaagacgt

SEQ ID NO: 66493 - RNA, 23 nt, synthetic construct
  source 1..23: mol_type = other RNA
ggaagcggtgctggctgtgcctg

SEQ ID NO: 66494 - RNA, 23 nt, synthetic construct
  source 1..23: mol_type = other RNA
tagtcaaggggctcattgtcgtc

SEQ ID NO: 66495 - RNA, 23 nt, synthetic construct
  source 1..23: mol_type = other RNA
agtaccactggtctgtgtgctag

SEQ ID NO: 66496 - RNA, 23 nt, synthetic construct
  source 1..23: mol_type = other RNA
agtaccactggtctgtgtgctag

SEQ ID NO: 66497 - RNA, 23 nt, synthetic construct
  source 1..23: mol_type = other RNA
tggacatggaactggtggccctt

SEQ ID NO: 66498 - RNA, 23 nt, synthetic construct
  source 1..23: mol_type = other RNA
gaggacggggtggccgtggggcc

SEQ ID NO: 66499 - RNA, 23 nt, synthetic construct
  source 1..23: mol_type = other RNA
agtaccactggtctgtgtgctag

SEQ ID NO: 66500 - RNA, 23 nt, synthetic construct
  source 1..23: mol_type = other RNA
agtaccactggtctgtgtgctag

SEQ ID NO: 66501 - RNA, 23 nt, synthetic construct
  source 1..23: mol_type = other RNA
gaggacggggtggccgtggggcc

SEQ ID NO: 66502 - RNA, 23 nt, synthetic construct
  source 1..23: mol_type = other RNA
agtaccactggtctgtgtgctag

SEQ ID NO: 66503 - RNA, 23 nt, synthetic construct
  source 1..23: mol_type = other RNA
ggctttggagctggtggctgcgg

SEQ ID NO: 66504 - RNA, 23 nt, synthetic construct
  source 1..23: mol_type = other RNA
ggtcagctcagtgaggatccggg

SEQ ID NO: 66505 - RNA, 23 nt, synthetic construct
  source 1..23: mol_type = other RNA
gggagcactgcaggggtgcgggt

SEQ ID NO: 66506 - RNA, 23 nt, synthetic construct
  source 1..23: mol_type = other RNA
tccacacgcatggtggtggtccc

SEQ ID NO: 66507 - RNA, 23 nt, synthetic construct
  source 1..23: mol_type = other RNA
tctggtcctcagggcagaagcag

SEQ ID NO: 66508 - RNA, 23 nt, synthetic construct
  source 1..23: mol_type = other RNA
aggtgcccgggctgtaggtgcgg

SEQ ID NO: 66509 - RNA, 23 nt, synthetic construct
  source 1..23: mol_type = other RNA
cctgggcgggcacacaggcgccc

SEQ ID NO: 66510 - RNA, 23 nt, synthetic construct
  source 1..23: mol_type = other RNA
gtgcaccttctgccccacctgtg

SEQ ID NO: 66511 - RNA, 23 nt, synthetic construct
  source 1..23: mol_type = other RNA
cagttgcctgggtggaggaggcg

SEQ ID NO: 66512 - RNA, 23 nt, synthetic construct
  source 1..23: mol_type = other RNA
cagttgcctgggtggaggaggcg

SEQ ID NO: 66513 - RNA, 23 nt, synthetic construct
  source 1..23: mol_type = other RNA
atggtggccacgggtgtggtggt

SEQ ID NO: 66514 - RNA, 23 nt, synthetic construct
  source 1..23: mol_type = other RNA
cagttgcctgggtggaggaggcg

SEQ ID NO: 66515 - RNA, 23 nt, synthetic construct
  source 1..23: mol_type = other RNA
gcctgtcgcagcttcctggcagc

SEQ ID NO: 66516 - RNA, 23 nt, synthetic construct
  source 1..23: mol_type = other RNA
gcaccagccggatgctgaccttg

SEQ ID NO: 66517 - RNA, 23 nt, synthetic construct
  source 1..23: mol_type = other RNA
ctgagagggtggggactgctgtg

SEQ ID NO: 66518 - RNA, 23 nt, synthetic construct
  source 1..23: mol_type = other RNA
tggtggagccggtggccgtgatc

SEQ ID NO: 66519 - RNA, 23 nt, synthetic construct
  source 1..23: mol_type = other RNA
tggtggagccggtggccgtgatc

SEQ ID NO: 66520 - RNA, 23 nt, synthetic construct
  source 1..23: mol_type = other RNA
tggtggagccggtggccgtgatc

SEQ ID NO: 66521 - RNA, 23 nt, synthetic construct
  source 1..23: mol_type = other RNA
tggtggagccggtggccgtgatc

SEQ ID NO: 66522 - RNA, 23 nt, synthetic construct
  source 1..23: mol_type = other RNA
cccttgtcatggtggctgtggtg

SEQ ID NO: 66523 - RNA, 23 nt, synthetic construct
  source 1..23: mol_type = other RNA
gtgtgggggagccatgggcgcag

SEQ ID NO: 66524 - RNA, 23 nt, synthetic construct
  source 1..23: mol_type = other RNA
cccctctctgacctggccgttgc

SEQ ID NO: 66525 - RNA, 23 nt, synthetic construct
  source 1..23: mol_type = other RNA
ccaccaccccgctgagggccgtg

SEQ ID NO: 66526 - RNA, 23 nt, synthetic construct
  source 1..23: mol_type = other RNA
ctgttgctgcagtccaggtacac

SEQ ID NO: 66527 - RNA, 23 nt, synthetic construct
  source 1..23: mol_type = other RNA
aggtcctggcactgccatagccc

SEQ ID NO: 66528 - RNA, 23 nt, synthetic construct
  source 1..23: mol_type = other RNA
gcgtgggtggctgtgaggggcgc

SEQ ID NO: 66529 - RNA, 23 nt, synthetic construct
  source 1..23: mol_type = other RNA
gggggacccaggcggtggtgaag

SEQ ID NO: 66530 - RNA, 23 nt, synthetic construct
  source 1..23: mol_type = other RNA
tggtcgtccctggagaagggggt

SEQ ID NO: 66531 - RNA, 23 nt, synthetic construct
  source 1..23: mol_type = other RNA
tggtcgtccctggagaagggggt

SEQ ID NO: 66532 - RNA, 23 nt, synthetic construct
  source 1..23: mol_type = other RNA
tggtcgtccctggagaagggggt

SEQ ID NO: 66533 - RNA, 23 nt, synthetic construct
  source 1..23: mol_type = other RNA
gacctggcccaactcccccaggg

SEQ ID NO: 66534 - RNA, 23 nt, synthetic construct
  source 1..23: mol_type = other RNA
tgtgagctgttcccagagtggag

SEQ ID NO: 66535 - RNA, 23 nt, synthetic construct
  source 1..23: mol_type = other RNA
aggacactggcggtggggaggtg

SEQ ID NO: 66536 - RNA, 23 nt, synthetic construct
  source 1..23: mol_type = other RNA
agtggttgtccaggtagaggctg

SEQ ID NO: 66537 - RNA, 23 nt, synthetic construct
  source 1..23: mol_type = other RNA
tagtggttgtccaggtagaggct

SEQ ID NO: 66538 - RNA, 23 nt, synthetic construct
  source 1..23: mol_type = other RNA
ctccccgggcgcggcagagctct

SEQ ID NO: 66539 - RNA, 23 nt, synthetic construct
  source 1..23: mol_type = other RNA
gtccacaggcacgaaggaaacgc

SEQ ID NO: 66540 - RNA, 23 nt, synthetic construct
  source 1..23: mol_type = other RNA
gaggaagaggggatgggtgtaac

SEQ ID NO: 66541 - RNA, 23 nt, synthetic construct
  source 1..23: mol_type = other RNA
tggtggccgtgggtgtggtggtc

SEQ ID NO: 66542 - RNA, 23 nt, synthetic construct
  source 1..23: mol_type = other RNA
agggagtcactgtgttgctggtg

SEQ ID NO: 66543 - RNA, 23 nt, synthetic construct
  source 1..23: mol_type = other RNA
tggtggccgtgggtgtggtggtc

SEQ ID NO: 66544 - RNA, 23 nt, synthetic construct
  source 1..23: mol_type = other RNA
tggagctgatgactgtgggtgtg

SEQ ID NO: 66545 - RNA, 23 nt, synthetic construct
  source 1..23: mol_type = other RNA
tggtggccgtgggtgtggtggtc

SEQ ID NO: 66546 - RNA, 23 nt, synthetic construct
  source 1..23: mol_type = other RNA
tggtggccgtgggtgtggtggtc

SEQ ID NO: 66547 - RNA, 23 nt, synthetic construct
  source 1..23: mol_type = other RNA
tggtggccgtgggtgtggtggtc

SEQ ID NO: 66548 - RNA, 23 nt, synthetic construct
  source 1..23: mol_type = other RNA
tgggtgtggtggttgtgggtgtg

SEQ ID NO: 66549 - RNA, 23 nt, synthetic construct
  source 1..23: mol_type = other RNA
cactggggtgatgggtgttgtcc

SEQ ID NO: 66550 - RNA, 23 nt, synthetic construct
  source 1..23: mol_type = other RNA
gctgtgggctctggttcctagag

SEQ ID NO: 66551 - RNA, 23 nt, synthetic construct
  source 1..23: mol_type = other RNA
tgggtgtaggtgtgcaggatggc

SEQ ID NO: 66552 - RNA, 23 nt, synthetic construct
  source 1..23: mol_type = other RNA
ggtcggggtggccgtggatccag

SEQ ID NO: 66553 - RNA, 23 nt, synthetic construct
  source 1..23: mol_type = other RNA
ctggaggagggagtggctttgga

SEQ ID NO: 66554 - RNA, 23 nt, synthetic construct
  source 1..23: mol_type = other RNA
ctggaggagggagtggctttgga

SEQ ID NO: 66555 - RNA, 23 nt, synthetic construct
  source 1..23: mol_type = other RNA
cgttgaagaggatctggtcctca

SEQ ID NO: 66556 - RNA, 23 nt, synthetic construct
  source 1..23: mol_type = other RNA
ttgtccccacagtagtcctgggc

SEQ ID NO: 66557 - RNA, 23 nt, synthetic construct
  source 1..23: mol_type = other RNA
gccgggaggccgttgaagtcccc

SEQ ID NO: 66558 - RNA, 23 nt, synthetic construct
  source 1..23: mol_type = other RNA
gaagtcacagaacaaggggcagg

SEQ ID NO: 66559 - RNA, 23 nt, synthetic construct
  source 1..23: mol_type = other RNA
ggtggccccagttgtggtggccg

SEQ ID NO: 66560 - RNA, 23 nt, synthetic construct
  source 1..23: mol_type = other RNA
atccaggtggtccctggggtgga

SEQ ID NO: 66561 - RNA, 23 nt, synthetic construct
  source 1..23: mol_type = other RNA
agggggtggacatggaactggtg

SEQ ID NO: 66562 - RNA, 23 nt, synthetic construct
  source 1..23: mol_type = other RNA
atccaggtggtccctggggtgga

SEQ ID NO: 66563 - RNA, 23 nt, synthetic construct
  source 1..23: mol_type = other RNA
agtctctggagtagaggagggtg

SEQ ID NO: 66564 - RNA, 23 nt, synthetic construct
  source 1..23: mol_type = other RNA
atccaggtggtccctggggtgga

SEQ ID NO: 66565 - RNA, 23 nt, synthetic construct
  source 1..23: mol_type = other RNA
atccaggtggtccctggggtgga

SEQ ID NO: 66566 - RNA, 23 nt, synthetic construct
  source 1..23: mol_type = other RNA
atccaggtggtccctggggtgga

SEQ ID NO: 66567 - RNA, 23 nt, synthetic construct
  source 1..23: mol_type = other RNA
ggtctctggagtagaggaggtgt

SEQ ID NO: 66568 - RNA, 23 nt, synthetic construct
  source 1..23: mol_type = other RNA
atccaggtggtccctggggtgga

SEQ ID NO: 66569 - RNA, 23 nt, synthetic construct
  source 1..23: mol_type = other RNA
tgtccaggtagaggctgagattc

SEQ ID NO: 66570 - RNA, 23 nt, synthetic construct
  source 1..23: mol_type = other RNA
ttgtccaggtagaggctgagatt

SEQ ID NO: 66571 - RNA, 23 nt, synthetic construct
  source 1..23: mol_type = other RNA
acaggcaggctctgggggcaggt

SEQ ID NO: 66572 - RNA, 23 nt, synthetic construct
  source 1..23: mol_type = other RNA
gggctggcacgggtggggggacg

SEQ ID NO: 66573 - RNA, 23 nt, synthetic construct
  source 1..23: mol_type = other RNA
tgctccaccaggaggccagtgcg

SEQ ID NO: 66574 - RNA, 23 nt, synthetic construct
  source 1..23: mol_type = other RNA
cgggaggccgttgaagtccccac

SEQ ID NO: 66575 - RNA, 23 nt, synthetic construct
  source 1..23: mol_type = other RNA
gtccttgggtgccagggcgtccg

SEQ ID NO: 66576 - RNA, 23 nt, synthetic construct
  source 1..23: mol_type = other RNA
gggtccttgggtgccagggcgtc

SEQ ID NO: 66577 - RNA, 23 nt, synthetic construct
  source 1..23: mol_type = other RNA
ggccgggctctgggcggtgccca

SEQ ID NO: 66578 - RNA, 23 nt, synthetic construct
  source 1..23: mol_type = other RNA
tctgcctcaggttttcaaacgtc

SEQ ID NO: 66579 - RNA, 23 nt, synthetic construct
  source 1..23: mol_type = other RNA
gtgttggaagggtggatgtggcc

SEQ ID NO: 66580 - RNA, 23 nt, synthetic construct
  source 1..23: mol_type = other RNA
gtccctggaagggctgagcgtgt

SEQ ID NO: 66581 - RNA, 23 nt, synthetic construct
  source 1..23: mol_type = other RNA
gtgccgtccctgggctggaggag

SEQ ID NO: 66582 - RNA, 23 nt, synthetic construct
  source 1..23: mol_type = other RNA
actgggggtgtgtgggtggtccc

SEQ ID NO: 66583 - RNA, 23 nt, synthetic construct
  source 1..23: mol_type = other RNA
gatgtgggtggtgcccaagatgc

SEQ ID NO: 66584 - RNA, 23 nt, synthetic construct
  source 1..23: mol_type = other RNA
gggaagtcaccgtggaaggctct

SEQ ID NO: 66585 - RNA, 23 nt, synthetic construct
  source 1..23: mol_type = other RNA
tgggaagtcaccgtggaaggctc

SEQ ID NO: 66586 - RNA, 23 nt, synthetic construct
  source 1..23: mol_type = other RNA
ggtccctggggtggaggacgggg

SEQ ID NO: 66587 - RNA, 23 nt, synthetic construct
  source 1..23: mol_type = other RNA
gtgccgtccctgggctggaggag

SEQ ID NO: 66588 - RNA, 23 nt, synthetic construct
  source 1..23: mol_type = other RNA
gtgggggtgtgggtggtccccgg

SEQ ID NO: 66589 - RNA, 23 nt, synthetic construct
  source 1..23: mol_type = other RNA
actgggggtgtgtgggtggtccc

SEQ ID NO: 66590 - RNA, 23 nt, synthetic construct
  source 1..23: mol_type = other RNA
gtgaaggaggggatgggtgtaaa

SEQ ID NO: 66591 - RNA, 23 nt, synthetic construct
  source 1..23: mol_type = other RNA
ggtccctggggtggaggacgggg

SEQ ID NO: 66592 - RNA, 23 nt, synthetic construct
  source 1..23: mol_type = other RNA
gtgccgtccctgggctggaggag

SEQ ID NO: 66593 - RNA, 23 nt, synthetic construct
  source 1..23: mol_type = other RNA
actgggggtgtgtgggtggtccc

SEQ ID NO: 66594 - RNA, 23 nt, synthetic construct
  source 1..23: mol_type = other RNA
gatgtgggtggtgcccaagatgc

SEQ ID NO: 66595 - RNA, 23 nt, synthetic construct
  source 1..23: mol_type = other RNA
gggaagtcaccgtggaaggctct

SEQ ID NO: 66596 - RNA, 23 nt, synthetic construct
  source 1..23: mol_type = other RNA
tgggaagtcaccgtggaaggctc

SEQ ID NO: 66597 - RNA, 23 nt, synthetic construct
  source 1..23: mol_type = other RNA
tggtcagctttgtgaggatccag

SEQ ID NO: 66598 - RNA, 23 nt, synthetic construct
  source 1..23: mol_type = other RNA
ggtccctggggtggaggacgggg

SEQ ID NO: 66599 - RNA, 23 nt, synthetic construct
  source 1..23: mol_type = other RNA
gtgccgtccctgggctggaggag

SEQ ID NO: 66600 - RNA, 23 nt, synthetic construct
  source 1..23: mol_type = other RNA
gtgggggtgtgggtggtccccgg

SEQ ID NO: 66601 - RNA, 23 nt, synthetic construct
  source 1..23: mol_type = other RNA
actgggggtgtgtgggtggtccc

SEQ ID NO: 66602 - RNA, 23 nt, synthetic construct
  source 1..23: mol_type = other RNA
ggtccctggggtggaggacgggg

SEQ ID NO: 66603 - RNA, 23 nt, synthetic construct
  source 1..23: mol_type = other RNA
ggtccctggggtggaggacgggg

SEQ ID NO: 66604 - RNA, 23 nt, synthetic construct
  source 1..23: mol_type = other RNA
gtgccgtccctgggctggaggag

SEQ ID NO: 66605 - RNA, 23 nt, synthetic construct
  source 1..23: mol_type = other RNA
gcactggggtgatgggtgttgtc

SEQ ID NO: 66606 - RNA, 23 nt, synthetic construct
  source 1..23: mol_type = other RNA
tggtggacatgggtgtggtggtc

SEQ ID NO: 66607 - RNA, 23 nt, synthetic construct
  source 1..23: mol_type = other RNA
atggtggacatgggtgtggtggt

SEQ ID NO: 66608 - RNA, 23 nt, synthetic construct
  source 1..23: mol_type = other RNA
gtggggaggtgggacaggcgccc

SEQ ID NO: 66609 - RNA, 23 nt, synthetic construct
  source 1..23: mol_type = other RNA
tcctccttcccatgcaccatggt

SEQ ID NO: 66610 - RNA, 23 nt, synthetic construct
  source 1..23: mol_type = other RNA
tggtgggtgggcaggtgaggtcg

SEQ ID NO: 66611 - RNA, 23 nt, synthetic construct
  source 1..23: mol_type = other RNA
gcaggctctgggggcaggtggtt

SEQ ID NO: 66612 - RNA, 23 nt, synthetic construct
  source 1..23: mol_type = other RNA
gtctgcagcggaaggtgggacag

SEQ ID NO: 66613 - RNA, 23 nt, synthetic construct
  source 1..23: mol_type = other RNA
tggcccctcacccttctggggcc

SEQ ID NO: 66614 - RNA, 23 nt, synthetic construct
  source 1..23: mol_type = other RNA
tcgtgcaccacctctccaggagc

SEQ ID NO: 66615 - RNA, 23 nt, synthetic construct
  source 1..23: mol_type = other RNA
ggcgtcacagggcaggggcttgc

SEQ ID NO: 66616 - RNA, 23 nt, synthetic construct
  source 1..23: mol_type = other RNA
agggcacctccagttccgcggct

SEQ ID NO: 66617 - RNA, 23 nt, synthetic construct
  source 1..23: mol_type = other RNA
gaaaaactgtccaaatgccctgc

SEQ ID NO: 66618 - RNA, 23 nt, synthetic construct
  source 1..23: mol_type = other RNA
tcccagtgacatcagggaggggc

SEQ ID NO: 66619 - RNA, 23 nt, synthetic construct
  source 1..23: mol_type = other RNA
gaggttgccattgttgttggggc

SEQ ID NO: 66620 - RNA, 23 nt, synthetic construct
  source 1..23: mol_type = other RNA
cgttgtggctggagttccaggac

SEQ ID NO: 66621 - RNA, 23 nt, synthetic construct
  source 1..23: mol_type = other RNA
gttgtggctggagttccaggaca

SEQ ID NO: 66622 - RNA, 23 nt, synthetic construct
  source 1..23: mol_type = other RNA
gagtcactgtgttgctggtggct

SEQ ID NO: 66623 - RNA, 23 nt, synthetic construct
  source 1..23: mol_type = other RNA
gcagaggagggagtcactgtgtt

SEQ ID NO: 66624 - RNA, 23 nt, synthetic construct
  source 1..23: mol_type = other RNA
gcagaggagggagtcactgtgct

SEQ ID NO: 66625 - RNA, 23 nt, synthetic construct
  source 1..23: mol_type = other RNA
gcagaggagggagtcactgtgct

SEQ ID NO: 66626 - RNA, 23 nt, synthetic construct
  source 1..23: mol_type = other RNA
tgagctgttcctggggtggaaga

SEQ ID NO: 66627 - RNA, 23 nt, synthetic construct
  source 1..23: mol_type = other RNA
gcagaggagggagtcactgtgct

SEQ ID NO: 66628 - RNA, 23 nt, synthetic construct
  source 1..23: mol_type = other RNA
ccccacggtggacgagctgggaa

SEQ ID NO: 66629 - RNA, 23 nt, synthetic construct
  source 1..23: mol_type = other RNA
gccagtgggtctcagggtggtga

SEQ ID NO: 66630 - RNA, 23 nt, synthetic construct
  source 1..23: mol_type = other RNA
agatggactcctgccctggcggg

SEQ ID NO: 66631 - RNA, 23 nt, synthetic construct
  source 1..23: mol_type = other RNA
cggtgaagctgctgtcggcacat

SEQ ID NO: 66632 - RNA, 23 nt, synthetic construct
  source 1..23: mol_type = other RNA
gctgttcctggggtggaagaggg

SEQ ID NO: 66633 - RNA, 23 nt, synthetic construct
  source 1..23: mol_type = other RNA
tgatcagtgatgggggagtacca

SEQ ID NO: 66634 - RNA, 23 nt, synthetic construct
  source 1..23: mol_type = other RNA
agtagtggttgtccaggtagagg

SEQ ID NO: 66635 - RNA, 23 nt, synthetic construct
  source 1..23: mol_type = other RNA
gcagccctggtgccacaggatgg

SEQ ID NO: 66636 - RNA, 23 nt, synthetic construct
  source 1..23: mol_type = other RNA
tgccggccggcaagggcagcggg

SEQ ID NO: 66637 - RNA, 23 nt, synthetic construct
  source 1..23: mol_type = other RNA
tcattgtcgtctctgtcctgggc

SEQ ID NO: 66638 - RNA, 23 nt, synthetic construct
  source 1..23: mol_type = other RNA
tggctttggagctggtgactgtg

SEQ ID NO: 66639 - RNA, 23 nt, synthetic construct
  source 1..23: mol_type = other RNA
tggctttggagctggtgactgtg

SEQ ID NO: 66640 - RNA, 23 nt, synthetic construct
  source 1..23: mol_type = other RNA
tggctttggagctggtgactgtg

SEQ ID NO: 66641 - RNA, 23 nt, synthetic construct
  source 1..23: mol_type = other RNA
tggctttggagctggtgactgtg

SEQ ID NO: 66642 - RNA, 23 nt, synthetic construct
  source 1..23: mol_type = other RNA
cacactcctggtgctgcatgttg

SEQ ID NO: 66643 - RNA, 23 nt, synthetic construct
  source 1..23: mol_type = other RNA
acccggccctctcgccaccgcct

SEQ ID NO: 66644 - RNA, 23 nt, synthetic construct
  source 1..23: mol_type = other RNA
cttgtcgtagcagccacactggg

SEQ ID NO: 66645 - RNA, 23 nt, synthetic construct
  source 1..23: mol_type = other RNA
ttgtcgtctctgtcctgggcgtg

SEQ ID NO: 66646 - RNA, 23 nt, synthetic construct
  source 1..23: mol_type = other RNA
ctttgggagggggagctgttctc

SEQ ID NO: 66647 - RNA, 23 nt, synthetic construct
  source 1..23: mol_type = other RNA
ggctttggagctggtgactgtgg

SEQ ID NO: 66648 - RNA, 23 nt, synthetic construct
  source 1..23: mol_type = other RNA
gtgtggtggctgtgcttctcagt

SEQ ID NO: 66649 - RNA, 23 nt, synthetic construct
  source 1..23: mol_type = other RNA
tgggtggtgcccaagatgcccga

SEQ ID NO: 66650 - RNA, 23 nt, synthetic construct
  source 1..23: mol_type = other RNA
ggctttggagctggtgactgtgg

SEQ ID NO: 66651 - RNA, 23 nt, synthetic construct
  source 1..23: mol_type = other RNA
gtgtggtggctgtgcttctcagt

SEQ ID NO: 66652 - RNA, 23 nt, synthetic construct
  source 1..23: mol_type = other RNA
gcgtgccgtccctgggctggagg

SEQ ID NO: 66653 - RNA, 23 nt, synthetic construct
  source 1..23: mol_type = other RNA
ctttgggagggggagctgttccc

SEQ ID NO: 66654 - RNA, 23 nt, synthetic construct
  source 1..23: mol_type = other RNA
ggtggattgtggacatggtggcc

SEQ ID NO: 66655 - RNA, 23 nt, synthetic construct
  source 1..23: mol_type = other RNA
gtgtggtggctgtgcttctcagt

SEQ ID NO: 66656 - RNA, 23 nt, synthetic construct
  source 1..23: mol_type = other RNA
aagaggggatggctgtaacgctg

SEQ ID NO: 66657 - RNA, 23 nt, synthetic construct
  source 1..23: mol_type = other RNA
tgggtggtgcccaagatgcccga

SEQ ID NO: 66658 - RNA, 23 nt, synthetic construct
  source 1..23: mol_type = other RNA
ggctttggagctggtgactgtgg

SEQ ID NO: 66659 - RNA, 23 nt, synthetic construct
  source 1..23: mol_type = other RNA
gtgtggtggctgtgcttctcagt

SEQ ID NO: 66660 - RNA, 23 nt, synthetic construct
  source 1..23: mol_type = other RNA
gcgtgccgtccctgggctggagg

SEQ ID NO: 66661 - RNA, 23 nt, synthetic construct
  source 1..23: mol_type = other RNA
ctttgggagggggagctgttccc

SEQ ID NO: 66662 - RNA, 23 nt, synthetic construct
  source 1..23: mol_type = other RNA
ggtggattgtggacatggtggcc

SEQ ID NO: 66663 - RNA, 23 nt, synthetic construct
  source 1..23: mol_type = other RNA
gggtggacgtggaactggtggcc

SEQ ID NO: 66664 - RNA, 23 nt, synthetic construct
  source 1..23: mol_type = other RNA
ggctttggagctggtgactgtgg

SEQ ID NO: 66665 - RNA, 23 nt, synthetic construct
  source 1..23: mol_type = other RNA
gtgtggtggctgtgcttctcagt

SEQ ID NO: 66666 - RNA, 23 nt, synthetic construct
  source 1..23: mol_type = other RNA
tgtggattgtggacatggtggac

SEQ ID NO: 66667 - RNA, 23 nt, synthetic construct
  source 1..23: mol_type = other RNA
cactttgggggtgtgagctgttc

SEQ ID NO: 66668 - RNA, 23 nt, synthetic construct
  source 1..23: mol_type = other RNA
acttggccattgaaggtgacgct

SEQ ID NO: 66669 - RNA, 23 nt, synthetic construct
  source 1..23: mol_type = other RNA
agagcggctgtggtgggcatggg

SEQ ID NO: 66670 - RNA, 23 nt, synthetic construct
  source 1..23: mol_type = other RNA
tacacatgtggcagggaagggcg

SEQ ID NO: 66671 - RNA, 23 nt, synthetic construct
  source 1..23: mol_type = other RNA
cccacccggccctctcgccaccg

SEQ ID NO: 66672 - RNA, 23 nt, synthetic construct
  source 1..23: mol_type = other RNA
atacctggtaccctctctgcctc

SEQ ID NO: 66673 - RNA, 23 nt, synthetic construct
  source 1..23: mol_type = other RNA
gacggggacgggcagggagggag

SEQ ID NO: 66674 - RNA, 23 nt, synthetic construct
  source 1..23: mol_type = other RNA
agaacaaggggcaggtgtccgga

SEQ ID NO: 66675 - RNA, 23 nt, synthetic construct
  source 1..23: mol_type = other RNA
gcgggtcttgctgggtgtggccg

SEQ ID NO: 66676 - RNA, 23 nt, synthetic construct
  source 1..23: mol_type = other RNA
gcgggtcttgctgggtgtggccg

SEQ ID NO: 66677 - RNA, 23 nt, synthetic construct
  source 1..23: mol_type = other RNA
gcgggtcttgctgggtgtggctg

SEQ ID NO: 66678 - RNA, 23 nt, synthetic construct
  source 1..23: mol_type = other RNA
gccctggttgtggtggccgtggt

SEQ ID NO: 66679 - RNA, 23 nt, synthetic construct
  source 1..23: mol_type = other RNA
gcgggtcttgctgggtgtggccg

SEQ ID NO: 66680 - RNA, 23 nt, synthetic construct
  source 1..23: mol_type = other RNA
cacagggtggaggaggggatggg

SEQ ID NO: 66681 - RNA, 23 nt, synthetic construct
  source 1..23: mol_type = other RNA
tcttgctgggtgtggccgtggct

SEQ ID NO: 66682 - RNA, 23 nt, synthetic construct
  source 1..23: mol_type = other RNA
tcttgctgggtgtggccgtggcc

SEQ ID NO: 66683 - RNA, 23 nt, synthetic construct
  source 1..23: mol_type = other RNA
cgtagtggctgctgtggtctgct

SEQ ID NO: 66684 - RNA, 23 nt, synthetic construct
  source 1..23: mol_type = other RNA
tcttgctgggtgtggccgtggcc

SEQ ID NO: 66685 - RNA, 23 nt, synthetic construct
  source 1..23: mol_type = other RNA
caggggagggcgaggacagcggg

SEQ ID NO: 66686 - RNA, 23 nt, synthetic construct
  source 1..23: mol_type = other RNA
tgtagtggctgctgtggtcagct

SEQ ID NO: 66687 - RNA, 23 nt, synthetic construct
  source 1..23: mol_type = other RNA
ggaggagggagtggctctggagc

SEQ ID NO: 66688 - RNA, 23 nt, synthetic construct
  source 1..23: mol_type = other RNA
gcagggaccgcccgtgtgtggtg

SEQ ID NO: 66689 - RNA, 23 nt, synthetic construct
  source 1..23: mol_type = other RNA
tgtagtggctgctgtggtcagct

SEQ ID NO: 66690 - RNA, 23 nt, synthetic construct
  source 1..23: mol_type = other RNA
ggagccctggtcagccccgggct

SEQ ID NO: 66691 - RNA, 23 nt, synthetic construct
  source 1..23: mol_type = other RNA
tccagccactctgaccaggcaca

SEQ ID NO: 66692 - RNA, 23 nt, synthetic construct
  source 1..23: mol_type = other RNA
tccagccactctgaccaggcaca

SEQ ID NO: 66693 - RNA, 23 nt, synthetic construct
  source 1..23: mol_type = other RNA
tccagccactctgaccaggcaca

SEQ ID NO: 66694 - RNA, 23 nt, synthetic construct
  source 1..23: mol_type = other RNA
tccagccactctgaccaggcaca

SEQ ID NO: 66695 - RNA, 23 nt, synthetic construct
  source 1..23: mol_type = other RNA
agagctgcgcgcgctgggggttg

SEQ ID NO: 66696 - RNA, 23 nt, synthetic construct
  source 1..23: mol_type = other RNA
aggtggagatgtgggccccgccc

SEQ ID NO: 66697 - RNA, 23 nt, synthetic construct
  source 1..23: mol_type = other RNA
gcaccacgatgaagaagctcgag

SEQ ID NO: 66698 - RNA, 23 nt, synthetic construct
  source 1..23: mol_type = other RNA
gagccctggtcagccccgggcta

SEQ ID NO: 66699 - RNA, 23 nt, synthetic construct
  source 1..23: mol_type = other RNA
ctctggttgtgggtgtggtggtt

SEQ ID NO: 66700 - RNA, 23 nt, synthetic construct
  source 1..23: mol_type = other RNA
accagtggccacagttgtggtgg

SEQ ID NO: 66701 - RNA, 23 nt, synthetic construct
  source 1..23: mol_type = other RNA
gaggtggccgtggtgtggcccgg

SEQ ID NO: 66702 - RNA, 23 nt, synthetic construct
  source 1..23: mol_type = other RNA
ctctggttgtgggtgtggtggtt

SEQ ID NO: 66703 - RNA, 23 nt, synthetic construct
  source 1..23: mol_type = other RNA
accagtggccacagttgtggtgg

SEQ ID NO: 66704 - RNA, 23 nt, synthetic construct
  source 1..23: mol_type = other RNA
aggagggagtcactgtgctgctg

SEQ ID NO: 66705 - RNA, 23 nt, synthetic construct
  source 1..23: mol_type = other RNA
gtggtctgctctgtgaggatcca

SEQ ID NO: 66706 - RNA, 23 nt, synthetic construct
  source 1..23: mol_type = other RNA
ctctggttgtgggtgtggtggtt

SEQ ID NO: 66707 - RNA, 23 nt, synthetic construct
  source 1..23: mol_type = other RNA
accagtggccacagttgtggtgg

SEQ ID NO: 66708 - RNA, 23 nt, synthetic construct
  source 1..23: mol_type = other RNA
aggagggagtcactgtgctgctg

SEQ ID NO: 66709 - RNA, 23 nt, synthetic construct
  source 1..23: mol_type = other RNA
accagtggccacagttgtggtgg

SEQ ID NO: 66710 - RNA, 23 nt, synthetic construct
  source 1..23: mol_type = other RNA
aggagggagtcactgtgctgctg

SEQ ID NO: 66711 - RNA, 23 nt, synthetic construct
  source 1..23: mol_type = other RNA
gaggtggccgtggtgtggcccgg

SEQ ID NO: 66712 - RNA, 23 nt, synthetic construct
  source 1..23: mol_type = other RNA
accagtggccacagttgtggtgg

SEQ ID NO: 66713 - RNA, 23 nt, synthetic construct
  source 1..23: mol_type = other RNA
tggactccaccctcagcctcaca

SEQ ID NO: 66714 - RNA, 23 nt, synthetic construct
  source 1..23: mol_type = other RNA
ggacccgcctctcctggcagcag

SEQ ID NO: 66715 - RNA, 23 nt, synthetic construct
  source 1..23: mol_type = other RNA
gacagcagtggcctcctgggccg

SEQ ID NO: 66716 - RNA, 23 nt, synthetic construct
  source 1..23: mol_type = other RNA
cacccacggggtgggcagcagga

SEQ ID NO: 66717 - RNA, 23 nt, synthetic construct
  source 1..23: mol_type = other RNA
ggctttgggatgctgacccctct

SEQ ID NO: 66718 - RNA, 23 nt, synthetic construct
  source 1..23: mol_type = other RNA
gctcctcccgctgcccattgatg

SEQ ID NO: 66719 - RNA, 23 nt, synthetic construct
  source 1..23: mol_type = other RNA
caccaggaggccagtgcggctgt

SEQ ID NO: 66720 - RNA, 23 nt, synthetic construct
  source 1..23: mol_type = other RNA
gatgctgaccttgatgtagtccc

SEQ ID NO: 66721 - RNA, 23 nt, synthetic construct
  source 1..23: mol_type = other RNA
ggctgggtgggcacttcgggtag

SEQ ID NO: 66722 - RNA, 23 nt, synthetic construct
  source 1..23: mol_type = other RNA
tgagctggacccagtctgcgagg

SEQ ID NO: 66723 - RNA, 23 nt, synthetic construct
  source 1..23: mol_type = other RNA
gggtgtggctgtggacatggtgg

SEQ ID NO: 66724 - RNA, 23 nt, synthetic construct
  source 1..23: mol_type = other RNA
tgggtgtggtggttgtgctgatc

SEQ ID NO: 66725 - RNA, 23 nt, synthetic construct
  source 1..23: mol_type = other RNA
cccatggtcaccaccgtggttat

SEQ ID NO: 66726 - RNA, 23 nt, synthetic construct
  source 1..23: mol_type = other RNA
gttcctgcagaccaggccaaagt

SEQ ID NO: 66727 - RNA, 23 nt, synthetic construct
  source 1..23: mol_type = other RNA
gcagttgcctgggtggaggaggc

SEQ ID NO: 66728 - RNA, 23 nt, synthetic construct
  source 1..23: mol_type = other RNA
gggtgtggctgtggacatggtgg

SEQ ID NO: 66729 - RNA, 23 nt, synthetic construct
  source 1..23: mol_type = other RNA
tgggtgtggtggttgtgctgatc

SEQ ID NO: 66730 - RNA, 23 nt, synthetic construct
  source 1..23: mol_type = other RNA
cccatggtcaccaccgtggttat

SEQ ID NO: 66731 - RNA, 23 nt, synthetic construct
  source 1..23: mol_type = other RNA
gttcctgcagaccaggccaaagt

SEQ ID NO: 66732 - RNA, 23 nt, synthetic construct
  source 1..23: mol_type = other RNA
gggtgtggctgtggacatggtgg

SEQ ID NO: 66733 - RNA, 23 nt, synthetic construct
  source 1..23: mol_type = other RNA
tgggtgtggtggttgtgctgatc

SEQ ID NO: 66734 - RNA, 23 nt, synthetic construct
  source 1..23: mol_type = other RNA
gttcctgcagaccaggccaaagt

SEQ ID NO: 66735 - RNA, 23 nt, synthetic construct
  source 1..23: mol_type = other RNA
gcagttgcctgggtggaggaggc

SEQ ID NO: 66736 - RNA, 23 nt, synthetic construct
  source 1..23: mol_type = other RNA
gggtgtggctgtggacatggtgg

SEQ ID NO: 66737 - RNA, 23 nt, synthetic construct
  source 1..23: mol_type = other RNA
tgggtgtggtggttgtgctgatc

SEQ ID NO: 66738 - RNA, 23 nt, synthetic construct
  source 1..23: mol_type = other RNA
gttcctgcagaccaggccaaagt

SEQ ID NO: 66739 - RNA, 23 nt, synthetic construct
  source 1..23: mol_type = other RNA
gcagttgcctgggtggaggaggc

SEQ ID NO: 66740 - RNA, 23 nt, synthetic construct
  source 1..23: mol_type = other RNA
gggtgtggctgtggacatggtgg

SEQ ID NO: 66741 - RNA, 23 nt, synthetic construct
  source 1..23: mol_type = other RNA
tgggtgtggtggttgtgctgatc

SEQ ID NO: 66742 - RNA, 23 nt, synthetic construct
  source 1..23: mol_type = other RNA
agtagaggaggtgtggattgtgg

SEQ ID NO: 66743 - RNA, 23 nt, synthetic construct
  source 1..23: mol_type = other RNA
ccctgcagctggacacatctggg

SEQ ID NO: 66744 - RNA, 23 nt, synthetic construct
  source 1..23: mol_type = other RNA
ctggcagtggggggtgtgccagt

SEQ ID NO: 66745 - RNA, 23 nt, synthetic construct
  source 1..23: mol_type = other RNA
gttaccctgcagcaggcatggac

SEQ ID NO: 66746 - RNA, 23 nt, synthetic construct
  source 1..23: mol_type = other RNA
tgcattctcccagctcggctcca

SEQ ID NO: 66747 - RNA, 23 nt, synthetic construct
  source 1..23: mol_type = other RNA
agcggcaggcggcgaaggtgggg

SEQ ID NO: 66748 - RNA, 23 nt, synthetic construct
  source 1..23: mol_type = other RNA
caggtgtggtggcggtggtggtc

SEQ ID NO: 66749 - RNA, 23 nt, synthetic construct
  source 1..23: mol_type = other RNA
gtgggaagtcaccgtggaaggct

SEQ ID NO: 66750 - RNA, 23 nt, synthetic construct
  source 1..23: mol_type = other RNA
caggtgtggtggcggtggtggtc

SEQ ID NO: 66751 - RNA, 23 nt, synthetic construct
  source 1..23: mol_type = other RNA
gatttggtggctgtgcttgtcag

SEQ ID NO: 66752 - RNA, 23 nt, synthetic construct
  source 1..23: mol_type = other RNA
caggtgtggtggcggtggtggtc

SEQ ID NO: 66753 - RNA, 23 nt, synthetic construct
  source 1..23: mol_type = other RNA
gtgggaagtcaccgtggaaggct

SEQ ID NO: 66754 - RNA, 23 nt, synthetic construct
  source 1..23: mol_type = other RNA
caggtgtggtggcggtggtggtc

SEQ ID NO: 66755 - RNA, 23 nt, synthetic construct
  source 1..23: mol_type = other RNA
gatttggtggctgtgcttgtcag

SEQ ID NO: 66756 - RNA, 23 nt, synthetic construct
  source 1..23: mol_type = other RNA
cagaagcagccctccgccatccc

SEQ ID NO: 66757 - RNA, 23 nt, synthetic construct
  source 1..23: mol_type = other RNA
ctcccacctccggttcctgcagg

SEQ ID NO: 66758 - RNA, 23 nt, synthetic construct
  source 1..23: mol_type = other RNA
cgtgtggggactgctggggggca

SEQ ID NO: 66759 - RNA, 23 nt, synthetic construct
  source 1..23: mol_type = other RNA
cgtgtggggactgctgggggaca

SEQ ID NO: 66760 - RNA, 23 nt, synthetic construct
  source 1..23: mol_type = other RNA
cgtgtggggactgctggggggca

SEQ ID NO: 66761 - RNA, 23 nt, synthetic construct
  source 1..23: mol_type = other RNA
cgtgtggggactgctgggggaca

SEQ ID NO: 66762 - RNA, 23 nt, synthetic construct
  source 1..23: mol_type = other RNA
gcgggtgtggtggccgtgctggt

SEQ ID NO: 66763 - RNA, 23 nt, synthetic construct
  source 1..23: mol_type = other RNA
cacgtggtccacagggtggagga

SEQ ID NO: 66764 - RNA, 23 nt, synthetic construct
  source 1..23: mol_type = other RNA
ggcacacaggcaggctctggggg

SEQ ID NO: 66765 - RNA, 23 nt, synthetic construct
  source 1..23: mol_type = other RNA
tgaaggccgggaggccgttgaag

SEQ ID NO: 66766 - RNA, 23 nt, synthetic construct
  source 1..23: mol_type = other RNA
cgcagagctgcgcgcgctggggg

SEQ ID NO: 66767 - RNA, 23 nt, synthetic construct
  source 1..23: mol_type = other RNA
ccccgccctgcacagagcaggtg

SEQ ID NO: 66768 - RNA, 23 nt, synthetic construct
  source 1..23: mol_type = other RNA
gaggctcccaggcagcttagctt

SEQ ID NO: 66769 - RNA, 23 nt, synthetic construct
  source 1..23: mol_type = other RNA
agctgttgctgcagtccaggtac

SEQ ID NO: 66770 - RNA, 23 nt, synthetic construct
  source 1..23: mol_type = other RNA
aaggtcccctcttggaggatcag

SEQ ID NO: 66771 - RNA, 23 nt, synthetic construct
  source 1..23: mol_type = other RNA
gacagagcgggggactctgttgg

SEQ ID NO: 66772 - RNA, 23 nt, synthetic construct
  source 1..23: mol_type = other RNA
ctgagctggacccagtctgcgag

SEQ ID NO: 66773 - RNA, 23 nt, synthetic construct
  source 1..23: mol_type = other RNA
tctgtggagcctgcaggcgtcgt

SEQ ID NO: 66774 - RNA, 23 nt, synthetic construct
  source 1..23: mol_type = other RNA
cagcgtgggtggctgtgaggggc

SEQ ID NO: 66775 - RNA, 23 nt, synthetic construct
  source 1..23: mol_type = other RNA
gggagctgttctcagggtggagg

SEQ ID NO: 66776 - RNA, 23 nt, synthetic construct
  source 1..23: mol_type = other RNA
tgggtgtggtggccgtggtggtc

SEQ ID NO: 66777 - RNA, 23 nt, synthetic construct
  source 1..23: mol_type = other RNA
tgtggtggctgtgcttctcagtg

SEQ ID NO: 66778 - RNA, 23 nt, synthetic construct
  source 1..23: mol_type = other RNA
tccaggtggtgcccagggaggaa

SEQ ID NO: 66779 - RNA, 23 nt, synthetic construct
  source 1..23: mol_type = other RNA
ggagggtgtggctgtggacatgg

SEQ ID NO: 66780 - RNA, 23 nt, synthetic construct
  source 1..23: mol_type = other RNA
ctctggagtggaggagggtgtgg

SEQ ID NO: 66781 - RNA, 23 nt, synthetic construct
  source 1..23: mol_type = other RNA
ggccacagagccggtggccccag

SEQ ID NO: 66782 - RNA, 23 nt, synthetic construct
  source 1..23: mol_type = other RNA
gttgtgctgatccacactggagg

SEQ ID NO: 66783 - RNA, 23 nt, synthetic construct
  source 1..23: mol_type = other RNA
tctggttgtgggtgtggtggttg

SEQ ID NO: 66784 - RNA, 23 nt, synthetic construct
  source 1..23: mol_type = other RNA
actgtgttgctggtggctgcagg

SEQ ID NO: 66785 - RNA, 23 nt, synthetic construct
  source 1..23: mol_type = other RNA
gggggtgtgtgggtggtccctag

SEQ ID NO: 66786 - RNA, 23 nt, synthetic construct
  source 1..23: mol_type = other RNA
aagtcaccgtggaaggctctgtg

SEQ ID NO: 66787 - RNA, 23 nt, synthetic construct
  source 1..23: mol_type = other RNA
tgcagaccaggccaaagtccagg

SEQ ID NO: 66788 - RNA, 23 nt, synthetic construct
  source 1..23: mol_type = other RNA
tgtggtggctgtgcttctcagtg

SEQ ID NO: 66789 - RNA, 23 nt, synthetic construct
  source 1..23: mol_type = other RNA
tccaggtggtgcccagggaggag

SEQ ID NO: 66790 - RNA, 23 nt, synthetic construct
  source 1..23: mol_type = other RNA
ggagggtgtggctgtggacatgg

SEQ ID NO: 66791 - RNA, 23 nt, synthetic construct
  source 1..23: mol_type = other RNA
ctctggagtggaggagggtgtgg

SEQ ID NO: 66792 - RNA, 23 nt, synthetic construct
  source 1..23: mol_type = other RNA
ggccacagagccggtggccccgg

SEQ ID NO: 66793 - RNA, 23 nt, synthetic construct
  source 1..23: mol_type = other RNA
gttgtgctgatccacactggaag

SEQ ID NO: 66794 - RNA, 23 nt, synthetic construct
  source 1..23: mol_type = other RNA
tctggttgtgggtgtggtggttg

SEQ ID NO: 66795 - RNA, 23 nt, synthetic construct
  source 1..23: mol_type = other RNA
gggggtgtgtgggtggtccctag

SEQ ID NO: 66796 - RNA, 23 nt, synthetic construct
  source 1..23: mol_type = other RNA
tgcagaccaggccaaagtccagg

SEQ ID NO: 66797 - RNA, 23 nt, synthetic construct
  source 1..23: mol_type = other RNA
cttggactggaggaggaagtggc

SEQ ID NO: 66798 - RNA, 23 nt, synthetic construct
  source 1..23: mol_type = other RNA
ttggtggctgtgcttgtcagcac

SEQ ID NO: 66799 - RNA, 23 nt, synthetic construct
  source 1..23: mol_type = other RNA
aagggtgaaggaggggatgggtg

SEQ ID NO: 66800 - RNA, 23 nt, synthetic construct
  source 1..23: mol_type = other RNA
gtggattgtggacatggtggcca

SEQ ID NO: 66801 - RNA, 23 nt, synthetic construct
  source 1..23: mol_type = other RNA
tggtcagcactgtggaggtgtgg

SEQ ID NO: 66802 - RNA, 23 nt, synthetic construct
  source 1..23: mol_type = other RNA
tggggccagtggctgcagttgta

SEQ ID NO: 66803 - RNA, 23 nt, synthetic construct
  source 1..23: mol_type = other RNA
agttgcccgggtggaggaggcgg

SEQ ID NO: 66804 - RNA, 23 nt, synthetic construct
  source 1..23: mol_type = other RNA
tgtggtggctgtgcttctcagtg

SEQ ID NO: 66805 - RNA, 23 nt, synthetic construct
  source 1..23: mol_type = other RNA
ggagggtgtggctgtggacatgg

SEQ ID NO: 66806 - RNA, 23 nt, synthetic construct
  source 1..23: mol_type = other RNA
ggccacagagccggtggccctgg

SEQ ID NO: 66807 - RNA, 23 nt, synthetic construct
  source 1..23: mol_type = other RNA
gttgtgctgatccacactggagg

SEQ ID NO: 66808 - RNA, 23 nt, synthetic construct
  source 1..23: mol_type = other RNA
tctggttgtgggtgtggtggttg

SEQ ID NO: 66809 - RNA, 23 nt, synthetic construct
  source 1..23: mol_type = other RNA
gggggtgtgtgggtggtccctag

SEQ ID NO: 66810 - RNA, 23 nt, synthetic construct
  source 1..23: mol_type = other RNA
aagtcaccgtggaaggctctgtg

SEQ ID NO: 66811 - RNA, 23 nt, synthetic construct
  source 1..23: mol_type = other RNA
tgcagaccaggccaaagtccagg

SEQ ID NO: 66812 - RNA, 23 nt, synthetic construct
  source 1..23: mol_type = other RNA
tgtggtggctgtgcttctcagtg

SEQ ID NO: 66813 - RNA, 23 nt, synthetic construct
  source 1..23: mol_type = other RNA
tccaggtggtgcccagggaggag

SEQ ID NO: 66814 - RNA, 23 nt, synthetic construct
  source 1..23: mol_type = other RNA
ggagggtgtggctgtggacatgg

SEQ ID NO: 66815 - RNA, 23 nt, synthetic construct
  source 1..23: mol_type = other RNA
ctctggagtggaggagggtgtgg

SEQ ID NO: 66816 - RNA, 23 nt, synthetic construct
  source 1..23: mol_type = other RNA
ggccacagagccggtggccctgg

SEQ ID NO: 66817 - RNA, 23 nt, synthetic construct
  source 1..23: mol_type = other RNA
gttgtgctgatccacactggagg

SEQ ID NO: 66818 - RNA, 23 nt, synthetic construct
  source 1..23: mol_type = other RNA
actggttgtgggtgtggtggttg

SEQ ID NO: 66819 - RNA, 23 nt, synthetic construct
  source 1..23: mol_type = other RNA
gggggtgtgtgggtggtccctag

SEQ ID NO: 66820 - RNA, 23 nt, synthetic construct
  source 1..23: mol_type = other RNA
tgcagaccaggccaaagtccagg

SEQ ID NO: 66821 - RNA, 23 nt, synthetic construct
  source 1..23: mol_type = other RNA
gggtgtggtggccgggctggtca

SEQ ID NO: 66822 - RNA, 23 nt, synthetic construct
  source 1..23: mol_type = other RNA
cttggactggaggaggaagtggc

SEQ ID NO: 66823 - RNA, 23 nt, synthetic construct
  source 1..23: mol_type = other RNA
ttggtggctgtgcttgtcagcac

SEQ ID NO: 66824 - RNA, 23 nt, synthetic construct
  source 1..23: mol_type = other RNA
gtcccaagggtggaggaggggat

SEQ ID NO: 66825 - RNA, 23 nt, synthetic construct
  source 1..23: mol_type = other RNA
gtggattgtggacatggtggcca

SEQ ID NO: 66826 - RNA, 23 nt, synthetic construct
  source 1..23: mol_type = other RNA
tggtcagcactgtggaggtgtgg

SEQ ID NO: 66827 - RNA, 23 nt, synthetic construct
  source 1..23: mol_type = other RNA
tggggccagtggctgcagttgta

SEQ ID NO: 66828 - RNA, 23 nt, synthetic construct
  source 1..23: mol_type = other RNA
tgtggtggctgtgcttctcagtg

SEQ ID NO: 66829 - RNA, 23 nt, synthetic construct
  source 1..23: mol_type = other RNA
tccaggtggtgcccagggaggag

SEQ ID NO: 66830 - RNA, 23 nt, synthetic construct
  source 1..23: mol_type = other RNA
ggagggtgtggctgtggacatgg

SEQ ID NO: 66831 - RNA, 23 nt, synthetic construct
  source 1..23: mol_type = other RNA
ctctggagtggaggagggtgtgg

SEQ ID NO: 66832 - RNA, 23 nt, synthetic construct
  source 1..23: mol_type = other RNA
ggccacagagccggtggccccgg

SEQ ID NO: 66833 - RNA, 23 nt, synthetic construct
  source 1..23: mol_type = other RNA
gttgtgctgatccacactggagg

SEQ ID NO: 66834 - RNA, 23 nt, synthetic construct
  source 1..23: mol_type = other RNA
actggttgtgggtgtggtggttg

SEQ ID NO: 66835 - RNA, 23 nt, synthetic construct
  source 1..23: mol_type = other RNA
cttggactggaggaggaagtggc

SEQ ID NO: 66836 - RNA, 23 nt, synthetic construct
  source 1..23: mol_type = other RNA
cgtggtccacagggtggaggagg

SEQ ID NO: 66837 - RNA, 23 nt, synthetic construct
  source 1..23: mol_type = other RNA
acgtggtccacagggtggaggag

SEQ ID NO: 66838 - RNA, 23 nt, synthetic construct
  source 1..23: mol_type = other RNA
gtggattgtggacatggtggaca

SEQ ID NO: 66839 - RNA, 23 nt, synthetic construct
  source 1..23: mol_type = other RNA
tggtcagcactgtggaggtgtgg

SEQ ID NO: 66840 - RNA, 23 nt, synthetic construct
  source 1..23: mol_type = other RNA
gagaaaaactgtccaaatgccct

SEQ ID NO: 66841 - RNA, 23 nt, synthetic construct
  source 1..23: mol_type = other RNA
ggccacaggctttgggtccagca

SEQ ID NO: 66842 - RNA, 23 nt, synthetic construct
  source 1..23: mol_type = other RNA
gccccacatgctgcagatgcact

SEQ ID NO: 66843 - RNA, 23 nt, synthetic construct
  source 1..23: mol_type = other RNA
catggtgacagtgaggacgatat

SEQ ID NO: 66844 - RNA, 23 nt, synthetic construct
  source 1..23: mol_type = other RNA
gagttgcaggtggcaggctgtat

SEQ ID NO: 66845 - RNA, 23 nt, synthetic construct
  source 1..23: mol_type = other RNA
tcacccacggggtgggcagcagg

SEQ ID NO: 66846 - RNA, 23 nt, synthetic construct
  source 1..23: mol_type = other RNA
atcagggaggggcaaggccaagg

SEQ ID NO: 66847 - RNA, 23 nt, synthetic construct
  source 1..23: mol_type = other RNA
gctgacccctctctgacctggcc

SEQ ID NO: 66848 - RNA, 23 nt, synthetic construct
  source 1..23: mol_type = other RNA
gggctttgggatgctgacccctc

SEQ ID NO: 66849 - RNA, 23 nt, synthetic construct
  source 1..23: mol_type = other RNA
gggtttatttgcaaaactgggct

SEQ ID NO: 66850 - RNA, 23 nt, synthetic construct
  source 1..23: mol_type = other RNA
catccatggtgtgccctgcattc

SEQ ID NO: 66851 - RNA, 23 nt, synthetic construct
  source 1..23: mol_type = other RNA
ggactggcagttgctgacccacc

SEQ ID NO: 66852 - RNA, 23 nt, synthetic construct
  source 1..23: mol_type = other RNA
gctggggtgtgggaagtccccgt

SEQ ID NO: 66853 - RNA, 23 nt, synthetic construct
  source 1..23: mol_type = other RNA
gctggggtgtgggaagtccccgt

SEQ ID NO: 66854 - RNA, 23 nt, synthetic construct
  source 1..23: mol_type = other RNA
gaggagggggtgactgtgaagcc

SEQ ID NO: 66855 - RNA, 23 nt, synthetic construct
  source 1..23: mol_type = other RNA
ggtcagcactggggggatgggag

SEQ ID NO: 66856 - RNA, 23 nt, synthetic construct
  source 1..23: mol_type = other RNA
ggtcagcactggggggatgggag

SEQ ID NO: 66857 - RNA, 23 nt, synthetic construct
  source 1..23: mol_type = other RNA
gcaggggtccttgggtgccaggg

SEQ ID NO: 66858 - RNA, 23 nt, synthetic construct
  source 1..23: mol_type = other RNA
gtggccacagagccggtggcccc

SEQ ID NO: 66859 - RNA, 23 nt, synthetic construct
  source 1..23: mol_type = other RNA
gtggccacagagccggtggcccc

SEQ ID NO: 66860 - RNA, 23 nt, synthetic construct
  source 1..23: mol_type = other RNA
gtggccacagagccggtggccct

SEQ ID NO: 66861 - RNA, 23 nt, synthetic construct
  source 1..23: mol_type = other RNA
gtggccacagagccggtggccct

SEQ ID NO: 66862 - RNA, 23 nt, synthetic construct
  source 1..23: mol_type = other RNA
gtggccacagagccggtggcccc

SEQ ID NO: 66863 - RNA, 23 nt, synthetic construct
  source 1..23: mol_type = other RNA
gcacggagcgcggggtgccacac

SEQ ID NO: 66864 - RNA, 23 nt, synthetic construct
  source 1..23: mol_type = other RNA
ctggtgctgcatgttgagggggc

SEQ ID NO: 66865 - RNA, 23 nt, synthetic construct
  source 1..23: mol_type = other RNA
cgtggatccagtggactcagtcg

SEQ ID NO: 66866 - RNA, 23 nt, synthetic construct
  source 1..23: mol_type = other RNA
ctgttgtggtcagctttgtgagg

SEQ ID NO: 66867 - RNA, 23 nt, synthetic construct
  source 1..23: mol_type = other RNA
cgtggatccagtggactcagtcg

SEQ ID NO: 66868 - RNA, 23 nt, synthetic construct
  source 1..23: mol_type = other RNA
cgccatccatggtgtgccctgca

SEQ ID NO: 66869 - RNA, 23 nt, synthetic construct
  source 1..23: mol_type = other RNA
cgcgcgctgggggttggagcagg

SEQ ID NO: 66870 - RNA, 23 nt, synthetic construct
  source 1..23: mol_type = other RNA
ggagggagtcactgtgttgctgg

SEQ ID NO: 66871 - RNA, 23 nt, synthetic construct
  source 1..23: mol_type = other RNA
actggtggcccttgtcgtggtgg

SEQ ID NO: 66872 - RNA, 23 nt, synthetic construct
  source 1..23: mol_type = other RNA
actggtggcccttgtcgtggtgg

SEQ ID NO: 66873 - RNA, 23 nt, synthetic construct
  source 1..23: mol_type = other RNA
tggattttgtggctgtgcttgtc

SEQ ID NO: 66874 - RNA, 23 nt, synthetic construct
  source 1..23: mol_type = other RNA
cccatgcaccatggtgacagtga

SEQ ID NO: 66875 - RNA, 23 nt, synthetic construct
  source 1..23: mol_type = other RNA
ccacgggtgtgtgggggagccat

SEQ ID NO: 66876 - RNA, 23 nt, synthetic construct
  source 1..23: mol_type = other RNA
gtgctgcgcgggcgctccggccg

SEQ ID NO: 66877 - RNA, 23 nt, synthetic construct
  source 1..23: mol_type = other RNA
cgacctcagccctgagttaccct

SEQ ID NO: 66878 - RNA, 23 nt, synthetic construct
  source 1..23: mol_type = other RNA
tctggagtagaggaggtgtggat

SEQ ID NO: 66879 - RNA, 23 nt, synthetic construct
  source 1..23: mol_type = other RNA
acacaggccacaggtctggttgg

SEQ ID NO: 66880 - RNA, 23 nt, synthetic construct
  source 1..23: mol_type = other RNA
ggtggccgaagtccaggctgtgc

SEQ ID NO: 66881 - RNA, 23 nt, synthetic construct
  source 1..23: mol_type = other RNA
gtgggtggtgcccaagatgcccg

SEQ ID NO: 66882 - RNA, 23 nt, synthetic construct
  source 1..23: mol_type = other RNA
ggtggccgaagtccaggctgtgc

SEQ ID NO: 66883 - RNA, 23 nt, synthetic construct
  source 1..23: mol_type = other RNA
ggtggccgaagtccaggctgtgc

SEQ ID NO: 66884 - RNA, 23 nt, synthetic construct
  source 1..23: mol_type = other RNA
gtgggtggtgcccaagatgcccg

SEQ ID NO: 66885 - RNA, 23 nt, synthetic construct
  source 1..23: mol_type = other RNA
ggtggccgaagtccaggctgtgc

SEQ ID NO: 66886 - RNA, 23 nt, synthetic construct
  source 1..23: mol_type = other RNA
cagtgacatcagggaggggcaag

SEQ ID NO: 66887 - RNA, 23 nt, synthetic construct
  source 1..23: mol_type = other RNA
gcggcagtgctcagagaacacgt

SEQ ID NO: 66888 - RNA, 23 nt, synthetic construct
  source 1..23: mol_type = other RNA
ctcgatgtcagccagcacagggc

SEQ ID NO: 66889 - RNA, 23 nt, synthetic construct
  source 1..23: mol_type = other RNA
aggtggtggtacctggggccgag

SEQ ID NO: 66890 - RNA, 23 nt, synthetic construct
  source 1..23: mol_type = other RNA
agtggaggaggggtggattgtgg

SEQ ID NO: 66891 - RNA, 23 nt, synthetic construct
  source 1..23: mol_type = other RNA
agtggaggaggggtggattgtgg

SEQ ID NO: 66892 - RNA, 23 nt, synthetic construct
  source 1..23: mol_type = other RNA
ggtgtggctgtggacatggtggc

SEQ ID NO: 66893 - RNA, 23 nt, synthetic construct
  source 1..23: mol_type = other RNA
ggtgtggctgtggacatggtggc

SEQ ID NO: 66894 - RNA, 23 nt, synthetic construct
  source 1..23: mol_type = other RNA
ggtgtggctgtggacatggtggc

SEQ ID NO: 66895 - RNA, 23 nt, synthetic construct
  source 1..23: mol_type = other RNA
ggtgtggctgtggacatggtggc

SEQ ID NO: 66896 - RNA, 23 nt, synthetic construct
  source 1..23: mol_type = other RNA
ggtgtggctgtggacatggtggc

SEQ ID NO: 66897 - RNA, 23 nt, synthetic construct
  source 1..23: mol_type = other RNA
agcatggccgccagagccaacac

SEQ ID NO: 66898 - RNA, 23 nt, synthetic construct
  source 1..23: mol_type = other RNA
agtgggctggcaggcatccacca

SEQ ID NO: 66899 - RNA, 23 nt, synthetic construct
  source 1..23: mol_type = other RNA
ccgtcacggggcctgagctggac

SEQ ID NO: 66900 - RNA, 23 nt, synthetic construct
  source 1..23: mol_type = other RNA
tctcggcctgagaggtggacagc

SEQ ID NO: 66901 - RNA, 23 nt, synthetic construct
  source 1..23: mol_type = other RNA
tggtggccgtgctggtcagcact

SEQ ID NO: 66902 - RNA, 23 nt, synthetic construct
  source 1..23: mol_type = other RNA
tggtggccgtgctggtcagcact

SEQ ID NO: 66903 - RNA, 23 nt, synthetic construct
  source 1..23: mol_type = other RNA
tggtggccgtgctggtcagcact

SEQ ID NO: 66904 - RNA, 23 nt, synthetic construct
  source 1..23: mol_type = other RNA
ccgccatcccctccagctgtggg

SEQ ID NO: 66905 - RNA, 23 nt, synthetic construct
  source 1..23: mol_type = other RNA
ccagtgacatcagggaggggcaa

SEQ ID NO: 66906 - RNA, 23 nt, synthetic construct
  source 1..23: mol_type = other RNA
gccggcaagggcagcgggtccgg

SEQ ID NO: 66907 - RNA, 23 nt, synthetic construct
  source 1..23: mol_type = other RNA
ggcctccaccaccccgctgaggg

SEQ ID NO: 66908 - RNA, 23 nt, synthetic construct
  source 1..23: mol_type = other RNA
ggatgccactgggtgtgcagtta

SEQ ID NO: 66909 - RNA, 23 nt, synthetic construct
  source 1..23: mol_type = other RNA
gccttcctgatgatggtgccgtt

SEQ ID NO: 66910 - RNA, 23 nt, synthetic construct
  source 1..23: mol_type = other RNA
gtctccgcctcccaggccgggct

SEQ ID NO: 66911 - RNA, 23 nt, synthetic construct
  source 1..23: mol_type = other RNA
acctggggccgagggggtgaccg

SEQ ID NO: 66912 - RNA, 23 nt, synthetic construct
  source 1..23: mol_type = other RNA
ggctgctgtggtctgctctgtga

SEQ ID NO: 66913 - RNA, 23 nt, synthetic construct
  source 1..23: mol_type = other RNA
tcagcactgtggaggtgtgggtg

SEQ ID NO: 66914 - RNA, 23 nt, synthetic construct
  source 1..23: mol_type = other RNA
gagttgtccctggagttgaggag

SEQ ID NO: 66915 - RNA, 23 nt, synthetic construct
  source 1..23: mol_type = other RNA
tcagcactgtggaggtgtgggtg

SEQ ID NO: 66916 - RNA, 23 nt, synthetic construct
  source 1..23: mol_type = other RNA
tcagcactgtggaggtgtgggtg

SEQ ID NO: 66917 - RNA, 23 nt, synthetic construct
  source 1..23: mol_type = other RNA
atgctgcagatgcactcgcactc

SEQ ID NO: 66918 - RNA, 23 nt, synthetic construct
  source 1..23: mol_type = other RNA
ggcagccgggcctggaagacttg

SEQ ID NO: 66919 - RNA, 23 nt, synthetic construct
  source 1..23: mol_type = other RNA
gactggcagttgctgacccaccg

SEQ ID NO: 66920 - RNA, 23 nt, synthetic construct
  source 1..23: mol_type = other RNA
tgtaggtgtgcaggatggctgag

SEQ ID NO: 66921 - RNA, 23 nt, synthetic construct
  source 1..23: mol_type = other RNA
gcggctctttggaagcggtgctg

SEQ ID NO: 66922 - RNA, 23 nt, synthetic construct
  source 1..23: mol_type = other RNA
gctgctcacagactgcccctccg

SEQ ID NO: 66923 - RNA, 23 nt, synthetic construct
  source 1..23: mol_type = other RNA
gtgacatcagggaggggcaaggc

SEQ ID NO: 66924 - RNA, 23 nt, synthetic construct
  source 1..23: mol_type = other RNA
agatgccctcctcgtccgtgcag

SEQ ID NO: 66925 - RNA, 23 nt, synthetic construct
  source 1..23: mol_type = other RNA
cggcaagtgggctggcaggcatc

SEQ ID NO: 66926 - RNA, 23 nt, synthetic construct
  source 1..23: mol_type = other RNA
tcccggggtggaggacggggtgg

SEQ ID NO: 66927 - RNA, 23 nt, synthetic construct
  source 1..23: mol_type = other RNA
gaggagggggtggacgtggaact

SEQ ID NO: 66928 - RNA, 23 nt, synthetic construct
  source 1..23: mol_type = other RNA
gggttgatgatggagtggcagcg

SEQ ID NO: 66929 - RNA, 23 nt, synthetic construct
  source 1..23: mol_type = other RNA
actggatgccactgggtgtgcag

SEQ ID NO: 66930 - RNA, 23 nt, synthetic construct
  source 1..23: mol_type = other RNA
ggttgctgctagggtgtgggaag

SEQ ID NO: 66931 - RNA, 23 nt, synthetic construct
  source 1..23: mol_type = other RNA
ggtggtggagccggtggctgtga

SEQ ID NO: 66932 - RNA, 23 nt, synthetic construct
  source 1..23: mol_type = other RNA
gctggtggctgcgggtgtggtgg

SEQ ID NO: 66933 - RNA, 23 nt, synthetic construct
  source 1..23: mol_type = other RNA
gagcactgcaggggtgcgggtgg

SEQ ID NO: 66934 - RNA, 23 nt, synthetic construct
  source 1..23: mol_type = other RNA
cggaggacactggcggtggggag

SEQ ID NO: 66935 - RNA, 23 nt, synthetic construct
  source 1..23: mol_type = other RNA
gacagcagtcgccctcctcctgg

SEQ ID NO: 66936 - RNA, 23 nt, synthetic construct
  source 1..23: mol_type = other RNA
ggggggacggggacgggcaggga

SEQ ID NO: 66937 - RNA, 23 nt, synthetic construct
  source 1..23: mol_type = other RNA
gggtggggggacggggacgggca

SEQ ID NO: 66938 - RNA, 23 nt, synthetic construct
  source 1..23: mol_type = other RNA
gctccaccaggaggccagtgcgg

SEQ ID NO: 66939 - RNA, 23 nt, synthetic construct
  source 1..23: mol_type = other RNA
gcagggtgcggtggcagatgccc

SEQ ID NO: 66940 - RNA, 23 nt, synthetic construct
  source 1..23: mol_type = other RNA
gcccgcggggcaggtgcagccgt

SEQ ID NO: 66941 - RNA, 23 nt, synthetic construct
  source 1..23: mol_type = other RNA
cagtccaggtacaccatgggggc

SEQ ID NO: 66942 - RNA, 23 nt, synthetic construct
  source 1..23: mol_type = other RNA
ggtggcctcgttgtgcacacagg

SEQ ID NO: 66943 - RNA, 23 nt, synthetic construct
  source 1..23: mol_type = other RNA
gttcctgcaggtgcaggtgttgc

SEQ ID NO: 66944 - RNA, 23 nt, synthetic construct
  source 1..23: mol_type = other RNA
gcggaaggtcccgtgggtggtgt

SEQ ID NO: 66945 - RNA, 23 nt, synthetic construct
  source 1..23: mol_type = other RNA
caggggtccttgggtgccagggc

SEQ ID NO: 66946 - RNA, 23 nt, synthetic construct
  source 1..23: mol_type = other RNA
tcttgaagacgccctcctgctcc

SEQ ID NO: 66947 - RNA, 23 nt, synthetic construct
  source 1..23: mol_type = other RNA
tccctggaagggctgagcgtgtt

SEQ ID NO: 66948 - RNA, 23 nt, synthetic construct
  source 1..23: mol_type = other RNA
cgtccctggaagggctgagcgtg

SEQ ID NO: 66949 - RNA, 23 nt, synthetic construct
  source 1..23: mol_type = other RNA
ttggggccagcgtgggtggctgt

SEQ ID NO: 66950 - RNA, 23 nt, synthetic construct
  source 1..23: mol_type = other RNA
tggccgtggatccagtggacgca

SEQ ID NO: 66951 - RNA, 23 nt, synthetic construct
  source 1..23: mol_type = other RNA
ggagtggctttggagctggtgac

SEQ ID NO: 66952 - RNA, 23 nt, synthetic construct
  source 1..23: mol_type = other RNA
caggtggtgcccagggaggaaga

SEQ ID NO: 66953 - RNA, 23 nt, synthetic construct
  source 1..23: mol_type = other RNA
gtccccgggatggaggagggggt

SEQ ID NO: 66954 - RNA, 23 nt, synthetic construct
  source 1..23: mol_type = other RNA
gggcagaggagggagtcactgtg

SEQ ID NO: 66955 - RNA, 23 nt, synthetic construct
  source 1..23: mol_type = other RNA
tggaaggctctgtgatgtgggtg

SEQ ID NO: 66956 - RNA, 23 nt, synthetic construct
  source 1..23: mol_type = other RNA
gggctggaaagggctggagtcga

SEQ ID NO: 66957 - RNA, 23 nt, synthetic construct
  source 1..23: mol_type = other RNA
ggcccctccggccgcacggatgt

SEQ ID NO: 66958 - RNA, 23 nt, synthetic construct
  source 1..23: mol_type = other RNA
tggccgtggatccagtggactca

SEQ ID NO: 66959 - RNA, 23 nt, synthetic construct
  source 1..23: mol_type = other RNA
ggagtggctttggagctggtgac

SEQ ID NO: 66960 - RNA, 23 nt, synthetic construct
  source 1..23: mol_type = other RNA
tggagaagggagtggctttggag

SEQ ID NO: 66961 - RNA, 23 nt, synthetic construct
  source 1..23: mol_type = other RNA
caggtggtgcccagggaggagga

SEQ ID NO: 66962 - RNA, 23 nt, synthetic construct
  source 1..23: mol_type = other RNA
gtccccgggatggaggagggggt

SEQ ID NO: 66963 - RNA, 23 nt, synthetic construct
  source 1..23: mol_type = other RNA
gggcagaggagggagtcactgtg

SEQ ID NO: 66964 - RNA, 23 nt, synthetic construct
  source 1..23: mol_type = other RNA
tggaaggctctgtgatgtgggtg

SEQ ID NO: 66965 - RNA, 23 nt, synthetic construct
  source 1..23: mol_type = other RNA
cctggaggtggccctggtgtggc

SEQ ID NO: 66966 - RNA, 23 nt, synthetic construct
  source 1..23: mol_type = other RNA
ggcccctccggccgcacggatgt

SEQ ID NO: 66967 - RNA, 23 nt, synthetic construct
  source 1..23: mol_type = other RNA
ccctggttgtggtggtcgtggtg

SEQ ID NO: 66968 - RNA, 23 nt, synthetic construct
  source 1..23: mol_type = other RNA
gtccccgggatggaggagggggt

SEQ ID NO: 66969 - RNA, 23 nt, synthetic construct
  source 1..23: mol_type = other RNA
gggcagaggagggagtcactgtg

SEQ ID NO: 66970 - RNA, 23 nt, synthetic construct
  source 1..23: mol_type = other RNA
tggaaggctctgtgatgtgggtg

SEQ ID NO: 66971 - RNA, 23 nt, synthetic construct
  source 1..23: mol_type = other RNA
tgcccctccggccgcacggatgt

SEQ ID NO: 66972 - RNA, 23 nt, synthetic construct
  source 1..23: mol_type = other RNA
tggccgtggatccagtggactca

SEQ ID NO: 66973 - RNA, 23 nt, synthetic construct
  source 1..23: mol_type = other RNA
ggagtggctttggagctggtgac

SEQ ID NO: 66974 - RNA, 23 nt, synthetic construct
  source 1..23: mol_type = other RNA
tggagaagggagtggctttggag

SEQ ID NO: 66975 - RNA, 23 nt, synthetic construct
  source 1..23: mol_type = other RNA
caggtggtgcccagggaggagga

SEQ ID NO: 66976 - RNA, 23 nt, synthetic construct
  source 1..23: mol_type = other RNA
gagctgttcctggggtggaagag

SEQ ID NO: 66977 - RNA, 23 nt, synthetic construct
  source 1..23: mol_type = other RNA
gggcagaggagggagtcactgtg

SEQ ID NO: 66978 - RNA, 23 nt, synthetic construct
  source 1..23: mol_type = other RNA
tggaaggctctgtgatgtgggtg

SEQ ID NO: 66979 - RNA, 23 nt, synthetic construct
  source 1..23: mol_type = other RNA
ggcccctccggccgcacggatgt

SEQ ID NO: 66980 - RNA, 23 nt, synthetic construct
  source 1..23: mol_type = other RNA
tggccgtggatccagtggacgca

SEQ ID NO: 66981 - RNA, 23 nt, synthetic construct
  source 1..23: mol_type = other RNA
ggagtggctttggagctggtgac

SEQ ID NO: 66982 - RNA, 23 nt, synthetic construct
  source 1..23: mol_type = other RNA
caggtggtgcccagggaggagga

SEQ ID NO: 66983 - RNA, 23 nt, synthetic construct
  source 1..23: mol_type = other RNA
gtccccgggatggaggagggggt

SEQ ID NO: 66984 - RNA, 23 nt, synthetic construct
  source 1..23: mol_type = other RNA
gaagtggctttggagctggtggc

SEQ ID NO: 66985 - RNA, 23 nt, synthetic construct
  source 1..23: mol_type = other RNA
tgttgtggtcagctcagtgagga

SEQ ID NO: 66986 - RNA, 23 nt, synthetic construct
  source 1..23: mol_type = other RNA
tggctgttgtggtcagctcagtg

SEQ ID NO: 66987 - RNA, 23 nt, synthetic construct
  source 1..23: mol_type = other RNA
ggaggcggtggccgtggaaccgg

SEQ ID NO: 66988 - RNA, 23 nt, synthetic construct
  source 1..23: mol_type = other RNA
catagtggccatggtggtcacca

SEQ ID NO: 66989 - RNA, 23 nt, synthetic construct
  source 1..23: mol_type = other RNA
tgcgggtggtccccacggtggac

SEQ ID NO: 66990 - RNA, 23 nt, synthetic construct
  source 1..23: mol_type = other RNA
aggtctcattcacctgccggaga

SEQ ID NO: 66991 - RNA, 23 nt, synthetic construct
  source 1..23: mol_type = other RNA
tgctgagggcgcgggggcagcgg

SEQ ID NO: 66992 - RNA, 23 nt, synthetic construct
  source 1..23: mol_type = other RNA
caggatcaggccctcctccttcc

SEQ ID NO: 66993 - RNA, 23 nt, synthetic construct
  source 1..23: mol_type = other RNA
gggcagccgggcctggaagactt

SEQ ID NO: 66994 - RNA, 23 nt, synthetic construct
  source 1..23: mol_type = other RNA
ggggctggcagtggggggtgtgc

SEQ ID NO: 66995 - RNA, 23 nt, synthetic construct
  source 1..23: mol_type = other RNA
ccctccgccatcccctccagctg

SEQ ID NO: 66996 - RNA, 23 nt, synthetic construct
  source 1..23: mol_type = other RNA
cacgcaggggcaggcctgcacgc

SEQ ID NO: 66997 - RNA, 23 nt, synthetic construct
  source 1..23: mol_type = other RNA
gtcccacgcaggggcaggcctgc

SEQ ID NO: 66998 - RNA, 23 nt, synthetic construct
  source 1..23: mol_type = other RNA
ttgttgcaggcatcctcctgaca

SEQ ID NO: 66999 - RNA, 23 nt, synthetic construct
  source 1..23: mol_type = other RNA
attgttgcaggcatcctcctgac

SEQ ID NO: 67000 - RNA, 23 nt, synthetic construct
  source 1..23: mol_type = other RNA
ggggtgactcggtggttctgctg

SEQ ID NO: 67001 - RNA, 23 nt, synthetic construct
  source 1..23: mol_type = other RNA
aacaccagcgtccggcacgcgct

SEQ ID NO: 67002 - RNA, 23 nt, synthetic construct
  source 1..23: mol_type = other RNA
ggcgtatttgggatccagctcca

SEQ ID NO: 67003 - RNA, 23 nt, synthetic construct
  source 1..23: mol_type = other RNA
atccatggtgtgccctgcattct

SEQ ID NO: 67004 - RNA, 23 nt, synthetic construct
  source 1..23: mol_type = other RNA
cgtggcaggcctgggcgtaggca

SEQ ID NO: 67005 - RNA, 23 nt, synthetic construct
  source 1..23: mol_type = other RNA
ctcagcatcagatcacagagcgg

SEQ ID NO: 67006 - RNA, 23 nt, synthetic construct
  source 1..23: mol_type = other RNA
agtgggggacccaggcggtggtg

SEQ ID NO: 67007 - RNA, 23 nt, synthetic construct
  source 1..23: mol_type = other RNA
ctgagaggtggacagctcgctcg

SEQ ID NO: 67008 - RNA, 23 nt, synthetic construct
  source 1..23: mol_type = other RNA
aggactcctgagtggcgccctcc

SEQ ID NO: 67009 - RNA, 23 nt, synthetic construct
  source 1..23: mol_type = other RNA
ggtggggggacggggacgggcag

SEQ ID NO: 67010 - RNA, 23 nt, synthetic construct
  source 1..23: mol_type = other RNA
ccggccggcaagggcagcgggtc

SEQ ID NO: 67011 - RNA, 23 nt, synthetic construct
  source 1..23: mol_type = other RNA
gccggccggcaagggcagcgggt

SEQ ID NO: 67012 - RNA, 23 nt, synthetic construct
  source 1..23: mol_type = other RNA
ggccgcacttccgcagctcagcc

SEQ ID NO: 67013 - RNA, 23 nt, synthetic construct
  source 1..23: mol_type = other RNA
actcgcagtcgccacccgagtcg

SEQ ID NO: 67014 - RNA, 23 nt, synthetic construct
  source 1..23: mol_type = other RNA
acactcgcagtcgccacccgagt

SEQ ID NO: 67015 - RNA, 23 nt, synthetic construct
  source 1..23: mol_type = other RNA
ataggcgggtccaggtggtgccc

SEQ ID NO: 67016 - RNA, 23 nt, synthetic construct
  source 1..23: mol_type = other RNA
gagtgccgtccctgggctggagg

SEQ ID NO: 67017 - RNA, 23 nt, synthetic construct
  source 1..23: mol_type = other RNA
cctagggcagaggagggagtcac

SEQ ID NO: 67018 - RNA, 23 nt, synthetic construct
  source 1..23: mol_type = other RNA
gtgtggcccggggtggtcgtccc

SEQ ID NO: 67019 - RNA, 23 nt, synthetic construct
  source 1..23: mol_type = other RNA
ataggcgggtccaggtggtgccc

SEQ ID NO: 67020 - RNA, 23 nt, synthetic construct
  source 1..23: mol_type = other RNA
cctagggcagaggagggagtcac

SEQ ID NO: 67021 - RNA, 23 nt, synthetic construct
  source 1..23: mol_type = other RNA
ggggactgctgggggacagggat

SEQ ID NO: 67022 - RNA, 23 nt, synthetic construct
  source 1..23: mol_type = other RNA
gtgtggcccggggtggtcgtccc

SEQ ID NO: 67023 - RNA, 23 nt, synthetic construct
  source 1..23: mol_type = other RNA
attgtggacatggtggccatggg

SEQ ID NO: 67024 - RNA, 23 nt, synthetic construct
  source 1..23: mol_type = other RNA
gagtgccgtccctgggctggagg

SEQ ID NO: 67025 - RNA, 23 nt, synthetic construct
  source 1..23: mol_type = other RNA
cctagggcagaggagggagtcac

SEQ ID NO: 67026 - RNA, 23 nt, synthetic construct
  source 1..23: mol_type = other RNA
gtgtggcccggggtggtcgtccc

SEQ ID NO: 67027 - RNA, 23 nt, synthetic construct
  source 1..23: mol_type = other RNA
ataggcgggtccaggtggtgccc

SEQ ID NO: 67028 - RNA, 23 nt, synthetic construct
  source 1..23: mol_type = other RNA
gacggaggagggggtcaccgtgg

SEQ ID NO: 67029 - RNA, 23 nt, synthetic construct
  source 1..23: mol_type = other RNA
gccgtggtgatcagtgatggggg

SEQ ID NO: 67030 - RNA, 23 nt, synthetic construct
  source 1..23: mol_type = other RNA
cctagggcagaggagggagtcac

SEQ ID NO: 67031 - RNA, 23 nt, synthetic construct
  source 1..23: mol_type = other RNA
ggggactgctgggggacagggat

SEQ ID NO: 67032 - RNA, 23 nt, synthetic construct
  source 1..23: mol_type = other RNA
gtgtggcccggggtggtcgtccc

SEQ ID NO: 67033 - RNA, 23 nt, synthetic construct
  source 1..23: mol_type = other RNA
ataggcgggtccaggtggtgccc

SEQ ID NO: 67034 - RNA, 23 nt, synthetic construct
  source 1..23: mol_type = other RNA
gagtgccgtccctgggctggagg

SEQ ID NO: 67035 - RNA, 23 nt, synthetic construct
  source 1..23: mol_type = other RNA
cacacaggccggggggctccgca

SEQ ID NO: 67036 - RNA, 23 nt, synthetic construct
  source 1..23: mol_type = other RNA
ggaccagcctgtctgccccagcg

SEQ ID NO: 67037 - RNA, 23 nt, synthetic construct
  source 1..23: mol_type = other RNA
ggtggtaagcactgtggaggtgt

SEQ ID NO: 67038 - RNA, 23 nt, synthetic construct
  source 1..23: mol_type = other RNA
ggtggtaagcactgtggaggtgt

SEQ ID NO: 67039 - RNA, 23 nt, synthetic construct
  source 1..23: mol_type = other RNA
ggtggtaagcactgtggaggtgt

SEQ ID NO: 67040 - RNA, 23 nt, synthetic construct
  source 1..23: mol_type = other RNA
ttctcagacagcagtggcctcct

SEQ ID NO: 67041 - RNA, 23 nt, synthetic construct
  source 1..23: mol_type = other RNA
aagcaggcgccaagcccatcggt

SEQ ID NO: 67042 - RNA, 23 nt, synthetic construct
  source 1..23: mol_type = other RNA
ggccatgggtgtggtggtctgtt

SEQ ID NO: 67043 - RNA, 23 nt, synthetic construct
  source 1..23: mol_type = other RNA
gacaccggggctgcggggctggc

SEQ ID NO: 67044 - RNA, 23 nt, synthetic construct
  source 1..23: mol_type = other RNA
gctgtgcttgtcagcactggaag

SEQ ID NO: 67045 - RNA, 23 nt, synthetic construct
  source 1..23: mol_type = other RNA
gctgtgcttgtcagcactggaag

SEQ ID NO: 67046 - RNA, 23 nt, synthetic construct
  source 1..23: mol_type = other RNA
gctgtgcttgtcagcactggaag

SEQ ID NO: 67047 - RNA, 23 nt, synthetic construct
  source 1..23: mol_type = other RNA
tcagcctggcgttgtgggcatag

SEQ ID NO: 67048 - RNA, 23 nt, synthetic construct
  source 1..23: mol_type = other RNA
gtggtggccatggtgttcggcac

SEQ ID NO: 67049 - RNA, 23 nt, synthetic construct
  source 1..23: mol_type = other RNA
ggccagtggctgcagttgtagtg

SEQ ID NO: 67050 - RNA, 23 nt, synthetic construct
  source 1..23: mol_type = other RNA
ggccagtggctgcagttgtagtg

SEQ ID NO: 67051 - RNA, 23 nt, synthetic construct
  source 1..23: mol_type = other RNA
gtgatgttgacctcggtctcgca

SEQ ID NO: 67052 - RNA, 23 nt, synthetic construct
  source 1..23: mol_type = other RNA
aggaggcccaaggttttcatgat

SEQ ID NO: 67053 - RNA, 23 nt, synthetic construct
  source 1..23: mol_type = other RNA
cggcaatgcagcccccactccca

SEQ ID NO: 67054 - RNA, 23 nt, synthetic construct
  source 1..23: mol_type = other RNA
tgtggctgtggacatggtggccg

SEQ ID NO: 67055 - RNA, 23 nt, synthetic construct
  source 1..23: mol_type = other RNA
tgtggctgtggacatggtggccg

SEQ ID NO: 67056 - RNA, 23 nt, synthetic construct
  source 1..23: mol_type = other RNA
tgggggtgtgggtggtccccggg

SEQ ID NO: 67057 - RNA, 23 nt, synthetic construct
  source 1..23: mol_type = other RNA
ccgtggggccagtggctgcagtt

SEQ ID NO: 67058 - RNA, 23 nt, synthetic construct
  source 1..23: mol_type = other RNA
tgtggctgtggacatggtggccg

SEQ ID NO: 67059 - RNA, 23 nt, synthetic construct
  source 1..23: mol_type = other RNA
gggggcagggaccgcccgtgtgt

SEQ ID NO: 67060 - RNA, 23 nt, synthetic construct
  source 1..23: mol_type = other RNA
ggggggcagggaccgcccgtgtg

SEQ ID NO: 67061 - RNA, 23 nt, synthetic construct
  source 1..23: mol_type = other RNA
tgtggctgtggacatggtggccg

SEQ ID NO: 67062 - RNA, 23 nt, synthetic construct
  source 1..23: mol_type = other RNA
tgggggtgtgggtggtccccggg

SEQ ID NO: 67063 - RNA, 23 nt, synthetic construct
  source 1..23: mol_type = other RNA
ccgtggggccagtggctgcagtt

SEQ ID NO: 67064 - RNA, 23 nt, synthetic construct
  source 1..23: mol_type = other RNA
tgtggctgtggacatggtggccg

SEQ ID NO: 67065 - RNA, 23 nt, synthetic construct
  source 1..23: mol_type = other RNA
agtggctgtgggcatagtggcca

SEQ ID NO: 67066 - RNA, 23 nt, synthetic construct
  source 1..23: mol_type = other RNA
gcactgcaggggtgcgggtggtc

SEQ ID NO: 67067 - RNA, 23 nt, synthetic construct
  source 1..23: mol_type = other RNA
agctcagccagcacggtgaagct

SEQ ID NO: 67068 - RNA, 23 nt, synthetic construct
  source 1..23: mol_type = other RNA
gaggtgcgggtcttgctgggtgt

SEQ ID NO: 67069 - RNA, 23 nt, synthetic construct
  source 1..23: mol_type = other RNA
gaggtgcgggtcttgctgggtgt

SEQ ID NO: 67070 - RNA, 23 nt, synthetic construct
  source 1..23: mol_type = other RNA
gaggtgcgggtcttgctgggtgt

SEQ ID NO: 67071 - RNA, 23 nt, synthetic construct
  source 1..23: mol_type = other RNA
gaggtgcgggtcttgctgggtgt

SEQ ID NO: 67072 - RNA, 23 nt, synthetic construct
  source 1..23: mol_type = other RNA
tcaatgtcacagtgctgattgca

SEQ ID NO: 67073 - RNA, 23 nt, synthetic construct
  source 1..23: mol_type = other RNA
agcacagacacaagcacgccgtt

SEQ ID NO: 67074 - RNA, 23 nt, synthetic construct
  source 1..23: mol_type = other RNA
cggccggcaagggcagcgggtcc

SEQ ID NO: 67075 - RNA, 23 nt, synthetic construct
  source 1..23: mol_type = other RNA
gtgccactcacagcccccatgtg

SEQ ID NO: 67076 - RNA, 23 nt, synthetic construct
  source 1..23: mol_type = other RNA
ccacctgctcacggttcctgcag

SEQ ID NO: 67077 - RNA, 23 nt, synthetic construct
  source 1..23: mol_type = other RNA
ccacctgctcacggttcctgcag

SEQ ID NO: 67078 - RNA, 23 nt, synthetic construct
  source 1..23: mol_type = other RNA
ccacctgctcacggttcctgcag

SEQ ID NO: 67079 - RNA, 23 nt, synthetic construct
  source 1..23: mol_type = other RNA
ccacctgctcacggttcctgcag

SEQ ID NO: 67080 - RNA, 23 nt, synthetic construct
  source 1..23: mol_type = other RNA
catggtggccacgggtgtggtgg

SEQ ID NO: 67081 - RNA, 23 nt, synthetic construct
  source 1..23: mol_type = other RNA
ggatgctgaccttgatgtagtcc

SEQ ID NO: 67082 - RNA, 23 nt, synthetic construct
  source 1..23: mol_type = other RNA
gggggttggagcaggtgtccgtg

SEQ ID NO: 67083 - RNA, 23 nt, synthetic construct
  source 1..23: mol_type = other RNA
agcgctgggacttggggcagttc

SEQ ID NO: 67084 - RNA, 23 nt, synthetic construct
  source 1..23: mol_type = other RNA
tgcagccgtccacaggcacgaag

SEQ ID NO: 67085 - RNA, 23 nt, synthetic construct
  source 1..23: mol_type = other RNA
gcaatgcagcccccactcccatc

SEQ ID NO: 67086 - RNA, 23 nt, synthetic construct
  source 1..23: mol_type = other RNA
cgtccgggcaggagggggagagc

SEQ ID NO: 67087 - RNA, 23 nt, synthetic construct
  source 1..23: mol_type = other RNA
ctccgcctcccaggccgggctct

SEQ ID NO: 67088 - RNA, 23 nt, synthetic construct
  source 1..23: mol_type = other RNA
tgtgaggggcgccatgtgcccaa

SEQ ID NO: 67089 - RNA, 23 nt, synthetic construct
  source 1..23: mol_type = other RNA
gaggagggagtggctttggagct

SEQ ID NO: 67090 - RNA, 23 nt, synthetic construct
  source 1..23: mol_type = other RNA
tggccacagagccggtggcccca

SEQ ID NO: 67091 - RNA, 23 nt, synthetic construct
  source 1..23: mol_type = other RNA
tggaggagggggtcaccgtggag

SEQ ID NO: 67092 - RNA, 23 nt, synthetic construct
  source 1..23: mol_type = other RNA
cactgggggtgtgtgggtggtcc

SEQ ID NO: 67093 - RNA, 23 nt, synthetic construct
  source 1..23: mol_type = other RNA
cacactggggctcacagcccatg

SEQ ID NO: 67094 - RNA, 23 nt, synthetic construct
  source 1..23: mol_type = other RNA
tggccacagagccggtggccccg

SEQ ID NO: 67095 - RNA, 23 nt, synthetic construct
  source 1..23: mol_type = other RNA
tggaggagggggtcaccgtggaa

SEQ ID NO: 67096 - RNA, 23 nt, synthetic construct
  source 1..23: mol_type = other RNA
cactgggggtgtgtgggtggtcc

SEQ ID NO: 67097 - RNA, 23 nt, synthetic construct
  source 1..23: mol_type = other RNA
cacactggggctcacagcccatg

SEQ ID NO: 67098 - RNA, 23 nt, synthetic construct
  source 1..23: mol_type = other RNA
agtggctttggaactggtggctg

SEQ ID NO: 67099 - RNA, 23 nt, synthetic construct
  source 1..23: mol_type = other RNA
aggaggaagtggctttggaactg

SEQ ID NO: 67100 - RNA, 23 nt, synthetic construct
  source 1..23: mol_type = other RNA
ttgtcagcactggaagggtggtt

SEQ ID NO: 67101 - RNA, 23 nt, synthetic construct
  source 1..23: mol_type = other RNA
ctgctgtggtcagctctgtgagg

SEQ ID NO: 67102 - RNA, 23 nt, synthetic construct
  source 1..23: mol_type = other RNA
gctgctgtggtcagctctgtgag

SEQ ID NO: 67103 - RNA, 23 nt, synthetic construct
  source 1..23: mol_type = other RNA
ggctgctgtggtcagctctgtga

SEQ ID NO: 67104 - RNA, 23 nt, synthetic construct
  source 1..23: mol_type = other RNA
gtggggccagtggctgcagttgt

SEQ ID NO: 67105 - RNA, 23 nt, synthetic construct
  source 1..23: mol_type = other RNA
gctgatgactgtgggtgtggtgg

SEQ ID NO: 67106 - RNA, 23 nt, synthetic construct
  source 1..23: mol_type = other RNA
tggccacagagccggtggccctg

SEQ ID NO: 67107 - RNA, 23 nt, synthetic construct
  source 1..23: mol_type = other RNA
tggaggagggggtcaccgtggag

SEQ ID NO: 67108 - RNA, 23 nt, synthetic construct
  source 1..23: mol_type = other RNA
cactgggggtgtgtgggtggtcc

SEQ ID NO: 67109 - RNA, 23 nt, synthetic construct
  source 1..23: mol_type = other RNA
gtcttgctgggtgtggctgtggc

SEQ ID NO: 67110 - RNA, 23 nt, synthetic construct
  source 1..23: mol_type = other RNA
tggccacagagccggtggccctg

SEQ ID NO: 67111 - RNA, 23 nt, synthetic construct
  source 1..23: mol_type = other RNA
ccactggttgtgggtgtggtggt

SEQ ID NO: 67112 - RNA, 23 nt, synthetic construct
  source 1..23: mol_type = other RNA
cggaggagggggtcaccgtggag

SEQ ID NO: 67113 - RNA, 23 nt, synthetic construct
  source 1..23: mol_type = other RNA
cactgggggtgtgtgggtggtcc

SEQ ID NO: 67114 - RNA, 23 nt, synthetic construct
  source 1..23: mol_type = other RNA
agtggctttggaactggtggctg

SEQ ID NO: 67115 - RNA, 23 nt, synthetic construct
  source 1..23: mol_type = other RNA
aggaggaagtggctttggaactg

SEQ ID NO: 67116 - RNA, 23 nt, synthetic construct
  source 1..23: mol_type = other RNA
ttgtcagcactggaagggtggtt

SEQ ID NO: 67117 - RNA, 23 nt, synthetic construct
  source 1..23: mol_type = other RNA
ctgctgtggtcagctctgtgagg

SEQ ID NO: 67118 - RNA, 23 nt, synthetic construct
  source 1..23: mol_type = other RNA
gctgctgtggtcagctctgtgag

SEQ ID NO: 67119 - RNA, 23 nt, synthetic construct
  source 1..23: mol_type = other RNA
ggctgctgtggtcagctctgtga

SEQ ID NO: 67120 - RNA, 23 nt, synthetic construct
  source 1..23: mol_type = other RNA
gtggggccagtggctgcagttgt

SEQ ID NO: 67121 - RNA, 23 nt, synthetic construct
  source 1..23: mol_type = other RNA
gaggagggagtggctttggagct

SEQ ID NO: 67122 - RNA, 23 nt, synthetic construct
  source 1..23: mol_type = other RNA
tggccacagagccggtggccccg

SEQ ID NO: 67123 - RNA, 23 nt, synthetic construct
  source 1..23: mol_type = other RNA
ccactggttgtgggtgtggtggt

SEQ ID NO: 67124 - RNA, 23 nt, synthetic construct
  source 1..23: mol_type = other RNA
tggaggagggggtcaccgtggag

SEQ ID NO: 67125 - RNA, 23 nt, synthetic construct
  source 1..23: mol_type = other RNA
aggaagtggctttggagctggtg

SEQ ID NO: 67126 - RNA, 23 nt, synthetic construct
  source 1..23: mol_type = other RNA
aggaggaagtggctttggagctg

SEQ ID NO: 67127 - RNA, 23 nt, synthetic construct
  source 1..23: mol_type = other RNA
ttgtcagcactggaagggtggtt

SEQ ID NO: 67128 - RNA, 23 nt, synthetic construct
  source 1..23: mol_type = other RNA
tggatccagtggctgcagttgta

SEQ ID NO: 67129 - RNA, 23 nt, synthetic construct
  source 1..23: mol_type = other RNA
gtgggtctcagggtggtgaggac

SEQ ID NO: 67130 - RNA, 23 nt, synthetic construct
  source 1..23: mol_type = other RNA
gtcaatgtcacagtgctgattgc

SEQ ID NO: 67131 - RNA, 23 nt, synthetic construct
  source 1..23: mol_type = other RNA
gctggcagtggggggtgtgccag

SEQ ID NO: 67132 - RNA, 23 nt, synthetic construct
  source 1..23: mol_type = other RNA
cagcaaagacctggctcagcatc

SEQ ID NO: 67133 - RNA, 23 nt, synthetic construct
  source 1..23: mol_type = other RNA
cgtctcggggcagcaggggttct

SEQ ID NO: 67134 - RNA, 23 nt, synthetic construct
  source 1..23: mol_type = other RNA
ccctggcgggcacacaggcaggc

SEQ ID NO: 67135 - RNA, 23 nt, synthetic construct
  source 1..23: mol_type = other RNA
aggctgtggggtcagcaaatgga

SEQ ID NO: 67136 - RNA, 23 nt, synthetic construct
  source 1..23: mol_type = other RNA
cccgcctctcctggcagcaggtg

SEQ ID NO: 67137 - RNA, 23 nt, synthetic construct
  source 1..23: mol_type = other RNA
gtgcagccacactcatccacgtg

SEQ ID NO: 67138 - RNA, 23 nt, synthetic construct
  source 1..23: mol_type = other RNA
gtgtgtgggggagccatgggcgc

SEQ ID NO: 67139 - RNA, 23 nt, synthetic construct
  source 1..23: mol_type = other RNA
ctcagacagcagtggcctcctgg

SEQ ID NO: 67140 - RNA, 23 nt, synthetic construct
  source 1..23: mol_type = other RNA
tctcagacagcagtggcctcctg

SEQ ID NO: 67141 - RNA, 23 nt, synthetic construct
  source 1..23: mol_type = other RNA
ctgcgcgggcgctccggccgtgg

SEQ ID NO: 67142 - RNA, 23 nt, synthetic construct
  source 1..23: mol_type = other RNA
ggaagtcaccccaggtgctgcac

SEQ ID NO: 67143 - RNA, 23 nt, synthetic construct
  source 1..23: mol_type = other RNA
cagccggatgctgaccttgatgt

SEQ ID NO: 67144 - RNA, 23 nt, synthetic construct
  source 1..23: mol_type = other RNA
ccggccccagcagggtgcggtgg

SEQ ID NO: 67145 - RNA, 23 nt, synthetic construct
  source 1..23: mol_type = other RNA
gttgagggggcaggtccgggggc

SEQ ID NO: 67146 - RNA, 23 nt, synthetic construct
  source 1..23: mol_type = other RNA
tgatgtcatccagcaccgtgcct

SEQ ID NO: 67147 - RNA, 23 nt, synthetic construct
  source 1..23: mol_type = other RNA
tgatggagtggcagcgcgagaag

SEQ ID NO: 67148 - RNA, 23 nt, synthetic construct
  source 1..23: mol_type = other RNA
gtgcacacaggggcagtcctcct

SEQ ID NO: 67149 - RNA, 23 nt, synthetic construct
  source 1..23: mol_type = other RNA
tcgtggagtgggggacccaggcg

SEQ ID NO: 67150 - RNA, 23 nt, synthetic construct
  source 1..23: mol_type = other RNA
agcgggtcgtgccctggctggtg

SEQ ID NO: 67151 - RNA, 23 nt, synthetic construct
  source 1..23: mol_type = other RNA
ggtggctgtgcttctcagtgctg

SEQ ID NO: 67152 - RNA, 23 nt, synthetic construct
  source 1..23: mol_type = other RNA
gggtggccacagagccggtggcc

SEQ ID NO: 67153 - RNA, 23 nt, synthetic construct
  source 1..23: mol_type = other RNA
tagtgtgagctgttcctggggtg

SEQ ID NO: 67154 - RNA, 23 nt, synthetic construct
  source 1..23: mol_type = other RNA
gtcaccgtggaaggctctgtgat

SEQ ID NO: 67155 - RNA, 23 nt, synthetic construct
  source 1..23: mol_type = other RNA
acagcccatggtcaccaccgtgg

SEQ ID NO: 67156 - RNA, 23 nt, synthetic construct
  source 1..23: mol_type = other RNA
cgtcacggtggctgtagtgctcg

SEQ ID NO: 67157 - RNA, 23 nt, synthetic construct
  source 1..23: mol_type = other RNA
ggtggctgtgcttctcagtgctg

SEQ ID NO: 67158 - RNA, 23 nt, synthetic construct
  source 1..23: mol_type = other RNA
gggtggccacagagccggtggcc

SEQ ID NO: 67159 - RNA, 23 nt, synthetic construct
  source 1..23: mol_type = other RNA
tagtgtgagctgttcctggggtg

SEQ ID NO: 67160 - RNA, 23 nt, synthetic construct
  source 1..23: mol_type = other RNA
tgtgggtggtgcccaaggtgcct

SEQ ID NO: 67161 - RNA, 23 nt, synthetic construct
  source 1..23: mol_type = other RNA
acagcccatggtcaccaccgtgg

SEQ ID NO: 67162 - RNA, 23 nt, synthetic construct
  source 1..23: mol_type = other RNA
tgttctgggagggtcccggtggt

SEQ ID NO: 67163 - RNA, 23 nt, synthetic construct
  source 1..23: mol_type = other RNA
cgtcacggtggctgtagtgctgg

SEQ ID NO: 67164 - RNA, 23 nt, synthetic construct
  source 1..23: mol_type = other RNA
agctgatgactgtgggtgtggtg

SEQ ID NO: 67165 - RNA, 23 nt, synthetic construct
  source 1..23: mol_type = other RNA
gagctgatgactgtgggtgtggt

SEQ ID NO: 67166 - RNA, 23 nt, synthetic construct
  source 1..23: mol_type = other RNA
ggtggctgtgcttctcagtgctg

SEQ ID NO: 67167 - RNA, 23 nt, synthetic construct
  source 1..23: mol_type = other RNA
gggtggccacagagccggtggcc

SEQ ID NO: 67168 - RNA, 23 nt, synthetic construct
  source 1..23: mol_type = other RNA
tagtgtgagctgttcctggggtg

SEQ ID NO: 67169 - RNA, 23 nt, synthetic construct
  source 1..23: mol_type = other RNA
gtcaccgtggaaggctctgtgat

SEQ ID NO: 67170 - RNA, 23 nt, synthetic construct
  source 1..23: mol_type = other RNA
cgtcacggtggctgtagtgctcg

SEQ ID NO: 67171 - RNA, 23 nt, synthetic construct
  source 1..23: mol_type = other RNA
ggtggctgtgcttctcagtgctg

SEQ ID NO: 67172 - RNA, 23 nt, synthetic construct
  source 1..23: mol_type = other RNA
gggtggccacagagccggtggcc

SEQ ID NO: 67173 - RNA, 23 nt, synthetic construct
  source 1..23: mol_type = other RNA
ctgttcctggggtggaagagggg

SEQ ID NO: 67174 - RNA, 23 nt, synthetic construct
  source 1..23: mol_type = other RNA
tagtgtgagctgttcctggggtg

SEQ ID NO: 67175 - RNA, 23 nt, synthetic construct
  source 1..23: mol_type = other RNA
tgggtggtccccgggacggagga

SEQ ID NO: 67176 - RNA, 23 nt, synthetic construct
  source 1..23: mol_type = other RNA
tgtgggtggtgcccaaggtgcct

SEQ ID NO: 67177 - RNA, 23 nt, synthetic construct
  source 1..23: mol_type = other RNA
cgggctggtcagcactttgggag

SEQ ID NO: 67178 - RNA, 23 nt, synthetic construct
  source 1..23: mol_type = other RNA
tggccgggctggtcagcactttg

SEQ ID NO: 67179 - RNA, 23 nt, synthetic construct
  source 1..23: mol_type = other RNA
tgttctgggagggtcccggtggt

SEQ ID NO: 67180 - RNA, 23 nt, synthetic construct
  source 1..23: mol_type = other RNA
cgtcacggtggctgtagtgctcg

SEQ ID NO: 67181 - RNA, 23 nt, synthetic construct
  source 1..23: mol_type = other RNA
ggtggctgtgcttctcagtgctg

SEQ ID NO: 67182 - RNA, 23 nt, synthetic construct
  source 1..23: mol_type = other RNA
gggtggccacagagccggtggcc

SEQ ID NO: 67183 - RNA, 23 nt, synthetic construct
  source 1..23: mol_type = other RNA
tagtgtgagctgttcctggggtg

SEQ ID NO: 67184 - RNA, 23 nt, synthetic construct
  source 1..23: mol_type = other RNA
attggtggcccttgtcatggtgg

SEQ ID NO: 67185 - RNA, 23 nt, synthetic construct
  source 1..23: mol_type = other RNA
gggggtgtgagctgttcccagag

SEQ ID NO: 67186 - RNA, 23 nt, synthetic construct
  source 1..23: mol_type = other RNA
ccatgcaccatggtgacagtgag

SEQ ID NO: 67187 - RNA, 23 nt, synthetic construct
  source 1..23: mol_type = other RNA
gggcttgcactgcaccgacactg

SEQ ID NO: 67188 - RNA, 23 nt, synthetic construct
  source 1..23: mol_type = other RNA
gggggctgaccctgggcgtcaca

SEQ ID NO: 67189 - RNA, 23 nt, synthetic construct
  source 1..23: mol_type = other RNA
tgtggcagggaagggcgcctggg

SEQ ID NO: 67190 - RNA, 23 nt, synthetic construct
  source 1..23: mol_type = other RNA
acggtgcagttgtccacatggct

SEQ ID NO: 67191 - RNA, 23 nt, synthetic construct
  source 1..23: mol_type = other RNA
gacccgcctctcctggcagcagg

SEQ ID NO: 67192 - RNA, 23 nt, synthetic construct
  source 1..23: mol_type = other RNA
gggtgtaggtgtgcaggatggct

SEQ ID NO: 67193 - RNA, 23 nt, synthetic construct
  source 1..23: mol_type = other RNA
acgggtgtgtgggggagccatgg

SEQ ID NO: 67194 - RNA, 23 nt, synthetic construct
  source 1..23: mol_type = other RNA
ccatcctgggggctggcacgggt

SEQ ID NO: 67195 - RNA, 23 nt, synthetic construct
  source 1..23: mol_type = other RNA
gagatgtgggccccgccctgcac

SEQ ID NO: 67196 - RNA, 23 nt, synthetic construct
  source 1..23: mol_type = other RNA
gcactcctgggcgggcacacagg

SEQ ID NO: 67197 - RNA, 23 nt, synthetic construct
  source 1..23: mol_type = other RNA
gtggctgtgcttctcagtgctgg

SEQ ID NO: 67198 - RNA, 23 nt, synthetic construct
  source 1..23: mol_type = other RNA
gtggctgtgcttctcagtgctgg

SEQ ID NO: 67199 - RNA, 23 nt, synthetic construct
  source 1..23: mol_type = other RNA
gtggtcctggaggtggccctggt

SEQ ID NO: 67200 - RNA, 23 nt, synthetic construct
  source 1..23: mol_type = other RNA
gtggctgtgcttctcagtgctgg

SEQ ID NO: 67201 - RNA, 23 nt, synthetic construct
  source 1..23: mol_type = other RNA
ccggtggccctggttgtggtggt

SEQ ID NO: 67202 - RNA, 23 nt, synthetic construct
  source 1..23: mol_type = other RNA
gtggctgtgcttctcagtgctgg

SEQ ID NO: 67203 - RNA, 23 nt, synthetic construct
  source 1..23: mol_type = other RNA
ccggtggccctggttgtggtggc

SEQ ID NO: 67204 - RNA, 23 nt, synthetic construct
  source 1..23: mol_type = other RNA
gtggctgtgcttctcagtgctgg

SEQ ID NO: 67205 - RNA, 23 nt, synthetic construct
  source 1..23: mol_type = other RNA
gggaagccagtgggtctcagggt

SEQ ID NO: 67206 - RNA, 23 nt, synthetic construct
  source 1..23: mol_type = other RNA
tggcagggaagggcgcctgggaa

SEQ ID NO: 67207 - RNA, 23 nt, synthetic construct
  source 1..23: mol_type = other RNA
taggtgtgcaggatggctgagcc

SEQ ID NO: 67208 - RNA, 23 nt, synthetic construct
  source 1..23: mol_type = other RNA
agtggcctcctgggccgggaagc

SEQ ID NO: 67209 - RNA, 23 nt, synthetic construct
  source 1..23: mol_type = other RNA
gagggggagctgttctcagggtg

SEQ ID NO: 67210 - RNA, 23 nt, synthetic construct
  source 1..23: mol_type = other RNA
tggtggttgtgctgatccacact

SEQ ID NO: 67211 - RNA, 23 nt, synthetic construct
  source 1..23: mol_type = other RNA
ttggtggtggagccggtggccgt

SEQ ID NO: 67212 - RNA, 23 nt, synthetic construct
  source 1..23: mol_type = other RNA
tggtggttgtgctgatccacact

SEQ ID NO: 67213 - RNA, 23 nt, synthetic construct
  source 1..23: mol_type = other RNA
tggaacctctggttgtgggtgtg

SEQ ID NO: 67214 - RNA, 23 nt, synthetic construct
  source 1..23: mol_type = other RNA
ttggtggtggagccggtggccgt

SEQ ID NO: 67215 - RNA, 23 nt, synthetic construct
  source 1..23: mol_type = other RNA
ggtggccatgggtgtggtggtct

SEQ ID NO: 67216 - RNA, 23 nt, synthetic construct
  source 1..23: mol_type = other RNA
tggtggccttcgtggtcagcact

SEQ ID NO: 67217 - RNA, 23 nt, synthetic construct
  source 1..23: mol_type = other RNA
tggtggttgtgctgatccacact

SEQ ID NO: 67218 - RNA, 23 nt, synthetic construct
  source 1..23: mol_type = other RNA
ttggtggtggagccggtggctgt

SEQ ID NO: 67219 - RNA, 23 nt, synthetic construct
  source 1..23: mol_type = other RNA
tggtggttgtgctgatccacact

SEQ ID NO: 67220 - RNA, 23 nt, synthetic construct
  source 1..23: mol_type = other RNA
ttggtggtggagccggtggccgt

SEQ ID NO: 67221 - RNA, 23 nt, synthetic construct
  source 1..23: mol_type = other RNA
tggtggccttcgtggtcagcact

SEQ ID NO: 67222 - RNA, 23 nt, synthetic construct
  source 1..23: mol_type = other RNA
tggtggttgtgctgatccacact

SEQ ID NO: 67223 - RNA, 23 nt, synthetic construct
  source 1..23: mol_type = other RNA
ttggtggtggagccggtggccgt

SEQ ID NO: 67224 - RNA, 23 nt, synthetic construct
  source 1..23: mol_type = other RNA
gtggcagaggccgtgcagtagtg

SEQ ID NO: 67225 - RNA, 23 nt, synthetic construct
  source 1..23: mol_type = other RNA
aggtgtgcaggatggctgagccg

SEQ ID NO: 67226 - RNA, 23 nt, synthetic construct
  source 1..23: mol_type = other RNA
tcaatgctcagggtttatttgca

SEQ ID NO: 67227 - RNA, 23 nt, synthetic construct
  source 1..23: mol_type = other RNA
gggcacccatcctgggggctggc

SEQ ID NO: 67228 - RNA, 23 nt, synthetic construct
  source 1..23: mol_type = other RNA
ttgatgaggacggagccgttgga

SEQ ID NO: 67229 - RNA, 23 nt, synthetic construct
  source 1..23: mol_type = other RNA
gcggtggcagatgccctcctcgt

SEQ ID NO: 67230 - RNA, 23 nt, synthetic construct
  source 1..23: mol_type = other RNA
acttcgggtagcagccttccagg

SEQ ID NO: 67231 - RNA, 23 nt, synthetic construct
  source 1..23: mol_type = other RNA
cacttcgggtagcagccttccag

SEQ ID NO: 67232 - RNA, 23 nt, synthetic construct
  source 1..23: mol_type = other RNA
gtggcacgtcccctgcagtggtc

SEQ ID NO: 67233 - RNA, 23 nt, synthetic construct
  source 1..23: mol_type = other RNA
aagggtgcttgtgtatctggggg

SEQ ID NO: 67234 - RNA, 23 nt, synthetic construct
  source 1..23: mol_type = other RNA
tcgtctctgtcctgggcgtgctg

SEQ ID NO: 67235 - RNA, 23 nt, synthetic construct
  source 1..23: mol_type = other RNA
gccggtggccccagttgtggtgg

SEQ ID NO: 67236 - RNA, 23 nt, synthetic construct
  source 1..23: mol_type = other RNA
ctgcagaccaggccaaagtccag

SEQ ID NO: 67237 - RNA, 23 nt, synthetic construct
  source 1..23: mol_type = other RNA
gactggagaagggagtggctttg

SEQ ID NO: 67238 - RNA, 23 nt, synthetic construct
  source 1..23: mol_type = other RNA
cctggagttgaggaggggttggt

SEQ ID NO: 67239 - RNA, 23 nt, synthetic construct
  source 1..23: mol_type = other RNA
ctgcagaccaggccaaagtccag

SEQ ID NO: 67240 - RNA, 23 nt, synthetic construct
  source 1..23: mol_type = other RNA
aaagctggtagctgtggatttgg

SEQ ID NO: 67241 - RNA, 23 nt, synthetic construct
  source 1..23: mol_type = other RNA
ggtccaggcggtgcccagggagg

SEQ ID NO: 67242 - RNA, 23 nt, synthetic construct
  source 1..23: mol_type = other RNA
cctggagttgaggaggggttggt

SEQ ID NO: 67243 - RNA, 23 nt, synthetic construct
  source 1..23: mol_type = other RNA
ctgcagaccaggccaaagtccag

SEQ ID NO: 67244 - RNA, 23 nt, synthetic construct
  source 1..23: mol_type = other RNA
gactggagaagggagtggctttg

SEQ ID NO: 67245 - RNA, 23 nt, synthetic construct
  source 1..23: mol_type = other RNA
cctggagttgaggaggggttggt

SEQ ID NO: 67246 - RNA, 23 nt, synthetic construct
  source 1..23: mol_type = other RNA
ctgcagaccaggccaaagtccag

SEQ ID NO: 67247 - RNA, 23 nt, synthetic construct
  source 1..23: mol_type = other RNA
gcagttgcagtccctggactgga

SEQ ID NO: 67248 - RNA, 23 nt, synthetic construct
  source 1..23: mol_type = other RNA
cctggagttgaggaggggttggt

SEQ ID NO: 67249 - RNA, 23 nt, synthetic construct
  source 1..23: mol_type = other RNA
gtggattttgtggctgtgcttgt

SEQ ID NO: 67250 - RNA, 23 nt, synthetic construct
  source 1..23: mol_type = other RNA
aaagctggtagctgtggattttg

SEQ ID NO: 67251 - RNA, 23 nt, synthetic construct
  source 1..23: mol_type = other RNA
gacggtccacgtggtccacaggg

SEQ ID NO: 67252 - RNA, 23 nt, synthetic construct
  source 1..23: mol_type = other RNA
ttgtggacatggtggacatgggt

SEQ ID NO: 67253 - RNA, 23 nt, synthetic construct
  source 1..23: mol_type = other RNA
tgtggccgtggaattggtggccc

SEQ ID NO: 67254 - RNA, 23 nt, synthetic construct
  source 1..23: mol_type = other RNA
gagccgccccacatgctgcagat

SEQ ID NO: 67255 - RNA, 23 nt, synthetic construct
  source 1..23: mol_type = other RNA
gtggggggacggggacgggcagg

SEQ ID NO: 67256 - RNA, 23 nt, synthetic construct
  source 1..23: mol_type = other RNA
tcaccccaggtgctgcacacccg

SEQ ID NO: 67257 - RNA, 23 nt, synthetic construct
  source 1..23: mol_type = other RNA
gacgcctccagcaccagcccctg

SEQ ID NO: 67258 - RNA, 23 nt, synthetic construct
  source 1..23: mol_type = other RNA
cgttggacgcctccagcaccagc

SEQ ID NO: 67259 - RNA, 23 nt, synthetic construct
  source 1..23: mol_type = other RNA
gggatccagctccagcagggcac

SEQ ID NO: 67260 - RNA, 23 nt, synthetic construct
  source 1..23: mol_type = other RNA
ctggagcggggtcagcctggcgt

SEQ ID NO: 67261 - RNA, 23 nt, synthetic construct
  source 1..23: mol_type = other RNA
gatgccctcctcgtccgtgcagt

SEQ ID NO: 67262 - RNA, 23 nt, synthetic construct
  source 1..23: mol_type = other RNA
ggcagatgccctcctcgtccgtg

SEQ ID NO: 67263 - RNA, 23 nt, synthetic construct
  source 1..23: mol_type = other RNA
cagagctcagggcacctccagtt

SEQ ID NO: 67264 - RNA, 23 nt, synthetic construct
  source 1..23: mol_type = other RNA
gttggagcaggtgtccgtgcagg

SEQ ID NO: 67265 - RNA, 23 nt, synthetic construct
  source 1..23: mol_type = other RNA
gtcctcgcagagctgcgcgcgct

SEQ ID NO: 67266 - RNA, 23 nt, synthetic construct
  source 1..23: mol_type = other RNA
cagtggtcctcgcagagctgcgc

SEQ ID NO: 67267 - RNA, 23 nt, synthetic construct
  source 1..23: mol_type = other RNA
caaagctgttcctggcattggca

SEQ ID NO: 67268 - RNA, 23 nt, synthetic construct
  source 1..23: mol_type = other RNA
tgatgatggagtggcagcgcgag

SEQ ID NO: 67269 - RNA, 23 nt, synthetic construct
  source 1..23: mol_type = other RNA
tagcgctgggacttggggcagtt

SEQ ID NO: 67270 - RNA, 23 nt, synthetic construct
  source 1..23: mol_type = other RNA
gcggcaagtgggctggcaggcat

SEQ ID NO: 67271 - RNA, 23 nt, synthetic construct
  source 1..23: mol_type = other RNA
gccgtccacaggcacgaaggaaa

SEQ ID NO: 67272 - RNA, 23 nt, synthetic construct
  source 1..23: mol_type = other RNA
ccgcggggcaggtgcagccgtcc

SEQ ID NO: 67273 - RNA, 23 nt, synthetic construct
  source 1..23: mol_type = other RNA
cccgcggggcaggtgcagccgtc

SEQ ID NO: 67274 - RNA, 23 nt, synthetic construct
  source 1..23: mol_type = other RNA
cacctctccaggagccagcacgg

SEQ ID NO: 67275 - RNA, 23 nt, synthetic construct
  source 1..23: mol_type = other RNA
ccacctctccaggagccagcacg

SEQ ID NO: 67276 - RNA, 23 nt, synthetic construct
  source 1..23: mol_type = other RNA
ggtacaccatgggggctgcacac

SEQ ID NO: 67277 - RNA, 23 nt, synthetic construct
  source 1..23: mol_type = other RNA
ggttcctgcaggtgcaggtgttg

SEQ ID NO: 67278 - RNA, 23 nt, synthetic construct
  source 1..23: mol_type = other RNA
cctccggttcctgcaggtgcagg

SEQ ID NO: 67279 - RNA, 23 nt, synthetic construct
  source 1..23: mol_type = other RNA
tcgcagctgccttcaaagctgta

SEQ ID NO: 67280 - RNA, 23 nt, synthetic construct
  source 1..23: mol_type = other RNA
atgtactcgcagctgccttcaaa

SEQ ID NO: 67281 - RNA, 23 nt, synthetic construct
  source 1..23: mol_type = other RNA
gtcccctcttggaggatcagctc

SEQ ID NO: 67282 - RNA, 23 nt, synthetic construct
  source 1..23: mol_type = other RNA
gggtgggtccccacccggccctc

SEQ ID NO: 67283 - RNA, 23 nt, synthetic construct
  source 1..23: mol_type = other RNA
cagggcgtccgggcaggaggggg

SEQ ID NO: 67284 - RNA, 23 nt, synthetic construct
  source 1..23: mol_type = other RNA
agtcacagaacaaggggcaggtg

SEQ ID NO: 67285 - RNA, 23 nt, synthetic construct
  source 1..23: mol_type = other RNA
tagtgccactcacagcccccatg

SEQ ID NO: 67286 - RNA, 23 nt, synthetic construct
  source 1..23: mol_type = other RNA
ttcgggtagcagccttccaggcc

SEQ ID NO: 67287 - RNA, 23 nt, synthetic construct
  source 1..23: mol_type = other RNA
cttcgggtagcagccttccaggc

SEQ ID NO: 67288 - RNA, 23 nt, synthetic construct
  source 1..23: mol_type = other RNA
cagccttcctgatgatggtgccg

SEQ ID NO: 67289 - RNA, 23 nt, synthetic construct
  source 1..23: mol_type = other RNA
cacagccttcctgatgatggtgc

SEQ ID NO: 67290 - RNA, 23 nt, synthetic construct
  source 1..23: mol_type = other RNA
catgccacagccttcctgatgat

SEQ ID NO: 67291 - RNA, 23 nt, synthetic construct
  source 1..23: mol_type = other RNA
gcggtggtgaaggtgaatggcgt

SEQ ID NO: 67292 - RNA, 23 nt, synthetic construct
  source 1..23: mol_type = other RNA
cgcctcccaggccgggctctggg

SEQ ID NO: 67293 - RNA, 23 nt, synthetic construct
  source 1..23: mol_type = other RNA
agcacagggcatacctggtaccc

SEQ ID NO: 67294 - RNA, 23 nt, synthetic construct
  source 1..23: mol_type = other RNA
tgtcagccagcacagggcatacc

SEQ ID NO: 67295 - RNA, 23 nt, synthetic construct
  source 1..23: mol_type = other RNA
tcagcccccgcatgcggtcacag

SEQ ID NO: 67296 - RNA, 23 nt, synthetic construct
  source 1..23: mol_type = other RNA
ggactctgttggctgttggcgca

SEQ ID NO: 67297 - RNA, 23 nt, synthetic construct
  source 1..23: mol_type = other RNA
cacggggcctgagctggacccag

SEQ ID NO: 67298 - RNA, 23 nt, synthetic construct
  source 1..23: mol_type = other RNA
agtgccctccagcggccctgatc

SEQ ID NO: 67299 - RNA, 23 nt, synthetic construct
  source 1..23: mol_type = other RNA
atgtccttaggctgctggcataa

SEQ ID NO: 67300 - RNA, 23 nt, synthetic construct
  source 1..23: mol_type = other RNA
cttctgccccacctgtgccaggg

SEQ ID NO: 67301 - RNA, 23 nt, synthetic construct
  source 1..23: mol_type = other RNA
agacgccctcctgctcccagttc

SEQ ID NO: 67302 - RNA, 23 nt, synthetic construct
  source 1..23: mol_type = other RNA
ctgctgtggtgctggccggggga

SEQ ID NO: 67303 - RNA, 23 nt, synthetic construct
  source 1..23: mol_type = other RNA
aagggtggatgtggccacccctg

SEQ ID NO: 67304 - RNA, 23 nt, synthetic construct
  source 1..23: mol_type = other RNA
gaagcggtgctggctgtgcctgt

SEQ ID NO: 67305 - RNA, 23 nt, synthetic construct
  source 1..23: mol_type = other RNA
gtcctgggcgtgctggtctcggc

SEQ ID NO: 67306 - RNA, 23 nt, synthetic construct
  source 1..23: mol_type = other RNA
tcgtgccctggctggtggtggtg

SEQ ID NO: 67307 - RNA, 23 nt, synthetic construct
  source 1..23: mol_type = other RNA
gagctgttctcagggtggaggtc

SEQ ID NO: 67308 - RNA, 23 nt, synthetic construct
  source 1..23: mol_type = other RNA
gagggagtggctttggagctggt

SEQ ID NO: 67309 - RNA, 23 nt, synthetic construct
  source 1..23: mol_type = other RNA
tgtgcttctcagtgctggaaggg

SEQ ID NO: 67310 - RNA, 23 nt, synthetic construct
  source 1..23: mol_type = other RNA
ccagttgtggtggccgtggcggt

SEQ ID NO: 67311 - RNA, 23 nt, synthetic construct
  source 1..23: mol_type = other RNA
gtaccactggtctgtgtgctaga

SEQ ID NO: 67312 - RNA, 23 nt, synthetic construct
  source 1..23: mol_type = other RNA
gccgtggtggtcagtgatggggg

SEQ ID NO: 67313 - RNA, 23 nt, synthetic construct
  source 1..23: mol_type = other RNA
ctagggcagaggagggagtcact

SEQ ID NO: 67314 - RNA, 23 nt, synthetic construct
  source 1..23: mol_type = other RNA
ggactgctggggggcagggatcg

SEQ ID NO: 67315 - RNA, 23 nt, synthetic construct
  source 1..23: mol_type = other RNA
ctgtggtcctggaggtggccgtg

SEQ ID NO: 67316 - RNA, 23 nt, synthetic construct
  source 1..23: mol_type = other RNA
cgtggctgtggtcctggaggtgg

SEQ ID NO: 67317 - RNA, 23 nt, synthetic construct
  source 1..23: mol_type = other RNA
gccactctgaccaggcacactgg

SEQ ID NO: 67318 - RNA, 23 nt, synthetic construct
  source 1..23: mol_type = other RNA
ccctggggtggaggacggggtgg

SEQ ID NO: 67319 - RNA, 23 nt, synthetic construct
  source 1..23: mol_type = other RNA
aagggagtggctttggagctggt

SEQ ID NO: 67320 - RNA, 23 nt, synthetic construct
  source 1..23: mol_type = other RNA
gtccctggactggagaagggagt

SEQ ID NO: 67321 - RNA, 23 nt, synthetic construct
  source 1..23: mol_type = other RNA
tgtgcttctcagtgctggaaggg

SEQ ID NO: 67322 - RNA, 23 nt, synthetic construct
  source 1..23: mol_type = other RNA
actgtggaggtgtggacagtctc

SEQ ID NO: 67323 - RNA, 23 nt, synthetic construct
  source 1..23: mol_type = other RNA
ccggttgtggtggccgtggtggt

SEQ ID NO: 67324 - RNA, 23 nt, synthetic construct
  source 1..23: mol_type = other RNA
gtaccactggtctgtgtgctaga

SEQ ID NO: 67325 - RNA, 23 nt, synthetic construct
  source 1..23: mol_type = other RNA
gccgtggtggtcagtgatggggg

SEQ ID NO: 67326 - RNA, 23 nt, synthetic construct
  source 1..23: mol_type = other RNA
ttgtccctggagttgaggagggg

SEQ ID NO: 67327 - RNA, 23 nt, synthetic construct
  source 1..23: mol_type = other RNA
ctagggcagaggagggagtcact

SEQ ID NO: 67328 - RNA, 23 nt, synthetic construct
  source 1..23: mol_type = other RNA
ggactgctgggggacagggatcg

SEQ ID NO: 67329 - RNA, 23 nt, synthetic construct
  source 1..23: mol_type = other RNA
gtggggactgctgggggacaggg

SEQ ID NO: 67330 - RNA, 23 nt, synthetic construct
  source 1..23: mol_type = other RNA
taccggtggttgctgctggggtg

SEQ ID NO: 67331 - RNA, 23 nt, synthetic construct
  source 1..23: mol_type = other RNA
gccactctgaccaggcacactgg

SEQ ID NO: 67332 - RNA, 23 nt, synthetic construct
  source 1..23: mol_type = other RNA
gtgcttgtcagcactggaagggt

SEQ ID NO: 67333 - RNA, 23 nt, synthetic construct
  source 1..23: mol_type = other RNA
tcgtggtcagcactgtggaggtg

SEQ ID NO: 67334 - RNA, 23 nt, synthetic construct
  source 1..23: mol_type = other RNA
gtccccggagtggaggagggggt

SEQ ID NO: 67335 - RNA, 23 nt, synthetic construct
  source 1..23: mol_type = other RNA
agttgtagtggctgctgtggtca

SEQ ID NO: 67336 - RNA, 23 nt, synthetic construct
  source 1..23: mol_type = other RNA
ccctggggtggaggacggggtgg

SEQ ID NO: 67337 - RNA, 23 nt, synthetic construct
  source 1..23: mol_type = other RNA
tgtgcttctcagtgctggaaggg

SEQ ID NO: 67338 - RNA, 23 nt, synthetic construct
  source 1..23: mol_type = other RNA
gggtccaggcggtgcccagggag

SEQ ID NO: 67339 - RNA, 23 nt, synthetic construct
  source 1..23: mol_type = other RNA
actgtggaggtgtggacagtctc

SEQ ID NO: 67340 - RNA, 23 nt, synthetic construct
  source 1..23: mol_type = other RNA
gtaccactggtctgtgtgctaga

SEQ ID NO: 67341 - RNA, 23 nt, synthetic construct
  source 1..23: mol_type = other RNA
gccgtggtggtcagtgatggggg

SEQ ID NO: 67342 - RNA, 23 nt, synthetic construct
  source 1..23: mol_type = other RNA
ttgtccctggagttgaggagggg

SEQ ID NO: 67343 - RNA, 23 nt, synthetic construct
  source 1..23: mol_type = other RNA
ctagggcagaggagggagtcact

SEQ ID NO: 67344 - RNA, 23 nt, synthetic construct
  source 1..23: mol_type = other RNA
ggactgctggggggcagggaccg

SEQ ID NO: 67345 - RNA, 23 nt, synthetic construct
  source 1..23: mol_type = other RNA
tgtggctgtggtcctggaggtgc

SEQ ID NO: 67346 - RNA, 23 nt, synthetic construct
  source 1..23: mol_type = other RNA
gccactctgaccaggcacactgg

SEQ ID NO: 67347 - RNA, 23 nt, synthetic construct
  source 1..23: mol_type = other RNA
ccctggggtggaggacggggtgg

SEQ ID NO: 67348 - RNA, 23 nt, synthetic construct
  source 1..23: mol_type = other RNA
aagggagtggctttggagctggt

SEQ ID NO: 67349 - RNA, 23 nt, synthetic construct
  source 1..23: mol_type = other RNA
gtccctggactggagaagggagt

SEQ ID NO: 67350 - RNA, 23 nt, synthetic construct
  source 1..23: mol_type = other RNA
tgtgcttctcagtgctggaaggg

SEQ ID NO: 67351 - RNA, 23 nt, synthetic construct
  source 1..23: mol_type = other RNA
cctggttgtggtggccgtggtgg

SEQ ID NO: 67352 - RNA, 23 nt, synthetic construct
  source 1..23: mol_type = other RNA
gctggaggagggggtgactgtga

SEQ ID NO: 67353 - RNA, 23 nt, synthetic construct
  source 1..23: mol_type = other RNA
tccccgggacggaggagggggtc

SEQ ID NO: 67354 - RNA, 23 nt, synthetic construct
  source 1..23: mol_type = other RNA
gtaccactggtctgtgtgctaga

SEQ ID NO: 67355 - RNA, 23 nt, synthetic construct
  source 1..23: mol_type = other RNA
ttgtccctggagttgaggagggg

SEQ ID NO: 67356 - RNA, 23 nt, synthetic construct
  source 1..23: mol_type = other RNA
ctagggcagaggagggagtcact

SEQ ID NO: 67357 - RNA, 23 nt, synthetic construct
  source 1..23: mol_type = other RNA
ggactgctgggggacagggatcg

SEQ ID NO: 67358 - RNA, 23 nt, synthetic construct
  source 1..23: mol_type = other RNA
gtggggactgctgggggacaggg

SEQ ID NO: 67359 - RNA, 23 nt, synthetic construct
  source 1..23: mol_type = other RNA
taccggtggttgctgctggggtg

SEQ ID NO: 67360 - RNA, 23 nt, synthetic construct
  source 1..23: mol_type = other RNA
gccactctgaccaggcacactgg

SEQ ID NO: 67361 - RNA, 23 nt, synthetic construct
  source 1..23: mol_type = other RNA
gtgtggtggccgggctggtcagc

SEQ ID NO: 67362 - RNA, 23 nt, synthetic construct
  source 1..23: mol_type = other RNA
gtgcttgtcagcactggaagggt

SEQ ID NO: 67363 - RNA, 23 nt, synthetic construct
  source 1..23: mol_type = other RNA
tcgtggtcagcactgtggaggtg

SEQ ID NO: 67364 - RNA, 23 nt, synthetic construct
  source 1..23: mol_type = other RNA
gtccccggagtggaggagggggt

SEQ ID NO: 67365 - RNA, 23 nt, synthetic construct
  source 1..23: mol_type = other RNA
agttgtagtggctgctgtggtca

SEQ ID NO: 67366 - RNA, 23 nt, synthetic construct
  source 1..23: mol_type = other RNA
ccctggggtggaggacggggtgg

SEQ ID NO: 67367 - RNA, 23 nt, synthetic construct
  source 1..23: mol_type = other RNA
ccctggggtggaggacggggtgg

SEQ ID NO: 67368 - RNA, 23 nt, synthetic construct
  source 1..23: mol_type = other RNA
gagggagtggctttggagctggt

SEQ ID NO: 67369 - RNA, 23 nt, synthetic construct
  source 1..23: mol_type = other RNA
tgtgcttctcagtgctggaaggg

SEQ ID NO: 67370 - RNA, 23 nt, synthetic construct
  source 1..23: mol_type = other RNA
actgtggaggtgtggacagtctc

SEQ ID NO: 67371 - RNA, 23 nt, synthetic construct
  source 1..23: mol_type = other RNA
ccggttgtggtggccgtggcggt

SEQ ID NO: 67372 - RNA, 23 nt, synthetic construct
  source 1..23: mol_type = other RNA
tgtgggtgtggtggttgtgggtg

SEQ ID NO: 67373 - RNA, 23 nt, synthetic construct
  source 1..23: mol_type = other RNA
gtaccactggtctgtgtgctaga

SEQ ID NO: 67374 - RNA, 23 nt, synthetic construct
  source 1..23: mol_type = other RNA
gccgtggtggtcagtgatggggg

SEQ ID NO: 67375 - RNA, 23 nt, synthetic construct
  source 1..23: mol_type = other RNA
ttgtccctggagttgaggagggg

SEQ ID NO: 67376 - RNA, 23 nt, synthetic construct
  source 1..23: mol_type = other RNA
cgtgctggtcagcactggggtga

SEQ ID NO: 67377 - RNA, 23 nt, synthetic construct
  source 1..23: mol_type = other RNA
ctgcgggtgtggtggccgtgctg

SEQ ID NO: 67378 - RNA, 23 nt, synthetic construct
  source 1..23: mol_type = other RNA
gctgcgggtgtggtggccgtgct

SEQ ID NO: 67379 - RNA, 23 nt, synthetic construct
  source 1..23: mol_type = other RNA
gtgcttgtcagcactggaagggt

SEQ ID NO: 67380 - RNA, 23 nt, synthetic construct
  source 1..23: mol_type = other RNA
ctggtagctgtggattttgtggc

SEQ ID NO: 67381 - RNA, 23 nt, synthetic construct
  source 1..23: mol_type = other RNA
gtggacatgggtgtggtggtctg

SEQ ID NO: 67382 - RNA, 23 nt, synthetic construct
  source 1..23: mol_type = other RNA
ggacatggtggacatgggtgtgg

SEQ ID NO: 67383 - RNA, 23 nt, synthetic construct
  source 1..23: mol_type = other RNA
tgtggacatggtggacatgggtg

SEQ ID NO: 67384 - RNA, 23 nt, synthetic construct
  source 1..23: mol_type = other RNA
tggcccttgtcatggtggctgtg

SEQ ID NO: 67385 - RNA, 23 nt, synthetic construct
  source 1..23: mol_type = other RNA
tggccgtggaattggtggccctt

SEQ ID NO: 67386 - RNA, 23 nt, synthetic construct
  source 1..23: mol_type = other RNA
ccgtggaggcagtggctgtgggc

SEQ ID NO: 67387 - RNA, 23 nt, synthetic construct
  source 1..23: mol_type = other RNA
cacgctgaaggttggcaggctgc

SEQ ID NO: 67388 - RNA, 23 nt, synthetic construct
  source 1..23: mol_type = other RNA
cccacatgctgcagatgcactcg

SEQ ID NO: 67389 - RNA, 23 nt, synthetic construct
  source 1..23: mol_type = other RNA
gtgcagttgccccggaaggtgta

SEQ ID NO: 67390 - RNA, 23 nt, synthetic construct
  source 1..23: mol_type = other RNA
gtagtggatgctgagggcgcggg

SEQ ID NO: 67391 - RNA, 23 nt, synthetic construct
  source 1..23: mol_type = other RNA
cggggcccagcagccatcctttc

SEQ ID NO: 67392 - RNA, 23 nt, synthetic construct
  source 1..23: mol_type = other RNA
acagagcggctgtggtgggcatg

SEQ ID NO: 67393 - RNA, 23 nt, synthetic construct
  source 1..23: mol_type = other RNA
gcgttgaagaggatctggtcctc

SEQ ID NO: 67394 - RNA, 23 nt, synthetic construct
  source 1..23: mol_type = other RNA
cgggggctgaccctgggcgtcac

SEQ ID NO: 67395 - RNA, 23 nt, synthetic construct
  source 1..23: mol_type = other RNA
ttctcggcccggggcctggtcac

SEQ ID NO: 67396 - RNA, 23 nt, synthetic construct
  source 1..23: mol_type = other RNA
gttctcggcccggggcctggtca

SEQ ID NO: 67397 - RNA, 23 nt, synthetic construct
  source 1..23: mol_type = other RNA
ggactcctgccctggcgggcaca

SEQ ID NO: 67398 - RNA, 23 nt, synthetic construct
  source 1..23: mol_type = other RNA
agtcgccctcctcctgggtgcag

SEQ ID NO: 67399 - RNA, 23 nt, synthetic construct
  source 1..23: mol_type = other RNA
gttgcaggcatcctcctgacatt

SEQ ID NO: 67400 - RNA, 23 nt, synthetic construct
  source 1..23: mol_type = other RNA
gcagttgtccacatggctgttga

SEQ ID NO: 67401 - RNA, 23 nt, synthetic construct
  source 1..23: mol_type = other RNA
catctgggcaggatgcaggctgt

SEQ ID NO: 67402 - RNA, 23 nt, synthetic construct
  source 1..23: mol_type = other RNA
tcgcagccctggtgccacaggat

SEQ ID NO: 67403 - RNA, 23 nt, synthetic construct
  source 1..23: mol_type = other RNA
gcaggagccctcgcagaaggtga

SEQ ID NO: 67404 - RNA, 23 nt, synthetic construct
  source 1..23: mol_type = other RNA
aagccacgggtgtgtgggggagc

SEQ ID NO: 67405 - RNA, 23 nt, synthetic construct
  source 1..23: mol_type = other RNA
cacaggccggggggctccgcaga

SEQ ID NO: 67406 - RNA, 23 nt, synthetic construct
  source 1..23: mol_type = other RNA
cacggggtgggcagcaggagcac

SEQ ID NO: 67407 - RNA, 23 nt, synthetic construct
  source 1..23: mol_type = other RNA
ccacggggtgggcagcaggagca

SEQ ID NO: 67408 - RNA, 23 nt, synthetic construct
  source 1..23: mol_type = other RNA
gcctgtctgccccagcggccgga

SEQ ID NO: 67409 - RNA, 23 nt, synthetic construct
  source 1..23: mol_type = other RNA
cagctggccttgcctggaccagc

SEQ ID NO: 67410 - RNA, 23 nt, synthetic construct
  source 1..23: mol_type = other RNA
tgtcgcagcttcctggcagcagc

SEQ ID NO: 67411 - RNA, 23 nt, synthetic construct
  source 1..23: mol_type = other RNA
ctgtcgcagcttcctggcagcag

SEQ ID NO: 67412 - RNA, 23 nt, synthetic construct
  source 1..23: mol_type = other RNA
gcgacctcagccctgagttaccc

SEQ ID NO: 67413 - RNA, 23 nt, synthetic construct
  source 1..23: mol_type = other RNA
cgaggtggccgaagtccaggctg

SEQ ID NO: 67414 - RNA, 23 nt, synthetic construct
  source 1..23: mol_type = other RNA
ggtggtgcccaagatgcccgagg

SEQ ID NO: 67415 - RNA, 23 nt, synthetic construct
  source 1..23: mol_type = other RNA
tgttgtccctggagttgaggagg

SEQ ID NO: 67416 - RNA, 23 nt, synthetic construct
  source 1..23: mol_type = other RNA
tgaggtggccgaagtccaggctg

SEQ ID NO: 67417 - RNA, 23 nt, synthetic construct
  source 1..23: mol_type = other RNA
ggatccaggtcgtccctggagtg

SEQ ID NO: 67418 - RNA, 23 nt, synthetic construct
  source 1..23: mol_type = other RNA
atggtggccatgggtgtggtggt

SEQ ID NO: 67419 - RNA, 23 nt, synthetic construct
  source 1..23: mol_type = other RNA
agttgtccctggagttgaggagg

SEQ ID NO: 67420 - RNA, 23 nt, synthetic construct
  source 1..23: mol_type = other RNA
cgaggtggccgaagtccaggctg

SEQ ID NO: 67421 - RNA, 23 nt, synthetic construct
  source 1..23: mol_type = other RNA
ggtggtgcccaagatgcccgagg

SEQ ID NO: 67422 - RNA, 23 nt, synthetic construct
  source 1..23: mol_type = other RNA
tgttgtccctggagttgaggagg

SEQ ID NO: 67423 - RNA, 23 nt, synthetic construct
  source 1..23: mol_type = other RNA
tgaggtggccgaagtccaggctg

SEQ ID NO: 67424 - RNA, 23 nt, synthetic construct
  source 1..23: mol_type = other RNA
tgttgtccctggagttgaggagg

SEQ ID NO: 67425 - RNA, 23 nt, synthetic construct
  source 1..23: mol_type = other RNA
ctggcagttgctgacccaccgct

SEQ ID NO: 67426 - RNA, 23 nt, synthetic construct
  source 1..23: mol_type = other RNA
gtgctggaagggcggttgcagtc

SEQ ID NO: 67427 - RNA, 23 nt, synthetic construct
  source 1..23: mol_type = other RNA
gtgctggaagggcggttgcagtc

SEQ ID NO: 67428 - RNA, 23 nt, synthetic construct
  source 1..23: mol_type = other RNA
cgtggtcctggaggtggccctgg

SEQ ID NO: 67429 - RNA, 23 nt, synthetic construct
  source 1..23: mol_type = other RNA
gtgctggaagggcggttgcagtc

SEQ ID NO: 67430 - RNA, 23 nt, synthetic construct
  source 1..23: mol_type = other RNA
gtgctggaagggcggttgcagtc

SEQ ID NO: 67431 - RNA, 23 nt, synthetic construct
  source 1..23: mol_type = other RNA
aggcagcctgggccttccaggtg

SEQ ID NO: 67432 - RNA, 23 nt, synthetic construct
  source 1..23: mol_type = other RNA
ggtgagggctggacagggctgga

SEQ ID NO: 67433 - RNA, 23 nt, synthetic construct
  source 1..23: mol_type = other RNA
ggtgagggctggacagggctgga

SEQ ID NO: 67434 - RNA, 23 nt, synthetic construct
  source 1..23: mol_type = other RNA
ggtgagggctggacagggctgga

SEQ ID NO: 67435 - RNA, 23 nt, synthetic construct
  source 1..23: mol_type = other RNA
gccctccgccatcccctccagct

SEQ ID NO: 67436 - RNA, 23 nt, synthetic construct
  source 1..23: mol_type = other RNA
gactccaccctcagcctcacaga

SEQ ID NO: 67437 - RNA, 23 nt, synthetic construct
  source 1..23: mol_type = other RNA
agtgctcagagaacacgtagttg

SEQ ID NO: 67438 - RNA, 23 nt, synthetic construct
  source 1..23: mol_type = other RNA
agcggggtcagcctggcgttgtg

SEQ ID NO: 67439 - RNA, 23 nt, synthetic construct
  source 1..23: mol_type = other RNA
ccgggggcagagctcagggcacc

SEQ ID NO: 67440 - RNA, 23 nt, synthetic construct
  source 1..23: mol_type = other RNA
acagccttcctgatgatggtgcc

SEQ ID NO: 67441 - RNA, 23 nt, synthetic construct
  source 1..23: mol_type = other RNA
cgtggagtgggggacccaggcgg

SEQ ID NO: 67442 - RNA, 23 nt, synthetic construct
  source 1..23: mol_type = other RNA
ctgggcgtgctggtctcggcctg

SEQ ID NO: 67443 - RNA, 23 nt, synthetic construct
  source 1..23: mol_type = other RNA
taggcgggtccaggtggtgccca

SEQ ID NO: 67444 - RNA, 23 nt, synthetic construct
  source 1..23: mol_type = other RNA
tgtggtcctggaggtggccgtgg

SEQ ID NO: 67445 - RNA, 23 nt, synthetic construct
  source 1..23: mol_type = other RNA
gtggccgtggctgtggtcctgga

SEQ ID NO: 67446 - RNA, 23 nt, synthetic construct
  source 1..23: mol_type = other RNA
cacagcccatggtcaccaccgtg

SEQ ID NO: 67447 - RNA, 23 nt, synthetic construct
  source 1..23: mol_type = other RNA
ttgaacttccccacctgctcacg

SEQ ID NO: 67448 - RNA, 23 nt, synthetic construct
  source 1..23: mol_type = other RNA
taggcgggtccaggtggtgccca

SEQ ID NO: 67449 - RNA, 23 nt, synthetic construct
  source 1..23: mol_type = other RNA
cacagcccatggtcaccaccgtg

SEQ ID NO: 67450 - RNA, 23 nt, synthetic construct
  source 1..23: mol_type = other RNA
ttgaacttccccacctgctcacg

SEQ ID NO: 67451 - RNA, 23 nt, synthetic construct
  source 1..23: mol_type = other RNA
gtggccatgggtgtggtggtctg

SEQ ID NO: 67452 - RNA, 23 nt, synthetic construct
  source 1..23: mol_type = other RNA
gcccgggtggaggaggcggtggc

SEQ ID NO: 67453 - RNA, 23 nt, synthetic construct
  source 1..23: mol_type = other RNA
aggagggagtggctctggagctg

SEQ ID NO: 67454 - RNA, 23 nt, synthetic construct
  source 1..23: mol_type = other RNA
ttgaacttccccacctgctcacg

SEQ ID NO: 67455 - RNA, 23 nt, synthetic construct
  source 1..23: mol_type = other RNA
taggcgggtccaggtggtgccca

SEQ ID NO: 67456 - RNA, 23 nt, synthetic construct
  source 1..23: mol_type = other RNA
ccgtggagccactggttgtgggt

SEQ ID NO: 67457 - RNA, 23 nt, synthetic construct
  source 1..23: mol_type = other RNA
cccgggacggaggagggggtcac

SEQ ID NO: 67458 - RNA, 23 nt, synthetic construct
  source 1..23: mol_type = other RNA
ccccgggacggaggagggggtca

SEQ ID NO: 67459 - RNA, 23 nt, synthetic construct
  source 1..23: mol_type = other RNA
ccagggggacaccaggctgggcc

SEQ ID NO: 67460 - RNA, 23 nt, synthetic construct
  source 1..23: mol_type = other RNA
ttgaacttccccacctgctcacg

SEQ ID NO: 67461 - RNA, 23 nt, synthetic construct
  source 1..23: mol_type = other RNA
taggcgggtccaggtggtgccca

SEQ ID NO: 67462 - RNA, 23 nt, synthetic construct
  source 1..23: mol_type = other RNA
ccgtggagccactggttgtgggt

SEQ ID NO: 67463 - RNA, 23 nt, synthetic construct
  source 1..23: mol_type = other RNA
tggctgcgggtgtggtggccgtg

SEQ ID NO: 67464 - RNA, 23 nt, synthetic construct
  source 1..23: mol_type = other RNA
ccacagggtggaggaggggatgg

SEQ ID NO: 67465 - RNA, 23 nt, synthetic construct
  source 1..23: mol_type = other RNA
ccttgtcatggtggctgtggtgg

SEQ ID NO: 67466 - RNA, 23 nt, synthetic construct
  source 1..23: mol_type = other RNA
tgttcccagagtggaggaggcgg

SEQ ID NO: 67467 - RNA, 23 nt, synthetic construct
  source 1..23: mol_type = other RNA
gatcaggccctcctccttcccat

SEQ ID NO: 67468 - RNA, 23 nt, synthetic construct
  source 1..23: mol_type = other RNA
catggtggtggtccccagcacag

SEQ ID NO: 67469 - RNA, 23 nt, synthetic construct
  source 1..23: mol_type = other RNA
cgccatcccctccagctgtgggc

SEQ ID NO: 67470 - RNA, 23 nt, synthetic construct
  source 1..23: mol_type = other RNA
cctggcactgccatagccccccg

SEQ ID NO: 67471 - RNA, 23 nt, synthetic construct
  source 1..23: mol_type = other RNA
cgtaggcgtagcgctgggacttg

SEQ ID NO: 67472 - RNA, 23 nt, synthetic construct
  source 1..23: mol_type = other RNA
gttgctgcagtccaggtacacca

SEQ ID NO: 67473 - RNA, 23 nt, synthetic construct
  source 1..23: mol_type = other RNA
agtgctggaagggcggttgcagt

SEQ ID NO: 67474 - RNA, 23 nt, synthetic construct
  source 1..23: mol_type = other RNA
gtagtggccgtggtggtcagtga

SEQ ID NO: 67475 - RNA, 23 nt, synthetic construct
  source 1..23: mol_type = other RNA
gagttgaggaggggttggtggtg

SEQ ID NO: 67476 - RNA, 23 nt, synthetic construct
  source 1..23: mol_type = other RNA
accggtggttgctgctagggtgt

SEQ ID NO: 67477 - RNA, 23 nt, synthetic construct
  source 1..23: mol_type = other RNA
agtgctggaagggcggttgcagt

SEQ ID NO: 67478 - RNA, 23 nt, synthetic construct
  source 1..23: mol_type = other RNA
gtagtggccgtggtggtcagtga

SEQ ID NO: 67479 - RNA, 23 nt, synthetic construct
  source 1..23: mol_type = other RNA
gagttgaggaggggttggtggtg

SEQ ID NO: 67480 - RNA, 23 nt, synthetic construct
  source 1..23: mol_type = other RNA
tggtggccgtggtgttcggcact

SEQ ID NO: 67481 - RNA, 23 nt, synthetic construct
  source 1..23: mol_type = other RNA
gggactgctgggggacagggatc

SEQ ID NO: 67482 - RNA, 23 nt, synthetic construct
  source 1..23: mol_type = other RNA
ctggggtgtgggaagtccccgtg

SEQ ID NO: 67483 - RNA, 23 nt, synthetic construct
  source 1..23: mol_type = other RNA
tgctgggctctgtgaggatccag

SEQ ID NO: 67484 - RNA, 23 nt, synthetic construct
  source 1..23: mol_type = other RNA
agtgctggaagggcggttgcagt

SEQ ID NO: 67485 - RNA, 23 nt, synthetic construct
  source 1..23: mol_type = other RNA
gtagtggccgtggtggtcagtga

SEQ ID NO: 67486 - RNA, 23 nt, synthetic construct
  source 1..23: mol_type = other RNA
gagttgaggaggggttggtggtg

SEQ ID NO: 67487 - RNA, 23 nt, synthetic construct
  source 1..23: mol_type = other RNA
tggtggccgtggtgttcggcact

SEQ ID NO: 67488 - RNA, 23 nt, synthetic construct
  source 1..23: mol_type = other RNA
agtgctggaagggcggttgcagt

SEQ ID NO: 67489 - RNA, 23 nt, synthetic construct
  source 1..23: mol_type = other RNA
gagttgaggaggggttggtggtg

SEQ ID NO: 67490 - RNA, 23 nt, synthetic construct
  source 1..23: mol_type = other RNA
tggtggccgtggtgttcggcact

SEQ ID NO: 67491 - RNA, 23 nt, synthetic construct
  source 1..23: mol_type = other RNA
gggactgctgggggacagggatc

SEQ ID NO: 67492 - RNA, 23 nt, synthetic construct
  source 1..23: mol_type = other RNA
ctggggtgtgggaagtccccgtg

SEQ ID NO: 67493 - RNA, 23 nt, synthetic construct
  source 1..23: mol_type = other RNA
gtagtggccgtggtggtcagtga

SEQ ID NO: 67494 - RNA, 23 nt, synthetic construct
  source 1..23: mol_type = other RNA
gagttgaggaggggttggtggtg

SEQ ID NO: 67495 - RNA, 23 nt, synthetic construct
  source 1..23: mol_type = other RNA
tgtcggggaccagccacgtcttg

SEQ ID NO: 67496 - RNA, 23 nt, synthetic construct
  source 1..23: mol_type = other RNA
tgccagggcgtccgggcaggagg

SEQ ID NO: 67497 - RNA, 23 nt, synthetic construct
  source 1..23: mol_type = other RNA
gcctgcacgcagatgcccatgtg

SEQ ID NO: 67498 - RNA, 23 nt, synthetic construct
  source 1..23: mol_type = other RNA
ctgggcgcaggcggccaggtacg

SEQ ID NO: 67499 - RNA, 23 nt, synthetic construct
  source 1..23: mol_type = other RNA
ccagggcgtccgggcaggagggg

SEQ ID NO: 67500 - RNA, 23 nt, synthetic construct
  source 1..23: mol_type = other RNA
tggctggagttccaggacatgcc

SEQ ID NO: 67501 - RNA, 23 nt, synthetic construct
  source 1..23: mol_type = other RNA
aagctccccgtcgtccctggaag

SEQ ID NO: 67502 - RNA, 23 nt, synthetic construct
  source 1..23: mol_type = other RNA
actgtggcggtgtgggtggtccc

SEQ ID NO: 67503 - RNA, 23 nt, synthetic construct
  source 1..23: mol_type = other RNA
actgtggcggtgtgggtggtccc

SEQ ID NO: 67504 - RNA, 23 nt, synthetic construct
  source 1..23: mol_type = other RNA
aacgctggtagctgtggatttgg

SEQ ID NO: 67505 - RNA, 23 nt, synthetic construct
  source 1..23: mol_type = other RNA
gcaggagcacggagcgcggggtg

SEQ ID NO: 67506 - RNA, 23 nt, synthetic construct
  source 1..23: mol_type = other RNA
cccagctcggctccacagggccc

SEQ ID NO: 67507 - RNA, 23 nt, synthetic construct
  source 1..23: mol_type = other RNA
cggtggcagatgccctcctcgtc

SEQ ID NO: 67508 - RNA, 23 nt, synthetic construct
  source 1..23: mol_type = other RNA
cctgggcgcaggcggccaggtac

SEQ ID NO: 67509 - RNA, 23 nt, synthetic construct
  source 1..23: mol_type = other RNA
ccgtccacacagtggtcctcgca

SEQ ID NO: 67510 - RNA, 23 nt, synthetic construct
  source 1..23: mol_type = other RNA
gagtggcaccagctgcaccagca

SEQ ID NO: 67511 - RNA, 23 nt, synthetic construct
  source 1..23: mol_type = other RNA
ttggaggatcagctcgtagctct

SEQ ID NO: 67512 - RNA, 23 nt, synthetic construct
  source 1..23: mol_type = other RNA
ccattgtaccagctggaccagcg

SEQ ID NO: 67513 - RNA, 23 nt, synthetic construct
  source 1..23: mol_type = other RNA
ccgggctctgggcggtgcccatt

SEQ ID NO: 67514 - RNA, 23 nt, synthetic construct
  source 1..23: mol_type = other RNA
ggtggctgtaccaagggtgcttg

SEQ ID NO: 67515 - RNA, 23 nt, synthetic construct
  source 1..23: mol_type = other RNA
gtcagcactggggggatgggagt

SEQ ID NO: 67516 - RNA, 23 nt, synthetic construct
  source 1..23: mol_type = other RNA
agtccctggactggagaagggag

SEQ ID NO: 67517 - RNA, 23 nt, synthetic construct
  source 1..23: mol_type = other RNA
ttggggccgatgtggggctgctg

SEQ ID NO: 67518 - RNA, 23 nt, synthetic construct
  source 1..23: mol_type = other RNA
ggtggacatggaactggtggccc

SEQ ID NO: 67519 - RNA, 23 nt, synthetic construct
  source 1..23: mol_type = other RNA
ggtgccagcagttgcccgggtgg

SEQ ID NO: 67520 - RNA, 23 nt, synthetic construct
  source 1..23: mol_type = other RNA
gtcagcactggggggatgggagt

SEQ ID NO: 67521 - RNA, 23 nt, synthetic construct
  source 1..23: mol_type = other RNA
agtccctggactggagaagggag

SEQ ID NO: 67522 - RNA, 23 nt, synthetic construct
  source 1..23: mol_type = other RNA
ggccctggttgtggtggccgtgg

SEQ ID NO: 67523 - RNA, 23 nt, synthetic construct
  source 1..23: mol_type = other RNA
gtggctgcgggtgtggtggccgt

SEQ ID NO: 67524 - RNA, 23 nt, synthetic construct
  source 1..23: mol_type = other RNA
ttgtggctgtgcttgtcagcact

SEQ ID NO: 67525 - RNA, 23 nt, synthetic construct
  source 1..23: mol_type = other RNA
tttgtggctgtgcttgtcagcac

SEQ ID NO: 67526 - RNA, 23 nt, synthetic construct
  source 1..23: mol_type = other RNA
tggggtggaggacagggtggccg

SEQ ID NO: 67527 - RNA, 23 nt, synthetic construct
  source 1..23: mol_type = other RNA
tcacctgccggagagggatggca

SEQ ID NO: 67528 - RNA, 23 nt, synthetic construct
  source 1..23: mol_type = other RNA
ggtggtggtccccagcacagaca

SEQ ID NO: 67529 - RNA, 23 nt, synthetic construct
  source 1..23: mol_type = other RNA
taggtggagatgtgggccccgcc

SEQ ID NO: 67530 - RNA, 23 nt, synthetic construct
  source 1..23: mol_type = other RNA
tccgcagctcagccagcacggtg

SEQ ID NO: 67531 - RNA, 23 nt, synthetic construct
  source 1..23: mol_type = other RNA
tgctgtggtgctggccgggggag

SEQ ID NO: 67532 - RNA, 23 nt, synthetic construct
  source 1..23: mol_type = other RNA
agaggtggacagctcgctcgtga

SEQ ID NO: 67533 - RNA, 23 nt, synthetic construct
  source 1..23: mol_type = other RNA
gtgtggtggttgtgctgatccac

SEQ ID NO: 67534 - RNA, 23 nt, synthetic construct
  source 1..23: mol_type = other RNA
gaggaggggttggtggtggagcc

SEQ ID NO: 67535 - RNA, 23 nt, synthetic construct
  source 1..23: mol_type = other RNA
gtcgtggccgtggtgctcacatg

SEQ ID NO: 67536 - RNA, 23 nt, synthetic construct
  source 1..23: mol_type = other RNA
tgggtgtcgtggccgtggtgctc

SEQ ID NO: 67537 - RNA, 23 nt, synthetic construct
  source 1..23: mol_type = other RNA
gtgtggtggttgtgctgatccac

SEQ ID NO: 67538 - RNA, 23 nt, synthetic construct
  source 1..23: mol_type = other RNA
gaggaggggttggtggtggagcc

SEQ ID NO: 67539 - RNA, 23 nt, synthetic construct
  source 1..23: mol_type = other RNA
tcagcactggaagggtggttgca

SEQ ID NO: 67540 - RNA, 23 nt, synthetic construct
  source 1..23: mol_type = other RNA
tggtggccatgggtgtggtggtc

SEQ ID NO: 67541 - RNA, 23 nt, synthetic construct
  source 1..23: mol_type = other RNA
tggctgtagtgctgggctctgtg

SEQ ID NO: 67542 - RNA, 23 nt, synthetic construct
  source 1..23: mol_type = other RNA
tggccctggttgtggtggtcgtg

SEQ ID NO: 67543 - RNA, 23 nt, synthetic construct
  source 1..23: mol_type = other RNA
gtgtggtggttgtgctgatccac

SEQ ID NO: 67544 - RNA, 23 nt, synthetic construct
  source 1..23: mol_type = other RNA
gaggaggggttggtggtggagcc

SEQ ID NO: 67545 - RNA, 23 nt, synthetic construct
  source 1..23: mol_type = other RNA
gtcgtggccgtggtgctcacatg

SEQ ID NO: 67546 - RNA, 23 nt, synthetic construct
  source 1..23: mol_type = other RNA
tgggtgtcgtggccgtggtgctc

SEQ ID NO: 67547 - RNA, 23 nt, synthetic construct
  source 1..23: mol_type = other RNA
gtgtggtggttgtgctgatccac

SEQ ID NO: 67548 - RNA, 23 nt, synthetic construct
  source 1..23: mol_type = other RNA
gaggaggggttggtggtggagcc

SEQ ID NO: 67549 - RNA, 23 nt, synthetic construct
  source 1..23: mol_type = other RNA
tcagcactggaagggtggttgca

SEQ ID NO: 67550 - RNA, 23 nt, synthetic construct
  source 1..23: mol_type = other RNA
gtcgtggccgtggtgctcacatg

SEQ ID NO: 67551 - RNA, 23 nt, synthetic construct
  source 1..23: mol_type = other RNA
tgggtgtcgtggccgtggtgctc

SEQ ID NO: 67552 - RNA, 23 nt, synthetic construct
  source 1..23: mol_type = other RNA
aagggcagttgcagtccctggac

SEQ ID NO: 67553 - RNA, 23 nt, synthetic construct
  source 1..23: mol_type = other RNA
gtgtggtggttgtgctgatccac

SEQ ID NO: 67554 - RNA, 23 nt, synthetic construct
  source 1..23: mol_type = other RNA
gaggaggggttggtggtggagcc

SEQ ID NO: 67555 - RNA, 23 nt, synthetic construct
  source 1..23: mol_type = other RNA
tcagcactggaagggtggttgca

SEQ ID NO: 67556 - RNA, 23 nt, synthetic construct
  source 1..23: mol_type = other RNA
gtggtggtccccagcacagacac

SEQ ID NO: 67557 - RNA, 23 nt, synthetic construct
  source 1..23: mol_type = other RNA
aggggcaggcctgcacgcagatg

SEQ ID NO: 67558 - RNA, 23 nt, synthetic construct
  source 1..23: mol_type = other RNA
atgtggcagggaagggcgcctgg

SEQ ID NO: 67559 - RNA, 23 nt, synthetic construct
  source 1..23: mol_type = other RNA
gggctccgcagaggaggcccaag

SEQ ID NO: 67560 - RNA, 23 nt, synthetic construct
  source 1..23: mol_type = other RNA
gggggctccgcagaggaggccca

SEQ ID NO: 67561 - RNA, 23 nt, synthetic construct
  source 1..23: mol_type = other RNA
gtggagcctctggttgtgggtgt

SEQ ID NO: 67562 - RNA, 23 nt, synthetic construct
  source 1..23: mol_type = other RNA
gtggagcctctggttgtgggtgt

SEQ ID NO: 67563 - RNA, 23 nt, synthetic construct
  source 1..23: mol_type = other RNA
ggctggcacgggtggggggacgg

SEQ ID NO: 67564 - RNA, 23 nt, synthetic construct
  source 1..23: mol_type = other RNA
ggttgacagcgggtcgtgccctg

SEQ ID NO: 67565 - RNA, 23 nt, synthetic construct
  source 1..23: mol_type = other RNA
ggtggaggacggggtggccgtgg

SEQ ID NO: 67566 - RNA, 23 nt, synthetic construct
  source 1..23: mol_type = other RNA
ggtggaggacggggtggccgtgg

SEQ ID NO: 67567 - RNA, 23 nt, synthetic construct
  source 1..23: mol_type = other RNA
ggtggaggacggggtggccgtgg

SEQ ID NO: 67568 - RNA, 23 nt, synthetic construct
  source 1..23: mol_type = other RNA
ggtggaggacggggtggccgtgg

SEQ ID NO: 67569 - RNA, 23 nt, synthetic construct
  source 1..23: mol_type = other RNA
ggtggaggacggggtggccgtgg

SEQ ID NO: 67570 - RNA, 23 nt, synthetic construct
  source 1..23: mol_type = other RNA
ggtggaggacggggtggccgtgg

SEQ ID NO: 67571 - RNA, 23 nt, synthetic construct
  source 1..23: mol_type = other RNA
ggggtggaggacagggtggccgt

SEQ ID NO: 67572 - RNA, 23 nt, synthetic construct
  source 1..23: mol_type = other RNA
agctcctcccgctgcccattgat

SEQ ID NO: 67573 - RNA, 23 nt, synthetic construct
  source 1..23: mol_type = other RNA
gccctgcacagagcaggtgccag

SEQ ID NO: 67574 - RNA, 23 nt, synthetic construct
  source 1..23: mol_type = other RNA
gccagggcgtccgggcaggaggg

SEQ ID NO: 67575 - RNA, 23 nt, synthetic construct
  source 1..23: mol_type = other RNA
accttctgccccacctgtgccag

SEQ ID NO: 67576 - RNA, 23 nt, synthetic construct
  source 1..23: mol_type = other RNA
gcggttgcagtccctggactgga

SEQ ID NO: 67577 - RNA, 23 nt, synthetic construct
  source 1..23: mol_type = other RNA
ggtgtggtggttgtgctgatcca

SEQ ID NO: 67578 - RNA, 23 nt, synthetic construct
  source 1..23: mol_type = other RNA
gcggttgcagtccctggactgga

SEQ ID NO: 67579 - RNA, 23 nt, synthetic construct
  source 1..23: mol_type = other RNA
ggtgtggtggttgtgctgatcca

SEQ ID NO: 67580 - RNA, 23 nt, synthetic construct
  source 1..23: mol_type = other RNA
gtgggtgtggtggccgtgctggt

SEQ ID NO: 67581 - RNA, 23 nt, synthetic construct
  source 1..23: mol_type = other RNA
gcactttgagggtgccagcagtt

SEQ ID NO: 67582 - RNA, 23 nt, synthetic construct
  source 1..23: mol_type = other RNA
gtgggtgtggtggccgtgctggt

SEQ ID NO: 67583 - RNA, 23 nt, synthetic construct
  source 1..23: mol_type = other RNA
gcggttgcagtccctggactgga

SEQ ID NO: 67584 - RNA, 23 nt, synthetic construct
  source 1..23: mol_type = other RNA
ggtgtggtggttgtgctgatcca

SEQ ID NO: 67585 - RNA, 23 nt, synthetic construct
  source 1..23: mol_type = other RNA
gcggttgcagtccctggactgga

SEQ ID NO: 67586 - RNA, 23 nt, synthetic construct
  source 1..23: mol_type = other RNA
ctggaggagggggtgactgtgaa

SEQ ID NO: 67587 - RNA, 23 nt, synthetic construct
  source 1..23: mol_type = other RNA
ggtgtggtggttgtgctgatcca

SEQ ID NO: 67588 - RNA, 23 nt, synthetic construct
  source 1..23: mol_type = other RNA
ggtgtggtggttgtgctgatcca

SEQ ID NO: 67589 - RNA, 23 nt, synthetic construct
  source 1..23: mol_type = other RNA
ggggtgtgagctgttcccagagt

SEQ ID NO: 67590 - RNA, 23 nt, synthetic construct
  source 1..23: mol_type = other RNA
gcaggggagggcgaggacagcgg

SEQ ID NO: 67591 - RNA, 23 nt, synthetic construct
  source 1..23: mol_type = other RNA
cggggaccagccacgtcttggcc

SEQ ID NO: 67592 - RNA, 23 nt, synthetic construct
  source 1..23: mol_type = other RNA
gcccagcagccatcctttctgct

SEQ ID NO: 67593 - RNA, 23 nt, synthetic construct
  source 1..23: mol_type = other RNA
caggggttctcggcccggggcct

SEQ ID NO: 67594 - RNA, 23 nt, synthetic construct
  source 1..23: mol_type = other RNA
gggcaggtggttgtgttgcacac

SEQ ID NO: 67595 - RNA, 23 nt, synthetic construct
  source 1..23: mol_type = other RNA
acacacaggccggggggctccgc

SEQ ID NO: 67596 - RNA, 23 nt, synthetic construct
  source 1..23: mol_type = other RNA
catcagggaggggcaaggccaag

SEQ ID NO: 67597 - RNA, 23 nt, synthetic construct
  source 1..23: mol_type = other RNA
cgctccggccgtggcagggacac

SEQ ID NO: 67598 - RNA, 23 nt, synthetic construct
  source 1..23: mol_type = other RNA
cacccatcctgggggctggcacg

SEQ ID NO: 67599 - RNA, 23 nt, synthetic construct
  source 1..23: mol_type = other RNA
ctcggggcacccatcctgggggc

SEQ ID NO: 67600 - RNA, 23 nt, synthetic construct
  source 1..23: mol_type = other RNA
ctcggctccacagggccctgggt

SEQ ID NO: 67601 - RNA, 23 nt, synthetic construct
  source 1..23: mol_type = other RNA
ctcccagctcggctccacagggc

SEQ ID NO: 67602 - RNA, 23 nt, synthetic construct
  source 1..23: mol_type = other RNA
cttgtagtggaagtcaccccagg

SEQ ID NO: 67603 - RNA, 23 nt, synthetic construct
  source 1..23: mol_type = other RNA
ggacgcctccagcaccagcccct

SEQ ID NO: 67604 - RNA, 23 nt, synthetic construct
  source 1..23: mol_type = other RNA
ccgctgcccattgatgaggacgg

SEQ ID NO: 67605 - RNA, 23 nt, synthetic construct
  source 1..23: mol_type = other RNA
tggagcggggtcagcctggcgtt

SEQ ID NO: 67606 - RNA, 23 nt, synthetic construct
  source 1..23: mol_type = other RNA
ggtcctgggcgcaggcggccagg

SEQ ID NO: 67607 - RNA, 23 nt, synthetic construct
  source 1..23: mol_type = other RNA
ggtggcacacgggcaggtggggc

SEQ ID NO: 67608 - RNA, 23 nt, synthetic construct
  source 1..23: mol_type = other RNA
ccccggagcaggtgcaggagctg

SEQ ID NO: 67609 - RNA, 23 nt, synthetic construct
  source 1..23: mol_type = other RNA
gtgggccccgccctgcacagagc

SEQ ID NO: 67610 - RNA, 23 nt, synthetic construct
  source 1..23: mol_type = other RNA
gccccaggcctgtctgcaccacg

SEQ ID NO: 67611 - RNA, 23 nt, synthetic construct
  source 1..23: mol_type = other RNA
ggcagcctgggccttccaggtgt

SEQ ID NO: 67612 - RNA, 23 nt, synthetic construct
  source 1..23: mol_type = other RNA
cgagcaccagtgccgggcgtagt

SEQ ID NO: 67613 - RNA, 23 nt, synthetic construct
  source 1..23: mol_type = other RNA
agtggcagcgcgagaaggcactg

SEQ ID NO: 67614 - RNA, 23 nt, synthetic construct
  source 1..23: mol_type = other RNA
cgcggcaagtgggctggcaggca

SEQ ID NO: 67615 - RNA, 23 nt, synthetic construct
  source 1..23: mol_type = other RNA
gccgagctgttgctgcagtccag

SEQ ID NO: 67616 - RNA, 23 nt, synthetic construct
  source 1..23: mol_type = other RNA
acctccggttcctgcaggtgcag

SEQ ID NO: 67617 - RNA, 23 nt, synthetic construct
  source 1..23: mol_type = other RNA
cccaggacacggccatcccgtgg

SEQ ID NO: 67618 - RNA, 23 nt, synthetic construct
  source 1..23: mol_type = other RNA
gaaacactcgcagtcgccacccg

SEQ ID NO: 67619 - RNA, 23 nt, synthetic construct
  source 1..23: mol_type = other RNA
actgggtgtgcagttacagctct

SEQ ID NO: 67620 - RNA, 23 nt, synthetic construct
  source 1..23: mol_type = other RNA
ctcccaggccgggctctgggcgg

SEQ ID NO: 67621 - RNA, 23 nt, synthetic construct
  source 1..23: mol_type = other RNA
ctgagggagggctgagggctggt

SEQ ID NO: 67622 - RNA, 23 nt, synthetic construct
  source 1..23: mol_type = other RNA
cacccatagggtggtcttttcgg

SEQ ID NO: 67623 - RNA, 23 nt, synthetic construct
  source 1..23: mol_type = other RNA
ggtgctggccgggggagccctgg

SEQ ID NO: 67624 - RNA, 23 nt, synthetic construct
  source 1..23: mol_type = other RNA
gtgggtgtggtggccgtggtggt

SEQ ID NO: 67625 - RNA, 23 nt, synthetic construct
  source 1..23: mol_type = other RNA
ggtggccacagagccggtggccc

SEQ ID NO: 67626 - RNA, 23 nt, synthetic construct
  source 1..23: mol_type = other RNA
ctgttcctggggtggaggagggg

SEQ ID NO: 67627 - RNA, 23 nt, synthetic construct
  source 1..23: mol_type = other RNA
gtagtgtgagctgttcctggggt

SEQ ID NO: 67628 - RNA, 23 nt, synthetic construct
  source 1..23: mol_type = other RNA
agcctctggttgtgggtgtggtg

SEQ ID NO: 67629 - RNA, 23 nt, synthetic construct
  source 1..23: mol_type = other RNA
gtctgtgtgctagaggagggtgt

SEQ ID NO: 67630 - RNA, 23 nt, synthetic construct
  source 1..23: mol_type = other RNA
cgtagtggccgtggtggtcagtg

SEQ ID NO: 67631 - RNA, 23 nt, synthetic construct
  source 1..23: mol_type = other RNA
gggagtcactgtgttgctggtgg

SEQ ID NO: 67632 - RNA, 23 nt, synthetic construct
  source 1..23: mol_type = other RNA
gtggggactgctggggggcaggg

SEQ ID NO: 67633 - RNA, 23 nt, synthetic construct
  source 1..23: mol_type = other RNA
ctgtgatgtgggtggtgcccaag

SEQ ID NO: 67634 - RNA, 23 nt, synthetic construct
  source 1..23: mol_type = other RNA
ccatggtcaccaccgtggttatg

SEQ ID NO: 67635 - RNA, 23 nt, synthetic construct
  source 1..23: mol_type = other RNA
tcacagcccatggtcaccaccgt

SEQ ID NO: 67636 - RNA, 23 nt, synthetic construct
  source 1..23: mol_type = other RNA
tagctgtagtccagccactctga

SEQ ID NO: 67637 - RNA, 23 nt, synthetic construct
  source 1..23: mol_type = other RNA
ccaggccaaagtccaggctgcat

SEQ ID NO: 67638 - RNA, 23 nt, synthetic construct
  source 1..23: mol_type = other RNA
ggtggccacagagccggtggccc

SEQ ID NO: 67639 - RNA, 23 nt, synthetic construct
  source 1..23: mol_type = other RNA
ctgttcctggggtggaggagggg

SEQ ID NO: 67640 - RNA, 23 nt, synthetic construct
  source 1..23: mol_type = other RNA
gtagtgtgagctgttcctggggt

SEQ ID NO: 67641 - RNA, 23 nt, synthetic construct
  source 1..23: mol_type = other RNA
gtctgtgtgctagaggagggtgt

SEQ ID NO: 67642 - RNA, 23 nt, synthetic construct
  source 1..23: mol_type = other RNA
cgtagtggccgtggtggtcagtg

SEQ ID NO: 67643 - RNA, 23 nt, synthetic construct
  source 1..23: mol_type = other RNA
ggtggtgcccaaggtgcctgagg

SEQ ID NO: 67644 - RNA, 23 nt, synthetic construct
  source 1..23: mol_type = other RNA
ctgtgatgtgggtggtgcccaag

SEQ ID NO: 67645 - RNA, 23 nt, synthetic construct
  source 1..23: mol_type = other RNA
gtggttgctgctggggtgtggga

SEQ ID NO: 67646 - RNA, 23 nt, synthetic construct
  source 1..23: mol_type = other RNA
ccatggtcaccaccgtggttatt

SEQ ID NO: 67647 - RNA, 23 nt, synthetic construct
  source 1..23: mol_type = other RNA
tcacagcccatggtcaccaccgt

SEQ ID NO: 67648 - RNA, 23 nt, synthetic construct
  source 1..23: mol_type = other RNA
tagctgtagtccagccactctga

SEQ ID NO: 67649 - RNA, 23 nt, synthetic construct
  source 1..23: mol_type = other RNA
ccaggccaaagtccaggctgcat

SEQ ID NO: 67650 - RNA, 23 nt, synthetic construct
  source 1..23: mol_type = other RNA
agctgttcccggggtggaggacg

SEQ ID NO: 67651 - RNA, 23 nt, synthetic construct
  source 1..23: mol_type = other RNA
tggccatgggtgtggtggtctgt

SEQ ID NO: 67652 - RNA, 23 nt, synthetic construct
  source 1..23: mol_type = other RNA
tggtctccggagtggaggagggg

SEQ ID NO: 67653 - RNA, 23 nt, synthetic construct
  source 1..23: mol_type = other RNA
gacatggaactggtggcccttgt

SEQ ID NO: 67654 - RNA, 23 nt, synthetic construct
  source 1..23: mol_type = other RNA
ggggtggacatggaactggtggc

SEQ ID NO: 67655 - RNA, 23 nt, synthetic construct
  source 1..23: mol_type = other RNA
ttgtagtggctgctgtggtcagc

SEQ ID NO: 67656 - RNA, 23 nt, synthetic construct
  source 1..23: mol_type = other RNA
gttgtagtggctgctgtggtcag

SEQ ID NO: 67657 - RNA, 23 nt, synthetic construct
  source 1..23: mol_type = other RNA
gcagttgtagtggctgctgtggt

SEQ ID NO: 67658 - RNA, 23 nt, synthetic construct
  source 1..23: mol_type = other RNA
gggtgccagcagttgcccgggtg

SEQ ID NO: 67659 - RNA, 23 nt, synthetic construct
  source 1..23: mol_type = other RNA
caggcggtgcccagggaggaaga

SEQ ID NO: 67660 - RNA, 23 nt, synthetic construct
  source 1..23: mol_type = other RNA
ccaggcggtgcccagggaggaag

SEQ ID NO: 67661 - RNA, 23 nt, synthetic construct
  source 1..23: mol_type = other RNA
gccctggttgtggtggtcgtggt

SEQ ID NO: 67662 - RNA, 23 nt, synthetic construct
  source 1..23: mol_type = other RNA
ggtggccacagagccggtggccc

SEQ ID NO: 67663 - RNA, 23 nt, synthetic construct
  source 1..23: mol_type = other RNA
ctgttcctggggtggaggagggg

SEQ ID NO: 67664 - RNA, 23 nt, synthetic construct
  source 1..23: mol_type = other RNA
gtagtgtgagctgttcctggggt

SEQ ID NO: 67665 - RNA, 23 nt, synthetic construct
  source 1..23: mol_type = other RNA
agcctctggttgtgggtgtggtg

SEQ ID NO: 67666 - RNA, 23 nt, synthetic construct
  source 1..23: mol_type = other RNA
gtctgtgtgctagaggagggtgt

SEQ ID NO: 67667 - RNA, 23 nt, synthetic construct
  source 1..23: mol_type = other RNA
cgtagtggccgtggtggtcagtg

SEQ ID NO: 67668 - RNA, 23 nt, synthetic construct
  source 1..23: mol_type = other RNA
gtggggactgctggggggcaggg

SEQ ID NO: 67669 - RNA, 23 nt, synthetic construct
  source 1..23: mol_type = other RNA
ctgtgatgtgggtggtgcccaag

SEQ ID NO: 67670 - RNA, 23 nt, synthetic construct
  source 1..23: mol_type = other RNA
gtggttgctgctggggtgtggga

SEQ ID NO: 67671 - RNA, 23 nt, synthetic construct
  source 1..23: mol_type = other RNA
tagctgtagtccagccactctga

SEQ ID NO: 67672 - RNA, 23 nt, synthetic construct
  source 1..23: mol_type = other RNA
ccaggccaaagtccaggctgcat

SEQ ID NO: 67673 - RNA, 23 nt, synthetic construct
  source 1..23: mol_type = other RNA
ggtggccacagagccggtggccc

SEQ ID NO: 67674 - RNA, 23 nt, synthetic construct
  source 1..23: mol_type = other RNA
gtagtgtgagctgttcctggggt

SEQ ID NO: 67675 - RNA, 23 nt, synthetic construct
  source 1..23: mol_type = other RNA
gtctgtgtgctagaggagggtgt

SEQ ID NO: 67676 - RNA, 23 nt, synthetic construct
  source 1..23: mol_type = other RNA
ggtggtgcccaaggtgcctgagg

SEQ ID NO: 67677 - RNA, 23 nt, synthetic construct
  source 1..23: mol_type = other RNA
ctgtgatgtgggtggtgcccaag

SEQ ID NO: 67678 - RNA, 23 nt, synthetic construct
  source 1..23: mol_type = other RNA
gtggttgctgctggggtgtggga

SEQ ID NO: 67679 - RNA, 23 nt, synthetic construct
  source 1..23: mol_type = other RNA
cggggtggtcgtccctggggaag

SEQ ID NO: 67680 - RNA, 23 nt, synthetic construct
  source 1..23: mol_type = other RNA
tagctgtagtccagccactctga

SEQ ID NO: 67681 - RNA, 23 nt, synthetic construct
  source 1..23: mol_type = other RNA
ccaggccaaagtccaggctgcat

SEQ ID NO: 67682 - RNA, 23 nt, synthetic construct
  source 1..23: mol_type = other RNA
agctgttcccggggtggaggacg

SEQ ID NO: 67683 - RNA, 23 nt, synthetic construct
  source 1..23: mol_type = other RNA
tgtggtggccgggctggtcagca

SEQ ID NO: 67684 - RNA, 23 nt, synthetic construct
  source 1..23: mol_type = other RNA
tggtctccggagtggaggagggg

SEQ ID NO: 67685 - RNA, 23 nt, synthetic construct
  source 1..23: mol_type = other RNA
cgtggaactggtggcccttgtcg

SEQ ID NO: 67686 - RNA, 23 nt, synthetic construct
  source 1..23: mol_type = other RNA
ggggtggacgtggaactggtggc

SEQ ID NO: 67687 - RNA, 23 nt, synthetic construct
  source 1..23: mol_type = other RNA
ttgtagtggctgctgtggtcagc

SEQ ID NO: 67688 - RNA, 23 nt, synthetic construct
  source 1..23: mol_type = other RNA
gttgtagtggctgctgtggtcag

SEQ ID NO: 67689 - RNA, 23 nt, synthetic construct
  source 1..23: mol_type = other RNA
gcagttgtagtggctgctgtggt

SEQ ID NO: 67690 - RNA, 23 nt, synthetic construct
  source 1..23: mol_type = other RNA
ggcagttgcagtccctggactgg

SEQ ID NO: 67691 - RNA, 23 nt, synthetic construct
  source 1..23: mol_type = other RNA
ggtggccacagagccggtggccc

SEQ ID NO: 67692 - RNA, 23 nt, synthetic construct
  source 1..23: mol_type = other RNA
ctgttcctggggtggaggagggg

SEQ ID NO: 67693 - RNA, 23 nt, synthetic construct
  source 1..23: mol_type = other RNA
gtagtgtgagctgttcctggggt

SEQ ID NO: 67694 - RNA, 23 nt, synthetic construct
  source 1..23: mol_type = other RNA
gtctgtgtgctagaggagggtgt

SEQ ID NO: 67695 - RNA, 23 nt, synthetic construct
  source 1..23: mol_type = other RNA
cgtagtggccgtggtggtcagtg

SEQ ID NO: 67696 - RNA, 23 nt, synthetic construct
  source 1..23: mol_type = other RNA
gtcagcactggggtgatgggtgt

SEQ ID NO: 67697 - RNA, 23 nt, synthetic construct
  source 1..23: mol_type = other RNA
gtggctttggagctggtggctgc

SEQ ID NO: 67698 - RNA, 23 nt, synthetic construct
  source 1..23: mol_type = other RNA
agtggctttggagctggtggctg

SEQ ID NO: 67699 - RNA, 23 nt, synthetic construct
  source 1..23: mol_type = other RNA
attgtggacatggtggacatggg

SEQ ID NO: 67700 - RNA, 23 nt, synthetic construct
  source 1..23: mol_type = other RNA
gaggtgtggattgtggacatggt

SEQ ID NO: 67701 - RNA, 23 nt, synthetic construct
  source 1..23: mol_type = other RNA
cgctgaaggttggcaggctgctg

SEQ ID NO: 67702 - RNA, 23 nt, synthetic construct
  source 1..23: mol_type = other RNA
ggggagggcgaggacagcggggc

SEQ ID NO: 67703 - RNA, 23 nt, synthetic construct
  source 1..23: mol_type = other RNA
cgccccacatgctgcagatgcac

SEQ ID NO: 67704 - RNA, 23 nt, synthetic construct
  source 1..23: mol_type = other RNA
atcaggccctcctccttcccatg

SEQ ID NO: 67705 - RNA, 23 nt, synthetic construct
  source 1..23: mol_type = other RNA
ggatcaggccctcctccttccca

SEQ ID NO: 67706 - RNA, 23 nt, synthetic construct
  source 1..23: mol_type = other RNA
aggatcaggccctcctccttccc

SEQ ID NO: 67707 - RNA, 23 nt, synthetic construct
  source 1..23: mol_type = other RNA
aggtgacgctcacgcccagggca

SEQ ID NO: 67708 - RNA, 23 nt, synthetic construct
  source 1..23: mol_type = other RNA
gatctggtcctcagggcagaagc

SEQ ID NO: 67709 - RNA, 23 nt, synthetic construct
  source 1..23: mol_type = other RNA
ggtgcagatggactcctgccctg

SEQ ID NO: 67710 - RNA, 23 nt, synthetic construct
  source 1..23: mol_type = other RNA
ctcctcctgggtgcagatggact

SEQ ID NO: 67711 - RNA, 23 nt, synthetic construct
  source 1..23: mol_type = other RNA
agctggactggctggccatcggg

SEQ ID NO: 67712 - RNA, 23 nt, synthetic construct
  source 1..23: mol_type = other RNA
ttcagctggactggctggccatc

SEQ ID NO: 67713 - RNA, 23 nt, synthetic construct
  source 1..23: mol_type = other RNA
accctcagcctcacagaggtaca

SEQ ID NO: 67714 - RNA, 23 nt, synthetic construct
  source 1..23: mol_type = other RNA
tctcgcagccctggtgccacagg

SEQ ID NO: 67715 - RNA, 23 nt, synthetic construct
  source 1..23: mol_type = other RNA
tggacccgcctctcctggcagca

SEQ ID NO: 67716 - RNA, 23 nt, synthetic construct
  source 1..23: mol_type = other RNA
ggaggcccaaggttttcatgatc

SEQ ID NO: 67717 - RNA, 23 nt, synthetic construct
  source 1..23: mol_type = other RNA
gctgcgcgggcgctccggccgtg

SEQ ID NO: 67718 - RNA, 23 nt, synthetic construct
  source 1..23: mol_type = other RNA
ggggacggggacgggcagggagg

SEQ ID NO: 67719 - RNA, 23 nt, synthetic construct
  source 1..23: mol_type = other RNA
ggcctggagcccactaggcctcg

SEQ ID NO: 67720 - RNA, 23 nt, synthetic construct
  source 1..23: mol_type = other RNA
aggcctggagcccactaggcctc

SEQ ID NO: 67721 - RNA, 23 nt, synthetic construct
  source 1..23: mol_type = other RNA
caggcctggagcccactaggcct

SEQ ID NO: 67722 - RNA, 23 nt, synthetic construct
  source 1..23: mol_type = other RNA
acaggcctggagcccactaggcc

SEQ ID NO: 67723 - RNA, 23 nt, synthetic construct
  source 1..23: mol_type = other RNA
ccaccaggaggccagtgcggctg

SEQ ID NO: 67724 - RNA, 23 nt, synthetic construct
  source 1..23: mol_type = other RNA
tccaccaggaggccagtgcggct

SEQ ID NO: 67725 - RNA, 23 nt, synthetic construct
  source 1..23: mol_type = other RNA
tagtccccgctctgctccaccag

SEQ ID NO: 67726 - RNA, 23 nt, synthetic construct
  source 1..23: mol_type = other RNA
agccggatgctgaccttgatgta

SEQ ID NO: 67727 - RNA, 23 nt, synthetic construct
  source 1..23: mol_type = other RNA
gttgaagtccccacacaggccac

SEQ ID NO: 67728 - RNA, 23 nt, synthetic construct
  source 1..23: mol_type = other RNA
cgttgaagtccccacacaggcca

SEQ ID NO: 67729 - RNA, 23 nt, synthetic construct
  source 1..23: mol_type = other RNA
ggcagagctcagggcacctccag

SEQ ID NO: 67730 - RNA, 23 nt, synthetic construct
  source 1..23: mol_type = other RNA
ggcagaagcagccgtccacacag

SEQ ID NO: 67731 - RNA, 23 nt, synthetic construct
  source 1..23: mol_type = other RNA
tcctggcattggcacaggcagcc

SEQ ID NO: 67732 - RNA, 23 nt, synthetic construct
  source 1..23: mol_type = other RNA
gatgatggagtggcagcgcgaga

SEQ ID NO: 67733 - RNA, 23 nt, synthetic construct
  source 1..23: mol_type = other RNA
ggggttgatgatggagtggcagc

SEQ ID NO: 67734 - RNA, 23 nt, synthetic construct
  source 1..23: mol_type = other RNA
cgcggggcaggtgcagccgtcca

SEQ ID NO: 67735 - RNA, 23 nt, synthetic construct
  source 1..23: mol_type = other RNA
gaggaaggtgcccgcggggcagg

SEQ ID NO: 67736 - RNA, 23 nt, synthetic construct
  source 1..23: mol_type = other RNA
gcaggggcactcctgggcgggca

SEQ ID NO: 67737 - RNA, 23 nt, synthetic construct
  source 1..23: mol_type = other RNA
cggcgccctcgtcgtgcaccacc

SEQ ID NO: 67738 - RNA, 23 nt, synthetic construct
  source 1..23: mol_type = other RNA
cgagctgttgctgcagtccaggt

SEQ ID NO: 67739 - RNA, 23 nt, synthetic construct
  source 1..23: mol_type = other RNA
agatgtactcgcagctgccttca

SEQ ID NO: 67740 - RNA, 23 nt, synthetic construct
  source 1..23: mol_type = other RNA
gtgttgtccccacagtagtcctg

SEQ ID NO: 67741 - RNA, 23 nt, synthetic construct
  source 1..23: mol_type = other RNA
aggtcccgtgggtggtgttgtcc

SEQ ID NO: 67742 - RNA, 23 nt, synthetic construct
  source 1..23: mol_type = other RNA
ccgggcaggagggggagagcttc

SEQ ID NO: 67743 - RNA, 23 nt, synthetic construct
  source 1..23: mol_type = other RNA
gtccgggcaggagggggagagct

SEQ ID NO: 67744 - RNA, 23 nt, synthetic construct
  source 1..23: mol_type = other RNA
aggcctgggcgtaggcagccaca

SEQ ID NO: 67745 - RNA, 23 nt, synthetic construct
  source 1..23: mol_type = other RNA
caggcctgggcgtaggcagccac

SEQ ID NO: 67746 - RNA, 23 nt, synthetic construct
  source 1..23: mol_type = other RNA
tcgtggcaggcctgggcgtaggc

SEQ ID NO: 67747 - RNA, 23 nt, synthetic construct
  source 1..23: mol_type = other RNA
aaggggcaggtgtccggagtccg

SEQ ID NO: 67748 - RNA, 23 nt, synthetic construct
  source 1..23: mol_type = other RNA
ccttcctgatgatggtgccgttg

SEQ ID NO: 67749 - RNA, 23 nt, synthetic construct
  source 1..23: mol_type = other RNA
ggagtgggggacccaggcggtgg

SEQ ID NO: 67750 - RNA, 23 nt, synthetic construct
  source 1..23: mol_type = other RNA
tgcccattgtaccagctggacca

SEQ ID NO: 67751 - RNA, 23 nt, synthetic construct
  source 1..23: mol_type = other RNA
aggccgggctctgggcggtgccc

SEQ ID NO: 67752 - RNA, 23 nt, synthetic construct
  source 1..23: mol_type = other RNA
gatgtcagccagcacagggcata

SEQ ID NO: 67753 - RNA, 23 nt, synthetic construct
  source 1..23: mol_type = other RNA
ctggtgcctggggccggggaggg

SEQ ID NO: 67754 - RNA, 23 nt, synthetic construct
  source 1..23: mol_type = other RNA
ggctgagggctggtgcctggggc

SEQ ID NO: 67755 - RNA, 23 nt, synthetic construct
  source 1..23: mol_type = other RNA
ggtctgggttggggtaggcacag

SEQ ID NO: 67756 - RNA, 23 nt, synthetic construct
  source 1..23: mol_type = other RNA
ctgtgccagggtccagttgggga

SEQ ID NO: 67757 - RNA, 23 nt, synthetic construct
  source 1..23: mol_type = other RNA
ccccacctgtgccagggtccagt

SEQ ID NO: 67758 - RNA, 23 nt, synthetic construct
  source 1..23: mol_type = other RNA
gactgctgtggtgctggccgggg

SEQ ID NO: 67759 - RNA, 23 nt, synthetic construct
  source 1..23: mol_type = other RNA
ggtggctgtgaggggcgccatgt

SEQ ID NO: 67760 - RNA, 23 nt, synthetic construct
  source 1..23: mol_type = other RNA
ctgtcctgggcgtgctggtctcg

SEQ ID NO: 67761 - RNA, 23 nt, synthetic construct
  source 1..23: mol_type = other RNA
tggctggtggtggtgttagtcaa

SEQ ID NO: 67762 - RNA, 23 nt, synthetic construct
  source 1..23: mol_type = other RNA
ctggctggtggtggtgttagtca

SEQ ID NO: 67763 - RNA, 23 nt, synthetic construct
  source 1..23: mol_type = other RNA
gtcgtgccctggctggtggtggt

SEQ ID NO: 67764 - RNA, 23 nt, synthetic construct
  source 1..23: mol_type = other RNA
ctggactggaggagggagtggct

SEQ ID NO: 67765 - RNA, 23 nt, synthetic construct
  source 1..23: mol_type = other RNA
gggtgtggtggctgtgcttctca

SEQ ID NO: 67766 - RNA, 23 nt, synthetic construct
  source 1..23: mol_type = other RNA
gggtccaggtggtgcccagggag

SEQ ID NO: 67767 - RNA, 23 nt, synthetic construct
  source 1..23: mol_type = other RNA
atggtggccgtgggtgtggtggt

SEQ ID NO: 67768 - RNA, 23 nt, synthetic construct
  source 1..23: mol_type = other RNA
tggacatggtggccgtgggtgtg

SEQ ID NO: 67769 - RNA, 23 nt, synthetic construct
  source 1..23: mol_type = other RNA
cagttgtggtggccgtggcggta

SEQ ID NO: 67770 - RNA, 23 nt, synthetic construct
  source 1..23: mol_type = other RNA
ggggtggccacagagccggtggc

SEQ ID NO: 67771 - RNA, 23 nt, synthetic construct
  source 1..23: mol_type = other RNA
gggggtggccacagagccggtgg

SEQ ID NO: 67772 - RNA, 23 nt, synthetic construct
  source 1..23: mol_type = other RNA
gtggtccccgggatggaggaggg

SEQ ID NO: 67773 - RNA, 23 nt, synthetic construct
  source 1..23: mol_type = other RNA
ggtggtccccgggatggaggagg

SEQ ID NO: 67774 - RNA, 23 nt, synthetic construct
  source 1..23: mol_type = other RNA
ggtggtcagcactgtggcggtgt

SEQ ID NO: 67775 - RNA, 23 nt, synthetic construct
  source 1..23: mol_type = other RNA
gtggccacagttgtggtggtggt

SEQ ID NO: 67776 - RNA, 23 nt, synthetic construct
  source 1..23: mol_type = other RNA
ccactggtctgtgtgctagagga

SEQ ID NO: 67777 - RNA, 23 nt, synthetic construct
  source 1..23: mol_type = other RNA
agtggccgtggtggtcagtgatg

SEQ ID NO: 67778 - RNA, 23 nt, synthetic construct
  source 1..23: mol_type = other RNA
gggttggtggtggagccggtggc

SEQ ID NO: 67779 - RNA, 23 nt, synthetic construct
  source 1..23: mol_type = other RNA
ggtggtcagcactggggggatgg

SEQ ID NO: 67780 - RNA, 23 nt, synthetic construct
  source 1..23: mol_type = other RNA
tggtggtcagcactggggggatg

SEQ ID NO: 67781 - RNA, 23 nt, synthetic construct
  source 1..23: mol_type = other RNA
agggcagaggagggagtcactgt

SEQ ID NO: 67782 - RNA, 23 nt, synthetic construct
  source 1..23: mol_type = other RNA
actgctggggggcagggatcgcc

SEQ ID NO: 67783 - RNA, 23 nt, synthetic construct
  source 1..23: mol_type = other RNA
cccgaggtggccgaagtccaggc

SEQ ID NO: 67784 - RNA, 23 nt, synthetic construct
  source 1..23: mol_type = other RNA
ggctggaaagggctggagtcgag

SEQ ID NO: 67785 - RNA, 23 nt, synthetic construct
  source 1..23: mol_type = other RNA
gctagggtgagggctggaaaggg

SEQ ID NO: 67786 - RNA, 23 nt, synthetic construct
  source 1..23: mol_type = other RNA
gtggctgtggtcctggaggtggc

SEQ ID NO: 67787 - RNA, 23 nt, synthetic construct
  source 1..23: mol_type = other RNA
cagcccatggtcaccaccgtggt

SEQ ID NO: 67788 - RNA, 23 nt, synthetic construct
  source 1..23: mol_type = other RNA
ggctgggcctgggcacggcactc

SEQ ID NO: 67789 - RNA, 23 nt, synthetic construct
  source 1..23: mol_type = other RNA
caggctgggcctgggcacggcac

SEQ ID NO: 67790 - RNA, 23 nt, synthetic construct
  source 1..23: mol_type = other RNA
ccgtcacggtggctgtagtgctc

SEQ ID NO: 67791 - RNA, 23 nt, synthetic construct
  source 1..23: mol_type = other RNA
aggaggcggtggccgtggatccg

SEQ ID NO: 67792 - RNA, 23 nt, synthetic construct
  source 1..23: mol_type = other RNA
ctggtgactgtgggtgtcgtggc

SEQ ID NO: 67793 - RNA, 23 nt, synthetic construct
  source 1..23: mol_type = other RNA
tgcagtccctggactggagaagg

SEQ ID NO: 67794 - RNA, 23 nt, synthetic construct
  source 1..23: mol_type = other RNA
gggtgtggtggctgtgcttctca

SEQ ID NO: 67795 - RNA, 23 nt, synthetic construct
  source 1..23: mol_type = other RNA
gggtccaggtggtgcccagggag

SEQ ID NO: 67796 - RNA, 23 nt, synthetic construct
  source 1..23: mol_type = other RNA
atggtggccgtgggtgtggtggt

SEQ ID NO: 67797 - RNA, 23 nt, synthetic construct
  source 1..23: mol_type = other RNA
tggacatggtggccgtgggtgtg

SEQ ID NO: 67798 - RNA, 23 nt, synthetic construct
  source 1..23: mol_type = other RNA
ggggtggccacagagccggtggc

SEQ ID NO: 67799 - RNA, 23 nt, synthetic construct
  source 1..23: mol_type = other RNA
gggggtggccacagagccggtgg

SEQ ID NO: 67800 - RNA, 23 nt, synthetic construct
  source 1..23: mol_type = other RNA
accgtggaacctctggttgtggg

SEQ ID NO: 67801 - RNA, 23 nt, synthetic construct
  source 1..23: mol_type = other RNA
gtggtccccgggatggaggaggg

SEQ ID NO: 67802 - RNA, 23 nt, synthetic construct
  source 1..23: mol_type = other RNA
ggtggtccccgggatggaggagg

SEQ ID NO: 67803 - RNA, 23 nt, synthetic construct
  source 1..23: mol_type = other RNA
gtggccacagttgtggtggtggt

SEQ ID NO: 67804 - RNA, 23 nt, synthetic construct
  source 1..23: mol_type = other RNA
ccactggtctgtgtgctagagga

SEQ ID NO: 67805 - RNA, 23 nt, synthetic construct
  source 1..23: mol_type = other RNA
agtggccgtggtggtcagtgatg

SEQ ID NO: 67806 - RNA, 23 nt, synthetic construct
  source 1..23: mol_type = other RNA
gggttggtggtggagccggtggc

SEQ ID NO: 67807 - RNA, 23 nt, synthetic construct
  source 1..23: mol_type = other RNA
ggtggtcagcactggggggatag

SEQ ID NO: 67808 - RNA, 23 nt, synthetic construct
  source 1..23: mol_type = other RNA
tggtggtcagcactggggggata

SEQ ID NO: 67809 - RNA, 23 nt, synthetic construct
  source 1..23: mol_type = other RNA
agggcagaggagggagtcactgt

SEQ ID NO: 67810 - RNA, 23 nt, synthetic construct
  source 1..23: mol_type = other RNA
gctgggggacagggatcgcccgt

SEQ ID NO: 67811 - RNA, 23 nt, synthetic construct
  source 1..23: mol_type = other RNA
cagcccatggtcaccaccgtggt

SEQ ID NO: 67812 - RNA, 23 nt, synthetic construct
  source 1..23: mol_type = other RNA
ggctgggcctgggcacggcactc

SEQ ID NO: 67813 - RNA, 23 nt, synthetic construct
  source 1..23: mol_type = other RNA
caggctgggcctgggcacggcac

SEQ ID NO: 67814 - RNA, 23 nt, synthetic construct
  source 1..23: mol_type = other RNA
gaggatccaggtcgtccctggag

SEQ ID NO: 67815 - RNA, 23 nt, synthetic construct
  source 1..23: mol_type = other RNA
tggctgctgtggtctgctctgtg

SEQ ID NO: 67816 - RNA, 23 nt, synthetic construct
  source 1..23: mol_type = other RNA
gtggccgtgctggtcagcacttt

SEQ ID NO: 67817 - RNA, 23 nt, synthetic construct
  source 1..23: mol_type = other RNA
tggctgtgggtgtggtggccgtg

SEQ ID NO: 67818 - RNA, 23 nt, synthetic construct
  source 1..23: mol_type = other RNA
ggatttggtggctgtgcttgtca

SEQ ID NO: 67819 - RNA, 23 nt, synthetic construct
  source 1..23: mol_type = other RNA
agctgtggatttggtggctgtgc

SEQ ID NO: 67820 - RNA, 23 nt, synthetic construct
  source 1..23: mol_type = other RNA
actgtggaggtgtgggtggtctc

SEQ ID NO: 67821 - RNA, 23 nt, synthetic construct
  source 1..23: mol_type = other RNA
gcactgtggaggtgtgggtggtc

SEQ ID NO: 67822 - RNA, 23 nt, synthetic construct
  source 1..23: mol_type = other RNA
gtggtcagcactgtggaggtgtg

SEQ ID NO: 67823 - RNA, 23 nt, synthetic construct
  source 1..23: mol_type = other RNA
aggagggggtggacatggaactg

SEQ ID NO: 67824 - RNA, 23 nt, synthetic construct
  source 1..23: mol_type = other RNA
gccagtggctgcagttgtagtgg

SEQ ID NO: 67825 - RNA, 23 nt, synthetic construct
  source 1..23: mol_type = other RNA
ggggtggccgtggggccagtggc

SEQ ID NO: 67826 - RNA, 23 nt, synthetic construct
  source 1..23: mol_type = other RNA
tagtgctgggctctgtgaggatc

SEQ ID NO: 67827 - RNA, 23 nt, synthetic construct
  source 1..23: mol_type = other RNA
ccgtcacggtggctgtagtgctg

SEQ ID NO: 67828 - RNA, 23 nt, synthetic construct
  source 1..23: mol_type = other RNA
aggaggcggtggccgtggatccg

SEQ ID NO: 67829 - RNA, 23 nt, synthetic construct
  source 1..23: mol_type = other RNA
gtggccgtgctggtcagcacttt

SEQ ID NO: 67830 - RNA, 23 nt, synthetic construct
  source 1..23: mol_type = other RNA
ctggactggaggagggagtggct

SEQ ID NO: 67831 - RNA, 23 nt, synthetic construct
  source 1..23: mol_type = other RNA
gggtgtggtggctgtgcttctca

SEQ ID NO: 67832 - RNA, 23 nt, synthetic construct
  source 1..23: mol_type = other RNA
atggtggccgtgggtgtggtggt

SEQ ID NO: 67833 - RNA, 23 nt, synthetic construct
  source 1..23: mol_type = other RNA
tggacatggtggccgtgggtgtg

SEQ ID NO: 67834 - RNA, 23 nt, synthetic construct
  source 1..23: mol_type = other RNA
ggggtggccacagagccggtggc

SEQ ID NO: 67835 - RNA, 23 nt, synthetic construct
  source 1..23: mol_type = other RNA
gggggtggccacagagccggtgg

SEQ ID NO: 67836 - RNA, 23 nt, synthetic construct
  source 1..23: mol_type = other RNA
gtggtccccgggatggaggaggg

SEQ ID NO: 67837 - RNA, 23 nt, synthetic construct
  source 1..23: mol_type = other RNA
ggtggtccccgggatggaggagg

SEQ ID NO: 67838 - RNA, 23 nt, synthetic construct
  source 1..23: mol_type = other RNA
ggtggtcagcactgtggcggtgt

SEQ ID NO: 67839 - RNA, 23 nt, synthetic construct
  source 1..23: mol_type = other RNA
gtggccacagttgtggtggtggt

SEQ ID NO: 67840 - RNA, 23 nt, synthetic construct
  source 1..23: mol_type = other RNA
ccactggtctgtgtgctagagga

SEQ ID NO: 67841 - RNA, 23 nt, synthetic construct
  source 1..23: mol_type = other RNA
agtggccgtggtggtcagtgatg

SEQ ID NO: 67842 - RNA, 23 nt, synthetic construct
  source 1..23: mol_type = other RNA
gggttggtggtggagccggtggc

SEQ ID NO: 67843 - RNA, 23 nt, synthetic construct
  source 1..23: mol_type = other RNA
ggtggtcagcactggggggatgg

SEQ ID NO: 67844 - RNA, 23 nt, synthetic construct
  source 1..23: mol_type = other RNA
tggtggtcagcactggggggatg

SEQ ID NO: 67845 - RNA, 23 nt, synthetic construct
  source 1..23: mol_type = other RNA
agggcagaggagggagtcactgt

SEQ ID NO: 67846 - RNA, 23 nt, synthetic construct
  source 1..23: mol_type = other RNA
cccgaggtggccgaagtccaggc

SEQ ID NO: 67847 - RNA, 23 nt, synthetic construct
  source 1..23: mol_type = other RNA
gtggctgtggtcctggaggtgcc

SEQ ID NO: 67848 - RNA, 23 nt, synthetic construct
  source 1..23: mol_type = other RNA
ggctgggcctgggcacggcactc

SEQ ID NO: 67849 - RNA, 23 nt, synthetic construct
  source 1..23: mol_type = other RNA
caggctgggcctgggcacggcac

SEQ ID NO: 67850 - RNA, 23 nt, synthetic construct
  source 1..23: mol_type = other RNA
ccgtcacggtggctgtagtgctc

SEQ ID NO: 67851 - RNA, 23 nt, synthetic construct
  source 1..23: mol_type = other RNA
aggaggcggtggccgtggatccg

SEQ ID NO: 67852 - RNA, 23 nt, synthetic construct
  source 1..23: mol_type = other RNA
ctggtgactgtgggtgtcgtggc

SEQ ID NO: 67853 - RNA, 23 nt, synthetic construct
  source 1..23: mol_type = other RNA
tgcagtccctggactggagaagg

SEQ ID NO: 67854 - RNA, 23 nt, synthetic construct
  source 1..23: mol_type = other RNA
gggtgtggtggctgtgcttctca

SEQ ID NO: 67855 - RNA, 23 nt, synthetic construct
  source 1..23: mol_type = other RNA
gggtccaggtggtgcccagggag

SEQ ID NO: 67856 - RNA, 23 nt, synthetic construct
  source 1..23: mol_type = other RNA
atggtggccgtgggtgtggtggt

SEQ ID NO: 67857 - RNA, 23 nt, synthetic construct
  source 1..23: mol_type = other RNA
tggacatggtggccgtgggtgtg

SEQ ID NO: 67858 - RNA, 23 nt, synthetic construct
  source 1..23: mol_type = other RNA
ggggtggccacagagccggtggc

SEQ ID NO: 67859 - RNA, 23 nt, synthetic construct
  source 1..23: mol_type = other RNA
gggggtggccacagagccggtgg

SEQ ID NO: 67860 - RNA, 23 nt, synthetic construct
  source 1..23: mol_type = other RNA
gtggaagagggggtggccacaga

SEQ ID NO: 67861 - RNA, 23 nt, synthetic construct
  source 1..23: mol_type = other RNA
tcctggggtggaagagggggtgg

SEQ ID NO: 67862 - RNA, 23 nt, synthetic construct
  source 1..23: mol_type = other RNA
atccacactggaggcgtgcgtgc

SEQ ID NO: 67863 - RNA, 23 nt, synthetic construct
  source 1..23: mol_type = other RNA
ccgggacggaggagggggtcacc

SEQ ID NO: 67864 - RNA, 23 nt, synthetic construct
  source 1..23: mol_type = other RNA
gtggccacagttgtggtggtggt

SEQ ID NO: 67865 - RNA, 23 nt, synthetic construct
  source 1..23: mol_type = other RNA
ccactggtctgtgtgctagagga

SEQ ID NO: 67866 - RNA, 23 nt, synthetic construct
  source 1..23: mol_type = other RNA
gggttggtggtggagccggtggc

SEQ ID NO: 67867 - RNA, 23 nt, synthetic construct
  source 1..23: mol_type = other RNA
ggtggtcagcactggggggatag

SEQ ID NO: 67868 - RNA, 23 nt, synthetic construct
  source 1..23: mol_type = other RNA
tggtggtcagcactggggggata

SEQ ID NO: 67869 - RNA, 23 nt, synthetic construct
  source 1..23: mol_type = other RNA
agggcagaggagggagtcactgt

SEQ ID NO: 67870 - RNA, 23 nt, synthetic construct
  source 1..23: mol_type = other RNA
gctgggggacagggatcgcccgt

SEQ ID NO: 67871 - RNA, 23 nt, synthetic construct
  source 1..23: mol_type = other RNA
ggctgggcctgggcacggcactc

SEQ ID NO: 67872 - RNA, 23 nt, synthetic construct
  source 1..23: mol_type = other RNA
caggctgggcctgggcacggcac

SEQ ID NO: 67873 - RNA, 23 nt, synthetic construct
  source 1..23: mol_type = other RNA
aactcccccagggggacaccagg

SEQ ID NO: 67874 - RNA, 23 nt, synthetic construct
  source 1..23: mol_type = other RNA
gggctggtcagcactttgggagg

SEQ ID NO: 67875 - RNA, 23 nt, synthetic construct
  source 1..23: mol_type = other RNA
tggctgtgggtgtggtggccggg

SEQ ID NO: 67876 - RNA, 23 nt, synthetic construct
  source 1..23: mol_type = other RNA
ggatttggtggctgtgcttgtca

SEQ ID NO: 67877 - RNA, 23 nt, synthetic construct
  source 1..23: mol_type = other RNA
agctgtggatttggtggctgtgc

SEQ ID NO: 67878 - RNA, 23 nt, synthetic construct
  source 1..23: mol_type = other RNA
ccacgggtgtggtggtctgttct

SEQ ID NO: 67879 - RNA, 23 nt, synthetic construct
  source 1..23: mol_type = other RNA
actgtggaggtgtgggtggtctc

SEQ ID NO: 67880 - RNA, 23 nt, synthetic construct
  source 1..23: mol_type = other RNA
gcactgtggaggtgtgggtggtc

SEQ ID NO: 67881 - RNA, 23 nt, synthetic construct
  source 1..23: mol_type = other RNA
gtggtcagcactgtggaggtgtg

SEQ ID NO: 67882 - RNA, 23 nt, synthetic construct
  source 1..23: mol_type = other RNA
gccagtggctgcagttgtagtgg

SEQ ID NO: 67883 - RNA, 23 nt, synthetic construct
  source 1..23: mol_type = other RNA
ggggtggccgtggggccagtggc

SEQ ID NO: 67884 - RNA, 23 nt, synthetic construct
  source 1..23: mol_type = other RNA
ccgtcacggtggctgtagtgctc

SEQ ID NO: 67885 - RNA, 23 nt, synthetic construct
  source 1..23: mol_type = other RNA
aggaggcggtggccgtggatccg

SEQ ID NO: 67886 - RNA, 23 nt, synthetic construct
  source 1..23: mol_type = other RNA
ctggtgactgtgggtgtcgtggc

SEQ ID NO: 67887 - RNA, 23 nt, synthetic construct
  source 1..23: mol_type = other RNA
ctggactggaggagggagtggct

SEQ ID NO: 67888 - RNA, 23 nt, synthetic construct
  source 1..23: mol_type = other RNA
gggtgtggtggctgtgcttctca

SEQ ID NO: 67889 - RNA, 23 nt, synthetic construct
  source 1..23: mol_type = other RNA
gggtccaggtggtgcccagggag

SEQ ID NO: 67890 - RNA, 23 nt, synthetic construct
  source 1..23: mol_type = other RNA
atggtggccgtgggtgtggtggt

SEQ ID NO: 67891 - RNA, 23 nt, synthetic construct
  source 1..23: mol_type = other RNA
tggacatggtggccgtgggtgtg

SEQ ID NO: 67892 - RNA, 23 nt, synthetic construct
  source 1..23: mol_type = other RNA
cggttgtggtggccgtggcggta

SEQ ID NO: 67893 - RNA, 23 nt, synthetic construct
  source 1..23: mol_type = other RNA
ggggtggccacagagccggtggc

SEQ ID NO: 67894 - RNA, 23 nt, synthetic construct
  source 1..23: mol_type = other RNA
gggggtggccacagagccggtgg

SEQ ID NO: 67895 - RNA, 23 nt, synthetic construct
  source 1..23: mol_type = other RNA
gtggtccccgggatggaggaggg

SEQ ID NO: 67896 - RNA, 23 nt, synthetic construct
  source 1..23: mol_type = other RNA
ggtggtccccgggatggaggagg

SEQ ID NO: 67897 - RNA, 23 nt, synthetic construct
  source 1..23: mol_type = other RNA
gtggccacagttgtggtggtggt

SEQ ID NO: 67898 - RNA, 23 nt, synthetic construct
  source 1..23: mol_type = other RNA
ccactggtctgtgtgctagagga

SEQ ID NO: 67899 - RNA, 23 nt, synthetic construct
  source 1..23: mol_type = other RNA
agtggccgtggtggtcagtgatg

SEQ ID NO: 67900 - RNA, 23 nt, synthetic construct
  source 1..23: mol_type = other RNA
gggttggtggtggagccggtggc

SEQ ID NO: 67901 - RNA, 23 nt, synthetic construct
  source 1..23: mol_type = other RNA
gtggccgtgctggtcagcactgg

SEQ ID NO: 67902 - RNA, 23 nt, synthetic construct
  source 1..23: mol_type = other RNA
ctggtggctgcgggtgtggtggc

SEQ ID NO: 67903 - RNA, 23 nt, synthetic construct
  source 1..23: mol_type = other RNA
tggagctggtggctgcgggtgtg

SEQ ID NO: 67904 - RNA, 23 nt, synthetic construct
  source 1..23: mol_type = other RNA
ggaggaagtggctttggagctgg

SEQ ID NO: 67905 - RNA, 23 nt, synthetic construct
  source 1..23: mol_type = other RNA
gggtgtggtggtctgtgctggga

SEQ ID NO: 67906 - RNA, 23 nt, synthetic construct
  source 1..23: mol_type = other RNA
ggtggacatgggtgtggtggtct

SEQ ID NO: 67907 - RNA, 23 nt, synthetic construct
  source 1..23: mol_type = other RNA
actgtggaggtgtgggtggtctc

SEQ ID NO: 67908 - RNA, 23 nt, synthetic construct
  source 1..23: mol_type = other RNA
gcactgtggaggtgtgggtggtc

SEQ ID NO: 67909 - RNA, 23 nt, synthetic construct
  source 1..23: mol_type = other RNA
gtggtcagcactgtggaggtgtg

SEQ ID NO: 67910 - RNA, 23 nt, synthetic construct
  source 1..23: mol_type = other RNA
aggagggtgtggccgtggaattg

SEQ ID NO: 67911 - RNA, 23 nt, synthetic construct
  source 1..23: mol_type = other RNA
tccagtggctgcagttgtagtgg

SEQ ID NO: 67912 - RNA, 23 nt, synthetic construct
  source 1..23: mol_type = other RNA
tggaggacagggtggccgtggat

SEQ ID NO: 67913 - RNA, 23 nt, synthetic construct
  source 1..23: mol_type = other RNA
gaggcagtggctgtgggcatagt

SEQ ID NO: 67914 - RNA, 23 nt, synthetic construct
  source 1..23: mol_type = other RNA
aggttggcaggctgctggggagc

SEQ ID NO: 67915 - RNA, 23 nt, synthetic construct
  source 1..23: mol_type = other RNA
agctggggaagccagtgggtctc

SEQ ID NO: 67916 - RNA, 23 nt, synthetic construct
  source 1..23: mol_type = other RNA
ggggaggtgggacaggcgccctg

SEQ ID NO: 67917 - RNA, 23 nt, synthetic construct
  source 1..23: mol_type = other RNA
ggcggtggggaggtgggacaggc

SEQ ID NO: 67918 - RNA, 23 nt, synthetic construct
  source 1..23: mol_type = other RNA
cactggcggtggggaggtgggac

SEQ ID NO: 67919 - RNA, 23 nt, synthetic construct
  source 1..23: mol_type = other RNA
ggggcggaggacactggcggtgg

SEQ ID NO: 67920 - RNA, 23 nt, synthetic construct
  source 1..23: mol_type = other RNA
ggagggcgaggacagcggggcgg

SEQ ID NO: 67921 - RNA, 23 nt, synthetic construct
  source 1..23: mol_type = other RNA
gggagggcgaggacagcggggcg

SEQ ID NO: 67922 - RNA, 23 nt, synthetic construct
  source 1..23: mol_type = other RNA
gggcaggggagggcgaggacagc

SEQ ID NO: 67923 - RNA, 23 nt, synthetic construct
  source 1..23: mol_type = other RNA
ggcagtggcagaggccgtgcagt

SEQ ID NO: 67924 - RNA, 23 nt, synthetic construct
  source 1..23: mol_type = other RNA
ccatggtgacagtgaggacgata

SEQ ID NO: 67925 - RNA, 23 nt, synthetic construct
  source 1..23: mol_type = other RNA
ccagcacagacacaagcacgccg

SEQ ID NO: 67926 - RNA, 23 nt, synthetic construct
  source 1..23: mol_type = other RNA
ccccagcacagacacaagcacgc

SEQ ID NO: 67927 - RNA, 23 nt, synthetic construct
  source 1..23: mol_type = other RNA
tccccagcacagacacaagcacg

SEQ ID NO: 67928 - RNA, 23 nt, synthetic construct
  source 1..23: mol_type = other RNA
gtcggggcccagcagccatcctt

SEQ ID NO: 67929 - RNA, 23 nt, synthetic construct
  source 1..23: mol_type = other RNA
cccgggggcacaaggttgtggca

SEQ ID NO: 67930 - RNA, 23 nt, synthetic construct
  source 1..23: mol_type = other RNA
tcagggcagaagcagccctccgc

SEQ ID NO: 67931 - RNA, 23 nt, synthetic construct
  source 1..23: mol_type = other RNA
ggggctgaccctgggcgtcacag

SEQ ID NO: 67932 - RNA, 23 nt, synthetic construct
  source 1..23: mol_type = other RNA
tctcggggcagcaggggttctcg

SEQ ID NO: 67933 - RNA, 23 nt, synthetic construct
  source 1..23: mol_type = other RNA
gggggcaggtggttgtgttgcac

SEQ ID NO: 67934 - RNA, 23 nt, synthetic construct
  source 1..23: mol_type = other RNA
ctgggggcaggtggttgtgttgc

SEQ ID NO: 67935 - RNA, 23 nt, synthetic construct
  source 1..23: mol_type = other RNA
gaacacagctgaggtctgcagcg

SEQ ID NO: 67936 - RNA, 23 nt, synthetic construct
  source 1..23: mol_type = other RNA
gagaggcaggtacacatgtggca

SEQ ID NO: 67937 - RNA, 23 nt, synthetic construct
  source 1..23: mol_type = other RNA
aaagccctggggacaggtagtat

SEQ ID NO: 67938 - RNA, 23 nt, synthetic construct
  source 1..23: mol_type = other RNA
ggactggctggccatcgggcgtg

SEQ ID NO: 67939 - RNA, 23 nt, synthetic construct
  source 1..23: mol_type = other RNA
tcattcagctggactggctggcc

SEQ ID NO: 67940 - RNA, 23 nt, synthetic construct
  source 1..23: mol_type = other RNA
tgtccacatggctgttgacccag

SEQ ID NO: 67941 - RNA, 23 nt, synthetic construct
  source 1..23: mol_type = other RNA
atctgggcaggatgcaggctgtg

SEQ ID NO: 67942 - RNA, 23 nt, synthetic construct
  source 1..23: mol_type = other RNA
gcagaaggtgatgttgacctcgg

SEQ ID NO: 67943 - RNA, 23 nt, synthetic construct
  source 1..23: mol_type = other RNA
cgcagaaggtgatgttgacctcg

SEQ ID NO: 67944 - RNA, 23 nt, synthetic construct
  source 1..23: mol_type = other RNA
ggcaggagccctcgcagaaggtg

SEQ ID NO: 67945 - RNA, 23 nt, synthetic construct
  source 1..23: mol_type = other RNA
gggcaggagccctcgcagaaggt

SEQ ID NO: 67946 - RNA, 23 nt, synthetic construct
  source 1..23: mol_type = other RNA
tgcagccacactcatccacgtgg

SEQ ID NO: 67947 - RNA, 23 nt, synthetic construct
  source 1..23: mol_type = other RNA
tgggggagccatgggcgcaggga

SEQ ID NO: 67948 - RNA, 23 nt, synthetic construct
  source 1..23: mol_type = other RNA
gcagtggcctcctgggccgggaa

SEQ ID NO: 67949 - RNA, 23 nt, synthetic construct
  source 1..23: mol_type = other RNA
agcagtggcctcctgggccggga

SEQ ID NO: 67950 - RNA, 23 nt, synthetic construct
  source 1..23: mol_type = other RNA
cagacaatgcacatcctggctcc

SEQ ID NO: 67951 - RNA, 23 nt, synthetic construct
  source 1..23: mol_type = other RNA
tgggcagcaggagcacggagcgc

SEQ ID NO: 67952 - RNA, 23 nt, synthetic construct
  source 1..23: mol_type = other RNA
ggggtgggcagcaggagcacgga

SEQ ID NO: 67953 - RNA, 23 nt, synthetic construct
  source 1..23: mol_type = other RNA
cggggtgggcagcaggagcacgg

SEQ ID NO: 67954 - RNA, 23 nt, synthetic construct
  source 1..23: mol_type = other RNA
gtctgccccagcggccggacgtg

SEQ ID NO: 67955 - RNA, 23 nt, synthetic construct
  source 1..23: mol_type = other RNA
ccagcctgtctgccccagcggcc

SEQ ID NO: 67956 - RNA, 23 nt, synthetic construct
  source 1..23: mol_type = other RNA
gggggacggggacgggcagggag

SEQ ID NO: 67957 - RNA, 23 nt, synthetic construct
  source 1..23: mol_type = other RNA
gccctgcattctcccagctcggc

SEQ ID NO: 67958 - RNA, 23 nt, synthetic construct
  source 1..23: mol_type = other RNA
tgtcatccagcaccgtgcctggg

SEQ ID NO: 67959 - RNA, 23 nt, synthetic construct
  source 1..23: mol_type = other RNA
gcgtgatgtcatccagcaccgtg

SEQ ID NO: 67960 - RNA, 23 nt, synthetic construct
  source 1..23: mol_type = other RNA
aggaaggtgcccgcggggcaggt

SEQ ID NO: 67961 - RNA, 23 nt, synthetic construct
  source 1..23: mol_type = other RNA
tgtagaagtcacagaacaagggg

SEQ ID NO: 67962 - RNA, 23 nt, synthetic construct
  source 1..23: mol_type = other RNA
ccttctgccccacctgtgccagg

SEQ ID NO: 67963 - RNA, 23 nt, synthetic construct
  source 1..23: mol_type = other RNA
tgtggtgctggccgggggagccc

SEQ ID NO: 67964 - RNA, 23 nt, synthetic construct
  source 1..23: mol_type = other RNA
aagggctgagcgtgttggaaggg

SEQ ID NO: 67965 - RNA, 23 nt, synthetic construct
  source 1..23: mol_type = other RNA
ggacatggtggccgtgggtgtgg

SEQ ID NO: 67966 - RNA, 23 nt, synthetic construct
  source 1..23: mol_type = other RNA
gcaggtgtggtggcggtggtggt

SEQ ID NO: 67967 - RNA, 23 nt, synthetic construct
  source 1..23: mol_type = other RNA
ccctagggcagaggagggagtca

SEQ ID NO: 67968 - RNA, 23 nt, synthetic construct
  source 1..23: mol_type = other RNA
gtggtgcccaagatgcccgaggt

SEQ ID NO: 67969 - RNA, 23 nt, synthetic construct
  source 1..23: mol_type = other RNA
aggctgggcctgggcacggcact

SEQ ID NO: 67970 - RNA, 23 nt, synthetic construct
  source 1..23: mol_type = other RNA
tagagctggtggccggggtgctg

SEQ ID NO: 67971 - RNA, 23 nt, synthetic construct
  source 1..23: mol_type = other RNA
ctggactggagaagggagtggct

SEQ ID NO: 67972 - RNA, 23 nt, synthetic construct
  source 1..23: mol_type = other RNA
ggacatggtggccgtgggtgtgg

SEQ ID NO: 67973 - RNA, 23 nt, synthetic construct
  source 1..23: mol_type = other RNA
gggggtgtgggtggtccccggga

SEQ ID NO: 67974 - RNA, 23 nt, synthetic construct
  source 1..23: mol_type = other RNA
gcaggtgtggtggcggtggtggt

SEQ ID NO: 67975 - RNA, 23 nt, synthetic construct
  source 1..23: mol_type = other RNA
ccctagggcagaggagggagtca

SEQ ID NO: 67976 - RNA, 23 nt, synthetic construct
  source 1..23: mol_type = other RNA
aggctgggcctgggcacggcact

SEQ ID NO: 67977 - RNA, 23 nt, synthetic construct
  source 1..23: mol_type = other RNA
tagagctggtggccggggtgctg

SEQ ID NO: 67978 - RNA, 23 nt, synthetic construct
  source 1..23: mol_type = other RNA
tttggtggctgtgcttgtcagca

SEQ ID NO: 67979 - RNA, 23 nt, synthetic construct
  source 1..23: mol_type = other RNA
ggacatggtggccatgggtgtgg

SEQ ID NO: 67980 - RNA, 23 nt, synthetic construct
  source 1..23: mol_type = other RNA
ggacatggtggccgtgggtgtgg

SEQ ID NO: 67981 - RNA, 23 nt, synthetic construct
  source 1..23: mol_type = other RNA
gcaggtgtggtggcggtggtggt

SEQ ID NO: 67982 - RNA, 23 nt, synthetic construct
  source 1..23: mol_type = other RNA
ccctagggcagaggagggagtca

SEQ ID NO: 67983 - RNA, 23 nt, synthetic construct
  source 1..23: mol_type = other RNA
gtggtgcccaagatgcccgaggt

SEQ ID NO: 67984 - RNA, 23 nt, synthetic construct
  source 1..23: mol_type = other RNA
aggctgggcctgggcacggcact

SEQ ID NO: 67985 - RNA, 23 nt, synthetic construct
  source 1..23: mol_type = other RNA
tagagctggtggccggggtgctg

SEQ ID NO: 67986 - RNA, 23 nt, synthetic construct
  source 1..23: mol_type = other RNA
ctggactggagaagggagtggct

SEQ ID NO: 67987 - RNA, 23 nt, synthetic construct
  source 1..23: mol_type = other RNA
ggacatggtggccgtgggtgtgg

SEQ ID NO: 67988 - RNA, 23 nt, synthetic construct
  source 1..23: mol_type = other RNA
ggaagagggggtggccacagagc

SEQ ID NO: 67989 - RNA, 23 nt, synthetic construct
  source 1..23: mol_type = other RNA
tccacactggaggcgtgcgtgcc

SEQ ID NO: 67990 - RNA, 23 nt, synthetic construct
  source 1..23: mol_type = other RNA
gggggtgtgggtggtccccggga

SEQ ID NO: 67991 - RNA, 23 nt, synthetic construct
  source 1..23: mol_type = other RNA
gcaggtgtggtggcggtggtggt

SEQ ID NO: 67992 - RNA, 23 nt, synthetic construct
  source 1..23: mol_type = other RNA
ccctagggcagaggagggagtca

SEQ ID NO: 67993 - RNA, 23 nt, synthetic construct
  source 1..23: mol_type = other RNA
aggctgggcctgggcacggcact

SEQ ID NO: 67994 - RNA, 23 nt, synthetic construct
  source 1..23: mol_type = other RNA
tagagctggtggccggggtgctg

SEQ ID NO: 67995 - RNA, 23 nt, synthetic construct
  source 1..23: mol_type = other RNA
tttggtggctgtgcttgtcagca

SEQ ID NO: 67996 - RNA, 23 nt, synthetic construct
  source 1..23: mol_type = other RNA
gtggaggaggggatgggtgtaac

SEQ ID NO: 67997 - RNA, 23 nt, synthetic construct
  source 1..23: mol_type = other RNA
ggacatggtggccgtgggtgtgg

SEQ ID NO: 67998 - RNA, 23 nt, synthetic construct
  source 1..23: mol_type = other RNA
gagctggtggctgcgggtgtggt

SEQ ID NO: 67999 - RNA, 23 nt, synthetic construct
  source 1..23: mol_type = other RNA
gtggaggaggggatgggtgtaaa

SEQ ID NO: 68000 - RNA, 23 nt, synthetic construct
  source 1..23: mol_type = other RNA
gtggatccagtggctgcagttgt

SEQ ID NO: 68001 - RNA, 23 nt, synthetic construct
  source 1..23: mol_type = other RNA
ggtgcgggtggtccccacggtgg

SEQ ID NO: 68002 - RNA, 23 nt, synthetic construct
  source 1..23: mol_type = other RNA
tggtcaaacaggatcaggccctc

SEQ ID NO: 68003 - RNA, 23 nt, synthetic construct
  source 1..23: mol_type = other RNA
cccagcacagacacaagcacgcc

SEQ ID NO: 68004 - RNA, 23 nt, synthetic construct
  source 1..23: mol_type = other RNA
ggtccccagcacagacacaagca

SEQ ID NO: 68005 - RNA, 23 nt, synthetic construct
  source 1..23: mol_type = other RNA
cagatcacagagcggctgtggtg

SEQ ID NO: 68006 - RNA, 23 nt, synthetic construct
  source 1..23: mol_type = other RNA
gtgggtgggcaggtgaggtcgca

SEQ ID NO: 68007 - RNA, 23 nt, synthetic construct
  source 1..23: mol_type = other RNA
gccctcctcctgggtgcagatgg

SEQ ID NO: 68008 - RNA, 23 nt, synthetic construct
  source 1..23: mol_type = other RNA
tccacatggctgttgacccaggt

SEQ ID NO: 68009 - RNA, 23 nt, synthetic construct
  source 1..23: mol_type = other RNA
ctccccctgcagctggacacatc

SEQ ID NO: 68010 - RNA, 23 nt, synthetic construct
  source 1..23: mol_type = other RNA
acaggcggccgccttgcctgtcg

SEQ ID NO: 68011 - RNA, 23 nt, synthetic construct
  source 1..23: mol_type = other RNA
agtccccgctctgctccaccagg

SEQ ID NO: 68012 - RNA, 23 nt, synthetic construct
  source 1..23: mol_type = other RNA
cggccccagcagggtgcggtggc

SEQ ID NO: 68013 - RNA, 23 nt, synthetic construct
  source 1..23: mol_type = other RNA
ctgcaggtggtgttgaaggaggt

SEQ ID NO: 68014 - RNA, 23 nt, synthetic construct
  source 1..23: mol_type = other RNA
tggtctctccaggcttgtaggtg

SEQ ID NO: 68015 - RNA, 23 nt, synthetic construct
  source 1..23: mol_type = other RNA
cccaggccgggctctgggcggtg

SEQ ID NO: 68016 - RNA, 23 nt, synthetic construct
  source 1..23: mol_type = other RNA
tctgggttggggtaggcacagca

SEQ ID NO: 68017 - RNA, 23 nt, synthetic construct
  source 1..23: mol_type = other RNA
cggttgctgtggtctgggttggg

SEQ ID NO: 68018 - RNA, 23 nt, synthetic construct
  source 1..23: mol_type = other RNA
tcggtggcggggttgtggcacgt

SEQ ID NO: 68019 - RNA, 23 nt, synthetic construct
  source 1..23: mol_type = other RNA
gggggagccctggtcagccccgg

SEQ ID NO: 68020 - RNA, 23 nt, synthetic construct
  source 1..23: mol_type = other RNA
gtggtgctggccgggggagccct

SEQ ID NO: 68021 - RNA, 23 nt, synthetic construct
  source 1..23: mol_type = other RNA
ctcattgtcgtctctgtcctggg

SEQ ID NO: 68022 - RNA, 23 nt, synthetic construct
  source 1..23: mol_type = other RNA
tgtggtggttgtgctgatccaca

SEQ ID NO: 68023 - RNA, 23 nt, synthetic construct
  source 1..23: mol_type = other RNA
gaggggttggtggtggagccggt

SEQ ID NO: 68024 - RNA, 23 nt, synthetic construct
  source 1..23: mol_type = other RNA
tggggactgctggggggcaggga

SEQ ID NO: 68025 - RNA, 23 nt, synthetic construct
  source 1..23: mol_type = other RNA
agagctggtggccggggtgctgg

SEQ ID NO: 68026 - RNA, 23 nt, synthetic construct
  source 1..23: mol_type = other RNA
aagcactgtggaggtgtggacag

SEQ ID NO: 68027 - RNA, 23 nt, synthetic construct
  source 1..23: mol_type = other RNA
tgtggtggttgtgctgatccaca

SEQ ID NO: 68028 - RNA, 23 nt, synthetic construct
  source 1..23: mol_type = other RNA
gaggggttggtggtggagccggt

SEQ ID NO: 68029 - RNA, 23 nt, synthetic construct
  source 1..23: mol_type = other RNA
tgctgggggacagggatcgcccg

SEQ ID NO: 68030 - RNA, 23 nt, synthetic construct
  source 1..23: mol_type = other RNA
tgggtggtgcccaaggtgcctga

SEQ ID NO: 68031 - RNA, 23 nt, synthetic construct
  source 1..23: mol_type = other RNA
gctgctggggtgtgggaagtccc

SEQ ID NO: 68032 - RNA, 23 nt, synthetic construct
  source 1..23: mol_type = other RNA
agagctggtggccggggtgctgg

SEQ ID NO: 68033 - RNA, 23 nt, synthetic construct
  source 1..23: mol_type = other RNA
agtccttggactggaggaggaag

SEQ ID NO: 68034 - RNA, 23 nt, synthetic construct
  source 1..23: mol_type = other RNA
gagtggaggagggggtggacatg

SEQ ID NO: 68035 - RNA, 23 nt, synthetic construct
  source 1..23: mol_type = other RNA
aagcactgtggaggtgtggacag

SEQ ID NO: 68036 - RNA, 23 nt, synthetic construct
  source 1..23: mol_type = other RNA
tgtggtggttgtgctgatccaca

SEQ ID NO: 68037 - RNA, 23 nt, synthetic construct
  source 1..23: mol_type = other RNA
gaggggttggtggtggagccggt

SEQ ID NO: 68038 - RNA, 23 nt, synthetic construct
  source 1..23: mol_type = other RNA
tggggactgctggggggcaggga

SEQ ID NO: 68039 - RNA, 23 nt, synthetic construct
  source 1..23: mol_type = other RNA
gctgctggggtgtgggaagtcac

SEQ ID NO: 68040 - RNA, 23 nt, synthetic construct
  source 1..23: mol_type = other RNA
agagctggtggccggggtgctgg

SEQ ID NO: 68041 - RNA, 23 nt, synthetic construct
  source 1..23: mol_type = other RNA
gtggctgttgtggtcagctttgt

SEQ ID NO: 68042 - RNA, 23 nt, synthetic construct
  source 1..23: mol_type = other RNA
tgtggtggttgtgctgatccaca

SEQ ID NO: 68043 - RNA, 23 nt, synthetic construct
  source 1..23: mol_type = other RNA
gaggggttggtggtggagccggt

SEQ ID NO: 68044 - RNA, 23 nt, synthetic construct
  source 1..23: mol_type = other RNA
tgctgggggacagggatcgcccg

SEQ ID NO: 68045 - RNA, 23 nt, synthetic construct
  source 1..23: mol_type = other RNA
tgggtggtgcccaaggtgcctga

SEQ ID NO: 68046 - RNA, 23 nt, synthetic construct
  source 1..23: mol_type = other RNA
gctgctggggtgtgggaagtccc

SEQ ID NO: 68047 - RNA, 23 nt, synthetic construct
  source 1..23: mol_type = other RNA
agagctggtggccggggtgctgg

SEQ ID NO: 68048 - RNA, 23 nt, synthetic construct
  source 1..23: mol_type = other RNA
agtccttggactggaggaggaag

SEQ ID NO: 68049 - RNA, 23 nt, synthetic construct
  source 1..23: mol_type = other RNA
tggtcccaagggtggaggagggg

SEQ ID NO: 68050 - RNA, 23 nt, synthetic construct
  source 1..23: mol_type = other RNA
gagtggaggagggggtggacgtg

SEQ ID NO: 68051 - RNA, 23 nt, synthetic construct
  source 1..23: mol_type = other RNA
aagcactgtggaggtgtggacag

SEQ ID NO: 68052 - RNA, 23 nt, synthetic construct
  source 1..23: mol_type = other RNA
tgtggtggttgtgctgatccaca

SEQ ID NO: 68053 - RNA, 23 nt, synthetic construct
  source 1..23: mol_type = other RNA
gaggggttggtggtggagccggt

SEQ ID NO: 68054 - RNA, 23 nt, synthetic construct
  source 1..23: mol_type = other RNA
agtccttggactggaggaggaag

SEQ ID NO: 68055 - RNA, 23 nt, synthetic construct
  source 1..23: mol_type = other RNA
tggtctctggagtagaggaggtg

SEQ ID NO: 68056 - RNA, 23 nt, synthetic construct
  source 1..23: mol_type = other RNA
tgggggtgtgagctgttcccaga

SEQ ID NO: 68057 - RNA, 23 nt, synthetic construct
  source 1..23: mol_type = other RNA
ggcggaggacactggcggtgggg

SEQ ID NO: 68058 - RNA, 23 nt, synthetic construct
  source 1..23: mol_type = other RNA
ggcaggggagggcgaggacagcg

SEQ ID NO: 68059 - RNA, 23 nt, synthetic construct
  source 1..23: mol_type = other RNA
gtccccagcacagacacaagcac

SEQ ID NO: 68060 - RNA, 23 nt, synthetic construct
  source 1..23: mol_type = other RNA
cgaacacagctgaggtctgcagc

SEQ ID NO: 68061 - RNA, 23 nt, synthetic construct
  source 1..23: mol_type = other RNA
ggcagggaagggcgcctgggaag

SEQ ID NO: 68062 - RNA, 23 nt, synthetic construct
  source 1..23: mol_type = other RNA
gacccaggtttcattcagctgga

SEQ ID NO: 68063 - RNA, 23 nt, synthetic construct
  source 1..23: mol_type = other RNA
gggaggggcaaggccaaggtggg

SEQ ID NO: 68064 - RNA, 23 nt, synthetic construct
  source 1..23: mol_type = other RNA
tgcctggaccagcctgtctgccc

SEQ ID NO: 68065 - RNA, 23 nt, synthetic construct
  source 1..23: mol_type = other RNA
ctgcagcaggcatggacaggcgg

SEQ ID NO: 68066 - RNA, 23 nt, synthetic construct
  source 1..23: mol_type = other RNA
cgagcatggccgccagagccaac

SEQ ID NO: 68067 - RNA, 23 nt, synthetic construct
  source 1..23: mol_type = other RNA
tgcaaaggccagggaagcggaag

SEQ ID NO: 68068 - RNA, 23 nt, synthetic construct
  source 1..23: mol_type = other RNA
tatttgggatccagctccagcag

SEQ ID NO: 68069 - RNA, 23 nt, synthetic construct
  source 1..23: mol_type = other RNA
tccccacacaggccacaggtctg

SEQ ID NO: 68070 - RNA, 23 nt, synthetic construct
  source 1..23: mol_type = other RNA
ggggtcagcctggcgttgtgggc

SEQ ID NO: 68071 - RNA, 23 nt, synthetic construct
  source 1..23: mol_type = other RNA
tgccctcctcgtccgtgcagttg

SEQ ID NO: 68072 - RNA, 23 nt, synthetic construct
  source 1..23: mol_type = other RNA
aaggtggcacacgggcaggtggg

SEQ ID NO: 68073 - RNA, 23 nt, synthetic construct
  source 1..23: mol_type = other RNA
gggggcaggtccgggggcagagc

SEQ ID NO: 68074 - RNA, 23 nt, synthetic construct
  source 1..23: mol_type = other RNA
acactcctggtgctgcatgttga

SEQ ID NO: 68075 - RNA, 23 nt, synthetic construct
  source 1..23: mol_type = other RNA
ggagcaggtgtccgtgcagggtg

SEQ ID NO: 68076 - RNA, 23 nt, synthetic construct
  source 1..23: mol_type = other RNA
agaagcagccgtccacacagtgg

SEQ ID NO: 68077 - RNA, 23 nt, synthetic construct
  source 1..23: mol_type = other RNA
caggtcctggcactgccatagcc

SEQ ID NO: 68078 - RNA, 23 nt, synthetic construct
  source 1..23: mol_type = other RNA
cagccccaggcctgtctgcacca

SEQ ID NO: 68079 - RNA, 23 nt, synthetic construct
  source 1..23: mol_type = other RNA
gcctccaccaccccgctgagggc

SEQ ID NO: 68080 - RNA, 23 nt, synthetic construct
  source 1..23: mol_type = other RNA
tggcacaggcagcctgggccttc

SEQ ID NO: 68081 - RNA, 23 nt, synthetic construct
  source 1..23: mol_type = other RNA
gcgagcaccagtgccgggcgtag

SEQ ID NO: 68082 - RNA, 23 nt, synthetic construct
  source 1..23: mol_type = other RNA
cgtccctccagtcgctgagctgt

SEQ ID NO: 68083 - RNA, 23 nt, synthetic construct
  source 1..23: mol_type = other RNA
ccggccctctcgccaccgcctta

SEQ ID NO: 68084 - RNA, 23 nt, synthetic construct
  source 1..23: mol_type = other RNA
tcacagaacaaggggcaggtgtc

SEQ ID NO: 68085 - RNA, 23 nt, synthetic construct
  source 1..23: mol_type = other RNA
ccactcacagcccccatgtgggt

SEQ ID NO: 68086 - RNA, 23 nt, synthetic construct
  source 1..23: mol_type = other RNA
ccacagccttcctgatgatggtg

SEQ ID NO: 68087 - RNA, 23 nt, synthetic construct
  source 1..23: mol_type = other RNA
ggggacccaggcggtggtgaagg

SEQ ID NO: 68088 - RNA, 23 nt, synthetic construct
  source 1..23: mol_type = other RNA
gcctcccaggccgggctctgggc

SEQ ID NO: 68089 - RNA, 23 nt, synthetic construct
  source 1..23: mol_type = other RNA
agggctgagggctggtgcctggg

SEQ ID NO: 68090 - RNA, 23 nt, synthetic construct
  source 1..23: mol_type = other RNA
ggcactgagggagggctgagggc

SEQ ID NO: 68091 - RNA, 23 nt, synthetic construct
  source 1..23: mol_type = other RNA
cagggtccagttggggaagctct

SEQ ID NO: 68092 - RNA, 23 nt, synthetic construct
  source 1..23: mol_type = other RNA
gctctgtggtcggtggcggggtt

SEQ ID NO: 68093 - RNA, 23 nt, synthetic construct
  source 1..23: mol_type = other RNA
ccagctctgtggtcggtggcggg

SEQ ID NO: 68094 - RNA, 23 nt, synthetic construct
  source 1..23: mol_type = other RNA
ccgtctccagctctgtggtcggt

SEQ ID NO: 68095 - RNA, 23 nt, synthetic construct
  source 1..23: mol_type = other RNA
agcgtgggtggctgtgaggggcg

SEQ ID NO: 68096 - RNA, 23 nt, synthetic construct
  source 1..23: mol_type = other RNA
tggggccagcgtgggtggctgtg

SEQ ID NO: 68097 - RNA, 23 nt, synthetic construct
  source 1..23: mol_type = other RNA
tgtcctgggcgtgctggtctcgg

SEQ ID NO: 68098 - RNA, 23 nt, synthetic construct
  source 1..23: mol_type = other RNA
cagggtggaggtcggggtggccg

SEQ ID NO: 68099 - RNA, 23 nt, synthetic construct
  source 1..23: mol_type = other RNA
tggagctggtgactgtgggtgtg

SEQ ID NO: 68100 - RNA, 23 nt, synthetic construct
  source 1..23: mol_type = other RNA
actggaggagggagtggctttgg

SEQ ID NO: 68101 - RNA, 23 nt, synthetic construct
  source 1..23: mol_type = other RNA
gactggaggagggagtggctttg

SEQ ID NO: 68102 - RNA, 23 nt, synthetic construct
  source 1..23: mol_type = other RNA
atggaggagggggtcaccgtgga

SEQ ID NO: 68103 - RNA, 23 nt, synthetic construct
  source 1..23: mol_type = other RNA
tgaggaggggttggtggtggagc

SEQ ID NO: 68104 - RNA, 23 nt, synthetic construct
  source 1..23: mol_type = other RNA
ccaggagttgaggaggggttggt

SEQ ID NO: 68105 - RNA, 23 nt, synthetic construct
  source 1..23: mol_type = other RNA
ttgctggtggctgcaggtgtggt

SEQ ID NO: 68106 - RNA, 23 nt, synthetic construct
  source 1..23: mol_type = other RNA
ggttctgctgctagggtgagggc

SEQ ID NO: 68107 - RNA, 23 nt, synthetic construct
  source 1..23: mol_type = other RNA
ggtgtggcccggggtggtcgtcc

SEQ ID NO: 68108 - RNA, 23 nt, synthetic construct
  source 1..23: mol_type = other RNA
ggctgtggtcctggaggtggccg

SEQ ID NO: 68109 - RNA, 23 nt, synthetic construct
  source 1..23: mol_type = other RNA
ggaggcggtggccgtggatccgg

SEQ ID NO: 68110 - RNA, 23 nt, synthetic construct
  source 1..23: mol_type = other RNA
tggagctggtgactgtgggtgtc

SEQ ID NO: 68111 - RNA, 23 nt, synthetic construct
  source 1..23: mol_type = other RNA
gcactgtggaggtgtggacagtc

SEQ ID NO: 68112 - RNA, 23 nt, synthetic construct
  source 1..23: mol_type = other RNA
agcactgtggaggtgtggacagt

SEQ ID NO: 68113 - RNA, 23 nt, synthetic construct
  source 1..23: mol_type = other RNA
atggaggagggggtcaccgtgga

SEQ ID NO: 68114 - RNA, 23 nt, synthetic construct
  source 1..23: mol_type = other RNA
tgaggaggggttggtggtggagc

SEQ ID NO: 68115 - RNA, 23 nt, synthetic construct
  source 1..23: mol_type = other RNA
ctgctggtggctgcaggtgtggt

SEQ ID NO: 68116 - RNA, 23 nt, synthetic construct
  source 1..23: mol_type = other RNA
atgtgggtggtgcccaaggtgcc

SEQ ID NO: 68117 - RNA, 23 nt, synthetic construct
  source 1..23: mol_type = other RNA
ggtgtggcccggggtggtcgtcc

SEQ ID NO: 68118 - RNA, 23 nt, synthetic construct
  source 1..23: mol_type = other RNA
gtggctgcagttgtagtggctgc

SEQ ID NO: 68119 - RNA, 23 nt, synthetic construct
  source 1..23: mol_type = other RNA
agtggctgcagttgtagtggctg

SEQ ID NO: 68120 - RNA, 23 nt, synthetic construct
  source 1..23: mol_type = other RNA
ggaggcggtggccgtggatccgg

SEQ ID NO: 68121 - RNA, 23 nt, synthetic construct
  source 1..23: mol_type = other RNA
gactggaggagggagtggctctg

SEQ ID NO: 68122 - RNA, 23 nt, synthetic construct
  source 1..23: mol_type = other RNA
gtagaggagggtgtggctgtgga

SEQ ID NO: 68123 - RNA, 23 nt, synthetic construct
  source 1..23: mol_type = other RNA
gcactgtggaggtgtggacagtc

SEQ ID NO: 68124 - RNA, 23 nt, synthetic construct
  source 1..23: mol_type = other RNA
agcactgtggaggtgtggacagt

SEQ ID NO: 68125 - RNA, 23 nt, synthetic construct
  source 1..23: mol_type = other RNA
cggtggccctggttgtggtggtc

SEQ ID NO: 68126 - RNA, 23 nt, synthetic construct
  source 1..23: mol_type = other RNA
atggaggagggggtcaccgtgga

SEQ ID NO: 68127 - RNA, 23 nt, synthetic construct
  source 1..23: mol_type = other RNA
tgaggaggggttggtggtggagc

SEQ ID NO: 68128 - RNA, 23 nt, synthetic construct
  source 1..23: mol_type = other RNA
ctgctggtggctgcaggtgtggt

SEQ ID NO: 68129 - RNA, 23 nt, synthetic construct
  source 1..23: mol_type = other RNA
ggtgtggcccggggtggtcgtcc

SEQ ID NO: 68130 - RNA, 23 nt, synthetic construct
  source 1..23: mol_type = other RNA
tggctgtggctgtggtcctggag

SEQ ID NO: 68131 - RNA, 23 nt, synthetic construct
  source 1..23: mol_type = other RNA
ggaggcggtggccgtggatccgg

SEQ ID NO: 68132 - RNA, 23 nt, synthetic construct
  source 1..23: mol_type = other RNA
tggagctggtgactgtgggtgtc

SEQ ID NO: 68133 - RNA, 23 nt, synthetic construct
  source 1..23: mol_type = other RNA
cggtggccctggttgtggtggcc

SEQ ID NO: 68134 - RNA, 23 nt, synthetic construct
  source 1..23: mol_type = other RNA
agctgttcctggggtggaagagg

SEQ ID NO: 68135 - RNA, 23 nt, synthetic construct
  source 1..23: mol_type = other RNA
tgaggaggggttggtggtggagc

SEQ ID NO: 68136 - RNA, 23 nt, synthetic construct
  source 1..23: mol_type = other RNA
ctgctggtggctgcaggtgtggt

SEQ ID NO: 68137 - RNA, 23 nt, synthetic construct
  source 1..23: mol_type = other RNA
atgtgggtggtgcccaaggtgcc

SEQ ID NO: 68138 - RNA, 23 nt, synthetic construct
  source 1..23: mol_type = other RNA
ggtgtggcccggggtggtcgtcc

SEQ ID NO: 68139 - RNA, 23 nt, synthetic construct
  source 1..23: mol_type = other RNA
tcccccagggggacaccaggctg

SEQ ID NO: 68140 - RNA, 23 nt, synthetic construct
  source 1..23: mol_type = other RNA
gtaacgctggtagctgtggattt

SEQ ID NO: 68141 - RNA, 23 nt, synthetic construct
  source 1..23: mol_type = other RNA
acatggtggccacgggtgtggtg

SEQ ID NO: 68142 - RNA, 23 nt, synthetic construct
  source 1..23: mol_type = other RNA
gtggctgcagttgtagtggctgc

SEQ ID NO: 68143 - RNA, 23 nt, synthetic construct
  source 1..23: mol_type = other RNA
agtggctgcagttgtagtggctg

SEQ ID NO: 68144 - RNA, 23 nt, synthetic construct
  source 1..23: mol_type = other RNA
ggaggcggtggccgtggatccgg

SEQ ID NO: 68145 - RNA, 23 nt, synthetic construct
  source 1..23: mol_type = other RNA
tggagctggtgactgtgggtgtc

SEQ ID NO: 68146 - RNA, 23 nt, synthetic construct
  source 1..23: mol_type = other RNA
actggaggagggagtggctttgg

SEQ ID NO: 68147 - RNA, 23 nt, synthetic construct
  source 1..23: mol_type = other RNA
gactggaggagggagtggctttg

SEQ ID NO: 68148 - RNA, 23 nt, synthetic construct
  source 1..23: mol_type = other RNA
gcactgtggaggtgtggacagtc

SEQ ID NO: 68149 - RNA, 23 nt, synthetic construct
  source 1..23: mol_type = other RNA
agcactgtggaggtgtggacagt

SEQ ID NO: 68150 - RNA, 23 nt, synthetic construct
  source 1..23: mol_type = other RNA
gggtgtggtggttgtgggtgtgg

SEQ ID NO: 68151 - RNA, 23 nt, synthetic construct
  source 1..23: mol_type = other RNA
atggaggagggggtcaccgtgga

SEQ ID NO: 68152 - RNA, 23 nt, synthetic construct
  source 1..23: mol_type = other RNA
tgaggaggggttggtggtggagc

SEQ ID NO: 68153 - RNA, 23 nt, synthetic construct
  source 1..23: mol_type = other RNA
ggtggctgcgggtgtggtggccg

SEQ ID NO: 68154 - RNA, 23 nt, synthetic construct
  source 1..23: mol_type = other RNA
ttggagctggtggctgcgggtgt

SEQ ID NO: 68155 - RNA, 23 nt, synthetic construct
  source 1..23: mol_type = other RNA
gtggctgtggtggtcagcactgt

SEQ ID NO: 68156 - RNA, 23 nt, synthetic construct
  source 1..23: mol_type = other RNA
tggtggctgtggtggtcagcact

SEQ ID NO: 68157 - RNA, 23 nt, synthetic construct
  source 1..23: mol_type = other RNA
atggtggctgtggtggtcagcac

SEQ ID NO: 68158 - RNA, 23 nt, synthetic construct
  source 1..23: mol_type = other RNA
gtggctgcagttgtagtggctgt

SEQ ID NO: 68159 - RNA, 23 nt, synthetic construct
  source 1..23: mol_type = other RNA
agtggctgcagttgtagtggctg

SEQ ID NO: 68160 - RNA, 23 nt, synthetic construct
  source 1..23: mol_type = other RNA
tggggaagccagtgggtctcagg

SEQ ID NO: 68161 - RNA, 23 nt, synthetic construct
  source 1..23: mol_type = other RNA
gagggcgaggacagcggggcgga

SEQ ID NO: 68162 - RNA, 23 nt, synthetic construct
  source 1..23: mol_type = other RNA
acaggatcaggccctcctccttc

SEQ ID NO: 68163 - RNA, 23 nt, synthetic construct
  source 1..23: mol_type = other RNA
ccagtcggggcccagcagccatc

SEQ ID NO: 68164 - RNA, 23 nt, synthetic construct
  source 1..23: mol_type = other RNA
gggctggcagtggggggtgtgcc

SEQ ID NO: 68165 - RNA, 23 nt, synthetic construct
  source 1..23: mol_type = other RNA
catcccctccagctgtgggctct

SEQ ID NO: 68166 - RNA, 23 nt, synthetic construct
  source 1..23: mol_type = other RNA
tgggtgcagatggactcctgccc

SEQ ID NO: 68167 - RNA, 23 nt, synthetic construct
  source 1..23: mol_type = other RNA
ctcctgggtgcagatggactcct

SEQ ID NO: 68168 - RNA, 23 nt, synthetic construct
  source 1..23: mol_type = other RNA
cagcagtcgccctcctcctgggt

SEQ ID NO: 68169 - RNA, 23 nt, synthetic construct
  source 1..23: mol_type = other RNA
gcagggaagggcgcctgggaagg

SEQ ID NO: 68170 - RNA, 23 nt, synthetic construct
  source 1..23: mol_type = other RNA
cctggggacaggtagtattgttg

SEQ ID NO: 68171 - RNA, 23 nt, synthetic construct
  source 1..23: mol_type = other RNA
attcagctggactggctggccat

SEQ ID NO: 68172 - RNA, 23 nt, synthetic construct
  source 1..23: mol_type = other RNA
ccaccctcagcctcacagaggta

SEQ ID NO: 68173 - RNA, 23 nt, synthetic construct
  source 1..23: mol_type = other RNA
cctcctgggccgggaagccacgg

SEQ ID NO: 68174 - RNA, 23 nt, synthetic construct
  source 1..23: mol_type = other RNA
gcctcctgggccgggaagccacg

SEQ ID NO: 68175 - RNA, 23 nt, synthetic construct
  source 1..23: mol_type = other RNA
gctggcccctcacccttctgggg

SEQ ID NO: 68176 - RNA, 23 nt, synthetic construct
  source 1..23: mol_type = other RNA
tcctggcagcagctggccttgcc

SEQ ID NO: 68177 - RNA, 23 nt, synthetic construct
  source 1..23: mol_type = other RNA
gctcagggtttatttgcaaaact

SEQ ID NO: 68178 - RNA, 23 nt, synthetic construct
  source 1..23: mol_type = other RNA
  misc_difference 23: note = a, c, u, g, unknown or other
cagggagggagccgggccgggtn

SEQ ID NO: 68179 - RNA, 23 nt, synthetic construct
  source 1..23: mol_type = other RNA
ggcagggagggagccgggccggg

SEQ ID NO: 68180 - RNA, 23 nt, synthetic construct
  source 1..23: mol_type = other RNA
gggcagggagggagccgggccgg

SEQ ID NO: 68181 - RNA, 23 nt, synthetic construct
  source 1..23: mol_type = other RNA
cgggcagggagggagccgggccg

SEQ ID NO: 68182 - RNA, 23 nt, synthetic construct
  source 1..23: mol_type = other RNA
acgggcagggagggagccgggcc

SEQ ID NO: 68183 - RNA, 23 nt, synthetic construct
  source 1..23: mol_type = other RNA
gacgggcagggagggagccgggc

SEQ ID NO: 68184 - RNA, 23 nt, synthetic construct
  source 1..23: mol_type = other RNA
ggggacgggcagggagggagccg

SEQ ID NO: 68185 - RNA, 23 nt, synthetic construct
  source 1..23: mol_type = other RNA
cggggacgggcagggagggagcc

SEQ ID NO: 68186 - RNA, 23 nt, synthetic construct
  source 1..23: mol_type = other RNA
acggggacgggcagggagggagc

SEQ ID NO: 68187 - RNA, 23 nt, synthetic construct
  source 1..23: mol_type = other RNA
ggacggggacgggcagggaggga

SEQ ID NO: 68188 - RNA, 23 nt, synthetic construct
  source 1..23: mol_type = other RNA
acgggtggggggacggggacggg

SEQ ID NO: 68189 - RNA, 23 nt, synthetic construct
  source 1..23: mol_type = other RNA
gcacgggtggggggacggggacg

SEQ ID NO: 68190 - RNA, 23 nt, synthetic construct
  source 1..23: mol_type = other RNA
ggggctggcacgggtggggggac

SEQ ID NO: 68191 - RNA, 23 nt, synthetic construct
  source 1..23: mol_type = other RNA
ctgggggctggcacgggtggggg

SEQ ID NO: 68192 - RNA, 23 nt, synthetic construct
  source 1..23: mol_type = other RNA
cctgggggctggcacgggtgggg

SEQ ID NO: 68193 - RNA, 23 nt, synthetic construct
  source 1..23: mol_type = other RNA
atcctgggggctggcacgggtgg

SEQ ID NO: 68194 - RNA, 23 nt, synthetic construct
  source 1..23: mol_type = other RNA
cggggcacccatcctgggggctg

SEQ ID NO: 68195 - RNA, 23 nt, synthetic construct
  source 1..23: mol_type = other RNA
tctctgcctgcggcaccacgagc

SEQ ID NO: 68196 - RNA, 23 nt, synthetic construct
  source 1..23: mol_type = other RNA
gtctctgcctgcggcaccacgag

SEQ ID NO: 68197 - RNA, 23 nt, synthetic construct
  source 1..23: mol_type = other RNA
acagggccctgggtctctgcctg

SEQ ID NO: 68198 - RNA, 23 nt, synthetic construct
  source 1..23: mol_type = other RNA
cacagggccctgggtctctgcct

SEQ ID NO: 68199 - RNA, 23 nt, synthetic construct
  source 1..23: mol_type = other RNA
tccacagggccctgggtctctgc

SEQ ID NO: 68200 - RNA, 23 nt, synthetic construct
  source 1..23: mol_type = other RNA
gctccacagggccctgggtctct

SEQ ID NO: 68201 - RNA, 23 nt, synthetic construct
  source 1..23: mol_type = other RNA
tcggctccacagggccctgggtc

SEQ ID NO: 68202 - RNA, 23 nt, synthetic construct
  source 1..23: mol_type = other RNA
gctcggctccacagggccctggg

SEQ ID NO: 68203 - RNA, 23 nt, synthetic construct
  source 1..23: mol_type = other RNA
ttctcccagctcggctccacagg

SEQ ID NO: 68204 - RNA, 23 nt, synthetic construct
  source 1..23: mol_type = other RNA
cgcgccgggtgggcgaggacgtc

SEQ ID NO: 68205 - RNA, 23 nt, synthetic construct
  source 1..23: mol_type = other RNA
caccccaggtgctgcacacccgc

SEQ ID NO: 68206 - RNA, 23 nt, synthetic construct
  source 1..23: mol_type = other RNA
gtcaccccaggtgctgcacaccc

SEQ ID NO: 68207 - RNA, 23 nt, synthetic construct
  source 1..23: mol_type = other RNA
ccacaggcctggagcccactagg

SEQ ID NO: 68208 - RNA, 23 nt, synthetic construct
  source 1..23: mol_type = other RNA
accacaggcctggagcccactag

SEQ ID NO: 68209 - RNA, 23 nt, synthetic construct
  source 1..23: mol_type = other RNA
cagctcctcccgctgcccattga

SEQ ID NO: 68210 - RNA, 23 nt, synthetic construct
  source 1..23: mol_type = other RNA
ctccaccaggaggccagtgcggc

SEQ ID NO: 68211 - RNA, 23 nt, synthetic construct
  source 1..23: mol_type = other RNA
gctctgctccaccaggaggccag

SEQ ID NO: 68212 - RNA, 23 nt, synthetic construct
  source 1..23: mol_type = other RNA
cgctctgctccaccaggaggcca

SEQ ID NO: 68213 - RNA, 23 nt, synthetic construct
  source 1..23: mol_type = other RNA
ccgctctgctccaccaggaggcc

SEQ ID NO: 68214 - RNA, 23 nt, synthetic construct
  source 1..23: mol_type = other RNA
ccccgctctgctccaccaggagg

SEQ ID NO: 68215 - RNA, 23 nt, synthetic construct
  source 1..23: mol_type = other RNA
tccccgctctgctccaccaggag

SEQ ID NO: 68216 - RNA, 23 nt, synthetic construct
  source 1..23: mol_type = other RNA
gtccccgctctgctccaccagga

SEQ ID NO: 68217 - RNA, 23 nt, synthetic construct
  source 1..23: mol_type = other RNA
ggatccagctccagcagggcact

SEQ ID NO: 68218 - RNA, 23 nt, synthetic construct
  source 1..23: mol_type = other RNA
tttgggatccagctccagcaggg

SEQ ID NO: 68219 - RNA, 23 nt, synthetic construct
  source 1..23: mol_type = other RNA
gtatttgggatccagctccagca

SEQ ID NO: 68220 - RNA, 23 nt, synthetic construct
  source 1..23: mol_type = other RNA
cacacaggccacaggtctggttg

SEQ ID NO: 68221 - RNA, 23 nt, synthetic construct
  source 1..23: mol_type = other RNA
ccacacaggccacaggtctggtt

SEQ ID NO: 68222 - RNA, 23 nt, synthetic construct
  source 1..23: mol_type = other RNA
aagtccccacacaggccacaggt

SEQ ID NO: 68223 - RNA, 23 nt, synthetic construct
  source 1..23: mol_type = other RNA
actggagcggggtcagcctggcg

SEQ ID NO: 68224 - RNA, 23 nt, synthetic construct
  source 1..23: mol_type = other RNA
agggtgcggtggcagatgccctc

SEQ ID NO: 68225 - RNA, 23 nt, synthetic construct
  source 1..23: mol_type = other RNA
cccagcagggtgcggtggcagat

SEQ ID NO: 68226 - RNA, 23 nt, synthetic construct
  source 1..23: mol_type = other RNA
ggccccagcagggtgcggtggca

SEQ ID NO: 68227 - RNA, 23 nt, synthetic construct
  source 1..23: mol_type = other RNA
ggccggccccagcagggtgcggt

SEQ ID NO: 68228 - RNA, 23 nt, synthetic construct
  source 1..23: mol_type = other RNA
aggccggccccagcagggtgcgg

SEQ ID NO: 68229 - RNA, 23 nt, synthetic construct
  source 1..23: mol_type = other RNA
cagtgctgtccaccagtgcgtgg

SEQ ID NO: 68230 - RNA, 23 nt, synthetic construct
  source 1..23: mol_type = other RNA
aggtggcacacgggcaggtgggg

SEQ ID NO: 68231 - RNA, 23 nt, synthetic construct
  source 1..23: mol_type = other RNA
ttccgcggctggccccccgcgtg

SEQ ID NO: 68232 - RNA, 23 nt, synthetic construct
  source 1..23: mol_type = other RNA
cagggcacctccagttccgcggc

SEQ ID NO: 68233 - RNA, 23 nt, synthetic construct
  source 1..23: mol_type = other RNA
gagctcagggcacctccagttcc

SEQ ID NO: 68234 - RNA, 23 nt, synthetic construct
  source 1..23: mol_type = other RNA
gcagagctcagggcacctccagt

SEQ ID NO: 68235 - RNA, 23 nt, synthetic construct
  source 1..23: mol_type = other RNA
gggggcagagctcagggcacctc

SEQ ID NO: 68236 - RNA, 23 nt, synthetic construct
  source 1..23: mol_type = other RNA
gagggggcaggtccgggggcaga

SEQ ID NO: 68237 - RNA, 23 nt, synthetic construct
  source 1..23: mol_type = other RNA
gtgagccacactcctggtgctgc

SEQ ID NO: 68238 - RNA, 23 nt, synthetic construct
  source 1..23: mol_type = other RNA
ggtgagccacactcctggtgctg

SEQ ID NO: 68239 - RNA, 23 nt, synthetic construct
  source 1..23: mol_type = other RNA
gggtgagccacactcctggtgct

SEQ ID NO: 68240 - RNA, 23 nt, synthetic construct
  source 1..23: mol_type = other RNA
ggttggagcaggtgtccgtgcag

SEQ ID NO: 68241 - RNA, 23 nt, synthetic construct
  source 1..23: mol_type = other RNA
tcgcagagctgcgcgcgctgggg

SEQ ID NO: 68242 - RNA, 23 nt, synthetic construct
  source 1..23: mol_type = other RNA
agtggtcctcgcagagctgcgcg

SEQ ID NO: 68243 - RNA, 23 nt, synthetic construct
  source 1..23: mol_type = other RNA
tgaaggaggtgcccgggctgtag

SEQ ID NO: 68244 - RNA, 23 nt, synthetic construct
  source 1..23: mol_type = other RNA
tgcaggtggtgttgaaggaggtg

SEQ ID NO: 68245 - RNA, 23 nt, synthetic construct
  source 1..23: mol_type = other RNA
cccccggagcaggtgcaggagct

SEQ ID NO: 68246 - RNA, 23 nt, synthetic construct
  source 1..23: mol_type = other RNA
agagcaggtgccagggcacggca

SEQ ID NO: 68247 - RNA, 23 nt, synthetic construct
  source 1..23: mol_type = other RNA
cagagcaggtgccagggcacggc

SEQ ID NO: 68248 - RNA, 23 nt, synthetic construct
  source 1..23: mol_type = other RNA
cacagagcaggtgccagggcacg

SEQ ID NO: 68249 - RNA, 23 nt, synthetic construct
  source 1..23: mol_type = other RNA
tgcacagagcaggtgccagggca

SEQ ID NO: 68250 - RNA, 23 nt, synthetic construct
  source 1..23: mol_type = other RNA
ctgcacagagcaggtgccagggc

SEQ ID NO: 68251 - RNA, 23 nt, synthetic construct
  source 1..23: mol_type = other RNA
cgccctgcacagagcaggtgcca

SEQ ID NO: 68252 - RNA, 23 nt, synthetic construct
  source 1..23: mol_type = other RNA
gggccccgccctgcacagagcag

SEQ ID NO: 68253 - RNA, 23 nt, synthetic construct
  source 1..23: mol_type = other RNA
atgtgggccccgccctgcacaga

SEQ ID NO: 68254 - RNA, 23 nt, synthetic construct
  source 1..23: mol_type = other RNA
cagcacggtgaagctgctgtcgg

SEQ ID NO: 68255 - RNA, 23 nt, synthetic construct
  source 1..23: mol_type = other RNA
ccgcagctcagccagcacggtga

SEQ ID NO: 68256 - RNA, 23 nt, synthetic construct
  source 1..23: mol_type = other RNA
ttccgcagctcagccagcacggt

SEQ ID NO: 68257 - RNA, 23 nt, synthetic construct
  source 1..23: mol_type = other RNA
cttccgcagctcagccagcacgg

SEQ ID NO: 68258 - RNA, 23 nt, synthetic construct
  source 1..23: mol_type = other RNA
acttccgcagctcagccagcacg

SEQ ID NO: 68259 - RNA, 23 nt, synthetic construct
  source 1..23: mol_type = other RNA
tgtctgcaccacgatgaagaagc

SEQ ID NO: 68260 - RNA, 23 nt, synthetic construct
  source 1..23: mol_type = other RNA
cccaggcctgtctgcaccacgat

SEQ ID NO: 68261 - RNA, 23 nt, synthetic construct
  source 1..23: mol_type = other RNA
ccccaggcctgtctgcaccacga

SEQ ID NO: 68262 - RNA, 23 nt, synthetic construct
  source 1..23: mol_type = other RNA
agccccaggcctgtctgcaccac

SEQ ID NO: 68263 - RNA, 23 nt, synthetic construct
  source 1..23: mol_type = other RNA
gcagccccaggcctgtctgcacc

SEQ ID NO: 68264 - RNA, 23 nt, synthetic construct
  source 1..23: mol_type = other RNA
ctgcagccccaggcctgtctgca

SEQ ID NO: 68265 - RNA, 23 nt, synthetic construct
  source 1..23: mol_type = other RNA
gcaccagcagctgcagccccagg

SEQ ID NO: 68266 - RNA, 23 nt, synthetic construct
  source 1..23: mol_type = other RNA
ctccaccaccccgctgagggccg

SEQ ID NO: 68267 - RNA, 23 nt, synthetic construct
  source 1..23: mol_type = other RNA
cctccaccaccccgctgagggcc

SEQ ID NO: 68268 - RNA, 23 nt, synthetic construct
  source 1..23: mol_type = other RNA
gtggcctccaccaccccgctgag

SEQ ID NO: 68269 - RNA, 23 nt, synthetic construct
  source 1..23: mol_type = other RNA
tgcgcccgtggcctccaccaccc

SEQ ID NO: 68270 - RNA, 23 nt, synthetic construct
  source 1..23: mol_type = other RNA
agcctgggccttccaggtgttgg

SEQ ID NO: 68271 - RNA, 23 nt, synthetic construct
  source 1..23: mol_type = other RNA
cagcctgggccttccaggtgttg

SEQ ID NO: 68272 - RNA, 23 nt, synthetic construct
  source 1..23: mol_type = other RNA
acaggcagcctgggccttccagg

SEQ ID NO: 68273 - RNA, 23 nt, synthetic construct
  source 1..23: mol_type = other RNA
cacaggcagcctgggccttccag

SEQ ID NO: 68274 - RNA, 23 nt, synthetic construct
  source 1..23: mol_type = other RNA
ggcacaggcagcctgggccttcc

SEQ ID NO: 68275 - RNA, 23 nt, synthetic construct
  source 1..23: mol_type = other RNA
ggcattggcacaggcagcctggg

SEQ ID NO: 68276 - RNA, 23 nt, synthetic construct
  source 1..23: mol_type = other RNA
cgagaaggcactgttgggatcgg

SEQ ID NO: 68277 - RNA, 23 nt, synthetic construct
  source 1..23: mol_type = other RNA
ggttgatgatggagtggcagcgc

SEQ ID NO: 68278 - RNA, 23 nt, synthetic construct
  source 1..23: mol_type = other RNA
ggcttggggttgatgatggagtg

SEQ ID NO: 68279 - RNA, 23 nt, synthetic construct
  source 1..23: mol_type = other RNA
gggcttggggttgatgatggagt

SEQ ID NO: 68280 - RNA, 23 nt, synthetic construct
  source 1..23: mol_type = other RNA
aaacatgcagttcgagtggaagg

SEQ ID NO: 68281 - RNA, 23 nt, synthetic construct
  source 1..23: mol_type = other RNA
gcagccgtccacaggcacgaagg

SEQ ID NO: 68282 - RNA, 23 nt, synthetic construct
  source 1..23: mol_type = other RNA
gcggggcaggtgcagccgtccac

SEQ ID NO: 68283 - RNA, 23 nt, synthetic construct
  source 1..23: mol_type = other RNA
tagcaggggcactcctgggcggg

SEQ ID NO: 68284 - RNA, 23 nt, synthetic construct
  source 1..23: mol_type = other RNA
gcaccacctctccaggagccagc

SEQ ID NO: 68285 - RNA, 23 nt, synthetic construct
  source 1..23: mol_type = other RNA
agaggctcccaggcagcttagct

SEQ ID NO: 68286 - RNA, 23 nt, synthetic construct
  source 1..23: mol_type = other RNA
gcacaccctgtgcttttctgcag

SEQ ID NO: 68287 - RNA, 23 nt, synthetic construct
  source 1..23: mol_type = other RNA
gctgttgctgcagtccaggtaca

SEQ ID NO: 68288 - RNA, 23 nt, synthetic construct
  source 1..23: mol_type = other RNA
gcagcccccactcccatccgaca

SEQ ID NO: 68289 - RNA, 23 nt, synthetic construct
  source 1..23: mol_type = other RNA
aatgcagcccccactcccatccg

SEQ ID NO: 68290 - RNA, 23 nt, synthetic construct
  source 1..23: mol_type = other RNA
tcctgcaggtgcaggtgttgcag

SEQ ID NO: 68291 - RNA, 23 nt, synthetic construct
  source 1..23: mol_type = other RNA
ttcctgcaggtgcaggtgttgca

SEQ ID NO: 68292 - RNA, 23 nt, synthetic construct
  source 1..23: mol_type = other RNA
gtggtgttgtccccacagtagtc

SEQ ID NO: 68293 - RNA, 23 nt, synthetic construct
  source 1..23: mol_type = other RNA
cggccctctcgccaccgccttaa

SEQ ID NO: 68294 - RNA, 23 nt, synthetic construct
  source 1..23: mol_type = other RNA
gggtccccacccggccctctcgc

SEQ ID NO: 68295 - RNA, 23 nt, synthetic construct
  source 1..23: mol_type = other RNA
tccgggcaggagggggagagctt

SEQ ID NO: 68296 - RNA, 23 nt, synthetic construct
  source 1..23: mol_type = other RNA
gtgcaggggtccttgggtgccag

SEQ ID NO: 68297 - RNA, 23 nt, synthetic construct
  source 1..23: mol_type = other RNA
aggggcaggtgtccggagtccgc

SEQ ID NO: 68298 - RNA, 23 nt, synthetic construct
  source 1..23: mol_type = other RNA
cacagaacaaggggcaggtgtcc

SEQ ID NO: 68299 - RNA, 23 nt, synthetic construct
  source 1..23: mol_type = other RNA
tgccactcacagcccccatgtgg

SEQ ID NO: 68300 - RNA, 23 nt, synthetic construct
  source 1..23: mol_type = other RNA
agtgccactcacagcccccatgt

SEQ ID NO: 68301 - RNA, 23 nt, synthetic construct
  source 1..23: mol_type = other RNA
gggctggctgggtgggcacttcg

SEQ ID NO: 68302 - RNA, 23 nt, synthetic construct
  source 1..23: mol_type = other RNA
agggctggctgggtgggcacttc

SEQ ID NO: 68303 - RNA, 23 nt, synthetic construct
  source 1..23: mol_type = other RNA
atgccacagccttcctgatgatg

SEQ ID NO: 68304 - RNA, 23 nt, synthetic construct
  source 1..23: mol_type = other RNA
acatgccacagccttcctgatga

SEQ ID NO: 68305 - RNA, 23 nt, synthetic construct
  source 1..23: mol_type = other RNA
ggctggagttccaggacatgcca

SEQ ID NO: 68306 - RNA, 23 nt, synthetic construct
  source 1..23: mol_type = other RNA
ggcggtggtgaaggtgaatggcg

SEQ ID NO: 68307 - RNA, 23 nt, synthetic construct
  source 1..23: mol_type = other RNA
ccaggcggtggtgaaggtgaatg

SEQ ID NO: 68308 - RNA, 23 nt, synthetic construct
  source 1..23: mol_type = other RNA
cccaggcggtggtgaaggtgaat

SEQ ID NO: 68309 - RNA, 23 nt, synthetic construct
  source 1..23: mol_type = other RNA
gtggagtgggggacccaggcggt

SEQ ID NO: 68310 - RNA, 23 nt, synthetic construct
  source 1..23: mol_type = other RNA
cggtggagaccgggagggccggg

SEQ ID NO: 68311 - RNA, 23 nt, synthetic construct
  source 1..23: mol_type = other RNA
acggtggagaccgggagggccgg

SEQ ID NO: 68312 - RNA, 23 nt, synthetic construct
  source 1..23: mol_type = other RNA
gtgcccattgtaccagctggacc

SEQ ID NO: 68313 - RNA, 23 nt, synthetic construct
  source 1..23: mol_type = other RNA
cggtgcccattgtaccagctgga

SEQ ID NO: 68314 - RNA, 23 nt, synthetic construct
  source 1..23: mol_type = other RNA
tcccaggccgggctctgggcggt

SEQ ID NO: 68315 - RNA, 23 nt, synthetic construct
  source 1..23: mol_type = other RNA
ccgcctcccaggccgggctctgg

SEQ ID NO: 68316 - RNA, 23 nt, synthetic construct
  source 1..23: mol_type = other RNA
tccgcctcccaggccgggctctg

SEQ ID NO: 68317 - RNA, 23 nt, synthetic construct
  source 1..23: mol_type = other RNA
tctccgcctcccaggccgggctc

SEQ ID NO: 68318 - RNA, 23 nt, synthetic construct
  source 1..23: mol_type = other RNA
gctggcccagctcctccagcggc

SEQ ID NO: 68319 - RNA, 23 nt, synthetic construct
  source 1..23: mol_type = other RNA
ccacctgctggcccagctcctcc

SEQ ID NO: 68320 - RNA, 23 nt, synthetic construct
  source 1..23: mol_type = other RNA
ggggaggggccacagggcacgta

SEQ ID NO: 68321 - RNA, 23 nt, synthetic construct
  source 1..23: mol_type = other RNA
ccggggaggggccacagggcacg

SEQ ID NO: 68322 - RNA, 23 nt, synthetic construct
  source 1..23: mol_type = other RNA
gccggggaggggccacagggcac

SEQ ID NO: 68323 - RNA, 23 nt, synthetic construct
  source 1..23: mol_type = other RNA
ggccggggaggggccacagggca

SEQ ID NO: 68324 - RNA, 23 nt, synthetic construct
  source 1..23: mol_type = other RNA
gggccggggaggggccacagggc

SEQ ID NO: 68325 - RNA, 23 nt, synthetic construct
  source 1..23: mol_type = other RNA
gtgcctggggccggggaggggcc

SEQ ID NO: 68326 - RNA, 23 nt, synthetic construct
  source 1..23: mol_type = other RNA
tgagggctggtgcctggggccgg

SEQ ID NO: 68327 - RNA, 23 nt, synthetic construct
  source 1..23: mol_type = other RNA
ctgagggctggtgcctggggccg

SEQ ID NO: 68328 - RNA, 23 nt, synthetic construct
  source 1..23: mol_type = other RNA
gctgagggctggtgcctggggcc

SEQ ID NO: 68329 - RNA, 23 nt, synthetic construct
  source 1..23: mol_type = other RNA
gggctgagggctggtgcctgggg

SEQ ID NO: 68330 - RNA, 23 nt, synthetic construct
  source 1..23: mol_type = other RNA
gagggagggctgagggctggtgc

SEQ ID NO: 68331 - RNA, 23 nt, synthetic construct
  source 1..23: mol_type = other RNA
cactgagggagggctgagggctg

SEQ ID NO: 68332 - RNA, 23 nt, synthetic construct
  source 1..23: mol_type = other RNA
ctggcactgagggagggctgagg

SEQ ID NO: 68333 - RNA, 23 nt, synthetic construct
  source 1..23: mol_type = other RNA
ggttgctgtggtctgggttgggg

SEQ ID NO: 68334 - RNA, 23 nt, synthetic construct
  source 1..23: mol_type = other RNA
gtcacggggcctgagctggaccc

SEQ ID NO: 68335 - RNA, 23 nt, synthetic construct
  source 1..23: mol_type = other RNA
tacctggggccgagggggtgacc

SEQ ID NO: 68336 - RNA, 23 nt, synthetic construct
  source 1..23: mol_type = other RNA
tgccctccagcggccctgatctt

SEQ ID NO: 68337 - RNA, 23 nt, synthetic construct
  source 1..23: mol_type = other RNA
ctgcagcagaggacccggatcct

SEQ ID NO: 68338 - RNA, 23 nt, synthetic construct
  source 1..23: mol_type = other RNA
ctccagctctgtggtcggtggcg

SEQ ID NO: 68339 - RNA, 23 nt, synthetic construct
  source 1..23: mol_type = other RNA
ggccgtctccagctctgtggtcg

SEQ ID NO: 68340 - RNA, 23 nt, synthetic construct
  source 1..23: mol_type = other RNA
tggccgtctccagctctgtggtc

SEQ ID NO: 68341 - RNA, 23 nt, synthetic construct
  source 1..23: mol_type = other RNA
ggcctgggtggtggtggtggtgg

SEQ ID NO: 68342 - RNA, 23 nt, synthetic construct
  source 1..23: mol_type = other RNA
gggcctgggtggtggtggtggtg

SEQ ID NO: 68343 - RNA, 23 nt, synthetic construct
  source 1..23: mol_type = other RNA
cagggcctgggtggtggtggtgg

SEQ ID NO: 68344 - RNA, 23 nt, synthetic construct
  source 1..23: mol_type = other RNA
agaacagggcctgggtggtggtg

SEQ ID NO: 68345 - RNA, 23 nt, synthetic construct
  source 1..23: mol_type = other RNA
gagaacagggcctgggtggtggt

SEQ ID NO: 68346 - RNA, 23 nt, synthetic construct
  source 1..23: mol_type = other RNA
ttgagaacagggcctgggtggtg

SEQ ID NO: 68347 - RNA, 23 nt, synthetic construct
  source 1..23: mol_type = other RNA
gccctggtcagccccgggctact

SEQ ID NO: 68348 - RNA, 23 nt, synthetic construct
  source 1..23: mol_type = other RNA
gggagccctggtcagccccgggc

SEQ ID NO: 68349 - RNA, 23 nt, synthetic construct
  source 1..23: mol_type = other RNA
tggccgggggagccctggtcagc

SEQ ID NO: 68350 - RNA, 23 nt, synthetic construct
  source 1..23: mol_type = other RNA
gctggccgggggagccctggtca

SEQ ID NO: 68351 - RNA, 23 nt, synthetic construct
  source 1..23: mol_type = other RNA
gtgctggccgggggagccctggt

SEQ ID NO: 68352 - RNA, 23 nt, synthetic construct
  source 1..23: mol_type = other RNA
ggggatgtcagtccttctgagag

SEQ ID NO: 68353 - RNA, 23 nt, synthetic construct
  source 1..23: mol_type = other RNA
gttctgtggagcctgcaggcgtc

SEQ ID NO: 68354 - RNA, 23 nt, synthetic construct
  source 1..23: mol_type = other RNA
cctggaagggctgagcgtgttgg

SEQ ID NO: 68355 - RNA, 23 nt, synthetic construct
  source 1..23: mol_type = other RNA
ccctggaagggctgagcgtgttg

SEQ ID NO: 68356 - RNA, 23 nt, synthetic construct
  source 1..23: mol_type = other RNA
tggctgtgaggggcgccatgtgc

SEQ ID NO: 68357 - RNA, 23 nt, synthetic construct
  source 1..23: mol_type = other RNA
gggtggctgtgaggggcgccatg

SEQ ID NO: 68358 - RNA, 23 nt, synthetic construct
  source 1..23: mol_type = other RNA
cgtgggtggctgtgaggggcgcc

SEQ ID NO: 68359 - RNA, 23 nt, synthetic construct
  source 1..23: mol_type = other RNA
tgctggctgtgcctgtcgggcga

SEQ ID NO: 68360 - RNA, 23 nt, synthetic construct
  source 1..23: mol_type = other RNA
gtgctggctgtgcctgtcgggcg

SEQ ID NO: 68361 - RNA, 23 nt, synthetic construct
  source 1..23: mol_type = other RNA
cggtgctggctgtgcctgtcggg

SEQ ID NO: 68362 - RNA, 23 nt, synthetic construct
  source 1..23: mol_type = other RNA
gcggtgctggctgtgcctgtcgg

SEQ ID NO: 68363 - RNA, 23 nt, synthetic construct
  source 1..23: mol_type = other RNA
cggcctgagaggtggacagctcg

SEQ ID NO: 68364 - RNA, 23 nt, synthetic construct
  source 1..23: mol_type = other RNA
gctggtggtggtgttagtcaagg

SEQ ID NO: 68365 - RNA, 23 nt, synthetic construct
  source 1..23: mol_type = other RNA
tgccctggctggtggtggtgtta

SEQ ID NO: 68366 - RNA, 23 nt, synthetic construct
  source 1..23: mol_type = other RNA
cgtgccctggctggtggtggtgt

SEQ ID NO: 68367 - RNA, 23 nt, synthetic construct
  source 1..23: mol_type = other RNA
gggtcgtgccctggctggtggtg

SEQ ID NO: 68368 - RNA, 23 nt, synthetic construct
  source 1..23: mol_type = other RNA
gggtggaggtcggggtggccgtg

SEQ ID NO: 68369 - RNA, 23 nt, synthetic construct
  source 1..23: mol_type = other RNA
agggtggaggtcggggtggccgt

SEQ ID NO: 68370 - RNA, 23 nt, synthetic construct
  source 1..23: mol_type = other RNA
tcagggtggaggtcggggtggcc

SEQ ID NO: 68371 - RNA, 23 nt, synthetic construct
  source 1..23: mol_type = other RNA
ttgggagggggagctgttctcag

SEQ ID NO: 68372 - RNA, 23 nt, synthetic construct
  source 1..23: mol_type = other RNA
tgtgggtgtggtggccgtggtgg

SEQ ID NO: 68373 - RNA, 23 nt, synthetic construct
  source 1..23: mol_type = other RNA
gactgtgggtgtggtggccgtgg

SEQ ID NO: 68374 - RNA, 23 nt, synthetic construct
  source 1..23: mol_type = other RNA
gtgactgtgggtgtggtggccgt

SEQ ID NO: 68375 - RNA, 23 nt, synthetic construct
  source 1..23: mol_type = other RNA
tggtgactgtgggtgtggtggcc

SEQ ID NO: 68376 - RNA, 23 nt, synthetic construct
  source 1..23: mol_type = other RNA
ggagctggtgactgtgggtgtgg

SEQ ID NO: 68377 - RNA, 23 nt, synthetic construct
  source 1..23: mol_type = other RNA
ttggagctggtgactgtgggtgt

SEQ ID NO: 68378 - RNA, 23 nt, synthetic construct
  source 1..23: mol_type = other RNA
tttggagctggtgactgtgggtg

SEQ ID NO: 68379 - RNA, 23 nt, synthetic construct
  source 1..23: mol_type = other RNA
gagtggctttggagctggtgact

SEQ ID NO: 68380 - RNA, 23 nt, synthetic construct
  source 1..23: mol_type = other RNA
ggaggagggagtggctttggagc

SEQ ID NO: 68381 - RNA, 23 nt, synthetic construct
  source 1..23: mol_type = other RNA
tggaggagggagtggctttggag

SEQ ID NO: 68382 - RNA, 23 nt, synthetic construct
  source 1..23: mol_type = other RNA
ggactggaggagggagtggcttt

SEQ ID NO: 68383 - RNA, 23 nt, synthetic construct
  source 1..23: mol_type = other RNA
ccctggactggaggagggagtgg

SEQ ID NO: 68384 - RNA, 23 nt, synthetic construct
  source 1..23: mol_type = other RNA
agggaggaagaggggatgggtgt

SEQ ID NO: 68385 - RNA, 23 nt, synthetic construct
  source 1..23: mol_type = other RNA
tgcccagggaggaagaggggatg

SEQ ID NO: 68386 - RNA, 23 nt, synthetic construct
  source 1..23: mol_type = other RNA
ggtgcccagggaggaagagggga

SEQ ID NO: 68387 - RNA, 23 nt, synthetic construct
  source 1..23: mol_type = other RNA
tggtgcccagggaggaagagggg

SEQ ID NO: 68388 - RNA, 23 nt, synthetic construct
  source 1..23: mol_type = other RNA
gtggtgcccagggaggaagaggg

SEQ ID NO: 68389 - RNA, 23 nt, synthetic construct
  source 1..23: mol_type = other RNA
ggtggtgcccagggaggaagagg

SEQ ID NO: 68390 - RNA, 23 nt, synthetic construct
  source 1..23: mol_type = other RNA
ccaggtggtgcccagggaggaag

SEQ ID NO: 68391 - RNA, 23 nt, synthetic construct
  source 1..23: mol_type = other RNA
ggtccaggtggtgcccagggagg

SEQ ID NO: 68392 - RNA, 23 nt, synthetic construct
  source 1..23: mol_type = other RNA
cgggtccaggtggtgcccaggga

SEQ ID NO: 68393 - RNA, 23 nt, synthetic construct
  source 1..23: mol_type = other RNA
gcgggtccaggtggtgcccaggg

SEQ ID NO: 68394 - RNA, 23 nt, synthetic construct
  source 1..23: mol_type = other RNA
ggcgggtccaggtggtgcccagg

SEQ ID NO: 68395 - RNA, 23 nt, synthetic construct
  source 1..23: mol_type = other RNA
aggcgggtccaggtggtgcccag

SEQ ID NO: 68396 - RNA, 23 nt, synthetic construct
  source 1..23: mol_type = other RNA
tgggtgtggtggtctgtgatagg

SEQ ID NO: 68397 - RNA, 23 nt, synthetic construct
  source 1..23: mol_type = other RNA
tggctgtggacatggtggccgtg

SEQ ID NO: 68398 - RNA, 23 nt, synthetic construct
  source 1..23: mol_type = other RNA
gtgtggctgtggacatggtggcc

SEQ ID NO: 68399 - RNA, 23 nt, synthetic construct
  source 1..23: mol_type = other RNA
agggtgtggctgtggacatggtg

SEQ ID NO: 68400 - RNA, 23 nt, synthetic construct
  source 1..23: mol_type = other RNA
tctggagtggaggagggtgtggc

SEQ ID NO: 68401 - RNA, 23 nt, synthetic construct
  source 1..23: mol_type = other RNA
cactgtggaggtgtgggcagtct

SEQ ID NO: 68402 - RNA, 23 nt, synthetic construct
  source 1..23: mol_type = other RNA
gttgtggtggccgtggcggtaag

SEQ ID NO: 68403 - RNA, 23 nt, synthetic construct
  source 1..23: mol_type = other RNA
aggagggggtggccacagagccg

SEQ ID NO: 68404 - RNA, 23 nt, synthetic construct
  source 1..23: mol_type = other RNA
gaggagggggtggccacagagcc

SEQ ID NO: 68405 - RNA, 23 nt, synthetic construct
  source 1..23: mol_type = other RNA
ggaggagggggtggccacagagc

SEQ ID NO: 68406 - RNA, 23 nt, synthetic construct
  source 1..23: mol_type = other RNA
tggaggagggggtggccacagag

SEQ ID NO: 68407 - RNA, 23 nt, synthetic construct
  source 1..23: mol_type = other RNA
gtggaggagggggtggccacaga

SEQ ID NO: 68408 - RNA, 23 nt, synthetic construct
  source 1..23: mol_type = other RNA
tcctggggtggaggagggggtgg

SEQ ID NO: 68409 - RNA, 23 nt, synthetic construct
  source 1..23: mol_type = other RNA
tgttcctggggtggaggaggggg

SEQ ID NO: 68410 - RNA, 23 nt, synthetic construct
  source 1..23: mol_type = other RNA
gggtggctgtgaagcccgtggtt

SEQ ID NO: 68411 - RNA, 23 nt, synthetic construct
  source 1..23: mol_type = other RNA
aggagggggtggctgtgaagccc

SEQ ID NO: 68412 - RNA, 23 nt, synthetic construct
  source 1..23: mol_type = other RNA
tggaggagggggtggctgtgaag

SEQ ID NO: 68413 - RNA, 23 nt, synthetic construct
  source 1..23: mol_type = other RNA
gccgtccctgggctggaggaggg

SEQ ID NO: 68414 - RNA, 23 nt, synthetic construct
  source 1..23: mol_type = other RNA
tgccgtccctgggctggaggagg

SEQ ID NO: 68415 - RNA, 23 nt, synthetic construct
  source 1..23: mol_type = other RNA
tgtgctgatccacactggaggcg

SEQ ID NO: 68416 - RNA, 23 nt, synthetic construct
  source 1..23: mol_type = other RNA
gatggaggagggggtcaccgtgg

SEQ ID NO: 68417 - RNA, 23 nt, synthetic construct
  source 1..23: mol_type = other RNA
cgggatggaggagggggtcaccg

SEQ ID NO: 68418 - RNA, 23 nt, synthetic construct
  source 1..23: mol_type = other RNA
cccgggatggaggagggggtcac

SEQ ID NO: 68419 - RNA, 23 nt, synthetic construct
  source 1..23: mol_type = other RNA
tccccgggatggaggagggggtc

SEQ ID NO: 68420 - RNA, 23 nt, synthetic construct
  source 1..23: mol_type = other RNA
ggtccccgggatggaggaggggg

SEQ ID NO: 68421 - RNA, 23 nt, synthetic construct
  source 1..23: mol_type = other RNA
ggtggtggtcagcactgtggcgg

SEQ ID NO: 68422 - RNA, 23 nt, synthetic construct
  source 1..23: mol_type = other RNA
ttgtggtggtggtggtcagcact

SEQ ID NO: 68423 - RNA, 23 nt, synthetic construct
  source 1..23: mol_type = other RNA
gttgtggtggtggtggtcagcac

SEQ ID NO: 68424 - RNA, 23 nt, synthetic construct
  source 1..23: mol_type = other RNA
cacagttgtggtggtggtggtca

SEQ ID NO: 68425 - RNA, 23 nt, synthetic construct
  source 1..23: mol_type = other RNA
cagtggccacagttgtggtggtg

SEQ ID NO: 68426 - RNA, 23 nt, synthetic construct
  source 1..23: mol_type = other RNA
tgccatagaaccagtggccacag

SEQ ID NO: 68427 - RNA, 23 nt, synthetic construct
  source 1..23: mol_type = other RNA
tagtggccgtggtggtcagtgat

SEQ ID NO: 68428 - RNA, 23 nt, synthetic construct
  source 1..23: mol_type = other RNA
ggtggtggagccggtggccgtga

SEQ ID NO: 68429 - RNA, 23 nt, synthetic construct
  source 1..23: mol_type = other RNA
ggttggtggtggagccggtggcc

SEQ ID NO: 68430 - RNA, 23 nt, synthetic construct
  source 1..23: mol_type = other RNA
ttgaggaggggttggtggtggag

SEQ ID NO: 68431 - RNA, 23 nt, synthetic construct
  source 1..23: mol_type = other RNA
agttgaggaggggttggtggtgg

SEQ ID NO: 68432 - RNA, 23 nt, synthetic construct
  source 1..23: mol_type = other RNA
aggagttgaggaggggttggtgg

SEQ ID NO: 68433 - RNA, 23 nt, synthetic construct
  source 1..23: mol_type = other RNA
ctggggggatgggagttgtccca

SEQ ID NO: 68434 - RNA, 23 nt, synthetic construct
  source 1..23: mol_type = other RNA
cactggggggatgggagttgtcc

SEQ ID NO: 68435 - RNA, 23 nt, synthetic construct
  source 1..23: mol_type = other RNA
tcagcactggggggatgggagtt

SEQ ID NO: 68436 - RNA, 23 nt, synthetic construct
  source 1..23: mol_type = other RNA
gtggtggtcagcactggggggat

SEQ ID NO: 68437 - RNA, 23 nt, synthetic construct
  source 1..23: mol_type = other RNA
cggtggtggtcagcactgggggg

SEQ ID NO: 68438 - RNA, 23 nt, synthetic construct
  source 1..23: mol_type = other RNA
gtggtggcggtggtggtcagcac

SEQ ID NO: 68439 - RNA, 23 nt, synthetic construct
  source 1..23: mol_type = other RNA
aggtgtggtggcggtggtggtca

SEQ ID NO: 68440 - RNA, 23 nt, synthetic construct
  source 1..23: mol_type = other RNA
ctgcaggtgtggtggcggtggtg

SEQ ID NO: 68441 - RNA, 23 nt, synthetic construct
  source 1..23: mol_type = other RNA
ggctgcaggtgtggtggcggtgg

SEQ ID NO: 68442 - RNA, 23 nt, synthetic construct
  source 1..23: mol_type = other RNA
tggctgcaggtgtggtggcggtg

SEQ ID NO: 68443 - RNA, 23 nt, synthetic construct
  source 1..23: mol_type = other RNA
gttgctggtggctgcaggtgtgg

SEQ ID NO: 68444 - RNA, 23 nt, synthetic construct
  source 1..23: mol_type = other RNA
gtgttgctggtggctgcaggtgt

SEQ ID NO: 68445 - RNA, 23 nt, synthetic construct
  source 1..23: mol_type = other RNA
ctgtgttgctggtggctgcaggt

SEQ ID NO: 68446 - RNA, 23 nt, synthetic construct
  source 1..23: mol_type = other RNA
tcactgtgttgctggtggctgca

SEQ ID NO: 68447 - RNA, 23 nt, synthetic construct
  source 1..23: mol_type = other RNA
agtcactgtgttgctggtggctg

SEQ ID NO: 68448 - RNA, 23 nt, synthetic construct
  source 1..23: mol_type = other RNA
tagggcagaggagggagtcactg

SEQ ID NO: 68449 - RNA, 23 nt, synthetic construct
  source 1..23: mol_type = other RNA
cggcactgggggtgtgtgggtgg

SEQ ID NO: 68450 - RNA, 23 nt, synthetic construct
  source 1..23: mol_type = other RNA
ttcggcactgggggtgtgtgggt

SEQ ID NO: 68451 - RNA, 23 nt, synthetic construct
  source 1..23: mol_type = other RNA
tgtgtggtggccatggtgttcgg

SEQ ID NO: 68452 - RNA, 23 nt, synthetic construct
  source 1..23: mol_type = other RNA
gactgctggggggcagggatcgc

SEQ ID NO: 68453 - RNA, 23 nt, synthetic construct
  source 1..23: mol_type = other RNA
gggactgctggggggcagggatc

SEQ ID NO: 68454 - RNA, 23 nt, synthetic construct
  source 1..23: mol_type = other RNA
ggggactgctggggggcagggat

SEQ ID NO: 68455 - RNA, 23 nt, synthetic construct
  source 1..23: mol_type = other RNA
tgtggggactgctggggggcagg

SEQ ID NO: 68456 - RNA, 23 nt, synthetic construct
  source 1..23: mol_type = other RNA
agggctggaaagggctggagtcg

SEQ ID NO: 68457 - RNA, 23 nt, synthetic construct
  source 1..23: mol_type = other RNA
gagggctggaaagggctggagtc

SEQ ID NO: 68458 - RNA, 23 nt, synthetic construct
  source 1..23: mol_type = other RNA
tccctggagaagggggtgactcg

SEQ ID NO: 68459 - RNA, 23 nt, synthetic construct
  source 1..23: mol_type = other RNA
gtccctggagaagggggtgactc

SEQ ID NO: 68460 - RNA, 23 nt, synthetic construct
  source 1..23: mol_type = other RNA
cgtccctggagaagggggtgact

SEQ ID NO: 68461 - RNA, 23 nt, synthetic construct
  source 1..23: mol_type = other RNA
tcgtccctggagaagggggtgac

SEQ ID NO: 68462 - RNA, 23 nt, synthetic construct
  source 1..23: mol_type = other RNA
ggtcgtccctggagaagggggtg

SEQ ID NO: 68463 - RNA, 23 nt, synthetic construct
  source 1..23: mol_type = other RNA
ggtggtcgtccctggagaagggg

SEQ ID NO: 68464 - RNA, 23 nt, synthetic construct
  source 1..23: mol_type = other RNA
tggtgtggcccggggtggtcgtc

SEQ ID NO: 68465 - RNA, 23 nt, synthetic construct
  source 1..23: mol_type = other RNA
aggtggccgtggtgtggcccggg

SEQ ID NO: 68466 - RNA, 23 nt, synthetic construct
  source 1..23: mol_type = other RNA
cctggaggtggccgtggtgtggc

SEQ ID NO: 68467 - RNA, 23 nt, synthetic construct
  source 1..23: mol_type = other RNA
tggctgtggtcctggaggtggcc

SEQ ID NO: 68468 - RNA, 23 nt, synthetic construct
  source 1..23: mol_type = other RNA
ccgtggctgtggtcctggaggtg

SEQ ID NO: 68469 - RNA, 23 nt, synthetic construct
  source 1..23: mol_type = other RNA
tgtggccgtggctgtggtcctgg

SEQ ID NO: 68470 - RNA, 23 nt, synthetic construct
  source 1..23: mol_type = other RNA
ggtgtggccgtggctgtggtcct

SEQ ID NO: 68471 - RNA, 23 nt, synthetic construct
  source 1..23: mol_type = other RNA
gggtgtggccgtggctgtggtcc

SEQ ID NO: 68472 - RNA, 23 nt, synthetic construct
  source 1..23: mol_type = other RNA
ctgggtgtggccgtggctgtggt

SEQ ID NO: 68473 - RNA, 23 nt, synthetic construct
  source 1..23: mol_type = other RNA
gctgggtgtggccgtggctgtgg

SEQ ID NO: 68474 - RNA, 23 nt, synthetic construct
  source 1..23: mol_type = other RNA
tgctgggtgtggccgtggctgtg

SEQ ID NO: 68475 - RNA, 23 nt, synthetic construct
  source 1..23: mol_type = other RNA
ttgctgggtgtggccgtggctgt

SEQ ID NO: 68476 - RNA, 23 nt, synthetic construct
  source 1..23: mol_type = other RNA
cttgctgggtgtggccgtggctg

SEQ ID NO: 68477 - RNA, 23 nt, synthetic construct
  source 1..23: mol_type = other RNA
acactggggctcacagcccatgg

SEQ ID NO: 68478 - RNA, 23 nt, synthetic construct
  source 1..23: mol_type = other RNA
gtagtccagccactctgaccagg

SEQ ID NO: 68479 - RNA, 23 nt, synthetic construct
  source 1..23: mol_type = other RNA
agacggcccctccggccgcacgg

SEQ ID NO: 68480 - RNA, 23 nt, synthetic construct
  source 1..23: mol_type = other RNA
ccaggctgggcctgggcacggca

SEQ ID NO: 68481 - RNA, 23 nt, synthetic construct
  source 1..23: mol_type = other RNA
aggccaaagtccaggctgcattc

SEQ ID NO: 68482 - RNA, 23 nt, synthetic construct
  source 1..23: mol_type = other RNA
caggccaaagtccaggctgcatt

SEQ ID NO: 68483 - RNA, 23 nt, synthetic construct
  source 1..23: mol_type = other RNA
gaccaggccaaagtccaggctgc

SEQ ID NO: 68484 - RNA, 23 nt, synthetic construct
  source 1..23: mol_type = other RNA
acggttcctgcagaccaggccaa

SEQ ID NO: 68485 - RNA, 23 nt, synthetic construct
  source 1..23: mol_type = other RNA
gtggaggagggcatggccgtaga

SEQ ID NO: 68486 - RNA, 23 nt, synthetic construct
  source 1..23: mol_type = other RNA
ggagtggaggagggcatggccgt

SEQ ID NO: 68487 - RNA, 23 nt, synthetic construct
  source 1..23: mol_type = other RNA
tggatccagtggactcagtcgta

SEQ ID NO: 68488 - RNA, 23 nt, synthetic construct
  source 1..23: mol_type = other RNA
tccctggggtggaggacggggtg

SEQ ID NO: 68489 - RNA, 23 nt, synthetic construct
  source 1..23: mol_type = other RNA
gtccctggggtggaggacggggt

SEQ ID NO: 68490 - RNA, 23 nt, synthetic construct
  source 1..23: mol_type = other RNA
tggtccctggggtggaggacggg

SEQ ID NO: 68491 - RNA, 23 nt, synthetic construct
  source 1..23: mol_type = other RNA
gtggtccctggggtggaggacgg

SEQ ID NO: 68492 - RNA, 23 nt, synthetic construct
  source 1..23: mol_type = other RNA
aggtggtccctggggtggaggac

SEQ ID NO: 68493 - RNA, 23 nt, synthetic construct
  source 1..23: mol_type = other RNA
caggtggtccctggggtggagga

SEQ ID NO: 68494 - RNA, 23 nt, synthetic construct
  source 1..23: mol_type = other RNA
ccaggtggtccctggggtggagg

SEQ ID NO: 68495 - RNA, 23 nt, synthetic construct
  source 1..23: mol_type = other RNA
tccaggtggtccctggggtggag

SEQ ID NO: 68496 - RNA, 23 nt, synthetic construct
  source 1..23: mol_type = other RNA
cctgggtggaggaggcggtggcc

SEQ ID NO: 68497 - RNA, 23 nt, synthetic construct
  source 1..23: mol_type = other RNA
agcagttgcctgggtggaggagg

SEQ ID NO: 68498 - RNA, 23 nt, synthetic construct
  source 1..23: mol_type = other RNA
ggagctggtgactgtgggtgtcg

SEQ ID NO: 68499 - RNA, 23 nt, synthetic construct
  source 1..23: mol_type = other RNA
ttggagctggtgactgtgggtgt

SEQ ID NO: 68500 - RNA, 23 nt, synthetic construct
  source 1..23: mol_type = other RNA
tttggagctggtgactgtgggtg

SEQ ID NO: 68501 - RNA, 23 nt, synthetic construct
  source 1..23: mol_type = other RNA
gagtggctttggagctggtgact

SEQ ID NO: 68502 - RNA, 23 nt, synthetic construct
  source 1..23: mol_type = other RNA
agaagggagtggctttggagctg

SEQ ID NO: 68503 - RNA, 23 nt, synthetic construct
  source 1..23: mol_type = other RNA
ggagaagggagtggctttggagc

SEQ ID NO: 68504 - RNA, 23 nt, synthetic construct
  source 1..23: mol_type = other RNA
gaggaggaggggatggctgtaaa

SEQ ID NO: 68505 - RNA, 23 nt, synthetic construct
  source 1..23: mol_type = other RNA
ggaggaggaggggatggctgtaa

SEQ ID NO: 68506 - RNA, 23 nt, synthetic construct
  source 1..23: mol_type = other RNA
tggtgcccagggaggaggagggg

SEQ ID NO: 68507 - RNA, 23 nt, synthetic construct
  source 1..23: mol_type = other RNA
ccaggtggtgcccagggaggagg

SEQ ID NO: 68508 - RNA, 23 nt, synthetic construct
  source 1..23: mol_type = other RNA
ggtccaggtggtgcccagggagg

SEQ ID NO: 68509 - RNA, 23 nt, synthetic construct
  source 1..23: mol_type = other RNA
cgggtccaggtggtgcccaggga

SEQ ID NO: 68510 - RNA, 23 nt, synthetic construct
  source 1..23: mol_type = other RNA
gcgggtccaggtggtgcccaggg

SEQ ID NO: 68511 - RNA, 23 nt, synthetic construct
  source 1..23: mol_type = other RNA
ggcgggtccaggtggtgcccagg

SEQ ID NO: 68512 - RNA, 23 nt, synthetic construct
  source 1..23: mol_type = other RNA
aggcgggtccaggtggtgcccag

SEQ ID NO: 68513 - RNA, 23 nt, synthetic construct
  source 1..23: mol_type = other RNA
tgggtgtggtggtctgtgatagg

SEQ ID NO: 68514 - RNA, 23 nt, synthetic construct
  source 1..23: mol_type = other RNA
tggctgtggacatggtggccgtg

SEQ ID NO: 68515 - RNA, 23 nt, synthetic construct
  source 1..23: mol_type = other RNA
gtgtggctgtggacatggtggcc

SEQ ID NO: 68516 - RNA, 23 nt, synthetic construct
  source 1..23: mol_type = other RNA
agggtgtggctgtggacatggtg

SEQ ID NO: 68517 - RNA, 23 nt, synthetic construct
  source 1..23: mol_type = other RNA
tctggagtggaggagggtgtggc

SEQ ID NO: 68518 - RNA, 23 nt, synthetic construct
  source 1..23: mol_type = other RNA
aggagggggtggccacagagccg

SEQ ID NO: 68519 - RNA, 23 nt, synthetic construct
  source 1..23: mol_type = other RNA
gaggagggggtggccacagagcc

SEQ ID NO: 68520 - RNA, 23 nt, synthetic construct
  source 1..23: mol_type = other RNA
ggaggagggggtggccacagagc

SEQ ID NO: 68521 - RNA, 23 nt, synthetic construct
  source 1..23: mol_type = other RNA
tggaggagggggtggccacagag

SEQ ID NO: 68522 - RNA, 23 nt, synthetic construct
  source 1..23: mol_type = other RNA
gtggaggagggggtggccacaga

SEQ ID NO: 68523 - RNA, 23 nt, synthetic construct
  source 1..23: mol_type = other RNA
tcctggggtggaggagggggtgg

SEQ ID NO: 68524 - RNA, 23 nt, synthetic construct
  source 1..23: mol_type = other RNA
tgttcctggggtggaggaggggg

SEQ ID NO: 68525 - RNA, 23 nt, synthetic construct
  source 1..23: mol_type = other RNA
gggtggctgtgaagcccgtggtt

SEQ ID NO: 68526 - RNA, 23 nt, synthetic construct
  source 1..23: mol_type = other RNA
aggagggggtggctgtgaagccc

SEQ ID NO: 68527 - RNA, 23 nt, synthetic construct
  source 1..23: mol_type = other RNA
tggaggagggggtggctgtgaag

SEQ ID NO: 68528 - RNA, 23 nt, synthetic construct
  source 1..23: mol_type = other RNA
gccgtccctgggctggaggaggg

SEQ ID NO: 68529 - RNA, 23 nt, synthetic construct
  source 1..23: mol_type = other RNA
tgccgtccctgggctggaggagg

SEQ ID NO: 68530 - RNA, 23 nt, synthetic construct
  source 1..23: mol_type = other RNA
gtggaacctctggttgtgggtgt

SEQ ID NO: 68531 - RNA, 23 nt, synthetic construct
  source 1..23: mol_type = other RNA
cgtggaacctctggttgtgggtg

SEQ ID NO: 68532 - RNA, 23 nt, synthetic construct
  source 1..23: mol_type = other RNA
gatggaggagggggtcaccgtgg

SEQ ID NO: 68533 - RNA, 23 nt, synthetic construct
  source 1..23: mol_type = other RNA
cgggatggaggagggggtcaccg

SEQ ID NO: 68534 - RNA, 23 nt, synthetic construct
  source 1..23: mol_type = other RNA
cccgggatggaggagggggtcac

SEQ ID NO: 68535 - RNA, 23 nt, synthetic construct
  source 1..23: mol_type = other RNA
tccccgggatggaggagggggtc

SEQ ID NO: 68536 - RNA, 23 nt, synthetic construct
  source 1..23: mol_type = other RNA
ggtccccgggatggaggaggggg

SEQ ID NO: 68537 - RNA, 23 nt, synthetic construct
  source 1..23: mol_type = other RNA
tggtggtcagcactgtgggggtg

SEQ ID NO: 68538 - RNA, 23 nt, synthetic construct
  source 1..23: mol_type = other RNA
gtggtggtcagcactgtgggggt

SEQ ID NO: 68539 - RNA, 23 nt, synthetic construct
  source 1..23: mol_type = other RNA
ggtggtggtcagcactgtggggg

SEQ ID NO: 68540 - RNA, 23 nt, synthetic construct
  source 1..23: mol_type = other RNA
ttgtggtggtggtggtcagcact

SEQ ID NO: 68541 - RNA, 23 nt, synthetic construct
  source 1..23: mol_type = other RNA
gttgtggtggtggtggtcagcac

SEQ ID NO: 68542 - RNA, 23 nt, synthetic construct
  source 1..23: mol_type = other RNA
cacagttgtggtggtggtggtca

SEQ ID NO: 68543 - RNA, 23 nt, synthetic construct
  source 1..23: mol_type = other RNA
cagtggccacagttgtggtggtg

SEQ ID NO: 68544 - RNA, 23 nt, synthetic construct
  source 1..23: mol_type = other RNA
tgccatagaaccagtggccacag

SEQ ID NO: 68545 - RNA, 23 nt, synthetic construct
  source 1..23: mol_type = other RNA
tagtggccgtggtggtcagtgat

SEQ ID NO: 68546 - RNA, 23 nt, synthetic construct
  source 1..23: mol_type = other RNA
ggtggtggagccggtggccgtga

SEQ ID NO: 68547 - RNA, 23 nt, synthetic construct
  source 1..23: mol_type = other RNA
ggttggtggtggagccggtggcc

SEQ ID NO: 68548 - RNA, 23 nt, synthetic construct
  source 1..23: mol_type = other RNA
ttgaggaggggttggtggtggag

SEQ ID NO: 68549 - RNA, 23 nt, synthetic construct
  source 1..23: mol_type = other RNA
agttgaggaggggttggtggtgg

SEQ ID NO: 68550 - RNA, 23 nt, synthetic construct
  source 1..23: mol_type = other RNA
tggagttgaggaggggttggtgg

SEQ ID NO: 68551 - RNA, 23 nt, synthetic construct
  source 1..23: mol_type = other RNA
ctggagttgaggaggggttggtg

SEQ ID NO: 68552 - RNA, 23 nt, synthetic construct
  source 1..23: mol_type = other RNA
tccctggagttgaggaggggttg

SEQ ID NO: 68553 - RNA, 23 nt, synthetic construct
  source 1..23: mol_type = other RNA
tgtccctggagttgaggaggggt

SEQ ID NO: 68554 - RNA, 23 nt, synthetic construct
  source 1..23: mol_type = other RNA
gttgtccctggagttgaggaggg

SEQ ID NO: 68555 - RNA, 23 nt, synthetic construct
  source 1..23: mol_type = other RNA
gtggtggtcagcactggggggat

SEQ ID NO: 68556 - RNA, 23 nt, synthetic construct
  source 1..23: mol_type = other RNA
cggtggtggtcagcactgggggg

SEQ ID NO: 68557 - RNA, 23 nt, synthetic construct
  source 1..23: mol_type = other RNA
gtggtggcggtggtggtcagcac

SEQ ID NO: 68558 - RNA, 23 nt, synthetic construct
  source 1..23: mol_type = other RNA
aggtgtggtggcggtggtggtca

SEQ ID NO: 68559 - RNA, 23 nt, synthetic construct
  source 1..23: mol_type = other RNA
ctgcaggtgtggtggcggtggtg

SEQ ID NO: 68560 - RNA, 23 nt, synthetic construct
  source 1..23: mol_type = other RNA
ggctgcaggtgtggtggcggtgg

SEQ ID NO: 68561 - RNA, 23 nt, synthetic construct
  source 1..23: mol_type = other RNA
tggctgcaggtgtggtggcggtg

SEQ ID NO: 68562 - RNA, 23 nt, synthetic construct
  source 1..23: mol_type = other RNA
gctgctggtggctgcaggtgtgg

SEQ ID NO: 68563 - RNA, 23 nt, synthetic construct
  source 1..23: mol_type = other RNA
actgtgctgctggtggctgcagg

SEQ ID NO: 68564 - RNA, 23 nt, synthetic construct
  source 1..23: mol_type = other RNA
gtcactgtgctgctggtggctgc

SEQ ID NO: 68565 - RNA, 23 nt, synthetic construct
  source 1..23: mol_type = other RNA
gaggagggagtcactgtgctgct

SEQ ID NO: 68566 - RNA, 23 nt, synthetic construct
  source 1..23: mol_type = other RNA
agaggagggagtcactgtgctgc

SEQ ID NO: 68567 - RNA, 23 nt, synthetic construct
  source 1..23: mol_type = other RNA
tagggcagaggagggagtcactg

SEQ ID NO: 68568 - RNA, 23 nt, synthetic construct
  source 1..23: mol_type = other RNA
cggcactgggggtgtgtgggtgg

SEQ ID NO: 68569 - RNA, 23 nt, synthetic construct
  source 1..23: mol_type = other RNA
ttcggcactgggggtgtgtgggt

SEQ ID NO: 68570 - RNA, 23 nt, synthetic construct
  source 1..23: mol_type = other RNA
tgtgtggtggccgtggtgttcgg

SEQ ID NO: 68571 - RNA, 23 nt, synthetic construct
  source 1..23: mol_type = other RNA
tgtggggactgctgggggacagg

SEQ ID NO: 68572 - RNA, 23 nt, synthetic construct
  source 1..23: mol_type = other RNA
aaggtgcctgaggtggccgaagt

SEQ ID NO: 68573 - RNA, 23 nt, synthetic construct
  source 1..23: mol_type = other RNA
cccaaggtgcctgaggtggccga

SEQ ID NO: 68574 - RNA, 23 nt, synthetic construct
  source 1..23: mol_type = other RNA
tggtgcccaaggtgcctgaggtg

SEQ ID NO: 68575 - RNA, 23 nt, synthetic construct
  source 1..23: mol_type = other RNA
gtgggtggtgcccaaggtgcctg

SEQ ID NO: 68576 - RNA, 23 nt, synthetic construct
  source 1..23: mol_type = other RNA
tgctggggtgtgggaagtccccg

SEQ ID NO: 68577 - RNA, 23 nt, synthetic construct
  source 1..23: mol_type = other RNA
gttgctgctggggtgtgggaagt

SEQ ID NO: 68578 - RNA, 23 nt, synthetic construct
  source 1..23: mol_type = other RNA
gctagggtgagggctggacaggg

SEQ ID NO: 68579 - RNA, 23 nt, synthetic construct
  source 1..23: mol_type = other RNA
tccctggagaagggggtgactcg

SEQ ID NO: 68580 - RNA, 23 nt, synthetic construct
  source 1..23: mol_type = other RNA
gtccctggagaagggggtgactc

SEQ ID NO: 68581 - RNA, 23 nt, synthetic construct
  source 1..23: mol_type = other RNA
cgtccctggagaagggggtgact

SEQ ID NO: 68582 - RNA, 23 nt, synthetic construct
  source 1..23: mol_type = other RNA
tcgtccctggagaagggggtgac

SEQ ID NO: 68583 - RNA, 23 nt, synthetic construct
  source 1..23: mol_type = other RNA
ggtcgtccctggagaagggggtg

SEQ ID NO: 68584 - RNA, 23 nt, synthetic construct
  source 1..23: mol_type = other RNA
ggtggtcgtccctggagaagggg

SEQ ID NO: 68585 - RNA, 23 nt, synthetic construct
  source 1..23: mol_type = other RNA
tggtgtggcccggggtggtcgtc

SEQ ID NO: 68586 - RNA, 23 nt, synthetic construct
  source 1..23: mol_type = other RNA
ggaggtggccctggtgtggcccg

SEQ ID NO: 68587 - RNA, 23 nt, synthetic construct
  source 1..23: mol_type = other RNA
tggaggtggccctggtgtggccc

SEQ ID NO: 68588 - RNA, 23 nt, synthetic construct
  source 1..23: mol_type = other RNA
ctggaggtggccctggtgtggcc

SEQ ID NO: 68589 - RNA, 23 nt, synthetic construct
  source 1..23: mol_type = other RNA
tcctggaggtggccctggtgtgg

SEQ ID NO: 68590 - RNA, 23 nt, synthetic construct
  source 1..23: mol_type = other RNA
gtcctggaggtggccctggtgtg

SEQ ID NO: 68591 - RNA, 23 nt, synthetic construct
  source 1..23: mol_type = other RNA
ggtcctggaggtggccctggtgt

SEQ ID NO: 68592 - RNA, 23 nt, synthetic construct
  source 1..23: mol_type = other RNA
tggtcctggaggtggccctggtg

SEQ ID NO: 68593 - RNA, 23 nt, synthetic construct
  source 1..23: mol_type = other RNA
ccgtggtcctggaggtggccctg

SEQ ID NO: 68594 - RNA, 23 nt, synthetic construct
  source 1..23: mol_type = other RNA
tgggtgtggccgtggccgtggtc

SEQ ID NO: 68595 - RNA, 23 nt, synthetic construct
  source 1..23: mol_type = other RNA
ctgggtgtggccgtggccgtggt

SEQ ID NO: 68596 - RNA, 23 nt, synthetic construct
  source 1..23: mol_type = other RNA
gctgggtgtggccgtggccgtgg

SEQ ID NO: 68597 - RNA, 23 nt, synthetic construct
  source 1..23: mol_type = other RNA
ttgctgggtgtggccgtggccgt

SEQ ID NO: 68598 - RNA, 23 nt, synthetic construct
  source 1..23: mol_type = other RNA
cttgctgggtgtggccgtggccg

SEQ ID NO: 68599 - RNA, 23 nt, synthetic construct
  source 1..23: mol_type = other RNA
acactggggctcacagcccatgg

SEQ ID NO: 68600 - RNA, 23 nt, synthetic construct
  source 1..23: mol_type = other RNA
gtagtccagccactctgaccagg

SEQ ID NO: 68601 - RNA, 23 nt, synthetic construct
  source 1..23: mol_type = other RNA
agacggcccctccggccgcacgg

SEQ ID NO: 68602 - RNA, 23 nt, synthetic construct
  source 1..23: mol_type = other RNA
ccaggctgggcctgggcacggca

SEQ ID NO: 68603 - RNA, 23 nt, synthetic construct
  source 1..23: mol_type = other RNA
aggccaaagtccaggctgcattc

SEQ ID NO: 68604 - RNA, 23 nt, synthetic construct
  source 1..23: mol_type = other RNA
caggccaaagtccaggctgcatt

SEQ ID NO: 68605 - RNA, 23 nt, synthetic construct
  source 1..23: mol_type = other RNA
gaccaggccaaagtccaggctgc

SEQ ID NO: 68606 - RNA, 23 nt, synthetic construct
  source 1..23: mol_type = other RNA
acggttcctgcagaccaggccaa

SEQ ID NO: 68607 - RNA, 23 nt, synthetic construct
  source 1..23: mol_type = other RNA
cgtggccgtagagctggtggccg

SEQ ID NO: 68608 - RNA, 23 nt, synthetic construct
  source 1..23: mol_type = other RNA
gatccaggtcgtccctggagtgg

SEQ ID NO: 68609 - RNA, 23 nt, synthetic construct
  source 1..23: mol_type = other RNA
gtggctgctgtggtctgctctgt

SEQ ID NO: 68610 - RNA, 23 nt, synthetic construct
  source 1..23: mol_type = other RNA
tagtggctgctgtggtctgctct

SEQ ID NO: 68611 - RNA, 23 nt, synthetic construct
  source 1..23: mol_type = other RNA
ttgggagggggagctgttcccgg

SEQ ID NO: 68612 - RNA, 23 nt, synthetic construct
  source 1..23: mol_type = other RNA
tgtggtggccgtgctggtcagca

SEQ ID NO: 68613 - RNA, 23 nt, synthetic construct
  source 1..23: mol_type = other RNA
tgggtgtggtggccgtgctggtc

SEQ ID NO: 68614 - RNA, 23 nt, synthetic construct
  source 1..23: mol_type = other RNA
tgtgggtgtggtggccgtgctgg

SEQ ID NO: 68615 - RNA, 23 nt, synthetic construct
  source 1..23: mol_type = other RNA
gaggaggaagtggctttggaact

SEQ ID NO: 68616 - RNA, 23 nt, synthetic construct
  source 1..23: mol_type = other RNA
actggaggaggaagtggctttgg

SEQ ID NO: 68617 - RNA, 23 nt, synthetic construct
  source 1..23: mol_type = other RNA
ggactggaggaggaagtggcttt

SEQ ID NO: 68618 - RNA, 23 nt, synthetic construct
  source 1..23: mol_type = other RNA
tggactggaggaggaagtggctt

SEQ ID NO: 68619 - RNA, 23 nt, synthetic construct
  source 1..23: mol_type = other RNA
ttggactggaggaggaagtggct

SEQ ID NO: 68620 - RNA, 23 nt, synthetic construct
  source 1..23: mol_type = other RNA
ccttggactggaggaggaagtgg

SEQ ID NO: 68621 - RNA, 23 nt, synthetic construct
  source 1..23: mol_type = other RNA
gtccttggactggaggaggaagt

SEQ ID NO: 68622 - RNA, 23 nt, synthetic construct
  source 1..23: mol_type = other RNA
agggtgaaggaggggatgggtgt

SEQ ID NO: 68623 - RNA, 23 nt, synthetic construct
  source 1..23: mol_type = other RNA
ggtcccaagggtgaaggagggga

SEQ ID NO: 68624 - RNA, 23 nt, synthetic construct
  source 1..23: mol_type = other RNA
gtggtcccaagggtgaaggaggg

SEQ ID NO: 68625 - RNA, 23 nt, synthetic construct
  source 1..23: mol_type = other RNA
ctgttctgggagggtcccggtgg

SEQ ID NO: 68626 - RNA, 23 nt, synthetic construct
  source 1..23: mol_type = other RNA
gccatgggtgtggtggtctgttc

SEQ ID NO: 68627 - RNA, 23 nt, synthetic construct
  source 1..23: mol_type = other RNA
gtggacatggtggccatgggtgt

SEQ ID NO: 68628 - RNA, 23 nt, synthetic construct
  source 1..23: mol_type = other RNA
tctccggagtggaggaggggtgg

SEQ ID NO: 68629 - RNA, 23 nt, synthetic construct
  source 1..23: mol_type = other RNA
cactgtggaggtgtgggtggtct

SEQ ID NO: 68630 - RNA, 23 nt, synthetic construct
  source 1..23: mol_type = other RNA
cgtggtggccttcgtggtcagca

SEQ ID NO: 68631 - RNA, 23 nt, synthetic construct
  source 1..23: mol_type = other RNA
ggacatggaactggtggcccttg

SEQ ID NO: 68632 - RNA, 23 nt, synthetic construct
  source 1..23: mol_type = other RNA
ggaggagggggtggacatggaac

SEQ ID NO: 68633 - RNA, 23 nt, synthetic construct
  source 1..23: mol_type = other RNA
tggaggagggggtggacatggaa

SEQ ID NO: 68634 - RNA, 23 nt, synthetic construct
  source 1..23: mol_type = other RNA
gtggaggagggggtggacatgga

SEQ ID NO: 68635 - RNA, 23 nt, synthetic construct
  source 1..23: mol_type = other RNA
ccggagtggaggagggggtggac

SEQ ID NO: 68636 - RNA, 23 nt, synthetic construct
  source 1..23: mol_type = other RNA
ggctgcagttgtagtggctgctg

SEQ ID NO: 68637 - RNA, 23 nt, synthetic construct
  source 1..23: mol_type = other RNA
tggctgcagttgtagtggctgct

SEQ ID NO: 68638 - RNA, 23 nt, synthetic construct
  source 1..23: mol_type = other RNA
gggccagtggctgcagttgtagt

SEQ ID NO: 68639 - RNA, 23 nt, synthetic construct
  source 1..23: mol_type = other RNA
ggggccagtggctgcagttgtag

SEQ ID NO: 68640 - RNA, 23 nt, synthetic construct
  source 1..23: mol_type = other RNA
gccgtggggccagtggctgcagt

SEQ ID NO: 68641 - RNA, 23 nt, synthetic construct
  source 1..23: mol_type = other RNA
ggtggccgtggggccagtggctg

SEQ ID NO: 68642 - RNA, 23 nt, synthetic construct
  source 1..23: mol_type = other RNA
gacggggtggccgtggggccagt

SEQ ID NO: 68643 - RNA, 23 nt, synthetic construct
  source 1..23: mol_type = other RNA
tccctggggtggaggacggggtg

SEQ ID NO: 68644 - RNA, 23 nt, synthetic construct
  source 1..23: mol_type = other RNA
gtccctggggtggaggacggggt

SEQ ID NO: 68645 - RNA, 23 nt, synthetic construct
  source 1..23: mol_type = other RNA
tggtccctggggtggaggacggg

SEQ ID NO: 68646 - RNA, 23 nt, synthetic construct
  source 1..23: mol_type = other RNA
gtggtccctggggtggaggacgg

SEQ ID NO: 68647 - RNA, 23 nt, synthetic construct
  source 1..23: mol_type = other RNA
aggtggtccctggggtggaggac

SEQ ID NO: 68648 - RNA, 23 nt, synthetic construct
  source 1..23: mol_type = other RNA
caggtggtccctggggtggagga

SEQ ID NO: 68649 - RNA, 23 nt, synthetic construct
  source 1..23: mol_type = other RNA
ccaggtggtccctggggtggagg

SEQ ID NO: 68650 - RNA, 23 nt, synthetic construct
  source 1..23: mol_type = other RNA
tccaggtggtccctggggtggag

SEQ ID NO: 68651 - RNA, 23 nt, synthetic construct
  source 1..23: mol_type = other RNA
cggtggctgtagtgctgggctct

SEQ ID NO: 68652 - RNA, 23 nt, synthetic construct
  source 1..23: mol_type = other RNA
cccgggtggaggaggcggtggcc

SEQ ID NO: 68653 - RNA, 23 nt, synthetic construct
  source 1..23: mol_type = other RNA
tgcccgggtggaggaggcggtgg

SEQ ID NO: 68654 - RNA, 23 nt, synthetic construct
  source 1..23: mol_type = other RNA
ttgcccgggtggaggaggcggtg

SEQ ID NO: 68655 - RNA, 23 nt, synthetic construct
  source 1..23: mol_type = other RNA
tgtggtggccgtgctggtcagca

SEQ ID NO: 68656 - RNA, 23 nt, synthetic construct
  source 1..23: mol_type = other RNA
tgggtgtggtggccgtgctggtc

SEQ ID NO: 68657 - RNA, 23 nt, synthetic construct
  source 1..23: mol_type = other RNA
tgtgggtgtggtggccgtgctgg

SEQ ID NO: 68658 - RNA, 23 nt, synthetic construct
  source 1..23: mol_type = other RNA
gactgtgggtgtggtggccgtgc

SEQ ID NO: 68659 - RNA, 23 nt, synthetic construct
  source 1..23: mol_type = other RNA
atgactgtgggtgtggtggccgt

SEQ ID NO: 68660 - RNA, 23 nt, synthetic construct
  source 1..23: mol_type = other RNA
ggagctgatgactgtgggtgtgg

SEQ ID NO: 68661 - RNA, 23 nt, synthetic construct
  source 1..23: mol_type = other RNA
ctggagctgatgactgtgggtgt

SEQ ID NO: 68662 - RNA, 23 nt, synthetic construct
  source 1..23: mol_type = other RNA
tctggagctgatgactgtgggtg

SEQ ID NO: 68663 - RNA, 23 nt, synthetic construct
  source 1..23: mol_type = other RNA
ggctctggagctgatgactgtgg

SEQ ID NO: 68664 - RNA, 23 nt, synthetic construct
  source 1..23: mol_type = other RNA
gagggagtggctctggagctgat

SEQ ID NO: 68665 - RNA, 23 nt, synthetic construct
  source 1..23: mol_type = other RNA
tggaggagggagtggctctggag

SEQ ID NO: 68666 - RNA, 23 nt, synthetic construct
  source 1..23: mol_type = other RNA
ctggaggagggagtggctctgga

SEQ ID NO: 68667 - RNA, 23 nt, synthetic construct
  source 1..23: mol_type = other RNA
ggactggaggagggagtggctct

SEQ ID NO: 68668 - RNA, 23 nt, synthetic construct
  source 1..23: mol_type = other RNA
ccctggactggaggagggagtgg

SEQ ID NO: 68669 - RNA, 23 nt, synthetic construct
  source 1..23: mol_type = other RNA
ggaagaggggatggctgtaacgc

SEQ ID NO: 68670 - RNA, 23 nt, synthetic construct
  source 1..23: mol_type = other RNA
tgcccagggaggaagaggggatg

SEQ ID NO: 68671 - RNA, 23 nt, synthetic construct
  source 1..23: mol_type = other RNA
ggtgcccagggaggaagagggga

SEQ ID NO: 68672 - RNA, 23 nt, synthetic construct
  source 1..23: mol_type = other RNA
cggtgcccagggaggaagagggg

SEQ ID NO: 68673 - RNA, 23 nt, synthetic construct
  source 1..23: mol_type = other RNA
gcggtgcccagggaggaagaggg

SEQ ID NO: 68674 - RNA, 23 nt, synthetic construct
  source 1..23: mol_type = other RNA
ggcggtgcccagggaggaagagg

SEQ ID NO: 68675 - RNA, 23 nt, synthetic construct
  source 1..23: mol_type = other RNA
aggcggtgcccagggaggaagag

SEQ ID NO: 68676 - RNA, 23 nt, synthetic construct
  source 1..23: mol_type = other RNA
tccaggcggtgcccagggaggaa

SEQ ID NO: 68677 - RNA, 23 nt, synthetic construct
  source 1..23: mol_type = other RNA
tgggtgtggtggtctgtgatagg

SEQ ID NO: 68678 - RNA, 23 nt, synthetic construct
  source 1..23: mol_type = other RNA
tggctgtggacatggtggccgtg

SEQ ID NO: 68679 - RNA, 23 nt, synthetic construct
  source 1..23: mol_type = other RNA
gtgtggctgtggacatggtggcc

SEQ ID NO: 68680 - RNA, 23 nt, synthetic construct
  source 1..23: mol_type = other RNA
agggtgtggctgtggacatggtg

SEQ ID NO: 68681 - RNA, 23 nt, synthetic construct
  source 1..23: mol_type = other RNA
tagaggagggtgtggctgtggac

SEQ ID NO: 68682 - RNA, 23 nt, synthetic construct
  source 1..23: mol_type = other RNA
gagtagaggagggtgtggctgtg

SEQ ID NO: 68683 - RNA, 23 nt, synthetic construct
  source 1..23: mol_type = other RNA
ctggagtagaggagggtgtggct

SEQ ID NO: 68684 - RNA, 23 nt, synthetic construct
  source 1..23: mol_type = other RNA
gttgtggtggtcgtggtggtaag

SEQ ID NO: 68685 - RNA, 23 nt, synthetic construct
  source 1..23: mol_type = other RNA
ggttgtggtggtcgtggtggtaa

SEQ ID NO: 68686 - RNA, 23 nt, synthetic construct
  source 1..23: mol_type = other RNA
tggttgtggtggtcgtggtggta

SEQ ID NO: 68687 - RNA, 23 nt, synthetic construct
  source 1..23: mol_type = other RNA
ctggttgtggtggtcgtggtggt

SEQ ID NO: 68688 - RNA, 23 nt, synthetic construct
  source 1..23: mol_type = other RNA
cctggttgtggtggtcgtggtgg

SEQ ID NO: 68689 - RNA, 23 nt, synthetic construct
  source 1..23: mol_type = other RNA
ggtggccctggttgtggtggtcg

SEQ ID NO: 68690 - RNA, 23 nt, synthetic construct
  source 1..23: mol_type = other RNA
cagagccggtggccctggttgtg

SEQ ID NO: 68691 - RNA, 23 nt, synthetic construct
  source 1..23: mol_type = other RNA
acagagccggtggccctggttgt

SEQ ID NO: 68692 - RNA, 23 nt, synthetic construct
  source 1..23: mol_type = other RNA
aggagggggtggccacagagccg

SEQ ID NO: 68693 - RNA, 23 nt, synthetic construct
  source 1..23: mol_type = other RNA
gaggagggggtggccacagagcc

SEQ ID NO: 68694 - RNA, 23 nt, synthetic construct
  source 1..23: mol_type = other RNA
ggaggagggggtggccacagagc

SEQ ID NO: 68695 - RNA, 23 nt, synthetic construct
  source 1..23: mol_type = other RNA
tggaggagggggtggccacagag

SEQ ID NO: 68696 - RNA, 23 nt, synthetic construct
  source 1..23: mol_type = other RNA
gtggaggagggggtggccacaga

SEQ ID NO: 68697 - RNA, 23 nt, synthetic construct
  source 1..23: mol_type = other RNA
tcctggggtggaggagggggtgg

SEQ ID NO: 68698 - RNA, 23 nt, synthetic construct
  source 1..23: mol_type = other RNA
tgttcctggggtggaggaggggg

SEQ ID NO: 68699 - RNA, 23 nt, synthetic construct
  source 1..23: mol_type = other RNA
tggttgtggtagtcggcactttg

SEQ ID NO: 68700 - RNA, 23 nt, synthetic construct
  source 1..23: mol_type = other RNA
gggtggctgtgaagcccgtggtt

SEQ ID NO: 68701 - RNA, 23 nt, synthetic construct
  source 1..23: mol_type = other RNA
aggagggggtggctgtgaagccc

SEQ ID NO: 68702 - RNA, 23 nt, synthetic construct
  source 1..23: mol_type = other RNA
tggaggagggggtggctgtgaag

SEQ ID NO: 68703 - RNA, 23 nt, synthetic construct
  source 1..23: mol_type = other RNA
gccgtccctgggctggaggaggg

SEQ ID NO: 68704 - RNA, 23 nt, synthetic construct
  source 1..23: mol_type = other RNA
tgccgtccctgggctggaggagg

SEQ ID NO: 68705 - RNA, 23 nt, synthetic construct
  source 1..23: mol_type = other RNA
tgtgctgatccacactggaggcg

SEQ ID NO: 68706 - RNA, 23 nt, synthetic construct
  source 1..23: mol_type = other RNA
gatggaggagggggtcaccgtgg

SEQ ID NO: 68707 - RNA, 23 nt, synthetic construct
  source 1..23: mol_type = other RNA
cgggatggaggagggggtcaccg

SEQ ID NO: 68708 - RNA, 23 nt, synthetic construct
  source 1..23: mol_type = other RNA
cccgggatggaggagggggtcac

SEQ ID NO: 68709 - RNA, 23 nt, synthetic construct
  source 1..23: mol_type = other RNA
tccccgggatggaggagggggtc

SEQ ID NO: 68710 - RNA, 23 nt, synthetic construct
  source 1..23: mol_type = other RNA
ggtccccgggatggaggaggggg

SEQ ID NO: 68711 - RNA, 23 nt, synthetic construct
  source 1..23: mol_type = other RNA
ggtggtggtcagcactgtggcgg

SEQ ID NO: 68712 - RNA, 23 nt, synthetic construct
  source 1..23: mol_type = other RNA
ttgtggtggtggtggtcagcact

SEQ ID NO: 68713 - RNA, 23 nt, synthetic construct
  source 1..23: mol_type = other RNA
gttgtggtggtggtggtcagcac

SEQ ID NO: 68714 - RNA, 23 nt, synthetic construct
  source 1..23: mol_type = other RNA
cacagttgtggtggtggtggtca

SEQ ID NO: 68715 - RNA, 23 nt, synthetic construct
  source 1..23: mol_type = other RNA
cagtggccacagttgtggtggtg

SEQ ID NO: 68716 - RNA, 23 nt, synthetic construct
  source 1..23: mol_type = other RNA
tgccatagaaccagtggccacag

SEQ ID NO: 68717 - RNA, 23 nt, synthetic construct
  source 1..23: mol_type = other RNA
tagtggccgtggtggtcagtgat

SEQ ID NO: 68718 - RNA, 23 nt, synthetic construct
  source 1..23: mol_type = other RNA
ggttggtggtggagccggtggct

SEQ ID NO: 68719 - RNA, 23 nt, synthetic construct
  source 1..23: mol_type = other RNA
ttgaggaggggttggtggtggag

SEQ ID NO: 68720 - RNA, 23 nt, synthetic construct
  source 1..23: mol_type = other RNA
agttgaggaggggttggtggtgg

SEQ ID NO: 68721 - RNA, 23 nt, synthetic construct
  source 1..23: mol_type = other RNA
tggagttgaggaggggttggtgg

SEQ ID NO: 68722 - RNA, 23 nt, synthetic construct
  source 1..23: mol_type = other RNA
ctggagttgaggaggggttggtg

SEQ ID NO: 68723 - RNA, 23 nt, synthetic construct
  source 1..23: mol_type = other RNA
tccctggagttgaggaggggttg

SEQ ID NO: 68724 - RNA, 23 nt, synthetic construct
  source 1..23: mol_type = other RNA
tgtccctggagttgaggaggggt

SEQ ID NO: 68725 - RNA, 23 nt, synthetic construct
  source 1..23: mol_type = other RNA
gttgtccctggagttgaggaggg

SEQ ID NO: 68726 - RNA, 23 nt, synthetic construct
  source 1..23: mol_type = other RNA
ctggggggatgggagttgtccct

SEQ ID NO: 68727 - RNA, 23 nt, synthetic construct
  source 1..23: mol_type = other RNA
cactggggggatgggagttgtcc

SEQ ID NO: 68728 - RNA, 23 nt, synthetic construct
  source 1..23: mol_type = other RNA
tcagcactggggggatgggagtt

SEQ ID NO: 68729 - RNA, 23 nt, synthetic construct
  source 1..23: mol_type = other RNA
gtggtggtcagcactggggggat

SEQ ID NO: 68730 - RNA, 23 nt, synthetic construct
  source 1..23: mol_type = other RNA
cggtggtggtcagcactgggggg

SEQ ID NO: 68731 - RNA, 23 nt, synthetic construct
  source 1..23: mol_type = other RNA
gtggtggcggtggtggtcagcac

SEQ ID NO: 68732 - RNA, 23 nt, synthetic construct
  source 1..23: mol_type = other RNA
aggtgtggtggcggtggtggtca

SEQ ID NO: 68733 - RNA, 23 nt, synthetic construct
  source 1..23: mol_type = other RNA
ctgcaggtgtggtggcggtggtg

SEQ ID NO: 68734 - RNA, 23 nt, synthetic construct
  source 1..23: mol_type = other RNA
ggctgcaggtgtggtggcggtgg

SEQ ID NO: 68735 - RNA, 23 nt, synthetic construct
  source 1..23: mol_type = other RNA
tggctgcaggtgtggtggcggtg

SEQ ID NO: 68736 - RNA, 23 nt, synthetic construct
  source 1..23: mol_type = other RNA
gctgctggtggctgcaggtgtgg

SEQ ID NO: 68737 - RNA, 23 nt, synthetic construct
  source 1..23: mol_type = other RNA
actgtgctgctggtggctgcagg

SEQ ID NO: 68738 - RNA, 23 nt, synthetic construct
  source 1..23: mol_type = other RNA
gtcactgtgctgctggtggctgc

SEQ ID NO: 68739 - RNA, 23 nt, synthetic construct
  source 1..23: mol_type = other RNA
gaggagggagtcactgtgctgct

SEQ ID NO: 68740 - RNA, 23 nt, synthetic construct
  source 1..23: mol_type = other RNA
agaggagggagtcactgtgctgc

SEQ ID NO: 68741 - RNA, 23 nt, synthetic construct
  source 1..23: mol_type = other RNA
tagggcagaggagggagtcactg

SEQ ID NO: 68742 - RNA, 23 nt, synthetic construct
  source 1..23: mol_type = other RNA
cggcactgggggtgtgtgggtgg

SEQ ID NO: 68743 - RNA, 23 nt, synthetic construct
  source 1..23: mol_type = other RNA
ttcggcactgggggtgtgtgggt

SEQ ID NO: 68744 - RNA, 23 nt, synthetic construct
  source 1..23: mol_type = other RNA
tgtgtggtggccgtggtgttcgg

SEQ ID NO: 68745 - RNA, 23 nt, synthetic construct
  source 1..23: mol_type = other RNA
accgcccgtgtgtggtggccgtg

SEQ ID NO: 68746 - RNA, 23 nt, synthetic construct
  source 1..23: mol_type = other RNA
actgctggggggcagggaccgcc

SEQ ID NO: 68747 - RNA, 23 nt, synthetic construct
  source 1..23: mol_type = other RNA
gactgctggggggcagggaccgc

SEQ ID NO: 68748 - RNA, 23 nt, synthetic construct
  source 1..23: mol_type = other RNA
gggactgctggggggcagggacc

SEQ ID NO: 68749 - RNA, 23 nt, synthetic construct
  source 1..23: mol_type = other RNA
ggggactgctggggggcagggac

SEQ ID NO: 68750 - RNA, 23 nt, synthetic construct
  source 1..23: mol_type = other RNA
tgtggggactgctggggggcagg

SEQ ID NO: 68751 - RNA, 23 nt, synthetic construct
  source 1..23: mol_type = other RNA
gttgctgctggggtgtgggaagt

SEQ ID NO: 68752 - RNA, 23 nt, synthetic construct
  source 1..23: mol_type = other RNA
actggtggttgctgctggggtgt

SEQ ID NO: 68753 - RNA, 23 nt, synthetic construct
  source 1..23: mol_type = other RNA
ggtggtactggtggttgctgctg

SEQ ID NO: 68754 - RNA, 23 nt, synthetic construct
  source 1..23: mol_type = other RNA
gctagggtgagggctggacaggg

SEQ ID NO: 68755 - RNA, 23 nt, synthetic construct
  source 1..23: mol_type = other RNA
tccctggagaagggggtgactcg

SEQ ID NO: 68756 - RNA, 23 nt, synthetic construct
  source 1..23: mol_type = other RNA
gtccctggagaagggggtgactc

SEQ ID NO: 68757 - RNA, 23 nt, synthetic construct
  source 1..23: mol_type = other RNA
cgtccctggagaagggggtgact

SEQ ID NO: 68758 - RNA, 23 nt, synthetic construct
  source 1..23: mol_type = other RNA
tcgtccctggagaagggggtgac

SEQ ID NO: 68759 - RNA, 23 nt, synthetic construct
  source 1..23: mol_type = other RNA
ggtcgtccctggagaagggggtg

SEQ ID NO: 68760 - RNA, 23 nt, synthetic construct
  source 1..23: mol_type = other RNA
ggtggtcgtccctggagaagggg

SEQ ID NO: 68761 - RNA, 23 nt, synthetic construct
  source 1..23: mol_type = other RNA
tggtgtggcccggggtggtcgtc

SEQ ID NO: 68762 - RNA, 23 nt, synthetic construct
  source 1..23: mol_type = other RNA
tcctggaggtgcccctggtgtgg

SEQ ID NO: 68763 - RNA, 23 nt, synthetic construct
  source 1..23: mol_type = other RNA
gtcctggaggtgcccctggtgtg

SEQ ID NO: 68764 - RNA, 23 nt, synthetic construct
  source 1..23: mol_type = other RNA
tgtggtcctggaggtgcccctgg

SEQ ID NO: 68765 - RNA, 23 nt, synthetic construct
  source 1..23: mol_type = other RNA
gctgtggtcctggaggtgcccct

SEQ ID NO: 68766 - RNA, 23 nt, synthetic construct
  source 1..23: mol_type = other RNA
ggctgtggtcctggaggtgcccc

SEQ ID NO: 68767 - RNA, 23 nt, synthetic construct
  source 1..23: mol_type = other RNA
tggctgtggtcctggaggtgccc

SEQ ID NO: 68768 - RNA, 23 nt, synthetic construct
  source 1..23: mol_type = other RNA
ctgtggctgtggtcctggaggtg

SEQ ID NO: 68769 - RNA, 23 nt, synthetic construct
  source 1..23: mol_type = other RNA
gtggctgtggctgtggtcctgga

SEQ ID NO: 68770 - RNA, 23 nt, synthetic construct
  source 1..23: mol_type = other RNA
tcacagcccgtggtcaccaccgt

SEQ ID NO: 68771 - RNA, 23 nt, synthetic construct
  source 1..23: mol_type = other RNA
gtagtccagccactctgaccagg

SEQ ID NO: 68772 - RNA, 23 nt, synthetic construct
  source 1..23: mol_type = other RNA
caggggctgctcacagactgccc

SEQ ID NO: 68773 - RNA, 23 nt, synthetic construct
  source 1..23: mol_type = other RNA
ccaggctgggcctgggcacggca

SEQ ID NO: 68774 - RNA, 23 nt, synthetic construct
  source 1..23: mol_type = other RNA
aggccaaagtccaggctgcattc

SEQ ID NO: 68775 - RNA, 23 nt, synthetic construct
  source 1..23: mol_type = other RNA
caggccaaagtccaggctgcatt

SEQ ID NO: 68776 - RNA, 23 nt, synthetic construct
  source 1..23: mol_type = other RNA
gaccaggccaaagtccaggctgc

SEQ ID NO: 68777 - RNA, 23 nt, synthetic construct
  source 1..23: mol_type = other RNA
acggttcctgcagaccaggccaa

SEQ ID NO: 68778 - RNA, 23 nt, synthetic construct
  source 1..23: mol_type = other RNA
cgtggccgtagagctggtggccg

SEQ ID NO: 68779 - RNA, 23 nt, synthetic construct
  source 1..23: mol_type = other RNA
tggctgttgtggtcagctttgtg

SEQ ID NO: 68780 - RNA, 23 nt, synthetic construct
  source 1..23: mol_type = other RNA
tggatccagtggactcagtcgta

SEQ ID NO: 68781 - RNA, 23 nt, synthetic construct
  source 1..23: mol_type = other RNA
tccctggggtggaggacggggtg

SEQ ID NO: 68782 - RNA, 23 nt, synthetic construct
  source 1..23: mol_type = other RNA
gtccctggggtggaggacggggt

SEQ ID NO: 68783 - RNA, 23 nt, synthetic construct
  source 1..23: mol_type = other RNA
tggtccctggggtggaggacggg

SEQ ID NO: 68784 - RNA, 23 nt, synthetic construct
  source 1..23: mol_type = other RNA
gtggtccctggggtggaggacgg

SEQ ID NO: 68785 - RNA, 23 nt, synthetic construct
  source 1..23: mol_type = other RNA
aggtggtccctggggtggaggac

SEQ ID NO: 68786 - RNA, 23 nt, synthetic construct
  source 1..23: mol_type = other RNA
caggtggtccctggggtggagga

SEQ ID NO: 68787 - RNA, 23 nt, synthetic construct
  source 1..23: mol_type = other RNA
ccaggtggtccctggggtggagg

SEQ ID NO: 68788 - RNA, 23 nt, synthetic construct
  source 1..23: mol_type = other RNA
tccaggtggtccctggggtggag

SEQ ID NO: 68789 - RNA, 23 nt, synthetic construct
  source 1..23: mol_type = other RNA
cctgggtggaggaggcggtggcc

SEQ ID NO: 68790 - RNA, 23 nt, synthetic construct
  source 1..23: mol_type = other RNA
agcagttgcctgggtggaggagg

SEQ ID NO: 68791 - RNA, 23 nt, synthetic construct
  source 1..23: mol_type = other RNA
ggagctggtgactgtgggtgtcg

SEQ ID NO: 68792 - RNA, 23 nt, synthetic construct
  source 1..23: mol_type = other RNA
ttggagctggtgactgtgggtgt

SEQ ID NO: 68793 - RNA, 23 nt, synthetic construct
  source 1..23: mol_type = other RNA
tttggagctggtgactgtgggtg

SEQ ID NO: 68794 - RNA, 23 nt, synthetic construct
  source 1..23: mol_type = other RNA
gagtggctttggagctggtgact

SEQ ID NO: 68795 - RNA, 23 nt, synthetic construct
  source 1..23: mol_type = other RNA
agaagggagtggctttggagctg

SEQ ID NO: 68796 - RNA, 23 nt, synthetic construct
  source 1..23: mol_type = other RNA
ggagaagggagtggctttggagc

SEQ ID NO: 68797 - RNA, 23 nt, synthetic construct
  source 1..23: mol_type = other RNA
gaggaggaggggatggctgtaaa

SEQ ID NO: 68798 - RNA, 23 nt, synthetic construct
  source 1..23: mol_type = other RNA
ggaggaggaggggatggctgtaa

SEQ ID NO: 68799 - RNA, 23 nt, synthetic construct
  source 1..23: mol_type = other RNA
tggtgcccagggaggaggagggg

SEQ ID NO: 68800 - RNA, 23 nt, synthetic construct
  source 1..23: mol_type = other RNA
ccaggtggtgcccagggaggagg

SEQ ID NO: 68801 - RNA, 23 nt, synthetic construct
  source 1..23: mol_type = other RNA
ggtccaggtggtgcccagggagg

SEQ ID NO: 68802 - RNA, 23 nt, synthetic construct
  source 1..23: mol_type = other RNA
cgggtccaggtggtgcccaggga

SEQ ID NO: 68803 - RNA, 23 nt, synthetic construct
  source 1..23: mol_type = other RNA
gcgggtccaggtggtgcccaggg

SEQ ID NO: 68804 - RNA, 23 nt, synthetic construct
  source 1..23: mol_type = other RNA
ggcgggtccaggtggtgcccagg

SEQ ID NO: 68805 - RNA, 23 nt, synthetic construct
  source 1..23: mol_type = other RNA
aggcgggtccaggtggtgcccag

SEQ ID NO: 68806 - RNA, 23 nt, synthetic construct
  source 1..23: mol_type = other RNA
tgggtgtggtggtctgtgatagg

SEQ ID NO: 68807 - RNA, 23 nt, synthetic construct
  source 1..23: mol_type = other RNA
tggctgtggacatggtggccgtg

SEQ ID NO: 68808 - RNA, 23 nt, synthetic construct
  source 1..23: mol_type = other RNA
gtgtggctgtggacatggtggcc

SEQ ID NO: 68809 - RNA, 23 nt, synthetic construct
  source 1..23: mol_type = other RNA
agggtgtggctgtggacatggtg

SEQ ID NO: 68810 - RNA, 23 nt, synthetic construct
  source 1..23: mol_type = other RNA
tctggagtggaggagggtgtggc

SEQ ID NO: 68811 - RNA, 23 nt, synthetic construct
  source 1..23: mol_type = other RNA
cactgtggaggtgtgggcagtct

SEQ ID NO: 68812 - RNA, 23 nt, synthetic construct
  source 1..23: mol_type = other RNA
ctggttgtggtggccgtggtggt

SEQ ID NO: 68813 - RNA, 23 nt, synthetic construct
  source 1..23: mol_type = other RNA
ggtggccctggttgtggtggccg

SEQ ID NO: 68814 - RNA, 23 nt, synthetic construct
  source 1..23: mol_type = other RNA
cagagccggtggccctggttgtg

SEQ ID NO: 68815 - RNA, 23 nt, synthetic construct
  source 1..23: mol_type = other RNA
acagagccggtggccctggttgt

SEQ ID NO: 68816 - RNA, 23 nt, synthetic construct
  source 1..23: mol_type = other RNA
ggtggaagagggggtggccacag

SEQ ID NO: 68817 - RNA, 23 nt, synthetic construct
  source 1..23: mol_type = other RNA
gggtggaagagggggtggccaca

SEQ ID NO: 68818 - RNA, 23 nt, synthetic construct
  source 1..23: mol_type = other RNA
ggggtggaagagggggtggccac

SEQ ID NO: 68819 - RNA, 23 nt, synthetic construct
  source 1..23: mol_type = other RNA
tggttgtggtagtcggcactttg

SEQ ID NO: 68820 - RNA, 23 nt, synthetic construct
  source 1..23: mol_type = other RNA
aggagggggtgactgtgaagccc

SEQ ID NO: 68821 - RNA, 23 nt, synthetic construct
  source 1..23: mol_type = other RNA
ctgggctggaggagggggtgact

SEQ ID NO: 68822 - RNA, 23 nt, synthetic construct
  source 1..23: mol_type = other RNA
gccgtccctgggctggaggaggg

SEQ ID NO: 68823 - RNA, 23 nt, synthetic construct
  source 1..23: mol_type = other RNA
tgccgtccctgggctggaggagg

SEQ ID NO: 68824 - RNA, 23 nt, synthetic construct
  source 1..23: mol_type = other RNA
tgtgctgatccacactggaggcg

SEQ ID NO: 68825 - RNA, 23 nt, synthetic construct
  source 1..23: mol_type = other RNA
cactggttgtgggtgtggtggtt

SEQ ID NO: 68826 - RNA, 23 nt, synthetic construct
  source 1..23: mol_type = other RNA
tcaccgtggagccactggttgtg

SEQ ID NO: 68827 - RNA, 23 nt, synthetic construct
  source 1..23: mol_type = other RNA
gtgtgggtggtccccgggacgga

SEQ ID NO: 68828 - RNA, 23 nt, synthetic construct
  source 1..23: mol_type = other RNA
tggtggtcagcactgtgggggtg

SEQ ID NO: 68829 - RNA, 23 nt, synthetic construct
  source 1..23: mol_type = other RNA
gtggtggtcagcactgtgggggt

SEQ ID NO: 68830 - RNA, 23 nt, synthetic construct
  source 1..23: mol_type = other RNA
ggtggtggtcagcactgtggggg

SEQ ID NO: 68831 - RNA, 23 nt, synthetic construct
  source 1..23: mol_type = other RNA
ttgtggtggtggtggtcagcact

SEQ ID NO: 68832 - RNA, 23 nt, synthetic construct
  source 1..23: mol_type = other RNA
gttgtggtggtggtggtcagcac

SEQ ID NO: 68833 - RNA, 23 nt, synthetic construct
  source 1..23: mol_type = other RNA
cacagttgtggtggtggtggtca

SEQ ID NO: 68834 - RNA, 23 nt, synthetic construct
  source 1..23: mol_type = other RNA
cagtggccacagttgtggtggtg

SEQ ID NO: 68835 - RNA, 23 nt, synthetic construct
  source 1..23: mol_type = other RNA
tgccatagaaccagtggccacag

SEQ ID NO: 68836 - RNA, 23 nt, synthetic construct
  source 1..23: mol_type = other RNA
ggtggtggagccggtggccgtga

SEQ ID NO: 68837 - RNA, 23 nt, synthetic construct
  source 1..23: mol_type = other RNA
ggttggtggtggagccggtggcc

SEQ ID NO: 68838 - RNA, 23 nt, synthetic construct
  source 1..23: mol_type = other RNA
ttgaggaggggttggtggtggag

SEQ ID NO: 68839 - RNA, 23 nt, synthetic construct
  source 1..23: mol_type = other RNA
agttgaggaggggttggtggtgg

SEQ ID NO: 68840 - RNA, 23 nt, synthetic construct
  source 1..23: mol_type = other RNA
tggagttgaggaggggttggtgg

SEQ ID NO: 68841 - RNA, 23 nt, synthetic construct
  source 1..23: mol_type = other RNA
ctggagttgaggaggggttggtg

SEQ ID NO: 68842 - RNA, 23 nt, synthetic construct
  source 1..23: mol_type = other RNA
tccctggagttgaggaggggttg

SEQ ID NO: 68843 - RNA, 23 nt, synthetic construct
  source 1..23: mol_type = other RNA
tgtccctggagttgaggaggggt

SEQ ID NO: 68844 - RNA, 23 nt, synthetic construct
  source 1..23: mol_type = other RNA
gttgtccctggagttgaggaggg

SEQ ID NO: 68845 - RNA, 23 nt, synthetic construct
  source 1..23: mol_type = other RNA
gtggtggtcagcactggggggat

SEQ ID NO: 68846 - RNA, 23 nt, synthetic construct
  source 1..23: mol_type = other RNA
cggtggtggtcagcactgggggg

SEQ ID NO: 68847 - RNA, 23 nt, synthetic construct
  source 1..23: mol_type = other RNA
gtggtggcggtggtggtcagcac

SEQ ID NO: 68848 - RNA, 23 nt, synthetic construct
  source 1..23: mol_type = other RNA
aggtgtggtggcggtggtggtca

SEQ ID NO: 68849 - RNA, 23 nt, synthetic construct
  source 1..23: mol_type = other RNA
ctgcaggtgtggtggcggtggtg

SEQ ID NO: 68850 - RNA, 23 nt, synthetic construct
  source 1..23: mol_type = other RNA
ggctgcaggtgtggtggcggtgg

SEQ ID NO: 68851 - RNA, 23 nt, synthetic construct
  source 1..23: mol_type = other RNA
tggctgcaggtgtggtggcggtg

SEQ ID NO: 68852 - RNA, 23 nt, synthetic construct
  source 1..23: mol_type = other RNA
gctgctggtggctgcaggtgtgg

SEQ ID NO: 68853 - RNA, 23 nt, synthetic construct
  source 1..23: mol_type = other RNA
actgtgctgctggtggctgcagg

SEQ ID NO: 68854 - RNA, 23 nt, synthetic construct
  source 1..23: mol_type = other RNA
gtcactgtgctgctggtggctgc

SEQ ID NO: 68855 - RNA, 23 nt, synthetic construct
  source 1..23: mol_type = other RNA
gaggagggagtcactgtgctgct

SEQ ID NO: 68856 - RNA, 23 nt, synthetic construct
  source 1..23: mol_type = other RNA
agaggagggagtcactgtgctgc

SEQ ID NO: 68857 - RNA, 23 nt, synthetic construct
  source 1..23: mol_type = other RNA
tagggcagaggagggagtcactg

SEQ ID NO: 68858 - RNA, 23 nt, synthetic construct
  source 1..23: mol_type = other RNA
cggcactgggggtgtgtgggtgg

SEQ ID NO: 68859 - RNA, 23 nt, synthetic construct
  source 1..23: mol_type = other RNA
ttcggcactgggggtgtgtgggt

SEQ ID NO: 68860 - RNA, 23 nt, synthetic construct
  source 1..23: mol_type = other RNA
tgtgtggtggccgtggtgttcgg

SEQ ID NO: 68861 - RNA, 23 nt, synthetic construct
  source 1..23: mol_type = other RNA
tgtggggactgctgggggacagg

SEQ ID NO: 68862 - RNA, 23 nt, synthetic construct
  source 1..23: mol_type = other RNA
aaggtgcctgaggtggccgaagt

SEQ ID NO: 68863 - RNA, 23 nt, synthetic construct
  source 1..23: mol_type = other RNA
cccaaggtgcctgaggtggccga

SEQ ID NO: 68864 - RNA, 23 nt, synthetic construct
  source 1..23: mol_type = other RNA
tggtgcccaaggtgcctgaggtg

SEQ ID NO: 68865 - RNA, 23 nt, synthetic construct
  source 1..23: mol_type = other RNA
gtgggtggtgcccaaggtgcctg

SEQ ID NO: 68866 - RNA, 23 nt, synthetic construct
  source 1..23: mol_type = other RNA
tgctggggtgtgggaagtccccg

SEQ ID NO: 68867 - RNA, 23 nt, synthetic construct
  source 1..23: mol_type = other RNA
gttgctgctggggtgtgggaagt

SEQ ID NO: 68868 - RNA, 23 nt, synthetic construct
  source 1..23: mol_type = other RNA
gctagggtgagggctggacaggg

SEQ ID NO: 68869 - RNA, 23 nt, synthetic construct
  source 1..23: mol_type = other RNA
tggtgtggcccggggtggtcgtc

SEQ ID NO: 68870 - RNA, 23 nt, synthetic construct
  source 1..23: mol_type = other RNA
aggtggccgtggtgtggcccggg

SEQ ID NO: 68871 - RNA, 23 nt, synthetic construct
  source 1..23: mol_type = other RNA
cctggaggtggccgtggtgtggc

SEQ ID NO: 68872 - RNA, 23 nt, synthetic construct
  source 1..23: mol_type = other RNA
tgggtgtggccgtggccgtggtc

SEQ ID NO: 68873 - RNA, 23 nt, synthetic construct
  source 1..23: mol_type = other RNA
ctgggtgtggccgtggccgtggt

SEQ ID NO: 68874 - RNA, 23 nt, synthetic construct
  source 1..23: mol_type = other RNA
gctgggtgtggccgtggccgtgg

SEQ ID NO: 68875 - RNA, 23 nt, synthetic construct
  source 1..23: mol_type = other RNA
ttgctgggtgtggccgtggccgt

SEQ ID NO: 68876 - RNA, 23 nt, synthetic construct
  source 1..23: mol_type = other RNA
cttgctgggtgtggccgtggccg

SEQ ID NO: 68877 - RNA, 23 nt, synthetic construct
  source 1..23: mol_type = other RNA
tcacagcccgtggtcaccaccgt

SEQ ID NO: 68878 - RNA, 23 nt, synthetic construct
  source 1..23: mol_type = other RNA
gtagtccagccactctgaccagg

SEQ ID NO: 68879 - RNA, 23 nt, synthetic construct
  source 1..23: mol_type = other RNA
agacggcccctccggccgcacgg

SEQ ID NO: 68880 - RNA, 23 nt, synthetic construct
  source 1..23: mol_type = other RNA
ccaggctgggcctgggcacggca

SEQ ID NO: 68881 - RNA, 23 nt, synthetic construct
  source 1..23: mol_type = other RNA
actcccccagggggacaccaggc

SEQ ID NO: 68882 - RNA, 23 nt, synthetic construct
  source 1..23: mol_type = other RNA
aggccaaagtccaggctgcattc

SEQ ID NO: 68883 - RNA, 23 nt, synthetic construct
  source 1..23: mol_type = other RNA
caggccaaagtccaggctgcatt

SEQ ID NO: 68884 - RNA, 23 nt, synthetic construct
  source 1..23: mol_type = other RNA
gaccaggccaaagtccaggctgc

SEQ ID NO: 68885 - RNA, 23 nt, synthetic construct
  source 1..23: mol_type = other RNA
acggttcctgcagaccaggccaa

SEQ ID NO: 68886 - RNA, 23 nt, synthetic construct
  source 1..23: mol_type = other RNA
gtggaggagggcatggccgtaga

SEQ ID NO: 68887 - RNA, 23 nt, synthetic construct
  source 1..23: mol_type = other RNA
ggagtggaggagggcatggccgt

SEQ ID NO: 68888 - RNA, 23 nt, synthetic construct
  source 1..23: mol_type = other RNA
cccggggtggaggacggggtggc

SEQ ID NO: 68889 - RNA, 23 nt, synthetic construct
  source 1..23: mol_type = other RNA
ttgggagggggagctgttcccgg

SEQ ID NO: 68890 - RNA, 23 nt, synthetic construct
  source 1..23: mol_type = other RNA
tgtgggtgtggtggccgggctgg

SEQ ID NO: 68891 - RNA, 23 nt, synthetic construct
  source 1..23: mol_type = other RNA
gaggaggaagtggctttggaact

SEQ ID NO: 68892 - RNA, 23 nt, synthetic construct
  source 1..23: mol_type = other RNA
actggaggaggaagtggctttgg

SEQ ID NO: 68893 - RNA, 23 nt, synthetic construct
  source 1..23: mol_type = other RNA
ggactggaggaggaagtggcttt

SEQ ID NO: 68894 - RNA, 23 nt, synthetic construct
  source 1..23: mol_type = other RNA
tggactggaggaggaagtggctt

SEQ ID NO: 68895 - RNA, 23 nt, synthetic construct
  source 1..23: mol_type = other RNA
ttggactggaggaggaagtggct

SEQ ID NO: 68896 - RNA, 23 nt, synthetic construct
  source 1..23: mol_type = other RNA
ccttggactggaggaggaagtgg

SEQ ID NO: 68897 - RNA, 23 nt, synthetic construct
  source 1..23: mol_type = other RNA
gtccttggactggaggaggaagt

SEQ ID NO: 68898 - RNA, 23 nt, synthetic construct
  source 1..23: mol_type = other RNA
ggtggaggaggggatgggtgtaa

SEQ ID NO: 68899 - RNA, 23 nt, synthetic construct
  source 1..23: mol_type = other RNA
tcccaagggtggaggaggggatg

SEQ ID NO: 68900 - RNA, 23 nt, synthetic construct
  source 1..23: mol_type = other RNA
ggtggtcccaagggtggaggagg

SEQ ID NO: 68901 - RNA, 23 nt, synthetic construct
  source 1..23: mol_type = other RNA
ctgttctgggagggtcccggtgg

SEQ ID NO: 68902 - RNA, 23 nt, synthetic construct
  source 1..23: mol_type = other RNA
tgtggacatggtggccacgggtg

SEQ ID NO: 68903 - RNA, 23 nt, synthetic construct
  source 1..23: mol_type = other RNA
tctccggagtggaggaggggtgg

SEQ ID NO: 68904 - RNA, 23 nt, synthetic construct
  source 1..23: mol_type = other RNA
cactgtggaggtgtgggtggtct

SEQ ID NO: 68905 - RNA, 23 nt, synthetic construct
  source 1..23: mol_type = other RNA
cgtggtggccttcgtggtcagca

SEQ ID NO: 68906 - RNA, 23 nt, synthetic construct
  source 1..23: mol_type = other RNA
ggaggagggggtggacgtggaac

SEQ ID NO: 68907 - RNA, 23 nt, synthetic construct
  source 1..23: mol_type = other RNA
tggaggagggggtggacgtggaa

SEQ ID NO: 68908 - RNA, 23 nt, synthetic construct
  source 1..23: mol_type = other RNA
gtggaggagggggtggacgtgga

SEQ ID NO: 68909 - RNA, 23 nt, synthetic construct
  source 1..23: mol_type = other RNA
ccggagtggaggagggggtggac

SEQ ID NO: 68910 - RNA, 23 nt, synthetic construct
  source 1..23: mol_type = other RNA
ggctgcagttgtagtggctgctg

SEQ ID NO: 68911 - RNA, 23 nt, synthetic construct
  source 1..23: mol_type = other RNA
tggctgcagttgtagtggctgct

SEQ ID NO: 68912 - RNA, 23 nt, synthetic construct
  source 1..23: mol_type = other RNA
gggccagtggctgcagttgtagt

SEQ ID NO: 68913 - RNA, 23 nt, synthetic construct
  source 1..23: mol_type = other RNA
ggggccagtggctgcagttgtag

SEQ ID NO: 68914 - RNA, 23 nt, synthetic construct
  source 1..23: mol_type = other RNA
gccgtggggccagtggctgcagt

SEQ ID NO: 68915 - RNA, 23 nt, synthetic construct
  source 1..23: mol_type = other RNA
ggtggccgtggggccagtggctg

SEQ ID NO: 68916 - RNA, 23 nt, synthetic construct
  source 1..23: mol_type = other RNA
gacggggtggccgtggggccagt

SEQ ID NO: 68917 - RNA, 23 nt, synthetic construct
  source 1..23: mol_type = other RNA
tccctggggtggaggacggggtg

SEQ ID NO: 68918 - RNA, 23 nt, synthetic construct
  source 1..23: mol_type = other RNA
gtccctggggtggaggacggggt

SEQ ID NO: 68919 - RNA, 23 nt, synthetic construct
  source 1..23: mol_type = other RNA
tggtccctggggtggaggacggg

SEQ ID NO: 68920 - RNA, 23 nt, synthetic construct
  source 1..23: mol_type = other RNA
gtggtccctggggtggaggacgg

SEQ ID NO: 68921 - RNA, 23 nt, synthetic construct
  source 1..23: mol_type = other RNA
aggtggtccctggggtggaggac

SEQ ID NO: 68922 - RNA, 23 nt, synthetic construct
  source 1..23: mol_type = other RNA
caggtggtccctggggtggagga

SEQ ID NO: 68923 - RNA, 23 nt, synthetic construct
  source 1..23: mol_type = other RNA
ccaggtggtccctggggtggagg

SEQ ID NO: 68924 - RNA, 23 nt, synthetic construct
  source 1..23: mol_type = other RNA
tccaggtggtccctggggtggag

SEQ ID NO: 68925 - RNA, 23 nt, synthetic construct
  source 1..23: mol_type = other RNA
tccctggggtggaggacggggtg

SEQ ID NO: 68926 - RNA, 23 nt, synthetic construct
  source 1..23: mol_type = other RNA
gtccctggggtggaggacggggt

SEQ ID NO: 68927 - RNA, 23 nt, synthetic construct
  source 1..23: mol_type = other RNA
tggtccctggggtggaggacggg

SEQ ID NO: 68928 - RNA, 23 nt, synthetic construct
  source 1..23: mol_type = other RNA
gtggtccctggggtggaggacgg

SEQ ID NO: 68929 - RNA, 23 nt, synthetic construct
  source 1..23: mol_type = other RNA
aggtggtccctggggtggaggac

SEQ ID NO: 68930 - RNA, 23 nt, synthetic construct
  source 1..23: mol_type = other RNA
caggtggtccctggggtggagga

SEQ ID NO: 68931 - RNA, 23 nt, synthetic construct
  source 1..23: mol_type = other RNA
ccaggtggtccctggggtggagg

SEQ ID NO: 68932 - RNA, 23 nt, synthetic construct
  source 1..23: mol_type = other RNA
tccaggtggtccctggggtggag

SEQ ID NO: 68933 - RNA, 23 nt, synthetic construct
  source 1..23: mol_type = other RNA
cctgggtggaggaggcggtggcc

SEQ ID NO: 68934 - RNA, 23 nt, synthetic construct
  source 1..23: mol_type = other RNA
agcagttgcctgggtggaggagg

SEQ ID NO: 68935 - RNA, 23 nt, synthetic construct
  source 1..23: mol_type = other RNA
ggagctggtgactgtgggtgtcg

SEQ ID NO: 68936 - RNA, 23 nt, synthetic construct
  source 1..23: mol_type = other RNA
ttggagctggtgactgtgggtgt

SEQ ID NO: 68937 - RNA, 23 nt, synthetic construct
  source 1..23: mol_type = other RNA
tttggagctggtgactgtgggtg

SEQ ID NO: 68938 - RNA, 23 nt, synthetic construct
  source 1..23: mol_type = other RNA
gagtggctttggagctggtgact

SEQ ID NO: 68939 - RNA, 23 nt, synthetic construct
  source 1..23: mol_type = other RNA
ggaggagggagtggctttggagc

SEQ ID NO: 68940 - RNA, 23 nt, synthetic construct
  source 1..23: mol_type = other RNA
tggaggagggagtggctttggag

SEQ ID NO: 68941 - RNA, 23 nt, synthetic construct
  source 1..23: mol_type = other RNA
ggactggaggagggagtggcttt

SEQ ID NO: 68942 - RNA, 23 nt, synthetic construct
  source 1..23: mol_type = other RNA
ccctggactggaggagggagtgg

SEQ ID NO: 68943 - RNA, 23 nt, synthetic construct
  source 1..23: mol_type = other RNA
gaggaggaggggatggctgtaaa

SEQ ID NO: 68944 - RNA, 23 nt, synthetic construct
  source 1..23: mol_type = other RNA
ggaggaggaggggatggctgtaa

SEQ ID NO: 68945 - RNA, 23 nt, synthetic construct
  source 1..23: mol_type = other RNA
tggtgcccagggaggaggagggg

SEQ ID NO: 68946 - RNA, 23 nt, synthetic construct
  source 1..23: mol_type = other RNA
ccaggtggtgcccagggaggagg

SEQ ID NO: 68947 - RNA, 23 nt, synthetic construct
  source 1..23: mol_type = other RNA
ggtccaggtggtgcccagggagg

SEQ ID NO: 68948 - RNA, 23 nt, synthetic construct
  source 1..23: mol_type = other RNA
cgggtccaggtggtgcccaggga

SEQ ID NO: 68949 - RNA, 23 nt, synthetic construct
  source 1..23: mol_type = other RNA
gcgggtccaggtggtgcccaggg

SEQ ID NO: 68950 - RNA, 23 nt, synthetic construct
  source 1..23: mol_type = other RNA
ggcgggtccaggtggtgcccagg

SEQ ID NO: 68951 - RNA, 23 nt, synthetic construct
  source 1..23: mol_type = other RNA
aggcgggtccaggtggtgcccag

SEQ ID NO: 68952 - RNA, 23 nt, synthetic construct
  source 1..23: mol_type = other RNA
tgggtgtggtggtctgtgatagg

SEQ ID NO: 68953 - RNA, 23 nt, synthetic construct
  source 1..23: mol_type = other RNA
tggctgtggacatggtggccgtg

SEQ ID NO: 68954 - RNA, 23 nt, synthetic construct
  source 1..23: mol_type = other RNA
gtgtggctgtggacatggtggcc

SEQ ID NO: 68955 - RNA, 23 nt, synthetic construct
  source 1..23: mol_type = other RNA
agggtgtggctgtggacatggtg

SEQ ID NO: 68956 - RNA, 23 nt, synthetic construct
  source 1..23: mol_type = other RNA
tctggagtggaggagggtgtggc

SEQ ID NO: 68957 - RNA, 23 nt, synthetic construct
  source 1..23: mol_type = other RNA
gttgtggtggccgtggcggtaag

SEQ ID NO: 68958 - RNA, 23 nt, synthetic construct
  source 1..23: mol_type = other RNA
aggagggggtggccacagagccg

SEQ ID NO: 68959 - RNA, 23 nt, synthetic construct
  source 1..23: mol_type = other RNA
gaggagggggtggccacagagcc

SEQ ID NO: 68960 - RNA, 23 nt, synthetic construct
  source 1..23: mol_type = other RNA
ggaggagggggtggccacagagc

SEQ ID NO: 68961 - RNA, 23 nt, synthetic construct
  source 1..23: mol_type = other RNA
tggaggagggggtggccacagag

SEQ ID NO: 68962 - RNA, 23 nt, synthetic construct
  source 1..23: mol_type = other RNA
gtggaggagggggtggccacaga

SEQ ID NO: 68963 - RNA, 23 nt, synthetic construct
  source 1..23: mol_type = other RNA
tcctggggtggaggagggggtgg

SEQ ID NO: 68964 - RNA, 23 nt, synthetic construct
  source 1..23: mol_type = other RNA
tgttcctggggtggaggaggggg

SEQ ID NO: 68965 - RNA, 23 nt, synthetic construct
  source 1..23: mol_type = other RNA
tggttgtggtagtcggcactttg

SEQ ID NO: 68966 - RNA, 23 nt, synthetic construct
  source 1..23: mol_type = other RNA
gggtggctgtgaagcccgtggtt

SEQ ID NO: 68967 - RNA, 23 nt, synthetic construct
  source 1..23: mol_type = other RNA
aggagggggtggctgtgaagccc

SEQ ID NO: 68968 - RNA, 23 nt, synthetic construct
  source 1..23: mol_type = other RNA
tggaggagggggtggctgtgaag

SEQ ID NO: 68969 - RNA, 23 nt, synthetic construct
  source 1..23: mol_type = other RNA
gccgtccctgggctggaggaggg

SEQ ID NO: 68970 - RNA, 23 nt, synthetic construct
  source 1..23: mol_type = other RNA
tgccgtccctgggctggaggagg

SEQ ID NO: 68971 - RNA, 23 nt, synthetic construct
  source 1..23: mol_type = other RNA
tgtgctgatccacactggaggcg

SEQ ID NO: 68972 - RNA, 23 nt, synthetic construct
  source 1..23: mol_type = other RNA
gtggttgtgggtgtggtggttgt

SEQ ID NO: 68973 - RNA, 23 nt, synthetic construct
  source 1..23: mol_type = other RNA
ggtggttgtgggtgtggtggttg

SEQ ID NO: 68974 - RNA, 23 nt, synthetic construct
  source 1..23: mol_type = other RNA
tggtggttgtgggtgtggtggtt

SEQ ID NO: 68975 - RNA, 23 nt, synthetic construct
  source 1..23: mol_type = other RNA
gtggtggttgtgggtgtggtggt

SEQ ID NO: 68976 - RNA, 23 nt, synthetic construct
  source 1..23: mol_type = other RNA
tgtggtggttgtgggtgtggtgg

SEQ ID NO: 68977 - RNA, 23 nt, synthetic construct
  source 1..23: mol_type = other RNA
gtgtggtggttgtgggtgtggtg

SEQ ID NO: 68978 - RNA, 23 nt, synthetic construct
  source 1..23: mol_type = other RNA
ggtgtggtggttgtgggtgtggt

SEQ ID NO: 68979 - RNA, 23 nt, synthetic construct
  source 1..23: mol_type = other RNA
gtgggtgtggtggttgtgggtgt

SEQ ID NO: 68980 - RNA, 23 nt, synthetic construct
  source 1..23: mol_type = other RNA
cactggttgtgggtgtggtggtt

SEQ ID NO: 68981 - RNA, 23 nt, synthetic construct
  source 1..23: mol_type = other RNA
tcaccgtggagccactggttgtg

SEQ ID NO: 68982 - RNA, 23 nt, synthetic construct
  source 1..23: mol_type = other RNA
gatggaggagggggtcaccgtgg

SEQ ID NO: 68983 - RNA, 23 nt, synthetic construct
  source 1..23: mol_type = other RNA
cgggatggaggagggggtcaccg

SEQ ID NO: 68984 - RNA, 23 nt, synthetic construct
  source 1..23: mol_type = other RNA
cccgggatggaggagggggtcac

SEQ ID NO: 68985 - RNA, 23 nt, synthetic construct
  source 1..23: mol_type = other RNA
tccccgggatggaggagggggtc

SEQ ID NO: 68986 - RNA, 23 nt, synthetic construct
  source 1..23: mol_type = other RNA
ggtccccgggatggaggaggggg

SEQ ID NO: 68987 - RNA, 23 nt, synthetic construct
  source 1..23: mol_type = other RNA
gtggtggtggtcagcactctggc

SEQ ID NO: 68988 - RNA, 23 nt, synthetic construct
  source 1..23: mol_type = other RNA
ttgtggtggtggtggtcagcact

SEQ ID NO: 68989 - RNA, 23 nt, synthetic construct
  source 1..23: mol_type = other RNA
gttgtggtggtggtggtcagcac

SEQ ID NO: 68990 - RNA, 23 nt, synthetic construct
  source 1..23: mol_type = other RNA
cacagttgtggtggtggtggtca

SEQ ID NO: 68991 - RNA, 23 nt, synthetic construct
  source 1..23: mol_type = other RNA
cagtggccacagttgtggtggtg

SEQ ID NO: 68992 - RNA, 23 nt, synthetic construct
  source 1..23: mol_type = other RNA
tgccatagaaccagtggccacag

SEQ ID NO: 68993 - RNA, 23 nt, synthetic construct
  source 1..23: mol_type = other RNA
tagtggccgtggtggtcagtgat

SEQ ID NO: 68994 - RNA, 23 nt, synthetic construct
  source 1..23: mol_type = other RNA
ggtggtggagccggtggccgtga

SEQ ID NO: 68995 - RNA, 23 nt, synthetic construct
  source 1..23: mol_type = other RNA
ggttggtggtggagccggtggcc

SEQ ID NO: 68996 - RNA, 23 nt, synthetic construct
  source 1..23: mol_type = other RNA
ttgaggaggggttggtggtggag

SEQ ID NO: 68997 - RNA, 23 nt, synthetic construct
  source 1..23: mol_type = other RNA
agttgaggaggggttggtggtgg

SEQ ID NO: 68998 - RNA, 23 nt, synthetic construct
  source 1..23: mol_type = other RNA
tggagttgaggaggggttggtgg

SEQ ID NO: 68999 - RNA, 23 nt, synthetic construct
  source 1..23: mol_type = other RNA
ctggagttgaggaggggttggtg

SEQ ID NO: 69000 - RNA, 23 nt, synthetic construct
  source 1..23: mol_type = other RNA
tccctggagttgaggaggggttg

SEQ ID NO: 69001 - RNA, 23 nt, synthetic construct
  source 1..23: mol_type = other RNA
tgtccctggagttgaggaggggt

SEQ ID NO: 69002 - RNA, 23 nt, synthetic construct
  source 1..23: mol_type = other RNA
gttgtccctggagttgaggaggg

SEQ ID NO: 69003 - RNA, 23 nt, synthetic construct
  source 1..23: mol_type = other RNA
agcactggggtgatgggtgttgt

SEQ ID NO: 69004 - RNA, 23 nt, synthetic construct
  source 1..23: mol_type = other RNA
ggtcagcactggggtgatgggtg

SEQ ID NO: 69005 - RNA, 23 nt, synthetic construct
  source 1..23: mol_type = other RNA
tggtcagcactggggtgatgggt

SEQ ID NO: 69006 - RNA, 23 nt, synthetic construct
  source 1..23: mol_type = other RNA
tgtggtggccgtgctggtcagca

SEQ ID NO: 69007 - RNA, 23 nt, synthetic construct
  source 1..23: mol_type = other RNA
cgggtgtggtggccgtgctggtc

SEQ ID NO: 69008 - RNA, 23 nt, synthetic construct
  source 1..23: mol_type = other RNA
ctttggagctggtggctgcgggt

SEQ ID NO: 69009 - RNA, 23 nt, synthetic construct
  source 1..23: mol_type = other RNA
aagtggctttggagctggtggct

SEQ ID NO: 69010 - RNA, 23 nt, synthetic construct
  source 1..23: mol_type = other RNA
gaggaagtggctttggagctggt

SEQ ID NO: 69011 - RNA, 23 nt, synthetic construct
  source 1..23: mol_type = other RNA
gaggaggaagtggctttggagct

SEQ ID NO: 69012 - RNA, 23 nt, synthetic construct
  source 1..23: mol_type = other RNA
actggaggaggaagtggctttgg

SEQ ID NO: 69013 - RNA, 23 nt, synthetic construct
  source 1..23: mol_type = other RNA
ggactggaggaggaagtggcttt

SEQ ID NO: 69014 - RNA, 23 nt, synthetic construct
  source 1..23: mol_type = other RNA
tggactggaggaggaagtggctt

SEQ ID NO: 69015 - RNA, 23 nt, synthetic construct
  source 1..23: mol_type = other RNA
ttggactggaggaggaagtggct

SEQ ID NO: 69016 - RNA, 23 nt, synthetic construct
  source 1..23: mol_type = other RNA
ccttggactggaggaggaagtgg

SEQ ID NO: 69017 - RNA, 23 nt, synthetic construct
  source 1..23: mol_type = other RNA
gtccttggactggaggaggaagt

SEQ ID NO: 69018 - RNA, 23 nt, synthetic construct
  source 1..23: mol_type = other RNA
ggtggaggaggggatgggtgtaa

SEQ ID NO: 69019 - RNA, 23 nt, synthetic construct
  source 1..23: mol_type = other RNA
tccacagggtggaggaggggatg

SEQ ID NO: 69020 - RNA, 23 nt, synthetic construct
  source 1..23: mol_type = other RNA
gtggtccacagggtggaggaggg

SEQ ID NO: 69021 - RNA, 23 nt, synthetic construct
  source 1..23: mol_type = other RNA
gtgtggtggtctgtgctgggacg

SEQ ID NO: 69022 - RNA, 23 nt, synthetic construct
  source 1..23: mol_type = other RNA
ggtgtggtggtctgtgctgggac

SEQ ID NO: 69023 - RNA, 23 nt, synthetic construct
  source 1..23: mol_type = other RNA
catggtggacatgggtgtggtgg

SEQ ID NO: 69024 - RNA, 23 nt, synthetic construct
  source 1..23: mol_type = other RNA
acatggtggacatgggtgtggtg

SEQ ID NO: 69025 - RNA, 23 nt, synthetic construct
  source 1..23: mol_type = other RNA
gtggacatggtggacatgggtgt

SEQ ID NO: 69026 - RNA, 23 nt, synthetic construct
  source 1..23: mol_type = other RNA
cactgtggaggtgtgggtggtct

SEQ ID NO: 69027 - RNA, 23 nt, synthetic construct
  source 1..23: mol_type = other RNA
tggtggtcagcactgtggaggtg

SEQ ID NO: 69028 - RNA, 23 nt, synthetic construct
  source 1..23: mol_type = other RNA
gtggtggtcagcactgtggaggt

SEQ ID NO: 69029 - RNA, 23 nt, synthetic construct
  source 1..23: mol_type = other RNA
tgtggtggtcagcactgtggagg

SEQ ID NO: 69030 - RNA, 23 nt, synthetic construct
  source 1..23: mol_type = other RNA
tggctgtggtggtcagcactgtg

SEQ ID NO: 69031 - RNA, 23 nt, synthetic construct
  source 1..23: mol_type = other RNA
gctgttgtggtcagctcagtgag

SEQ ID NO: 69032 - RNA, 23 nt, synthetic construct
  source 1..23: mol_type = other RNA
ggctgcagttgtagtggctgttg

SEQ ID NO: 69033 - RNA, 23 nt, synthetic construct
  source 1..23: mol_type = other RNA
tggctgcagttgtagtggctgtt

SEQ ID NO: 69034 - RNA, 23 nt, synthetic construct
  source 1..23: mol_type = other RNA
gaggacagggtggccgtggatcc

SEQ ID NO: 69035 - RNA, 23 nt, synthetic construct
  source 1..23: mol_type = other RNA
ggtggaggacagggtggccgtgg

SEQ ID NO: 69036 - RNA, 23 nt, synthetic construct
  source 1..23: mol_type = other RNA
gggtggaggacagggtggccgtg

SEQ ID NO: 69037 - RNA, 23 nt, synthetic construct
  source 1..23: mol_type = other RNA
ctggggtggaggacagggtggcc

SEQ ID NO: 69038 - RNA, 23 nt, synthetic construct
  source 1..23: mol_type = other RNA
ccctggggtggaggacagggtgg

SEQ ID NO: 69039 - RNA, 23 nt, synthetic construct
  source 1..23: mol_type = other RNA
tccctggggtggaggacagggtg

SEQ ID NO: 69040 - RNA, 23 nt, synthetic construct
  source 1..23: mol_type = other RNA
tggtccctggggtggaggacagg

SEQ ID NO: 69041 - RNA, 23 nt, synthetic construct
  source 1..23: mol_type = other RNA
gtggtccctggggtggaggacag

SEQ ID NO: 69042 - RNA, 23 nt, synthetic construct
  source 1..23: mol_type = other RNA
aggtggtccctggggtggaggac

SEQ ID NO: 69043 - RNA, 23 nt, synthetic construct
  source 1..23: mol_type = other RNA
caggtggtccctggggtggagga

SEQ ID NO: 69044 - RNA, 23 nt, synthetic construct
  source 1..23: mol_type = other RNA
ccaggtggtccctggggtggagg

SEQ ID NO: 69045 - RNA, 23 nt, synthetic construct
  source 1..23: mol_type = other RNA
tccaggtggtccctggggtggag

SEQ ID NO: 69046 - RNA, 23 nt, synthetic construct
  source 1..23: mol_type = other RNA
aggaggcggtggccgtggaaccg

SEQ ID NO: 69047 - RNA, 23 nt, synthetic construct
  source 1..23: mol_type = other RNA
gagtggaggaggcggtggccgtg

SEQ ID NO: 69048 - RNA, 23 nt, synthetic construct
  source 1..23: mol_type = other RNA
ccagagtggaggaggcggtggcc

SEQ ID NO: 69049 - RNA, 23 nt, synthetic construct
  source 1..23: mol_type = other RNA
tcccagagtggaggaggcggtgg

SEQ ID NO: 69050 - RNA, 23 nt, synthetic construct
  source 1..23: mol_type = other RNA
ttcccagagtggaggaggcggtg

SEQ ID NO: 69051 - RNA, 23 nt, synthetic construct
  source 1..23: mol_type = other RNA
atagtggccatggtggtcaccac

SEQ ID NO: 69052 - RNA, 23 nt, synthetic construct
  source 1..23: mol_type = other RNA
ctgtgggcatagtggccatggtg

SEQ ID NO: 69053 - RNA, 23 nt, synthetic construct
  source 1..23: mol_type = other RNA
cagtggctgtgggcatagtggcc

SEQ ID NO: 69054 - RNA, 23 nt, synthetic construct
  source 1..23: mol_type = other RNA
ggaggcagtggctgtgggcatag

SEQ ID NO: 69055 - RNA, 23 nt, synthetic construct
  source 1..23: mol_type = other RNA
tggaggcagtggctgtgggcata

SEQ ID NO: 69056 - RNA, 23 nt, synthetic construct
  source 1..23: mol_type = other RNA
gtggaggcagtggctgtgggcat

SEQ ID NO: 69057 - RNA, 23 nt, synthetic construct
  source 1..23: mol_type = other RNA
accgtggaggcagtggctgtggg

SEQ ID NO: 69058 - RNA, 23 nt, synthetic construct
  source 1..23: mol_type = other RNA
aaccgtggaggcagtggctgtgg

SEQ ID NO: 69059 - RNA, 23 nt, synthetic construct
  source 1..23: mol_type = other RNA
tggggagcactgcaggggtgcgg

SEQ ID NO: 69060 - RNA, 23 nt, synthetic construct
  source 1..23: mol_type = other RNA
ggttggcaggctgctggggagca

SEQ ID NO: 69061 - RNA, 23 nt, synthetic construct
  source 1..23: mol_type = other RNA
agtgggtctcagggtggtgagga

SEQ ID NO: 69062 - RNA, 23 nt, synthetic construct
  source 1..23: mol_type = other RNA
tgggagctggggaagccagtggg

SEQ ID NO: 69063 - RNA, 23 nt, synthetic construct
  source 1..23: mol_type = other RNA
agtgggagctggggaagccagtg

SEQ ID NO: 69064 - RNA, 23 nt, synthetic construct
  source 1..23: mol_type = other RNA
aagtgggagctggggaagccagt

SEQ ID NO: 69065 - RNA, 23 nt, synthetic construct
  source 1..23: mol_type = other RNA
gaagtgggagctggggaagccag

SEQ ID NO: 69066 - RNA, 23 nt, synthetic construct
  source 1..23: mol_type = other RNA
agaagtgggagctggggaagcca

SEQ ID NO: 69067 - RNA, 23 nt, synthetic construct
  source 1..23: mol_type = other RNA
aatgtcacagtgctgattgcaca

SEQ ID NO: 69068 - RNA, 23 nt, synthetic construct
  source 1..23: mol_type = other RNA
ggtggggaggtgggacaggcgcc

SEQ ID NO: 69069 - RNA, 23 nt, synthetic construct
  source 1..23: mol_type = other RNA
cggtggggaggtgggacaggcgc

SEQ ID NO: 69070 - RNA, 23 nt, synthetic construct
  source 1..23: mol_type = other RNA
tggcggtggggaggtgggacagg

SEQ ID NO: 69071 - RNA, 23 nt, synthetic construct
  source 1..23: mol_type = other RNA
ctggcggtggggaggtgggacag

SEQ ID NO: 69072 - RNA, 23 nt, synthetic construct
  source 1..23: mol_type = other RNA
actggcggtggggaggtgggaca

SEQ ID NO: 69073 - RNA, 23 nt, synthetic construct
  source 1..23: mol_type = other RNA
acactggcggtggggaggtggga

SEQ ID NO: 69074 - RNA, 23 nt, synthetic construct
  source 1..23: mol_type = other RNA
aggacagcggggcggaggacact

SEQ ID NO: 69075 - RNA, 23 nt, synthetic construct
  source 1..23: mol_type = other RNA
agggcgaggacagcggggcggag

SEQ ID NO: 69076 - RNA, 23 nt, synthetic construct
  source 1..23: mol_type = other RNA
aggggagggcgaggacagcgggg

SEQ ID NO: 69077 - RNA, 23 nt, synthetic construct
  source 1..23: mol_type = other RNA
ggggcaggggagggcgaggacag

SEQ ID NO: 69078 - RNA, 23 nt, synthetic construct
  source 1..23: mol_type = other RNA
aggggcaggggagggcgaggaca

SEQ ID NO: 69079 - RNA, 23 nt, synthetic construct
  source 1..23: mol_type = other RNA
gtccaggtagaggctgagattcc

SEQ ID NO: 69080 - RNA, 23 nt, synthetic construct
  source 1..23: mol_type = other RNA
tgcagtagtggttgtccaggtag

SEQ ID NO: 69081 - RNA, 23 nt, synthetic construct
  source 1..23: mol_type = other RNA
agcggcagtggcagaggccgtgc

SEQ ID NO: 69082 - RNA, 23 nt, synthetic construct
  source 1..23: mol_type = other RNA
gcagcggcagtggcagaggccgt

SEQ ID NO: 69083 - RNA, 23 nt, synthetic construct
  source 1..23: mol_type = other RNA
ggcagcggcagtggcagaggccg

SEQ ID NO: 69084 - RNA, 23 nt, synthetic construct
  source 1..23: mol_type = other RNA
ggcagcgggcggcagcggcagtg

SEQ ID NO: 69085 - RNA, 23 nt, synthetic construct
  source 1..23: mol_type = other RNA
gggggcagcgggcggcagcggca

SEQ ID NO: 69086 - RNA, 23 nt, synthetic construct
  source 1..23: mol_type = other RNA
gagggcgcgggggcagcgggcgg

SEQ ID NO: 69087 - RNA, 23 nt, synthetic construct
  source 1..23: mol_type = other RNA
ctgagggcgcgggggcagcgggc

SEQ ID NO: 69088 - RNA, 23 nt, synthetic construct
  source 1..23: mol_type = other RNA
ggccctcctccttcccatgcacc

SEQ ID NO: 69089 - RNA, 23 nt, synthetic construct
  source 1..23: mol_type = other RNA
aggccctcctccttcccatgcac

SEQ ID NO: 69090 - RNA, 23 nt, synthetic construct
  source 1..23: mol_type = other RNA
caggccctcctccttcccatgca

SEQ ID NO: 69091 - RNA, 23 nt, synthetic construct
  source 1..23: mol_type = other RNA
tcaggccctcctccttcccatgc

SEQ ID NO: 69092 - RNA, 23 nt, synthetic construct
  source 1..23: mol_type = other RNA
cagcacagacacaagcacgccgt

SEQ ID NO: 69093 - RNA, 23 nt, synthetic construct
  source 1..23: mol_type = other RNA
cgcatggtggtggtccccagcac

SEQ ID NO: 69094 - RNA, 23 nt, synthetic construct
  source 1..23: mol_type = other RNA
agggcaggaatgtccacacgcat

SEQ ID NO: 69095 - RNA, 23 nt, synthetic construct
  source 1..23: mol_type = other RNA
cgggcctggaagacttggccatt

SEQ ID NO: 69096 - RNA, 23 nt, synthetic construct
  source 1..23: mol_type = other RNA
cagccgggcctggaagacttggc

SEQ ID NO: 69097 - RNA, 23 nt, synthetic construct
  source 1..23: mol_type = other RNA
tgtgccagtcggggcccagcagc

SEQ ID NO: 69098 - RNA, 23 nt, synthetic construct
  source 1..23: mol_type = other RNA
ggctggcagtggggggtgtgcca

SEQ ID NO: 69099 - RNA, 23 nt, synthetic construct
  source 1..23: mol_type = other RNA
gcggggctggcagtggggggtgt

SEQ ID NO: 69100 - RNA, 23 nt, synthetic construct
  source 1..23: mol_type = other RNA
ctgcggggctggcagtggggggt

SEQ ID NO: 69101 - RNA, 23 nt, synthetic construct
  source 1..23: mol_type = other RNA
ggcatggggtgggggtgggtgtg

SEQ ID NO: 69102 - RNA, 23 nt, synthetic construct
  source 1..23: mol_type = other RNA
tgggcatggggtgggggtgggtg

SEQ ID NO: 69103 - RNA, 23 nt, synthetic construct
  source 1..23: mol_type = other RNA
gctgtggtgggcatggggtgggg

SEQ ID NO: 69104 - RNA, 23 nt, synthetic construct
  source 1..23: mol_type = other RNA
agcggctgtggtgggcatggggt

SEQ ID NO: 69105 - RNA, 23 nt, synthetic construct
  source 1..23: mol_type = other RNA
gagcggctgtggtgggcatgggg

SEQ ID NO: 69106 - RNA, 23 nt, synthetic construct
  source 1..23: mol_type = other RNA
cactcagcaaagacctggctcag

SEQ ID NO: 69107 - RNA, 23 nt, synthetic construct
  source 1..23: mol_type = other RNA
gcactcagcaaagacctggctca

SEQ ID NO: 69108 - RNA, 23 nt, synthetic construct
  source 1..23: mol_type = other RNA
agcctccaggctctggcagggca

SEQ ID NO: 69109 - RNA, 23 nt, synthetic construct
  source 1..23: mol_type = other RNA
ccagctgtgggctctggttccta

SEQ ID NO: 69110 - RNA, 23 nt, synthetic construct
  source 1..23: mol_type = other RNA
tccagctgtgggctctggttcct

SEQ ID NO: 69111 - RNA, 23 nt, synthetic construct
  source 1..23: mol_type = other RNA
ctccagctgtgggctctggttcc

SEQ ID NO: 69112 - RNA, 23 nt, synthetic construct
  source 1..23: mol_type = other RNA
cctccagctgtgggctctggttc

SEQ ID NO: 69113 - RNA, 23 nt, synthetic construct
  source 1..23: mol_type = other RNA
tccgccatcccctccagctgtgg

SEQ ID NO: 69114 - RNA, 23 nt, synthetic construct
  source 1..23: mol_type = other RNA
cctccgccatcccctccagctgt

SEQ ID NO: 69115 - RNA, 23 nt, synthetic construct
  source 1..23: mol_type = other RNA
ggtcctcagggcagaagcagccc

SEQ ID NO: 69116 - RNA, 23 nt, synthetic construct
  source 1..23: mol_type = other RNA
atctggtcctcagggcagaagca

SEQ ID NO: 69117 - RNA, 23 nt, synthetic construct
  source 1..23: mol_type = other RNA
ggatctggtcctcagggcagaag

SEQ ID NO: 69118 - RNA, 23 nt, synthetic construct
  source 1..23: mol_type = other RNA
tcccacgcaggggcaggcctgca

SEQ ID NO: 69119 - RNA, 23 nt, synthetic construct
  source 1..23: mol_type = other RNA
ggtcccacgcaggggcaggcctg

SEQ ID NO: 69120 - RNA, 23 nt, synthetic construct
  source 1..23: mol_type = other RNA
gcaggactggcagttgctgaccc

SEQ ID NO: 69121 - RNA, 23 nt, synthetic construct
  source 1..23: mol_type = other RNA
gcgggggctgaccctgggcgtca

SEQ ID NO: 69122 - RNA, 23 nt, synthetic construct
  source 1..23: mol_type = other RNA
tctcggcccggggcctggtcacg

SEQ ID NO: 69123 - RNA, 23 nt, synthetic construct
  source 1..23: mol_type = other RNA
tgggggcaggtggttgtgttgca

SEQ ID NO: 69124 - RNA, 23 nt, synthetic construct
  source 1..23: mol_type = other RNA
ggctctgggggcaggtggttgtg

SEQ ID NO: 69125 - RNA, 23 nt, synthetic construct
  source 1..23: mol_type = other RNA
aggctctgggggcaggtggttgt

SEQ ID NO: 69126 - RNA, 23 nt, synthetic construct
  source 1..23: mol_type = other RNA
ggcaggctctgggggcaggtggt

SEQ ID NO: 69127 - RNA, 23 nt, synthetic construct
  source 1..23: mol_type = other RNA
caggcaggctctgggggcaggtg

SEQ ID NO: 69128 - RNA, 23 nt, synthetic construct
  source 1..23: mol_type = other RNA
cacaggcaggctctgggggcagg

SEQ ID NO: 69129 - RNA, 23 nt, synthetic construct
  source 1..23: mol_type = other RNA
gactcctgccctggcgggcacac

SEQ ID NO: 69130 - RNA, 23 nt, synthetic construct
  source 1..23: mol_type = other RNA
tggactcctgccctggcgggcac

SEQ ID NO: 69131 - RNA, 23 nt, synthetic construct
  source 1..23: mol_type = other RNA
cctcctgggtgcagatggactcc

SEQ ID NO: 69132 - RNA, 23 nt, synthetic construct
  source 1..23: mol_type = other RNA
tcctcctgggtgcagatggactc

SEQ ID NO: 69133 - RNA, 23 nt, synthetic construct
  source 1..23: mol_type = other RNA
cctcctcctgggtgcagatggac

SEQ ID NO: 69134 - RNA, 23 nt, synthetic construct
  source 1..23: mol_type = other RNA
cgccctcctcctgggtgcagatg

SEQ ID NO: 69135 - RNA, 23 nt, synthetic construct
  source 1..23: mol_type = other RNA
gtcgccctcctcctgggtgcaga

SEQ ID NO: 69136 - RNA, 23 nt, synthetic construct
  source 1..23: mol_type = other RNA
cacagctgaggtctgcagcggaa

SEQ ID NO: 69137 - RNA, 23 nt, synthetic construct
  source 1..23: mol_type = other RNA
acacagctgaggtctgcagcgga

SEQ ID NO: 69138 - RNA, 23 nt, synthetic construct
  source 1..23: mol_type = other RNA
agggaagggcgcctgggaaggtt

SEQ ID NO: 69139 - RNA, 23 nt, synthetic construct
  source 1..23: mol_type = other RNA
caaagccctggggacaggtagta

SEQ ID NO: 69140 - RNA, 23 nt, synthetic construct
  source 1..23: mol_type = other RNA
tactcaaagccctggggacaggt

SEQ ID NO: 69141 - RNA, 23 nt, synthetic construct
  source 1..23: mol_type = other RNA
tcagctggactggctggccatcg

SEQ ID NO: 69142 - RNA, 23 nt, synthetic construct
  source 1..23: mol_type = other RNA
agttgtccacatggctgttgacc

SEQ ID NO: 69143 - RNA, 23 nt, synthetic construct
  source 1..23: mol_type = other RNA
caccctcagcctcacagaggtac

SEQ ID NO: 69144 - RNA, 23 nt, synthetic construct
  source 1..23: mol_type = other RNA
tccaccctcagcctcacagaggt

SEQ ID NO: 69145 - RNA, 23 nt, synthetic construct
  source 1..23: mol_type = other RNA
ctccaccctcagcctcacagagg

SEQ ID NO: 69146 - RNA, 23 nt, synthetic construct
  source 1..23: mol_type = other RNA
actccaccctcagcctcacagag

SEQ ID NO: 69147 - RNA, 23 nt, synthetic construct
  source 1..23: mol_type = other RNA
cacatctgggcaggatgcaggct

SEQ ID NO: 69148 - RNA, 23 nt, synthetic construct
  source 1..23: mol_type = other RNA
tccccctgcagctggacacatct

SEQ ID NO: 69149 - RNA, 23 nt, synthetic construct
  source 1..23: mol_type = other RNA
tgacctcggtctcgcagccctgg

SEQ ID NO: 69150 - RNA, 23 nt, synthetic construct
  source 1..23: mol_type = other RNA
tccggggcaggagccctcgcaga

SEQ ID NO: 69151 - RNA, 23 nt, synthetic construct
  source 1..23: mol_type = other RNA
ctccggggcaggagccctcgcag

SEQ ID NO: 69152 - RNA, 23 nt, synthetic construct
  source 1..23: mol_type = other RNA
ggcctgggcctctgctgagtact

SEQ ID NO: 69153 - RNA, 23 nt, synthetic construct
  source 1..23: mol_type = other RNA
cctctcctggcagcaggtgcact

SEQ ID NO: 69154 - RNA, 23 nt, synthetic construct
  source 1..23: mol_type = other RNA
acccgcctctcctggcagcaggt

SEQ ID NO: 69155 - RNA, 23 nt, synthetic construct
  source 1..23: mol_type = other RNA
gggccgggaagccacgggtgtgt

SEQ ID NO: 69156 - RNA, 23 nt, synthetic construct
  source 1..23: mol_type = other RNA
ctcctgggccgggaagccacggg

SEQ ID NO: 69157 - RNA, 23 nt, synthetic construct
  source 1..23: mol_type = other RNA
ggcctcctgggccgggaagccac

SEQ ID NO: 69158 - RNA, 23 nt, synthetic construct
  source 1..23: mol_type = other RNA
tggcctcctgggccgggaagcca

SEQ ID NO: 69159 - RNA, 23 nt, synthetic construct
  source 1..23: mol_type = other RNA
cagcagtggcctcctgggccggg

SEQ ID NO: 69160 - RNA, 23 nt, synthetic construct
  source 1..23: mol_type = other RNA
cagacagcagtggcctcctgggc

SEQ ID NO: 69161 - RNA, 23 nt, synthetic construct
  source 1..23: mol_type = other RNA
catggggatggaggcagaacgtt

SEQ ID NO: 69162 - RNA, 23 nt, synthetic construct
  source 1..23: mol_type = other RNA
acatcctggctccaggtggacag

SEQ ID NO: 69163 - RNA, 23 nt, synthetic construct
  source 1..23: mol_type = other RNA
gttttcatgatcagacaatgcac

SEQ ID NO: 69164 - RNA, 23 nt, synthetic construct
  source 1..23: mol_type = other RNA
ggttttcatgatcagacaatgca

SEQ ID NO: 69165 - RNA, 23 nt, synthetic construct
  source 1..23: mol_type = other RNA
ggggctccgcagaggaggcccaa

SEQ ID NO: 69166 - RNA, 23 nt, synthetic construct
  source 1..23: mol_type = other RNA
cggggggctccgcagaggaggcc

SEQ ID NO: 69167 - RNA, 23 nt, synthetic construct
  source 1..23: mol_type = other RNA
aggccggggggctccgcagagga

SEQ ID NO: 69168 - RNA, 23 nt, synthetic construct
  source 1..23: mol_type = other RNA
caggccggggggctccgcagagg

SEQ ID NO: 69169 - RNA, 23 nt, synthetic construct
  source 1..23: mol_type = other RNA
tgccacacacaggccggggggct

SEQ ID NO: 69170 - RNA, 23 nt, synthetic construct
  source 1..23: mol_type = other RNA
cccctcacccttctggggccggt

SEQ ID NO: 69171 - RNA, 23 nt, synthetic construct
  source 1..23: mol_type = other RNA
ctgctggcccctcacccttctgg

SEQ ID NO: 69172 - RNA, 23 nt, synthetic construct
  source 1..23: mol_type = other RNA
cgaaaggggtcctgctggcccct

SEQ ID NO: 69173 - RNA, 23 nt, synthetic construct
  source 1..23: mol_type = other RNA
cagggaggggcaaggccaaggtg

SEQ ID NO: 69174 - RNA, 23 nt, synthetic construct
  source 1..23: mol_type = other RNA
tcagggaggggcaaggccaaggt

SEQ ID NO: 69175 - RNA, 23 nt, synthetic construct
  source 1..23: mol_type = other RNA
tgcgcgggcgctccggccgtggc

SEQ ID NO: 69176 - RNA, 23 nt, synthetic construct
  source 1..23: mol_type = other RNA
tggccttgcctggaccagcctgt

SEQ ID NO: 69177 - RNA, 23 nt, synthetic construct
  source 1..23: mol_type = other RNA
gcagctggccttgcctggaccag

SEQ ID NO: 69178 - RNA, 23 nt, synthetic construct
  source 1..23: mol_type = other RNA
ctggcagcagctggccttgcctg

SEQ ID NO: 69179 - RNA, 23 nt, synthetic construct
  source 1..23: mol_type = other RNA
cctggcagcagctggccttgcct

SEQ ID NO: 69180 - RNA, 23 nt, synthetic construct
  source 1..23: mol_type = other RNA
ttcctggcagcagctggccttgc

SEQ ID NO: 69181 - RNA, 23 nt, synthetic construct
  source 1..23: mol_type = other RNA
agcttcctggcagcagctggcct

SEQ ID NO: 69182 - RNA, 23 nt, synthetic construct
  source 1..23: mol_type = other RNA
cgcagcttcctggcagcagctgg

SEQ ID NO: 69183 - RNA, 23 nt, synthetic construct
  source 1..23: mol_type = other RNA
gtcgcagcttcctggcagcagct

SEQ ID NO: 69184 - RNA, 23 nt, synthetic construct
  source 1..23: mol_type = other RNA
ccttgcctgtcgcagcttcctgg

SEQ ID NO: 69185 - RNA, 23 nt, synthetic construct
  source 1..23: mol_type = other RNA
tgctgacccctctctgacctggc

SEQ ID NO: 69186 - RNA, 23 nt, synthetic construct
  source 1..23: mol_type = other RNA
tgggatgctgacccctctctgac

SEQ ID NO: 69187 - RNA, 23 nt, synthetic construct
  source 1..23: mol_type = other RNA
caatgctcagggtttatttgcaa

SEQ ID NO: 69188 - RNA, 23 nt, synthetic construct
  source 1..23: mol_type = other RNA
tgcagttgtccacatggctgttg

SEQ ID NO: 69189 - RNA, 23 nt, synthetic construct
  source 1..23: mol_type = other RNA
ggctgcgcccgtggcctccacca

SEQ ID NO: 69190 - RNA, 23 nt, synthetic construct
  source 1..23: mol_type = other RNA
gcactttgggagggggagctgtt

SEQ ID NO: 69191 - RNA, 23 nt, synthetic construct
  source 1..23: mol_type = other RNA
gcactttgggagggggagctgtt

SEQ ID NO: 69192 - RNA, 23 nt, synthetic construct
  source 1..23: mol_type = other RNA
gcactttgggagggggagctgtt

SEQ ID NO: 69193 - RNA, 23 nt, synthetic construct
  source 1..23: mol_type = other RNA
ggttttcaaacgtctcaaagtct

SEQ ID NO: 69194 - RNA, 23 nt, synthetic construct
  source 1..23: mol_type = other RNA
cctccttcccatgcaccatggtg

SEQ ID NO: 69195 - RNA, 23 nt, synthetic construct
  source 1..23: mol_type = other RNA
cgccgggtgggcgaggacgtcgg

SEQ ID NO: 69196 - RNA, 23 nt, synthetic construct
  source 1..23: mol_type = other RNA
gtgtgcagttacagctctggcag

SEQ ID NO: 69197 - RNA, 23 nt, synthetic construct
  source 1..23: mol_type = other RNA
ggatgggagttgtccctggagtt

SEQ ID NO: 69198 - RNA, 23 nt, synthetic construct
  source 1..23: mol_type = other RNA
gagaggctcccaggcagcttagc

SEQ ID NO: 69199 - RNA, 23 nt, synthetic construct
  source 1..23: mol_type = other RNA
gctggtcagcactggggtgatgg

SEQ ID NO: 69200 - RNA, 23 nt, synthetic construct
  source 1..23: mol_type = other RNA
ccaggaggccagtgcggctgtaa

SEQ ID NO: 69201 - RNA, 23 nt, synthetic construct
  source 1..23: mol_type = other RNA
gggggctttgggatgctgacccc

SEQ ID NO: 69202 - RNA, 23 nt, synthetic construct
  source 1..23: mol_type = other RNA
gctgtggtgctggccgggggagc

SEQ ID NO: 69203 - RNA, 23 nt, synthetic construct
  source 1..23: mol_type = other RNA
aagagggggtggccacagagccg

SEQ ID NO: 69204 - RNA, 23 nt, synthetic construct
  source 1..23: mol_type = other RNA
gtgctggtcagcactggggtgat

SEQ ID NO: 69205 - RNA, 23 nt, synthetic construct
  source 1..23: mol_type = other RNA
aggaggccagtgcggctgtaagg

SEQ ID NO: 69206 - RNA, 23 nt, synthetic construct
  source 1..23: mol_type = other RNA
ggggccagcgtgggtggctgtga

SEQ ID NO: 69207 - RNA, 23 nt, synthetic construct
  source 1..23: mol_type = other RNA
acaggccggggggctccgcagag

SEQ ID NO: 69208 - RNA, 23 nt, synthetic construct
  source 1..23: mol_type = other RNA
accaggaggccagtgcggctgta

SEQ ID NO: 69209 - RNA, 23 nt, synthetic construct
  source 1..23: mol_type = other RNA
acacgggcaggtggggcagcggc

SEQ ID NO: 69210 - RNA, 23 nt, synthetic construct
  source 1..23: mol_type = other RNA
ttggcacaggcagcctgggcctt

SEQ ID NO: 69211 - RNA, 23 nt, synthetic construct
  source 1..23: mol_type = other RNA
tccacctgctggcccagctcctc

SEQ ID NO: 69212 - RNA, 23 nt, synthetic construct
  source 1..23: mol_type = other RNA
gggctggtgcctggggccgggga

SEQ ID NO: 69213 - RNA, 23 nt, synthetic construct
  source 1..23: mol_type = other RNA
acagggcctgggtggtggtggtg

SEQ ID NO: 69214 - RNA, 23 nt, synthetic construct
  source 1..23: mol_type = other RNA
agggagtggctctggagctgatg

SEQ ID NO: 69215 - RNA, 23 nt, synthetic construct
  source 1..23: mol_type = other RNA
tgtggctgtggctgtggtcctgg

SEQ ID NO: 69216 - RNA, 23 nt, synthetic construct
  source 1..23: mol_type = other RNA
cagggcagaagcagccctccgcc

SEQ ID NO: 69217 - RNA, 23 nt, synthetic construct
  source 1..23: mol_type = other RNA
ggagggctgagggctggtgcctg

SEQ ID NO: 69218 - RNA, 23 nt, synthetic construct
  source 1..23: mol_type = other RNA
cagggaagggcgcctgggaaggt

SEQ ID NO: 69219 - RNA, 23 nt, synthetic construct
  source 1..23: mol_type = other RNA
tggggggcagggaccgcccgtgt

SEQ ID NO: 69220 - RNA, 23 nt, synthetic construct
  source 1..23: mol_type = other RNA
ctggggggcagggaccgcccgtg

SEQ ID NO: 69221 - RNA, 23 nt, synthetic construct
  source 1..23: mol_type = other RNA
gggatgctgacccctctctgacc

SEQ ID NO: 69222 - RNA, 23 nt, synthetic construct
  source 1..23: mol_type = other RNA
gccacgggtgtgtgggggagcca

SEQ ID NO: 69223 - RNA, 23 nt, synthetic construct
  source 1..23: mol_type = other RNA
agccacgggtgtgtgggggagcc

SEQ ID NO: 69224 - RNA, 23 nt, synthetic construct
  source 1..23: mol_type = other RNA
gctggggaagccagtgggtctca

SEQ ID NO: 69225 - RNA, 23 nt, synthetic construct
  source 1..23: mol_type = other RNA
ctggaccagcctgtctgccccag

SEQ ID NO: 69226 - RNA, 23 nt, synthetic construct
  source 1..23: mol_type = other RNA
gtgtggtggcggtggtggtcagc

SEQ ID NO: 69227 - RNA, 23 nt, synthetic construct
  source 1..23: mol_type = other RNA
gtgtggtggcggtggtggtcagc

SEQ ID NO: 69228 - RNA, 23 nt, synthetic construct
  source 1..23: mol_type = other RNA
gtgtggtggcggtggtggtcagc

SEQ ID NO: 69229 - RNA, 23 nt, synthetic construct
  source 1..23: mol_type = other RNA
gtgtggtggcggtggtggtcagc

SEQ ID NO: 69230 - RNA, 23 nt, synthetic construct
  source 1..23: mol_type = other RNA
gctggggggcagggaccgcccgt

SEQ ID NO: 69231 - RNA, 23 nt, synthetic construct
  source 1..23: mol_type = other RNA
ccctggggaagggggtgactcgg

SEQ ID NO: 69232 - RNA, 23 nt, synthetic construct
  source 1..23: mol_type = other RNA
gtccctggggaagggggtgactc

SEQ ID NO: 69233 - RNA, 23 nt, synthetic construct
  source 1..23: mol_type = other RNA
gagggctgagggctggtgcctgg

SEQ ID NO: 69234 - RNA, 23 nt, synthetic construct
  source 1..23: mol_type = other RNA
cctggggaagggggtgactcggt

SEQ ID NO: 69235 - RNA, 23 nt, synthetic construct
  source 1..23: mol_type = other RNA
  misc_difference 22: note = a, c, u, g, unknown or other
  misc_difference 23: note = a, c, u, g, unknown or other
agggagggagccgggccgggtnn

SEQ ID NO: 69236 - RNA, 23 nt, synthetic construct
  source 1..23: mol_type = other RNA
gaggagggggtggctgtgaagcc

SEQ ID NO: 69237 - RNA, 23 nt, synthetic construct
  source 1..23: mol_type = other RNA
gaggagggggtggctgtgaagcc

SEQ ID NO: 69238 - RNA, 23 nt, synthetic construct
  source 1..23: mol_type = other RNA
gaggagggggtggctgtgaagcc

SEQ ID NO: 69239 - RNA, 23 nt, synthetic construct
  source 1..23: mol_type = other RNA
gaggagggggtggctgtgaagcc

SEQ ID NO: 69240 - RNA, 23 nt, synthetic construct
  source 1..23: mol_type = other RNA
ctggggaagccagtgggtctcag

SEQ ID NO: 69241 - RNA, 23 nt, synthetic construct
  source 1..23: mol_type = other RNA
gggcagcgggcggcagcggcagt

SEQ ID NO: 69242 - RNA, 23 nt, synthetic construct
  source 1..23: mol_type = other RNA
gtcttggccatgtccttgcaact

SEQ ID NO: 69243 - RNA, 23 nt, synthetic construct
  source 1..23: mol_type = other RNA
ccggggctgcggggctggcagtg

SEQ ID NO: 69244 - RNA, 23 nt, synthetic construct
  source 1..23: mol_type = other RNA
agacaccggggctgcggggctgg

SEQ ID NO: 69245 - RNA, 23 nt, synthetic construct
  source 1..23: mol_type = other RNA
cgtcacggggcctgagctggacc

SEQ ID NO: 69246 - RNA, 23 nt, synthetic construct
  source 1..23: mol_type = other RNA
accggtggttgctgctggggtgt

SEQ ID NO: 69247 - RNA, 23 nt, synthetic construct
  source 1..23: mol_type = other RNA
accggtggttgctgctggggtgt

SEQ ID NO: 69248 - RNA, 23 nt, synthetic construct
  source 1..23: mol_type = other RNA
aaggttggcaggctgctggggag

SEQ ID NO: 69249 - RNA, 23 nt, synthetic construct
  source 1..23: mol_type = other RNA
tagggtgagggctggaaagggct

SEQ ID NO: 69250 - RNA, 23 nt, synthetic construct
  source 1..23: mol_type = other RNA
ggctgcggggctggcagtggggg

SEQ ID NO: 69251 - RNA, 23 nt, synthetic construct
  source 1..23: mol_type = other RNA
ctccacagggccctgggtctctg

SEQ ID NO: 69252 - RNA, 23 nt, synthetic construct
  source 1..23: mol_type = other RNA
ctgtggtgctggccgggggagcc

SEQ ID NO: 69253 - RNA, 23 nt, synthetic construct
  source 1..23: mol_type = other RNA
aggaggggttggtggtggagccg

SEQ ID NO: 69254 - RNA, 23 nt, synthetic construct
  source 1..23: mol_type = other RNA
aggaggggttggtggtggagccg

SEQ ID NO: 69255 - RNA, 23 nt, synthetic construct
  source 1..23: mol_type = other RNA
aggaggggttggtggtggagccg

SEQ ID NO: 69256 - RNA, 23 nt, synthetic construct
  source 1..23: mol_type = other RNA
aggaggggttggtggtggagccg

SEQ ID NO: 69257 - RNA, 23 nt, synthetic construct
  source 1..23: mol_type = other RNA
aggaggggttggtggtggagccg

SEQ ID NO: 69258 - RNA, 23 nt, synthetic construct
  source 1..23: mol_type = other RNA
ccggggcaggagccctcgcagaa

SEQ ID NO: 69259 - RNA, 23 nt, synthetic construct
  source 1..23: mol_type = other RNA
ggacagggtggccgtggatccag

SEQ ID NO: 69260 - RNA, 23 nt, synthetic construct
  source 1..23: mol_type = other RNA
ccctccagctgtgggctctggtt

SEQ ID NO: 69261 - RNA, 23 nt, synthetic construct
  source 1..23: mol_type = other RNA
tcggggcccagcagccatccttt

SEQ ID NO: 69262 - RNA, 23 nt, synthetic construct
  source 1..23: mol_type = other RNA
gtccccacacaggccacaggtct

SEQ ID NO: 69263 - RNA, 23 nt, synthetic construct
  source 1..23: mol_type = other RNA
ggtcctcgcagagctgcgcgcgc

SEQ ID NO: 69264 - RNA, 23 nt, synthetic construct
  source 1..23: mol_type = other RNA
cggttcctgcaggtgcaggtgtt

SEQ ID NO: 69265 - RNA, 23 nt, synthetic construct
  source 1..23: mol_type = other RNA
gggagggctgagggctggtgcct

SEQ ID NO: 69266 - RNA, 23 nt, synthetic construct
  source 1..23: mol_type = other RNA
actgctgtggtgctggccggggg

SEQ ID NO: 69267 - RNA, 23 nt, synthetic construct
  source 1..23: mol_type = other RNA
gccctggctggtggtggtgttag

SEQ ID NO: 69268 - RNA, 23 nt, synthetic construct
  source 1..23: mol_type = other RNA
ctgtggaggtgtgggcagtctct

SEQ ID NO: 69269 - RNA, 23 nt, synthetic construct
  source 1..23: mol_type = other RNA
actgtggaggtgtgggcagtctc

SEQ ID NO: 69270 - RNA, 23 nt, synthetic construct
  source 1..23: mol_type = other RNA
ttcctggggtggaggagggggtg

SEQ ID NO: 69271 - RNA, 23 nt, synthetic construct
  source 1..23: mol_type = other RNA
ctagggtgagggctggaaagggc

SEQ ID NO: 69272 - RNA, 23 nt, synthetic construct
  source 1..23: mol_type = other RNA
ctggaggtggccgtggtgtggcc

SEQ ID NO: 69273 - RNA, 23 nt, synthetic construct
  source 1..23: mol_type = other RNA
tggccgtggctgtggtcctggag

SEQ ID NO: 69274 - RNA, 23 nt, synthetic construct
  source 1..23: mol_type = other RNA
agggaggaggaggggatggctgt

SEQ ID NO: 69275 - RNA, 23 nt, synthetic construct
  source 1..23: mol_type = other RNA
cagggaggaggaggggatggctg

SEQ ID NO: 69276 - RNA, 23 nt, synthetic construct
  source 1..23: mol_type = other RNA
acagtctctggagtggaggaggg

SEQ ID NO: 69277 - RNA, 23 nt, synthetic construct
  source 1..23: mol_type = other RNA
ttcctggggtggaggagggggtg

SEQ ID NO: 69278 - RNA, 23 nt, synthetic construct
  source 1..23: mol_type = other RNA
gactgctgggggacagggatcgc

SEQ ID NO: 69279 - RNA, 23 nt, synthetic construct
  source 1..23: mol_type = other RNA
gggtggccgtggggccagtggct

SEQ ID NO: 69280 - RNA, 23 nt, synthetic construct
  source 1..23: mol_type = other RNA
ttcctggggtggaggagggggtg

SEQ ID NO: 69281 - RNA, 23 nt, synthetic construct
  source 1..23: mol_type = other RNA
agggaggaggaggggatggctgt

SEQ ID NO: 69282 - RNA, 23 nt, synthetic construct
  source 1..23: mol_type = other RNA
cagggaggaggaggggatggctg

SEQ ID NO: 69283 - RNA, 23 nt, synthetic construct
  source 1..23: mol_type = other RNA
ctgtggaggtgtgggcagtctct

SEQ ID NO: 69284 - RNA, 23 nt, synthetic construct
  source 1..23: mol_type = other RNA
actgtggaggtgtgggcagtctc

SEQ ID NO: 69285 - RNA, 23 nt, synthetic construct
  source 1..23: mol_type = other RNA
gactgctgggggacagggatcgc

SEQ ID NO: 69286 - RNA, 23 nt, synthetic construct
  source 1..23: mol_type = other RNA
ctggaggtggccgtggtgtggcc

SEQ ID NO: 69287 - RNA, 23 nt, synthetic construct
  source 1..23: mol_type = other RNA
ccaagggtggaggaggggatggg

SEQ ID NO: 69288 - RNA, 23 nt, synthetic construct
  source 1..23: mol_type = other RNA
gggtggccgtggggccagtggct

SEQ ID NO: 69289 - RNA, 23 nt, synthetic construct
  source 1..23: mol_type = other RNA
agggaggaggaggggatggctgt

SEQ ID NO: 69290 - RNA, 23 nt, synthetic construct
  source 1..23: mol_type = other RNA
cagggaggaggaggggatggctg

SEQ ID NO: 69291 - RNA, 23 nt, synthetic construct
  source 1..23: mol_type = other RNA
acagtctctggagtggaggaggg

SEQ ID NO: 69292 - RNA, 23 nt, synthetic construct
  source 1..23: mol_type = other RNA
ttcctggggtggaggagggggtg

SEQ ID NO: 69293 - RNA, 23 nt, synthetic construct
  source 1..23: mol_type = other RNA
ggggcagcgggcggcagcggcag

SEQ ID NO: 69294 - RNA, 23 nt, synthetic construct
  source 1..23: mol_type = other RNA
gctgcggggctggcagtgggggg

SEQ ID NO: 69295 - RNA, 23 nt, synthetic construct
  source 1..23: mol_type = other RNA
gggctgcggggctggcagtgggg

SEQ ID NO: 69296 - RNA, 23 nt, synthetic construct
  source 1..23: mol_type = other RNA
ggggctgcggggctggcagtggg

SEQ ID NO: 69297 - RNA, 23 nt, synthetic construct
  source 1..23: mol_type = other RNA
cccctccagctgtgggctctggt

SEQ ID NO: 69298 - RNA, 23 nt, synthetic construct
  source 1..23: mol_type = other RNA
tcccctccagctgtgggctctgg

SEQ ID NO: 69299 - RNA, 23 nt, synthetic construct
  source 1..23: mol_type = other RNA
aggcaggctctgggggcaggtgg

SEQ ID NO: 69300 - RNA, 23 nt, synthetic construct
  source 1..23: mol_type = other RNA
cgtgcagggtgagccacactcct

SEQ ID NO: 69301 - RNA, 23 nt, synthetic construct
  source 1..23: mol_type = other RNA
ggtgactgtgggtgtggtggccg

SEQ ID NO: 69302 - RNA, 23 nt, synthetic construct
  source 1..23: mol_type = other RNA
cgggggactctgttggctgttgg

SEQ ID NO: 69303 - RNA, 23 nt, synthetic construct
  source 1..23: mol_type = other RNA
gttctcagacagcagtggcctcc

SEQ ID NO: 69304 - RNA, 23 nt, synthetic construct
  source 1..23: mol_type = other RNA
cttctgagagggtggggactgct

SEQ ID NO: 69305 - RNA, 23 nt, synthetic construct
  source 1..23: mol_type = other RNA
cccgtgtgtggtggccatggtgt

SEQ ID NO: 69306 - RNA, 23 nt, synthetic construct
  source 1..23: mol_type = other RNA
ctcagccctgagttaccctgcag

SEQ ID NO: 69307 - RNA, 23 nt, synthetic construct
  source 1..23: mol_type = other RNA
cacaggctttgggtccagcagga

SEQ ID NO: 69308 - RNA, 23 nt, synthetic construct
  source 1..23: mol_type = other RNA
ctggtgactgtgggtgtggtggc

SEQ ID NO: 69309 - RNA, 23 nt, synthetic construct
  source 1..23: mol_type = other RNA
cactgtgctgctggtggctgcag

SEQ ID NO: 69310 - RNA, 23 nt, synthetic construct
  source 1..23: mol_type = other RNA
tggggactgctgggggacaggga

SEQ ID NO: 69311 - RNA, 23 nt, synthetic construct
  source 1..23: mol_type = other RNA
cactgtgctgctggtggctgcag

SEQ ID NO: 69312 - RNA, 23 nt, synthetic construct
  source 1..23: mol_type = other RNA
cactgtgctgctggtggctgcag

SEQ ID NO: 69313 - RNA, 23 nt, synthetic construct
  source 1..23: mol_type = other RNA
tggggactgctgggggacaggga

SEQ ID NO: 69314 - RNA, 23 nt, synthetic construct
  source 1..23: mol_type = other RNA
gggcacacaggcaggctctgggg

SEQ ID NO: 69315 - RNA, 23 nt, synthetic construct
  source 1..23: mol_type = other RNA
gtggagatgtgggccccgccctg

SEQ ID NO: 69316 - RNA, 23 nt, synthetic construct
  source 1..23: mol_type = other RNA
gggcggaggacactggcggtggg

SEQ ID NO: 69317 - RNA, 23 nt, synthetic construct
  source 1..23: mol_type = other RNA
acgctccggggcaggagccctcg

SEQ ID NO: 69318 - RNA, 23 nt, synthetic construct
  source 1..23: mol_type = other RNA
gccgggctctgggcggtgcccat

SEQ ID NO: 69319 - RNA, 23 nt, synthetic construct
  source 1..23: mol_type = other RNA
ggtggagatgtgggccccgccct

SEQ ID NO: 69320 - RNA, 23 nt, synthetic construct
  source 1..23: mol_type = other RNA
ggcgtccgggcaggagggggaga

SEQ ID NO: 69321 - RNA, 23 nt, synthetic construct
  source 1..23: mol_type = other RNA
gggccacaggctctcccagggta

SEQ ID NO: 69322 - RNA, 23 nt, synthetic construct
  source 1..23: mol_type = other RNA
tgtggtggtctgtgctgggacgg

SEQ ID NO: 69323 - RNA, 23 nt, synthetic construct
  source 1..23: mol_type = other RNA
ggtcccaagggtggaggagggga

SEQ ID NO: 69324 - RNA, 23 nt, synthetic construct
  source 1..23: mol_type = other RNA
gatgactgtgggtgtggtggccg

SEQ ID NO: 69325 - RNA, 23 nt, synthetic construct
  source 1..23: mol_type = other RNA
gacgctccggggcaggagccctc

SEQ ID NO: 69326 - RNA, 23 nt, synthetic construct
  source 1..23: mol_type = other RNA
agtcactgtgctgctggtggctg

SEQ ID NO: 69327 - RNA, 23 nt, synthetic construct
  source 1..23: mol_type = other RNA
ccccggagtggaggagggggtgg

SEQ ID NO: 69328 - RNA, 23 nt, synthetic construct
  source 1..23: mol_type = other RNA
agtcactgtgctgctggtggctg

SEQ ID NO: 69329 - RNA, 23 nt, synthetic construct
  source 1..23: mol_type = other RNA
agtcactgtgctgctggtggctg

SEQ ID NO: 69330 - RNA, 23 nt, synthetic construct
  source 1..23: mol_type = other RNA
ccccggagtggaggagggggtgg

SEQ ID NO: 69331 - RNA, 23 nt, synthetic construct
  source 1..23: mol_type = other RNA
atgggtgtggtggtctgttctgg

SEQ ID NO: 69332 - RNA, 23 nt, synthetic construct
  source 1..23: mol_type = other RNA
acgggtgtggtggtctgttctgg

SEQ ID NO: 69333 - RNA, 23 nt, synthetic construct
  source 1..23: mol_type = other RNA
gcgggcacacaggcaggctctgg

SEQ ID NO: 69334 - RNA, 23 nt, synthetic construct
  source 1..23: mol_type = other RNA
ccatgggggctgcacaccctgtg

SEQ ID NO: 69335 - RNA, 23 nt, synthetic construct
  source 1..23: mol_type = other RNA
atcctggctccaggtggacagag

SEQ ID NO: 69336 - RNA, 23 nt, synthetic construct
  source 1..23: mol_type = other RNA
cccggagcaggtgcaggagctgc

SEQ ID NO: 69337 - RNA, 23 nt, synthetic construct
  source 1..23: mol_type = other RNA
tgcagccccaggcctgtctgcac

SEQ ID NO: 69338 - RNA, 23 nt, synthetic construct
  source 1..23: mol_type = other RNA
gcctgggtggtggtggtggtggc

SEQ ID NO: 69339 - RNA, 23 nt, synthetic construct
  source 1..23: mol_type = other RNA
ccccgggatggaggagggggtca

SEQ ID NO: 69340 - RNA, 23 nt, synthetic construct
  source 1..23: mol_type = other RNA
gctgtggtcctggaggtggccgt

SEQ ID NO: 69341 - RNA, 23 nt, synthetic construct
  source 1..23: mol_type = other RNA
tgggtgtggccgtggctgtggtc

SEQ ID NO: 69342 - RNA, 23 nt, synthetic construct
  source 1..23: mol_type = other RNA
ccccgggatggaggagggggtca

SEQ ID NO: 69343 - RNA, 23 nt, synthetic construct
  source 1..23: mol_type = other RNA
ggagtggaggagggggtggacat

SEQ ID NO: 69344 - RNA, 23 nt, synthetic construct
  source 1..23: mol_type = other RNA
ccccgggatggaggagggggtca

SEQ ID NO: 69345 - RNA, 23 nt, synthetic construct
  source 1..23: mol_type = other RNA
ggagtggaggagggggtggacgt

SEQ ID NO: 69346 - RNA, 23 nt, synthetic construct
  source 1..23: mol_type = other RNA
ccccgggatggaggagggggtca

SEQ ID NO: 69347 - RNA, 23 nt, synthetic construct
  source 1..23: mol_type = other RNA
accagcctgtctgccccagcggc

SEQ ID NO: 69348 - RNA, 23 nt, synthetic construct
  source 1..23: mol_type = other RNA
cgtagagctggtggccggggtgc

SEQ ID NO: 69349 - RNA, 23 nt, synthetic construct
  source 1..23: mol_type = other RNA
cgtagagctggtggccggggtgc

SEQ ID NO: 69350 - RNA, 23 nt, synthetic construct
  source 1..23: mol_type = other RNA
cgtagagctggtggccggggtgc

SEQ ID NO: 69351 - RNA, 23 nt, synthetic construct
  source 1..23: mol_type = other RNA
cgtagagctggtggccggggtgc

SEQ ID NO: 69352 - RNA, 23 nt, synthetic construct
  source 1..23: mol_type = other RNA
gcactgagggagggctgagggct

SEQ ID NO: 69353 - RNA, 23 nt, synthetic construct
  source 1..23: mol_type = other RNA
ccgtgggtgtggtggtctgtgat

SEQ ID NO: 69354 - RNA, 23 nt, synthetic construct
  source 1..23: mol_type = other RNA
ccgtgggtgtggtggtctgtgat

SEQ ID NO: 69355 - RNA, 23 nt, synthetic construct
  source 1..23: mol_type = other RNA
ccgtgggtgtggtggtctgtgat

SEQ ID NO: 69356 - RNA, 23 nt, synthetic construct
  source 1..23: mol_type = other RNA
ccgtgggtgtggtggtctgtgat

SEQ ID NO: 69357 - RNA, 23 nt, synthetic construct
  source 1..23: mol_type = other RNA
ccgtgggtgtggtggtctgtgat

SEQ ID NO: 69358 - RNA, 23 nt, synthetic construct
  source 1..23: mol_type = other RNA
tgcagcccccactcccatccgac

SEQ ID NO: 69359 - RNA, 23 nt, synthetic construct
  source 1..23: mol_type = other RNA
gttgcctgggtggaggaggcggt

SEQ ID NO: 69360 - RNA, 23 nt, synthetic construct
  source 1..23: mol_type = other RNA
gttgcctgggtggaggaggcggt

SEQ ID NO: 69361 - RNA, 23 nt, synthetic construct
  source 1..23: mol_type = other RNA
gttgcctgggtggaggaggcggt

SEQ ID NO: 69362 - RNA, 23 nt, synthetic construct
  source 1..23: mol_type = other RNA
agttgcaggtggcaggctgtatg

SEQ ID NO: 69363 - RNA, 23 nt, synthetic construct
  source 1..23: mol_type = other RNA
gctggccttgcctggaccagcct

SEQ ID NO: 69364 - RNA, 23 nt, synthetic construct
  source 1..23: mol_type = other RNA
ggcctcgttgtgcacacaggggc

SEQ ID NO: 69365 - RNA, 23 nt, synthetic construct
  source 1..23: mol_type = other RNA
tggagcctctggttgtgggtgtg

SEQ ID NO: 69366 - RNA, 23 nt, synthetic construct
  source 1..23: mol_type = other RNA
tggagcctctggttgtgggtgtg

SEQ ID NO: 69367 - RNA, 23 nt, synthetic construct
  source 1..23: mol_type = other RNA
gcagtggcagaggccgtgcagta

SEQ ID NO: 69368 - RNA, 23 nt, synthetic construct
  source 1..23: mol_type = other RNA
gaggagggggtggacatggaact

SEQ ID NO: 69369 - RNA, 23 nt, synthetic construct
  source 1..23: mol_type = other RNA
tggtcccaagggtgaaggagggg

SEQ ID NO: 69370 - RNA, 23 nt, synthetic construct
  source 1..23: mol_type = other RNA
ggtgcccagggaggaggagggga

SEQ ID NO: 69371 - RNA, 23 nt, synthetic construct
  source 1..23: mol_type = other RNA
ggtgcccagggaggaggagggga

SEQ ID NO: 69372 - RNA, 23 nt, synthetic construct
  source 1..23: mol_type = other RNA
ggtgcccagggaggaggagggga

SEQ ID NO: 69373 - RNA, 23 nt, synthetic construct
  source 1..23: mol_type = other RNA
ccatcccctccagctgtgggctc

SEQ ID NO: 69374 - RNA, 23 nt, synthetic construct
  source 1..23: mol_type = other RNA
cactgtggaggtgtggacagtct

SEQ ID NO: 69375 - RNA, 23 nt, synthetic construct
  source 1..23: mol_type = other RNA
cactgtggaggtgtggacagtct

SEQ ID NO: 69376 - RNA, 23 nt, synthetic construct
  source 1..23: mol_type = other RNA
cactgtggaggtgtggacagtct

SEQ ID NO: 69377 - RNA, 23 nt, synthetic construct
  source 1..23: mol_type = other RNA
cgttctcagacagcagtggcctc

SEQ ID NO: 69378 - RNA, 23 nt, synthetic construct
  source 1..23: mol_type = other RNA
ccttctgagagggtggggactgc

SEQ ID NO: 69379 - RNA, 23 nt, synthetic construct
  source 1..23: mol_type = other RNA
acgcctccagcaccagcccctgg

SEQ ID NO: 69380 - RNA, 23 nt, synthetic construct
  source 1..23: mol_type = other RNA
gctggtgcctggggccggggagg

SEQ ID NO: 69381 - RNA, 23 nt, synthetic construct
  source 1..23: mol_type = other RNA
tccttctgagagggtggggactg

SEQ ID NO: 69382 - RNA, 23 nt, synthetic construct
  source 1..23: mol_type = other RNA
gtccttctgagagggtggggact

SEQ ID NO: 69383 - RNA, 23 nt, synthetic construct
  source 1..23: mol_type = other RNA
gttggtggtggagccggtggccg

SEQ ID NO: 69384 - RNA, 23 nt, synthetic construct
  source 1..23: mol_type = other RNA
gttggtggtggagccggtggccg

SEQ ID NO: 69385 - RNA, 23 nt, synthetic construct
  source 1..23: mol_type = other RNA
gtgctgggctctgtgaggatcca

SEQ ID NO: 69386 - RNA, 23 nt, synthetic construct
  source 1..23: mol_type = other RNA
actggaggagggagtggctctgg

SEQ ID NO: 69387 - RNA, 23 nt, synthetic construct
  source 1..23: mol_type = other RNA
agggaggaagaggggatggctgt

SEQ ID NO: 69388 - RNA, 23 nt, synthetic construct
  source 1..23: mol_type = other RNA
gttggtggtggagccggtggctg

SEQ ID NO: 69389 - RNA, 23 nt, synthetic construct
  source 1..23: mol_type = other RNA
gttggtggtggagccggtggccg

SEQ ID NO: 69390 - RNA, 23 nt, synthetic construct
  source 1..23: mol_type = other RNA
cccaagggtggaggaggggatgg

SEQ ID NO: 69391 - RNA, 23 nt, synthetic construct
  source 1..23: mol_type = other RNA
gttggtggtggagccggtggccg

SEQ ID NO: 69392 - RNA, 23 nt, synthetic construct
  source 1..23: mol_type = other RNA
gggcgcgggggcagcgggcggca

SEQ ID NO: 69393 - RNA, 23 nt, synthetic construct
  source 1..23: mol_type = other RNA
gcagccgggcctggaagacttgg

SEQ ID NO: 69394 - RNA, 23 nt, synthetic construct
  source 1..23: mol_type = other RNA
acacaggcaggctctgggggcag

SEQ ID NO: 69395 - RNA, 23 nt, synthetic construct
  source 1..23: mol_type = other RNA
ccacgtgggtgtaggtgtgcagg

SEQ ID NO: 69396 - RNA, 23 nt, synthetic construct
  source 1..23: mol_type = other RNA
tggctgtgcttgtcagcactgga

SEQ ID NO: 69397 - RNA, 23 nt, synthetic construct
  source 1..23: mol_type = other RNA
tggctgtgcttgtcagcactgga

SEQ ID NO: 69398 - RNA, 23 nt, synthetic construct
  source 1..23: mol_type = other RNA
tggctgtgcttgtcagcactgga

SEQ ID NO: 69399 - RNA, 23 nt, synthetic construct
  source 1..23: mol_type = other RNA
tgtcccaggagttgaggaggggt

SEQ ID NO: 69400 - RNA, 23 nt, synthetic construct
  source 1..23: mol_type = other RNA
aagggcgcctgggaaggttgcac

SEQ ID NO: 69401 - RNA, 23 nt, synthetic construct
  source 1..23: mol_type = other RNA
tcaccgtggaaggctctgtgatg

SEQ ID NO: 69402 - RNA, 23 nt, synthetic construct
  source 1..23: mol_type = other RNA
tcaccgtggaaggctctgtgatg

SEQ ID NO: 69403 - RNA, 23 nt, synthetic construct
  source 1..23: mol_type = other RNA
gtacaccatgggggctgcacacc

SEQ ID NO: 69404 - RNA, 23 nt, synthetic construct
  source 1..23: mol_type = other RNA
ggagggagtggctctggagctga

SEQ ID NO: 69405 - RNA, 23 nt, synthetic construct
  source 1..23: mol_type = other RNA
ctgtctgccccagcggccggacg

SEQ ID NO: 69406 - RNA, 23 nt, synthetic construct
  source 1..23: mol_type = other RNA
tcggttgctgtggtctgggttgg

SEQ ID NO: 69407 - RNA, 23 nt, synthetic construct
  source 1..23: mol_type = other RNA
ggctggctgggtgggcacttcgg

SEQ ID NO: 69408 - RNA, 23 nt, synthetic construct
  source 1..23: mol_type = other RNA
gccgttggacgcctccagcacca

SEQ ID NO: 69409 - RNA, 23 nt, synthetic construct
  source 1..23: mol_type = other RNA
cgccctcctgctcccagttcctg

SEQ ID NO: 69410 - RNA, 23 nt, synthetic construct
  source 1..23: mol_type = other RNA
cagtggcctcctgggccgggaag

SEQ ID NO: 69411 - RNA, 23 nt, synthetic construct
  source 1..23: mol_type = other RNA
tccccgtggaaggctctgtgatg

SEQ ID NO: 69412 - RNA, 23 nt, synthetic construct
  source 1..23: mol_type = other RNA
tccccgtggaaggctctgtgatg

SEQ ID NO: 69413 - RNA, 23 nt, synthetic construct
  source 1..23: mol_type = other RNA
tcttgtagtggaagtcaccccag

SEQ ID NO: 69414 - RNA, 23 nt, synthetic construct
  source 1..23: mol_type = other RNA
ccggagcaggtgcaggagctgca

SEQ ID NO: 69415 - RNA, 23 nt, synthetic construct
  source 1..23: mol_type = other RNA
tggcaccagctgcaccagcagct

SEQ ID NO: 69416 - RNA, 23 nt, synthetic construct
  source 1..23: mol_type = other RNA
ggtgtggtggcggtggtggtcag

SEQ ID NO: 69417 - RNA, 23 nt, synthetic construct
  source 1..23: mol_type = other RNA
ttgcctgggtggaggaggcggtg

SEQ ID NO: 69418 - RNA, 23 nt, synthetic construct
  source 1..23: mol_type = other RNA
ggtgtggtggcggtggtggtcag

SEQ ID NO: 69419 - RNA, 23 nt, synthetic construct
  source 1..23: mol_type = other RNA
ggtgtggtggcggtggtggtcag

SEQ ID NO: 69420 - RNA, 23 nt, synthetic construct
  source 1..23: mol_type = other RNA
ttgcctgggtggaggaggcggtg

SEQ ID NO: 69421 - RNA, 23 nt, synthetic construct
  source 1..23: mol_type = other RNA
ggtgtggtggcggtggtggtcag

SEQ ID NO: 69422 - RNA, 23 nt, synthetic construct
  source 1..23: mol_type = other RNA
ttgcctgggtggaggaggcggtg

SEQ ID NO: 69423 - RNA, 23 nt, synthetic construct
  source 1..23: mol_type = other RNA
tgggtccccacccggccctctcg

SEQ ID NO: 69424 - RNA, 23 nt, synthetic construct
  source 1..23: mol_type = other RNA
tgaggatccaggtcgtccctgga

SEQ ID NO: 69425 - RNA, 23 nt, synthetic construct
  source 1..23: mol_type = other RNA
tgcatggcctgggcctctgctga

SEQ ID NO: 69426 - RNA, 23 nt, synthetic construct
  source 1..23: mol_type = other RNA
tgctgctggggtgtgggaagtcc

SEQ ID NO: 69427 - RNA, 23 nt, synthetic construct
  source 1..23: mol_type = other RNA
tgctgctggggtgtgggaagtca

SEQ ID NO: 69428 - RNA, 23 nt, synthetic construct
  source 1..23: mol_type = other RNA
tgctgctggggtgtgggaagtcc

SEQ ID NO: 69429 - RNA, 23 nt, synthetic construct
  source 1..23: mol_type = other RNA
ggacgggcagggagggagccggg

SEQ ID NO: 69430 - RNA, 23 nt, synthetic construct
  source 1..23: mol_type = other RNA
ggggcacccatcctgggggctgg

SEQ ID NO: 69431 - RNA, 23 nt, synthetic construct
  source 1..23: mol_type = other RNA
ttgggatccagctccagcagggc

SEQ ID NO: 69432 - RNA, 23 nt, synthetic construct
  source 1..23: mol_type = other RNA
caccagcagctgcagccccaggc

SEQ ID NO: 69433 - RNA, 23 nt, synthetic construct
  source 1..23: mol_type = other RNA
atgcagcccccactcccatccga

SEQ ID NO: 69434 - RNA, 23 nt, synthetic construct
  source 1..23: mol_type = other RNA
ccagggaggaagaggggatgggt

SEQ ID NO: 69435 - RNA, 23 nt, synthetic construct
  source 1..23: mol_type = other RNA
cgtgggtgtggtggtctgtgata

SEQ ID NO: 69436 - RNA, 23 nt, synthetic construct
  source 1..23: mol_type = other RNA
gtggctgtggacatggtggccgt

SEQ ID NO: 69437 - RNA, 23 nt, synthetic construct
  source 1..23: mol_type = other RNA
aggagggtgtggctgtggacatg

SEQ ID NO: 69438 - RNA, 23 nt, synthetic construct
  source 1..23: mol_type = other RNA
gaggagggtgtggctgtggacat

SEQ ID NO: 69439 - RNA, 23 nt, synthetic construct
  source 1..23: mol_type = other RNA
accaggctgggcctgggcacggc

SEQ ID NO: 69440 - RNA, 23 nt, synthetic construct
  source 1..23: mol_type = other RNA
gcctgggtggaggaggcggtggc

SEQ ID NO: 69441 - RNA, 23 nt, synthetic construct
  source 1..23: mol_type = other RNA
cgtgggtgtggtggtctgtgata

SEQ ID NO: 69442 - RNA, 23 nt, synthetic construct
  source 1..23: mol_type = other RNA
gtggctgtggacatggtggccgt

SEQ ID NO: 69443 - RNA, 23 nt, synthetic construct
  source 1..23: mol_type = other RNA
aggagggtgtggctgtggacatg

SEQ ID NO: 69444 - RNA, 23 nt, synthetic construct
  source 1..23: mol_type = other RNA
gaggagggtgtggctgtggacat

SEQ ID NO: 69445 - RNA, 23 nt, synthetic construct
  source 1..23: mol_type = other RNA
ttgctgctggggtgtgggaagtc

SEQ ID NO: 69446 - RNA, 23 nt, synthetic construct
  source 1..23: mol_type = other RNA
accaggctgggcctgggcacggc

SEQ ID NO: 69447 - RNA, 23 nt, synthetic construct
  source 1..23: mol_type = other RNA
ccagggaggaagaggggatggct

SEQ ID NO: 69448 - RNA, 23 nt, synthetic construct
  source 1..23: mol_type = other RNA
cgtgggtgtggtggtctgtgata

SEQ ID NO: 69449 - RNA, 23 nt, synthetic construct
  source 1..23: mol_type = other RNA
gtggctgtggacatggtggccgt

SEQ ID NO: 69450 - RNA, 23 nt, synthetic construct
  source 1..23: mol_type = other RNA
aggagggtgtggctgtggacatg

SEQ ID NO: 69451 - RNA, 23 nt, synthetic construct
  source 1..23: mol_type = other RNA
gaggagggtgtggctgtggacat

SEQ ID NO: 69452 - RNA, 23 nt, synthetic construct
  source 1..23: mol_type = other RNA
agaggagggtgtggctgtggaca

SEQ ID NO: 69453 - RNA, 23 nt, synthetic construct
  source 1..23: mol_type = other RNA
ttgctgctggggtgtgggaagtc

SEQ ID NO: 69454 - RNA, 23 nt, synthetic construct
  source 1..23: mol_type = other RNA
accaggctgggcctgggcacggc

SEQ ID NO: 69455 - RNA, 23 nt, synthetic construct
  source 1..23: mol_type = other RNA
gcctgggtggaggaggcggtggc

SEQ ID NO: 69456 - RNA, 23 nt, synthetic construct
  source 1..23: mol_type = other RNA
cgtgggtgtggtggtctgtgata

SEQ ID NO: 69457 - RNA, 23 nt, synthetic construct
  source 1..23: mol_type = other RNA
gtggctgtggacatggtggccgt

SEQ ID NO: 69458 - RNA, 23 nt, synthetic construct
  source 1..23: mol_type = other RNA
aggagggtgtggctgtggacatg

SEQ ID NO: 69459 - RNA, 23 nt, synthetic construct
  source 1..23: mol_type = other RNA
gaggagggtgtggctgtggacat

SEQ ID NO: 69460 - RNA, 23 nt, synthetic construct
  source 1..23: mol_type = other RNA
gttcctggggtggaagagggggt

SEQ ID NO: 69461 - RNA, 23 nt, synthetic construct
  source 1..23: mol_type = other RNA
ttgctgctggggtgtgggaagtc

SEQ ID NO: 69462 - RNA, 23 nt, synthetic construct
  source 1..23: mol_type = other RNA
accaggctgggcctgggcacggc

SEQ ID NO: 69463 - RNA, 23 nt, synthetic construct
  source 1..23: mol_type = other RNA
gcctgggtggaggaggcggtggc

SEQ ID NO: 69464 - RNA, 23 nt, synthetic construct
  source 1..23: mol_type = other RNA
cgtgggtgtggtggtctgtgata

SEQ ID NO: 69465 - RNA, 23 nt, synthetic construct
  source 1..23: mol_type = other RNA
gtggctgtggacatggtggccgt

SEQ ID NO: 69466 - RNA, 23 nt, synthetic construct
  source 1..23: mol_type = other RNA
aggagggtgtggctgtggacatg

SEQ ID NO: 69467 - RNA, 23 nt, synthetic construct
  source 1..23: mol_type = other RNA
gaggagggtgtggctgtggacat

SEQ ID NO: 69468 - RNA, 23 nt, synthetic construct
  source 1..23: mol_type = other RNA
catgggtgtggtggtctgtgctg

SEQ ID NO: 69469 - RNA, 23 nt, synthetic construct
  source 1..23: mol_type = other RNA
gggagctggggaagccagtgggt

SEQ ID NO: 69470 - RNA, 23 nt, synthetic construct
  source 1..23: mol_type = other RNA
acaggctttgggtccagcaggac

SEQ ID NO: 69471 - RNA, 23 nt, synthetic construct
  source 1..23: mol_type = other RNA
atggtggtggtccccagcacaga

SEQ ID NO: 69472 - RNA, 23 nt, synthetic construct
  source 1..23: mol_type = other RNA
cggggctgcggggctggcagtgg

SEQ ID NO: 69473 - RNA, 23 nt, synthetic construct
  source 1..23: mol_type = other RNA
atggcctgggcctctgctgagta

SEQ ID NO: 69474 - RNA, 23 nt, synthetic construct
  source 1..23: mol_type = other RNA
actgagggagggctgagggctgg

SEQ ID NO: 69475 - RNA, 23 nt, synthetic construct
  source 1..23: mol_type = other RNA
gcatggcctgggcctctgctgag

SEQ ID NO: 69476 - RNA, 23 nt, synthetic construct
  source 1..23: mol_type = other RNA
tgcctgggtggaggaggcggtgg

SEQ ID NO: 69477 - RNA, 23 nt, synthetic construct
  source 1..23: mol_type = other RNA
tgcctgggtggaggaggcggtgg

SEQ ID NO: 69478 - RNA, 23 nt, synthetic construct
  source 1..23: mol_type = other RNA
tccctggggaagggggtgactcg

SEQ ID NO: 69479 - RNA, 23 nt, synthetic construct
  source 1..23: mol_type = other RNA
tgcctgggtggaggaggcggtgg

SEQ ID NO: 69480 - RNA, 23 nt, synthetic construct
  source 1..23: mol_type = other RNA
actgctgggggacagggatcgcc

SEQ ID NO: 69481 - RNA, 23 nt, synthetic construct
  source 1..23: mol_type = other RNA
gctgggtgtggctgtggctgtgg

SEQ ID NO: 69482 - RNA, 23 nt, synthetic construct
  source 1..23: mol_type = other RNA
tgctgggtgtggctgtggctgtg

SEQ ID NO: 69483 - RNA, 23 nt, synthetic construct
  source 1..23: mol_type = other RNA
actgctgggggacagggatcgcc

SEQ ID NO: 69484 - RNA, 23 nt, synthetic construct
  source 1..23: mol_type = other RNA
cgcagaccctgcccttgtagtcc

SEQ ID NO: 69485 - RNA, 23 nt, synthetic construct
  source 1..23: mol_type = other RNA
aaccactctgtccactcacactt

SEQ ID NO: 69486 - RNA, 23 nt, synthetic construct
  source 1..23: mol_type = other RNA
ccgcagaccctgcccttgtagtc

SEQ ID NO: 69487 - RNA, 23 nt, synthetic construct
  source 1..23: mol_type = other RNA
ggggctggcaggtggtggtacct

SEQ ID NO: 69488 - RNA, 23 nt, synthetic construct
  source 1..23: mol_type = other RNA
ccaggggctgctcacagacggcc

SEQ ID NO: 69489 - RNA, 23 nt, synthetic construct
  source 1..23: mol_type = other RNA
ccaggggctgctcacagacggcc

SEQ ID NO: 69490 - RNA, 23 nt, synthetic construct
  source 1..23: mol_type = other RNA
ccaggggctgctcacagacggcc

SEQ ID NO: 69491 - RNA, 23 nt, synthetic construct
  source 1..23: mol_type = other RNA
ttcacgcaggcctcgtagtactt

SEQ ID NO: 69492 - RNA, 23 nt, synthetic construct
  source 1..23: mol_type = other RNA
gcaccagcccctgggccttgatg

SEQ ID NO: 69493 - RNA, 23 nt, synthetic construct
  source 1..23: mol_type = other RNA
gtgcagacgccgtccctccagtc

SEQ ID NO: 69494 - RNA, 23 nt, synthetic construct
  source 1..23: mol_type = other RNA
gcccaggggctgctcacagacgg

SEQ ID NO: 69495 - RNA, 23 nt, synthetic construct
  source 1..23: mol_type = other RNA
gcccaggggctgctcacagacgg

SEQ ID NO: 69496 - RNA, 23 nt, synthetic construct
  source 1..23: mol_type = other RNA
gcccaggggctgctcacagactg

SEQ ID NO: 69497 - RNA, 23 nt, synthetic construct
  source 1..23: mol_type = other RNA
gcccaggggctgctcacagacgg

SEQ ID NO: 69498 - RNA, 23 nt, synthetic construct
  source 1..23: mol_type = other RNA
tggggggcagaagcagccgtcca

SEQ ID NO: 69499 - RNA, 23 nt, synthetic construct
  source 1..23: mol_type = other RNA
aggatgctgcactgcttctgggc

SEQ ID NO: 69500 - RNA, 23 nt, synthetic construct
  source 1..23: mol_type = other RNA
gtgctgaaacagcccacgtccag

SEQ ID NO: 69501 - RNA, 23 nt, synthetic construct
  source 1..23: mol_type = other RNA
gggcagttctgcatgtacttggt

SEQ ID NO: 69502 - RNA, 23 nt, synthetic construct
  source 1..23: mol_type = other RNA
tagcagcagccggttttcctgag

SEQ ID NO: 69503 - RNA, 23 nt, synthetic construct
  source 1..23: mol_type = other RNA
gggaagacagtgacgggtggaac

SEQ ID NO: 69504 - RNA, 23 nt, synthetic construct
  source 1..23: mol_type = other RNA
gccggttttcctgaggctccccc

SEQ ID NO: 69505 - RNA, 23 nt, synthetic construct
  source 1..23: mol_type = other RNA
ccaggacacacacaggcccgcgt

SEQ ID NO: 69506 - RNA, 23 nt, synthetic construct
  source 1..23: mol_type = other RNA
cgccaggacacacacaggcccgc

SEQ ID NO: 69507 - RNA, 23 nt, synthetic construct
  source 1..23: mol_type = other RNA
cccaggggctgctcacagacggc

SEQ ID NO: 69508 - RNA, 23 nt, synthetic construct
  source 1..23: mol_type = other RNA
cccaggggctgctcacagacggc

SEQ ID NO: 69509 - RNA, 23 nt, synthetic construct
  source 1..23: mol_type = other RNA
cccaggggctgctcacagacggc

SEQ ID NO: 69510 - RNA, 23 nt, synthetic construct
  source 1..23: mol_type = other RNA
cacaggcagtcctcgctccgctc

SEQ ID NO: 69511 - RNA, 23 nt, synthetic construct
  source 1..23: mol_type = other RNA
gggttggccgtgcaggggtcctt

SEQ ID NO: 69512 - RNA, 23 nt, synthetic construct
  source 1..23: mol_type = other RNA
aggacttgcggaaggggttggcc

SEQ ID NO: 69513 - RNA, 23 nt, synthetic construct
  source 1..23: mol_type = other RNA
gcacaggcagtcctcgctccgct

SEQ ID NO: 69514 - RNA, 23 nt, synthetic construct
  source 1..23: mol_type = other RNA
tgcaggtgcaggtgttgcagtcg

SEQ ID NO: 69515 - RNA, 23 nt, synthetic construct
  source 1..23: mol_type = other RNA
cacgaagagcttgatggccttgg

SEQ ID NO: 69516 - RNA, 23 nt, synthetic construct
  source 1..23: mol_type = other RNA
gcggaaggggttggccgtgcagg

SEQ ID NO: 69517 - RNA, 23 nt, synthetic construct
  source 1..23: mol_type = other RNA
ctgggcccaggacttgcggaagg

SEQ ID NO: 69518 - RNA, 23 nt, synthetic construct
  source 1..23: mol_type = other RNA
tctgggcccaggacttgcggaag

SEQ ID NO: 69519 - RNA, 23 nt, synthetic construct
  source 1..23: mol_type = other RNA
gccaggacacacacaggcccgcg

SEQ ID NO: 69520 - RNA, 23 nt, synthetic construct
  source 1..23: mol_type = other RNA
gggtggtgaggactgaggaggac

SEQ ID NO: 69521 - RNA, 23 nt, synthetic construct
  source 1..23: mol_type = other RNA
agggtggtgaggactgaggagga

SEQ ID NO: 69522 - RNA, 23 nt, synthetic construct
  source 1..23: mol_type = other RNA
tctggccctggtgggcggggtcc

SEQ ID NO: 69523 - RNA, 23 nt, synthetic construct
  source 1..23: mol_type = other RNA
ctctgtgatgtgggtggtgccca

SEQ ID NO: 69524 - RNA, 23 nt, synthetic construct
  source 1..23: mol_type = other RNA
ctctgtgatgtgggtggtgccca

SEQ ID NO: 69525 - RNA, 23 nt, synthetic construct
  source 1..23: mol_type = other RNA
ctctgtgatgtgggtggtgccca

SEQ ID NO: 69526 - RNA, 23 nt, synthetic construct
  source 1..23: mol_type = other RNA
ctctgtgatgtgggtggtgccca

SEQ ID NO: 69527 - RNA, 23 nt, synthetic construct
  source 1..23: mol_type = other RNA
acgcgtggcaaagtcattgatgg

SEQ ID NO: 69528 - RNA, 23 nt, synthetic construct
  source 1..23: mol_type = other RNA
cacagcaggctccgtgctggcac

SEQ ID NO: 69529 - RNA, 23 nt, synthetic construct
  source 1..23: mol_type = other RNA
tgtggccacccctgggacagtgg

SEQ ID NO: 69530 - RNA, 23 nt, synthetic construct
  source 1..23: mol_type = other RNA
gcctgagctggacccagtctgcg

SEQ ID NO: 69531 - RNA, 23 nt, synthetic construct
  source 1..23: mol_type = other RNA
ggcctgagctggacccagtctgc

SEQ ID NO: 69532 - RNA, 23 nt, synthetic construct
  source 1..23: mol_type = other RNA
gtgaggactgaggaggacacagt

SEQ ID NO: 69533 - RNA, 23 nt, synthetic construct
  source 1..23: mol_type = other RNA
ctccccacagcactgcccggcca

SEQ ID NO: 69534 - RNA, 23 nt, synthetic construct
  source 1..23: mol_type = other RNA
ccctgtgcttttctgcagagagg

SEQ ID NO: 69535 - RNA, 23 nt, synthetic construct
  source 1..23: mol_type = other RNA
ttggtggagtcaacctgggagcg

SEQ ID NO: 69536 - RNA, 23 nt, synthetic construct
  source 1..23: mol_type = other RNA
cgcaggactggcagttgctgacc

SEQ ID NO: 69537 - RNA, 23 nt, synthetic construct
  source 1..23: mol_type = other RNA
ggagtagagaagtgggagctggg

SEQ ID NO: 69538 - RNA, 23 nt, synthetic construct
  source 1..23: mol_type = other RNA
cagcagggcactgtcctctccgt

SEQ ID NO: 69539 - RNA, 23 nt, synthetic construct
  source 1..23: mol_type = other RNA
ggccgcagaccctgcccttgtag

SEQ ID NO: 69540 - RNA, 23 nt, synthetic construct
  source 1..23: mol_type = other RNA
gctgtgggtgtggtggctgtgct

SEQ ID NO: 69541 - RNA, 23 nt, synthetic construct
  source 1..23: mol_type = other RNA
gctgtgggtgtggtggctgtgct

SEQ ID NO: 69542 - RNA, 23 nt, synthetic construct
  source 1..23: mol_type = other RNA
gctgtgggtgtggtggctgtgct

SEQ ID NO: 69543 - RNA, 23 nt, synthetic construct
  source 1..23: mol_type = other RNA
gctgtgggtgtggtggctgtgct

SEQ ID NO: 69544 - RNA, 23 nt, synthetic construct
  source 1..23: mol_type = other RNA
gctgtgggtgtggtggctgtgct

SEQ ID NO: 69545 - RNA, 23 nt, synthetic construct
  source 1..23: mol_type = other RNA
accagcccctgggccttgatgac

SEQ ID NO: 69546 - RNA, 23 nt, synthetic construct
  source 1..23: mol_type = other RNA
ggacagcgcggcgcacaggcagt

SEQ ID NO: 69547 - RNA, 23 nt, synthetic construct
  source 1..23: mol_type = other RNA
ccttggcggcacaggcgtgcaca

SEQ ID NO: 69548 - RNA, 23 nt, synthetic construct
  source 1..23: mol_type = other RNA
caggtgcaggtgttgcagtcgac

SEQ ID NO: 69549 - RNA, 23 nt, synthetic construct
  source 1..23: mol_type = other RNA
gcaggtgcaggtgttgcagtcga

SEQ ID NO: 69550 - RNA, 23 nt, synthetic construct
  source 1..23: mol_type = other RNA
tggtccctagggcagaggaggga

SEQ ID NO: 69551 - RNA, 23 nt, synthetic construct
  source 1..23: mol_type = other RNA
tggtccctagggcagaggaggga

SEQ ID NO: 69552 - RNA, 23 nt, synthetic construct
  source 1..23: mol_type = other RNA
tggtccctagggcagaggaggga

SEQ ID NO: 69553 - RNA, 23 nt, synthetic construct
  source 1..23: mol_type = other RNA
tggtccctagggcagaggaggga

SEQ ID NO: 69554 - RNA, 23 nt, synthetic construct
  source 1..23: mol_type = other RNA
ggtgtccccagagaggcaggtac

SEQ ID NO: 69555 - RNA, 23 nt, synthetic construct
  source 1..23: mol_type = other RNA
tggcggcacaggcgtgcacatag

SEQ ID NO: 69556 - RNA, 23 nt, synthetic construct
  source 1..23: mol_type = other RNA
cgatgaccaggaagatccccatg

SEQ ID NO: 69557 - RNA, 23 nt, synthetic construct
  source 1..23: mol_type = other RNA
tggttctggttgaagttcccaca

SEQ ID NO: 69558 - RNA, 23 nt, synthetic construct
  source 1..23: mol_type = other RNA
gcgcggcgcacaggcagtcctcg

SEQ ID NO: 69559 - RNA, 23 nt, synthetic construct
  source 1..23: mol_type = other RNA
accctgtgcttttctgcagagag

SEQ ID NO: 69560 - RNA, 23 nt, synthetic construct
  source 1..23: mol_type = other RNA
aggccgcagaccctgcccttgta

SEQ ID NO: 69561 - RNA, 23 nt, synthetic construct
  source 1..23: mol_type = other RNA
caggccgcagaccctgcccttgt

SEQ ID NO: 69562 - RNA, 23 nt, synthetic construct
  source 1..23: mol_type = other RNA
gcgtcgttcacgcaggcctcgta

SEQ ID NO: 69563 - RNA, 23 nt, synthetic construct
  source 1..23: mol_type = other RNA
tccaccaggcagtgcccactggg

SEQ ID NO: 69564 - RNA, 23 nt, synthetic construct
  source 1..23: mol_type = other RNA
gcacagcaggctccgtgctggca

SEQ ID NO: 69565 - RNA, 23 nt, synthetic construct
  source 1..23: mol_type = other RNA
ctgtgggtgtggtggctgtgctt

SEQ ID NO: 69566 - RNA, 23 nt, synthetic construct
  source 1..23: mol_type = other RNA
ggggctgctgggcagcagggtcg

SEQ ID NO: 69567 - RNA, 23 nt, synthetic construct
  source 1..23: mol_type = other RNA
ggtggccggggtgctggggcagt

SEQ ID NO: 69568 - RNA, 23 nt, synthetic construct
  source 1..23: mol_type = other RNA
ctgtgggtgtggtggctgtgctt

SEQ ID NO: 69569 - RNA, 23 nt, synthetic construct
  source 1..23: mol_type = other RNA
ggggctgctgggcagcagggtcg

SEQ ID NO: 69570 - RNA, 23 nt, synthetic construct
  source 1..23: mol_type = other RNA
ggtggccggggtgctggggcagt

SEQ ID NO: 69571 - RNA, 23 nt, synthetic construct
  source 1..23: mol_type = other RNA
tggtggctgtgggtgtggtggcc

SEQ ID NO: 69572 - RNA, 23 nt, synthetic construct
  source 1..23: mol_type = other RNA
ctgtgggtgtggtggctgtgctt

SEQ ID NO: 69573 - RNA, 23 nt, synthetic construct
  source 1..23: mol_type = other RNA
ggggctgctgggcagcagggtcg

SEQ ID NO: 69574 - RNA, 23 nt, synthetic construct
  source 1..23: mol_type = other RNA
ggtggccggggtgctggggcagt

SEQ ID NO: 69575 - RNA, 23 nt, synthetic construct
  source 1..23: mol_type = other RNA
ctgtgggtgtggtggctgtgctt

SEQ ID NO: 69576 - RNA, 23 nt, synthetic construct
  source 1..23: mol_type = other RNA
ggggctgctgggcagcagggtcg

SEQ ID NO: 69577 - RNA, 23 nt, synthetic construct
  source 1..23: mol_type = other RNA
ggtggccggggtgctggggcagt

SEQ ID NO: 69578 - RNA, 23 nt, synthetic construct
  source 1..23: mol_type = other RNA
tggtggctgtgggtgtggtggcc

SEQ ID NO: 69579 - RNA, 23 nt, synthetic construct
  source 1..23: mol_type = other RNA
ctgtgggtgtggtggctgtgctt

SEQ ID NO: 69580 - RNA, 23 nt, synthetic construct
  source 1..23: mol_type = other RNA
gtagggcagccgggcctggaaga

SEQ ID NO: 69581 - RNA, 23 nt, synthetic construct
  source 1..23: mol_type = other RNA
acgcaggactggcagttgctgac

SEQ ID NO: 69582 - RNA, 23 nt, synthetic construct
  source 1..23: mol_type = other RNA
tgggcaggatgcaggctgtgggg

SEQ ID NO: 69583 - RNA, 23 nt, synthetic construct
  source 1..23: mol_type = other RNA
gctccccctgcagctggacacat

SEQ ID NO: 69584 - RNA, 23 nt, synthetic construct
  source 1..23: mol_type = other RNA
tgcttctgggcccaggacttgcg

SEQ ID NO: 69585 - RNA, 23 nt, synthetic construct
  source 1..23: mol_type = other RNA
aaaggtgatgaagtggccatccc

SEQ ID NO: 69586 - RNA, 23 nt, synthetic construct
  source 1..23: mol_type = other RNA
cgcacaggcagtcctcgctccgc

SEQ ID NO: 69587 - RNA, 23 nt, synthetic construct
  source 1..23: mol_type = other RNA
caccgtgcagttctccagggtcc

SEQ ID NO: 69588 - RNA, 23 nt, synthetic construct
  source 1..23: mol_type = other RNA
caggcagtcctcgctccgctcac

SEQ ID NO: 69589 - RNA, 23 nt, synthetic construct
  source 1..23: mol_type = other RNA
acaggcagtcctcgctccgctca

SEQ ID NO: 69590 - RNA, 23 nt, synthetic construct
  source 1..23: mol_type = other RNA
tgcggaaggggttggccgtgcag

SEQ ID NO: 69591 - RNA, 23 nt, synthetic construct
  source 1..23: mol_type = other RNA
ggacttgcggaaggggttggccg

SEQ ID NO: 69592 - RNA, 23 nt, synthetic construct
  source 1..23: mol_type = other RNA
gcgcacaggcagtcctcgctccg

SEQ ID NO: 69593 - RNA, 23 nt, synthetic construct
  source 1..23: mol_type = other RNA
ggcgcacaggcagtcctcgctcc

SEQ ID NO: 69594 - RNA, 23 nt, synthetic construct
  source 1..23: mol_type = other RNA
cggaaggggttggccgtgcaggg

SEQ ID NO: 69595 - RNA, 23 nt, synthetic construct
  source 1..23: mol_type = other RNA
caccagcccctgggccttgatga

SEQ ID NO: 69596 - RNA, 23 nt, synthetic construct
  source 1..23: mol_type = other RNA
agctggtagctgtgggtgtggtg

SEQ ID NO: 69597 - RNA, 23 nt, synthetic construct
  source 1..23: mol_type = other RNA
agctggtagctgtgggtgtggtg

SEQ ID NO: 69598 - RNA, 23 nt, synthetic construct
  source 1..23: mol_type = other RNA
agctggtagctgtgggtgtggtg

SEQ ID NO: 69599 - RNA, 23 nt, synthetic construct
  source 1..23: mol_type = other RNA
ccagcagggcactgtcctctccg

SEQ ID NO: 69600 - RNA, 23 nt, synthetic construct
  source 1..23: mol_type = other RNA
cacagttgcaggtgtcaaacatg

SEQ ID NO: 69601 - RNA, 23 nt, synthetic construct
  source 1..23: mol_type = other RNA
tccgctcacagttgcaggtgtca

SEQ ID NO: 69602 - RNA, 23 nt, synthetic construct
  source 1..23: mol_type = other RNA
taggaggacagcgcggcgcacag

SEQ ID NO: 69603 - RNA, 23 nt, synthetic construct
  source 1..23: mol_type = other RNA
actctgtccactgacaccggggc

SEQ ID NO: 69604 - RNA, 23 nt, synthetic construct
  source 1..23: mol_type = other RNA
ccactctgtccactgacaccggg

SEQ ID NO: 69605 - RNA, 23 nt, synthetic construct
  source 1..23: mol_type = other RNA
ccgcagggctggtagtgccactc

SEQ ID NO: 69606 - RNA, 23 nt, synthetic construct
  source 1..23: mol_type = other RNA
cgcagggctggtagtgccactca

SEQ ID NO: 69607 - RNA, 23 nt, synthetic construct
  source 1..23: mol_type = other RNA
ccgctcacagttgcaggtgtcaa

SEQ ID NO: 69608 - RNA, 23 nt, synthetic construct
  source 1..23: mol_type = other RNA
ctccgctcacagttgcaggtgtc

SEQ ID NO: 69609 - RNA, 23 nt, synthetic construct
  source 1..23: mol_type = other RNA
gcttctgggcccaggacttgcgg

SEQ ID NO: 69610 - RNA, 23 nt, synthetic construct
  source 1..23: mol_type = other RNA
ggaggatgctgcactgcttctgg

SEQ ID NO: 69611 - RNA, 23 nt, synthetic construct
  source 1..23: mol_type = other RNA
cttctgggcccaggacttgcgga

SEQ ID NO: 69612 - RNA, 23 nt, synthetic construct
  source 1..23: mol_type = other RNA
ctgcttctgggcccaggacttgc

SEQ ID NO: 69613 - RNA, 23 nt, synthetic construct
  source 1..23: mol_type = other RNA
actgcttctgggcccaggacttg

SEQ ID NO: 69614 - RNA, 23 nt, synthetic construct
  source 1..23: mol_type = other RNA
ctgcactgcttctgggcccagga

SEQ ID NO: 69615 - RNA, 23 nt, synthetic construct
  source 1..23: mol_type = other RNA
tgctgcactgcttctgggcccag

SEQ ID NO: 69616 - RNA, 23 nt, synthetic construct
  source 1..23: mol_type = other RNA
ggatgctgcactgcttctgggcc

SEQ ID NO: 69617 - RNA, 23 nt, synthetic construct
  source 1..23: mol_type = other RNA
ctggccccccgcgtgggcgcact

SEQ ID NO: 69618 - RNA, 23 nt, synthetic construct
  source 1..23: mol_type = other RNA
acccctgggacagtgggttctgt

SEQ ID NO: 69619 - RNA, 23 nt, synthetic construct
  source 1..23: mol_type = other RNA
agcagcagccggttttcctgagg

SEQ ID NO: 69620 - RNA, 23 nt, synthetic construct
  source 1..23: mol_type = other RNA
ggaggggccacagggcacgtatt

SEQ ID NO: 69621 - RNA, 23 nt, synthetic construct
  source 1..23: mol_type = other RNA
gtcacagtccacctgctggccca

SEQ ID NO: 69622 - RNA, 23 nt, synthetic construct
  source 1..23: mol_type = other RNA
tagcagccacactgggccacgca

SEQ ID NO: 69623 - RNA, 23 nt, synthetic construct
  source 1..23: mol_type = other RNA
gctcccagttcctgcacaccagg

SEQ ID NO: 69624 - RNA, 23 nt, synthetic construct
  source 1..23: mol_type = other RNA
ctgcattccacgacctggcccaa

SEQ ID NO: 69625 - RNA, 23 nt, synthetic construct
  source 1..23: mol_type = other RNA
ctgcattccacgacctggcccaa

SEQ ID NO: 69626 - RNA, 23 nt, synthetic construct
  source 1..23: mol_type = other RNA
ctgcattccacgacctggcccaa

SEQ ID NO: 69627 - RNA, 23 nt, synthetic construct
  source 1..23: mol_type = other RNA
ctgcattccacgacctggcccaa

SEQ ID NO: 69628 - RNA, 23 nt, synthetic construct
  source 1..23: mol_type = other RNA
gtcacagtgcaccttctgcccca

SEQ ID NO: 69629 - RNA, 23 nt, synthetic construct
  source 1..23: mol_type = other RNA
ctggccctggtgggcggggtcca

SEQ ID NO: 69630 - RNA, 23 nt, synthetic construct
  source 1..23: mol_type = other RNA
gaccctgcccttgtagtcctggt

SEQ ID NO: 69631 - RNA, 23 nt, synthetic construct
  source 1..23: mol_type = other RNA
atgccctgcagaagcagggagta

SEQ ID NO: 69632 - RNA, 23 nt, synthetic construct
  source 1..23: mol_type = other RNA
ctgtgcttttctgcagagaggct

SEQ ID NO: 69633 - RNA, 23 nt, synthetic construct
  source 1..23: mol_type = other RNA
caacctgggagcggcaggcggcg

SEQ ID NO: 69634 - RNA, 23 nt, synthetic construct
  source 1..23: mol_type = other RNA
tcctgctcccagttcctgcacac

SEQ ID NO: 69635 - RNA, 23 nt, synthetic construct
  source 1..23: mol_type = other RNA
cggagtggaggagggcatggccg

SEQ ID NO: 69636 - RNA, 23 nt, synthetic construct
  source 1..23: mol_type = other RNA
cggagtggaggagggcatggccg

SEQ ID NO: 69637 - RNA, 23 nt, synthetic construct
  source 1..23: mol_type = other RNA
caggagctgcaggtggtgttgaa

SEQ ID NO: 69638 - RNA, 23 nt, synthetic construct
  source 1..23: mol_type = other RNA
gccttggagcaggtggtgccggt

SEQ ID NO: 69639 - RNA, 23 nt, synthetic construct
  source 1..23: mol_type = other RNA
aggcagtgcccactggggttccg

SEQ ID NO: 69640 - RNA, 23 nt, synthetic construct
  source 1..23: mol_type = other RNA
tagcagccttccaggccaggcag

SEQ ID NO: 69641 - RNA, 23 nt, synthetic construct
  source 1..23: mol_type = other RNA
ctcataggtgcaggtgcaggcct

SEQ ID NO: 69642 - RNA, 23 nt, synthetic construct
  source 1..23: mol_type = other RNA
tcacagtccacctgctggcccag

SEQ ID NO: 69643 - RNA, 23 nt, synthetic construct
  source 1..23: mol_type = other RNA
acagcaggctccgtgctggcact

SEQ ID NO: 69644 - RNA, 23 nt, synthetic construct
  source 1..23: mol_type = other RNA
tgctggtggctgcaggtgtggtg

SEQ ID NO: 69645 - RNA, 23 nt, synthetic construct
  source 1..23: mol_type = other RNA
agctggtggccggggtgctgggg

SEQ ID NO: 69646 - RNA, 23 nt, synthetic construct
  source 1..23: mol_type = other RNA
tgctggtggctgcaggtgtggtg

SEQ ID NO: 69647 - RNA, 23 nt, synthetic construct
  source 1..23: mol_type = other RNA
agctggtggccggggtgctgggg

SEQ ID NO: 69648 - RNA, 23 nt, synthetic construct
  source 1..23: mol_type = other RNA
tggagtggaggagggcgtggccg

SEQ ID NO: 69649 - RNA, 23 nt, synthetic construct
  source 1..23: mol_type = other RNA
tgctggtggctgcaggtgtggtg

SEQ ID NO: 69650 - RNA, 23 nt, synthetic construct
  source 1..23: mol_type = other RNA
agctggtggccggggtgctgggg

SEQ ID NO: 69651 - RNA, 23 nt, synthetic construct
  source 1..23: mol_type = other RNA
tgctggtggctgcaggtgtggtg

SEQ ID NO: 69652 - RNA, 23 nt, synthetic construct
  source 1..23: mol_type = other RNA
agctggtggccggggtgctgggg

SEQ ID NO: 69653 - RNA, 23 nt, synthetic construct
  source 1..23: mol_type = other RNA
cctgcagaagcagggagtagaga

SEQ ID NO: 69654 - RNA, 23 nt, synthetic construct
  source 1..23: mol_type = other RNA
ggcagcaggtgcactggtgctgc

SEQ ID NO: 69655 - RNA, 23 nt, synthetic construct
  source 1..23: mol_type = other RNA
ccaggacttgcggaaggggttgg

SEQ ID NO: 69656 - RNA, 23 nt, synthetic construct
  source 1..23: mol_type = other RNA
tgctggcactgagggagggctga

SEQ ID NO: 69657 - RNA, 23 nt, synthetic construct
  source 1..23: mol_type = other RNA
cacaggagtagcagcagccggtt

SEQ ID NO: 69658 - RNA, 23 nt, synthetic construct
  source 1..23: mol_type = other RNA
tctcctggcagcaggtgcactgg

SEQ ID NO: 69659 - RNA, 23 nt, synthetic construct
  source 1..23: mol_type = other RNA
ccccaggtgctgcacacccgccc

SEQ ID NO: 69660 - RNA, 23 nt, synthetic construct
  source 1..23: mol_type = other RNA
gggcaggtggggcagcggcacag

SEQ ID NO: 69661 - RNA, 23 nt, synthetic construct
  source 1..23: mol_type = other RNA
acttgcggaaggggttggccgtg

SEQ ID NO: 69662 - RNA, 23 nt, synthetic construct
  source 1..23: mol_type = other RNA
cccgcagggctggtagtgccact

SEQ ID NO: 69663 - RNA, 23 nt, synthetic construct
  source 1..23: mol_type = other RNA
cacaggccgcagaccctgccctt

SEQ ID NO: 69664 - RNA, 23 nt, synthetic construct
  source 1..23: mol_type = other RNA
gaaggggttggccgtgcaggggt

SEQ ID NO: 69665 - RNA, 23 nt, synthetic construct
  source 1..23: mol_type = other RNA
tggaggatgctgcactgcttctg

SEQ ID NO: 69666 - RNA, 23 nt, synthetic construct
  source 1..23: mol_type = other RNA
ccaggtgctgcacacccgcccat

SEQ ID NO: 69667 - RNA, 23 nt, synthetic construct
  source 1..23: mol_type = other RNA
atggccttggagcaggtggtgcc

SEQ ID NO: 69668 - RNA, 23 nt, synthetic construct
  source 1..23: mol_type = other RNA
aaggggttggccgtgcaggggtc

SEQ ID NO: 69669 - RNA, 23 nt, synthetic construct
  source 1..23: mol_type = other RNA
ccgccaggacacacacaggcccg

SEQ ID NO: 69670 - RNA, 23 nt, synthetic construct
  source 1..23: mol_type = other RNA
gggtagcagccttccaggccagg

SEQ ID NO: 69671 - RNA, 23 nt, synthetic construct
  source 1..23: mol_type = other RNA
tcagggggctcaggctggggaag

SEQ ID NO: 69672 - RNA, 23 nt, synthetic construct
  source 1..23: mol_type = other RNA
cccaggtgctgcacacccgccca

SEQ ID NO: 69673 - RNA, 23 nt, synthetic construct
  source 1..23: mol_type = other RNA
ccgtcgaaggtcttgtagtggaa

SEQ ID NO: 69674 - RNA, 23 nt, synthetic construct
  source 1..23: mol_type = other RNA
agctccagcagggcactgtcctc

SEQ ID NO: 69675 - RNA, 23 nt, synthetic construct
  source 1..23: mol_type = other RNA
ctggggggcagaagcagccgtcc

SEQ ID NO: 69676 - RNA, 23 nt, synthetic construct
  source 1..23: mol_type = other RNA
cctggggggcagaagcagccgtc

SEQ ID NO: 69677 - RNA, 23 nt, synthetic construct
  source 1..23: mol_type = other RNA
gctgcaccagcagctgcagcccc

SEQ ID NO: 69678 - RNA, 23 nt, synthetic construct
  source 1..23: mol_type = other RNA
ggcaccagctgcaccagcagctg

SEQ ID NO: 69679 - RNA, 23 nt, synthetic construct
  source 1..23: mol_type = other RNA
ctcacagttgcaggtgtcaaaca

SEQ ID NO: 69680 - RNA, 23 nt, synthetic construct
  source 1..23: mol_type = other RNA
gctcacagttgcaggtgtcaaac

SEQ ID NO: 69681 - RNA, 23 nt, synthetic construct
  source 1..23: mol_type = other RNA
cgctcacagttgcaggtgtcaaa

SEQ ID NO: 69682 - RNA, 23 nt, synthetic construct
  source 1..23: mol_type = other RNA
agtcctcgctccgctcacagttg

SEQ ID NO: 69683 - RNA, 23 nt, synthetic construct
  source 1..23: mol_type = other RNA
aggcagtcctcgctccgctcaca

SEQ ID NO: 69684 - RNA, 23 nt, synthetic construct
  source 1..23: mol_type = other RNA
ctgcaggtgcaggtgttgcagtc

SEQ ID NO: 69685 - RNA, 23 nt, synthetic construct
  source 1..23: mol_type = other RNA
gtgcccaggcagagccggtggct

SEQ ID NO: 69686 - RNA, 23 nt, synthetic construct
  source 1..23: mol_type = other RNA
ccttggagcaggtggtgccggtg

SEQ ID NO: 69687 - RNA, 23 nt, synthetic construct
  source 1..23: mol_type = other RNA
ggccttggagcaggtggtgccgg

SEQ ID NO: 69688 - RNA, 23 nt, synthetic construct
  source 1..23: mol_type = other RNA
tggccttggagcaggtggtgccg

SEQ ID NO: 69689 - RNA, 23 nt, synthetic construct
  source 1..23: mol_type = other RNA
gatggccttggagcaggtggtgc

SEQ ID NO: 69690 - RNA, 23 nt, synthetic construct
  source 1..23: mol_type = other RNA
tgatggccttggagcaggtggtg

SEQ ID NO: 69691 - RNA, 23 nt, synthetic construct
  source 1..23: mol_type = other RNA
ttgatggccttggagcaggtggt

SEQ ID NO: 69692 - RNA, 23 nt, synthetic construct
  source 1..23: mol_type = other RNA
gcttgatggccttggagcaggtg

SEQ ID NO: 69693 - RNA, 23 nt, synthetic construct
  source 1..23: mol_type = other RNA
acaggccgcagaccctgcccttg

SEQ ID NO: 69694 - RNA, 23 nt, synthetic construct
  source 1..23: mol_type = other RNA
gcacaggccgcagaccctgccct

SEQ ID NO: 69695 - RNA, 23 nt, synthetic construct
  source 1..23: mol_type = other RNA
ttcccgcacaggccgcagaccct

SEQ ID NO: 69696 - RNA, 23 nt, synthetic construct
  source 1..23: mol_type = other RNA
gttggccgtgcaggggtccttgg

SEQ ID NO: 69697 - RNA, 23 nt, synthetic construct
  source 1..23: mol_type = other RNA
ggaaggggttggccgtgcagggg

SEQ ID NO: 69698 - RNA, 23 nt, synthetic construct
  source 1..23: mol_type = other RNA
cccaggacttgcggaaggggttg

SEQ ID NO: 69699 - RNA, 23 nt, synthetic construct
  source 1..23: mol_type = other RNA
gcccaggacttgcggaaggggtt

SEQ ID NO: 69700 - RNA, 23 nt, synthetic construct
  source 1..23: mol_type = other RNA
ggcccaggacttgcggaaggggt

SEQ ID NO: 69701 - RNA, 23 nt, synthetic construct
  source 1..23: mol_type = other RNA
gggcccaggacttgcggaagggg

SEQ ID NO: 69702 - RNA, 23 nt, synthetic construct
  source 1..23: mol_type = other RNA
tgcactgcttctgggcccaggac

SEQ ID NO: 69703 - RNA, 23 nt, synthetic construct
  source 1..23: mol_type = other RNA
gtggaggatgctgcactgcttct

SEQ ID NO: 69704 - RNA, 23 nt, synthetic construct
  source 1..23: mol_type = other RNA
tccgccaggacacacacaggccc

SEQ ID NO: 69705 - RNA, 23 nt, synthetic construct
  source 1..23: mol_type = other RNA
gtccgccaggacacacacaggcc

SEQ ID NO: 69706 - RNA, 23 nt, synthetic construct
  source 1..23: mol_type = other RNA
agtccgccaggacacacacaggc

SEQ ID NO: 69707 - RNA, 23 nt, synthetic construct
  source 1..23: mol_type = other RNA
ggcaggtccaccaggcagtgccc

SEQ ID NO: 69708 - RNA, 23 nt, synthetic construct
  source 1..23: mol_type = other RNA
gtagcagccttccaggccaggca

SEQ ID NO: 69709 - RNA, 23 nt, synthetic construct
  source 1..23: mol_type = other RNA
ggtagcagccttccaggccaggc

SEQ ID NO: 69710 - RNA, 23 nt, synthetic construct
  source 1..23: mol_type = other RNA
cgggtagcagccttccaggccag

SEQ ID NO: 69711 - RNA, 23 nt, synthetic construct
  source 1..23: mol_type = other RNA
gaagggctggctgggtgggcact

SEQ ID NO: 69712 - RNA, 23 nt, synthetic construct
  source 1..23: mol_type = other RNA
tccctgggctggaggagggggtg

SEQ ID NO: 69713 - RNA, 23 nt, synthetic construct
  source 1..23: mol_type = other RNA
tccctgggctggaggagggggtg

SEQ ID NO: 69714 - RNA, 23 nt, synthetic construct
  source 1..23: mol_type = other RNA
tccctgggctggaggagggggtg

SEQ ID NO: 69715 - RNA, 23 nt, synthetic construct
  source 1..23: mol_type = other RNA
tccctgggctggaggagggggtg

SEQ ID NO: 69716 - RNA, 23 nt, synthetic construct
  source 1..23: mol_type = other RNA
tccctgggctggaggagggggtg

SEQ ID NO: 69717 - RNA, 23 nt, synthetic construct
  source 1..23: mol_type = other RNA
ccaggggcaggggagggcgagga

SEQ ID NO: 69718 - RNA, 23 nt, synthetic construct
  source 1..23: mol_type = other RNA
agttctccagggtccaggtctca

SEQ ID NO: 69719 - RNA, 23 nt, synthetic construct
  source 1..23: mol_type = other RNA
tagggcagccgggcctggaagac

SEQ ID NO: 69720 - RNA, 23 nt, synthetic construct
  source 1..23: mol_type = other RNA
tcacaggagtagcagcagccggt

SEQ ID NO: 69721 - RNA, 23 nt, synthetic construct
  source 1..23: mol_type = other RNA
accagctgcaccagcagctgcag

SEQ ID NO: 69722 - RNA, 23 nt, synthetic construct
  source 1..23: mol_type = other RNA
aagggctggctgggtgggcactt

SEQ ID NO: 69723 - RNA, 23 nt, synthetic construct
  source 1..23: mol_type = other RNA
ccctcctgctcccagttcctgca

SEQ ID NO: 69724 - RNA, 23 nt, synthetic construct
  source 1..23: mol_type = other RNA
agaagggctggctgggtgggcac

SEQ ID NO: 69725 - RNA, 23 nt, synthetic construct
  source 1..23: mol_type = other RNA
actgggctgggttgagcagaggg

SEQ ID NO: 69726 - RNA, 23 nt, synthetic construct
  source 1..23: mol_type = other RNA
ggctctgtgaggatccaggtggt

SEQ ID NO: 69727 - RNA, 23 nt, synthetic construct
  source 1..23: mol_type = other RNA
ggctctgtgaggatccaggtggt

SEQ ID NO: 69728 - RNA, 23 nt, synthetic construct
  source 1..23: mol_type = other RNA
ggctctgtgaggatccaggtggt

SEQ ID NO: 69729 - RNA, 23 nt, synthetic construct
  source 1..23: mol_type = other RNA
ggctctgtgaggatccaggtggt

SEQ ID NO: 69730 - RNA, 23 nt, synthetic construct
  source 1..23: mol_type = other RNA
ggctctgtgaggatccaggtggt

SEQ ID NO: 69731 - RNA, 23 nt, synthetic construct
  source 1..23: mol_type = other RNA
cttgttcacgcaggtgacgttgg

SEQ ID NO: 69732 - RNA, 23 nt, synthetic construct
  source 1..23: mol_type = other RNA
tatttgcaaaactgggctgggtt

SEQ ID NO: 69733 - RNA, 23 nt, synthetic construct
  source 1..23: mol_type = other RNA
tgcaaaactgggctgggttgagc

SEQ ID NO: 69734 - RNA, 23 nt, synthetic construct
  source 1..23: mol_type = other RNA
tcggcccggggcctggtcacggt

SEQ ID NO: 69735 - RNA, 23 nt, synthetic construct
  source 1..23: mol_type = other RNA
ctggtggctgtgggtgtggtggc

SEQ ID NO: 69736 - RNA, 23 nt, synthetic construct
  source 1..23: mol_type = other RNA
ctggtggctgtgggtgtggtggc

SEQ ID NO: 69737 - RNA, 23 nt, synthetic construct
  source 1..23: mol_type = other RNA
aggggcttgcactgcaccgacac

SEQ ID NO: 69738 - RNA, 23 nt, synthetic construct
  source 1..23: mol_type = other RNA
acacagtggacacgctgaaggtt

SEQ ID NO: 69739 - RNA, 23 nt, synthetic construct
  source 1..23: mol_type = other RNA
ggaactggtggctgtgggtgtgg

SEQ ID NO: 69740 - RNA, 23 nt, synthetic construct
  source 1..23: mol_type = other RNA
ggaactggtggctgtgggtgtgg

SEQ ID NO: 69741 - RNA, 23 nt, synthetic construct
  source 1..23: mol_type = other RNA
gctttggaactggtggctgtggg

SEQ ID NO: 69742 - RNA, 23 nt, synthetic construct
  source 1..23: mol_type = other RNA
gctttggaactggtggctgtggg

SEQ ID NO: 69743 - RNA, 23 nt, synthetic construct
  source 1..23: mol_type = other RNA
tcctgctggcccctcacccttct

SEQ ID NO: 69744 - RNA, 23 nt, synthetic construct
  source 1..23: mol_type = other RNA
tggagtggaggagggtgtggctg

SEQ ID NO: 69745 - RNA, 23 nt, synthetic construct
  source 1..23: mol_type = other RNA
tggagtggaggagggtgtggctg

SEQ ID NO: 69746 - RNA, 23 nt, synthetic construct
  source 1..23: mol_type = other RNA
tggagtggaggagggtgtggctg

SEQ ID NO: 69747 - RNA, 23 nt, synthetic construct
  source 1..23: mol_type = other RNA
tggagtggaggagggtgtggctg

SEQ ID NO: 69748 - RNA, 23 nt, synthetic construct
  source 1..23: mol_type = other RNA
cctggctccaggtggacagagca

SEQ ID NO: 69749 - RNA, 23 nt, synthetic construct
  source 1..23: mol_type = other RNA
actttggtgggtgggcaggtgag

SEQ ID NO: 69750 - RNA, 23 nt, synthetic construct
  source 1..23: mol_type = other RNA
ccggaggcactcggccccagggg

SEQ ID NO: 69751 - RNA, 23 nt, synthetic construct
  source 1..23: mol_type = other RNA
tccggaggcactcggccccaggg

SEQ ID NO: 69752 - RNA, 23 nt, synthetic construct
  source 1..23: mol_type = other RNA
gtggtggtggtggtggccgtctc

SEQ ID NO: 69753 - RNA, 23 nt, synthetic construct
  source 1..23: mol_type = other RNA
ggtggtggtggtggtggccgtct

SEQ ID NO: 69754 - RNA, 23 nt, synthetic construct
  source 1..23: mol_type = other RNA
ctggcagttctccgctgtgggga

SEQ ID NO: 69755 - RNA, 23 nt, synthetic construct
  source 1..23: mol_type = other RNA
cgtcgaaggtcttgtagtggaag

SEQ ID NO: 69756 - RNA, 23 nt, synthetic construct
  source 1..23: mol_type = other RNA
gctgcaggtgacgtcggcctcac

SEQ ID NO: 69757 - RNA, 23 nt, synthetic construct
  source 1..23: mol_type = other RNA
gcccctgggccttgatgacaaca

SEQ ID NO: 69758 - RNA, 23 nt, synthetic construct
  source 1..23: mol_type = other RNA
gtggccccagttgtggtggccgt

SEQ ID NO: 69759 - RNA, 23 nt, synthetic construct
  source 1..23: mol_type = other RNA
tctgcagagaggctcccaggcag

SEQ ID NO: 69760 - RNA, 23 nt, synthetic construct
  source 1..23: mol_type = other RNA
gctctggcagttctccgctgtgg

SEQ ID NO: 69761 - RNA, 23 nt, synthetic construct
  source 1..23: mol_type = other RNA
cggaaggtgggacagcagtcgcc

SEQ ID NO: 69762 - RNA, 23 nt, synthetic construct
  source 1..23: mol_type = other RNA
tgtggtggccgtggtggtaagca

SEQ ID NO: 69763 - RNA, 23 nt, synthetic construct
  source 1..23: mol_type = other RNA
tgtggtggccgtggtggtaagca

SEQ ID NO: 69764 - RNA, 23 nt, synthetic construct
  source 1..23: mol_type = other RNA
ggctggacagggctggagtcgag

SEQ ID NO: 69765 - RNA, 23 nt, synthetic construct
  source 1..23: mol_type = other RNA
gggctggacagggctggagtcga

SEQ ID NO: 69766 - RNA, 23 nt, synthetic construct
  source 1..23: mol_type = other RNA
ggctggacagggctggagtcgag

SEQ ID NO: 69767 - RNA, 23 nt, synthetic construct
  source 1..23: mol_type = other RNA
gggctggacagggctggagtcga

SEQ ID NO: 69768 - RNA, 23 nt, synthetic construct
  source 1..23: mol_type = other RNA
ggctggacagggctggagtcgag

SEQ ID NO: 69769 - RNA, 23 nt, synthetic construct
  source 1..23: mol_type = other RNA
gggctggacagggctggagtcga

SEQ ID NO: 69770 - RNA, 23 nt, synthetic construct
  source 1..23: mol_type = other RNA
cgtggaggatgctgcactgcttc

SEQ ID NO: 69771 - RNA, 23 nt, synthetic construct
  source 1..23: mol_type = other RNA
gagggctggacagggctggagtc

SEQ ID NO: 69772 - RNA, 23 nt, synthetic construct
  source 1..23: mol_type = other RNA
gagggctggacagggctggagtc

SEQ ID NO: 69773 - RNA, 23 nt, synthetic construct
  source 1..23: mol_type = other RNA
gagggctggacagggctggagtc

SEQ ID NO: 69774 - RNA, 23 nt, synthetic construct
  source 1..23: mol_type = other RNA
agggctggacagggctggagtcg

SEQ ID NO: 69775 - RNA, 23 nt, synthetic construct
  source 1..23: mol_type = other RNA
agggctggacagggctggagtcg

SEQ ID NO: 69776 - RNA, 23 nt, synthetic construct
  source 1..23: mol_type = other RNA
agggctggacagggctggagtcg

SEQ ID NO: 69777 - RNA, 23 nt, synthetic construct
  source 1..23: mol_type = other RNA
gctggacagggctggagtcgagt

SEQ ID NO: 69778 - RNA, 23 nt, synthetic construct
  source 1..23: mol_type = other RNA
aggaagaggggatggctgtaacg

SEQ ID NO: 69779 - RNA, 23 nt, synthetic construct
  source 1..23: mol_type = other RNA
gctggacagggctggagtcgagt

SEQ ID NO: 69780 - RNA, 23 nt, synthetic construct
  source 1..23: mol_type = other RNA
gctggacagggctggagtcgagt

SEQ ID NO: 69781 - RNA, 23 nt, synthetic construct
  source 1..23: mol_type = other RNA
cgaaggtcttgtagtggaagtca

SEQ ID NO: 69782 - RNA, 23 nt, synthetic construct
  source 1..23: mol_type = other RNA
tggcagttctccgctgtggggac

SEQ ID NO: 69783 - RNA, 23 nt, synthetic construct
  source 1..23: mol_type = other RNA
gggcaggtccgggggcagagctc

SEQ ID NO: 69784 - RNA, 23 nt, synthetic construct
  source 1..23: mol_type = other RNA
ggtcagtgatgggggagtaccac

SEQ ID NO: 69785 - RNA, 23 nt, synthetic construct
  source 1..23: mol_type = other RNA
ggtcagtgatgggggagtaccac

SEQ ID NO: 69786 - RNA, 23 nt, synthetic construct
  source 1..23: mol_type = other RNA
ggtcagtgatgggggagtaccac

SEQ ID NO: 69787 - RNA, 23 nt, synthetic construct
  source 1..23: mol_type = other RNA
ggtcagtgatgggggagtaccac

SEQ ID NO: 69788 - RNA, 23 nt, synthetic construct
  source 1..23: mol_type = other RNA
atgctgaccttgatgtagtcccc

SEQ ID NO: 69789 - RNA, 23 nt, synthetic construct
  source 1..23: mol_type = other RNA
gatggctgtaacgctggtagctg

SEQ ID NO: 69790 - RNA, 23 nt, synthetic construct
  source 1..23: mol_type = other RNA
gaaggtgatgttgacctcggtct

SEQ ID NO: 69791 - RNA, 23 nt, synthetic construct
  source 1..23: mol_type = other RNA
cggaagacgtcgccgtcgaaggt

SEQ ID NO: 69792 - RNA, 23 nt, synthetic construct
  source 1..23: mol_type = other RNA
tcagggtttatttgcaaaactgg

SEQ ID NO: 69793 - RNA, 23 nt, synthetic construct
  source 1..23: mol_type = other RNA
ctggggacaggtagtattgttgc

SEQ ID NO: 69794 - RNA, 23 nt, synthetic construct
  source 1..23: mol_type = other RNA
cacatcctggctccaggtggaca

SEQ ID NO: 69795 - RNA, 23 nt, synthetic construct
  source 1..23: mol_type = other RNA
cctgagctggacccagtctgcga

SEQ ID NO: 69796 - RNA, 23 nt, synthetic construct
  source 1..23: mol_type = other RNA
tgtgtgggtggtccctagggcag

SEQ ID NO: 69797 - RNA, 23 nt, synthetic construct
  source 1..23: mol_type = other RNA
tgtgtgggtggtccctagggcag

SEQ ID NO: 69798 - RNA, 23 nt, synthetic construct
  source 1..23: mol_type = other RNA
tgtgtgggtggtccctagggcag

SEQ ID NO: 69799 - RNA, 23 nt, synthetic construct
  source 1..23: mol_type = other RNA
tgtgtgggtggtccctagggcag

SEQ ID NO: 69800 - RNA, 23 nt, synthetic construct
  source 1..23: mol_type = other RNA
ggtggtgaaggtgaatggcgttg

SEQ ID NO: 69801 - RNA, 23 nt, synthetic construct
  source 1..23: mol_type = other RNA
actggagaagggagtggctttgg

SEQ ID NO: 69802 - RNA, 23 nt, synthetic construct
  source 1..23: mol_type = other RNA
actggagaagggagtggctttgg

SEQ ID NO: 69803 - RNA, 23 nt, synthetic construct
  source 1..23: mol_type = other RNA
cgcagctcagccagcacggtgaa

SEQ ID NO: 69804 - RNA, 23 nt, synthetic construct
  source 1..23: mol_type = other RNA
cttctcagtgctggaagggcggt

SEQ ID NO: 69805 - RNA, 23 nt, synthetic construct
  source 1..23: mol_type = other RNA
cttctcagtgctggaagggcggt

SEQ ID NO: 69806 - RNA, 23 nt, synthetic construct
  source 1..23: mol_type = other RNA
cttctcagtgctggaagggcggt

SEQ ID NO: 69807 - RNA, 23 nt, synthetic construct
  source 1..23: mol_type = other RNA
cttctcagtgctggaagggcggt

SEQ ID NO: 69808 - RNA, 23 nt, synthetic construct
  source 1..23: mol_type = other RNA
ggccgggctggtcagcactttgg

SEQ ID NO: 69809 - RNA, 23 nt, synthetic construct
  source 1..23: mol_type = other RNA
cttctcagtgctggaagggcagt

SEQ ID NO: 69810 - RNA, 23 nt, synthetic construct
  source 1..23: mol_type = other RNA
ggtgcggtggcagatgccctcct

SEQ ID NO: 69811 - RNA, 23 nt, synthetic construct
  source 1..23: mol_type = other RNA
ccctgatggtctctccaggcttg

SEQ ID NO: 69812 - RNA, 23 nt, synthetic construct
  source 1..23: mol_type = other RNA
tggcagggcacctcaaggcggcc

SEQ ID NO: 69813 - RNA, 23 nt, synthetic construct
  source 1..23: mol_type = other RNA
cggcgaaggtggggccgtggagg

SEQ ID NO: 69814 - RNA, 23 nt, synthetic construct
  source 1..23: mol_type = other RNA
gaccgggagggccgggcttgtcg

SEQ ID NO: 69815 - RNA, 23 nt, synthetic construct
  source 1..23: mol_type = other RNA
ctcagggcagaagcagccctccg

SEQ ID NO: 69816 - RNA, 23 nt, synthetic construct
  source 1..23: mol_type = other RNA
gccctgggtctctgcctgcggca

SEQ ID NO: 69817 - RNA, 23 nt, synthetic construct
  source 1..23: mol_type = other RNA
gcagctcagccagcacggtgaag

SEQ ID NO: 69818 - RNA, 23 nt, synthetic construct
  source 1..23: mol_type = other RNA
cagacgccgtccctccagtcgct

SEQ ID NO: 69819 - RNA, 23 nt, synthetic construct
  source 1..23: mol_type = other RNA
tgcagacgccgtccctccagtcg

SEQ ID NO: 69820 - RNA, 23 nt, synthetic construct
  source 1..23: mol_type = other RNA
acaccatgggggctgcacaccct

SEQ ID NO: 69821 - RNA, 23 nt, synthetic construct
  source 1..23: mol_type = other RNA
agctgttcccaaactccagtgcg

SEQ ID NO: 69822 - RNA, 23 nt, synthetic construct
  source 1..23: mol_type = other RNA
cggttgcagtccctggactggag

SEQ ID NO: 69823 - RNA, 23 nt, synthetic construct
  source 1..23: mol_type = other RNA
gctgtgcttctcagtgctggaag

SEQ ID NO: 69824 - RNA, 23 nt, synthetic construct
  source 1..23: mol_type = other RNA
aggtggtgcccagggaggaagag

SEQ ID NO: 69825 - RNA, 23 nt, synthetic construct
  source 1..23: mol_type = other RNA
gaagtccaggctgtgcgcaccgt

SEQ ID NO: 69826 - RNA, 23 nt, synthetic construct
  source 1..23: mol_type = other RNA
agctctgtgaggatccaggtcgt

SEQ ID NO: 69827 - RNA, 23 nt, synthetic construct
  source 1..23: mol_type = other RNA
cagctctgtgaggatccaggtcg

SEQ ID NO: 69828 - RNA, 23 nt, synthetic construct
  source 1..23: mol_type = other RNA
cggttgcagtccctggactggag

SEQ ID NO: 69829 - RNA, 23 nt, synthetic construct
  source 1..23: mol_type = other RNA
gctgtgcttctcagtgctggaag

SEQ ID NO: 69830 - RNA, 23 nt, synthetic construct
  source 1..23: mol_type = other RNA
gaagtccaggctgtgcgcaccgt

SEQ ID NO: 69831 - RNA, 23 nt, synthetic construct
  source 1..23: mol_type = other RNA
tgctctgtgaggatccaggtcgt

SEQ ID NO: 69832 - RNA, 23 nt, synthetic construct
  source 1..23: mol_type = other RNA
agctctgtgaggatccaggtcgt

SEQ ID NO: 69833 - RNA, 23 nt, synthetic construct
  source 1..23: mol_type = other RNA
cagctctgtgaggatccaggtcg

SEQ ID NO: 69834 - RNA, 23 nt, synthetic construct
  source 1..23: mol_type = other RNA
cggttgcagtccctggactggag

SEQ ID NO: 69835 - RNA, 23 nt, synthetic construct
  source 1..23: mol_type = other RNA
gctgtgcttctcagtgctggaag

SEQ ID NO: 69836 - RNA, 23 nt, synthetic construct
  source 1..23: mol_type = other RNA
gaagtccaggctgtgcgcaccgt

SEQ ID NO: 69837 - RNA, 23 nt, synthetic construct
  source 1..23: mol_type = other RNA
cggttgcagtccctggactggag

SEQ ID NO: 69838 - RNA, 23 nt, synthetic construct
  source 1..23: mol_type = other RNA
gctgtgcttctcagtgctggaag

SEQ ID NO: 69839 - RNA, 23 nt, synthetic construct
  source 1..23: mol_type = other RNA
gaagtccaggctgtgcgcaccgt

SEQ ID NO: 69840 - RNA, 23 nt, synthetic construct
  source 1..23: mol_type = other RNA
agctctgtgaggatccaggtcgt

SEQ ID NO: 69841 - RNA, 23 nt, synthetic construct
  source 1..23: mol_type = other RNA
cagctctgtgaggatccaggtcg

SEQ ID NO: 69842 - RNA, 23 nt, synthetic construct
  source 1..23: mol_type = other RNA
agctctgtgaggatccaggtcgt

SEQ ID NO: 69843 - RNA, 23 nt, synthetic construct
  source 1..23: mol_type = other RNA
cagctctgtgaggatccaggtcg

SEQ ID NO: 69844 - RNA, 23 nt, synthetic construct
  source 1..23: mol_type = other RNA
agctctgtgaggatccaggtggt

SEQ ID NO: 69845 - RNA, 23 nt, synthetic construct
  source 1..23: mol_type = other RNA
cagctctgtgaggatccaggtgg

SEQ ID NO: 69846 - RNA, 23 nt, synthetic construct
  source 1..23: mol_type = other RNA
gctgtgcttctcagtgctggaag

SEQ ID NO: 69847 - RNA, 23 nt, synthetic construct
  source 1..23: mol_type = other RNA
gcatggatctctctcatgaggac

SEQ ID NO: 69848 - RNA, 23 nt, synthetic construct
  source 1..23: mol_type = other RNA
tcagtgctggaagggcggttgca

SEQ ID NO: 69849 - RNA, 23 nt, synthetic construct
  source 1..23: mol_type = other RNA
tcagtgctggaagggcggttgca

SEQ ID NO: 69850 - RNA, 23 nt, synthetic construct
  source 1..23: mol_type = other RNA
tcagtgctggaagggcggttgca

SEQ ID NO: 69851 - RNA, 23 nt, synthetic construct
  source 1..23: mol_type = other RNA
tcagtgctggaagggcggttgca

SEQ ID NO: 69852 - RNA, 23 nt, synthetic construct
  source 1..23: mol_type = other RNA
gattgcacactgcgtagaaatgg

SEQ ID NO: 69853 - RNA, 23 nt, synthetic construct
  source 1..23: mol_type = other RNA
ggaggggatgggtgtaaagctgg

SEQ ID NO: 69854 - RNA, 23 nt, synthetic construct
  source 1..23: mol_type = other RNA
ggaggggatgggtgtaaagctgg

SEQ ID NO: 69855 - RNA, 23 nt, synthetic construct
  source 1..23: mol_type = other RNA
aggcagtggctgtgggcatagtg

SEQ ID NO: 69856 - RNA, 23 nt, synthetic construct
  source 1..23: mol_type = other RNA
caggggcactcctgggcgggcac

SEQ ID NO: 69857 - RNA, 23 nt, synthetic construct
  source 1..23: mol_type = other RNA
gcgaggacgtcggggcaccgcca

SEQ ID NO: 69858 - RNA, 23 nt, synthetic construct
  source 1..23: mol_type = other RNA
gaaggtgacgctcacgcccaggg

SEQ ID NO: 69859 - RNA, 23 nt, synthetic construct
  source 1..23: mol_type = other RNA
cgaccctgatggtctctccaggc

SEQ ID NO: 69860 - RNA, 23 nt, synthetic construct
  source 1..23: mol_type = other RNA
gtgtgcgttgaagaggatctggt

SEQ ID NO: 69861 - RNA, 23 nt, synthetic construct
  source 1..23: mol_type = other RNA
tttgttccagggcgtcccagtga

SEQ ID NO: 69862 - RNA, 23 nt, synthetic construct
  source 1..23: mol_type = other RNA
ccagtgcgtggcactccgcaaag

SEQ ID NO: 69863 - RNA, 23 nt, synthetic construct
  source 1..23: mol_type = other RNA
actcacagcccccatgtgggttg

SEQ ID NO: 69864 - RNA, 23 nt, synthetic construct
  source 1..23: mol_type = other RNA
gtcacagtgctgattgcacactg

SEQ ID NO: 69865 - RNA, 23 nt, synthetic construct
  source 1..23: mol_type = other RNA
gtgctgatccacactggaagcgt

SEQ ID NO: 69866 - RNA, 23 nt, synthetic construct
  source 1..23: mol_type = other RNA
ggcagcagggtcgaggtgcgggt

SEQ ID NO: 69867 - RNA, 23 nt, synthetic construct
  source 1..23: mol_type = other RNA
atccagtggactcagtcgtagtg

SEQ ID NO: 69868 - RNA, 23 nt, synthetic construct
  source 1..23: mol_type = other RNA
ggcagcagggtcgaggtgcgggt

SEQ ID NO: 69869 - RNA, 23 nt, synthetic construct
  source 1..23: mol_type = other RNA
ggcagcagggtcgaggtgcgggt

SEQ ID NO: 69870 - RNA, 23 nt, synthetic construct
  source 1..23: mol_type = other RNA
atccagtggactcagtcgtagtg

SEQ ID NO: 69871 - RNA, 23 nt, synthetic construct
  source 1..23: mol_type = other RNA
ggcagcagggtcgaggtgcgggt

SEQ ID NO: 69872 - RNA, 23 nt, synthetic construct
  source 1..23: mol_type = other RNA
tgaccctgggcgtcacagggcag

SEQ ID NO: 69873 - RNA, 23 nt, synthetic construct
  source 1..23: mol_type = other RNA
tcctgctgctagggtgagggctg

SEQ ID NO: 69874 - RNA, 23 nt, synthetic construct
  source 1..23: mol_type = other RNA
tcctgctgctagggtgagggctg

SEQ ID NO: 69875 - RNA, 23 nt, synthetic construct
  source 1..23: mol_type = other RNA
ctcacagcccgtggtcaccaccg

SEQ ID NO: 69876 - RNA, 23 nt, synthetic construct
  source 1..23: mol_type = other RNA
tcctgctgctagggtgagggctg

SEQ ID NO: 69877 - RNA, 23 nt, synthetic construct
  source 1..23: mol_type = other RNA
ctcacagcccgtggtcaccaccg

SEQ ID NO: 69878 - RNA, 23 nt, synthetic construct
  source 1..23: mol_type = other RNA
cagtgcaagggcaccgtctcctc

SEQ ID NO: 69879 - RNA, 23 nt, synthetic construct
  source 1..23: mol_type = other RNA
acagtgcaagggcaccgtctcct

SEQ ID NO: 69880 - RNA, 23 nt, synthetic construct
  source 1..23: mol_type = other RNA
atgccctcctcgtccgtgcagtt

SEQ ID NO: 69881 - RNA, 23 nt, synthetic construct
  source 1..23: mol_type = other RNA
acagtagtcctgggccaagatgt

SEQ ID NO: 69882 - RNA, 23 nt, synthetic construct
  source 1..23: mol_type = other RNA
aggacggggtggccgtggatcca

SEQ ID NO: 69883 - RNA, 23 nt, synthetic construct
  source 1..23: mol_type = other RNA
aggacggggtggccgtggatcca

SEQ ID NO: 69884 - RNA, 23 nt, synthetic construct
  source 1..23: mol_type = other RNA
aggacggggtggccgtggatcca

SEQ ID NO: 69885 - RNA, 23 nt, synthetic construct
  source 1..23: mol_type = other RNA
aggacggggtggccgtggatcca

SEQ ID NO: 69886 - RNA, 23 nt, synthetic construct
  source 1..23: mol_type = other RNA
gaccctgatggtctctccaggct

SEQ ID NO: 69887 - RNA, 23 nt, synthetic construct
  source 1..23: mol_type = other RNA
gcccctggtgtggcccggggtgg

SEQ ID NO: 69888 - RNA, 23 nt, synthetic construct
  source 1..23: mol_type = other RNA
actttggtagtgtgagctgttcc

SEQ ID NO: 69889 - RNA, 23 nt, synthetic construct
  source 1..23: mol_type = other RNA
actttggtagtgtgagctgttcc

SEQ ID NO: 69890 - RNA, 23 nt, synthetic construct
  source 1..23: mol_type = other RNA
actttggtagtgtgagctgttcc

SEQ ID NO: 69891 - RNA, 23 nt, synthetic construct
  source 1..23: mol_type = other RNA
actttggtagtgtgagctgttcc

SEQ ID NO: 69892 - RNA, 23 nt, synthetic construct
  source 1..23: mol_type = other RNA
actttggtagtgtgagctgttcc

SEQ ID NO: 69893 - RNA, 23 nt, synthetic construct
  source 1..23: mol_type = other RNA
atcacagagcggctgtggtgggc

SEQ ID NO: 69894 - RNA, 23 nt, synthetic construct
  source 1..23: mol_type = other RNA
tgggtctcagggtggtgaggact

SEQ ID NO: 69895 - RNA, 23 nt, synthetic construct
  source 1..23: mol_type = other RNA
ttgctgacccaccgctccccggg

SEQ ID NO: 69896 - RNA, 23 nt, synthetic construct
  source 1..23: mol_type = other RNA
ctcacagacggcccctccggccg

SEQ ID NO: 69897 - RNA, 23 nt, synthetic construct
  source 1..23: mol_type = other RNA
ctcacagacggcccctccggccg

SEQ ID NO: 69898 - RNA, 23 nt, synthetic construct
  source 1..23: mol_type = other RNA
ctcacagacggcccctccggccg

SEQ ID NO: 69899 - RNA, 23 nt, synthetic construct
  source 1..23: mol_type = other RNA
ggcagcaggagcacggagcgcgg

SEQ ID NO: 69900 - RNA, 23 nt, synthetic construct
  source 1..23: mol_type = other RNA
acacagtggtcctcgcagagctg

SEQ ID NO: 69901 - RNA, 23 nt, synthetic construct
  source 1..23: mol_type = other RNA
gagctgcaggtggtgttgaagga

SEQ ID NO: 69902 - RNA, 23 nt, synthetic construct
  source 1..23: mol_type = other RNA
ctcacagcccatggtcaccaccg

SEQ ID NO: 69903 - RNA, 23 nt, synthetic construct
  source 1..23: mol_type = other RNA
ctcacagcccatggtcaccaccg

SEQ ID NO: 69904 - RNA, 23 nt, synthetic construct
  source 1..23: mol_type = other RNA
agagggggctttgggatgctgac

SEQ ID NO: 69905 - RNA, 23 nt, synthetic construct
  source 1..23: mol_type = other RNA
ccacagtagtcctgggccaagat

SEQ ID NO: 69906 - RNA, 23 nt, synthetic construct
  source 1..23: mol_type = other RNA
ccagtgcgtcccccaccacggac

SEQ ID NO: 69907 - RNA, 23 nt, synthetic construct
  source 1..23: mol_type = other RNA
tgcagcagaggacccggatcctg

SEQ ID NO: 69908 - RNA, 23 nt, synthetic construct
  source 1..23: mol_type = other RNA
cctgcagtggtcgtcactgcagc

SEQ ID NO: 69909 - RNA, 23 nt, synthetic construct
  source 1..23: mol_type = other RNA
caggtagaggctgagattcccaa

SEQ ID NO: 69910 - RNA, 23 nt, synthetic construct
  source 1..23: mol_type = other RNA
atgctgagggcgcgggggcagcg

SEQ ID NO: 69911 - RNA, 23 nt, synthetic construct
  source 1..23: mol_type = other RNA
agcggaagacgtcgccgtcgaag

SEQ ID NO: 69912 - RNA, 23 nt, synthetic construct
  source 1..23: mol_type = other RNA
tggagtgggggacccaggcggtg

SEQ ID NO: 69913 - RNA, 23 nt, synthetic construct
  source 1..23: mol_type = other RNA
ccagcagttgcctgggtggagga

SEQ ID NO: 69914 - RNA, 23 nt, synthetic construct
  source 1..23: mol_type = other RNA
cccaggggctgctcacagactgc

SEQ ID NO: 69915 - RNA, 23 nt, synthetic construct
  source 1..23: mol_type = other RNA
ccagcagttgcctgggtggagga

SEQ ID NO: 69916 - RNA, 23 nt, synthetic construct
  source 1..23: mol_type = other RNA
ccagcagttgcctgggtggagga

SEQ ID NO: 69917 - RNA, 23 nt, synthetic construct
  source 1..23: mol_type = other RNA
gctggactggctggccatcgggc

SEQ ID NO: 69918 - RNA, 23 nt, synthetic construct
  source 1..23: mol_type = other RNA
ggtgctgcacacccgcccattgt

SEQ ID NO: 69919 - RNA, 23 nt, synthetic construct
  source 1..23: mol_type = other RNA
gcggaagacgtcgccgtcgaagg

SEQ ID NO: 69920 - RNA, 23 nt, synthetic construct
  source 1..23: mol_type = other RNA
gaagacgtcgccgtcgaaggtct

SEQ ID NO: 69921 - RNA, 23 nt, synthetic construct
  source 1..23: mol_type = other RNA
ggaagacgtcgccgtcgaaggtc

SEQ ID NO: 69922 - RNA, 23 nt, synthetic construct
  source 1..23: mol_type = other RNA
gtgcgggtggtccccacggtgga

SEQ ID NO: 69923 - RNA, 23 nt, synthetic construct
  source 1..23: mol_type = other RNA
gttgcaggtgtcaaacatgcagt

SEQ ID NO: 69924 - RNA, 23 nt, synthetic construct
  source 1..23: mol_type = other RNA
agttgcaggtgtcaaacatgcag

SEQ ID NO: 69925 - RNA, 23 nt, synthetic construct
  source 1..23: mol_type = other RNA
cgtccacaggcacgaaggaaacg

SEQ ID NO: 69926 - RNA, 23 nt, synthetic construct
  source 1..23: mol_type = other RNA
accctgatggtctctccaggctt

SEQ ID NO: 69927 - RNA, 23 nt, synthetic construct
  source 1..23: mol_type = other RNA
gagcttccagctgttcccaaact

SEQ ID NO: 69928 - RNA, 23 nt, synthetic construct
  source 1..23: mol_type = other RNA
gccgtgcaggggtccttgggtgc

SEQ ID NO: 69929 - RNA, 23 nt, synthetic construct
  source 1..23: mol_type = other RNA
ggccgtgcaggggtccttgggtg

SEQ ID NO: 69930 - RNA, 23 nt, synthetic construct
  source 1..23: mol_type = other RNA
gggctcacagcccatggtcacca

SEQ ID NO: 69931 - RNA, 23 nt, synthetic construct
  source 1..23: mol_type = other RNA
atgttggagtaggtgtcaaagtc

SEQ ID NO: 69932 - RNA, 23 nt, synthetic construct
  source 1..23: mol_type = other RNA
gccagcagttgcctgggtggagg

SEQ ID NO: 69933 - RNA, 23 nt, synthetic construct
  source 1..23: mol_type = other RNA
gggctcacagcccatggtcacca

SEQ ID NO: 69934 - RNA, 23 nt, synthetic construct
  source 1..23: mol_type = other RNA
atgttggagtaggtgtcaaagtc

SEQ ID NO: 69935 - RNA, 23 nt, synthetic construct
  source 1..23: mol_type = other RNA
atgttggagtaggtgtcaaagtc

SEQ ID NO: 69936 - RNA, 23 nt, synthetic construct
  source 1..23: mol_type = other RNA
gccagcagttgcctgggtggagg

SEQ ID NO: 69937 - RNA, 23 nt, synthetic construct
  source 1..23: mol_type = other RNA
atgttggagtaggtgtcaaagtc

SEQ ID NO: 69938 - RNA, 23 nt, synthetic construct
  source 1..23: mol_type = other RNA
gccagcagttgcctgggtggagg

SEQ ID NO: 69939 - RNA, 23 nt, synthetic construct
  source 1..23: mol_type = other RNA
cagggtggtgaggactgaggagg

SEQ ID NO: 69940 - RNA, 23 nt, synthetic construct
  source 1..23: mol_type = other RNA
tttggtcaaacaggatcaggccc

SEQ ID NO: 69941 - RNA, 23 nt, synthetic construct
  source 1..23: mol_type = other RNA
aggttgtggcactcagcaaagac

SEQ ID NO: 69942 - RNA, 23 nt, synthetic construct
  source 1..23: mol_type = other RNA
ccccctgcagctggacacatctg

SEQ ID NO: 69943 - RNA, 23 nt, synthetic construct
  source 1..23: mol_type = other RNA
ccggggggctccgcagaggaggc

SEQ ID NO: 69944 - RNA, 23 nt, synthetic construct
  source 1..23: mol_type = other RNA
gcgcgggcgctccggccgtggca

SEQ ID NO: 69945 - RNA, 23 nt, synthetic construct
  source 1..23: mol_type = other RNA
tcccaagggtgaaggaggggatg

SEQ ID NO: 69946 - RNA, 23 nt, synthetic construct
  source 1..23: mol_type = other RNA
cagccctggtgccacaggatggt

SEQ ID NO: 69947 - RNA, 23 nt, synthetic construct
  source 1..23: mol_type = other RNA
gtcccaagggtgaaggaggggat

SEQ ID NO: 69948 - RNA, 23 nt, synthetic construct
  source 1..23: mol_type = other RNA
tgggtgtggtggccgggctggtc

SEQ ID NO: 69949 - RNA, 23 nt, synthetic construct
  source 1..23: mol_type = other RNA
ttgggggtgtgagctgttcccag

SEQ ID NO: 69950 - RNA, 23 nt, synthetic construct
  source 1..23: mol_type = other RNA
gccctggtgccacaggatggtcg

SEQ ID NO: 69951 - RNA, 23 nt, synthetic construct
  source 1..23: mol_type = other RNA
gcacatcctggctccaggtggac

SEQ ID NO: 69952 - RNA, 23 nt, synthetic construct
  source 1..23: mol_type = other RNA
cgtgcaggggtccttgggtgcca

SEQ ID NO: 69953 - RNA, 23 nt, synthetic construct
  source 1..23: mol_type = other RNA
gcagacgccgtccctccagtcgc

SEQ ID NO: 69954 - RNA, 23 nt, synthetic construct
  source 1..23: mol_type = other RNA
cactttgggagggggagctgttc

SEQ ID NO: 69955 - RNA, 23 nt, synthetic construct
  source 1..23: mol_type = other RNA
gccacagttgtggtggtggtggt

SEQ ID NO: 69956 - RNA, 23 nt, synthetic construct
  source 1..23: mol_type = other RNA
gccacagttgtggtggtggtggt

SEQ ID NO: 69957 - RNA, 23 nt, synthetic construct
  source 1..23: mol_type = other RNA
cactttgggagggggagctgttc

SEQ ID NO: 69958 - RNA, 23 nt, synthetic construct
  source 1..23: mol_type = other RNA
gccacagttgtggtggtggtggt

SEQ ID NO: 69959 - RNA, 23 nt, synthetic construct
  source 1..23: mol_type = other RNA
ctggaggtgcccctggtgtggcc

SEQ ID NO: 69960 - RNA, 23 nt, synthetic construct
  source 1..23: mol_type = other RNA
gccacagttgtggtggtggtggt

SEQ ID NO: 69961 - RNA, 23 nt, synthetic construct
  source 1..23: mol_type = other RNA
cactttgggagggggagctgttc

SEQ ID NO: 69962 - RNA, 23 nt, synthetic construct
  source 1..23: mol_type = other RNA
gccacagttgtggtggtggtggt

SEQ ID NO: 69963 - RNA, 23 nt, synthetic construct
  source 1..23: mol_type = other RNA
gccggggggctccgcagaggagg

SEQ ID NO: 69964 - RNA, 23 nt, synthetic construct
  source 1..23: mol_type = other RNA
ttctgtggagcctgcaggcgtcg

SEQ ID NO: 69965 - RNA, 23 nt, synthetic construct
  source 1..23: mol_type = other RNA
gaggacagcggggcggaggacac

SEQ ID NO: 69966 - RNA, 23 nt, synthetic construct
  source 1..23: mol_type = other RNA
atgcacatcctggctccaggtgg

SEQ ID NO: 69967 - RNA, 23 nt, synthetic construct
  source 1..23: mol_type = other RNA
ggacacatctgggcaggatgcag

SEQ ID NO: 69968 - RNA, 23 nt, synthetic construct
  source 1..23: mol_type = other RNA
agtcaccccaggtgctgcacacc

SEQ ID NO: 69969 - RNA, 23 nt, synthetic construct
  source 1..23: mol_type = other RNA
agcggtgctggctgtgcctgtcg

SEQ ID NO: 69970 - RNA, 23 nt, synthetic construct
  source 1..23: mol_type = other RNA
ggcagaggagggagtcactgtgt

SEQ ID NO: 69971 - RNA, 23 nt, synthetic construct
  source 1..23: mol_type = other RNA
ctggagaagggagtggctttgga

SEQ ID NO: 69972 - RNA, 23 nt, synthetic construct
  source 1..23: mol_type = other RNA
ggcagaggagggagtcactgtgc

SEQ ID NO: 69973 - RNA, 23 nt, synthetic construct
  source 1..23: mol_type = other RNA
gtggctgctgtggtcagctctgt

SEQ ID NO: 69974 - RNA, 23 nt, synthetic construct
  source 1..23: mol_type = other RNA
ggcagaggagggagtcactgtgc

SEQ ID NO: 69975 - RNA, 23 nt, synthetic construct
  source 1..23: mol_type = other RNA
ctggagaagggagtggctttgga

SEQ ID NO: 69976 - RNA, 23 nt, synthetic construct
  source 1..23: mol_type = other RNA
ggcagaggagggagtcactgtgc

SEQ ID NO: 69977 - RNA, 23 nt, synthetic construct
  source 1..23: mol_type = other RNA
gtggctgctgtggtcagctctgt

SEQ ID NO: 69978 - RNA, 23 nt, synthetic construct
  source 1..23: mol_type = other RNA
gcagtcgccctcctcctgggtgc

SEQ ID NO: 69979 - RNA, 23 nt, synthetic construct
  source 1..23: mol_type = other RNA
acacatctgggcaggatgcaggc

SEQ ID NO: 69980 - RNA, 23 nt, synthetic construct
  source 1..23: mol_type = other RNA
ctgtggtctgctctgtgaggatc

SEQ ID NO: 69981 - RNA, 23 nt, synthetic construct
  source 1..23: mol_type = other RNA
cgaggacagcggggcggaggaca

SEQ ID NO: 69982 - RNA, 23 nt, synthetic construct
  source 1..23: mol_type = other RNA
tgcacatcctggctccaggtgga

SEQ ID NO: 69983 - RNA, 23 nt, synthetic construct
  source 1..23: mol_type = other RNA
gcacaggcagcctgggccttcca

SEQ ID NO: 69984 - RNA, 23 nt, synthetic construct
  source 1..23: mol_type = other RNA
ggaggaagaggggatgggtgtaa

SEQ ID NO: 69985 - RNA, 23 nt, synthetic construct
  source 1..23: mol_type = other RNA
aagggtggaggaggggatgggtg

SEQ ID NO: 69986 - RNA, 23 nt, synthetic construct
  source 1..23: mol_type = other RNA
cagggtggaggaggggatgggtg

SEQ ID NO: 69987 - RNA, 23 nt, synthetic construct
  source 1..23: mol_type = other RNA
ggctgttgtggtcagctcagtga

SEQ ID NO: 69988 - RNA, 23 nt, synthetic construct
  source 1..23: mol_type = other RNA
tcctcagggcagaagcagccctc

SEQ ID NO: 69989 - RNA, 23 nt, synthetic construct
  source 1..23: mol_type = other RNA
ggccggggggctccgcagaggag

SEQ ID NO: 69990 - RNA, 23 nt, synthetic construct
  source 1..23: mol_type = other RNA
attctcccagctcggctccacag

SEQ ID NO: 69991 - RNA, 23 nt, synthetic construct
  source 1..23: mol_type = other RNA
tggactggaggagggagtggctt

SEQ ID NO: 69992 - RNA, 23 nt, synthetic construct
  source 1..23: mol_type = other RNA
tggactggaggagggagtggctc

SEQ ID NO: 69993 - RNA, 23 nt, synthetic construct
  source 1..23: mol_type = other RNA
tggactggaggagggagtggctt

SEQ ID NO: 69994 - RNA, 23 nt, synthetic construct
  source 1..23: mol_type = other RNA
cagccatcctttctgctgtcggg

SEQ ID NO: 69995 - RNA, 23 nt, synthetic construct
  source 1..23: mol_type = other RNA
cctgcacagagcaggtgccaggg

SEQ ID NO: 69996 - RNA, 23 nt, synthetic construct
  source 1..23: mol_type = other RNA
agatgtgggccccgccctgcaca

SEQ ID NO: 69997 - RNA, 23 nt, synthetic construct
  source 1..23: mol_type = other RNA
cagcccccactcccatccgacac

SEQ ID NO: 69998 - RNA, 23 nt, synthetic construct
  source 1..23: mol_type = other RNA
ccagctgttcccaaactccagtg

SEQ ID NO: 69999 - RNA, 23 nt, synthetic construct
  source 1..23: mol_type = other RNA
ttccagctgttcccaaactccag

SEQ ID NO: 70000 - RNA, 23 nt, synthetic construct
  source 1..23: mol_type = other RNA
gcttccagctgttcccaaactcc

SEQ ID NO: 70001 - RNA, 23 nt, synthetic construct
  source 1..23: mol_type = other RNA
ggcaggagggggagagcttccag

SEQ ID NO: 70002 - RNA, 23 nt, synthetic construct
  source 1..23: mol_type = other RNA
cgggcaggagggggagagcttcc

SEQ ID NO: 70003 - RNA, 23 nt, synthetic construct
  source 1..23: mol_type = other RNA
cggcaggcggcgaaggtggggcc

SEQ ID NO: 70004 - RNA, 23 nt, synthetic construct
  source 1..23: mol_type = other RNA
gccacagccttcctgatgatggt

SEQ ID NO: 70005 - RNA, 23 nt, synthetic construct
  source 1..23: mol_type = other RNA
ccaggggctgctcacagactgcc

SEQ ID NO: 70006 - RNA, 23 nt, synthetic construct
  source 1..23: mol_type = other RNA
ggacatggtggccacgggtgtgg

SEQ ID NO: 70007 - RNA, 23 nt, synthetic construct
  source 1..23: mol_type = other RNA
tcggggcacccatcctgggggct

SEQ ID NO: 70008 - RNA, 23 nt, synthetic construct
  source 1..23: mol_type = other RNA
aagtcaccccaggtgctgcacac

SEQ ID NO: 70009 - RNA, 23 nt, synthetic construct
  source 1..23: mol_type = other RNA
ttggacgcctccagcaccagccc

SEQ ID NO: 70010 - RNA, 23 nt, synthetic construct
  source 1..23: mol_type = other RNA
gttggacgcctccagcaccagcc

SEQ ID NO: 70011 - RNA, 23 nt, synthetic construct
  source 1..23: mol_type = other RNA
cggagcaggtgcaggagctgcag

SEQ ID NO: 70012 - RNA, 23 nt, synthetic construct
  source 1..23: mol_type = other RNA
gcacagagcaggtgccagggcac

SEQ ID NO: 70013 - RNA, 23 nt, synthetic construct
  source 1..23: mol_type = other RNA
ccctgcacagagcaggtgccagg

SEQ ID NO: 70014 - RNA, 23 nt, synthetic construct
  source 1..23: mol_type = other RNA
tgcaccagcagctgcagccccag

SEQ ID NO: 70015 - RNA, 23 nt, synthetic construct
  source 1..23: mol_type = other RNA
aggctcccaggcagcttagcttc

SEQ ID NO: 70016 - RNA, 23 nt, synthetic construct
  source 1..23: mol_type = other RNA
cgacaccagccccgggggacaga

SEQ ID NO: 70017 - RNA, 23 nt, synthetic construct
  source 1..23: mol_type = other RNA
gctgttcccaaactccagtgcgt

SEQ ID NO: 70018 - RNA, 23 nt, synthetic construct
  source 1..23: mol_type = other RNA
cagctgttcccaaactccagtgc

SEQ ID NO: 70019 - RNA, 23 nt, synthetic construct
  source 1..23: mol_type = other RNA
tccagctgttcccaaactccagt

SEQ ID NO: 70020 - RNA, 23 nt, synthetic construct
  source 1..23: mol_type = other RNA
cttccagctgttcccaaactcca

SEQ ID NO: 70021 - RNA, 23 nt, synthetic construct
  source 1..23: mol_type = other RNA
agcttccagctgttcccaaactc

SEQ ID NO: 70022 - RNA, 23 nt, synthetic construct
  source 1..23: mol_type = other RNA
agggggagagcttccagctgttc

SEQ ID NO: 70023 - RNA, 23 nt, synthetic construct
  source 1..23: mol_type = other RNA
gagggggagagcttccagctgtt

SEQ ID NO: 70024 - RNA, 23 nt, synthetic construct
  source 1..23: mol_type = other RNA
aggagggggagagcttccagctg

SEQ ID NO: 70025 - RNA, 23 nt, synthetic construct
  source 1..23: mol_type = other RNA
gggcaggagggggagagcttcca

SEQ ID NO: 70026 - RNA, 23 nt, synthetic construct
  source 1..23: mol_type = other RNA
gcgaaggtggggccgtggaggat

SEQ ID NO: 70027 - RNA, 23 nt, synthetic construct
  source 1..23: mol_type = other RNA
ggcgaaggtggggccgtggagga

SEQ ID NO: 70028 - RNA, 23 nt, synthetic construct
  source 1..23: mol_type = other RNA
caggcggcgaaggtggggccgtg

SEQ ID NO: 70029 - RNA, 23 nt, synthetic construct
  source 1..23: mol_type = other RNA
gcaggcggcgaaggtggggccgt

SEQ ID NO: 70030 - RNA, 23 nt, synthetic construct
  source 1..23: mol_type = other RNA
gccactcacagcccccatgtggg

SEQ ID NO: 70031 - RNA, 23 nt, synthetic construct
  source 1..23: mol_type = other RNA
cggtggtgaaggtgaatggcgtt

SEQ ID NO: 70032 - RNA, 23 nt, synthetic construct
  source 1..23: mol_type = other RNA
caggcggtggtgaaggtgaatgg

SEQ ID NO: 70033 - RNA, 23 nt, synthetic construct
  source 1..23: mol_type = other RNA
ccaggccgggctctgggcggtgc

SEQ ID NO: 70034 - RNA, 23 nt, synthetic construct
  source 1..23: mol_type = other RNA
aagtctccgcctcccaggccggg

SEQ ID NO: 70035 - RNA, 23 nt, synthetic construct
  source 1..23: mol_type = other RNA
agggagggctgagggctggtgcc

SEQ ID NO: 70036 - RNA, 23 nt, synthetic construct
  source 1..23: mol_type = other RNA
tgagggagggctgagggctggtg

SEQ ID NO: 70037 - RNA, 23 nt, synthetic construct
  source 1..23: mol_type = other RNA
ttctgccccacctgtgccagggt

SEQ ID NO: 70038 - RNA, 23 nt, synthetic construct
  source 1..23: mol_type = other RNA
gtggccgtctccagctctgtggt

SEQ ID NO: 70039 - RNA, 23 nt, synthetic construct
  source 1..23: mol_type = other RNA
ggtggccgtctccagctctgtgg

SEQ ID NO: 70040 - RNA, 23 nt, synthetic construct
  source 1..23: mol_type = other RNA
agggcctgggtggtggtggtggt

SEQ ID NO: 70041 - RNA, 23 nt, synthetic construct
  source 1..23: mol_type = other RNA
ggggactgctgtggtgctggccg

SEQ ID NO: 70042 - RNA, 23 nt, synthetic construct
  source 1..23: mol_type = other RNA
ggctgtgcttctcagtgctggaa

SEQ ID NO: 70043 - RNA, 23 nt, synthetic construct
  source 1..23: mol_type = other RNA
tggctgtgcttctcagtgctgga

SEQ ID NO: 70044 - RNA, 23 nt, synthetic construct
  source 1..23: mol_type = other RNA
gggaggaagaggggatgggtgta

SEQ ID NO: 70045 - RNA, 23 nt, synthetic construct
  source 1..23: mol_type = other RNA
gcccagggaggaagaggggatgg

SEQ ID NO: 70046 - RNA, 23 nt, synthetic construct
  source 1..23: mol_type = other RNA
gtgcccagggaggaagaggggat

SEQ ID NO: 70047 - RNA, 23 nt, synthetic construct
  source 1..23: mol_type = other RNA
ggccacagttgtggtggtggtgg

SEQ ID NO: 70048 - RNA, 23 nt, synthetic construct
  source 1..23: mol_type = other RNA
gtgtggggactgctggggggcag

SEQ ID NO: 70049 - RNA, 23 nt, synthetic construct
  source 1..23: mol_type = other RNA
tcctggaggtggccgtggtgtgg

SEQ ID NO: 70050 - RNA, 23 nt, synthetic construct
  source 1..23: mol_type = other RNA
gggtggaggaggcggtggccgtg

SEQ ID NO: 70051 - RNA, 23 nt, synthetic construct
  source 1..23: mol_type = other RNA
ggctgtgcttctcagtgctggaa

SEQ ID NO: 70052 - RNA, 23 nt, synthetic construct
  source 1..23: mol_type = other RNA
tggctgtgcttctcagtgctgga

SEQ ID NO: 70053 - RNA, 23 nt, synthetic construct
  source 1..23: mol_type = other RNA
tgcccagggaggaggaggggatg

SEQ ID NO: 70054 - RNA, 23 nt, synthetic construct
  source 1..23: mol_type = other RNA
aggtggtgcccagggaggaggag

SEQ ID NO: 70055 - RNA, 23 nt, synthetic construct
  source 1..23: mol_type = other RNA
ggccacagttgtggtggtggtgg

SEQ ID NO: 70056 - RNA, 23 nt, synthetic construct
  source 1..23: mol_type = other RNA
gtgtggggactgctgggggacag

SEQ ID NO: 70057 - RNA, 23 nt, synthetic construct
  source 1..23: mol_type = other RNA
gtgtggccgtggccgtggtcctg

SEQ ID NO: 70058 - RNA, 23 nt, synthetic construct
  source 1..23: mol_type = other RNA
ggctgtgggtgtggtggccgtgc

SEQ ID NO: 70059 - RNA, 23 nt, synthetic construct
  source 1..23: mol_type = other RNA
ctggaggaggaagtggctttgga

SEQ ID NO: 70060 - RNA, 23 nt, synthetic construct
  source 1..23: mol_type = other RNA
ccggagtggaggaggggtggatt

SEQ ID NO: 70061 - RNA, 23 nt, synthetic construct
  source 1..23: mol_type = other RNA
tggctgctgtggtcagctctgtg

SEQ ID NO: 70062 - RNA, 23 nt, synthetic construct
  source 1..23: mol_type = other RNA
agtggctgctgtggtcagctctg

SEQ ID NO: 70063 - RNA, 23 nt, synthetic construct
  source 1..23: mol_type = other RNA
gtggccgtggggccagtggctgc

SEQ ID NO: 70064 - RNA, 23 nt, synthetic construct
  source 1..23: mol_type = other RNA
gggtggaggaggcggtggccgtg

SEQ ID NO: 70065 - RNA, 23 nt, synthetic construct
  source 1..23: mol_type = other RNA
ggctgtgcttctcagtgctggaa

SEQ ID NO: 70066 - RNA, 23 nt, synthetic construct
  source 1..23: mol_type = other RNA
tggctgtgcttctcagtgctgga

SEQ ID NO: 70067 - RNA, 23 nt, synthetic construct
  source 1..23: mol_type = other RNA
gcccagggaggaagaggggatgg

SEQ ID NO: 70068 - RNA, 23 nt, synthetic construct
  source 1..23: mol_type = other RNA
gtgcccagggaggaagaggggat

SEQ ID NO: 70069 - RNA, 23 nt, synthetic construct
  source 1..23: mol_type = other RNA
ttgtggtggtcgtggtggtaagc

SEQ ID NO: 70070 - RNA, 23 nt, synthetic construct
  source 1..23: mol_type = other RNA
ggccacagttgtggtggtggtgg

SEQ ID NO: 70071 - RNA, 23 nt, synthetic construct
  source 1..23: mol_type = other RNA
tgctggggggcagggaccgcccg

SEQ ID NO: 70072 - RNA, 23 nt, synthetic construct
  source 1..23: mol_type = other RNA
ctgctggggggcagggaccgccc

SEQ ID NO: 70073 - RNA, 23 nt, synthetic construct
  source 1..23: mol_type = other RNA
gtgtggggactgctggggggcag

SEQ ID NO: 70074 - RNA, 23 nt, synthetic construct
  source 1..23: mol_type = other RNA
ggctgtggctgtggtcctggagg

SEQ ID NO: 70075 - RNA, 23 nt, synthetic construct
  source 1..23: mol_type = other RNA
gggtggaggaggcggtggccgtg

SEQ ID NO: 70076 - RNA, 23 nt, synthetic construct
  source 1..23: mol_type = other RNA
ggctgtgcttctcagtgctggaa

SEQ ID NO: 70077 - RNA, 23 nt, synthetic construct
  source 1..23: mol_type = other RNA
tggctgtgcttctcagtgctgga

SEQ ID NO: 70078 - RNA, 23 nt, synthetic construct
  source 1..23: mol_type = other RNA
tgcccagggaggaggaggggatg

SEQ ID NO: 70079 - RNA, 23 nt, synthetic construct
  source 1..23: mol_type = other RNA
aggtggtgcccagggaggaggag

SEQ ID NO: 70080 - RNA, 23 nt, synthetic construct
  source 1..23: mol_type = other RNA
cctggggtggaagagggggtggc

SEQ ID NO: 70081 - RNA, 23 nt, synthetic construct
  source 1..23: mol_type = other RNA
ggccacagttgtggtggtggtgg

SEQ ID NO: 70082 - RNA, 23 nt, synthetic construct
  source 1..23: mol_type = other RNA
gtgtggggactgctgggggacag

SEQ ID NO: 70083 - RNA, 23 nt, synthetic construct
  source 1..23: mol_type = other RNA
tcctggaggtggccgtggtgtgg

SEQ ID NO: 70084 - RNA, 23 nt, synthetic construct
  source 1..23: mol_type = other RNA
gtgtggccgtggccgtggtcctg

SEQ ID NO: 70085 - RNA, 23 nt, synthetic construct
  source 1..23: mol_type = other RNA
gtggtggccgggctggtcagcac

SEQ ID NO: 70086 - RNA, 23 nt, synthetic construct
  source 1..23: mol_type = other RNA
ggctgtgggtgtggtggccgggc

SEQ ID NO: 70087 - RNA, 23 nt, synthetic construct
  source 1..23: mol_type = other RNA
ctggaggaggaagtggctttgga

SEQ ID NO: 70088 - RNA, 23 nt, synthetic construct
  source 1..23: mol_type = other RNA
agggtggaggaggggatgggtgt

SEQ ID NO: 70089 - RNA, 23 nt, synthetic construct
  source 1..23: mol_type = other RNA
ccggagtggaggaggggtggatt

SEQ ID NO: 70090 - RNA, 23 nt, synthetic construct
  source 1..23: mol_type = other RNA
tggctgctgtggtcagctctgtg

SEQ ID NO: 70091 - RNA, 23 nt, synthetic construct
  source 1..23: mol_type = other RNA
agtggctgctgtggtcagctctg

SEQ ID NO: 70092 - RNA, 23 nt, synthetic construct
  source 1..23: mol_type = other RNA
gtggccgtggggccagtggctgc

SEQ ID NO: 70093 - RNA, 23 nt, synthetic construct
  source 1..23: mol_type = other RNA
gggtggaggaggcggtggccgtg

SEQ ID NO: 70094 - RNA, 23 nt, synthetic construct
  source 1..23: mol_type = other RNA
tgctggaagggcagttgcagtcc

SEQ ID NO: 70095 - RNA, 23 nt, synthetic construct
  source 1..23: mol_type = other RNA
ggctgtgcttctcagtgctggaa

SEQ ID NO: 70096 - RNA, 23 nt, synthetic construct
  source 1..23: mol_type = other RNA
tggctgtgcttctcagtgctgga

SEQ ID NO: 70097 - RNA, 23 nt, synthetic construct
  source 1..23: mol_type = other RNA
tgcccagggaggaggaggggatg

SEQ ID NO: 70098 - RNA, 23 nt, synthetic construct
  source 1..23: mol_type = other RNA
aggtggtgcccagggaggaggag

SEQ ID NO: 70099 - RNA, 23 nt, synthetic construct
  source 1..23: mol_type = other RNA
ggccacagttgtggtggtggtgg

SEQ ID NO: 70100 - RNA, 23 nt, synthetic construct
  source 1..23: mol_type = other RNA
tcagcactggggtgatgggtgtt

SEQ ID NO: 70101 - RNA, 23 nt, synthetic construct
  source 1..23: mol_type = other RNA
ctggaggaggaagtggctttgga

SEQ ID NO: 70102 - RNA, 23 nt, synthetic construct
  source 1..23: mol_type = other RNA
gctgtggattttgtggctgtgct

SEQ ID NO: 70103 - RNA, 23 nt, synthetic construct
  source 1..23: mol_type = other RNA
agctgtggattttgtggctgtgc

SEQ ID NO: 70104 - RNA, 23 nt, synthetic construct
  source 1..23: mol_type = other RNA
agggtggaggaggggatgggtgt

SEQ ID NO: 70105 - RNA, 23 nt, synthetic construct
  source 1..23: mol_type = other RNA
cggtccacgtggtccacagggtg

SEQ ID NO: 70106 - RNA, 23 nt, synthetic construct
  source 1..23: mol_type = other RNA
tcatggtggctgtggtggtcagc

SEQ ID NO: 70107 - RNA, 23 nt, synthetic construct
  source 1..23: mol_type = other RNA
gtcatggtggctgtggtggtcag

SEQ ID NO: 70108 - RNA, 23 nt, synthetic construct
  source 1..23: mol_type = other RNA
cgtggaggcagtggctgtgggca

SEQ ID NO: 70109 - RNA, 23 nt, synthetic construct
  source 1..23: mol_type = other RNA
ccctcctccttcccatgcaccat

SEQ ID NO: 70110 - RNA, 23 nt, synthetic construct
  source 1..23: mol_type = other RNA
aacaggatcaggccctcctcctt

SEQ ID NO: 70111 - RNA, 23 nt, synthetic construct
  source 1..23: mol_type = other RNA
ggcagggcacctcaaggcggccc

SEQ ID NO: 70112 - RNA, 23 nt, synthetic construct
  source 1..23: mol_type = other RNA
cacacaggcaggctctgggggca

SEQ ID NO: 70113 - RNA, 23 nt, synthetic construct
  source 1..23: mol_type = other RNA
ctggacacatctgggcaggatgc

SEQ ID NO: 70114 - RNA, 23 nt, synthetic construct
  source 1..23: mol_type = other RNA
agccctggtgccacaggatggtc

SEQ ID NO: 70115 - RNA, 23 nt, synthetic construct
  source 1..23: mol_type = other RNA
gggtgtgtgggggagccatgggc

SEQ ID NO: 70116 - RNA, 23 nt, synthetic construct
  source 1..23: mol_type = other RNA
ggtgggcagcaggagcacggagc

SEQ ID NO: 70117 - RNA, 23 nt, synthetic construct
  source 1..23: mol_type = other RNA
cttcctggcagcagctggccttg

SEQ ID NO: 70118 - RNA, 23 nt, synthetic construct
  source 1..23: mol_type = other RNA
gcttcctggcagcagctggcctt

SEQ ID NO: 70119 - RNA, 23 nt, synthetic construct
  source 1..23: mol_type = other RNA
ccctgggtctctgcctgcggcac

SEQ ID NO: 70120 - RNA, 23 nt, synthetic construct
  source 1..23: mol_type = other RNA
cagtgcaccttctgccccacctg

SEQ ID NO: 70121 - RNA, 23 nt, synthetic construct
  source 1..23: mol_type = other RNA
ggagggggtgactgtgaagcccg

SEQ ID NO: 70122 - RNA, 23 nt, synthetic construct
  source 1..23: mol_type = other RNA
gatggcattgtcgtcgaagttcc

SEQ ID NO: 70123 - RNA, 23 nt, synthetic construct
  source 1..23: mol_type = other RNA
gccctgagttaccctgcagcagg

SEQ ID NO: 70124 - RNA, 23 nt, synthetic construct
  source 1..23: mol_type = other RNA
gctgcagttgtagtggctgttgt

SEQ ID NO: 70125 - RNA, 23 nt, synthetic construct
  source 1..23: mol_type = other RNA
tagctgcagtcaccatgcaggtc

SEQ ID NO: 70126 - RNA, 23 nt, synthetic construct
  source 1..23: mol_type = other RNA
gaccctgggcgtcacagggcagg

SEQ ID NO: 70127 - RNA, 23 nt, synthetic construct
  source 1..23: mol_type = other RNA
gtcacagggcaggggcttgcact

SEQ ID NO: 70128 - RNA, 23 nt, synthetic construct
  source 1..23: mol_type = other RNA
actgcaggggtgcgggtggtccc

SEQ ID NO: 70129 - RNA, 23 nt, synthetic construct
  source 1..23: mol_type = other RNA
ggagggggtggccacagagccgg

SEQ ID NO: 70130 - RNA, 23 nt, synthetic construct
  source 1..23: mol_type = other RNA
ggagggggtggccacagagccgg

SEQ ID NO: 70131 - RNA, 23 nt, synthetic construct
  source 1..23: mol_type = other RNA
gtggccctggtgtggcccggggt

SEQ ID NO: 70132 - RNA, 23 nt, synthetic construct
  source 1..23: mol_type = other RNA
ggagggggtggccacagagccgg

SEQ ID NO: 70133 - RNA, 23 nt, synthetic construct
  source 1..23: mol_type = other RNA
agagggggtggccacagagccgg

SEQ ID NO: 70134 - RNA, 23 nt, synthetic construct
  source 1..23: mol_type = other RNA
ggagggggtggccacagagccgg

SEQ ID NO: 70135 - RNA, 23 nt, synthetic construct
  source 1..23: mol_type = other RNA
cctgcagcaggcatggacaggcg

SEQ ID NO: 70136 - RNA, 23 nt, synthetic construct
  source 1..23: mol_type = other RNA
cctgatggtctctccaggcttgt

SEQ ID NO: 70137 - RNA, 23 nt, synthetic construct
  source 1..23: mol_type = other RNA
gtgtgggcagtctctggagtgga

SEQ ID NO: 70138 - RNA, 23 nt, synthetic construct
  source 1..23: mol_type = other RNA
gtgtgggcagtctctggagtgga

SEQ ID NO: 70139 - RNA, 23 nt, synthetic construct
  source 1..23: mol_type = other RNA
ccgtgcaggggtccttgggtgcc

SEQ ID NO: 70140 - RNA, 23 nt, synthetic construct
  source 1..23: mol_type = other RNA
gggcgtccgggcaggagggggag

SEQ ID NO: 70141 - RNA, 23 nt, synthetic construct
  source 1..23: mol_type = other RNA
cgtcacagggcaggggcttgcac

SEQ ID NO: 70142 - RNA, 23 nt, synthetic construct
  source 1..23: mol_type = other RNA
ccgtggatccagtggctgcagtt

SEQ ID NO: 70143 - RNA, 23 nt, synthetic construct
  source 1..23: mol_type = other RNA
gcagctcctcccgctgcccattg

SEQ ID NO: 70144 - RNA, 23 nt, synthetic construct
  source 1..23: mol_type = other RNA
tggggtgggggtgggtgtgctag

SEQ ID NO: 70145 - RNA, 23 nt, synthetic construct
  source 1..23: mol_type = other RNA
ccagcaccagcccctgggccttg

SEQ ID NO: 70146 - RNA, 23 nt, synthetic construct
  source 1..23: mol_type = other RNA
ggcagctcctcccgctgcccatt

SEQ ID NO: 70147 - RNA, 23 nt, synthetic construct
  source 1..23: mol_type = other RNA
tggcccagctcctccagcggcat

SEQ ID NO: 70148 - RNA, 23 nt, synthetic construct
  source 1..23: mol_type = other RNA
ggggtgggggtgggtgtgctaga

SEQ ID NO: 70149 - RNA, 23 nt, synthetic construct
  source 1..23: mol_type = other RNA
gcatggggtgggggtgggtgtgc

SEQ ID NO: 70150 - RNA, 23 nt, synthetic construct
  source 1..23: mol_type = other RNA
tccttgggtgccagggcgtccgg

SEQ ID NO: 70151 - RNA, 23 nt, synthetic construct
  source 1..23: mol_type = other RNA
gctctggagctgatgactgtggg

SEQ ID NO: 70152 - RNA, 23 nt, synthetic construct
  source 1..23: mol_type = other RNA
cgggtcttgctgggtgtggccgt

SEQ ID NO: 70153 - RNA, 23 nt, synthetic construct
  source 1..23: mol_type = other RNA
cgggtcttgctgggtgtggccgt

SEQ ID NO: 70154 - RNA, 23 nt, synthetic construct
  source 1..23: mol_type = other RNA
cgggtcttgctgggtgtggctgt

SEQ ID NO: 70155 - RNA, 23 nt, synthetic construct
  source 1..23: mol_type = other RNA
cgggtcttgctgggtgtggccgt

SEQ ID NO: 70156 - RNA, 23 nt, synthetic construct
  source 1..23: mol_type = other RNA
tctctggagtagaggaggtgtgg

SEQ ID NO: 70157 - RNA, 23 nt, synthetic construct
  source 1..23: mol_type = other RNA
gggacggaggagggggtcaccgt

SEQ ID NO: 70158 - RNA, 23 nt, synthetic construct
  source 1..23: mol_type = other RNA
agctggtggctgcgggtgtggtg

SEQ ID NO: 70159 - RNA, 23 nt, synthetic construct
  source 1..23: mol_type = other RNA
cgctggtagctgtgggtgtggtg

SEQ ID NO: 70160 - RNA, 23 nt, synthetic construct
  source 1..23: mol_type = other RNA
cgctggtagctgtgggtgtggtg

SEQ ID NO: 70161 - RNA, 23 nt, synthetic construct
  source 1..23: mol_type = other RNA
actttgggagggggagctgttct

SEQ ID NO: 70162 - RNA, 23 nt, synthetic construct
  source 1..23: mol_type = other RNA
actttgggagggggagctgttcc

SEQ ID NO: 70163 - RNA, 23 nt, synthetic construct
  source 1..23: mol_type = other RNA
actttgggagggggagctgttcc

SEQ ID NO: 70164 - RNA, 23 nt, synthetic construct
  source 1..23: mol_type = other RNA
acagttgcaggtgtcaaacatgc

SEQ ID NO: 70165 - RNA, 23 nt, synthetic construct
  source 1..23: mol_type = other RNA
gtggggccgtggaggatgctgca

SEQ ID NO: 70166 - RNA, 23 nt, synthetic construct
  source 1..23: mol_type = other RNA
gctttggagctggtgactgtggg

SEQ ID NO: 70167 - RNA, 23 nt, synthetic construct
  source 1..23: mol_type = other RNA
gctttggagctggtgactgtggg

SEQ ID NO: 70168 - RNA, 23 nt, synthetic construct
  source 1..23: mol_type = other RNA
gctttggagctggtgactgtggg

SEQ ID NO: 70169 - RNA, 23 nt, synthetic construct
  source 1..23: mol_type = other RNA
gctttggagctggtgactgtggg

SEQ ID NO: 70170 - RNA, 23 nt, synthetic construct
  source 1..23: mol_type = other RNA
atcccctccagctgtgggctctg

SEQ ID NO: 70171 - RNA, 23 nt, synthetic construct
  source 1..23: mol_type = other RNA
gcggaggacactggcggtgggga

SEQ ID NO: 70172 - RNA, 23 nt, synthetic construct
  source 1..23: mol_type = other RNA
cacaggcctggagcccactaggc

SEQ ID NO: 70173 - RNA, 23 nt, synthetic construct
  source 1..23: mol_type = other RNA
gcaggcctgggcgtaggcagcca

SEQ ID NO: 70174 - RNA, 23 nt, synthetic construct
  source 1..23: mol_type = other RNA
gggtggaggaggggatgggtgta

SEQ ID NO: 70175 - RNA, 23 nt, synthetic construct
  source 1..23: mol_type = other RNA
gggtggaggaggggatgggtgta

SEQ ID NO: 70176 - RNA, 23 nt, synthetic construct
  source 1..23: mol_type = other RNA
cgctccggggcaggagccctcgc

SEQ ID NO: 70177 - RNA, 23 nt, synthetic construct
  source 1..23: mol_type = other RNA
cctggggtggaggacggggtggc

SEQ ID NO: 70178 - RNA, 23 nt, synthetic construct
  source 1..23: mol_type = other RNA
cctggggtggaggacggggtggc

SEQ ID NO: 70179 - RNA, 23 nt, synthetic construct
  source 1..23: mol_type = other RNA
cctggggtggaggacggggtggc

SEQ ID NO: 70180 - RNA, 23 nt, synthetic construct
  source 1..23: mol_type = other RNA
cctggggtggaggacggggtggc

SEQ ID NO: 70181 - RNA, 23 nt, synthetic construct
  source 1..23: mol_type = other RNA
cctggggtggaggacggggtggc

SEQ ID NO: 70182 - RNA, 23 nt, synthetic construct
  source 1..23: mol_type = other RNA
cctcagggcagaagcagccctcc

SEQ ID NO: 70183 - RNA, 23 nt, synthetic construct
  source 1..23: mol_type = other RNA
accggttgcacctcgccagtcac

SEQ ID NO: 70184 - RNA, 23 nt, synthetic construct
  source 1..23: mol_type = other RNA
ggagggggtcaccgtggagcctc

SEQ ID NO: 70185 - RNA, 23 nt, synthetic construct
  source 1..23: mol_type = other RNA
ggagggggtcaccgtggaacctc

SEQ ID NO: 70186 - RNA, 23 nt, synthetic construct
  source 1..23: mol_type = other RNA
ggagggggtcaccgtggagcctc

SEQ ID NO: 70187 - RNA, 23 nt, synthetic construct
  source 1..23: mol_type = other RNA
ggagggggtcaccgtggagccac

SEQ ID NO: 70188 - RNA, 23 nt, synthetic construct
  source 1..23: mol_type = other RNA
ggagggggtcaccgtggagccac

SEQ ID NO: 70189 - RNA, 23 nt, synthetic construct
  source 1..23: mol_type = other RNA
ggtgacagtgaggacgatatcca

SEQ ID NO: 70190 - RNA, 23 nt, synthetic construct
  source 1..23: mol_type = other RNA
aagctgcgccgcccggcactcga

SEQ ID NO: 70191 - RNA, 23 nt, synthetic construct
  source 1..23: mol_type = other RNA
gtgccctgcattctcccagctcg

SEQ ID NO: 70192 - RNA, 23 nt, synthetic construct
  source 1..23: mol_type = other RNA
cagcaccagccggatgctgacct

SEQ ID NO: 70193 - RNA, 23 nt, synthetic construct
  source 1..23: mol_type = other RNA
gctgcagtcaccatgcaggtcgt

SEQ ID NO: 70194 - RNA, 23 nt, synthetic construct
  source 1..23: mol_type = other RNA
tggagtggcagcgcgagaaggca

SEQ ID NO: 70195 - RNA, 23 nt, synthetic construct
  source 1..23: mol_type = other RNA
gtgccctccagcggccctgatct

SEQ ID NO: 70196 - RNA, 23 nt, synthetic construct
  source 1..23: mol_type = other RNA
acagtgcaccttctgccccacct

SEQ ID NO: 70197 - RNA, 23 nt, synthetic construct
  source 1..23: mol_type = other RNA
catgtgcccaagctccccgtcgt

SEQ ID NO: 70198 - RNA, 23 nt, synthetic construct
  source 1..23: mol_type = other RNA
gctggctgtgcctgtcgggcgag

SEQ ID NO: 70199 - RNA, 23 nt, synthetic construct
  source 1..23: mol_type = other RNA
ggagggggagctgttctcagggt

SEQ ID NO: 70200 - RNA, 23 nt, synthetic construct
  source 1..23: mol_type = other RNA
cccggttgtggtggccgtggtgg

SEQ ID NO: 70201 - RNA, 23 nt, synthetic construct
  source 1..23: mol_type = other RNA
tgctggtcagcactttgggaggg

SEQ ID NO: 70202 - RNA, 23 nt, synthetic construct
  source 1..23: mol_type = other RNA
tgctggtcagcactttgagggtg

SEQ ID NO: 70203 - RNA, 23 nt, synthetic construct
  source 1..23: mol_type = other RNA
ggctggtcagcactttgggaggg

SEQ ID NO: 70204 - RNA, 23 nt, synthetic construct
  source 1..23: mol_type = other RNA
cccggttgtggtggccgtggcgg

SEQ ID NO: 70205 - RNA, 23 nt, synthetic construct
  source 1..23: mol_type = other RNA
tggaagacttggccattgaaggt

SEQ ID NO: 70206 - RNA, 23 nt, synthetic construct
  source 1..23: mol_type = other RNA
ccagcagccatcctttctgctgt

SEQ ID NO: 70207 - RNA, 23 nt, synthetic construct
  source 1..23: mol_type = other RNA
aagcagccctccgccatcccctc

SEQ ID NO: 70208 - RNA, 23 nt, synthetic construct
  source 1..23: mol_type = other RNA
cctggaccagcctgtctgcccca

SEQ ID NO: 70209 - RNA, 23 nt, synthetic construct
  source 1..23: mol_type = other RNA
atgctgacccctctctgacctgg

SEQ ID NO: 70210 - RNA, 23 nt, synthetic construct
  source 1..23: mol_type = other RNA
aggaatgtcagcaccagccggat

SEQ ID NO: 70211 - RNA, 23 nt, synthetic construct
  source 1..23: mol_type = other RNA
ggagatgtgggccccgccctgca

SEQ ID NO: 70212 - RNA, 23 nt, synthetic construct
  source 1..23: mol_type = other RNA
atcataggtggagatgtgggccc

SEQ ID NO: 70213 - RNA, 23 nt, synthetic construct
  source 1..23: mol_type = other RNA
gctgcagtccaggtacaccatgg

SEQ ID NO: 70214 - RNA, 23 nt, synthetic construct
  source 1..23: mol_type = other RNA
agaggggatggctgtaacgctgg

SEQ ID NO: 70215 - RNA, 23 nt, synthetic construct
  source 1..23: mol_type = other RNA
gcgccctggaagcggtcaatgtc

SEQ ID NO: 70216 - RNA, 23 nt, synthetic construct
  source 1..23: mol_type = other RNA
gtggcccttgtcatggtggctgt

SEQ ID NO: 70217 - RNA, 23 nt, synthetic construct
  source 1..23: mol_type = other RNA
gcgaggacagcggggcggaggac

SEQ ID NO: 70218 - RNA, 23 nt, synthetic construct
  source 1..23: mol_type = other RNA
gcagtagtggttgtccaggtaga

SEQ ID NO: 70219 - RNA, 23 nt, synthetic construct
  source 1..23: mol_type = other RNA
cagcagccatcctttctgctgtc

SEQ ID NO: 70220 - RNA, 23 nt, synthetic construct
  source 1..23: mol_type = other RNA
ggaggggcaaggccaaggtgggc

SEQ ID NO: 70221 - RNA, 23 nt, synthetic construct
  source 1..23: mol_type = other RNA
taccctgcagcaggcatggacag

SEQ ID NO: 70222 - RNA, 23 nt, synthetic construct
  source 1..23: mol_type = other RNA
agctggtagctgtggatttggtg

SEQ ID NO: 70223 - RNA, 23 nt, synthetic construct
  source 1..23: mol_type = other RNA
gctgcagttgtagtggctgctgt

SEQ ID NO: 70224 - RNA, 23 nt, synthetic construct
  source 1..23: mol_type = other RNA
cgctggtagctgtggatttggtg

SEQ ID NO: 70225 - RNA, 23 nt, synthetic construct
  source 1..23: mol_type = other RNA
gctgcagttgtagtggctgctgt

SEQ ID NO: 70226 - RNA, 23 nt, synthetic construct
  source 1..23: mol_type = other RNA
agctggtagctgtggattttgtg

SEQ ID NO: 70227 - RNA, 23 nt, synthetic construct
  source 1..23: mol_type = other RNA
tctggacgcactccccacagcac

SEQ ID NO: 70228 - RNA, 23 nt, synthetic construct
  source 1..23: mol_type = other RNA
gctttgggatgctgacccctctc

SEQ ID NO: 70229 - RNA, 23 nt, synthetic construct
  source 1..23: mol_type = other RNA
gggacggggacgggcagggaggg

SEQ ID NO: 70230 - RNA, 23 nt, synthetic construct
  source 1..23: mol_type = other RNA
tgggtctctgcctgcggcaccac

SEQ ID NO: 70231 - RNA, 23 nt, synthetic construct
  source 1..23: mol_type = other RNA
gctgcagatgcactcgcactcat

SEQ ID NO: 70232 - RNA, 23 nt, synthetic construct
  source 1..23: mol_type = other RNA
tctgcagcggaaggtgggacagc

SEQ ID NO: 70233 - RNA, 23 nt, synthetic construct
  source 1..23: mol_type = other RNA
tggcagtggggggtgtgccagtc

SEQ ID NO: 70234 - RNA, 23 nt, synthetic construct
  source 1..23: mol_type = other RNA
acgccctcctgctcccagttcct

SEQ ID NO: 70235 - RNA, 23 nt, synthetic construct
  source 1..23: mol_type = other RNA
tctttggaagcggtgctggctgt

SEQ ID NO: 70236 - RNA, 23 nt, synthetic construct
  source 1..23: mol_type = other RNA
cctctggttgtgggtgtggtggt

SEQ ID NO: 70237 - RNA, 23 nt, synthetic construct
  source 1..23: mol_type = other RNA
cctctggttgtgggtgtggtggt

SEQ ID NO: 70238 - RNA, 23 nt, synthetic construct
  source 1..23: mol_type = other RNA
tctctggagtagaggagggtgtg

SEQ ID NO: 70239 - RNA, 23 nt, synthetic construct
  source 1..23: mol_type = other RNA
cctctggttgtgggtgtggtggt

SEQ ID NO: 70240 - RNA, 23 nt, synthetic construct
  source 1..23: mol_type = other RNA
actctggcggtgtgggtggtccc

SEQ ID NO: 70241 - RNA, 23 nt, synthetic construct
  source 1..23: mol_type = other RNA
gcgccctcccgaaaggggtcctg

SEQ ID NO: 70242 - RNA, 23 nt, synthetic construct
  source 1..23: mol_type = other RNA
tgagggggcaggtccgggggcag

SEQ ID NO: 70243 - RNA, 23 nt, synthetic construct
  source 1..23: mol_type = other RNA
ctcacagcccccatgtgggttgt

SEQ ID NO: 70244 - RNA, 23 nt, synthetic construct
  source 1..23: mol_type = other RNA
gctctggaggttgccattgttgt

SEQ ID NO: 70245 - RNA, 23 nt, synthetic construct
  source 1..23: mol_type = other RNA
ggctggtggtggtgttagtcaag

SEQ ID NO: 70246 - RNA, 23 nt, synthetic construct
  source 1..23: mol_type = other RNA
cctggctggtggtggtgttagtc

SEQ ID NO: 70247 - RNA, 23 nt, synthetic construct
  source 1..23: mol_type = other RNA
gtgccctggctggtggtggtgtt

SEQ ID NO: 70248 - RNA, 23 nt, synthetic construct
  source 1..23: mol_type = other RNA
gctgcaggtgtggtggcggtggt

SEQ ID NO: 70249 - RNA, 23 nt, synthetic construct
  source 1..23: mol_type = other RNA
cctggactggagaagggagtggc

SEQ ID NO: 70250 - RNA, 23 nt, synthetic construct
  source 1..23: mol_type = other RNA
gctgcaggtgtggtggcggtggt

SEQ ID NO: 70251 - RNA, 23 nt, synthetic construct
  source 1..23: mol_type = other RNA
ggagggggtggacatggaactgg

SEQ ID NO: 70252 - RNA, 23 nt, synthetic construct
  source 1..23: mol_type = other RNA
gctgcaggtgtggtggcggtggt

SEQ ID NO: 70253 - RNA, 23 nt, synthetic construct
  source 1..23: mol_type = other RNA
cctggactggagaagggagtggc

SEQ ID NO: 70254 - RNA, 23 nt, synthetic construct
  source 1..23: mol_type = other RNA
gctgcaggtgtggtggcggtggt

SEQ ID NO: 70255 - RNA, 23 nt, synthetic construct
  source 1..23: mol_type = other RNA
ggaggggttggtggtggagccgg

SEQ ID NO: 70256 - RNA, 23 nt, synthetic construct
  source 1..23: mol_type = other RNA
ggaggggttggtggtggagccgg

SEQ ID NO: 70257 - RNA, 23 nt, synthetic construct
  source 1..23: mol_type = other RNA
ggaggggttggtggtggagccgg

SEQ ID NO: 70258 - RNA, 23 nt, synthetic construct
  source 1..23: mol_type = other RNA
ggaggggttggtggtggagccgg

SEQ ID NO: 70259 - RNA, 23 nt, synthetic construct
  source 1..23: mol_type = other RNA
ggaggggttggtggtggagccgg

SEQ ID NO: 70260 - RNA, 23 nt, synthetic construct
  source 1..23: mol_type = other RNA
actcccacctccggttcctgcag

SEQ ID NO: 70261 - RNA, 23 nt, synthetic construct
  source 1..23: mol_type = other RNA
cctgcagctggacacatctgggc

SEQ ID NO: 70262 - RNA, 23 nt, synthetic construct
  source 1..23: mol_type = other RNA
tctcccagctcggctccacaggg

SEQ ID NO: 70263 - RNA, 23 nt, synthetic construct
  source 1..23: mol_type = other RNA
gcagtgctgtccaccagtgcgtg

SEQ ID NO: 70264 - RNA, 23 nt, synthetic construct
  source 1..23: mol_type = other RNA
ggagggggtggctgtgaagcccg

SEQ ID NO: 70265 - RNA, 23 nt, synthetic construct
  source 1..23: mol_type = other RNA
ggagggggtggctgtgaagcccg

SEQ ID NO: 70266 - RNA, 23 nt, synthetic construct
  source 1..23: mol_type = other RNA
gtggccctggttgtggtggtcgt

SEQ ID NO: 70267 - RNA, 23 nt, synthetic construct
  source 1..23: mol_type = other RNA
ggagggggtggctgtgaagcccg

SEQ ID NO: 70268 - RNA, 23 nt, synthetic construct
  source 1..23: mol_type = other RNA
gctcacagcccgtggtcaccacc

SEQ ID NO: 70269 - RNA, 23 nt, synthetic construct
  source 1..23: mol_type = other RNA
tggaagagggggtggccacagag

SEQ ID NO: 70270 - RNA, 23 nt, synthetic construct
  source 1..23: mol_type = other RNA
gctcacagcccgtggtcaccacc

SEQ ID NO: 70271 - RNA, 23 nt, synthetic construct
  source 1..23: mol_type = other RNA
ggagggggtggctgtgaagcccg

SEQ ID NO: 70272 - RNA, 23 nt, synthetic construct
  source 1..23: mol_type = other RNA
atccagtggctgcagttgtagtg

SEQ ID NO: 70273 - RNA, 23 nt, synthetic construct
  source 1..23: mol_type = other RNA
cctgcagtggtcgctgatgcagg

SEQ ID NO: 70274 - RNA, 23 nt, synthetic construct
  source 1..23: mol_type = other RNA
cagcaccagcccctgggccttga

SEQ ID NO: 70275 - RNA, 23 nt, synthetic construct
  source 1..23: mol_type = other RNA
ccagcagggtgcggtggcagatg

SEQ ID NO: 70276 - RNA, 23 nt, synthetic construct
  source 1..23: mol_type = other RNA
ccgccctgcacagagcaggtgcc

SEQ ID NO: 70277 - RNA, 23 nt, synthetic construct
  source 1..23: mol_type = other RNA
attggcacaggcagcctgggcct

SEQ ID NO: 70278 - RNA, 23 nt, synthetic construct
  source 1..23: mol_type = other RNA
gaaggtgcccgcggggcaggtgc

SEQ ID NO: 70279 - RNA, 23 nt, synthetic construct
  source 1..23: mol_type = other RNA
gctcccaggcagcttagcttccc

SEQ ID NO: 70280 - RNA, 23 nt, synthetic construct
  source 1..23: mol_type = other RNA
cctgcaggtgcaggtgttgcagt

SEQ ID NO: 70281 - RNA, 23 nt, synthetic construct
  source 1..23: mol_type = other RNA
cagctgccttcaaagctgtagcg

SEQ ID NO: 70282 - RNA, 23 nt, synthetic construct
  source 1..23: mol_type = other RNA
cacagtagtcctgggccaagatg

SEQ ID NO: 70283 - RNA, 23 nt, synthetic construct
  source 1..23: mol_type = other RNA
ggctggtgcctggggccggggag

SEQ ID NO: 70284 - RNA, 23 nt, synthetic construct
  source 1..23: mol_type = other RNA
actgcagcagaggacccggatcc

SEQ ID NO: 70285 - RNA, 23 nt, synthetic construct
  source 1..23: mol_type = other RNA
tgagaacagggcctgggtggtgg

SEQ ID NO: 70286 - RNA, 23 nt, synthetic construct
  source 1..23: mol_type = other RNA
ctgtgcttctcagtgctggaagg

SEQ ID NO: 70287 - RNA, 23 nt, synthetic construct
  source 1..23: mol_type = other RNA
ctgtgcttctcagtgctggaagg

SEQ ID NO: 70288 - RNA, 23 nt, synthetic construct
  source 1..23: mol_type = other RNA
ctgtgctgctggtggctgcaggt

SEQ ID NO: 70289 - RNA, 23 nt, synthetic construct
  source 1..23: mol_type = other RNA
caaggtgcctgaggtggccgaag

SEQ ID NO: 70290 - RNA, 23 nt, synthetic construct
  source 1..23: mol_type = other RNA
ggagggggagctgttcccggggt

SEQ ID NO: 70291 - RNA, 23 nt, synthetic construct
  source 1..23: mol_type = other RNA
tccttggactggaggaggaagtg

SEQ ID NO: 70292 - RNA, 23 nt, synthetic construct
  source 1..23: mol_type = other RNA
cggagtggaggagggggtggaca

SEQ ID NO: 70293 - RNA, 23 nt, synthetic construct
  source 1..23: mol_type = other RNA
gggagtggctctggagctgatga

SEQ ID NO: 70294 - RNA, 23 nt, synthetic construct
  source 1..23: mol_type = other RNA
ctgtgcttctcagtgctggaagg

SEQ ID NO: 70295 - RNA, 23 nt, synthetic construct
  source 1..23: mol_type = other RNA
ctgtgctgctggtggctgcaggt

SEQ ID NO: 70296 - RNA, 23 nt, synthetic construct
  source 1..23: mol_type = other RNA
ctgtgcttctcagtgctggaagg

SEQ ID NO: 70297 - RNA, 23 nt, synthetic construct
  source 1..23: mol_type = other RNA
gtggccctggttgtggtggccgt

SEQ ID NO: 70298 - RNA, 23 nt, synthetic construct
  source 1..23: mol_type = other RNA
ctgtgctgctggtggctgcaggt

SEQ ID NO: 70299 - RNA, 23 nt, synthetic construct
  source 1..23: mol_type = other RNA
caaggtgcctgaggtggccgaag

SEQ ID NO: 70300 - RNA, 23 nt, synthetic construct
  source 1..23: mol_type = other RNA
ggagggggagctgttcccggggt

SEQ ID NO: 70301 - RNA, 23 nt, synthetic construct
  source 1..23: mol_type = other RNA
tccttggactggaggaggaagtg

SEQ ID NO: 70302 - RNA, 23 nt, synthetic construct
  source 1..23: mol_type = other RNA
cggagtggaggagggggtggacg

SEQ ID NO: 70303 - RNA, 23 nt, synthetic construct
  source 1..23: mol_type = other RNA
gggcagttgcagtccctggactg

SEQ ID NO: 70304 - RNA, 23 nt, synthetic construct
  source 1..23: mol_type = other RNA
ctgtgcttctcagtgctggaagg

SEQ ID NO: 70305 - RNA, 23 nt, synthetic construct
  source 1..23: mol_type = other RNA
tgctggtcagcactggggtgatg

SEQ ID NO: 70306 - RNA, 23 nt, synthetic construct
  source 1..23: mol_type = other RNA
gctttggagctggtggctgcggg

SEQ ID NO: 70307 - RNA, 23 nt, synthetic construct
  source 1..23: mol_type = other RNA
tccttggactggaggaggaagtg

SEQ ID NO: 70308 - RNA, 23 nt, synthetic construct
  source 1..23: mol_type = other RNA
actttgggggtgtgagctgttcc

SEQ ID NO: 70309 - RNA, 23 nt, synthetic construct
  source 1..23: mol_type = other RNA
gaaccgtggaggcagtggctgtg

SEQ ID NO: 70310 - RNA, 23 nt, synthetic construct
  source 1..23: mol_type = other RNA
cgagaaaaactgtccaaatgccc

SEQ ID NO: 70311 - RNA, 23 nt, synthetic construct
  source 1..23: mol_type = other RNA
cggcagtggcagaggccgtgcag

SEQ ID NO: 70312 - RNA, 23 nt, synthetic construct
  source 1..23: mol_type = other RNA
gctctgggggcaggtggttgtgt

SEQ ID NO: 70313 - RNA, 23 nt, synthetic construct
  source 1..23: mol_type = other RNA
tcgccctcctcctgggtgcagat

SEQ ID NO: 70314 - RNA, 23 nt, synthetic construct
  source 1..23: mol_type = other RNA
acagcagtcgccctcctcctggg

SEQ ID NO: 70315 - RNA, 23 nt, synthetic construct
  source 1..23: mol_type = other RNA
actcaaagccctggggacaggta

SEQ ID NO: 70316 - RNA, 23 nt, synthetic construct
  source 1..23: mol_type = other RNA
cagcagctggccttgcctggacc

SEQ ID NO: 70317 - RNA, 23 nt, synthetic construct
  source 1..23: mol_type = other RNA
gcagcagctggccttgcctggac

SEQ ID NO: 70318 - RNA, 23 nt, synthetic construct
  source 1..23: mol_type = other RNA
ggcagcagctggccttgcctgga

SEQ ID NO: 70319 - RNA, 23 nt, synthetic construct
  source 1..23: mol_type = other RNA
caggtgctgcacacccgcccatt

SEQ ID NO: 70320 - RNA, 23 nt, synthetic construct
  source 1..23: mol_type = other RNA
ttgagggggcaggtccgggggca

SEQ ID NO: 70321 - RNA, 23 nt, synthetic construct
  source 1..23: mol_type = other RNA
gatggtctctccaggcttgtagg

SEQ ID NO: 70322 - RNA, 23 nt, synthetic construct
  source 1..23: mol_type = other RNA
gggggagagcttccagctgttcc

SEQ ID NO: 70323 - RNA, 23 nt, synthetic construct
  source 1..23: mol_type = other RNA
gagaccgggagggccgggcttgt

SEQ ID NO: 70324 - RNA, 23 nt, synthetic construct
  source 1..23: mol_type = other RNA
ccagctcctccagcggcatgtcg

SEQ ID NO: 70325 - RNA, 23 nt, synthetic construct
  source 1..23: mol_type = other RNA
cccagctcctccagcggcatgtc

SEQ ID NO: 70326 - RNA, 23 nt, synthetic construct
  source 1..23: mol_type = other RNA
cggagtggaggaggggtggattg

SEQ ID NO: 70327 - RNA, 23 nt, synthetic construct
  source 1..23: mol_type = other RNA
cggagtggaggaggggtggattg

SEQ ID NO: 70328 - RNA, 23 nt, synthetic construct
  source 1..23: mol_type = other RNA
tgtactcaaagccctggggacag

SEQ ID NO: 70329 - RNA, 23 nt, synthetic construct
  source 1..23: mol_type = other RNA
ttggccgtgcaggggtccttggg

SEQ ID NO: 70330 - RNA, 23 nt, synthetic construct
  source 1..23: mol_type = other RNA
tggtgcctggggccggggagggg

SEQ ID NO: 70331 - RNA, 23 nt, synthetic construct
  source 1..23: mol_type = other RNA
ctgctgggggacagggatcgccc

SEQ ID NO: 70332 - RNA, 23 nt, synthetic construct
  source 1..23: mol_type = other RNA
ttcccggggtggaggacgggatg

SEQ ID NO: 70333 - RNA, 23 nt, synthetic construct
  source 1..23: mol_type = other RNA
ctgctgggggacagggatcgccc

SEQ ID NO: 70334 - RNA, 23 nt, synthetic construct
  source 1..23: mol_type = other RNA
ttcccggggtggaggacggggtg

SEQ ID NO: 70335 - RNA, 23 nt, synthetic construct
  source 1..23: mol_type = other RNA
cagttgcaggtgtcaaacatgca

SEQ ID NO: 70336 - RNA, 23 nt, synthetic construct
  source 1..23: mol_type = other RNA
gggagagcttccagctgttccca

SEQ ID NO: 70337 - RNA, 23 nt, synthetic construct
  source 1..23: mol_type = other RNA
tggtggtggagccggtggctgtg

SEQ ID NO: 70338 - RNA, 23 nt, synthetic construct
  source 1..23: mol_type = other RNA
ggggagagcttccagctgttccc

SEQ ID NO: 70339 - RNA, 23 nt, synthetic construct
  source 1..23: mol_type = other RNA
aaggtggggccgtggaggatgct

SEQ ID NO: 70340 - RNA, 23 nt, synthetic construct
  source 1..23: mol_type = other RNA
tgtgggcagtctctggagtggag

SEQ ID NO: 70341 - RNA, 23 nt, synthetic construct
  source 1..23: mol_type = other RNA
tggtggtggagccggtggccgtg

SEQ ID NO: 70342 - RNA, 23 nt, synthetic construct
  source 1..23: mol_type = other RNA
gctcacagcccatggtcaccacc

SEQ ID NO: 70343 - RNA, 23 nt, synthetic construct
  source 1..23: mol_type = other RNA
gggaggaggaggggatggctgta

SEQ ID NO: 70344 - RNA, 23 nt, synthetic construct
  source 1..23: mol_type = other RNA
tggtggtggagccggtggccgtg

SEQ ID NO: 70345 - RNA, 23 nt, synthetic construct
  source 1..23: mol_type = other RNA
gctcacagcccatggtcaccacc

SEQ ID NO: 70346 - RNA, 23 nt, synthetic construct
  source 1..23: mol_type = other RNA
gggaggaggaggggatggctgta

SEQ ID NO: 70347 - RNA, 23 nt, synthetic construct
  source 1..23: mol_type = other RNA
tgtgggcagtctctggagtggag

SEQ ID NO: 70348 - RNA, 23 nt, synthetic construct
  source 1..23: mol_type = other RNA
tggtggtggagccggtggccgtg

SEQ ID NO: 70349 - RNA, 23 nt, synthetic construct
  source 1..23: mol_type = other RNA
gggaggaggaggggatggctgta

SEQ ID NO: 70350 - RNA, 23 nt, synthetic construct
  source 1..23: mol_type = other RNA
tggtggtggagccggtggccgtg

SEQ ID NO: 70351 - RNA, 23 nt, synthetic construct
  source 1..23: mol_type = other RNA
ggttgtggcactcagcaaagacc

SEQ ID NO: 70352 - RNA, 23 nt, synthetic construct
  source 1..23: mol_type = other RNA
gctggacacatctgggcaggatg

SEQ ID NO: 70353 - RNA, 23 nt, synthetic construct
  source 1..23: mol_type = other RNA
ctgggccgggaagccacgggtgt

SEQ ID NO: 70354 - RNA, 23 nt, synthetic construct
  source 1..23: mol_type = other RNA
aggtgctgcacacccgcccattg

SEQ ID NO: 70355 - RNA, 23 nt, synthetic construct
  source 1..23: mol_type = other RNA
accccaggtgctgcacacccgcc

SEQ ID NO: 70356 - RNA, 23 nt, synthetic construct
  source 1..23: mol_type = other RNA
aggtcttgtagtggaagtcaccc

SEQ ID NO: 70357 - RNA, 23 nt, synthetic construct
  source 1..23: mol_type = other RNA
gccgtcgaaggtcttgtagtgga

SEQ ID NO: 70358 - RNA, 23 nt, synthetic construct
  source 1..23: mol_type = other RNA
tccagcaccagcccctgggcctt

SEQ ID NO: 70359 - RNA, 23 nt, synthetic construct
  source 1..23: mol_type = other RNA
ctgctccaccaggaggccagtgc

SEQ ID NO: 70360 - RNA, 23 nt, synthetic construct
  source 1..23: mol_type = other RNA
tctgctccaccaggaggccagtg

SEQ ID NO: 70361 - RNA, 23 nt, synthetic construct
  source 1..23: mol_type = other RNA
atccagctccagcagggcactgt

SEQ ID NO: 70362 - RNA, 23 nt, synthetic construct
  source 1..23: mol_type = other RNA
ccccccggagcaggtgcaggagc

SEQ ID NO: 70363 - RNA, 23 nt, synthetic construct
  source 1..23: mol_type = other RNA
gccccccggagcaggtgcaggag

SEQ ID NO: 70364 - RNA, 23 nt, synthetic construct
  source 1..23: mol_type = other RNA
cagcagctgcagccccaggcctg

SEQ ID NO: 70365 - RNA, 23 nt, synthetic construct
  source 1..23: mol_type = other RNA
ccagcagctgcagccccaggcct

SEQ ID NO: 70366 - RNA, 23 nt, synthetic construct
  source 1..23: mol_type = other RNA
cgtggcctccaccaccccgctga

SEQ ID NO: 70367 - RNA, 23 nt, synthetic construct
  source 1..23: mol_type = other RNA
cctggcattggcacaggcagcct

SEQ ID NO: 70368 - RNA, 23 nt, synthetic construct
  source 1..23: mol_type = other RNA
aggtgtcaaacatgcagttcgag

SEQ ID NO: 70369 - RNA, 23 nt, synthetic construct
  source 1..23: mol_type = other RNA
ggaaggtgcccgcggggcaggtg

SEQ ID NO: 70370 - RNA, 23 nt, synthetic construct
  source 1..23: mol_type = other RNA
tgcccgccgagctgttgctgcag

SEQ ID NO: 70371 - RNA, 23 nt, synthetic construct
  source 1..23: mol_type = other RNA
ctgatggtctctccaggcttgta

SEQ ID NO: 70372 - RNA, 23 nt, synthetic construct
  source 1..23: mol_type = other RNA
agagcttccagctgttcccaaac

SEQ ID NO: 70373 - RNA, 23 nt, synthetic construct
  source 1..23: mol_type = other RNA
gagagcttccagctgttcccaaa

SEQ ID NO: 70374 - RNA, 23 nt, synthetic construct
  source 1..23: mol_type = other RNA
ggagagcttccagctgttcccaa

SEQ ID NO: 70375 - RNA, 23 nt, synthetic construct
  source 1..23: mol_type = other RNA
ggagggggagagcttccagctgt

SEQ ID NO: 70376 - RNA, 23 nt, synthetic construct
  source 1..23: mol_type = other RNA
agggcgtccgggcaggaggggga

SEQ ID NO: 70377 - RNA, 23 nt, synthetic construct
  source 1..23: mol_type = other RNA
tggccgtgcaggggtccttgggt

SEQ ID NO: 70378 - RNA, 23 nt, synthetic construct
  source 1..23: mol_type = other RNA
gggccgtggaggatgctgcactg

SEQ ID NO: 70379 - RNA, 23 nt, synthetic construct
  source 1..23: mol_type = other RNA
tggggccgtggaggatgctgcac

SEQ ID NO: 70380 - RNA, 23 nt, synthetic construct
  source 1..23: mol_type = other RNA
aggtggggccgtggaggatgctg

SEQ ID NO: 70381 - RNA, 23 nt, synthetic construct
  source 1..23: mol_type = other RNA
gaaggtggggccgtggaggatgc

SEQ ID NO: 70382 - RNA, 23 nt, synthetic construct
  source 1..23: mol_type = other RNA
gtcacagaacaaggggcaggtgt

SEQ ID NO: 70383 - RNA, 23 nt, synthetic construct
  source 1..23: mol_type = other RNA
agaccgggagggccgggcttgtc

SEQ ID NO: 70384 - RNA, 23 nt, synthetic construct
  source 1..23: mol_type = other RNA
ctggcccagctcctccagcggca

SEQ ID NO: 70385 - RNA, 23 nt, synthetic construct
  source 1..23: mol_type = other RNA
ctgctggcccagctcctccagcg

SEQ ID NO: 70386 - RNA, 23 nt, synthetic construct
  source 1..23: mol_type = other RNA
acctgctggcccagctcctccag

SEQ ID NO: 70387 - RNA, 23 nt, synthetic construct
  source 1..23: mol_type = other RNA
ggtgcctggggccggggaggggc

SEQ ID NO: 70388 - RNA, 23 nt, synthetic construct
  source 1..23: mol_type = other RNA
agggctggtgcctggggccgggg

SEQ ID NO: 70389 - RNA, 23 nt, synthetic construct
  source 1..23: mol_type = other RNA
gagggctggtgcctggggccggg

SEQ ID NO: 70390 - RNA, 23 nt, synthetic construct
  source 1..23: mol_type = other RNA
tgctggccgggggagccctggtc

SEQ ID NO: 70391 - RNA, 23 nt, synthetic construct
  source 1..23: mol_type = other RNA
tgggtggctgtgaggggcgccat

SEQ ID NO: 70392 - RNA, 23 nt, synthetic construct
  source 1..23: mol_type = other RNA
gtggaggtcggggtggccgtgga

SEQ ID NO: 70393 - RNA, 23 nt, synthetic construct
  source 1..23: mol_type = other RNA
agctggtgactgtgggtgtggtg

SEQ ID NO: 70394 - RNA, 23 nt, synthetic construct
  source 1..23: mol_type = other RNA
gggtggaggagggggtggccaca

SEQ ID NO: 70395 - RNA, 23 nt, synthetic construct
  source 1..23: mol_type = other RNA
ggggtggaggagggggtggccac

SEQ ID NO: 70396 - RNA, 23 nt, synthetic construct
  source 1..23: mol_type = other RNA
tggggtggaggagggggtggcca

SEQ ID NO: 70397 - RNA, 23 nt, synthetic construct
  source 1..23: mol_type = other RNA
agttgtggtggtggtggtcagca

SEQ ID NO: 70398 - RNA, 23 nt, synthetic construct
  source 1..23: mol_type = other RNA
cagttgtggtggtggtggtcagc

SEQ ID NO: 70399 - RNA, 23 nt, synthetic construct
  source 1..23: mol_type = other RNA
ccacagttgtggtggtggtggtc

SEQ ID NO: 70400 - RNA, 23 nt, synthetic construct
  source 1..23: mol_type = other RNA
tgtggtggcggtggtggtcagca

SEQ ID NO: 70401 - RNA, 23 nt, synthetic construct
  source 1..23: mol_type = other RNA
agctggtgactgtgggtgtcgtg

SEQ ID NO: 70402 - RNA, 23 nt, synthetic construct
  source 1..23: mol_type = other RNA
cccagggaggaggaggggatggc

SEQ ID NO: 70403 - RNA, 23 nt, synthetic construct
  source 1..23: mol_type = other RNA
gggtggaggagggggtggccaca

SEQ ID NO: 70404 - RNA, 23 nt, synthetic construct
  source 1..23: mol_type = other RNA
ggggtggaggagggggtggccac

SEQ ID NO: 70405 - RNA, 23 nt, synthetic construct
  source 1..23: mol_type = other RNA
tggggtggaggagggggtggcca

SEQ ID NO: 70406 - RNA, 23 nt, synthetic construct
  source 1..23: mol_type = other RNA
agttgtggtggtggtggtcagca

SEQ ID NO: 70407 - RNA, 23 nt, synthetic construct
  source 1..23: mol_type = other RNA
cagttgtggtggtggtggtcagc

SEQ ID NO: 70408 - RNA, 23 nt, synthetic construct
  source 1..23: mol_type = other RNA
ccacagttgtggtggtggtggtc

SEQ ID NO: 70409 - RNA, 23 nt, synthetic construct
  source 1..23: mol_type = other RNA
tgtggtggcggtggtggtcagca

SEQ ID NO: 70410 - RNA, 23 nt, synthetic construct
  source 1..23: mol_type = other RNA
ggttgctgctggggtgtgggaag

SEQ ID NO: 70411 - RNA, 23 nt, synthetic construct
  source 1..23: mol_type = other RNA
gttcccggggtggaggacgggat

SEQ ID NO: 70412 - RNA, 23 nt, synthetic construct
  source 1..23: mol_type = other RNA
agtggaggagggggtggacatgg

SEQ ID NO: 70413 - RNA, 23 nt, synthetic construct
  source 1..23: mol_type = other RNA
gggtggaggagggggtggccaca

SEQ ID NO: 70414 - RNA, 23 nt, synthetic construct
  source 1..23: mol_type = other RNA
ggggtggaggagggggtggccac

SEQ ID NO: 70415 - RNA, 23 nt, synthetic construct
  source 1..23: mol_type = other RNA
tggggtggaggagggggtggcca

SEQ ID NO: 70416 - RNA, 23 nt, synthetic construct
  source 1..23: mol_type = other RNA
agttgtggtggtggtggtcagca

SEQ ID NO: 70417 - RNA, 23 nt, synthetic construct
  source 1..23: mol_type = other RNA
cagttgtggtggtggtggtcagc

SEQ ID NO: 70418 - RNA, 23 nt, synthetic construct
  source 1..23: mol_type = other RNA
ccacagttgtggtggtggtggtc

SEQ ID NO: 70419 - RNA, 23 nt, synthetic construct
  source 1..23: mol_type = other RNA
tgtggtggcggtggtggtcagca

SEQ ID NO: 70420 - RNA, 23 nt, synthetic construct
  source 1..23: mol_type = other RNA
ggttgctgctggggtgtgggaag

SEQ ID NO: 70421 - RNA, 23 nt, synthetic construct
  source 1..23: mol_type = other RNA
gtgtggctgtggctgtggtcctg

SEQ ID NO: 70422 - RNA, 23 nt, synthetic construct
  source 1..23: mol_type = other RNA
ggtgtggctgtggctgtggtcct

SEQ ID NO: 70423 - RNA, 23 nt, synthetic construct
  source 1..23: mol_type = other RNA
agctggtgactgtgggtgtcgtg

SEQ ID NO: 70424 - RNA, 23 nt, synthetic construct
  source 1..23: mol_type = other RNA
cccagggaggaggaggggatggc

SEQ ID NO: 70425 - RNA, 23 nt, synthetic construct
  source 1..23: mol_type = other RNA
agttgtggtggtggtggtcagca

SEQ ID NO: 70426 - RNA, 23 nt, synthetic construct
  source 1..23: mol_type = other RNA
cagttgtggtggtggtggtcagc

SEQ ID NO: 70427 - RNA, 23 nt, synthetic construct
  source 1..23: mol_type = other RNA
ccacagttgtggtggtggtggtc

SEQ ID NO: 70428 - RNA, 23 nt, synthetic construct
  source 1..23: mol_type = other RNA
tgtggtggcggtggtggtcagca

SEQ ID NO: 70429 - RNA, 23 nt, synthetic construct
  source 1..23: mol_type = other RNA
ggttgctgctggggtgtgggaag

SEQ ID NO: 70430 - RNA, 23 nt, synthetic construct
  source 1..23: mol_type = other RNA
gttcccggggtggaggacggggt

SEQ ID NO: 70431 - RNA, 23 nt, synthetic construct
  source 1..23: mol_type = other RNA
gtggacatggtggccacgggtgt

SEQ ID NO: 70432 - RNA, 23 nt, synthetic construct
  source 1..23: mol_type = other RNA
agtggaggagggggtggacgtgg

SEQ ID NO: 70433 - RNA, 23 nt, synthetic construct
  source 1..23: mol_type = other RNA
agctggtgactgtgggtgtcgtg

SEQ ID NO: 70434 - RNA, 23 nt, synthetic construct
  source 1..23: mol_type = other RNA
cccagggaggaggaggggatggc

SEQ ID NO: 70435 - RNA, 23 nt, synthetic construct
  source 1..23: mol_type = other RNA
gggtggaggagggggtggccaca

SEQ ID NO: 70436 - RNA, 23 nt, synthetic construct
  source 1..23: mol_type = other RNA
ggggtggaggagggggtggccac

SEQ ID NO: 70437 - RNA, 23 nt, synthetic construct
  source 1..23: mol_type = other RNA
tggggtggaggagggggtggcca

SEQ ID NO: 70438 - RNA, 23 nt, synthetic construct
  source 1..23: mol_type = other RNA
agttgtggtggtggtggtcagca

SEQ ID NO: 70439 - RNA, 23 nt, synthetic construct
  source 1..23: mol_type = other RNA
cagttgtggtggtggtggtcagc

SEQ ID NO: 70440 - RNA, 23 nt, synthetic construct
  source 1..23: mol_type = other RNA
ccacagttgtggtggtggtggtc

SEQ ID NO: 70441 - RNA, 23 nt, synthetic construct
  source 1..23: mol_type = other RNA
catggtggctgtggtggtcagca

SEQ ID NO: 70442 - RNA, 23 nt, synthetic construct
  source 1..23: mol_type = other RNA
cggcagcggcagtggcagaggcc

SEQ ID NO: 70443 - RNA, 23 nt, synthetic construct
  source 1..23: mol_type = other RNA
gcggcagcggcagtggcagaggc

SEQ ID NO: 70444 - RNA, 23 nt, synthetic construct
  source 1..23: mol_type = other RNA
agggcgcgggggcagcgggcggc

SEQ ID NO: 70445 - RNA, 23 nt, synthetic construct
  source 1..23: mol_type = other RNA
agggcagaagcagccctccgcca

SEQ ID NO: 70446 - RNA, 23 nt, synthetic construct
  source 1..23: mol_type = other RNA
gaggatctggtcctcagggcaga

SEQ ID NO: 70447 - RNA, 23 nt, synthetic construct
  source 1..23: mol_type = other RNA
acagctgaggtctgcagcggaag

SEQ ID NO: 70448 - RNA, 23 nt, synthetic construct
  source 1..23: mol_type = other RNA
gtactcaaagccctggggacagg

SEQ ID NO: 70449 - RNA, 23 nt, synthetic construct
  source 1..23: mol_type = other RNA
ttgtactcaaagccctggggaca

SEQ ID NO: 70450 - RNA, 23 nt, synthetic construct
  source 1..23: mol_type = other RNA
cattcagctggactggctggcca

SEQ ID NO: 70451 - RNA, 23 nt, synthetic construct
  source 1..23: mol_type = other RNA
cctgggccgggaagccacgggtg

SEQ ID NO: 70452 - RNA, 23 nt, synthetic construct
  source 1..23: mol_type = other RNA
agtgacatcagggaggggcaagg

SEQ ID NO: 70453 - RNA, 23 nt, synthetic construct
  source 1..23: mol_type = other RNA
ggactgctgtggtgctggccggg

SEQ ID NO: 70454 - RNA, 23 nt, synthetic construct
  source 1..23: mol_type = other RNA
cccggagtggaggagggggtgga

SEQ ID NO: 70455 - RNA, 23 nt, synthetic construct
  source 1..23: mol_type = other RNA
cccggagtggaggagggggtgga

SEQ ID NO: 70456 - RNA, 23 nt, synthetic construct
  source 1..23: mol_type = other RNA
tggggggacggggacgggcaggg

SEQ ID NO: 70457 - RNA, 23 nt, synthetic construct
  source 1..23: mol_type = other RNA
caggagggggagagcttccagct

SEQ ID NO: 70458 - RNA, 23 nt, synthetic construct
  source 1..23: mol_type = other RNA
cccagggaggaagaggggatggg

SEQ ID NO: 70459 - RNA, 23 nt, synthetic construct
  source 1..23: mol_type = other RNA
gggaggaagaggggatggctgta

SEQ ID NO: 70460 - RNA, 23 nt, synthetic construct
  source 1..23: mol_type = other RNA
cccagggaggaagaggggatggc

SEQ ID NO: 70461 - RNA, 23 nt, synthetic construct
  source 1..23: mol_type = other RNA
gcaggagggggagagcttccagc

SEQ ID NO: 70462 - RNA, 23 nt, synthetic construct
  source 1..23: mol_type = other RNA
agctgcagccccaggcctgtctg

SEQ ID NO: 70463 - RNA, 23 nt, synthetic construct
  source 1..23: mol_type = other RNA
caccacctctccaggagccagca

SEQ ID NO: 70464 - RNA, 23 nt, synthetic construct
  source 1..23: mol_type = other RNA
cgaaggtggggccgtggaggatg

SEQ ID NO: 70465 - RNA, 23 nt, synthetic construct
  source 1..23: mol_type = other RNA
cctggggtggaggagggggtggc

SEQ ID NO: 70466 - RNA, 23 nt, synthetic construct
  source 1..23: mol_type = other RNA
cctggggtggaggagggggtggc

SEQ ID NO: 70467 - RNA, 23 nt, synthetic construct
  source 1..23: mol_type = other RNA
cctggggtggaggagggggtggc

SEQ ID NO: 70468 - RNA, 23 nt, synthetic construct
  source 1..23: mol_type = other RNA
cctggggtggaggagggggtggc

SEQ ID NO: 70469 - RNA, 23 nt, synthetic construct
  source 1..23: mol_type = other RNA
atggggtgggggtgggtgtgcta

SEQ ID NO: 70470 - RNA, 23 nt, synthetic construct
  source 1..23: mol_type = other RNA
acagcagtggcctcctgggccgg

SEQ ID NO: 70471 - RNA, 23 nt, synthetic construct
  source 1..23: mol_type = other RNA
agttgtggtggccgtggcggtaa

SEQ ID NO: 70472 - RNA, 23 nt, synthetic construct
  source 1..23: mol_type = other RNA
ggttgtggtggccgtggcggtaa

SEQ ID NO: 70473 - RNA, 23 nt, synthetic construct
  source 1..23: mol_type = other RNA
agtgctgggctctgtgaggatcc

SEQ ID NO: 70474 - RNA, 23 nt, synthetic construct
  source 1..23: mol_type = other RNA
ggggttggtggtggagccggtgg

SEQ ID NO: 70475 - RNA, 23 nt, synthetic construct
  source 1..23: mol_type = other RNA
ggggttggtggtggagccggtgg

SEQ ID NO: 70476 - RNA, 23 nt, synthetic construct
  source 1..23: mol_type = other RNA
ggggttggtggtggagccggtgg

SEQ ID NO: 70477 - RNA, 23 nt, synthetic construct
  source 1..23: mol_type = other RNA
ggggttggtggtggagccggtgg

SEQ ID NO: 70478 - RNA, 23 nt, synthetic construct
  source 1..23: mol_type = other RNA
ggggttggtggtggagccggtgg

SEQ ID NO: 70479 - RNA, 23 nt, synthetic construct
  source 1..23: mol_type = other RNA
tggcagttgctgacccaccgctc

SEQ ID NO: 70480 - RNA, 23 nt, synthetic construct
  source 1..23: mol_type = other RNA
gctgcagccccaggcctgtctgc

SEQ ID NO: 70481 - RNA, 23 nt, synthetic construct
  source 1..23: mol_type = other RNA
cctcccaggccgggctctgggcg

SEQ ID NO: 70482 - RNA, 23 nt, synthetic construct
  source 1..23: mol_type = other RNA
accagcagctgcagccccaggcc

SEQ ID NO: 70483 - RNA, 23 nt, synthetic construct
  source 1..23: mol_type = other RNA
ccagggaggaggaggggatggct

SEQ ID NO: 70484 - RNA, 23 nt, synthetic construct
  source 1..23: mol_type = other RNA
ccagggaggaggaggggatggct

SEQ ID NO: 70485 - RNA, 23 nt, synthetic construct
  source 1..23: mol_type = other RNA
ccagggaggaggaggggatggct

SEQ ID NO: 70486 - RNA, 23 nt, synthetic construct
  source 1..23: mol_type = other RNA
ccggcactctatgctctttggtg

SEQ ID NO: 70487 - RNA, 23 nt, synthetic construct
  source 1..23: mol_type = other RNA
ccgcccggcactctatgctcttt

SEQ ID NO: 70488 - RNA, 23 nt, synthetic construct
  source 1..23: mol_type = other RNA
ggcgcactggcgtgagtattcca

SEQ ID NO: 70489 - RNA, 23 nt, synthetic construct
  source 1..23: mol_type = other RNA
tgcttacctcggggtagttctcc

SEQ ID NO: 70490 - RNA, 23 nt, synthetic construct
  source 1..23: mol_type = other RNA
gcttacctcggggtagttctccg

SEQ ID NO: 70491 - RNA, 23 nt, synthetic construct
  source 1..23: mol_type = other RNA
tgtgcgttgaagaggatctggtc

SEQ ID NO: 70492 - RNA, 23 nt, synthetic construct
  source 1..23: mol_type = other RNA
tcggctttgtgaggatccaggtc

SEQ ID NO: 70493 - RNA, 23 nt, synthetic construct
  source 1..23: mol_type = other RNA
tcgtgttgatgcggacttgacag

SEQ ID NO: 70494 - RNA, 23 nt, synthetic construct
  source 1..23: mol_type = other RNA
catcgggtcccacgcaggggcag

SEQ ID NO: 70495 - RNA, 23 nt, synthetic construct
  source 1..23: mol_type = other RNA
gttacgaagccgggacggttgca

SEQ ID NO: 70496 - RNA, 23 nt, synthetic construct
  source 1..23: mol_type = other RNA
ccgcatggcttgtacactttggt

SEQ ID NO: 70497 - RNA, 23 nt, synthetic construct
  source 1..23: mol_type = other RNA
agccggctcggtcggtcttattg

SEQ ID NO: 70498 - RNA, 23 nt, synthetic construct
  source 1..23: mol_type = other RNA
gatccgggtcgtccccagagtgg

SEQ ID NO: 70499 - RNA, 23 nt, synthetic construct
  source 1..23: mol_type = other RNA
accgctttcaggcagttctcgtt

SEQ ID NO: 70500 - RNA, 23 nt, synthetic construct
  source 1..23: mol_type = other RNA
acctcggggtagttctccgcccg

SEQ ID NO: 70501 - RNA, 23 nt, synthetic construct
  source 1..23: mol_type = other RNA
tgaagtggccatccccgtaggcc

SEQ ID NO: 70502 - RNA, 23 nt, synthetic construct
  source 1..23: mol_type = other RNA
tcggggtagttctccgcccggca

SEQ ID NO: 70503 - RNA, 23 nt, synthetic construct
  source 1..23: mol_type = other RNA
tagttctccgcccggcactctat

SEQ ID NO: 70504 - RNA, 23 nt, synthetic construct
  source 1..23: mol_type = other RNA
gcccggcactctatgctctttgg

SEQ ID NO: 70505 - RNA, 23 nt, synthetic construct
  source 1..23: mol_type = other RNA
gggtagttctccgcccggcactc

SEQ ID NO: 70506 - RNA, 23 nt, synthetic construct
  source 1..23: mol_type = other RNA
ggggtagttctccgcccggcact

SEQ ID NO: 70507 - RNA, 23 nt, synthetic construct
  source 1..23: mol_type = other RNA
cccggcactctatgctctttggt

SEQ ID NO: 70508 - RNA, 23 nt, synthetic construct
  source 1..23: mol_type = other RNA
cggggtagttctccgcccggcac

SEQ ID NO: 70509 - RNA, 23 nt, synthetic construct
  source 1..23: mol_type = other RNA
ctccgcccggcactctatgctct

SEQ ID NO: 70510 - RNA, 23 nt, synthetic construct
  source 1..23: mol_type = other RNA
ctcggggtagttctccgcccggc

SEQ ID NO: 70511 - RNA, 23 nt, synthetic construct
  source 1..23: mol_type = other RNA
tgtagttgaagcacatgttgaac

SEQ ID NO: 70512 - RNA, 23 nt, synthetic construct
  source 1..23: mol_type = other RNA
gagcgcactggatgccactgggt

SEQ ID NO: 70513 - RNA, 23 nt, synthetic construct
  source 1..23: mol_type = other RNA
aaagtttccatgtccccgcctgc

SEQ ID NO: 70514 - RNA, 23 nt, synthetic construct
  source 1..23: mol_type = other RNA
gcactctatgctctttggtgccc

SEQ ID NO: 70515 - RNA, 23 nt, synthetic construct
  source 1..23: mol_type = other RNA
cgcccggcactctatgctctttg

SEQ ID NO: 70516 - RNA, 23 nt, synthetic construct
  source 1..23: mol_type = other RNA
tccgcccggcactctatgctctt

SEQ ID NO: 70517 - RNA, 23 nt, synthetic construct
  source 1..23: mol_type = other RNA
gtagttctccgcccggcactcta

SEQ ID NO: 70518 - RNA, 23 nt, synthetic construct
  source 1..23: mol_type = other RNA
ggtagttctccgcccggcactct

SEQ ID NO: 70519 - RNA, 23 nt, synthetic construct
  source 1..23: mol_type = other RNA
tgttgaacctgcctgtctggtct

SEQ ID NO: 70520 - RNA, 23 nt, synthetic construct
  source 1..23: mol_type = other RNA
aagcacatgttgaacctgcctgt

SEQ ID NO: 70521 - RNA, 23 nt, synthetic construct
  source 1..23: mol_type = other RNA
ttgtagttgaagcacatgttgaa

SEQ ID NO: 70522 - RNA, 23 nt, synthetic construct
  source 1..23: mol_type = other RNA
gtggctgtagtcgtcacagcaaa

SEQ ID NO: 70523 - RNA, 23 nt, synthetic construct
  source 1..23: mol_type = other RNA
cagtggctgtagtcgtcacagca

SEQ ID NO: 70524 - RNA, 23 nt, synthetic construct
  source 1..23: mol_type = other RNA
ggggcagtggctgtagtcgtcac

SEQ ID NO: 70525 - RNA, 23 nt, synthetic construct
  source 1..23: mol_type = other RNA
ctctatgctctttggtgcccagc

SEQ ID NO: 70526 - RNA, 23 nt, synthetic construct
  source 1..23: mol_type = other RNA
tggtgcccagcacatcttgcccc

SEQ ID NO: 70527 - RNA, 23 nt, synthetic construct
  source 1..23: mol_type = other RNA
actctatgctctttggtgcccag

SEQ ID NO: 70528 - RNA, 23 nt, synthetic construct
  source 1..23: mol_type = other RNA
actgacaccggggctggcaggtg

SEQ ID NO: 70529 - RNA, 23 nt, synthetic construct
  source 1..23: mol_type = other RNA
gttgaacctgcctgtctggtctt

SEQ ID NO: 70530 - RNA, 23 nt, synthetic construct
  source 1..23: mol_type = other RNA
cagcacatcttgcccccagcagc

SEQ ID NO: 70531 - RNA, 23 nt, synthetic construct
  source 1..23: mol_type = other RNA
ggtgcccagcacatcttgccccc

SEQ ID NO: 70532 - RNA, 23 nt, synthetic construct
  source 1..23: mol_type = other RNA
gcacatcttgcccccagcagccc

SEQ ID NO: 70533 - RNA, 23 nt, synthetic construct
  source 1..23: mol_type = other RNA
agcacatcttgcccccagcagcc

SEQ ID NO: 70534 - RNA, 23 nt, synthetic construct
  source 1..23: mol_type = other RNA
agtggctgtagtcgtcacagcaa

SEQ ID NO: 70535 - RNA, 23 nt, synthetic construct
  source 1..23: mol_type = other RNA
gcagtggctgtagtcgtcacagc

SEQ ID NO: 70536 - RNA, 23 nt, synthetic construct
  source 1..23: mol_type = other RNA
acgcagtgtgtgctgaaacagcc

SEQ ID NO: 70537 - RNA, 23 nt, synthetic construct
  source 1..23: mol_type = other RNA
tcgtagcagccacactgggccac

SEQ ID NO: 70538 - RNA, 23 nt, synthetic construct
  source 1..23: mol_type = other RNA
aagtttccatgtccccgcctgca

SEQ ID NO: 70539 - RNA, 23 nt, synthetic construct
  source 1..23: mol_type = other RNA
catgttgaacctgcctgtctggt

SEQ ID NO: 70540 - RNA, 23 nt, synthetic construct
  source 1..23: mol_type = other RNA
cacatgttgaacctgcctgtctg

SEQ ID NO: 70541 - RNA, 23 nt, synthetic construct
  source 1..23: mol_type = other RNA
agcacatgttgaacctgcctgtc

SEQ ID NO: 70542 - RNA, 23 nt, synthetic construct
  source 1..23: mol_type = other RNA
gttgaagcacatgttgaacctgc

SEQ ID NO: 70543 - RNA, 23 nt, synthetic construct
  source 1..23: mol_type = other RNA
tagttgaagcacatgttgaacct

SEQ ID NO: 70544 - RNA, 23 nt, synthetic construct
  source 1..23: mol_type = other RNA
cggcactctatgctctttggtgc

SEQ ID NO: 70545 - RNA, 23 nt, synthetic construct
  source 1..23: mol_type = other RNA
cccagcagccctgatgttttcaa

SEQ ID NO: 70546 - RNA, 23 nt, synthetic construct
  source 1..23: mol_type = other RNA
cactgacaccggggctggcaggt

SEQ ID NO: 70547 - RNA, 23 nt, synthetic construct
  source 1..23: mol_type = other RNA
tgctctttggtgcccagcacatc

SEQ ID NO: 70548 - RNA, 23 nt, synthetic construct
  source 1..23: mol_type = other RNA
gcacatgttgaacctgcctgtct

SEQ ID NO: 70549 - RNA, 23 nt, synthetic construct
  source 1..23: mol_type = other RNA
agttgaagcacatgttgaacctg

SEQ ID NO: 70550 - RNA, 23 nt, synthetic construct
  source 1..23: mol_type = other RNA
agtgcggctgtaaggcagctcct

SEQ ID NO: 70551 - RNA, 23 nt, synthetic construct
  source 1..23: mol_type = other RNA
tggacagaacgtagctgcagtca

SEQ ID NO: 70552 - RNA, 23 nt, synthetic construct
  source 1..23: mol_type = other RNA
gtaggactcaacgtcccctccaa

SEQ ID NO: 70553 - RNA, 23 nt, synthetic construct
  source 1..23: mol_type = other RNA
cagtgccgggcgtagttctcatt

SEQ ID NO: 70554 - RNA, 23 nt, synthetic construct
  source 1..23: mol_type = other RNA
ctcgagggtgtgaacagggtgat

SEQ ID NO: 70555 - RNA, 23 nt, synthetic construct
  source 1..23: mol_type = other RNA
gcacgccgttcttgctgaaaccg

SEQ ID NO: 70556 - RNA, 23 nt, synthetic construct
  source 1..23: mol_type = other RNA
aaggctgtgagcgcactggatgc

SEQ ID NO: 70557 - RNA, 23 nt, synthetic construct
  source 1..23: mol_type = other RNA
gacagtgacgggtggaacaaagc

SEQ ID NO: 70558 - RNA, 23 nt, synthetic construct
  source 1..23: mol_type = other RNA
ccgtgggtgcaggggcactgccc

SEQ ID NO: 70559 - RNA, 23 nt, synthetic construct
  source 1..23: mol_type = other RNA
atgttggctgccgacaggggcag

SEQ ID NO: 70560 - RNA, 23 nt, synthetic construct
  source 1..23: mol_type = other RNA
ctgctcacagacggcccctccgg

SEQ ID NO: 70561 - RNA, 23 nt, synthetic construct
  source 1..23: mol_type = other RNA
ctgctcacagacggcccctccgg

SEQ ID NO: 70562 - RNA, 23 nt, synthetic construct
  source 1..23: mol_type = other RNA
ctgctcacagacggcccctccgg

SEQ ID NO: 70563 - RNA, 23 nt, synthetic construct
  source 1..23: mol_type = other RNA
ccatccaacttctgcaggttccc

SEQ ID NO: 70564 - RNA, 23 nt, synthetic construct
  source 1..23: mol_type = other RNA
ggcagcgggtccgggcactgctc

SEQ ID NO: 70565 - RNA, 23 nt, synthetic construct
  source 1..23: mol_type = other RNA
atcctgtagttgtagcacatctt

SEQ ID NO: 70566 - RNA, 23 nt, synthetic construct
  source 1..23: mol_type = other RNA
gcggctgtaaggcagctcctccc

SEQ ID NO: 70567 - RNA, 23 nt, synthetic construct
  source 1..23: mol_type = other RNA
ttacagctctggcagttctccgc

SEQ ID NO: 70568 - RNA, 23 nt, synthetic construct
  source 1..23: mol_type = other RNA
caccgtgcctggggggcagaagc

SEQ ID NO: 70569 - RNA, 23 nt, synthetic construct
  source 1..23: mol_type = other RNA
gtagttgaagcacatgttgaacc

SEQ ID NO: 70570 - RNA, 23 nt, synthetic construct
  source 1..23: mol_type = other RNA
gtcccacaggggatgttctcggt

SEQ ID NO: 70571 - RNA, 23 nt, synthetic construct
  source 1..23: mol_type = other RNA
gtagcagccacactgggccacgc

SEQ ID NO: 70572 - RNA, 23 nt, synthetic construct
  source 1..23: mol_type = other RNA
ccctggtgggcggggtccagcct

SEQ ID NO: 70573 - RNA, 23 nt, synthetic construct
  source 1..23: mol_type = other RNA
caaaggccggccccagcagggtg

SEQ ID NO: 70574 - RNA, 23 nt, synthetic construct
  source 1..23: mol_type = other RNA
ggcatagaactcgttgaaggccg

SEQ ID NO: 70575 - RNA, 23 nt, synthetic construct
  source 1..23: mol_type = other RNA
acacgcagtgtgtgctgaaacag

SEQ ID NO: 70576 - RNA, 23 nt, synthetic construct
  source 1..23: mol_type = other RNA
ccccccgcgtgggcgcactggcg

SEQ ID NO: 70577 - RNA, 23 nt, synthetic construct
  source 1..23: mol_type = other RNA
actgtccaaatgccctgcagaag

SEQ ID NO: 70578 - RNA, 23 nt, synthetic construct
  source 1..23: mol_type = other RNA
aaaccactctgtccactgacacc

SEQ ID NO: 70579 - RNA, 23 nt, synthetic construct
  source 1..23: mol_type = other RNA
tgtcgtggagtgggggacccagg

SEQ ID NO: 70580 - RNA, 23 nt, synthetic construct
  source 1..23: mol_type = other RNA
tggtcgatgcttacctcggggta

SEQ ID NO: 70581 - RNA, 23 nt, synthetic construct
  source 1..23: mol_type = other RNA
cgatgcttacctcggggtagttc

SEQ ID NO: 70582 - RNA, 23 nt, synthetic construct
  source 1..23: mol_type = other RNA
tcgatgcttacctcggggtagtt

SEQ ID NO: 70583 - RNA, 23 nt, synthetic construct
  source 1..23: mol_type = other RNA
ggtcgatgcttacctcggggtag

SEQ ID NO: 70584 - RNA, 23 nt, synthetic construct
  source 1..23: mol_type = other RNA
gacagtcgtccctctggttgttg

SEQ ID NO: 70585 - RNA, 23 nt, synthetic construct
  source 1..23: mol_type = other RNA
gatgcttacctcggggtagttct

SEQ ID NO: 70586 - RNA, 23 nt, synthetic construct
  source 1..23: mol_type = other RNA
tacctcggggtagttctccgccc

SEQ ID NO: 70587 - RNA, 23 nt, synthetic construct
  source 1..23: mol_type = other RNA
ttacctcggggtagttctccgcc

SEQ ID NO: 70588 - RNA, 23 nt, synthetic construct
  source 1..23: mol_type = other RNA
atgcttacctcggggtagttctc

SEQ ID NO: 70589 - RNA, 23 nt, synthetic construct
  source 1..23: mol_type = other RNA
ccccgtctccaggctgcaggtca

SEQ ID NO: 70590 - RNA, 23 nt, synthetic construct
  source 1..23: mol_type = other RNA
ctggtcgatgcttacctcggggt

SEQ ID NO: 70591 - RNA, 23 nt, synthetic construct
  source 1..23: mol_type = other RNA
tgtgaggatccaggtcgtccccg

SEQ ID NO: 70592 - RNA, 23 nt, synthetic construct
  source 1..23: mol_type = other RNA
tgtgaggatccaggtcgtccccg

SEQ ID NO: 70593 - RNA, 23 nt, synthetic construct
  source 1..23: mol_type = other RNA
tgtgaggatccaggtcgtccctg

SEQ ID NO: 70594 - RNA, 23 nt, synthetic construct
  source 1..23: mol_type = other RNA
tgtgaggatccaggtcgtccccg

SEQ ID NO: 70595 - RNA, 23 nt, synthetic construct
  source 1..23: mol_type = other RNA
tgtgaggatccaggtcgtccccg

SEQ ID NO: 70596 - RNA, 23 nt, synthetic construct
  source 1..23: mol_type = other RNA
tgtgaggatccaggtcgtccccg

SEQ ID NO: 70597 - RNA, 23 nt, synthetic construct
  source 1..23: mol_type = other RNA
tgtgaggatccaggtcgtccccg

SEQ ID NO: 70598 - RNA, 23 nt, synthetic construct
  source 1..23: mol_type = other RNA
aaaactgggctgggttgagcaga

SEQ ID NO: 70599 - RNA, 23 nt, synthetic construct
  source 1..23: mol_type = other RNA
gtcgatgcttacctcggggtagt

SEQ ID NO: 70600 - RNA, 23 nt, synthetic construct
  source 1..23: mol_type = other RNA
ctttggaactggtggctgtgggt

SEQ ID NO: 70601 - RNA, 23 nt, synthetic construct
  source 1..23: mol_type = other RNA
ctttggaactggtggctgtgggt

SEQ ID NO: 70602 - RNA, 23 nt, synthetic construct
  source 1..23: mol_type = other RNA
gttccagggcgtcccagtgacat

SEQ ID NO: 70603 - RNA, 23 nt, synthetic construct
  source 1..23: mol_type = other RNA
cttacctcggggtagttctccgc

SEQ ID NO: 70604 - RNA, 23 nt, synthetic construct
  source 1..23: mol_type = other RNA
tggctcgggtccgacactttgat

SEQ ID NO: 70605 - RNA, 23 nt, synthetic construct
  source 1..23: mol_type = other RNA
gtgaggatccaggtcgtccccgg

SEQ ID NO: 70606 - RNA, 23 nt, synthetic construct
  source 1..23: mol_type = other RNA
gtgaggatccaggtcgtccccgg

SEQ ID NO: 70607 - RNA, 23 nt, synthetic construct
  source 1..23: mol_type = other RNA
gtgaggatccaggtcgtccccgg

SEQ ID NO: 70608 - RNA, 23 nt, synthetic construct
  source 1..23: mol_type = other RNA
gtgaggatccaggtcgtccccgg

SEQ ID NO: 70609 - RNA, 23 nt, synthetic construct
  source 1..23: mol_type = other RNA
gtgaggatccaggtcgtccccgg

SEQ ID NO: 70610 - RNA, 23 nt, synthetic construct
  source 1..23: mol_type = other RNA
gtgaggatccaggtcgtccccgg

SEQ ID NO: 70611 - RNA, 23 nt, synthetic construct
  source 1..23: mol_type = other RNA
atttcatagttgaagcacatctt

SEQ ID NO: 70612 - RNA, 23 nt, synthetic construct
  source 1..23: mol_type = other RNA
atttcatagttgaagcacatctt

SEQ ID NO: 70613 - RNA, 23 nt, synthetic construct
  source 1..23: mol_type = other RNA
atttcatagttgaagcacatctt

SEQ ID NO: 70614 - RNA, 23 nt, synthetic construct
  source 1..23: mol_type = other RNA
atttcatagttgaagcacatctt

SEQ ID NO: 70615 - RNA, 23 nt, synthetic construct
  source 1..23: mol_type = other RNA
cgtccccagagtggaggagggtg

SEQ ID NO: 70616 - RNA, 23 nt, synthetic construct
  source 1..23: mol_type = other RNA
tcgtccccagagtggaggagggt

SEQ ID NO: 70617 - RNA, 23 nt, synthetic construct
  source 1..23: mol_type = other RNA
gccttgatgacaacacgggtgac

SEQ ID NO: 70618 - RNA, 23 nt, synthetic construct
  source 1..23: mol_type = other RNA
gttgtggtagtcagcactttggt

SEQ ID NO: 70619 - RNA, 23 nt, synthetic construct
  source 1..23: mol_type = other RNA
ccgtggtggtaagcactgtggag

SEQ ID NO: 70620 - RNA, 23 nt, synthetic construct
  source 1..23: mol_type = other RNA
ccgtggtggtaagcactgtggag

SEQ ID NO: 70621 - RNA, 23 nt, synthetic construct
  source 1..23: mol_type = other RNA
gtggatgcagtcgtagtggctgt

SEQ ID NO: 70622 - RNA, 23 nt, synthetic construct
  source 1..23: mol_type = other RNA
cttcgttcttgcaggtcagcccc

SEQ ID NO: 70623 - RNA, 23 nt, synthetic construct
  source 1..23: mol_type = other RNA
cagtggacgcagtcgtagtggct

SEQ ID NO: 70624 - RNA, 23 nt, synthetic construct
  source 1..23: mol_type = other RNA
cagtggacgcagtcgtagtggct

SEQ ID NO: 70625 - RNA, 23 nt, synthetic construct
  source 1..23: mol_type = other RNA
acctgcccgacctggtcgatgct

SEQ ID NO: 70626 - RNA, 23 nt, synthetic construct
  source 1..23: mol_type = other RNA
gcccgacctggtcgatgcttacc

SEQ ID NO: 70627 - RNA, 23 nt, synthetic construct
  source 1..23: mol_type = other RNA
ctgcctgtctggtcttcgttctt

SEQ ID NO: 70628 - RNA, 23 nt, synthetic construct
  source 1..23: mol_type = other RNA
caaagcacacgcacgttgtagtt

SEQ ID NO: 70629 - RNA, 23 nt, synthetic construct
  source 1..23: mol_type = other RNA
tcttcgttcttgcaggtcagccc

SEQ ID NO: 70630 - RNA, 23 nt, synthetic construct
  source 1..23: mol_type = other RNA
aaagcacacgcacgttgtagttg

SEQ ID NO: 70631 - RNA, 23 nt, synthetic construct
  source 1..23: mol_type = other RNA
gtagtcgtcacagcaaagcacac

SEQ ID NO: 70632 - RNA, 23 nt, synthetic construct
  source 1..23: mol_type = other RNA
ctcagtcgtagtggctgttgtgg

SEQ ID NO: 70633 - RNA, 23 nt, synthetic construct
  source 1..23: mol_type = other RNA
ctcagtcgtagtggctgttgtgg

SEQ ID NO: 70634 - RNA, 23 nt, synthetic construct
  source 1..23: mol_type = other RNA
agcacacgcacgttgtagttgaa

SEQ ID NO: 70635 - RNA, 23 nt, synthetic construct
  source 1..23: mol_type = other RNA
aagcacacgcacgttgtagttga

SEQ ID NO: 70636 - RNA, 23 nt, synthetic construct
  source 1..23: mol_type = other RNA
aggtcgtccccggagttgaggag

SEQ ID NO: 70637 - RNA, 23 nt, synthetic construct
  source 1..23: mol_type = other RNA
aggtcgtccccggagttgaggag

SEQ ID NO: 70638 - RNA, 23 nt, synthetic construct
  source 1..23: mol_type = other RNA
cgacctggtcgatgcttacctcg

SEQ ID NO: 70639 - RNA, 23 nt, synthetic construct
  source 1..23: mol_type = other RNA
gacagggctggagtcgagtgctg

SEQ ID NO: 70640 - RNA, 23 nt, synthetic construct
  source 1..23: mol_type = other RNA
gacagggctggagtcgagtgctg

SEQ ID NO: 70641 - RNA, 23 nt, synthetic construct
  source 1..23: mol_type = other RNA
gacagggctggagtcgagtgctg

SEQ ID NO: 70642 - RNA, 23 nt, synthetic construct
  source 1..23: mol_type = other RNA
gtggacgcagtcgtagtggctgt

SEQ ID NO: 70643 - RNA, 23 nt, synthetic construct
  source 1..23: mol_type = other RNA
gtggacgcagtcgtagtggctgt

SEQ ID NO: 70644 - RNA, 23 nt, synthetic construct
  source 1..23: mol_type = other RNA
gctgttgtggtcggctttgtgag

SEQ ID NO: 70645 - RNA, 23 nt, synthetic construct
  source 1..23: mol_type = other RNA
gatccagtggacgcagtcgtagt

SEQ ID NO: 70646 - RNA, 23 nt, synthetic construct
  source 1..23: mol_type = other RNA
gatccagtggacgcagtcgtagt

SEQ ID NO: 70647 - RNA, 23 nt, synthetic construct
  source 1..23: mol_type = other RNA
tggtcggctttgtgaggatccag

SEQ ID NO: 70648 - RNA, 23 nt, synthetic construct
  source 1..23: mol_type = other RNA
gcctgtctggtcttcgttcttgc

SEQ ID NO: 70649 - RNA, 23 nt, synthetic construct
  source 1..23: mol_type = other RNA
ccaggtcgtccccggagttgagg

SEQ ID NO: 70650 - RNA, 23 nt, synthetic construct
  source 1..23: mol_type = other RNA
ccaggtcgtccccggagttgagg

SEQ ID NO: 70651 - RNA, 23 nt, synthetic construct
  source 1..23: mol_type = other RNA
gacctggtcgatgcttacctcgg

SEQ ID NO: 70652 - RNA, 23 nt, synthetic construct
  source 1..23: mol_type = other RNA
gcagtcgtagtggctgttgtggt

SEQ ID NO: 70653 - RNA, 23 nt, synthetic construct
  source 1..23: mol_type = other RNA
tcagtcgtagtggctgttgtggt

SEQ ID NO: 70654 - RNA, 23 nt, synthetic construct
  source 1..23: mol_type = other RNA
actcagtcgtagtggctgttgtg

SEQ ID NO: 70655 - RNA, 23 nt, synthetic construct
  source 1..23: mol_type = other RNA
tcagtcgtagtggctgttgtggt

SEQ ID NO: 70656 - RNA, 23 nt, synthetic construct
  source 1..23: mol_type = other RNA
actcagtcgtagtggctgttgtg

SEQ ID NO: 70657 - RNA, 23 nt, synthetic construct
  source 1..23: mol_type = other RNA
gcagtcgtagtggctgttgtggt

SEQ ID NO: 70658 - RNA, 23 nt, synthetic construct
  source 1..23: mol_type = other RNA
gcagtcgtagtggctgttgtggt

SEQ ID NO: 70659 - RNA, 23 nt, synthetic construct
  source 1..23: mol_type = other RNA
agtggacgcagtcgtagtggctg

SEQ ID NO: 70660 - RNA, 23 nt, synthetic construct
  source 1..23: mol_type = other RNA
agtggacgcagtcgtagtggctg

SEQ ID NO: 70661 - RNA, 23 nt, synthetic construct
  source 1..23: mol_type = other RNA
cccgacctggtcgatgcttacct

SEQ ID NO: 70662 - RNA, 23 nt, synthetic construct
  source 1..23: mol_type = other RNA
cacacgcacgttgtagttgaagc

SEQ ID NO: 70663 - RNA, 23 nt, synthetic construct
  source 1..23: mol_type = other RNA
gcacacgcacgttgtagttgaag

SEQ ID NO: 70664 - RNA, 23 nt, synthetic construct
  source 1..23: mol_type = other RNA
tggctgtagtcgtcacagcaaag

SEQ ID NO: 70665 - RNA, 23 nt, synthetic construct
  source 1..23: mol_type = other RNA
gtcgtccccggagttgaggaggg

SEQ ID NO: 70666 - RNA, 23 nt, synthetic construct
  source 1..23: mol_type = other RNA
caggtcgtccccggagttgagga

SEQ ID NO: 70667 - RNA, 23 nt, synthetic construct
  source 1..23: mol_type = other RNA
gacgcagtcgtagtggctgttgt

SEQ ID NO: 70668 - RNA, 23 nt, synthetic construct
  source 1..23: mol_type = other RNA
tccagtggacgcagtcgtagtgg

SEQ ID NO: 70669 - RNA, 23 nt, synthetic construct
  source 1..23: mol_type = other RNA
gtcgtccccggagttgaggaggg

SEQ ID NO: 70670 - RNA, 23 nt, synthetic construct
  source 1..23: mol_type = other RNA
caggtcgtccccggagttgagga

SEQ ID NO: 70671 - RNA, 23 nt, synthetic construct
  source 1..23: mol_type = other RNA
gatgcagtcgtagtggctgttgt

SEQ ID NO: 70672 - RNA, 23 nt, synthetic construct
  source 1..23: mol_type = other RNA
ggatgcagtcgtagtggctgttg

SEQ ID NO: 70673 - RNA, 23 nt, synthetic construct
  source 1..23: mol_type = other RNA
gacgcagtcgtagtggctgttgt

SEQ ID NO: 70674 - RNA, 23 nt, synthetic construct
  source 1..23: mol_type = other RNA
tccagtggacgcagtcgtagtgg

SEQ ID NO: 70675 - RNA, 23 nt, synthetic construct
  source 1..23: mol_type = other RNA
cttaaaggtcccctcttggagga

SEQ ID NO: 70676 - RNA, 23 nt, synthetic construct
  source 1..23: mol_type = other RNA
tgcaacccctgaggttgggaagt

SEQ ID NO: 70677 - RNA, 23 nt, synthetic construct
  source 1..23: mol_type = other RNA
tgcccgacctggtcgatgcttac

SEQ ID NO: 70678 - RNA, 23 nt, synthetic construct
  source 1..23: mol_type = other RNA
ctgcccgacctggtcgatgctta

SEQ ID NO: 70679 - RNA, 23 nt, synthetic construct
  source 1..23: mol_type = other RNA
cttgcaggtcagccccgtctcca

SEQ ID NO: 70680 - RNA, 23 nt, synthetic construct
  source 1..23: mol_type = other RNA
ttcttgcaggtcagccccgtctc

SEQ ID NO: 70681 - RNA, 23 nt, synthetic construct
  source 1..23: mol_type = other RNA
tcgttcttgcaggtcagccccgt

SEQ ID NO: 70682 - RNA, 23 nt, synthetic construct
  source 1..23: mol_type = other RNA
ttcgttcttgcaggtcagccccg

SEQ ID NO: 70683 - RNA, 23 nt, synthetic construct
  source 1..23: mol_type = other RNA
cctgtctggtcttcgttcttgca

SEQ ID NO: 70684 - RNA, 23 nt, synthetic construct
  source 1..23: mol_type = other RNA
gttgtagttgaagcacatgttga

SEQ ID NO: 70685 - RNA, 23 nt, synthetic construct
  source 1..23: mol_type = other RNA
cacgcacgttgtagttgaagcac

SEQ ID NO: 70686 - RNA, 23 nt, synthetic construct
  source 1..23: mol_type = other RNA
tagtcgtcacagcaaagcacacg

SEQ ID NO: 70687 - RNA, 23 nt, synthetic construct
  source 1..23: mol_type = other RNA
ggtcgtccccggagttgaggagg

SEQ ID NO: 70688 - RNA, 23 nt, synthetic construct
  source 1..23: mol_type = other RNA
gctttgtgaggatccaggtcgtc

SEQ ID NO: 70689 - RNA, 23 nt, synthetic construct
  source 1..23: mol_type = other RNA
ggtcggctttgtgaggatccagg

SEQ ID NO: 70690 - RNA, 23 nt, synthetic construct
  source 1..23: mol_type = other RNA
tgttgtggtcggctttgtgagga

SEQ ID NO: 70691 - RNA, 23 nt, synthetic construct
  source 1..23: mol_type = other RNA
ctgttgtggtcggctttgtgagg

SEQ ID NO: 70692 - RNA, 23 nt, synthetic construct
  source 1..23: mol_type = other RNA
acgcagtcgtagtggctgttgtg

SEQ ID NO: 70693 - RNA, 23 nt, synthetic construct
  source 1..23: mol_type = other RNA
ggacgcagtcgtagtggctgttg

SEQ ID NO: 70694 - RNA, 23 nt, synthetic construct
  source 1..23: mol_type = other RNA
tggacgcagtcgtagtggctgtt

SEQ ID NO: 70695 - RNA, 23 nt, synthetic construct
  source 1..23: mol_type = other RNA
gtggatccagtggacgcagtcgt

SEQ ID NO: 70696 - RNA, 23 nt, synthetic construct
  source 1..23: mol_type = other RNA
ggtcgtccccggagttgaggagg

SEQ ID NO: 70697 - RNA, 23 nt, synthetic construct
  source 1..23: mol_type = other RNA
gctttgtgaggatccaggtcgtc

SEQ ID NO: 70698 - RNA, 23 nt, synthetic construct
  source 1..23: mol_type = other RNA
atgcagtcgtagtggctgttgtg

SEQ ID NO: 70699 - RNA, 23 nt, synthetic construct
  source 1..23: mol_type = other RNA
tggatgcagtcgtagtggctgtt

SEQ ID NO: 70700 - RNA, 23 nt, synthetic construct
  source 1..23: mol_type = other RNA
agtggatgcagtcgtagtggctg

SEQ ID NO: 70701 - RNA, 23 nt, synthetic construct
  source 1..23: mol_type = other RNA
acgcagtcgtagtggctgttgtg

SEQ ID NO: 70702 - RNA, 23 nt, synthetic construct
  source 1..23: mol_type = other RNA
ggacgcagtcgtagtggctgttg

SEQ ID NO: 70703 - RNA, 23 nt, synthetic construct
  source 1..23: mol_type = other RNA
tggacgcagtcgtagtggctgtt

SEQ ID NO: 70704 - RNA, 23 nt, synthetic construct
  source 1..23: mol_type = other RNA
gtggatccagtggacgcagtcgt

SEQ ID NO: 70705 - RNA, 23 nt, synthetic construct
  source 1..23: mol_type = other RNA
gtcggtcttattgtagatgactt

SEQ ID NO: 70706 - RNA, 23 nt, synthetic construct
  source 1..23: mol_type = other RNA
ttgaacctgcctgtctggtcttc

SEQ ID NO: 70707 - RNA, 23 nt, synthetic construct
  source 1..23: mol_type = other RNA
ggctgttgtggtcggctttgtga

SEQ ID NO: 70708 - RNA, 23 nt, synthetic construct
  source 1..23: mol_type = other RNA
acgcacgttgtagttgaagcaca

SEQ ID NO: 70709 - RNA, 23 nt, synthetic construct
  source 1..23: mol_type = other RNA
tcgtagtggctgttgtggtcggc

SEQ ID NO: 70710 - RNA, 23 nt, synthetic construct
  source 1..23: mol_type = other RNA
tcgtagtggctgttgtggtcagc

SEQ ID NO: 70711 - RNA, 23 nt, synthetic construct
  source 1..23: mol_type = other RNA
tcgtagtggctgttgtggtcagc

SEQ ID NO: 70712 - RNA, 23 nt, synthetic construct
  source 1..23: mol_type = other RNA
tcgtagtggctgttgtggtcagc

SEQ ID NO: 70713 - RNA, 23 nt, synthetic construct
  source 1..23: mol_type = other RNA
tcgtagtggctgttgtggtcagc

SEQ ID NO: 70714 - RNA, 23 nt, synthetic construct
  source 1..23: mol_type = other RNA
ttgcaggtcagccccgtctccag

SEQ ID NO: 70715 - RNA, 23 nt, synthetic construct
  source 1..23: mol_type = other RNA
tcttgcaggtcagccccgtctcc

SEQ ID NO: 70716 - RNA, 23 nt, synthetic construct
  source 1..23: mol_type = other RNA
ggtcttcgttcttgcaggtcagc

SEQ ID NO: 70717 - RNA, 23 nt, synthetic construct
  source 1..23: mol_type = other RNA
ctgtctggtcttcgttcttgcag

SEQ ID NO: 70718 - RNA, 23 nt, synthetic construct
  source 1..23: mol_type = other RNA
ccggagttgaggagggcgtggcc

SEQ ID NO: 70719 - RNA, 23 nt, synthetic construct
  source 1..23: mol_type = other RNA
tggctgttgtggtcggctttgtg

SEQ ID NO: 70720 - RNA, 23 nt, synthetic construct
  source 1..23: mol_type = other RNA
gtggctgttgtggtcggctttgt

SEQ ID NO: 70721 - RNA, 23 nt, synthetic construct
  source 1..23: mol_type = other RNA
ccggagttgaggagggcgtggcc

SEQ ID NO: 70722 - RNA, 23 nt, synthetic construct
  source 1..23: mol_type = other RNA
gtcggctttgtgaggatccaggt

SEQ ID NO: 70723 - RNA, 23 nt, synthetic construct
  source 1..23: mol_type = other RNA
gcaacccctgaggttgggaagtc

SEQ ID NO: 70724 - RNA, 23 nt, synthetic construct
  source 1..23: mol_type = other RNA
gtttccatgtccccgcctgcaac

SEQ ID NO: 70725 - RNA, 23 nt, synthetic construct
  source 1..23: mol_type = other RNA
gtcgtcacagcaaagcacacgca

SEQ ID NO: 70726 - RNA, 23 nt, synthetic construct
  source 1..23: mol_type = other RNA
gtccccggagttgaggagggcgt

SEQ ID NO: 70727 - RNA, 23 nt, synthetic construct
  source 1..23: mol_type = other RNA
gtccccggagttgaggagggcgt

SEQ ID NO: 70728 - RNA, 23 nt, synthetic construct
  source 1..23: mol_type = other RNA
tgcctgtctggtcttcgttcttg

SEQ ID NO: 70729 - RNA, 23 nt, synthetic construct
  source 1..23: mol_type = other RNA
gtcgtagtggctgttgtggtcgg

SEQ ID NO: 70730 - RNA, 23 nt, synthetic construct
  source 1..23: mol_type = other RNA
gtcgtagtggctgttgtggtcag

SEQ ID NO: 70731 - RNA, 23 nt, synthetic construct
  source 1..23: mol_type = other RNA
gtcgtagtggctgttgtggtcag

SEQ ID NO: 70732 - RNA, 23 nt, synthetic construct
  source 1..23: mol_type = other RNA
gtcgtagtggctgttgtggtcag

SEQ ID NO: 70733 - RNA, 23 nt, synthetic construct
  source 1..23: mol_type = other RNA
gtcgtagtggctgttgtggtcag

SEQ ID NO: 70734 - RNA, 23 nt, synthetic construct
  source 1..23: mol_type = other RNA
gcaaagcacacgcacgttgtagt

SEQ ID NO: 70735 - RNA, 23 nt, synthetic construct
  source 1..23: mol_type = other RNA
tggatccagtggatgcagtcgta

SEQ ID NO: 70736 - RNA, 23 nt, synthetic construct
  source 1..23: mol_type = other RNA
gttgtagtggctgttgtggtcag

SEQ ID NO: 70737 - RNA, 23 nt, synthetic construct
  source 1..23: mol_type = other RNA
ccagtggacgcagtcgtagtggc

SEQ ID NO: 70738 - RNA, 23 nt, synthetic construct
  source 1..23: mol_type = other RNA
ccagtggacgcagtcgtagtggc

SEQ ID NO: 70739 - RNA, 23 nt, synthetic construct
  source 1..23: mol_type = other RNA
cacgggtggggggacggggacgg

SEQ ID NO: 70740 - RNA, 23 nt, synthetic construct
  source 1..23: mol_type = other RNA
cacaggtcctgggcgcaggcggc

SEQ ID NO: 70741 - RNA, 23 nt, synthetic construct
  source 1..23: mol_type = other RNA
cacggtgaagctgctgtcggcac

SEQ ID NO: 70742 - RNA, 23 nt, synthetic construct
  source 1..23: mol_type = other RNA
ggaaggtcccgtgggtggtgttg

SEQ ID NO: 70743 - RNA, 23 nt, synthetic construct
  source 1..23: mol_type = other RNA
ggacccagtctgcgaggtgaggg

SEQ ID NO: 70744 - RNA, 23 nt, synthetic construct
  source 1..23: mol_type = other RNA
ctgcaacccctgaggttgggaag

SEQ ID NO: 70745 - RNA, 23 nt, synthetic construct
  source 1..23: mol_type = other RNA
cctgcccgacctggtcgatgctt

SEQ ID NO: 70746 - RNA, 23 nt, synthetic construct
  source 1..23: mol_type = other RNA
gcacctgcccgacctggtcgatg

SEQ ID NO: 70747 - RNA, 23 nt, synthetic construct
  source 1..23: mol_type = other RNA
agcacctgcccgacctggtcgat

SEQ ID NO: 70748 - RNA, 23 nt, synthetic construct
  source 1..23: mol_type = other RNA
tcagcacctgcccgacctggtcg

SEQ ID NO: 70749 - RNA, 23 nt, synthetic construct
  source 1..23: mol_type = other RNA
ggtcagcacctgcccgacctggt

SEQ ID NO: 70750 - RNA, 23 nt, synthetic construct
  source 1..23: mol_type = other RNA
acctgcctgtctggtcttcgttc

SEQ ID NO: 70751 - RNA, 23 nt, synthetic construct
  source 1..23: mol_type = other RNA
gggcgtggccgtggagctggtgg

SEQ ID NO: 70752 - RNA, 23 nt, synthetic construct
  source 1..23: mol_type = other RNA
gatccaggtcgtccccggagttg

SEQ ID NO: 70753 - RNA, 23 nt, synthetic construct
  source 1..23: mol_type = other RNA
ggatccaggtcgtccccggagtt

SEQ ID NO: 70754 - RNA, 23 nt, synthetic construct
  source 1..23: mol_type = other RNA
tagtggctgttgtggtcggcttt

SEQ ID NO: 70755 - RNA, 23 nt, synthetic construct
  source 1..23: mol_type = other RNA
agtcaccgtggaaggctctgtga

SEQ ID NO: 70756 - RNA, 23 nt, synthetic construct
  source 1..23: mol_type = other RNA
gatccaggtcgtccccggagtgg

SEQ ID NO: 70757 - RNA, 23 nt, synthetic construct
  source 1..23: mol_type = other RNA
ggatccaggtcgtccccggagtg

SEQ ID NO: 70758 - RNA, 23 nt, synthetic construct
  source 1..23: mol_type = other RNA
tagtggctgttgtggtcagctct

SEQ ID NO: 70759 - RNA, 23 nt, synthetic construct
  source 1..23: mol_type = other RNA
cccgtgtgtggtggccgtggtgt

SEQ ID NO: 70760 - RNA, 23 nt, synthetic construct
  source 1..23: mol_type = other RNA
gggtgtggtggccgtgctggtca

SEQ ID NO: 70761 - RNA, 23 nt, synthetic construct
  source 1..23: mol_type = other RNA
gatccaggtcgtccccggagtgg

SEQ ID NO: 70762 - RNA, 23 nt, synthetic construct
  source 1..23: mol_type = other RNA
ggatccaggtcgtccccggagtg

SEQ ID NO: 70763 - RNA, 23 nt, synthetic construct
  source 1..23: mol_type = other RNA
gggtgtggtggccgtgctggtca

SEQ ID NO: 70764 - RNA, 23 nt, synthetic construct
  source 1..23: mol_type = other RNA
cccgtgtgtggtggccgtggtgt

SEQ ID NO: 70765 - RNA, 23 nt, synthetic construct
  source 1..23: mol_type = other RNA
agtcaccgtggaaggctctgtga

SEQ ID NO: 70766 - RNA, 23 nt, synthetic construct
  source 1..23: mol_type = other RNA
gatccaggtcgtccccggagttg

SEQ ID NO: 70767 - RNA, 23 nt, synthetic construct
  source 1..23: mol_type = other RNA
ggatccaggtcgtccccggagtt

SEQ ID NO: 70768 - RNA, 23 nt, synthetic construct
  source 1..23: mol_type = other RNA
tagtggctgttgtggtcagcttt

SEQ ID NO: 70769 - RNA, 23 nt, synthetic construct
  source 1..23: mol_type = other RNA
cccgtgtgtggtggccgtggtgt

SEQ ID NO: 70770 - RNA, 23 nt, synthetic construct
  source 1..23: mol_type = other RNA
gatccaggtcgtccccggagtgg

SEQ ID NO: 70771 - RNA, 23 nt, synthetic construct
  source 1..23: mol_type = other RNA
ggatccaggtcgtccccggagtg

SEQ ID NO: 70772 - RNA, 23 nt, synthetic construct
  source 1..23: mol_type = other RNA
tagtggctgttgtggtcagctct

SEQ ID NO: 70773 - RNA, 23 nt, synthetic construct
  source 1..23: mol_type = other RNA
ggatccagtggatgcagtcgtag

SEQ ID NO: 70774 - RNA, 23 nt, synthetic construct
  source 1..23: mol_type = other RNA
gatccaggtcgtccccggagtgg

SEQ ID NO: 70775 - RNA, 23 nt, synthetic construct
  source 1..23: mol_type = other RNA
ggatccaggtcgtccccggagtg

SEQ ID NO: 70776 - RNA, 23 nt, synthetic construct
  source 1..23: mol_type = other RNA
tagtggctgttgtggtcagctct

SEQ ID NO: 70777 - RNA, 23 nt, synthetic construct
  source 1..23: mol_type = other RNA
gggtgtggtggccgtgctggtca

SEQ ID NO: 70778 - RNA, 23 nt, synthetic construct
  source 1..23: mol_type = other RNA
tagtggctgttgtggtcagctca

SEQ ID NO: 70779 - RNA, 23 nt, synthetic construct
  source 1..23: mol_type = other RNA
cgttggccacaggctttgggtcc

SEQ ID NO: 70780 - RNA, 23 nt, synthetic construct
  source 1..23: mol_type = other RNA
gctgagggcgcgggggcagcggg

SEQ ID NO: 70781 - RNA, 23 nt, synthetic construct
  source 1..23: mol_type = other RNA
agttgaggagggcgtggccgtgg

SEQ ID NO: 70782 - RNA, 23 nt, synthetic construct
  source 1..23: mol_type = other RNA
agttgaggagggcgtggccgtag

SEQ ID NO: 70783 - RNA, 23 nt, synthetic construct
  source 1..23: mol_type = other RNA
ctttgtgaggatccaggtcgtcc

SEQ ID NO: 70784 - RNA, 23 nt, synthetic construct
  source 1..23: mol_type = other RNA
ctgttgtggtcagctctgtgagg

SEQ ID NO: 70785 - RNA, 23 nt, synthetic construct
  source 1..23: mol_type = other RNA
ctttgtgaggatccaggtcgtcc

SEQ ID NO: 70786 - RNA, 23 nt, synthetic construct
  source 1..23: mol_type = other RNA
ctgttgtggtcagctctgtgagg

SEQ ID NO: 70787 - RNA, 23 nt, synthetic construct
  source 1..23: mol_type = other RNA
gatccagtggatgcagtcgtagt

SEQ ID NO: 70788 - RNA, 23 nt, synthetic construct
  source 1..23: mol_type = other RNA
ctgttgtggtcagctctgtgagg

SEQ ID NO: 70789 - RNA, 23 nt, synthetic construct
  source 1..23: mol_type = other RNA
tggacccagtctgcgaggtgagg

SEQ ID NO: 70790 - RNA, 23 nt, synthetic construct
  source 1..23: mol_type = other RNA
gcaggtggtgttgaaggaggtgc

SEQ ID NO: 70791 - RNA, 23 nt, synthetic construct
  source 1..23: mol_type = other RNA
tcacggggcctgagctggaccca

SEQ ID NO: 70792 - RNA, 23 nt, synthetic construct
  source 1..23: mol_type = other RNA
gaacagggcctgggtggtggtgg

SEQ ID NO: 70793 - RNA, 23 nt, synthetic construct
  source 1..23: mol_type = other RNA
gtccccgcctgcaacccctgagg

SEQ ID NO: 70794 - RNA, 23 nt, synthetic construct
  source 1..23: mol_type = other RNA
tttccatgtccccgcctgcaacc

SEQ ID NO: 70795 - RNA, 23 nt, synthetic construct
  source 1..23: mol_type = other RNA
cgtccccggagttgaggagggcg

SEQ ID NO: 70796 - RNA, 23 nt, synthetic construct
  source 1..23: mol_type = other RNA
tgtgggtgtcgtggccgtggtgc

SEQ ID NO: 70797 - RNA, 23 nt, synthetic construct
  source 1..23: mol_type = other RNA
ctgtgggtgtcgtggccgtggtg

SEQ ID NO: 70798 - RNA, 23 nt, synthetic construct
  source 1..23: mol_type = other RNA
tagggtgagggctggacagggct

SEQ ID NO: 70799 - RNA, 23 nt, synthetic construct
  source 1..23: mol_type = other RNA
acagtctctggagtagaggaggg

SEQ ID NO: 70800 - RNA, 23 nt, synthetic construct
  source 1..23: mol_type = other RNA
tagggtgagggctggacagggct

SEQ ID NO: 70801 - RNA, 23 nt, synthetic construct
  source 1..23: mol_type = other RNA
cgtccccggagttgaggagggcg

SEQ ID NO: 70802 - RNA, 23 nt, synthetic construct
  source 1..23: mol_type = other RNA
tgtgggtgtcgtggccgtggtgc

SEQ ID NO: 70803 - RNA, 23 nt, synthetic construct
  source 1..23: mol_type = other RNA
ctgtgggtgtcgtggccgtggtg

SEQ ID NO: 70804 - RNA, 23 nt, synthetic construct
  source 1..23: mol_type = other RNA
tagggtgagggctggacagggct

SEQ ID NO: 70805 - RNA, 23 nt, synthetic construct
  source 1..23: mol_type = other RNA
tgtgggtgtcgtggccgtggtgc

SEQ ID NO: 70806 - RNA, 23 nt, synthetic construct
  source 1..23: mol_type = other RNA
ctgtgggtgtcgtggccgtggtg

SEQ ID NO: 70807 - RNA, 23 nt, synthetic construct
  source 1..23: mol_type = other RNA
gtggtctctggagtagaggaggt

SEQ ID NO: 70808 - RNA, 23 nt, synthetic construct
  source 1..23: mol_type = other RNA
ttgtggcacgtcccctgcagtgg

SEQ ID NO: 70809 - RNA, 23 nt, synthetic construct
  source 1..23: mol_type = other RNA
ggccgtggtgttcggcactgggg

SEQ ID NO: 70810 - RNA, 23 nt, synthetic construct
  source 1..23: mol_type = other RNA
ggccgtggtgttcggcactgggg

SEQ ID NO: 70811 - RNA, 23 nt, synthetic construct
  source 1..23: mol_type = other RNA
ggccgtggtgttcggcactgggg

SEQ ID NO: 70812 - RNA, 23 nt, synthetic construct
  source 1..23: mol_type = other RNA
ggccgtggcggtaagcactgtgg

SEQ ID NO: 70813 - RNA, 23 nt, synthetic construct
  source 1..23: mol_type = other RNA
ggccgtggcggtaagcactgtgg

SEQ ID NO: 70814 - RNA, 23 nt, synthetic construct
  source 1..23: mol_type = other RNA
ctctatgtccttaggctgctggc

SEQ ID NO: 70815 - RNA, 23 nt, synthetic construct
  source 1..23: mol_type = other RNA
ggtcgtggtggtaagcactgtgg

SEQ ID NO: 70816 - RNA, 23 nt, synthetic construct
  source 1..23: mol_type = other RNA
gatggaggcagaacgttctcaga

SEQ ID NO: 70817 - RNA, 23 nt, synthetic construct
  source 1..23: mol_type = other RNA
gttgccggccggcaagggcagcg

SEQ ID NO: 70818 - RNA, 23 nt, synthetic construct
  source 1..23: mol_type = other RNA
ccgtggtggctgtaccaagggtg

SEQ ID NO: 70819 - RNA, 23 nt, synthetic construct
  source 1..23: mol_type = other RNA
gttgaggagggcgtggccgtgga

SEQ ID NO: 70820 - RNA, 23 nt, synthetic construct
  source 1..23: mol_type = other RNA
gttgaggagggcgtggccgtaga

SEQ ID NO: 70821 - RNA, 23 nt, synthetic construct
  source 1..23: mol_type = other RNA
gaattggtggcccttgtcatggt

SEQ ID NO: 70822 - RNA, 23 nt, synthetic construct
  source 1..23: mol_type = other RNA
caccgtggaaggctctgtgatgt

SEQ ID NO: 70823 - RNA, 23 nt, synthetic construct
  source 1..23: mol_type = other RNA
caccgtggaaggctctgtgatgt

SEQ ID NO: 70824 - RNA, 23 nt, synthetic construct
  source 1..23: mol_type = other RNA
gcacgaaggaaacgctgcaggtg

SEQ ID NO: 70825 - RNA, 23 nt, synthetic construct
  source 1..23: mol_type = other RNA
ttgcggtcgtagtggctgctgtg

SEQ ID NO: 70826 - RNA, 23 nt, synthetic construct
  source 1..23: mol_type = other RNA
tggaggcgtgagtgccgtccctg

SEQ ID NO: 70827 - RNA, 23 nt, synthetic construct
  source 1..23: mol_type = other RNA
tggaggcgtgagtgccgtccctg

SEQ ID NO: 70828 - RNA, 23 nt, synthetic construct
  source 1..23: mol_type = other RNA
tggaggcgtgagtgccgtccctg

SEQ ID NO: 70829 - RNA, 23 nt, synthetic construct
  source 1..23: mol_type = other RNA
ggccttcgtggtcagcactgtgg

SEQ ID NO: 70830 - RNA, 23 nt, synthetic construct
  source 1..23: mol_type = other RNA
ggccttcgtggtcagcactgtgg

SEQ ID NO: 70831 - RNA, 23 nt, synthetic construct
  source 1..23: mol_type = other RNA
agtcgtcacagcaaagcacacgc

SEQ ID NO: 70832 - RNA, 23 nt, synthetic construct
  source 1..23: mol_type = other RNA
accgccttaaaggtcccctcttg

SEQ ID NO: 70833 - RNA, 23 nt, synthetic construct
  source 1..23: mol_type = other RNA
gcgtagaaatggcagccggctcg

SEQ ID NO: 70834 - RNA, 23 nt, synthetic construct
  source 1..23: mol_type = other RNA
ggtgccgtgagcgtagcaggggc

SEQ ID NO: 70835 - RNA, 23 nt, synthetic construct
  source 1..23: mol_type = other RNA
tggcactttggtagtgtgagctg

SEQ ID NO: 70836 - RNA, 23 nt, synthetic construct
  source 1..23: mol_type = other RNA
cggcactttggtagtgtgagctg

SEQ ID NO: 70837 - RNA, 23 nt, synthetic construct
  source 1..23: mol_type = other RNA
cggcactttggtagtgtgagctg

SEQ ID NO: 70838 - RNA, 23 nt, synthetic construct
  source 1..23: mol_type = other RNA
cggcactttggtagtgtgagctg

SEQ ID NO: 70839 - RNA, 23 nt, synthetic construct
  source 1..23: mol_type = other RNA
tcccgaaaggggtcctgctggcc

SEQ ID NO: 70840 - RNA, 23 nt, synthetic construct
  source 1..23: mol_type = other RNA
ggtggccttcgtggtcagcactg

SEQ ID NO: 70841 - RNA, 23 nt, synthetic construct
  source 1..23: mol_type = other RNA
ggtggccttcgtggtcagcactg

SEQ ID NO: 70842 - RNA, 23 nt, synthetic construct
  source 1..23: mol_type = other RNA
tcgaccctgatggtctctccagg

SEQ ID NO: 70843 - RNA, 23 nt, synthetic construct
  source 1..23: mol_type = other RNA
cctcaaggcggcccctgcagtgg

SEQ ID NO: 70844 - RNA, 23 nt, synthetic construct
  source 1..23: mol_type = other RNA
acgttgtagttgaagcacatgtt

SEQ ID NO: 70845 - RNA, 23 nt, synthetic construct
  source 1..23: mol_type = other RNA
tgcccaagatgcccgaggtggcc

SEQ ID NO: 70846 - RNA, 23 nt, synthetic construct
  source 1..23: mol_type = other RNA
tgcccaagatgcccgaggtggcc

SEQ ID NO: 70847 - RNA, 23 nt, synthetic construct
  source 1..23: mol_type = other RNA
tggaagcgtgcgtgccgtccctg

SEQ ID NO: 70848 - RNA, 23 nt, synthetic construct
  source 1..23: mol_type = other RNA
tggcggcagtggttccgtcccgc

SEQ ID NO: 70849 - RNA, 23 nt, synthetic construct
  source 1..23: mol_type = other RNA
gggtccagcaggacgacacggtt

SEQ ID NO: 70850 - RNA, 23 nt, synthetic construct
  source 1..23: mol_type = other RNA
tctgtgataggcgggtccaggtg

SEQ ID NO: 70851 - RNA, 23 nt, synthetic construct
  source 1..23: mol_type = other RNA
tgtcaaagtccccgccagagggc

SEQ ID NO: 70852 - RNA, 23 nt, synthetic construct
  source 1..23: mol_type = other RNA
tctgtgataggcgggtccaggtg

SEQ ID NO: 70853 - RNA, 23 nt, synthetic construct
  source 1..23: mol_type = other RNA
tgtcaaagtccccgccagagggc

SEQ ID NO: 70854 - RNA, 23 nt, synthetic construct
  source 1..23: mol_type = other RNA
tctgtgataggcgggtccaggcg

SEQ ID NO: 70855 - RNA, 23 nt, synthetic construct
  source 1..23: mol_type = other RNA
tgtcaaagtccccgccagagggc

SEQ ID NO: 70856 - RNA, 23 nt, synthetic construct
  source 1..23: mol_type = other RNA
tctgtgataggcgggtccaggtg

SEQ ID NO: 70857 - RNA, 23 nt, synthetic construct
  source 1..23: mol_type = other RNA
tgtcaaagtccccgccagagggc

SEQ ID NO: 70858 - RNA, 23 nt, synthetic construct
  source 1..23: mol_type = other RNA
tctgtgataggcgggtccaggtg

SEQ ID NO: 70859 - RNA, 23 nt, synthetic construct
  source 1..23: mol_type = other RNA
gcacaggccaccggttgcacctc

SEQ ID NO: 70860 - RNA, 23 nt, synthetic construct
  source 1..23: mol_type = other RNA
aggcggtctggacgcactcccca

SEQ ID NO: 70861 - RNA, 23 nt, synthetic construct
  source 1..23: mol_type = other RNA
ggctctttggaagcggtgctggc

SEQ ID NO: 70862 - RNA, 23 nt, synthetic construct
  source 1..23: mol_type = other RNA
caggacgacacggttgtcaccca

SEQ ID NO: 70863 - RNA, 23 nt, synthetic construct
  source 1..23: mol_type = other RNA
ccgccttgcctgtcgcagcttcc

SEQ ID NO: 70864 - RNA, 23 nt, synthetic construct
  source 1..23: mol_type = other RNA
gtgtccgtgcagggtgagccaca

SEQ ID NO: 70865 - RNA, 23 nt, synthetic construct
  source 1..23: mol_type = other RNA
gccagagtgcgtgatgtcatcca

SEQ ID NO: 70866 - RNA, 23 nt, synthetic construct
  source 1..23: mol_type = other RNA
ccatagccccccggagcaggtgc

SEQ ID NO: 70867 - RNA, 23 nt, synthetic construct
  source 1..23: mol_type = other RNA
tgcaggtcgtagagtttctcatc

SEQ ID NO: 70868 - RNA, 23 nt, synthetic construct
  source 1..23: mol_type = other RNA
caggccgcacttccgcagctcag

SEQ ID NO: 70869 - RNA, 23 nt, synthetic construct
  source 1..23: mol_type = other RNA
tcaaagctgttcctggcattggc

SEQ ID NO: 70870 - RNA, 23 nt, synthetic construct
  source 1..23: mol_type = other RNA
gagcgtagcaggggcactcctgg

SEQ ID NO: 70871 - RNA, 23 nt, synthetic construct
  source 1..23: mol_type = other RNA
tcgtcgtgcaccacctctccagg

SEQ ID NO: 70872 - RNA, 23 nt, synthetic construct
  source 1..23: mol_type = other RNA
ggcaatgcagcccccactcccat

SEQ ID NO: 70873 - RNA, 23 nt, synthetic construct
  source 1..23: mol_type = other RNA
tgactcggtggttctgctgctag

SEQ ID NO: 70874 - RNA, 23 nt, synthetic construct
  source 1..23: mol_type = other RNA
ccccgtggaaggctctgtgatgt

SEQ ID NO: 70875 - RNA, 23 nt, synthetic construct
  source 1..23: mol_type = other RNA
ggtaccggtggttgctgctgggg

SEQ ID NO: 70876 - RNA, 23 nt, synthetic construct
  source 1..23: mol_type = other RNA
gggtcccggtggtcccaagggtg

SEQ ID NO: 70877 - RNA, 23 nt, synthetic construct
  source 1..23: mol_type = other RNA
gttgtggtagtcggcactttggt

SEQ ID NO: 70878 - RNA, 23 nt, synthetic construct
  source 1..23: mol_type = other RNA
gttgtggtagtcggcactttggt

SEQ ID NO: 70879 - RNA, 23 nt, synthetic construct
  source 1..23: mol_type = other RNA
ccccgtggaaggctctgtgatgt

SEQ ID NO: 70880 - RNA, 23 nt, synthetic construct
  source 1..23: mol_type = other RNA
ggtaccggtggttgctgctgggg

SEQ ID NO: 70881 - RNA, 23 nt, synthetic construct
  source 1..23: mol_type = other RNA
gggtcccggtggtcccaagggtg

SEQ ID NO: 70882 - RNA, 23 nt, synthetic construct
  source 1..23: mol_type = other RNA
gttgtggtagtcggcactttggt

SEQ ID NO: 70883 - RNA, 23 nt, synthetic construct
  source 1..23: mol_type = other RNA
ggcggtggccgtggaaccggtgg

SEQ ID NO: 70884 - RNA, 23 nt, synthetic construct
  source 1..23: mol_type = other RNA
gccacaggctttgggtccagcag

SEQ ID NO: 70885 - RNA, 23 nt, synthetic construct
  source 1..23: mol_type = other RNA
caccgtctcggggcagcaggggt

SEQ ID NO: 70886 - RNA, 23 nt, synthetic construct
  source 1..23: mol_type = other RNA
aaccccgtagaaggtgccattgt

SEQ ID NO: 70887 - RNA, 23 nt, synthetic construct
  source 1..23: mol_type = other RNA
ggtagtattgttgcaggcatcct

SEQ ID NO: 70888 - RNA, 23 nt, synthetic construct
  source 1..23: mol_type = other RNA
ccacaggatggtcgtgttgatgc

SEQ ID NO: 70889 - RNA, 23 nt, synthetic construct
  source 1..23: mol_type = other RNA
catgatcagacaatgcacatcct

SEQ ID NO: 70890 - RNA, 23 nt, synthetic construct
  source 1..23: mol_type = other RNA
agttaccctgcagcaggcatgga

SEQ ID NO: 70891 - RNA, 23 nt, synthetic construct
  source 1..23: mol_type = other RNA
ctttgggatgctgacccctctct

SEQ ID NO: 70892 - RNA, 23 nt, synthetic construct
  source 1..23: mol_type = other RNA
ggtggcagatgccctcctcgtcc

SEQ ID NO: 70893 - RNA, 23 nt, synthetic construct
  source 1..23: mol_type = other RNA
cctgcatgagtggcaccagctgc

SEQ ID NO: 70894 - RNA, 23 nt, synthetic construct
  source 1..23: mol_type = other RNA
ctgttggctgttggcgcacatca

SEQ ID NO: 70895 - RNA, 23 nt, synthetic construct
  source 1..23: mol_type = other RNA
ccgaggtggccgaagtccaggct

SEQ ID NO: 70896 - RNA, 23 nt, synthetic construct
  source 1..23: mol_type = other RNA
gtgctggtcagcactttgagggt

SEQ ID NO: 70897 - RNA, 23 nt, synthetic construct
  source 1..23: mol_type = other RNA
ccgaggtggccgaagtccaggct

SEQ ID NO: 70898 - RNA, 23 nt, synthetic construct
  source 1..23: mol_type = other RNA
tgttggctgttggcgcacatcag

SEQ ID NO: 70899 - RNA, 23 nt, synthetic construct
  source 1..23: mol_type = other RNA
gactcggtggtcctgctgctagg

SEQ ID NO: 70900 - RNA, 23 nt, synthetic construct
  source 1..23: mol_type = other RNA
gactcggtggtcctgctgctagg

SEQ ID NO: 70901 - RNA, 23 nt, synthetic construct
  source 1..23: mol_type = other RNA
gactcggtggtcctgctgctagg

SEQ ID NO: 70902 - RNA, 23 nt, synthetic construct
  source 1..23: mol_type = other RNA
catggacttgtagtggatgctga

SEQ ID NO: 70903 - RNA, 23 nt, synthetic construct
  source 1..23: mol_type = other RNA
gaagacttggccattgaaggtga

SEQ ID NO: 70904 - RNA, 23 nt, synthetic construct
  source 1..23: mol_type = other RNA
tgaggaacacgccgccgtccgct

SEQ ID NO: 70905 - RNA, 23 nt, synthetic construct
  source 1..23: mol_type = other RNA
gacccaggcggtggtgaaggtga

SEQ ID NO: 70906 - RNA, 23 nt, synthetic construct
  source 1..23: mol_type = other RNA
gcggtgcccattgtaccagctgg

SEQ ID NO: 70907 - RNA, 23 nt, synthetic construct
  source 1..23: mol_type = other RNA
cagaccaggccaaagtccaggct

SEQ ID NO: 70908 - RNA, 23 nt, synthetic construct
  source 1..23: mol_type = other RNA
cagaccaggccaaagtccaggct

SEQ ID NO: 70909 - RNA, 23 nt, synthetic construct
  source 1..23: mol_type = other RNA
tgcagttgtagtggctgctgtgg

SEQ ID NO: 70910 - RNA, 23 nt, synthetic construct
  source 1..23: mol_type = other RNA
tcgtggtggtaagcactgtggag

SEQ ID NO: 70911 - RNA, 23 nt, synthetic construct
  source 1..23: mol_type = other RNA
cagaccaggccaaagtccaggct

SEQ ID NO: 70912 - RNA, 23 nt, synthetic construct
  source 1..23: mol_type = other RNA
cagaccaggccaaagtccaggct

SEQ ID NO: 70913 - RNA, 23 nt, synthetic construct
  source 1..23: mol_type = other RNA
tgcagttgtagtggctgctgtgg

SEQ ID NO: 70914 - RNA, 23 nt, synthetic construct
  source 1..23: mol_type = other RNA
cagccctccgccatcccctccag

SEQ ID NO: 70915 - RNA, 23 nt, synthetic construct
  source 1..23: mol_type = other RNA
accctgggcgtcacagggcaggg

SEQ ID NO: 70916 - RNA, 23 nt, synthetic construct
  source 1..23: mol_type = other RNA
gcgtcccagtgacatcagggagg

SEQ ID NO: 70917 - RNA, 23 nt, synthetic construct
  source 1..23: mol_type = other RNA
gggactctgttggctgttggcgc

SEQ ID NO: 70918 - RNA, 23 nt, synthetic construct
  source 1..23: mol_type = other RNA
gggggactctgttggctgttggc

SEQ ID NO: 70919 - RNA, 23 nt, synthetic construct
  source 1..23: mol_type = other RNA
acctggtcgatgcttacctcggg

SEQ ID NO: 70920 - RNA, 23 nt, synthetic construct
  source 1..23: mol_type = other RNA
cacgttgtagttgaagcacatgt

SEQ ID NO: 70921 - RNA, 23 nt, synthetic construct
  source 1..23: mol_type = other RNA
ccccggagttgaggagggcgtgg

SEQ ID NO: 70922 - RNA, 23 nt, synthetic construct
  source 1..23: mol_type = other RNA
agtccagccactctgaccaggca

SEQ ID NO: 70923 - RNA, 23 nt, synthetic construct
  source 1..23: mol_type = other RNA
tgttgtggtcagctctgtgagga

SEQ ID NO: 70924 - RNA, 23 nt, synthetic construct
  source 1..23: mol_type = other RNA
agtccagccactctgaccaggca

SEQ ID NO: 70925 - RNA, 23 nt, synthetic construct
  source 1..23: mol_type = other RNA
gtgaggatccaggtcgtccctgg

SEQ ID NO: 70926 - RNA, 23 nt, synthetic construct
  source 1..23: mol_type = other RNA
cgtggtcagcactgtggaggtgt

SEQ ID NO: 70927 - RNA, 23 nt, synthetic construct
  source 1..23: mol_type = other RNA
agtccagccactctgaccaggca

SEQ ID NO: 70928 - RNA, 23 nt, synthetic construct
  source 1..23: mol_type = other RNA
ccccggagttgaggagggcgtgg

SEQ ID NO: 70929 - RNA, 23 nt, synthetic construct
  source 1..23: mol_type = other RNA
agtccagccactctgaccaggca

SEQ ID NO: 70930 - RNA, 23 nt, synthetic construct
  source 1..23: mol_type = other RNA
tgttgtggtcagctctgtgagga

SEQ ID NO: 70931 - RNA, 23 nt, synthetic construct
  source 1..23: mol_type = other RNA
cgtggtcagcactgtggaggtgt

SEQ ID NO: 70932 - RNA, 23 nt, synthetic construct
  source 1..23: mol_type = other RNA
tgttgtggtcagctctgtgagga

SEQ ID NO: 70933 - RNA, 23 nt, synthetic construct
  source 1..23: mol_type = other RNA
ggtggtcagcactgtggaggtgt

SEQ ID NO: 70934 - RNA, 23 nt, synthetic construct
  source 1..23: mol_type = other RNA
gtccccacggtggacgagctggg

SEQ ID NO: 70935 - RNA, 23 nt, synthetic construct
  source 1..23: mol_type = other RNA
ggagccgccccacatgctgcaga

SEQ ID NO: 70936 - RNA, 23 nt, synthetic construct
  source 1..23: mol_type = other RNA
aggctctggcagggcacctcaag

SEQ ID NO: 70937 - RNA, 23 nt, synthetic construct
  source 1..23: mol_type = other RNA
ggtcctggaggtgcccctggtgt

SEQ ID NO: 70938 - RNA, 23 nt, synthetic construct
  source 1..23: mol_type = other RNA
gccgtgctggtcagcactttggg

SEQ ID NO: 70939 - RNA, 23 nt, synthetic construct
  source 1..23: mol_type = other RNA
gccgtgctggtcagcactttgag

SEQ ID NO: 70940 - RNA, 23 nt, synthetic construct
  source 1..23: mol_type = other RNA
tggaggcgtgcgtgccgtccctg

SEQ ID NO: 70941 - RNA, 23 nt, synthetic construct
  source 1..23: mol_type = other RNA
ttctgctgtcggggaccagccac

SEQ ID NO: 70942 - RNA, 23 nt, synthetic construct
  source 1..23: mol_type = other RNA
cctcgtggacccgcctctcctgg

SEQ ID NO: 70943 - RNA, 23 nt, synthetic construct
  source 1..23: mol_type = other RNA
gggtgtggtggccgtggtggtca

SEQ ID NO: 70944 - RNA, 23 nt, synthetic construct
  source 1..23: mol_type = other RNA
gggtggtgcccaagatgcccgag

SEQ ID NO: 70945 - RNA, 23 nt, synthetic construct
  source 1..23: mol_type = other RNA
gggtggtgcccaagatgcccgag

SEQ ID NO: 70946 - RNA, 23 nt, synthetic construct
  source 1..23: mol_type = other RNA
ggcgcctgggaaggttgcaccaa

SEQ ID NO: 70947 - RNA, 23 nt, synthetic construct
  source 1..23: mol_type = other RNA
gtgactcggtggttctgctgcta

SEQ ID NO: 70948 - RNA, 23 nt, synthetic construct
  source 1..23: mol_type = other RNA
tggtctgttctgggagggtcccg

SEQ ID NO: 70949 - RNA, 23 nt, synthetic construct
  source 1..23: mol_type = other RNA
tggtctgttctgggagggtcccg

SEQ ID NO: 70950 - RNA, 23 nt, synthetic construct
  source 1..23: mol_type = other RNA
tgctgtggtctgctctgtgagga

SEQ ID NO: 70951 - RNA, 23 nt, synthetic construct
  source 1..23: mol_type = other RNA
ttaggctgctggcataagtgccc

SEQ ID NO: 70952 - RNA, 23 nt, synthetic construct
  source 1..23: mol_type = other RNA
cacgagcatggccgccagagcca

SEQ ID NO: 70953 - RNA, 23 nt, synthetic construct
  source 1..23: mol_type = other RNA
gttggggtaggcacagcaggctc

SEQ ID NO: 70954 - RNA, 23 nt, synthetic construct
  source 1..23: mol_type = other RNA
cagcgcgagaaggcactgttggg

SEQ ID NO: 70955 - RNA, 23 nt, synthetic construct
  source 1..23: mol_type = other RNA
cagtcctcctcggcaatgcagcc

SEQ ID NO: 70956 - RNA, 23 nt, synthetic construct
  source 1..23: mol_type = other RNA
tgcagtggtcgtcactgcagcag

SEQ ID NO: 70957 - RNA, 23 nt, synthetic construct
  source 1..23: mol_type = other RNA
tgtagtggatgctgagggcgcgg

SEQ ID NO: 70958 - RNA, 23 nt, synthetic construct
  source 1..23: mol_type = other RNA
gtgactcggtggtcctgctgcta

SEQ ID NO: 70959 - RNA, 23 nt, synthetic construct
  source 1..23: mol_type = other RNA
gtgactcggtggtcctgctgcta

SEQ ID NO: 70960 - RNA, 23 nt, synthetic construct
  source 1..23: mol_type = other RNA
gtgactcggtggtcctgctgcta

SEQ ID NO: 70961 - RNA, 23 nt, synthetic construct
  source 1..23: mol_type = other RNA
tgactcggtggtcctgctgctag

SEQ ID NO: 70962 - RNA, 23 nt, synthetic construct
  source 1..23: mol_type = other RNA
tgactcggtggtcctgctgctag

SEQ ID NO: 70963 - RNA, 23 nt, synthetic construct
  source 1..23: mol_type = other RNA
tgactcggtggtcctgctgctag

SEQ ID NO: 70964 - RNA, 23 nt, synthetic construct
  source 1..23: mol_type = other RNA
tgaaggttggcaggctgctgggg

SEQ ID NO: 70965 - RNA, 23 nt, synthetic construct
  source 1..23: mol_type = other RNA
gctggtcagcactttgggagggg

SEQ ID NO: 70966 - RNA, 23 nt, synthetic construct
  source 1..23: mol_type = other RNA
gctggtcagcactttgggagggg

SEQ ID NO: 70967 - RNA, 23 nt, synthetic construct
  source 1..23: mol_type = other RNA
ccgcctctcctggcagcaggtgc

SEQ ID NO: 70968 - RNA, 23 nt, synthetic construct
  source 1..23: mol_type = other RNA
gcattggcacaggcagcctgggc

SEQ ID NO: 70969 - RNA, 23 nt, synthetic construct
  source 1..23: mol_type = other RNA
gtcttcgttcttgcaggtcagcc

SEQ ID NO: 70970 - RNA, 23 nt, synthetic construct
  source 1..23: mol_type = other RNA
tgacgctcacgcccagggcagga

SEQ ID NO: 70971 - RNA, 23 nt, synthetic construct
  source 1..23: mol_type = other RNA
tggacgtcacagtgcaccttctg

SEQ ID NO: 70972 - RNA, 23 nt, synthetic construct
  source 1..23: mol_type = other RNA
cgtggttgtggtagtcagcactt

SEQ ID NO: 70973 - RNA, 23 nt, synthetic construct
  source 1..23: mol_type = other RNA
gtgtgtgctgaaacagcccacgt

SEQ ID NO: 70974 - RNA, 23 nt, synthetic construct
  source 1..23: mol_type = other RNA
cagcaggctccgtgctggcactg

SEQ ID NO: 70975 - RNA, 23 nt, synthetic construct
  source 1..23: mol_type = other RNA
cacatcttgcccccagcagccct

SEQ ID NO: 70976 - RNA, 23 nt, synthetic construct
  source 1..23: mol_type = other RNA
ggcactctatgctctttggtgcc

SEQ ID NO: 70977 - RNA, 23 nt, synthetic construct
  source 1..23: mol_type = other RNA
cctcggggtagttctccgcccgg

SEQ ID NO: 70978 - RNA, 23 nt, synthetic construct
  source 1..23: mol_type = other RNA
gcaggggtcctcaaagctgttcc

SEQ ID NO: 70979 - RNA, 23 nt, synthetic construct
  source 1..23: mol_type = other RNA
tatgctctttggtgcccagcaca

SEQ ID NO: 70980 - RNA, 23 nt, synthetic construct
  source 1..23: mol_type = other RNA
gttctccgcccggcactctatgc

SEQ ID NO: 70981 - RNA, 23 nt, synthetic construct
  source 1..23: mol_type = other RNA
ttctccgcccggcactctatgct

SEQ ID NO: 70982 - RNA, 23 nt, synthetic construct
  source 1..23: mol_type = other RNA
tctatgctctttggtgcccagca

SEQ ID NO: 70983 - RNA, 23 nt, synthetic construct
  source 1..23: mol_type = other RNA
ccccagcagccctgatgttttca

SEQ ID NO: 70984 - RNA, 23 nt, synthetic construct
  source 1..23: mol_type = other RNA
ggagcaggggtcctcaaagctgt

SEQ ID NO: 70985 - RNA, 23 nt, synthetic construct
  source 1..23: mol_type = other RNA
ggcactcggccccaggggtgccc

SEQ ID NO: 70986 - RNA, 23 nt, synthetic construct
  source 1..23: mol_type = other RNA
ggcactctatgtccttaggctgc

SEQ ID NO: 70987 - RNA, 23 nt, synthetic construct
  source 1..23: mol_type = other RNA
tggcactctatgtccttaggctg

SEQ ID NO: 70988 - RNA, 23 nt, synthetic construct
  source 1..23: mol_type = other RNA
cactctatgctctttggtgccca

SEQ ID NO: 70989 - RNA, 23 nt, synthetic construct
  source 1..23: mol_type = other RNA
tctccgcccggcactctatgctc

SEQ ID NO: 70990 - RNA, 23 nt, synthetic construct
  source 1..23: mol_type = other RNA
atgttgaacctgcctgtctggtc

SEQ ID NO: 70991 - RNA, 23 nt, synthetic construct
  source 1..23: mol_type = other RNA
agttctccgcccggcactctatg

SEQ ID NO: 70992 - RNA, 23 nt, synthetic construct
  source 1..23: mol_type = other RNA
ccagcctgacaaacacctgcatg

SEQ ID NO: 70993 - RNA, 23 nt, synthetic construct
  source 1..23: mol_type = other RNA
gagcaggggtcctcaaagctgtt

SEQ ID NO: 70994 - RNA, 23 nt, synthetic construct
  source 1..23: mol_type = other RNA
accctctctgcctcaggttttca

SEQ ID NO: 70995 - RNA, 23 nt, synthetic construct
  source 1..23: mol_type = other RNA
gaggttgggaagtccacgtcaaa

SEQ ID NO: 70996 - RNA, 23 nt, synthetic construct
  source 1..23: mol_type = other RNA
tgaggttgggaagtccacgtcaa

SEQ ID NO: 70997 - RNA, 23 nt, synthetic construct
  source 1..23: mol_type = other RNA
gcagccctgatgttttcaaaagt

SEQ ID NO: 70998 - RNA, 23 nt, synthetic construct
  source 1..23: mol_type = other RNA
agcagccctgatgttttcaaaag

SEQ ID NO: 70999 - RNA, 23 nt, synthetic construct
  source 1..23: mol_type = other RNA
ttggtgcccagcacatcttgccc

SEQ ID NO: 71000 - RNA, 23 nt, synthetic construct
  source 1..23: mol_type = other RNA
ccctctctgcctcaggttttcaa

SEQ ID NO: 71001 - RNA, 23 nt, synthetic construct
  source 1..23: mol_type = other RNA
agtttccatgtccccgcctgcaa

SEQ ID NO: 71002 - RNA, 23 nt, synthetic construct
  source 1..23: mol_type = other RNA
ccagcacatcttgcccccagcag

SEQ ID NO: 71003 - RNA, 23 nt, synthetic construct
  source 1..23: mol_type = other RNA
acatcttgcccccagcagccctg

SEQ ID NO: 71004 - RNA, 23 nt, synthetic construct
  source 1..23: mol_type = other RNA
aggttgggaagtccacgtcaaac

SEQ ID NO: 71005 - RNA, 23 nt, synthetic construct
  source 1..23: mol_type = other RNA
ctatgctctttggtgcccagcac

SEQ ID NO: 71006 - RNA, 23 nt, synthetic construct
  source 1..23: mol_type = other RNA
ttgaagcacatgttgaacctgcc

SEQ ID NO: 71007 - RNA, 23 nt, synthetic construct
  source 1..23: mol_type = other RNA
tgcccagcacatcttgcccccag

SEQ ID NO: 71008 - RNA, 23 nt, synthetic construct
  source 1..23: mol_type = other RNA
cacatctggccctggtgggcggg

SEQ ID NO: 71009 - RNA, 23 nt, synthetic construct
  source 1..23: mol_type = other RNA
agcaggggtcctcaaagctgttc

SEQ ID NO: 71010 - RNA, 23 nt, synthetic construct
  source 1..23: mol_type = other RNA
ggtggtggtggccgtctccagct

SEQ ID NO: 71011 - RNA, 23 nt, synthetic construct
  source 1..23: mol_type = other RNA
cctgaggttgggaagtccacgtc

SEQ ID NO: 71012 - RNA, 23 nt, synthetic construct
  source 1..23: mol_type = other RNA
cccccagcagccctgatgttttc

SEQ ID NO: 71013 - RNA, 23 nt, synthetic construct
  source 1..23: mol_type = other RNA
tttggtgcccagcacatcttgcc

SEQ ID NO: 71014 - RNA, 23 nt, synthetic construct
  source 1..23: mol_type = other RNA
acatgttgaacctgcctgtctgg

SEQ ID NO: 71015 - RNA, 23 nt, synthetic construct
  source 1..23: mol_type = other RNA
gaagcacatgttgaacctgcctg

SEQ ID NO: 71016 - RNA, 23 nt, synthetic construct
  source 1..23: mol_type = other RNA
tctccaggagccagcacggtgcc

SEQ ID NO: 71017 - RNA, 23 nt, synthetic construct
  source 1..23: mol_type = other RNA
aaaagtttccatgtccccgcctg

SEQ ID NO: 71018 - RNA, 23 nt, synthetic construct
  source 1..23: mol_type = other RNA
agggggacaccaggctgggcctg

SEQ ID NO: 71019 - RNA, 23 nt, synthetic construct
  source 1..23: mol_type = other RNA
agggggacaccaggctgggcctg

SEQ ID NO: 71020 - RNA, 23 nt, synthetic construct
  source 1..23: mol_type = other RNA
agggggacaccaggctgggcctg

SEQ ID NO: 71021 - RNA, 23 nt, synthetic construct
  source 1..23: mol_type = other RNA
agggggacaccaggctgggcctg

SEQ ID NO: 71022 - RNA, 23 nt, synthetic construct
  source 1..23: mol_type = other RNA
cctctctgcctcaggttttcaaa

SEQ ID NO: 71023 - RNA, 23 nt, synthetic construct
  source 1..23: mol_type = other RNA
atgttttcaaaagtttccatgtc

SEQ ID NO: 71024 - RNA, 23 nt, synthetic construct
  source 1..23: mol_type = other RNA
cagccctgatgttttcaaaagtt

SEQ ID NO: 71025 - RNA, 23 nt, synthetic construct
  source 1..23: mol_type = other RNA
catcttgcccccagcagccctga

SEQ ID NO: 71026 - RNA, 23 nt, synthetic construct
  source 1..23: mol_type = other RNA
agggtggggactgctgtggtgct

SEQ ID NO: 71027 - RNA, 23 nt, synthetic construct
  source 1..23: mol_type = other RNA
gcccagcacatcttgcccccagc

SEQ ID NO: 71028 - RNA, 23 nt, synthetic construct
  source 1..23: mol_type = other RNA
agagaagtgggagctggggaagc

SEQ ID NO: 71029 - RNA, 23 nt, synthetic construct
  source 1..23: mol_type = other RNA
caaaagtttccatgtccccgcct

SEQ ID NO: 71030 - RNA, 23 nt, synthetic construct
  source 1..23: mol_type = other RNA
ctgaggttgggaagtccacgtca

SEQ ID NO: 71031 - RNA, 23 nt, synthetic construct
  source 1..23: mol_type = other RNA
gccctggtgggcggggtccagcc

SEQ ID NO: 71032 - RNA, 23 nt, synthetic construct
  source 1..23: mol_type = other RNA
ccctgaggttgggaagtccacgt

SEQ ID NO: 71033 - RNA, 23 nt, synthetic construct
  source 1..23: mol_type = other RNA
ctccaggagccagcacggtgccg

SEQ ID NO: 71034 - RNA, 23 nt, synthetic construct
  source 1..23: mol_type = other RNA
gaggagggcgtggccgtggagct

SEQ ID NO: 71035 - RNA, 23 nt, synthetic construct
  source 1..23: mol_type = other RNA
aggcactcggccccaggggtgcc

SEQ ID NO: 71036 - RNA, 23 nt, synthetic construct
  source 1..23: mol_type = other RNA
ataggtgcaggtgcaggcctcaa

SEQ ID NO: 71037 - RNA, 23 nt, synthetic construct
  source 1..23: mol_type = other RNA
ctgggacagtgggttctgtggag

SEQ ID NO: 71038 - RNA, 23 nt, synthetic construct
  source 1..23: mol_type = other RNA
tgtcacagccaggggcaggggag

SEQ ID NO: 71039 - RNA, 23 nt, synthetic construct
  source 1..23: mol_type = other RNA
cataggtgcaggtgcaggcctca

SEQ ID NO: 71040 - RNA, 23 nt, synthetic construct
  source 1..23: mol_type = other RNA
ttttcaaaagtttccatgtcccc

SEQ ID NO: 71041 - RNA, 23 nt, synthetic construct
  source 1..23: mol_type = other RNA
atgctctttggtgcccagcacat

SEQ ID NO: 71042 - RNA, 23 nt, synthetic construct
  source 1..23: mol_type = other RNA
agggggctcaggctggggaagac

SEQ ID NO: 71043 - RNA, 23 nt, synthetic construct
  source 1..23: mol_type = other RNA
caacttctgcaggttcccaaact

SEQ ID NO: 71044 - RNA, 23 nt, synthetic construct
  source 1..23: mol_type = other RNA
cagcctgacaaacacctgcatga

SEQ ID NO: 71045 - RNA, 23 nt, synthetic construct
  source 1..23: mol_type = other RNA
tccaggccaggcaggtccaccag

SEQ ID NO: 71046 - RNA, 23 nt, synthetic construct
  source 1..23: mol_type = other RNA
cggggctggcaggtggtggtacc

SEQ ID NO: 71047 - RNA, 23 nt, synthetic construct
  source 1..23: mol_type = other RNA
accggggctggcaggtggtggta

SEQ ID NO: 71048 - RNA, 23 nt, synthetic construct
  source 1..23: mol_type = other RNA
gtggtggtggccgtctccagctc

SEQ ID NO: 71049 - RNA, 23 nt, synthetic construct
  source 1..23: mol_type = other RNA
gggtggggactgctgtggtgctg

SEQ ID NO: 71050 - RNA, 23 nt, synthetic construct
  source 1..23: mol_type = other RNA
tcaaaagtttccatgtccccgcc

SEQ ID NO: 71051 - RNA, 23 nt, synthetic construct
  source 1..23: mol_type = other RNA
ttcaaaagtttccatgtccccgc

SEQ ID NO: 71052 - RNA, 23 nt, synthetic construct
  source 1..23: mol_type = other RNA
gttttcaaaagtttccatgtccc

SEQ ID NO: 71053 - RNA, 23 nt, synthetic construct
  source 1..23: mol_type = other RNA
tgttttcaaaagtttccatgtcc

SEQ ID NO: 71054 - RNA, 23 nt, synthetic construct
  source 1..23: mol_type = other RNA
cctgatgttttcaaaagtttcca

SEQ ID NO: 71055 - RNA, 23 nt, synthetic construct
  source 1..23: mol_type = other RNA
agccctgatgttttcaaaagttt

SEQ ID NO: 71056 - RNA, 23 nt, synthetic construct
  source 1..23: mol_type = other RNA
gcccccagcagccctgatgtttt

SEQ ID NO: 71057 - RNA, 23 nt, synthetic construct
  source 1..23: mol_type = other RNA
tcttgcccccagcagccctgatg

SEQ ID NO: 71058 - RNA, 23 nt, synthetic construct
  source 1..23: mol_type = other RNA
cccagcacatcttgcccccagca

SEQ ID NO: 71059 - RNA, 23 nt, synthetic construct
  source 1..23: mol_type = other RNA
gtgcccagcacatcttgccccca

SEQ ID NO: 71060 - RNA, 23 nt, synthetic construct
  source 1..23: mol_type = other RNA
ctttggtgcccagcacatcttgc

SEQ ID NO: 71061 - RNA, 23 nt, synthetic construct
  source 1..23: mol_type = other RNA
tgaagcacatgttgaacctgcct

SEQ ID NO: 71062 - RNA, 23 nt, synthetic construct
  source 1..23: mol_type = other RNA
ggcagtggctgtagtcgtcacag

SEQ ID NO: 71063 - RNA, 23 nt, synthetic construct
  source 1..23: mol_type = other RNA
aggagggcgtggccgtggagctg

SEQ ID NO: 71064 - RNA, 23 nt, synthetic construct
  source 1..23: mol_type = other RNA
ccctgggctggaggagggggtgg

SEQ ID NO: 71065 - RNA, 23 nt, synthetic construct
  source 1..23: mol_type = other RNA
atgtggggctgctgggcagcagg

SEQ ID NO: 71066 - RNA, 23 nt, synthetic construct
  source 1..23: mol_type = other RNA
gggggacaccaggctgggcctgg

SEQ ID NO: 71067 - RNA, 23 nt, synthetic construct
  source 1..23: mol_type = other RNA
cagggggacaccaggctgggcct

SEQ ID NO: 71068 - RNA, 23 nt, synthetic construct
  source 1..23: mol_type = other RNA
ccctgggctggaggagggggtgg

SEQ ID NO: 71069 - RNA, 23 nt, synthetic construct
  source 1..23: mol_type = other RNA
atgtggggctgctgggcagcagg

SEQ ID NO: 71070 - RNA, 23 nt, synthetic construct
  source 1..23: mol_type = other RNA
gggggacaccaggctgggcctgg

SEQ ID NO: 71071 - RNA, 23 nt, synthetic construct
  source 1..23: mol_type = other RNA
cagggggacaccaggctgggcct

SEQ ID NO: 71072 - RNA, 23 nt, synthetic construct
  source 1..23: mol_type = other RNA
gtccctggagtggaggagggcgt

SEQ ID NO: 71073 - RNA, 23 nt, synthetic construct
  source 1..23: mol_type = other RNA
ccctgggctggaggagggggtgg

SEQ ID NO: 71074 - RNA, 23 nt, synthetic construct
  source 1..23: mol_type = other RNA
atgtggggctgctgggcagcagg

SEQ ID NO: 71075 - RNA, 23 nt, synthetic construct
  source 1..23: mol_type = other RNA
gggggacaccaggctgggcctgg

SEQ ID NO: 71076 - RNA, 23 nt, synthetic construct
  source 1..23: mol_type = other RNA
cagggggacaccaggctgggcct

SEQ ID NO: 71077 - RNA, 23 nt, synthetic construct
  source 1..23: mol_type = other RNA
ccctgggctggaggagggggtga

SEQ ID NO: 71078 - RNA, 23 nt, synthetic construct
  source 1..23: mol_type = other RNA
atgtggggctgctgggcagcagg

SEQ ID NO: 71079 - RNA, 23 nt, synthetic construct
  source 1..23: mol_type = other RNA
gggggacaccaggctgggcctgg

SEQ ID NO: 71080 - RNA, 23 nt, synthetic construct
  source 1..23: mol_type = other RNA
cagggggacaccaggctgggcct

SEQ ID NO: 71081 - RNA, 23 nt, synthetic construct
  source 1..23: mol_type = other RNA
ccctgggctggaggagggggtgg

SEQ ID NO: 71082 - RNA, 23 nt, synthetic construct
  source 1..23: mol_type = other RNA
ggcaggctgctggggagcactgc

SEQ ID NO: 71083 - RNA, 23 nt, synthetic construct
  source 1..23: mol_type = other RNA
ccctgatgttttcaaaagtttcc

SEQ ID NO: 71084 - RNA, 23 nt, synthetic construct
  source 1..23: mol_type = other RNA
gatcctgtagttgtagcacatct

SEQ ID NO: 71085 - RNA, 23 nt, synthetic construct
  source 1..23: mol_type = other RNA
gggttctgtggagcctgcaggcg

SEQ ID NO: 71086 - RNA, 23 nt, synthetic construct
  source 1..23: mol_type = other RNA
gggccgatgtggggctgctgggc

SEQ ID NO: 71087 - RNA, 23 nt, synthetic construct
  source 1..23: mol_type = other RNA
gggccgatgtggggctgctgggc

SEQ ID NO: 71088 - RNA, 23 nt, synthetic construct
  source 1..23: mol_type = other RNA
gggccgatgtggggctgctgggc

SEQ ID NO: 71089 - RNA, 23 nt, synthetic construct
  source 1..23: mol_type = other RNA
gggccgatgtggggctgctgggc

SEQ ID NO: 71090 - RNA, 23 nt, synthetic construct
  source 1..23: mol_type = other RNA
atggggtagctgtagtccagcca

SEQ ID NO: 71091 - RNA, 23 nt, synthetic construct
  source 1..23: mol_type = other RNA
atggggtagctgtagtccagcca

SEQ ID NO: 71092 - RNA, 23 nt, synthetic construct
  source 1..23: mol_type = other RNA
atggggtagctgtagtccagcca

SEQ ID NO: 71093 - RNA, 23 nt, synthetic construct
  source 1..23: mol_type = other RNA
atggggtagctgtagtccagcca

SEQ ID NO: 71094 - RNA, 23 nt, synthetic construct
  source 1..23: mol_type = other RNA
gccgtggtggtcagcactttggg

SEQ ID NO: 71095 - RNA, 23 nt, synthetic construct
  source 1..23: mol_type = other RNA
ctggccaccgtgcagttctccag

SEQ ID NO: 71096 - RNA, 23 nt, synthetic construct
  source 1..23: mol_type = other RNA
ggatcagctcgtagctctccacg

SEQ ID NO: 71097 - RNA, 23 nt, synthetic construct
  source 1..23: mol_type = other RNA
caggaagatccccatgtagcgta

SEQ ID NO: 71098 - RNA, 23 nt, synthetic construct
  source 1..23: mol_type = other RNA
tggggaagacagtgacgggtgga

SEQ ID NO: 71099 - RNA, 23 nt, synthetic construct
  source 1..23: mol_type = other RNA
cactttgatgggcaggtgcttgt

SEQ ID NO: 71100 - RNA, 23 nt, synthetic construct
  source 1..23: mol_type = other RNA
tggccgtgtccccgccgtccagg

SEQ ID NO: 71101 - RNA, 23 nt, synthetic construct
  source 1..23: mol_type = other RNA
gctgtgagcgcactggatgccac

SEQ ID NO: 71102 - RNA, 23 nt, synthetic construct
  source 1..23: mol_type = other RNA
tgcccgaggggcaggcagccaga

SEQ ID NO: 71103 - RNA, 23 nt, synthetic construct
  source 1..23: mol_type = other RNA
ctctttggtgcccagcacatctt

SEQ ID NO: 71104 - RNA, 23 nt, synthetic construct
  source 1..23: mol_type = other RNA
caggctccgtgctggcactgagg

SEQ ID NO: 71105 - RNA, 23 nt, synthetic construct
  source 1..23: mol_type = other RNA
gacagacacagccggacacgcag

SEQ ID NO: 71106 - RNA, 23 nt, synthetic construct
  source 1..23: mol_type = other RNA
cacggcaggtcctggcactgcca

SEQ ID NO: 71107 - RNA, 23 nt, synthetic construct
  source 1..23: mol_type = other RNA
tggtggagtcaacctgggagcgg

SEQ ID NO: 71108 - RNA, 23 nt, synthetic construct
  source 1..23: mol_type = other RNA
gcaggcctcaaggctgtgagcgc

SEQ ID NO: 71109 - RNA, 23 nt, synthetic construct
  source 1..23: mol_type = other RNA
acatctggccctggtgggcgggg

SEQ ID NO: 71110 - RNA, 23 nt, synthetic construct
  source 1..23: mol_type = other RNA
ctgcccgaggggcaggcagccag

SEQ ID NO: 71111 - RNA, 23 nt, synthetic construct
  source 1..23: mol_type = other RNA
gcccgaggggcaggcagccagag

SEQ ID NO: 71112 - RNA, 23 nt, synthetic construct
  source 1..23: mol_type = other RNA
actcggccccaggggtgcccgcc

SEQ ID NO: 71113 - RNA, 23 nt, synthetic construct
  source 1..23: mol_type = other RNA
agggagtagagaagtgggagctg

SEQ ID NO: 71114 - RNA, 23 nt, synthetic construct
  source 1..23: mol_type = other RNA
gcaagggcaccgtctcctcgtgg

SEQ ID NO: 71115 - RNA, 23 nt, synthetic construct
  source 1..23: mol_type = other RNA
gtggaagaggctgtagggcagcc

SEQ ID NO: 71116 - RNA, 23 nt, synthetic construct
  source 1..23: mol_type = other RNA
tcaaggctgtgagcgcactggat

SEQ ID NO: 71117 - RNA, 23 nt, synthetic construct
  source 1..23: mol_type = other RNA
aaggccggccccagcagggtgcg

SEQ ID NO: 71118 - RNA, 23 nt, synthetic construct
  source 1..23: mol_type = other RNA
tgccggtggtcccacaggggatg

SEQ ID NO: 71119 - RNA, 23 nt, synthetic construct
  source 1..23: mol_type = other RNA
cactggggttccggcaggttttt

SEQ ID NO: 71120 - RNA, 23 nt, synthetic construct
  source 1..23: mol_type = other RNA
ggcattgtcacagccaggggcag

SEQ ID NO: 71121 - RNA, 23 nt, synthetic construct
  source 1..23: mol_type = other RNA
ggcccatccaacttctgcaggtt

SEQ ID NO: 71122 - RNA, 23 nt, synthetic construct
  source 1..23: mol_type = other RNA
gcagctgcgtgtagatggagttg

SEQ ID NO: 71123 - RNA, 23 nt, synthetic construct
  source 1..23: mol_type = other RNA
ctgaaacagcccacgtccagcgt

SEQ ID NO: 71124 - RNA, 23 nt, synthetic construct
  source 1..23: mol_type = other RNA
gctctttggtgcccagcacatct

SEQ ID NO: 71125 - RNA, 23 nt, synthetic construct
  source 1..23: mol_type = other RNA
cgtggccgtggtcctggaggtgg

SEQ ID NO: 71126 - RNA, 23 nt, synthetic construct
  source 1..23: mol_type = other RNA
cgtggccgtggtcctggaggtgg

SEQ ID NO: 71127 - RNA, 23 nt, synthetic construct
  source 1..23: mol_type = other RNA
ggatgcaggctgtggggtcagca

SEQ ID NO: 71128 - RNA, 23 nt, synthetic construct
  source 1..23: mol_type = other RNA
ggggccgatgtggggctgctggg

SEQ ID NO: 71129 - RNA, 23 nt, synthetic construct
  source 1..23: mol_type = other RNA
tggcccaactcccgcagggggac

SEQ ID NO: 71130 - RNA, 23 nt, synthetic construct
  source 1..23: mol_type = other RNA
ggggccgatgtggggctgctggg

SEQ ID NO: 71131 - RNA, 23 nt, synthetic construct
  source 1..23: mol_type = other RNA
tggcccaactcccgcagggggac

SEQ ID NO: 71132 - RNA, 23 nt, synthetic construct
  source 1..23: mol_type = other RNA
ggggccgatgtggggctgctggg

SEQ ID NO: 71133 - RNA, 23 nt, synthetic construct
  source 1..23: mol_type = other RNA
tggcccaactcccgcagggggac

SEQ ID NO: 71134 - RNA, 23 nt, synthetic construct
  source 1..23: mol_type = other RNA
ggggccgatgtggggctgctggg

SEQ ID NO: 71135 - RNA, 23 nt, synthetic construct
  source 1..23: mol_type = other RNA
gaggcactcggccccaggggtgc

SEQ ID NO: 71136 - RNA, 23 nt, synthetic construct
  source 1..23: mol_type = other RNA
ggtggctgtgcttgtcagcactg

SEQ ID NO: 71137 - RNA, 23 nt, synthetic construct
  source 1..23: mol_type = other RNA
ggtggctgtgcttgtcagcactg

SEQ ID NO: 71138 - RNA, 23 nt, synthetic construct
  source 1..23: mol_type = other RNA
ggcaggtttttaggcagggtgcc

SEQ ID NO: 71139 - RNA, 23 nt, synthetic construct
  source 1..23: mol_type = other RNA
tgcaggcctcaaggctgtgagcg

SEQ ID NO: 71140 - RNA, 23 nt, synthetic construct
  source 1..23: mol_type = other RNA
ccccggagtggaggagggcatgg

SEQ ID NO: 71141 - RNA, 23 nt, synthetic construct
  source 1..23: mol_type = other RNA
ccccggagtggaggagggcatgg

SEQ ID NO: 71142 - RNA, 23 nt, synthetic construct
  source 1..23: mol_type = other RNA
ctagaggagggtgttgccataga

SEQ ID NO: 71143 - RNA, 23 nt, synthetic construct
  source 1..23: mol_type = other RNA
ctagaggagggtgttgccataga

SEQ ID NO: 71144 - RNA, 23 nt, synthetic construct
  source 1..23: mol_type = other RNA
ctagaggagggtgttgccataga

SEQ ID NO: 71145 - RNA, 23 nt, synthetic construct
  source 1..23: mol_type = other RNA
ctagaggagggtgttgccataga

SEQ ID NO: 71146 - RNA, 23 nt, synthetic construct
  source 1..23: mol_type = other RNA
ctagaggagggtgttgccataga

SEQ ID NO: 71147 - RNA, 23 nt, synthetic construct
  source 1..23: mol_type = other RNA
cggtcacagtccacctgctggcc

SEQ ID NO: 71148 - RNA, 23 nt, synthetic construct
  source 1..23: mol_type = other RNA
ctgcaggttcccaaactggagcg

SEQ ID NO: 71149 - RNA, 23 nt, synthetic construct
  source 1..23: mol_type = other RNA
cccgaggggcaggcagccagagt

SEQ ID NO: 71150 - RNA, 23 nt, synthetic construct
  source 1..23: mol_type = other RNA
ggtcctgggtgtccccagagagg

SEQ ID NO: 71151 - RNA, 23 nt, synthetic construct
  source 1..23: mol_type = other RNA
gtgtggtggccgtggtggtcagc

SEQ ID NO: 71152 - RNA, 23 nt, synthetic construct
  source 1..23: mol_type = other RNA
gccgtgtccccgccgtccaggct

SEQ ID NO: 71153 - RNA, 23 nt, synthetic construct
  source 1..23: mol_type = other RNA
acttggtgcagacgccgtccctc

SEQ ID NO: 71154 - RNA, 23 nt, synthetic construct
  source 1..23: mol_type = other RNA
gtgggtgcaggggcactgcccga

SEQ ID NO: 71155 - RNA, 23 nt, synthetic construct
  source 1..23: mol_type = other RNA
ggctgccgacaggggcagctgcg

SEQ ID NO: 71156 - RNA, 23 nt, synthetic construct
  source 1..23: mol_type = other RNA
agagccggtggctgcactcccac

SEQ ID NO: 71157 - RNA, 23 nt, synthetic construct
  source 1..23: mol_type = other RNA
tcttccggtcccaggacacggcc

SEQ ID NO: 71158 - RNA, 23 nt, synthetic construct
  source 1..23: mol_type = other RNA
ggtggccgtggtggtcagcactt

SEQ ID NO: 71159 - RNA, 23 nt, synthetic construct
  source 1..23: mol_type = other RNA
ttcttgctgaaaccgctgctcac

SEQ ID NO: 71160 - RNA, 23 nt, synthetic construct
  source 1..23: mol_type = other RNA
agggcactgtcctctccgttcca

SEQ ID NO: 71161 - RNA, 23 nt, synthetic construct
  source 1..23: mol_type = other RNA
gagctggtggccggggtgctggg

SEQ ID NO: 71162 - RNA, 23 nt, synthetic construct
  source 1..23: mol_type = other RNA
gagctggtggccggggtgctggg

SEQ ID NO: 71163 - RNA, 23 nt, synthetic construct
  source 1..23: mol_type = other RNA
gagctggtggccggggtgctggg

SEQ ID NO: 71164 - RNA, 23 nt, synthetic construct
  source 1..23: mol_type = other RNA
gagctggtggccggggtgctggg

SEQ ID NO: 71165 - RNA, 23 nt, synthetic construct
  source 1..23: mol_type = other RNA
ctgaggctccccctgcagctgga

SEQ ID NO: 71166 - RNA, 23 nt, synthetic construct
  source 1..23: mol_type = other RNA
tgagagggtggggactgctgtgg

SEQ ID NO: 71167 - RNA, 23 nt, synthetic construct
  source 1..23: mol_type = other RNA
tgcagttctccagggtccaggtc

SEQ ID NO: 71168 - RNA, 23 nt, synthetic construct
  source 1..23: mol_type = other RNA
agcagggcactgtcctctccgtt

SEQ ID NO: 71169 - RNA, 23 nt, synthetic construct
  source 1..23: mol_type = other RNA
gcgctgggggttggagcaggtgt

SEQ ID NO: 71170 - RNA, 23 nt, synthetic construct
  source 1..23: mol_type = other RNA
gggggcagaagcagccgtccaca

SEQ ID NO: 71171 - RNA, 23 nt, synthetic construct
  source 1..23: mol_type = other RNA
cggcaggtcctggcactgccata

SEQ ID NO: 71172 - RNA, 23 nt, synthetic construct
  source 1..23: mol_type = other RNA
caccagctgcaccagcagctgca

SEQ ID NO: 71173 - RNA, 23 nt, synthetic construct
  source 1..23: mol_type = other RNA
gcagagccggtggctgcactccc

SEQ ID NO: 71174 - RNA, 23 nt, synthetic construct
  source 1..23: mol_type = other RNA
taccctctctgcctcaggttttc

SEQ ID NO: 71175 - RNA, 23 nt, synthetic construct
  source 1..23: mol_type = other RNA
tggtggtggtggccgtctccagc

SEQ ID NO: 71176 - RNA, 23 nt, synthetic construct
  source 1..23: mol_type = other RNA
gtggggactgctgtggtgctggc

SEQ ID NO: 71177 - RNA, 23 nt, synthetic construct
  source 1..23: mol_type = other RNA
ccctggagtggaggagggcgtgg

SEQ ID NO: 71178 - RNA, 23 nt, synthetic construct
  source 1..23: mol_type = other RNA
caggctgctggggagcactgcag

SEQ ID NO: 71179 - RNA, 23 nt, synthetic construct
  source 1..23: mol_type = other RNA
ccgtgcagttctccagggtccag

SEQ ID NO: 71180 - RNA, 23 nt, synthetic construct
  source 1..23: mol_type = other RNA
ctccaggctctggcagggcacct

SEQ ID NO: 71181 - RNA, 23 nt, synthetic construct
  source 1..23: mol_type = other RNA
tgcaggctgtggggtcagcaaat

SEQ ID NO: 71182 - RNA, 23 nt, synthetic construct
  source 1..23: mol_type = other RNA
tcctggcagcaggtgcactggtg

SEQ ID NO: 71183 - RNA, 23 nt, synthetic construct
  source 1..23: mol_type = other RNA
agcaggtgcaggagctgcaggtg

SEQ ID NO: 71184 - RNA, 23 nt, synthetic construct
  source 1..23: mol_type = other RNA
ccagctgcaccagcagctgcagc

SEQ ID NO: 71185 - RNA, 23 nt, synthetic construct
  source 1..23: mol_type = other RNA
catctggccctggtgggcggggt

SEQ ID NO: 71186 - RNA, 23 nt, synthetic construct
  source 1..23: mol_type = other RNA
gctgcactcccacctccggttcc

SEQ ID NO: 71187 - RNA, 23 nt, synthetic construct
  source 1..23: mol_type = other RNA
gcacttcatctggtcctcattga

SEQ ID NO: 71188 - RNA, 23 nt, synthetic construct
  source 1..23: mol_type = other RNA
taggtgcaggtgcaggcctcaag

SEQ ID NO: 71189 - RNA, 23 nt, synthetic construct
  source 1..23: mol_type = other RNA
tggcaggtggtggtacctggggc

SEQ ID NO: 71190 - RNA, 23 nt, synthetic construct
  source 1..23: mol_type = other RNA
ggtgtggtggccgtggtggtcag

SEQ ID NO: 71191 - RNA, 23 nt, synthetic construct
  source 1..23: mol_type = other RNA
ggtcctggaggtggccgtggtgt

SEQ ID NO: 71192 - RNA, 23 nt, synthetic construct
  source 1..23: mol_type = other RNA
ggtcctggaggtggccgtggtgt

SEQ ID NO: 71193 - RNA, 23 nt, synthetic construct
  source 1..23: mol_type = other RNA
gaggactgaggaggacacagtgg

SEQ ID NO: 71194 - RNA, 23 nt, synthetic construct
  source 1..23: mol_type = other RNA
gcaggctgtggggtcagcaaatg

SEQ ID NO: 71195 - RNA, 23 nt, synthetic construct
  source 1..23: mol_type = other RNA
tcctgaggctccccctgcagctg

SEQ ID NO: 71196 - RNA, 23 nt, synthetic construct
  source 1..23: mol_type = other RNA
ttcctgaggctccccctgcagct

SEQ ID NO: 71197 - RNA, 23 nt, synthetic construct
  source 1..23: mol_type = other RNA
gagcaggtgcaggagctgcaggt

SEQ ID NO: 71198 - RNA, 23 nt, synthetic construct
  source 1..23: mol_type = other RNA
cccgcacaggccgcagaccctgc

SEQ ID NO: 71199 - RNA, 23 nt, synthetic construct
  source 1..23: mol_type = other RNA
ttcccacacaggccgcacatctg

SEQ ID NO: 71200 - RNA, 23 nt, synthetic construct
  source 1..23: mol_type = other RNA
ttggtgcaggtgccgcactggcc

SEQ ID NO: 71201 - RNA, 23 nt, synthetic construct
  source 1..23: mol_type = other RNA
gtcgtcgaagttcccgcacaggc

SEQ ID NO: 71202 - RNA, 23 nt, synthetic construct
  source 1..23: mol_type = other RNA
ccagctccagcagggcactgtcc

SEQ ID NO: 71203 - RNA, 23 nt, synthetic construct
  source 1..23: mol_type = other RNA
tctgtgaggatccaggtcgtccc

SEQ ID NO: 71204 - RNA, 23 nt, synthetic construct
  source 1..23: mol_type = other RNA
tctgtgaggatccaggtcgtccc

SEQ ID NO: 71205 - RNA, 23 nt, synthetic construct
  source 1..23: mol_type = other RNA
tctgtgaggatccaggtcgtccc

SEQ ID NO: 71206 - RNA, 23 nt, synthetic construct
  source 1..23: mol_type = other RNA
tctgtgaggatccaggtcgtccc

SEQ ID NO: 71207 - RNA, 23 nt, synthetic construct
  source 1..23: mol_type = other RNA
tctgtgaggatccaggtcgtccc

SEQ ID NO: 71208 - RNA, 23 nt, synthetic construct
  source 1..23: mol_type = other RNA
ctgtgaggatccaggtcgtcccc

SEQ ID NO: 71209 - RNA, 23 nt, synthetic construct
  source 1..23: mol_type = other RNA
ctgtgaggatccaggtcgtccct

SEQ ID NO: 71210 - RNA, 23 nt, synthetic construct
  source 1..23: mol_type = other RNA
ctgtgaggatccaggtcgtcccc

SEQ ID NO: 71211 - RNA, 23 nt, synthetic construct
  source 1..23: mol_type = other RNA
ctgtgaggatccaggtcgtcccc

SEQ ID NO: 71212 - RNA, 23 nt, synthetic construct
  source 1..23: mol_type = other RNA
ctgtgaggatccaggtcgtcccc

SEQ ID NO: 71213 - RNA, 23 nt, synthetic construct
  source 1..23: mol_type = other RNA
caggctgcaggtcagcacctgcc

SEQ ID NO: 71214 - RNA, 23 nt, synthetic construct
  source 1..23: mol_type = other RNA
ctctgtgaggatccaggtcgtcc

SEQ ID NO: 71215 - RNA, 23 nt, synthetic construct
  source 1..23: mol_type = other RNA
ctctgtgaggatccaggtcgtcc

SEQ ID NO: 71216 - RNA, 23 nt, synthetic construct
  source 1..23: mol_type = other RNA
ctctgtgaggatccaggtcgtcc

SEQ ID NO: 71217 - RNA, 23 nt, synthetic construct
  source 1..23: mol_type = other RNA
ctctgtgaggatccaggtcgtcc

SEQ ID NO: 71218 - RNA, 23 nt, synthetic construct
  source 1..23: mol_type = other RNA
ctctgtgaggatccaggtcgtcc

SEQ ID NO: 71219 - RNA, 23 nt, synthetic construct
  source 1..23: mol_type = other RNA
tcggctctgtgaggatccaggtg

SEQ ID NO: 71220 - RNA, 23 nt, synthetic construct
  source 1..23: mol_type = other RNA
tcggctctgtgaggatccaggtg

SEQ ID NO: 71221 - RNA, 23 nt, synthetic construct
  source 1..23: mol_type = other RNA
tcggctctgtgaggatccaggtg

SEQ ID NO: 71222 - RNA, 23 nt, synthetic construct
  source 1..23: mol_type = other RNA
tcggctctgtgaggatccaggtg

SEQ ID NO: 71223 - RNA, 23 nt, synthetic construct
  source 1..23: mol_type = other RNA
tttatttgcaaaactgggctggg

SEQ ID NO: 71224 - RNA, 23 nt, synthetic construct
  source 1..23: mol_type = other RNA
ccgtctccaggctgcaggtcagc

SEQ ID NO: 71225 - RNA, 23 nt, synthetic construct
  source 1..23: mol_type = other RNA
agcagagggggctttgggatgct

SEQ ID NO: 71226 - RNA, 23 nt, synthetic construct
  source 1..23: mol_type = other RNA
cagccccgtctccaggctgcagg

SEQ ID NO: 71227 - RNA, 23 nt, synthetic construct
  source 1..23: mol_type = other RNA
tgggctctgtgaggatccaggtg

SEQ ID NO: 71228 - RNA, 23 nt, synthetic construct
  source 1..23: mol_type = other RNA
cagggccctgggtctctgcctgc

SEQ ID NO: 71229 - RNA, 23 nt, synthetic construct
  source 1..23: mol_type = other RNA
ggctgcaggtcagcacctgcccg

SEQ ID NO: 71230 - RNA, 23 nt, synthetic construct
  source 1..23: mol_type = other RNA
tccaggctgcaggtcagcacctg

SEQ ID NO: 71231 - RNA, 23 nt, synthetic construct
  source 1..23: mol_type = other RNA
tctccaggctgcaggtcagcacc

SEQ ID NO: 71232 - RNA, 23 nt, synthetic construct
  source 1..23: mol_type = other RNA
cccgtctccaggctgcaggtcag

SEQ ID NO: 71233 - RNA, 23 nt, synthetic construct
  source 1..23: mol_type = other RNA
tcagccccgtctccaggctgcag

SEQ ID NO: 71234 - RNA, 23 nt, synthetic construct
  source 1..23: mol_type = other RNA
gtggtcagctctgtgaggatcca

SEQ ID NO: 71235 - RNA, 23 nt, synthetic construct
  source 1..23: mol_type = other RNA
gtggtcagctctgtgaggatcca

SEQ ID NO: 71236 - RNA, 23 nt, synthetic construct
  source 1..23: mol_type = other RNA
gtggtcagctctgtgaggatcca

SEQ ID NO: 71237 - RNA, 23 nt, synthetic construct
  source 1..23: mol_type = other RNA
gtggtcagctctgtgaggatcca

SEQ ID NO: 71238 - RNA, 23 nt, synthetic construct
  source 1..23: mol_type = other RNA
gtggtcagctctgtgaggatcca

SEQ ID NO: 71239 - RNA, 23 nt, synthetic construct
  source 1..23: mol_type = other RNA
ggaggagggtgtggccgtggaat

SEQ ID NO: 71240 - RNA, 23 nt, synthetic construct
  source 1..23: mol_type = other RNA
ctttggtgggtgggcaggtgagg

SEQ ID NO: 71241 - RNA, 23 nt, synthetic construct
  source 1..23: mol_type = other RNA
caaaactgggctgggttgagcag

SEQ ID NO: 71242 - RNA, 23 nt, synthetic construct
  source 1..23: mol_type = other RNA
gtttatttgcaaaactgggctgg

SEQ ID NO: 71243 - RNA, 23 nt, synthetic construct
  source 1..23: mol_type = other RNA
aggctgcaggtcagcacctgccc

SEQ ID NO: 71244 - RNA, 23 nt, synthetic construct
  source 1..23: mol_type = other RNA
gtctccaggctgcaggtcagcac

SEQ ID NO: 71245 - RNA, 23 nt, synthetic construct
  source 1..23: mol_type = other RNA
gacagagcatggggatggaggca

SEQ ID NO: 71246 - RNA, 23 nt, synthetic construct
  source 1..23: mol_type = other RNA
ccgccagagccaacaccagcgtc

SEQ ID NO: 71247 - RNA, 23 nt, synthetic construct
  source 1..23: mol_type = other RNA
aggaggacacagtggacacgctg

SEQ ID NO: 71248 - RNA, 23 nt, synthetic construct
  source 1..23: mol_type = other RNA
gccccgtctccaggctgcaggtc

SEQ ID NO: 71249 - RNA, 23 nt, synthetic construct
  source 1..23: mol_type = other RNA
acgtccagcgtgtggcagctccg

SEQ ID NO: 71250 - RNA, 23 nt, synthetic construct
  source 1..23: mol_type = other RNA
aggtgggccacaggctctcccag

SEQ ID NO: 71251 - RNA, 23 nt, synthetic construct
  source 1..23: mol_type = other RNA
aaactgggctgggttgagcagag

SEQ ID NO: 71252 - RNA, 23 nt, synthetic construct
  source 1..23: mol_type = other RNA
tgcaggtcagcacctgcccgacc

SEQ ID NO: 71253 - RNA, 23 nt, synthetic construct
  source 1..23: mol_type = other RNA
cagggcaggggcttgcactgcac

SEQ ID NO: 71254 - RNA, 23 nt, synthetic construct
  source 1..23: mol_type = other RNA
ggtcctgctggcccctcaccctt

SEQ ID NO: 71255 - RNA, 23 nt, synthetic construct
  source 1..23: mol_type = other RNA
gatttcatagttgaagcacatct

SEQ ID NO: 71256 - RNA, 23 nt, synthetic construct
  source 1..23: mol_type = other RNA
gatttcatagttgaagcacatct

SEQ ID NO: 71257 - RNA, 23 nt, synthetic construct
  source 1..23: mol_type = other RNA
gatttcatagttgaagcacatct

SEQ ID NO: 71258 - RNA, 23 nt, synthetic construct
  source 1..23: mol_type = other RNA
gatttcatagttgaagcacatct

SEQ ID NO: 71259 - RNA, 23 nt, synthetic construct
  source 1..23: mol_type = other RNA
acagggcaggggcttgcactgca

SEQ ID NO: 71260 - RNA, 23 nt, synthetic construct
  source 1..23: mol_type = other RNA
aggggtcctgctggcccctcacc

SEQ ID NO: 71261 - RNA, 23 nt, synthetic construct
  source 1..23: mol_type = other RNA
ggcaaggccaaggtgggccacag

SEQ ID NO: 71262 - RNA, 23 nt, synthetic construct
  source 1..23: mol_type = other RNA
ctgcaggtcagcacctgcccgac

SEQ ID NO: 71263 - RNA, 23 nt, synthetic construct
  source 1..23: mol_type = other RNA
ctccaggctgcaggtcagcacct

SEQ ID NO: 71264 - RNA, 23 nt, synthetic construct
  source 1..23: mol_type = other RNA
gagtggaggagggcatggccgta

SEQ ID NO: 71265 - RNA, 23 nt, synthetic construct
  source 1..23: mol_type = other RNA
gagtggaggagggcatggccgta

SEQ ID NO: 71266 - RNA, 23 nt, synthetic construct
  source 1..23: mol_type = other RNA
cgtctccaggctgcaggtcagca

SEQ ID NO: 71267 - RNA, 23 nt, synthetic construct
  source 1..23: mol_type = other RNA
tctggcagttctccgctgtgggg

SEQ ID NO: 71268 - RNA, 23 nt, synthetic construct
  source 1..23: mol_type = other RNA
ctctggcagttctccgctgtggg

SEQ ID NO: 71269 - RNA, 23 nt, synthetic construct
  source 1..23: mol_type = other RNA
ggccggggtgctggggcagtggc

SEQ ID NO: 71270 - RNA, 23 nt, synthetic construct
  source 1..23: mol_type = other RNA
ggccggggtgctggggcagtggc

SEQ ID NO: 71271 - RNA, 23 nt, synthetic construct
  source 1..23: mol_type = other RNA
ggccggggtgctggggcagtggc

SEQ ID NO: 71272 - RNA, 23 nt, synthetic construct
  source 1..23: mol_type = other RNA
ggccggggtgctggggcagtggc

SEQ ID NO: 71273 - RNA, 23 nt, synthetic construct
  source 1..23: mol_type = other RNA
ttctccacactgagggagcaggg

SEQ ID NO: 71274 - RNA, 23 nt, synthetic construct
  source 1..23: mol_type = other RNA
ttgtggtggccgtggtggtaagc

SEQ ID NO: 71275 - RNA, 23 nt, synthetic construct
  source 1..23: mol_type = other RNA
ttgtggtggccgtggtggtaagc

SEQ ID NO: 71276 - RNA, 23 nt, synthetic construct
  source 1..23: mol_type = other RNA
agtctctggagtggaggagggtg

SEQ ID NO: 71277 - RNA, 23 nt, synthetic construct
  source 1..23: mol_type = other RNA
agtctctggagtggaggagggtg

SEQ ID NO: 71278 - RNA, 23 nt, synthetic construct
  source 1..23: mol_type = other RNA
agtctctggagtggaggagggtg

SEQ ID NO: 71279 - RNA, 23 nt, synthetic construct
  source 1..23: mol_type = other RNA
agtctctggagtggaggagggtg

SEQ ID NO: 71280 - RNA, 23 nt, synthetic construct
  source 1..23: mol_type = other RNA
gaggaagaggggatggctgtaac

SEQ ID NO: 71281 - RNA, 23 nt, synthetic construct
  source 1..23: mol_type = other RNA
ggccgtggtggtaagcactgtgg

SEQ ID NO: 71282 - RNA, 23 nt, synthetic construct
  source 1..23: mol_type = other RNA
ggccgtggtggtaagcactgtgg

SEQ ID NO: 71283 - RNA, 23 nt, synthetic construct
  source 1..23: mol_type = other RNA
ggccgccgtgggtgcaggggcac

SEQ ID NO: 71284 - RNA, 23 nt, synthetic construct
  source 1..23: mol_type = other RNA
acgcactccccacagcactgccc

SEQ ID NO: 71285 - RNA, 23 nt, synthetic construct
  source 1..23: mol_type = other RNA
tccacactgagggagcaggggtc

SEQ ID NO: 71286 - RNA, 23 nt, synthetic construct
  source 1..23: mol_type = other RNA
cggcactcgaggcccaggggctg

SEQ ID NO: 71287 - RNA, 23 nt, synthetic construct
  source 1..23: mol_type = other RNA
cggcactcgaggcccaggggctg

SEQ ID NO: 71288 - RNA, 23 nt, synthetic construct
  source 1..23: mol_type = other RNA
cggcactcgaggcccaggggctg

SEQ ID NO: 71289 - RNA, 23 nt, synthetic construct
  source 1..23: mol_type = other RNA
cggcactcgaggcccaggggctg

SEQ ID NO: 71290 - RNA, 23 nt, synthetic construct
  source 1..23: mol_type = other RNA
ctccacactgagggagcaggggt

SEQ ID NO: 71291 - RNA, 23 nt, synthetic construct
  source 1..23: mol_type = other RNA
tccgggggcagagctcagggcac

SEQ ID NO: 71292 - RNA, 23 nt, synthetic construct
  source 1..23: mol_type = other RNA
ccacactgagggagcaggggtcc

SEQ ID NO: 71293 - RNA, 23 nt, synthetic construct
  source 1..23: mol_type = other RNA
ctcgaggcccaggggctgctcac

SEQ ID NO: 71294 - RNA, 23 nt, synthetic construct
  source 1..23: mol_type = other RNA
ctcgaggcccaggggctgctcac

SEQ ID NO: 71295 - RNA, 23 nt, synthetic construct
  source 1..23: mol_type = other RNA
ctcgaggcccaggggctgctcac

SEQ ID NO: 71296 - RNA, 23 nt, synthetic construct
  source 1..23: mol_type = other RNA
ctcgaggcccaggggctgctcac

SEQ ID NO: 71297 - RNA, 23 nt, synthetic construct
  source 1..23: mol_type = other RNA
gctggggagcactgcaggggtgc

SEQ ID NO: 71298 - RNA, 23 nt, synthetic construct
  source 1..23: mol_type = other RNA
gctgctggggagcactgcagggg

SEQ ID NO: 71299 - RNA, 23 nt, synthetic construct
  source 1..23: mol_type = other RNA
gcactccccacagcactgcccgg

SEQ ID NO: 71300 - RNA, 23 nt, synthetic construct
  source 1..23: mol_type = other RNA
tgcagtccctggactggaggagg

SEQ ID NO: 71301 - RNA, 23 nt, synthetic construct
  source 1..23: mol_type = other RNA
gttgtggtggccgtggtggtaag

SEQ ID NO: 71302 - RNA, 23 nt, synthetic construct
  source 1..23: mol_type = other RNA
tgcagtccctggactggaggagg

SEQ ID NO: 71303 - RNA, 23 nt, synthetic construct
  source 1..23: mol_type = other RNA
gttgtggtggccgtggtggtaag

SEQ ID NO: 71304 - RNA, 23 nt, synthetic construct
  source 1..23: mol_type = other RNA
tgcagtccctggactggaggagg

SEQ ID NO: 71305 - RNA, 23 nt, synthetic construct
  source 1..23: mol_type = other RNA
tgggtgtggtggtctgtgctggg

SEQ ID NO: 71306 - RNA, 23 nt, synthetic construct
  source 1..23: mol_type = other RNA
cctggtcgatgcttacctcgggg

SEQ ID NO: 71307 - RNA, 23 nt, synthetic construct
  source 1..23: mol_type = other RNA
cacctgcccgacctggtcgatgc

SEQ ID NO: 71308 - RNA, 23 nt, synthetic construct
  source 1..23: mol_type = other RNA
ccagtggatgcagtcgtagtggc

SEQ ID NO: 71309 - RNA, 23 nt, synthetic construct
  source 1..23: mol_type = other RNA
cgcagtcgtagtggctgttgtgg

SEQ ID NO: 71310 - RNA, 23 nt, synthetic construct
  source 1..23: mol_type = other RNA
tgcagtcgtagtggctgttgtgg

SEQ ID NO: 71311 - RNA, 23 nt, synthetic construct
  source 1..23: mol_type = other RNA
cgcagtcgtagtggctgttgtgg

SEQ ID NO: 71312 - RNA, 23 nt, synthetic construct
  source 1..23: mol_type = other RNA
tgtctggtcttcgttcttgcagg

SEQ ID NO: 71313 - RNA, 23 nt, synthetic construct
  source 1..23: mol_type = other RNA
catgtccccgcctgcaacccctg

SEQ ID NO: 71314 - RNA, 23 nt, synthetic construct
  source 1..23: mol_type = other RNA
ggagttgaggagggcgtggccgt

SEQ ID NO: 71315 - RNA, 23 nt, synthetic construct
  source 1..23: mol_type = other RNA
gtggtcggctttgtgaggatcca

SEQ ID NO: 71316 - RNA, 23 nt, synthetic construct
  source 1..23: mol_type = other RNA
ggagttgaggagggcgtggccgt

SEQ ID NO: 71317 - RNA, 23 nt, synthetic construct
  source 1..23: mol_type = other RNA
gagttgaggagggcgtggccgtg

SEQ ID NO: 71318 - RNA, 23 nt, synthetic construct
  source 1..23: mol_type = other RNA
tgtggtcggctttgtgaggatcc

SEQ ID NO: 71319 - RNA, 23 nt, synthetic construct
  source 1..23: mol_type = other RNA
gagttgaggagggcgtggccgta

SEQ ID NO: 71320 - RNA, 23 nt, synthetic construct
  source 1..23: mol_type = other RNA
cggggtcacccatagggtggtct

SEQ ID NO: 71321 - RNA, 23 nt, synthetic construct
  source 1..23: mol_type = other RNA
acccagtctgcgaggtgagggcc

SEQ ID NO: 71322 - RNA, 23 nt, synthetic construct
  source 1..23: mol_type = other RNA
ccatgtccccgcctgcaacccct

SEQ ID NO: 71323 - RNA, 23 nt, synthetic construct
  source 1..23: mol_type = other RNA
tcgtcacagcaaagcacacgcac

SEQ ID NO: 71324 - RNA, 23 nt, synthetic construct
  source 1..23: mol_type = other RNA
aacccctgaggttgggaagtcca

SEQ ID NO: 71325 - RNA, 23 nt, synthetic construct
  source 1..23: mol_type = other RNA
tccatgtccccgcctgcaacccc

SEQ ID NO: 71326 - RNA, 23 nt, synthetic construct
  source 1..23: mol_type = other RNA
gtctggtcttcgttcttgcaggt

SEQ ID NO: 71327 - RNA, 23 nt, synthetic construct
  source 1..23: mol_type = other RNA
tgaacctgcctgtctggtcttcg

SEQ ID NO: 71328 - RNA, 23 nt, synthetic construct
  source 1..23: mol_type = other RNA
cgttgtagttgaagcacatgttg

SEQ ID NO: 71329 - RNA, 23 nt, synthetic construct
  source 1..23: mol_type = other RNA
gcacgttgtagttgaagcacatg

SEQ ID NO: 71330 - RNA, 23 nt, synthetic construct
  source 1..23: mol_type = other RNA
ctgtagtcgtcacagcaaagcac

SEQ ID NO: 71331 - RNA, 23 nt, synthetic construct
  source 1..23: mol_type = other RNA
ggctgtagtcgtcacagcaaagc

SEQ ID NO: 71332 - RNA, 23 nt, synthetic construct
  source 1..23: mol_type = other RNA
atccaggtcgtccccggagttga

SEQ ID NO: 71333 - RNA, 23 nt, synthetic construct
  source 1..23: mol_type = other RNA
ggctttgtgaggatccaggtcgt

SEQ ID NO: 71334 - RNA, 23 nt, synthetic construct
  source 1..23: mol_type = other RNA
ggatccagtggacgcagtcgtag

SEQ ID NO: 71335 - RNA, 23 nt, synthetic construct
  source 1..23: mol_type = other RNA
atccaggtcgtccccggagtgga

SEQ ID NO: 71336 - RNA, 23 nt, synthetic construct
  source 1..23: mol_type = other RNA
atccaggtcgtccccggagtgga

SEQ ID NO: 71337 - RNA, 23 nt, synthetic construct
  source 1..23: mol_type = other RNA
ggtggctgtgatcgtagtggccg

SEQ ID NO: 71338 - RNA, 23 nt, synthetic construct
  source 1..23: mol_type = other RNA
atccaggtcgtccccggagttga

SEQ ID NO: 71339 - RNA, 23 nt, synthetic construct
  source 1..23: mol_type = other RNA
agctttgtgaggatccaggtcgt

SEQ ID NO: 71340 - RNA, 23 nt, synthetic construct
  source 1..23: mol_type = other RNA
atccaggtcgtccccggagtgga

SEQ ID NO: 71341 - RNA, 23 nt, synthetic construct
  source 1..23: mol_type = other RNA
cagtggatgcagtcgtagtggct

SEQ ID NO: 71342 - RNA, 23 nt, synthetic construct
  source 1..23: mol_type = other RNA
tccagtggatgcagtcgtagtgg

SEQ ID NO: 71343 - RNA, 23 nt, synthetic construct
  source 1..23: mol_type = other RNA
atccaggtcgtccccggagtgga

SEQ ID NO: 71344 - RNA, 23 nt, synthetic construct
  source 1..23: mol_type = other RNA
ggatccagtggacgcagtcgtag

SEQ ID NO: 71345 - RNA, 23 nt, synthetic construct
  source 1..23: mol_type = other RNA
gaaagggctggagtcgagtgctg

SEQ ID NO: 71346 - RNA, 23 nt, synthetic construct
  source 1..23: mol_type = other RNA
gagctggtggctggggtactggg

SEQ ID NO: 71347 - RNA, 23 nt, synthetic construct
  source 1..23: mol_type = other RNA
cctgcaacccctgaggttgggaa

SEQ ID NO: 71348 - RNA, 23 nt, synthetic construct
  source 1..23: mol_type = other RNA
cctgcctgtctggtcttcgttct

SEQ ID NO: 71349 - RNA, 23 nt, synthetic construct
  source 1..23: mol_type = other RNA
aggatccaggtcgtccccggagt

SEQ ID NO: 71350 - RNA, 23 nt, synthetic construct
  source 1..23: mol_type = other RNA
aggatccaggtcgtccccggagt

SEQ ID NO: 71351 - RNA, 23 nt, synthetic construct
  source 1..23: mol_type = other RNA
gtcagctctgtgaggatccaggt

SEQ ID NO: 71352 - RNA, 23 nt, synthetic construct
  source 1..23: mol_type = other RNA
gctgttgtggtcagctctgtgag

SEQ ID NO: 71353 - RNA, 23 nt, synthetic construct
  source 1..23: mol_type = other RNA
aggatccaggtcgtccccggagt

SEQ ID NO: 71354 - RNA, 23 nt, synthetic construct
  source 1..23: mol_type = other RNA
gtcagctctgtgaggatccaggt

SEQ ID NO: 71355 - RNA, 23 nt, synthetic construct
  source 1..23: mol_type = other RNA
aggatccaggtcgtccccggagt

SEQ ID NO: 71356 - RNA, 23 nt, synthetic construct
  source 1..23: mol_type = other RNA
aggatccaggtcgtccccggagt

SEQ ID NO: 71357 - RNA, 23 nt, synthetic construct
  source 1..23: mol_type = other RNA
gtcagctctgtgaggatccaggt

SEQ ID NO: 71358 - RNA, 23 nt, synthetic construct
  source 1..23: mol_type = other RNA
gctgttgtggtcagctctgtgag

SEQ ID NO: 71359 - RNA, 23 nt, synthetic construct
  source 1..23: mol_type = other RNA
aggatccaggtcgtccccggagt

SEQ ID NO: 71360 - RNA, 23 nt, synthetic construct
  source 1..23: mol_type = other RNA
gtcagctctgtgaggatccaggt

SEQ ID NO: 71361 - RNA, 23 nt, synthetic construct
  source 1..23: mol_type = other RNA
gtcagctctgtgaggatccaggt

SEQ ID NO: 71362 - RNA, 23 nt, synthetic construct
  source 1..23: mol_type = other RNA
gctgttgtggtcagctctgtgag

SEQ ID NO: 71363 - RNA, 23 nt, synthetic construct
  source 1..23: mol_type = other RNA
ttgtagtggctgttgtggtcagc

SEQ ID NO: 71364 - RNA, 23 nt, synthetic construct
  source 1..23: mol_type = other RNA
cgccgtccctccagtcgctgagc

SEQ ID NO: 71365 - RNA, 23 nt, synthetic construct
  source 1..23: mol_type = other RNA
ccgacctggtcgatgcttacctc

SEQ ID NO: 71366 - RNA, 23 nt, synthetic construct
  source 1..23: mol_type = other RNA
tctggtcttcgttcttgcaggtc

SEQ ID NO: 71367 - RNA, 23 nt, synthetic construct
  source 1..23: mol_type = other RNA
cgtcacagcaaagcacacgcacg

SEQ ID NO: 71368 - RNA, 23 nt, synthetic construct
  source 1..23: mol_type = other RNA
tcgtccccggagttgaggagggc

SEQ ID NO: 71369 - RNA, 23 nt, synthetic construct
  source 1..23: mol_type = other RNA
tcgtccccggagttgaggagggc

SEQ ID NO: 71370 - RNA, 23 nt, synthetic construct
  source 1..23: mol_type = other RNA
gtctcggggcagcaggggttctc

SEQ ID NO: 71371 - RNA, 23 nt, synthetic construct
  source 1..23: mol_type = other RNA
gcaggtcagccccgtctccaggc

SEQ ID NO: 71372 - RNA, 23 nt, synthetic construct
  source 1..23: mol_type = other RNA
tgtagtcgtcacagcaaagcaca

SEQ ID NO: 71373 - RNA, 23 nt, synthetic construct
  source 1..23: mol_type = other RNA
cggagttgaggagggcgtggccg

SEQ ID NO: 71374 - RNA, 23 nt, synthetic construct
  source 1..23: mol_type = other RNA
cccggagttgaggagggcgtggc

SEQ ID NO: 71375 - RNA, 23 nt, synthetic construct
  source 1..23: mol_type = other RNA
cggagttgaggagggcgtggccg

SEQ ID NO: 71376 - RNA, 23 nt, synthetic construct
  source 1..23: mol_type = other RNA
cccggagttgaggagggcgtggc

SEQ ID NO: 71377 - RNA, 23 nt, synthetic construct
  source 1..23: mol_type = other RNA
tggacttgtagtggatgctgagg

SEQ ID NO: 71378 - RNA, 23 nt, synthetic construct
  source 1..23: mol_type = other RNA
gacccagtctgcgaggtgagggc

SEQ ID NO: 71379 - RNA, 23 nt, synthetic construct
  source 1..23: mol_type = other RNA
tggtcttcgttcttgcaggtcag

SEQ ID NO: 71380 - RNA, 23 nt, synthetic construct
  source 1..23: mol_type = other RNA
tcacagcaaagcacacgcacgtt

SEQ ID NO: 71381 - RNA, 23 nt, synthetic construct
  source 1..23: mol_type = other RNA
agtcgtagtggctgttgtggtcg

SEQ ID NO: 71382 - RNA, 23 nt, synthetic construct
  source 1..23: mol_type = other RNA
agtcgtagtggctgttgtggtca

SEQ ID NO: 71383 - RNA, 23 nt, synthetic construct
  source 1..23: mol_type = other RNA
agtcgtagtggctgttgtggtca

SEQ ID NO: 71384 - RNA, 23 nt, synthetic construct
  source 1..23: mol_type = other RNA
agtcgtagtggctgttgtggtca

SEQ ID NO: 71385 - RNA, 23 nt, synthetic construct
  source 1..23: mol_type = other RNA
agtcgtagtggctgttgtggtca

SEQ ID NO: 71386 - RNA, 23 nt, synthetic construct
  source 1..23: mol_type = other RNA
ccgcctgcaacccctgaggttgg

SEQ ID NO: 71387 - RNA, 23 nt, synthetic construct
  source 1..23: mol_type = other RNA
ggggtactggggcagtggctgta

SEQ ID NO: 71388 - RNA, 23 nt, synthetic construct
  source 1..23: mol_type = other RNA
ctggggtactggggcagtggctg

SEQ ID NO: 71389 - RNA, 23 nt, synthetic construct
  source 1..23: mol_type = other RNA
cagtcgtagtggctgttgtggtc

SEQ ID NO: 71390 - RNA, 23 nt, synthetic construct
  source 1..23: mol_type = other RNA
cagtcgtagtggctgttgtggtc

SEQ ID NO: 71391 - RNA, 23 nt, synthetic construct
  source 1..23: mol_type = other RNA
gggtggaggacgggatggccgtg

SEQ ID NO: 71392 - RNA, 23 nt, synthetic construct
  source 1..23: mol_type = other RNA
cagtcgtagtggctgttgtggtc

SEQ ID NO: 71393 - RNA, 23 nt, synthetic construct
  source 1..23: mol_type = other RNA
cagtcgtagtggctgttgtggtc

SEQ ID NO: 71394 - RNA, 23 nt, synthetic construct
  source 1..23: mol_type = other RNA
cagtcgtagtggctgttgtggtc

SEQ ID NO: 71395 - RNA, 23 nt, synthetic construct
  source 1..23: mol_type = other RNA
ctggcattggcacaggcagcctg

SEQ ID NO: 71396 - RNA, 23 nt, synthetic construct
  source 1..23: mol_type = other RNA
acgccgtccctccagtcgctgag

SEQ ID NO: 71397 - RNA, 23 nt, synthetic construct
  source 1..23: mol_type = other RNA
ccccgcctgcaacccctgaggtt

SEQ ID NO: 71398 - RNA, 23 nt, synthetic construct
  source 1..23: mol_type = other RNA
aggtcagcacctgcccgacctgg

SEQ ID NO: 71399 - RNA, 23 nt, synthetic construct
  source 1..23: mol_type = other RNA
aggtcagccccgtctccaggctg

SEQ ID NO: 71400 - RNA, 23 nt, synthetic construct
  source 1..23: mol_type = other RNA
caggtcagccccgtctccaggct

SEQ ID NO: 71401 - RNA, 23 nt, synthetic construct
  source 1..23: mol_type = other RNA
ctggtcttcgttcttgcaggtca

SEQ ID NO: 71402 - RNA, 23 nt, synthetic construct
  source 1..23: mol_type = other RNA
cgcacgttgtagttgaagcacat

SEQ ID NO: 71403 - RNA, 23 nt, synthetic construct
  source 1..23: mol_type = other RNA
acacgcacgttgtagttgaagca

SEQ ID NO: 71404 - RNA, 23 nt, synthetic construct
  source 1..23: mol_type = other RNA
gctgtagtcgtcacagcaaagca

SEQ ID NO: 71405 - RNA, 23 nt, synthetic construct
  source 1..23: mol_type = other RNA
gtactggggcagtggctgtagtc

SEQ ID NO: 71406 - RNA, 23 nt, synthetic construct
  source 1..23: mol_type = other RNA
tggggtactggggcagtggctgt

SEQ ID NO: 71407 - RNA, 23 nt, synthetic construct
  source 1..23: mol_type = other RNA
ggctggggtactggggcagtggc

SEQ ID NO: 71408 - RNA, 23 nt, synthetic construct
  source 1..23: mol_type = other RNA
gtggctggggtactggggcagtg

SEQ ID NO: 71409 - RNA, 23 nt, synthetic construct
  source 1..23: mol_type = other RNA
gctggtggctggggtactggggc

SEQ ID NO: 71410 - RNA, 23 nt, synthetic construct
  source 1..23: mol_type = other RNA
tggagctggtggctggggtactg

SEQ ID NO: 71411 - RNA, 23 nt, synthetic construct
  source 1..23: mol_type = other RNA
tccccggagttgaggagggcgtg

SEQ ID NO: 71412 - RNA, 23 nt, synthetic construct
  source 1..23: mol_type = other RNA
tccaggtcgtccccggagttgag

SEQ ID NO: 71413 - RNA, 23 nt, synthetic construct
  source 1..23: mol_type = other RNA
gaggatccaggtcgtccccggag

SEQ ID NO: 71414 - RNA, 23 nt, synthetic construct
  source 1..23: mol_type = other RNA
ttgtgaggatccaggtcgtcccc

SEQ ID NO: 71415 - RNA, 23 nt, synthetic construct
  source 1..23: mol_type = other RNA
gtagtggctgttgtggtcggctt

SEQ ID NO: 71416 - RNA, 23 nt, synthetic construct
  source 1..23: mol_type = other RNA
cgtagtggctgttgtggtcggct

SEQ ID NO: 71417 - RNA, 23 nt, synthetic construct
  source 1..23: mol_type = other RNA
cgtggatccagtggacgcagtcg

SEQ ID NO: 71418 - RNA, 23 nt, synthetic construct
  source 1..23: mol_type = other RNA
tgtagtccagccactctgaccag

SEQ ID NO: 71419 - RNA, 23 nt, synthetic construct
  source 1..23: mol_type = other RNA
gaggatccaggtcgtccccggag

SEQ ID NO: 71420 - RNA, 23 nt, synthetic construct
  source 1..23: mol_type = other RNA
cgtagtggctgttgtggtcagct

SEQ ID NO: 71421 - RNA, 23 nt, synthetic construct
  source 1..23: mol_type = other RNA
gaggtggccctggtgtggcccgg

SEQ ID NO: 71422 - RNA, 23 nt, synthetic construct
  source 1..23: mol_type = other RNA
tgtagtccagccactctgaccag

SEQ ID NO: 71423 - RNA, 23 nt, synthetic construct
  source 1..23: mol_type = other RNA
gaggatccaggtcgtccccggag

SEQ ID NO: 71424 - RNA, 23 nt, synthetic construct
  source 1..23: mol_type = other RNA
tgtagtccagccactctgaccag

SEQ ID NO: 71425 - RNA, 23 nt, synthetic construct
  source 1..23: mol_type = other RNA
tccccggagttgaggagggcgtg

SEQ ID NO: 71426 - RNA, 23 nt, synthetic construct
  source 1..23: mol_type = other RNA
tccaggtcgtccccggagttgag

SEQ ID NO: 71427 - RNA, 23 nt, synthetic construct
  source 1..23: mol_type = other RNA
gaggatccaggtcgtccccggag

SEQ ID NO: 71428 - RNA, 23 nt, synthetic construct
  source 1..23: mol_type = other RNA
ttgtgaggatccaggtcgtcccc

SEQ ID NO: 71429 - RNA, 23 nt, synthetic construct
  source 1..23: mol_type = other RNA
cgtagtggctgttgtggtcagct

SEQ ID NO: 71430 - RNA, 23 nt, synthetic construct
  source 1..23: mol_type = other RNA
tgtagtccagccactctgaccag

SEQ ID NO: 71431 - RNA, 23 nt, synthetic construct
  source 1..23: mol_type = other RNA
gaggatccaggtcgtccccggag

SEQ ID NO: 71432 - RNA, 23 nt, synthetic construct
  source 1..23: mol_type = other RNA
cgtagtggctgttgtggtcagct

SEQ ID NO: 71433 - RNA, 23 nt, synthetic construct
  source 1..23: mol_type = other RNA
gaggatccaggtcgtccccggag

SEQ ID NO: 71434 - RNA, 23 nt, synthetic construct
  source 1..23: mol_type = other RNA
cgtagtggctgttgtggtcagct

SEQ ID NO: 71435 - RNA, 23 nt, synthetic construct
  source 1..23: mol_type = other RNA
cgtggatccagtggacgcagtcg

SEQ ID NO: 71436 - RNA, 23 nt, synthetic construct
  source 1..23: mol_type = other RNA
tgtagtggctgttgtggtcagct

SEQ ID NO: 71437 - RNA, 23 nt, synthetic construct
  source 1..23: mol_type = other RNA
ggctgtggtgggcatggggtggg

SEQ ID NO: 71438 - RNA, 23 nt, synthetic construct
  source 1..23: mol_type = other RNA
cgcctgcaacccctgaggttggg

SEQ ID NO: 71439 - RNA, 23 nt, synthetic construct
  source 1..23: mol_type = other RNA
tcagctttgtgaggatccaggtc

SEQ ID NO: 71440 - RNA, 23 nt, synthetic construct
  source 1..23: mol_type = other RNA
ttgtggtcggctttgtgaggatc

SEQ ID NO: 71441 - RNA, 23 nt, synthetic construct
  source 1..23: mol_type = other RNA
gggcctcccgtggtggctgtacc

SEQ ID NO: 71442 - RNA, 23 nt, synthetic construct
  source 1..23: mol_type = other RNA
cggctttgtgaggatccaggtcg

SEQ ID NO: 71443 - RNA, 23 nt, synthetic construct
  source 1..23: mol_type = other RNA
gtggatccagtggatgcagtcgt

SEQ ID NO: 71444 - RNA, 23 nt, synthetic construct
  source 1..23: mol_type = other RNA
tgtccccgcctgcaacccctgag

SEQ ID NO: 71445 - RNA, 23 nt, synthetic construct
  source 1..23: mol_type = other RNA
agcaaagcacacgcacgttgtag

SEQ ID NO: 71446 - RNA, 23 nt, synthetic construct
  source 1..23: mol_type = other RNA
cagcaaagcacacgcacgttgta

SEQ ID NO: 71447 - RNA, 23 nt, synthetic construct
  source 1..23: mol_type = other RNA
cgtgcaccacctctccaggagcc

SEQ ID NO: 71448 - RNA, 23 nt, synthetic construct
  source 1..23: mol_type = other RNA
ccgtgtggggactgctggggggc

SEQ ID NO: 71449 - RNA, 23 nt, synthetic construct
  source 1..23: mol_type = other RNA
ccgtgtggggactgctgggggac

SEQ ID NO: 71450 - RNA, 23 nt, synthetic construct
  source 1..23: mol_type = other RNA
ccgtgtggggactgctggggggc

SEQ ID NO: 71451 - RNA, 23 nt, synthetic construct
  source 1..23: mol_type = other RNA
ccgtgtggggactgctgggggac

SEQ ID NO: 71452 - RNA, 23 nt, synthetic construct
  source 1..23: mol_type = other RNA
gtctcgcagccctggtgccacag

SEQ ID NO: 71453 - RNA, 23 nt, synthetic construct
  source 1..23: mol_type = other RNA
ggccgtgaagtcgtcagcctggt

SEQ ID NO: 71454 - RNA, 23 nt, synthetic construct
  source 1..23: mol_type = other RNA
ggactggagaagggagtggcttt

SEQ ID NO: 71455 - RNA, 23 nt, synthetic construct
  source 1..23: mol_type = other RNA
gtagctgtggatttggtggctgt

SEQ ID NO: 71456 - RNA, 23 nt, synthetic construct
  source 1..23: mol_type = other RNA
ggactggagaagggagtggcttt

SEQ ID NO: 71457 - RNA, 23 nt, synthetic construct
  source 1..23: mol_type = other RNA
gtagctgtggatttggtggctgt

SEQ ID NO: 71458 - RNA, 23 nt, synthetic construct
  source 1..23: mol_type = other RNA
atgtccccgcctgcaacccctga

SEQ ID NO: 71459 - RNA, 23 nt, synthetic construct
  source 1..23: mol_type = other RNA
gagggcgtggccgtggagctggt

SEQ ID NO: 71460 - RNA, 23 nt, synthetic construct
  source 1..23: mol_type = other RNA
gccgtggctgtggtcctggaggt

SEQ ID NO: 71461 - RNA, 23 nt, synthetic construct
  source 1..23: mol_type = other RNA
agtggctgttgtggtcagctctg

SEQ ID NO: 71462 - RNA, 23 nt, synthetic construct
  source 1..23: mol_type = other RNA
catggtggccatgggtgtggtgg

SEQ ID NO: 71463 - RNA, 23 nt, synthetic construct
  source 1..23: mol_type = other RNA
tggtcctggaggtgcccctggtg

SEQ ID NO: 71464 - RNA, 23 nt, synthetic construct
  source 1..23: mol_type = other RNA
agtggctgttgtggtcagctttg

SEQ ID NO: 71465 - RNA, 23 nt, synthetic construct
  source 1..23: mol_type = other RNA
agtggctgttgtggtcagctctg

SEQ ID NO: 71466 - RNA, 23 nt, synthetic construct
  source 1..23: mol_type = other RNA
agtggctgttgtggtcagctctg

SEQ ID NO: 71467 - RNA, 23 nt, synthetic construct
  source 1..23: mol_type = other RNA
cttgtcatggtggctgtggtggt

SEQ ID NO: 71468 - RNA, 23 nt, synthetic construct
  source 1..23: mol_type = other RNA
agtggctgttgtggtcagctcag

SEQ ID NO: 71469 - RNA, 23 nt, synthetic construct
  source 1..23: mol_type = other RNA
ggtctcgcagccctggtgccaca

SEQ ID NO: 71470 - RNA, 23 nt, synthetic construct
  source 1..23: mol_type = other RNA
caacccctgaggttgggaagtcc

SEQ ID NO: 71471 - RNA, 23 nt, synthetic construct
  source 1..23: mol_type = other RNA
tggtggtaagcactgtggaggtg

SEQ ID NO: 71472 - RNA, 23 nt, synthetic construct
  source 1..23: mol_type = other RNA
tggtggtaagcactgtggaggtg

SEQ ID NO: 71473 - RNA, 23 nt, synthetic construct
  source 1..23: mol_type = other RNA
tggtggtaagcactgtggaggtg

SEQ ID NO: 71474 - RNA, 23 nt, synthetic construct
  source 1..23: mol_type = other RNA
agggtgagggctggacagggctg

SEQ ID NO: 71475 - RNA, 23 nt, synthetic construct
  source 1..23: mol_type = other RNA
agggtgagggctggacagggctg

SEQ ID NO: 71476 - RNA, 23 nt, synthetic construct
  source 1..23: mol_type = other RNA
agggtgagggctggacagggctg

SEQ ID NO: 71477 - RNA, 23 nt, synthetic construct
  source 1..23: mol_type = other RNA
cgtgggtgtaggtgtgcaggatg

SEQ ID NO: 71478 - RNA, 23 nt, synthetic construct
  source 1..23: mol_type = other RNA
ggggccggggaggggccacaggg

SEQ ID NO: 71479 - RNA, 23 nt, synthetic construct
  source 1..23: mol_type = other RNA
cacagcaaagcacacgcacgttg

SEQ ID NO: 71480 - RNA, 23 nt, synthetic construct
  source 1..23: mol_type = other RNA
ggcggttgcagtccctggactgg

SEQ ID NO: 71481 - RNA, 23 nt, synthetic construct
  source 1..23: mol_type = other RNA
gcttctcagtgctggaagggcgg

SEQ ID NO: 71482 - RNA, 23 nt, synthetic construct
  source 1..23: mol_type = other RNA
tgtggtcagctctgtgaggatcc

SEQ ID NO: 71483 - RNA, 23 nt, synthetic construct
  source 1..23: mol_type = other RNA
gtggctgttgtggtcagctctgt

SEQ ID NO: 71484 - RNA, 23 nt, synthetic construct
  source 1..23: mol_type = other RNA
ggcggttgcagtccctggactgg

SEQ ID NO: 71485 - RNA, 23 nt, synthetic construct
  source 1..23: mol_type = other RNA
gcttctcagtgctggaagggcgg

SEQ ID NO: 71486 - RNA, 23 nt, synthetic construct
  source 1..23: mol_type = other RNA
tgtggtcagctctgtgaggatcc

SEQ ID NO: 71487 - RNA, 23 nt, synthetic construct
  source 1..23: mol_type = other RNA
ggcggttgcagtccctggactgg

SEQ ID NO: 71488 - RNA, 23 nt, synthetic construct
  source 1..23: mol_type = other RNA
gcttctcagtgctggaagggcgg

SEQ ID NO: 71489 - RNA, 23 nt, synthetic construct
  source 1..23: mol_type = other RNA
ggcggttgcagtccctggactgg

SEQ ID NO: 71490 - RNA, 23 nt, synthetic construct
  source 1..23: mol_type = other RNA
gcttctcagtgctggaagggcgg

SEQ ID NO: 71491 - RNA, 23 nt, synthetic construct
  source 1..23: mol_type = other RNA
tgtggtcagctctgtgaggatcc

SEQ ID NO: 71492 - RNA, 23 nt, synthetic construct
  source 1..23: mol_type = other RNA
gtggctgttgtggtcagctctgt

SEQ ID NO: 71493 - RNA, 23 nt, synthetic construct
  source 1..23: mol_type = other RNA
tgtggtcagctctgtgaggatcc

SEQ ID NO: 71494 - RNA, 23 nt, synthetic construct
  source 1..23: mol_type = other RNA
tgtggtcagctctgtgaggatcc

SEQ ID NO: 71495 - RNA, 23 nt, synthetic construct
  source 1..23: mol_type = other RNA
gtggctgttgtggtcagctctgt

SEQ ID NO: 71496 - RNA, 23 nt, synthetic construct
  source 1..23: mol_type = other RNA
gcttctcagtgctggaagggcag

SEQ ID NO: 71497 - RNA, 23 nt, synthetic construct
  source 1..23: mol_type = other RNA
gtggctgttgtggtcagctcagt

SEQ ID NO: 71498 - RNA, 23 nt, synthetic construct
  source 1..23: mol_type = other RNA
ggccacaggctctcccagggtag

SEQ ID NO: 71499 - RNA, 23 nt, synthetic construct
  source 1..23: mol_type = other RNA
ccacagcactgcccggccactct

SEQ ID NO: 71500 - RNA, 23 nt, synthetic construct
  source 1..23: mol_type = other RNA
gtgccagcagttgcctgggtgga

SEQ ID NO: 71501 - RNA, 23 nt, synthetic construct
  source 1..23: mol_type = other RNA
tctgctctgtgaggatccaggtc

SEQ ID NO: 71502 - RNA, 23 nt, synthetic construct
  source 1..23: mol_type = other RNA
gtgccagcagttgcctgggtgga

SEQ ID NO: 71503 - RNA, 23 nt, synthetic construct
  source 1..23: mol_type = other RNA
gtgccagcagttgcctgggtgga

SEQ ID NO: 71504 - RNA, 23 nt, synthetic construct
  source 1..23: mol_type = other RNA
ttgtggtcagctctgtgaggatc

SEQ ID NO: 71505 - RNA, 23 nt, synthetic construct
  source 1..23: mol_type = other RNA
ctgtggtcagctctgtgaggatc

SEQ ID NO: 71506 - RNA, 23 nt, synthetic construct
  source 1..23: mol_type = other RNA
ttgtggtcagctctgtgaggatc

SEQ ID NO: 71507 - RNA, 23 nt, synthetic construct
  source 1..23: mol_type = other RNA
ctgtggtcagctctgtgaggatc

SEQ ID NO: 71508 - RNA, 23 nt, synthetic construct
  source 1..23: mol_type = other RNA
ttgtggtcagctctgtgaggatc

SEQ ID NO: 71509 - RNA, 23 nt, synthetic construct
  source 1..23: mol_type = other RNA
gttcttgcaggtcagccccgtct

SEQ ID NO: 71510 - RNA, 23 nt, synthetic construct
  source 1..23: mol_type = other RNA
cacaggaatgtcagcaccagccg

SEQ ID NO: 71511 - RNA, 23 nt, synthetic construct
  source 1..23: mol_type = other RNA
cgttcttgcaggtcagccccgtc

SEQ ID NO: 71512 - RNA, 23 nt, synthetic construct
  source 1..23: mol_type = other RNA
agttgcctgggtggaggaggcgg

SEQ ID NO: 71513 - RNA, 23 nt, synthetic construct
  source 1..23: mol_type = other RNA
agttgcctgggtggaggaggcgg

SEQ ID NO: 71514 - RNA, 23 nt, synthetic construct
  source 1..23: mol_type = other RNA
agttgcctgggtggaggaggcgg

SEQ ID NO: 71515 - RNA, 23 nt, synthetic construct
  source 1..23: mol_type = other RNA
ggtggagaccgggagggccgggc

SEQ ID NO: 71516 - RNA, 23 nt, synthetic construct
  source 1..23: mol_type = other RNA
tccccgcctgcaacccctgaggt

SEQ ID NO: 71517 - RNA, 23 nt, synthetic construct
  source 1..23: mol_type = other RNA
tgggggctgcacaccctgtgctt

SEQ ID NO: 71518 - RNA, 23 nt, synthetic construct
  source 1..23: mol_type = other RNA
tggtggctggggtactggggcag

SEQ ID NO: 71519 - RNA, 23 nt, synthetic construct
  source 1..23: mol_type = other RNA
ggccgtggagctggtggctgggg

SEQ ID NO: 71520 - RNA, 23 nt, synthetic construct
  source 1..23: mol_type = other RNA
tggccgtggagctggtggctggg

SEQ ID NO: 71521 - RNA, 23 nt, synthetic construct
  source 1..23: mol_type = other RNA
tggtcagctctgtgaggatccag

SEQ ID NO: 71522 - RNA, 23 nt, synthetic construct
  source 1..23: mol_type = other RNA
tggtcagctctgtgaggatccag

SEQ ID NO: 71523 - RNA, 23 nt, synthetic construct
  source 1..23: mol_type = other RNA
tggtcagctctgtgaggatccag

SEQ ID NO: 71524 - RNA, 23 nt, synthetic construct
  source 1..23: mol_type = other RNA
tggtcagctctgtgaggatccag

SEQ ID NO: 71525 - RNA, 23 nt, synthetic construct
  source 1..23: mol_type = other RNA
tggtcagctctgtgaggatccag

SEQ ID NO: 71526 - RNA, 23 nt, synthetic construct
  source 1..23: mol_type = other RNA
cagctgtgggctctggttcctag

SEQ ID NO: 71527 - RNA, 23 nt, synthetic construct
  source 1..23: mol_type = other RNA
gtgctggaagggcagttgcagtc

SEQ ID NO: 71528 - RNA, 23 nt, synthetic construct
  source 1..23: mol_type = other RNA
ctctgggggcaggtggttgtgtt

SEQ ID NO: 71529 - RNA, 23 nt, synthetic construct
  source 1..23: mol_type = other RNA
gtgcaccacctctccaggagcca

SEQ ID NO: 71530 - RNA, 23 nt, synthetic construct
  source 1..23: mol_type = other RNA
aacagggcctgggtggtggtggt

SEQ ID NO: 71531 - RNA, 23 nt, synthetic construct
  source 1..23: mol_type = other RNA
aacctgcctgtctggtcttcgtt

SEQ ID NO: 71532 - RNA, 23 nt, synthetic construct
  source 1..23: mol_type = other RNA
ctggggcagtggctgtagtcgtc

SEQ ID NO: 71533 - RNA, 23 nt, synthetic construct
  source 1..23: mol_type = other RNA
ggccgtggctgtggtcctggagg

SEQ ID NO: 71534 - RNA, 23 nt, synthetic construct
  source 1..23: mol_type = other RNA
ggtcagctctgtgaggatccagg

SEQ ID NO: 71535 - RNA, 23 nt, synthetic construct
  source 1..23: mol_type = other RNA
ggtcagctctgtgaggatccagg

SEQ ID NO: 71536 - RNA, 23 nt, synthetic construct
  source 1..23: mol_type = other RNA
caccgtggagccactggttgtgg

SEQ ID NO: 71537 - RNA, 23 nt, synthetic construct
  source 1..23: mol_type = other RNA
tcgtccctggggaagggggtgac

SEQ ID NO: 71538 - RNA, 23 nt, synthetic construct
  source 1..23: mol_type = other RNA
ggtcagctctgtgaggatccagg

SEQ ID NO: 71539 - RNA, 23 nt, synthetic construct
  source 1..23: mol_type = other RNA
ggtcagctctgtgaggatccagg

SEQ ID NO: 71540 - RNA, 23 nt, synthetic construct
  source 1..23: mol_type = other RNA
ggtcagctctgtgaggatccagg

SEQ ID NO: 71541 - RNA, 23 nt, synthetic construct
  source 1..23: mol_type = other RNA
caccgtggagccactggttgtgg

SEQ ID NO: 71542 - RNA, 23 nt, synthetic construct
  source 1..23: mol_type = other RNA
cagctggactggctggccatcgg

SEQ ID NO: 71543 - RNA, 23 nt, synthetic construct
  source 1..23: mol_type = other RNA
tcgcagcttcctggcagcagctg

SEQ ID NO: 71544 - RNA, 23 nt, synthetic construct
  source 1..23: mol_type = other RNA
gctggggtactggggcagtggct

SEQ ID NO: 71545 - RNA, 23 nt, synthetic construct
  source 1..23: mol_type = other RNA
ccgtccctgggctggaggagggg

SEQ ID NO: 71546 - RNA, 23 nt, synthetic construct
  source 1..23: mol_type = other RNA
gcactgggggtgtgtgggtggtc

SEQ ID NO: 71547 - RNA, 23 nt, synthetic construct
  source 1..23: mol_type = other RNA
ccgtccctgggctggaggagggg

SEQ ID NO: 71548 - RNA, 23 nt, synthetic construct
  source 1..23: mol_type = other RNA
gcactgggggtgtgtgggtggtc

SEQ ID NO: 71549 - RNA, 23 nt, synthetic construct
  source 1..23: mol_type = other RNA
ccgtccctgggctggaggagggg

SEQ ID NO: 71550 - RNA, 23 nt, synthetic construct
  source 1..23: mol_type = other RNA
gcactgggggtgtgtgggtggtc

SEQ ID NO: 71551 - RNA, 23 nt, synthetic construct
  source 1..23: mol_type = other RNA
ccgtccctgggctggaggagggg

SEQ ID NO: 71552 - RNA, 23 nt, synthetic construct
  source 1..23: mol_type = other RNA
gcactgggggtgtgtgggtggtc

SEQ ID NO: 71553 - RNA, 23 nt, synthetic construct
  source 1..23: mol_type = other RNA
ccgtccctgggctggaggagggg

SEQ ID NO: 71554 - RNA, 23 nt, synthetic construct
  source 1..23: mol_type = other RNA
ttggcaggctgctggggagcact

SEQ ID NO: 71555 - RNA, 23 nt, synthetic construct
  source 1..23: mol_type = other RNA
tggggcagtggctgtagtcgtca

SEQ ID NO: 71556 - RNA, 23 nt, synthetic construct
  source 1..23: mol_type = other RNA
agtggctgttgtggtcggctttg

SEQ ID NO: 71557 - RNA, 23 nt, synthetic construct
  source 1..23: mol_type = other RNA
ggtggtcagcactgtgggggtgt

SEQ ID NO: 71558 - RNA, 23 nt, synthetic construct
  source 1..23: mol_type = other RNA
accgtggagccactggttgtggg

SEQ ID NO: 71559 - RNA, 23 nt, synthetic construct
  source 1..23: mol_type = other RNA
ggtggtcagcactgtgggggtgt

SEQ ID NO: 71560 - RNA, 23 nt, synthetic construct
  source 1..23: mol_type = other RNA
accgtggagccactggttgtggg

SEQ ID NO: 71561 - RNA, 23 nt, synthetic construct
  source 1..23: mol_type = other RNA
atgggggctgcacaccctgtgct

SEQ ID NO: 71562 - RNA, 23 nt, synthetic construct
  source 1..23: mol_type = other RNA
cccgcctgcaacccctgaggttg

SEQ ID NO: 71563 - RNA, 23 nt, synthetic construct
  source 1..23: mol_type = other RNA
gtcagccccgtctccaggctgca

SEQ ID NO: 71564 - RNA, 23 nt, synthetic construct
  source 1..23: mol_type = other RNA
gtggctgcaggtgtggtggcggt

SEQ ID NO: 71565 - RNA, 23 nt, synthetic construct
  source 1..23: mol_type = other RNA
gtggctgcaggtgtggtggcggt

SEQ ID NO: 71566 - RNA, 23 nt, synthetic construct
  source 1..23: mol_type = other RNA
gtggctgcaggtgtggtggcggt

SEQ ID NO: 71567 - RNA, 23 nt, synthetic construct
  source 1..23: mol_type = other RNA
gtggtcctggaggtgcccctggt

SEQ ID NO: 71568 - RNA, 23 nt, synthetic construct
  source 1..23: mol_type = other RNA
gtggctgcaggtgtggtggcggt

SEQ ID NO: 71569 - RNA, 23 nt, synthetic construct
  source 1..23: mol_type = other RNA
tttggagctggtggctgcgggtg

SEQ ID NO: 71570 - RNA, 23 nt, synthetic construct
  source 1..23: mol_type = other RNA
gattgtggacatggtggacatgg

SEQ ID NO: 71571 - RNA, 23 nt, synthetic construct
  source 1..23: mol_type = other RNA
caggctctgggggcaggtggttg

SEQ ID NO: 71572 - RNA, 23 nt, synthetic construct
  source 1..23: mol_type = other RNA
acgtgggtgtaggtgtgcaggat

SEQ ID NO: 71573 - RNA, 23 nt, synthetic construct
  source 1..23: mol_type = other RNA
gcagggagggagccgggccgggt

SEQ ID NO: 71574 - RNA, 23 nt, synthetic construct
  source 1..23: mol_type = other RNA
ccacagggccctgggtctctgcc

SEQ ID NO: 71575 - RNA, 23 nt, synthetic construct
  source 1..23: mol_type = other RNA
agagctcagggcacctccagttc

SEQ ID NO: 71576 - RNA, 23 nt, synthetic construct
  source 1..23: mol_type = other RNA
gggcagagctcagggcacctcca

SEQ ID NO: 71577 - RNA, 23 nt, synthetic construct
  source 1..23: mol_type = other RNA
ggggcagagctcagggcacctcc

SEQ ID NO: 71578 - RNA, 23 nt, synthetic construct
  source 1..23: mol_type = other RNA
caggtggtgttgaaggaggtgcc

SEQ ID NO: 71579 - RNA, 23 nt, synthetic construct
  source 1..23: mol_type = other RNA
gggccgtgaagtcgtcagcctgg

SEQ ID NO: 71580 - RNA, 23 nt, synthetic construct
  source 1..23: mol_type = other RNA
gcccgtggcctccaccaccccgc

SEQ ID NO: 71581 - RNA, 23 nt, synthetic construct
  source 1..23: mol_type = other RNA
cgcccgtggcctccaccaccccg

SEQ ID NO: 71582 - RNA, 23 nt, synthetic construct
  source 1..23: mol_type = other RNA
gcgcccgtggcctccaccacccc

SEQ ID NO: 71583 - RNA, 23 nt, synthetic construct
  source 1..23: mol_type = other RNA
tccgacaccagccccgggggaca

SEQ ID NO: 71584 - RNA, 23 nt, synthetic construct
  source 1..23: mol_type = other RNA
agtctccgcctcccaggccgggc

SEQ ID NO: 71585 - RNA, 23 nt, synthetic construct
  source 1..23: mol_type = other RNA
gcctggggccggggaggggccac

SEQ ID NO: 71586 - RNA, 23 nt, synthetic construct
  source 1..23: mol_type = other RNA
tgcctggggccggggaggggcca

SEQ ID NO: 71587 - RNA, 23 nt, synthetic construct
  source 1..23: mol_type = other RNA
ttccatgtccccgcctgcaaccc

SEQ ID NO: 71588 - RNA, 23 nt, synthetic construct
  source 1..23: mol_type = other RNA
gtcagcacctgcccgacctggtc

SEQ ID NO: 71589 - RNA, 23 nt, synthetic construct
  source 1..23: mol_type = other RNA
caggtcagcacctgcccgacctg

SEQ ID NO: 71590 - RNA, 23 nt, synthetic construct
  source 1..23: mol_type = other RNA
gcaggtcagcacctgcccgacct

SEQ ID NO: 71591 - RNA, 23 nt, synthetic construct
  source 1..23: mol_type = other RNA
ggtcagccccgtctccaggctgc

SEQ ID NO: 71592 - RNA, 23 nt, synthetic construct
  source 1..23: mol_type = other RNA
actggggcagtggctgtagtcgt

SEQ ID NO: 71593 - RNA, 23 nt, synthetic construct
  source 1..23: mol_type = other RNA
tactggggcagtggctgtagtcg

SEQ ID NO: 71594 - RNA, 23 nt, synthetic construct
  source 1..23: mol_type = other RNA
ggtactggggcagtggctgtagt

SEQ ID NO: 71595 - RNA, 23 nt, synthetic construct
  source 1..23: mol_type = other RNA
gggtactggggcagtggctgtag

SEQ ID NO: 71596 - RNA, 23 nt, synthetic construct
  source 1..23: mol_type = other RNA
ggtggctggggtactggggcagt

SEQ ID NO: 71597 - RNA, 23 nt, synthetic construct
  source 1..23: mol_type = other RNA
ctggtggctggggtactggggca

SEQ ID NO: 71598 - RNA, 23 nt, synthetic construct
  source 1..23: mol_type = other RNA
ggagctggtggctggggtactgg

SEQ ID NO: 71599 - RNA, 23 nt, synthetic construct
  source 1..23: mol_type = other RNA
gtggagctggtggctggggtact

SEQ ID NO: 71600 - RNA, 23 nt, synthetic construct
  source 1..23: mol_type = other RNA
gccgtggagctggtggctggggt

SEQ ID NO: 71601 - RNA, 23 nt, synthetic construct
  source 1..23: mol_type = other RNA
gtggccgtggagctggtggctgg

SEQ ID NO: 71602 - RNA, 23 nt, synthetic construct
  source 1..23: mol_type = other RNA
cgtggccgtggagctggtggctg

SEQ ID NO: 71603 - RNA, 23 nt, synthetic construct
  source 1..23: mol_type = other RNA
gcgtggccgtggagctggtggct

SEQ ID NO: 71604 - RNA, 23 nt, synthetic construct
  source 1..23: mol_type = other RNA
ggcgtggccgtggagctggtggc

SEQ ID NO: 71605 - RNA, 23 nt, synthetic construct
  source 1..23: mol_type = other RNA
agggcgtggccgtggagctggtg

SEQ ID NO: 71606 - RNA, 23 nt, synthetic construct
  source 1..23: mol_type = other RNA
ggagggcgtggccgtggagctgg

SEQ ID NO: 71607 - RNA, 23 nt, synthetic construct
  source 1..23: mol_type = other RNA
ttgaggagggcgtggccgtggag

SEQ ID NO: 71608 - RNA, 23 nt, synthetic construct
  source 1..23: mol_type = other RNA
tgaggatccaggtcgtccccgga

SEQ ID NO: 71609 - RNA, 23 nt, synthetic construct
  source 1..23: mol_type = other RNA
tggatccagtggacgcagtcgta

SEQ ID NO: 71610 - RNA, 23 nt, synthetic construct
  source 1..23: mol_type = other RNA
tcagcactttgggagggggagct

SEQ ID NO: 71611 - RNA, 23 nt, synthetic construct
  source 1..23: mol_type = other RNA
ggttgcagtccctggactggagg

SEQ ID NO: 71612 - RNA, 23 nt, synthetic construct
  source 1..23: mol_type = other RNA
cagggaggaagaggggatgggtg

SEQ ID NO: 71613 - RNA, 23 nt, synthetic construct
  source 1..23: mol_type = other RNA
ggtggaggagggggtggccacag

SEQ ID NO: 71614 - RNA, 23 nt, synthetic construct
  source 1..23: mol_type = other RNA
ggatggaggagggggtcaccgtg

SEQ ID NO: 71615 - RNA, 23 nt, synthetic construct
  source 1..23: mol_type = other RNA
tgttgctggtggctgcaggtgtg

SEQ ID NO: 71616 - RNA, 23 nt, synthetic construct
  source 1..23: mol_type = other RNA
ggcactgggggtgtgtgggtggt

SEQ ID NO: 71617 - RNA, 23 nt, synthetic construct
  source 1..23: mol_type = other RNA
aagtccaggctgtgcgcaccgtg

SEQ ID NO: 71618 - RNA, 23 nt, synthetic construct
  source 1..23: mol_type = other RNA
acaccaggctgggcctgggcacg

SEQ ID NO: 71619 - RNA, 23 nt, synthetic construct
  source 1..23: mol_type = other RNA
tgaggatccaggtcgtccccgga

SEQ ID NO: 71620 - RNA, 23 nt, synthetic construct
  source 1..23: mol_type = other RNA
tggctgttgtggtcagctctgtg

SEQ ID NO: 71621 - RNA, 23 nt, synthetic construct
  source 1..23: mol_type = other RNA
gtagtggctgttgtggtcagctc

SEQ ID NO: 71622 - RNA, 23 nt, synthetic construct
  source 1..23: mol_type = other RNA
ggggtggaggacggggtggccgt

SEQ ID NO: 71623 - RNA, 23 nt, synthetic construct
  source 1..23: mol_type = other RNA
tggggtggaggacggggtggccg

SEQ ID NO: 71624 - RNA, 23 nt, synthetic construct
  source 1..23: mol_type = other RNA
ggaggaggcggtggccgtggatc

SEQ ID NO: 71625 - RNA, 23 nt, synthetic construct
  source 1..23: mol_type = other RNA
tggaggaggcggtggccgtggat

SEQ ID NO: 71626 - RNA, 23 nt, synthetic construct
  source 1..23: mol_type = other RNA
tgccagcagttgcctgggtggag

SEQ ID NO: 71627 - RNA, 23 nt, synthetic construct
  source 1..23: mol_type = other RNA
ggttgcagtccctggactggaga

SEQ ID NO: 71628 - RNA, 23 nt, synthetic construct
  source 1..23: mol_type = other RNA
ggtggaggagggggtggccacag

SEQ ID NO: 71629 - RNA, 23 nt, synthetic construct
  source 1..23: mol_type = other RNA
ggatggaggagggggtcaccgtg

SEQ ID NO: 71630 - RNA, 23 nt, synthetic construct
  source 1..23: mol_type = other RNA
tgctgctggtggctgcaggtgtg

SEQ ID NO: 71631 - RNA, 23 nt, synthetic construct
  source 1..23: mol_type = other RNA
gtgctgctggtggctgcaggtgt

SEQ ID NO: 71632 - RNA, 23 nt, synthetic construct
  source 1..23: mol_type = other RNA
ggcactgggggtgtgtgggtggt

SEQ ID NO: 71633 - RNA, 23 nt, synthetic construct
  source 1..23: mol_type = other RNA
aagtccaggctgtgcgcaccgtg

SEQ ID NO: 71634 - RNA, 23 nt, synthetic construct
  source 1..23: mol_type = other RNA
aggtggccctggtgtggcccggg

SEQ ID NO: 71635 - RNA, 23 nt, synthetic construct
  source 1..23: mol_type = other RNA
ggtgtggccgtggccgtggtcct

SEQ ID NO: 71636 - RNA, 23 nt, synthetic construct
  source 1..23: mol_type = other RNA
acaccaggctgggcctgggcacg

SEQ ID NO: 71637 - RNA, 23 nt, synthetic construct
  source 1..23: mol_type = other RNA
agtggctgctgtggtctgctctg

SEQ ID NO: 71638 - RNA, 23 nt, synthetic construct
  source 1..23: mol_type = other RNA
tcagcactttgggagggggagct

SEQ ID NO: 71639 - RNA, 23 nt, synthetic construct
  source 1..23: mol_type = other RNA
gtggctgtgggtgtggtggccgt

SEQ ID NO: 71640 - RNA, 23 nt, synthetic construct
  source 1..23: mol_type = other RNA
tggaggaggaagtggctttggaa

SEQ ID NO: 71641 - RNA, 23 nt, synthetic construct
  source 1..23: mol_type = other RNA
ggtgaaggaggggatgggtgtaa

SEQ ID NO: 71642 - RNA, 23 nt, synthetic construct
  source 1..23: mol_type = other RNA
tgaggatccaggtcgtccccgga

SEQ ID NO: 71643 - RNA, 23 nt, synthetic construct
  source 1..23: mol_type = other RNA
cggggtggccgtggggccagtgg

SEQ ID NO: 71644 - RNA, 23 nt, synthetic construct
  source 1..23: mol_type = other RNA
ggggtggaggacggggtggccgt

SEQ ID NO: 71645 - RNA, 23 nt, synthetic construct
  source 1..23: mol_type = other RNA
tggggtggaggacggggtggccg

SEQ ID NO: 71646 - RNA, 23 nt, synthetic construct
  source 1..23: mol_type = other RNA
ggaggaggcggtggccgtggatc

SEQ ID NO: 71647 - RNA, 23 nt, synthetic construct
  source 1..23: mol_type = other RNA
tggaggaggcggtggccgtggat

SEQ ID NO: 71648 - RNA, 23 nt, synthetic construct
  source 1..23: mol_type = other RNA
ggttgcagtccctggactggagg

SEQ ID NO: 71649 - RNA, 23 nt, synthetic construct
  source 1..23: mol_type = other RNA
ggaggaagaggggatggctgtaa

SEQ ID NO: 71650 - RNA, 23 nt, synthetic construct
  source 1..23: mol_type = other RNA
cagggaggaagaggggatggctg

SEQ ID NO: 71651 - RNA, 23 nt, synthetic construct
  source 1..23: mol_type = other RNA
ggtggaggagggggtggccacag

SEQ ID NO: 71652 - RNA, 23 nt, synthetic construct
  source 1..23: mol_type = other RNA
ggatggaggagggggtcaccgtg

SEQ ID NO: 71653 - RNA, 23 nt, synthetic construct
  source 1..23: mol_type = other RNA
tgctgctggtggctgcaggtgtg

SEQ ID NO: 71654 - RNA, 23 nt, synthetic construct
  source 1..23: mol_type = other RNA
gtgctgctggtggctgcaggtgt

SEQ ID NO: 71655 - RNA, 23 nt, synthetic construct
  source 1..23: mol_type = other RNA
ggcactgggggtgtgtgggtggt

SEQ ID NO: 71656 - RNA, 23 nt, synthetic construct
  source 1..23: mol_type = other RNA
aagtccaggctgtgcgcaccgtg

SEQ ID NO: 71657 - RNA, 23 nt, synthetic construct
  source 1..23: mol_type = other RNA
tgctgggtggtactggtggttgc

SEQ ID NO: 71658 - RNA, 23 nt, synthetic construct
  source 1..23: mol_type = other RNA
gctgtggctgtggtcctggaggt

SEQ ID NO: 71659 - RNA, 23 nt, synthetic construct
  source 1..23: mol_type = other RNA
tcttgctgggtgtggctgtggct

SEQ ID NO: 71660 - RNA, 23 nt, synthetic construct
  source 1..23: mol_type = other RNA
acaccaggctgggcctgggcacg

SEQ ID NO: 71661 - RNA, 23 nt, synthetic construct
  source 1..23: mol_type = other RNA
tgaggatccaggtcgtccccgga

SEQ ID NO: 71662 - RNA, 23 nt, synthetic construct
  source 1..23: mol_type = other RNA
gtagtggctgttgtggtcagctt

SEQ ID NO: 71663 - RNA, 23 nt, synthetic construct
  source 1..23: mol_type = other RNA
ggggtggaggacggggtggccgt

SEQ ID NO: 71664 - RNA, 23 nt, synthetic construct
  source 1..23: mol_type = other RNA
tggggtggaggacggggtggccg

SEQ ID NO: 71665 - RNA, 23 nt, synthetic construct
  source 1..23: mol_type = other RNA
ggaggaggcggtggccgtggatc

SEQ ID NO: 71666 - RNA, 23 nt, synthetic construct
  source 1..23: mol_type = other RNA
tggaggaggcggtggccgtggat

SEQ ID NO: 71667 - RNA, 23 nt, synthetic construct
  source 1..23: mol_type = other RNA
tgccagcagttgcctgggtggag

SEQ ID NO: 71668 - RNA, 23 nt, synthetic construct
  source 1..23: mol_type = other RNA
ggttgcagtccctggactggaga

SEQ ID NO: 71669 - RNA, 23 nt, synthetic construct
  source 1..23: mol_type = other RNA
tggggtggaagagggggtggcca

SEQ ID NO: 71670 - RNA, 23 nt, synthetic construct
  source 1..23: mol_type = other RNA
ctggggtggaagagggggtggcc

SEQ ID NO: 71671 - RNA, 23 nt, synthetic construct
  source 1..23: mol_type = other RNA
ttcctggggtggaagagggggtg

SEQ ID NO: 71672 - RNA, 23 nt, synthetic construct
  source 1..23: mol_type = other RNA
gggctggaggagggggtgactgt

SEQ ID NO: 71673 - RNA, 23 nt, synthetic construct
  source 1..23: mol_type = other RNA
tgctgctggtggctgcaggtgtg

SEQ ID NO: 71674 - RNA, 23 nt, synthetic construct
  source 1..23: mol_type = other RNA
gtgctgctggtggctgcaggtgt

SEQ ID NO: 71675 - RNA, 23 nt, synthetic construct
  source 1..23: mol_type = other RNA
ggcactgggggtgtgtgggtggt

SEQ ID NO: 71676 - RNA, 23 nt, synthetic construct
  source 1..23: mol_type = other RNA
aagtccaggctgtgcgcaccgtg

SEQ ID NO: 71677 - RNA, 23 nt, synthetic construct
  source 1..23: mol_type = other RNA
ggtgtggccgtggccgtggtcct

SEQ ID NO: 71678 - RNA, 23 nt, synthetic construct
  source 1..23: mol_type = other RNA
acaccaggctgggcctgggcacg

SEQ ID NO: 71679 - RNA, 23 nt, synthetic construct
  source 1..23: mol_type = other RNA
tgaggatccaggtcgtccccgga

SEQ ID NO: 71680 - RNA, 23 nt, synthetic construct
  source 1..23: mol_type = other RNA
tggctgttgtggtcagctctgtg

SEQ ID NO: 71681 - RNA, 23 nt, synthetic construct
  source 1..23: mol_type = other RNA
gtagtggctgttgtggtcagctc

SEQ ID NO: 71682 - RNA, 23 nt, synthetic construct
  source 1..23: mol_type = other RNA
cgtggatccagtggatgcagtcg

SEQ ID NO: 71683 - RNA, 23 nt, synthetic construct
  source 1..23: mol_type = other RNA
ggggtggaggacggggtggccgt

SEQ ID NO: 71684 - RNA, 23 nt, synthetic construct
  source 1..23: mol_type = other RNA
cggggtggaggacggggtggccg

SEQ ID NO: 71685 - RNA, 23 nt, synthetic construct
  source 1..23: mol_type = other RNA
tcagcactttgggagggggagct

SEQ ID NO: 71686 - RNA, 23 nt, synthetic construct
  source 1..23: mol_type = other RNA
gtggctgtgggtgtggtggccgg

SEQ ID NO: 71687 - RNA, 23 nt, synthetic construct
  source 1..23: mol_type = other RNA
tggaggaggaagtggctttggaa

SEQ ID NO: 71688 - RNA, 23 nt, synthetic construct
  source 1..23: mol_type = other RNA
tgaggatccaggtcgtccccgga

SEQ ID NO: 71689 - RNA, 23 nt, synthetic construct
  source 1..23: mol_type = other RNA
cggggtggccgtggggccagtgg

SEQ ID NO: 71690 - RNA, 23 nt, synthetic construct
  source 1..23: mol_type = other RNA
ggggtggaggacggggtggccgt

SEQ ID NO: 71691 - RNA, 23 nt, synthetic construct
  source 1..23: mol_type = other RNA
tggggtggaggacggggtggccg

SEQ ID NO: 71692 - RNA, 23 nt, synthetic construct
  source 1..23: mol_type = other RNA
tggctgttgtggtcagctctgtg

SEQ ID NO: 71693 - RNA, 23 nt, synthetic construct
  source 1..23: mol_type = other RNA
gtagtggctgttgtggtcagctc

SEQ ID NO: 71694 - RNA, 23 nt, synthetic construct
  source 1..23: mol_type = other RNA
tggatccagtggacgcagtcgta

SEQ ID NO: 71695 - RNA, 23 nt, synthetic construct
  source 1..23: mol_type = other RNA
ggggtggaggacggggtggccgt

SEQ ID NO: 71696 - RNA, 23 nt, synthetic construct
  source 1..23: mol_type = other RNA
tggggtggaggacggggtggccg

SEQ ID NO: 71697 - RNA, 23 nt, synthetic construct
  source 1..23: mol_type = other RNA
ggaggaggcggtggccgtggatc

SEQ ID NO: 71698 - RNA, 23 nt, synthetic construct
  source 1..23: mol_type = other RNA
tggaggaggcggtggccgtggat

SEQ ID NO: 71699 - RNA, 23 nt, synthetic construct
  source 1..23: mol_type = other RNA
tgccagcagttgcctgggtggag

SEQ ID NO: 71700 - RNA, 23 nt, synthetic construct
  source 1..23: mol_type = other RNA
agttgcagtccctggactggagg

SEQ ID NO: 71701 - RNA, 23 nt, synthetic construct
  source 1..23: mol_type = other RNA
ggtggaggagggggtggccacag

SEQ ID NO: 71702 - RNA, 23 nt, synthetic construct
  source 1..23: mol_type = other RNA
ggatggaggagggggtcaccgtg

SEQ ID NO: 71703 - RNA, 23 nt, synthetic construct
  source 1..23: mol_type = other RNA
ggaagtggctttggagctggtgg

SEQ ID NO: 71704 - RNA, 23 nt, synthetic construct
  source 1..23: mol_type = other RNA
tggaggaggaagtggctttggag

SEQ ID NO: 71705 - RNA, 23 nt, synthetic construct
  source 1..23: mol_type = other RNA
acagggtggaggaggggatgggt

SEQ ID NO: 71706 - RNA, 23 nt, synthetic construct
  source 1..23: mol_type = other RNA
tgtcatggtggctgtggtggtca

SEQ ID NO: 71707 - RNA, 23 nt, synthetic construct
  source 1..23: mol_type = other RNA
ttgtcatggtggctgtggtggtc

SEQ ID NO: 71708 - RNA, 23 nt, synthetic construct
  source 1..23: mol_type = other RNA
gaggagggtgtggccgtggaatt

SEQ ID NO: 71709 - RNA, 23 nt, synthetic construct
  source 1..23: mol_type = other RNA
gtagtggctgttgtggtcagctc

SEQ ID NO: 71710 - RNA, 23 nt, synthetic construct
  source 1..23: mol_type = other RNA
gtccctggggtggaggacagggt

SEQ ID NO: 71711 - RNA, 23 nt, synthetic construct
  source 1..23: mol_type = other RNA
ggtccctggggtggaggacaggg

SEQ ID NO: 71712 - RNA, 23 nt, synthetic construct
  source 1..23: mol_type = other RNA
ggaggaggcggtggccgtggaac

SEQ ID NO: 71713 - RNA, 23 nt, synthetic construct
  source 1..23: mol_type = other RNA
tggaggaggcggtggccgtggaa

SEQ ID NO: 71714 - RNA, 23 nt, synthetic construct
  source 1..23: mol_type = other RNA
gagctggggaagccagtgggtct

SEQ ID NO: 71715 - RNA, 23 nt, synthetic construct
  source 1..23: mol_type = other RNA
ggagctggggaagccagtgggtc

SEQ ID NO: 71716 - RNA, 23 nt, synthetic construct
  source 1..23: mol_type = other RNA
gcgggcggcagcggcagtggcag

SEQ ID NO: 71717 - RNA, 23 nt, synthetic construct
  source 1..23: mol_type = other RNA
tgagggcgcgggggcagcgggcg

SEQ ID NO: 71718 - RNA, 23 nt, synthetic construct
  source 1..23: mol_type = other RNA
cctggaagacttggccattgaag

SEQ ID NO: 71719 - RNA, 23 nt, synthetic construct
  source 1..23: mol_type = other RNA
gggcatggggtgggggtgggtgt

SEQ ID NO: 71720 - RNA, 23 nt, synthetic construct
  source 1..23: mol_type = other RNA
gtgggcatggggtgggggtgggt

SEQ ID NO: 71721 - RNA, 23 nt, synthetic construct
  source 1..23: mol_type = other RNA
ggtgggtgggcaggtgaggtcgc

SEQ ID NO: 71722 - RNA, 23 nt, synthetic construct
  source 1..23: mol_type = other RNA
agctgtgggctctggttcctaga

SEQ ID NO: 71723 - RNA, 23 nt, synthetic construct
  source 1..23: mol_type = other RNA
tcaaagccctggggacaggtagt

SEQ ID NO: 71724 - RNA, 23 nt, synthetic construct
  source 1..23: mol_type = other RNA
cagcactttgggagggggagctg

SEQ ID NO: 71725 - RNA, 23 nt, synthetic construct
  source 1..23: mol_type = other RNA
cagcactttgggagggggagctg

SEQ ID NO: 71726 - RNA, 23 nt, synthetic construct
  source 1..23: mol_type = other RNA
cagcactttgggagggggagctg

SEQ ID NO: 71727 - RNA, 23 nt, synthetic construct
  source 1..23: mol_type = other RNA
caagggtggaggaggggatgggt

SEQ ID NO: 71728 - RNA, 23 nt, synthetic construct
  source 1..23: mol_type = other RNA
cagagtggaggaggcggtggccg

SEQ ID NO: 71729 - RNA, 23 nt, synthetic construct
  source 1..23: mol_type = other RNA
ctgttcccagagtggaggaggcg

SEQ ID NO: 71730 - RNA, 23 nt, synthetic construct
  source 1..23: mol_type = other RNA
cctcctccttcccatgcaccatg

SEQ ID NO: 71731 - RNA, 23 nt, synthetic construct
  source 1..23: mol_type = other RNA
caccaggctgggcctgggcacgg

SEQ ID NO: 71732 - RNA, 23 nt, synthetic construct
  source 1..23: mol_type = other RNA
caccaggctgggcctgggcacgg

SEQ ID NO: 71733 - RNA, 23 nt, synthetic construct
  source 1..23: mol_type = other RNA
caccaggctgggcctgggcacgg

SEQ ID NO: 71734 - RNA, 23 nt, synthetic construct
  source 1..23: mol_type = other RNA
caccaggctgggcctgggcacgg

SEQ ID NO: 71735 - RNA, 23 nt, synthetic construct
  source 1..23: mol_type = other RNA
ggaagtggctttggaactggtgg

SEQ ID NO: 71736 - RNA, 23 nt, synthetic construct
  source 1..23: mol_type = other RNA
ggaagtggctttggaactggtgg

SEQ ID NO: 71737 - RNA, 23 nt, synthetic construct
  source 1..23: mol_type = other RNA
ggggctgcacaccctgtgctttt

SEQ ID NO: 71738 - RNA, 23 nt, synthetic construct
  source 1..23: mol_type = other RNA
gggggctgcacaccctgtgcttt

SEQ ID NO: 71739 - RNA, 23 nt, synthetic construct
  source 1..23: mol_type = other RNA
gtggaggaggcggtggccgtgga

SEQ ID NO: 71740 - RNA, 23 nt, synthetic construct
  source 1..23: mol_type = other RNA
aggaagtggctttggaactggtg

SEQ ID NO: 71741 - RNA, 23 nt, synthetic construct
  source 1..23: mol_type = other RNA
gtggaggaggcggtggccgtgga

SEQ ID NO: 71742 - RNA, 23 nt, synthetic construct
  source 1..23: mol_type = other RNA
gtggaggaggcggtggccgtgga

SEQ ID NO: 71743 - RNA, 23 nt, synthetic construct
  source 1..23: mol_type = other RNA
aggaagtggctttggaactggtg

SEQ ID NO: 71744 - RNA, 23 nt, synthetic construct
  source 1..23: mol_type = other RNA
gtggaggaggcggtggccgtgga

SEQ ID NO: 71745 - RNA, 23 nt, synthetic construct
  source 1..23: mol_type = other RNA
gtggaggaggcggtggccgtgga

SEQ ID NO: 71746 - RNA, 23 nt, synthetic construct
  source 1..23: mol_type = other RNA
gggctgcacaccctgtgcttttc

SEQ ID NO: 71747 - RNA, 23 nt, synthetic construct
  source 1..23: mol_type = other RNA
gggtggaggacggggtggccgtg

SEQ ID NO: 71748 - RNA, 23 nt, synthetic construct
  source 1..23: mol_type = other RNA
gggtggaggacggggtggccgtg

SEQ ID NO: 71749 - RNA, 23 nt, synthetic construct
  source 1..23: mol_type = other RNA
gggtggaggacggggtggccgtg

SEQ ID NO: 71750 - RNA, 23 nt, synthetic construct
  source 1..23: mol_type = other RNA
gggtggaggacggggtggccgtg

SEQ ID NO: 71751 - RNA, 23 nt, synthetic construct
  source 1..23: mol_type = other RNA
gggtggaggacggggtggccgtg

SEQ ID NO: 71752 - RNA, 23 nt, synthetic construct
  source 1..23: mol_type = other RNA
gggtggaggacggggtggccgtg

SEQ ID NO: 71753 - RNA, 23 nt, synthetic construct
  source 1..23: mol_type = other RNA
ccgtggcctccaccaccccgctg

SEQ ID NO: 71754 - RNA, 23 nt, synthetic construct
  source 1..23: mol_type = other RNA
ggcccagctcctccagcggcatg

SEQ ID NO: 71755 - RNA, 23 nt, synthetic construct
  source 1..23: mol_type = other RNA
tggctggggtactggggcagtgg

SEQ ID NO: 71756 - RNA, 23 nt, synthetic construct
  source 1..23: mol_type = other RNA
agggtgagggctggaaagggctg

SEQ ID NO: 71757 - RNA, 23 nt, synthetic construct
  source 1..23: mol_type = other RNA
ttgctgggtgtggctgtggctgt

SEQ ID NO: 71758 - RNA, 23 nt, synthetic construct
  source 1..23: mol_type = other RNA
cttgctgggtgtggctgtggctg

SEQ ID NO: 71759 - RNA, 23 nt, synthetic construct
  source 1..23: mol_type = other RNA
cggctgtggtgggcatggggtgg

SEQ ID NO: 71760 - RNA, 23 nt, synthetic construct
  source 1..23: mol_type = other RNA
tatagtgctcggctctgtgagga

SEQ ID NO: 71761 - RNA, 23 nt, synthetic construct
  source 1..23: mol_type = other RNA
ccgcacatgcttagtttgttcca

SEQ ID NO: 71762 - RNA, 23 nt, synthetic construct
  source 1..23: mol_type = other RNA
ccgtggcggtaagcactgtggag

SEQ ID NO: 71763 - RNA, 23 nt, synthetic construct
  source 1..23: mol_type = other RNA
ccgtggcggtaagcactgtggag

SEQ ID NO: 71764 - RNA, 23 nt, synthetic construct
  source 1..23: mol_type = other RNA
cgtaagcctccaggctctggcag

SEQ ID NO: 71765 - RNA, 23 nt, synthetic construct
  source 1..23: mol_type = other RNA
acatggtggccatgggtgtggtg

SEQ ID NO: 71766 - RNA, 23 nt, synthetic construct
  source 1..23: mol_type = other RNA
gtagtgctcggctctgtgaggat

SEQ ID NO: 71767 - RNA, 23 nt, synthetic construct
  source 1..23: mol_type = other RNA
gtagtgctcggctctgtgaggat

SEQ ID NO: 71768 - RNA, 23 nt, synthetic construct
  source 1..23: mol_type = other RNA
gtagtgctcggctctgtgaggat

SEQ ID NO: 71769 - RNA, 23 nt, synthetic construct
  source 1..23: mol_type = other RNA
atagtgctcggctctgtgaggat

SEQ ID NO: 71770 - RNA, 23 nt, synthetic construct
  source 1..23: mol_type = other RNA
tgaggagggcgtggccgtggagc

SEQ ID NO: 71771 - RNA, 23 nt, synthetic construct
  source 1..23: mol_type = other RNA
cggcactcgatgtcagccagcac

SEQ ID NO: 71772 - RNA, 23 nt, synthetic construct
  source 1..23: mol_type = other RNA
tctccgttccacaggaatgtcag

SEQ ID NO: 71773 - RNA, 23 nt, synthetic construct
  source 1..23: mol_type = other RNA
gtggtactggtggttgctgctgg

SEQ ID NO: 71774 - RNA, 23 nt, synthetic construct
  source 1..23: mol_type = other RNA
cacagtggacacgctgaaggttg

SEQ ID NO: 71775 - RNA, 23 nt, synthetic construct
  source 1..23: mol_type = other RNA
ccacatgctgcagatgcactcgc

SEQ ID NO: 71776 - RNA, 23 nt, synthetic construct
  source 1..23: mol_type = other RNA
atgtcagccagcacagggcatac

SEQ ID NO: 71777 - RNA, 23 nt, synthetic construct
  source 1..23: mol_type = other RNA
cagagggggctttgggatgctga

SEQ ID NO: 71778 - RNA, 23 nt, synthetic construct
  source 1..23: mol_type = other RNA
cctgctcacggttcctgcagacc

SEQ ID NO: 71779 - RNA, 23 nt, synthetic construct
  source 1..23: mol_type = other RNA
cctgctcacggttcctgcagacc

SEQ ID NO: 71780 - RNA, 23 nt, synthetic construct
  source 1..23: mol_type = other RNA
gctgtggtctgctctgtgaggat

SEQ ID NO: 71781 - RNA, 23 nt, synthetic construct
  source 1..23: mol_type = other RNA
ggtggccgtgctggtcagcactt

SEQ ID NO: 71782 - RNA, 23 nt, synthetic construct
  source 1..23: mol_type = other RNA
ggtggccgtgctggtcagcactt

SEQ ID NO: 71783 - RNA, 23 nt, synthetic construct
  source 1..23: mol_type = other RNA
cctgctcacggttcctgcagacc

SEQ ID NO: 71784 - RNA, 23 nt, synthetic construct
  source 1..23: mol_type = other RNA
cctgctcacggttcctgcagacc

SEQ ID NO: 71785 - RNA, 23 nt, synthetic construct
  source 1..23: mol_type = other RNA
ggccgtgctggtcagcactgggg

SEQ ID NO: 71786 - RNA, 23 nt, synthetic construct
  source 1..23: mol_type = other RNA
ggtggccgtgctggtcagcactg

SEQ ID NO: 71787 - RNA, 23 nt, synthetic construct
  source 1..23: mol_type = other RNA
agcagccatcctttctgctgtcg

SEQ ID NO: 71788 - RNA, 23 nt, synthetic construct
  source 1..23: mol_type = other RNA
ctggccttgcctggaccagcctg

SEQ ID NO: 71789 - RNA, 23 nt, synthetic construct
  source 1..23: mol_type = other RNA
taaagctggtagctgtggatttg

SEQ ID NO: 71790 - RNA, 23 nt, synthetic construct
  source 1..23: mol_type = other RNA
gtagctgtggattttgtggctgt

SEQ ID NO: 71791 - RNA, 23 nt, synthetic construct
  source 1..23: mol_type = other RNA
taaagctggtagctgtggatttt

SEQ ID NO: 71792 - RNA, 23 nt, synthetic construct
  source 1..23: mol_type = other RNA
catcctggctccaggtggacaga

SEQ ID NO: 71793 - RNA, 23 nt, synthetic construct
  source 1..23: mol_type = other RNA
ctgagttaccctgcagcaggcat

SEQ ID NO: 71794 - RNA, 23 nt, synthetic construct
  source 1..23: mol_type = other RNA
gagagggatggcattgtcacagc

SEQ ID NO: 71795 - RNA, 23 nt, synthetic construct
  source 1..23: mol_type = other RNA
gtgcccaagatgcccgaggtggc

SEQ ID NO: 71796 - RNA, 23 nt, synthetic construct
  source 1..23: mol_type = other RNA
tgcccaaggtgcctgaggtggcc

SEQ ID NO: 71797 - RNA, 23 nt, synthetic construct
  source 1..23: mol_type = other RNA
gtgcccaagatgcccgaggtggc

SEQ ID NO: 71798 - RNA, 23 nt, synthetic construct
  source 1..23: mol_type = other RNA
tgcccaaggtgcctgaggtggcc

SEQ ID NO: 71799 - RNA, 23 nt, synthetic construct
  source 1..23: mol_type = other RNA
ggccgccgtcgaccggatgctcg

SEQ ID NO: 71800 - RNA, 23 nt, synthetic construct
  source 1..23: mol_type = other RNA
ggagggagtcactgtgctgctgg

SEQ ID NO: 71801 - RNA, 23 nt, synthetic construct
  source 1..23: mol_type = other RNA
ggagggagtcactgtgctgctgg

SEQ ID NO: 71802 - RNA, 23 nt, synthetic construct
  source 1..23: mol_type = other RNA
ggagggagtcactgtgctgctgg

SEQ ID NO: 71803 - RNA, 23 nt, synthetic construct
  source 1..23: mol_type = other RNA
gatgaacacgctggtcttccggt

SEQ ID NO: 71804 - RNA, 23 nt, synthetic construct
  source 1..23: mol_type = other RNA
gggtgtggccgtggccgtggtcc

SEQ ID NO: 71805 - RNA, 23 nt, synthetic construct
  source 1..23: mol_type = other RNA
gggtgtggccgtggccgtggtcc

SEQ ID NO: 71806 - RNA, 23 nt, synthetic construct
  source 1..23: mol_type = other RNA
attgtgcgccgggttcagggggc

SEQ ID NO: 71807 - RNA, 23 nt, synthetic construct
  source 1..23: mol_type = other RNA
tctatgtccttaggctgctggca

SEQ ID NO: 71808 - RNA, 23 nt, synthetic construct
  source 1..23: mol_type = other RNA
gttgtggtagttggcactttggt

SEQ ID NO: 71809 - RNA, 23 nt, synthetic construct
  source 1..23: mol_type = other RNA
tgtagtgctcggctctgtgagga

SEQ ID NO: 71810 - RNA, 23 nt, synthetic construct
  source 1..23: mol_type = other RNA
tgtagtgctcggctctgtgagga

SEQ ID NO: 71811 - RNA, 23 nt, synthetic construct
  source 1..23: mol_type = other RNA
tgtagtgctcggctctgtgagga

SEQ ID NO: 71812 - RNA, 23 nt, synthetic construct
  source 1..23: mol_type = other RNA
ccttcgtggtcagcactgtggag

SEQ ID NO: 71813 - RNA, 23 nt, synthetic construct
  source 1..23: mol_type = other RNA
ccttcgtggtcagcactgtggag

SEQ ID NO: 71814 - RNA, 23 nt, synthetic construct
  source 1..23: mol_type = other RNA
gttgtggtcagctttgtgaggat

SEQ ID NO: 71815 - RNA, 23 nt, synthetic construct
  source 1..23: mol_type = other RNA
cgaagccgggacggttgcacggc

SEQ ID NO: 71816 - RNA, 23 nt, synthetic construct
  source 1..23: mol_type = other RNA
cccggggcctggtcacggttacg

SEQ ID NO: 71817 - RNA, 23 nt, synthetic construct
  source 1..23: mol_type = other RNA
tgccgtgagcgtagcaggggcac

SEQ ID NO: 71818 - RNA, 23 nt, synthetic construct
  source 1..23: mol_type = other RNA
cagcactttggtagtgtgagctg

SEQ ID NO: 71819 - RNA, 23 nt, synthetic construct
  source 1..23: mol_type = other RNA
cactcccatccgacaccagcccc

SEQ ID NO: 71820 - RNA, 23 nt, synthetic construct
  source 1..23: mol_type = other RNA
ggccatggtgttcggcactgggg

SEQ ID NO: 71821 - RNA, 23 nt, synthetic construct
  source 1..23: mol_type = other RNA
gactcggtggttctgctgctagg

SEQ ID NO: 71822 - RNA, 23 nt, synthetic construct
  source 1..23: mol_type = other RNA
ggtggccgggctggtcagcactt

SEQ ID NO: 71823 - RNA, 23 nt, synthetic construct
  source 1..23: mol_type = other RNA
gtggtggtctgttctgggagggt

SEQ ID NO: 71824 - RNA, 23 nt, synthetic construct
  source 1..23: mol_type = other RNA
gtggtggtctgttctgggagggt

SEQ ID NO: 71825 - RNA, 23 nt, synthetic construct
  source 1..23: mol_type = other RNA
tgtcagcaccagccggatgctga

SEQ ID NO: 71826 - RNA, 23 nt, synthetic construct
  source 1..23: mol_type = other RNA
ggtggtcagcactttgggagggg

SEQ ID NO: 71827 - RNA, 23 nt, synthetic construct
  source 1..23: mol_type = other RNA
ggtgtcgtggccgtggtgctcac

SEQ ID NO: 71828 - RNA, 23 nt, synthetic construct
  source 1..23: mol_type = other RNA
agggagtcactgtgctgctggtg

SEQ ID NO: 71829 - RNA, 23 nt, synthetic construct
  source 1..23: mol_type = other RNA
agggagtcactgtgctgctggtg

SEQ ID NO: 71830 - RNA, 23 nt, synthetic construct
  source 1..23: mol_type = other RNA
ggtgtcgtggccgtggtgctcac

SEQ ID NO: 71831 - RNA, 23 nt, synthetic construct
  source 1..23: mol_type = other RNA
agggagtcactgtgctgctggtg

SEQ ID NO: 71832 - RNA, 23 nt, synthetic construct
  source 1..23: mol_type = other RNA
ggtgtcgtggccgtggtgctcac

SEQ ID NO: 71833 - RNA, 23 nt, synthetic construct
  source 1..23: mol_type = other RNA
ggctgtggtggtcagcactgtgg

SEQ ID NO: 71834 - RNA, 23 nt, synthetic construct
  source 1..23: mol_type = other RNA
caccactttgggggtgtgagctg

SEQ ID NO: 71835 - RNA, 23 nt, synthetic construct
  source 1..23: mol_type = other RNA
gccatggtggtcaccactttggg

SEQ ID NO: 71836 - RNA, 23 nt, synthetic construct
  source 1..23: mol_type = other RNA
ccgtctcggggcagcaggggttc

SEQ ID NO: 71837 - RNA, 23 nt, synthetic construct
  source 1..23: mol_type = other RNA
tccgcagaggaggcccaaggttt

SEQ ID NO: 71838 - RNA, 23 nt, synthetic construct
  source 1..23: mol_type = other RNA
ccccagcagggtgcggtggcaga

SEQ ID NO: 71839 - RNA, 23 nt, synthetic construct
  source 1..23: mol_type = other RNA
gttgtggtcggctttgtgaggat

SEQ ID NO: 71840 - RNA, 23 nt, synthetic construct
  source 1..23: mol_type = other RNA
tcctgcagaccaggccaaagtcc

SEQ ID NO: 71841 - RNA, 23 nt, synthetic construct
  source 1..23: mol_type = other RNA
ccacagagccggtggccccggtt

SEQ ID NO: 71842 - RNA, 23 nt, synthetic construct
  source 1..23: mol_type = other RNA
gcccaaggtgcctgaggtggccg

SEQ ID NO: 71843 - RNA, 23 nt, synthetic construct
  source 1..23: mol_type = other RNA
tcctgcagaccaggccaaagtcc

SEQ ID NO: 71844 - RNA, 23 nt, synthetic construct
  source 1..23: mol_type = other RNA
gctgtggtcagctctgtgaggat

SEQ ID NO: 71845 - RNA, 23 nt, synthetic construct
  source 1..23: mol_type = other RNA
tgctgtggtcagctctgtgagga

SEQ ID NO: 71846 - RNA, 23 nt, synthetic construct
  source 1..23: mol_type = other RNA
gtagtggctgctgtggtcagctc

SEQ ID NO: 71847 - RNA, 23 nt, synthetic construct
  source 1..23: mol_type = other RNA
tcctgcagaccaggccaaagtcc

SEQ ID NO: 71848 - RNA, 23 nt, synthetic construct
  source 1..23: mol_type = other RNA
gcccaaggtgcctgaggtggccg

SEQ ID NO: 71849 - RNA, 23 nt, synthetic construct
  source 1..23: mol_type = other RNA
tcctgcagaccaggccaaagtcc

SEQ ID NO: 71850 - RNA, 23 nt, synthetic construct
  source 1..23: mol_type = other RNA
gctgtggtcagctctgtgaggat

SEQ ID NO: 71851 - RNA, 23 nt, synthetic construct
  source 1..23: mol_type = other RNA
tgctgtggtcagctctgtgagga

SEQ ID NO: 71852 - RNA, 23 nt, synthetic construct
  source 1..23: mol_type = other RNA
gtagtggctgctgtggtcagctc

SEQ ID NO: 71853 - RNA, 23 nt, synthetic construct
  source 1..23: mol_type = other RNA
ccacagagccggtggccccggtt

SEQ ID NO: 71854 - RNA, 23 nt, synthetic construct
  source 1..23: mol_type = other RNA
cgtagaaatggcagccggctcgg

SEQ ID NO: 71855 - RNA, 23 nt, synthetic construct
  source 1..23: mol_type = other RNA
cagggcacctcaaggcggcccct

SEQ ID NO: 71856 - RNA, 23 nt, synthetic construct
  source 1..23: mol_type = other RNA
cgtggacccgcctctcctggcag

SEQ ID NO: 71857 - RNA, 23 nt, synthetic construct
  source 1..23: mol_type = other RNA
tgtctgccccagcggccggacgt

SEQ ID NO: 71858 - RNA, 23 nt, synthetic construct
  source 1..23: mol_type = other RNA
gtgggtgtaggtgtgcaggatgg

SEQ ID NO: 71859 - RNA, 23 nt, synthetic construct
  source 1..23: mol_type = other RNA
gtggaggagggcgtggccgtaga

SEQ ID NO: 71860 - RNA, 23 nt, synthetic construct
  source 1..23: mol_type = other RNA
tggtcagcactttgggaggggga

SEQ ID NO: 71861 - RNA, 23 nt, synthetic construct
  source 1..23: mol_type = other RNA
tggtcagcactttgggaggggga

SEQ ID NO: 71862 - RNA, 23 nt, synthetic construct
  source 1..23: mol_type = other RNA
tggtcagcactttgggaggggga

SEQ ID NO: 71863 - RNA, 23 nt, synthetic construct
  source 1..23: mol_type = other RNA
gtccctggagttgaggaggggtt

SEQ ID NO: 71864 - RNA, 23 nt, synthetic construct
  source 1..23: mol_type = other RNA
gtccctggagttgaggaggggtt

SEQ ID NO: 71865 - RNA, 23 nt, synthetic construct
  source 1..23: mol_type = other RNA
gtccctggagttgaggaggggtt

SEQ ID NO: 71866 - RNA, 23 nt, synthetic construct
  source 1..23: mol_type = other RNA
gtccctggagttgaggaggggtt

SEQ ID NO: 71867 - RNA, 23 nt, synthetic construct
  source 1..23: mol_type = other RNA
tagtggccatggtggtcaccact

SEQ ID NO: 71868 - RNA, 23 nt, synthetic construct
  source 1..23: mol_type = other RNA
gtggagaccgggagggccgggct

SEQ ID NO: 71869 - RNA, 23 nt, synthetic construct
  source 1..23: mol_type = other RNA
caaagtccaggctgcattccacg

SEQ ID NO: 71870 - RNA, 23 nt, synthetic construct
  source 1..23: mol_type = other RNA
caaagtccaggctgcattccacg

SEQ ID NO: 71871 - RNA, 23 nt, synthetic construct
  source 1..23: mol_type = other RNA
caaagtccaggctgcattccacg

SEQ ID NO: 71872 - RNA, 23 nt, synthetic construct
  source 1..23: mol_type = other RNA
caaagtccaggctgcattccacg

SEQ ID NO: 71873 - RNA, 23 nt, synthetic construct
  source 1..23: mol_type = other RNA
cccacagtagtcctgggccaaga

SEQ ID NO: 71874 - RNA, 23 nt, synthetic construct
  source 1..23: mol_type = other RNA
ctcctggtgctgcatgttgaggg

SEQ ID NO: 71875 - RNA, 23 nt, synthetic construct
  source 1..23: mol_type = other RNA
ggagctgcaggtggtgttgaagg

SEQ ID NO: 71876 - RNA, 23 nt, synthetic construct
  source 1..23: mol_type = other RNA
gccagcgtgggtggctgtgaggg

SEQ ID NO: 71877 - RNA, 23 nt, synthetic construct
  source 1..23: mol_type = other RNA
cgctgtggggacccttgcaccga

SEQ ID NO: 71878 - RNA, 23 nt, synthetic construct
  source 1..23: mol_type = other RNA
gttgtggtcagctctgtgaggat

SEQ ID NO: 71879 - RNA, 23 nt, synthetic construct
  source 1..23: mol_type = other RNA
gttgtggtcagctctgtgaggat

SEQ ID NO: 71880 - RNA, 23 nt, synthetic construct
  source 1..23: mol_type = other RNA
gttgtggtcagctctgtgaggat

SEQ ID NO: 71881 - RNA, 23 nt, synthetic construct
  source 1..23: mol_type = other RNA
acaggaatgtcagcaccagccgg

SEQ ID NO: 71882 - RNA, 23 nt, synthetic construct
  source 1..23: mol_type = other RNA
gcaagtgggctggcaggcatcca

SEQ ID NO: 71883 - RNA, 23 nt, synthetic construct
  source 1..23: mol_type = other RNA
gtagtgctgggctctgtgaggat

SEQ ID NO: 71884 - RNA, 23 nt, synthetic construct
  source 1..23: mol_type = other RNA
tgtagtgctgggctctgtgagga

SEQ ID NO: 71885 - RNA, 23 nt, synthetic construct
  source 1..23: mol_type = other RNA
cgtggatccagtggctgcagttg

SEQ ID NO: 71886 - RNA, 23 nt, synthetic construct
  source 1..23: mol_type = other RNA
catggcctgggcctctgctgagt

SEQ ID NO: 71887 - RNA, 23 nt, synthetic construct
  source 1..23: mol_type = other RNA
cattgtaccagctggaccagcgg

SEQ ID NO: 71888 - RNA, 23 nt, synthetic construct
  source 1..23: mol_type = other RNA
tagtccagccactctgaccaggc

SEQ ID NO: 71889 - RNA, 23 nt, synthetic construct
  source 1..23: mol_type = other RNA
tagtccagccactctgaccaggc

SEQ ID NO: 71890 - RNA, 23 nt, synthetic construct
  source 1..23: mol_type = other RNA
tagtccagccactctgaccaggc

SEQ ID NO: 71891 - RNA, 23 nt, synthetic construct
  source 1..23: mol_type = other RNA
tagtccagccactctgaccaggc

SEQ ID NO: 71892 - RNA, 23 nt, synthetic construct
  source 1..23: mol_type = other RNA
gtcctcagggcagaagcagccct

SEQ ID NO: 71893 - RNA, 23 nt, synthetic construct
  source 1..23: mol_type = other RNA
cagcgggcggcagcggcagtggc

SEQ ID NO: 71894 - RNA, 23 nt, synthetic construct
  source 1..23: mol_type = other RNA
gtcgtggcaggcctgggcgtagg

SEQ ID NO: 71895 - RNA, 23 nt, synthetic construct
  source 1..23: mol_type = other RNA
gtgcccagggaggaggaggggat

SEQ ID NO: 71896 - RNA, 23 nt, synthetic construct
  source 1..23: mol_type = other RNA
gtgcccagggaggaggaggggat

SEQ ID NO: 71897 - RNA, 23 nt, synthetic construct
  source 1..23: mol_type = other RNA
gtgcccagggaggaggaggggat

SEQ ID NO: 71898 - RNA, 23 nt, synthetic construct
  source 1..23: mol_type = other RNA
agcgggcggcagcggcagtggca

SEQ ID NO: 71899 - RNA, 23 nt, synthetic construct
  source 1..23: mol_type = other RNA
caccggggctgcggggctggcag

SEQ ID NO: 71900 - RNA, 23 nt, synthetic construct
  source 1..23: mol_type = other RNA
gcttagtttgttccagggcgtcc

SEQ ID NO: 71901 - RNA, 23 nt, synthetic construct
  source 1..23: mol_type = other RNA
tgtgggtggtccctagggcagag

SEQ ID NO: 71902 - RNA, 23 nt, synthetic construct
  source 1..23: mol_type = other RNA
tgtgggtggtccctagggcagag

SEQ ID NO: 71903 - RNA, 23 nt, synthetic construct
  source 1..23: mol_type = other RNA
tgtgggtggtccctagggcagag

SEQ ID NO: 71904 - RNA, 23 nt, synthetic construct
  source 1..23: mol_type = other RNA
tgtgggtggtccctagggcagag

SEQ ID NO: 71905 - RNA, 23 nt, synthetic construct
  source 1..23: mol_type = other RNA
gcatcctcctgacattgcaccgt

SEQ ID NO: 71906 - RNA, 23 nt, synthetic construct
  source 1..23: mol_type = other RNA
gccgcacttccgcagctcagcca

SEQ ID NO: 71907 - RNA, 23 nt, synthetic construct
  source 1..23: mol_type = other RNA
agcaaagacctggctcagcatca

SEQ ID NO: 71908 - RNA, 23 nt, synthetic construct
  source 1..23: mol_type = other RNA
ctgctcacagactgcccctccgg

SEQ ID NO: 71909 - RNA, 23 nt, synthetic construct
  source 1..23: mol_type = other RNA
gccgggctggtcagcactttggg

SEQ ID NO: 71910 - RNA, 23 nt, synthetic construct
  source 1..23: mol_type = other RNA
ctgtggtggtcagcactgtggag

SEQ ID NO: 71911 - RNA, 23 nt, synthetic construct
  source 1..23: mol_type = other RNA
cgggtgtgtgggggagccatggg

SEQ ID NO: 71912 - RNA, 23 nt, synthetic construct
  source 1..23: mol_type = other RNA
ccacacacaggccggggggctcc

SEQ ID NO: 71913 - RNA, 23 nt, synthetic construct
  source 1..23: mol_type = other RNA
gccacacacaggccggggggctc

SEQ ID NO: 71914 - RNA, 23 nt, synthetic construct
  source 1..23: mol_type = other RNA
cgtcatagtagtttccgtccttg

SEQ ID NO: 71915 - RNA, 23 nt, synthetic construct
  source 1..23: mol_type = other RNA
gccaagatgtactcgcagctgcc

SEQ ID NO: 71916 - RNA, 23 nt, synthetic construct
  source 1..23: mol_type = other RNA
ggcggtggtggtcagcactgggg

SEQ ID NO: 71917 - RNA, 23 nt, synthetic construct
  source 1..23: mol_type = other RNA
ggtggcggtggtggtcagcactg

SEQ ID NO: 71918 - RNA, 23 nt, synthetic construct
  source 1..23: mol_type = other RNA
tggtaccggtggttgctgctagg

SEQ ID NO: 71919 - RNA, 23 nt, synthetic construct
  source 1..23: mol_type = other RNA
gtggtaccggtggttgctgctag

SEQ ID NO: 71920 - RNA, 23 nt, synthetic construct
  source 1..23: mol_type = other RNA
ggcggtggtggtcagcactgggg

SEQ ID NO: 71921 - RNA, 23 nt, synthetic construct
  source 1..23: mol_type = other RNA
ggtggcggtggtggtcagcactg

SEQ ID NO: 71922 - RNA, 23 nt, synthetic construct
  source 1..23: mol_type = other RNA
tggtaccggtggttgctgctggg

SEQ ID NO: 71923 - RNA, 23 nt, synthetic construct
  source 1..23: mol_type = other RNA
gtggtaccggtggttgctgctgg

SEQ ID NO: 71924 - RNA, 23 nt, synthetic construct
  source 1..23: mol_type = other RNA
ggcggtggtggtcagcactgggg

SEQ ID NO: 71925 - RNA, 23 nt, synthetic construct
  source 1..23: mol_type = other RNA
ggtggcggtggtggtcagcactg

SEQ ID NO: 71926 - RNA, 23 nt, synthetic construct
  source 1..23: mol_type = other RNA
tggtactggtggttgctgctggg

SEQ ID NO: 71927 - RNA, 23 nt, synthetic construct
  source 1..23: mol_type = other RNA
ggcggtggtggtcagcactgggg

SEQ ID NO: 71928 - RNA, 23 nt, synthetic construct
  source 1..23: mol_type = other RNA
ggtggcggtggtggtcagcactg

SEQ ID NO: 71929 - RNA, 23 nt, synthetic construct
  source 1..23: mol_type = other RNA
tggtaccggtggttgctgctggg

SEQ ID NO: 71930 - RNA, 23 nt, synthetic construct
  source 1..23: mol_type = other RNA
gtggtaccggtggttgctgctgg

SEQ ID NO: 71931 - RNA, 23 nt, synthetic construct
  source 1..23: mol_type = other RNA
tggcccaactcccccagggggac

SEQ ID NO: 71932 - RNA, 23 nt, synthetic construct
  source 1..23: mol_type = other RNA
ggttgtgttgcacacgcacaccg

SEQ ID NO: 71933 - RNA, 23 nt, synthetic construct
  source 1..23: mol_type = other RNA
ccctggggacaggtagtattgtt

SEQ ID NO: 71934 - RNA, 23 nt, synthetic construct
  source 1..23: mol_type = other RNA
cgtccacacagtggtcctcgcag

SEQ ID NO: 71935 - RNA, 23 nt, synthetic construct
  source 1..23: mol_type = other RNA
gagggagtcactgtgctgctggt

SEQ ID NO: 71936 - RNA, 23 nt, synthetic construct
  source 1..23: mol_type = other RNA
ctgaggtggccgaagtccaggct

SEQ ID NO: 71937 - RNA, 23 nt, synthetic construct
  source 1..23: mol_type = other RNA
gagggagtcactgtgctgctggt

SEQ ID NO: 71938 - RNA, 23 nt, synthetic construct
  source 1..23: mol_type = other RNA
gagggagtcactgtgctgctggt

SEQ ID NO: 71939 - RNA, 23 nt, synthetic construct
  source 1..23: mol_type = other RNA
ctgaggtggccgaagtccaggct

SEQ ID NO: 71940 - RNA, 23 nt, synthetic construct
  source 1..23: mol_type = other RNA
agtcggggcccagcagccatcct

SEQ ID NO: 71941 - RNA, 23 nt, synthetic construct
  source 1..23: mol_type = other RNA
gtgtgcaggatggctgagccgtt

SEQ ID NO: 71942 - RNA, 23 nt, synthetic construct
  source 1..23: mol_type = other RNA
gggacacataggcccgcacatgc

SEQ ID NO: 71943 - RNA, 23 nt, synthetic construct
  source 1..23: mol_type = other RNA
cctcgttgtgcacacaggggcag

SEQ ID NO: 71944 - RNA, 23 nt, synthetic construct
  source 1..23: mol_type = other RNA
cgagctctggaggttgccattgt

SEQ ID NO: 71945 - RNA, 23 nt, synthetic construct
  source 1..23: mol_type = other RNA
ctcgcagaaggtgatgttgacct

SEQ ID NO: 71946 - RNA, 23 nt, synthetic construct
  source 1..23: mol_type = other RNA
agccctgagttaccctgcagcag

SEQ ID NO: 71947 - RNA, 23 nt, synthetic construct
  source 1..23: mol_type = other RNA
tggaagtcaccccaggtgctgca

SEQ ID NO: 71948 - RNA, 23 nt, synthetic construct
  source 1..23: mol_type = other RNA
ggtactggtggttgctgctgggg

SEQ ID NO: 71949 - RNA, 23 nt, synthetic construct
  source 1..23: mol_type = other RNA
cacttccgcagctcagccagcac

SEQ ID NO: 71950 - RNA, 23 nt, synthetic construct
  source 1..23: mol_type = other RNA
tcaaacgtctcaaagtctccgcc

SEQ ID NO: 71951 - RNA, 23 nt, synthetic construct
  source 1..23: mol_type = other RNA
agggggagctgttctcagggtgg

SEQ ID NO: 71952 - RNA, 23 nt, synthetic construct
  source 1..23: mol_type = other RNA
ctgcagttgtagtggctgctgtg

SEQ ID NO: 71953 - RNA, 23 nt, synthetic construct
  source 1..23: mol_type = other RNA
ctgcagttgtagtggctgctgtg

SEQ ID NO: 71954 - RNA, 23 nt, synthetic construct
  source 1..23: mol_type = other RNA
tccaggtagaggctgagattccc

SEQ ID NO: 71955 - RNA, 23 nt, synthetic construct
  source 1..23: mol_type = other RNA
gtgcagtagtggttgtccaggta

SEQ ID NO: 71956 - RNA, 23 nt, synthetic construct
  source 1..23: mol_type = other RNA
cccacggggtgggcagcaggagc

SEQ ID NO: 71957 - RNA, 23 nt, synthetic construct
  source 1..23: mol_type = other RNA
ccagctggaatccgtgctgcgcg

SEQ ID NO: 71958 - RNA, 23 nt, synthetic construct
  source 1..23: mol_type = other RNA
acggtgaagctgctgtcggcaca

SEQ ID NO: 71959 - RNA, 23 nt, synthetic construct
  source 1..23: mol_type = other RNA
ggggactctgttggctgttggcg

SEQ ID NO: 71960 - RNA, 23 nt, synthetic construct
  source 1..23: mol_type = other RNA
gtggtcagcactttgggaggggg

SEQ ID NO: 71961 - RNA, 23 nt, synthetic construct
  source 1..23: mol_type = other RNA
ctagggtgagggctggacagggc

SEQ ID NO: 71962 - RNA, 23 nt, synthetic construct
  source 1..23: mol_type = other RNA
ctggtcagcactttgggaggggg

SEQ ID NO: 71963 - RNA, 23 nt, synthetic construct
  source 1..23: mol_type = other RNA
ctagggtgagggctggacagggc

SEQ ID NO: 71964 - RNA, 23 nt, synthetic construct
  source 1..23: mol_type = other RNA
ctagggtgagggctggacagggc

SEQ ID NO: 71965 - RNA, 23 nt, synthetic construct
  source 1..23: mol_type = other RNA
ctggtcagcactttgggaggggg

SEQ ID NO: 71966 - RNA, 23 nt, synthetic construct
  source 1..23: mol_type = other RNA
tagctgtggattttgtggctgtg

SEQ ID NO: 71967 - RNA, 23 nt, synthetic construct
  source 1..23: mol_type = other RNA
cacgtgggtgtaggtgtgcagga

SEQ ID NO: 71968 - RNA, 23 nt, synthetic construct
  source 1..23: mol_type = other RNA
gtggctgtaccaagggtgcttgt

SEQ ID NO: 71969 - RNA, 23 nt, synthetic construct
  source 1..23: mol_type = other RNA
gttaggacagtgcaagggcaccg

SEQ ID NO: 71970 - RNA, 23 nt, synthetic construct
  source 1..23: mol_type = other RNA
gcaaagtcattgatggcattgtc

SEQ ID NO: 71971 - RNA, 23 nt, synthetic construct
  source 1..23: mol_type = other RNA
tgtggctgtgcttgtcagcactg

SEQ ID NO: 71972 - RNA, 23 nt, synthetic construct
  source 1..23: mol_type = other RNA
agtggcaccagctgcaccagcag

SEQ ID NO: 71973 - RNA, 23 nt, synthetic construct
  source 1..23: mol_type = other RNA
gccagcacggtgaagctgctgtc

SEQ ID NO: 71974 - RNA, 23 nt, synthetic construct
  source 1..23: mol_type = other RNA
aggcggtggccgtggatccggtg

SEQ ID NO: 71975 - RNA, 23 nt, synthetic construct
  source 1..23: mol_type = other RNA
aggcggtggccgtggatccggtg

SEQ ID NO: 71976 - RNA, 23 nt, synthetic construct
  source 1..23: mol_type = other RNA
aggcggtggccgtggatccggtg

SEQ ID NO: 71977 - RNA, 23 nt, synthetic construct
  source 1..23: mol_type = other RNA
aggcggtggccgtggatccggtg

SEQ ID NO: 71978 - RNA, 23 nt, synthetic construct
  source 1..23: mol_type = other RNA
caaaggtggaatagtgggagccg

SEQ ID NO: 71979 - RNA, 23 nt, synthetic construct
  source 1..23: mol_type = other RNA
tttcatgatcagacaatgcacat

SEQ ID NO: 71980 - RNA, 23 nt, synthetic construct
  source 1..23: mol_type = other RNA
tgcagggtgagccacactcctgg

SEQ ID NO: 71981 - RNA, 23 nt, synthetic construct
  source 1..23: mol_type = other RNA
tggaggtgtgggtggtctccgga

SEQ ID NO: 71982 - RNA, 23 nt, synthetic construct
  source 1..23: mol_type = other RNA
ctctggagctgatgactgtgggt

SEQ ID NO: 71983 - RNA, 23 nt, synthetic construct
  source 1..23: mol_type = other RNA
tggaggtgtgggtggtctccgga

SEQ ID NO: 71984 - RNA, 23 nt, synthetic construct
  source 1..23: mol_type = other RNA
ctgaaggttggcaggctgctggg

SEQ ID NO: 71985 - RNA, 23 nt, synthetic construct
  source 1..23: mol_type = other RNA
ccgagctgttgctgcagtccagg

SEQ ID NO: 71986 - RNA, 23 nt, synthetic construct
  source 1..23: mol_type = other RNA
ccccacccggccctctcgccacc

SEQ ID NO: 71987 - RNA, 23 nt, synthetic construct
  source 1..23: mol_type = other RNA
ggtgacgctcacgcccagggcag

SEQ ID NO: 71988 - RNA, 23 nt, synthetic construct
  source 1..23: mol_type = other RNA
taagcctccaggctctggcaggg

SEQ ID NO: 71989 - RNA, 23 nt, synthetic construct
  source 1..23: mol_type = other RNA
tccagcaggacgacacggttgtc

SEQ ID NO: 71990 - RNA, 23 nt, synthetic construct
  source 1..23: mol_type = other RNA
ccagcgtgggtggctgtgagggg

SEQ ID NO: 71991 - RNA, 23 nt, synthetic construct
  source 1..23: mol_type = other RNA
ggtgtgagctgttcccagagtgg

SEQ ID NO: 71992 - RNA, 23 nt, synthetic construct
  source 1..23: mol_type = other RNA
tgtcacagtgctgattgcacact

SEQ ID NO: 71993 - RNA, 23 nt, synthetic construct
  source 1..23: mol_type = other RNA
ggcaggtggttgtgttgcacacg

SEQ ID NO: 71994 - RNA, 23 nt, synthetic construct
  source 1..23: mol_type = other RNA
actgcccggccactctcttgtac

SEQ ID NO: 71995 - RNA, 23 nt, synthetic construct
  source 1..23: mol_type = other RNA
ggtggagccggtggctgtgatcg

SEQ ID NO: 71996 - RNA, 23 nt, synthetic construct
  source 1..23: mol_type = other RNA
cccacctccggttcctgcaggtg

SEQ ID NO: 71997 - RNA, 23 nt, synthetic construct
  source 1..23: mol_type = other RNA
gctgccttcaaagctgtagcgat

SEQ ID NO: 71998 - RNA, 23 nt, synthetic construct
  source 1..23: mol_type = other RNA
actcgatgtcagccagcacaggg

SEQ ID NO: 71999 - RNA, 23 nt, synthetic construct
  source 1..23: mol_type = other RNA
cacctgctggcccagctcctcca

SEQ ID NO: 72000 - RNA, 23 nt, synthetic construct
  source 1..23: mol_type = other RNA
ggtggtcccaagggtgaaggagg

SEQ ID NO: 72001 - RNA, 23 nt, synthetic construct
  source 1..23: mol_type = other RNA
tggtggtggtccccagcacagac

SEQ ID NO: 72002 - RNA, 23 nt, synthetic construct
  source 1..23: mol_type = other RNA
cacgcccagggcaggaatgtcca

SEQ ID NO: 72003 - RNA, 23 nt, synthetic construct
  source 1..23: mol_type = other RNA
gtgtggtggccgtgctggtcagc

SEQ ID NO: 72004 - RNA, 23 nt, synthetic construct
  source 1..23: mol_type = other RNA
gtgtggtggccgtgctggtcagc

SEQ ID NO: 72005 - RNA, 23 nt, synthetic construct
  source 1..23: mol_type = other RNA
gtgtggtggccgtgctggtcagc

SEQ ID NO: 72006 - RNA, 23 nt, synthetic construct
  source 1..23: mol_type = other RNA
gtcagctcagtgaggatccgggt

SEQ ID NO: 72007 - RNA, 23 nt, synthetic construct
  source 1..23: mol_type = other RNA
ctggaagcggtcaatgtcacagt

SEQ ID NO: 72008 - RNA, 23 nt, synthetic construct
  source 1..23: mol_type = other RNA
agcaggtgtccgtgcagggtgag

SEQ ID NO: 72009 - RNA, 23 nt, synthetic construct
  source 1..23: mol_type = other RNA
tgggcaggtgaggtcgcacaggc

SEQ ID NO: 72010 - RNA, 23 nt, synthetic construct
  source 1..23: mol_type = other RNA
ggacacataggcccgcacatgct

SEQ ID NO: 72011 - RNA, 23 nt, synthetic construct
  source 1..23: mol_type = other RNA
gttccacaggaatgtcagcacca

SEQ ID NO: 72012 - RNA, 23 nt, synthetic construct
  source 1..23: mol_type = other RNA
tgaagctgctgtcggcacatttc

SEQ ID NO: 72013 - RNA, 23 nt, synthetic construct
  source 1..23: mol_type = other RNA
gccttaaaggtcccctcttggag

SEQ ID NO: 72014 - RNA, 23 nt, synthetic construct
  source 1..23: mol_type = other RNA
ggtccttgggtgccagggcgtcc

SEQ ID NO: 72015 - RNA, 23 nt, synthetic construct
  source 1..23: mol_type = other RNA
gcagatggcgatcaagcaggcgc

SEQ ID NO: 72016 - RNA, 23 nt, synthetic construct
  source 1..23: mol_type = other RNA
ccacctgtgccagggtccagttg

SEQ ID NO: 72017 - RNA, 23 nt, synthetic construct
  source 1..23: mol_type = other RNA
ttctcagtgctggaagggcggtt

SEQ ID NO: 72018 - RNA, 23 nt, synthetic construct
  source 1..23: mol_type = other RNA
ttccccacctgctcacggttcct

SEQ ID NO: 72019 - RNA, 23 nt, synthetic construct
  source 1..23: mol_type = other RNA
ttctcagtgctggaagggcggtt

SEQ ID NO: 72020 - RNA, 23 nt, synthetic construct
  source 1..23: mol_type = other RNA
ttccccacctgctcacggttcct

SEQ ID NO: 72021 - RNA, 23 nt, synthetic construct
  source 1..23: mol_type = other RNA
ttctcagtgctggaagggcggtt

SEQ ID NO: 72022 - RNA, 23 nt, synthetic construct
  source 1..23: mol_type = other RNA
ttccccacctgctcacggttcct

SEQ ID NO: 72023 - RNA, 23 nt, synthetic construct
  source 1..23: mol_type = other RNA
ttctcagtgctggaagggcggtt

SEQ ID NO: 72024 - RNA, 23 nt, synthetic construct
  source 1..23: mol_type = other RNA
ttccccacctgctcacggttcct

SEQ ID NO: 72025 - RNA, 23 nt, synthetic construct
  source 1..23: mol_type = other RNA
ttctcagtgctggaagggcagtt

SEQ ID NO: 72026 - RNA, 23 nt, synthetic construct
  source 1..23: mol_type = other RNA
gtccacgtggtccacagggtgga

SEQ ID NO: 72027 - RNA, 23 nt, synthetic construct
  source 1..23: mol_type = other RNA
agccgccccacatgctgcagatg

SEQ ID NO: 72028 - RNA, 23 nt, synthetic construct
  source 1..23: mol_type = other RNA
tcggggcagcaggggttctcggc

SEQ ID NO: 72029 - RNA, 23 nt, synthetic construct
  source 1..23: mol_type = other RNA
acatgtggcagggaagggcgcct

SEQ ID NO: 72030 - RNA, 23 nt, synthetic construct
  source 1..23: mol_type = other RNA
gttgtccacatggctgttgaccc

SEQ ID NO: 72031 - RNA, 23 nt, synthetic construct
  source 1..23: mol_type = other RNA
agccacactcctggtgctgcatg

SEQ ID NO: 72032 - RNA, 23 nt, synthetic construct
  source 1..23: mol_type = other RNA
tgagccacactcctggtgctgca

SEQ ID NO: 72033 - RNA, 23 nt, synthetic construct
  source 1..23: mol_type = other RNA
gccccacctgtgccagggtccag

SEQ ID NO: 72034 - RNA, 23 nt, synthetic construct
  source 1..23: mol_type = other RNA
tgggagggggagctgttctcagg

SEQ ID NO: 72035 - RNA, 23 nt, synthetic construct
  source 1..23: mol_type = other RNA
ggctgtgcttgtcagcactggaa

SEQ ID NO: 72036 - RNA, 23 nt, synthetic construct
  source 1..23: mol_type = other RNA
ggctgtgcttgtcagcactggaa

SEQ ID NO: 72037 - RNA, 23 nt, synthetic construct
  source 1..23: mol_type = other RNA
ggctgtgcttgtcagcactggaa

SEQ ID NO: 72038 - RNA, 23 nt, synthetic construct
  source 1..23: mol_type = other RNA
aagccagtgggtctcagggtggt

SEQ ID NO: 72039 - RNA, 23 nt, synthetic construct
  source 1..23: mol_type = other RNA
gccacaggctctcccagggtagg

SEQ ID NO: 72040 - RNA, 23 nt, synthetic construct
  source 1..23: mol_type = other RNA
gtgggtgtggtggtctgtgatag

SEQ ID NO: 72041 - RNA, 23 nt, synthetic construct
  source 1..23: mol_type = other RNA
cagcactggggggatgggagttg

SEQ ID NO: 72042 - RNA, 23 nt, synthetic construct
  source 1..23: mol_type = other RNA
gtgggtgtggtggtctgtgatag

SEQ ID NO: 72043 - RNA, 23 nt, synthetic construct
  source 1..23: mol_type = other RNA
gatgtgggtggtgcccaaggtgc

SEQ ID NO: 72044 - RNA, 23 nt, synthetic construct
  source 1..23: mol_type = other RNA
gtgggtgtggtggtctgtgatag

SEQ ID NO: 72045 - RNA, 23 nt, synthetic construct
  source 1..23: mol_type = other RNA
cagcactggggggatgggagttg

SEQ ID NO: 72046 - RNA, 23 nt, synthetic construct
  source 1..23: mol_type = other RNA
gtgggtgtggtggtctgtgatag

SEQ ID NO: 72047 - RNA, 23 nt, synthetic construct
  source 1..23: mol_type = other RNA
ggaggagggggtgactgtgaagc

SEQ ID NO: 72048 - RNA, 23 nt, synthetic construct
  source 1..23: mol_type = other RNA
gatgtgggtggtgcccaaggtgc

SEQ ID NO: 72049 - RNA, 23 nt, synthetic construct
  source 1..23: mol_type = other RNA
gtgggtgtggtggtctgtgatag

SEQ ID NO: 72050 - RNA, 23 nt, synthetic construct
  source 1..23: mol_type = other RNA
gttgcagtccttggactggagga

SEQ ID NO: 72051 - RNA, 23 nt, synthetic construct
  source 1..23: mol_type = other RNA
gttgcagtccttggactggagga

SEQ ID NO: 72052 - RNA, 23 nt, synthetic construct
  source 1..23: mol_type = other RNA
gttgcagtccttggactggagga

SEQ ID NO: 72053 - RNA, 23 nt, synthetic construct
  source 1..23: mol_type = other RNA
tgggccgggaagccacgggtgtg

SEQ ID NO: 72054 - RNA, 23 nt, synthetic construct
  source 1..23: mol_type = other RNA
tcctgggggctggcacgggtggg

SEQ ID NO: 72055 - RNA, 23 nt, synthetic construct
  source 1..23: mol_type = other RNA
tggacgcctccagcaccagcccc

SEQ ID NO: 72056 - RNA, 23 nt, synthetic construct
  source 1..23: mol_type = other RNA
tgggatccagctccagcagggca

SEQ ID NO: 72057 - RNA, 23 nt, synthetic construct
  source 1..23: mol_type = other RNA
cgggggcagagctcagggcacct

SEQ ID NO: 72058 - RNA, 23 nt, synthetic construct
  source 1..23: mol_type = other RNA
acagagcaggtgccagggcacgg

SEQ ID NO: 72059 - RNA, 23 nt, synthetic construct
  source 1..23: mol_type = other RNA
ccagcacggtgaagctgctgtcg

SEQ ID NO: 72060 - RNA, 23 nt, synthetic construct
  source 1..23: mol_type = other RNA
ggcagcgcgagaaggcactgttg

SEQ ID NO: 72061 - RNA, 23 nt, synthetic construct
  source 1..23: mol_type = other RNA
gcttggggttgatgatggagtgg

SEQ ID NO: 72062 - RNA, 23 nt, synthetic construct
  source 1..23: mol_type = other RNA
cggggcaggtgcagccgtccaca

SEQ ID NO: 72063 - RNA, 23 nt, synthetic construct
  source 1..23: mol_type = other RNA
accacctctccaggagccagcac

SEQ ID NO: 72064 - RNA, 23 nt, synthetic construct
  source 1..23: mol_type = other RNA
gagctgttgctgcagtccaggta

SEQ ID NO: 72065 - RNA, 23 nt, synthetic construct
  source 1..23: mol_type = other RNA
ccgccgagctgttgctgcagtcc

SEQ ID NO: 72066 - RNA, 23 nt, synthetic construct
  source 1..23: mol_type = other RNA
cacaggggcagtcctcctcggca

SEQ ID NO: 72067 - RNA, 23 nt, synthetic construct
  source 1..23: mol_type = other RNA
ttgtagaagtcacagaacaaggg

SEQ ID NO: 72068 - RNA, 23 nt, synthetic construct
  source 1..23: mol_type = other RNA
cggggaggggccacagggcacgt

SEQ ID NO: 72069 - RNA, 23 nt, synthetic construct
  source 1..23: mol_type = other RNA
tgccattgttgttggggccagcg

SEQ ID NO: 72070 - RNA, 23 nt, synthetic construct
  source 1..23: mol_type = other RNA
gggggagctgttctcagggtgga

SEQ ID NO: 72071 - RNA, 23 nt, synthetic construct
  source 1..23: mol_type = other RNA
gttgcagtccctggactggagga

SEQ ID NO: 72072 - RNA, 23 nt, synthetic construct
  source 1..23: mol_type = other RNA
ggaggagggggtggctgtgaagc

SEQ ID NO: 72073 - RNA, 23 nt, synthetic construct
  source 1..23: mol_type = other RNA
gggtggtccccgggatggaggag

SEQ ID NO: 72074 - RNA, 23 nt, synthetic construct
  source 1..23: mol_type = other RNA
tggtggtggtcagcactgtggcg

SEQ ID NO: 72075 - RNA, 23 nt, synthetic construct
  source 1..23: mol_type = other RNA
tgtgttgctggtggctgcaggtg

SEQ ID NO: 72076 - RNA, 23 nt, synthetic construct
  source 1..23: mol_type = other RNA
cagaggagggagtcactgtgttg

SEQ ID NO: 72077 - RNA, 23 nt, synthetic construct
  source 1..23: mol_type = other RNA
gcaccgtgtggggactgctgggg

SEQ ID NO: 72078 - RNA, 23 nt, synthetic construct
  source 1..23: mol_type = other RNA
gttgcagtccctggactggagaa

SEQ ID NO: 72079 - RNA, 23 nt, synthetic construct
  source 1..23: mol_type = other RNA
ggaggagggggtggctgtgaagc

SEQ ID NO: 72080 - RNA, 23 nt, synthetic construct
  source 1..23: mol_type = other RNA
gggtggtccccgggatggaggag

SEQ ID NO: 72081 - RNA, 23 nt, synthetic construct
  source 1..23: mol_type = other RNA
tggtggtggtcagcactgtgggg

SEQ ID NO: 72082 - RNA, 23 nt, synthetic construct
  source 1..23: mol_type = other RNA
cagaggagggagtcactgtgctg

SEQ ID NO: 72083 - RNA, 23 nt, synthetic construct
  source 1..23: mol_type = other RNA
gcaccgtgtggggactgctgggg

SEQ ID NO: 72084 - RNA, 23 nt, synthetic construct
  source 1..23: mol_type = other RNA
tgcggtcgtagtggctgctgtgg

SEQ ID NO: 72085 - RNA, 23 nt, synthetic construct
  source 1..23: mol_type = other RNA
cgtggggccagtggctgcagttg

SEQ ID NO: 72086 - RNA, 23 nt, synthetic construct
  source 1..23: mol_type = other RNA
gttgcagtccctggactggagga

SEQ ID NO: 72087 - RNA, 23 nt, synthetic construct
  source 1..23: mol_type = other RNA
ggaggagggggtggctgtgaagc

SEQ ID NO: 72088 - RNA, 23 nt, synthetic construct
  source 1..23: mol_type = other RNA
gggtggtccccgggatggaggag

SEQ ID NO: 72089 - RNA, 23 nt, synthetic construct
  source 1..23: mol_type = other RNA
tggtggtggtcagcactgtggcg

SEQ ID NO: 72090 - RNA, 23 nt, synthetic construct
  source 1..23: mol_type = other RNA
cagaggagggagtcactgtgctg

SEQ ID NO: 72091 - RNA, 23 nt, synthetic construct
  source 1..23: mol_type = other RNA
gcaccgtgtggggactgctgggg

SEQ ID NO: 72092 - RNA, 23 nt, synthetic construct
  source 1..23: mol_type = other RNA
ggggctgctcacagactgcccct

SEQ ID NO: 72093 - RNA, 23 nt, synthetic construct
  source 1..23: mol_type = other RNA
gttgcagtccctggactggagaa

SEQ ID NO: 72094 - RNA, 23 nt, synthetic construct
  source 1..23: mol_type = other RNA
tggaggagggggtgactgtgaag

SEQ ID NO: 72095 - RNA, 23 nt, synthetic construct
  source 1..23: mol_type = other RNA
tggtggtggtcagcactgtgggg

SEQ ID NO: 72096 - RNA, 23 nt, synthetic construct
  source 1..23: mol_type = other RNA
cagaggagggagtcactgtgctg

SEQ ID NO: 72097 - RNA, 23 nt, synthetic construct
  source 1..23: mol_type = other RNA
gcaccgtgtggggactgctgggg

SEQ ID NO: 72098 - RNA, 23 nt, synthetic construct
  source 1..23: mol_type = other RNA
gccgtggatccagtggatgcagt

SEQ ID NO: 72099 - RNA, 23 nt, synthetic construct
  source 1..23: mol_type = other RNA
cgtggggccagtggctgcagttg

SEQ ID NO: 72100 - RNA, 23 nt, synthetic construct
  source 1..23: mol_type = other RNA
gttgcagtccctggactggagga

SEQ ID NO: 72101 - RNA, 23 nt, synthetic construct
  source 1..23: mol_type = other RNA
ggaggagggggtggctgtgaagc

SEQ ID NO: 72102 - RNA, 23 nt, synthetic construct
  source 1..23: mol_type = other RNA
gggtggtccccgggatggaggag

SEQ ID NO: 72103 - RNA, 23 nt, synthetic construct
  source 1..23: mol_type = other RNA
ggtggctgtggtggtcagcactg

SEQ ID NO: 72104 - RNA, 23 nt, synthetic construct
  source 1..23: mol_type = other RNA
gaagccagtgggtctcagggtgg

SEQ ID NO: 72105 - RNA, 23 nt, synthetic construct
  source 1..23: mol_type = other RNA
gtgggagctggggaagccagtgg

SEQ ID NO: 72106 - RNA, 23 nt, synthetic construct
  source 1..23: mol_type = other RNA
tgccggagagggatggcattgtc

SEQ ID NO: 72107 - RNA, 23 nt, synthetic construct
  source 1..23: mol_type = other RNA
caggctttgggtccagcaggacg

SEQ ID NO: 72108 - RNA, 23 nt, synthetic construct
  source 1..23: mol_type = other RNA
agaggatctggtcctcagggcag

SEQ ID NO: 72109 - RNA, 23 nt, synthetic construct
  source 1..23: mol_type = other RNA
aacacagctgaggtctgcagcgg

SEQ ID NO: 72110 - RNA, 23 nt, synthetic construct
  source 1..23: mol_type = other RNA
agggaggggcaaggccaaggtgg

SEQ ID NO: 72111 - RNA, 23 nt, synthetic construct
  source 1..23: mol_type = other RNA
gcagcttcctggcagcagctggc

SEQ ID NO: 72112 - RNA, 23 nt, synthetic construct
  source 1..23: mol_type = other RNA
ctccagcaccagcccctgggcct

SEQ ID NO: 72113 - RNA, 23 nt, synthetic construct
  source 1..23: mol_type = other RNA
cctccagcaccagcccctgggcc

SEQ ID NO: 72114 - RNA, 23 nt, synthetic construct
  source 1..23: mol_type = other RNA
gcctccagcaccagcccctgggc

SEQ ID NO: 72115 - RNA, 23 nt, synthetic construct
  source 1..23: mol_type = other RNA
cgcctccagcaccagcccctggg

SEQ ID NO: 72116 - RNA, 23 nt, synthetic construct
  source 1..23: mol_type = other RNA
gatccagctccagcagggcactg

SEQ ID NO: 72117 - RNA, 23 nt, synthetic construct
  source 1..23: mol_type = other RNA
agccccccggagcaggtgcagga

SEQ ID NO: 72118 - RNA, 23 nt, synthetic construct
  source 1..23: mol_type = other RNA
tagccccccggagcaggtgcagg

SEQ ID NO: 72119 - RNA, 23 nt, synthetic construct
  source 1..23: mol_type = other RNA
cccgccctgcacagagcaggtgc

SEQ ID NO: 72120 - RNA, 23 nt, synthetic construct
  source 1..23: mol_type = other RNA
gtggcaccagctgcaccagcagc

SEQ ID NO: 72121 - RNA, 23 nt, synthetic construct
  source 1..23: mol_type = other RNA
tgagtggcaccagctgcaccagc

SEQ ID NO: 72122 - RNA, 23 nt, synthetic construct
  source 1..23: mol_type = other RNA
tgccacagccttcctgatgatgg

SEQ ID NO: 72123 - RNA, 23 nt, synthetic construct
  source 1..23: mol_type = other RNA
attgtaccagctggaccagcggc

SEQ ID NO: 72124 - RNA, 23 nt, synthetic construct
  source 1..23: mol_type = other RNA
gcccagctcctccagcggcatgt

SEQ ID NO: 72125 - RNA, 23 nt, synthetic construct
  source 1..23: mol_type = other RNA
ggtcgtgccctggctggtggtgg

SEQ ID NO: 72126 - RNA, 23 nt, synthetic construct
  source 1..23: mol_type = other RNA
cgtccctgggctggaggaggggg

SEQ ID NO: 72127 - RNA, 23 nt, synthetic construct
  source 1..23: mol_type = other RNA
acagttgtggtggtggtggtcag

SEQ ID NO: 72128 - RNA, 23 nt, synthetic construct
  source 1..23: mol_type = other RNA
cggttcctgcagaccaggccaaa

SEQ ID NO: 72129 - RNA, 23 nt, synthetic construct
  source 1..23: mol_type = other RNA
gaggaggcggtggccgtggatcc

SEQ ID NO: 72130 - RNA, 23 nt, synthetic construct
  source 1..23: mol_type = other RNA
ggtggaggaggcggtggccgtgg

SEQ ID NO: 72131 - RNA, 23 nt, synthetic construct
  source 1..23: mol_type = other RNA
ctgggtggaggaggcggtggccg

SEQ ID NO: 72132 - RNA, 23 nt, synthetic construct
  source 1..23: mol_type = other RNA
ccctggactggagaagggagtgg

SEQ ID NO: 72133 - RNA, 23 nt, synthetic construct
  source 1..23: mol_type = other RNA
ggtggtgcccagggaggaggagg

SEQ ID NO: 72134 - RNA, 23 nt, synthetic construct
  source 1..23: mol_type = other RNA
ggttgtggtggccgtggtggtaa

SEQ ID NO: 72135 - RNA, 23 nt, synthetic construct
  source 1..23: mol_type = other RNA
cggttgtggtggccgtggtggta

SEQ ID NO: 72136 - RNA, 23 nt, synthetic construct
  source 1..23: mol_type = other RNA
cgtccctgggctggaggaggggg

SEQ ID NO: 72137 - RNA, 23 nt, synthetic construct
  source 1..23: mol_type = other RNA
acagttgtggtggtggtggtcag

SEQ ID NO: 72138 - RNA, 23 nt, synthetic construct
  source 1..23: mol_type = other RNA
tgtgctgctggtggctgcaggtg

SEQ ID NO: 72139 - RNA, 23 nt, synthetic construct
  source 1..23: mol_type = other RNA
tgctgggtgtggccgtggccgtg

SEQ ID NO: 72140 - RNA, 23 nt, synthetic construct
  source 1..23: mol_type = other RNA
cggttcctgcagaccaggccaaa

SEQ ID NO: 72141 - RNA, 23 nt, synthetic construct
  source 1..23: mol_type = other RNA
ggtgtggtggccgtgctggtcag

SEQ ID NO: 72142 - RNA, 23 nt, synthetic construct
  source 1..23: mol_type = other RNA
ggaggaagtggctttggaactgg

SEQ ID NO: 72143 - RNA, 23 nt, synthetic construct
  source 1..23: mol_type = other RNA
ggaggaggaagtggctttggaac

SEQ ID NO: 72144 - RNA, 23 nt, synthetic construct
  source 1..23: mol_type = other RNA
gtggctgtgcttgtcagcactgg

SEQ ID NO: 72145 - RNA, 23 nt, synthetic construct
  source 1..23: mol_type = other RNA
tagtggctgctgtggtcagctct

SEQ ID NO: 72146 - RNA, 23 nt, synthetic construct
  source 1..23: mol_type = other RNA
gaggaggcggtggccgtggatcc

SEQ ID NO: 72147 - RNA, 23 nt, synthetic construct
  source 1..23: mol_type = other RNA
ggtggaggaggcggtggccgtgg

SEQ ID NO: 72148 - RNA, 23 nt, synthetic construct
  source 1..23: mol_type = other RNA
ccgggtggaggaggcggtggccg

SEQ ID NO: 72149 - RNA, 23 nt, synthetic construct
  source 1..23: mol_type = other RNA
ggtgtggtggccgtgctggtcag

SEQ ID NO: 72150 - RNA, 23 nt, synthetic construct
  source 1..23: mol_type = other RNA
cgtccctgggctggaggaggggg

SEQ ID NO: 72151 - RNA, 23 nt, synthetic construct
  source 1..23: mol_type = other RNA
acagttgtggtggtggtggtcag

SEQ ID NO: 72152 - RNA, 23 nt, synthetic construct
  source 1..23: mol_type = other RNA
tgtgctgctggtggctgcaggtg

SEQ ID NO: 72153 - RNA, 23 nt, synthetic construct
  source 1..23: mol_type = other RNA
ctgtggtcctggaggtgcccctg

SEQ ID NO: 72154 - RNA, 23 nt, synthetic construct
  source 1..23: mol_type = other RNA
cggttcctgcagaccaggccaaa

SEQ ID NO: 72155 - RNA, 23 nt, synthetic construct
  source 1..23: mol_type = other RNA
gaggaggcggtggccgtggatcc

SEQ ID NO: 72156 - RNA, 23 nt, synthetic construct
  source 1..23: mol_type = other RNA
ggtggaggaggcggtggccgtgg

SEQ ID NO: 72157 - RNA, 23 nt, synthetic construct
  source 1..23: mol_type = other RNA
ctgggtggaggaggcggtggccg

SEQ ID NO: 72158 - RNA, 23 nt, synthetic construct
  source 1..23: mol_type = other RNA
ccctggactggagaagggagtgg

SEQ ID NO: 72159 - RNA, 23 nt, synthetic construct
  source 1..23: mol_type = other RNA
ggtggtgcccagggaggaggagg

SEQ ID NO: 72160 - RNA, 23 nt, synthetic construct
  source 1..23: mol_type = other RNA
ggttgtggtggccgtggtggtaa

SEQ ID NO: 72161 - RNA, 23 nt, synthetic construct
  source 1..23: mol_type = other RNA
tggttgtggtggccgtggtggta

SEQ ID NO: 72162 - RNA, 23 nt, synthetic construct
  source 1..23: mol_type = other RNA
tgggctggaggagggggtgactg

SEQ ID NO: 72163 - RNA, 23 nt, synthetic construct
  source 1..23: mol_type = other RNA
cgtccctgggctggaggaggggg

SEQ ID NO: 72164 - RNA, 23 nt, synthetic construct
  source 1..23: mol_type = other RNA
acagttgtggtggtggtggtcag

SEQ ID NO: 72165 - RNA, 23 nt, synthetic construct
  source 1..23: mol_type = other RNA
tgtgctgctggtggctgcaggtg

SEQ ID NO: 72166 - RNA, 23 nt, synthetic construct
  source 1..23: mol_type = other RNA
cgtccctggggaagggggtgact

SEQ ID NO: 72167 - RNA, 23 nt, synthetic construct
  source 1..23: mol_type = other RNA
tgctgggtgtggccgtggccgtg

SEQ ID NO: 72168 - RNA, 23 nt, synthetic construct
  source 1..23: mol_type = other RNA
cggttcctgcagaccaggccaaa

SEQ ID NO: 72169 - RNA, 23 nt, synthetic construct
  source 1..23: mol_type = other RNA
ggaggaagtggctttggaactgg

SEQ ID NO: 72170 - RNA, 23 nt, synthetic construct
  source 1..23: mol_type = other RNA
ggaggaggaagtggctttggaac

SEQ ID NO: 72171 - RNA, 23 nt, synthetic construct
  source 1..23: mol_type = other RNA
gtggctgtgcttgtcagcactgg

SEQ ID NO: 72172 - RNA, 23 nt, synthetic construct
  source 1..23: mol_type = other RNA
tagtggctgctgtggtcagctct

SEQ ID NO: 72173 - RNA, 23 nt, synthetic construct
  source 1..23: mol_type = other RNA
gaggaggcggtggccgtggatcc

SEQ ID NO: 72174 - RNA, 23 nt, synthetic construct
  source 1..23: mol_type = other RNA
ggtggaggaggcggtggccgtgg

SEQ ID NO: 72175 - RNA, 23 nt, synthetic construct
  source 1..23: mol_type = other RNA
ctgggtggaggaggcggtggccg

SEQ ID NO: 72176 - RNA, 23 nt, synthetic construct
  source 1..23: mol_type = other RNA
ggtggtgcccagggaggaggagg

SEQ ID NO: 72177 - RNA, 23 nt, synthetic construct
  source 1..23: mol_type = other RNA
cgtccctgggctggaggaggggg

SEQ ID NO: 72178 - RNA, 23 nt, synthetic construct
  source 1..23: mol_type = other RNA
acagttgtggtggtggtggtcag

SEQ ID NO: 72179 - RNA, 23 nt, synthetic construct
  source 1..23: mol_type = other RNA
cagcactggggtgatgggtgttg

SEQ ID NO: 72180 - RNA, 23 nt, synthetic construct
  source 1..23: mol_type = other RNA
ggtgtggtggccgtgctggtcag

SEQ ID NO: 72181 - RNA, 23 nt, synthetic construct
  source 1..23: mol_type = other RNA
ggaggaggaagtggctttggagc

SEQ ID NO: 72182 - RNA, 23 nt, synthetic construct
  source 1..23: mol_type = other RNA
gtggctgtgcttgtcagcactgg

SEQ ID NO: 72183 - RNA, 23 nt, synthetic construct
  source 1..23: mol_type = other RNA
tggtccacagggtggaggagggg

SEQ ID NO: 72184 - RNA, 23 nt, synthetic construct
  source 1..23: mol_type = other RNA
atgggtgtggtggtctgtgctgg

SEQ ID NO: 72185 - RNA, 23 nt, synthetic construct
  source 1..23: mol_type = other RNA
cctggggtggaggacagggtggc

SEQ ID NO: 72186 - RNA, 23 nt, synthetic construct
  source 1..23: mol_type = other RNA
gaggaggcggtggccgtggaacc

SEQ ID NO: 72187 - RNA, 23 nt, synthetic construct
  source 1..23: mol_type = other RNA
agtggaggaggcggtggccgtgg

SEQ ID NO: 72188 - RNA, 23 nt, synthetic construct
  source 1..23: mol_type = other RNA
tagaggctgagattcccaaagcg

SEQ ID NO: 72189 - RNA, 23 nt, synthetic construct
  source 1..23: mol_type = other RNA
cgggcggcagcggcagtggcaga

SEQ ID NO: 72190 - RNA, 23 nt, synthetic construct
  source 1..23: mol_type = other RNA
gcagcgggcggcagcggcagtgg

SEQ ID NO: 72191 - RNA, 23 nt, synthetic construct
  source 1..23: mol_type = other RNA
ggcgcgggggcagcgggcggcag

SEQ ID NO: 72192 - RNA, 23 nt, synthetic construct
  source 1..23: mol_type = other RNA
acaccggggctgcggggctggca

SEQ ID NO: 72193 - RNA, 23 nt, synthetic construct
  source 1..23: mol_type = other RNA
gtggtgggcatggggtgggggtg

SEQ ID NO: 72194 - RNA, 23 nt, synthetic construct
  source 1..23: mol_type = other RNA
ctgtggtgggcatggggtggggg

SEQ ID NO: 72195 - RNA, 23 nt, synthetic construct
  source 1..23: mol_type = other RNA
agggcacctcaaggcggcccctg

SEQ ID NO: 72196 - RNA, 23 nt, synthetic construct
  source 1..23: mol_type = other RNA
gcagggcacctcaaggcggcccc

SEQ ID NO: 72197 - RNA, 23 nt, synthetic construct
  source 1..23: mol_type = other RNA
aagcctccaggctctggcagggc

SEQ ID NO: 72198 - RNA, 23 nt, synthetic construct
  source 1..23: mol_type = other RNA
gtaagcctccaggctctggcagg

SEQ ID NO: 72199 - RNA, 23 nt, synthetic construct
  source 1..23: mol_type = other RNA
tctgggggcaggtggttgtgttg

SEQ ID NO: 72200 - RNA, 23 nt, synthetic construct
  source 1..23: mol_type = other RNA
tggcctgggcctctgctgagtac

SEQ ID NO: 72201 - RNA, 23 nt, synthetic construct
  source 1..23: mol_type = other RNA
gtggacccgcctctcctggcagc

SEQ ID NO: 72202 - RNA, 23 nt, synthetic construct
  source 1..23: mol_type = other RNA
agacagcagtggcctcctgggcc

SEQ ID NO: 72203 - RNA, 23 nt, synthetic construct
  source 1..23: mol_type = other RNA
gaggggcaaggccaaggtgggcc

SEQ ID NO: 72204 - RNA, 23 nt, synthetic construct
  source 1..23: mol_type = other RNA
tggcagcagctggccttgcctgg

SEQ ID NO: 72205 - RNA, 23 nt, synthetic construct
  source 1..23: mol_type = other RNA
cagcttcctggcagcagctggcc

SEQ ID NO: 72206 - RNA, 23 nt, synthetic construct
  source 1..23: mol_type = other RNA
agagaggctcccaggcagcttag

SEQ ID NO: 72207 - RNA, 23 nt, synthetic construct
  source 1..23: mol_type = other RNA
gcaggtcctggcactgccatagc

SEQ ID NO: 72208 - RNA, 23 nt, synthetic construct
  source 1..23: mol_type = other RNA
catggggtgggggtgggtgtgct

SEQ ID NO: 72209 - RNA, 23 nt, synthetic construct
  source 1..23: mol_type = other RNA
caaggttgtggcactcagcaaag

SEQ ID NO: 72210 - RNA, 23 nt, synthetic construct
  source 1..23: mol_type = other RNA
ctgggtgtggctgtggctgtggt

SEQ ID NO: 72211 - RNA, 23 nt, synthetic construct
  source 1..23: mol_type = other RNA
gtccccacccggccctctcgcca

SEQ ID NO: 72212 - RNA, 23 nt, synthetic construct
  source 1..23: mol_type = other RNA
tgtggtggtggtggtcagcactg

SEQ ID NO: 72213 - RNA, 23 nt, synthetic construct
  source 1..23: mol_type = other RNA
tgtggtggtggtggtcagcactg

SEQ ID NO: 72214 - RNA, 23 nt, synthetic construct
  source 1..23: mol_type = other RNA
tgtggtggtggtggtcagcactg

SEQ ID NO: 72215 - RNA, 23 nt, synthetic construct
  source 1..23: mol_type = other RNA
tgtggtggtggtggtcagcactg

SEQ ID NO: 72216 - RNA, 23 nt, synthetic construct
  source 1..23: mol_type = other RNA
tgtggtggtggtggtcagcactc

SEQ ID NO: 72217 - RNA, 23 nt, synthetic construct
  source 1..23: mol_type = other RNA
acggggtggccgtggggccagtg

SEQ ID NO: 72218 - RNA, 23 nt, synthetic construct
  source 1..23: mol_type = other RNA
acggggtggccgtggggccagtg

SEQ ID NO: 72219 - RNA, 23 nt, synthetic construct
  source 1..23: mol_type = other RNA
agtccccacacaggccacaggtc

SEQ ID NO: 72220 - RNA, 23 nt, synthetic construct
  source 1..23: mol_type = other RNA
tccccacccggccctctcgccac

SEQ ID NO: 72221 - RNA, 23 nt, synthetic construct
  source 1..23: mol_type = other RNA
tgcaggtcagccccgtctccagg

SEQ ID NO: 72222 - RNA, 23 nt, synthetic construct
  source 1..23: mol_type = other RNA
gctgcactgcttctgggcccagg

SEQ ID NO: 72223 - RNA, 23 nt, synthetic construct
  source 1..23: mol_type = other RNA
cccctgaggttgggaagtccacg

SEQ ID NO: 72224 - RNA, 23 nt, synthetic construct
  source 1..23: mol_type = other RNA
ccagcagccctgatgttttcaaa

SEQ ID NO: 72225 - RNA, 23 nt, synthetic construct
  source 1..23: mol_type = other RNA
tctttggtgcccagcacatcttg

SEQ ID NO: 72226 - RNA, 23 nt, synthetic construct
  source 1..23: mol_type = other RNA
tttcaaaagtttccatgtccccg

SEQ ID NO: 72227 - RNA, 23 nt, synthetic construct
  source 1..23: mol_type = other RNA
tagctgtgggtgtggtggctgtg

SEQ ID NO: 72228 - RNA, 23 nt, synthetic construct
  source 1..23: mol_type = other RNA
tagctgtgggtgtggtggctgtg

SEQ ID NO: 72229 - RNA, 23 nt, synthetic construct
  source 1..23: mol_type = other RNA
tagctgtgggtgtggtggctgtg

SEQ ID NO: 72230 - RNA, 23 nt, synthetic construct
  source 1..23: mol_type = other RNA
tagctgtgggtgtggtggctgtg

SEQ ID NO: 72231 - RNA, 23 nt, synthetic construct
  source 1..23: mol_type = other RNA
tagctgtgggtgtggtggctgtg

SEQ ID NO: 72232 - RNA, 23 nt, synthetic construct
  source 1..23: mol_type = other RNA
atccagcaccgtgcctggggggc

SEQ ID NO: 72233 - RNA, 23 nt, synthetic construct
  source 1..23: mol_type = other RNA
gccgcagaccctgcccttgtagt

SEQ ID NO: 72234 - RNA, 23 nt, synthetic construct
  source 1..23: mol_type = other RNA
tgcccccagcagccctgatgttt

SEQ ID NO: 72235 - RNA, 23 nt, synthetic construct
  source 1..23: mol_type = other RNA
cttgcccccagcagccctgatgt

SEQ ID NO: 72236 - RNA, 23 nt, synthetic construct
  source 1..23: mol_type = other RNA
tgtggtggccgtggtggtcagca

SEQ ID NO: 72237 - RNA, 23 nt, synthetic construct
  source 1..23: mol_type = other RNA
agctgtgggtgtggtggctgtgc

SEQ ID NO: 72238 - RNA, 23 nt, synthetic construct
  source 1..23: mol_type = other RNA
gtagctgtgggtgtggtggctgt

SEQ ID NO: 72239 - RNA, 23 nt, synthetic construct
  source 1..23: mol_type = other RNA
agctgtgggtgtggtggctgtgc

SEQ ID NO: 72240 - RNA, 23 nt, synthetic construct
  source 1..23: mol_type = other RNA
gtagctgtgggtgtggtggctgt

SEQ ID NO: 72241 - RNA, 23 nt, synthetic construct
  source 1..23: mol_type = other RNA
agctgtgggtgtggtggctgtgc

SEQ ID NO: 72242 - RNA, 23 nt, synthetic construct
  source 1..23: mol_type = other RNA
gtagctgtgggtgtggtggctgt

SEQ ID NO: 72243 - RNA, 23 nt, synthetic construct
  source 1..23: mol_type = other RNA
agctgtgggtgtggtggctgtgc

SEQ ID NO: 72244 - RNA, 23 nt, synthetic construct
  source 1..23: mol_type = other RNA
gtagctgtgggtgtggtggctgt

SEQ ID NO: 72245 - RNA, 23 nt, synthetic construct
  source 1..23: mol_type = other RNA
agctgtgggtgtggtggctgtgc

SEQ ID NO: 72246 - RNA, 23 nt, synthetic construct
  source 1..23: mol_type = other RNA
gtagctgtgggtgtggtggctgt

SEQ ID NO: 72247 - RNA, 23 nt, synthetic construct
  source 1..23: mol_type = other RNA
gccctgatgttttcaaaagtttc

SEQ ID NO: 72248 - RNA, 23 nt, synthetic construct
  source 1..23: mol_type = other RNA
atcttgcccccagcagccctgat

SEQ ID NO: 72249 - RNA, 23 nt, synthetic construct
  source 1..23: mol_type = other RNA
acccctgaggttgggaagtccac

SEQ ID NO: 72250 - RNA, 23 nt, synthetic construct
  source 1..23: mol_type = other RNA
cagcagccctgatgttttcaaaa

SEQ ID NO: 72251 - RNA, 23 nt, synthetic construct
  source 1..23: mol_type = other RNA
gggcagtggctgtagtcgtcaca

SEQ ID NO: 72252 - RNA, 23 nt, synthetic construct
  source 1..23: mol_type = other RNA
gcctggggggcagaagcagccgt

SEQ ID NO: 72253 - RNA, 23 nt, synthetic construct
  source 1..23: mol_type = other RNA
tcacagttgcaggtgtcaaacat

SEQ ID NO: 72254 - RNA, 23 nt, synthetic construct
  source 1..23: mol_type = other RNA
cttggagcaggtggtgccggtgg

SEQ ID NO: 72255 - RNA, 23 nt, synthetic construct
  source 1..23: mol_type = other RNA
gatgttttcaaaagtttccatgt

SEQ ID NO: 72256 - RNA, 23 nt, synthetic construct
  source 1..23: mol_type = other RNA
tgatgttttcaaaagtttccatg

SEQ ID NO: 72257 - RNA, 23 nt, synthetic construct
  source 1..23: mol_type = other RNA
ctgatgttttcaaaagtttccat

SEQ ID NO: 72258 - RNA, 23 nt, synthetic construct
  source 1..23: mol_type = other RNA
cctgggctggaggagggggtggc

SEQ ID NO: 72259 - RNA, 23 nt, synthetic construct
  source 1..23: mol_type = other RNA
cctgggctggaggagggggtggc

SEQ ID NO: 72260 - RNA, 23 nt, synthetic construct
  source 1..23: mol_type = other RNA
cctgggctggaggagggggtggc

SEQ ID NO: 72261 - RNA, 23 nt, synthetic construct
  source 1..23: mol_type = other RNA
cctgggctggaggagggggtgac

SEQ ID NO: 72262 - RNA, 23 nt, synthetic construct
  source 1..23: mol_type = other RNA
cctgggctggaggagggggtggc

SEQ ID NO: 72263 - RNA, 23 nt, synthetic construct
  source 1..23: mol_type = other RNA
agggcagccgggcctggaagact

SEQ ID NO: 72264 - RNA, 23 nt, synthetic construct
  source 1..23: mol_type = other RNA
ctcacaggagtagcagcagccgg

SEQ ID NO: 72265 - RNA, 23 nt, synthetic construct
  source 1..23: mol_type = other RNA
cctcacaggagtagcagcagccg

SEQ ID NO: 72266 - RNA, 23 nt, synthetic construct
  source 1..23: mol_type = other RNA
gtggggctgctgggcagcagggt

SEQ ID NO: 72267 - RNA, 23 nt, synthetic construct
  source 1..23: mol_type = other RNA
gtggggctgctgggcagcagggt

SEQ ID NO: 72268 - RNA, 23 nt, synthetic construct
  source 1..23: mol_type = other RNA
gtggggctgctgggcagcagggt

SEQ ID NO: 72269 - RNA, 23 nt, synthetic construct
  source 1..23: mol_type = other RNA
gtggggctgctgggcagcagggt

SEQ ID NO: 72270 - RNA, 23 nt, synthetic construct
  source 1..23: mol_type = other RNA
ggaggacagcgcggcgcacaggc

SEQ ID NO: 72271 - RNA, 23 nt, synthetic construct
  source 1..23: mol_type = other RNA
ggctgctgggcagcagggtcgag

SEQ ID NO: 72272 - RNA, 23 nt, synthetic construct
  source 1..23: mol_type = other RNA
ggctgctgggcagcagggtcgag

SEQ ID NO: 72273 - RNA, 23 nt, synthetic construct
  source 1..23: mol_type = other RNA
ggctgctgggcagcagggtcgag

SEQ ID NO: 72274 - RNA, 23 nt, synthetic construct
  source 1..23: mol_type = other RNA
ggctgctgggcagcagggtcgag

SEQ ID NO: 72275 - RNA, 23 nt, synthetic construct
  source 1..23: mol_type = other RNA
ggcggcacaggcgtgcacatagg

SEQ ID NO: 72276 - RNA, 23 nt, synthetic construct
  source 1..23: mol_type = other RNA
cgccagtcactgcacactccccg

SEQ ID NO: 72277 - RNA, 23 nt, synthetic construct
  source 1..23: mol_type = other RNA
gtggtggtggtggccgtctccag

SEQ ID NO: 72278 - RNA, 23 nt, synthetic construct
  source 1..23: mol_type = other RNA
tggggctgctgggcagcagggtc

SEQ ID NO: 72279 - RNA, 23 nt, synthetic construct
  source 1..23: mol_type = other RNA
tggggctgctgggcagcagggtc

SEQ ID NO: 72280 - RNA, 23 nt, synthetic construct
  source 1..23: mol_type = other RNA
tggggctgctgggcagcagggtc

SEQ ID NO: 72281 - RNA, 23 nt, synthetic construct
  source 1..23: mol_type = other RNA
tggggctgctgggcagcagggtc

SEQ ID NO: 72282 - RNA, 23 nt, synthetic construct
  source 1..23: mol_type = other RNA
ggactgaggaggacacagtggac

SEQ ID NO: 72283 - RNA, 23 nt, synthetic construct
  source 1..23: mol_type = other RNA
aggactgaggaggacacagtgga

SEQ ID NO: 72284 - RNA, 23 nt, synthetic construct
  source 1..23: mol_type = other RNA
tttcctgaggctccccctgcagc

SEQ ID NO: 72285 - RNA, 23 nt, synthetic construct
  source 1..23: mol_type = other RNA
cactgcttctgggcccaggactt

SEQ ID NO: 72286 - RNA, 23 nt, synthetic construct
  source 1..23: mol_type = other RNA
gcactgcttctgggcccaggact

SEQ ID NO: 72287 - RNA, 23 nt, synthetic construct
  source 1..23: mol_type = other RNA
atgctgcactgcttctgggccca

SEQ ID NO: 72288 - RNA, 23 nt, synthetic construct
  source 1..23: mol_type = other RNA
gatgctgcactgcttctgggccc

SEQ ID NO: 72289 - RNA, 23 nt, synthetic construct
  source 1..23: mol_type = other RNA
ccggatcctgtagttgtagcaca

SEQ ID NO: 72290 - RNA, 23 nt, synthetic construct
  source 1..23: mol_type = other RNA
caccctgtgcttttctgcagaga

SEQ ID NO: 72291 - RNA, 23 nt, synthetic construct
  source 1..23: mol_type = other RNA
gtcacagccaggggcaggggagg

SEQ ID NO: 72292 - RNA, 23 nt, synthetic construct
  source 1..23: mol_type = other RNA
aaatgccctgcagaagcagggag

SEQ ID NO: 72293 - RNA, 23 nt, synthetic construct
  source 1..23: mol_type = other RNA
gcagcaggtgcactggtgctgca

SEQ ID NO: 72294 - RNA, 23 nt, synthetic construct
  source 1..23: mol_type = other RNA
gatggcattgtcacagccagggg

SEQ ID NO: 72295 - RNA, 23 nt, synthetic construct
  source 1..23: mol_type = other RNA
cgaggggcaggcagccagagtgc

SEQ ID NO: 72296 - RNA, 23 nt, synthetic construct
  source 1..23: mol_type = other RNA
cagctgcaccagcagctgcagcc

SEQ ID NO: 72297 - RNA, 23 nt, synthetic construct
  source 1..23: mol_type = other RNA
gttcccacacaggccgcacatct

SEQ ID NO: 72298 - RNA, 23 nt, synthetic construct
  source 1..23: mol_type = other RNA
cggcgcacaggcagtcctcgctc

SEQ ID NO: 72299 - RNA, 23 nt, synthetic construct
  source 1..23: mol_type = other RNA
cttgatggccttggagcaggtgg

SEQ ID NO: 72300 - RNA, 23 nt, synthetic construct
  source 1..23: mol_type = other RNA
accgtgcagttctccagggtcca

SEQ ID NO: 72301 - RNA, 23 nt, synthetic construct
  source 1..23: mol_type = other RNA
aggggttggccgtgcaggggtcc

SEQ ID NO: 72302 - RNA, 23 nt, synthetic construct
  source 1..23: mol_type = other RNA
gggctgctgggcagcagggtcga

SEQ ID NO: 72303 - RNA, 23 nt, synthetic construct
  source 1..23: mol_type = other RNA
gggctgctgggcagcagggtcga

SEQ ID NO: 72304 - RNA, 23 nt, synthetic construct
  source 1..23: mol_type = other RNA
gggctgctgggcagcagggtcga

SEQ ID NO: 72305 - RNA, 23 nt, synthetic construct
  source 1..23: mol_type = other RNA
gggctgctgggcagcagggtcga

SEQ ID NO: 72306 - RNA, 23 nt, synthetic construct
  source 1..23: mol_type = other RNA
gccaggggcaggggagggcgagg

SEQ ID NO: 72307 - RNA, 23 nt, synthetic construct
  source 1..23: mol_type = other RNA
agcaggtgcactggtgctgcatg

SEQ ID NO: 72308 - RNA, 23 nt, synthetic construct
  source 1..23: mol_type = other RNA
ctcctggcagcaggtgcactggt

SEQ ID NO: 72309 - RNA, 23 nt, synthetic construct
  source 1..23: mol_type = other RNA
agctgcaccagcagctgcagccc

SEQ ID NO: 72310 - RNA, 23 nt, synthetic construct
  source 1..23: mol_type = other RNA
ttgcccccagcagccctgatgtt

SEQ ID NO: 72311 - RNA, 23 nt, synthetic construct
  source 1..23: mol_type = other RNA
gggccctgggtctctgcctgcgg

SEQ ID NO: 72312 - RNA, 23 nt, synthetic construct
  source 1..23: mol_type = other RNA
agccccgtctccaggctgcaggt

SEQ ID NO: 72313 - RNA, 23 nt, synthetic construct
  source 1..23: mol_type = other RNA
tggtggtggtggtggccgtctcc

SEQ ID NO: 72314 - RNA, 23 nt, synthetic construct
  source 1..23: mol_type = other RNA
ccaggctgcaggtcagcacctgc

SEQ ID NO: 72315 - RNA, 23 nt, synthetic construct
  source 1..23: mol_type = other RNA
cgcagggacacagaagggcgtgc

SEQ ID NO: 72316 - RNA, 23 nt, synthetic construct
  source 1..23: mol_type = other RNA
cacagggcaggggcttgcactgc

SEQ ID NO: 72317 - RNA, 23 nt, synthetic construct
  source 1..23: mol_type = other RNA
gctgcaggtcagcacctgcccga

SEQ ID NO: 72318 - RNA, 23 nt, synthetic construct
  source 1..23: mol_type = other RNA
cctgggtggtggtggtggtggcc

SEQ ID NO: 72319 - RNA, 23 nt, synthetic construct
  source 1..23: mol_type = other RNA
tggccggggtgctggggcagtgg

SEQ ID NO: 72320 - RNA, 23 nt, synthetic construct
  source 1..23: mol_type = other RNA
tggccggggtgctggggcagtgg

SEQ ID NO: 72321 - RNA, 23 nt, synthetic construct
  source 1..23: mol_type = other RNA
tggccggggtgctggggcagtgg

SEQ ID NO: 72322 - RNA, 23 nt, synthetic construct
  source 1..23: mol_type = other RNA
tggccggggtgctggggcagtgg

SEQ ID NO: 72323 - RNA, 23 nt, synthetic construct
  source 1..23: mol_type = other RNA
ccgtggaggatgctgcactgctt

SEQ ID NO: 72324 - RNA, 23 nt, synthetic construct
  source 1..23: mol_type = other RNA
atccagtggacgcagtcgtagtg

SEQ ID NO: 72325 - RNA, 23 nt, synthetic construct
  source 1..23: mol_type = other RNA
atccagtggacgcagtcgtagtg

SEQ ID NO: 72326 - RNA, 23 nt, synthetic construct
  source 1..23: mol_type = other RNA
tttgtgaggatccaggtcgtccc

SEQ ID NO: 72327 - RNA, 23 nt, synthetic construct
  source 1..23: mol_type = other RNA
tttgtgaggatccaggtcgtccc

SEQ ID NO: 72328 - RNA, 23 nt, synthetic construct
  source 1..23: mol_type = other RNA
ggctcacagcccatggtcaccac

SEQ ID NO: 72329 - RNA, 23 nt, synthetic construct
  source 1..23: mol_type = other RNA
ggctcacagcccatggtcaccac

SEQ ID NO: 72330 - RNA, 23 nt, synthetic construct
  source 1..23: mol_type = other RNA
tgttggggccagcgtgggtggct

SEQ ID NO: 72331 - RNA, 23 nt, synthetic construct
  source 1..23: mol_type = other RNA
gtcacagcaaagcacacgcacgt

SEQ ID NO: 72332 - RNA, 23 nt, synthetic construct
  source 1..23: mol_type = other RNA
agctggtggctggggtactgggg

SEQ ID NO: 72333 - RNA, 23 nt, synthetic construct
  source 1..23: mol_type = other RNA
gtgagggctggaaagggctggag

SEQ ID NO: 72334 - RNA, 23 nt, synthetic construct
  source 1..23: mol_type = other RNA
cagctttgtgaggatccaggtcg

SEQ ID NO: 72335 - RNA, 23 nt, synthetic construct
  source 1..23: mol_type = other RNA
gcctgcaacccctgaggttggga

SEQ ID NO: 72336 - RNA, 23 nt, synthetic construct
  source 1..23: mol_type = other RNA
ggctgttgtggtcagctctgtga

SEQ ID NO: 72337 - RNA, 23 nt, synthetic construct
  source 1..23: mol_type = other RNA
ggctgttgtggtcagctctgtga

SEQ ID NO: 72338 - RNA, 23 nt, synthetic construct
  source 1..23: mol_type = other RNA
ggctgttgtggtcagctctgtga

SEQ ID NO: 72339 - RNA, 23 nt, synthetic construct
  source 1..23: mol_type = other RNA
ggccctgggtctctgcctgcggc

SEQ ID NO: 72340 - RNA, 23 nt, synthetic construct
  source 1..23: mol_type = other RNA
tggggccggggaggggccacagg

SEQ ID NO: 72341 - RNA, 23 nt, synthetic construct
  source 1..23: mol_type = other RNA
cctggggccggggaggggccaca

SEQ ID NO: 72342 - RNA, 23 nt, synthetic construct
  source 1..23: mol_type = other RNA
ctgccccacctgtgccagggtcc

SEQ ID NO: 72343 - RNA, 23 nt, synthetic construct
  source 1..23: mol_type = other RNA
tctgccccacctgtgccagggtc

SEQ ID NO: 72344 - RNA, 23 nt, synthetic construct
  source 1..23: mol_type = other RNA
acagcaaagcacacgcacgttgt

SEQ ID NO: 72345 - RNA, 23 nt, synthetic construct
  source 1..23: mol_type = other RNA
ccgtggagctggtggctggggta

SEQ ID NO: 72346 - RNA, 23 nt, synthetic construct
  source 1..23: mol_type = other RNA
tgagggctggaaagggctggagt

SEQ ID NO: 72347 - RNA, 23 nt, synthetic construct
  source 1..23: mol_type = other RNA
tcagctctgtgaggatccaggtc

SEQ ID NO: 72348 - RNA, 23 nt, synthetic construct
  source 1..23: mol_type = other RNA
tgggtggaggaggcggtggccgt

SEQ ID NO: 72349 - RNA, 23 nt, synthetic construct
  source 1..23: mol_type = other RNA
tccggagtggaggaggggtggat

SEQ ID NO: 72350 - RNA, 23 nt, synthetic construct
  source 1..23: mol_type = other RNA
tcagctctgtgaggatccaggtc

SEQ ID NO: 72351 - RNA, 23 nt, synthetic construct
  source 1..23: mol_type = other RNA
cgggtggaggaggcggtggccgt

SEQ ID NO: 72352 - RNA, 23 nt, synthetic construct
  source 1..23: mol_type = other RNA
tgggtggaggaggcggtggccgt

SEQ ID NO: 72353 - RNA, 23 nt, synthetic construct
  source 1..23: mol_type = other RNA
tcagctctgtgaggatccaggtc

SEQ ID NO: 72354 - RNA, 23 nt, synthetic construct
  source 1..23: mol_type = other RNA
tccggagtggaggaggggtggat

SEQ ID NO: 72355 - RNA, 23 nt, synthetic construct
  source 1..23: mol_type = other RNA
tcagctctgtgaggatccaggtc

SEQ ID NO: 72356 - RNA, 23 nt, synthetic construct
  source 1..23: mol_type = other RNA
tcagctctgtgaggatccaggtg

SEQ ID NO: 72357 - RNA, 23 nt, synthetic construct
  source 1..23: mol_type = other RNA
tgggtggaggaggcggtggccgt

SEQ ID NO: 72358 - RNA, 23 nt, synthetic construct
  source 1..23: mol_type = other RNA
tgcggggctggcagtggggggtg

SEQ ID NO: 72359 - RNA, 23 nt, synthetic construct
  source 1..23: mol_type = other RNA
ggtgggcatggggtgggggtggg

SEQ ID NO: 72360 - RNA, 23 nt, synthetic construct
  source 1..23: mol_type = other RNA
agctggacacatctgggcaggat

SEQ ID NO: 72361 - RNA, 23 nt, synthetic construct
  source 1..23: mol_type = other RNA
cccctgcagctggacacatctgg

SEQ ID NO: 72362 - RNA, 23 nt, synthetic construct
  source 1..23: mol_type = other RNA
agagtggaggaggcggtggccgt

SEQ ID NO: 72363 - RNA, 23 nt, synthetic construct
  source 1..23: mol_type = other RNA
ggcaggtcctggcactgccatag

SEQ ID NO: 72364 - RNA, 23 nt, synthetic construct
  source 1..23: mol_type = other RNA
cagcacctgcccgacctggtcga

SEQ ID NO: 72365 - RNA, 23 nt, synthetic construct
  source 1..23: mol_type = other RNA
atccagtggatgcagtcgtagtg

SEQ ID NO: 72366 - RNA, 23 nt, synthetic construct
  source 1..23: mol_type = other RNA
gttggcaggctgctggggagcac

SEQ ID NO: 72367 - RNA, 23 nt, synthetic construct
  source 1..23: mol_type = other RNA
gaacctgcctgtctggtcttcgt

SEQ ID NO: 72368 - RNA, 23 nt, synthetic construct
  source 1..23: mol_type = other RNA
gggagtggctttggagctggtga

SEQ ID NO: 72369 - RNA, 23 nt, synthetic construct
  source 1..23: mol_type = other RNA
tctctggagtggaggagggtgtg

SEQ ID NO: 72370 - RNA, 23 nt, synthetic construct
  source 1..23: mol_type = other RNA
gggagtggctttggagctggtga

SEQ ID NO: 72371 - RNA, 23 nt, synthetic construct
  source 1..23: mol_type = other RNA
tctctggagtggaggagggtgtg

SEQ ID NO: 72372 - RNA, 23 nt, synthetic construct
  source 1..23: mol_type = other RNA
gggagtggctttggagctggtga

SEQ ID NO: 72373 - RNA, 23 nt, synthetic construct
  source 1..23: mol_type = other RNA
tctctggagtggaggagggtgtg

SEQ ID NO: 72374 - RNA, 23 nt, synthetic construct
  source 1..23: mol_type = other RNA
gggagtggctttggagctggtga

SEQ ID NO: 72375 - RNA, 23 nt, synthetic construct
  source 1..23: mol_type = other RNA
tctctggagtggaggagggtgtg

SEQ ID NO: 72376 - RNA, 23 nt, synthetic construct
  source 1..23: mol_type = other RNA
cccgtggcctccaccaccccgct

SEQ ID NO: 72377 - RNA, 23 nt, synthetic construct
  source 1..23: mol_type = other RNA
cccgccgagctgttgctgcagtc

SEQ ID NO: 72378 - RNA, 23 nt, synthetic construct
  source 1..23: mol_type = other RNA
tgctggcccagctcctccagcgg

SEQ ID NO: 72379 - RNA, 23 nt, synthetic construct
  source 1..23: mol_type = other RNA
cgtggagctggtggctggggtac

SEQ ID NO: 72380 - RNA, 23 nt, synthetic construct
  source 1..23: mol_type = other RNA
ctggggtggaggagggggtggcc

SEQ ID NO: 72381 - RNA, 23 nt, synthetic construct
  source 1..23: mol_type = other RNA
ctggggtggaggagggggtggcc

SEQ ID NO: 72382 - RNA, 23 nt, synthetic construct
  source 1..23: mol_type = other RNA
ctggggtggaggagggggtggcc

SEQ ID NO: 72383 - RNA, 23 nt, synthetic construct
  source 1..23: mol_type = other RNA
ctggggtggaggagggggtggcc

SEQ ID NO: 72384 - RNA, 23 nt, synthetic construct
  source 1..23: mol_type = other RNA
gcgcgggggcagcgggcggcagc

SEQ ID NO: 72385 - RNA, 23 nt, synthetic construct
  source 1..23: mol_type = other RNA
ccaccagtgcgtggcactccgca

SEQ ID NO: 72386 - RNA, 23 nt, synthetic construct
  source 1..23: mol_type = other RNA
agaggctgagattcccaaagcgt

SEQ ID NO: 72387 - RNA, 23 nt, synthetic construct
  source 1..23: mol_type = other RNA
gggtgtggctgtggctgtggtcc

SEQ ID NO: 72388 - RNA, 23 nt, synthetic construct
  source 1..23: mol_type = other RNA
cgggggcagcgggcggcagcggc

SEQ ID NO: 72389 - RNA, 23 nt, synthetic construct
  source 1..23: mol_type = other RNA
cgcgggggcagcgggcggcagcg

SEQ ID NO: 72390 - RNA, 23 nt, synthetic construct
  source 1..23: mol_type = other RNA
tggacatggtggccacgggtgtg

SEQ ID NO: 72391 - RNA, 23 nt, synthetic construct
  source 1..23: mol_type = other RNA
tgccccacctgtgccagggtcca

SEQ ID NO: 72392 - RNA, 23 nt, synthetic construct
  source 1..23: mol_type = other RNA
gacacatctgggcaggatgcagg

SEQ ID NO: 72393 - RNA, 23 nt, synthetic construct
  source 1..23: mol_type = other RNA
gaagtcaccccaggtgctgcaca

SEQ ID NO: 72394 - RNA, 23 nt, synthetic construct
  source 1..23: mol_type = other RNA
ctggggccggggaggggccacag

SEQ ID NO: 72395 - RNA, 23 nt, synthetic construct
  source 1..23: mol_type = other RNA
ctttggagctggtgactgtgggt

SEQ ID NO: 72396 - RNA, 23 nt, synthetic construct
  source 1..23: mol_type = other RNA
ctttggagctggtgactgtgggt

SEQ ID NO: 72397 - RNA, 23 nt, synthetic construct
  source 1..23: mol_type = other RNA
tccctggactggagaagggagtg

SEQ ID NO: 72398 - RNA, 23 nt, synthetic construct
  source 1..23: mol_type = other RNA
ctttggagctggtgactgtgggt

SEQ ID NO: 72399 - RNA, 23 nt, synthetic construct
  source 1..23: mol_type = other RNA
tccctggactggagaagggagtg

SEQ ID NO: 72400 - RNA, 23 nt, synthetic construct
  source 1..23: mol_type = other RNA
ctttggagctggtgactgtgggt

SEQ ID NO: 72401 - RNA, 23 nt, synthetic construct
  source 1..23: mol_type = other RNA
tgggcgtcacagggcaggggctt

SEQ ID NO: 72402 - RNA, 23 nt, synthetic construct
  source 1..23: mol_type = other RNA
gcccagggaggaggaggggatgg

SEQ ID NO: 72403 - RNA, 23 nt, synthetic construct
  source 1..23: mol_type = other RNA
gactggaggaggaagtggctttg

SEQ ID NO: 72404 - RNA, 23 nt, synthetic construct
  source 1..23: mol_type = other RNA
gcccagggaggaggaggggatgg

SEQ ID NO: 72405 - RNA, 23 nt, synthetic construct
  source 1..23: mol_type = other RNA
gactggaggaggaagtggctttg

SEQ ID NO: 72406 - RNA, 23 nt, synthetic construct
  source 1..23: mol_type = other RNA
gcccagggaggaggaggggatgg

SEQ ID NO: 72407 - RNA, 23 nt, synthetic construct
  source 1..23: mol_type = other RNA
gactggaggaggaagtggctttg

SEQ ID NO: 72408 - RNA, 23 nt, synthetic construct
  source 1..23: mol_type = other RNA
gggcggcagcggcagtggcagag

SEQ ID NO: 72409 - RNA, 23 nt, synthetic construct
  source 1..23: mol_type = other RNA
tggtgggcatggggtgggggtgg

SEQ ID NO: 72410 - RNA, 23 nt, synthetic construct
  source 1..23: mol_type = other RNA
acggggtgggcagcaggagcacg

SEQ ID NO: 72411 - RNA, 23 nt, synthetic construct
  source 1..23: mol_type = other RNA
gtcagcactttgggagggggagc

SEQ ID NO: 72412 - RNA, 23 nt, synthetic construct
  source 1..23: mol_type = other RNA
ggtcagcactttgggagggggag

SEQ ID NO: 72413 - RNA, 23 nt, synthetic construct
  source 1..23: mol_type = other RNA
gtcagcactttgggagggggagc

SEQ ID NO: 72414 - RNA, 23 nt, synthetic construct
  source 1..23: mol_type = other RNA
ggtcagcactttgggagggggag

SEQ ID NO: 72415 - RNA, 23 nt, synthetic construct
  source 1..23: mol_type = other RNA
gtcagcactttgggagggggagc

SEQ ID NO: 72416 - RNA, 23 nt, synthetic construct
  source 1..23: mol_type = other RNA
ggtcagcactttgggagggggag

SEQ ID NO: 72417 - RNA, 23 nt, synthetic construct
  source 1..23: mol_type = other RNA
ggagcaggtgcaggagctgcagg

SEQ ID NO: 72418 - RNA, 23 nt, synthetic construct
  source 1..23: mol_type = other RNA
gttcccagagtggaggaggcggt

SEQ ID NO: 72419 - RNA, 23 nt, synthetic construct
  source 1..23: mol_type = other RNA
gcgggggcagcgggcggcagcgg

SEQ ID NO: 72420 - RNA, 23 nt, synthetic construct
  source 1..23: mol_type = other RNA
tggagaccgggagggccgggctt

SEQ ID NO: 72421 - RNA, 23 nt, synthetic construct
  source 1..23: mol_type = other RNA
ggagaccgggagggccgggcttg

SEQ ID NO: 72422 - RNA, 23 nt, synthetic construct
  source 1..23: mol_type = other RNA
ttgtgcgccgggttcagggggct

SEQ ID NO: 72423 - RNA, 23 nt, synthetic construct
  source 1..23: mol_type = other RNA
agtgcaagggcaccgtctcctcg

SEQ ID NO: 72424 - RNA, 23 nt, synthetic construct
  source 1..23: mol_type = other RNA
gcagcagagaacccgcagctcgt

SEQ ID NO: 72425 - RNA, 23 nt, synthetic construct
  source 1..23: mol_type = other RNA
gctggacgttgaagtcctcgtag

SEQ ID NO: 72426 - RNA, 23 nt, synthetic construct
  source 1..23: mol_type = other RNA
gctgcaggtggtgttgaaggagg

SEQ ID NO: 72427 - RNA, 23 nt, synthetic construct
  source 1..23: mol_type = other RNA
ttgtgctgatccacactggaggc

SEQ ID NO: 72428 - RNA, 23 nt, synthetic construct
  source 1..23: mol_type = other RNA
ttgtgctgatccacactggaagc

SEQ ID NO: 72429 - RNA, 23 nt, synthetic construct
  source 1..23: mol_type = other RNA
ctgtgcttgtcagcactggaagg

SEQ ID NO: 72430 - RNA, 23 nt, synthetic construct
  source 1..23: mol_type = other RNA
ttgtgctgatccacactggaggc

SEQ ID NO: 72431 - RNA, 23 nt, synthetic construct
  source 1..23: mol_type = other RNA
ttgtgctgatccacactggaggc

SEQ ID NO: 72432 - RNA, 23 nt, synthetic construct
  source 1..23: mol_type = other RNA
ctgtgcttgtcagcactggaagg

SEQ ID NO: 72433 - RNA, 23 nt, synthetic construct
  source 1..23: mol_type = other RNA
ttgtgctgatccacactggaggc

SEQ ID NO: 72434 - RNA, 23 nt, synthetic construct
  source 1..23: mol_type = other RNA
ctgtgcttgtcagcactggaagg

SEQ ID NO: 72435 - RNA, 23 nt, synthetic construct
  source 1..23: mol_type = other RNA
catggctgttgacccaggtttca

SEQ ID NO: 72436 - RNA, 23 nt, synthetic construct
  source 1..23: mol_type = other RNA
cctgcagaccaggccaaagtcca

SEQ ID NO: 72437 - RNA, 23 nt, synthetic construct
  source 1..23: mol_type = other RNA
cctgcagaccaggccaaagtcca

SEQ ID NO: 72438 - RNA, 23 nt, synthetic construct
  source 1..23: mol_type = other RNA
cctgcagaccaggccaaagtcca

SEQ ID NO: 72439 - RNA, 23 nt, synthetic construct
  source 1..23: mol_type = other RNA
cctgcagaccaggccaaagtcca

SEQ ID NO: 72440 - RNA, 23 nt, synthetic construct
  source 1..23: mol_type = other RNA
gccgtggaggatgctgcactgct

SEQ ID NO: 72441 - RNA, 23 nt, synthetic construct
  source 1..23: mol_type = other RNA
ggtggtggtggtcagcactgtgg

SEQ ID NO: 72442 - RNA, 23 nt, synthetic construct
  source 1..23: mol_type = other RNA
ggtggtggtggtcagcactgtgg

SEQ ID NO: 72443 - RNA, 23 nt, synthetic construct
  source 1..23: mol_type = other RNA
ggtggtggtggtcagcactgtgg

SEQ ID NO: 72444 - RNA, 23 nt, synthetic construct
  source 1..23: mol_type = other RNA
ggtggtggtggtcagcactgtgg

SEQ ID NO: 72445 - RNA, 23 nt, synthetic construct
  source 1..23: mol_type = other RNA
gcccgccgagctgttgctgcagt

SEQ ID NO: 72446 - RNA, 23 nt, synthetic construct
  source 1..23: mol_type = other RNA
ggggccgtggaggatgctgcact

SEQ ID NO: 72447 - RNA, 23 nt, synthetic construct
  source 1..23: mol_type = other RNA
ggtggggccgtggaggatgctgc

SEQ ID NO: 72448 - RNA, 23 nt, synthetic construct
  source 1..23: mol_type = other RNA
aggatctggtcctcagggcagaa

SEQ ID NO: 72449 - RNA, 23 nt, synthetic construct
  source 1..23: mol_type = other RNA
cagctgcagccccaggcctgtct

SEQ ID NO: 72450 - RNA, 23 nt, synthetic construct
  source 1..23: mol_type = other RNA
gcagctgcagccccaggcctgtc

SEQ ID NO: 72451 - RNA, 23 nt, synthetic construct
  source 1..23: mol_type = other RNA
agcagctgcagccccaggcctgt

SEQ ID NO: 72452 - RNA, 23 nt, synthetic construct
  source 1..23: mol_type = other RNA
tgatggtctctccaggcttgtag

SEQ ID NO: 72453 - RNA, 23 nt, synthetic construct
  source 1..23: mol_type = other RNA
cctgctggcccagctcctccagc

SEQ ID NO: 72454 - RNA, 23 nt, synthetic construct
  source 1..23: mol_type = other RNA
gggtggtggtggtggtggccgtc

SEQ ID NO: 72455 - RNA, 23 nt, synthetic construct
  source 1..23: mol_type = other RNA
tgggtggtggtggtggtggccgt

SEQ ID NO: 72456 - RNA, 23 nt, synthetic construct
  source 1..23: mol_type = other RNA
ctgggtggtggtggtggtggccg

SEQ ID NO: 72457 - RNA, 23 nt, synthetic construct
  source 1..23: mol_type = other RNA
gtggtgcccagggaggaggaggg

SEQ ID NO: 72458 - RNA, 23 nt, synthetic construct
  source 1..23: mol_type = other RNA
gaggaagtggctttggaactggt

SEQ ID NO: 72459 - RNA, 23 nt, synthetic construct
  source 1..23: mol_type = other RNA
tgggtgtggctgtggctgtggtc

SEQ ID NO: 72460 - RNA, 23 nt, synthetic construct
  source 1..23: mol_type = other RNA
gtggtgcccagggaggaggaggg

SEQ ID NO: 72461 - RNA, 23 nt, synthetic construct
  source 1..23: mol_type = other RNA
gaggaagtggctttggaactggt

SEQ ID NO: 72462 - RNA, 23 nt, synthetic construct
  source 1..23: mol_type = other RNA
gtggtgcccagggaggaggaggg

SEQ ID NO: 72463 - RNA, 23 nt, synthetic construct
  source 1..23: mol_type = other RNA
ggcggcagcggcagtggcagagg

SEQ ID NO: 72464 - RNA, 23 nt, synthetic construct
  source 1..23: mol_type = other RNA
accggggctgcggggctggcagt

SEQ ID NO: 72465 - RNA, 23 nt, synthetic construct
  source 1..23: mol_type = other RNA
tgtggtgggcatggggtgggggt

SEQ ID NO: 72466 - RNA, 21 nt, synthetic construct
  source 1..21: mol_type = other RNA
cctcaatgacgcgggcgccta

SEQ ID NO: 72467 - RNA, 21 nt, synthetic construct
  source 1..21: mol_type = other RNA
gacgtgggctgtttcagcaca

SEQ ID NO: 72468 - RNA, 21 nt, synthetic construct
  source 1..21: mol_type = other RNA
tgtccgcgaggtctgccgcta

SEQ ID NO: 72469 - RNA, 21 nt, synthetic construct
  source 1..21: mol_type = other RNA
gacgttgagtcctacgataaa

SEQ ID NO: 72470 - RNA, 21 nt, synthetic construct
  source 1..21: mol_type = other RNA
actatgagtgcgagtgcatca

SEQ ID NO: 72471 - RNA, 21 nt, synthetic construct
  source 1..21: mol_type = other RNA
gctacgttctgtccaagaaaa

SEQ ID NO: 72472 - RNA, 21 nt, synthetic construct
  source 1..21: mol_type = other RNA
tgaacaacttggaggggacga

SEQ ID NO: 72473 - RNA, 21 nt, synthetic construct
  source 1..21: mol_type = other RNA
tccactatgagtgcgagtgca

SEQ ID NO: 72474 - RNA, 21 nt, synthetic construct
  source 1..21: mol_type = other RNA
gcggtttcagcaagaacggca

SEQ ID NO: 72475 - RNA, 21 nt, synthetic construct
  source 1..21: mol_type = other RNA
agaacggcgtgcttgtgtcta

SEQ ID NO: 72476 - RNA, 21 nt, synthetic construct
  source 1..21: mol_type = other RNA
ctgaccccgctccagtttgga

SEQ ID NO: 72477 - RNA, 21 nt, synthetic construct
  source 1..21: mol_type = other RNA
gtcacctgcgtgaacaagcaa

SEQ ID NO: 72478 - RNA, 21 nt, synthetic construct
  source 1..21: mol_type = other RNA
cctttgtggaatactcacgca

SEQ ID NO: 72479 - RNA, 21 nt, synthetic construct
  source 1..21: mol_type = other RNA
ggcgcagccttcgccaacaca

SEQ ID NO: 72480 - RNA, 21 nt, synthetic construct
  source 1..21: mol_type = other RNA
ggacgttgagtcctacgataa

SEQ ID NO: 72481 - RNA, 21 nt, synthetic construct
  source 1..21: mol_type = other RNA
tcacggcaccgtgctggctca

SEQ ID NO: 72482 - RNA, 21 nt, synthetic construct
  source 1..21: mol_type = other RNA
gttgactccaccaagtactaa

SEQ ID NO: 72483 - RNA, 21 nt, synthetic construct
  source 1..21: mol_type = other RNA
caagtccatggatatcgtcca

SEQ ID NO: 72484 - RNA, 21 nt, synthetic construct
  source 1..21: mol_type = other RNA
cagctacgttctgtccaagaa

SEQ ID NO: 72485 - RNA, 21 nt, synthetic construct
  source 1..21: mol_type = other RNA
tttgacggcacctcttacaca

SEQ ID NO: 72486 - RNA, 21 nt, synthetic construct
  source 1..21: mol_type = other RNA
ctgtttgaccaaattccggta

SEQ ID NO: 72487 - RNA, 21 nt, synthetic construct
  source 1..21: mol_type = other RNA
ccctcgagcttcttcatcgta

SEQ ID NO: 72488 - RNA, 21 nt, synthetic construct
  source 1..21: mol_type = other RNA
tattccacctttgacggcaca

SEQ ID NO: 72489 - RNA, 21 nt, synthetic construct
  source 1..21: mol_type = other RNA
acggcgtctgcaccaagtaca

SEQ ID NO: 72490 - RNA, 21 nt, synthetic construct
  source 1..21: mol_type = other RNA
gttcatccgactgcaccagga

SEQ ID NO: 72491 - RNA, 21 nt, synthetic construct
  source 1..21: mol_type = other RNA
actccaccaagtactacgaga

SEQ ID NO: 72492 - RNA, 21 nt, synthetic construct
  source 1..21: mol_type = other RNA
gtgacttccactatgagtgca

SEQ ID NO: 72493 - RNA, 21 nt, synthetic construct
  source 1..21: mol_type = other RNA
cctccactccggggacgacca

SEQ ID NO: 72494 - RNA, 21 nt, synthetic construct
  source 1..21: mol_type = other RNA
cctccactccggggacgacca

SEQ ID NO: 72495 - RNA, 21 nt, synthetic construct
  source 1..21: mol_type = other RNA
cctccactccggggacgacca

SEQ ID NO: 72496 - RNA, 21 nt, synthetic construct
  source 1..21: mol_type = other RNA
ttgaccaaattccggtgagca

SEQ ID NO: 72497 - RNA, 21 nt, synthetic construct
  source 1..21: mol_type = other RNA
gccggaaccccagtgggcaca

SEQ ID NO: 72498 - RNA, 21 nt, synthetic construct
  source 1..21: mol_type = other RNA
tgaaatccgtgtgttctgcta

SEQ ID NO: 72499 - RNA, 21 nt, synthetic construct
  source 1..21: mol_type = other RNA
tgaaatccgtgtgttctgcta

SEQ ID NO: 72500 - RNA, 21 nt, synthetic construct
  source 1..21: mol_type = other RNA
tgaaatccgtgtgttctgcta

SEQ ID NO: 72501 - RNA, 21 nt, synthetic construct
  source 1..21: mol_type = other RNA
cgaatacgtgccctgtggcca

SEQ ID NO: 72502 - RNA, 21 nt, synthetic construct
  source 1..21: mol_type = other RNA
actcacgccagtgcgcccaca

SEQ ID NO: 72503 - RNA, 21 nt, synthetic construct
  source 1..21: mol_type = other RNA
cggcgtctgcaccaagtacaa

SEQ ID NO: 72504 - RNA, 21 nt, synthetic construct
  source 1..21: mol_type = other RNA
cgctgaccacgagcctggcga

SEQ ID NO: 72505 - RNA, 21 nt, synthetic construct
  source 1..21: mol_type = other RNA
cactacaagtccatggatata

SEQ ID NO: 72506 - RNA, 21 nt, synthetic construct
  source 1..21: mol_type = other RNA
gtgttcatccgactgcaccaa

SEQ ID NO: 72507 - RNA, 21 nt, synthetic construct
  source 1..21: mol_type = other RNA
agcggtttcagcaagaacgga

SEQ ID NO: 72508 - RNA, 21 nt, synthetic construct
  source 1..21: mol_type = other RNA
aacaacttggaggggacgtta

SEQ ID NO: 72509 - RNA, 21 nt, synthetic construct
  source 1..21: mol_type = other RNA
ccaaattccggtgagcagcga

SEQ ID NO: 72510 - RNA, 21 nt, synthetic construct
  source 1..21: mol_type = other RNA
gccaggtgcgtgggtgacaaa

SEQ ID NO: 72511 - RNA, 21 nt, synthetic construct
  source 1..21: mol_type = other RNA
ttcctcaatgacgcgggcgca

SEQ ID NO: 72512 - RNA, 21 nt, synthetic construct
  source 1..21: mol_type = other RNA
ggacgtcatctacaacaccaa

SEQ ID NO: 72513 - RNA, 21 nt, synthetic construct
  source 1..21: mol_type = other RNA
accccgctccagtttgggaaa

SEQ ID NO: 72514 - RNA, 21 nt, synthetic construct
  source 1..21: mol_type = other RNA
tcatccgactgcaccaggaca

SEQ ID NO: 72515 - RNA, 21 nt, synthetic construct
  source 1..21: mol_type = other RNA
agaactgccagagctgtaaca

SEQ ID NO: 72516 - RNA, 21 nt, synthetic construct
  source 1..21: mol_type = other RNA
aactacaggatccgggtccta

SEQ ID NO: 72517 - RNA, 21 nt, synthetic construct
  source 1..21: mol_type = other RNA
cctttgacggcacctcttaca

SEQ ID NO: 72518 - RNA, 21 nt, synthetic construct
  source 1..21: mol_type = other RNA
cgggaccttccgcatcgtcaa

SEQ ID NO: 72519 - RNA, 21 nt, synthetic construct
  source 1..21: mol_type = other RNA
acgttgagtcctacgataaga

SEQ ID NO: 72520 - RNA, 21 nt, synthetic construct
  source 1..21: mol_type = other RNA
ttgacggcacctcttacacca

SEQ ID NO: 72521 - RNA, 21 nt, synthetic construct
  source 1..21: mol_type = other RNA
caccctcgagcttcttcatca

SEQ ID NO: 72522 - RNA, 21 nt, synthetic construct
  source 1..21: mol_type = other RNA
agctgccttacagccgcacta

SEQ ID NO: 72523 - RNA, 21 nt, synthetic construct
  source 1..21: mol_type = other RNA
aagtccatggatatcgtccta

SEQ ID NO: 72524 - RNA, 21 nt, synthetic construct
  source 1..21: mol_type = other RNA
tttgtggaatactcacgccaa

SEQ ID NO: 72525 - RNA, 21 nt, synthetic construct
  source 1..21: mol_type = other RNA
tgttctgctgcaactacggca

SEQ ID NO: 72526 - RNA, 21 nt, synthetic construct
  source 1..21: mol_type = other RNA
tgttctgctgcaactacggca

SEQ ID NO: 72527 - RNA, 21 nt, synthetic construct
  source 1..21: mol_type = other RNA
gatgaagtgcgtggcccagta

SEQ ID NO: 72528 - RNA, 21 nt, synthetic construct
  source 1..21: mol_type = other RNA
cacctttgacggcacctctta

SEQ ID NO: 72529 - RNA, 21 nt, synthetic construct
  source 1..21: mol_type = other RNA
agcaagaacggcgtgcttgta

SEQ ID NO: 72530 - RNA, 21 nt, synthetic construct
  source 1..21: mol_type = other RNA
gcctgagtgaggccgacgtca

SEQ ID NO: 72531 - RNA, 21 nt, synthetic construct
  source 1..21: mol_type = other RNA
ccagaaccaggctgacgacta

SEQ ID NO: 72532 - RNA, 21 nt, synthetic construct
  source 1..21: mol_type = other RNA
ctattccacctttgacggcaa

SEQ ID NO: 72533 - RNA, 21 nt, synthetic construct
  source 1..21: mol_type = other RNA
acctttgacggcacctcttaa

SEQ ID NO: 72534 - RNA, 21 nt, synthetic construct
  source 1..21: mol_type = other RNA
agcctcaggaaaaccggctga

SEQ ID NO: 72535 - RNA, 21 nt, synthetic construct
  source 1..21: mol_type = other RNA
gcacggtggccaggtgcgtga

SEQ ID NO: 72536 - RNA, 21 nt, synthetic construct
  source 1..21: mol_type = other RNA
gttgggccaggtcgtggaata

SEQ ID NO: 72537 - RNA, 21 nt, synthetic construct
  source 1..21: mol_type = other RNA
gttgggccaggtcgtggaata

SEQ ID NO: 72538 - RNA, 21 nt, synthetic construct
  source 1..21: mol_type = other RNA
gttgggccaggtcgtggaata

SEQ ID NO: 72539 - RNA, 21 nt, synthetic construct
  source 1..21: mol_type = other RNA
gttgggccaggtcgtggaata

SEQ ID NO: 72540 - RNA, 21 nt, synthetic construct
  source 1..21: mol_type = other RNA
ctcttccacaacaacaccgaa

SEQ ID NO: 72541 - RNA, 21 nt, synthetic construct
  source 1..21: mol_type = other RNA
accaacaaccagagggacgaa

SEQ ID NO: 72542 - RNA, 21 nt, synthetic construct
  source 1..21: mol_type = other RNA
gatgagtgtggctgcacgcca

SEQ ID NO: 72543 - RNA, 21 nt, synthetic construct
  source 1..21: mol_type = other RNA
tacaagtccatggatatcgta

SEQ ID NO: 72544 - RNA, 21 nt, synthetic construct
  source 1..21: mol_type = other RNA
gaatgagaactacgcccggca

SEQ ID NO: 72545 - RNA, 21 nt, synthetic construct
  source 1..21: mol_type = other RNA
ccgagaacatcccctgtggga

SEQ ID NO: 72546 - RNA, 21 nt, synthetic construct
  source 1..21: mol_type = other RNA
gaggactaccccaagtctgaa

SEQ ID NO: 72547 - RNA, 21 nt, synthetic construct
  source 1..21: mol_type = other RNA
agtcctacgataagatcagga

SEQ ID NO: 72548 - RNA, 21 nt, synthetic construct
  source 1..21: mol_type = other RNA
tttcagcaagaacggcgtgca

SEQ ID NO: 72549 - RNA, 21 nt, synthetic construct
  source 1..21: mol_type = other RNA
cggggatggccacttcatcaa

SEQ ID NO: 72550 - RNA, 21 nt, synthetic construct
  source 1..21: mol_type = other RNA
gtgagctttgttccacccgta

SEQ ID NO: 72551 - RNA, 21 nt, synthetic construct
  source 1..21: mol_type = other RNA
gactaccccaagtctgaacaa

SEQ ID NO: 72552 - RNA, 21 nt, synthetic construct
  source 1..21: mol_type = other RNA
acctatgaggacaggacctaa

SEQ ID NO: 72553 - RNA, 21 nt, synthetic construct
  source 1..21: mol_type = other RNA
accctcgagcttcttcatcga

SEQ ID NO: 72554 - RNA, 21 nt, synthetic construct
  source 1..21: mol_type = other RNA
gacttccactatgagtgcgaa

SEQ ID NO: 72555 - RNA, 21 nt, synthetic construct
  source 1..21: mol_type = other RNA
gccaggtcgtggaatgcagca

SEQ ID NO: 72556 - RNA, 21 nt, synthetic construct
  source 1..21: mol_type = other RNA
gccaggtcgtggaatgcagca

SEQ ID NO: 72557 - RNA, 21 nt, synthetic construct
  source 1..21: mol_type = other RNA
gccaggtcgtggaatgcagca

SEQ ID NO: 72558 - RNA, 21 nt, synthetic construct
  source 1..21: mol_type = other RNA
gccaggtcgtggaatgcagca

SEQ ID NO: 72559 - RNA, 21 nt, synthetic construct
  source 1..21: mol_type = other RNA
gtggacagagtggtttgacga

SEQ ID NO: 72560 - RNA, 21 nt, synthetic construct
  source 1..21: mol_type = other RNA
agaatgagaactacgcccgga

SEQ ID NO: 72561 - RNA, 21 nt, synthetic construct
  source 1..21: mol_type = other RNA
gagaactgccagagctgtaaa

SEQ ID NO: 72562 - RNA, 21 nt, synthetic construct
  source 1..21: mol_type = other RNA
ttcaagatgtgctacaactaa

SEQ ID NO: 72563 - RNA, 21 nt, synthetic construct
  source 1..21: mol_type = other RNA
ggggacgttgagtcctacgaa

SEQ ID NO: 72564 - RNA, 21 nt, synthetic construct
  source 1..21: mol_type = other RNA
aactgcacctatgtcctcata

SEQ ID NO: 72565 - RNA, 21 nt, synthetic construct
  source 1..21: mol_type = other RNA
cagtgcgcccacgcgggggga

SEQ ID NO: 72566 - RNA, 21 nt, synthetic construct
  source 1..21: mol_type = other RNA
gtggtttgatgaggactacca

SEQ ID NO: 72567 - RNA, 21 nt, synthetic construct
  source 1..21: mol_type = other RNA
atgggcccacggagcagtgca

SEQ ID NO: 72568 - RNA, 21 nt, synthetic construct
  source 1..21: mol_type = other RNA
tgcacaacgaggccacctaca

SEQ ID NO: 72569 - RNA, 21 nt, synthetic construct
  source 1..21: mol_type = other RNA
acgacgcgggcctgtgtgtga

SEQ ID NO: 72570 - RNA, 21 nt, synthetic construct
  source 1..21: mol_type = other RNA
gacgtcatctacaacaccaca

SEQ ID NO: 72571 - RNA, 21 nt, synthetic construct
  source 1..21: mol_type = other RNA
ggacttcaacgtccagctaca

SEQ ID NO: 72572 - RNA, 21 nt, synthetic construct
  source 1..21: mol_type = other RNA
tgcacctatgaggacaggaca

SEQ ID NO: 72573 - RNA, 21 nt, synthetic construct
  source 1..21: mol_type = other RNA
aacttggaggggacgttgaga

SEQ ID NO: 72574 - RNA, 21 nt, synthetic construct
  source 1..21: mol_type = other RNA
accctgttcacaccctcgaga

SEQ ID NO: 72575 - RNA, 21 nt, synthetic construct
  source 1..21: mol_type = other RNA
ccctgttcacaccctcgagca

SEQ ID NO: 72576 - RNA, 21 nt, synthetic construct
  source 1..21: mol_type = other RNA
cgcatcgtcaccgagaacata

SEQ ID NO: 72577 - RNA, 21 nt, synthetic construct
  source 1..21: mol_type = other RNA
cctggcggactccggacacca

SEQ ID NO: 72578 - RNA, 21 nt, synthetic construct
  source 1..21: mol_type = other RNA
aactactatgacgtcggtgca

SEQ ID NO: 72579 - RNA, 21 nt, synthetic construct
  source 1..21: mol_type = other RNA
cacgacccgctgtcaaccgaa

SEQ ID NO: 72580 - RNA, 21 nt, synthetic construct
  source 1..21: mol_type = other RNA
acggaaactactatgacgtca

SEQ ID NO: 72581 - RNA, 21 nt, synthetic construct
  source 1..21: mol_type = other RNA
aataagaccgaccgagccgga

SEQ ID NO: 72582 - RNA, 21 nt, synthetic construct
  source 1..21: mol_type = other RNA
acggccactacgatcacggca

SEQ ID NO: 72583 - RNA, 21 nt, synthetic construct
  source 1..21: mol_type = other RNA
acggccactacgatcacggca

SEQ ID NO: 72584 - RNA, 21 nt, synthetic construct
  source 1..21: mol_type = other RNA
acggccactacgatcacggca

SEQ ID NO: 72585 - RNA, 21 nt, synthetic construct
  source 1..21: mol_type = other RNA
acggccactacgatcacggca

SEQ ID NO: 72586 - RNA, 21 nt, synthetic construct
  source 1..21: mol_type = other RNA
cgacccgctgtcaaccgaaga

SEQ ID NO: 72587 - RNA, 21 nt, synthetic construct
  source 1..21: mol_type = other RNA
acgaccactgcaggggacgta

SEQ ID NO: 72588 - RNA, 21 nt, synthetic construct
  source 1..21: mol_type = other RNA
tgctcgcgcctgaccgatcca

SEQ ID NO: 72589 - RNA, 21 nt, synthetic construct
  source 1..21: mol_type = other RNA
ctaccaaagtgccgactacca

SEQ ID NO: 72590 - RNA, 21 nt, synthetic construct
  source 1..21: mol_type = other RNA
ctaccaaagtgccgactacca

SEQ ID NO: 72591 - RNA, 21 nt, synthetic construct
  source 1..21: mol_type = other RNA
ctaccaaagtgccgactacca

SEQ ID NO: 72592 - RNA, 21 nt, synthetic construct
  source 1..21: mol_type = other RNA
ctgcgaatacgtgccctgtga

SEQ ID NO: 72593 - RNA, 21 nt, synthetic construct
  source 1..21: mol_type = other RNA
cactaccaaagtgccgactaa

SEQ ID NO: 72594 - RNA, 21 nt, synthetic construct
  source 1..21: mol_type = other RNA
actaccaaagtgccgactaca

SEQ ID NO: 72595 - RNA, 21 nt, synthetic construct
  source 1..21: mol_type = other RNA
cactaccaaagtgccgactaa

SEQ ID NO: 72596 - RNA, 21 nt, synthetic construct
  source 1..21: mol_type = other RNA
actaccaaagtgccgactaca

SEQ ID NO: 72597 - RNA, 21 nt, synthetic construct
  source 1..21: mol_type = other RNA
cactaccaaagtgccgactaa

SEQ ID NO: 72598 - RNA, 21 nt, synthetic construct
  source 1..21: mol_type = other RNA
actaccaaagtgccgactaca

SEQ ID NO: 72599 - RNA, 21 nt, synthetic construct
  source 1..21: mol_type = other RNA
gacccgatgggtttcctaaaa

SEQ ID NO: 72600 - RNA, 21 nt, synthetic construct
  source 1..21: mol_type = other RNA
cacacccccagtgccgaacaa

SEQ ID NO: 72601 - RNA, 21 nt, synthetic construct
  source 1..21: mol_type = other RNA
cacacccccagtgccgaacaa

SEQ ID NO: 72602 - RNA, 21 nt, synthetic construct
  source 1..21: mol_type = other RNA
cacacccccagtgccgaacaa

SEQ ID NO: 72603 - RNA, 21 nt, synthetic construct
  source 1..21: mol_type = other RNA
cacacccccagtgccgaacaa

SEQ ID NO: 72604 - RNA, 21 nt, synthetic construct
  source 1..21: mol_type = other RNA
gtgctcgcgcctgaccgatca

SEQ ID NO: 72605 - RNA, 21 nt, synthetic construct
  source 1..21: mol_type = other RNA
gatacgctacatggggatcta

SEQ ID NO: 72606 - RNA, 21 nt, synthetic construct
  source 1..21: mol_type = other RNA
ggtgtccccctgcgggagtta

SEQ ID NO: 72607 - RNA, 21 nt, synthetic construct
  source 1..21: mol_type = other RNA
cagtgcgctcacagccttgaa

SEQ ID NO: 72608 - RNA, 21 nt, synthetic construct
  source 1..21: mol_type = other RNA
gggacgttgagtcctacgata

SEQ ID NO: 72609 - RNA, 21 nt, synthetic construct
  source 1..21: mol_type = other RNA
ggtgtccccctgcgggagtta

SEQ ID NO: 72610 - RNA, 21 nt, synthetic construct
  source 1..21: mol_type = other RNA
ggtgtccccctgcgggagtta

SEQ ID NO: 72611 - RNA, 21 nt, synthetic construct
  source 1..21: mol_type = other RNA
gccaacgtcacctgcgtgaaa

SEQ ID NO: 72612 - RNA, 21 nt, synthetic construct
  source 1..21: mol_type = other RNA
ggacgcactggagtttgggaa

SEQ ID NO: 72613 - RNA, 21 nt, synthetic construct
  source 1..21: mol_type = other RNA
ctacgataagatcagggccga

SEQ ID NO: 72614 - RNA, 21 nt, synthetic construct
  source 1..21: mol_type = other RNA
caataagaccgaccgagccga

SEQ ID NO: 72615 - RNA, 21 nt, synthetic construct
  source 1..21: mol_type = other RNA
ctactatgacgtcggtgcaaa

SEQ ID NO: 72616 - RNA, 21 nt, synthetic construct
  source 1..21: mol_type = other RNA
cagcctggtgtccccctgcga

SEQ ID NO: 72617 - RNA, 21 nt, synthetic construct
  source 1..21: mol_type = other RNA
cagcctggtgtccccctgcga

SEQ ID NO: 72618 - RNA, 21 nt, synthetic construct
  source 1..21: mol_type = other RNA
cagcctggtgtccccctgcga

SEQ ID NO: 72619 - RNA, 21 nt, synthetic construct
  source 1..21: mol_type = other RNA
cagaaccaggctgacgactta

SEQ ID NO: 72620 - RNA, 21 nt, synthetic construct
  source 1..21: mol_type = other RNA
atgtacgggtgggaagctaaa

SEQ ID NO: 72621 - RNA, 21 nt, synthetic construct
  source 1..21: mol_type = other RNA
tacgctacatggggatcttca

SEQ ID NO: 72622 - RNA, 21 nt, synthetic construct
  source 1..21: mol_type = other RNA
gcgaatacgtgccctgtggca

SEQ ID NO: 72623 - RNA, 21 nt, synthetic construct
  source 1..21: mol_type = other RNA
gctacgcctacgtggtggata

SEQ ID NO: 72624 - RNA, 21 nt, synthetic construct
  source 1..21: mol_type = other RNA
gcacgacccgctgtcaaccga

SEQ ID NO: 72625 - RNA, 21 nt, synthetic construct
  source 1..21: mol_type = other RNA
caccggtaccacccagcacta

SEQ ID NO: 72626 - RNA, 21 nt, synthetic construct
  source 1..21: mol_type = other RNA
acggcacgcacgcttccagta

SEQ ID NO: 72627 - RNA, 21 nt, synthetic construct
  source 1..21: mol_type = other RNA
caccggtaccacccagcacta

SEQ ID NO: 72628 - RNA, 21 nt, synthetic construct
  source 1..21: mol_type = other RNA
caccggtaccacccagcacta

SEQ ID NO: 72629 - RNA, 21 nt, synthetic construct
  source 1..21: mol_type = other RNA
caacgtccagctacgccgaga

SEQ ID NO: 72630 - RNA, 21 nt, synthetic construct
  source 1..21: mol_type = other RNA
tacgccgaggcctagtgggca

SEQ ID NO: 72631 - RNA, 21 nt, synthetic construct
  source 1..21: mol_type = other RNA
tgccttacagccgcactggca

SEQ ID NO: 72632 - RNA, 21 nt, synthetic construct
  source 1..21: mol_type = other RNA
tctacgacctgcatggtgaca

SEQ ID NO: 72633 - RNA, 21 nt, synthetic construct
  source 1..21: mol_type = other RNA
gcggcgtgttcctcaactcca

SEQ ID NO: 72634 - RNA, 21 nt, synthetic construct
  source 1..21: mol_type = other RNA
ccagcgctacgcctacgtgga

SEQ ID NO: 72635 - RNA, 21 nt, synthetic construct
  source 1..21: mol_type = other RNA
ggcgatcgctacagctttgaa

SEQ ID NO: 72636 - RNA, 21 nt, synthetic construct
  source 1..21: mol_type = other RNA
cgatcgctacagctttgaaga

SEQ ID NO: 72637 - RNA, 21 nt, synthetic construct
  source 1..21: mol_type = other RNA
gaccggaagaccagcgtgtta

SEQ ID NO: 72638 - RNA, 21 nt, synthetic construct
  source 1..21: mol_type = other RNA
cacgactacgagctgcgggta

SEQ ID NO: 72639 - RNA, 21 nt, synthetic construct
  source 1..21: mol_type = other RNA
acgacggggagcttgggcaca

SEQ ID NO: 72640 - RNA, 21 nt, synthetic construct
  source 1..21: mol_type = other RNA
cacgagcctggcgccaacaca

SEQ ID NO: 72641 - RNA, 21 nt, synthetic construct
  source 1..21: mol_type = other RNA
gagacgacaatgagcccctta

SEQ ID NO: 72642 - RNA, 21 nt, synthetic construct
  source 1..21: mol_type = other RNA
gacgacaatgagccccttgaa

SEQ ID NO: 72643 - RNA, 21 nt, synthetic construct
  source 1..21: mol_type = other RNA
ccagcgttacacccatcccca

SEQ ID NO: 72644 - RNA, 21 nt, synthetic construct
  source 1..21: mol_type = other RNA
cagcgttacacccatccccta

SEQ ID NO: 72645 - RNA, 21 nt, synthetic construct
  source 1..21: mol_type = other RNA
ccagcgttacacccatcccca

SEQ ID NO: 72646 - RNA, 21 nt, synthetic construct
  source 1..21: mol_type = other RNA
cagcgttacacccatccccta

SEQ ID NO: 72647 - RNA, 21 nt, synthetic construct
  source 1..21: mol_type = other RNA
gtgtcggacccgagccagcca

SEQ ID NO: 72648 - RNA, 21 nt, synthetic construct
  source 1..21: mol_type = other RNA
cactactgcacggcctctgca

SEQ ID NO: 72649 - RNA, 21 nt, synthetic construct
  source 1..21: mol_type = other RNA
ttacgcagagctctgccgcga

SEQ ID NO: 72650 - RNA, 21 nt, synthetic construct
  source 1..21: mol_type = other RNA
ccgtcccggcttcgtaaccga

SEQ ID NO: 72651 - RNA, 21 nt, synthetic construct
  source 1..21: mol_type = other RNA
cccggcttcgtaaccgtgaca

SEQ ID NO: 72652 - RNA, 21 nt, synthetic construct
  source 1..21: mol_type = other RNA
acggtgtgcgtgtgcaacaca

SEQ ID NO: 72653 - RNA, 21 nt, synthetic construct
  source 1..21: mol_type = other RNA
tgtgcgggcctatgtgtccca

SEQ ID NO: 72654 - RNA, 21 nt, synthetic construct
  source 1..21: mol_type = other RNA
acggattccagctggccacga

SEQ ID NO: 72655 - RNA, 21 nt, synthetic construct
  source 1..21: mol_type = other RNA
gagcctcaggaaaaccggcta

SEQ ID NO: 72656 - RNA, 21 nt, synthetic construct
  source 1..21: mol_type = other RNA
gccagtgcgcccacgcgggga

SEQ ID NO: 72657 - RNA, 21 nt, synthetic construct
  source 1..21: mol_type = other RNA
catcgagtgccgggcggcgca

SEQ ID NO: 72658 - RNA, 21 nt, synthetic construct
  source 1..21: mol_type = other RNA
aaccgaaaagaccaccctata

SEQ ID NO: 72659 - RNA, 21 nt, synthetic construct
  source 1..21: mol_type = other RNA
cttcaacgtccagctacgcca

SEQ ID NO: 72660 - RNA, 21 nt, synthetic construct
  source 1..21: mol_type = other RNA
gcgtagccggtccgtggtgga

SEQ ID NO: 72661 - RNA, 21 nt, synthetic construct
  source 1..21: mol_type = other RNA
cactaccaaagtgctgactaa

SEQ ID NO: 72662 - RNA, 21 nt, synthetic construct
  source 1..21: mol_type = other RNA
accgaaaagaccaccctatga

SEQ ID NO: 72663 - RNA, 21 nt, synthetic construct
  source 1..21: mol_type = other RNA
gctacgccgaggcctagtgga

SEQ ID NO: 72664 - RNA, 21 nt, synthetic construct
  source 1..21: mol_type = other RNA
cctcgagcttcttcatcgtga

SEQ ID NO: 72665 - RNA, 21 nt, synthetic construct
  source 1..21: mol_type = other RNA
ccggagcgtccaagtactcaa

SEQ ID NO: 72666 - RNA, 21 nt, synthetic construct
  source 1..21: mol_type = other RNA
cccgctctgtcacgactacga

SEQ ID NO: 72667 - RNA, 21 nt, synthetic construct
  source 1..21: mol_type = other RNA
gcgcgtgagctttgttccaca

SEQ ID NO: 72668 - RNA, 21 nt, synthetic construct
  source 1..21: mol_type = other RNA
actactatgacgtcggtgcaa

SEQ ID NO: 72669 - RNA, 21 nt, synthetic construct
  source 1..21: mol_type = other RNA
tttgcggagtgccacgcacta

SEQ ID NO: 72670 - RNA, 21 nt, synthetic construct
  source 1..21: mol_type = other RNA
tctacggggttggtgcaacca

SEQ ID NO: 72671 - RNA, 21 nt, synthetic construct
  source 1..21: mol_type = other RNA
gctgtgttcgtacaatggcaa

SEQ ID NO: 72672 - RNA, 21 nt, synthetic construct
  source 1..21: mol_type = other RNA
gactacgagctgcgggttcta

SEQ ID NO: 72673 - RNA, 21 nt, synthetic construct
  source 1..21: mol_type = other RNA
ccgagcatccggtcgacggca

SEQ ID NO: 72674 - RNA, 21 nt, synthetic construct
  source 1..21: mol_type = other RNA
acaagatacgctacatgggga

SEQ ID NO: 72675 - RNA, 21 nt, synthetic construct
  source 1..21: mol_type = other RNA
ctgtcacgactacgagctgca

SEQ ID NO: 72676 - RNA, 21 nt, synthetic construct
  source 1..21: mol_type = other RNA
gataagatcagggccgctgga

SEQ ID NO: 72677 - RNA, 21 nt, synthetic construct
  source 1..21: mol_type = other RNA
acgcacgcttccagtgtggaa

SEQ ID NO: 72678 - RNA, 21 nt, synthetic construct
  source 1..21: mol_type = other RNA
cagctaccagctttacaccca

SEQ ID NO: 72679 - RNA, 21 nt, synthetic construct
  source 1..21: mol_type = other RNA
cagctaccagctttacaccca

SEQ ID NO: 72680 - RNA, 21 nt, synthetic construct
  source 1..21: mol_type = other RNA
cgccgcagcctacgagtagca

SEQ ID NO: 72681 - RNA, 21 nt, synthetic construct
  source 1..21: mol_type = other RNA
gactttgccacgcgtagccga

SEQ ID NO: 72682 - RNA, 21 nt, synthetic construct
  source 1..21: mol_type = other RNA
actttgccacgcgtagccgga

SEQ ID NO: 72683 - RNA, 21 nt, synthetic construct
  source 1..21: mol_type = other RNA
caacgagttctatgcccacaa

SEQ ID NO: 72684 - RNA, 21 nt, synthetic construct
  source 1..21: mol_type = other RNA
aacggcgtgcttgtgtctgta

SEQ ID NO: 72685 - RNA, 21 nt, synthetic construct
  source 1..21: mol_type = other RNA
agaactacgcccggcactgga

SEQ ID NO: 72686 - RNA, 21 nt, synthetic construct
  source 1..21: mol_type = other RNA
gcgtctgcaccaagtacatga

SEQ ID NO: 72687 - RNA, 21 nt, synthetic construct
  source 1..21: mol_type = other RNA
cactatgagtgcgagtgcata

SEQ ID NO: 72688 - RNA, 21 nt, synthetic construct
  source 1..21: mol_type = other RNA
aaattccggtgagcagcggta

SEQ ID NO: 72689 - RNA, 21 nt, synthetic construct
  source 1..21: mol_type = other RNA
tccgcatcgtcaccgagaaca

SEQ ID NO: 72690 - RNA, 21 nt, synthetic construct
  source 1..21: mol_type = other RNA
caacgaggccacctacaagca

SEQ ID NO: 72691 - RNA, 21 nt, synthetic construct
  source 1..21: mol_type = other RNA
tgcgtgaacgacgcgtgtgca

SEQ ID NO: 72692 - RNA, 21 nt, synthetic construct
  source 1..21: mol_type = other RNA
gcgtgaacgacgcgtgtgcca

SEQ ID NO: 72693 - RNA, 21 nt, synthetic construct
  source 1..21: mol_type = other RNA
cgtgaacgacgcgtgtgccta

SEQ ID NO: 72694 - RNA, 21 nt, synthetic construct
  source 1..21: mol_type = other RNA
tcaacgagttctatgcccaca

SEQ ID NO: 72695 - RNA, 21 nt, synthetic construct
  source 1..21: mol_type = other RNA
tgacggacaacgagaactgca

SEQ ID NO: 72696 - RNA, 21 nt, synthetic construct
  source 1..21: mol_type = other RNA
acgccaaccagacctgtggca

SEQ ID NO: 72697 - RNA, 21 nt, synthetic construct
  source 1..21: mol_type = other RNA
ggtccacgaggagacggtgca

SEQ ID NO: 72698 - RNA, 21 nt, synthetic construct
  source 1..21: mol_type = other RNA
ctttgccacgcgtagccggta

SEQ ID NO: 72699 - RNA, 21 nt, synthetic construct
  source 1..21: mol_type = other RNA
tgagtcctacgataagatcaa

SEQ ID NO: 72700 - RNA, 21 nt, synthetic construct
  source 1..21: mol_type = other RNA
ccacgggaccttccgcatcga

SEQ ID NO: 72701 - RNA, 21 nt, synthetic construct
  source 1..21: mol_type = other RNA
ttccggtgagcagcggtttca

SEQ ID NO: 72702 - RNA, 21 nt, synthetic construct
  source 1..21: mol_type = other RNA
tcaaccgaagtgtgagtggaa

SEQ ID NO: 72703 - RNA, 21 nt, synthetic construct
  source 1..21: mol_type = other RNA
gcatcgtcaccgagaacatca

SEQ ID NO: 72704 - RNA, 21 nt, synthetic construct
  source 1..21: mol_type = other RNA
tttgaccaaattccggtgaga

SEQ ID NO: 72705 - RNA, 21 nt, synthetic construct
  source 1..21: mol_type = other RNA
aatacgccaaccagacctgta

SEQ ID NO: 72706 - RNA, 21 nt, synthetic construct
  source 1..21: mol_type = other RNA
tatgagtgcgagtgcatctga

SEQ ID NO: 72707 - RNA, 21 nt, synthetic construct
  source 1..21: mol_type = other RNA
aggtcgtggaatgcagcctga

SEQ ID NO: 72708 - RNA, 21 nt, synthetic construct
  source 1..21: mol_type = other RNA
aggtcgtggaatgcagcctga

SEQ ID NO: 72709 - RNA, 21 nt, synthetic construct
  source 1..21: mol_type = other RNA
aggtcgtggaatgcagcctga

SEQ ID NO: 72710 - RNA, 21 nt, synthetic construct
  source 1..21: mol_type = other RNA
aggtcgtggaatgcagcctga

SEQ ID NO: 72711 - RNA, 21 nt, synthetic construct
  source 1..21: mol_type = other RNA
gcgagtgtttctgcacggcta

SEQ ID NO: 72712 - RNA, 21 nt, synthetic construct
  source 1..21: mol_type = other RNA
acgagttctatgcccacaaca

SEQ ID NO: 72713 - RNA, 21 nt, synthetic construct
  source 1..21: mol_type = other RNA
cgtagccggtccgtggtggga

SEQ ID NO: 72714 - RNA, 21 nt, synthetic construct
  source 1..21: mol_type = other RNA
gggacgcactggagtttggga

SEQ ID NO: 72715 - RNA, 21 nt, synthetic construct
  source 1..21: mol_type = other RNA
cttgatcgccatctgcggaaa

SEQ ID NO: 72716 - RNA, 21 nt, synthetic construct
  source 1..21: mol_type = other RNA
cttacgcagagctctgccgca

SEQ ID NO: 72717 - RNA, 21 nt, synthetic construct
  source 1..21: mol_type = other RNA
aacgtccagctacgccgagga

SEQ ID NO: 72718 - RNA, 21 nt, synthetic construct
  source 1..21: mol_type = other RNA
tgatcgccatctgcggaagca

SEQ ID NO: 72719 - RNA, 21 nt, synthetic construct
  source 1..21: mol_type = other RNA
cacttcggcctggtgtgcaga

SEQ ID NO: 72720 - RNA, 21 nt, synthetic construct
  source 1..21: mol_type = other RNA
gcactatagccaccgtgatga

SEQ ID NO: 72721 - RNA, 21 nt, synthetic construct
  source 1..21: mol_type = other RNA
aagaccgaccgagccggctga

SEQ ID NO: 72722 - RNA, 21 nt, synthetic construct
  source 1..21: mol_type = other RNA
tgtcacgactacgagctgcga

SEQ ID NO: 72723 - RNA, 21 nt, synthetic construct
  source 1..21: mol_type = other RNA
catcgagacccacgggatgga

SEQ ID NO: 72724 - RNA, 21 nt, synthetic construct
  source 1..21: mol_type = other RNA
ctacccgaagtgcccacccaa

SEQ ID NO: 72725 - RNA, 21 nt, synthetic construct
  source 1..21: mol_type = other RNA
tgtacgggtgggaagctaaga

SEQ ID NO: 72726 - RNA, 21 nt, synthetic construct
  source 1..21: mol_type = other RNA
gtgcttaccgccacggccaca

SEQ ID NO: 72727 - RNA, 21 nt, synthetic construct
  source 1..21: mol_type = other RNA
gtgcttaccgccacggccaca

SEQ ID NO: 72728 - RNA, 21 nt, synthetic construct
  source 1..21: mol_type = other RNA
tgtgacgagggttcagtgtca

SEQ ID NO: 72729 - RNA, 21 nt, synthetic construct
  source 1..21: mol_type = other RNA
ccgcaaccactggatccacga

SEQ ID NO: 72730 - RNA, 21 nt, synthetic construct
  source 1..21: mol_type = other RNA
cacaccgccacagtgctgaca

SEQ ID NO: 72731 - RNA, 21 nt, synthetic construct
  source 1..21: mol_type = other RNA
acacgggcgatccctgtccca

SEQ ID NO: 72732 - RNA, 21 nt, synthetic construct
  source 1..21: mol_type = other RNA
cacaccgccacagtgctgaca

SEQ ID NO: 72733 - RNA, 21 nt, synthetic construct
  source 1..21: mol_type = other RNA
acacgggcgatccctgtccca

SEQ ID NO: 72734 - RNA, 21 nt, synthetic construct
  source 1..21: mol_type = other RNA
gaacgacgcgtgtgcctgcga

SEQ ID NO: 72735 - RNA, 21 nt, synthetic construct
  source 1..21: mol_type = other RNA
ccgacctccaccctgagaaca

SEQ ID NO: 72736 - RNA, 21 nt, synthetic construct
  source 1..21: mol_type = other RNA
ctcgcgcctgaccgatcccaa

SEQ ID NO: 72737 - RNA, 21 nt, synthetic construct
  source 1..21: mol_type = other RNA
ggaccggaagaccagcgtgta

SEQ ID NO: 72738 - RNA, 21 nt, synthetic construct
  source 1..21: mol_type = other RNA
gacgcgtgtgcctgcgactca

SEQ ID NO: 72739 - RNA, 21 nt, synthetic construct
  source 1..21: mol_type = other RNA
ccgcatgcgggggctgatgta

SEQ ID NO: 72740 - RNA, 21 nt, synthetic construct
  source 1..21: mol_type = other RNA
acggcgtgcttgtgtctgtga

SEQ ID NO: 72741 - RNA, 21 nt, synthetic construct
  source 1..21: mol_type = other RNA
tgagcgtcaccttcaatggca

SEQ ID NO: 72742 - RNA, 21 nt, synthetic construct
  source 1..21: mol_type = other RNA
ccgagacggtgtgcgtgtgca

SEQ ID NO: 72743 - RNA, 21 nt, synthetic construct
  source 1..21: mol_type = other RNA
accggtaccacccagcactca

SEQ ID NO: 72744 - RNA, 21 nt, synthetic construct
  source 1..21: mol_type = other RNA
accggtaccacccagcactca

SEQ ID NO: 72745 - RNA, 21 nt, synthetic construct
  source 1..21: mol_type = other RNA
accggtaccacccagcactca

SEQ ID NO: 72746 - RNA, 21 nt, synthetic construct
  source 1..21: mol_type = other RNA
gacgagggttcagtgtcggta

SEQ ID NO: 72747 - RNA, 21 nt, synthetic construct
  source 1..21: mol_type = other RNA
agcactatagccaccgtgata

SEQ ID NO: 72748 - RNA, 21 nt, synthetic construct
  source 1..21: mol_type = other RNA
gcgtcaccttcaatggccaaa

SEQ ID NO: 72749 - RNA, 21 nt, synthetic construct
  source 1..21: mol_type = other RNA
cttcaacgcacacatgggcaa

SEQ ID NO: 72750 - RNA, 21 nt, synthetic construct
  source 1..21: mol_type = other RNA
aatttcccggggagcggtgga

SEQ ID NO: 72751 - RNA, 21 nt, synthetic construct
  source 1..21: mol_type = other RNA
ccggcgcacaatgggcgggta

SEQ ID NO: 72752 - RNA, 21 nt, synthetic construct
  source 1..21: mol_type = other RNA
gcacgacgagggcgccgtgta

SEQ ID NO: 72753 - RNA, 21 nt, synthetic construct
  source 1..21: mol_type = other RNA
atcgctacagctttgaaggca

SEQ ID NO: 72754 - RNA, 21 nt, synthetic construct
  source 1..21: mol_type = other RNA
accgatcccaacagtgcctta

SEQ ID NO: 72755 - RNA, 21 nt, synthetic construct
  source 1..21: mol_type = other RNA
tcgagacccacgggatggcca

SEQ ID NO: 72756 - RNA, 21 nt, synthetic construct
  source 1..21: mol_type = other RNA
ctatgtgtccctgccacggca

SEQ ID NO: 72757 - RNA, 21 nt, synthetic construct
  source 1..21: mol_type = other RNA
cacgcctccagtgtggatcaa

SEQ ID NO: 72758 - RNA, 21 nt, synthetic construct
  source 1..21: mol_type = other RNA
cacgcctccagtgtggatcaa

SEQ ID NO: 72759 - RNA, 21 nt, synthetic construct
  source 1..21: mol_type = other RNA
cacgcctccagtgtggatcaa

SEQ ID NO: 72760 - RNA, 21 nt, synthetic construct
  source 1..21: mol_type = other RNA
cacgcctccagtgtggatcaa

SEQ ID NO: 72761 - RNA, 21 nt, synthetic construct
  source 1..21: mol_type = other RNA
ggacgtgccacaaccccgcca

SEQ ID NO: 72762 - RNA, 21 nt, synthetic construct
  source 1..21: mol_type = other RNA
agagcggggactacatcaaga

SEQ ID NO: 72763 - RNA, 21 nt, synthetic construct
  source 1..21: mol_type = other RNA
gttcgtacaatggcaccttca

SEQ ID NO: 72764 - RNA, 21 nt, synthetic construct
  source 1..21: mol_type = other RNA
tgaacgacgcgtgtgcctgca

SEQ ID NO: 72765 - RNA, 21 nt, synthetic construct
  source 1..21: mol_type = other RNA
acaatgggcgggtgtgcagca

SEQ ID NO: 72766 - RNA, 21 nt, synthetic construct
  source 1..21: mol_type = other RNA
atatcgtcctcactgtcacca

SEQ ID NO: 72767 - RNA, 21 nt, synthetic construct
  source 1..21: mol_type = other RNA
ccacctacaagcctggagaga

SEQ ID NO: 72768 - RNA, 21 nt, synthetic construct
  source 1..21: mol_type = other RNA
gacgtcggtgcaagggtccca

SEQ ID NO: 72769 - RNA, 21 nt, synthetic construct
  source 1..21: mol_type = other RNA
gcgcagcttcccgacatgcca

SEQ ID NO: 72770 - RNA, 21 nt, synthetic construct
  source 1..21: mol_type = other RNA
tcccgacatgccgctggagga

SEQ ID NO: 72771 - RNA, 21 nt, synthetic construct
  source 1..21: mol_type = other RNA
tgcgagtgcatctgcagcata

SEQ ID NO: 72772 - RNA, 21 nt, synthetic construct
  source 1..21: mol_type = other RNA
gtcgcaacggccaggtcagaa

SEQ ID NO: 72773 - RNA, 21 nt, synthetic construct
  source 1..21: mol_type = other RNA
gcgctacgcctacgtggtgga

SEQ ID NO: 72774 - RNA, 21 nt, synthetic construct
  source 1..21: mol_type = other RNA
caactgcacggacgaggagga

SEQ ID NO: 72775 - RNA, 21 nt, synthetic construct
  source 1..21: mol_type = other RNA
cgctacgcctacgtggtggaa

SEQ ID NO: 72776 - RNA, 21 nt, synthetic construct
  source 1..21: mol_type = other RNA
atcgagacccacgggatggca

SEQ ID NO: 72777 - RNA, 21 nt, synthetic construct
  source 1..21: mol_type = other RNA
tacgaggacttcaacgtccaa

SEQ ID NO: 72778 - RNA, 21 nt, synthetic construct
  source 1..21: mol_type = other RNA
tgtgcgggaacttcgacgaca

SEQ ID NO: 72779 - RNA, 21 nt, synthetic construct
  source 1..21: mol_type = other RNA
ccgacatgccgctggaggaga

SEQ ID NO: 72780 - RNA, 21 nt, synthetic construct
  source 1..21: mol_type = other RNA
cccgtgtgccacctttgtgga

SEQ ID NO: 72781 - RNA, 21 nt, synthetic construct
  source 1..21: mol_type = other RNA
tcgctacagctttgaaggcaa

SEQ ID NO: 72782 - RNA, 21 nt, synthetic construct
  source 1..21: mol_type = other RNA
ctacgagtagcccggggctga

SEQ ID NO: 72783 - RNA, 21 nt, synthetic construct
  source 1..21: mol_type = other RNA
ccccgacctccaccctgagaa

SEQ ID NO: 72784 - RNA, 21 nt, synthetic construct
  source 1..21: mol_type = other RNA
cttcggccacctcgggcatca

SEQ ID NO: 72785 - RNA, 21 nt, synthetic construct
  source 1..21: mol_type = other RNA
cttcggccacctcgggcatca

SEQ ID NO: 72786 - RNA, 21 nt, synthetic construct
  source 1..21: mol_type = other RNA
cacgaccatcctgtggcacca

SEQ ID NO: 72787 - RNA, 21 nt, synthetic construct
  source 1..21: mol_type = other RNA
gtgcgccaacagccaacagaa

SEQ ID NO: 72788 - RNA, 21 nt, synthetic construct
  source 1..21: mol_type = other RNA
ctactccagagactgtccaca

SEQ ID NO: 72789 - RNA, 21 nt, synthetic construct
  source 1..21: mol_type = other RNA
tctccggcaggtgaatgagaa

SEQ ID NO: 72790 - RNA, 21 nt, synthetic construct
  source 1..21: mol_type = other RNA
aaatccgtgtgttctgctgca

SEQ ID NO: 72791 - RNA, 21 nt, synthetic construct
  source 1..21: mol_type = other RNA
aaatccgtgtgttctgctgca

SEQ ID NO: 72792 - RNA, 21 nt, synthetic construct
  source 1..21: mol_type = other RNA
aaatccgtgtgttctgctgca

SEQ ID NO: 72793 - RNA, 21 nt, synthetic construct
  source 1..21: mol_type = other RNA
aaatccgtgtgttctgctgca

SEQ ID NO: 72794 - RNA, 21 nt, synthetic construct
  source 1..21: mol_type = other RNA
tggcctacggggatggccaca

SEQ ID NO: 72795 - RNA, 21 nt, synthetic construct
  source 1..21: mol_type = other RNA
acgaggcctgcgtgaacgaca

SEQ ID NO: 72796 - RNA, 21 nt, synthetic construct
  source 1..21: mol_type = other RNA
ggcactaccagccctgcggga

SEQ ID NO: 72797 - RNA, 21 nt, synthetic construct
  source 1..21: mol_type = other RNA
gcttaccaccacggccaccaa

SEQ ID NO: 72798 - RNA, 21 nt, synthetic construct
  source 1..21: mol_type = other RNA
gcttaccaccacggccaccaa

SEQ ID NO: 72799 - RNA, 21 nt, synthetic construct
  source 1..21: mol_type = other RNA
agcgttacacccatcccctca

SEQ ID NO: 72800 - RNA, 21 nt, synthetic construct
  source 1..21: mol_type = other RNA
agcgttacacccatcccctca

SEQ ID NO: 72801 - RNA, 21 nt, synthetic construct
  source 1..21: mol_type = other RNA
acgctacatggggatcttcca

SEQ ID NO: 72802 - RNA, 21 nt, synthetic construct
  source 1..21: mol_type = other RNA
tacgcagtgtgcaatcagcaa

SEQ ID NO: 72803 - RNA, 21 nt, synthetic construct
  source 1..21: mol_type = other RNA
gaccttcgacggcgacgtcta

SEQ ID NO: 72804 - RNA, 21 nt, synthetic construct
  source 1..21: mol_type = other RNA
cgacggcgacgtcttccgcta

SEQ ID NO: 72805 - RNA, 21 nt, synthetic construct
  source 1..21: mol_type = other RNA
cactcgaactgcatgtttgaa

SEQ ID NO: 72806 - RNA, 21 nt, synthetic construct
  source 1..21: mol_type = other RNA
tcgaactgcatgtttgacaca

SEQ ID NO: 72807 - RNA, 21 nt, synthetic construct
  source 1..21: mol_type = other RNA
caccgtgtacctctgtgagga

SEQ ID NO: 72808 - RNA, 21 nt, synthetic construct
  source 1..21: mol_type = other RNA
acaagaccttcgacggcgaca

SEQ ID NO: 72809 - RNA, 21 nt, synthetic construct
  source 1..21: mol_type = other RNA
cccccgccgtgcaaccgtcca

SEQ ID NO: 72810 - RNA, 21 nt, synthetic construct
  source 1..21: mol_type = other RNA
ctacgacctgcatggtgacta

SEQ ID NO: 72811 - RNA, 21 nt, synthetic construct
  source 1..21: mol_type = other RNA
ccctacaagatacgctacata

SEQ ID NO: 72812 - RNA, 21 nt, synthetic construct
  source 1..21: mol_type = other RNA
tgtcctaacggctcagccata

SEQ ID NO: 72813 - RNA, 21 nt, synthetic construct
  source 1..21: mol_type = other RNA
tgttcgtacaatggcacctta

SEQ ID NO: 72814 - RNA, 21 nt, synthetic construct
  source 1..21: mol_type = other RNA
tgcaccgtgtacctctgtgaa

SEQ ID NO: 72815 - RNA, 21 nt, synthetic construct
  source 1..21: mol_type = other RNA
gacggcgacgtcttccgctta

SEQ ID NO: 72816 - RNA, 21 nt, synthetic construct
  source 1..21: mol_type = other RNA
cttaccgccacggccaccaca

SEQ ID NO: 72817 - RNA, 21 nt, synthetic construct
  source 1..21: mol_type = other RNA
cttaccgccacggccaccaca

SEQ ID NO: 72818 - RNA, 21 nt, synthetic construct
  source 1..21: mol_type = other RNA
tgcgaatacgtgccctgtgga

SEQ ID NO: 72819 - RNA, 21 nt, synthetic construct
  source 1..21: mol_type = other RNA
ccgatcccaacagtgccttca

SEQ ID NO: 72820 - RNA, 21 nt, synthetic construct
  source 1..21: mol_type = other RNA
ggacggaaactactatgacga

SEQ ID NO: 72821 - RNA, 21 nt, synthetic construct
  source 1..21: mol_type = other RNA
aacatccgtgcggccggagga

SEQ ID NO: 72822 - RNA, 21 nt, synthetic construct
  source 1..21: mol_type = other RNA
aacatccgtgcggccggagga

SEQ ID NO: 72823 - RNA, 21 nt, synthetic construct
  source 1..21: mol_type = other RNA
aacatccgtgcggccggagga

SEQ ID NO: 72824 - RNA, 21 nt, synthetic construct
  source 1..21: mol_type = other RNA
aacatccgtgcggccggagga

SEQ ID NO: 72825 - RNA, 21 nt, synthetic construct
  source 1..21: mol_type = other RNA
ctgtgttcgtacaatggcaca

SEQ ID NO: 72826 - RNA, 21 nt, synthetic construct
  source 1..21: mol_type = other RNA
cccaacggtgcaatgtcagga

SEQ ID NO: 72827 - RNA, 21 nt, synthetic construct
  source 1..21: mol_type = other RNA
cctaacggctcagccatccta

SEQ ID NO: 72828 - RNA, 21 nt, synthetic construct
  source 1..21: mol_type = other RNA
cagctaccagcgttacaccca

SEQ ID NO: 72829 - RNA, 21 nt, synthetic construct
  source 1..21: mol_type = other RNA
cacatcggccccaataaccaa

SEQ ID NO: 72830 - RNA, 21 nt, synthetic construct
  source 1..21: mol_type = other RNA
cagctaccagcgttacaccca

SEQ ID NO: 72831 - RNA, 21 nt, synthetic construct
  source 1..21: mol_type = other RNA
ccaacactcacgagcgagcta

SEQ ID NO: 72832 - RNA, 21 nt, synthetic construct
  source 1..21: mol_type = other RNA
ctacgaggacttcaacgtcca

SEQ ID NO: 72833 - RNA, 21 nt, synthetic construct
  source 1..21: mol_type = other RNA
ctacaataagaccgaccgaga

SEQ ID NO: 72834 - RNA, 21 nt, synthetic construct
  source 1..21: mol_type = other RNA
cacaccatggatggcggtgca

SEQ ID NO: 72835 - RNA, 21 nt, synthetic construct
  source 1..21: mol_type = other RNA
cggccactacgatcacggcca

SEQ ID NO: 72836 - RNA, 21 nt, synthetic construct
  source 1..21: mol_type = other RNA
cggccactacgatcacggcca

SEQ ID NO: 72837 - RNA, 21 nt, synthetic construct
  source 1..21: mol_type = other RNA
cggccactacgatcacggcca

SEQ ID NO: 72838 - RNA, 21 nt, synthetic construct
  source 1..21: mol_type = other RNA
cggccactacgatcacggcca

SEQ ID NO: 72839 - RNA, 21 nt, synthetic construct
  source 1..21: mol_type = other RNA
acgactacgagctgcgggtta

SEQ ID NO: 72840 - RNA, 21 nt, synthetic construct
  source 1..21: mol_type = other RNA
cagcgctacgcctacgtggta

SEQ ID NO: 72841 - RNA, 21 nt, synthetic construct
  source 1..21: mol_type = other RNA
ggtcgacggcggccctcacca

SEQ ID NO: 72842 - RNA, 21 nt, synthetic construct
  source 1..21: mol_type = other RNA
cctacgagtagcccggggcta

SEQ ID NO: 72843 - RNA, 21 nt, synthetic construct
  source 1..21: mol_type = other RNA
ggacggcacgcacgcttccaa

SEQ ID NO: 72844 - RNA, 21 nt, synthetic construct
  source 1..21: mol_type = other RNA
gctcgcgcctgaccgatccca

SEQ ID NO: 72845 - RNA, 21 nt, synthetic construct
  source 1..21: mol_type = other RNA
agcgctacgcctacgtggtga

SEQ ID NO: 72846 - RNA, 21 nt, synthetic construct
  source 1..21: mol_type = other RNA
ctgcgactcgggtggcgacta

SEQ ID NO: 72847 - RNA, 21 nt, synthetic construct
  source 1..21: mol_type = other RNA
gctacccgaagtgcccaccca

SEQ ID NO: 72848 - RNA, 21 nt, synthetic construct
  source 1..21: mol_type = other RNA
ccgtgacggtcaccccctcga

SEQ ID NO: 72849 - RNA, 21 nt, synthetic construct
  source 1..21: mol_type = other RNA
cctggcgccaacactcacgaa

SEQ ID NO: 72850 - RNA, 21 nt, synthetic construct
  source 1..21: mol_type = other RNA
ctaccagcgttacacccatca

SEQ ID NO: 72851 - RNA, 21 nt, synthetic construct
  source 1..21: mol_type = other RNA
ggacccgcctatcacagacca

SEQ ID NO: 72852 - RNA, 21 nt, synthetic construct
  source 1..21: mol_type = other RNA
ggacggcactcacgcctccaa

SEQ ID NO: 72853 - RNA, 21 nt, synthetic construct
  source 1..21: mol_type = other RNA
cactacgatcacggccaccga

SEQ ID NO: 72854 - RNA, 21 nt, synthetic construct
  source 1..21: mol_type = other RNA
ggacccgcctatcacagacca

SEQ ID NO: 72855 - RNA, 21 nt, synthetic construct
  source 1..21: mol_type = other RNA
cactacgatcacggccaccga

SEQ ID NO: 72856 - RNA, 21 nt, synthetic construct
  source 1..21: mol_type = other RNA
cacctatccccccagtgctga

SEQ ID NO: 72857 - RNA, 21 nt, synthetic construct
  source 1..21: mol_type = other RNA
ggacccgcctatcacagacca

SEQ ID NO: 72858 - RNA, 21 nt, synthetic construct
  source 1..21: mol_type = other RNA
ggacggcactcacgcctccaa

SEQ ID NO: 72859 - RNA, 21 nt, synthetic construct
  source 1..21: mol_type = other RNA
ggacccgcctatcacagacca

SEQ ID NO: 72860 - RNA, 21 nt, synthetic construct
  source 1..21: mol_type = other RNA
cactacgatcacggccaccga

SEQ ID NO: 72861 - RNA, 21 nt, synthetic construct
  source 1..21: mol_type = other RNA
cacctatccccccagtgctga

SEQ ID NO: 72862 - RNA, 21 nt, synthetic construct
  source 1..21: mol_type = other RNA
ctaccagcgttacacccatca

SEQ ID NO: 72863 - RNA, 21 nt, synthetic construct
  source 1..21: mol_type = other RNA
ggacccgcctatcacagacca

SEQ ID NO: 72864 - RNA, 21 nt, synthetic construct
  source 1..21: mol_type = other RNA
ggacggcactcacgcctccaa

SEQ ID NO: 72865 - RNA, 21 nt, synthetic construct
  source 1..21: mol_type = other RNA
cactacgatcacggccaccga

SEQ ID NO: 72866 - RNA, 21 nt, synthetic construct
  source 1..21: mol_type = other RNA
cacgtggaccgtcccagcaca

SEQ ID NO: 72867 - RNA, 21 nt, synthetic construct
  source 1..21: mol_type = other RNA
gcttacgcagagctctgccga

SEQ ID NO: 72868 - RNA, 21 nt, synthetic construct
  source 1..21: mol_type = other RNA
gcgaggtgcaaccggtggcca

SEQ ID NO: 72869 - RNA, 21 nt, synthetic construct
  source 1..21: mol_type = other RNA
gccccgagacggtgtgcgtga

SEQ ID NO: 72870 - RNA, 21 nt, synthetic construct
  source 1..21: mol_type = other RNA
acggggttggtgcaaccttca

SEQ ID NO: 72871 - RNA, 21 nt, synthetic construct
  source 1..21: mol_type = other RNA
caccgtgtgtgtccgcgagga

SEQ ID NO: 72872 - RNA, 21 nt, synthetic construct
  source 1..21: mol_type = other RNA
ctaacggctcagccatcctga

SEQ ID NO: 72873 - RNA, 21 nt, synthetic construct
  source 1..21: mol_type = other RNA
ggacggcacgcacgcctccaa

SEQ ID NO: 72874 - RNA, 21 nt, synthetic construct
  source 1..21: mol_type = other RNA
tgactaccacaaccacgggca

SEQ ID NO: 72875 - RNA, 21 nt, synthetic construct
  source 1..21: mol_type = other RNA
cgactaccacaaccacgggca

SEQ ID NO: 72876 - RNA, 21 nt, synthetic construct
  source 1..21: mol_type = other RNA
cgactaccacaaccacgggca

SEQ ID NO: 72877 - RNA, 21 nt, synthetic construct
  source 1..21: mol_type = other RNA
cgactaccacaaccacgggca

SEQ ID NO: 72878 - RNA, 21 nt, synthetic construct
  source 1..21: mol_type = other RNA
cccgggcccattcttcaacga

SEQ ID NO: 72879 - RNA, 21 nt, synthetic construct
  source 1..21: mol_type = other RNA
cccgatgggtttcctaaatta

SEQ ID NO: 72880 - RNA, 21 nt, synthetic construct
  source 1..21: mol_type = other RNA
ccgagcactatagccaccgta

SEQ ID NO: 72881 - RNA, 21 nt, synthetic construct
  source 1..21: mol_type = other RNA
cacgacgcctgcaggctccaa

SEQ ID NO: 72882 - RNA, 21 nt, synthetic construct
  source 1..21: mol_type = other RNA
aagacccgcacctcgacccta

SEQ ID NO: 72883 - RNA, 21 nt, synthetic construct
  source 1..21: mol_type = other RNA
aagacccgcacctcgacccta

SEQ ID NO: 72884 - RNA, 21 nt, synthetic construct
  source 1..21: mol_type = other RNA
aagacccgcacctcgacccta

SEQ ID NO: 72885 - RNA, 21 nt, synthetic construct
  source 1..21: mol_type = other RNA
aagacccgcacctcgacccta

SEQ ID NO: 72886 - RNA, 21 nt, synthetic construct
  source 1..21: mol_type = other RNA
tacgggtgggaagctaagcta

SEQ ID NO: 72887 - RNA, 21 nt, synthetic construct
  source 1..21: mol_type = other RNA
aaggacggaaactactatgaa

SEQ ID NO: 72888 - RNA, 21 nt, synthetic construct
  source 1..21: mol_type = other RNA
gccgctggagggcacttatga

SEQ ID NO: 72889 - RNA, 21 nt, synthetic construct
  source 1..21: mol_type = other RNA
ccgctggagggcacttatgca

SEQ ID NO: 72890 - RNA, 21 nt, synthetic construct
  source 1..21: mol_type = other RNA
cggagcgtccaagtactcaga

SEQ ID NO: 72891 - RNA, 21 nt, synthetic construct
  source 1..21: mol_type = other RNA
tttctcgcccggggaagtcaa

SEQ ID NO: 72892 - RNA, 21 nt, synthetic construct
  source 1..21: mol_type = other RNA
actcacgagcgagctgtccaa

SEQ ID NO: 72893 - RNA, 21 nt, synthetic construct
  source 1..21: mol_type = other RNA
ctacgctcacggcaccgtgca

SEQ ID NO: 72894 - RNA, 21 nt, synthetic construct
  source 1..21: mol_type = other RNA
cggcgtgttcctcaactccaa

SEQ ID NO: 72895 - RNA, 21 nt, synthetic construct
  source 1..21: mol_type = other RNA
ccgtgtgccacctttgtggaa

SEQ ID NO: 72896 - RNA, 21 nt, synthetic construct
  source 1..21: mol_type = other RNA
ctacgatcacggccaccggca

SEQ ID NO: 72897 - RNA, 21 nt, synthetic construct
  source 1..21: mol_type = other RNA
ctacgatcacggccaccggca

SEQ ID NO: 72898 - RNA, 21 nt, synthetic construct
  source 1..21: mol_type = other RNA
ctacgatcacggccaccggca

SEQ ID NO: 72899 - RNA, 21 nt, synthetic construct
  source 1..21: mol_type = other RNA
ctacgatcacggccaccggca

SEQ ID NO: 72900 - RNA, 21 nt, synthetic construct
  source 1..21: mol_type = other RNA
cagctgtgttcgtacaatgga

SEQ ID NO: 72901 - RNA, 21 nt, synthetic construct
  source 1..21: mol_type = other RNA
catccgggtccaagcggacga

SEQ ID NO: 72902 - RNA, 21 nt, synthetic construct
  source 1..21: mol_type = other RNA
tcccggcttcgtaaccgtgaa

SEQ ID NO: 72903 - RNA, 21 nt, synthetic construct
  source 1..21: mol_type = other RNA
tactatgacgtcggtgcaaga

SEQ ID NO: 72904 - RNA, 21 nt, synthetic construct
  source 1..21: mol_type = other RNA
tgacgtcggtgcaagggtcca

SEQ ID NO: 72905 - RNA, 21 nt, synthetic construct
  source 1..21: mol_type = other RNA
acgagctgatcctccaagaga

SEQ ID NO: 72906 - RNA, 21 nt, synthetic construct
  source 1..21: mol_type = other RNA
catcggccccaataaccacga

SEQ ID NO: 72907 - RNA, 21 nt, synthetic construct
  source 1..21: mol_type = other RNA
cccatacagcctgccacctga

SEQ ID NO: 72908 - RNA, 21 nt, synthetic construct
  source 1..21: mol_type = other RNA
acacgaccatcctgtggcaca

SEQ ID NO: 72909 - RNA, 21 nt, synthetic construct
  source 1..21: mol_type = other RNA
ccggacctgccccctcaacaa

SEQ ID NO: 72910 - RNA, 21 nt, synthetic construct
  source 1..21: mol_type = other RNA
cacatcggcccccataaccaa

SEQ ID NO: 72911 - RNA, 21 nt, synthetic construct
  source 1..21: mol_type = other RNA
gcacgcttccagtgtggatca

SEQ ID NO: 72912 - RNA, 21 nt, synthetic construct
  source 1..21: mol_type = other RNA
cacatcggcccccataaccaa

SEQ ID NO: 72913 - RNA, 21 nt, synthetic construct
  source 1..21: mol_type = other RNA
cacatcggcccccataaccaa

SEQ ID NO: 72914 - RNA, 21 nt, synthetic construct
  source 1..21: mol_type = other RNA
ccggcttcgtaaccgtgacca

SEQ ID NO: 72915 - RNA, 21 nt, synthetic construct
  source 1..21: mol_type = other RNA
aagcatgtgcgggcctatgta

SEQ ID NO: 72916 - RNA, 21 nt, synthetic construct
  source 1..21: mol_type = other RNA
tctcaacgccgcagcctacga

SEQ ID NO: 72917 - RNA, 21 nt, synthetic construct
  source 1..21: mol_type = other RNA
gctacgctcacggcaccgtga

SEQ ID NO: 72918 - RNA, 21 nt, synthetic construct
  source 1..21: mol_type = other RNA
gacgtgccacaaccccgccaa

SEQ ID NO: 72919 - RNA, 21 nt, synthetic construct
  source 1..21: mol_type = other RNA
cgagttctatgcccacaacga

SEQ ID NO: 72920 - RNA, 21 nt, synthetic construct
  source 1..21: mol_type = other RNA
cctttaaggcggtggcgagaa

SEQ ID NO: 72921 - RNA, 21 nt, synthetic construct
  source 1..21: mol_type = other RNA
cgctctgtcacgactacgaga

SEQ ID NO: 72922 - RNA, 21 nt, synthetic construct
  source 1..21: mol_type = other RNA
gtgcgtgggtgacaaccgtga

SEQ ID NO: 72923 - RNA, 21 nt, synthetic construct
  source 1..21: mol_type = other RNA
ggccactacgatcacggccaa

SEQ ID NO: 72924 - RNA, 21 nt, synthetic construct
  source 1..21: mol_type = other RNA
ggccactacgatcacggccaa

SEQ ID NO: 72925 - RNA, 21 nt, synthetic construct
  source 1..21: mol_type = other RNA
ggccactacgatcacggccaa

SEQ ID NO: 72926 - RNA, 21 nt, synthetic construct
  source 1..21: mol_type = other RNA
ggccactacgatcacggccaa

SEQ ID NO: 72927 - RNA, 21 nt, synthetic construct
  source 1..21: mol_type = other RNA
gtgacgagggttcagtgtcga

SEQ ID NO: 72928 - RNA, 21 nt, synthetic construct
  source 1..21: mol_type = other RNA
tcctgtcaagtccgcatcaaa

SEQ ID NO: 72929 - RNA, 21 nt, synthetic construct
  source 1..21: mol_type = other RNA
gtccaagaaatgtgccgacaa

SEQ ID NO: 72930 - RNA, 21 nt, synthetic construct
  source 1..21: mol_type = other RNA
ctgtgacgtccacttcggcca

SEQ ID NO: 72931 - RNA, 21 nt, synthetic construct
  source 1..21: mol_type = other RNA
ggtgcgtgggtgacaaccgta

SEQ ID NO: 72932 - RNA, 21 nt, synthetic construct
  source 1..21: mol_type = other RNA
cagctacgccgaggcctagta

SEQ ID NO: 72933 - RNA, 21 nt, synthetic construct
  source 1..21: mol_type = other RNA
aaactactatgacgtcggtga

SEQ ID NO: 72934 - RNA, 21 nt, synthetic construct
  source 1..21: mol_type = other RNA
gggtgacaaccgtgtcgtcca

SEQ ID NO: 72935 - RNA, 21 nt, synthetic construct
  source 1..21: mol_type = other RNA
gcccccgccgtgcaaccgtca

SEQ ID NO: 72936 - RNA, 21 nt, synthetic construct
  source 1..21: mol_type = other RNA
gtacgggtgggaagctaagca

SEQ ID NO: 72937 - RNA, 21 nt, synthetic construct
  source 1..21: mol_type = other RNA
ctgctacgacaaggacggaaa

SEQ ID NO: 72938 - RNA, 21 nt, synthetic construct
  source 1..21: mol_type = other RNA
cacactaccaaagtgccgaca

SEQ ID NO: 72939 - RNA, 21 nt, synthetic construct
  source 1..21: mol_type = other RNA
cacactaccaaagtgccgaca

SEQ ID NO: 72940 - RNA, 21 nt, synthetic construct
  source 1..21: mol_type = other RNA
cacactaccaaagtgccgaca

SEQ ID NO: 72941 - RNA, 21 nt, synthetic construct
  source 1..21: mol_type = other RNA
cgccaacactcacgagcgaga

SEQ ID NO: 72942 - RNA, 21 nt, synthetic construct
  source 1..21: mol_type = other RNA
gcaaccggtggcctgtgcgaa

SEQ ID NO: 72943 - RNA, 21 nt, synthetic construct
  source 1..21: mol_type = other RNA
ccccgagcatccggtcgacga

SEQ ID NO: 72944 - RNA, 21 nt, synthetic construct
  source 1..21: mol_type = other RNA
acctttgatggcgatcgctaa

SEQ ID NO: 72945 - RNA, 21 nt, synthetic construct
  source 1..21: mol_type = other RNA
accccgagcatccggtcgaca

SEQ ID NO: 72946 - RNA, 21 nt, synthetic construct
  source 1..21: mol_type = other RNA
cccccgctctgtcacgactaa

SEQ ID NO: 72947 - RNA, 21 nt, synthetic construct
  source 1..21: mol_type = other RNA
gaggactcctgtcaagtccga

SEQ ID NO: 72948 - RNA, 21 nt, synthetic construct
  source 1..21: mol_type = other RNA
gcccttgcactgtcctaacga

SEQ ID NO: 72949 - RNA, 21 nt, synthetic construct
  source 1..21: mol_type = other RNA
acgacccgctgtcaaccgaaa

SEQ ID NO: 72950 - RNA, 21 nt, synthetic construct
  source 1..21: mol_type = other RNA
cccttgccggccggcaactga

SEQ ID NO: 72951 - RNA, 21 nt, synthetic construct
  source 1..21: mol_type = other RNA
ggcaccttctacggggttgga

SEQ ID NO: 72952 - RNA, 21 nt, synthetic construct
  source 1..21: mol_type = other RNA
aagtccgcatcaacacgacca

SEQ ID NO: 72953 - RNA, 21 nt, synthetic construct
  source 1..21: mol_type = other RNA
ccatccgggtccaagcggaca

SEQ ID NO: 72954 - RNA, 21 nt, synthetic construct
  source 1..21: mol_type = other RNA
gagaccatcagggtcgactga

SEQ ID NO: 72955 - RNA, 21 nt, synthetic construct
  source 1..21: mol_type = other RNA
cctttgatggcgatcgctaca

SEQ ID NO: 72956 - RNA, 21 nt, synthetic construct
  source 1..21: mol_type = other RNA
tcccccgctctgtcacgacta

SEQ ID NO: 72957 - RNA, 21 nt, synthetic construct
  source 1..21: mol_type = other RNA
ccccgctctgtcacgactaca

SEQ ID NO: 72958 - RNA, 21 nt, synthetic construct
  source 1..21: mol_type = other RNA
gacccgctgtcaaccgaagta

SEQ ID NO: 72959 - RNA, 21 nt, synthetic construct
  source 1..21: mol_type = other RNA
acagctaccagcgttacacca

SEQ ID NO: 72960 - RNA, 21 nt, synthetic construct
  source 1..21: mol_type = other RNA
acagctaccagcgttacacca

SEQ ID NO: 72961 - RNA, 21 nt, synthetic construct
  source 1..21: mol_type = other RNA
ggacagtttttctcgcccgga

SEQ ID NO: 72962 - RNA, 21 nt, synthetic construct
  source 1..21: mol_type = other RNA
gcaaccgtcccggcttcgtaa

SEQ ID NO: 72963 - RNA, 21 nt, synthetic construct
  source 1..21: mol_type = other RNA
aaccgtcccggcttcgtaaca

SEQ ID NO: 72964 - RNA, 21 nt, synthetic construct
  source 1..21: mol_type = other RNA
gcttcgtaaccgtgaccagga

SEQ ID NO: 72965 - RNA, 21 nt, synthetic construct
  source 1..21: mol_type = other RNA
acctcagctgtgttcgtacaa

SEQ ID NO: 72966 - RNA, 21 nt, synthetic construct
  source 1..21: mol_type = other RNA
ctcctgtcaagtccgcatcaa

SEQ ID NO: 72967 - RNA, 21 nt, synthetic construct
  source 1..21: mol_type = other RNA
ggctgaggtcgcaacggccaa

SEQ ID NO: 72968 - RNA, 21 nt, synthetic construct
  source 1..21: mol_type = other RNA
cctaaatttcccggggagcga

SEQ ID NO: 72969 - RNA, 21 nt, synthetic construct
  source 1..21: mol_type = other RNA
gctgctacgacaaggacggaa

SEQ ID NO: 72970 - RNA, 21 nt, synthetic construct
  source 1..21: mol_type = other RNA
ttcctaaatttcccggggaga

SEQ ID NO: 72971 - RNA, 21 nt, synthetic construct
  source 1..21: mol_type = other RNA
ccctagcagcaaccaccggta

SEQ ID NO: 72972 - RNA, 21 nt, synthetic construct
  source 1..21: mol_type = other RNA
agctacgccgaggcctagtga

SEQ ID NO: 72973 - RNA, 21 nt, synthetic construct
  source 1..21: mol_type = other RNA
agcagccactacgaccgcaaa

SEQ ID NO: 72974 - RNA, 21 nt, synthetic construct
  source 1..21: mol_type = other RNA
gtggggcggctcccactatta

SEQ ID NO: 72975 - RNA, 21 nt, synthetic construct
  source 1..21: mol_type = other RNA
tgggtttcctaaatttcccga

SEQ ID NO: 72976 - RNA, 21 nt, synthetic construct
  source 1..21: mol_type = other RNA
atctacaataagaccgaccga

SEQ ID NO: 72977 - RNA, 21 nt, synthetic construct
  source 1..21: mol_type = other RNA
ccacggccactacgatcacga

SEQ ID NO: 72978 - RNA, 21 nt, synthetic construct
  source 1..21: mol_type = other RNA
ccacggccactacgatcacga

SEQ ID NO: 72979 - RNA, 21 nt, synthetic construct
  source 1..21: mol_type = other RNA
ccacggccactacgatcacga

SEQ ID NO: 72980 - RNA, 21 nt, synthetic construct
  source 1..21: mol_type = other RNA
ccacggccactacgatcacga

SEQ ID NO: 72981 - RNA, 21 nt, synthetic construct
  source 1..21: mol_type = other RNA
ccaacatccgtgcggccggaa

SEQ ID NO: 72982 - RNA, 21 nt, synthetic construct
  source 1..21: mol_type = other RNA
ccaacatccgtgcggccggaa

SEQ ID NO: 72983 - RNA, 21 nt, synthetic construct
  source 1..21: mol_type = other RNA
ccaacatccgtgcggccggaa

SEQ ID NO: 72984 - RNA, 21 nt, synthetic construct
  source 1..21: mol_type = other RNA
ccaacatccgtgcggccggaa

SEQ ID NO: 72985 - RNA, 21 nt, synthetic construct
  source 1..21: mol_type = other RNA
aggcgtccaacggctccgtca

SEQ ID NO: 72986 - RNA, 21 nt, synthetic construct
  source 1..21: mol_type = other RNA
cttggcgcctgcttgatcgca

SEQ ID NO: 72987 - RNA, 21 nt, synthetic construct
  source 1..21: mol_type = other RNA
cgtgggtgacaaccgtgtcga

SEQ ID NO: 72988 - RNA, 21 nt, synthetic construct
  source 1..21: mol_type = other RNA
ccgcagccccggtgtctagca

SEQ ID NO: 72989 - RNA, 21 nt, synthetic construct
  source 1..21: mol_type = other RNA
aacaaactaagcatgtgcgga

SEQ ID NO: 72990 - RNA, 21 nt, synthetic construct
  source 1..21: mol_type = other RNA
acaataagaccgaccgagcca

SEQ ID NO: 72991 - RNA, 21 nt, synthetic construct
  source 1..21: mol_type = other RNA
ccccgagacggtgtgcgtgta

SEQ ID NO: 72992 - RNA, 21 nt, synthetic construct
  source 1..21: mol_type = other RNA
ccgagcgcgtgccggacgcta

SEQ ID NO: 72993 - RNA, 21 nt, synthetic construct
  source 1..21: mol_type = other RNA
tacaagatacgctacatggga

SEQ ID NO: 72994 - RNA, 21 nt, synthetic construct
  source 1..21: mol_type = other RNA
cccaagtcccagcgctacgca

SEQ ID NO: 72995 - RNA, 21 nt, synthetic construct
  source 1..21: mol_type = other RNA
agtcccccgctctgtcacgaa

SEQ ID NO: 72996 - RNA, 21 nt, synthetic construct
  source 1..21: mol_type = other RNA
taccaaagtgccaactaccaa

SEQ ID NO: 72997 - RNA, 21 nt, synthetic construct
  source 1..21: mol_type = other RNA
ggccaccacacacgggcgata

SEQ ID NO: 72998 - RNA, 21 nt, synthetic construct
  source 1..21: mol_type = other RNA
gcccccataaccacggtggta

SEQ ID NO: 72999 - RNA, 21 nt, synthetic construct
  source 1..21: mol_type = other RNA
tactccaacatccgtgcggca

SEQ ID NO: 73000 - RNA, 21 nt, synthetic construct
  source 1..21: mol_type = other RNA
ggccaccacacacgggcgata

SEQ ID NO: 73001 - RNA, 21 nt, synthetic construct
  source 1..21: mol_type = other RNA
gccccacatcggccccaataa

SEQ ID NO: 73002 - RNA, 21 nt, synthetic construct
  source 1..21: mol_type = other RNA
tactccaacatccgtgcggca

SEQ ID NO: 73003 - RNA, 21 nt, synthetic construct
  source 1..21: mol_type = other RNA
taccaaagtgccgactaccaa

SEQ ID NO: 73004 - RNA, 21 nt, synthetic construct
  source 1..21: mol_type = other RNA
gcccccataaccacggtggta

SEQ ID NO: 73005 - RNA, 21 nt, synthetic construct
  source 1..21: mol_type = other RNA
tactccaacatccgtgcggca

SEQ ID NO: 73006 - RNA, 21 nt, synthetic construct
  source 1..21: mol_type = other RNA
taccaaagtgccgactaccaa

SEQ ID NO: 73007 - RNA, 21 nt, synthetic construct
  source 1..21: mol_type = other RNA
ggccaccacacacgggcgata

SEQ ID NO: 73008 - RNA, 21 nt, synthetic construct
  source 1..21: mol_type = other RNA
gcccccataaccacggtggta

SEQ ID NO: 73009 - RNA, 21 nt, synthetic construct
  source 1..21: mol_type = other RNA
tactccaacatccgtgcggca

SEQ ID NO: 73010 - RNA, 21 nt, synthetic construct
  source 1..21: mol_type = other RNA
taccaaagtgccgactaccaa

SEQ ID NO: 73011 - RNA, 21 nt, synthetic construct
  source 1..21: mol_type = other RNA
tgtggaccacgtggaccgtca

SEQ ID NO: 73012 - RNA, 21 nt, synthetic construct
  source 1..21: mol_type = other RNA
ctcttcaacgcacacatggga

SEQ ID NO: 73013 - RNA, 21 nt, synthetic construct
  source 1..21: mol_type = other RNA
tgtgtgtggcaccccgcgcta

SEQ ID NO: 73014 - RNA, 21 nt, synthetic construct
  source 1..21: mol_type = other RNA
ccgggcccattcttcaacgca

SEQ ID NO: 73015 - RNA, 21 nt, synthetic construct
  source 1..21: mol_type = other RNA
cgcagcctacgagtagcccga

SEQ ID NO: 73016 - RNA, 21 nt, synthetic construct
  source 1..21: mol_type = other RNA
gcagcctacgagtagcccgga

SEQ ID NO: 73017 - RNA, 21 nt, synthetic construct
  source 1..21: mol_type = other RNA
tctacaataagaccgaccgaa

SEQ ID NO: 73018 - RNA, 21 nt, synthetic construct
  source 1..21: mol_type = other RNA
gccaccacacacgggcggtca

SEQ ID NO: 73019 - RNA, 21 nt, synthetic construct
  source 1..21: mol_type = other RNA
acaaactaagcatgtgcggga

SEQ ID NO: 73020 - RNA, 21 nt, synthetic construct
  source 1..21: mol_type = other RNA
agagaccatcagggtcgacta

SEQ ID NO: 73021 - RNA, 21 nt, synthetic construct
  source 1..21: mol_type = other RNA
aggccctgttctcaacgccga

SEQ ID NO: 73022 - RNA, 21 nt, synthetic construct
  source 1..21: mol_type = other RNA
tccaagaaatgtgccgacaga

SEQ ID NO: 73023 - RNA, 21 nt, synthetic construct
  source 1..21: mol_type = other RNA
tcggccccaataaccacggta

SEQ ID NO: 73024 - RNA, 21 nt, synthetic construct
  source 1..21: mol_type = other RNA
cccggcactggtgctcgcgca

SEQ ID NO: 73025 - RNA, 21 nt, synthetic construct
  source 1..21: mol_type = other RNA
ggccgctggagggcacttata

SEQ ID NO: 73026 - RNA, 21 nt, synthetic construct
  source 1..21: mol_type = other RNA
gtgctgtggggagtgcgtcca

SEQ ID NO: 73027 - RNA, 21 nt, synthetic construct
  source 1..21: mol_type = other RNA
gggcgtgagcgtcaccttcaa

SEQ ID NO: 73028 - RNA, 21 nt, synthetic construct
  source 1..21: mol_type = other RNA
agatacgctacatggggatca

SEQ ID NO: 73029 - RNA, 21 nt, synthetic construct
  source 1..21: mol_type = other RNA
cgcgtgagctttgttccacca

SEQ ID NO: 73030 - RNA, 21 nt, synthetic construct
  source 1..21: mol_type = other RNA
caaccggtggcctgtgcgaca

SEQ ID NO: 73031 - RNA, 21 nt, synthetic construct
  source 1..21: mol_type = other RNA
acatcggccccaataaccaca

SEQ ID NO: 73032 - RNA, 21 nt, synthetic construct
  source 1..21: mol_type = other RNA
gctacaactacaggatccgga

SEQ ID NO: 73033 - RNA, 21 nt, synthetic construct
  source 1..21: mol_type = other RNA
gtgccggacgctggtgttgga

SEQ ID NO: 73034 - RNA, 21 nt, synthetic construct
  source 1..21: mol_type = other RNA
aagaacggcgtgcttgtgtca

SEQ ID NO: 73035 - RNA, 21 nt, synthetic construct
  source 1..21: mol_type = other RNA
catcgtcaccgagaacatcca

SEQ ID NO: 73036 - RNA, 21 nt, synthetic construct
  source 1..21: mol_type = other RNA
gtcaaccgaagtgtgagtgga

SEQ ID NO: 73037 - RNA, 21 nt, synthetic construct
  source 1..21: mol_type = other RNA
agctacgttctgtccaagaaa

SEQ ID NO: 73038 - RNA, 21 nt, synthetic construct
  source 1..21: mol_type = other RNA
ggcgtctgcaccaagtacata

SEQ ID NO: 73039 - RNA, 21 nt, synthetic construct
  source 1..21: mol_type = other RNA
cacgacgcgggcctgtgtgta

SEQ ID NO: 73040 - RNA, 21 nt, synthetic construct
  source 1..21: mol_type = other RNA
ccgctgtcaaccgaagtgtga

SEQ ID NO: 73041 - RNA, 21 nt, synthetic construct
  source 1..21: mol_type = other RNA
cacggcaccgtgctggctcca

SEQ ID NO: 73042 - RNA, 21 nt, synthetic construct
  source 1..21: mol_type = other RNA
aactacgcccggcactggtga

SEQ ID NO: 73043 - RNA, 21 nt, synthetic construct
  source 1..21: mol_type = other RNA
cacaacgaggccacctacaaa

SEQ ID NO: 73044 - RNA, 21 nt, synthetic construct
  source 1..21: mol_type = other RNA
ccggaaccccagtgggcacta

SEQ ID NO: 73045 - RNA, 21 nt, synthetic construct
  source 1..21: mol_type = other RNA
tccactacaagtccatggata

SEQ ID NO: 73046 - RNA, 21 nt, synthetic construct
  source 1..21: mol_type = other RNA
tactcacgccagtgcgcccaa

SEQ ID NO: 73047 - RNA, 21 nt, synthetic construct
  source 1..21: mol_type = other RNA
atactcacgccagtgcgccca

SEQ ID NO: 73048 - RNA, 21 nt, synthetic construct
  source 1..21: mol_type = other RNA
gaggggacgttgagtcctaca

SEQ ID NO: 73049 - RNA, 21 nt, synthetic construct
  source 1..21: mol_type = other RNA
caggacccaacggtgcaatga

SEQ ID NO: 73050 - RNA, 21 nt, synthetic construct
  source 1..21: mol_type = other RNA
ctgtcaaccgaagtgtgagta

SEQ ID NO: 73051 - RNA, 21 nt, synthetic construct
  source 1..21: mol_type = other RNA
caggtcgtggaatgcagccta

SEQ ID NO: 73052 - RNA, 21 nt, synthetic construct
  source 1..21: mol_type = other RNA
caggtcgtggaatgcagccta

SEQ ID NO: 73053 - RNA, 21 nt, synthetic construct
  source 1..21: mol_type = other RNA
caggtcgtggaatgcagccta

SEQ ID NO: 73054 - RNA, 21 nt, synthetic construct
  source 1..21: mol_type = other RNA
caggtcgtggaatgcagccta

SEQ ID NO: 73055 - RNA, 21 nt, synthetic construct
  source 1..21: mol_type = other RNA
aaccgaagtgtgagtggacaa

SEQ ID NO: 73056 - RNA, 21 nt, synthetic construct
  source 1..21: mol_type = other RNA
tcctcaatgacgcgggcgcca

SEQ ID NO: 73057 - RNA, 21 nt, synthetic construct
  source 1..21: mol_type = other RNA
tggaggggacgttgagtccta

SEQ ID NO: 73058 - RNA, 21 nt, synthetic construct
  source 1..21: mol_type = other RNA
ctcaatgacgcgggcgcctga

SEQ ID NO: 73059 - RNA, 21 nt, synthetic construct
  source 1..21: mol_type = other RNA
tgtggaatactcacgccagta

SEQ ID NO: 73060 - RNA, 21 nt, synthetic construct
  source 1..21: mol_type = other RNA
ctacaacaccaccgatgggca

SEQ ID NO: 73061 - RNA, 21 nt, synthetic construct
  source 1..21: mol_type = other RNA
ccgcgaggtctgccgctggta

SEQ ID NO: 73062 - RNA, 21 nt, synthetic construct
  source 1..21: mol_type = other RNA
actacgcccggcactggtgca

SEQ ID NO: 73063 - RNA, 21 nt, synthetic construct
  source 1..21: mol_type = other RNA
caactacaggatccgggtcca

SEQ ID NO: 73064 - RNA, 21 nt, synthetic construct
  source 1..21: mol_type = other RNA
tgtttgaccaaattccggtga

SEQ ID NO: 73065 - RNA, 21 nt, synthetic construct
  source 1..21: mol_type = other RNA
tgtcaaccgaagtgtgagtga

SEQ ID NO: 73066 - RNA, 21 nt, synthetic construct
  source 1..21: mol_type = other RNA
cacctgcgtggcctacgggga

SEQ ID NO: 73067 - RNA, 21 nt, synthetic construct
  source 1..21: mol_type = other RNA
agtccatggatatcgtcctca

SEQ ID NO: 73068 - RNA, 21 nt, synthetic construct
  source 1..21: mol_type = other RNA
caaattccggtgagcagcgga

SEQ ID NO: 73069 - RNA, 21 nt, synthetic construct
  source 1..21: mol_type = other RNA
ccctgtcggcagccaacatca

SEQ ID NO: 73070 - RNA, 21 nt, synthetic construct
  source 1..21: mol_type = other RNA
ggagctgccttacagccgcaa

SEQ ID NO: 73071 - RNA, 21 nt, synthetic construct
  source 1..21: mol_type = other RNA
atgagtgcgagtgcatctgca

SEQ ID NO: 73072 - RNA, 21 nt, synthetic construct
  source 1..21: mol_type = other RNA
atcagggtcgactgcaacaca

SEQ ID NO: 73073 - RNA, 21 nt, synthetic construct
  source 1..21: mol_type = other RNA
gcgtggcctacggggatggca

SEQ ID NO: 73074 - RNA, 21 nt, synthetic construct
  source 1..21: mol_type = other RNA
tctacaacaccaccgatggga

SEQ ID NO: 73075 - RNA, 21 nt, synthetic construct
  source 1..21: mol_type = other RNA
aggggacgttgagtcctacga

SEQ ID NO: 73076 - RNA, 21 nt, synthetic construct
  source 1..21: mol_type = other RNA
cagaagttggatgggcccaca

SEQ ID NO: 73077 - RNA, 21 nt, synthetic construct
  source 1..21: mol_type = other RNA
gtgtcctggcggactccggaa

SEQ ID NO: 73078 - RNA, 21 nt, synthetic construct
  source 1..21: mol_type = other RNA
acaccctcgagcttcttcata

SEQ ID NO: 73079 - RNA, 21 nt, synthetic construct
  source 1..21: mol_type = other RNA
tgcgtggcctacggggatgga

SEQ ID NO: 73080 - RNA, 21 nt, synthetic construct
  source 1..21: mol_type = other RNA
cctgagtgaggccgacgtcaa

SEQ ID NO: 73081 - RNA, 21 nt, synthetic construct
  source 1..21: mol_type = other RNA
ctgagtgaggccgacgtcaca

SEQ ID NO: 73082 - RNA, 21 nt, synthetic construct
  source 1..21: mol_type = other RNA
gctttgttccacccgtcacta

SEQ ID NO: 73083 - RNA, 21 nt, synthetic construct
  source 1..21: mol_type = other RNA
acccgctgtcaaccgaagtga

SEQ ID NO: 73084 - RNA, 21 nt, synthetic construct
  source 1..21: mol_type = other RNA
ttgtggaatactcacgccaga

SEQ ID NO: 73085 - RNA, 21 nt, synthetic construct
  source 1..21: mol_type = other RNA
tacaacaccaccgatgggcta

SEQ ID NO: 73086 - RNA, 21 nt, synthetic construct
  source 1..21: mol_type = other RNA
gtgactggcgaggtgcaacca

SEQ ID NO: 73087 - RNA, 21 nt, synthetic construct
  source 1..21: mol_type = other RNA
tgactggcgaggtgcaaccga

SEQ ID NO: 73088 - RNA, 21 nt, synthetic construct
  source 1..21: mol_type = other RNA
cggtggccaggtgcgtgggta

SEQ ID NO: 73089 - RNA, 21 nt, synthetic construct
  source 1..21: mol_type = other RNA
cccgctgtcaaccgaagtgta

SEQ ID NO: 73090 - RNA, 21 nt, synthetic construct
  source 1..21: mol_type = other RNA
agtgactggcgaggtgcaaca

SEQ ID NO: 73091 - RNA, 21 nt, synthetic construct
  source 1..21: mol_type = other RNA
ggacggcgtctgcaccaagta

SEQ ID NO: 73092 - RNA, 21 nt, synthetic construct
  source 1..21: mol_type = other RNA
ctttgtggaatactcacgcca

SEQ ID NO: 73093 - RNA, 21 nt, synthetic construct
  source 1..21: mol_type = other RNA
gagtcctacgataagatcaga

SEQ ID NO: 73094 - RNA, 21 nt, synthetic construct
  source 1..21: mol_type = other RNA
ggacatagagtgccaggccga

SEQ ID NO: 73095 - RNA, 21 nt, synthetic construct
  source 1..21: mol_type = other RNA
gtctgcaccaagtacatgcaa

SEQ ID NO: 73096 - RNA, 21 nt, synthetic construct
  source 1..21: mol_type = other RNA
gtggaatactcacgccagtga

SEQ ID NO: 73097 - RNA, 21 nt, synthetic construct
  source 1..21: mol_type = other RNA
ctatgagtgcgagtgcatcta

SEQ ID NO: 73098 - RNA, 21 nt, synthetic construct
  source 1..21: mol_type = other RNA
accatcagggtcgactgcaaa

SEQ ID NO: 73099 - RNA, 21 nt, synthetic construct
  source 1..21: mol_type = other RNA
gtgtcctgggaccggaagaca

SEQ ID NO: 73100 - RNA, 21 nt, synthetic construct
  source 1..21: mol_type = other RNA
gcacaacgaggccacctacaa

SEQ ID NO: 73101 - RNA, 21 nt, synthetic construct
  source 1..21: mol_type = other RNA
ccgcatcgtcaccgagaacaa

SEQ ID NO: 73102 - RNA, 21 nt, synthetic construct
  source 1..21: mol_type = other RNA
tcagggtcgactgcaacacca

SEQ ID NO: 73103 - RNA, 21 nt, synthetic construct
  source 1..21: mol_type = other RNA
acaagtccatggatatcgtca

SEQ ID NO: 73104 - RNA, 21 nt, synthetic construct
  source 1..21: mol_type = other RNA
accaaattccggtgagcagca

SEQ ID NO: 73105 - RNA, 21 nt, synthetic construct
  source 1..21: mol_type = other RNA
caagaacggcgtgcttgtgta

SEQ ID NO: 73106 - RNA, 21 nt, synthetic construct
  source 1..21: mol_type = other RNA
actattccacctttgacggca

SEQ ID NO: 73107 - RNA, 21 nt, synthetic construct
  source 1..21: mol_type = other RNA
cacggtggccaggtgcgtgga

SEQ ID NO: 73108 - RNA, 21 nt, synthetic construct
  source 1..21: mol_type = other RNA
tgcagctacgttctgtccaaa

SEQ ID NO: 73109 - RNA, 21 nt, synthetic construct
  source 1..21: mol_type = other RNA
catcagggtcgactgcaacaa

SEQ ID NO: 73110 - RNA, 21 nt, synthetic construct
  source 1..21: mol_type = other RNA
gcaactgcacctatgtcctca

SEQ ID NO: 73111 - RNA, 21 nt, synthetic construct
  source 1..21: mol_type = other RNA
gagttgggccaggtcgtggaa

SEQ ID NO: 73112 - RNA, 21 nt, synthetic construct
  source 1..21: mol_type = other RNA
ctgcagctacgttctgtccaa

SEQ ID NO: 73113 - RNA, 21 nt, synthetic construct
  source 1..21: mol_type = other RNA
acggacaacgagaactgccta

SEQ ID NO: 73114 - RNA, 21 nt, synthetic construct
  source 1..21: mol_type = other RNA
cacaccctcgagcttcttcaa

SEQ ID NO: 73115 - RNA, 21 nt, synthetic construct
  source 1..21: mol_type = other RNA
agggtcgactgcaacacctga

SEQ ID NO: 73116 - RNA, 21 nt, synthetic construct
  source 1..21: mol_type = other RNA
ccttccgcatcgtcaccgaga

SEQ ID NO: 73117 - RNA, 21 nt, synthetic construct
  source 1..21: mol_type = other RNA
gagttgggccaggtcgtggaa

SEQ ID NO: 73118 - RNA, 21 nt, synthetic construct
  source 1..21: mol_type = other RNA
gacatagagtgccaggccgaa

SEQ ID NO: 73119 - RNA, 21 nt, synthetic construct
  source 1..21: mol_type = other RNA
ccacggtgacttcccacacca

SEQ ID NO: 73120 - RNA, 21 nt, synthetic construct
  source 1..21: mol_type = other RNA
acagctaccagctttacagca

SEQ ID NO: 73121 - RNA, 21 nt, synthetic construct
  source 1..21: mol_type = other RNA
ccacggtgacttcccacacca

SEQ ID NO: 73122 - RNA, 21 nt, synthetic construct
  source 1..21: mol_type = other RNA
acagctaccagctttacagca

SEQ ID NO: 73123 - RNA, 21 nt, synthetic construct
  source 1..21: mol_type = other RNA
acagctaccagctttacagca

SEQ ID NO: 73124 - RNA, 21 nt, synthetic construct
  source 1..21: mol_type = other RNA
cacctgcgtgaacaagcacca

SEQ ID NO: 73125 - RNA, 21 nt, synthetic construct
  source 1..21: mol_type = other RNA
tcagcaagaacggcgtgctta

SEQ ID NO: 73126 - RNA, 21 nt, synthetic construct
  source 1..21: mol_type = other RNA
gaacggcgtgcttgtgtctga

SEQ ID NO: 73127 - RNA, 21 nt, synthetic construct
  source 1..21: mol_type = other RNA
ctttgttccacccgtcactga

SEQ ID NO: 73128 - RNA, 21 nt, synthetic construct
  source 1..21: mol_type = other RNA
ttgttccacccgtcactgtca

SEQ ID NO: 73129 - RNA, 21 nt, synthetic construct
  source 1..21: mol_type = other RNA
tgttccacccgtcactgtcta

SEQ ID NO: 73130 - RNA, 21 nt, synthetic construct
  source 1..21: mol_type = other RNA
gagttgggccaggtcgtggaa

SEQ ID NO: 73131 - RNA, 21 nt, synthetic construct
  source 1..21: mol_type = other RNA
gagttgggccaggtcgtggaa

SEQ ID NO: 73132 - RNA, 21 nt, synthetic construct
  source 1..21: mol_type = other RNA
gccacctttgtggaatactca

SEQ ID NO: 73133 - RNA, 21 nt, synthetic construct
  source 1..21: mol_type = other RNA
aatactcacgccagtgcgcca

SEQ ID NO: 73134 - RNA, 21 nt, synthetic construct
  source 1..21: mol_type = other RNA
agtgcgcccacgcggggggca

SEQ ID NO: 73135 - RNA, 21 nt, synthetic construct
  source 1..21: mol_type = other RNA
ggggacacggccatccgggta

SEQ ID NO: 73136 - RNA, 21 nt, synthetic construct
  source 1..21: mol_type = other RNA
accttccgcatcgtcaccgaa

SEQ ID NO: 73137 - RNA, 21 nt, synthetic construct
  source 1..21: mol_type = other RNA
cttggaggggacgttgagtca

SEQ ID NO: 73138 - RNA, 21 nt, synthetic construct
  source 1..21: mol_type = other RNA
cccaggacccaacggtgcaaa

SEQ ID NO: 73139 - RNA, 21 nt, synthetic construct
  source 1..21: mol_type = other RNA
gagaatgagaactacgcccga

SEQ ID NO: 73140 - RNA, 21 nt, synthetic construct
  source 1..21: mol_type = other RNA
gggggctgatgtgcgccaaca

SEQ ID NO: 73141 - RNA, 21 nt, synthetic construct
  source 1..21: mol_type = other RNA
accttcctcaatgacgcggga

SEQ ID NO: 73142 - RNA, 21 nt, synthetic construct
  source 1..21: mol_type = other RNA
acaacttggaggggacgttga

SEQ ID NO: 73143 - RNA, 21 nt, synthetic construct
  source 1..21: mol_type = other RNA
atgagaactacgcccggcaca

SEQ ID NO: 73144 - RNA, 21 nt, synthetic construct
  source 1..21: mol_type = other RNA
gggctgtttcagcacacacta

SEQ ID NO: 73145 - RNA, 21 nt, synthetic construct
  source 1..21: mol_type = other RNA
ttccactatgagtgcgagtga

SEQ ID NO: 73146 - RNA, 21 nt, synthetic construct
  source 1..21: mol_type = other RNA
aatgagaactacgcccggcaa

SEQ ID NO: 73147 - RNA, 21 nt, synthetic construct
  source 1..21: mol_type = other RNA
aaaaccggctgctgctactca

SEQ ID NO: 73148 - RNA, 21 nt, synthetic construct
  source 1..21: mol_type = other RNA
ggggccggcctttgcggagta

SEQ ID NO: 73149 - RNA, 21 nt, synthetic construct
  source 1..21: mol_type = other RNA
ctgcgtggcctacggggatga

SEQ ID NO: 73150 - RNA, 21 nt, synthetic construct
  source 1..21: mol_type = other RNA
gcagccaacatcaccctgtta

SEQ ID NO: 73151 - RNA, 21 nt, synthetic construct
  source 1..21: mol_type = other RNA
agctgccacacgctggacgta

SEQ ID NO: 73152 - RNA, 21 nt, synthetic construct
  source 1..21: mol_type = other RNA
ggcacctgcgtggcctacgga

SEQ ID NO: 73153 - RNA, 21 nt, synthetic construct
  source 1..21: mol_type = other RNA
gaccttccgcatcgtcaccga

SEQ ID NO: 73154 - RNA, 21 nt, synthetic construct
  source 1..21: mol_type = other RNA
catccgactgcaccaggacta

SEQ ID NO: 73155 - RNA, 21 nt, synthetic construct
  source 1..21: mol_type = other RNA
actgacatcccccagatacaa

SEQ ID NO: 73156 - RNA, 21 nt, synthetic construct
  source 1..21: mol_type = other RNA
tgttctgctgcaactacggca

SEQ ID NO: 73157 - RNA, 21 nt, synthetic construct
  source 1..21: mol_type = other RNA
tcctggcggactccggacaca

SEQ ID NO: 73158 - RNA, 21 nt, synthetic construct
  source 1..21: mol_type = other RNA
gcacctgcacctatgaggaca

SEQ ID NO: 73159 - RNA, 21 nt, synthetic construct
  source 1..21: mol_type = other RNA
taccaggacgtcatctacaaa

SEQ ID NO: 73160 - RNA, 21 nt, synthetic construct
  source 1..21: mol_type = other RNA
aggacgtcatctacaacacca

SEQ ID NO: 73161 - RNA, 21 nt, synthetic construct
  source 1..21: mol_type = other RNA
tgttctgctgcaactacggca

SEQ ID NO: 73162 - RNA, 21 nt, synthetic construct
  source 1..21: mol_type = other RNA
gtgctacaactacaggatcca

SEQ ID NO: 73163 - RNA, 21 nt, synthetic construct
  source 1..21: mol_type = other RNA
atctacaacaccaccgatgga

SEQ ID NO: 73164 - RNA, 21 nt, synthetic construct
  source 1..21: mol_type = other RNA
ccactacaagtccatggataa

SEQ ID NO: 73165 - RNA, 21 nt, synthetic construct
  source 1..21: mol_type = other RNA
gctgaccacgagcctggcgca

SEQ ID NO: 73166 - RNA, 21 nt, synthetic construct
  source 1..21: mol_type = other RNA
gcgaggtctgccgctggtcca

SEQ ID NO: 73167 - RNA, 21 nt, synthetic construct
  source 1..21: mol_type = other RNA
ctggcggactccggacaccta

SEQ ID NO: 73168 - RNA, 21 nt, synthetic construct
  source 1..21: mol_type = other RNA
catctacaacaccaccgatga

SEQ ID NO: 73169 - RNA, 21 nt, synthetic construct
  source 1..21: mol_type = other RNA
gctgatgtgcgccaacagcca

SEQ ID NO: 73170 - RNA, 21 nt, synthetic construct
  source 1..21: mol_type = other RNA
acccacgggaccttccgcata

SEQ ID NO: 73171 - RNA, 21 nt, synthetic construct
  source 1..21: mol_type = other RNA
agagtggtttgatgaggacta

SEQ ID NO: 73172 - RNA, 21 nt, synthetic construct
  source 1..21: mol_type = other RNA
ccttcaacgagttctatgcca

SEQ ID NO: 73173 - RNA, 21 nt, synthetic construct
  source 1..21: mol_type = other RNA
tggtttgatgaggactaccca

SEQ ID NO: 73174 - RNA, 21 nt, synthetic construct
  source 1..21: mol_type = other RNA
ggtttgatgaggactacccca

SEQ ID NO: 73175 - RNA, 21 nt, synthetic construct
  source 1..21: mol_type = other RNA
aggactaccccaagtctgaaa

SEQ ID NO: 73176 - RNA, 21 nt, synthetic construct
  source 1..21: mol_type = other RNA
caacttggaggggacgttgaa

SEQ ID NO: 73177 - RNA, 21 nt, synthetic construct
  source 1..21: mol_type = other RNA
acatagagtgccaggccgaga

SEQ ID NO: 73178 - RNA, 21 nt, synthetic construct
  source 1..21: mol_type = other RNA
catagagtgccaggccgagaa

SEQ ID NO: 73179 - RNA, 21 nt, synthetic construct
  source 1..21: mol_type = other RNA
ggccgagagcttccccaacta

SEQ ID NO: 73180 - RNA, 21 nt, synthetic construct
  source 1..21: mol_type = other RNA
ccctgtgggaccaccggcaca

SEQ ID NO: 73181 - RNA, 21 nt, synthetic construct
  source 1..21: mol_type = other RNA
cttctgcagggcatttggaca

SEQ ID NO: 73182 - RNA, 21 nt, synthetic construct
  source 1..21: mol_type = other RNA
tggacagagtggtttgacgta

SEQ ID NO: 73183 - RNA, 21 nt, synthetic construct
  source 1..21: mol_type = other RNA
agaactgcacggtggccagga

SEQ ID NO: 73184 - RNA, 21 nt, synthetic construct
  source 1..21: mol_type = other RNA
acggtggccaggtgcgtggga

SEQ ID NO: 73185 - RNA, 21 nt, synthetic construct
  source 1..21: mol_type = other RNA
aggttgactccaccaagtaca

SEQ ID NO: 73186 - RNA, 21 nt, synthetic construct
  source 1..21: mol_type = other RNA
acaactacaggatccgggtca

SEQ ID NO: 73187 - RNA, 21 nt, synthetic construct
  source 1..21: mol_type = other RNA
gcaagaacggcgtgcttgtga

SEQ ID NO: 73188 - RNA, 21 nt, synthetic construct
  source 1..21: mol_type = other RNA
tcttccacaacaacaccgaga

SEQ ID NO: 73189 - RNA, 21 nt, synthetic construct
  source 1..21: mol_type = other RNA
ttccacaacaacaccgaggga

SEQ ID NO: 73190 - RNA, 21 nt, synthetic construct
  source 1..21: mol_type = other RNA
ttgtgcccccgggcccattca

SEQ ID NO: 73191 - RNA, 21 nt, synthetic construct
  source 1..21: mol_type = other RNA
agctttgttccacccgtcaca

SEQ ID NO: 73192 - RNA, 21 nt, synthetic construct
  source 1..21: mol_type = other RNA
gcccggggagtgtgcagtgaa

SEQ ID NO: 73193 - RNA, 21 nt, synthetic construct
  source 1..21: mol_type = other RNA
ctggggccggcctttgcggaa

SEQ ID NO: 73194 - RNA, 21 nt, synthetic construct
  source 1..21: mol_type = other RNA
gccggcctttgcggagtgcca

SEQ ID NO: 73195 - RNA, 21 nt, synthetic construct
  source 1..21: mol_type = other RNA
caactccatctacacgcagca

SEQ ID NO: 73196 - RNA, 21 nt, synthetic construct
  source 1..21: mol_type = other RNA
cgaggtctgccgctggtccaa

SEQ ID NO: 73197 - RNA, 21 nt, synthetic construct
  source 1..21: mol_type = other RNA
cctgttcacaccctcgagcta

SEQ ID NO: 73198 - RNA, 21 nt, synthetic construct
  source 1..21: mol_type = other RNA
cttcaaccagaaccaggctga

SEQ ID NO: 73199 - RNA, 21 nt, synthetic construct
  source 1..21: mol_type = other RNA
cgtctgcaccaagtacatgca

SEQ ID NO: 73200 - RNA, 21 nt, synthetic construct
  source 1..21: mol_type = other RNA
cttcctcaatgacgcgggcga

SEQ ID NO: 73201 - RNA, 21 nt, synthetic construct
  source 1..21: mol_type = other RNA
gacgcgggcgcctgtgtgcca

SEQ ID NO: 73202 - RNA, 21 nt, synthetic construct
  source 1..21: mol_type = other RNA
tgagtgaggccgacgtcacca

SEQ ID NO: 73203 - RNA, 21 nt, synthetic construct
  source 1..21: mol_type = other RNA
tacggggatggccacttcata

SEQ ID NO: 73204 - RNA, 21 nt, synthetic construct
  source 1..21: mol_type = other RNA
tggacgtgggctgtttcagca

SEQ ID NO: 73205 - RNA, 21 nt, synthetic construct
  source 1..21: mol_type = other RNA
tggtgtccccctgcgggagta

SEQ ID NO: 73206 - RNA, 21 nt, synthetic construct
  source 1..21: mol_type = other RNA
cctgtgccgctgccccaccta

SEQ ID NO: 73207 - RNA, 21 nt, synthetic construct
  source 1..21: mol_type = other RNA
ctcaactccatctacacgcaa

SEQ ID NO: 73208 - RNA, 21 nt, synthetic construct
  source 1..21: mol_type = other RNA
catgcagaactgccccaagta

SEQ ID NO: 73209 - RNA, 21 nt, synthetic construct
  source 1..21: mol_type = other RNA
tcaagatgtgctacaactaca

SEQ ID NO: 73210 - RNA, 21 nt, synthetic construct
  source 1..21: mol_type = other RNA
tggtgtccccctgcgggagta

SEQ ID NO: 73211 - RNA, 21 nt, synthetic construct
  source 1..21: mol_type = other RNA
tggtgtccccctgcgggagta

SEQ ID NO: 73212 - RNA, 21 nt, synthetic construct
  source 1..21: mol_type = other RNA
ctgcctaaaaacctgccggaa

SEQ ID NO: 73213 - RNA, 21 nt, synthetic construct
  source 1..21: mol_type = other RNA
ccgaagtgtgagtggacagaa

SEQ ID NO: 73214 - RNA, 21 nt, synthetic construct
  source 1..21: mol_type = other RNA
acggggatggccacttcatca

SEQ ID NO: 73215 - RNA, 21 nt, synthetic construct
  source 1..21: mol_type = other RNA
gccgctgaccacgagcctgga

SEQ ID NO: 73216 - RNA, 21 nt, synthetic construct
  source 1..21: mol_type = other RNA
cgctgtcaaccgaagtgtgaa

SEQ ID NO: 73217 - RNA, 21 nt, synthetic construct
  source 1..21: mol_type = other RNA
gggtcgactgcaacacctgca

SEQ ID NO: 73218 - RNA, 21 nt, synthetic construct
  source 1..21: mol_type = other RNA
cacactgcgtgtccggctgta

SEQ ID NO: 73219 - RNA, 21 nt, synthetic construct
  source 1..21: mol_type = other RNA
tgttcatccgactgcaccaga

SEQ ID NO: 73220 - RNA, 21 nt, synthetic construct
  source 1..21: mol_type = other RNA
ggacagagtggtttgacgtga

SEQ ID NO: 73221 - RNA, 21 nt, synthetic construct
  source 1..21: mol_type = other RNA
ttcagcacacactgcgtgtca

SEQ ID NO: 73222 - RNA, 21 nt, synthetic construct
  source 1..21: mol_type = other RNA
atgaagtgcgtggcccagtga

SEQ ID NO: 73223 - RNA, 21 nt, synthetic construct
  source 1..21: mol_type = other RNA
gtgcgctcacagccttgagga

SEQ ID NO: 73224 - RNA, 21 nt, synthetic construct
  source 1..21: mol_type = other RNA
ctgcacctatgaggacaggaa

SEQ ID NO: 73225 - RNA, 21 nt, synthetic construct
  source 1..21: mol_type = other RNA
ttccacccgtcactgtcttca

SEQ ID NO: 73226 - RNA, 21 nt, synthetic construct
  source 1..21: mol_type = other RNA
cggcacctgcaccaacaacca

SEQ ID NO: 73227 - RNA, 21 nt, synthetic construct
  source 1..21: mol_type = other RNA
gcccccgggcccattcttcaa

SEQ ID NO: 73228 - RNA, 21 nt, synthetic construct
  source 1..21: mol_type = other RNA
cagcgggaggagctgccttaa

SEQ ID NO: 73229 - RNA, 21 nt, synthetic construct
  source 1..21: mol_type = other RNA
gcccacggagcagtgcccgga

SEQ ID NO: 73230 - RNA, 21 nt, synthetic construct
  source 1..21: mol_type = other RNA
cacggagcagtgcccggacca

SEQ ID NO: 73231 - RNA, 21 nt, synthetic construct
  source 1..21: mol_type = other RNA
gtttgacgtggacttcccaaa

SEQ ID NO: 73232 - RNA, 21 nt, synthetic construct
  source 1..21: mol_type = other RNA
ccacctttgacggcacctcta

SEQ ID NO: 73233 - RNA, 21 nt, synthetic construct
  source 1..21: mol_type = other RNA
ctgctccaacccccagcgcga

SEQ ID NO: 73234 - RNA, 21 nt, synthetic construct
  source 1..21: mol_type = other RNA
tccgcgaggtctgccgctgga

SEQ ID NO: 73235 - RNA, 21 nt, synthetic construct
  source 1..21: mol_type = other RNA
cagtgccaggacctgccgtga

SEQ ID NO: 73236 - RNA, 21 nt, synthetic construct
  source 1..21: mol_type = other RNA
tcctcaactccatctacacga

SEQ ID NO: 73237 - RNA, 21 nt, synthetic construct
  source 1..21: mol_type = other RNA
cctcaactccatctacacgca

SEQ ID NO: 73238 - RNA, 21 nt, synthetic construct
  source 1..21: mol_type = other RNA
gagctacgagctgatcctcca

SEQ ID NO: 73239 - RNA, 21 nt, synthetic construct
  source 1..21: mol_type = other RNA
tgcctgtggacggctgcacca

SEQ ID NO: 73240 - RNA, 21 nt, synthetic construct
  source 1..21: mol_type = other RNA
cagatgaagtgcgtggcccaa

SEQ ID NO: 73241 - RNA, 21 nt, synthetic construct
  source 1..21: mol_type = other RNA
ggagtgcagccaccggctcta

SEQ ID NO: 73242 - RNA, 21 nt, synthetic construct
  source 1..21: mol_type = other RNA
atcccctgtgggaccaccgga

SEQ ID NO: 73243 - RNA, 21 nt, synthetic construct
  source 1..21: mol_type = other RNA
tgactccaccaagtactacga

SEQ ID NO: 73244 - RNA, 21 nt, synthetic construct
  source 1..21: mol_type = other RNA
ggtttcagcaagaacggcgta

SEQ ID NO: 73245 - RNA, 21 nt, synthetic construct
  source 1..21: mol_type = other RNA
agtgtgcagtgactggcgaga

SEQ ID NO: 73246 - RNA, 21 nt, synthetic construct
  source 1..21: mol_type = other RNA
cgccagtgcgcccacgcggga

SEQ ID NO: 73247 - RNA, 21 nt, synthetic construct
  source 1..21: mol_type = other RNA
ggacacccaggacccaacgga

SEQ ID NO: 73248 - RNA, 21 nt, synthetic construct
  source 1..21: mol_type = other RNA
aggacttcaacgtccagctaa

SEQ ID NO: 73249 - RNA, 21 nt, synthetic construct
  source 1..21: mol_type = other RNA
gacttcaacgtccagctacga

SEQ ID NO: 73250 - RNA, 21 nt, synthetic construct
  source 1..21: mol_type = other RNA
gaggacttcaacgtccagcta

SEQ ID NO: 73251 - RNA, 21 nt, synthetic construct
  source 1..21: mol_type = other RNA
cacacactgcgtgtccggcta

SEQ ID NO: 73252 - RNA, 21 nt, synthetic construct
  source 1..21: mol_type = other RNA
gtgcacaacgaggccacctaa

SEQ ID NO: 73253 - RNA, 21 nt, synthetic construct
  source 1..21: mol_type = other RNA
ctgcgtgtccggctgtgtcta

SEQ ID NO: 73254 - RNA, 21 nt, synthetic construct
  source 1..21: mol_type = other RNA
acgaggccacctacaagccta

SEQ ID NO: 73255 - RNA, 21 nt, synthetic construct
  source 1..21: mol_type = other RNA
gcacctgcgtggcctacggga

SEQ ID NO: 73256 - RNA, 21 nt, synthetic construct
  source 1..21: mol_type = other RNA
cgacgcgggcctgtgtgtgta

SEQ ID NO: 73257 - RNA, 21 nt, synthetic construct
  source 1..21: mol_type = other RNA
tgtgtcctggcggactccgga

SEQ ID NO: 73258 - RNA, 21 nt, synthetic construct
  source 1..21: mol_type = other RNA
ggcggactccggacacctgca

SEQ ID NO: 73259 - RNA, 21 nt, synthetic construct
  source 1..21: mol_type = other RNA
ccctgcggggcaccctgccta

SEQ ID NO: 73260 - RNA, 21 nt, synthetic construct
  source 1..21: mol_type = other RNA
cgtcatctacaacaccaccga

SEQ ID NO: 73261 - RNA, 21 nt, synthetic construct
  source 1..21: mol_type = other RNA
ccgctgaccacgagcctggca

SEQ ID NO: 73262 - RNA, 21 nt, synthetic construct
  source 1..21: mol_type = other RNA
cacctctcaggccgagaccaa

SEQ ID NO: 73263 - RNA, 21 nt, synthetic construct
  source 1..21: mol_type = other RNA
attccacctttgacggcacca

SEQ ID NO: 73264 - RNA, 21 nt, synthetic construct
  source 1..21: mol_type = other RNA
tgaccaaattccggtgagcaa

SEQ ID NO: 73265 - RNA, 21 nt, synthetic construct
  source 1..21: mol_type = other RNA
acgggaccttccgcatcgtca

SEQ ID NO: 73266 - RNA, 21 nt, synthetic construct
  source 1..21: mol_type = other RNA
gggaccttccgcatcgtcaca

SEQ ID NO: 73267 - RNA, 21 nt, synthetic construct
  source 1..21: mol_type = other RNA
gtgcagtgactggcgaggtga

SEQ ID NO: 73268 - RNA, 21 nt, synthetic construct
  source 1..21: mol_type = other RNA
ggaccttccgcatcgtcacca

SEQ ID NO: 73269 - RNA, 21 nt, synthetic construct
  source 1..21: mol_type = other RNA
gactccaccaagtactacgaa

SEQ ID NO: 73270 - RNA, 21 nt, synthetic construct
  source 1..21: mol_type = other RNA
gtcctggcggactccggacaa

SEQ ID NO: 73271 - RNA, 21 nt, synthetic construct
  source 1..21: mol_type = other RNA
gtcatctacaacaccaccgaa

SEQ ID NO: 73272 - RNA, 21 nt, synthetic construct
  source 1..21: mol_type = other RNA
gacgcgggcctgtgtgtgtca

SEQ ID NO: 73273 - RNA, 21 nt, synthetic construct
  source 1..21: mol_type = other RNA
tcatctacaacaccaccgata

SEQ ID NO: 73274 - RNA, 21 nt, synthetic construct
  source 1..21: mol_type = other RNA
acaacaccaccgatgggctta

SEQ ID NO: 73275 - RNA, 21 nt, synthetic construct
  source 1..21: mol_type = other RNA
cgcgaggtctgccgctggtca

SEQ ID NO: 73276 - RNA, 21 nt, synthetic construct
  source 1..21: mol_type = other RNA
ggggctgatgtgcgccaacaa

SEQ ID NO: 73277 - RNA, 21 nt, synthetic construct
  source 1..21: mol_type = other RNA
ggctgatgtgcgccaacagca

SEQ ID NO: 73278 - RNA, 21 nt, synthetic construct
  source 1..21: mol_type = other RNA
acccaggacccaacggtgcaa

SEQ ID NO: 73279 - RNA, 21 nt, synthetic construct
  source 1..21: mol_type = other RNA
agtggacagagtggtttgata

SEQ ID NO: 73280 - RNA, 21 nt, synthetic construct
  source 1..21: mol_type = other RNA
agcaaccgaaaagaccaccca

SEQ ID NO: 73281 - RNA, 21 nt, synthetic construct
  source 1..21: mol_type = other RNA
agtggtttgatgaggactaca

SEQ ID NO: 73282 - RNA, 21 nt, synthetic construct
  source 1..21: mol_type = other RNA
gccgagagcttccccaactga

SEQ ID NO: 73283 - RNA, 21 nt, synthetic construct
  source 1..21: mol_type = other RNA
actacaagtccatggatatca

SEQ ID NO: 73284 - RNA, 21 nt, synthetic construct
  source 1..21: mol_type = other RNA
tgtgctacaactacaggatca

SEQ ID NO: 73285 - RNA, 21 nt, synthetic construct
  source 1..21: mol_type = other RNA
catccagtgcgctcacagcca

SEQ ID NO: 73286 - RNA, 21 nt, synthetic construct
  source 1..21: mol_type = other RNA
gaccccgctccagtttgggaa

SEQ ID NO: 73287 - RNA, 21 nt, synthetic construct
  source 1..21: mol_type = other RNA
cacagctaccagctttacaga

SEQ ID NO: 73288 - RNA, 21 nt, synthetic construct
  source 1..21: mol_type = other RNA
cacagctaccagctttacaga

SEQ ID NO: 73289 - RNA, 21 nt, synthetic construct
  source 1..21: mol_type = other RNA
cacagctaccagctttacaga

SEQ ID NO: 73290 - RNA, 21 nt, synthetic construct
  source 1..21: mol_type = other RNA
ctccacgacaagcccggccca

SEQ ID NO: 73291 - RNA, 21 nt, synthetic construct
  source 1..21: mol_type = other RNA
gcacctatgtcctcatgagaa

SEQ ID NO: 73292 - RNA, 21 nt, synthetic construct
  source 1..21: mol_type = other RNA
gcctgccgctcccaggttgaa

SEQ ID NO: 73293 - RNA, 21 nt, synthetic construct
  source 1..21: mol_type = other RNA
gttcacaccctcgagcttcta

SEQ ID NO: 73294 - RNA, 21 nt, synthetic construct
  source 1..21: mol_type = other RNA
ttcacaccctcgagcttctta

SEQ ID NO: 73295 - RNA, 21 nt, synthetic construct
  source 1..21: mol_type = other RNA
caagatgtgctacaactacaa

SEQ ID NO: 73296 - RNA, 21 nt, synthetic construct
  source 1..21: mol_type = other RNA
agccccggtgtcagtggacaa

SEQ ID NO: 73297 - RNA, 21 nt, synthetic construct
  source 1..21: mol_type = other RNA
tgccaggacctgccgtgccca

SEQ ID NO: 73298 - RNA, 21 nt, synthetic construct
  source 1..21: mol_type = other RNA
tgcctaaaaacctgccggaaa

SEQ ID NO: 73299 - RNA, 21 nt, synthetic construct
  source 1..21: mol_type = other RNA
aacatcccctgtgggaccaca

SEQ ID NO: 73300 - RNA, 21 nt, synthetic construct
  source 1..21: mol_type = other RNA
gcacctatgaggacaggacca

SEQ ID NO: 73301 - RNA, 21 nt, synthetic construct
  source 1..21: mol_type = other RNA
tcaatgacgcgggcgcctgta

SEQ ID NO: 73302 - RNA, 21 nt, synthetic construct
  source 1..21: mol_type = other RNA
tccctcagtgccagcacggaa

SEQ ID NO: 73303 - RNA, 21 nt, synthetic construct
  source 1..21: mol_type = other RNA
cccctgtcggcagccaacata

SEQ ID NO: 73304 - RNA, 21 nt, synthetic construct
  source 1..21: mol_type = other RNA
cccacagctaccagctttaca

SEQ ID NO: 73305 - RNA, 21 nt, synthetic construct
  source 1..21: mol_type = other RNA
cccacagctaccagctttaca

SEQ ID NO: 73306 - RNA, 21 nt, synthetic construct
  source 1..21: mol_type = other RNA
ggagcagtgcccggacccgca

SEQ ID NO: 73307 - RNA, 21 nt, synthetic construct
  source 1..21: mol_type = other RNA
cccacgcggggggccagccga

SEQ ID NO: 73308 - RNA, 21 nt, synthetic construct
  source 1..21: mol_type = other RNA
tgacgcgggcgcctgtgtgca

SEQ ID NO: 73309 - RNA, 21 nt, synthetic construct
  source 1..21: mol_type = other RNA
agcacacactgcgtgtccgga

SEQ ID NO: 73310 - RNA, 21 nt, synthetic construct
  source 1..21: mol_type = other RNA
cccacagctaccagctttaca

SEQ ID NO: 73311 - RNA, 21 nt, synthetic construct
  source 1..21: mol_type = other RNA
tcccactattccacctttgaa

SEQ ID NO: 73312 - RNA, 21 nt, synthetic construct
  source 1..21: mol_type = other RNA
ttcttcaatgaggaccagata

SEQ ID NO: 73313 - RNA, 21 nt, synthetic construct
  source 1..21: mol_type = other RNA
tgtcctcatgagagagatcca

SEQ ID NO: 73314 - RNA, 21 nt, synthetic construct
  source 1..21: mol_type = other RNA
ccacaacgccattcaccttca

SEQ ID NO: 73315 - RNA, 21 nt, synthetic construct
  source 1..21: mol_type = other RNA
cacaacgccattcaccttcaa

SEQ ID NO: 73316 - RNA, 21 nt, synthetic construct
  source 1..21: mol_type = other RNA
gagtggtttgatgaggactaa

SEQ ID NO: 73317 - RNA, 21 nt, synthetic construct
  source 1..21: mol_type = other RNA
acggagcctgctgtgcctaca

SEQ ID NO: 73318 - RNA, 21 nt, synthetic construct
  source 1..21: mol_type = other RNA
gaccaaattccggtgagcaga

SEQ ID NO: 73319 - RNA, 21 nt, synthetic construct
  source 1..21: mol_type = other RNA
gtccatggatatcgtcctcaa

SEQ ID NO: 73320 - RNA, 21 nt, synthetic construct
  source 1..21: mol_type = other RNA
ccccaagcccttccactcgaa

SEQ ID NO: 73321 - RNA, 21 nt, synthetic construct
  source 1..21: mol_type = other RNA
ctgtgacttctacaacccaca

SEQ ID NO: 73322 - RNA, 21 nt, synthetic construct
  source 1..21: mol_type = other RNA
aggacatagagtgccaggcca

SEQ ID NO: 73323 - RNA, 21 nt, synthetic construct
  source 1..21: mol_type = other RNA
gcagcggtttcagcaagaaca

SEQ ID NO: 73324 - RNA, 21 nt, synthetic construct
  source 1..21: mol_type = other RNA
tctatggcaacaccctcctca

SEQ ID NO: 73325 - RNA, 21 nt, synthetic construct
  source 1..21: mol_type = other RNA
tctatggcaacaccctcctca

SEQ ID NO: 73326 - RNA, 21 nt, synthetic construct
  source 1..21: mol_type = other RNA
tctatggcaacaccctcctca

SEQ ID NO: 73327 - RNA, 21 nt, synthetic construct
  source 1..21: mol_type = other RNA
tctatggcaacaccctcctca

SEQ ID NO: 73328 - RNA, 21 nt, synthetic construct
  source 1..21: mol_type = other RNA
tctatggcaacaccctcctca

SEQ ID NO: 73329 - RNA, 21 nt, synthetic construct
  source 1..21: mol_type = other RNA
ttcagcaagaacggcgtgcta

SEQ ID NO: 73330 - RNA, 21 nt, synthetic construct
  source 1..21: mol_type = other RNA
tgtgcccccgggcccattcta

SEQ ID NO: 73331 - RNA, 21 nt, synthetic construct
  source 1..21: mol_type = other RNA
cacccaggacccaacggtgca

SEQ ID NO: 73332 - RNA, 21 nt, synthetic construct
  source 1..21: mol_type = other RNA
gggctgtgagtggcactacca

SEQ ID NO: 73333 - RNA, 21 nt, synthetic construct
  source 1..21: mol_type = other RNA
gtggccaggtgcgtgggtgaa

SEQ ID NO: 73334 - RNA, 21 nt, synthetic construct
  source 1..21: mol_type = other RNA
cagcaggtggactgtgaccga

SEQ ID NO: 73335 - RNA, 21 nt, synthetic construct
  source 1..21: mol_type = other RNA
aggcccggctgccctacagca

SEQ ID NO: 73336 - RNA, 21 nt, synthetic construct
  source 1..21: mol_type = other RNA
gactgacatcccccagataca

SEQ ID NO: 73337 - RNA, 21 nt, synthetic construct
  source 1..21: mol_type = other RNA
cagaaggtgcactgtgacgta

SEQ ID NO: 73338 - RNA, 21 nt, synthetic construct
  source 1..21: mol_type = other RNA
gtgccaggccgagagcttcca

SEQ ID NO: 73339 - RNA, 21 nt, synthetic construct
  source 1..21: mol_type = other RNA
ccactattccacctttgacga

SEQ ID NO: 73340 - RNA, 21 nt, synthetic construct
  source 1..21: mol_type = other RNA
gggacacggccatccgggtca

SEQ ID NO: 73341 - RNA, 21 nt, synthetic construct
  source 1..21: mol_type = other RNA
ttgactccaccaagtactaca

SEQ ID NO: 73342 - RNA, 21 nt, synthetic construct
  source 1..21: mol_type = other RNA
caggacctgtgccgctgccca

SEQ ID NO: 73343 - RNA, 21 nt, synthetic construct
  source 1..21: mol_type = other RNA
cagcccttcttcaatgaggaa

SEQ ID NO: 73344 - RNA, 21 nt, synthetic construct
  source 1..21: mol_type = other RNA
ccatcagggtcgactgcaaca

SEQ ID NO: 73345 - RNA, 21 nt, synthetic construct
  source 1..21: mol_type = other RNA
gcccttcttcaatgaggacca

SEQ ID NO: 73346 - RNA, 21 nt, synthetic construct
  source 1..21: mol_type = other RNA
tgaagtgcgtggcccagtgta

SEQ ID NO: 73347 - RNA, 21 nt, synthetic construct
  source 1..21: mol_type = other RNA
catcccctgtgggaccaccga

SEQ ID NO: 73348 - RNA, 21 nt, synthetic construct
  source 1..21: mol_type = other RNA
ccagatgaagtgcgtggccca

SEQ ID NO: 73349 - RNA, 21 nt, synthetic construct
  source 1..21: mol_type = other RNA
ggcagtgcccctgcacccaca

SEQ ID NO: 73350 - RNA, 21 nt, synthetic construct
  source 1..21: mol_type = other RNA
cagaccacagcaaccgaaaaa

SEQ ID NO: 73351 - RNA, 21 nt, synthetic construct
  source 1..21: mol_type = other RNA
ttgtcaggctggaccccgcca

SEQ ID NO: 73352 - RNA, 21 nt, synthetic construct
  source 1..21: mol_type = other RNA
tgtggaacggagaggacagta

SEQ ID NO: 73353 - RNA, 21 nt, synthetic construct
  source 1..21: mol_type = other RNA
gcacacactgcgtgtccggca

SEQ ID NO: 73354 - RNA, 21 nt, synthetic construct
  source 1..21: mol_type = other RNA
ctgcggggcaccctgcctaaa

SEQ ID NO: 73355 - RNA, 21 nt, synthetic construct
  source 1..21: mol_type = other RNA
accagatgaagtgcgtggcca

SEQ ID NO: 73356 - RNA, 21 nt, synthetic construct
  source 1..21: mol_type = other RNA
cctcagtgccagcacggagca

SEQ ID NO: 73357 - RNA, 21 nt, synthetic construct
  source 1..21: mol_type = other RNA
ttggaggggacgttgagtcca

SEQ ID NO: 73358 - RNA, 21 nt, synthetic construct
  source 1..21: mol_type = other RNA
ggtggccaggtgcgtgggtga

SEQ ID NO: 73359 - RNA, 21 nt, synthetic construct
  source 1..21: mol_type = other RNA
gggagttgggccaggtcgtga

SEQ ID NO: 73360 - RNA, 21 nt, synthetic construct
  source 1..21: mol_type = other RNA
gggagttgggccaggtcgtga

SEQ ID NO: 73361 - RNA, 21 nt, synthetic construct
  source 1..21: mol_type = other RNA
gggagttgggccaggtcgtga

SEQ ID NO: 73362 - RNA, 21 nt, synthetic construct
  source 1..21: mol_type = other RNA
ccaccagggccagatgtgcga

SEQ ID NO: 73363 - RNA, 21 nt, synthetic construct
  source 1..21: mol_type = other RNA
gggagttgggccaggtcgtga

SEQ ID NO: 73364 - RNA, 21 nt, synthetic construct
  source 1..21: mol_type = other RNA
cagcgggacggaaccactgca

SEQ ID NO: 73365 - RNA, 21 nt, synthetic construct
  source 1..21: mol_type = other RNA
ggacgactgtctccagcggga

SEQ ID NO: 73366 - RNA, 21 nt, synthetic construct
  source 1..21: mol_type = other RNA
tcaactatgaaatccgtgtga

SEQ ID NO: 73367 - RNA, 21 nt, synthetic construct
  source 1..21: mol_type = other RNA
tcaactatgaaatccgtgtga

SEQ ID NO: 73368 - RNA, 21 nt, synthetic construct
  source 1..21: mol_type = other RNA
tcaactatgaaatccgtgtga

SEQ ID NO: 73369 - RNA, 21 nt, synthetic construct
  source 1..21: mol_type = other RNA
tcaactatgaaatccgtgtga

SEQ ID NO: 73370 - RNA, 21 nt, synthetic construct
  source 1..21: mol_type = other RNA
agtgtcggacccgagccagca

SEQ ID NO: 73371 - RNA, 21 nt, synthetic construct
  source 1..21: mol_type = other RNA
gagttctatgcccacaacgca

SEQ ID NO: 73372 - RNA, 21 nt, synthetic construct
  source 1..21: mol_type = other RNA
actatgaaatccgtgtgttca

SEQ ID NO: 73373 - RNA, 21 nt, synthetic construct
  source 1..21: mol_type = other RNA
actatgaaatccgtgtgttca

SEQ ID NO: 73374 - RNA, 21 nt, synthetic construct
  source 1..21: mol_type = other RNA
actatgaaatccgtgtgttca

SEQ ID NO: 73375 - RNA, 21 nt, synthetic construct
  source 1..21: mol_type = other RNA
actatgaaatccgtgtgttca

SEQ ID NO: 73376 - RNA, 21 nt, synthetic construct
  source 1..21: mol_type = other RNA
gggacgactgtctccagcgga

SEQ ID NO: 73377 - RNA, 21 nt, synthetic construct
  source 1..21: mol_type = other RNA
tgatgtcactgggacgcccta

SEQ ID NO: 73378 - RNA, 21 nt, synthetic construct
  source 1..21: mol_type = other RNA
tgcttcaactatgaaatccga

SEQ ID NO: 73379 - RNA, 21 nt, synthetic construct
  source 1..21: mol_type = other RNA
tgcttcaactatgaaatccga

SEQ ID NO: 73380 - RNA, 21 nt, synthetic construct
  source 1..21: mol_type = other RNA
tgcttcaactatgaaatccga

SEQ ID NO: 73381 - RNA, 21 nt, synthetic construct
  source 1..21: mol_type = other RNA
tgcttcaactatgaaatccga

SEQ ID NO: 73382 - RNA, 21 nt, synthetic construct
  source 1..21: mol_type = other RNA
ctcctccactccggggacgaa

SEQ ID NO: 73383 - RNA, 21 nt, synthetic construct
  source 1..21: mol_type = other RNA
tccagcgggacggaaccacta

SEQ ID NO: 73384 - RNA, 21 nt, synthetic construct
  source 1..21: mol_type = other RNA
ctcctccactccggggacgaa

SEQ ID NO: 73385 - RNA, 21 nt, synthetic construct
  source 1..21: mol_type = other RNA
ctacaagtccatggatatcga

SEQ ID NO: 73386 - RNA, 21 nt, synthetic construct
  source 1..21: mol_type = other RNA
tcaccctgttcacaccctcga

SEQ ID NO: 73387 - RNA, 21 nt, synthetic construct
  source 1..21: mol_type = other RNA
ccaacgtcacctgcgtgaaca

SEQ ID NO: 73388 - RNA, 21 nt, synthetic construct
  source 1..21: mol_type = other RNA
agggacgactgtctccagcga

SEQ ID NO: 73389 - RNA, 21 nt, synthetic construct
  source 1..21: mol_type = other RNA
ttcaactatgaaatccgtgta

SEQ ID NO: 73390 - RNA, 21 nt, synthetic construct
  source 1..21: mol_type = other RNA
ttcaactatgaaatccgtgta

SEQ ID NO: 73391 - RNA, 21 nt, synthetic construct
  source 1..21: mol_type = other RNA
ttcaactatgaaatccgtgta

SEQ ID NO: 73392 - RNA, 21 nt, synthetic construct
  source 1..21: mol_type = other RNA
ttcaactatgaaatccgtgta

SEQ ID NO: 73393 - RNA, 21 nt, synthetic construct
  source 1..21: mol_type = other RNA
gttctatgcccacaacgccaa

SEQ ID NO: 73394 - RNA, 21 nt, synthetic construct
  source 1..21: mol_type = other RNA
cttcaactatgaaatccgtga

SEQ ID NO: 73395 - RNA, 21 nt, synthetic construct
  source 1..21: mol_type = other RNA
cttcaactatgaaatccgtga

SEQ ID NO: 73396 - RNA, 21 nt, synthetic construct
  source 1..21: mol_type = other RNA
tgaaatccgtgtgttctgcta

SEQ ID NO: 73397 - RNA, 21 nt, synthetic construct
  source 1..21: mol_type = other RNA
tgtgcttcaactatgaaatca

SEQ ID NO: 73398 - RNA, 21 nt, synthetic construct
  source 1..21: mol_type = other RNA
atgaaatccgtgtgttctgca

SEQ ID NO: 73399 - RNA, 21 nt, synthetic construct
  source 1..21: mol_type = other RNA
tgtgcttcaactatgaaatca

SEQ ID NO: 73400 - RNA, 21 nt, synthetic construct
  source 1..21: mol_type = other RNA
atgaaatccgtgtgttctgca

SEQ ID NO: 73401 - RNA, 21 nt, synthetic construct
  source 1..21: mol_type = other RNA
tgtgcttcaactatgaaatca

SEQ ID NO: 73402 - RNA, 21 nt, synthetic construct
  source 1..21: mol_type = other RNA
atgaaatccgtgtgttctgca

SEQ ID NO: 73403 - RNA, 21 nt, synthetic construct
  source 1..21: mol_type = other RNA
tgtgcttcaactatgaaatca

SEQ ID NO: 73404 - RNA, 21 nt, synthetic construct
  source 1..21: mol_type = other RNA
atgaaatccgtgtgttctgca

SEQ ID NO: 73405 - RNA, 21 nt, synthetic construct
  source 1..21: mol_type = other RNA
cgtcacctgcgtgaacaagca

SEQ ID NO: 73406 - RNA, 21 nt, synthetic construct
  source 1..21: mol_type = other RNA
ccagcgggacggaaccactga

SEQ ID NO: 73407 - RNA, 21 nt, synthetic construct
  source 1..21: mol_type = other RNA
gccacgcgtagccggtccgta

SEQ ID NO: 73408 - RNA, 21 nt, synthetic construct
  source 1..21: mol_type = other RNA
caggtggactgtgaccgcata

SEQ ID NO: 73409 - RNA, 21 nt, synthetic construct
  source 1..21: mol_type = other RNA
gcttcaactatgaaatccgta

SEQ ID NO: 73410 - RNA, 21 nt, synthetic construct
  source 1..21: mol_type = other RNA
gcttcaactatgaaatccgta

SEQ ID NO: 73411 - RNA, 21 nt, synthetic construct
  source 1..21: mol_type = other RNA
gcttcaactatgaaatccgta

SEQ ID NO: 73412 - RNA, 21 nt, synthetic construct
  source 1..21: mol_type = other RNA
gcttcaactatgaaatccgta

SEQ ID NO: 73413 - RNA, 21 nt, synthetic construct
  source 1..21: mol_type = other RNA
acgtcacctgcgtgaacaaga

SEQ ID NO: 73414 - RNA, 21 nt, synthetic construct
  source 1..21: mol_type = other RNA
cctgcccatcaaagtgtcgga

SEQ ID NO: 73415 - RNA, 21 nt, synthetic construct
  source 1..21: mol_type = other RNA
caacaaccagagggacgacta

SEQ ID NO: 73416 - RNA, 21 nt, synthetic construct
  source 1..21: mol_type = other RNA
cagagggacgactgtctccaa

SEQ ID NO: 73417 - RNA, 21 nt, synthetic construct
  source 1..21: mol_type = other RNA
agagggacgactgtctccaga

SEQ ID NO: 73418 - RNA, 21 nt, synthetic construct
  source 1..21: mol_type = other RNA
gacgactgtctccagcgggaa

SEQ ID NO: 73419 - RNA, 21 nt, synthetic construct
  source 1..21: mol_type = other RNA
cccacccaccaaagtgtacaa

SEQ ID NO: 73420 - RNA, 21 nt, synthetic construct
  source 1..21: mol_type = other RNA
ctgcacgcccttctgtgtcca

SEQ ID NO: 73421 - RNA, 21 nt, synthetic construct
  source 1..21: mol_type = other RNA
aaccagagggacgactgtcta

SEQ ID NO: 73422 - RNA, 21 nt, synthetic construct
  source 1..21: mol_type = other RNA
ggctgcacgcccttctgtgta

SEQ ID NO: 73423 - RNA, 21 nt, synthetic construct
  source 1..21: mol_type = other RNA
cctccggagctgccacacgca

SEQ ID NO: 73424 - RNA, 21 nt, synthetic construct
  source 1..21: mol_type = other RNA
ctccggagctgccacacgcta

SEQ ID NO: 73425 - RNA, 21 nt, synthetic construct
  source 1..21: mol_type = other RNA
gggccgagtgcctccggagca

SEQ ID NO: 73426 - RNA, 21 nt, synthetic construct
  source 1..21: mol_type = other RNA
cttcaactatgaaatccgtga

SEQ ID NO: 73427 - RNA, 21 nt, synthetic construct
  source 1..21: mol_type = other RNA
acccaccaaagtgtacaagca

SEQ ID NO: 73428 - RNA, 21 nt, synthetic construct
  source 1..21: mol_type = other RNA
cttcaactatgaaatccgtga

SEQ ID NO: 73429 - RNA, 21 nt, synthetic construct
  source 1..21: mol_type = other RNA
ggccgagtgcctccggagcta

SEQ ID NO: 73430 - RNA, 21 nt, synthetic construct
  source 1..21: mol_type = other RNA
ccgcgcccggggagtgtgcaa

SEQ ID NO: 73431 - RNA, 21 nt, synthetic construct
  source 1..21: mol_type = other RNA
ctccagcgggacggaaccaca

SEQ ID NO: 73432 - RNA, 21 nt, synthetic construct
  source 1..21: mol_type = other RNA
cctgcccacccaccaaagtga

SEQ ID NO: 73433 - RNA, 21 nt, synthetic construct
  source 1..21: mol_type = other RNA
ctggtgttggctctggcggca

SEQ ID NO: 73434 - RNA, 21 nt, synthetic construct
  source 1..21: mol_type = other RNA
gtctccagcgggacggaacca

SEQ ID NO: 73435 - RNA, 21 nt, synthetic construct
  source 1..21: mol_type = other RNA
tccggagctgccacacgctga

SEQ ID NO: 73436 - RNA, 21 nt, synthetic construct
  source 1..21: mol_type = other RNA
tgtctccagcgggacggaaca

SEQ ID NO: 73437 - RNA, 21 nt, synthetic construct
  source 1..21: mol_type = other RNA
gctgcacgcccttctgtgtca

SEQ ID NO: 73438 - RNA, 21 nt, synthetic construct
  source 1..21: mol_type = other RNA
agggcgactgctgtcccacca

SEQ ID NO: 73439 - RNA, 21 nt, synthetic construct
  source 1..21: mol_type = other RNA
gactgtctccagcgggacgga

SEQ ID NO: 73440 - RNA, 21 nt, synthetic construct
  source 1..21: mol_type = other RNA
cacggttcccagctcgtccaa

SEQ ID NO: 73441 - RNA, 21 nt, synthetic construct
  source 1..21: mol_type = other RNA
ctgccgcgcccggggagtgta

SEQ ID NO: 73442 - RNA, 21 nt, synthetic construct
  source 1..21: mol_type = other RNA
gccgacgtcacctgcagcgta

SEQ ID NO: 73443 - RNA, 21 nt, synthetic construct
  source 1..21: mol_type = other RNA
tggtcacccgtgttgtcatca

SEQ ID NO: 73444 - RNA, 21 nt, synthetic construct
  source 1..21: mol_type = other RNA
gcggccgcacctacagcccga

SEQ ID NO: 73445 - RNA, 21 nt, synthetic construct
  source 1..21: mol_type = other RNA
tgcaactacggccactgccca

SEQ ID NO: 73446 - RNA, 21 nt, synthetic construct
  source 1..21: mol_type = other RNA
tccacagtgcttaccaccaca

SEQ ID NO: 73447 - RNA, 21 nt, synthetic construct
  source 1..21: mol_type = other RNA
cagtgcttaccaccacggcca

SEQ ID NO: 73448 - RNA, 21 nt, synthetic construct
  source 1..21: mol_type = other RNA
actaccaaagtgctgactaca

SEQ ID NO: 73449 - RNA, 21 nt, synthetic construct
  source 1..21: mol_type = other RNA
aaagtgctgactaccacaaca

SEQ ID NO: 73450 - RNA, 21 nt, synthetic construct
  source 1..21: mol_type = other RNA
aagtgctgactaccacaacca

SEQ ID NO: 73451 - RNA, 21 nt, synthetic construct
  source 1..21: mol_type = other RNA
tgcaactacggccactgccca

SEQ ID NO: 73452 - RNA, 21 nt, synthetic construct
  source 1..21: mol_type = other RNA
tccacagtgcttaccaccaca

SEQ ID NO: 73453 - RNA, 21 nt, synthetic construct
  source 1..21: mol_type = other RNA
tgcaactacggccactgccca

SEQ ID NO: 73454 - RNA, 21 nt, synthetic construct
  source 1..21: mol_type = other RNA
tccacagtgcttaccaccaca

SEQ ID NO: 73455 - RNA, 21 nt, synthetic construct
  source 1..21: mol_type = other RNA
cagtgcttaccaccacggcca

SEQ ID NO: 73456 - RNA, 21 nt, synthetic construct
  source 1..21: mol_type = other RNA
tgcaactacggccactgccca

SEQ ID NO: 73457 - RNA, 21 nt, synthetic construct
  source 1..21: mol_type = other RNA
tgtggacaactgcaccgtgta

SEQ ID NO: 73458 - RNA, 21 nt, synthetic construct
  source 1..21: mol_type = other RNA
tggacaactgcaccgtgtaca

SEQ ID NO: 73459 - RNA, 21 nt, synthetic construct
  source 1..21: mol_type = other RNA
gagggcgactgctgtcccaca

SEQ ID NO: 73460 - RNA, 21 nt, synthetic construct
  source 1..21: mol_type = other RNA
cagcggagaactgccagagca

SEQ ID NO: 73461 - RNA, 21 nt, synthetic construct
  source 1..21: mol_type = other RNA
gacgtcacctgcagcgtttca

SEQ ID NO: 73462 - RNA, 21 nt, synthetic construct
  source 1..21: mol_type = other RNA
aaagtgtcggacccgagccaa

SEQ ID NO: 73463 - RNA, 21 nt, synthetic construct
  source 1..21: mol_type = other RNA
tgggggacgcactggagttta

SEQ ID NO: 73464 - RNA, 21 nt, synthetic construct
  source 1..21: mol_type = other RNA
gggggacgcactggagtttga

SEQ ID NO: 73465 - RNA, 21 nt, synthetic construct
  source 1..21: mol_type = other RNA
accaaagtgctgactaccaca

SEQ ID NO: 73466 - RNA, 21 nt, synthetic construct
  source 1..21: mol_type = other RNA
actgtctccagcgggacggaa

SEQ ID NO: 73467 - RNA, 21 nt, synthetic construct
  source 1..21: mol_type = other RNA
ctgtctccagcgggacggaaa

SEQ ID NO: 73468 - RNA, 21 nt, synthetic construct
  source 1..21: mol_type = other RNA
cctgtggtcacccgtgttgta

SEQ ID NO: 73469 - RNA, 21 nt, synthetic construct
  source 1..21: mol_type = other RNA
gcctgtggtcacccgtgttga

SEQ ID NO: 73470 - RNA, 21 nt, synthetic construct
  source 1..21: mol_type = other RNA
ccagaccacagcaaccgaaaa

SEQ ID NO: 73471 - RNA, 21 nt, synthetic construct
  source 1..21: mol_type = other RNA
ttctgctgcaactacggccaa

SEQ ID NO: 73472 - RNA, 21 nt, synthetic construct
  source 1..21: mol_type = other RNA
ttctgctgcaactacggccaa

SEQ ID NO: 73473 - RNA, 21 nt, synthetic construct
  source 1..21: mol_type = other RNA
ttctgctgcaactacggccaa

SEQ ID NO: 73474 - RNA, 21 nt, synthetic construct
  source 1..21: mol_type = other RNA
ttctgctgcaactacggccaa

SEQ ID NO: 73475 - RNA, 21 nt, synthetic construct
  source 1..21: mol_type = other RNA
gttctgctgcaactacggcca

SEQ ID NO: 73476 - RNA, 21 nt, synthetic construct
  source 1..21: mol_type = other RNA
ctgctgcaactacggccacta

SEQ ID NO: 73477 - RNA, 21 nt, synthetic construct
  source 1..21: mol_type = other RNA
gttctgctgcaactacggcca

SEQ ID NO: 73478 - RNA, 21 nt, synthetic construct
  source 1..21: mol_type = other RNA
ccgacgtcacctgcagcgtta

SEQ ID NO: 73479 - RNA, 21 nt, synthetic construct
  source 1..21: mol_type = other RNA
tgctgcaactacggccactga

SEQ ID NO: 73480 - RNA, 21 nt, synthetic construct
  source 1..21: mol_type = other RNA
tgctgcaactacggccactga

SEQ ID NO: 73481 - RNA, 21 nt, synthetic construct
  source 1..21: mol_type = other RNA
tgctgcaactacggccactga

SEQ ID NO: 73482 - RNA, 21 nt, synthetic construct
  source 1..21: mol_type = other RNA
tgctgcaactacggccactga

SEQ ID NO: 73483 - RNA, 21 nt, synthetic construct
  source 1..21: mol_type = other RNA
cggagaactgccagagctgta

SEQ ID NO: 73484 - RNA, 21 nt, synthetic construct
  source 1..21: mol_type = other RNA
cccagaccacagcaaccgaaa

SEQ ID NO: 73485 - RNA, 21 nt, synthetic construct
  source 1..21: mol_type = other RNA
ggtgggggacgcactggagta

SEQ ID NO: 73486 - RNA, 21 nt, synthetic construct
  source 1..21: mol_type = other RNA
ctgctgcaactacggccacta

SEQ ID NO: 73487 - RNA, 21 nt, synthetic construct
  source 1..21: mol_type = other RNA
cgtcacctgcagcgtttccta

SEQ ID NO: 73488 - RNA, 21 nt, synthetic construct
  source 1..21: mol_type = other RNA
gaaactactatgacgtcggta

SEQ ID NO: 73489 - RNA, 21 nt, synthetic construct
  source 1..21: mol_type = other RNA
tcctacgataagatcagggca

SEQ ID NO: 73490 - RNA, 21 nt, synthetic construct
  source 1..21: mol_type = other RNA
gttctgctgcaactacggcca

SEQ ID NO: 73491 - RNA, 21 nt, synthetic construct
  source 1..21: mol_type = other RNA
ctgctgcaactacggccacta

SEQ ID NO: 73492 - RNA, 21 nt, synthetic construct
  source 1..21: mol_type = other RNA
tggcgaggtgcaaccggtgga

SEQ ID NO: 73493 - RNA, 21 nt, synthetic construct
  source 1..21: mol_type = other RNA
agtccgcatcaacacgaccaa

SEQ ID NO: 73494 - RNA, 21 nt, synthetic construct
  source 1..21: mol_type = other RNA
gttctgctgcaactacggcca

SEQ ID NO: 73495 - RNA, 21 nt, synthetic construct
  source 1..21: mol_type = other RNA
ctgctgcaactacggccacta

SEQ ID NO: 73496 - RNA, 21 nt, synthetic construct
  source 1..21: mol_type = other RNA
cgactacgagctgcgggttca

SEQ ID NO: 73497 - RNA, 21 nt, synthetic construct
  source 1..21: mol_type = other RNA
caccttctacggggttggtga

SEQ ID NO: 73498 - RNA, 21 nt, synthetic construct
  source 1..21: mol_type = other RNA
ctacgagctgcgggttctcta

SEQ ID NO: 73499 - RNA, 21 nt, synthetic construct
  source 1..21: mol_type = other RNA
tgacaaccgtgtcgtcctgca

SEQ ID NO: 73500 - RNA, 21 nt, synthetic construct
  source 1..21: mol_type = other RNA
gtgggggacgcactggagtta

SEQ ID NO: 73501 - RNA, 21 nt, synthetic construct
  source 1..21: mol_type = other RNA
taaatttcccggggagcggta

SEQ ID NO: 73502 - RNA, 21 nt, synthetic construct
  source 1..21: mol_type = other RNA
gacggaaactactatgacgta

SEQ ID NO: 73503 - RNA, 21 nt, synthetic construct
  source 1..21: mol_type = other RNA
ccactacgaccgcaaccacta

SEQ ID NO: 73504 - RNA, 21 nt, synthetic construct
  source 1..21: mol_type = other RNA
cggcgcgtgagctttgttcca

SEQ ID NO: 73505 - RNA, 21 nt, synthetic construct
  source 1..21: mol_type = other RNA
tgggtgacaaccgtgtcgtca

SEQ ID NO: 73506 - RNA, 21 nt, synthetic construct
  source 1..21: mol_type = other RNA
ctttcgggagggcgccactca

SEQ ID NO: 73507 - RNA, 21 nt, synthetic construct
  source 1..21: mol_type = other RNA
tatgacgtcggtgcaagggta

SEQ ID NO: 73508 - RNA, 21 nt, synthetic construct
  source 1..21: mol_type = other RNA
ctcacgagcgagctgtccaca

SEQ ID NO: 73509 - RNA, 21 nt, synthetic construct
  source 1..21: mol_type = other RNA
caccctacaagatacgctaca

SEQ ID NO: 73510 - RNA, 21 nt, synthetic construct
  source 1..21: mol_type = other RNA
gtcccggcttcgtaaccgtga

SEQ ID NO: 73511 - RNA, 21 nt, synthetic construct
  source 1..21: mol_type = other RNA
tacgataagatcagggccgca

SEQ ID NO: 73512 - RNA, 21 nt, synthetic construct
  source 1..21: mol_type = other RNA
ccacccggcgcgtgagcttta

SEQ ID NO: 73513 - RNA, 21 nt, synthetic construct
  source 1..21: mol_type = other RNA
cactacgaccgcaaccactga

SEQ ID NO: 73514 - RNA, 21 nt, synthetic construct
  source 1..21: mol_type = other RNA
agcctacgagtagcccgggga

SEQ ID NO: 73515 - RNA, 21 nt, synthetic construct
  source 1..21: mol_type = other RNA
ctctgtcacgactacgagcta

SEQ ID NO: 73516 - RNA, 21 nt, synthetic construct
  source 1..21: mol_type = other RNA
gctgcgacaggcaaggcggca

SEQ ID NO: 73517 - RNA, 21 nt, synthetic construct
  source 1..21: mol_type = other RNA
aagatacgctacatggggata

SEQ ID NO: 73518 - RNA, 21 nt, synthetic construct
  source 1..21: mol_type = other RNA
actatgacgtcggtgcaagga

SEQ ID NO: 73519 - RNA, 21 nt, synthetic construct
  source 1..21: mol_type = other RNA
cagcctacgagtagcccggga

SEQ ID NO: 73520 - RNA, 21 nt, synthetic construct
  source 1..21: mol_type = other RNA
gcctacgagtagcccggggca

SEQ ID NO: 73521 - RNA, 21 nt, synthetic construct
  source 1..21: mol_type = other RNA
cacccggcgcgtgagctttga

SEQ ID NO: 73522 - RNA, 21 nt, synthetic construct
  source 1..21: mol_type = other RNA
acgaccgcaaccactggatca

SEQ ID NO: 73523 - RNA, 21 nt, synthetic construct
  source 1..21: mol_type = other RNA
cccggagcgtccaagtactca

SEQ ID NO: 73524 - RNA, 21 nt, synthetic construct
  source 1..21: mol_type = other RNA
cttgccgcggcctgagtgaga

SEQ ID NO: 73525 - RNA, 21 nt, synthetic construct
  source 1..21: mol_type = other RNA
ctgaggtcgcaacggccagga

SEQ ID NO: 73526 - RNA, 21 nt, synthetic construct
  source 1..21: mol_type = other RNA
cgaccgcaaccactggatcca

SEQ ID NO: 73527 - RNA, 21 nt, synthetic construct
  source 1..21: mol_type = other RNA
gagggcgccgtgtgttcatga

SEQ ID NO: 73528 - RNA, 21 nt, synthetic construct
  source 1..21: mol_type = other RNA
gcgactcgggtggcgactgca

SEQ ID NO: 73529 - RNA, 21 nt, synthetic construct
  source 1..21: mol_type = other RNA
actacgaccgcaaccactgga

SEQ ID NO: 73530 - RNA, 21 nt, synthetic construct
  source 1..21: mol_type = other RNA
tccaagcggacggcggcgtga

SEQ ID NO: 73531 - RNA, 21 nt, synthetic construct
  source 1..21: mol_type = other RNA
gacggcggcgtgttcctcaaa

SEQ ID NO: 73532 - RNA, 21 nt, synthetic construct
  source 1..21: mol_type = other RNA
agggcgccgtgtgttcatgta

SEQ ID NO: 73533 - RNA, 21 nt, synthetic construct
  source 1..21: mol_type = other RNA
ctacgagctgatcctccaaga

SEQ ID NO: 73534 - RNA, 21 nt, synthetic construct
  source 1..21: mol_type = other RNA
gccaacactcacgagcgagca

SEQ ID NO: 73535 - RNA, 21 nt, synthetic construct
  source 1..21: mol_type = other RNA
gaggttccacggtgaccccca

SEQ ID NO: 73536 - RNA, 21 nt, synthetic construct
  source 1..21: mol_type = other RNA
acaaccactactgcacggcca

SEQ ID NO: 73537 - RNA, 21 nt, synthetic construct
  source 1..21: mol_type = other RNA
catggatatcgtcctcactga

SEQ ID NO: 73538 - RNA, 21 nt, synthetic construct
  source 1..21: mol_type = other RNA
ggagcgtccaagtactcagca

SEQ ID NO: 73539 - RNA, 21 nt, synthetic construct
  source 1..21: mol_type = other RNA
ctggatcccaaatacgccaaa

SEQ ID NO: 73540 - RNA, 21 nt, synthetic construct
  source 1..21: mol_type = other RNA
atgagaaactctacgacctga

SEQ ID NO: 73541 - RNA, 21 nt, synthetic construct
  source 1..21: mol_type = other RNA
aagcggacggcggcgtgttca

SEQ ID NO: 73542 - RNA, 21 nt, synthetic construct
  source 1..21: mol_type = other RNA
tgccactcatgcaggtgttta

SEQ ID NO: 73543 - RNA, 21 nt, synthetic construct
  source 1..21: mol_type = other RNA
gaccgatcccaacagtgccta

SEQ ID NO: 73544 - RNA, 21 nt, synthetic construct
  source 1..21: mol_type = other RNA
ctacgcctacgtggtggatga

SEQ ID NO: 73545 - RNA, 21 nt, synthetic construct
  source 1..21: mol_type = other RNA
ctacagctaccaggacgtcaa

SEQ ID NO: 73546 - RNA, 21 nt, synthetic construct
  source 1..21: mol_type = other RNA
agacgtttgaaaacctgagga

SEQ ID NO: 73547 - RNA, 21 nt, synthetic construct
  source 1..21: mol_type = other RNA
ggagggcgtcttcaagatgta

SEQ ID NO: 73548 - RNA, 21 nt, synthetic construct
  source 1..21: mol_type = other RNA
gggacgtgccacaaccccgca

SEQ ID NO: 73549 - RNA, 21 nt, synthetic construct
  source 1..21: mol_type = other RNA
cttggtacagccaccacggga

SEQ ID NO: 73550 - RNA, 21 nt, synthetic construct
  source 1..21: mol_type = other RNA
ctggacccgcctatcacagaa

SEQ ID NO: 73551 - RNA, 21 nt, synthetic construct
  source 1..21: mol_type = other RNA
caacatccgtgcggccggaga

SEQ ID NO: 73552 - RNA, 21 nt, synthetic construct
  source 1..21: mol_type = other RNA
ctggacccgcctatcacagaa

SEQ ID NO: 73553 - RNA, 21 nt, synthetic construct
  source 1..21: mol_type = other RNA
caacatccgtgcggccggaga

SEQ ID NO: 73554 - RNA, 21 nt, synthetic construct
  source 1..21: mol_type = other RNA
agccactacgaccgcaaccaa

SEQ ID NO: 73555 - RNA, 21 nt, synthetic construct
  source 1..21: mol_type = other RNA
ctggacccgcctatcacagaa

SEQ ID NO: 73556 - RNA, 21 nt, synthetic construct
  source 1..21: mol_type = other RNA
caacatccgtgcggccggaga

SEQ ID NO: 73557 - RNA, 21 nt, synthetic construct
  source 1..21: mol_type = other RNA
ctggacccgcctatcacagaa

SEQ ID NO: 73558 - RNA, 21 nt, synthetic construct
  source 1..21: mol_type = other RNA
ggcacgcacgcctccagtgta

SEQ ID NO: 73559 - RNA, 21 nt, synthetic construct
  source 1..21: mol_type = other RNA
caacatccgtgcggccggaga

SEQ ID NO: 73560 - RNA, 21 nt, synthetic construct
  source 1..21: mol_type = other RNA
ctggacccgcctatcacagaa

SEQ ID NO: 73561 - RNA, 21 nt, synthetic construct
  source 1..21: mol_type = other RNA
tgacaagggccaccaattcca

SEQ ID NO: 73562 - RNA, 21 nt, synthetic construct
  source 1..21: mol_type = other RNA
caccggttccacggccaccga

SEQ ID NO: 73563 - RNA, 21 nt, synthetic construct
  source 1..21: mol_type = other RNA
ttctacgcagtgtgcaatcaa

SEQ ID NO: 73564 - RNA, 21 nt, synthetic construct
  source 1..21: mol_type = other RNA
ccatgcacgctttgggaatca

SEQ ID NO: 73565 - RNA, 21 nt, synthetic construct
  source 1..21: mol_type = other RNA
ccactactgcacggcctctga

SEQ ID NO: 73566 - RNA, 21 nt, synthetic construct
  source 1..21: mol_type = other RNA
cagtgtcggtgcagtgcaaga

SEQ ID NO: 73567 - RNA, 21 nt, synthetic construct
  source 1..21: mol_type = other RNA
agtgtcggtgcagtgcaagca

SEQ ID NO: 73568 - RNA, 21 nt, synthetic construct
  source 1..21: mol_type = other RNA
tccgcatcaacacgaccatca

SEQ ID NO: 73569 - RNA, 21 nt, synthetic construct
  source 1..21: mol_type = other RNA
tcaacgtccagctacgccgaa

SEQ ID NO: 73570 - RNA, 21 nt, synthetic construct
  source 1..21: mol_type = other RNA
tgctacgctcacggcaccgta

SEQ ID NO: 73571 - RNA, 21 nt, synthetic construct
  source 1..21: mol_type = other RNA
ctcccggccttcaacgagtta

SEQ ID NO: 73572 - RNA, 21 nt, synthetic construct
  source 1..21: mol_type = other RNA
ctgcgagtacatcttggccca

SEQ ID NO: 73573 - RNA, 21 nt, synthetic construct
  source 1..21: mol_type = other RNA
ccggttccacggccaccgcca

SEQ ID NO: 73574 - RNA, 21 nt, synthetic construct
  source 1..21: mol_type = other RNA
catgcggccccatacagccta

SEQ ID NO: 73575 - RNA, 21 nt, synthetic construct
  source 1..21: mol_type = other RNA
agctaccagctttacacccaa

SEQ ID NO: 73576 - RNA, 21 nt, synthetic construct
  source 1..21: mol_type = other RNA
agctaccagctttacacccaa

SEQ ID NO: 73577 - RNA, 21 nt, synthetic construct
  source 1..21: mol_type = other RNA
cctgctacgctcacggcacca

SEQ ID NO: 73578 - RNA, 21 nt, synthetic construct
  source 1..21: mol_type = other RNA
tcatgtacgggtgggaagcta

SEQ ID NO: 73579 - RNA, 21 nt, synthetic construct
  source 1..21: mol_type = other RNA
accagcgttacacccatccca

SEQ ID NO: 73580 - RNA, 21 nt, synthetic construct
  source 1..21: mol_type = other RNA
accagcgttacacccatccca

SEQ ID NO: 73581 - RNA, 21 nt, synthetic construct
  source 1..21: mol_type = other RNA
cttcaacggcctcccggccta

SEQ ID NO: 73582 - RNA, 21 nt, synthetic construct
  source 1..21: mol_type = other RNA
cacgggcgatccctgtcccca

SEQ ID NO: 73583 - RNA, 21 nt, synthetic construct
  source 1..21: mol_type = other RNA
cacgggcgatccctgtcccca

SEQ ID NO: 73584 - RNA, 21 nt, synthetic construct
  source 1..21: mol_type = other RNA
gcatgtgcgggcctatgtgta

SEQ ID NO: 73585 - RNA, 21 nt, synthetic construct
  source 1..21: mol_type = other RNA
ctatgcccacaacgccaggca

SEQ ID NO: 73586 - RNA, 21 nt, synthetic construct
  source 1..21: mol_type = other RNA
cggggactttgacacctacta

SEQ ID NO: 73587 - RNA, 21 nt, synthetic construct
  source 1..21: mol_type = other RNA
cggggactttgacacctacta

SEQ ID NO: 73588 - RNA, 21 nt, synthetic construct
  source 1..21: mol_type = other RNA
cggggactttgacacctacta

SEQ ID NO: 73589 - RNA, 21 nt, synthetic construct
  source 1..21: mol_type = other RNA
cggggactttgacacctacta

SEQ ID NO: 73590 - RNA, 21 nt, synthetic construct
  source 1..21: mol_type = other RNA
cccggccttcaacgagttcta

SEQ ID NO: 73591 - RNA, 21 nt, synthetic construct
  source 1..21: mol_type = other RNA
ggaccaccgagtcacccccta

SEQ ID NO: 73592 - RNA, 21 nt, synthetic construct
  source 1..21: mol_type = other RNA
ggaccaccgagtcacccccta

SEQ ID NO: 73593 - RNA, 21 nt, synthetic construct
  source 1..21: mol_type = other RNA
ggaccaccgagtcacccccta

SEQ ID NO: 73594 - RNA, 21 nt, synthetic construct
  source 1..21: mol_type = other RNA
tcacgactacgagctgcggga

SEQ ID NO: 73595 - RNA, 21 nt, synthetic construct
  source 1..21: mol_type = other RNA
gcaaccgaaaagaccacccta

SEQ ID NO: 73596 - RNA, 21 nt, synthetic construct
  source 1..21: mol_type = other RNA
cacacgggcgatccctgtcca

SEQ ID NO: 73597 - RNA, 21 nt, synthetic construct
  source 1..21: mol_type = other RNA
cacacgggcgatccctgtcca

SEQ ID NO: 73598 - RNA, 21 nt, synthetic construct
  source 1..21: mol_type = other RNA
ggacggaaccactgccgccaa

SEQ ID NO: 73599 - RNA, 21 nt, synthetic construct
  source 1..21: mol_type = other RNA
gacggaaccactgccgccaga

SEQ ID NO: 73600 - RNA, 21 nt, synthetic construct
  source 1..21: mol_type = other RNA
tgtgcgacctcacctgcccaa

SEQ ID NO: 73601 - RNA, 21 nt, synthetic construct
  source 1..21: mol_type = other RNA
gcgtacagctcagcgactgga

SEQ ID NO: 73602 - RNA, 21 nt, synthetic construct
  source 1..21: mol_type = other RNA
gcgccgtgtgttcatgtacga

SEQ ID NO: 73603 - RNA, 21 nt, synthetic construct
  source 1..21: mol_type = other RNA
gctacgacaaggacggaaaca

SEQ ID NO: 73604 - RNA, 21 nt, synthetic construct
  source 1..21: mol_type = other RNA
ctgccccgagacggtgtgcga

SEQ ID NO: 73605 - RNA, 21 nt, synthetic construct
  source 1..21: mol_type = other RNA
ccccgtgggtgaaaccggcca

SEQ ID NO: 73606 - RNA, 21 nt, synthetic construct
  source 1..21: mol_type = other RNA
gcctacgaggacttcaacgta

SEQ ID NO: 73607 - RNA, 21 nt, synthetic construct
  source 1..21: mol_type = other RNA
cctacgaggacttcaacgtca

SEQ ID NO: 73608 - RNA, 21 nt, synthetic construct
  source 1..21: mol_type = other RNA
cgcctacgaggacttcaacga

SEQ ID NO: 73609 - RNA, 21 nt, synthetic construct
  source 1..21: mol_type = other RNA
tgccatttctacgcagtgtga

SEQ ID NO: 73610 - RNA, 21 nt, synthetic construct
  source 1..21: mol_type = other RNA
ggttcagtgtcggtgcagtga

SEQ ID NO: 73611 - RNA, 21 nt, synthetic construct
  source 1..21: mol_type = other RNA
ctgcgacaggcaaggcggcca

SEQ ID NO: 73612 - RNA, 21 nt, synthetic construct
  source 1..21: mol_type = other RNA
cccaccctacaagatacgcta

SEQ ID NO: 73613 - RNA, 21 nt, synthetic construct
  source 1..21: mol_type = other RNA
ctgcgtgggacccgatgggta

SEQ ID NO: 73614 - RNA, 21 nt, synthetic construct
  source 1..21: mol_type = other RNA
tgcgtgggtgacaaccgtgta

SEQ ID NO: 73615 - RNA, 21 nt, synthetic construct
  source 1..21: mol_type = other RNA
cctttgcggagtgccacgcaa

SEQ ID NO: 73616 - RNA, 21 nt, synthetic construct
  source 1..21: mol_type = other RNA
aactaagcatgtgcgggccta

SEQ ID NO: 73617 - RNA, 21 nt, synthetic construct
  source 1..21: mol_type = other RNA
tggacagtttttctcgcccga

SEQ ID NO: 73618 - RNA, 21 nt, synthetic construct
  source 1..21: mol_type = other RNA
gacagtttttctcgcccggga

SEQ ID NO: 73619 - RNA, 21 nt, synthetic construct
  source 1..21: mol_type = other RNA
ctggcgaggtgcaaccggtga

SEQ ID NO: 73620 - RNA, 21 nt, synthetic construct
  source 1..21: mol_type = other RNA
caagtccgcatcaacacgaca

SEQ ID NO: 73621 - RNA, 21 nt, synthetic construct
  source 1..21: mol_type = other RNA
caaactaagcatgtgcgggca

SEQ ID NO: 73622 - RNA, 21 nt, synthetic construct
  source 1..21: mol_type = other RNA
agctaccaggacgtcatctaa

SEQ ID NO: 73623 - RNA, 21 nt, synthetic construct
  source 1..21: mol_type = other RNA
catctacaataagaccgacca

SEQ ID NO: 73624 - RNA, 21 nt, synthetic construct
  source 1..21: mol_type = other RNA
tggatccacggccatcccgta

SEQ ID NO: 73625 - RNA, 21 nt, synthetic construct
  source 1..21: mol_type = other RNA
ctcaggccccgtgacggtcaa

SEQ ID NO: 73626 - RNA, 21 nt, synthetic construct
  source 1..21: mol_type = other RNA
gtccaagcggacggcggcgta

SEQ ID NO: 73627 - RNA, 21 nt, synthetic construct
  source 1..21: mol_type = other RNA
gttctctgctgcgaatacgta

SEQ ID NO: 73628 - RNA, 21 nt, synthetic construct
  source 1..21: mol_type = other RNA
agggctgaggtcgcaacggca

SEQ ID NO: 73629 - RNA, 21 nt, synthetic construct
  source 1..21: mol_type = other RNA
tggcgcctgcttgatcgccaa

SEQ ID NO: 73630 - RNA, 21 nt, synthetic construct
  source 1..21: mol_type = other RNA
acatccacccttccaacacga

SEQ ID NO: 73631 - RNA, 21 nt, synthetic construct
  source 1..21: mol_type = other RNA
cacagctaccagcgttacaca

SEQ ID NO: 73632 - RNA, 21 nt, synthetic construct
  source 1..21: mol_type = other RNA
caccacggccactacgatcaa

SEQ ID NO: 73633 - RNA, 21 nt, synthetic construct
  source 1..21: mol_type = other RNA
caccacggccactacgatcaa

SEQ ID NO: 73634 - RNA, 21 nt, synthetic construct
  source 1..21: mol_type = other RNA
caccacggccactacgatcaa

SEQ ID NO: 73635 - RNA, 21 nt, synthetic construct
  source 1..21: mol_type = other RNA
cagggacggcacgcacgccta

SEQ ID NO: 73636 - RNA, 21 nt, synthetic construct
  source 1..21: mol_type = other RNA
caccacggccactacgatcaa

SEQ ID NO: 73637 - RNA, 21 nt, synthetic construct
  source 1..21: mol_type = other RNA
cacagctaccagcgttacaca

SEQ ID NO: 73638 - RNA, 21 nt, synthetic construct
  source 1..21: mol_type = other RNA
caccacggccactacgatcaa

SEQ ID NO: 73639 - RNA, 21 nt, synthetic construct
  source 1..21: mol_type = other RNA
accagcgtgttcatccgacta

SEQ ID NO: 73640 - RNA, 21 nt, synthetic construct
  source 1..21: mol_type = other RNA
gactgtgaccgcatgcgggga

SEQ ID NO: 73641 - RNA, 21 nt, synthetic construct
  source 1..21: mol_type = other RNA
tcctctgctgcagtgacgaca

SEQ ID NO: 73642 - RNA, 21 nt, synthetic construct
  source 1..21: mol_type = other RNA
tggggcggctcccactattca

SEQ ID NO: 73643 - RNA, 21 nt, synthetic construct
  source 1..21: mol_type = other RNA
agagagatccatgcacgctta

SEQ ID NO: 73644 - RNA, 21 nt, synthetic construct
  source 1..21: mol_type = other RNA
gctgcgaatacgtgccctgta

SEQ ID NO: 73645 - RNA, 21 nt, synthetic construct
  source 1..21: mol_type = other RNA
ggcctttgcggagtgccacga

SEQ ID NO: 73646 - RNA, 21 nt, synthetic construct
  source 1..21: mol_type = other RNA
acagagccgagcactatagca

SEQ ID NO: 73647 - RNA, 21 nt, synthetic construct
  source 1..21: mol_type = other RNA
aggggacctttaaggcggtga

SEQ ID NO: 73648 - RNA, 21 nt, synthetic construct
  source 1..21: mol_type = other RNA
cggccactacgatcacagcca

SEQ ID NO: 73649 - RNA, 21 nt, synthetic construct
  source 1..21: mol_type = other RNA
accaggctgacgacttcacga

SEQ ID NO: 73650 - RNA, 21 nt, synthetic construct
  source 1..21: mol_type = other RNA
atcacctttgatggcgatcga

SEQ ID NO: 73651 - RNA, 21 nt, synthetic construct
  source 1..21: mol_type = other RNA
acctttaaggcggtggcgaga

SEQ ID NO: 73652 - RNA, 21 nt, synthetic construct
  source 1..21: mol_type = other RNA
gaccccgagcatccggtcgaa

SEQ ID NO: 73653 - RNA, 21 nt, synthetic construct
  source 1..21: mol_type = other RNA
ctctgctgcagtgacgaccaa

SEQ ID NO: 73654 - RNA, 21 nt, synthetic construct
  source 1..21: mol_type = other RNA
ctgcaggggacgtgccacaaa

SEQ ID NO: 73655 - RNA, 21 nt, synthetic construct
  source 1..21: mol_type = other RNA
ggggacgtgccacaaccccga

SEQ ID NO: 73656 - RNA, 21 nt, synthetic construct
  source 1..21: mol_type = other RNA
acctggacccgcctatcacaa

SEQ ID NO: 73657 - RNA, 21 nt, synthetic construct
  source 1..21: mol_type = other RNA
gccaccacacacgggcgatca

SEQ ID NO: 73658 - RNA, 21 nt, synthetic construct
  source 1..21: mol_type = other RNA
gtgacggtgcccaccggatca

SEQ ID NO: 73659 - RNA, 21 nt, synthetic construct
  source 1..21: mol_type = other RNA
acctggacccgcctatcacaa

SEQ ID NO: 73660 - RNA, 21 nt, synthetic construct
  source 1..21: mol_type = other RNA
gccaccacacacgggcgatca

SEQ ID NO: 73661 - RNA, 21 nt, synthetic construct
  source 1..21: mol_type = other RNA
ccccacatcggccccaataaa

SEQ ID NO: 73662 - RNA, 21 nt, synthetic construct
  source 1..21: mol_type = other RNA
gtgacggtgcccaccggatca

SEQ ID NO: 73663 - RNA, 21 nt, synthetic construct
  source 1..21: mol_type = other RNA
gcctggacccgcctatcacaa

SEQ ID NO: 73664 - RNA, 21 nt, synthetic construct
  source 1..21: mol_type = other RNA
ggccaccacacacgggcggta

SEQ ID NO: 73665 - RNA, 21 nt, synthetic construct
  source 1..21: mol_type = other RNA
accggaagaccagcgtgttca

SEQ ID NO: 73666 - RNA, 21 nt, synthetic construct
  source 1..21: mol_type = other RNA
acctcttacaccttccgggga

SEQ ID NO: 73667 - RNA, 21 nt, synthetic construct
  source 1..21: mol_type = other RNA
ggggagtgcgtccagaccgca

SEQ ID NO: 73668 - RNA, 21 nt, synthetic construct
  source 1..21: mol_type = other RNA
aaactaagcatgtgcgggcca

SEQ ID NO: 73669 - RNA, 21 nt, synthetic construct
  source 1..21: mol_type = other RNA
gccatgctcgtggtgccgcaa

SEQ ID NO: 73670 - RNA, 21 nt, synthetic construct
  source 1..21: mol_type = other RNA
ggcggcgtgttcctcaactca

SEQ ID NO: 73671 - RNA, 21 nt, synthetic construct
  source 1..21: mol_type = other RNA
cccctgctacgctcacggcaa

SEQ ID NO: 73672 - RNA, 21 nt, synthetic construct
  source 1..21: mol_type = other RNA
ctggagaggtggtgcacgaca

SEQ ID NO: 73673 - RNA, 21 nt, synthetic construct
  source 1..21: mol_type = other RNA
cagcgtgttcatccgactgca

SEQ ID NO: 73674 - RNA, 21 nt, synthetic construct
  source 1..21: mol_type = other RNA
atcgccatctgcggaagcaaa

SEQ ID NO: 73675 - RNA, 21 nt, synthetic construct
  source 1..21: mol_type = other RNA
ctccaccgtgtgtgtccgcga

SEQ ID NO: 73676 - RNA, 21 nt, synthetic construct
  source 1..21: mol_type = other RNA
cagcttcccgacatgccgcta

SEQ ID NO: 73677 - RNA, 21 nt, synthetic construct
  source 1..21: mol_type = other RNA
cggcccccataaccacggtga

SEQ ID NO: 73678 - RNA, 21 nt, synthetic construct
  source 1..21: mol_type = other RNA
ccagggacaacacctatccca

SEQ ID NO: 73679 - RNA, 21 nt, synthetic construct
  source 1..21: mol_type = other RNA
cggcccccataaccacggtga

SEQ ID NO: 73680 - RNA, 21 nt, synthetic construct
  source 1..21: mol_type = other RNA
ccagggacaacacctatccca

SEQ ID NO: 73681 - RNA, 21 nt, synthetic construct
  source 1..21: mol_type = other RNA
cggcccccataaccacggtga

SEQ ID NO: 73682 - RNA, 21 nt, synthetic construct
  source 1..21: mol_type = other RNA
tgacgagggttcagtgtcgga

SEQ ID NO: 73683 - RNA, 21 nt, synthetic construct
  source 1..21: mol_type = other RNA
gtgacggtgcccaccggatca

SEQ ID NO: 73684 - RNA, 21 nt, synthetic construct
  source 1..21: mol_type = other RNA
acctggacccgcctatcacaa

SEQ ID NO: 73685 - RNA, 21 nt, synthetic construct
  source 1..21: mol_type = other RNA
gccaccacacacgggcgatca

SEQ ID NO: 73686 - RNA, 21 nt, synthetic construct
  source 1..21: mol_type = other RNA
gtgacggtgcccaccggatca

SEQ ID NO: 73687 - RNA, 21 nt, synthetic construct
  source 1..21: mol_type = other RNA
cccaccccgtgggtgaaacca

SEQ ID NO: 73688 - RNA, 21 nt, synthetic construct
  source 1..21: mol_type = other RNA
gacaaggacggaaactactaa

SEQ ID NO: 73689 - RNA, 21 nt, synthetic construct
  source 1..21: mol_type = other RNA
tccaacatccgtgcggccgga

SEQ ID NO: 73690 - RNA, 21 nt, synthetic construct
  source 1..21: mol_type = other RNA
tccaacatccgtgcggccgga

SEQ ID NO: 73691 - RNA, 21 nt, synthetic construct
  source 1..21: mol_type = other RNA
tccaacatccgtgcggccgga

SEQ ID NO: 73692 - RNA, 21 nt, synthetic construct
  source 1..21: mol_type = other RNA
tccaacatccgtgcggccgga

SEQ ID NO: 73693 - RNA, 21 nt, synthetic construct
  source 1..21: mol_type = other RNA
acctggacccgcctatcacaa

SEQ ID NO: 73694 - RNA, 21 nt, synthetic construct
  source 1..21: mol_type = other RNA
cacggccactacgatcacgga

SEQ ID NO: 73695 - RNA, 21 nt, synthetic construct
  source 1..21: mol_type = other RNA
cacggccactacgatcacgga

SEQ ID NO: 73696 - RNA, 21 nt, synthetic construct
  source 1..21: mol_type = other RNA
cacggccactacgatcacgga

SEQ ID NO: 73697 - RNA, 21 nt, synthetic construct
  source 1..21: mol_type = other RNA
cacggccactacgatcacgga

SEQ ID NO: 73698 - RNA, 21 nt, synthetic construct
  source 1..21: mol_type = other RNA
ctttaaggcggtggcgagaga

SEQ ID NO: 73699 - RNA, 21 nt, synthetic construct
  source 1..21: mol_type = other RNA
aagtgtacaagccatgcggca

SEQ ID NO: 73700 - RNA, 21 nt, synthetic construct
  source 1..21: mol_type = other RNA
cgccgtgcaaccgtcccggca

SEQ ID NO: 73701 - RNA, 21 nt, synthetic construct
  source 1..21: mol_type = other RNA
gccgtgcaaccgtcccggcta

SEQ ID NO: 73702 - RNA, 21 nt, synthetic construct
  source 1..21: mol_type = other RNA
cactcacgagcgagctgtcca

SEQ ID NO: 73703 - RNA, 21 nt, synthetic construct
  source 1..21: mol_type = other RNA
tacgaccgcaaccactggata

SEQ ID NO: 73704 - RNA, 21 nt, synthetic construct
  source 1..21: mol_type = other RNA
gccgactaccacaaccacgga

SEQ ID NO: 73705 - RNA, 21 nt, synthetic construct
  source 1..21: mol_type = other RNA
gccgactaccacaaccacgga

SEQ ID NO: 73706 - RNA, 21 nt, synthetic construct
  source 1..21: mol_type = other RNA
acaaccacgggcttcacagta

SEQ ID NO: 73707 - RNA, 21 nt, synthetic construct
  source 1..21: mol_type = other RNA
gccgactaccacaaccacgga

SEQ ID NO: 73708 - RNA, 21 nt, synthetic construct
  source 1..21: mol_type = other RNA
tttaaggcggtggcgagagga

SEQ ID NO: 73709 - RNA, 21 nt, synthetic construct
  source 1..21: mol_type = other RNA
ggacaacacctatccccccaa

SEQ ID NO: 73710 - RNA, 21 nt, synthetic construct
  source 1..21: mol_type = other RNA
ggacaacacctatccccccaa

SEQ ID NO: 73711 - RNA, 21 nt, synthetic construct
  source 1..21: mol_type = other RNA
tcccggccttcaacgagttca

SEQ ID NO: 73712 - RNA, 21 nt, synthetic construct
  source 1..21: mol_type = other RNA
ccaagcggacggcggcgtgta

SEQ ID NO: 73713 - RNA, 21 nt, synthetic construct
  source 1..21: mol_type = other RNA
gcggaagcaacggcaccatca

SEQ ID NO: 73714 - RNA, 21 nt, synthetic construct
  source 1..21: mol_type = other RNA
tgtgacgtccacttcggccta

SEQ ID NO: 73715 - RNA, 21 nt, synthetic construct
  source 1..21: mol_type = other RNA
gcaagacccgcacctcgacca

SEQ ID NO: 73716 - RNA, 21 nt, synthetic construct
  source 1..21: mol_type = other RNA
gcaagacccgcacctcgacca

SEQ ID NO: 73717 - RNA, 21 nt, synthetic construct
  source 1..21: mol_type = other RNA
gcaagacccgcacctcgacca

SEQ ID NO: 73718 - RNA, 21 nt, synthetic construct
  source 1..21: mol_type = other RNA
gcaagacccgcacctcgacca

SEQ ID NO: 73719 - RNA, 21 nt, synthetic construct
  source 1..21: mol_type = other RNA
agctgtgttcgtacaatggca

SEQ ID NO: 73720 - RNA, 21 nt, synthetic construct
  source 1..21: mol_type = other RNA
ctgctccggggggctatggca

SEQ ID NO: 73721 - RNA, 21 nt, synthetic construct
  source 1..21: mol_type = other RNA
cttcgacgacaatgccatcaa

SEQ ID NO: 73722 - RNA, 21 nt, synthetic construct
  source 1..21: mol_type = other RNA
acaaggacggaaactactata

SEQ ID NO: 73723 - RNA, 21 nt, synthetic construct
  source 1..21: mol_type = other RNA
gctaccagcgttacacccata

SEQ ID NO: 73724 - RNA, 21 nt, synthetic construct
  source 1..21: mol_type = other RNA
gcaacaccctcctctagcaca

SEQ ID NO: 73725 - RNA, 21 nt, synthetic construct
  source 1..21: mol_type = other RNA
ccacatcggcccccataacca

SEQ ID NO: 73726 - RNA, 21 nt, synthetic construct
  source 1..21: mol_type = other RNA
ggactacagctaccccatgca

SEQ ID NO: 73727 - RNA, 21 nt, synthetic construct
  source 1..21: mol_type = other RNA
ctggcggggactttgacacca

SEQ ID NO: 73728 - RNA, 21 nt, synthetic construct
  source 1..21: mol_type = other RNA
gcaacaccctcctctagcaca

SEQ ID NO: 73729 - RNA, 21 nt, synthetic construct
  source 1..21: mol_type = other RNA
ggactacagctaccccatgca

SEQ ID NO: 73730 - RNA, 21 nt, synthetic construct
  source 1..21: mol_type = other RNA
ctggcggggactttgacacca

SEQ ID NO: 73731 - RNA, 21 nt, synthetic construct
  source 1..21: mol_type = other RNA
gaccgcaaccactggatccaa

SEQ ID NO: 73732 - RNA, 21 nt, synthetic construct
  source 1..21: mol_type = other RNA
cagctaccagcgttacagcca

SEQ ID NO: 73733 - RNA, 21 nt, synthetic construct
  source 1..21: mol_type = other RNA
gcaacaccctcctctagcaca

SEQ ID NO: 73734 - RNA, 21 nt, synthetic construct
  source 1..21: mol_type = other RNA
acacacgggcggtccctgcca

SEQ ID NO: 73735 - RNA, 21 nt, synthetic construct
  source 1..21: mol_type = other RNA
ccacatcggcccccataacca

SEQ ID NO: 73736 - RNA, 21 nt, synthetic construct
  source 1..21: mol_type = other RNA
ggactacagctaccccatgca

SEQ ID NO: 73737 - RNA, 21 nt, synthetic construct
  source 1..21: mol_type = other RNA
ctggcggggactttgacacca

SEQ ID NO: 73738 - RNA, 21 nt, synthetic construct
  source 1..21: mol_type = other RNA
gcaacaccctcctctagcaca

SEQ ID NO: 73739 - RNA, 21 nt, synthetic construct
  source 1..21: mol_type = other RNA
ccacatcggcccccataacca

SEQ ID NO: 73740 - RNA, 21 nt, synthetic construct
  source 1..21: mol_type = other RNA
ggactacagctaccccatgca

SEQ ID NO: 73741 - RNA, 21 nt, synthetic construct
  source 1..21: mol_type = other RNA
ctggcggggactttgacacca

SEQ ID NO: 73742 - RNA, 21 nt, synthetic construct
  source 1..21: mol_type = other RNA
gctaccagcgttacacccata

SEQ ID NO: 73743 - RNA, 21 nt, synthetic construct
  source 1..21: mol_type = other RNA
gcaacaccctcctctagcaca

SEQ ID NO: 73744 - RNA, 21 nt, synthetic construct
  source 1..21: mol_type = other RNA
cactatagccaccgtgatgga

SEQ ID NO: 73745 - RNA, 21 nt, synthetic construct
  source 1..21: mol_type = other RNA
acaaccttgtgcccccgggca

SEQ ID NO: 73746 - RNA, 21 nt, synthetic construct
  source 1..21: mol_type = other RNA
gggcccattcttcaacgccta

SEQ ID NO: 73747 - RNA, 21 nt, synthetic construct
  source 1..21: mol_type = other RNA
gtcctgcgtgtgtgacgagga

SEQ ID NO: 73748 - RNA, 21 nt, synthetic construct
  source 1..21: mol_type = other RNA
acaatggcaccttctacggga

SEQ ID NO: 73749 - RNA, 21 nt, synthetic construct
  source 1..21: mol_type = other RNA
gacaaccgtgtcgtcctgcta

SEQ ID NO: 73750 - RNA, 21 nt, synthetic construct
  source 1..21: mol_type = other RNA
agggttcagtgtcggtgcaga

SEQ ID NO: 73751 - RNA, 21 nt, synthetic construct
  source 1..21: mol_type = other RNA
cacacgggcgatccctgccca

SEQ ID NO: 73752 - RNA, 21 nt, synthetic construct
  source 1..21: mol_type = other RNA
cagtttttctcgcccggggaa

SEQ ID NO: 73753 - RNA, 21 nt, synthetic construct
  source 1..21: mol_type = other RNA
tgcgtgtgtgacgagggttca

SEQ ID NO: 73754 - RNA, 21 nt, synthetic construct
  source 1..21: mol_type = other RNA
ggtaccacccagcactcgaca

SEQ ID NO: 73755 - RNA, 21 nt, synthetic construct
  source 1..21: mol_type = other RNA
ggtaccacccagcactcgaca

SEQ ID NO: 73756 - RNA, 21 nt, synthetic construct
  source 1..21: mol_type = other RNA
agtaccacccagcactcgaca

SEQ ID NO: 73757 - RNA, 21 nt, synthetic construct
  source 1..21: mol_type = other RNA
ggtaccacccagcactcgaca

SEQ ID NO: 73758 - RNA, 21 nt, synthetic construct
  source 1..21: mol_type = other RNA
caacactcacgagcgagctga

SEQ ID NO: 73759 - RNA, 21 nt, synthetic construct
  source 1..21: mol_type = other RNA
gaccagcgtgttcatccgaca

SEQ ID NO: 73760 - RNA, 21 nt, synthetic construct
  source 1..21: mol_type = other RNA
agggacggcacgcacgcttca

SEQ ID NO: 73761 - RNA, 21 nt, synthetic construct
  source 1..21: mol_type = other RNA
tccgggtccaagcggacggca

SEQ ID NO: 73762 - RNA, 21 nt, synthetic construct
  source 1..21: mol_type = other RNA
gccccaataaccacggtggta

SEQ ID NO: 73763 - RNA, 21 nt, synthetic construct
  source 1..21: mol_type = other RNA
cctgaacccggcgcacaatga

SEQ ID NO: 73764 - RNA, 21 nt, synthetic construct
  source 1..21: mol_type = other RNA
ctgcagcgtttccttcgtgca

SEQ ID NO: 73765 - RNA, 21 nt, synthetic construct
  source 1..21: mol_type = other RNA
ttcaacggcctcccggcctta

SEQ ID NO: 73766 - RNA, 21 nt, synthetic construct
  source 1..21: mol_type = other RNA
tgcaaccggtggcctgtgcga

SEQ ID NO: 73767 - RNA, 21 nt, synthetic construct
  source 1..21: mol_type = other RNA
ctaaatttcccggggagcgga

SEQ ID NO: 73768 - RNA, 21 nt, synthetic construct
  source 1..21: mol_type = other RNA
aagaccaccctatgggtgaca

SEQ ID NO: 73769 - RNA, 21 nt, synthetic construct
  source 1..21: mol_type = other RNA
aactccagggacaacacctaa

SEQ ID NO: 73770 - RNA, 21 nt, synthetic construct
  source 1..21: mol_type = other RNA
ccaccacacacgggcggtcca

SEQ ID NO: 73771 - RNA, 21 nt, synthetic construct
  source 1..21: mol_type = other RNA
aactccagggacaacacctaa

SEQ ID NO: 73772 - RNA, 21 nt, synthetic construct
  source 1..21: mol_type = other RNA
aggtgcgtgggtgacaaccga

SEQ ID NO: 73773 - RNA, 21 nt, synthetic construct
  source 1..21: mol_type = other RNA
tgctgccccgagacggtgtga

SEQ ID NO: 73774 - RNA, 21 nt, synthetic construct
  source 1..21: mol_type = other RNA
actgctgtctgagaacgttca

SEQ ID NO: 73775 - RNA, 21 nt, synthetic construct
  source 1..21: mol_type = other RNA
ccatttctacgcagtgtgcaa

SEQ ID NO: 73776 - RNA, 21 nt, synthetic construct
  source 1..21: mol_type = other RNA
gcgtgggtgacaaccgtgtca

SEQ ID NO: 73777 - RNA, 21 nt, synthetic construct
  source 1..21: mol_type = other RNA
ggcgccgtgtgttcatgtaca

SEQ ID NO: 73778 - RNA, 21 nt, synthetic construct
  source 1..21: mol_type = other RNA
tggactgtgaccgcatgcgga

SEQ ID NO: 73779 - RNA, 21 nt, synthetic construct
  source 1..21: mol_type = other RNA
ctaagcatgtgcgggcctata

SEQ ID NO: 73780 - RNA, 21 nt, synthetic construct
  source 1..21: mol_type = other RNA
caccacacacgggcggtccca

SEQ ID NO: 73781 - RNA, 21 nt, synthetic construct
  source 1..21: mol_type = other RNA
tgacggtgcccaccggatcca

SEQ ID NO: 73782 - RNA, 21 nt, synthetic construct
  source 1..21: mol_type = other RNA
tgacggtgcccaccggatcca

SEQ ID NO: 73783 - RNA, 21 nt, synthetic construct
  source 1..21: mol_type = other RNA
tgacggtgcccaccggatcca

SEQ ID NO: 73784 - RNA, 21 nt, synthetic construct
  source 1..21: mol_type = other RNA
tgacggtgcccaccggatcca

SEQ ID NO: 73785 - RNA, 21 nt, synthetic construct
  source 1..21: mol_type = other RNA
gctctgtcacgactacgagca

SEQ ID NO: 73786 - RNA, 21 nt, synthetic construct
  source 1..21: mol_type = other RNA
cacccccagtgccgaacacca

SEQ ID NO: 73787 - RNA, 21 nt, synthetic construct
  source 1..21: mol_type = other RNA
cacccccagtgccgaacacca

SEQ ID NO: 73788 - RNA, 21 nt, synthetic construct
  source 1..21: mol_type = other RNA
gagacgtttgaaaacctgaga

SEQ ID NO: 73789 - RNA, 21 nt, synthetic construct
  source 1..21: mol_type = other RNA
ggacccgatgggtttcctaaa

SEQ ID NO: 73790 - RNA, 21 nt, synthetic construct
  source 1..21: mol_type = other RNA
ctgccacgacgcgggcctgta

SEQ ID NO: 73791 - RNA, 21 nt, synthetic construct
  source 1..21: mol_type = other RNA
gcaacggcaccatcatcagga

SEQ ID NO: 73792 - RNA, 21 nt, synthetic construct
  source 1..21: mol_type = other RNA
acgtgccacaaccccgccaca

SEQ ID NO: 73793 - RNA, 21 nt, synthetic construct
  source 1..21: mol_type = other RNA
cacaaccccgccaccgaccaa

SEQ ID NO: 73794 - RNA, 21 nt, synthetic construct
  source 1..21: mol_type = other RNA
gccccggagcgtccaagtaca

SEQ ID NO: 73795 - RNA, 21 nt, synthetic construct
  source 1..21: mol_type = other RNA
ctggaggcgtccaacggctca

SEQ ID NO: 73796 - RNA, 21 nt, synthetic construct
  source 1..21: mol_type = other RNA
gacgtttgaaaacctgaggca

SEQ ID NO: 73797 - RNA, 21 nt, synthetic construct
  source 1..21: mol_type = other RNA
acgtttgaaaacctgaggcaa

SEQ ID NO: 73798 - RNA, 21 nt, synthetic construct
  source 1..21: mol_type = other RNA
ccacgctggccccaacaacaa

SEQ ID NO: 73799 - RNA, 21 nt, synthetic construct
  source 1..21: mol_type = other RNA
accttctacggggttggtgca

SEQ ID NO: 73800 - RNA, 21 nt, synthetic construct
  source 1..21: mol_type = other RNA
ccttgcactgtcctaacggca

SEQ ID NO: 73801 - RNA, 21 nt, synthetic construct
  source 1..21: mol_type = other RNA
gcgacaggcaaggcggccgca

SEQ ID NO: 73802 - RNA, 21 nt, synthetic construct
  source 1..21: mol_type = other RNA
acgacaaggacggaaactaca

SEQ ID NO: 73803 - RNA, 21 nt, synthetic construct
  source 1..21: mol_type = other RNA
atacgctacatggggatctta

SEQ ID NO: 73804 - RNA, 21 nt, synthetic construct
  source 1..21: mol_type = other RNA
ggatcccaaatacgccaacca

SEQ ID NO: 73805 - RNA, 21 nt, synthetic construct
  source 1..21: mol_type = other RNA
acacggccatccgggtccaaa

SEQ ID NO: 73806 - RNA, 21 nt, synthetic construct
  source 1..21: mol_type = other RNA
cacccccagtgccgaacacca

SEQ ID NO: 73807 - RNA, 21 nt, synthetic construct
  source 1..21: mol_type = other RNA
cacccccagtgccgaacacca

SEQ ID NO: 73808 - RNA, 21 nt, synthetic construct
  source 1..21: mol_type = other RNA
caagtcccagcgctacgccta

SEQ ID NO: 73809 - RNA, 21 nt, synthetic construct
  source 1..21: mol_type = other RNA
caggagtgcccctgctacgca

SEQ ID NO: 73810 - RNA, 21 nt, synthetic construct
  source 1..21: mol_type = other RNA
accccgtgggtgaaaccggca

SEQ ID NO: 73811 - RNA, 21 nt, synthetic construct
  source 1..21: mol_type = other RNA
agctcaggccccgtgacggta

SEQ ID NO: 73812 - RNA, 21 nt, synthetic construct
  source 1..21: mol_type = other RNA
acaatgagccccttgactaaa

SEQ ID NO: 73813 - RNA, 21 nt, synthetic construct
  source 1..21: mol_type = other RNA
cagggacggcacgcacgctta

SEQ ID NO: 73814 - RNA, 21 nt, synthetic construct
  source 1..21: mol_type = other RNA
gacggtgcccaccggatccaa

SEQ ID NO: 73815 - RNA, 21 nt, synthetic construct
  source 1..21: mol_type = other RNA
gacggtgcccaccggatccaa

SEQ ID NO: 73816 - RNA, 21 nt, synthetic construct
  source 1..21: mol_type = other RNA
gacggtgcccaccggatccaa

SEQ ID NO: 73817 - RNA, 21 nt, synthetic construct
  source 1..21: mol_type = other RNA
gacggtgcccaccggatccaa

SEQ ID NO: 73818 - RNA, 21 nt, synthetic construct
  source 1..21: mol_type = other RNA
ggttctctgctgcgaatacga

SEQ ID NO: 73819 - RNA, 21 nt, synthetic construct
  source 1..21: mol_type = other RNA
gtaccacccagcactcgacta

SEQ ID NO: 73820 - RNA, 21 nt, synthetic construct
  source 1..21: mol_type = other RNA
gtaccacccagcactcgacta

SEQ ID NO: 73821 - RNA, 21 nt, synthetic construct
  source 1..21: mol_type = other RNA
gtaccacccagcactcgacta

SEQ ID NO: 73822 - RNA, 21 nt, synthetic construct
  source 1..21: mol_type = other RNA
gtaccacccagcactcgacta

SEQ ID NO: 73823 - RNA, 21 nt, synthetic construct
  source 1..21: mol_type = other RNA
gcgcccgcgcagcacggatta

SEQ ID NO: 73824 - RNA, 21 nt, synthetic construct
  source 1..21: mol_type = other RNA
acaagccatgcggccccataa

SEQ ID NO: 73825 - RNA, 21 nt, synthetic construct
  source 1..21: mol_type = other RNA
tgggacgccctggaacaaaca

SEQ ID NO: 73826 - RNA, 21 nt, synthetic construct
  source 1..21: mol_type = other RNA
ttctctgctgcgaatacgtga

SEQ ID NO: 73827 - RNA, 21 nt, synthetic construct
  source 1..21: mol_type = other RNA
agagggtaccaggtatgccca

SEQ ID NO: 73828 - RNA, 21 nt, synthetic construct
  source 1..21: mol_type = other RNA
gcaccttctacggggttggta

SEQ ID NO: 73829 - RNA, 21 nt, synthetic construct
  source 1..21: mol_type = other RNA
cccaacagtgccttctcgcga

SEQ ID NO: 73830 - RNA, 21 nt, synthetic construct
  source 1..21: mol_type = other RNA
cgtgacggtcaccccctcgga

SEQ ID NO: 73831 - RNA, 21 nt, synthetic construct
  source 1..21: mol_type = other RNA
cccagggacggcactcacgca

SEQ ID NO: 73832 - RNA, 21 nt, synthetic construct
  source 1..21: mol_type = other RNA
ctccactccagggacgaccta

SEQ ID NO: 73833 - RNA, 21 nt, synthetic construct
  source 1..21: mol_type = other RNA
cccagggacggcactcacgca

SEQ ID NO: 73834 - RNA, 21 nt, synthetic construct
  source 1..21: mol_type = other RNA
cccagggacggcactcacgca

SEQ ID NO: 73835 - RNA, 21 nt, synthetic construct
  source 1..21: mol_type = other RNA
catgcacgctttgggaatcta

SEQ ID NO: 73836 - RNA, 21 nt, synthetic construct
  source 1..21: mol_type = other RNA
gtgacaaccgtgtcgtcctga

SEQ ID NO: 73837 - RNA, 21 nt, synthetic construct
  source 1..21: mol_type = other RNA
caccacacacgggcgatccca

SEQ ID NO: 73838 - RNA, 21 nt, synthetic construct
  source 1..21: mol_type = other RNA
caccacacacgggcgatccca

SEQ ID NO: 73839 - RNA, 21 nt, synthetic construct
  source 1..21: mol_type = other RNA
caccacacacgggcgatccca

SEQ ID NO: 73840 - RNA, 21 nt, synthetic construct
  source 1..21: mol_type = other RNA
cgaccgagccggctgccatta

SEQ ID NO: 73841 - RNA, 21 nt, synthetic construct
  source 1..21: mol_type = other RNA
atgatgagaaactctacgaca

SEQ ID NO: 73842 - RNA, 21 nt, synthetic construct
  source 1..21: mol_type = other RNA
tacagctaccaggacgtcata

SEQ ID NO: 73843 - RNA, 21 nt, synthetic construct
  source 1..21: mol_type = other RNA
tccaccgtgtgtgtccgcgaa

SEQ ID NO: 73844 - RNA, 21 nt, synthetic construct
  source 1..21: mol_type = other RNA
cgcagcttcccgacatgccga

SEQ ID NO: 73845 - RNA, 21 nt, synthetic construct
  source 1..21: mol_type = other RNA
ctctgctgcgaatacgtgcca

SEQ ID NO: 73846 - RNA, 21 nt, synthetic construct
  source 1..21: mol_type = other RNA
acagtttttctcgcccgggga

SEQ ID NO: 73847 - RNA, 21 nt, synthetic construct
  source 1..21: mol_type = other RNA
tacaataagaccgaccgagca

SEQ ID NO: 73848 - RNA, 21 nt, synthetic construct
  source 1..21: mol_type = other RNA
accggtggcctgtgcgaccta

SEQ ID NO: 73849 - RNA, 21 nt, synthetic construct
  source 1..21: mol_type = other RNA
ggtgtgcgtgtgcaacacaaa

SEQ ID NO: 73850 - RNA, 21 nt, synthetic construct
  source 1..21: mol_type = other RNA
aacacgaccatcctgtggcaa

SEQ ID NO: 73851 - RNA, 21 nt, synthetic construct
  source 1..21: mol_type = other RNA
taccacccagcactcgactca

SEQ ID NO: 73852 - RNA, 21 nt, synthetic construct
  source 1..21: mol_type = other RNA
taccacccagcactcgactca

SEQ ID NO: 73853 - RNA, 21 nt, synthetic construct
  source 1..21: mol_type = other RNA
taccacccagcactcgactca

SEQ ID NO: 73854 - RNA, 21 nt, synthetic construct
  source 1..21: mol_type = other RNA
taccacccagcactcgactca

SEQ ID NO: 73855 - RNA, 21 nt, synthetic construct
  source 1..21: mol_type = other RNA
ccctttcgggagggcgccaca

SEQ ID NO: 73856 - RNA, 21 nt, synthetic construct
  source 1..21: mol_type = other RNA
aggactcctgtcaagtccgca

SEQ ID NO: 73857 - RNA, 21 nt, synthetic construct
  source 1..21: mol_type = other RNA
cccgagcatccggtcgacgga

SEQ ID NO: 73858 - RNA, 21 nt, synthetic construct
  source 1..21: mol_type = other RNA
ctgaaagcggtgacgctcaga

SEQ ID NO: 73859 - RNA, 21 nt, synthetic construct
  source 1..21: mol_type = other RNA
cctgcgactcgggtggcgaca

SEQ ID NO: 73860 - RNA, 21 nt, synthetic construct
  source 1..21: mol_type = other RNA
ccgcctggacccgcctatcaa

SEQ ID NO: 73861 - RNA, 21 nt, synthetic construct
  source 1..21: mol_type = other RNA
gtcatcgagacccacgggata

SEQ ID NO: 73862 - RNA, 21 nt, synthetic construct
  source 1..21: mol_type = other RNA
gcccttgccggccggcaacta

SEQ ID NO: 73863 - RNA, 21 nt, synthetic construct
  source 1..21: mol_type = other RNA
tttgatggcgatcgctacaga

SEQ ID NO: 73864 - RNA, 21 nt, synthetic construct
  source 1..21: mol_type = other RNA
tcccagcgctacgcctacgta

SEQ ID NO: 73865 - RNA, 21 nt, synthetic construct
  source 1..21: mol_type = other RNA
tcacctttgatggcgatcgca

SEQ ID NO: 73866 - RNA, 21 nt, synthetic construct
  source 1..21: mol_type = other RNA
ccaccctacaagatacgctaa

SEQ ID NO: 73867 - RNA, 21 nt, synthetic construct
  source 1..21: mol_type = other RNA
ggatgacatcacgcactctga

SEQ ID NO: 73868 - RNA, 21 nt, synthetic construct
  source 1..21: mol_type = other RNA
agaccagcgtgttcatccgaa

SEQ ID NO: 73869 - RNA, 21 nt, synthetic construct
  source 1..21: mol_type = other RNA
ctggctgacatcgagtgccga

SEQ ID NO: 73870 - RNA, 21 nt, synthetic construct
  source 1..21: mol_type = other RNA
tcaggccccgtgacggtcaca

SEQ ID NO: 73871 - RNA, 21 nt, synthetic construct
  source 1..21: mol_type = other RNA
aacgccgcagcctacgagtaa

SEQ ID NO: 73872 - RNA, 21 nt, synthetic construct
  source 1..21: mol_type = other RNA
ccacctggacccgcctatcaa

SEQ ID NO: 73873 - RNA, 21 nt, synthetic construct
  source 1..21: mol_type = other RNA
cacagtgcttaccgccacgga

SEQ ID NO: 73874 - RNA, 21 nt, synthetic construct
  source 1..21: mol_type = other RNA
ccacctggacccgcctatcaa

SEQ ID NO: 73875 - RNA, 21 nt, synthetic construct
  source 1..21: mol_type = other RNA
ccacctggacccgcctatcaa

SEQ ID NO: 73876 - RNA, 21 nt, synthetic construct
  source 1..21: mol_type = other RNA
ccacctggacccgcctatcaa

SEQ ID NO: 73877 - RNA, 21 nt, synthetic construct
  source 1..21: mol_type = other RNA
cacagtgcttaccgccacgga

SEQ ID NO: 73878 - RNA, 21 nt, synthetic construct
  source 1..21: mol_type = other RNA
tcttacaccttccggggcaaa

SEQ ID NO: 73879 - RNA, 21 nt, synthetic construct
  source 1..21: mol_type = other RNA
agcccccgccgtgcaaccgta

SEQ ID NO: 73880 - RNA, 21 nt, synthetic construct
  source 1..21: mol_type = other RNA
accgtcccggcttcgtaacca

SEQ ID NO: 73881 - RNA, 21 nt, synthetic construct
  source 1..21: mol_type = other RNA
gtccgcatcaacacgaccata

SEQ ID NO: 73882 - RNA, 21 nt, synthetic construct
  source 1..21: mol_type = other RNA
tgctgtctgagaacgttctga

SEQ ID NO: 73883 - RNA, 21 nt, synthetic construct
  source 1..21: mol_type = other RNA
agcaggacccctttcgggaga

SEQ ID NO: 73884 - RNA, 21 nt, synthetic construct
  source 1..21: mol_type = other RNA
atccgggtccaagcggacgga

SEQ ID NO: 73885 - RNA, 21 nt, synthetic construct
  source 1..21: mol_type = other RNA
cacctggacccgcctatcaca

SEQ ID NO: 73886 - RNA, 21 nt, synthetic construct
  source 1..21: mol_type = other RNA
gacacctactccaacatccga

SEQ ID NO: 73887 - RNA, 21 nt, synthetic construct
  source 1..21: mol_type = other RNA
cacctggacccgcctatcaca

SEQ ID NO: 73888 - RNA, 21 nt, synthetic construct
  source 1..21: mol_type = other RNA
gacacctactccaacatccga

SEQ ID NO: 73889 - RNA, 21 nt, synthetic construct
  source 1..21: mol_type = other RNA
cgcctggacccgcctatcaca

SEQ ID NO: 73890 - RNA, 21 nt, synthetic construct
  source 1..21: mol_type = other RNA
cagtaccacccagcactcgaa

SEQ ID NO: 73891 - RNA, 21 nt, synthetic construct
  source 1..21: mol_type = other RNA
gacacctactccaacatccga

SEQ ID NO: 73892 - RNA, 21 nt, synthetic construct
  source 1..21: mol_type = other RNA
cacctggacccgcctatcaca

SEQ ID NO: 73893 - RNA, 21 nt, synthetic construct
  source 1..21: mol_type = other RNA
gacacctactccaacatccga

SEQ ID NO: 73894 - RNA, 21 nt, synthetic construct
  source 1..21: mol_type = other RNA
cacctggacccgcctatcaca

SEQ ID NO: 73895 - RNA, 21 nt, synthetic construct
  source 1..21: mol_type = other RNA
tgcactgtcctaacggctcaa

SEQ ID NO: 73896 - RNA, 21 nt, synthetic construct
  source 1..21: mol_type = other RNA
cagggctgaggtcgcaacgga

SEQ ID NO: 73897 - RNA, 21 nt, synthetic construct
  source 1..21: mol_type = other RNA
tgtcaagtccgcatcaacaca

SEQ ID NO: 73898 - RNA, 21 nt, synthetic construct
  source 1..21: mol_type = other RNA
tggatggcggtgccccgacga

SEQ ID NO: 73899 - RNA, 21 nt, synthetic construct
  source 1..21: mol_type = other RNA
tgatgagaaactctacgacca

SEQ ID NO: 73900 - RNA, 21 nt, synthetic construct
  source 1..21: mol_type = other RNA
tctgctgcgaatacgtgccca

SEQ ID NO: 73901 - RNA, 21 nt, synthetic construct
  source 1..21: mol_type = other RNA
tgatcaccacggccactacga

SEQ ID NO: 73902 - RNA, 21 nt, synthetic construct
  source 1..21: mol_type = other RNA
cgagcactatagccaccgtga

SEQ ID NO: 73903 - RNA, 21 nt, synthetic construct
  source 1..21: mol_type = other RNA
tttctacgcagtgtgcaatca

SEQ ID NO: 73904 - RNA, 21 nt, synthetic construct
  source 1..21: mol_type = other RNA
ccctgcgtgggacccgatgga

SEQ ID NO: 73905 - RNA, 21 nt, synthetic construct
  source 1..21: mol_type = other RNA
tgcctgaaagcggtgacgcta

SEQ ID NO: 73906 - RNA, 21 nt, synthetic construct
  source 1..21: mol_type = other RNA
cctacgataagatcagggcca

SEQ ID NO: 73907 - RNA, 21 nt, synthetic construct
  source 1..21: mol_type = other RNA
acgataagatcagggccgcta

SEQ ID NO: 73908 - RNA, 21 nt, synthetic construct
  source 1..21: mol_type = other RNA
ccccgccgtgcaaccgtccca

SEQ ID NO: 73909 - RNA, 21 nt, synthetic construct
  source 1..21: mol_type = other RNA
tcgcccacccggcgcgtgaga

SEQ ID NO: 73910 - RNA, 21 nt, synthetic construct
  source 1..21: mol_type = other RNA
cccacccggcgcgtgagctta

SEQ ID NO: 73911 - RNA, 21 nt, synthetic construct
  source 1..21: mol_type = other RNA
acccggcgcgtgagctttgta

SEQ ID NO: 73912 - RNA, 21 nt, synthetic construct
  source 1..21: mol_type = other RNA
tggatgacatcacgcactcta

SEQ ID NO: 73913 - RNA, 21 nt, synthetic construct
  source 1..21: mol_type = other RNA
cgggtccaagcggacggcgga

SEQ ID NO: 73914 - RNA, 21 nt, synthetic construct
  source 1..21: mol_type = other RNA
tgtgttcatgtacgggtggga

SEQ ID NO: 73915 - RNA, 21 nt, synthetic construct
  source 1..21: mol_type = other RNA
acgggtgggaagctaagctga

SEQ ID NO: 73916 - RNA, 21 nt, synthetic construct
  source 1..21: mol_type = other RNA
accctacaagatacgctacaa

SEQ ID NO: 73917 - RNA, 21 nt, synthetic construct
  source 1..21: mol_type = other RNA
acgccgcagcctacgagtaga

SEQ ID NO: 73918 - RNA, 21 nt, synthetic construct
  source 1..21: mol_type = other RNA
catcggcccccataaccacga

SEQ ID NO: 73919 - RNA, 21 nt, synthetic construct
  source 1..21: mol_type = other RNA
gggacaacacctatcccccca

SEQ ID NO: 73920 - RNA, 21 nt, synthetic construct
  source 1..21: mol_type = other RNA
acagctaccagcgttacagca

SEQ ID NO: 73921 - RNA, 21 nt, synthetic construct
  source 1..21: mol_type = other RNA
ccacggccactacgatcacaa

SEQ ID NO: 73922 - RNA, 21 nt, synthetic construct
  source 1..21: mol_type = other RNA
catcggcccccataaccacga

SEQ ID NO: 73923 - RNA, 21 nt, synthetic construct
  source 1..21: mol_type = other RNA
gggacaacacctatcccccca

SEQ ID NO: 73924 - RNA, 21 nt, synthetic construct
  source 1..21: mol_type = other RNA
catcggcccccataaccacga

SEQ ID NO: 73925 - RNA, 21 nt, synthetic construct
  source 1..21: mol_type = other RNA
gctgccatttctacgcagtga

SEQ ID NO: 73926 - RNA, 21 nt, synthetic construct
  source 1..21: mol_type = other RNA
cctcttacaccttccggggca

SEQ ID NO: 73927 - RNA, 21 nt, synthetic construct
  source 1..21: mol_type = other RNA
gagagagatccatgcacgcta

SEQ ID NO: 73928 - RNA, 21 nt, synthetic construct
  source 1..21: mol_type = other RNA
agagatccatgcacgctttga

SEQ ID NO: 73929 - RNA, 21 nt, synthetic construct
  source 1..21: mol_type = other RNA
tggacaaccactactgcacga

SEQ ID NO: 73930 - RNA, 21 nt, synthetic construct
  source 1..21: mol_type = other RNA
cactgcaggggccgccttgaa

SEQ ID NO: 73931 - RNA, 21 nt, synthetic construct
  source 1..21: mol_type = other RNA
gagggttcagtgtcggtgcaa

SEQ ID NO: 73932 - RNA, 21 nt, synthetic construct
  source 1..21: mol_type = other RNA
gctgtctgagaacgttctgca

SEQ ID NO: 73933 - RNA, 21 nt, synthetic construct
  source 1..21: mol_type = other RNA
actaagcatgtgcgggcctaa

SEQ ID NO: 73934 - RNA, 21 nt, synthetic construct
  source 1..21: mol_type = other RNA
tcagggctgaggtcgcaacga

SEQ ID NO: 73935 - RNA, 21 nt, synthetic construct
  source 1..21: mol_type = other RNA
ccgctctgtcacgactacgaa

SEQ ID NO: 73936 - RNA, 21 nt, synthetic construct
  source 1..21: mol_type = other RNA
cgtgggacccgatgggtttca

SEQ ID NO: 73937 - RNA, 21 nt, synthetic construct
  source 1..21: mol_type = other RNA
cacacacgggcgatccctgca

SEQ ID NO: 73938 - RNA, 21 nt, synthetic construct
  source 1..21: mol_type = other RNA
ctggtgctcgcgcctgaccga

SEQ ID NO: 73939 - RNA, 21 nt, synthetic construct
  source 1..21: mol_type = other RNA
gtcccagcgctacgcctacga

SEQ ID NO: 73940 - RNA, 21 nt, synthetic construct
  source 1..21: mol_type = other RNA
ctgctacgctcacggcaccga

SEQ ID NO: 73941 - RNA, 21 nt, synthetic construct
  source 1..21: mol_type = other RNA
cgacgacaatgccatcaatga

SEQ ID NO: 73942 - RNA, 21 nt, synthetic construct
  source 1..21: mol_type = other RNA
ggtgaccccgagcatccggta

SEQ ID NO: 73943 - RNA, 21 nt, synthetic construct
  source 1..21: mol_type = other RNA
gtgaccccgagcatccggtca

SEQ ID NO: 73944 - RNA, 21 nt, synthetic construct
  source 1..21: mol_type = other RNA
tttttctcgcccggggaagta

SEQ ID NO: 73945 - RNA, 21 nt, synthetic construct
  source 1..21: mol_type = other RNA
gtgggtgacaaccgtgtcgta

SEQ ID NO: 73946 - RNA, 21 nt, synthetic construct
  source 1..21: mol_type = other RNA
gcgtgggacccgatgggttta

SEQ ID NO: 73947 - RNA, 21 nt, synthetic construct
  source 1..21: mol_type = other RNA
gctgaccccgctccagtttga

SEQ ID NO: 73948 - RNA, 21 nt, synthetic construct
  source 1..21: mol_type = other RNA
cggcctttgcggagtgccaca

SEQ ID NO: 73949 - RNA, 21 nt, synthetic construct
  source 1..21: mol_type = other RNA
ggtgctcgcgcctgaccgata

SEQ ID NO: 73950 - RNA, 21 nt, synthetic construct
  source 1..21: mol_type = other RNA
gggacctttaaggcggtggca

SEQ ID NO: 73951 - RNA, 21 nt, synthetic construct
  source 1..21: mol_type = other RNA
tgtgacttctacaacccacaa

SEQ ID NO: 73952 - RNA, 21 nt, synthetic construct
  source 1..21: mol_type = other RNA
ggcgcctgcttgatcgccata

SEQ ID NO: 73953 - RNA, 21 nt, synthetic construct
  source 1..21: mol_type = other RNA
cgccatctgcggaagcaacga

SEQ ID NO: 73954 - RNA, 21 nt, synthetic construct
  source 1..21: mol_type = other RNA
ccaacagagtcccccgctcta

SEQ ID NO: 73955 - RNA, 21 nt, synthetic construct
  source 1..21: mol_type = other RNA
ccgcagcctacgagtagccca

SEQ ID NO: 73956 - RNA, 21 nt, synthetic construct
  source 1..21: mol_type = other RNA
gaccagtggtactcccccata

SEQ ID NO: 73957 - RNA, 21 nt, synthetic construct
  source 1..21: mol_type = other RNA
ccaccacacacgggcgatcca

SEQ ID NO: 73958 - RNA, 21 nt, synthetic construct
  source 1..21: mol_type = other RNA
ggggactttgacacctactca

SEQ ID NO: 73959 - RNA, 21 nt, synthetic construct
  source 1..21: mol_type = other RNA
acggtgcccaccggatccaca

SEQ ID NO: 73960 - RNA, 21 nt, synthetic construct
  source 1..21: mol_type = other RNA
gaccagtggtactcccccata

SEQ ID NO: 73961 - RNA, 21 nt, synthetic construct
  source 1..21: mol_type = other RNA
ccaccacacacgggcgatcca

SEQ ID NO: 73962 - RNA, 21 nt, synthetic construct
  source 1..21: mol_type = other RNA
ggggactttgacacctactca

SEQ ID NO: 73963 - RNA, 21 nt, synthetic construct
  source 1..21: mol_type = other RNA
acggtgcccaccggatccaca

SEQ ID NO: 73964 - RNA, 21 nt, synthetic construct
  source 1..21: mol_type = other RNA
gaccagtggtactcccccata

SEQ ID NO: 73965 - RNA, 21 nt, synthetic construct
  source 1..21: mol_type = other RNA
ggggactttgacacctactca

SEQ ID NO: 73966 - RNA, 21 nt, synthetic construct
  source 1..21: mol_type = other RNA
acggtgcccaccggatccaca

SEQ ID NO: 73967 - RNA, 21 nt, synthetic construct
  source 1..21: mol_type = other RNA
gaccagtggtactcccccata

SEQ ID NO: 73968 - RNA, 21 nt, synthetic construct
  source 1..21: mol_type = other RNA
ccaccacacacgggcgatcca

SEQ ID NO: 73969 - RNA, 21 nt, synthetic construct
  source 1..21: mol_type = other RNA
ggggactttgacacctactca

SEQ ID NO: 73970 - RNA, 21 nt, synthetic construct
  source 1..21: mol_type = other RNA
acggtgcccaccggatccaca

SEQ ID NO: 73971 - RNA, 21 nt, synthetic construct
  source 1..21: mol_type = other RNA
gaccagtggtactcccccata

SEQ ID NO: 73972 - RNA, 21 nt, synthetic construct
  source 1..21: mol_type = other RNA
gccgagcactatagccaccga

SEQ ID NO: 73973 - RNA, 21 nt, synthetic construct
  source 1..21: mol_type = other RNA
ggacaaccactactgcacgga

SEQ ID NO: 73974 - RNA, 21 nt, synthetic construct
  source 1..21: mol_type = other RNA
gacaaccactactgcacggca

SEQ ID NO: 73975 - RNA, 21 nt, synthetic construct
  source 1..21: mol_type = other RNA
aaagtgtacaagccatgcgga

SEQ ID NO: 73976 - RNA, 21 nt, synthetic construct
  source 1..21: mol_type = other RNA
cccgccgtgcaaccgtcccga

SEQ ID NO: 73977 - RNA, 21 nt, synthetic construct
  source 1..21: mol_type = other RNA
cctgccacatgtgtacctgca

SEQ ID NO: 73978 - RNA, 21 nt, synthetic construct
  source 1..21: mol_type = other RNA
ggctgcgagaccgaggtcaaa

SEQ ID NO: 73979 - RNA, 21 nt, synthetic construct
  source 1..21: mol_type = other RNA
gtgtgtggcaccccgcgctca

SEQ ID NO: 73980 - RNA, 21 nt, synthetic construct
  source 1..21: mol_type = other RNA
cccgcgcagcacggattccaa

SEQ ID NO: 73981 - RNA, 21 nt, synthetic construct
  source 1..21: mol_type = other RNA
cggtgccccgacgtcctcgca

SEQ ID NO: 73982 - RNA, 21 nt, synthetic construct
  source 1..21: mol_type = other RNA
cgcccacccggcgcgtgagca

SEQ ID NO: 73983 - RNA, 21 nt, synthetic construct
  source 1..21: mol_type = other RNA
cgccgaggcctagtgggctca

SEQ ID NO: 73984 - RNA, 21 nt, synthetic construct
  source 1..21: mol_type = other RNA
ggtcagcatccggctggtgca

SEQ ID NO: 73985 - RNA, 21 nt, synthetic construct
  source 1..21: mol_type = other RNA
cggccttcaacgagttctata

SEQ ID NO: 73986 - RNA, 21 nt, synthetic construct
  source 1..21: mol_type = other RNA
gtggacagcactgcgtaccta

SEQ ID NO: 73987 - RNA, 21 nt, synthetic construct
  source 1..21: mol_type = other RNA
ggacagcactgcgtacctgga

SEQ ID NO: 73988 - RNA, 21 nt, synthetic construct
  source 1..21: mol_type = other RNA
gacagcactgcgtacctggca

SEQ ID NO: 73989 - RNA, 21 nt, synthetic construct
  source 1..21: mol_type = other RNA
tgtggctcaccctgcacggaa

SEQ ID NO: 73990 - RNA, 21 nt, synthetic construct
  source 1..21: mol_type = other RNA
gaactgcctgaaagcggtgaa

SEQ ID NO: 73991 - RNA, 21 nt, synthetic construct
  source 1..21: mol_type = other RNA
gccactcatgcaggtgtttga

SEQ ID NO: 73992 - RNA, 21 nt, synthetic construct
  source 1..21: mol_type = other RNA
acttcacggccctcagcggga

SEQ ID NO: 73993 - RNA, 21 nt, synthetic construct
  source 1..21: mol_type = other RNA
ccggcactggtgctcgcgcca

SEQ ID NO: 73994 - RNA, 21 nt, synthetic construct
  source 1..21: mol_type = other RNA
actggtgctcgcgcctgacca

SEQ ID NO: 73995 - RNA, 21 nt, synthetic construct
  source 1..21: mol_type = other RNA
ctgaccgatcccaacagtgca

SEQ ID NO: 73996 - RNA, 21 nt, synthetic construct
  source 1..21: mol_type = other RNA
ccaagtcccagcgctacgcca

SEQ ID NO: 73997 - RNA, 21 nt, synthetic construct
  source 1..21: mol_type = other RNA
gccagcccacttgccgcggca

SEQ ID NO: 73998 - RNA, 21 nt, synthetic construct
  source 1..21: mol_type = other RNA
cccacttgccgcggcctgaga

SEQ ID NO: 73999 - RNA, 21 nt, synthetic construct
  source 1..21: mol_type = other RNA
acgacgagggcgccgtgtgta

SEQ ID NO: 74000 - RNA, 21 nt, synthetic construct
  source 1..21: mol_type = other RNA
cgacgagggcgccgtgtgtta

SEQ ID NO: 74001 - RNA, 21 nt, synthetic construct
  source 1..21: mol_type = other RNA
ccggggctggtgtcggatgga

SEQ ID NO: 74002 - RNA, 21 nt, synthetic construct
  source 1..21: mol_type = other RNA
ggggacctttaaggcggtgga

SEQ ID NO: 74003 - RNA, 21 nt, synthetic construct
  source 1..21: mol_type = other RNA
ctacaagatacgctacatgga

SEQ ID NO: 74004 - RNA, 21 nt, synthetic construct
  source 1..21: mol_type = other RNA
ccagcgtgttcatccgactga

SEQ ID NO: 74005 - RNA, 21 nt, synthetic construct
  source 1..21: mol_type = other RNA
tacgacaaggacggaaactaa

SEQ ID NO: 74006 - RNA, 21 nt, synthetic construct
  source 1..21: mol_type = other RNA
gaactccagccacaacgccaa

SEQ ID NO: 74007 - RNA, 21 nt, synthetic construct
  source 1..21: mol_type = other RNA
ccagccacaacgccattcaca

SEQ ID NO: 74008 - RNA, 21 nt, synthetic construct
  source 1..21: mol_type = other RNA
ccgtgtgtgtccgcgaggtca

SEQ ID NO: 74009 - RNA, 21 nt, synthetic construct
  source 1..21: mol_type = other RNA
cgtgtgtgtccgcgaggtcta

SEQ ID NO: 74010 - RNA, 21 nt, synthetic construct
  source 1..21: mol_type = other RNA
tggctgacatcgagtgccgga

SEQ ID NO: 74011 - RNA, 21 nt, synthetic construct
  source 1..21: mol_type = other RNA
ggctgacatcgagtgccggga

SEQ ID NO: 74012 - RNA, 21 nt, synthetic construct
  source 1..21: mol_type = other RNA
ctgacatcgagtgccgggcga

SEQ ID NO: 74013 - RNA, 21 nt, synthetic construct
  source 1..21: mol_type = other RNA
ggactgtgaccgcatgcggga

SEQ ID NO: 74014 - RNA, 21 nt, synthetic construct
  source 1..21: mol_type = other RNA
gccaacagagtcccccgctca

SEQ ID NO: 74015 - RNA, 21 nt, synthetic construct
  source 1..21: mol_type = other RNA
tgaccccgagcatccggtcga

SEQ ID NO: 74016 - RNA, 21 nt, synthetic construct
  source 1..21: mol_type = other RNA
gctcaggccccgtgacggtca

SEQ ID NO: 74017 - RNA, 21 nt, synthetic construct
  source 1..21: mol_type = other RNA
gccctgttctcaacgccgcaa

SEQ ID NO: 74018 - RNA, 21 nt, synthetic construct
  source 1..21: mol_type = other RNA
ccctgttctcaacgccgcaga

SEQ ID NO: 74019 - RNA, 21 nt, synthetic construct
  source 1..21: mol_type = other RNA
cctgttctcaacgccgcagca

SEQ ID NO: 74020 - RNA, 21 nt, synthetic construct
  source 1..21: mol_type = other RNA
ctgttctcaacgccgcagcca

SEQ ID NO: 74021 - RNA, 21 nt, synthetic construct
  source 1..21: mol_type = other RNA
gccgcagcctacgagtagcca

SEQ ID NO: 74022 - RNA, 21 nt, synthetic construct
  source 1..21: mol_type = other RNA
ttggtacagccaccacgggaa

SEQ ID NO: 74023 - RNA, 21 nt, synthetic construct
  source 1..21: mol_type = other RNA
accacgagcctggcgccaaca

SEQ ID NO: 74024 - RNA, 21 nt, synthetic construct
  source 1..21: mol_type = other RNA
gacaatgagccccttgactaa

SEQ ID NO: 74025 - RNA, 21 nt, synthetic construct
  source 1..21: mol_type = other RNA
caatgagccccttgactaaca

SEQ ID NO: 74026 - RNA, 21 nt, synthetic construct
  source 1..21: mol_type = other RNA
gagccccttgactaacaccaa

SEQ ID NO: 74027 - RNA, 21 nt, synthetic construct
  source 1..21: mol_type = other RNA
agctaccagcgttacacccaa

SEQ ID NO: 74028 - RNA, 21 nt, synthetic construct
  source 1..21: mol_type = other RNA
ctccacagtgcttaccgccaa

SEQ ID NO: 74029 - RNA, 21 nt, synthetic construct
  source 1..21: mol_type = other RNA
accaaagtgccaactaccaca

SEQ ID NO: 74030 - RNA, 21 nt, synthetic construct
  source 1..21: mol_type = other RNA
ccaaagtgccaactaccacaa

SEQ ID NO: 74031 - RNA, 21 nt, synthetic construct
  source 1..21: mol_type = other RNA
gcccagggacggcactcacga

SEQ ID NO: 74032 - RNA, 21 nt, synthetic construct
  source 1..21: mol_type = other RNA
aacaccctcctctagcacaca

SEQ ID NO: 74033 - RNA, 21 nt, synthetic construct
  source 1..21: mol_type = other RNA
ccaccacggccactacgatca

SEQ ID NO: 74034 - RNA, 21 nt, synthetic construct
  source 1..21: mol_type = other RNA
ccccacacggtgcgcacagca

SEQ ID NO: 74035 - RNA, 21 nt, synthetic construct
  source 1..21: mol_type = other RNA
cccacacggtgcgcacagcca

SEQ ID NO: 74036 - RNA, 21 nt, synthetic construct
  source 1..21: mol_type = other RNA
cagcaaccaccggtaccacca

SEQ ID NO: 74037 - RNA, 21 nt, synthetic construct
  source 1..21: mol_type = other RNA
accacccagcactcgactcca

SEQ ID NO: 74038 - RNA, 21 nt, synthetic construct
  source 1..21: mol_type = other RNA
cccataaccacggtggtgaca

SEQ ID NO: 74039 - RNA, 21 nt, synthetic construct
  source 1..21: mol_type = other RNA
cagctaccccatgccggggca

SEQ ID NO: 74040 - RNA, 21 nt, synthetic construct
  source 1..21: mol_type = other RNA
gcctcgagtgccgtgcccaga

SEQ ID NO: 74041 - RNA, 21 nt, synthetic construct
  source 1..21: mol_type = other RNA
aacaccctcctctagcacaca

SEQ ID NO: 74042 - RNA, 21 nt, synthetic construct
  source 1..21: mol_type = other RNA
ccaccacggccactacgatca

SEQ ID NO: 74043 - RNA, 21 nt, synthetic construct
  source 1..21: mol_type = other RNA
ctccagggacaacacctatca

SEQ ID NO: 74044 - RNA, 21 nt, synthetic construct
  source 1..21: mol_type = other RNA
cccagtgccgaacaccacgga

SEQ ID NO: 74045 - RNA, 21 nt, synthetic construct
  source 1..21: mol_type = other RNA
ccccacacggtgcgcacagca

SEQ ID NO: 74046 - RNA, 21 nt, synthetic construct
  source 1..21: mol_type = other RNA
cccacacggtgcgcacagcca

SEQ ID NO: 74047 - RNA, 21 nt, synthetic construct
  source 1..21: mol_type = other RNA
cagcaaccaccggtaccacca

SEQ ID NO: 74048 - RNA, 21 nt, synthetic construct
  source 1..21: mol_type = other RNA
accacccagcactcgactcca

SEQ ID NO: 74049 - RNA, 21 nt, synthetic construct
  source 1..21: mol_type = other RNA
cagctaccccatgccggggca

SEQ ID NO: 74050 - RNA, 21 nt, synthetic construct
  source 1..21: mol_type = other RNA
gcctcgagtgccgtgcccaga

SEQ ID NO: 74051 - RNA, 21 nt, synthetic construct
  source 1..21: mol_type = other RNA
cactggatccacggccatcca

SEQ ID NO: 74052 - RNA, 21 nt, synthetic construct
  source 1..21: mol_type = other RNA
caccgcctggacccgcctata

SEQ ID NO: 74053 - RNA, 21 nt, synthetic construct
  source 1..21: mol_type = other RNA
accaaagtgccgactaccaca

SEQ ID NO: 74054 - RNA, 21 nt, synthetic construct
  source 1..21: mol_type = other RNA
gcccagggacggcactcacga

SEQ ID NO: 74055 - RNA, 21 nt, synthetic construct
  source 1..21: mol_type = other RNA
aacaccctcctctagcacaca

SEQ ID NO: 74056 - RNA, 21 nt, synthetic construct
  source 1..21: mol_type = other RNA
ccaccacggccactacgatca

SEQ ID NO: 74057 - RNA, 21 nt, synthetic construct
  source 1..21: mol_type = other RNA
cccagtgccgaacaccacgga

SEQ ID NO: 74058 - RNA, 21 nt, synthetic construct
  source 1..21: mol_type = other RNA
ccccacacggtgcgcacagca

SEQ ID NO: 74059 - RNA, 21 nt, synthetic construct
  source 1..21: mol_type = other RNA
cccacacggtgcgcacagcca

SEQ ID NO: 74060 - RNA, 21 nt, synthetic construct
  source 1..21: mol_type = other RNA
accacccagcactcgactcca

SEQ ID NO: 74061 - RNA, 21 nt, synthetic construct
  source 1..21: mol_type = other RNA
cccataaccacggtggtgaca

SEQ ID NO: 74062 - RNA, 21 nt, synthetic construct
  source 1..21: mol_type = other RNA
cagctaccccatgccggggca

SEQ ID NO: 74063 - RNA, 21 nt, synthetic construct
  source 1..21: mol_type = other RNA
gcctcgagtgccgtgcccaga

SEQ ID NO: 74064 - RNA, 21 nt, synthetic construct
  source 1..21: mol_type = other RNA
accaaagtgccgactaccaca

SEQ ID NO: 74065 - RNA, 21 nt, synthetic construct
  source 1..21: mol_type = other RNA
aacaccctcctctagcacaca

SEQ ID NO: 74066 - RNA, 21 nt, synthetic construct
  source 1..21: mol_type = other RNA
tcaccacggccactacgatca

SEQ ID NO: 74067 - RNA, 21 nt, synthetic construct
  source 1..21: mol_type = other RNA
ctccagggacaacacctatca

SEQ ID NO: 74068 - RNA, 21 nt, synthetic construct
  source 1..21: mol_type = other RNA
cccagtgccgaacaccacgga

SEQ ID NO: 74069 - RNA, 21 nt, synthetic construct
  source 1..21: mol_type = other RNA
ccccacacggtgcgcacagca

SEQ ID NO: 74070 - RNA, 21 nt, synthetic construct
  source 1..21: mol_type = other RNA
cccacacggtgcgcacagcca

SEQ ID NO: 74071 - RNA, 21 nt, synthetic construct
  source 1..21: mol_type = other RNA
cagcaaccaccggtaccacca

SEQ ID NO: 74072 - RNA, 21 nt, synthetic construct
  source 1..21: mol_type = other RNA
accacccagcactcgactcca

SEQ ID NO: 74073 - RNA, 21 nt, synthetic construct
  source 1..21: mol_type = other RNA
cccataaccacggtggtgaca

SEQ ID NO: 74074 - RNA, 21 nt, synthetic construct
  source 1..21: mol_type = other RNA
cagctaccccatgccggggca

SEQ ID NO: 74075 - RNA, 21 nt, synthetic construct
  source 1..21: mol_type = other RNA
gcctcgagtgccgtgcccaga

SEQ ID NO: 74076 - RNA, 21 nt, synthetic construct
  source 1..21: mol_type = other RNA
agctaccagcgttacacccaa

SEQ ID NO: 74077 - RNA, 21 nt, synthetic construct
  source 1..21: mol_type = other RNA
ctccacagtgcttaccgccaa

SEQ ID NO: 74078 - RNA, 21 nt, synthetic construct
  source 1..21: mol_type = other RNA
accaaagtgccgactaccaca

SEQ ID NO: 74079 - RNA, 21 nt, synthetic construct
  source 1..21: mol_type = other RNA
gcccagggacggcactcacga

SEQ ID NO: 74080 - RNA, 21 nt, synthetic construct
  source 1..21: mol_type = other RNA
aacaccctcctctagcacaca

SEQ ID NO: 74081 - RNA, 21 nt, synthetic construct
  source 1..21: mol_type = other RNA
ccaccacggccactacgatca

SEQ ID NO: 74082 - RNA, 21 nt, synthetic construct
  source 1..21: mol_type = other RNA
ggaccacgtggaccgtcccaa

SEQ ID NO: 74083 - RNA, 21 nt, synthetic construct
  source 1..21: mol_type = other RNA
gtgcccaccggttccacggca

SEQ ID NO: 74084 - RNA, 21 nt, synthetic construct
  source 1..21: mol_type = other RNA
gccaaccttcagcgtgtccaa

SEQ ID NO: 74085 - RNA, 21 nt, synthetic construct
  source 1..21: mol_type = other RNA
cgcttccagggcgcctgtcca

SEQ ID NO: 74086 - RNA, 21 nt, synthetic construct
  source 1..21: mol_type = other RNA
tccatggatatcgtcctcaca

SEQ ID NO: 74087 - RNA, 21 nt, synthetic construct
  source 1..21: mol_type = other RNA
caccaccatgcgtgtggacaa

SEQ ID NO: 74088 - RNA, 21 nt, synthetic construct
  source 1..21: mol_type = other RNA
atggccaagacgtggctggta

SEQ ID NO: 74089 - RNA, 21 nt, synthetic construct
  source 1..21: mol_type = other RNA
ctgggccccgactggcacaca

SEQ ID NO: 74090 - RNA, 21 nt, synthetic construct
  source 1..21: mol_type = other RNA
cctgcatcagcgaccactgca

SEQ ID NO: 74091 - RNA, 21 nt, synthetic construct
  source 1..21: mol_type = other RNA
gtgtacaagccatgcggccca

SEQ ID NO: 74092 - RNA, 21 nt, synthetic construct
  source 1..21: mol_type = other RNA
tcctcttcaacgcacacatga

SEQ ID NO: 74093 - RNA, 21 nt, synthetic construct
  source 1..21: mol_type = other RNA
gatgggtttcctaaatttcca

SEQ ID NO: 74094 - RNA, 21 nt, synthetic construct
  source 1..21: mol_type = other RNA
tcagctgtgttcgtacaatga

SEQ ID NO: 74095 - RNA, 21 nt, synthetic construct
  source 1..21: mol_type = other RNA
agtgcgtccagaccgcctgca

SEQ ID NO: 74096 - RNA, 21 nt, synthetic construct
  source 1..21: mol_type = other RNA
gtgcgtccagaccgcctgcca

SEQ ID NO: 74097 - RNA, 21 nt, synthetic construct
  source 1..21: mol_type = other RNA
cctgcctcacgcccgatggca

SEQ ID NO: 74098 - RNA, 21 nt, synthetic construct
  source 1..21: mol_type = other RNA
ctgccccggagcgtccaagta

SEQ ID NO: 74099 - RNA, 21 nt, synthetic construct
  source 1..21: mol_type = other RNA
ttgcactgtcctaacggctca

SEQ ID NO: 74100 - RNA, 21 nt, synthetic construct
  source 1..21: mol_type = other RNA
cactgtcctaacggctcagca

SEQ ID NO: 74101 - RNA, 21 nt, synthetic construct
  source 1..21: mol_type = other RNA
gacggtgtgcgtgtgcaacaa

SEQ ID NO: 74102 - RNA, 21 nt, synthetic construct
  source 1..21: mol_type = other RNA
gcggggactacatcaaggtca

SEQ ID NO: 74103 - RNA, 21 nt, synthetic construct
  source 1..21: mol_type = other RNA
ctttgcggagtgccacgcaca

SEQ ID NO: 74104 - RNA, 21 nt, synthetic construct
  source 1..21: mol_type = other RNA
gaaagcggtgacgctcagcca

SEQ ID NO: 74105 - RNA, 21 nt, synthetic construct
  source 1..21: mol_type = other RNA
cccagcgctacgcctacgtga

SEQ ID NO: 74106 - RNA, 21 nt, synthetic construct
  source 1..21: mol_type = other RNA
catgtacgggtgggaagctaa

SEQ ID NO: 74107 - RNA, 21 nt, synthetic construct
  source 1..21: mol_type = other RNA
gggacccaccctacaagataa

SEQ ID NO: 74108 - RNA, 21 nt, synthetic construct
  source 1..21: mol_type = other RNA
cagggacggcactcacgccta

SEQ ID NO: 74109 - RNA, 21 nt, synthetic construct
  source 1..21: mol_type = other RNA
gacggcacgcacgcttccaga

SEQ ID NO: 74110 - RNA, 21 nt, synthetic construct
  source 1..21: mol_type = other RNA
cagggacggcactcacgccta

SEQ ID NO: 74111 - RNA, 21 nt, synthetic construct
  source 1..21: mol_type = other RNA
cagggacggcactcacgccta

SEQ ID NO: 74112 - RNA, 21 nt, synthetic construct
  source 1..21: mol_type = other RNA
acgacccggatcctcactgaa

SEQ ID NO: 74113 - RNA, 21 nt, synthetic construct
  source 1..21: mol_type = other RNA
caacgcctgcatcagcgacca

SEQ ID NO: 74114 - RNA, 21 nt, synthetic construct
  source 1..21: mol_type = other RNA
ggacaactgcaccgtgtacca

SEQ ID NO: 74115 - RNA, 21 nt, synthetic construct
  source 1..21: mol_type = other RNA
ccccggagcgtccaagtacta

SEQ ID NO: 74116 - RNA, 21 nt, synthetic construct
  source 1..21: mol_type = other RNA
ccggcgcgtgagctttgttca

SEQ ID NO: 74117 - RNA, 21 nt, synthetic construct
  source 1..21: mol_type = other RNA
gagcactatagccaccgtgaa

SEQ ID NO: 74118 - RNA, 21 nt, synthetic construct
  source 1..21: mol_type = other RNA
gacatcgagtgccgggcggca

SEQ ID NO: 74119 - RNA, 21 nt, synthetic construct
  source 1..21: mol_type = other RNA
gacccgcctatcacagaccaa

SEQ ID NO: 74120 - RNA, 21 nt, synthetic construct
  source 1..21: mol_type = other RNA
agcaaccaccggtaccaccca

SEQ ID NO: 74121 - RNA, 21 nt, synthetic construct
  source 1..21: mol_type = other RNA
gacccgcctatcacagaccaa

SEQ ID NO: 74122 - RNA, 21 nt, synthetic construct
  source 1..21: mol_type = other RNA
cacgcacgcttccagtgtgga

SEQ ID NO: 74123 - RNA, 21 nt, synthetic construct
  source 1..21: mol_type = other RNA
agcaaccaccggtaccaccca

SEQ ID NO: 74124 - RNA, 21 nt, synthetic construct
  source 1..21: mol_type = other RNA
gacccgcctatcacagaccaa

SEQ ID NO: 74125 - RNA, 21 nt, synthetic construct
  source 1..21: mol_type = other RNA
gacccgcctatcacagaccaa

SEQ ID NO: 74126 - RNA, 21 nt, synthetic construct
  source 1..21: mol_type = other RNA
agcaaccaccggtaccaccca

SEQ ID NO: 74127 - RNA, 21 nt, synthetic construct
  source 1..21: mol_type = other RNA
gacccgcctatcacagaccaa

SEQ ID NO: 74128 - RNA, 21 nt, synthetic construct
  source 1..21: mol_type = other RNA
ctacacccacgtggatgagta

SEQ ID NO: 74129 - RNA, 21 nt, synthetic construct
  source 1..21: mol_type = other RNA
ctgccttacagccgcactgga

SEQ ID NO: 74130 - RNA, 21 nt, synthetic construct
  source 1..21: mol_type = other RNA
gcctttgcggagtgccacgca

SEQ ID NO: 74131 - RNA, 21 nt, synthetic construct
  source 1..21: mol_type = other RNA
gcgggcaccttcctcaatgaa

SEQ ID NO: 74132 - RNA, 21 nt, synthetic construct
  source 1..21: mol_type = other RNA
ccaccggtaccacccagcaca

SEQ ID NO: 74133 - RNA, 21 nt, synthetic construct
  source 1..21: mol_type = other RNA
ctccaacatccgtgcggccga

SEQ ID NO: 74134 - RNA, 21 nt, synthetic construct
  source 1..21: mol_type = other RNA
ccgagcactacagccaccgta

SEQ ID NO: 74135 - RNA, 21 nt, synthetic construct
  source 1..21: mol_type = other RNA
ccaccggtaccacccagcaca

SEQ ID NO: 74136 - RNA, 21 nt, synthetic construct
  source 1..21: mol_type = other RNA
ctccaacatccgtgcggccga

SEQ ID NO: 74137 - RNA, 21 nt, synthetic construct
  source 1..21: mol_type = other RNA
ctccaacatccgtgcggccga

SEQ ID NO: 74138 - RNA, 21 nt, synthetic construct
  source 1..21: mol_type = other RNA
ccgagcactacagccaccgta

SEQ ID NO: 74139 - RNA, 21 nt, synthetic construct
  source 1..21: mol_type = other RNA
ccaccggtaccacccagcaca

SEQ ID NO: 74140 - RNA, 21 nt, synthetic construct
  source 1..21: mol_type = other RNA
ctccaacatccgtgcggccga

SEQ ID NO: 74141 - RNA, 21 nt, synthetic construct
  source 1..21: mol_type = other RNA
ccgagcactacagccaccgta

SEQ ID NO: 74142 - RNA, 21 nt, synthetic construct
  source 1..21: mol_type = other RNA
cccacaccgccagagtgctga

SEQ ID NO: 74143 - RNA, 21 nt, synthetic construct
  source 1..21: mol_type = other RNA
cgtggaccgtcccagcacaga

SEQ ID NO: 74144 - RNA, 21 nt, synthetic construct
  source 1..21: mol_type = other RNA
gaccgaccgagccggctgcca

SEQ ID NO: 74145 - RNA, 21 nt, synthetic construct
  source 1..21: mol_type = other RNA
gtgtgacgagggttcagtgta

SEQ ID NO: 74146 - RNA, 21 nt, synthetic construct
  source 1..21: mol_type = other RNA
ctgcaccgtgtacctctgtga

SEQ ID NO: 74147 - RNA, 21 nt, synthetic construct
  source 1..21: mol_type = other RNA
taagcatgtgcgggcctatga

SEQ ID NO: 74148 - RNA, 21 nt, synthetic construct
  source 1..21: mol_type = other RNA
ggcgcgtgagctttgttccaa

SEQ ID NO: 74149 - RNA, 21 nt, synthetic construct
  source 1..21: mol_type = other RNA
gtgccacgcactggtggacaa

SEQ ID NO: 74150 - RNA, 21 nt, synthetic construct
  source 1..21: mol_type = other RNA
agcggtgacgctcagcctgga

SEQ ID NO: 74151 - RNA, 21 nt, synthetic construct
  source 1..21: mol_type = other RNA
ccacgggcgcagccttcgcca

SEQ ID NO: 74152 - RNA, 21 nt, synthetic construct
  source 1..21: mol_type = other RNA
gggcgccgtgtgttcatgtaa

SEQ ID NO: 74153 - RNA, 21 nt, synthetic construct
  source 1..21: mol_type = other RNA
tccatttgctgaccccacaga

SEQ ID NO: 74154 - RNA, 21 nt, synthetic construct
  source 1..21: mol_type = other RNA
gcggagactttgagacgttta

SEQ ID NO: 74155 - RNA, 21 nt, synthetic construct
  source 1..21: mol_type = other RNA
agctaccccatgccggggcca

SEQ ID NO: 74156 - RNA, 21 nt, synthetic construct
  source 1..21: mol_type = other RNA
agctaccccatgccggggcca

SEQ ID NO: 74157 - RNA, 21 nt, synthetic construct
  source 1..21: mol_type = other RNA
agctaccccatgccggggcca

SEQ ID NO: 74158 - RNA, 21 nt, synthetic construct
  source 1..21: mol_type = other RNA
agctaccccatgccggggcca

SEQ ID NO: 74159 - RNA, 21 nt, synthetic construct
  source 1..21: mol_type = other RNA
gggacccgatgggtttcctaa

SEQ ID NO: 74160 - RNA, 21 nt, synthetic construct
  source 1..21: mol_type = other RNA
ctgtcctaacggctcagccaa

SEQ ID NO: 74161 - RNA, 21 nt, synthetic construct
  source 1..21: mol_type = other RNA
cgagcgcgtgccggacgctga

SEQ ID NO: 74162 - RNA, 21 nt, synthetic construct
  source 1..21: mol_type = other RNA
agtgccacgcactggtggaca

SEQ ID NO: 74163 - RNA, 21 nt, synthetic construct
  source 1..21: mol_type = other RNA
cactgcgtacctggccgccta

SEQ ID NO: 74164 - RNA, 21 nt, synthetic construct
  source 1..21: mol_type = other RNA
cggcggcgtgttcctcaacta

SEQ ID NO: 74165 - RNA, 21 nt, synthetic construct
  source 1..21: mol_type = other RNA
tggtgctcgcgcctgaccgaa

SEQ ID NO: 74166 - RNA, 21 nt, synthetic construct
  source 1..21: mol_type = other RNA
ccaacagtgccttctcgcgca

SEQ ID NO: 74167 - RNA, 21 nt, synthetic construct
  source 1..21: mol_type = other RNA
gtgcacgacgagggcgccgta

SEQ ID NO: 74168 - RNA, 21 nt, synthetic construct
  source 1..21: mol_type = other RNA
ttgatggcgatcgctacagca

SEQ ID NO: 74169 - RNA, 21 nt, synthetic construct
  source 1..21: mol_type = other RNA
tgatgtgcgccaacagccaaa

SEQ ID NO: 74170 - RNA, 21 nt, synthetic construct
  source 1..21: mol_type = other RNA
gagtcccccgctctgtcacga

SEQ ID NO: 74171 - RNA, 21 nt, synthetic construct
  source 1..21: mol_type = other RNA
gctgcgggttctctgctgcga

SEQ ID NO: 74172 - RNA, 21 nt, synthetic construct
  source 1..21: mol_type = other RNA
agaccaccctatgggtgacca

SEQ ID NO: 74173 - RNA, 21 nt, synthetic construct
  source 1..21: mol_type = other RNA
gcatccggtcgacggcggcca

SEQ ID NO: 74174 - RNA, 21 nt, synthetic construct
  source 1..21: mol_type = other RNA
gcgttacacccatcccctcta

SEQ ID NO: 74175 - RNA, 21 nt, synthetic construct
  source 1..21: mol_type = other RNA
cagtgcttaccgccacggcca

SEQ ID NO: 74176 - RNA, 21 nt, synthetic construct
  source 1..21: mol_type = other RNA
ccacaaccggggccaccggca

SEQ ID NO: 74177 - RNA, 21 nt, synthetic construct
  source 1..21: mol_type = other RNA
ccgactaccacaaccacggga

SEQ ID NO: 74178 - RNA, 21 nt, synthetic construct
  source 1..21: mol_type = other RNA
ccgactaccacaaccacggga

SEQ ID NO: 74179 - RNA, 21 nt, synthetic construct
  source 1..21: mol_type = other RNA
cagtgcttaccgccacggcca

SEQ ID NO: 74180 - RNA, 21 nt, synthetic construct
  source 1..21: mol_type = other RNA
ccacaaccggggccaccggca

SEQ ID NO: 74181 - RNA, 21 nt, synthetic construct
  source 1..21: mol_type = other RNA
ccgactaccacaaccacggga

SEQ ID NO: 74182 - RNA, 21 nt, synthetic construct
  source 1..21: mol_type = other RNA
ccaccggttccacggccacca

SEQ ID NO: 74183 - RNA, 21 nt, synthetic construct
  source 1..21: mol_type = other RNA
catttctacgcagtgtgcaaa

SEQ ID NO: 74184 - RNA, 21 nt, synthetic construct
  source 1..21: mol_type = other RNA
cagcctctacctggacaacca

SEQ ID NO: 74185 - RNA, 21 nt, synthetic construct
  source 1..21: mol_type = other RNA
aggcttacgcagagctctgca

SEQ ID NO: 74186 - RNA, 21 nt, synthetic construct
  source 1..21: mol_type = other RNA
ggcttacgcagagctctgcca

SEQ ID NO: 74187 - RNA, 21 nt, synthetic construct
  source 1..21: mol_type = other RNA
gtgggacccgatgggtttcca

SEQ ID NO: 74188 - RNA, 21 nt, synthetic construct
  source 1..21: mol_type = other RNA
ggcttcgtaaccgtgaccaga

SEQ ID NO: 74189 - RNA, 21 nt, synthetic construct
  source 1..21: mol_type = other RNA
tcaagtccgcatcaacacgaa

SEQ ID NO: 74190 - RNA, 21 nt, synthetic construct
  source 1..21: mol_type = other RNA
tcaacacgaccatcctgtgga

SEQ ID NO: 74191 - RNA, 21 nt, synthetic construct
  source 1..21: mol_type = other RNA
gcactgtcctaacggctcaga

SEQ ID NO: 74192 - RNA, 21 nt, synthetic construct
  source 1..21: mol_type = other RNA
gggtgccccgagcgcgtgcca

SEQ ID NO: 74193 - RNA, 21 nt, synthetic construct
  source 1..21: mol_type = other RNA
gccgaggcctagtgggctcca

SEQ ID NO: 74194 - RNA, 21 nt, synthetic construct
  source 1..21: mol_type = other RNA
gaggcgtccaacggctccgta

SEQ ID NO: 74195 - RNA, 21 nt, synthetic construct
  source 1..21: mol_type = other RNA
gcgtccaacggctccgtccta

SEQ ID NO: 74196 - RNA, 21 nt, synthetic construct
  source 1..21: mol_type = other RNA
ccttacagccgcactggccta

SEQ ID NO: 74197 - RNA, 21 nt, synthetic construct
  source 1..21: mol_type = other RNA
gtggggacttcaacggcctca

SEQ ID NO: 74198 - RNA, 21 nt, synthetic construct
  source 1..21: mol_type = other RNA
gcaactgcacggacgaggaga

SEQ ID NO: 74199 - RNA, 21 nt, synthetic construct
  source 1..21: mol_type = other RNA
aactgcacggacgaggaggga

SEQ ID NO: 74200 - RNA, 21 nt, synthetic construct
  source 1..21: mol_type = other RNA
cgtgtgccacctttgtggaaa

SEQ ID NO: 74201 - RNA, 21 nt, synthetic construct
  source 1..21: mol_type = other RNA
tgacatcacgcactctggcta

SEQ ID NO: 74202 - RNA, 21 nt, synthetic construct
  source 1..21: mol_type = other RNA
acctacagcccgggcacctca

SEQ ID NO: 74203 - RNA, 21 nt, synthetic construct
  source 1..21: mol_type = other RNA
ctccacctatgatgagaaaca

SEQ ID NO: 74204 - RNA, 21 nt, synthetic construct
  source 1..21: mol_type = other RNA
agcttcaccgtgctggctgaa

SEQ ID NO: 74205 - RNA, 21 nt, synthetic construct
  source 1..21: mol_type = other RNA
acggccatccgggtccaagca

SEQ ID NO: 74206 - RNA, 21 nt, synthetic construct
  source 1..21: mol_type = other RNA
gggtccaagcggacggcggca

SEQ ID NO: 74207 - RNA, 21 nt, synthetic construct
  source 1..21: mol_type = other RNA
ggtgccactcatgcaggtgta

SEQ ID NO: 74208 - RNA, 21 nt, synthetic construct
  source 1..21: mol_type = other RNA
gttcatgtacgggtgggaaga

SEQ ID NO: 74209 - RNA, 21 nt, synthetic construct
  source 1..21: mol_type = other RNA
tgatggcgatcgctacagcta

SEQ ID NO: 74210 - RNA, 21 nt, synthetic construct
  source 1..21: mol_type = other RNA
cgagtacatcttggcccagga

SEQ ID NO: 74211 - RNA, 21 nt, synthetic construct
  source 1..21: mol_type = other RNA
ggaagaccagcgtgttcatca

SEQ ID NO: 74212 - RNA, 21 nt, synthetic construct
  source 1..21: mol_type = other RNA
caaggacggaaactactatga

SEQ ID NO: 74213 - RNA, 21 nt, synthetic construct
  source 1..21: mol_type = other RNA
ctatgacgtcggtgcaaggga

SEQ ID NO: 74214 - RNA, 21 nt, synthetic construct
  source 1..21: mol_type = other RNA
gcgcctgcttgatcgccatca

SEQ ID NO: 74215 - RNA, 21 nt, synthetic construct
  source 1..21: mol_type = other RNA
tgacatcgagtgccgggcgga

SEQ ID NO: 74216 - RNA, 21 nt, synthetic construct
  source 1..21: mol_type = other RNA
ctgatgtgcgccaacagccaa

SEQ ID NO: 74217 - RNA, 21 nt, synthetic construct
  source 1..21: mol_type = other RNA
catccggtcgacggcggccca

SEQ ID NO: 74218 - RNA, 21 nt, synthetic construct
  source 1..21: mol_type = other RNA
atccggtcgacggcggcccta

SEQ ID NO: 74219 - RNA, 21 nt, synthetic construct
  source 1..21: mol_type = other RNA
cgataagatcagggccgctga

SEQ ID NO: 74220 - RNA, 21 nt, synthetic construct
  source 1..21: mol_type = other RNA
tgttctcaacgccgcagccta

SEQ ID NO: 74221 - RNA, 21 nt, synthetic construct
  source 1..21: mol_type = other RNA
gcacatggcgcccctcacaga

SEQ ID NO: 74222 - RNA, 21 nt, synthetic construct
  source 1..21: mol_type = other RNA
agctcgcccgacaggcacaga

SEQ ID NO: 74223 - RNA, 21 nt, synthetic construct
  source 1..21: mol_type = other RNA
accgcttccaaagagccgcta

SEQ ID NO: 74224 - RNA, 21 nt, synthetic construct
  source 1..21: mol_type = other RNA
ggactgcaaccgcccttccaa

SEQ ID NO: 74225 - RNA, 21 nt, synthetic construct
  source 1..21: mol_type = other RNA
gcctatcacagaccaccacaa

SEQ ID NO: 74226 - RNA, 21 nt, synthetic construct
  source 1..21: mol_type = other RNA
ctaccaaagtgccaactacca

SEQ ID NO: 74227 - RNA, 21 nt, synthetic construct
  source 1..21: mol_type = other RNA
cctagcagcaaccaccggtaa

SEQ ID NO: 74228 - RNA, 21 nt, synthetic construct
  source 1..21: mol_type = other RNA
ctagcagcaaccaccggtaca

SEQ ID NO: 74229 - RNA, 21 nt, synthetic construct
  source 1..21: mol_type = other RNA
agcaagacccgcacctcgaca

SEQ ID NO: 74230 - RNA, 21 nt, synthetic construct
  source 1..21: mol_type = other RNA
ggcctcgagtgccgtgcccaa

SEQ ID NO: 74231 - RNA, 21 nt, synthetic construct
  source 1..21: mol_type = other RNA
ggactgcaaccgcccttccaa

SEQ ID NO: 74232 - RNA, 21 nt, synthetic construct
  source 1..21: mol_type = other RNA
gcctatcacagaccaccacaa

SEQ ID NO: 74233 - RNA, 21 nt, synthetic construct
  source 1..21: mol_type = other RNA
aggttccacggtgacccccta

SEQ ID NO: 74234 - RNA, 21 nt, synthetic construct
  source 1..21: mol_type = other RNA
agcaagacccgcacctcgaca

SEQ ID NO: 74235 - RNA, 21 nt, synthetic construct
  source 1..21: mol_type = other RNA
ggcctcgagtgccgtgcccaa

SEQ ID NO: 74236 - RNA, 21 nt, synthetic construct
  source 1..21: mol_type = other RNA
acagctaccagctttacacca

SEQ ID NO: 74237 - RNA, 21 nt, synthetic construct
  source 1..21: mol_type = other RNA
ggactgcaaccgcccttccaa

SEQ ID NO: 74238 - RNA, 21 nt, synthetic construct
  source 1..21: mol_type = other RNA
gcctatcacagaccaccacaa

SEQ ID NO: 74239 - RNA, 21 nt, synthetic construct
  source 1..21: mol_type = other RNA
acactaccaaagtgccgacta

SEQ ID NO: 74240 - RNA, 21 nt, synthetic construct
  source 1..21: mol_type = other RNA
agcaagacccgcacctcgaca

SEQ ID NO: 74241 - RNA, 21 nt, synthetic construct
  source 1..21: mol_type = other RNA
cacggtggtgaccacgggcta

SEQ ID NO: 74242 - RNA, 21 nt, synthetic construct
  source 1..21: mol_type = other RNA
ggcctcgagtgccgtgcccaa

SEQ ID NO: 74243 - RNA, 21 nt, synthetic construct
  source 1..21: mol_type = other RNA
ggactgcaaccgcccttccaa

SEQ ID NO: 74244 - RNA, 21 nt, synthetic construct
  source 1..21: mol_type = other RNA
gcctatcacagaccaccacaa

SEQ ID NO: 74245 - RNA, 21 nt, synthetic construct
  source 1..21: mol_type = other RNA
acactaccaaagtgccgacta

SEQ ID NO: 74246 - RNA, 21 nt, synthetic construct
  source 1..21: mol_type = other RNA
acggcacgcacgcctccagta

SEQ ID NO: 74247 - RNA, 21 nt, synthetic construct
  source 1..21: mol_type = other RNA
agcaagacccgcacctcgaca

SEQ ID NO: 74248 - RNA, 21 nt, synthetic construct
  source 1..21: mol_type = other RNA
cacggtggtgaccacgggcta

SEQ ID NO: 74249 - RNA, 21 nt, synthetic construct
  source 1..21: mol_type = other RNA
ggcctcgagtgccgtgcccaa

SEQ ID NO: 74250 - RNA, 21 nt, synthetic construct
  source 1..21: mol_type = other RNA
ccagttccacgtccaccccca

SEQ ID NO: 74251 - RNA, 21 nt, synthetic construct
  source 1..21: mol_type = other RNA
gcctatcacagaccaccacaa

SEQ ID NO: 74252 - RNA, 21 nt, synthetic construct
  source 1..21: mol_type = other RNA
acactaccaaagtgccgacta

SEQ ID NO: 74253 - RNA, 21 nt, synthetic construct
  source 1..21: mol_type = other RNA
acagctaccagctttacacca

SEQ ID NO: 74254 - RNA, 21 nt, synthetic construct
  source 1..21: mol_type = other RNA
agtttttctcgcccggggaaa

SEQ ID NO: 74255 - RNA, 21 nt, synthetic construct
  source 1..21: mol_type = other RNA
ttttctcgcccggggaagtca

SEQ ID NO: 74256 - RNA, 21 nt, synthetic construct
  source 1..21: mol_type = other RNA
gaccgagccggctgccattta

SEQ ID NO: 74257 - RNA, 21 nt, synthetic construct
  source 1..21: mol_type = other RNA
accgagccggctgccatttca

SEQ ID NO: 74258 - RNA, 21 nt, synthetic construct
  source 1..21: mol_type = other RNA
cactgtgacattgaccgctta

SEQ ID NO: 74259 - RNA, 21 nt, synthetic construct
  source 1..21: mol_type = other RNA
agtgtcctccgccccgctgta

SEQ ID NO: 74260 - RNA, 21 nt, synthetic construct
  source 1..21: mol_type = other RNA
tccatgcacgctttgggaata

SEQ ID NO: 74261 - RNA, 21 nt, synthetic construct
  source 1..21: mol_type = other RNA
atggatatcgtcctcactgta

SEQ ID NO: 74262 - RNA, 21 nt, synthetic construct
  source 1..21: mol_type = other RNA
gcgtgagcgtcaccttcaata

SEQ ID NO: 74263 - RNA, 21 nt, synthetic construct
  source 1..21: mol_type = other RNA
gtgagcgtcaccttcaatgga

SEQ ID NO: 74264 - RNA, 21 nt, synthetic construct
  source 1..21: mol_type = other RNA
ctgccgccagttgcaaggaca

SEQ ID NO: 74265 - RNA, 21 nt, synthetic construct
  source 1..21: mol_type = other RNA
tgccgccagttgcaaggacaa

SEQ ID NO: 74266 - RNA, 21 nt, synthetic construct
  source 1..21: mol_type = other RNA
ccggtgtctagcacacccaca

SEQ ID NO: 74267 - RNA, 21 nt, synthetic construct
  source 1..21: mol_type = other RNA
agtgccacaaccttgtgccca

SEQ ID NO: 74268 - RNA, 21 nt, synthetic construct
  source 1..21: mol_type = other RNA
ctgcatcagcgaccactgcaa

SEQ ID NO: 74269 - RNA, 21 nt, synthetic construct
  source 1..21: mol_type = other RNA
ggaggcttacgcagagctcta

SEQ ID NO: 74270 - RNA, 21 nt, synthetic construct
  source 1..21: mol_type = other RNA
ctgcccctgcgtgggacccga

SEQ ID NO: 74271 - RNA, 21 nt, synthetic construct
  source 1..21: mol_type = other RNA
gcgtgtgtgacgagggttcaa

SEQ ID NO: 74272 - RNA, 21 nt, synthetic construct
  source 1..21: mol_type = other RNA
cttcgtaaccgtgaccaggca

SEQ ID NO: 74273 - RNA, 21 nt, synthetic construct
  source 1..21: mol_type = other RNA
tcgtaaccgtgaccaggccca

SEQ ID NO: 74274 - RNA, 21 nt, synthetic construct
  source 1..21: mol_type = other RNA
catcaacacgaccatcctgta

SEQ ID NO: 74275 - RNA, 21 nt, synthetic construct
  source 1..21: mol_type = other RNA
actgtcctaacggctcagcca

SEQ ID NO: 74276 - RNA, 21 nt, synthetic construct
  source 1..21: mol_type = other RNA
aaccttgggcctcctctgcga

SEQ ID NO: 74277 - RNA, 21 nt, synthetic construct
  source 1..21: mol_type = other RNA
gacccctttcgggagggcgca

SEQ ID NO: 74278 - RNA, 21 nt, synthetic construct
  source 1..21: mol_type = other RNA
gtgcgggcctatgtgtcccta

SEQ ID NO: 74279 - RNA, 21 nt, synthetic construct
  source 1..21: mol_type = other RNA
ggatgggtgccccgagcgcga

SEQ ID NO: 74280 - RNA, 21 nt, synthetic construct
  source 1..21: mol_type = other RNA
gatgggtgccccgagcgcgta

SEQ ID NO: 74281 - RNA, 21 nt, synthetic construct
  source 1..21: mol_type = other RNA
gccccgagcgcgtgccggaca

SEQ ID NO: 74282 - RNA, 21 nt, synthetic construct
  source 1..21: mol_type = other RNA
tggtgttggctctggcggcca

SEQ ID NO: 74283 - RNA, 21 nt, synthetic construct
  source 1..21: mol_type = other RNA
ggtgttggctctggcggccaa

SEQ ID NO: 74284 - RNA, 21 nt, synthetic construct
  source 1..21: mol_type = other RNA
ctggcggccatgctcgtggta

SEQ ID NO: 74285 - RNA, 21 nt, synthetic construct
  source 1..21: mol_type = other RNA
tggcggccatgctcgtggtga

SEQ ID NO: 74286 - RNA, 21 nt, synthetic construct
  source 1..21: mol_type = other RNA
gctcgtggtgccgcaggcaga

SEQ ID NO: 74287 - RNA, 21 nt, synthetic construct
  source 1..21: mol_type = other RNA
ctcgtggtgccgcaggcagaa

SEQ ID NO: 74288 - RNA, 21 nt, synthetic construct
  source 1..21: mol_type = other RNA
gcacaccatggatggcggtga

SEQ ID NO: 74289 - RNA, 21 nt, synthetic construct
  source 1..21: mol_type = other RNA
ccatggatggcggtgccccga

SEQ ID NO: 74290 - RNA, 21 nt, synthetic construct
  source 1..21: mol_type = other RNA
ctcgcccacccggcgcgtgaa

SEQ ID NO: 74291 - RNA, 21 nt, synthetic construct
  source 1..21: mol_type = other RNA
tccctggcctttgcaactaca

SEQ ID NO: 74292 - RNA, 21 nt, synthetic construct
  source 1..21: mol_type = other RNA
ccctggcctttgcaactacga

SEQ ID NO: 74293 - RNA, 21 nt, synthetic construct
  source 1..21: mol_type = other RNA
acgccgaggcctagtgggcta

SEQ ID NO: 74294 - RNA, 21 nt, synthetic construct
  source 1..21: mol_type = other RNA
tggaggcgtccaacggctcca

SEQ ID NO: 74295 - RNA, 21 nt, synthetic construct
  source 1..21: mol_type = other RNA
ggaggcgtccaacggctccga

SEQ ID NO: 74296 - RNA, 21 nt, synthetic construct
  source 1..21: mol_type = other RNA
tccaacggctccgtcctcata

SEQ ID NO: 74297 - RNA, 21 nt, synthetic construct
  source 1..21: mol_type = other RNA
gccttacagccgcactggcca

SEQ ID NO: 74298 - RNA, 21 nt, synthetic construct
  source 1..21: mol_type = other RNA
atccggctggtgctgacatta

SEQ ID NO: 74299 - RNA, 21 nt, synthetic construct
  source 1..21: mol_type = other RNA
gctggatcccaaatacgccaa

SEQ ID NO: 74300 - RNA, 21 nt, synthetic construct
  source 1..21: mol_type = other RNA
tggatcccaaatacgccaaca

SEQ ID NO: 74301 - RNA, 21 nt, synthetic construct
  source 1..21: mol_type = other RNA
gcctcccggccttcaacgaga

SEQ ID NO: 74302 - RNA, 21 nt, synthetic construct
  source 1..21: mol_type = other RNA
cctcccggccttcaacgagta

SEQ ID NO: 74303 - RNA, 21 nt, synthetic construct
  source 1..21: mol_type = other RNA
ttctatgcccacaacgccaga

SEQ ID NO: 74304 - RNA, 21 nt, synthetic construct
  source 1..21: mol_type = other RNA
ggctgaccccgctccagttta

SEQ ID NO: 74305 - RNA, 21 nt, synthetic construct
  source 1..21: mol_type = other RNA
tgcccttgccggccggcaaca

SEQ ID NO: 74306 - RNA, 21 nt, synthetic construct
  source 1..21: mol_type = other RNA
ccttgccggccggcaactgca

SEQ ID NO: 74307 - RNA, 21 nt, synthetic construct
  source 1..21: mol_type = other RNA
ttgccggccggcaactgcaca

SEQ ID NO: 74308 - RNA, 21 nt, synthetic construct
  source 1..21: mol_type = other RNA
gagtgccacgcactggtggaa

SEQ ID NO: 74309 - RNA, 21 nt, synthetic construct
  source 1..21: mol_type = other RNA
tgccacgcactggtggacaga

SEQ ID NO: 74310 - RNA, 21 nt, synthetic construct
  source 1..21: mol_type = other RNA
tggacagcactgcgtacctga

SEQ ID NO: 74311 - RNA, 21 nt, synthetic construct
  source 1..21: mol_type = other RNA
acagcactgcgtacctggcca

SEQ ID NO: 74312 - RNA, 21 nt, synthetic construct
  source 1..21: mol_type = other RNA
agcactgcgtacctggccgca

SEQ ID NO: 74313 - RNA, 21 nt, synthetic construct
  source 1..21: mol_type = other RNA
cctgcccgtgtgccaccttta

SEQ ID NO: 74314 - RNA, 21 nt, synthetic construct
  source 1..21: mol_type = other RNA
gtgtgccacctttgtggaata

SEQ ID NO: 74315 - RNA, 21 nt, synthetic construct
  source 1..21: mol_type = other RNA
tgtgccacctttgtggaataa

SEQ ID NO: 74316 - RNA, 21 nt, synthetic construct
  source 1..21: mol_type = other RNA
ggggccagccgcggaactgga

SEQ ID NO: 74317 - RNA, 21 nt, synthetic construct
  source 1..21: mol_type = other RNA
ggccagccgcggaactggaga

SEQ ID NO: 74318 - RNA, 21 nt, synthetic construct
  source 1..21: mol_type = other RNA
cggacctgccccctcaacata

SEQ ID NO: 74319 - RNA, 21 nt, synthetic construct
  source 1..21: mol_type = other RNA
ggacctgccccctcaacatga

SEQ ID NO: 74320 - RNA, 21 nt, synthetic construct
  source 1..21: mol_type = other RNA
ctgccccctcaacatgcagca

SEQ ID NO: 74321 - RNA, 21 nt, synthetic construct
  source 1..21: mol_type = other RNA
ctcaccctgcacggacaccta

SEQ ID NO: 74322 - RNA, 21 nt, synthetic construct
  source 1..21: mol_type = other RNA
cctgctccggggggctatgga

SEQ ID NO: 74323 - RNA, 21 nt, synthetic construct
  source 1..21: mol_type = other RNA
ggggctatggcagtgccagga

SEQ ID NO: 74324 - RNA, 21 nt, synthetic construct
  source 1..21: mol_type = other RNA
ggcccacatctccacctatga

SEQ ID NO: 74325 - RNA, 21 nt, synthetic construct
  source 1..21: mol_type = other RNA
ccacatctccacctatgatga

SEQ ID NO: 74326 - RNA, 21 nt, synthetic construct
  source 1..21: mol_type = other RNA
acatctccacctatgatgaga

SEQ ID NO: 74327 - RNA, 21 nt, synthetic construct
  source 1..21: mol_type = other RNA
gatgagaaactctacgaccta

SEQ ID NO: 74328 - RNA, 21 nt, synthetic construct
  source 1..21: mol_type = other RNA
catggtgactgcagctacgta

SEQ ID NO: 74329 - RNA, 21 nt, synthetic construct
  source 1..21: mol_type = other RNA
ctgcggaagtgcggcctgaca

SEQ ID NO: 74330 - RNA, 21 nt, synthetic construct
  source 1..21: mol_type = other RNA
tgcggcctgacggacaacgaa

SEQ ID NO: 74331 - RNA, 21 nt, synthetic construct
  source 1..21: mol_type = other RNA
gcggcctgacggacaacgaga

SEQ ID NO: 74332 - RNA, 21 nt, synthetic construct
  source 1..21: mol_type = other RNA
gcctgacggacaacgagaaca

SEQ ID NO: 74333 - RNA, 21 nt, synthetic construct
  source 1..21: mol_type = other RNA
gagaactgcctgaaagcggta

SEQ ID NO: 74334 - RNA, 21 nt, synthetic construct
  source 1..21: mol_type = other RNA
aactgcctgaaagcggtgaca

SEQ ID NO: 74335 - RNA, 21 nt, synthetic construct
  source 1..21: mol_type = other RNA
tgaaagcggtgacgctcagca

SEQ ID NO: 74336 - RNA, 21 nt, synthetic construct
  source 1..21: mol_type = other RNA
ggccatccgggtccaagcgga

SEQ ID NO: 74337 - RNA, 21 nt, synthetic construct
  source 1..21: mol_type = other RNA
ccgggtccaagcggacggcga

SEQ ID NO: 74338 - RNA, 21 nt, synthetic construct
  source 1..21: mol_type = other RNA
agcttcttcatcgtggtgcaa

SEQ ID NO: 74339 - RNA, 21 nt, synthetic construct
  source 1..21: mol_type = other RNA
gtgccactcatgcaggtgtta

SEQ ID NO: 74340 - RNA, 21 nt, synthetic construct
  source 1..21: mol_type = other RNA
cgacttcacggccctcagcga

SEQ ID NO: 74341 - RNA, 21 nt, synthetic construct
  source 1..21: mol_type = other RNA
cttcacggccctcagcgggga

SEQ ID NO: 74342 - RNA, 21 nt, synthetic construct
  source 1..21: mol_type = other RNA
ggccacgggcgcagccttcga

SEQ ID NO: 74343 - RNA, 21 nt, synthetic construct
  source 1..21: mol_type = other RNA
tcccaacagtgccttctcgca

SEQ ID NO: 74344 - RNA, 21 nt, synthetic construct
  source 1..21: mol_type = other RNA
aacagtgccttctcgcgctga

SEQ ID NO: 74345 - RNA, 21 nt, synthetic construct
  source 1..21: mol_type = other RNA
acttgccgcggcctgagtgaa

SEQ ID NO: 74346 - RNA, 21 nt, synthetic construct
  source 1..21: mol_type = other RNA
gagtgcccctgctacgctcaa

SEQ ID NO: 74347 - RNA, 21 nt, synthetic construct
  source 1..21: mol_type = other RNA
tgcccctgctacgctcacgga

SEQ ID NO: 74348 - RNA, 21 nt, synthetic construct
  source 1..21: mol_type = other RNA
acgctcacggcaccgtgctga

SEQ ID NO: 74349 - RNA, 21 nt, synthetic construct
  source 1..21: mol_type = other RNA
ctcacggcaccgtgctggcta

SEQ ID NO: 74350 - RNA, 21 nt, synthetic construct
  source 1..21: mol_type = other RNA
ggagaggtggtgcacgacgaa

SEQ ID NO: 74351 - RNA, 21 nt, synthetic construct
  source 1..21: mol_type = other RNA
gagaggtggtgcacgacgaga

SEQ ID NO: 74352 - RNA, 21 nt, synthetic construct
  source 1..21: mol_type = other RNA
gacgagggcgccgtgtgttca

SEQ ID NO: 74353 - RNA, 21 nt, synthetic construct
  source 1..21: mol_type = other RNA
acgagggcgccgtgtgttcaa

SEQ ID NO: 74354 - RNA, 21 nt, synthetic construct
  source 1..21: mol_type = other RNA
cgagggcgccgtgtgttcata

SEQ ID NO: 74355 - RNA, 21 nt, synthetic construct
  source 1..21: mol_type = other RNA
ttcatgtacgggtgggaagca

SEQ ID NO: 74356 - RNA, 21 nt, synthetic construct
  source 1..21: mol_type = other RNA
gcagcccccatggtgtaccta

SEQ ID NO: 74357 - RNA, 21 nt, synthetic construct
  source 1..21: mol_type = other RNA
cagcccccatggtgtacctga

SEQ ID NO: 74358 - RNA, 21 nt, synthetic construct
  source 1..21: mol_type = other RNA
agcccccatggtgtacctgga

SEQ ID NO: 74359 - RNA, 21 nt, synthetic construct
  source 1..21: mol_type = other RNA
gctgcattgccgaggaggaca

SEQ ID NO: 74360 - RNA, 21 nt, synthetic construct
  source 1..21: mol_type = other RNA
ctttgatggcgatcgctacaa

SEQ ID NO: 74361 - RNA, 21 nt, synthetic construct
  source 1..21: mol_type = other RNA
gatggcgatcgctacagctta

SEQ ID NO: 74362 - RNA, 21 nt, synthetic construct
  source 1..21: mol_type = other RNA
atggcgatcgctacagcttta

SEQ ID NO: 74363 - RNA, 21 nt, synthetic construct
  source 1..21: mol_type = other RNA
gcagctgcgagtacatcttga

SEQ ID NO: 74364 - RNA, 21 nt, synthetic construct
  source 1..21: mol_type = other RNA
caagaggggacctttaaggca

SEQ ID NO: 74365 - RNA, 21 nt, synthetic construct
  source 1..21: mol_type = other RNA
ggacctttaaggcggtggcga

SEQ ID NO: 74366 - RNA, 21 nt, synthetic construct
  source 1..21: mol_type = other RNA
ccgggtggggacccaccctaa

SEQ ID NO: 74367 - RNA, 21 nt, synthetic construct
  source 1..21: mol_type = other RNA
ttcctggtcatcgagacccaa

SEQ ID NO: 74368 - RNA, 21 nt, synthetic construct
  source 1..21: mol_type = other RNA
cgagacccacgggatggccga

SEQ ID NO: 74369 - RNA, 21 nt, synthetic construct
  source 1..21: mol_type = other RNA
agcgtgttcatccgactgcaa

SEQ ID NO: 74370 - RNA, 21 nt, synthetic construct
  source 1..21: mol_type = other RNA
tgcccggacgccctggcacca

SEQ ID NO: 74371 - RNA, 21 nt, synthetic construct
  source 1..21: mol_type = other RNA
gtgcctgcgactcgggtggca

SEQ ID NO: 74372 - RNA, 21 nt, synthetic construct
  source 1..21: mol_type = other RNA
tgcgactcgggtggcgactga

SEQ ID NO: 74373 - RNA, 21 nt, synthetic construct
  source 1..21: mol_type = other RNA
ccggacacctgccccttgtta

SEQ ID NO: 74374 - RNA, 21 nt, synthetic construct
  source 1..21: mol_type = other RNA
tctacaacccacatgggggca

SEQ ID NO: 74375 - RNA, 21 nt, synthetic construct
  source 1..21: mol_type = other RNA
ctacaacccacatgggggcta

SEQ ID NO: 74376 - RNA, 21 nt, synthetic construct
  source 1..21: mol_type = other RNA
cgacaaggacggaaactacta

SEQ ID NO: 74377 - RNA, 21 nt, synthetic construct
  source 1..21: mol_type = other RNA
tcggtgcaagggtccccacaa

SEQ ID NO: 74378 - RNA, 21 nt, synthetic construct
  source 1..21: mol_type = other RNA
agagctgtaactgcacaccca

SEQ ID NO: 74379 - RNA, 21 nt, synthetic construct
  source 1..21: mol_type = other RNA
aggacaggacctacagctaca

SEQ ID NO: 74380 - RNA, 21 nt, synthetic construct
  source 1..21: mol_type = other RNA
ccgatgggcttggcgcctgca

SEQ ID NO: 74381 - RNA, 21 nt, synthetic construct
  source 1..21: mol_type = other RNA
tctgcggaagcaacggcacca

SEQ ID NO: 74382 - RNA, 21 nt, synthetic construct
  source 1..21: mol_type = other RNA
cggaagcaacggcaccatcaa

SEQ ID NO: 74383 - RNA, 21 nt, synthetic construct
  source 1..21: mol_type = other RNA
ggaagcaacggcaccatcata

SEQ ID NO: 74384 - RNA, 21 nt, synthetic construct
  source 1..21: mol_type = other RNA
agccacaacgccattcaccta

SEQ ID NO: 74385 - RNA, 21 nt, synthetic construct
  source 1..21: mol_type = other RNA
gggaggcggagactttgagaa

SEQ ID NO: 74386 - RNA, 21 nt, synthetic construct
  source 1..21: mol_type = other RNA
ggaggcggagactttgagaca

SEQ ID NO: 74387 - RNA, 21 nt, synthetic construct
  source 1..21: mol_type = other RNA
actgtgaccgcatgcggggga

SEQ ID NO: 74388 - RNA, 21 nt, synthetic construct
  source 1..21: mol_type = other RNA
gaccgcatgcgggggctgata

SEQ ID NO: 74389 - RNA, 21 nt, synthetic construct
  source 1..21: mol_type = other RNA
atgcgggggctgatgtgcgca

SEQ ID NO: 74390 - RNA, 21 nt, synthetic construct
  source 1..21: mol_type = other RNA
tgcgggggctgatgtgcgcca

SEQ ID NO: 74391 - RNA, 21 nt, synthetic construct
  source 1..21: mol_type = other RNA
cgggggctgatgtgcgccaaa

SEQ ID NO: 74392 - RNA, 21 nt, synthetic construct
  source 1..21: mol_type = other RNA
cagagtcccccgctctgtcaa

SEQ ID NO: 74393 - RNA, 21 nt, synthetic construct
  source 1..21: mol_type = other RNA
gtcccccgctctgtcacgaca

SEQ ID NO: 74394 - RNA, 21 nt, synthetic construct
  source 1..21: mol_type = other RNA
tctctgctgcgaatacgtgca

SEQ ID NO: 74395 - RNA, 21 nt, synthetic construct
  source 1..21: mol_type = other RNA
gagcctgctgtgcctacccca

SEQ ID NO: 74396 - RNA, 21 nt, synthetic construct
  source 1..21: mol_type = other RNA
cctcgcagactgggtccagca

SEQ ID NO: 74397 - RNA, 21 nt, synthetic construct
  source 1..21: mol_type = other RNA
cccctcggccccaggtaccaa

SEQ ID NO: 74398 - RNA, 21 nt, synthetic construct
  source 1..21: mol_type = other RNA
ctggagggcacttatgccaga

SEQ ID NO: 74399 - RNA, 21 nt, synthetic construct
  source 1..21: mol_type = other RNA
ggagggcacttatgccagcaa

SEQ ID NO: 74400 - RNA, 21 nt, synthetic construct
  source 1..21: mol_type = other RNA
tgcactgtgacgtccacttca

SEQ ID NO: 74401 - RNA, 21 nt, synthetic construct
  source 1..21: mol_type = other RNA
gcactgtgacgtccacttcga

SEQ ID NO: 74402 - RNA, 21 nt, synthetic construct
  source 1..21: mol_type = other RNA
ggccctgttctcaacgccgca

SEQ ID NO: 74403 - RNA, 21 nt, synthetic construct
  source 1..21: mol_type = other RNA
ccctctcagaaggactgacaa

SEQ ID NO: 74404 - RNA, 21 nt, synthetic construct
  source 1..21: mol_type = other RNA
ctgacatcccccagatacaca

SEQ ID NO: 74405 - RNA, 21 nt, synthetic construct
  source 1..21: mol_type = other RNA
gccaccacgggaggccccaca

SEQ ID NO: 74406 - RNA, 21 nt, synthetic construct
  source 1..21: mol_type = other RNA
acgggaggccccacgacgcca

SEQ ID NO: 74407 - RNA, 21 nt, synthetic construct
  source 1..21: mol_type = other RNA
cccttccagggacgacgggga

SEQ ID NO: 74408 - RNA, 21 nt, synthetic construct
  source 1..21: mol_type = other RNA
ggcacatggcgcccctcacaa

SEQ ID NO: 74409 - RNA, 21 nt, synthetic construct
  source 1..21: mol_type = other RNA
cacatggcgcccctcacagca

SEQ ID NO: 74410 - RNA, 21 nt, synthetic construct
  source 1..21: mol_type = other RNA
acccacgctggccccaacaaa

SEQ ID NO: 74411 - RNA, 21 nt, synthetic construct
  source 1..21: mol_type = other RNA
cgctggccccaacaacaatga

SEQ ID NO: 74412 - RNA, 21 nt, synthetic construct
  source 1..21: mol_type = other RNA
ggcaacctccagagctcgcca

SEQ ID NO: 74413 - RNA, 21 nt, synthetic construct
  source 1..21: mol_type = other RNA
aacctccagagctcgcccgaa

SEQ ID NO: 74414 - RNA, 21 nt, synthetic construct
  source 1..21: mol_type = other RNA
cttccaaagagccgctgacca

SEQ ID NO: 74415 - RNA, 21 nt, synthetic construct
  source 1..21: mol_type = other RNA
ttccaaagagccgctgaccaa

SEQ ID NO: 74416 - RNA, 21 nt, synthetic construct
  source 1..21: mol_type = other RNA
ccaaagagccgctgaccacga

SEQ ID NO: 74417 - RNA, 21 nt, synthetic construct
  source 1..21: mol_type = other RNA
ctgaccacgagcctggcgcca

SEQ ID NO: 74418 - RNA, 21 nt, synthetic construct
  source 1..21: mol_type = other RNA
gaccacgagcctggcgccaaa

SEQ ID NO: 74419 - RNA, 21 nt, synthetic construct
  source 1..21: mol_type = other RNA
acactcacgagcgagctgtca

SEQ ID NO: 74420 - RNA, 21 nt, synthetic construct
  source 1..21: mol_type = other RNA
ccacctctcaggccgagacca

SEQ ID NO: 74421 - RNA, 21 nt, synthetic construct
  source 1..21: mol_type = other RNA
tctcaggccgagaccagcaca

SEQ ID NO: 74422 - RNA, 21 nt, synthetic construct
  source 1..21: mol_type = other RNA
caggccgagaccagcacgcca

SEQ ID NO: 74423 - RNA, 21 nt, synthetic construct
  source 1..21: mol_type = other RNA
agagacgacaatgagccccta

SEQ ID NO: 74424 - RNA, 21 nt, synthetic construct
  source 1..21: mol_type = other RNA
cacccacagctaccagcgtta

SEQ ID NO: 74425 - RNA, 21 nt, synthetic construct
  source 1..21: mol_type = other RNA
tggacccgcctatcacagaca

SEQ ID NO: 74426 - RNA, 21 nt, synthetic construct
  source 1..21: mol_type = other RNA
gaccaccacacccacggccaa

SEQ ID NO: 74427 - RNA, 21 nt, synthetic construct
  source 1..21: mol_type = other RNA
ccacacctccacagtgcttaa

SEQ ID NO: 74428 - RNA, 21 nt, synthetic construct
  source 1..21: mol_type = other RNA
gccaactaccacaaccacgga

SEQ ID NO: 74429 - RNA, 21 nt, synthetic construct
  source 1..21: mol_type = other RNA
actaccacaaccacgggctta

SEQ ID NO: 74430 - RNA, 21 nt, synthetic construct
  source 1..21: mol_type = other RNA
ccacaaccacgggcttcacaa

SEQ ID NO: 74431 - RNA, 21 nt, synthetic construct
  source 1..21: mol_type = other RNA
ccagggacggcactcacgcca

SEQ ID NO: 74432 - RNA, 21 nt, synthetic construct
  source 1..21: mol_type = other RNA
tcacgcctccagtgtggatca

SEQ ID NO: 74433 - RNA, 21 nt, synthetic construct
  source 1..21: mol_type = other RNA
ccacaaccagaggctccacga

SEQ ID NO: 74434 - RNA, 21 nt, synthetic construct
  source 1..21: mol_type = other RNA
tccatcccggggaccacccaa

SEQ ID NO: 74435 - RNA, 21 nt, synthetic construct
  source 1..21: mol_type = other RNA
acaccgccacagtgctgacca

SEQ ID NO: 74436 - RNA, 21 nt, synthetic construct
  source 1..21: mol_type = other RNA
caactgtggccactggttcta

SEQ ID NO: 74437 - RNA, 21 nt, synthetic construct
  source 1..21: mol_type = other RNA
tcctctagcacacagaccaga

SEQ ID NO: 74438 - RNA, 21 nt, synthetic construct
  source 1..21: mol_type = other RNA
actcccccatcactgaccaca

SEQ ID NO: 74439 - RNA, 21 nt, synthetic construct
  source 1..21: mol_type = other RNA
ccactacgatcacggccacca

SEQ ID NO: 74440 - RNA, 21 nt, synthetic construct
  source 1..21: mol_type = other RNA
acacacccccagtgccgaaca

SEQ ID NO: 74441 - RNA, 21 nt, synthetic construct
  source 1..21: mol_type = other RNA
acacccccagtgccgaacaca

SEQ ID NO: 74442 - RNA, 21 nt, synthetic construct
  source 1..21: mol_type = other RNA
atggccaccacacacgggcga

SEQ ID NO: 74443 - RNA, 21 nt, synthetic construct
  source 1..21: mol_type = other RNA
acacacgggcgatccctgcca

SEQ ID NO: 74444 - RNA, 21 nt, synthetic construct
  source 1..21: mol_type = other RNA
acacgggcgatccctgcccca

SEQ ID NO: 74445 - RNA, 21 nt, synthetic construct
  source 1..21: mol_type = other RNA
cagtccccacacggtgcgcaa

SEQ ID NO: 74446 - RNA, 21 nt, synthetic construct
  source 1..21: mol_type = other RNA
agtccccacacggtgcgcaca

SEQ ID NO: 74447 - RNA, 21 nt, synthetic construct
  source 1..21: mol_type = other RNA
gacttcggccacctcgggcaa

SEQ ID NO: 74448 - RNA, 21 nt, synthetic construct
  source 1..21: mol_type = other RNA
cttgggcaccacccacatcaa

SEQ ID NO: 74449 - RNA, 21 nt, synthetic construct
  source 1..21: mol_type = other RNA
cacccagcactcgactccaga

SEQ ID NO: 74450 - RNA, 21 nt, synthetic construct
  source 1..21: mol_type = other RNA
ctcaccctagcagcagaacca

SEQ ID NO: 74451 - RNA, 21 nt, synthetic construct
  source 1..21: mol_type = other RNA
cagcagaaccaccgagtcaca

SEQ ID NO: 74452 - RNA, 21 nt, synthetic construct
  source 1..21: mol_type = other RNA
accaccgagtcacccccttca

SEQ ID NO: 74453 - RNA, 21 nt, synthetic construct
  source 1..21: mol_type = other RNA
agggacgaccaccccgggcca

SEQ ID NO: 74454 - RNA, 21 nt, synthetic construct
  source 1..21: mol_type = other RNA
ccaccccgggccacaccacga

SEQ ID NO: 74455 - RNA, 21 nt, synthetic construct
  source 1..21: mol_type = other RNA
acggccacacccagcaagaca

SEQ ID NO: 74456 - RNA, 21 nt, synthetic construct
  source 1..21: mol_type = other RNA
cagccccacatcggcccccaa

SEQ ID NO: 74457 - RNA, 21 nt, synthetic construct
  source 1..21: mol_type = other RNA
cccacatcggcccccataaca

SEQ ID NO: 74458 - RNA, 21 nt, synthetic construct
  source 1..21: mol_type = other RNA
ggcccccataaccacggtgga

SEQ ID NO: 74459 - RNA, 21 nt, synthetic construct
  source 1..21: mol_type = other RNA
cccccataaccacggtggtga

SEQ ID NO: 74460 - RNA, 21 nt, synthetic construct
  source 1..21: mol_type = other RNA
gagtggctggactacagctaa

SEQ ID NO: 74461 - RNA, 21 nt, synthetic construct
  source 1..21: mol_type = other RNA
actacagctaccccatgccga

SEQ ID NO: 74462 - RNA, 21 nt, synthetic construct
  source 1..21: mol_type = other RNA
cacctactccaacatccgtga

SEQ ID NO: 74463 - RNA, 21 nt, synthetic construct
  source 1..21: mol_type = other RNA
cggaggggccgtctgtgagca

SEQ ID NO: 74464 - RNA, 21 nt, synthetic construct
  source 1..21: mol_type = other RNA
cagctctacggccatgcccta

SEQ ID NO: 74465 - RNA, 21 nt, synthetic construct
  source 1..21: mol_type = other RNA
acagagccgagcactacagca

SEQ ID NO: 74466 - RNA, 21 nt, synthetic construct
  source 1..21: mol_type = other RNA
gagccgagcactacagccaca

SEQ ID NO: 74467 - RNA, 21 nt, synthetic construct
  source 1..21: mol_type = other RNA
tacagccaccgtgacggtgca

SEQ ID NO: 74468 - RNA, 21 nt, synthetic construct
  source 1..21: mol_type = other RNA
acagccaccgtgacggtgcca

SEQ ID NO: 74469 - RNA, 21 nt, synthetic construct
  source 1..21: mol_type = other RNA
ccgtgacggtgcccaccggaa

SEQ ID NO: 74470 - RNA, 21 nt, synthetic construct
  source 1..21: mol_type = other RNA
gtgcccaccggatccacggca

SEQ ID NO: 74471 - RNA, 21 nt, synthetic construct
  source 1..21: mol_type = other RNA
tgcccaccggatccacggcca

SEQ ID NO: 74472 - RNA, 21 nt, synthetic construct
  source 1..21: mol_type = other RNA
ccaccggatccacggccacca

SEQ ID NO: 74473 - RNA, 21 nt, synthetic construct
  source 1..21: mol_type = other RNA
caggcaactgctggcacccca

SEQ ID NO: 74474 - RNA, 21 nt, synthetic construct
  source 1..21: mol_type = other RNA
accagctttacagccatccca

SEQ ID NO: 74475 - RNA, 21 nt, synthetic construct
  source 1..21: mol_type = other RNA
tggacccgcctatcacagaca

SEQ ID NO: 74476 - RNA, 21 nt, synthetic construct
  source 1..21: mol_type = other RNA
gaccaccacacccacggccaa

SEQ ID NO: 74477 - RNA, 21 nt, synthetic construct
  source 1..21: mol_type = other RNA
agagactgtccacacctccaa

SEQ ID NO: 74478 - RNA, 21 nt, synthetic construct
  source 1..21: mol_type = other RNA
ccacacctccacagtgcttaa

SEQ ID NO: 74479 - RNA, 21 nt, synthetic construct
  source 1..21: mol_type = other RNA
ctgactaccacaaccacggga

SEQ ID NO: 74480 - RNA, 21 nt, synthetic construct
  source 1..21: mol_type = other RNA
actaccacaaccacgggctta

SEQ ID NO: 74481 - RNA, 21 nt, synthetic construct
  source 1..21: mol_type = other RNA
ccacaaccacgggcttcacaa

SEQ ID NO: 74482 - RNA, 21 nt, synthetic construct
  source 1..21: mol_type = other RNA
ggcacgcacgcttccagtgta

SEQ ID NO: 74483 - RNA, 21 nt, synthetic construct
  source 1..21: mol_type = other RNA
gcacgcacgcttccagtgtga

SEQ ID NO: 74484 - RNA, 21 nt, synthetic construct
  source 1..21: mol_type = other RNA
cagaggttccacggtgaccca

SEQ ID NO: 74485 - RNA, 21 nt, synthetic construct
  source 1..21: mol_type = other RNA
agaggttccacggtgacccca

SEQ ID NO: 74486 - RNA, 21 nt, synthetic construct
  source 1..21: mol_type = other RNA
tccatcccggggaccacccaa

SEQ ID NO: 74487 - RNA, 21 nt, synthetic construct
  source 1..21: mol_type = other RNA
caactgtggccactggttcta

SEQ ID NO: 74488 - RNA, 21 nt, synthetic construct
  source 1..21: mol_type = other RNA
tcctctagcacacagaccaga

SEQ ID NO: 74489 - RNA, 21 nt, synthetic construct
  source 1..21: mol_type = other RNA
actcccccatcactgaccaca

SEQ ID NO: 74490 - RNA, 21 nt, synthetic construct
  source 1..21: mol_type = other RNA
ccactacgatcacggccacca

SEQ ID NO: 74491 - RNA, 21 nt, synthetic construct
  source 1..21: mol_type = other RNA
cagggacaacacctatcccca

SEQ ID NO: 74492 - RNA, 21 nt, synthetic construct
  source 1..21: mol_type = other RNA
aacacctatccccccagtgca

SEQ ID NO: 74493 - RNA, 21 nt, synthetic construct
  source 1..21: mol_type = other RNA
acacacccccagtgccgaaca

SEQ ID NO: 74494 - RNA, 21 nt, synthetic construct
  source 1..21: mol_type = other RNA
acacccccagtgccgaacaca

SEQ ID NO: 74495 - RNA, 21 nt, synthetic construct
  source 1..21: mol_type = other RNA
cagtgccgaacaccacggcca

SEQ ID NO: 74496 - RNA, 21 nt, synthetic construct
  source 1..21: mol_type = other RNA
cagtccccacacggtgcgcaa

SEQ ID NO: 74497 - RNA, 21 nt, synthetic construct
  source 1..21: mol_type = other RNA
agtccccacacggtgcgcaca

SEQ ID NO: 74498 - RNA, 21 nt, synthetic construct
  source 1..21: mol_type = other RNA
cttgggcaccacccacatcaa

SEQ ID NO: 74499 - RNA, 21 nt, synthetic construct
  source 1..21: mol_type = other RNA
cccagcagcaaccaccggtaa

SEQ ID NO: 74500 - RNA, 21 nt, synthetic construct
  source 1..21: mol_type = other RNA
cacccagcactcgactccaga

SEQ ID NO: 74501 - RNA, 21 nt, synthetic construct
  source 1..21: mol_type = other RNA
accaccgagtcacccccttca

SEQ ID NO: 74502 - RNA, 21 nt, synthetic construct
  source 1..21: mol_type = other RNA
agggacgaccaccccgggcca

SEQ ID NO: 74503 - RNA, 21 nt, synthetic construct
  source 1..21: mol_type = other RNA
acggccacacccagcaagaca

SEQ ID NO: 74504 - RNA, 21 nt, synthetic construct
  source 1..21: mol_type = other RNA
ccacatcggccccaataacca

SEQ ID NO: 74505 - RNA, 21 nt, synthetic construct
  source 1..21: mol_type = other RNA
ggccccaataaccacggtgga

SEQ ID NO: 74506 - RNA, 21 nt, synthetic construct
  source 1..21: mol_type = other RNA
gagtggctggactacagctaa

SEQ ID NO: 74507 - RNA, 21 nt, synthetic construct
  source 1..21: mol_type = other RNA
actacagctaccccatgccga

SEQ ID NO: 74508 - RNA, 21 nt, synthetic construct
  source 1..21: mol_type = other RNA
cacctactccaacatccgtga

SEQ ID NO: 74509 - RNA, 21 nt, synthetic construct
  source 1..21: mol_type = other RNA
cggaggggccgtctgtgagca

SEQ ID NO: 74510 - RNA, 21 nt, synthetic construct
  source 1..21: mol_type = other RNA
cagccactacgaccgcaacca

SEQ ID NO: 74511 - RNA, 21 nt, synthetic construct
  source 1..21: mol_type = other RNA
gccactacgaccgcaaccaca

SEQ ID NO: 74512 - RNA, 21 nt, synthetic construct
  source 1..21: mol_type = other RNA
actgcaaccacccttccagta

SEQ ID NO: 74513 - RNA, 21 nt, synthetic construct
  source 1..21: mol_type = other RNA
ccagctttacacccatcccca

SEQ ID NO: 74514 - RNA, 21 nt, synthetic construct
  source 1..21: mol_type = other RNA
cagctttacacccatccccta

SEQ ID NO: 74515 - RNA, 21 nt, synthetic construct
  source 1..21: mol_type = other RNA
gaccctcccagaacagaccaa

SEQ ID NO: 74516 - RNA, 21 nt, synthetic construct
  source 1..21: mol_type = other RNA
ctccactccggagaccaccca

SEQ ID NO: 74517 - RNA, 21 nt, synthetic construct
  source 1..21: mol_type = other RNA
cacagtgctgaccacgaagga

SEQ ID NO: 74518 - RNA, 21 nt, synthetic construct
  source 1..21: mol_type = other RNA
agtgctgaccacgaaggccaa

SEQ ID NO: 74519 - RNA, 21 nt, synthetic construct
  source 1..21: mol_type = other RNA
ccacgacaagggccaccagta

SEQ ID NO: 74520 - RNA, 21 nt, synthetic construct
  source 1..21: mol_type = other RNA
tacagccaccgtgacggtgca

SEQ ID NO: 74521 - RNA, 21 nt, synthetic construct
  source 1..21: mol_type = other RNA
acagccaccgtgacggtgcca

SEQ ID NO: 74522 - RNA, 21 nt, synthetic construct
  source 1..21: mol_type = other RNA
ccgtgacggtgcccaccggaa

SEQ ID NO: 74523 - RNA, 21 nt, synthetic construct
  source 1..21: mol_type = other RNA
gtgcccaccggatccacggca

SEQ ID NO: 74524 - RNA, 21 nt, synthetic construct
  source 1..21: mol_type = other RNA
tgcccaccggatccacggcca

SEQ ID NO: 74525 - RNA, 21 nt, synthetic construct
  source 1..21: mol_type = other RNA
ccaccggatccacggccacca

SEQ ID NO: 74526 - RNA, 21 nt, synthetic construct
  source 1..21: mol_type = other RNA
cctccacccgggcaactgcta

SEQ ID NO: 74527 - RNA, 21 nt, synthetic construct
  source 1..21: mol_type = other RNA
cacccacagctaccagcgtta

SEQ ID NO: 74528 - RNA, 21 nt, synthetic construct
  source 1..21: mol_type = other RNA
tggacccgcctatcacagaca

SEQ ID NO: 74529 - RNA, 21 nt, synthetic construct
  source 1..21: mol_type = other RNA
gaccaccacacccacggccaa

SEQ ID NO: 74530 - RNA, 21 nt, synthetic construct
  source 1..21: mol_type = other RNA
ctctactccagagactgtcca

SEQ ID NO: 74531 - RNA, 21 nt, synthetic construct
  source 1..21: mol_type = other RNA
agagactgtccacacctccaa

SEQ ID NO: 74532 - RNA, 21 nt, synthetic construct
  source 1..21: mol_type = other RNA
ccacacctccacagtgcttaa

SEQ ID NO: 74533 - RNA, 21 nt, synthetic construct
  source 1..21: mol_type = other RNA
actaccacaaccacgggctta

SEQ ID NO: 74534 - RNA, 21 nt, synthetic construct
  source 1..21: mol_type = other RNA
ccacaaccacgggcttcacaa

SEQ ID NO: 74535 - RNA, 21 nt, synthetic construct
  source 1..21: mol_type = other RNA
ccagggacggcactcacgcca

SEQ ID NO: 74536 - RNA, 21 nt, synthetic construct
  source 1..21: mol_type = other RNA
tcacgcctccagtgtggatca

SEQ ID NO: 74537 - RNA, 21 nt, synthetic construct
  source 1..21: mol_type = other RNA
ccacaaccagaggctccacga

SEQ ID NO: 74538 - RNA, 21 nt, synthetic construct
  source 1..21: mol_type = other RNA
tccatcccggggaccacccaa

SEQ ID NO: 74539 - RNA, 21 nt, synthetic construct
  source 1..21: mol_type = other RNA
acaccgccacagtgctgacca

SEQ ID NO: 74540 - RNA, 21 nt, synthetic construct
  source 1..21: mol_type = other RNA
caactgtggccactggttcta

SEQ ID NO: 74541 - RNA, 21 nt, synthetic construct
  source 1..21: mol_type = other RNA
tcctctagcacacagaccaga

SEQ ID NO: 74542 - RNA, 21 nt, synthetic construct
  source 1..21: mol_type = other RNA
actcccccatcactgaccaca

SEQ ID NO: 74543 - RNA, 21 nt, synthetic construct
  source 1..21: mol_type = other RNA
cactacgatcacagccaccga

SEQ ID NO: 74544 - RNA, 21 nt, synthetic construct
  source 1..21: mol_type = other RNA
acacacccccagtgccgaaca

SEQ ID NO: 74545 - RNA, 21 nt, synthetic construct
  source 1..21: mol_type = other RNA
acacccccagtgccgaacaca

SEQ ID NO: 74546 - RNA, 21 nt, synthetic construct
  source 1..21: mol_type = other RNA
cagtgccgaacaccacggcca

SEQ ID NO: 74547 - RNA, 21 nt, synthetic construct
  source 1..21: mol_type = other RNA
cagtccccacacggtgcgcaa

SEQ ID NO: 74548 - RNA, 21 nt, synthetic construct
  source 1..21: mol_type = other RNA
agtccccacacggtgcgcaca

SEQ ID NO: 74549 - RNA, 21 nt, synthetic construct
  source 1..21: mol_type = other RNA
gacttcggccacctcgggcaa

SEQ ID NO: 74550 - RNA, 21 nt, synthetic construct
  source 1..21: mol_type = other RNA
cttgggcaccacccacatcaa

SEQ ID NO: 74551 - RNA, 21 nt, synthetic construct
  source 1..21: mol_type = other RNA
caccagtaccacccagcacta

SEQ ID NO: 74552 - RNA, 21 nt, synthetic construct
  source 1..21: mol_type = other RNA
cacccagcactcgactccaga

SEQ ID NO: 74553 - RNA, 21 nt, synthetic construct
  source 1..21: mol_type = other RNA
accaccgagtcacccccttca

SEQ ID NO: 74554 - RNA, 21 nt, synthetic construct
  source 1..21: mol_type = other RNA
agggacgaccaccccgggcca

SEQ ID NO: 74555 - RNA, 21 nt, synthetic construct
  source 1..21: mol_type = other RNA
cagccccacatcggcccccaa

SEQ ID NO: 74556 - RNA, 21 nt, synthetic construct
  source 1..21: mol_type = other RNA
cccacatcggcccccataaca

SEQ ID NO: 74557 - RNA, 21 nt, synthetic construct
  source 1..21: mol_type = other RNA
ggcccccataaccacggtgga

SEQ ID NO: 74558 - RNA, 21 nt, synthetic construct
  source 1..21: mol_type = other RNA
cccccataaccacggtggtga

SEQ ID NO: 74559 - RNA, 21 nt, synthetic construct
  source 1..21: mol_type = other RNA
tgaccacgggctgtgagccca

SEQ ID NO: 74560 - RNA, 21 nt, synthetic construct
  source 1..21: mol_type = other RNA
gagtggctggactacagctaa

SEQ ID NO: 74561 - RNA, 21 nt, synthetic construct
  source 1..21: mol_type = other RNA
actacagctaccccatgccga

SEQ ID NO: 74562 - RNA, 21 nt, synthetic construct
  source 1..21: mol_type = other RNA
cacctactccaacatccgtga

SEQ ID NO: 74563 - RNA, 21 nt, synthetic construct
  source 1..21: mol_type = other RNA
acagagccgagcactacagca

SEQ ID NO: 74564 - RNA, 21 nt, synthetic construct
  source 1..21: mol_type = other RNA
gagccgagcactacagccaca

SEQ ID NO: 74565 - RNA, 21 nt, synthetic construct
  source 1..21: mol_type = other RNA
tacagccaccgtgacggtgca

SEQ ID NO: 74566 - RNA, 21 nt, synthetic construct
  source 1..21: mol_type = other RNA
acagccaccgtgacggtgcca

SEQ ID NO: 74567 - RNA, 21 nt, synthetic construct
  source 1..21: mol_type = other RNA
ccgtgacggtgcccaccggaa

SEQ ID NO: 74568 - RNA, 21 nt, synthetic construct
  source 1..21: mol_type = other RNA
gtgcccaccggatccacggca

SEQ ID NO: 74569 - RNA, 21 nt, synthetic construct
  source 1..21: mol_type = other RNA
tgcccaccggatccacggcca

SEQ ID NO: 74570 - RNA, 21 nt, synthetic construct
  source 1..21: mol_type = other RNA
ccaccggatccacggccacca

SEQ ID NO: 74571 - RNA, 21 nt, synthetic construct
  source 1..21: mol_type = other RNA
caggcaactgctggcacccca

SEQ ID NO: 74572 - RNA, 21 nt, synthetic construct
  source 1..21: mol_type = other RNA
accagctttacagccatccca

SEQ ID NO: 74573 - RNA, 21 nt, synthetic construct
  source 1..21: mol_type = other RNA
tggacccgcctatcacagaca

SEQ ID NO: 74574 - RNA, 21 nt, synthetic construct
  source 1..21: mol_type = other RNA
gaccaccacacccacggccaa

SEQ ID NO: 74575 - RNA, 21 nt, synthetic construct
  source 1..21: mol_type = other RNA
ccacacctccacagtgcttaa

SEQ ID NO: 74576 - RNA, 21 nt, synthetic construct
  source 1..21: mol_type = other RNA
actaccacaaccacgggctta

SEQ ID NO: 74577 - RNA, 21 nt, synthetic construct
  source 1..21: mol_type = other RNA
ccacaaccacgggcttcacaa

SEQ ID NO: 74578 - RNA, 21 nt, synthetic construct
  source 1..21: mol_type = other RNA
ccacgggcttcacagtcacca

SEQ ID NO: 74579 - RNA, 21 nt, synthetic construct
  source 1..21: mol_type = other RNA
cggcacgcacgcctccagtga

SEQ ID NO: 74580 - RNA, 21 nt, synthetic construct
  source 1..21: mol_type = other RNA
gcacgcacgcctccagtgtga

SEQ ID NO: 74581 - RNA, 21 nt, synthetic construct
  source 1..21: mol_type = other RNA
cgcacgcctccagtgtggata

SEQ ID NO: 74582 - RNA, 21 nt, synthetic construct
  source 1..21: mol_type = other RNA
gcacgcctccagtgtggatca

SEQ ID NO: 74583 - RNA, 21 nt, synthetic construct
  source 1..21: mol_type = other RNA
cacacccacaaccagtggcta

SEQ ID NO: 74584 - RNA, 21 nt, synthetic construct
  source 1..21: mol_type = other RNA
tccgtcccggggaccacccaa

SEQ ID NO: 74585 - RNA, 21 nt, synthetic construct
  source 1..21: mol_type = other RNA
caactgtggccactggttcta

SEQ ID NO: 74586 - RNA, 21 nt, synthetic construct
  source 1..21: mol_type = other RNA
tcctctagcacacagaccaga

SEQ ID NO: 74587 - RNA, 21 nt, synthetic construct
  source 1..21: mol_type = other RNA
ccactacgatcacggccacca

SEQ ID NO: 74588 - RNA, 21 nt, synthetic construct
  source 1..21: mol_type = other RNA
cagggacaacacctatcccca

SEQ ID NO: 74589 - RNA, 21 nt, synthetic construct
  source 1..21: mol_type = other RNA
aacacctatccccccagtgca

SEQ ID NO: 74590 - RNA, 21 nt, synthetic construct
  source 1..21: mol_type = other RNA
acacacccccagtgccgaaca

SEQ ID NO: 74591 - RNA, 21 nt, synthetic construct
  source 1..21: mol_type = other RNA
acacccccagtgccgaacaca

SEQ ID NO: 74592 - RNA, 21 nt, synthetic construct
  source 1..21: mol_type = other RNA
cagtgccgaacaccacggcca

SEQ ID NO: 74593 - RNA, 21 nt, synthetic construct
  source 1..21: mol_type = other RNA
cagtccccacacggtgcgcaa

SEQ ID NO: 74594 - RNA, 21 nt, synthetic construct
  source 1..21: mol_type = other RNA
agtccccacacggtgcgcaca

SEQ ID NO: 74595 - RNA, 21 nt, synthetic construct
  source 1..21: mol_type = other RNA
cttgggcaccacccacatcaa

SEQ ID NO: 74596 - RNA, 21 nt, synthetic construct
  source 1..21: mol_type = other RNA
cccagcagcaaccaccggtaa

SEQ ID NO: 74597 - RNA, 21 nt, synthetic construct
  source 1..21: mol_type = other RNA
cacccagcactcgactccaga

SEQ ID NO: 74598 - RNA, 21 nt, synthetic construct
  source 1..21: mol_type = other RNA
accaccgagtcacccccttca

SEQ ID NO: 74599 - RNA, 21 nt, synthetic construct
  source 1..21: mol_type = other RNA
caccgagtcacccccttccca

SEQ ID NO: 74600 - RNA, 21 nt, synthetic construct
  source 1..21: mol_type = other RNA
agggacgaccaccccgggcca

SEQ ID NO: 74601 - RNA, 21 nt, synthetic construct
  source 1..21: mol_type = other RNA
ccaccccgggccacaccacga

SEQ ID NO: 74602 - RNA, 21 nt, synthetic construct
  source 1..21: mol_type = other RNA
acggccacacccagcaagaca

SEQ ID NO: 74603 - RNA, 21 nt, synthetic construct
  source 1..21: mol_type = other RNA
cagccccacatcggcccccaa

SEQ ID NO: 74604 - RNA, 21 nt, synthetic construct
  source 1..21: mol_type = other RNA
cccacatcggcccccataaca

SEQ ID NO: 74605 - RNA, 21 nt, synthetic construct
  source 1..21: mol_type = other RNA
ggcccccataaccacggtgga

SEQ ID NO: 74606 - RNA, 21 nt, synthetic construct
  source 1..21: mol_type = other RNA
cccccataaccacggtggtga

SEQ ID NO: 74607 - RNA, 21 nt, synthetic construct
  source 1..21: mol_type = other RNA
tgaccacgggctgtgagccca

SEQ ID NO: 74608 - RNA, 21 nt, synthetic construct
  source 1..21: mol_type = other RNA
gagtggctggactacagctaa

SEQ ID NO: 74609 - RNA, 21 nt, synthetic construct
  source 1..21: mol_type = other RNA
actacagctaccccatgccga

SEQ ID NO: 74610 - RNA, 21 nt, synthetic construct
  source 1..21: mol_type = other RNA
cacctactccaacatccgtga

SEQ ID NO: 74611 - RNA, 21 nt, synthetic construct
  source 1..21: mol_type = other RNA
cggaggggccgtctgtgagca

SEQ ID NO: 74612 - RNA, 21 nt, synthetic construct
  source 1..21: mol_type = other RNA
cagctctacggccatgcccta

SEQ ID NO: 74613 - RNA, 21 nt, synthetic construct
  source 1..21: mol_type = other RNA
actgcaaccacccttccagta

SEQ ID NO: 74614 - RNA, 21 nt, synthetic construct
  source 1..21: mol_type = other RNA
gaccctcccagaacagaccaa

SEQ ID NO: 74615 - RNA, 21 nt, synthetic construct
  source 1..21: mol_type = other RNA
ctccactccggagaccaccca

SEQ ID NO: 74616 - RNA, 21 nt, synthetic construct
  source 1..21: mol_type = other RNA
cacagtgctgaccacgaagga

SEQ ID NO: 74617 - RNA, 21 nt, synthetic construct
  source 1..21: mol_type = other RNA
agtgctgaccacgaaggccaa

SEQ ID NO: 74618 - RNA, 21 nt, synthetic construct
  source 1..21: mol_type = other RNA
ccacgacaagggccaccagta

SEQ ID NO: 74619 - RNA, 21 nt, synthetic construct
  source 1..21: mol_type = other RNA
cagttccacgtccacccccta

SEQ ID NO: 74620 - RNA, 21 nt, synthetic construct
  source 1..21: mol_type = other RNA
acagagccgagcactacagca

SEQ ID NO: 74621 - RNA, 21 nt, synthetic construct
  source 1..21: mol_type = other RNA
gagccgagcactacagccaca

SEQ ID NO: 74622 - RNA, 21 nt, synthetic construct
  source 1..21: mol_type = other RNA
tacagccaccgtgacggtgca

SEQ ID NO: 74623 - RNA, 21 nt, synthetic construct
  source 1..21: mol_type = other RNA
acagccaccgtgacggtgcca

SEQ ID NO: 74624 - RNA, 21 nt, synthetic construct
  source 1..21: mol_type = other RNA
ccgtgacggtgcccaccggaa

SEQ ID NO: 74625 - RNA, 21 nt, synthetic construct
  source 1..21: mol_type = other RNA
gtgcccaccggatccacggca

SEQ ID NO: 74626 - RNA, 21 nt, synthetic construct
  source 1..21: mol_type = other RNA
tgcccaccggatccacggcca

SEQ ID NO: 74627 - RNA, 21 nt, synthetic construct
  source 1..21: mol_type = other RNA
ccaccggatccacggccacca

SEQ ID NO: 74628 - RNA, 21 nt, synthetic construct
  source 1..21: mol_type = other RNA
caggcaactgctggcacccca

SEQ ID NO: 74629 - RNA, 21 nt, synthetic construct
  source 1..21: mol_type = other RNA
accagctttacagccatccca

SEQ ID NO: 74630 - RNA, 21 nt, synthetic construct
  source 1..21: mol_type = other RNA
tggacccgcctatcacagaca

SEQ ID NO: 74631 - RNA, 21 nt, synthetic construct
  source 1..21: mol_type = other RNA
gaccaccacacccacggccaa

SEQ ID NO: 74632 - RNA, 21 nt, synthetic construct
  source 1..21: mol_type = other RNA
agagactgtccacacctccaa

SEQ ID NO: 74633 - RNA, 21 nt, synthetic construct
  source 1..21: mol_type = other RNA
ccacacctccacagtgcttaa

SEQ ID NO: 74634 - RNA, 21 nt, synthetic construct
  source 1..21: mol_type = other RNA
actaccacaaccacgggctta

SEQ ID NO: 74635 - RNA, 21 nt, synthetic construct
  source 1..21: mol_type = other RNA
ccacaaccacgggcttcacaa

SEQ ID NO: 74636 - RNA, 21 nt, synthetic construct
  source 1..21: mol_type = other RNA
ccagggacggcactcacgcca

SEQ ID NO: 74637 - RNA, 21 nt, synthetic construct
  source 1..21: mol_type = other RNA
tcacgcctccagtgtggatca

SEQ ID NO: 74638 - RNA, 21 nt, synthetic construct
  source 1..21: mol_type = other RNA
cacacccacaaccagtggcta

SEQ ID NO: 74639 - RNA, 21 nt, synthetic construct
  source 1..21: mol_type = other RNA
tccatcccggggaccacccaa

SEQ ID NO: 74640 - RNA, 21 nt, synthetic construct
  source 1..21: mol_type = other RNA
acaccgccagagtgctgacca

SEQ ID NO: 74641 - RNA, 21 nt, synthetic construct
  source 1..21: mol_type = other RNA
caactgtggccactggttcta

SEQ ID NO: 74642 - RNA, 21 nt, synthetic construct
  source 1..21: mol_type = other RNA
tcctctagcacacagaccaga

SEQ ID NO: 74643 - RNA, 21 nt, synthetic construct
  source 1..21: mol_type = other RNA
actcccccatcactgaccaca

SEQ ID NO: 74644 - RNA, 21 nt, synthetic construct
  source 1..21: mol_type = other RNA
ccactacgatcacggccacca

SEQ ID NO: 74645 - RNA, 21 nt, synthetic construct
  source 1..21: mol_type = other RNA
actgcaaccacccttccagta

SEQ ID NO: 74646 - RNA, 21 nt, synthetic construct
  source 1..21: mol_type = other RNA
ccagctttacacccatcccca

SEQ ID NO: 74647 - RNA, 21 nt, synthetic construct
  source 1..21: mol_type = other RNA
cagctttacacccatccccta

SEQ ID NO: 74648 - RNA, 21 nt, synthetic construct
  source 1..21: mol_type = other RNA
tggaccgtcccagcacagaca

SEQ ID NO: 74649 - RNA, 21 nt, synthetic construct
  source 1..21: mol_type = other RNA
tccacaatccacacctcctca

SEQ ID NO: 74650 - RNA, 21 nt, synthetic construct
  source 1..21: mol_type = other RNA
cacaatccacacctcctctaa

SEQ ID NO: 74651 - RNA, 21 nt, synthetic construct
  source 1..21: mol_type = other RNA
tccacacctcctctactccaa

SEQ ID NO: 74652 - RNA, 21 nt, synthetic construct
  source 1..21: mol_type = other RNA
cctctactccagagaccacca

SEQ ID NO: 74653 - RNA, 21 nt, synthetic construct
  source 1..21: mol_type = other RNA
acaagggccaccaattccaca

SEQ ID NO: 74654 - RNA, 21 nt, synthetic construct
  source 1..21: mol_type = other RNA
accaattccacggccacacca

SEQ ID NO: 74655 - RNA, 21 nt, synthetic construct
  source 1..21: mol_type = other RNA
tccactctggggacgacccga

SEQ ID NO: 74656 - RNA, 21 nt, synthetic construct
  source 1..21: mol_type = other RNA
ctctggggacgacccggatca

SEQ ID NO: 74657 - RNA, 21 nt, synthetic construct
  source 1..21: mol_type = other RNA
agccgagcactatagccacca

SEQ ID NO: 74658 - RNA, 21 nt, synthetic construct
  source 1..21: mol_type = other RNA
gccaccgtgatggtgcccaca

SEQ ID NO: 74659 - RNA, 21 nt, synthetic construct
  source 1..21: mol_type = other RNA
caccgtgatggtgcccaccga

SEQ ID NO: 74660 - RNA, 21 nt, synthetic construct
  source 1..21: mol_type = other RNA
agctcacacccccaaagtgga

SEQ ID NO: 74661 - RNA, 21 nt, synthetic construct
  source 1..21: mol_type = other RNA
gcctgccaaccttcagcgtga

SEQ ID NO: 74662 - RNA, 21 nt, synthetic construct
  source 1..21: mol_type = other RNA
cctgccaaccttcagcgtgta

SEQ ID NO: 74663 - RNA, 21 nt, synthetic construct
  source 1..21: mol_type = other RNA
tttggacagtttttctcgcca

SEQ ID NO: 74664 - RNA, 21 nt, synthetic construct
  source 1..21: mol_type = other RNA
ttggacagtttttctcgccca

SEQ ID NO: 74665 - RNA, 21 nt, synthetic construct
  source 1..21: mol_type = other RNA
cggggaagtcatctacaataa

SEQ ID NO: 74666 - RNA, 21 nt, synthetic construct
  source 1..21: mol_type = other RNA
ctgccatttctacgcagtgta

SEQ ID NO: 74667 - RNA, 21 nt, synthetic construct
  source 1..21: mol_type = other RNA
ctacgcagtgtgcaatcagca

SEQ ID NO: 74668 - RNA, 21 nt, synthetic construct
  source 1..21: mol_type = other RNA
cagtgtgcaatcagcactgta

SEQ ID NO: 74669 - RNA, 21 nt, synthetic construct
  source 1..21: mol_type = other RNA
gcaatcagcactgtgacatta

SEQ ID NO: 74670 - RNA, 21 nt, synthetic construct
  source 1..21: mol_type = other RNA
agcactgtgacattgaccgca

SEQ ID NO: 74671 - RNA, 21 nt, synthetic construct
  source 1..21: mol_type = other RNA
gcactgtgacattgaccgcta

SEQ ID NO: 74672 - RNA, 21 nt, synthetic construct
  source 1..21: mol_type = other RNA
ctccggcaggtgaatgagaca

SEQ ID NO: 74673 - RNA, 21 nt, synthetic construct
  source 1..21: mol_type = other RNA
ggggcggctcccactattcca

SEQ ID NO: 74674 - RNA, 21 nt, synthetic construct
  source 1..21: mol_type = other RNA
cacctcttacaccttccggga

SEQ ID NO: 74675 - RNA, 21 nt, synthetic construct
  source 1..21: mol_type = other RNA
ctcttacaccttccggggcaa

SEQ ID NO: 74676 - RNA, 21 nt, synthetic construct
  source 1..21: mol_type = other RNA
tacaccttccggggcaactga

SEQ ID NO: 74677 - RNA, 21 nt, synthetic construct
  source 1..21: mol_type = other RNA
tccggggcaactgcacctata

SEQ ID NO: 74678 - RNA, 21 nt, synthetic construct
  source 1..21: mol_type = other RNA
gagagatccatgcacgcttta

SEQ ID NO: 74679 - RNA, 21 nt, synthetic construct
  source 1..21: mol_type = other RNA
atgcacgctttgggaatctca

SEQ ID NO: 74680 - RNA, 21 nt, synthetic construct
  source 1..21: mol_type = other RNA
tgcacgctttgggaatctcaa

SEQ ID NO: 74681 - RNA, 21 nt, synthetic construct
  source 1..21: mol_type = other RNA
caaccactactgcacggccta

SEQ ID NO: 74682 - RNA, 21 nt, synthetic construct
  source 1..21: mol_type = other RNA
aaccactactgcacggcctca

SEQ ID NO: 74683 - RNA, 21 nt, synthetic construct
  source 1..21: mol_type = other RNA
accactactgcacggcctcta

SEQ ID NO: 74684 - RNA, 21 nt, synthetic construct
  source 1..21: mol_type = other RNA
cctcagcatccactacaagta

SEQ ID NO: 74685 - RNA, 21 nt, synthetic construct
  source 1..21: mol_type = other RNA
gcatccactacaagtccatga

SEQ ID NO: 74686 - RNA, 21 nt, synthetic construct
  source 1..21: mol_type = other RNA
catccactacaagtccatgga

SEQ ID NO: 74687 - RNA, 21 nt, synthetic construct
  source 1..21: mol_type = other RNA
atccactacaagtccatggaa

SEQ ID NO: 74688 - RNA, 21 nt, synthetic construct
  source 1..21: mol_type = other RNA
tggatatcgtcctcactgtca

SEQ ID NO: 74689 - RNA, 21 nt, synthetic construct
  source 1..21: mol_type = other RNA
tgtcaccatggtgcatgggaa

SEQ ID NO: 74690 - RNA, 21 nt, synthetic construct
  source 1..21: mol_type = other RNA
accaccatgcgtgtggacata

SEQ ID NO: 74691 - RNA, 21 nt, synthetic construct
  source 1..21: mol_type = other RNA
atgcgtgtggacattcctgca

SEQ ID NO: 74692 - RNA, 21 nt, synthetic construct
  source 1..21: mol_type = other RNA
tgggcgtgagcgtcaccttca

SEQ ID NO: 74693 - RNA, 21 nt, synthetic construct
  source 1..21: mol_type = other RNA
acggaaccactgccgccagta

SEQ ID NO: 74694 - RNA, 21 nt, synthetic construct
  source 1..21: mol_type = other RNA
cggaaccactgccgccagtta

SEQ ID NO: 74695 - RNA, 21 nt, synthetic construct
  source 1..21: mol_type = other RNA
gaaccactgccgccagttgca

SEQ ID NO: 74696 - RNA, 21 nt, synthetic construct
  source 1..21: mol_type = other RNA
aaccactgccgccagttgcaa

SEQ ID NO: 74697 - RNA, 21 nt, synthetic construct
  source 1..21: mol_type = other RNA
actgccgccagttgcaaggaa

SEQ ID NO: 74698 - RNA, 21 nt, synthetic construct
  source 1..21: mol_type = other RNA
ggacatggccaagacgtggca

SEQ ID NO: 74699 - RNA, 21 nt, synthetic construct
  source 1..21: mol_type = other RNA
gacatggccaagacgtggcta

SEQ ID NO: 74700 - RNA, 21 nt, synthetic construct
  source 1..21: mol_type = other RNA
tggccaagacgtggctggtca

SEQ ID NO: 74701 - RNA, 21 nt, synthetic construct
  source 1..21: mol_type = other RNA
ggccaagacgtggctggtcca

SEQ ID NO: 74702 - RNA, 21 nt, synthetic construct
  source 1..21: mol_type = other RNA
ctggtccccgacagcagaaaa

SEQ ID NO: 74703 - RNA, 21 nt, synthetic construct
  source 1..21: mol_type = other RNA
ccccgacagcagaaaggatga

SEQ ID NO: 74704 - RNA, 21 nt, synthetic construct
  source 1..21: mol_type = other RNA
gccccgactggcacaccccca

SEQ ID NO: 74705 - RNA, 21 nt, synthetic construct
  source 1..21: mol_type = other RNA
cccggtgtctagcacacccaa

SEQ ID NO: 74706 - RNA, 21 nt, synthetic construct
  source 1..21: mol_type = other RNA
gccgctctgtgatctgatgca

SEQ ID NO: 74707 - RNA, 21 nt, synthetic construct
  source 1..21: mol_type = other RNA
cgggcccattcttcaacgcca

SEQ ID NO: 74708 - RNA, 21 nt, synthetic construct
  source 1..21: mol_type = other RNA
ggcccattcttcaacgcctga

SEQ ID NO: 74709 - RNA, 21 nt, synthetic construct
  source 1..21: mol_type = other RNA
gcctgcatcagcgaccactga

SEQ ID NO: 74710 - RNA, 21 nt, synthetic construct
  source 1..21: mol_type = other RNA
gaccactgcaggggccgccta

SEQ ID NO: 74711 - RNA, 21 nt, synthetic construct
  source 1..21: mol_type = other RNA
cctggaggcttacgcagagca

SEQ ID NO: 74712 - RNA, 21 nt, synthetic construct
  source 1..21: mol_type = other RNA
tacgcagagctctgccgcgca

SEQ ID NO: 74713 - RNA, 21 nt, synthetic construct
  source 1..21: mol_type = other RNA
agtgtacaagccatgcggcca

SEQ ID NO: 74714 - RNA, 21 nt, synthetic construct
  source 1..21: mol_type = other RNA
gccatgcggccccatacagca

SEQ ID NO: 74715 - RNA, 21 nt, synthetic construct
  source 1..21: mol_type = other RNA
gcggccccatacagcctgcca

SEQ ID NO: 74716 - RNA, 21 nt, synthetic construct
  source 1..21: mol_type = other RNA
cggccccatacagcctgccaa

SEQ ID NO: 74717 - RNA, 21 nt, synthetic construct
  source 1..21: mol_type = other RNA
ctgcaactctaggaaccagaa

SEQ ID NO: 74718 - RNA, 21 nt, synthetic construct
  source 1..21: mol_type = other RNA
gggcatctgcgtgcaggccta

SEQ ID NO: 74719 - RNA, 21 nt, synthetic construct
  source 1..21: mol_type = other RNA
acccgatgggtttcctaaata

SEQ ID NO: 74720 - RNA, 21 nt, synthetic construct
  source 1..21: mol_type = other RNA
cgatgggtttcctaaatttca

SEQ ID NO: 74721 - RNA, 21 nt, synthetic construct
  source 1..21: mol_type = other RNA
ggagcggtgggtcagcaacta

SEQ ID NO: 74722 - RNA, 21 nt, synthetic construct
  source 1..21: mol_type = other RNA
gccagtcctgcgtgtgtgaca

SEQ ID NO: 74723 - RNA, 21 nt, synthetic construct
  source 1..21: mol_type = other RNA
cagtcctgcgtgtgtgacgaa

SEQ ID NO: 74724 - RNA, 21 nt, synthetic construct
  source 1..21: mol_type = other RNA
cgtgtgtgacgagggttcaga

SEQ ID NO: 74725 - RNA, 21 nt, synthetic construct
  source 1..21: mol_type = other RNA
tcagtgtcggtgcagtgcaaa

SEQ ID NO: 74726 - RNA, 21 nt, synthetic construct
  source 1..21: mol_type = other RNA
ccctgtgacgcccagggtcaa

SEQ ID NO: 74727 - RNA, 21 nt, synthetic construct
  source 1..21: mol_type = other RNA
cgtcccggcttcgtaaccgta

SEQ ID NO: 74728 - RNA, 21 nt, synthetic construct
  source 1..21: mol_type = other RNA
ttcgtaaccgtgaccaggcca

SEQ ID NO: 74729 - RNA, 21 nt, synthetic construct
  source 1..21: mol_type = other RNA
gtaaccgtgaccaggccccga

SEQ ID NO: 74730 - RNA, 21 nt, synthetic construct
  source 1..21: mol_type = other RNA
gctgccccgagacggtgtgca

SEQ ID NO: 74731 - RNA, 21 nt, synthetic construct
  source 1..21: mol_type = other RNA
gtgttcgtacaatggcaccta

SEQ ID NO: 74732 - RNA, 21 nt, synthetic construct
  source 1..21: mol_type = other RNA
ccttctacggggttggtgcaa

SEQ ID NO: 74733 - RNA, 21 nt, synthetic construct
  source 1..21: mol_type = other RNA
gggttggtgcaaccttcccaa

SEQ ID NO: 74734 - RNA, 21 nt, synthetic construct
  source 1..21: mol_type = other RNA
ggttggtgcaaccttcccaga

SEQ ID NO: 74735 - RNA, 21 nt, synthetic construct
  source 1..21: mol_type = other RNA
gttggtgcaaccttcccagga

SEQ ID NO: 74736 - RNA, 21 nt, synthetic construct
  source 1..21: mol_type = other RNA
atgcctgcaacaatactacca

SEQ ID NO: 74737 - RNA, 21 nt, synthetic construct
  source 1..21: mol_type = other RNA
tgcaacaatactacctgtcca

SEQ ID NO: 74738 - RNA, 21 nt, synthetic construct
  source 1..21: mol_type = other RNA
tttgagtacaagagagtggca

SEQ ID NO: 74739 - RNA, 21 nt, synthetic construct
  source 1..21: mol_type = other RNA
ctgtggggagtgcgtccagaa

SEQ ID NO: 74740 - RNA, 21 nt, synthetic construct
  source 1..21: mol_type = other RNA
ggagtgcgtccagaccgccta

SEQ ID NO: 74741 - RNA, 21 nt, synthetic construct
  source 1..21: mol_type = other RNA
ctgcctcacgcccgatggcca

SEQ ID NO: 74742 - RNA, 21 nt, synthetic construct
  source 1..21: mol_type = other RNA
ctcacgcccgatggccagcca

SEQ ID NO: 74743 - RNA, 21 nt, synthetic construct
  source 1..21: mol_type = other RNA
aatgaaacctgggtcaacaga

SEQ ID NO: 74744 - RNA, 21 nt, synthetic construct
  source 1..21: mol_type = other RNA
gacaactgcaccgtgtaccta

SEQ ID NO: 74745 - RNA, 21 nt, synthetic construct
  source 1..21: mol_type = other RNA
aactgcaccgtgtacctctga

SEQ ID NO: 74746 - RNA, 21 nt, synthetic construct
  source 1..21: mol_type = other RNA
actgcaccgtgtacctctgta

SEQ ID NO: 74747 - RNA, 21 nt, synthetic construct
  source 1..21: mol_type = other RNA
ctgagggtggagtccatttga

SEQ ID NO: 74748 - RNA, 21 nt, synthetic construct
  source 1..21: mol_type = other RNA
tgagggtggagtccatttgca

SEQ ID NO: 74749 - RNA, 21 nt, synthetic construct
  source 1..21: mol_type = other RNA
cctgtcaagtccgcatcaaca

SEQ ID NO: 74750 - RNA, 21 nt, synthetic construct
  source 1..21: mol_type = other RNA
ctgtcaagtccgcatcaacaa

SEQ ID NO: 74751 - RNA, 21 nt, synthetic construct
  source 1..21: mol_type = other RNA
accagggctgcgagaccgaga

SEQ ID NO: 74752 - RNA, 21 nt, synthetic construct
  source 1..21: mol_type = other RNA
caacatcaccttctgcgagga

SEQ ID NO: 74753 - RNA, 21 nt, synthetic construct
  source 1..21: mol_type = other RNA
ctcctgccccggagcgtccaa

SEQ ID NO: 74754 - RNA, 21 nt, synthetic construct
  source 1..21: mol_type = other RNA
gcgtccaagtactcagcagaa

SEQ ID NO: 74755 - RNA, 21 nt, synthetic construct
  source 1..21: mol_type = other RNA
ccaagtactcagcagaggcca

SEQ ID NO: 74756 - RNA, 21 nt, synthetic construct
  source 1..21: mol_type = other RNA
gtcctaacggctcagccatca

SEQ ID NO: 74757 - RNA, 21 nt, synthetic construct
  source 1..21: mol_type = other RNA
taacggctcagccatcctgca

SEQ ID NO: 74758 - RNA, 21 nt, synthetic construct
  source 1..21: mol_type = other RNA
acctacacccacgtggatgaa

SEQ ID NO: 74759 - RNA, 21 nt, synthetic construct
  source 1..21: mol_type = other RNA
cctacacccacgtggatgaga

SEQ ID NO: 74760 - RNA, 21 nt, synthetic construct
  source 1..21: mol_type = other RNA
tacacccacgtggatgagtga

SEQ ID NO: 74761 - RNA, 21 nt, synthetic construct
  source 1..21: mol_type = other RNA
gcctgtgtgtggcaccccgca

SEQ ID NO: 74762 - RNA, 21 nt, synthetic construct
  source 1..21: mol_type = other RNA
gcaggacccctttcgggagga

SEQ ID NO: 74763 - RNA, 21 nt, synthetic construct
  source 1..21: mol_type = other RNA
cccctttcgggagggcgccaa

SEQ ID NO: 74764 - RNA, 21 nt, synthetic construct
  source 1..21: mol_type = other RNA
cctttcgggagggcgccacta

SEQ ID NO: 74765 - RNA, 21 nt, synthetic construct
  source 1..21: mol_type = other RNA
tttcgggagggcgccactcaa

SEQ ID NO: 74766 - RNA, 21 nt, synthetic construct
  source 1..21: mol_type = other RNA
ctcaggagtcctaccctggga

SEQ ID NO: 74767 - RNA, 21 nt, synthetic construct
  source 1..21: mol_type = other RNA
tatgtgtccctgccacggcca

SEQ ID NO: 74768 - RNA, 21 nt, synthetic construct
  source 1..21: mol_type = other RNA
cggattccagctggccacgta

SEQ ID NO: 74769 - RNA, 21 nt, synthetic construct
  source 1..21: mol_type = other RNA
ccagctggccacgtccggcca

SEQ ID NO: 74770 - RNA, 21 nt, synthetic construct
  source 1..21: mol_type = other RNA
tgcgacaggcaaggcggccga

SEQ ID NO: 74771 - RNA, 21 nt, synthetic construct
  source 1..21: mol_type = other RNA
gacaggcaaggcggccgccta

SEQ ID NO: 74772 - RNA, 21 nt, synthetic construct
  source 1..21: mol_type = other RNA
agggtaactcagggctgagga

SEQ ID NO: 74773 - RNA, 21 nt, synthetic construct
  source 1..21: mol_type = other RNA
ccacatgtgagcaccacggca

SEQ ID NO: 74774 - RNA, 21 nt, synthetic construct
  source 1..21: mol_type = other RNA
ccacatgtgagcaccacggca

SEQ ID NO: 74775 - RNA, 21 nt, synthetic construct
  source 1..21: mol_type = other RNA
ccacatgtgagcaccacggca

SEQ ID NO: 74776 - RNA, 21 nt, synthetic construct
  source 1..21: mol_type = other RNA
cctacaagatacgctacatga

SEQ ID NO: 74777 - RNA, 21 nt, synthetic construct
  source 1..21: mol_type = other RNA
gtcacgactacgagctgcgga

SEQ ID NO: 74778 - RNA, 21 nt, synthetic construct
  source 1..21: mol_type = other RNA
caaccgaaaagaccaccctaa

SEQ ID NO: 74779 - RNA, 21 nt, synthetic construct
  source 1..21: mol_type = other RNA
cacggccactacgatcacaga

SEQ ID NO: 74780 - RNA, 21 nt, synthetic construct
  source 1..21: mol_type = other RNA
ctgtctgagaacgttctgcca

SEQ ID NO: 74781 - RNA, 21 nt, synthetic construct
  source 1..21: mol_type = other RNA
tctgtcacgactacgagctga

SEQ ID NO: 74782 - RNA, 21 nt, synthetic construct
  source 1..21: mol_type = other RNA
gctgacattcctgtggaacga

SEQ ID NO: 74783 - RNA, 21 nt, synthetic construct
  source 1..21: mol_type = other RNA
caggacccctttcgggaggga

SEQ ID NO: 74784 - RNA, 21 nt, synthetic construct
  source 1..21: mol_type = other RNA
gcccgcgcagcacggattcca

SEQ ID NO: 74785 - RNA, 21 nt, synthetic construct
  source 1..21: mol_type = other RNA
ccgcgcagcacggattccaga

SEQ ID NO: 74786 - RNA, 21 nt, synthetic construct
  source 1..21: mol_type = other RNA
gctgaggtcgcaacggccaga

SEQ ID NO: 74787 - RNA, 21 nt, synthetic construct
  source 1..21: mol_type = other RNA
cgcccgcgcagcacggattca

SEQ ID NO: 74788 - RNA, 21 nt, synthetic construct
  source 1..21: mol_type = other RNA
cccctgcgtgggacccgatga

SEQ ID NO: 74789 - RNA, 21 nt, synthetic construct
  source 1..21: mol_type = other RNA
accacacacgggcgatcccta

SEQ ID NO: 74790 - RNA, 21 nt, synthetic construct
  source 1..21: mol_type = other RNA
accacacacgggcgatcccta

SEQ ID NO: 74791 - RNA, 21 nt, synthetic construct
  source 1..21: mol_type = other RNA
accacacacgggcgatcccta

SEQ ID NO: 74792 - RNA, 21 nt, synthetic construct
  source 1..21: mol_type = other RNA
tccagagctcgcccgacagga

SEQ ID NO: 74793 - RNA, 21 nt, synthetic construct
  source 1..21: mol_type = other RNA
acccagcactcgactccagca

SEQ ID NO: 74794 - RNA, 21 nt, synthetic construct
  source 1..21: mol_type = other RNA
cggtgcccaccggatccacga

SEQ ID NO: 74795 - RNA, 21 nt, synthetic construct
  source 1..21: mol_type = other RNA
acacacgggcgatccctgtca

SEQ ID NO: 74796 - RNA, 21 nt, synthetic construct
  source 1..21: mol_type = other RNA
acccagcactcgactccagca

SEQ ID NO: 74797 - RNA, 21 nt, synthetic construct
  source 1..21: mol_type = other RNA
cggtgcccaccggatccacga

SEQ ID NO: 74798 - RNA, 21 nt, synthetic construct
  source 1..21: mol_type = other RNA
cacacacgggcgatccctgta

SEQ ID NO: 74799 - RNA, 21 nt, synthetic construct
  source 1..21: mol_type = other RNA
cacacacgggcgatccctgta

SEQ ID NO: 74800 - RNA, 21 nt, synthetic construct
  source 1..21: mol_type = other RNA
cacttgccgcggcctgagtga

SEQ ID NO: 74801 - RNA, 21 nt, synthetic construct
  source 1..21: mol_type = other RNA
acagagacgacaatgagccca

SEQ ID NO: 74802 - RNA, 21 nt, synthetic construct
  source 1..21: mol_type = other RNA
aactaccacaaccacgggcta

SEQ ID NO: 74803 - RNA, 21 nt, synthetic construct
  source 1..21: mol_type = other RNA
gactaccacaaccacgggcta

SEQ ID NO: 74804 - RNA, 21 nt, synthetic construct
  source 1..21: mol_type = other RNA
aaagtgccgactaccacaaca

SEQ ID NO: 74805 - RNA, 21 nt, synthetic construct
  source 1..21: mol_type = other RNA
gactaccacaaccacgggcta

SEQ ID NO: 74806 - RNA, 21 nt, synthetic construct
  source 1..21: mol_type = other RNA
aaagtgccgactaccacaaca

SEQ ID NO: 74807 - RNA, 21 nt, synthetic construct
  source 1..21: mol_type = other RNA
gactaccacaaccacgggcta

SEQ ID NO: 74808 - RNA, 21 nt, synthetic construct
  source 1..21: mol_type = other RNA
aaagtgccgactaccacaaca

SEQ ID NO: 74809 - RNA, 21 nt, synthetic construct
  source 1..21: mol_type = other RNA
gactaccacaaccacgggcta

SEQ ID NO: 74810 - RNA, 21 nt, synthetic construct
  source 1..21: mol_type = other RNA
tgtacaagccatgcggcccca

SEQ ID NO: 74811 - RNA, 21 nt, synthetic construct
  source 1..21: mol_type = other RNA
ccagggctgcgagaccgagga

SEQ ID NO: 74812 - RNA, 21 nt, synthetic construct
  source 1..21: mol_type = other RNA
agcacggattccagctggcca

SEQ ID NO: 74813 - RNA, 21 nt, synthetic construct
  source 1..21: mol_type = other RNA
acggcctcccggccttcaaca

SEQ ID NO: 74814 - RNA, 21 nt, synthetic construct
  source 1..21: mol_type = other RNA
caggacctacagctaccagga

SEQ ID NO: 74815 - RNA, 21 nt, synthetic construct
  source 1..21: mol_type = other RNA
cttcaagatgtgctacaacta

SEQ ID NO: 74816 - RNA, 21 nt, synthetic construct
  source 1..21: mol_type = other RNA
acgacaatgagccccttgaca

SEQ ID NO: 74817 - RNA, 21 nt, synthetic construct
  source 1..21: mol_type = other RNA
caactaccacaaccacgggca

SEQ ID NO: 74818 - RNA, 21 nt, synthetic construct
  source 1..21: mol_type = other RNA
catccccccagtgctgaccaa

SEQ ID NO: 74819 - RNA, 21 nt, synthetic construct
  source 1..21: mol_type = other RNA
ccacacacgggcgatccctga

SEQ ID NO: 74820 - RNA, 21 nt, synthetic construct
  source 1..21: mol_type = other RNA
acacggtgcgcacagcctgga

SEQ ID NO: 74821 - RNA, 21 nt, synthetic construct
  source 1..21: mol_type = other RNA
tatccccccagtgctgaccaa

SEQ ID NO: 74822 - RNA, 21 nt, synthetic construct
  source 1..21: mol_type = other RNA
ccacacacgggcgatccctga

SEQ ID NO: 74823 - RNA, 21 nt, synthetic construct
  source 1..21: mol_type = other RNA
acacggtgcgcacagcctgga

SEQ ID NO: 74824 - RNA, 21 nt, synthetic construct
  source 1..21: mol_type = other RNA
ttccacggggacttcccacaa

SEQ ID NO: 74825 - RNA, 21 nt, synthetic construct
  source 1..21: mol_type = other RNA
cagtccaaggactgcaaccaa

SEQ ID NO: 74826 - RNA, 21 nt, synthetic construct
  source 1..21: mol_type = other RNA
ctttacacccatcccctccta

SEQ ID NO: 74827 - RNA, 21 nt, synthetic construct
  source 1..21: mol_type = other RNA
cacccttgggaccaccgggaa

SEQ ID NO: 74828 - RNA, 21 nt, synthetic construct
  source 1..21: mol_type = other RNA
catccccccagtgctgaccaa

SEQ ID NO: 74829 - RNA, 21 nt, synthetic construct
  source 1..21: mol_type = other RNA
accacacacgggcggtcccta

SEQ ID NO: 74830 - RNA, 21 nt, synthetic construct
  source 1..21: mol_type = other RNA
acacggtgcgcacagcctgga

SEQ ID NO: 74831 - RNA, 21 nt, synthetic construct
  source 1..21: mol_type = other RNA
tatccccccagtgctgaccaa

SEQ ID NO: 74832 - RNA, 21 nt, synthetic construct
  source 1..21: mol_type = other RNA
ccacacacgggcgatccctga

SEQ ID NO: 74833 - RNA, 21 nt, synthetic construct
  source 1..21: mol_type = other RNA
acacggtgcgcacagcctgga

SEQ ID NO: 74834 - RNA, 21 nt, synthetic construct
  source 1..21: mol_type = other RNA
ttccacggggacttcccacaa

SEQ ID NO: 74835 - RNA, 21 nt, synthetic construct
  source 1..21: mol_type = other RNA
cagtccaaggactgcaaccaa

SEQ ID NO: 74836 - RNA, 21 nt, synthetic construct
  source 1..21: mol_type = other RNA
cacccttgggaccaccgggaa

SEQ ID NO: 74837 - RNA, 21 nt, synthetic construct
  source 1..21: mol_type = other RNA
aactccagggacaacacccaa

SEQ ID NO: 74838 - RNA, 21 nt, synthetic construct
  source 1..21: mol_type = other RNA
cagtccaaggactgcaaccaa

SEQ ID NO: 74839 - RNA, 21 nt, synthetic construct
  source 1..21: mol_type = other RNA
ctttacacccatcccctccta

SEQ ID NO: 74840 - RNA, 21 nt, synthetic construct
  source 1..21: mol_type = other RNA
ggagggcctgatcctgtttga

SEQ ID NO: 74841 - RNA, 21 nt, synthetic construct
  source 1..21: mol_type = other RNA
cgcctgcatcagcgaccacta

SEQ ID NO: 74842 - RNA, 21 nt, synthetic construct
  source 1..21: mol_type = other RNA
ctgcaggggccgccttgagga

SEQ ID NO: 74843 - RNA, 21 nt, synthetic construct
  source 1..21: mol_type = other RNA
ccatgcggccccatacagcca

SEQ ID NO: 74844 - RNA, 21 nt, synthetic construct
  source 1..21: mol_type = other RNA
tgccacctgcaactctaggaa

SEQ ID NO: 74845 - RNA, 21 nt, synthetic construct
  source 1..21: mol_type = other RNA
cacacatgggcatctgcgtga

SEQ ID NO: 74846 - RNA, 21 nt, synthetic construct
  source 1..21: mol_type = other RNA
tcccggggagcggtgggtcaa

SEQ ID NO: 74847 - RNA, 21 nt, synthetic construct
  source 1..21: mol_type = other RNA
cggcttcgtaaccgtgaccaa

SEQ ID NO: 74848 - RNA, 21 nt, synthetic construct
  source 1..21: mol_type = other RNA
agggtggagtccatttgctga

SEQ ID NO: 74849 - RNA, 21 nt, synthetic construct
  source 1..21: mol_type = other RNA
caccagggctgcgagaccgaa

SEQ ID NO: 74850 - RNA, 21 nt, synthetic construct
  source 1..21: mol_type = other RNA
cgcaacggccaggtcagagaa

SEQ ID NO: 74851 - RNA, 21 nt, synthetic construct
  source 1..21: mol_type = other RNA
acccagcactcgactccagca

SEQ ID NO: 74852 - RNA, 21 nt, synthetic construct
  source 1..21: mol_type = other RNA
cggtgcccaccggatccacga

SEQ ID NO: 74853 - RNA, 21 nt, synthetic construct
  source 1..21: mol_type = other RNA
acacacgggcgatccctgtca

SEQ ID NO: 74854 - RNA, 21 nt, synthetic construct
  source 1..21: mol_type = other RNA
acccagcactcgactccagca

SEQ ID NO: 74855 - RNA, 21 nt, synthetic construct
  source 1..21: mol_type = other RNA
ggacgccctggaacaaactaa

SEQ ID NO: 74856 - RNA, 21 nt, synthetic construct
  source 1..21: mol_type = other RNA
ctacgccgaggcctagtggga

SEQ ID NO: 74857 - RNA, 21 nt, synthetic construct
  source 1..21: mol_type = other RNA
tggtacaatgggcaccgccca

SEQ ID NO: 74858 - RNA, 21 nt, synthetic construct
  source 1..21: mol_type = other RNA
cggtgcccaccggatccacga

SEQ ID NO: 74859 - RNA, 21 nt, synthetic construct
  source 1..21: mol_type = other RNA
tggaccacgtggaccgtccca

SEQ ID NO: 74860 - RNA, 21 nt, synthetic construct
  source 1..21: mol_type = other RNA
ccacgagcctggcgccaacaa

SEQ ID NO: 74861 - RNA, 21 nt, synthetic construct
  source 1..21: mol_type = other RNA
ggtgaaaccggccccagaaga

SEQ ID NO: 74862 - RNA, 21 nt, synthetic construct
  source 1..21: mol_type = other RNA
ccgcctatcacagaccaccaa

SEQ ID NO: 74863 - RNA, 21 nt, synthetic construct
  source 1..21: mol_type = other RNA
ccgcctatcacagaccaccaa

SEQ ID NO: 74864 - RNA, 21 nt, synthetic construct
  source 1..21: mol_type = other RNA
ccgcctatcacagaccaccaa

SEQ ID NO: 74865 - RNA, 21 nt, synthetic construct
  source 1..21: mol_type = other RNA
ccgcctatcacagaccaccaa

SEQ ID NO: 74866 - RNA, 21 nt, synthetic construct
  source 1..21: mol_type = other RNA
ccgcctatcacagaccaccaa

SEQ ID NO: 74867 - RNA, 21 nt, synthetic construct
  source 1..21: mol_type = other RNA
ttccctgccacatgtgtacca

SEQ ID NO: 74868 - RNA, 21 nt, synthetic construct
  source 1..21: mol_type = other RNA
tttcctaaatttcccggggaa

SEQ ID NO: 74869 - RNA, 21 nt, synthetic construct
  source 1..21: mol_type = other RNA
ggcggggactttgacacctaa

SEQ ID NO: 74870 - RNA, 21 nt, synthetic construct
  source 1..21: mol_type = other RNA
ggcggggactttgacacctaa

SEQ ID NO: 74871 - RNA, 21 nt, synthetic construct
  source 1..21: mol_type = other RNA
ggcggggactttgacacctaa

SEQ ID NO: 74872 - RNA, 21 nt, synthetic construct
  source 1..21: mol_type = other RNA
ggcggggactttgacacctaa

SEQ ID NO: 74873 - RNA, 21 nt, synthetic construct
  source 1..21: mol_type = other RNA
cgaccactgcaggggacgtga

SEQ ID NO: 74874 - RNA, 21 nt, synthetic construct
  source 1..21: mol_type = other RNA
cacctccacagtgcttaccga

SEQ ID NO: 74875 - RNA, 21 nt, synthetic construct
  source 1..21: mol_type = other RNA
cacctccacagtgcttaccga

SEQ ID NO: 74876 - RNA, 21 nt, synthetic construct
  source 1..21: mol_type = other RNA
aagagccgctgaccacgagca

SEQ ID NO: 74877 - RNA, 21 nt, synthetic construct
  source 1..21: mol_type = other RNA
atgtgtccctgccacggccga

SEQ ID NO: 74878 - RNA, 21 nt, synthetic construct
  source 1..21: mol_type = other RNA
ctgcgagaccgaggtcaacaa

SEQ ID NO: 74879 - RNA, 21 nt, synthetic construct
  source 1..21: mol_type = other RNA
tcatcgagacccacgggatga

SEQ ID NO: 74880 - RNA, 21 nt, synthetic construct
  source 1..21: mol_type = other RNA
tgtgctggctgacatcgagta

SEQ ID NO: 74881 - RNA, 21 nt, synthetic construct
  source 1..21: mol_type = other RNA
cacccttccaacacgctcaga

SEQ ID NO: 74882 - RNA, 21 nt, synthetic construct
  source 1..21: mol_type = other RNA
acacctccacagtgcttacca

SEQ ID NO: 74883 - RNA, 21 nt, synthetic construct
  source 1..21: mol_type = other RNA
ggccctctggcggggacttta

SEQ ID NO: 74884 - RNA, 21 nt, synthetic construct
  source 1..21: mol_type = other RNA
acacctccacagtgcttacca

SEQ ID NO: 74885 - RNA, 21 nt, synthetic construct
  source 1..21: mol_type = other RNA
ggccctctggcggggacttta

SEQ ID NO: 74886 - RNA, 21 nt, synthetic construct
  source 1..21: mol_type = other RNA
acacctccacagtgcttacca

SEQ ID NO: 74887 - RNA, 21 nt, synthetic construct
  source 1..21: mol_type = other RNA
ggccctctggcggggacttta

SEQ ID NO: 74888 - RNA, 21 nt, synthetic construct
  source 1..21: mol_type = other RNA
ggacccaccctacaagataca

SEQ ID NO: 74889 - RNA, 21 nt, synthetic construct
  source 1..21: mol_type = other RNA
gggactgcaaccgcccttcca

SEQ ID NO: 74890 - RNA, 21 nt, synthetic construct
  source 1..21: mol_type = other RNA
cgggcgatccctgccccccaa

SEQ ID NO: 74891 - RNA, 21 nt, synthetic construct
  source 1..21: mol_type = other RNA
ccaccgagtcacccccttcta

SEQ ID NO: 74892 - RNA, 21 nt, synthetic construct
  source 1..21: mol_type = other RNA
gggactgcaaccgcccttcca

SEQ ID NO: 74893 - RNA, 21 nt, synthetic construct
  source 1..21: mol_type = other RNA
aggaccaccgagtcaccccca

SEQ ID NO: 74894 - RNA, 21 nt, synthetic construct
  source 1..21: mol_type = other RNA
ccaccgagtcacccccttcta

SEQ ID NO: 74895 - RNA, 21 nt, synthetic construct
  source 1..21: mol_type = other RNA
gggactgcaaccgcccttcca

SEQ ID NO: 74896 - RNA, 21 nt, synthetic construct
  source 1..21: mol_type = other RNA
aggaccaccgagtcaccccca

SEQ ID NO: 74897 - RNA, 21 nt, synthetic construct
  source 1..21: mol_type = other RNA
ccaccgagtcacccccttcta

SEQ ID NO: 74898 - RNA, 21 nt, synthetic construct
  source 1..21: mol_type = other RNA
gggactgcaaccgcccttcca

SEQ ID NO: 74899 - RNA, 21 nt, synthetic construct
  source 1..21: mol_type = other RNA
aggaccaccgagtcaccccca

SEQ ID NO: 74900 - RNA, 21 nt, synthetic construct
  source 1..21: mol_type = other RNA
cccaccggttccacggccaca

SEQ ID NO: 74901 - RNA, 21 nt, synthetic construct
  source 1..21: mol_type = other RNA
gaagctgcgacaggcaaggca

SEQ ID NO: 74902 - RNA, 21 nt, synthetic construct
  source 1..21: mol_type = other RNA
accatggatggcggtgcccca

SEQ ID NO: 74903 - RNA, 21 nt, synthetic construct
  source 1..21: mol_type = other RNA
gcgggggctgatgtgcgccaa

SEQ ID NO: 74904 - RNA, 21 nt, synthetic construct
  source 1..21: mol_type = other RNA
taccagcgttacacccatcca

SEQ ID NO: 74905 - RNA, 21 nt, synthetic construct
  source 1..21: mol_type = other RNA
caggaccaccgagtcacccca

SEQ ID NO: 74906 - RNA, 21 nt, synthetic construct
  source 1..21: mol_type = other RNA
caggaccaccgagtcacccca

SEQ ID NO: 74907 - RNA, 21 nt, synthetic construct
  source 1..21: mol_type = other RNA
caggaccaccgagtcacccca

SEQ ID NO: 74908 - RNA, 21 nt, synthetic construct
  source 1..21: mol_type = other RNA
taccagcgttacacccatcca

SEQ ID NO: 74909 - RNA, 21 nt, synthetic construct
  source 1..21: mol_type = other RNA
ccgcgccctcagcatccacta

SEQ ID NO: 74910 - RNA, 21 nt, synthetic construct
  source 1..21: mol_type = other RNA
aggtgcaaccggtggcctgta

SEQ ID NO: 74911 - RNA, 21 nt, synthetic construct
  source 1..21: mol_type = other RNA
agcgcgtgccggacgctggta

SEQ ID NO: 74912 - RNA, 21 nt, synthetic construct
  source 1..21: mol_type = other RNA
ggcaactgcacggacgaggaa

SEQ ID NO: 74913 - RNA, 21 nt, synthetic construct
  source 1..21: mol_type = other RNA
tccacctatgatgagaaacta

SEQ ID NO: 74914 - RNA, 21 nt, synthetic construct
  source 1..21: mol_type = other RNA
ccacctatgatgagaaactca

SEQ ID NO: 74915 - RNA, 21 nt, synthetic construct
  source 1..21: mol_type = other RNA
cagcttcaccgtgctggctga

SEQ ID NO: 74916 - RNA, 21 nt, synthetic construct
  source 1..21: mol_type = other RNA
ccactcatgcaggtgtttgta

SEQ ID NO: 74917 - RNA, 21 nt, synthetic construct
  source 1..21: mol_type = other RNA
ctgtgtgcccgcccaggagta

SEQ ID NO: 74918 - RNA, 21 nt, synthetic construct
  source 1..21: mol_type = other RNA
tgggggctgcattgccgagga

SEQ ID NO: 74919 - RNA, 21 nt, synthetic construct
  source 1..21: mol_type = other RNA
ggaaccggaggtgggagtgca

SEQ ID NO: 74920 - RNA, 21 nt, synthetic construct
  source 1..21: mol_type = other RNA
tcctggtcatcgagacccaca

SEQ ID NO: 74921 - RNA, 21 nt, synthetic construct
  source 1..21: mol_type = other RNA
ctcgggtggcgactgcgagta

SEQ ID NO: 74922 - RNA, 21 nt, synthetic construct
  source 1..21: mol_type = other RNA
cacccagtggcatccagtgca

SEQ ID NO: 74923 - RNA, 21 nt, synthetic construct
  source 1..21: mol_type = other RNA
cagctaccaggacgtcatcta

SEQ ID NO: 74924 - RNA, 21 nt, synthetic construct
  source 1..21: mol_type = other RNA
gatgggcttggcgcctgctta

SEQ ID NO: 74925 - RNA, 21 nt, synthetic construct
  source 1..21: mol_type = other RNA
tctcagaaggactgacatcca

SEQ ID NO: 74926 - RNA, 21 nt, synthetic construct
  source 1..21: mol_type = other RNA
cagggacgacggggagcttga

SEQ ID NO: 74927 - RNA, 21 nt, synthetic construct
  source 1..21: mol_type = other RNA
ccatcccggggaccacccaca

SEQ ID NO: 74928 - RNA, 21 nt, synthetic construct
  source 1..21: mol_type = other RNA
cccacaccctagcagcaacca

SEQ ID NO: 74929 - RNA, 21 nt, synthetic construct
  source 1..21: mol_type = other RNA
caccccgggccacaccacgga

SEQ ID NO: 74930 - RNA, 21 nt, synthetic construct
  source 1..21: mol_type = other RNA
cacctccacagtgcttaccaa

SEQ ID NO: 74931 - RNA, 21 nt, synthetic construct
  source 1..21: mol_type = other RNA
ccatcccggggaccacccaca

SEQ ID NO: 74932 - RNA, 21 nt, synthetic construct
  source 1..21: mol_type = other RNA
tccactccagggacgacctga

SEQ ID NO: 74933 - RNA, 21 nt, synthetic construct
  source 1..21: mol_type = other RNA
accagctttacacccatccca

SEQ ID NO: 74934 - RNA, 21 nt, synthetic construct
  source 1..21: mol_type = other RNA
cacctccacagtgcttaccaa

SEQ ID NO: 74935 - RNA, 21 nt, synthetic construct
  source 1..21: mol_type = other RNA
ccatcccggggaccacccaca

SEQ ID NO: 74936 - RNA, 21 nt, synthetic construct
  source 1..21: mol_type = other RNA
ccgtgcggccggaggggcaga

SEQ ID NO: 74937 - RNA, 21 nt, synthetic construct
  source 1..21: mol_type = other RNA
cacctccacagtgcttaccaa

SEQ ID NO: 74938 - RNA, 21 nt, synthetic construct
  source 1..21: mol_type = other RNA
caccccgggccacaccacgga

SEQ ID NO: 74939 - RNA, 21 nt, synthetic construct
  source 1..21: mol_type = other RNA
ccatcccggggaccacccaca

SEQ ID NO: 74940 - RNA, 21 nt, synthetic construct
  source 1..21: mol_type = other RNA
accagctttacacccatccca

SEQ ID NO: 74941 - RNA, 21 nt, synthetic construct
  source 1..21: mol_type = other RNA
aatccacacctcctctactca

SEQ ID NO: 74942 - RNA, 21 nt, synthetic construct
  source 1..21: mol_type = other RNA
atccacacctcctctactcca

SEQ ID NO: 74943 - RNA, 21 nt, synthetic construct
  source 1..21: mol_type = other RNA
caagggccaccaattccacga

SEQ ID NO: 74944 - RNA, 21 nt, synthetic construct
  source 1..21: mol_type = other RNA
cactgccgccagttgcaagga

SEQ ID NO: 74945 - RNA, 21 nt, synthetic construct
  source 1..21: mol_type = other RNA
gtgtctagcacacccacccca

SEQ ID NO: 74946 - RNA, 21 nt, synthetic construct
  source 1..21: mol_type = other RNA
cgaggtgcaaccggtggccta

SEQ ID NO: 74947 - RNA, 21 nt, synthetic construct
  source 1..21: mol_type = other RNA
atttcccggggagcggtggga

SEQ ID NO: 74948 - RNA, 21 nt, synthetic construct
  source 1..21: mol_type = other RNA
ggtcagcaactgccagtccta

SEQ ID NO: 74949 - RNA, 21 nt, synthetic construct
  source 1..21: mol_type = other RNA
agtcctgcgtgtgtgacgaga

SEQ ID NO: 74950 - RNA, 21 nt, synthetic construct
  source 1..21: mol_type = other RNA
ccttccgctgcagacctcaga

SEQ ID NO: 74951 - RNA, 21 nt, synthetic construct
  source 1..21: mol_type = other RNA
cagccagtccagctgaatgaa

SEQ ID NO: 74952 - RNA, 21 nt, synthetic construct
  source 1..21: mol_type = other RNA
acccctttcgggagggcgcca

SEQ ID NO: 74953 - RNA, 21 nt, synthetic construct
  source 1..21: mol_type = other RNA
tgacattcctgtggaacggaa

SEQ ID NO: 74954 - RNA, 21 nt, synthetic construct
  source 1..21: mol_type = other RNA
aaccggtggcctgtgcgacca

SEQ ID NO: 74955 - RNA, 21 nt, synthetic construct
  source 1..21: mol_type = other RNA
acacctccacagtgcttacca

SEQ ID NO: 74956 - RNA, 21 nt, synthetic construct
  source 1..21: mol_type = other RNA
ggccctctggcggggacttta

SEQ ID NO: 74957 - RNA, 21 nt, synthetic construct
  source 1..21: mol_type = other RNA
acacctccacagtgcttacca

SEQ ID NO: 74958 - RNA, 21 nt, synthetic construct
  source 1..21: mol_type = other RNA
ccacgtggaccgtcccagcaa

SEQ ID NO: 74959 - RNA, 21 nt, synthetic construct
  source 1..21: mol_type = other RNA
ggtttcctaaatttcccggga

SEQ ID NO: 74960 - RNA, 21 nt, synthetic construct
  source 1..21: mol_type = other RNA
acacagaccagtggtactcca

SEQ ID NO: 74961 - RNA, 21 nt, synthetic construct
  source 1..21: mol_type = other RNA
acacagaccagtggtactcca

SEQ ID NO: 74962 - RNA, 21 nt, synthetic construct
  source 1..21: mol_type = other RNA
acacagaccagtggtactcca

SEQ ID NO: 74963 - RNA, 21 nt, synthetic construct
  source 1..21: mol_type = other RNA
acacagaccagtggtactcca

SEQ ID NO: 74964 - RNA, 21 nt, synthetic construct
  source 1..21: mol_type = other RNA
acacagaccagtggtactcca

SEQ ID NO: 74965 - RNA, 21 nt, synthetic construct
  source 1..21: mol_type = other RNA
cctgcgtgggacccgatggga

SEQ ID NO: 74966 - RNA, 21 nt, synthetic construct
  source 1..21: mol_type = other RNA
ggctccgtcctcatcaatgga

SEQ ID NO: 74967 - RNA, 21 nt, synthetic construct
  source 1..21: mol_type = other RNA
cactgctgtctgagaacgtta

SEQ ID NO: 74968 - RNA, 21 nt, synthetic construct
  source 1..21: mol_type = other RNA
cacggccatccgggtccaaga

SEQ ID NO: 74969 - RNA, 21 nt, synthetic construct
  source 1..21: mol_type = other RNA
gcgggaacttcgacgacaata

SEQ ID NO: 74970 - RNA, 21 nt, synthetic construct
  source 1..21: mol_type = other RNA
cactgcaggggacgtgccaca

SEQ ID NO: 74971 - RNA, 21 nt, synthetic construct
  source 1..21: mol_type = other RNA
tcggcccccataaccacggta

SEQ ID NO: 74972 - RNA, 21 nt, synthetic construct
  source 1..21: mol_type = other RNA
tcggcccccataaccacggta

SEQ ID NO: 74973 - RNA, 21 nt, synthetic construct
  source 1..21: mol_type = other RNA
tcggcccccataaccacggta

SEQ ID NO: 74974 - RNA, 21 nt, synthetic construct
  source 1..21: mol_type = other RNA
ggccggcaactgcacggacga

SEQ ID NO: 74975 - RNA, 21 nt, synthetic construct
  source 1..21: mol_type = other RNA
gggaacttcgacgacaatgca

SEQ ID NO: 74976 - RNA, 21 nt, synthetic construct
  source 1..21: mol_type = other RNA
aaccactggatccacggccaa

SEQ ID NO: 74977 - RNA, 21 nt, synthetic construct
  source 1..21: mol_type = other RNA
gagctgtaactgcacacccaa

SEQ ID NO: 74978 - RNA, 21 nt, synthetic construct
  source 1..21: mol_type = other RNA
gtccactggatccacggccaa

SEQ ID NO: 74979 - RNA, 21 nt, synthetic construct
  source 1..21: mol_type = other RNA
cccctgggcctcgagtgccga

SEQ ID NO: 74980 - RNA, 21 nt, synthetic construct
  source 1..21: mol_type = other RNA
gtccactggatccacggccaa

SEQ ID NO: 74981 - RNA, 21 nt, synthetic construct
  source 1..21: mol_type = other RNA
acaaccagaggttccacggta

SEQ ID NO: 74982 - RNA, 21 nt, synthetic construct
  source 1..21: mol_type = other RNA
cccaataaccacggtggtgaa

SEQ ID NO: 74983 - RNA, 21 nt, synthetic construct
  source 1..21: mol_type = other RNA
cccctgggcctcgagtgccga

SEQ ID NO: 74984 - RNA, 21 nt, synthetic construct
  source 1..21: mol_type = other RNA
cccctgggcctcgagtgccga

SEQ ID NO: 74985 - RNA, 21 nt, synthetic construct
  source 1..21: mol_type = other RNA
gtccactggatccacggccaa

SEQ ID NO: 74986 - RNA, 21 nt, synthetic construct
  source 1..21: mol_type = other RNA
cgggaacttcgacgacaatga

SEQ ID NO: 74987 - RNA, 21 nt, synthetic construct
  source 1..21: mol_type = other RNA
ccggccggcaactgcacggaa

SEQ ID NO: 74988 - RNA, 21 nt, synthetic construct
  source 1..21: mol_type = other RNA
ttaaggcggtggcgagaggga

SEQ ID NO: 74989 - RNA, 21 nt, synthetic construct
  source 1..21: mol_type = other RNA
gccccgtgacggtcaccccca

SEQ ID NO: 74990 - RNA, 21 nt, synthetic construct
  source 1..21: mol_type = other RNA
tgtgttcgtacaatggcacca

SEQ ID NO: 74991 - RNA, 21 nt, synthetic construct
  source 1..21: mol_type = other RNA
cacgcactggtggacagcaca

SEQ ID NO: 74992 - RNA, 21 nt, synthetic construct
  source 1..21: mol_type = other RNA
tcttcaacgcacacatgggca

SEQ ID NO: 74993 - RNA, 21 nt, synthetic construct
  source 1..21: mol_type = other RNA
gcattgccgaggaggactgca

SEQ ID NO: 74994 - RNA, 21 nt, synthetic construct
  source 1..21: mol_type = other RNA
acgggcgatccctgtccccca

SEQ ID NO: 74995 - RNA, 21 nt, synthetic construct
  source 1..21: mol_type = other RNA
acgggcgatccctgtccccca

SEQ ID NO: 74996 - RNA, 21 nt, synthetic construct
  source 1..21: mol_type = other RNA
gagtcctaccctgggagagca

SEQ ID NO: 74997 - RNA, 21 nt, synthetic construct
  source 1..21: mol_type = other RNA
caccatggatggcggtgccca

SEQ ID NO: 74998 - RNA, 21 nt, synthetic construct
  source 1..21: mol_type = other RNA
gccccgacgtcctcgcccaca

SEQ ID NO: 74999 - RNA, 21 nt, synthetic construct
  source 1..21: mol_type = other RNA
gcactgcgtacctggccgcca

SEQ ID NO: 75000 - RNA, 21 nt, synthetic construct
  source 1..21: mol_type = other RNA
gccagccgcggaactggagga

SEQ ID NO: 75001 - RNA, 21 nt, synthetic construct
  source 1..21: mol_type = other RNA
caagcggacggcggcgtgtta

SEQ ID NO: 75002 - RNA, 21 nt, synthetic construct
  source 1..21: mol_type = other RNA
acgacttcacggccctcagca

SEQ ID NO: 75003 - RNA, 21 nt, synthetic construct
  source 1..21: mol_type = other RNA
tgaccgatcccaacagtgcca

SEQ ID NO: 75004 - RNA, 21 nt, synthetic construct
  source 1..21: mol_type = other RNA
tgggaagctaagctgcctgga

SEQ ID NO: 75005 - RNA, 21 nt, synthetic construct
  source 1..21: mol_type = other RNA
tgtgcacaacgaggccaccta

SEQ ID NO: 75006 - RNA, 21 nt, synthetic construct
  source 1..21: mol_type = other RNA
ggacaggacctacagctacca

SEQ ID NO: 75007 - RNA, 21 nt, synthetic construct
  source 1..21: mol_type = other RNA
cagccacaacgccattcacca

SEQ ID NO: 75008 - RNA, 21 nt, synthetic construct
  source 1..21: mol_type = other RNA
ccacaccctagcagcaaccaa

SEQ ID NO: 75009 - RNA, 21 nt, synthetic construct
  source 1..21: mol_type = other RNA
ttgacacctactccaacatca

SEQ ID NO: 75010 - RNA, 21 nt, synthetic construct
  source 1..21: mol_type = other RNA
ttgacacctactccaacatca

SEQ ID NO: 75011 - RNA, 21 nt, synthetic construct
  source 1..21: mol_type = other RNA
ttgacacctactccaacatca

SEQ ID NO: 75012 - RNA, 21 nt, synthetic construct
  source 1..21: mol_type = other RNA
ttgacacctactccaacatca

SEQ ID NO: 75013 - RNA, 21 nt, synthetic construct
  source 1..21: mol_type = other RNA
ccccgactggcacacccccca

SEQ ID NO: 75014 - RNA, 21 nt, synthetic construct
  source 1..21: mol_type = other RNA
gaggcttacgcagagctctga

SEQ ID NO: 75015 - RNA, 21 nt, synthetic construct
  source 1..21: mol_type = other RNA
cccgagacggtgtgcgtgtga

SEQ ID NO: 75016 - RNA, 21 nt, synthetic construct
  source 1..21: mol_type = other RNA
cacccacgtggatgagtgtga

SEQ ID NO: 75017 - RNA, 21 nt, synthetic construct
  source 1..21: mol_type = other RNA
cccgagcgcgtgccggacgca

SEQ ID NO: 75018 - RNA, 21 nt, synthetic construct
  source 1..21: mol_type = other RNA
acaccatggatggcggtgcca

SEQ ID NO: 75019 - RNA, 21 nt, synthetic construct
  source 1..21: mol_type = other RNA
gcacctggggtgacttccaca

SEQ ID NO: 75020 - RNA, 21 nt, synthetic construct
  source 1..21: mol_type = other RNA
gtccaacggctccgtcctcaa

SEQ ID NO: 75021 - RNA, 21 nt, synthetic construct
  source 1..21: mol_type = other RNA
catccggctggtgctgacata

SEQ ID NO: 75022 - RNA, 21 nt, synthetic construct
  source 1..21: mol_type = other RNA
ccagccgcggaactggaggta

SEQ ID NO: 75023 - RNA, 21 nt, synthetic construct
  source 1..21: mol_type = other RNA
agccgcggaactggaggtgca

SEQ ID NO: 75024 - RNA, 21 nt, synthetic construct
  source 1..21: mol_type = other RNA
cctacagcccgggcacctcca

SEQ ID NO: 75025 - RNA, 21 nt, synthetic construct
  source 1..21: mol_type = other RNA
cttcatcgtggtgcagacaga

SEQ ID NO: 75026 - RNA, 21 nt, synthetic construct
  source 1..21: mol_type = other RNA
tgcctgtgccaatgccaggaa

SEQ ID NO: 75027 - RNA, 21 nt, synthetic construct
  source 1..21: mol_type = other RNA
gcctgtgccaatgccaggaaa

SEQ ID NO: 75028 - RNA, 21 nt, synthetic construct
  source 1..21: mol_type = other RNA
gctacgagctgatcctccaaa

SEQ ID NO: 75029 - RNA, 21 nt, synthetic construct
  source 1..21: mol_type = other RNA
aagaccagcgtgttcatccga

SEQ ID NO: 75030 - RNA, 21 nt, synthetic construct
  source 1..21: mol_type = other RNA
gcgtgtgcctgcgactcggga

SEQ ID NO: 75031 - RNA, 21 nt, synthetic construct
  source 1..21: mol_type = other RNA
tggcgactgcgagtgtttcta

SEQ ID NO: 75032 - RNA, 21 nt, synthetic construct
  source 1..21: mol_type = other RNA
acaccaccgatgggcttggca

SEQ ID NO: 75033 - RNA, 21 nt, synthetic construct
  source 1..21: mol_type = other RNA
accgatgggcttggcgcctga

SEQ ID NO: 75034 - RNA, 21 nt, synthetic construct
  source 1..21: mol_type = other RNA
ccaccgtgtgtgtccgcgaga

SEQ ID NO: 75035 - RNA, 21 nt, synthetic construct
  source 1..21: mol_type = other RNA
cggtcgacggcggccctcaca

SEQ ID NO: 75036 - RNA, 21 nt, synthetic construct
  source 1..21: mol_type = other RNA
tcgacggcggccctcacctca

SEQ ID NO: 75037 - RNA, 21 nt, synthetic construct
  source 1..21: mol_type = other RNA
gctcgcccgacaggcacagca

SEQ ID NO: 75038 - RNA, 21 nt, synthetic construct
  source 1..21: mol_type = other RNA
aggccgagaccagcacgccca

SEQ ID NO: 75039 - RNA, 21 nt, synthetic construct
  source 1..21: mol_type = other RNA
atgagccccttgactaacaca

SEQ ID NO: 75040 - RNA, 21 nt, synthetic construct
  source 1..21: mol_type = other RNA
gccccttgactaacaccacca

SEQ ID NO: 75041 - RNA, 21 nt, synthetic construct
  source 1..21: mol_type = other RNA
gaacagctcacactaccaaaa

SEQ ID NO: 75042 - RNA, 21 nt, synthetic construct
  source 1..21: mol_type = other RNA
acagctcacactaccaaagta

SEQ ID NO: 75043 - RNA, 21 nt, synthetic construct
  source 1..21: mol_type = other RNA
aggctccacggtgacccccta

SEQ ID NO: 75044 - RNA, 21 nt, synthetic construct
  source 1..21: mol_type = other RNA
ccatccccccagtgctgacca

SEQ ID NO: 75045 - RNA, 21 nt, synthetic construct
  source 1..21: mol_type = other RNA
cacacccagcaagacccgcaa

SEQ ID NO: 75046 - RNA, 21 nt, synthetic construct
  source 1..21: mol_type = other RNA
ccagctctacggccatgccca

SEQ ID NO: 75047 - RNA, 21 nt, synthetic construct
  source 1..21: mol_type = other RNA
agagccgagcactacagccaa

SEQ ID NO: 75048 - RNA, 21 nt, synthetic construct
  source 1..21: mol_type = other RNA
ctacagccaccgtgacggtga

SEQ ID NO: 75049 - RNA, 21 nt, synthetic construct
  source 1..21: mol_type = other RNA
ctggcaccccacatgtgagca

SEQ ID NO: 75050 - RNA, 21 nt, synthetic construct
  source 1..21: mol_type = other RNA
gcaccccacatgtgagcacca

SEQ ID NO: 75051 - RNA, 21 nt, synthetic construct
  source 1..21: mol_type = other RNA
ccccacatgtgagcaccacga

SEQ ID NO: 75052 - RNA, 21 nt, synthetic construct
  source 1..21: mol_type = other RNA
acatgtgagcaccacggccaa

SEQ ID NO: 75053 - RNA, 21 nt, synthetic construct
  source 1..21: mol_type = other RNA
gaacagctcacactaccaaaa

SEQ ID NO: 75054 - RNA, 21 nt, synthetic construct
  source 1..21: mol_type = other RNA
acagctcacactaccaaagta

SEQ ID NO: 75055 - RNA, 21 nt, synthetic construct
  source 1..21: mol_type = other RNA
tgctgactaccacaaccacga

SEQ ID NO: 75056 - RNA, 21 nt, synthetic construct
  source 1..21: mol_type = other RNA
ctcaactccagggacaacaca

SEQ ID NO: 75057 - RNA, 21 nt, synthetic construct
  source 1..21: mol_type = other RNA
ctatccccccagtgctgacca

SEQ ID NO: 75058 - RNA, 21 nt, synthetic construct
  source 1..21: mol_type = other RNA
cacacccagcaagacccgcaa

SEQ ID NO: 75059 - RNA, 21 nt, synthetic construct
  source 1..21: mol_type = other RNA
tcacccttgggaccaccggga

SEQ ID NO: 75060 - RNA, 21 nt, synthetic construct
  source 1..21: mol_type = other RNA
ccgggaccctcccagaacaga

SEQ ID NO: 75061 - RNA, 21 nt, synthetic construct
  source 1..21: mol_type = other RNA
tgtccacaatccacccctcca

SEQ ID NO: 75062 - RNA, 21 nt, synthetic construct
  source 1..21: mol_type = other RNA
cagtgctgaccacgaaggcca

SEQ ID NO: 75063 - RNA, 21 nt, synthetic construct
  source 1..21: mol_type = other RNA
ctacagccaccgtgacggtga

SEQ ID NO: 75064 - RNA, 21 nt, synthetic construct
  source 1..21: mol_type = other RNA
ggcaactgctggcaccctcaa

SEQ ID NO: 75065 - RNA, 21 nt, synthetic construct
  source 1..21: mol_type = other RNA
gaacagctcacactaccaaaa

SEQ ID NO: 75066 - RNA, 21 nt, synthetic construct
  source 1..21: mol_type = other RNA
acagctcacactaccaaagta

SEQ ID NO: 75067 - RNA, 21 nt, synthetic construct
  source 1..21: mol_type = other RNA
aggctccacggtgacccccta

SEQ ID NO: 75068 - RNA, 21 nt, synthetic construct
  source 1..21: mol_type = other RNA
ccatccccccagtgctgacca

SEQ ID NO: 75069 - RNA, 21 nt, synthetic construct
  source 1..21: mol_type = other RNA
cacacccagcaagacccgcaa

SEQ ID NO: 75070 - RNA, 21 nt, synthetic construct
  source 1..21: mol_type = other RNA
ccacggtggtgaccacgggca

SEQ ID NO: 75071 - RNA, 21 nt, synthetic construct
  source 1..21: mol_type = other RNA
agagccgagcactacagccaa

SEQ ID NO: 75072 - RNA, 21 nt, synthetic construct
  source 1..21: mol_type = other RNA
ctacagccaccgtgacggtga

SEQ ID NO: 75073 - RNA, 21 nt, synthetic construct
  source 1..21: mol_type = other RNA
ctggcaccccacatgtgagca

SEQ ID NO: 75074 - RNA, 21 nt, synthetic construct
  source 1..21: mol_type = other RNA
gcaccccacatgtgagcacca

SEQ ID NO: 75075 - RNA, 21 nt, synthetic construct
  source 1..21: mol_type = other RNA
ccccacatgtgagcaccacga

SEQ ID NO: 75076 - RNA, 21 nt, synthetic construct
  source 1..21: mol_type = other RNA
acatgtgagcaccacggccaa

SEQ ID NO: 75077 - RNA, 21 nt, synthetic construct
  source 1..21: mol_type = other RNA
gaacagctcacactaccaaaa

SEQ ID NO: 75078 - RNA, 21 nt, synthetic construct
  source 1..21: mol_type = other RNA
acagctcacactaccaaagta

SEQ ID NO: 75079 - RNA, 21 nt, synthetic construct
  source 1..21: mol_type = other RNA
ccacacccacaaccagtggca

SEQ ID NO: 75080 - RNA, 21 nt, synthetic construct
  source 1..21: mol_type = other RNA
gtggctccacggtgaccccca

SEQ ID NO: 75081 - RNA, 21 nt, synthetic construct
  source 1..21: mol_type = other RNA
tggctccacggtgacccccta

SEQ ID NO: 75082 - RNA, 21 nt, synthetic construct
  source 1..21: mol_type = other RNA
actcccccatcactgatcaca

SEQ ID NO: 75083 - RNA, 21 nt, synthetic construct
  source 1..21: mol_type = other RNA
ctcccccatcactgatcacca

SEQ ID NO: 75084 - RNA, 21 nt, synthetic construct
  source 1..21: mol_type = other RNA
ctcaactccagggacaacaca

SEQ ID NO: 75085 - RNA, 21 nt, synthetic construct
  source 1..21: mol_type = other RNA
ctatccccccagtgctgacca

SEQ ID NO: 75086 - RNA, 21 nt, synthetic construct
  source 1..21: mol_type = other RNA
cacacccagcaagacccgcaa

SEQ ID NO: 75087 - RNA, 21 nt, synthetic construct
  source 1..21: mol_type = other RNA
ccacggtggtgaccacgggca

SEQ ID NO: 75088 - RNA, 21 nt, synthetic construct
  source 1..21: mol_type = other RNA
ccagctctacggccatgccca

SEQ ID NO: 75089 - RNA, 21 nt, synthetic construct
  source 1..21: mol_type = other RNA
ccacccttgggaccaccggga

SEQ ID NO: 75090 - RNA, 21 nt, synthetic construct
  source 1..21: mol_type = other RNA
ccgggaccctcccagaacaga

SEQ ID NO: 75091 - RNA, 21 nt, synthetic construct
  source 1..21: mol_type = other RNA
acagaccaccacacccgtgga

SEQ ID NO: 75092 - RNA, 21 nt, synthetic construct
  source 1..21: mol_type = other RNA
tgtccacaatccacccctcca

SEQ ID NO: 75093 - RNA, 21 nt, synthetic construct
  source 1..21: mol_type = other RNA
cagtgctgaccacgaaggcca

SEQ ID NO: 75094 - RNA, 21 nt, synthetic construct
  source 1..21: mol_type = other RNA
agagccgagcactacagccaa

SEQ ID NO: 75095 - RNA, 21 nt, synthetic construct
  source 1..21: mol_type = other RNA
ctacagccaccgtgacggtga

SEQ ID NO: 75096 - RNA, 21 nt, synthetic construct
  source 1..21: mol_type = other RNA
ctggcaccccacatgtgagca

SEQ ID NO: 75097 - RNA, 21 nt, synthetic construct
  source 1..21: mol_type = other RNA
gcaccccacatgtgagcacca

SEQ ID NO: 75098 - RNA, 21 nt, synthetic construct
  source 1..21: mol_type = other RNA
ccccacatgtgagcaccacga

SEQ ID NO: 75099 - RNA, 21 nt, synthetic construct
  source 1..21: mol_type = other RNA
acatgtgagcaccacggccaa

SEQ ID NO: 75100 - RNA, 21 nt, synthetic construct
  source 1..21: mol_type = other RNA
gggactgcaactgcccttcca

SEQ ID NO: 75101 - RNA, 21 nt, synthetic construct
  source 1..21: mol_type = other RNA
gaacagctcacactaccaaaa

SEQ ID NO: 75102 - RNA, 21 nt, synthetic construct
  source 1..21: mol_type = other RNA
acagctcacactaccaaagta

SEQ ID NO: 75103 - RNA, 21 nt, synthetic construct
  source 1..21: mol_type = other RNA
ccacacccacaaccagtggca

SEQ ID NO: 75104 - RNA, 21 nt, synthetic construct
  source 1..21: mol_type = other RNA
gtggctccacggtgaccccca

SEQ ID NO: 75105 - RNA, 21 nt, synthetic construct
  source 1..21: mol_type = other RNA
tggctccacggtgacccccta

SEQ ID NO: 75106 - RNA, 21 nt, synthetic construct
  source 1..21: mol_type = other RNA
ctcaactccagggacaacaca

SEQ ID NO: 75107 - RNA, 21 nt, synthetic construct
  source 1..21: mol_type = other RNA
cagggacaacacccatcacca

SEQ ID NO: 75108 - RNA, 21 nt, synthetic construct
  source 1..21: mol_type = other RNA
gtggaccgtcccagcacagaa

SEQ ID NO: 75109 - RNA, 21 nt, synthetic construct
  source 1..21: mol_type = other RNA
caccatgacaagggccaccaa

SEQ ID NO: 75110 - RNA, 21 nt, synthetic construct
  source 1..21: mol_type = other RNA
tctggggacgacccggatcca

SEQ ID NO: 75111 - RNA, 21 nt, synthetic construct
  source 1..21: mol_type = other RNA
tgaccgcttccagggcgccta

SEQ ID NO: 75112 - RNA, 21 nt, synthetic construct
  source 1..21: mol_type = other RNA
gcttccagggcgcctgtccca

SEQ ID NO: 75113 - RNA, 21 nt, synthetic construct
  source 1..21: mol_type = other RNA
gcacgctttgggaatctcaga

SEQ ID NO: 75114 - RNA, 21 nt, synthetic construct
  source 1..21: mol_type = other RNA
gcagccccggtgtctagcaca

SEQ ID NO: 75115 - RNA, 21 nt, synthetic construct
  source 1..21: mol_type = other RNA
agccccggtgtctagcacaca

SEQ ID NO: 75116 - RNA, 21 nt, synthetic construct
  source 1..21: mol_type = other RNA
tgagtgccacaaccttgtgca

SEQ ID NO: 75117 - RNA, 21 nt, synthetic construct
  source 1..21: mol_type = other RNA
acgcctgcatcagcgaccaca

SEQ ID NO: 75118 - RNA, 21 nt, synthetic construct
  source 1..21: mol_type = other RNA
ccactgcaggggccgccttga

SEQ ID NO: 75119 - RNA, 21 nt, synthetic construct
  source 1..21: mol_type = other RNA
acgcagagctctgccgcgcca

SEQ ID NO: 75120 - RNA, 21 nt, synthetic construct
  source 1..21: mol_type = other RNA
ccatacagcctgccacctgca

SEQ ID NO: 75121 - RNA, 21 nt, synthetic construct
  source 1..21: mol_type = other RNA
ttcagtgtcggtgcagtgcaa

SEQ ID NO: 75122 - RNA, 21 nt, synthetic construct
  source 1..21: mol_type = other RNA
ctgtgacgcccagggtcagca

SEQ ID NO: 75123 - RNA, 21 nt, synthetic construct
  source 1..21: mol_type = other RNA
gggtcagcccccgccgtgcaa

SEQ ID NO: 75124 - RNA, 21 nt, synthetic construct
  source 1..21: mol_type = other RNA
ccgccagggcaggagtccata

SEQ ID NO: 75125 - RNA, 21 nt, synthetic construct
  source 1..21: mol_type = other RNA
tccctgccacatgtgtaccta

SEQ ID NO: 75126 - RNA, 21 nt, synthetic construct
  source 1..21: mol_type = other RNA
gctgaatgaaacctgggtcaa

SEQ ID NO: 75127 - RNA, 21 nt, synthetic construct
  source 1..21: mol_type = other RNA
atgtggacaactgcaccgtga

SEQ ID NO: 75128 - RNA, 21 nt, synthetic construct
  source 1..21: mol_type = other RNA
gtccaagtactcagcagagga

SEQ ID NO: 75129 - RNA, 21 nt, synthetic construct
  source 1..21: mol_type = other RNA
cccgtgggtgaaaccggccca

SEQ ID NO: 75130 - RNA, 21 nt, synthetic construct
  source 1..21: mol_type = other RNA
tccctgccacggccggagcga

SEQ ID NO: 75131 - RNA, 21 nt, synthetic construct
  source 1..21: mol_type = other RNA
cgcgcagcacggattccagca

SEQ ID NO: 75132 - RNA, 21 nt, synthetic construct
  source 1..21: mol_type = other RNA
acttcaacgtccagctacgca

SEQ ID NO: 75133 - RNA, 21 nt, synthetic construct
  source 1..21: mol_type = other RNA
gacggcggccctcacctcgca

SEQ ID NO: 75134 - RNA, 21 nt, synthetic construct
  source 1..21: mol_type = other RNA
cgaggacttcaacgtccagca

SEQ ID NO: 75135 - RNA, 21 nt, synthetic construct
  source 1..21: mol_type = other RNA
cccctgggcctcgagtgccga

SEQ ID NO: 75136 - RNA, 21 nt, synthetic construct
  source 1..21: mol_type = other RNA
atccactggatccacggccaa

SEQ ID NO: 75137 - RNA, 21 nt, synthetic construct
  source 1..21: mol_type = other RNA
gtccactggatccacggccaa

SEQ ID NO: 75138 - RNA, 21 nt, synthetic construct
  source 1..21: mol_type = other RNA
gctgcgagaccgaggtcaaca

SEQ ID NO: 75139 - RNA, 21 nt, synthetic construct
  source 1..21: mol_type = other RNA
gcctgcgactcgggtggcgaa

SEQ ID NO: 75140 - RNA, 21 nt, synthetic construct
  source 1..21: mol_type = other RNA
cctgtgtgtggcaccccgcga

SEQ ID NO: 75141 - RNA, 21 nt, synthetic construct
  source 1..21: mol_type = other RNA
atggtgactgcagctacgtta

SEQ ID NO: 75142 - RNA, 21 nt, synthetic construct
  source 1..21: mol_type = other RNA
gggcgtacagctcagcgacta

SEQ ID NO: 75143 - RNA, 21 nt, synthetic construct
  source 1..21: mol_type = other RNA
tcctgccccggagcgtccaaa

SEQ ID NO: 75144 - RNA, 21 nt, synthetic construct
  source 1..21: mol_type = other RNA
tgccccggagcgtccaagtaa

SEQ ID NO: 75145 - RNA, 21 nt, synthetic construct
  source 1..21: mol_type = other RNA
gccgtgtgttcatgtacggga

SEQ ID NO: 75146 - RNA, 21 nt, synthetic construct
  source 1..21: mol_type = other RNA
agctggatcccaaatacgcca

SEQ ID NO: 75147 - RNA, 21 nt, synthetic construct
  source 1..21: mol_type = other RNA
gccagggcacgacccgctgta

SEQ ID NO: 75148 - RNA, 21 nt, synthetic construct
  source 1..21: mol_type = other RNA
gagccgagcactatagccaca

SEQ ID NO: 75149 - RNA, 21 nt, synthetic construct
  source 1..21: mol_type = other RNA
ggattccagctggccacgtca

SEQ ID NO: 75150 - RNA, 21 nt, synthetic construct
  source 1..21: mol_type = other RNA
tgccccgagacggtgtgcgta

SEQ ID NO: 75151 - RNA, 21 nt, synthetic construct
  source 1..21: mol_type = other RNA
gacaacaccacccacgggaca

SEQ ID NO: 75152 - RNA, 21 nt, synthetic construct
  source 1..21: mol_type = other RNA
cagagcggggactacatcaaa

SEQ ID NO: 75153 - RNA, 21 nt, synthetic construct
  source 1..21: mol_type = other RNA
ccaagaaatgtgccgacagca

SEQ ID NO: 75154 - RNA, 21 nt, synthetic construct
  source 1..21: mol_type = other RNA
gagcgtcaccttcaatggcca

SEQ ID NO: 75155 - RNA, 21 nt, synthetic construct
  source 1..21: mol_type = other RNA
agcgtccaagtactcagcaga

SEQ ID NO: 75156 - RNA, 21 nt, synthetic construct
  source 1..21: mol_type = other RNA
tgctgtggggagtgcgtccaa

SEQ ID NO: 75157 - RNA, 21 nt, synthetic construct
  source 1..21: mol_type = other RNA
tccagggacaacacctatcca

SEQ ID NO: 75158 - RNA, 21 nt, synthetic construct
  source 1..21: mol_type = other RNA
tccagggacaacacctatcca

SEQ ID NO: 75159 - RNA, 21 nt, synthetic construct
  source 1..21: mol_type = other RNA
tctgtccaagaaatgtgccga

SEQ ID NO: 75160 - RNA, 21 nt, synthetic construct
  source 1..21: mol_type = other RNA
cgtgacggtgcccaccggata

SEQ ID NO: 75161 - RNA, 21 nt, synthetic construct
  source 1..21: mol_type = other RNA
cgtgacggtgcccaccggata

SEQ ID NO: 75162 - RNA, 21 nt, synthetic construct
  source 1..21: mol_type = other RNA
cgtgacggtgcccaccggata

SEQ ID NO: 75163 - RNA, 21 nt, synthetic construct
  source 1..21: mol_type = other RNA
cgtgacggtgcccaccggata

SEQ ID NO: 75164 - RNA, 21 nt, synthetic construct
  source 1..21: mol_type = other RNA
catgagagagatccatgcaca

SEQ ID NO: 75165 - RNA, 21 nt, synthetic construct
  source 1..21: mol_type = other RNA
accacccacaccgccagagta

SEQ ID NO: 75166 - RNA, 21 nt, synthetic construct
  source 1..21: mol_type = other RNA
tgtggggcggctcccactata

SEQ ID NO: 75167 - RNA, 21 nt, synthetic construct
  source 1..21: mol_type = other RNA
gggcttggcgcctgcttgata

SEQ ID NO: 75168 - RNA, 21 nt, synthetic construct
  source 1..21: mol_type = other RNA
gggagcttgggcacatggcga

SEQ ID NO: 75169 - RNA, 21 nt, synthetic construct
  source 1..21: mol_type = other RNA
ggagcttgggcacatggcgca

SEQ ID NO: 75170 - RNA, 21 nt, synthetic construct
  source 1..21: mol_type = other RNA
acagccagcaccgcttccaaa

SEQ ID NO: 75171 - RNA, 21 nt, synthetic construct
  source 1..21: mol_type = other RNA
caccacctggacccgcctata

SEQ ID NO: 75172 - RNA, 21 nt, synthetic construct
  source 1..21: mol_type = other RNA
cacacctccacagtgcttaca

SEQ ID NO: 75173 - RNA, 21 nt, synthetic construct
  source 1..21: mol_type = other RNA
caccacctggacccgcctata

SEQ ID NO: 75174 - RNA, 21 nt, synthetic construct
  source 1..21: mol_type = other RNA
cacacctccacagtgcttaca

SEQ ID NO: 75175 - RNA, 21 nt, synthetic construct
  source 1..21: mol_type = other RNA
agccccacatcggccccaata

SEQ ID NO: 75176 - RNA, 21 nt, synthetic construct
  source 1..21: mol_type = other RNA
cacacctccacagtgcttaca

SEQ ID NO: 75177 - RNA, 21 nt, synthetic construct
  source 1..21: mol_type = other RNA
gacccacgggatggccgtgta

SEQ ID NO: 75178 - RNA, 21 nt, synthetic construct
  source 1..21: mol_type = other RNA
gtgacttctacaacccacata

SEQ ID NO: 75179 - RNA, 21 nt, synthetic construct
  source 1..21: mol_type = other RNA
tgacttctacaacccacatga

SEQ ID NO: 75180 - RNA, 21 nt, synthetic construct
  source 1..21: mol_type = other RNA
ccagcaccgcttccaaagaga

SEQ ID NO: 75181 - RNA, 21 nt, synthetic construct
  source 1..21: mol_type = other RNA
cggccacgacacccacagtca

SEQ ID NO: 75182 - RNA, 21 nt, synthetic construct
  source 1..21: mol_type = other RNA
cggccacgacacccacagtca

SEQ ID NO: 75183 - RNA, 21 nt, synthetic construct
  source 1..21: mol_type = other RNA
cggccacgacacccacagtca

SEQ ID NO: 75184 - RNA, 21 nt, synthetic construct
  source 1..21: mol_type = other RNA
gcagagcggggactacatcaa

SEQ ID NO: 75185 - RNA, 21 nt, synthetic construct
  source 1..21: mol_type = other RNA
gccggccggcaactgcacgga

SEQ ID NO: 75186 - RNA, 21 nt, synthetic construct
  source 1..21: mol_type = other RNA
ggacgaggagggcatctgcca

SEQ ID NO: 75187 - RNA, 21 nt, synthetic construct
  source 1..21: mol_type = other RNA
tgctccggggggctatggcaa

SEQ ID NO: 75188 - RNA, 21 nt, synthetic construct
  source 1..21: mol_type = other RNA
gggcgcctgtgtgcccgccca

SEQ ID NO: 75189 - RNA, 21 nt, synthetic construct
  source 1..21: mol_type = other RNA
tacgctcacggcaccgtgcta

SEQ ID NO: 75190 - RNA, 21 nt, synthetic construct
  source 1..21: mol_type = other RNA
cccggacgccctggcacccaa

SEQ ID NO: 75191 - RNA, 21 nt, synthetic construct
  source 1..21: mol_type = other RNA
tgcggaagcaacggcaccata

SEQ ID NO: 75192 - RNA, 21 nt, synthetic construct
  source 1..21: mol_type = other RNA
gtccacttcggcctggtgtga

SEQ ID NO: 75193 - RNA, 21 nt, synthetic construct
  source 1..21: mol_type = other RNA
acccttccaacacgctcagca

SEQ ID NO: 75194 - RNA, 21 nt, synthetic construct
  source 1..21: mol_type = other RNA
agcctggcgccaacactcaca

SEQ ID NO: 75195 - RNA, 21 nt, synthetic construct
  source 1..21: mol_type = other RNA
gagcgagctgtccacctctca

SEQ ID NO: 75196 - RNA, 21 nt, synthetic construct
  source 1..21: mol_type = other RNA
ccacggccaccatgtccacaa

SEQ ID NO: 75197 - RNA, 21 nt, synthetic construct
  source 1..21: mol_type = other RNA
cactaccaaagtgccaactaa

SEQ ID NO: 75198 - RNA, 21 nt, synthetic construct
  source 1..21: mol_type = other RNA
cctcctctagcacacagacca

SEQ ID NO: 75199 - RNA, 21 nt, synthetic construct
  source 1..21: mol_type = other RNA
ctcctctagcacacagaccaa

SEQ ID NO: 75200 - RNA, 21 nt, synthetic construct
  source 1..21: mol_type = other RNA
gaccaccccgggccacaccaa

SEQ ID NO: 75201 - RNA, 21 nt, synthetic construct
  source 1..21: mol_type = other RNA
tacagctaccccatgccggga

SEQ ID NO: 75202 - RNA, 21 nt, synthetic construct
  source 1..21: mol_type = other RNA
ccctctggcggggactttgaa

SEQ ID NO: 75203 - RNA, 21 nt, synthetic construct
  source 1..21: mol_type = other RNA
ccacggccaccatgtccacaa

SEQ ID NO: 75204 - RNA, 21 nt, synthetic construct
  source 1..21: mol_type = other RNA
cctcctctagcacacagacca

SEQ ID NO: 75205 - RNA, 21 nt, synthetic construct
  source 1..21: mol_type = other RNA
ctcctctagcacacagaccaa

SEQ ID NO: 75206 - RNA, 21 nt, synthetic construct
  source 1..21: mol_type = other RNA
gaccaccccgggccacaccaa

SEQ ID NO: 75207 - RNA, 21 nt, synthetic construct
  source 1..21: mol_type = other RNA
tacagctaccccatgccggga

SEQ ID NO: 75208 - RNA, 21 nt, synthetic construct
  source 1..21: mol_type = other RNA
ccctctggcggggactttgaa

SEQ ID NO: 75209 - RNA, 21 nt, synthetic construct
  source 1..21: mol_type = other RNA
cacagctaccagctttacaca

SEQ ID NO: 75210 - RNA, 21 nt, synthetic construct
  source 1..21: mol_type = other RNA
ccacggccaccatgtccacaa

SEQ ID NO: 75211 - RNA, 21 nt, synthetic construct
  source 1..21: mol_type = other RNA
tcacactaccaaagtgccgaa

SEQ ID NO: 75212 - RNA, 21 nt, synthetic construct
  source 1..21: mol_type = other RNA
cctcctctagcacacagacca

SEQ ID NO: 75213 - RNA, 21 nt, synthetic construct
  source 1..21: mol_type = other RNA
ctcctctagcacacagaccaa

SEQ ID NO: 75214 - RNA, 21 nt, synthetic construct
  source 1..21: mol_type = other RNA
gaccaccccgggccacaccaa

SEQ ID NO: 75215 - RNA, 21 nt, synthetic construct
  source 1..21: mol_type = other RNA
tacagctaccccatgccggga

SEQ ID NO: 75216 - RNA, 21 nt, synthetic construct
  source 1..21: mol_type = other RNA
ccctctggcggggactttgaa

SEQ ID NO: 75217 - RNA, 21 nt, synthetic construct
  source 1..21: mol_type = other RNA
ccacggccaccatgtccacaa

SEQ ID NO: 75218 - RNA, 21 nt, synthetic construct
  source 1..21: mol_type = other RNA
tcacactaccaaagtgccgaa

SEQ ID NO: 75219 - RNA, 21 nt, synthetic construct
  source 1..21: mol_type = other RNA
cctcctctagcacacagacca

SEQ ID NO: 75220 - RNA, 21 nt, synthetic construct
  source 1..21: mol_type = other RNA
ctcctctagcacacagaccaa

SEQ ID NO: 75221 - RNA, 21 nt, synthetic construct
  source 1..21: mol_type = other RNA
gaccaccccgggccacaccaa

SEQ ID NO: 75222 - RNA, 21 nt, synthetic construct
  source 1..21: mol_type = other RNA
tacagctaccccatgccggga

SEQ ID NO: 75223 - RNA, 21 nt, synthetic construct
  source 1..21: mol_type = other RNA
ccctctggcggggactttgaa

SEQ ID NO: 75224 - RNA, 21 nt, synthetic construct
  source 1..21: mol_type = other RNA
ccacggccaccatgtccacaa

SEQ ID NO: 75225 - RNA, 21 nt, synthetic construct
  source 1..21: mol_type = other RNA
tcacactaccaaagtgccgaa

SEQ ID NO: 75226 - RNA, 21 nt, synthetic construct
  source 1..21: mol_type = other RNA
cctcctctagcacacagacca

SEQ ID NO: 75227 - RNA, 21 nt, synthetic construct
  source 1..21: mol_type = other RNA
ctcctctagcacacagaccaa

SEQ ID NO: 75228 - RNA, 21 nt, synthetic construct
  source 1..21: mol_type = other RNA
cacagctaccagctttacaca

SEQ ID NO: 75229 - RNA, 21 nt, synthetic construct
  source 1..21: mol_type = other RNA
accgcttccagggcgcctgta

SEQ ID NO: 75230 - RNA, 21 nt, synthetic construct
  source 1..21: mol_type = other RNA
tggtccccgacagcagaaaga

SEQ ID NO: 75231 - RNA, 21 nt, synthetic construct
  source 1..21: mol_type = other RNA
gaccagatcctcttcaacgca

SEQ ID NO: 75232 - RNA, 21 nt, synthetic construct
  source 1..21: mol_type = other RNA
cctcttcaacgcacacatgga

SEQ ID NO: 75233 - RNA, 21 nt, synthetic construct
  source 1..21: mol_type = other RNA
gggtggagtccatttgctgaa

SEQ ID NO: 75234 - RNA, 21 nt, synthetic construct
  source 1..21: mol_type = other RNA
ggcaccccgcgctccgtgcta

SEQ ID NO: 75235 - RNA, 21 nt, synthetic construct
  source 1..21: mol_type = other RNA
aggagtcctaccctgggagaa

SEQ ID NO: 75236 - RNA, 21 nt, synthetic construct
  source 1..21: mol_type = other RNA
gtcctaccctgggagagccta

SEQ ID NO: 75237 - RNA, 21 nt, synthetic construct
  source 1..21: mol_type = other RNA
cccctccctgatgtcactgga

SEQ ID NO: 75238 - RNA, 21 nt, synthetic construct
  source 1..21: mol_type = other RNA
caccacctggacccgcctata

SEQ ID NO: 75239 - RNA, 21 nt, synthetic construct
  source 1..21: mol_type = other RNA
cacacctccacagtgcttaca

SEQ ID NO: 75240 - RNA, 21 nt, synthetic construct
  source 1..21: mol_type = other RNA
caggggacgtgccacaaccca

SEQ ID NO: 75241 - RNA, 21 nt, synthetic construct
  source 1..21: mol_type = other RNA
caccacctggacccgcctata

SEQ ID NO: 75242 - RNA, 21 nt, synthetic construct
  source 1..21: mol_type = other RNA
ggcacaccatggatggcggta

SEQ ID NO: 75243 - RNA, 21 nt, synthetic construct
  source 1..21: mol_type = other RNA
ctaccagcgttacagccatca

SEQ ID NO: 75244 - RNA, 21 nt, synthetic construct
  source 1..21: mol_type = other RNA
taccagcgttacagccatcca

SEQ ID NO: 75245 - RNA, 21 nt, synthetic construct
  source 1..21: mol_type = other RNA
gccactcaggagtcctaccca

SEQ ID NO: 75246 - RNA, 21 nt, synthetic construct
  source 1..21: mol_type = other RNA
cacacctccacagtgcttaca

SEQ ID NO: 75247 - RNA, 21 nt, synthetic construct
  source 1..21: mol_type = other RNA
ctctacctggacaaccactaa

SEQ ID NO: 75248 - RNA, 21 nt, synthetic construct
  source 1..21: mol_type = other RNA
tgctgcgaatacgtgccctga

SEQ ID NO: 75249 - RNA, 21 nt, synthetic construct
  source 1..21: mol_type = other RNA
ccagaggttccacggtgacca

SEQ ID NO: 75250 - RNA, 21 nt, synthetic construct
  source 1..21: mol_type = other RNA
gggctgaggtcgcaacggcca

SEQ ID NO: 75251 - RNA, 21 nt, synthetic construct
  source 1..21: mol_type = other RNA
gccatccgggtccaagcggaa

SEQ ID NO: 75252 - RNA, 21 nt, synthetic construct
  source 1..21: mol_type = other RNA
ccccagtgccgaacaccacga

SEQ ID NO: 75253 - RNA, 21 nt, synthetic construct
  source 1..21: mol_type = other RNA
ccccagtgccgaacaccacga

SEQ ID NO: 75254 - RNA, 21 nt, synthetic construct
  source 1..21: mol_type = other RNA
ccccagtgccgaacaccacga

SEQ ID NO: 75255 - RNA, 21 nt, synthetic construct
  source 1..21: mol_type = other RNA
gctgcggaagtgcggcctgaa

SEQ ID NO: 75256 - RNA, 21 nt, synthetic construct
  source 1..21: mol_type = other RNA
tcccggtctccaccgtgtgta

SEQ ID NO: 75257 - RNA, 21 nt, synthetic construct
  source 1..21: mol_type = other RNA
gttctcaacgccgcagcctaa

SEQ ID NO: 75258 - RNA, 21 nt, synthetic construct
  source 1..21: mol_type = other RNA
aagccatgcggccccatacaa

SEQ ID NO: 75259 - RNA, 21 nt, synthetic construct
  source 1..21: mol_type = other RNA
gtggctcaccctgcacggaca

SEQ ID NO: 75260 - RNA, 21 nt, synthetic construct
  source 1..21: mol_type = other RNA
cacacccagtggcatccagta

SEQ ID NO: 75261 - RNA, 21 nt, synthetic construct
  source 1..21: mol_type = other RNA
gacctacagctaccaggacga

SEQ ID NO: 75262 - RNA, 21 nt, synthetic construct
  source 1..21: mol_type = other RNA
gcggaagtgcggcctgacgga

SEQ ID NO: 75263 - RNA, 21 nt, synthetic construct
  source 1..21: mol_type = other RNA
cgcctacgtggtggatgccta

SEQ ID NO: 75264 - RNA, 21 nt, synthetic construct
  source 1..21: mol_type = other RNA
gccacgcactggtggacagca

SEQ ID NO: 75265 - RNA, 21 nt, synthetic construct
  source 1..21: mol_type = other RNA
ccggggggctatggcagtgca

SEQ ID NO: 75266 - RNA, 21 nt, synthetic construct
  source 1..21: mol_type = other RNA
caggatccgggtcctctgcta

SEQ ID NO: 75267 - RNA, 21 nt, synthetic construct
  source 1..21: mol_type = other RNA
tgcaggggacgtgccacaaca

SEQ ID NO: 75268 - RNA, 21 nt, synthetic construct
  source 1..21: mol_type = other RNA
tggatccacggccaccccgaa

SEQ ID NO: 75269 - RNA, 21 nt, synthetic construct
  source 1..21: mol_type = other RNA
tggatccacggccaccccgta

SEQ ID NO: 75270 - RNA, 21 nt, synthetic construct
  source 1..21: mol_type = other RNA
tggatccacggccaccccgta

SEQ ID NO: 75271 - RNA, 21 nt, synthetic construct
  source 1..21: mol_type = other RNA
tggatccacggccaccccgta

SEQ ID NO: 75272 - RNA, 21 nt, synthetic construct
  source 1..21: mol_type = other RNA
tggatccacggccaccccgta

SEQ ID NO: 75273 - RNA, 21 nt, synthetic construct
  source 1..21: mol_type = other RNA
ggccatgctcgtggtgccgca

SEQ ID NO: 75274 - RNA, 21 nt, synthetic construct
  source 1..21: mol_type = other RNA
gcgtgagctttgttccaccca

SEQ ID NO: 75275 - RNA, 21 nt, synthetic construct
  source 1..21: mol_type = other RNA
tgttctctgagcactgccgca

SEQ ID NO: 75276 - RNA, 21 nt, synthetic construct
  source 1..21: mol_type = other RNA
cagcactgcgtacctggccga

SEQ ID NO: 75277 - RNA, 21 nt, synthetic construct
  source 1..21: mol_type = other RNA
tgagctgcggaagtgcggcca

SEQ ID NO: 75278 - RNA, 21 nt, synthetic construct
  source 1..21: mol_type = other RNA
cggccatccgggtccaagcga

SEQ ID NO: 75279 - RNA, 21 nt, synthetic construct
  source 1..21: mol_type = other RNA
cagctggtgccactcatgcaa

SEQ ID NO: 75280 - RNA, 21 nt, synthetic construct
  source 1..21: mol_type = other RNA
gccacgggcgcagccttcgca

SEQ ID NO: 75281 - RNA, 21 nt, synthetic construct
  source 1..21: mol_type = other RNA
gcggcctgagtgaggccgaca

SEQ ID NO: 75282 - RNA, 21 nt, synthetic construct
  source 1..21: mol_type = other RNA
ccgcgggcaccttcctcaata

SEQ ID NO: 75283 - RNA, 21 nt, synthetic construct
  source 1..21: mol_type = other RNA
cccggggctggtgtcggatga

SEQ ID NO: 75284 - RNA, 21 nt, synthetic construct
  source 1..21: mol_type = other RNA
aggggacgtgccacaacccca

SEQ ID NO: 75285 - RNA, 21 nt, synthetic construct
  source 1..21: mol_type = other RNA
atccacggccaccccgaccta

SEQ ID NO: 75286 - RNA, 21 nt, synthetic construct
  source 1..21: mol_type = other RNA
acccccagtgccgaacaccaa

SEQ ID NO: 75287 - RNA, 21 nt, synthetic construct
  source 1..21: mol_type = other RNA
ccagcaagacccgcacctcga

SEQ ID NO: 75288 - RNA, 21 nt, synthetic construct
  source 1..21: mol_type = other RNA
accatgggctgtgagccccaa

SEQ ID NO: 75289 - RNA, 21 nt, synthetic construct
  source 1..21: mol_type = other RNA
ccccggccaccagctctacga

SEQ ID NO: 75290 - RNA, 21 nt, synthetic construct
  source 1..21: mol_type = other RNA
cacactaccaaagtgctgaca

SEQ ID NO: 75291 - RNA, 21 nt, synthetic construct
  source 1..21: mol_type = other RNA
acccccagtgccgaacaccaa

SEQ ID NO: 75292 - RNA, 21 nt, synthetic construct
  source 1..21: mol_type = other RNA
ctcaccctagcagcaggacca

SEQ ID NO: 75293 - RNA, 21 nt, synthetic construct
  source 1..21: mol_type = other RNA
ccagcaagacccgcacctcga

SEQ ID NO: 75294 - RNA, 21 nt, synthetic construct
  source 1..21: mol_type = other RNA
accatgggctgtgagccccaa

SEQ ID NO: 75295 - RNA, 21 nt, synthetic construct
  source 1..21: mol_type = other RNA
ccccggccaccagctctacga

SEQ ID NO: 75296 - RNA, 21 nt, synthetic construct
  source 1..21: mol_type = other RNA
tccaccccgggaacagctcca

SEQ ID NO: 75297 - RNA, 21 nt, synthetic construct
  source 1..21: mol_type = other RNA
ccaccccgggaacagctccca

SEQ ID NO: 75298 - RNA, 21 nt, synthetic construct
  source 1..21: mol_type = other RNA
ctcctccagtccaaggactga

SEQ ID NO: 75299 - RNA, 21 nt, synthetic construct
  source 1..21: mol_type = other RNA
ctgcaaccacccttccagtga

SEQ ID NO: 75300 - RNA, 21 nt, synthetic construct
  source 1..21: mol_type = other RNA
ctcacactaccaaagtgccga

SEQ ID NO: 75301 - RNA, 21 nt, synthetic construct
  source 1..21: mol_type = other RNA
acccccagtgccgaacaccaa

SEQ ID NO: 75302 - RNA, 21 nt, synthetic construct
  source 1..21: mol_type = other RNA
ctcaccctagcagcaggacca

SEQ ID NO: 75303 - RNA, 21 nt, synthetic construct
  source 1..21: mol_type = other RNA
ccagcaagacccgcacctcga

SEQ ID NO: 75304 - RNA, 21 nt, synthetic construct
  source 1..21: mol_type = other RNA
ccccggccaccagctctacga

SEQ ID NO: 75305 - RNA, 21 nt, synthetic construct
  source 1..21: mol_type = other RNA
ctcacactaccaaagtgccga

SEQ ID NO: 75306 - RNA, 21 nt, synthetic construct
  source 1..21: mol_type = other RNA
cacccacaaccagtggctcca

SEQ ID NO: 75307 - RNA, 21 nt, synthetic construct
  source 1..21: mol_type = other RNA
acccccagtgccgaacaccaa

SEQ ID NO: 75308 - RNA, 21 nt, synthetic construct
  source 1..21: mol_type = other RNA
ctcaccctagcagcaggacca

SEQ ID NO: 75309 - RNA, 21 nt, synthetic construct
  source 1..21: mol_type = other RNA
ccagcaagacccgcacctcga

SEQ ID NO: 75310 - RNA, 21 nt, synthetic construct
  source 1..21: mol_type = other RNA
ccccggccaccagctctacga

SEQ ID NO: 75311 - RNA, 21 nt, synthetic construct
  source 1..21: mol_type = other RNA
tccaccccgggaacagctcca

SEQ ID NO: 75312 - RNA, 21 nt, synthetic construct
  source 1..21: mol_type = other RNA
ccaccccgggaacagctccca

SEQ ID NO: 75313 - RNA, 21 nt, synthetic construct
  source 1..21: mol_type = other RNA
ctcctccagtccaaggactga

SEQ ID NO: 75314 - RNA, 21 nt, synthetic construct
  source 1..21: mol_type = other RNA
ctgcaaccacccttccagtga

SEQ ID NO: 75315 - RNA, 21 nt, synthetic construct
  source 1..21: mol_type = other RNA
ctcacactaccaaagtgccga

SEQ ID NO: 75316 - RNA, 21 nt, synthetic construct
  source 1..21: mol_type = other RNA
cacccacaaccagtggctcca

SEQ ID NO: 75317 - RNA, 21 nt, synthetic construct
  source 1..21: mol_type = other RNA
ctcctccagtccaaggactga

SEQ ID NO: 75318 - RNA, 21 nt, synthetic construct
  source 1..21: mol_type = other RNA
ctgcaaccacccttccagtga

SEQ ID NO: 75319 - RNA, 21 nt, synthetic construct
  source 1..21: mol_type = other RNA
agccgctctgtgatctgatga

SEQ ID NO: 75320 - RNA, 21 nt, synthetic construct
  source 1..21: mol_type = other RNA
cagggtcagcccccgccgtga

SEQ ID NO: 75321 - RNA, 21 nt, synthetic construct
  source 1..21: mol_type = other RNA
caacacgaccatcctgtggca

SEQ ID NO: 75322 - RNA, 21 nt, synthetic construct
  source 1..21: mol_type = other RNA
gcaccagggctgcgagaccga

SEQ ID NO: 75323 - RNA, 21 nt, synthetic construct
  source 1..21: mol_type = other RNA
ctgggacgccctggaacaaaa

SEQ ID NO: 75324 - RNA, 21 nt, synthetic construct
  source 1..21: mol_type = other RNA
accaccgatgggcttggcgca

SEQ ID NO: 75325 - RNA, 21 nt, synthetic construct
  source 1..21: mol_type = other RNA
acttatgccagcagcctaaga

SEQ ID NO: 75326 - RNA, 21 nt, synthetic construct
  source 1..21: mol_type = other RNA
acttcggccacctcgggcata

SEQ ID NO: 75327 - RNA, 21 nt, synthetic construct
  source 1..21: mol_type = other RNA
acttcggccacctcgggcata

SEQ ID NO: 75328 - RNA, 21 nt, synthetic construct
  source 1..21: mol_type = other RNA
acccagtggcatccagtgcga

SEQ ID NO: 75329 - RNA, 21 nt, synthetic construct
  source 1..21: mol_type = other RNA
atcggcccccataaccacgga

SEQ ID NO: 75330 - RNA, 21 nt, synthetic construct
  source 1..21: mol_type = other RNA
atcggcccccataaccacgga

SEQ ID NO: 75331 - RNA, 21 nt, synthetic construct
  source 1..21: mol_type = other RNA
atcggcccccataaccacgga

SEQ ID NO: 75332 - RNA, 21 nt, synthetic construct
  source 1..21: mol_type = other RNA
gaggcggagactttgagacga

SEQ ID NO: 75333 - RNA, 21 nt, synthetic construct
  source 1..21: mol_type = other RNA
agcttcccgacatgccgctga

SEQ ID NO: 75334 - RNA, 21 nt, synthetic construct
  source 1..21: mol_type = other RNA
tcttcaagatgtgctacaaca

SEQ ID NO: 75335 - RNA, 21 nt, synthetic construct
  source 1..21: mol_type = other RNA
ggtgacttcccacaccctaga

SEQ ID NO: 75336 - RNA, 21 nt, synthetic construct
  source 1..21: mol_type = other RNA
gcccggcactggtgctcgcga

SEQ ID NO: 75337 - RNA, 21 nt, synthetic construct
  source 1..21: mol_type = other RNA
tgcgtgggacccgatgggtta

SEQ ID NO: 75338 - RNA, 21 nt, synthetic construct
  source 1..21: mol_type = other RNA
gcagcgtttccttcgtgccta

SEQ ID NO: 75339 - RNA, 21 nt, synthetic construct
  source 1..21: mol_type = other RNA
ctgctgtctgagaacgttcta

SEQ ID NO: 75340 - RNA, 21 nt, synthetic construct
  source 1..21: mol_type = other RNA
atgtggggcggctcccactaa

SEQ ID NO: 75341 - RNA, 21 nt, synthetic construct
  source 1..21: mol_type = other RNA
gagtacaagagagtggccgga

SEQ ID NO: 75342 - RNA, 21 nt, synthetic construct
  source 1..21: mol_type = other RNA
cacctacacccacgtggatga

SEQ ID NO: 75343 - RNA, 21 nt, synthetic construct
  source 1..21: mol_type = other RNA
tgccaactaccacaaccacga

SEQ ID NO: 75344 - RNA, 21 nt, synthetic construct
  source 1..21: mol_type = other RNA
acgagtagcccggggctgaca

SEQ ID NO: 75345 - RNA, 21 nt, synthetic construct
  source 1..21: mol_type = other RNA
ccaataaccacggtggtgaca

SEQ ID NO: 75346 - RNA, 21 nt, synthetic construct
  source 1..21: mol_type = other RNA
caataaccacggtggtgacca

SEQ ID NO: 75347 - RNA, 21 nt, synthetic construct
  source 1..21: mol_type = other RNA
ccacccacaccgccagagtga

SEQ ID NO: 75348 - RNA, 21 nt, synthetic construct
  source 1..21: mol_type = other RNA
tgtggccaacgtcacctgcga

SEQ ID NO: 75349 - RNA, 21 nt, synthetic construct
  source 1..21: mol_type = other RNA
tgggcttggcgcctgcttgaa

SEQ ID NO: 75350 - RNA, 21 nt, synthetic construct
  source 1..21: mol_type = other RNA
tcgccatctgcggaagcaaca

SEQ ID NO: 75351 - RNA, 21 nt, synthetic construct
  source 1..21: mol_type = other RNA
gcttcccgacatgccgctgga

SEQ ID NO: 75352 - RNA, 21 nt, synthetic construct
  source 1..21: mol_type = other RNA
cgtccacttcggcctggtgta

SEQ ID NO: 75353 - RNA, 21 nt, synthetic construct
  source 1..21: mol_type = other RNA
cacatgtgagcaccacggcca

SEQ ID NO: 75354 - RNA, 21 nt, synthetic construct
  source 1..21: mol_type = other RNA
cacacccacaaccagaggtta

SEQ ID NO: 75355 - RNA, 21 nt, synthetic construct
  source 1..21: mol_type = other RNA
acccttccagtgctgacaaga

SEQ ID NO: 75356 - RNA, 21 nt, synthetic construct
  source 1..21: mol_type = other RNA
cgagcactacagccaccgtga

SEQ ID NO: 75357 - RNA, 21 nt, synthetic construct
  source 1..21: mol_type = other RNA
cgagcactacagccaccgtga

SEQ ID NO: 75358 - RNA, 21 nt, synthetic construct
  source 1..21: mol_type = other RNA
cgagcactacagccaccgtga

SEQ ID NO: 75359 - RNA, 21 nt, synthetic construct
  source 1..21: mol_type = other RNA
tgggacccgatgggtttccta

SEQ ID NO: 75360 - RNA, 21 nt, synthetic construct
  source 1..21: mol_type = other RNA
ccgtgcaaccgtcccggctta

SEQ ID NO: 75361 - RNA, 21 nt, synthetic construct
  source 1..21: mol_type = other RNA
tccactccggagaccacccaa

SEQ ID NO: 75362 - RNA, 21 nt, synthetic construct
  source 1..21: mol_type = other RNA
caaccacgggcttcacagtca

SEQ ID NO: 75363 - RNA, 21 nt, synthetic construct
  source 1..21: mol_type = other RNA
tccactccggagaccacccaa

SEQ ID NO: 75364 - RNA, 21 nt, synthetic construct
  source 1..21: mol_type = other RNA
acacccacgtggatgagtgta

SEQ ID NO: 75365 - RNA, 21 nt, synthetic construct
  source 1..21: mol_type = other RNA
tgccccgacgtcctcgcccaa

SEQ ID NO: 75366 - RNA, 21 nt, synthetic construct
  source 1..21: mol_type = other RNA
ggcagctgcgagtacatctta

SEQ ID NO: 75367 - RNA, 21 nt, synthetic construct
  source 1..21: mol_type = other RNA
acccacgggatggccgtgtca

SEQ ID NO: 75368 - RNA, 21 nt, synthetic construct
  source 1..21: mol_type = other RNA
cccacgggatggccgtgtcca

SEQ ID NO: 75369 - RNA, 21 nt, synthetic construct
  source 1..21: mol_type = other RNA
cttcccgacatgccgctggaa

SEQ ID NO: 75370 - RNA, 21 nt, synthetic construct
  source 1..21: mol_type = other RNA
ccagggcacgacccgctgtca

SEQ ID NO: 75371 - RNA, 21 nt, synthetic construct
  source 1..21: mol_type = other RNA
agtgccgaacaccatggccaa

SEQ ID NO: 75372 - RNA, 21 nt, synthetic construct
  source 1..21: mol_type = other RNA
ccccatgccggggccctctga

SEQ ID NO: 75373 - RNA, 21 nt, synthetic construct
  source 1..21: mol_type = other RNA
gggcctcgagtgccgtgccca

SEQ ID NO: 75374 - RNA, 21 nt, synthetic construct
  source 1..21: mol_type = other RNA
ccccatgccggggccctctga

SEQ ID NO: 75375 - RNA, 21 nt, synthetic construct
  source 1..21: mol_type = other RNA
gggcctcgagtgccgtgccca

SEQ ID NO: 75376 - RNA, 21 nt, synthetic construct
  source 1..21: mol_type = other RNA
accgcaaccactggatccaca

SEQ ID NO: 75377 - RNA, 21 nt, synthetic construct
  source 1..21: mol_type = other RNA
ccccatgccggggccctctga

SEQ ID NO: 75378 - RNA, 21 nt, synthetic construct
  source 1..21: mol_type = other RNA
gggcctcgagtgccgtgccca

SEQ ID NO: 75379 - RNA, 21 nt, synthetic construct
  source 1..21: mol_type = other RNA
ccccatgccggggccctctga

SEQ ID NO: 75380 - RNA, 21 nt, synthetic construct
  source 1..21: mol_type = other RNA
gggcctcgagtgccgtgccca

SEQ ID NO: 75381 - RNA, 21 nt, synthetic construct
  source 1..21: mol_type = other RNA
cacccacaccgccagagtgca

SEQ ID NO: 75382 - RNA, 21 nt, synthetic construct
  source 1..21: mol_type = other RNA
ccagtcctgcgtgtgtgacga

SEQ ID NO: 75383 - RNA, 21 nt, synthetic construct
  source 1..21: mol_type = other RNA
ccccgagcgcgtgccggacga

SEQ ID NO: 75384 - RNA, 21 nt, synthetic construct
  source 1..21: mol_type = other RNA
gtcctcgcccacccggcgcga

SEQ ID NO: 75385 - RNA, 21 nt, synthetic construct
  source 1..21: mol_type = other RNA
ttctctgagcactgccgcgca

SEQ ID NO: 75386 - RNA, 21 nt, synthetic construct
  source 1..21: mol_type = other RNA
tctctgagcactgccgcgcca

SEQ ID NO: 75387 - RNA, 21 nt, synthetic construct
  source 1..21: mol_type = other RNA
ctctgagcactgccgcgccga

SEQ ID NO: 75388 - RNA, 21 nt, synthetic construct
  source 1..21: mol_type = other RNA
tcatcaatgggcagcgggaga

SEQ ID NO: 75389 - RNA, 21 nt, synthetic construct
  source 1..21: mol_type = other RNA
catcaatgggcagcgggagga

SEQ ID NO: 75390 - RNA, 21 nt, synthetic construct
  source 1..21: mol_type = other RNA
gcatccggctggtgctgacaa

SEQ ID NO: 75391 - RNA, 21 nt, synthetic construct
  source 1..21: mol_type = other RNA
ggcctcccggccttcaacgaa

SEQ ID NO: 75392 - RNA, 21 nt, synthetic construct
  source 1..21: mol_type = other RNA
gtgccacctttgtggaataca

SEQ ID NO: 75393 - RNA, 21 nt, synthetic construct
  source 1..21: mol_type = other RNA
gacctgccccctcaacatgca

SEQ ID NO: 75394 - RNA, 21 nt, synthetic construct
  source 1..21: mol_type = other RNA
ggagtgtggctcaccctgcaa

SEQ ID NO: 75395 - RNA, 21 nt, synthetic construct
  source 1..21: mol_type = other RNA
atgacatcacgcactctggca

SEQ ID NO: 75396 - RNA, 21 nt, synthetic construct
  source 1..21: mol_type = other RNA
agctgcggaagtgcggcctga

SEQ ID NO: 75397 - RNA, 21 nt, synthetic construct
  source 1..21: mol_type = other RNA
cggtgacgctcagcctggaca

SEQ ID NO: 75398 - RNA, 21 nt, synthetic construct
  source 1..21: mol_type = other RNA
ctgacgacttcacggccctca

SEQ ID NO: 75399 - RNA, 21 nt, synthetic construct
  source 1..21: mol_type = other RNA
tgacgacttcacggccctcaa

SEQ ID NO: 75400 - RNA, 21 nt, synthetic construct
  source 1..21: mol_type = other RNA
ttcacggccctcagcggggta

SEQ ID NO: 75401 - RNA, 21 nt, synthetic construct
  source 1..21: mol_type = other RNA
tgccaatgccaggaacagcta

SEQ ID NO: 75402 - RNA, 21 nt, synthetic construct
  source 1..21: mol_type = other RNA
cctgaccgatcccaacagtga

SEQ ID NO: 75403 - RNA, 21 nt, synthetic construct
  source 1..21: mol_type = other RNA
gcccttccactcgaactgcaa

SEQ ID NO: 75404 - RNA, 21 nt, synthetic construct
  source 1..21: mol_type = other RNA
gccccaagtcccagcgctaca

SEQ ID NO: 75405 - RNA, 21 nt, synthetic construct
  source 1..21: mol_type = other RNA
ccagcccacttgccgcggcca

SEQ ID NO: 75406 - RNA, 21 nt, synthetic construct
  source 1..21: mol_type = other RNA
cagcccacttgccgcggccta

SEQ ID NO: 75407 - RNA, 21 nt, synthetic construct
  source 1..21: mol_type = other RNA
tgcagcgtttccttcgtgcca

SEQ ID NO: 75408 - RNA, 21 nt, synthetic construct
  source 1..21: mol_type = other RNA
tgcagcccccatggtgtacca

SEQ ID NO: 75409 - RNA, 21 nt, synthetic construct
  source 1..21: mol_type = other RNA
cacgggatggccgtgtcctga

SEQ ID NO: 75410 - RNA, 21 nt, synthetic construct
  source 1..21: mol_type = other RNA
cggtccgtggtgggggacgca

SEQ ID NO: 75411 - RNA, 21 nt, synthetic construct
  source 1..21: mol_type = other RNA
tgcctgcgactcgggtggcga

SEQ ID NO: 75412 - RNA, 21 nt, synthetic construct
  source 1..21: mol_type = other RNA
gcccaggcctgccacgacgca

SEQ ID NO: 75413 - RNA, 21 nt, synthetic construct
  source 1..21: mol_type = other RNA
cccaggcctgccacgacgcga

SEQ ID NO: 75414 - RNA, 21 nt, synthetic construct
  source 1..21: mol_type = other RNA
tatgaggacaggacctacaga

SEQ ID NO: 75415 - RNA, 21 nt, synthetic construct
  source 1..21: mol_type = other RNA
caccgatgggcttggcgccta

SEQ ID NO: 75416 - RNA, 21 nt, synthetic construct
  source 1..21: mol_type = other RNA
ctgcggaagcaacggcaccaa

SEQ ID NO: 75417 - RNA, 21 nt, synthetic construct
  source 1..21: mol_type = other RNA
gtctccaccgtgtgtgtccga

SEQ ID NO: 75418 - RNA, 21 nt, synthetic construct
  source 1..21: mol_type = other RNA
ggccccgtgacggtcacccca

SEQ ID NO: 75419 - RNA, 21 nt, synthetic construct
  source 1..21: mol_type = other RNA
ctgaccagggctcccccggca

SEQ ID NO: 75420 - RNA, 21 nt, synthetic construct
  source 1..21: mol_type = other RNA
gaaggactgacatcccccaga

SEQ ID NO: 75421 - RNA, 21 nt, synthetic construct
  source 1..21: mol_type = other RNA
ccacgggaggccccacgacga

SEQ ID NO: 75422 - RNA, 21 nt, synthetic construct
  source 1..21: mol_type = other RNA
acgctggccccaacaacaata

SEQ ID NO: 75423 - RNA, 21 nt, synthetic construct
  source 1..21: mol_type = other RNA
agagccgctgaccacgagcca

SEQ ID NO: 75424 - RNA, 21 nt, synthetic construct
  source 1..21: mol_type = other RNA
tccacctctcaggccgagaca

SEQ ID NO: 75425 - RNA, 21 nt, synthetic construct
  source 1..21: mol_type = other RNA
actaccaaagtgccaactaca

SEQ ID NO: 75426 - RNA, 21 nt, synthetic construct
  source 1..21: mol_type = other RNA
ccaactaccacaaccacggga

SEQ ID NO: 75427 - RNA, 21 nt, synthetic construct
  source 1..21: mol_type = other RNA
cacacccacaaccagaggcta

SEQ ID NO: 75428 - RNA, 21 nt, synthetic construct
  source 1..21: mol_type = other RNA
agaccagtggtactcccccaa

SEQ ID NO: 75429 - RNA, 21 nt, synthetic construct
  source 1..21: mol_type = other RNA
accaccacggccactacgata

SEQ ID NO: 75430 - RNA, 21 nt, synthetic construct
  source 1..21: mol_type = other RNA
acgatcacggccaccggctca

SEQ ID NO: 75431 - RNA, 21 nt, synthetic construct
  source 1..21: mol_type = other RNA
cccagtgctgaccaccaccga

SEQ ID NO: 75432 - RNA, 21 nt, synthetic construct
  source 1..21: mol_type = other RNA
gtgccgaacaccatggccaca

SEQ ID NO: 75433 - RNA, 21 nt, synthetic construct
  source 1..21: mol_type = other RNA
accaccggtaccacccagcaa

SEQ ID NO: 75434 - RNA, 21 nt, synthetic construct
  source 1..21: mol_type = other RNA
tgcggccggaggggccgtcta

SEQ ID NO: 75435 - RNA, 21 nt, synthetic construct
  source 1..21: mol_type = other RNA
tcctcacagagccgagcacta

SEQ ID NO: 75436 - RNA, 21 nt, synthetic construct
  source 1..21: mol_type = other RNA
gagactgtccacacctccaca

SEQ ID NO: 75437 - RNA, 21 nt, synthetic construct
  source 1..21: mol_type = other RNA
gctgactaccacaaccacgga

SEQ ID NO: 75438 - RNA, 21 nt, synthetic construct
  source 1..21: mol_type = other RNA
agaccagtggtactcccccaa

SEQ ID NO: 75439 - RNA, 21 nt, synthetic construct
  source 1..21: mol_type = other RNA
accaccacggccactacgata

SEQ ID NO: 75440 - RNA, 21 nt, synthetic construct
  source 1..21: mol_type = other RNA
acgatcacggccaccggctca

SEQ ID NO: 75441 - RNA, 21 nt, synthetic construct
  source 1..21: mol_type = other RNA
cccagtgctgaccaccaccga

SEQ ID NO: 75442 - RNA, 21 nt, synthetic construct
  source 1..21: mol_type = other RNA
accaccggtaccacccagcaa

SEQ ID NO: 75443 - RNA, 21 nt, synthetic construct
  source 1..21: mol_type = other RNA
tgcggccggaggggccgtcta

SEQ ID NO: 75444 - RNA, 21 nt, synthetic construct
  source 1..21: mol_type = other RNA
tgcaaccacccttccagtgca

SEQ ID NO: 75445 - RNA, 21 nt, synthetic construct
  source 1..21: mol_type = other RNA
cacccttccagtgctgacaaa

SEQ ID NO: 75446 - RNA, 21 nt, synthetic construct
  source 1..21: mol_type = other RNA
cacacctccacagtgctgaca

SEQ ID NO: 75447 - RNA, 21 nt, synthetic construct
  source 1..21: mol_type = other RNA
tgaccacgaaggccaccacga

SEQ ID NO: 75448 - RNA, 21 nt, synthetic construct
  source 1..21: mol_type = other RNA
accctcaaagtgctgaccaga

SEQ ID NO: 75449 - RNA, 21 nt, synthetic construct
  source 1..21: mol_type = other RNA
gagactgtccacacctccaca

SEQ ID NO: 75450 - RNA, 21 nt, synthetic construct
  source 1..21: mol_type = other RNA
cacacccacaaccagaggcta

SEQ ID NO: 75451 - RNA, 21 nt, synthetic construct
  source 1..21: mol_type = other RNA
agaccagtggtactcccccaa

SEQ ID NO: 75452 - RNA, 21 nt, synthetic construct
  source 1..21: mol_type = other RNA
accaccacggccactacgata

SEQ ID NO: 75453 - RNA, 21 nt, synthetic construct
  source 1..21: mol_type = other RNA
ctacgatcacagccaccggca

SEQ ID NO: 75454 - RNA, 21 nt, synthetic construct
  source 1..21: mol_type = other RNA
cccagtgctgaccaccaccga

SEQ ID NO: 75455 - RNA, 21 nt, synthetic construct
  source 1..21: mol_type = other RNA
acggtggtgaccacgggctga

SEQ ID NO: 75456 - RNA, 21 nt, synthetic construct
  source 1..21: mol_type = other RNA
tcctcacagagccgagcacta

SEQ ID NO: 75457 - RNA, 21 nt, synthetic construct
  source 1..21: mol_type = other RNA
aaccacgggcttcacagtcaa

SEQ ID NO: 75458 - RNA, 21 nt, synthetic construct
  source 1..21: mol_type = other RNA
agaccagtggtactcccccaa

SEQ ID NO: 75459 - RNA, 21 nt, synthetic construct
  source 1..21: mol_type = other RNA
acgatcacggccaccggctca

SEQ ID NO: 75460 - RNA, 21 nt, synthetic construct
  source 1..21: mol_type = other RNA
cccagtgctgaccaccaccga

SEQ ID NO: 75461 - RNA, 21 nt, synthetic construct
  source 1..21: mol_type = other RNA
accaccggtaccacccagcaa

SEQ ID NO: 75462 - RNA, 21 nt, synthetic construct
  source 1..21: mol_type = other RNA
acggtggtgaccacgggctga

SEQ ID NO: 75463 - RNA, 21 nt, synthetic construct
  source 1..21: mol_type = other RNA
tgcggccggaggggccgtcta

SEQ ID NO: 75464 - RNA, 21 nt, synthetic construct
  source 1..21: mol_type = other RNA
tgcaaccacccttccagtgca

SEQ ID NO: 75465 - RNA, 21 nt, synthetic construct
  source 1..21: mol_type = other RNA
cacccttccagtgctgacaaa

SEQ ID NO: 75466 - RNA, 21 nt, synthetic construct
  source 1..21: mol_type = other RNA
cacacctccacagtgctgaca

SEQ ID NO: 75467 - RNA, 21 nt, synthetic construct
  source 1..21: mol_type = other RNA
tgaccacgaaggccaccacga

SEQ ID NO: 75468 - RNA, 21 nt, synthetic construct
  source 1..21: mol_type = other RNA
accagttccacgtccacccca

SEQ ID NO: 75469 - RNA, 21 nt, synthetic construct
  source 1..21: mol_type = other RNA
tcctcacagagccgagcacta

SEQ ID NO: 75470 - RNA, 21 nt, synthetic construct
  source 1..21: mol_type = other RNA
gagactgtccacacctccaca

SEQ ID NO: 75471 - RNA, 21 nt, synthetic construct
  source 1..21: mol_type = other RNA
agaccagtggtactcccccaa

SEQ ID NO: 75472 - RNA, 21 nt, synthetic construct
  source 1..21: mol_type = other RNA
accaccacggccactacgata

SEQ ID NO: 75473 - RNA, 21 nt, synthetic construct
  source 1..21: mol_type = other RNA
acgatcacggccaccggctca

SEQ ID NO: 75474 - RNA, 21 nt, synthetic construct
  source 1..21: mol_type = other RNA
tgcaaccacccttccagtgca

SEQ ID NO: 75475 - RNA, 21 nt, synthetic construct
  source 1..21: mol_type = other RNA
cacccttccagtgctgacaaa

SEQ ID NO: 75476 - RNA, 21 nt, synthetic construct
  source 1..21: mol_type = other RNA
cacacctccacagtgctgaca

SEQ ID NO: 75477 - RNA, 21 nt, synthetic construct
  source 1..21: mol_type = other RNA
cactctggggacgacccggaa

SEQ ID NO: 75478 - RNA, 21 nt, synthetic construct
  source 1..21: mol_type = other RNA
tcctcacagagccgagcacta

SEQ ID NO: 75479 - RNA, 21 nt, synthetic construct
  source 1..21: mol_type = other RNA
gtccaccgtggggaccaccca

SEQ ID NO: 75480 - RNA, 21 nt, synthetic construct
  source 1..21: mol_type = other RNA
ctgccaaccttcagcgtgtca

SEQ ID NO: 75481 - RNA, 21 nt, synthetic construct
  source 1..21: mol_type = other RNA
tcactgtcaccatggtgcata

SEQ ID NO: 75482 - RNA, 21 nt, synthetic construct
  source 1..21: mol_type = other RNA
cgtgagcgtcaccttcaatga

SEQ ID NO: 75483 - RNA, 21 nt, synthetic construct
  source 1..21: mol_type = other RNA
agaaaggatggctgctgggca

SEQ ID NO: 75484 - RNA, 21 nt, synthetic construct
  source 1..21: mol_type = other RNA
cccccgggcccattcttcaaa

SEQ ID NO: 75485 - RNA, 21 nt, synthetic construct
  source 1..21: mol_type = other RNA
ccggtggcctgtgcgacctca

SEQ ID NO: 75486 - RNA, 21 nt, synthetic construct
  source 1..21: mol_type = other RNA
tgccagtcctgcgtgtgtgaa

SEQ ID NO: 75487 - RNA, 21 nt, synthetic construct
  source 1..21: mol_type = other RNA
tgtgcgtgtgcaacacaacca

SEQ ID NO: 75488 - RNA, 21 nt, synthetic construct
  source 1..21: mol_type = other RNA
caccttccgctgcagacctca

SEQ ID NO: 75489 - RNA, 21 nt, synthetic construct
  source 1..21: mol_type = other RNA
ggagtccatttgctgacccca

SEQ ID NO: 75490 - RNA, 21 nt, synthetic construct
  source 1..21: mol_type = other RNA
aagtactcagcagaggcccaa

SEQ ID NO: 75491 - RNA, 21 nt, synthetic construct
  source 1..21: mol_type = other RNA
acacctacacccacgtggata

SEQ ID NO: 75492 - RNA, 21 nt, synthetic construct
  source 1..21: mol_type = other RNA
atgtgcattgtctgatcatga

SEQ ID NO: 75493 - RNA, 21 nt, synthetic construct
  source 1..21: mol_type = other RNA
tgtgcattgtctgatcatgaa

SEQ ID NO: 75494 - RNA, 21 nt, synthetic construct
  source 1..21: mol_type = other RNA
gaaaaccttgggcctcctcta

SEQ ID NO: 75495 - RNA, 21 nt, synthetic construct
  source 1..21: mol_type = other RNA
gtgggtgaaaccggccccaga

SEQ ID NO: 75496 - RNA, 21 nt, synthetic construct
  source 1..21: mol_type = other RNA
aaccggccccagaagggtgaa

SEQ ID NO: 75497 - RNA, 21 nt, synthetic construct
  source 1..21: mol_type = other RNA
ttcgggagggcgccactcaga

SEQ ID NO: 75498 - RNA, 21 nt, synthetic construct
  source 1..21: mol_type = other RNA
ggagtcctaccctgggagaga

SEQ ID NO: 75499 - RNA, 21 nt, synthetic construct
  source 1..21: mol_type = other RNA
ccctggaacaaactaagcata

SEQ ID NO: 75500 - RNA, 21 nt, synthetic construct
  source 1..21: mol_type = other RNA
caaggcggccgcctgtccata

SEQ ID NO: 75501 - RNA, 21 nt, synthetic construct
  source 1..21: mol_type = other RNA
gccccggtgtctagcacacca

SEQ ID NO: 75502 - RNA, 21 nt, synthetic construct
  source 1..21: mol_type = other RNA
gcggggggccagccgcggaaa

SEQ ID NO: 75503 - RNA, 21 nt, synthetic construct
  source 1..21: mol_type = other RNA
aaagtgccaactaccacaaca

SEQ ID NO: 75504 - RNA, 21 nt, synthetic construct
  source 1..21: mol_type = other RNA
actggttctatggcaacacca

SEQ ID NO: 75505 - RNA, 21 nt, synthetic construct
  source 1..21: mol_type = other RNA
actggttctatggcaacacca

SEQ ID NO: 75506 - RNA, 21 nt, synthetic construct
  source 1..21: mol_type = other RNA
actggttctatggcaacacca

SEQ ID NO: 75507 - RNA, 21 nt, synthetic construct
  source 1..21: mol_type = other RNA
actggttctatggcaacacca

SEQ ID NO: 75508 - RNA, 21 nt, synthetic construct
  source 1..21: mol_type = other RNA
actggttctatggcaacacca

SEQ ID NO: 75509 - RNA, 21 nt, synthetic construct
  source 1..21: mol_type = other RNA
cctgccctgggcgtgagcgta

SEQ ID NO: 75510 - RNA, 21 nt, synthetic construct
  source 1..21: mol_type = other RNA
ccccgggcccattcttcaaca

SEQ ID NO: 75511 - RNA, 21 nt, synthetic construct
  source 1..21: mol_type = other RNA
ccgcttccagggcgcctgtca

SEQ ID NO: 75512 - RNA, 21 nt, synthetic construct
  source 1..21: mol_type = other RNA
gcccggacgccctggcaccca

SEQ ID NO: 75513 - RNA, 21 nt, synthetic construct
  source 1..21: mol_type = other RNA
acgaccaccacaaccagggca

SEQ ID NO: 75514 - RNA, 21 nt, synthetic construct
  source 1..21: mol_type = other RNA
cacatgtgagcaccacggcca

SEQ ID NO: 75515 - RNA, 21 nt, synthetic construct
  source 1..21: mol_type = other RNA
acccttccagtgctgacaaga

SEQ ID NO: 75516 - RNA, 21 nt, synthetic construct
  source 1..21: mol_type = other RNA
cacatgtgagcaccacggcca

SEQ ID NO: 75517 - RNA, 21 nt, synthetic construct
  source 1..21: mol_type = other RNA
ccaccaaagtgtacaagccaa

SEQ ID NO: 75518 - RNA, 21 nt, synthetic construct
  source 1..21: mol_type = other RNA
gggacttcaacggcctcccga

SEQ ID NO: 75519 - RNA, 21 nt, synthetic construct
  source 1..21: mol_type = other RNA
cccggacctgccccctcaaca

SEQ ID NO: 75520 - RNA, 21 nt, synthetic construct
  source 1..21: mol_type = other RNA
tggaggccacgggcgcagcca

SEQ ID NO: 75521 - RNA, 21 nt, synthetic construct
  source 1..21: mol_type = other RNA
atgggcaccgcccagagccca

SEQ ID NO: 75522 - RNA, 21 nt, synthetic construct
  source 1..21: mol_type = other RNA
tggccacatccacccttccaa

SEQ ID NO: 75523 - RNA, 21 nt, synthetic construct
  source 1..21: mol_type = other RNA
cccttctccagggacgaccaa

SEQ ID NO: 75524 - RNA, 21 nt, synthetic construct
  source 1..21: mol_type = other RNA
cccttctccagggacgaccaa

SEQ ID NO: 75525 - RNA, 21 nt, synthetic construct
  source 1..21: mol_type = other RNA
gggaccctcccagaacagaca

SEQ ID NO: 75526 - RNA, 21 nt, synthetic construct
  source 1..21: mol_type = other RNA
cccttctccagggacgaccaa

SEQ ID NO: 75527 - RNA, 21 nt, synthetic construct
  source 1..21: mol_type = other RNA
tgcggccggaggggcagtcta

SEQ ID NO: 75528 - RNA, 21 nt, synthetic construct
  source 1..21: mol_type = other RNA
gggaccctcccagaacagaca

SEQ ID NO: 75529 - RNA, 21 nt, synthetic construct
  source 1..21: mol_type = other RNA
accaccacacccgtggccaca

SEQ ID NO: 75530 - RNA, 21 nt, synthetic construct
  source 1..21: mol_type = other RNA
ggaggagggcgactgctgtca

SEQ ID NO: 75531 - RNA, 21 nt, synthetic construct
  source 1..21: mol_type = other RNA
acccttccagtgctgacaaga

SEQ ID NO: 75532 - RNA, 21 nt, synthetic construct
  source 1..21: mol_type = other RNA
tgccaaccttcagcgtgtcca

SEQ ID NO: 75533 - RNA, 21 nt, synthetic construct
  source 1..21: mol_type = other RNA
ggctgctacgacaaggacgga

SEQ ID NO: 75534 - RNA, 21 nt, synthetic construct
  source 1..21: mol_type = other RNA
gcccacccggcgcgtgagcta

SEQ ID NO: 75535 - RNA, 21 nt, synthetic construct
  source 1..21: mol_type = other RNA
gagaatgcagggcacaccata

SEQ ID NO: 75536 - RNA, 21 nt, synthetic construct
  source 1..21: mol_type = other RNA
catgtccacaatccaccccta

SEQ ID NO: 75537 - RNA, 21 nt, synthetic construct
  source 1..21: mol_type = other RNA
catgtccacaatccaccccta

SEQ ID NO: 75538 - RNA, 21 nt, synthetic construct
  source 1..21: mol_type = other RNA
tgcccgtgtgccacctttgta

SEQ ID NO: 75539 - RNA, 21 nt, synthetic construct
  source 1..21: mol_type = other RNA
agggacggcactcacgcctca

SEQ ID NO: 75540 - RNA, 21 nt, synthetic construct
  source 1..21: mol_type = other RNA
agggacggcactcacgcctca

SEQ ID NO: 75541 - RNA, 21 nt, synthetic construct
  source 1..21: mol_type = other RNA
ctcgcagactgggtccagcta

SEQ ID NO: 75542 - RNA, 21 nt, synthetic construct
  source 1..21: mol_type = other RNA
cataaccacggtggtgaccaa

SEQ ID NO: 75543 - RNA, 21 nt, synthetic construct
  source 1..21: mol_type = other RNA
aataaccacggtggtgaccaa

SEQ ID NO: 75544 - RNA, 21 nt, synthetic construct
  source 1..21: mol_type = other RNA
cataaccacggtggtgaccaa

SEQ ID NO: 75545 - RNA, 21 nt, synthetic construct
  source 1..21: mol_type = other RNA
cataaccacggtggtgaccaa

SEQ ID NO: 75546 - RNA, 21 nt, synthetic construct
  source 1..21: mol_type = other RNA
tcaacatgcagcaccaggaga

SEQ ID NO: 75547 - RNA, 21 nt, synthetic construct
  source 1..21: mol_type = other RNA
tcgagtgccgggcggcgcaga

SEQ ID NO: 75548 - RNA, 21 nt, synthetic construct
  source 1..21: mol_type = other RNA
acgcccaggacagagacgaca

SEQ ID NO: 75549 - RNA, 21 nt, synthetic construct
  source 1..21: mol_type = other RNA
ctcctgggacaactcccatca

SEQ ID NO: 75550 - RNA, 21 nt, synthetic construct
  source 1..21: mol_type = other RNA
tccacggggacttcccacaca

SEQ ID NO: 75551 - RNA, 21 nt, synthetic construct
  source 1..21: mol_type = other RNA
tccacaatccacccctcctca

SEQ ID NO: 75552 - RNA, 21 nt, synthetic construct
  source 1..21: mol_type = other RNA
tccacggggacttcccacaca

SEQ ID NO: 75553 - RNA, 21 nt, synthetic construct
  source 1..21: mol_type = other RNA
tccacaatccacccctcctca

SEQ ID NO: 75554 - RNA, 21 nt, synthetic construct
  source 1..21: mol_type = other RNA
ctccagggacaacacccatca

SEQ ID NO: 75555 - RNA, 21 nt, synthetic construct
  source 1..21: mol_type = other RNA
tgggaatctcagcctctacca

SEQ ID NO: 75556 - RNA, 21 nt, synthetic construct
  source 1..21: mol_type = other RNA
accggccccagaagggtgaga

SEQ ID NO: 75557 - RNA, 21 nt, synthetic construct
  source 1..21: mol_type = other RNA
cagcacggattccagctggca

SEQ ID NO: 75558 - RNA, 21 nt, synthetic construct
  source 1..21: mol_type = other RNA
cgcccggcactggtgctcgca

SEQ ID NO: 75559 - RNA, 21 nt, synthetic construct
  source 1..21: mol_type = other RNA
gcggggactttgacacctaca

SEQ ID NO: 75560 - RNA, 21 nt, synthetic construct
  source 1..21: mol_type = other RNA
gcggggactttgacacctaca

SEQ ID NO: 75561 - RNA, 21 nt, synthetic construct
  source 1..21: mol_type = other RNA
gcggggactttgacacctaca

SEQ ID NO: 75562 - RNA, 21 nt, synthetic construct
  source 1..21: mol_type = other RNA
tccgtgcggccggaggggcaa

SEQ ID NO: 75563 - RNA, 21 nt, synthetic construct
  source 1..21: mol_type = other RNA
gcggggactttgacacctaca

SEQ ID NO: 75564 - RNA, 21 nt, synthetic construct
  source 1..21: mol_type = other RNA
gggtcagcaactgccagtcca

SEQ ID NO: 75565 - RNA, 21 nt, synthetic construct
  source 1..21: mol_type = other RNA
agggacggcactcacgcctca

SEQ ID NO: 75566 - RNA, 21 nt, synthetic construct
  source 1..21: mol_type = other RNA
ctggggacgacccggatccta

SEQ ID NO: 75567 - RNA, 21 nt, synthetic construct
  source 1..21: mol_type = other RNA
ggccaccagttccacgtccaa

SEQ ID NO: 75568 - RNA, 21 nt, synthetic construct
  source 1..21: mol_type = other RNA
acgatcacagccaccggctca

SEQ ID NO: 75569 - RNA, 21 nt, synthetic construct
  source 1..21: mol_type = other RNA
catgtggggcggctcccacta

SEQ ID NO: 75570 - RNA, 21 nt, synthetic construct
  source 1..21: mol_type = other RNA
gaactggaggtgccctgagca

SEQ ID NO: 75571 - RNA, 21 nt, synthetic construct
  source 1..21: mol_type = other RNA
agcaacggcaccatcatcaga

SEQ ID NO: 75572 - RNA, 21 nt, synthetic construct
  source 1..21: mol_type = other RNA
cagccagcaccgcttccaaaa

SEQ ID NO: 75573 - RNA, 21 nt, synthetic construct
  source 1..21: mol_type = other RNA
ctcacactaccaaagtgccaa

SEQ ID NO: 75574 - RNA, 21 nt, synthetic construct
  source 1..21: mol_type = other RNA
aaccttcagcgtgtccactga

SEQ ID NO: 75575 - RNA, 21 nt, synthetic construct
  source 1..21: mol_type = other RNA
acctgggtcaacagccatgta

SEQ ID NO: 75576 - RNA, 21 nt, synthetic construct
  source 1..21: mol_type = other RNA
gagtccatttgctgaccccaa

SEQ ID NO: 75577 - RNA, 21 nt, synthetic construct
  source 1..21: mol_type = other RNA
ggcggccgcctgtccatgcca

SEQ ID NO: 75578 - RNA, 21 nt, synthetic construct
  source 1..21: mol_type = other RNA
tgcggaagtgcggcctgacga

SEQ ID NO: 75579 - RNA, 21 nt, synthetic construct
  source 1..21: mol_type = other RNA
cctagggaccacccacacaca

SEQ ID NO: 75580 - RNA, 21 nt, synthetic construct
  source 1..21: mol_type = other RNA
cctagggaccacccacacaca

SEQ ID NO: 75581 - RNA, 21 nt, synthetic construct
  source 1..21: mol_type = other RNA
cctagggaccacccacacaca

SEQ ID NO: 75582 - RNA, 21 nt, synthetic construct
  source 1..21: mol_type = other RNA
cctagggaccacccacacaca

SEQ ID NO: 75583 - RNA, 21 nt, synthetic construct
  source 1..21: mol_type = other RNA
gcccaccggttccacggccaa

SEQ ID NO: 75584 - RNA, 21 nt, synthetic construct
  source 1..21: mol_type = other RNA
ggaagctgcgacaggcaagga

SEQ ID NO: 75585 - RNA, 21 nt, synthetic construct
  source 1..21: mol_type = other RNA
ggtacaatgggcaccgcccaa

SEQ ID NO: 75586 - RNA, 21 nt, synthetic construct
  source 1..21: mol_type = other RNA
agaaccaccgagtcaccccca

SEQ ID NO: 75587 - RNA, 21 nt, synthetic construct
  source 1..21: mol_type = other RNA
cacccagcaagacccgcacca

SEQ ID NO: 75588 - RNA, 21 nt, synthetic construct
  source 1..21: mol_type = other RNA
cacccagcaagacccgcacca

SEQ ID NO: 75589 - RNA, 21 nt, synthetic construct
  source 1..21: mol_type = other RNA
ggactgcaaccacccttccaa

SEQ ID NO: 75590 - RNA, 21 nt, synthetic construct
  source 1..21: mol_type = other RNA
cacccagcaagacccgcacca

SEQ ID NO: 75591 - RNA, 21 nt, synthetic construct
  source 1..21: mol_type = other RNA
cacccagcaagacccgcacca

SEQ ID NO: 75592 - RNA, 21 nt, synthetic construct
  source 1..21: mol_type = other RNA
ggactgcaaccacccttccaa

SEQ ID NO: 75593 - RNA, 21 nt, synthetic construct
  source 1..21: mol_type = other RNA
ggactgcaaccacccttccaa

SEQ ID NO: 75594 - RNA, 21 nt, synthetic construct
  source 1..21: mol_type = other RNA
agccagtccagctgaatgaaa

SEQ ID NO: 75595 - RNA, 21 nt, synthetic construct
  source 1..21: mol_type = other RNA
ctccctgatgtcactgggaca

SEQ ID NO: 75596 - RNA, 21 nt, synthetic construct
  source 1..21: mol_type = other RNA
ggtggacagcactgcgtacca

SEQ ID NO: 75597 - RNA, 21 nt, synthetic construct
  source 1..21: mol_type = other RNA
cagagactgtccacacctcca

SEQ ID NO: 75598 - RNA, 21 nt, synthetic construct
  source 1..21: mol_type = other RNA
cagggacgaccaccccgggca

SEQ ID NO: 75599 - RNA, 21 nt, synthetic construct
  source 1..21: mol_type = other RNA
cagggacgaccaccccgggca

SEQ ID NO: 75600 - RNA, 21 nt, synthetic construct
  source 1..21: mol_type = other RNA
cagggacgaccaccccgggca

SEQ ID NO: 75601 - RNA, 21 nt, synthetic construct
  source 1..21: mol_type = other RNA
cagggacgaccaccccgggca

SEQ ID NO: 75602 - RNA, 21 nt, synthetic construct
  source 1..21: mol_type = other RNA
ctgcccgtgtgccacctttga

SEQ ID NO: 75603 - RNA, 21 nt, synthetic construct
  source 1..21: mol_type = other RNA
cgacccggatcctcactgaga

SEQ ID NO: 75604 - RNA, 21 nt, synthetic construct
  source 1..21: mol_type = other RNA
tggagtccatttgctgaccca

SEQ ID NO: 75605 - RNA, 21 nt, synthetic construct
  source 1..21: mol_type = other RNA
tgggtgaaaccggccccagaa

SEQ ID NO: 75606 - RNA, 21 nt, synthetic construct
  source 1..21: mol_type = other RNA
cggccggcaactgcacggaca

SEQ ID NO: 75607 - RNA, 21 nt, synthetic construct
  source 1..21: mol_type = other RNA
gacgacttcacggccctcaga

SEQ ID NO: 75608 - RNA, 21 nt, synthetic construct
  source 1..21: mol_type = other RNA
gagggccgggtggggacccaa

SEQ ID NO: 75609 - RNA, 21 nt, synthetic construct
  source 1..21: mol_type = other RNA
tgctacgacaaggacggaaaa

SEQ ID NO: 75610 - RNA, 21 nt, synthetic construct
  source 1..21: mol_type = other RNA
gagctggagacggccaccaca

SEQ ID NO: 75611 - RNA, 21 nt, synthetic construct
  source 1..21: mol_type = other RNA
cagccaccacgggaggcccca

SEQ ID NO: 75612 - RNA, 21 nt, synthetic construct
  source 1..21: mol_type = other RNA
gaggctccacggtgaccccca

SEQ ID NO: 75613 - RNA, 21 nt, synthetic construct
  source 1..21: mol_type = other RNA
acccacaccgccacagtgcta

SEQ ID NO: 75614 - RNA, 21 nt, synthetic construct
  source 1..21: mol_type = other RNA
caccacaactgtggccactga

SEQ ID NO: 75615 - RNA, 21 nt, synthetic construct
  source 1..21: mol_type = other RNA
acaccctagcagcaaccacca

SEQ ID NO: 75616 - RNA, 21 nt, synthetic construct
  source 1..21: mol_type = other RNA
caccctagcagcaaccaccga

SEQ ID NO: 75617 - RNA, 21 nt, synthetic construct
  source 1..21: mol_type = other RNA
gccacaccacggccacctcca

SEQ ID NO: 75618 - RNA, 21 nt, synthetic construct
  source 1..21: mol_type = other RNA
cgtgcggccggaggggccgta

SEQ ID NO: 75619 - RNA, 21 nt, synthetic construct
  source 1..21: mol_type = other RNA
caccacaactgtggccactga

SEQ ID NO: 75620 - RNA, 21 nt, synthetic construct
  source 1..21: mol_type = other RNA
gccgaacaccacggccaccaa

SEQ ID NO: 75621 - RNA, 21 nt, synthetic construct
  source 1..21: mol_type = other RNA
cgtgcggccggaggggccgta

SEQ ID NO: 75622 - RNA, 21 nt, synthetic construct
  source 1..21: mol_type = other RNA
tccacagctaccagctttaca

SEQ ID NO: 75623 - RNA, 21 nt, synthetic construct
  source 1..21: mol_type = other RNA
accacaaccagggccaccgga

SEQ ID NO: 75624 - RNA, 21 nt, synthetic construct
  source 1..21: mol_type = other RNA
gaggctccacggtgaccccca

SEQ ID NO: 75625 - RNA, 21 nt, synthetic construct
  source 1..21: mol_type = other RNA
acccacaccgccacagtgcta

SEQ ID NO: 75626 - RNA, 21 nt, synthetic construct
  source 1..21: mol_type = other RNA
caccacaactgtggccactga

SEQ ID NO: 75627 - RNA, 21 nt, synthetic construct
  source 1..21: mol_type = other RNA
ccagggacaactcccatccca

SEQ ID NO: 75628 - RNA, 21 nt, synthetic construct
  source 1..21: mol_type = other RNA
gccgaacaccacggccaccaa

SEQ ID NO: 75629 - RNA, 21 nt, synthetic construct
  source 1..21: mol_type = other RNA
accacaaccagggccaccgga

SEQ ID NO: 75630 - RNA, 21 nt, synthetic construct
  source 1..21: mol_type = other RNA
ctgcgtgaacgacgcgtgtga

SEQ ID NO: 75631 - RNA, 21 nt, synthetic construct
  source 1..21: mol_type = other RNA
ctacgttctgtccaagaaata

SEQ ID NO: 75632 - RNA, 21 nt, synthetic construct
  source 1..21: mol_type = other RNA
caaatacgccaaccagaccta

SEQ ID NO: 75633 - RNA, 21 nt, synthetic construct
  source 1..21: mol_type = other RNA
tccggtgagcagcggtttcaa

SEQ ID NO: 75634 - RNA, 21 nt, synthetic construct
  source 1..21: mol_type = other RNA
cttcaacgagttctatgccca

SEQ ID NO: 75635 - RNA, 21 nt, synthetic construct
  source 1..21: mol_type = other RNA
gaactacgcccggcactggta

SEQ ID NO: 75636 - RNA, 21 nt, synthetic construct
  source 1..21: mol_type = other RNA
caccgagaacatcccctgtga

SEQ ID NO: 75637 - RNA, 21 nt, synthetic construct
  source 1..21: mol_type = other RNA
tacgttctgtccaagaaatga

SEQ ID NO: 75638 - RNA, 21 nt, synthetic construct
  source 1..21: mol_type = other RNA
ctacaactacaggatccggga

SEQ ID NO: 75639 - RNA, 21 nt, synthetic construct
  source 1..21: mol_type = other RNA
cttccgcatcgtcaccgagaa

SEQ ID NO: 75640 - RNA, 21 nt, synthetic construct
  source 1..21: mol_type = other RNA
ctgacggacaacgagaactga

SEQ ID NO: 75641 - RNA, 21 nt, synthetic construct
  source 1..21: mol_type = other RNA
cagggtcgactgcaacaccta

SEQ ID NO: 75642 - RNA, 21 nt, synthetic construct
  source 1..21: mol_type = other RNA
tcgccaacacctggaaggcca

SEQ ID NO: 75643 - RNA, 21 nt, synthetic construct
  source 1..21: mol_type = other RNA
aacgaggccacctacaagcca

SEQ ID NO: 75644 - RNA, 21 nt, synthetic construct
  source 1..21: mol_type = other RNA
ccatcaagctcttcgtggaga

SEQ ID NO: 75645 - RNA, 21 nt, synthetic construct
  source 1..21: mol_type = other RNA
agtggtttgacgtggacttca

SEQ ID NO: 75646 - RNA, 21 nt, synthetic construct
  source 1..21: mol_type = other RNA
tgcgagtgtttctgcacggca

SEQ ID NO: 75647 - RNA, 21 nt, synthetic construct
  source 1..21: mol_type = other RNA
gcctgtgcgggaacttcgaca

SEQ ID NO: 75648 - RNA, 21 nt, synthetic construct
  source 1..21: mol_type = other RNA
atgactttgccacgcgtagca

SEQ ID NO: 75649 - RNA, 21 nt, synthetic construct
  source 1..21: mol_type = other RNA
aatgactttgccacgcgtaga

SEQ ID NO: 75650 - RNA, 21 nt, synthetic construct
  source 1..21: mol_type = other RNA
tcctgtttgaccaaattccga

SEQ ID NO: 75651 - RNA, 21 nt, synthetic construct
  source 1..21: mol_type = other RNA
tcacaccctcgagcttcttca

SEQ ID NO: 75652 - RNA, 21 nt, synthetic construct
  source 1..21: mol_type = other RNA
ggagcctcaggaaaaccggca

SEQ ID NO: 75653 - RNA, 21 nt, synthetic construct
  source 1..21: mol_type = other RNA
tgactttgccacgcgtagcca

SEQ ID NO: 75654 - RNA, 21 nt, synthetic construct
  source 1..21: mol_type = other RNA
taccccaagtctgaacaacta

SEQ ID NO: 75655 - RNA, 21 nt, synthetic construct
  source 1..21: mol_type = other RNA
tgacggcacctcttacaccta

SEQ ID NO: 75656 - RNA, 21 nt, synthetic construct
  source 1..21: mol_type = other RNA
gtgaggccgacgtcacctgca

SEQ ID NO: 75657 - RNA, 21 nt, synthetic construct
  source 1..21: mol_type = other RNA
aatgacgcgggcgcctgtgta

SEQ ID NO: 75658 - RNA, 21 nt, synthetic construct
  source 1..21: mol_type = other RNA
ggagagctacgagctgatcca

SEQ ID NO: 75659 - RNA, 21 nt, synthetic construct
  source 1..21: mol_type = other RNA
tgcggggcaccctgcctaaaa

SEQ ID NO: 75660 - RNA, 21 nt, synthetic construct
  source 1..21: mol_type = other RNA
gacagagtggtttgacgtgga

SEQ ID NO: 75661 - RNA, 21 nt, synthetic construct
  source 1..21: mol_type = other RNA
ctgtcggcagccaacatcaca

SEQ ID NO: 75662 - RNA, 21 nt, synthetic construct
  source 1..21: mol_type = other RNA
aaatacgccaaccagacctga

SEQ ID NO: 75663 - RNA, 21 nt, synthetic construct
  source 1..21: mol_type = other RNA
cctgcgtgaacgacgcgtgta

SEQ ID NO: 75664 - RNA, 21 nt, synthetic construct
  source 1..21: mol_type = other RNA
cttcgtggagagctacgagca

SEQ ID NO: 75665 - RNA, 21 nt, synthetic construct
  source 1..21: mol_type = other RNA
gcggggcaccctgcctaaaaa

SEQ ID NO: 75666 - RNA, 21 nt, synthetic construct
  source 1..21: mol_type = other RNA
gtgtgtgtccgcgaggtctga

SEQ ID NO: 75667 - RNA, 21 nt, synthetic construct
  source 1..21: mol_type = other RNA
ggatgggcccacggagcagta

SEQ ID NO: 75668 - RNA, 21 nt, synthetic construct
  source 1..21: mol_type = other RNA
ggccggcctttgcggagtgca

SEQ ID NO: 75669 - RNA, 21 nt, synthetic construct
  source 1..21: mol_type = other RNA
ccttcctcaatgacgcgggca

SEQ ID NO: 75670 - RNA, 21 nt, synthetic construct
  source 1..21: mol_type = other RNA
cacgggaccttccgcatcgta

SEQ ID NO: 75671 - RNA, 21 nt, synthetic construct
  source 1..21: mol_type = other RNA
gagagctacgagctgatccta

SEQ ID NO: 75672 - RNA, 21 nt, synthetic construct
  source 1..21: mol_type = other RNA
agagctacgagctgatcctca

SEQ ID NO: 75673 - RNA, 21 nt, synthetic construct
  source 1..21: mol_type = other RNA
acctgccggaaccccagtgga

SEQ ID NO: 75674 - RNA, 21 nt, synthetic construct
  source 1..21: mol_type = other RNA
ctgccggaaccccagtgggca

SEQ ID NO: 75675 - RNA, 21 nt, synthetic construct
  source 1..21: mol_type = other RNA
ttcaatgaggaccagatgaaa

SEQ ID NO: 75676 - RNA, 21 nt, synthetic construct
  source 1..21: mol_type = other RNA
gaccagatgaagtgcgtggca

SEQ ID NO: 75677 - RNA, 21 nt, synthetic construct
  source 1..21: mol_type = other RNA
ctaccccaagtctgaacaaca

SEQ ID NO: 75678 - RNA, 21 nt, synthetic construct
  source 1..21: mol_type = other RNA
ttgagtcctacgataagatca

SEQ ID NO: 75679 - RNA, 21 nt, synthetic construct
  source 1..21: mol_type = other RNA
cccaaagtgctgaccaccaca

SEQ ID NO: 75680 - RNA, 21 nt, synthetic construct
  source 1..21: mol_type = other RNA
ggcacctgcaccaacaaccaa

SEQ ID NO: 75681 - RNA, 21 nt, synthetic construct
  source 1..21: mol_type = other RNA
agggctttgagtacaagagaa

SEQ ID NO: 75682 - RNA, 21 nt, synthetic construct
  source 1..21: mol_type = other RNA
gaatacgtgccctgtggccca

SEQ ID NO: 75683 - RNA, 21 nt, synthetic construct
  source 1..21: mol_type = other RNA
ccactatgagtgcgagtgcaa

SEQ ID NO: 75684 - RNA, 21 nt, synthetic construct
  source 1..21: mol_type = other RNA
cgtgtcctgggaccggaagaa

SEQ ID NO: 75685 - RNA, 21 nt, synthetic construct
  source 1..21: mol_type = other RNA
cacggtgacttcccacaccca

SEQ ID NO: 75686 - RNA, 21 nt, synthetic construct
  source 1..21: mol_type = other RNA
gcctaaaaacctgccggaaca

SEQ ID NO: 75687 - RNA, 21 nt, synthetic construct
  source 1..21: mol_type = other RNA
ccgctccagtttgggaaccta

SEQ ID NO: 75688 - RNA, 21 nt, synthetic construct
  source 1..21: mol_type = other RNA
tgcgtgtccggctgtgtctga

SEQ ID NO: 75689 - RNA, 21 nt, synthetic construct
  source 1..21: mol_type = other RNA
cagccttgaggcctgcaccta

SEQ ID NO: 75690 - RNA, 21 nt, synthetic construct
  source 1..21: mol_type = other RNA
atccgtgtgttctgctgcaaa

SEQ ID NO: 75691 - RNA, 21 nt, synthetic construct
  source 1..21: mol_type = other RNA
atccgtgtgttctgctgcaaa

SEQ ID NO: 75692 - RNA, 21 nt, synthetic construct
  source 1..21: mol_type = other RNA
atccgtgtgttctgctgcaaa

SEQ ID NO: 75693 - RNA, 21 nt, synthetic construct
  source 1..21: mol_type = other RNA
atccgtgtgttctgctgcaaa

SEQ ID NO: 75694 - RNA, 21 nt, synthetic construct
  source 1..21: mol_type = other RNA
ctggacggcggggacacggca

SEQ ID NO: 75695 - RNA, 21 nt, synthetic construct
  source 1..21: mol_type = other RNA
cgtggcctacggggatggcca

SEQ ID NO: 75696 - RNA, 21 nt, synthetic construct
  source 1..21: mol_type = other RNA
cccacgggaccttccgcatca

SEQ ID NO: 75697 - RNA, 21 nt, synthetic construct
  source 1..21: mol_type = other RNA
cccaggttgactccaccaaga

SEQ ID NO: 75698 - RNA, 21 nt, synthetic construct
  source 1..21: mol_type = other RNA
ctgaacaacttggaggggaca

SEQ ID NO: 75699 - RNA, 21 nt, synthetic construct
  source 1..21: mol_type = other RNA
ggggccgtctgtgagcagcca

SEQ ID NO: 75700 - RNA, 21 nt, synthetic construct
  source 1..21: mol_type = other RNA
ggggccgtctgtgagcagcca

SEQ ID NO: 75701 - RNA, 21 nt, synthetic construct
  source 1..21: mol_type = other RNA
ggggccgtctgtgagcagcca

SEQ ID NO: 75702 - RNA, 21 nt, synthetic construct
  source 1..21: mol_type = other RNA
ggtgaatgagacctggaccca

SEQ ID NO: 75703 - RNA, 21 nt, synthetic construct
  source 1..21: mol_type = other RNA
ttcctgtggaacggagaggaa

SEQ ID NO: 75704 - RNA, 21 nt, synthetic construct
  source 1..21: mol_type = other RNA
gcagaagttggatgggcccaa

SEQ ID NO: 75705 - RNA, 21 nt, synthetic construct
  source 1..21: mol_type = other RNA
agaagttggatgggcccacga

SEQ ID NO: 75706 - RNA, 21 nt, synthetic construct
  source 1..21: mol_type = other RNA
ttggatgggcccacggagcaa

SEQ ID NO: 75707 - RNA, 21 nt, synthetic construct
  source 1..21: mol_type = other RNA
cctgtcggcagccaacatcaa

SEQ ID NO: 75708 - RNA, 21 nt, synthetic construct
  source 1..21: mol_type = other RNA
ctgttcacaccctcgagctta

SEQ ID NO: 75709 - RNA, 21 nt, synthetic construct
  source 1..21: mol_type = other RNA
ttcaaccagaaccaggctgaa

SEQ ID NO: 75710 - RNA, 21 nt, synthetic construct
  source 1..21: mol_type = other RNA
atgcagaactgccccaagtca

SEQ ID NO: 75711 - RNA, 21 nt, synthetic construct
  source 1..21: mol_type = other RNA
gcctgtggacggctgcaccta

SEQ ID NO: 75712 - RNA, 21 nt, synthetic construct
  source 1..21: mol_type = other RNA
atgacgcgggcgcctgtgtga

SEQ ID NO: 75713 - RNA, 21 nt, synthetic construct
  source 1..21: mol_type = other RNA
ctctctgcagaaaagcacaga

SEQ ID NO: 75714 - RNA, 21 nt, synthetic construct
  source 1..21: mol_type = other RNA
cgtggagagctacgagctgaa

SEQ ID NO: 75715 - RNA, 21 nt, synthetic construct
  source 1..21: mol_type = other RNA
atggccgtgtcctgggaccga

SEQ ID NO: 75716 - RNA, 21 nt, synthetic construct
  source 1..21: mol_type = other RNA
catcaatgactttgccacgca

SEQ ID NO: 75717 - RNA, 21 nt, synthetic construct
  source 1..21: mol_type = other RNA
ccaagtactacgaggcctgca

SEQ ID NO: 75718 - RNA, 21 nt, synthetic construct
  source 1..21: mol_type = other RNA
tgccacgacgcgggcctgtga

SEQ ID NO: 75719 - RNA, 21 nt, synthetic construct
  source 1..21: mol_type = other RNA
tgcacctgcacctatgaggaa

SEQ ID NO: 75720 - RNA, 21 nt, synthetic construct
  source 1..21: mol_type = other RNA
cacggagcctgctgtgcctaa

SEQ ID NO: 75721 - RNA, 21 nt, synthetic construct
  source 1..21: mol_type = other RNA
tttgatgaggactaccccaaa

SEQ ID NO: 75722 - RNA, 21 nt, synthetic construct
  source 1..21: mol_type = other RNA
ccaggccgagagcttccccaa

SEQ ID NO: 75723 - RNA, 21 nt, synthetic construct
  source 1..21: mol_type = other RNA
accgaagtgtgagtggacaga

SEQ ID NO: 75724 - RNA, 21 nt, synthetic construct
  source 1..21: mol_type = other RNA
acagagtggtttgacgtggaa

SEQ ID NO: 75725 - RNA, 21 nt, synthetic construct
  source 1..21: mol_type = other RNA
ggctggactacagctacccca

SEQ ID NO: 75726 - RNA, 21 nt, synthetic construct
  source 1..21: mol_type = other RNA
ggtcgtggaatgcagcctgga

SEQ ID NO: 75727 - RNA, 21 nt, synthetic construct
  source 1..21: mol_type = other RNA
ggctggactacagctacccca

SEQ ID NO: 75728 - RNA, 21 nt, synthetic construct
  source 1..21: mol_type = other RNA
ggtcgtggaatgcagcctgga

SEQ ID NO: 75729 - RNA, 21 nt, synthetic construct
  source 1..21: mol_type = other RNA
ggctggactacagctacccca

SEQ ID NO: 75730 - RNA, 21 nt, synthetic construct
  source 1..21: mol_type = other RNA
ggtcgtggaatgcagcctgga

SEQ ID NO: 75731 - RNA, 21 nt, synthetic construct
  source 1..21: mol_type = other RNA
ggctggactacagctacccca

SEQ ID NO: 75732 - RNA, 21 nt, synthetic construct
  source 1..21: mol_type = other RNA
ggtcgtggaatgcagcctgga

SEQ ID NO: 75733 - RNA, 21 nt, synthetic construct
  source 1..21: mol_type = other RNA
gaactgcacggtggccaggta

SEQ ID NO: 75734 - RNA, 21 nt, synthetic construct
  source 1..21: mol_type = other RNA
ggccaggtgcgtgggtgacaa

SEQ ID NO: 75735 - RNA, 21 nt, synthetic construct
  source 1..21: mol_type = other RNA
tcacctgcgtgaacaagcaca

SEQ ID NO: 75736 - RNA, 21 nt, synthetic construct
  source 1..21: mol_type = other RNA
attccggtgagcagcggttta

SEQ ID NO: 75737 - RNA, 21 nt, synthetic construct
  source 1..21: mol_type = other RNA
ccggtgagcagcggtttcaga

SEQ ID NO: 75738 - RNA, 21 nt, synthetic construct
  source 1..21: mol_type = other RNA
gagtgaggccgacgtcaccta

SEQ ID NO: 75739 - RNA, 21 nt, synthetic construct
  source 1..21: mol_type = other RNA
caactgcacctatgtcctcaa

SEQ ID NO: 75740 - RNA, 21 nt, synthetic construct
  source 1..21: mol_type = other RNA
tgaccccgctccagtttggga

SEQ ID NO: 75741 - RNA, 21 nt, synthetic construct
  source 1..21: mol_type = other RNA
tccaccaagtactacgaggca

SEQ ID NO: 75742 - RNA, 21 nt, synthetic construct
  source 1..21: mol_type = other RNA
cctaaaaacctgccggaacca

SEQ ID NO: 75743 - RNA, 21 nt, synthetic construct
  source 1..21: mol_type = other RNA
ccttcgccaacacctggaaga

SEQ ID NO: 75744 - RNA, 21 nt, synthetic construct
  source 1..21: mol_type = other RNA
ccaccaagtactacgaggcca

SEQ ID NO: 75745 - RNA, 21 nt, synthetic construct
  source 1..21: mol_type = other RNA
gaatgagacctggaccctgga

SEQ ID NO: 75746 - RNA, 21 nt, synthetic construct
  source 1..21: mol_type = other RNA
agccaacatcaccctgttcaa

SEQ ID NO: 75747 - RNA, 21 nt, synthetic construct
  source 1..21: mol_type = other RNA
gcaccttcctcaatgacgcga

SEQ ID NO: 75748 - RNA, 21 nt, synthetic construct
  source 1..21: mol_type = other RNA
caccttcctcaatgacgcgga

SEQ ID NO: 75749 - RNA, 21 nt, synthetic construct
  source 1..21: mol_type = other RNA
tgtcggcagccaacatcacca

SEQ ID NO: 75750 - RNA, 21 nt, synthetic construct
  source 1..21: mol_type = other RNA
gtgcgtggcccagtgtggcta

SEQ ID NO: 75751 - RNA, 21 nt, synthetic construct
  source 1..21: mol_type = other RNA
aaaccggctgctgctactcca

SEQ ID NO: 75752 - RNA, 21 nt, synthetic construct
  source 1..21: mol_type = other RNA
cccaaatacgccaaccagaca

SEQ ID NO: 75753 - RNA, 21 nt, synthetic construct
  source 1..21: mol_type = other RNA
agctcttcgtggagagctaca

SEQ ID NO: 75754 - RNA, 21 nt, synthetic construct
  source 1..21: mol_type = other RNA
gatgggcccacggagcagtga

SEQ ID NO: 75755 - RNA, 21 nt, synthetic construct
  source 1..21: mol_type = other RNA
gtcaccgagaacatcccctga

SEQ ID NO: 75756 - RNA, 21 nt, synthetic construct
  source 1..21: mol_type = other RNA
agtgaggccgacgtcacctga

SEQ ID NO: 75757 - RNA, 21 nt, synthetic construct
  source 1..21: mol_type = other RNA
gaagttggatgggcccacgga

SEQ ID NO: 75758 - RNA, 21 nt, synthetic construct
  source 1..21: mol_type = other RNA
tacatgcagaactgccccaaa

SEQ ID NO: 75759 - RNA, 21 nt, synthetic construct
  source 1..21: mol_type = other RNA
acacactgcgtgtccggctga

SEQ ID NO: 75760 - RNA, 21 nt, synthetic construct
  source 1..21: mol_type = other RNA
ttcaacgagttctatgcccaa

SEQ ID NO: 75761 - RNA, 21 nt, synthetic construct
  source 1..21: mol_type = other RNA
ctgtgggaccaccggcaccaa

SEQ ID NO: 75762 - RNA, 21 nt, synthetic construct
  source 1..21: mol_type = other RNA
caatgactttgccacgcgtaa

SEQ ID NO: 75763 - RNA, 21 nt, synthetic construct
  source 1..21: mol_type = other RNA
ttctgcacggctgtggctgca

SEQ ID NO: 75764 - RNA, 21 nt, synthetic construct
  source 1..21: mol_type = other RNA
aacctgccggaaccccagtga

SEQ ID NO: 75765 - RNA, 21 nt, synthetic construct
  source 1..21: mol_type = other RNA
ctaccaggacgtcatctacaa

SEQ ID NO: 75766 - RNA, 21 nt, synthetic construct
  source 1..21: mol_type = other RNA
agcgggaggagctgccttaca

SEQ ID NO: 75767 - RNA, 21 nt, synthetic construct
  source 1..21: mol_type = other RNA
gcgggaggagctgccttacaa

SEQ ID NO: 75768 - RNA, 21 nt, synthetic construct
  source 1..21: mol_type = other RNA
cgggaggagctgccttacaga

SEQ ID NO: 75769 - RNA, 21 nt, synthetic construct
  source 1..21: mol_type = other RNA
ctgtggaacggagaggacaga

SEQ ID NO: 75770 - RNA, 21 nt, synthetic construct
  source 1..21: mol_type = other RNA
cccacggagcagtgcccggaa

SEQ ID NO: 75771 - RNA, 21 nt, synthetic construct
  source 1..21: mol_type = other RNA
ccacctttgtggaatactcaa

SEQ ID NO: 75772 - RNA, 21 nt, synthetic construct
  source 1..21: mol_type = other RNA
cacctttgtggaatactcaca

SEQ ID NO: 75773 - RNA, 21 nt, synthetic construct
  source 1..21: mol_type = other RNA
ctcacgccagtgcgcccacga

SEQ ID NO: 75774 - RNA, 21 nt, synthetic construct
  source 1..21: mol_type = other RNA
cacgccagtgcgcccacgcga

SEQ ID NO: 75775 - RNA, 21 nt, synthetic construct
  source 1..21: mol_type = other RNA
acgccagtgcgcccacgcgga

SEQ ID NO: 75776 - RNA, 21 nt, synthetic construct
  source 1..21: mol_type = other RNA
gcctgcccctcgggcagtgca

SEQ ID NO: 75777 - RNA, 21 nt, synthetic construct
  source 1..21: mol_type = other RNA
gacgctcagcctggacggcga

SEQ ID NO: 75778 - RNA, 21 nt, synthetic construct
  source 1..21: mol_type = other RNA
gcggggacacggccatccgga

SEQ ID NO: 75779 - RNA, 21 nt, synthetic construct
  source 1..21: mol_type = other RNA
cggggacacggccatccggga

SEQ ID NO: 75780 - RNA, 21 nt, synthetic construct
  source 1..21: mol_type = other RNA
gccgcgctgtcctcctatgta

SEQ ID NO: 75781 - RNA, 21 nt, synthetic construct
  source 1..21: mol_type = other RNA
acacgctggacgtgggctgta

SEQ ID NO: 75782 - RNA, 21 nt, synthetic construct
  source 1..21: mol_type = other RNA
acaacgaggccacctacaaga

SEQ ID NO: 75783 - RNA, 21 nt, synthetic construct
  source 1..21: mol_type = other RNA
cttcatcacctttgatggcga

SEQ ID NO: 75784 - RNA, 21 nt, synthetic construct
  source 1..21: mol_type = other RNA
ggggatcttcctggtcatcga

SEQ ID NO: 75785 - RNA, 21 nt, synthetic construct
  source 1..21: mol_type = other RNA
caggttgactccaccaagtaa

SEQ ID NO: 75786 - RNA, 21 nt, synthetic construct
  source 1..21: mol_type = other RNA
tgtgtgtgtcctggcggacta

SEQ ID NO: 75787 - RNA, 21 nt, synthetic construct
  source 1..21: mol_type = other RNA
gtgtgtgtcctggcggactca

SEQ ID NO: 75788 - RNA, 21 nt, synthetic construct
  source 1..21: mol_type = other RNA
ggaccagatgaagtgcgtgga

SEQ ID NO: 75789 - RNA, 21 nt, synthetic construct
  source 1..21: mol_type = other RNA
ccaggacgtcatctacaacaa

SEQ ID NO: 75790 - RNA, 21 nt, synthetic construct
  source 1..21: mol_type = other RNA
cggagcctgctgtgcctacca

SEQ ID NO: 75791 - RNA, 21 nt, synthetic construct
  source 1..21: mol_type = other RNA
tgatgaggactaccccaagta

SEQ ID NO: 75792 - RNA, 21 nt, synthetic construct
  source 1..21: mol_type = other RNA
accccaagtctgaacaactta

SEQ ID NO: 75793 - RNA, 21 nt, synthetic construct
  source 1..21: mol_type = other RNA
gttgagtcctacgataagata

SEQ ID NO: 75794 - RNA, 21 nt, synthetic construct
  source 1..21: mol_type = other RNA
aagatgtgctacaactacaga

SEQ ID NO: 75795 - RNA, 21 nt, synthetic construct
  source 1..21: mol_type = other RNA
agtggacagagtggtttgaca

SEQ ID NO: 75796 - RNA, 21 nt, synthetic construct
  source 1..21: mol_type = other RNA
ggcaggtgaatgagacctgga

SEQ ID NO: 75797 - RNA, 21 nt, synthetic construct
  source 1..21: mol_type = other RNA
gtttgaccaaattccggtgaa

SEQ ID NO: 75798 - RNA, 21 nt, synthetic construct
  source 1..21: mol_type = other RNA
cttccacaacaacaccgagga

SEQ ID NO: 75799 - RNA, 21 nt, synthetic construct
  source 1..21: mol_type = other RNA
tgctgtcccaccttccgctga

SEQ ID NO: 75800 - RNA, 21 nt, synthetic construct
  source 1..21: mol_type = other RNA
gggaggagctgccttacagca

SEQ ID NO: 75801 - RNA, 21 nt, synthetic construct
  source 1..21: mol_type = other RNA
cagtgcccggacccgctgcca

SEQ ID NO: 75802 - RNA, 21 nt, synthetic construct
  source 1..21: mol_type = other RNA
gtacatgcagaactgccccaa

SEQ ID NO: 75803 - RNA, 21 nt, synthetic construct
  source 1..21: mol_type = other RNA
caccaggactacaagggcaga

SEQ ID NO: 75804 - RNA, 21 nt, synthetic construct
  source 1..21: mol_type = other RNA
ctccaccaagtactacgagga

SEQ ID NO: 75805 - RNA, 21 nt, synthetic construct
  source 1..21: mol_type = other RNA
actaccagccctgcggggcaa

SEQ ID NO: 75806 - RNA, 21 nt, synthetic construct
  source 1..21: mol_type = other RNA
gtgagtggacagagtggttta

SEQ ID NO: 75807 - RNA, 21 nt, synthetic construct
  source 1..21: mol_type = other RNA
tgcacctatgtcctcatgaga

SEQ ID NO: 75808 - RNA, 21 nt, synthetic construct
  source 1..21: mol_type = other RNA
gcgtgttcctcaactccatca

SEQ ID NO: 75809 - RNA, 21 nt, synthetic construct
  source 1..21: mol_type = other RNA
atcgtcaccgagaacatccca

SEQ ID NO: 75810 - RNA, 21 nt, synthetic construct
  source 1..21: mol_type = other RNA
tcacgccagtgcgcccacgca

SEQ ID NO: 75811 - RNA, 21 nt, synthetic construct
  source 1..21: mol_type = other RNA
cgcgggcgcctgtgtgcccga

SEQ ID NO: 75812 - RNA, 21 nt, synthetic construct
  source 1..21: mol_type = other RNA
tgccacacgctggacgtggga

SEQ ID NO: 75813 - RNA, 21 nt, synthetic construct
  source 1..21: mol_type = other RNA
cacggctgtggctgcctacga

SEQ ID NO: 75814 - RNA, 21 nt, synthetic construct
  source 1..21: mol_type = other RNA
acctctcaggccgagaccaga

SEQ ID NO: 75815 - RNA, 21 nt, synthetic construct
  source 1..21: mol_type = other RNA
aggccatgcagcaccagtgca

SEQ ID NO: 75816 - RNA, 21 nt, synthetic construct
  source 1..21: mol_type = other RNA
tacaactacaggatccgggta

SEQ ID NO: 75817 - RNA, 21 nt, synthetic construct
  source 1..21: mol_type = other RNA
ctctcaggccgagaccagcaa

SEQ ID NO: 75818 - RNA, 21 nt, synthetic construct
  source 1..21: mol_type = other RNA
cgtgttcctcaactccatcta

SEQ ID NO: 75819 - RNA, 21 nt, synthetic construct
  source 1..21: mol_type = other RNA
tccatctacacgcagctgcca

SEQ ID NO: 75820 - RNA, 21 nt, synthetic construct
  source 1..21: mol_type = other RNA
ctgcccctgtcggcagccaaa

SEQ ID NO: 75821 - RNA, 21 nt, synthetic construct
  source 1..21: mol_type = other RNA
tgtggacggctgcacctgcca

SEQ ID NO: 75822 - RNA, 21 nt, synthetic construct
  source 1..21: mol_type = other RNA
gcgggcgcctgtgtgcccgca

SEQ ID NO: 75823 - RNA, 21 nt, synthetic construct
  source 1..21: mol_type = other RNA
gctgccacacgctggacgtga

SEQ ID NO: 75824 - RNA, 21 nt, synthetic construct
  source 1..21: mol_type = other RNA
ccacacgctggacgtgggcta

SEQ ID NO: 75825 - RNA, 21 nt, synthetic construct
  source 1..21: mol_type = other RNA
cactgcgtgtccggctgtgta

SEQ ID NO: 75826 - RNA, 21 nt, synthetic construct
  source 1..21: mol_type = other RNA
tcgtcaccgagaacatcccca

SEQ ID NO: 75827 - RNA, 21 nt, synthetic construct
  source 1..21: mol_type = other RNA
cccctgtgggaccaccggcaa

SEQ ID NO: 75828 - RNA, 21 nt, synthetic construct
  source 1..21: mol_type = other RNA
cagccctgcggggcaccctga

SEQ ID NO: 75829 - RNA, 21 nt, synthetic construct
  source 1..21: mol_type = other RNA
aaaacctgccggaaccccaga

SEQ ID NO: 75830 - RNA, 21 nt, synthetic construct
  source 1..21: mol_type = other RNA
cactccacgacaagcccggca

SEQ ID NO: 75831 - RNA, 21 nt, synthetic construct
  source 1..21: mol_type = other RNA
gactgggtccagctcaggcca

SEQ ID NO: 75832 - RNA, 21 nt, synthetic construct
  source 1..21: mol_type = other RNA
cttcggcctggtgtgcaggaa

SEQ ID NO: 75833 - RNA, 21 nt, synthetic construct
  source 1..21: mol_type = other RNA
cacccttggtacagccaccaa

SEQ ID NO: 75834 - RNA, 21 nt, synthetic construct
  source 1..21: mol_type = other RNA
cagtgactggcgaggtgcaaa

SEQ ID NO: 75835 - RNA, 21 nt, synthetic construct
  source 1..21: mol_type = other RNA
tgctactcctgtgaggaggaa

SEQ ID NO: 75836 - RNA, 21 nt, synthetic construct
  source 1..21: mol_type = other RNA
aatacgtgccctgtggcccca

SEQ ID NO: 75837 - RNA, 21 nt, synthetic construct
  source 1..21: mol_type = other RNA
ccatctacacgcagctgccca

SEQ ID NO: 75838 - RNA, 21 nt, synthetic construct
  source 1..21: mol_type = other RNA
tggaacggagaggacagtgca

SEQ ID NO: 75839 - RNA, 21 nt, synthetic construct
  source 1..21: mol_type = other RNA
ggtcgactgcaacacctgcaa

SEQ ID NO: 75840 - RNA, 21 nt, synthetic construct
  source 1..21: mol_type = other RNA
ctacatggggatcttcctgga

SEQ ID NO: 75841 - RNA, 21 nt, synthetic construct
  source 1..21: mol_type = other RNA
atacgccaaccagacctgtga

SEQ ID NO: 75842 - RNA, 21 nt, synthetic construct
  source 1..21: mol_type = other RNA
catctacacgcagctgcccca

SEQ ID NO: 75843 - RNA, 21 nt, synthetic construct
  source 1..21: mol_type = other RNA
tcttcgtggagagctacgaga

SEQ ID NO: 75844 - RNA, 21 nt, synthetic construct
  source 1..21: mol_type = other RNA
aggggccgtctgtgagcagca

SEQ ID NO: 75845 - RNA, 21 nt, synthetic construct
  source 1..21: mol_type = other RNA
aggggccgtctgtgagcagca

SEQ ID NO: 75846 - RNA, 21 nt, synthetic construct
  source 1..21: mol_type = other RNA
aggggccgtctgtgagcagca

SEQ ID NO: 75847 - RNA, 21 nt, synthetic construct
  source 1..21: mol_type = other RNA
gccttcgccaacacctggaaa

SEQ ID NO: 75848 - RNA, 21 nt, synthetic construct
  source 1..21: mol_type = other RNA
atcaagctcttcgtggagaga

SEQ ID NO: 75849 - RNA, 21 nt, synthetic construct
  source 1..21: mol_type = other RNA
ctcttcgtggagagctacgaa

SEQ ID NO: 75850 - RNA, 21 nt, synthetic construct
  source 1..21: mol_type = other RNA
ccgctcccaggttgactccaa

SEQ ID NO: 75851 - RNA, 21 nt, synthetic construct
  source 1..21: mol_type = other RNA
gcggactccggacacctgcca

SEQ ID NO: 75852 - RNA, 21 nt, synthetic construct
  source 1..21: mol_type = other RNA
ggaaccccagtgggcactgca

SEQ ID NO: 75853 - RNA, 21 nt, synthetic construct
  source 1..21: mol_type = other RNA
acgtcatctacaacaccacca

SEQ ID NO: 75854 - RNA, 21 nt, synthetic construct
  source 1..21: mol_type = other RNA
cagcaaccgaaaagaccacca

SEQ ID NO: 75855 - RNA, 21 nt, synthetic construct
  source 1..21: mol_type = other RNA
gtggtttgacgtggacttcca

SEQ ID NO: 75856 - RNA, 21 nt, synthetic construct
  source 1..21: mol_type = other RNA
tggtttgacgtggacttccca

SEQ ID NO: 75857 - RNA, 21 nt, synthetic construct
  source 1..21: mol_type = other RNA
tggctggactacagctaccca

SEQ ID NO: 75858 - RNA, 21 nt, synthetic construct
  source 1..21: mol_type = other RNA
tggctggactacagctaccca

SEQ ID NO: 75859 - RNA, 21 nt, synthetic construct
  source 1..21: mol_type = other RNA
tggctggactacagctaccca

SEQ ID NO: 75860 - RNA, 21 nt, synthetic construct
  source 1..21: mol_type = other RNA
tggctggactacagctaccca

SEQ ID NO: 75861 - RNA, 21 nt, synthetic construct
  source 1..21: mol_type = other RNA
ctgcgtgaacaagcacctgca

SEQ ID NO: 75862 - RNA, 21 nt, synthetic construct
  source 1..21: mol_type = other RNA
cagcaagaacggcgtgcttga

SEQ ID NO: 75863 - RNA, 21 nt, synthetic construct
  source 1..21: mol_type = other RNA
gttccacccgtcactgtctta

SEQ ID NO: 75864 - RNA, 21 nt, synthetic construct
  source 1..21: mol_type = other RNA
ctgtcttccccagcctgagca

SEQ ID NO: 75865 - RNA, 21 nt, synthetic construct
  source 1..21: mol_type = other RNA
gccaaccagacctgtggccta

SEQ ID NO: 75866 - RNA, 21 nt, synthetic construct
  source 1..21: mol_type = other RNA
tggatgggcccacggagcaga

SEQ ID NO: 75867 - RNA, 21 nt, synthetic construct
  source 1..21: mol_type = other RNA
acggagcagtgcccggaccca

SEQ ID NO: 75868 - RNA, 21 nt, synthetic construct
  source 1..21: mol_type = other RNA
cggagcagtgcccggacccga

SEQ ID NO: 75869 - RNA, 21 nt, synthetic construct
  source 1..21: mol_type = other RNA
gtgcccggacccgctgcccta

SEQ ID NO: 75870 - RNA, 21 nt, synthetic construct
  source 1..21: mol_type = other RNA
aggacctgtgccgctgcccca

SEQ ID NO: 75871 - RNA, 21 nt, synthetic construct
  source 1..21: mol_type = other RNA
tgtgccgctgccccacctgca

SEQ ID NO: 75872 - RNA, 21 nt, synthetic construct
  source 1..21: mol_type = other RNA
cacgcactctggctgcctgca

SEQ ID NO: 75873 - RNA, 21 nt, synthetic construct
  source 1..21: mol_type = other RNA
ggacctgccgtgccctggcaa

SEQ ID NO: 75874 - RNA, 21 nt, synthetic construct
  source 1..21: mol_type = other RNA
gtgacgctcagcctggacgga

SEQ ID NO: 75875 - RNA, 21 nt, synthetic construct
  source 1..21: mol_type = other RNA
ctccatctacacgcagctgca

SEQ ID NO: 75876 - RNA, 21 nt, synthetic construct
  source 1..21: mol_type = other RNA
agctgcccctgtcggcagcca

SEQ ID NO: 75877 - RNA, 21 nt, synthetic construct
  source 1..21: mol_type = other RNA
tcatgcaggtgtttgtcagga

SEQ ID NO: 75878 - RNA, 21 nt, synthetic construct
  source 1..21: mol_type = other RNA
cggcctgtgtgggaacttcaa

SEQ ID NO: 75879 - RNA, 21 nt, synthetic construct
  source 1..21: mol_type = other RNA
ggcctgtgtgggaacttcaaa

SEQ ID NO: 75880 - RNA, 21 nt, synthetic construct
  source 1..21: mol_type = other RNA
gcctgtgtgggaacttcaaca

SEQ ID NO: 75881 - RNA, 21 nt, synthetic construct
  source 1..21: mol_type = other RNA
ggaacttcaaccagaaccaga

SEQ ID NO: 75882 - RNA, 21 nt, synthetic construct
  source 1..21: mol_type = other RNA
gaacttcaaccagaaccagga

SEQ ID NO: 75883 - RNA, 21 nt, synthetic construct
  source 1..21: mol_type = other RNA
agccttcgccaacacctggaa

SEQ ID NO: 75884 - RNA, 21 nt, synthetic construct
  source 1..21: mol_type = other RNA
ccaacacctggaaggcccaga

SEQ ID NO: 75885 - RNA, 21 nt, synthetic construct
  source 1..21: mol_type = other RNA
caacacctggaaggcccagga

SEQ ID NO: 75886 - RNA, 21 nt, synthetic construct
  source 1..21: mol_type = other RNA
tgtcctcctatgtgcacgcca

SEQ ID NO: 75887 - RNA, 21 nt, synthetic construct
  source 1..21: mol_type = other RNA
gtcctcctatgtgcacgccta

SEQ ID NO: 75888 - RNA, 21 nt, synthetic construct
  source 1..21: mol_type = other RNA
tcctcctatgtgcacgcctga

SEQ ID NO: 75889 - RNA, 21 nt, synthetic construct
  source 1..21: mol_type = other RNA
tcctatgtgcacgcctgtgca

SEQ ID NO: 75890 - RNA, 21 nt, synthetic construct
  source 1..21: mol_type = other RNA
cctatgtgcacgcctgtgcca

SEQ ID NO: 75891 - RNA, 21 nt, synthetic construct
  source 1..21: mol_type = other RNA
ctatgtgcacgcctgtgccga

SEQ ID NO: 75892 - RNA, 21 nt, synthetic construct
  source 1..21: mol_type = other RNA
gcaccaagtacatgcagaaca

SEQ ID NO: 75893 - RNA, 21 nt, synthetic construct
  source 1..21: mol_type = other RNA
accaagtacatgcagaactga

SEQ ID NO: 75894 - RNA, 21 nt, synthetic construct
  source 1..21: mol_type = other RNA
acgcgggcgcctgtgtgccca

SEQ ID NO: 75895 - RNA, 21 nt, synthetic construct
  source 1..21: mol_type = other RNA
ctgccacacgctggacgtgga

SEQ ID NO: 75896 - RNA, 21 nt, synthetic construct
  source 1..21: mol_type = other RNA
gccacacgctggacgtgggca

SEQ ID NO: 75897 - RNA, 21 nt, synthetic construct
  source 1..21: mol_type = other RNA
ctggacgtgggctgtttcaga

SEQ ID NO: 75898 - RNA, 21 nt, synthetic construct
  source 1..21: mol_type = other RNA
acactgcgtgtccggctgtga

SEQ ID NO: 75899 - RNA, 21 nt, synthetic construct
  source 1..21: mol_type = other RNA
gaggccacctacaagcctgga

SEQ ID NO: 75900 - RNA, 21 nt, synthetic construct
  source 1..21: mol_type = other RNA
ggccacctacaagcctggaga

SEQ ID NO: 75901 - RNA, 21 nt, synthetic construct
  source 1..21: mol_type = other RNA
tctgcctgggcacctgcgtga

SEQ ID NO: 75902 - RNA, 21 nt, synthetic construct
  source 1..21: mol_type = other RNA
tggccacttcatcacctttga

SEQ ID NO: 75903 - RNA, 21 nt, synthetic construct
  source 1..21: mol_type = other RNA
ccacccacgggaccttccgca

SEQ ID NO: 75904 - RNA, 21 nt, synthetic construct
  source 1..21: mol_type = other RNA
ttccgcatcgtcaccgagaaa

SEQ ID NO: 75905 - RNA, 21 nt, synthetic construct
  source 1..21: mol_type = other RNA
gaacatcccctgtgggaccaa

SEQ ID NO: 75906 - RNA, 21 nt, synthetic construct
  source 1..21: mol_type = other RNA
gccatcaagctcttcgtggaa

SEQ ID NO: 75907 - RNA, 21 nt, synthetic construct
  source 1..21: mol_type = other RNA
catcaagctcttcgtggagaa

SEQ ID NO: 75908 - RNA, 21 nt, synthetic construct
  source 1..21: mol_type = other RNA
gctcttcgtggagagctacga

SEQ ID NO: 75909 - RNA, 21 nt, synthetic construct
  source 1..21: mol_type = other RNA
gtggagagctacgagctgata

SEQ ID NO: 75910 - RNA, 21 nt, synthetic construct
  source 1..21: mol_type = other RNA
tcttcctggtcatcgagacca

SEQ ID NO: 75911 - RNA, 21 nt, synthetic construct
  source 1..21: mol_type = other RNA
ccgactgcaccaggactacaa

SEQ ID NO: 75912 - RNA, 21 nt, synthetic construct
  source 1..21: mol_type = other RNA
gactacaagggcagggtctga

SEQ ID NO: 75913 - RNA, 21 nt, synthetic construct
  source 1..21: mol_type = other RNA
atgccatcaatgactttgcca

SEQ ID NO: 75914 - RNA, 21 nt, synthetic construct
  source 1..21: mol_type = other RNA
ggttgactccaccaagtacta

SEQ ID NO: 75915 - RNA, 21 nt, synthetic construct
  source 1..21: mol_type = other RNA
ctgtggctgcctacgcccaga

SEQ ID NO: 75916 - RNA, 21 nt, synthetic construct
  source 1..21: mol_type = other RNA
tgtggctgcctacgcccagga

SEQ ID NO: 75917 - RNA, 21 nt, synthetic construct
  source 1..21: mol_type = other RNA
ccacgacgcgggcctgtgtga

SEQ ID NO: 75918 - RNA, 21 nt, synthetic construct
  source 1..21: mol_type = other RNA
ttgttctgtgacttctacaaa

SEQ ID NO: 75919 - RNA, 21 nt, synthetic construct
  source 1..21: mol_type = other RNA
gctgtgagtggcactaccaga

SEQ ID NO: 75920 - RNA, 21 nt, synthetic construct
  source 1..21: mol_type = other RNA
ctaaaaacctgccggaaccca

SEQ ID NO: 75921 - RNA, 21 nt, synthetic construct
  source 1..21: mol_type = other RNA
taaaaacctgccggaacccca

SEQ ID NO: 75922 - RNA, 21 nt, synthetic construct
  source 1..21: mol_type = other RNA
agatgaagtgcgtggcccaga

SEQ ID NO: 75923 - RNA, 21 nt, synthetic construct
  source 1..21: mol_type = other RNA
cacctgcacctatgaggacaa

SEQ ID NO: 75924 - RNA, 21 nt, synthetic construct
  source 1..21: mol_type = other RNA
ggtaccaccacctgccagcca

SEQ ID NO: 75925 - RNA, 21 nt, synthetic construct
  source 1..21: mol_type = other RNA
gccccggtgtcagtggacaga

SEQ ID NO: 75926 - RNA, 21 nt, synthetic construct
  source 1..21: mol_type = other RNA
ggtgtcagtggacagagtgga

SEQ ID NO: 75927 - RNA, 21 nt, synthetic construct
  source 1..21: mol_type = other RNA
gatgaggactaccccaagtca

SEQ ID NO: 75928 - RNA, 21 nt, synthetic construct
  source 1..21: mol_type = other RNA
tctgaacaacttggaggggaa

SEQ ID NO: 75929 - RNA, 21 nt, synthetic construct
  source 1..21: mol_type = other RNA
cgttgagtcctacgataagaa

SEQ ID NO: 75930 - RNA, 21 nt, synthetic construct
  source 1..21: mol_type = other RNA
gcagcctaaggacatagagta

SEQ ID NO: 75931 - RNA, 21 nt, synthetic construct
  source 1..21: mol_type = other RNA
cgaagtgtgagtggacagaga

SEQ ID NO: 75932 - RNA, 21 nt, synthetic construct
  source 1..21: mol_type = other RNA
gaagtgtgagtggacagagta

SEQ ID NO: 75933 - RNA, 21 nt, synthetic construct
  source 1..21: mol_type = other RNA
tccacggtgacttcccacaca

SEQ ID NO: 75934 - RNA, 21 nt, synthetic construct
  source 1..21: mol_type = other RNA
ccagcctggtgtccccctgca

SEQ ID NO: 75935 - RNA, 21 nt, synthetic construct
  source 1..21: mol_type = other RNA
ggagttgggccaggtcgtgga

SEQ ID NO: 75936 - RNA, 21 nt, synthetic construct
  source 1..21: mol_type = other RNA
gggaagttcaagatgtgctta

SEQ ID NO: 75937 - RNA, 21 nt, synthetic construct
  source 1..21: mol_type = other RNA
ccagcctggtgtccccctgca

SEQ ID NO: 75938 - RNA, 21 nt, synthetic construct
  source 1..21: mol_type = other RNA
ggagttgggccaggtcgtgga

SEQ ID NO: 75939 - RNA, 21 nt, synthetic construct
  source 1..21: mol_type = other RNA
gggaagttcaagatgtgctta

SEQ ID NO: 75940 - RNA, 21 nt, synthetic construct
  source 1..21: mol_type = other RNA
tccacggtgacttcccacaca

SEQ ID NO: 75941 - RNA, 21 nt, synthetic construct
  source 1..21: mol_type = other RNA
ccagcctggtgtccccctgca

SEQ ID NO: 75942 - RNA, 21 nt, synthetic construct
  source 1..21: mol_type = other RNA
ggagttgggccaggtcgtgga

SEQ ID NO: 75943 - RNA, 21 nt, synthetic construct
  source 1..21: mol_type = other RNA
gggaagttcaagatgtgctta

SEQ ID NO: 75944 - RNA, 21 nt, synthetic construct
  source 1..21: mol_type = other RNA
ggagttgggccaggtcgtgga

SEQ ID NO: 75945 - RNA, 21 nt, synthetic construct
  source 1..21: mol_type = other RNA
gggaagttcaagatgtgctta

SEQ ID NO: 75946 - RNA, 21 nt, synthetic construct
  source 1..21: mol_type = other RNA
ccggcaggtgaatgagaccta

SEQ ID NO: 75947 - RNA, 21 nt, synthetic construct
  source 1..21: mol_type = other RNA
aggtgaatgagacctggacca

SEQ ID NO: 75948 - RNA, 21 nt, synthetic construct
  source 1..21: mol_type = other RNA
gtgaatgagacctggacccta

SEQ ID NO: 75949 - RNA, 21 nt, synthetic construct
  source 1..21: mol_type = other RNA
tgaatgagacctggaccctga

SEQ ID NO: 75950 - RNA, 21 nt, synthetic construct
  source 1..21: mol_type = other RNA
cctgcgtgaacaagcacctga

SEQ ID NO: 75951 - RNA, 21 nt, synthetic construct
  source 1..21: mol_type = other RNA
tgaacaagcacctgcccatca

SEQ ID NO: 75952 - RNA, 21 nt, synthetic construct
  source 1..21: mol_type = other RNA
gggcaactgcacctatgtcca

SEQ ID NO: 75953 - RNA, 21 nt, synthetic construct
  source 1..21: mol_type = other RNA
ggcaactgcacctatgtccta

SEQ ID NO: 75954 - RNA, 21 nt, synthetic construct
  source 1..21: mol_type = other RNA
acctatgtcctcatgagagaa

SEQ ID NO: 75955 - RNA, 21 nt, synthetic construct
  source 1..21: mol_type = other RNA
ggcccggctgccctacagcca

SEQ ID NO: 75956 - RNA, 21 nt, synthetic construct
  source 1..21: mol_type = other RNA
gcccggctgccctacagccta

SEQ ID NO: 75957 - RNA, 21 nt, synthetic construct
  source 1..21: mol_type = other RNA
tccacaacaacaccgagggca

SEQ ID NO: 75958 - RNA, 21 nt, synthetic construct
  source 1..21: mol_type = other RNA
gcggcacctgcaccaacaaca

SEQ ID NO: 75959 - RNA, 21 nt, synthetic construct
  source 1..21: mol_type = other RNA
cctgcaccaacaaccagagga

SEQ ID NO: 75960 - RNA, 21 nt, synthetic construct
  source 1..21: mol_type = other RNA
cccggggagtgtgcagtgaca

SEQ ID NO: 75961 - RNA, 21 nt, synthetic construct
  source 1..21: mol_type = other RNA
aactgccagtcctgcgtgtga

SEQ ID NO: 75962 - RNA, 21 nt, synthetic construct
  source 1..21: mol_type = other RNA
gcctcaggaaaaccggctgca

SEQ ID NO: 75963 - RNA, 21 nt, synthetic construct
  source 1..21: mol_type = other RNA
catgcagcaccagtgcaccta

SEQ ID NO: 75964 - RNA, 21 nt, synthetic construct
  source 1..21: mol_type = other RNA
tccacgaggagacggtgccca

SEQ ID NO: 75965 - RNA, 21 nt, synthetic construct
  source 1..21: mol_type = other RNA
ccgcgctgtcctcctatgtga

SEQ ID NO: 75966 - RNA, 21 nt, synthetic construct
  source 1..21: mol_type = other RNA
tgacgctcagcctggacggca

SEQ ID NO: 75967 - RNA, 21 nt, synthetic construct
  source 1..21: mol_type = other RNA
cacctatgtcctcatgagaga

SEQ ID NO: 75968 - RNA, 21 nt, synthetic construct
  source 1..21: mol_type = other RNA
ccgagggccagtgcggcacca

SEQ ID NO: 75969 - RNA, 21 nt, synthetic construct
  source 1..21: mol_type = other RNA
ctgcggcctgtgcgggaacta

SEQ ID NO: 75970 - RNA, 21 nt, synthetic construct
  source 1..21: mol_type = other RNA
cgagggccagtgcggcaccta

SEQ ID NO: 75971 - RNA, 21 nt, synthetic construct
  source 1..21: mol_type = other RNA
gactgcgagtgtttctgcaca

SEQ ID NO: 75972 - RNA, 21 nt, synthetic construct
  source 1..21: mol_type = other RNA
gagggccagtgcggcacctga

SEQ ID NO: 75973 - RNA, 21 nt, synthetic construct
  source 1..21: mol_type = other RNA
cctgtgcgggaacttcgacga

SEQ ID NO: 75974 - RNA, 21 nt, synthetic construct
  source 1..21: mol_type = other RNA
gcggcctgtgcgggaacttca

SEQ ID NO: 75975 - RNA, 21 nt, synthetic construct
  source 1..21: mol_type = other RNA
cagatgtgcggcctgtgtgga

SEQ ID NO: 75976 - RNA, 21 nt, synthetic construct
  source 1..21: mol_type = other RNA
cggcctgtgcgggaacttcga

SEQ ID NO: 75977 - RNA, 21 nt, synthetic construct
  source 1..21: mol_type = other RNA
ggcctgtgcgggaacttcgaa

SEQ ID NO: 75978 - RNA, 21 nt, synthetic construct
  source 1..21: mol_type = other RNA
cgagtgtttctgcacggctga

SEQ ID NO: 75979 - RNA, 21 nt, synthetic construct
  source 1..21: mol_type = other RNA
gtgtttctgcacggctgtgga

SEQ ID NO: 75980 - RNA, 21 nt, synthetic construct
  source 1..21: mol_type = other RNA
acggctgtggctgcctacgca

SEQ ID NO: 75981 - RNA, 21 nt, synthetic construct
  source 1..21: mol_type = other RNA
acgcgggcctgtgtgtgtcca

SEQ ID NO: 75982 - RNA, 21 nt, synthetic construct
  source 1..21: mol_type = other RNA
cactaccagccctgcggggca

SEQ ID NO: 75983 - RNA, 21 nt, synthetic construct
  source 1..21: mol_type = other RNA
agggccagtgcggcacctgca

SEQ ID NO: 75984 - RNA, 21 nt, synthetic construct
  source 1..21: mol_type = other RNA
gggccagtgcggcacctgcaa

SEQ ID NO: 75985 - RNA, 21 nt, synthetic construct
  source 1..21: mol_type = other RNA
agtgcggcacctgcaccaaca

SEQ ID NO: 75986 - RNA, 21 nt, synthetic construct
  source 1..21: mol_type = other RNA
tgcagtgactggcgaggtgca

SEQ ID NO: 75987 - RNA, 21 nt, synthetic construct
  source 1..21: mol_type = other RNA
gcagtgactggcgaggtgcaa

SEQ ID NO: 75988 - RNA, 21 nt, synthetic construct
  source 1..21: mol_type = other RNA
cctgtttgaccaaattccgga

SEQ ID NO: 75989 - RNA, 21 nt, synthetic construct
  source 1..21: mol_type = other RNA
cacgggctgtgagccccagta

SEQ ID NO: 75990 - RNA, 21 nt, synthetic construct
  source 1..21: mol_type = other RNA
cacgggctgtgagccccagta

SEQ ID NO: 75991 - RNA, 21 nt, synthetic construct
  source 1..21: mol_type = other RNA
agaccacagcaaccgaaaaga

SEQ ID NO: 75992 - RNA, 21 nt, synthetic construct
  source 1..21: mol_type = other RNA
ggactgacatcccccagataa

SEQ ID NO: 75993 - RNA, 21 nt, synthetic construct
  source 1..21: mol_type = other RNA
aaggctgtggcatgtcctgga

SEQ ID NO: 75994 - RNA, 21 nt, synthetic construct
  source 1..21: mol_type = other RNA
agcagcctaaggacatagaga

SEQ ID NO: 75995 - RNA, 21 nt, synthetic construct
  source 1..21: mol_type = other RNA
aagttggatgggcccacggaa

SEQ ID NO: 75996 - RNA, 21 nt, synthetic construct
  source 1..21: mol_type = other RNA
ctcatgcaggtgtttgtcaga

SEQ ID NO: 75997 - RNA, 21 nt, synthetic construct
  source 1..21: mol_type = other RNA
cgctcccaggttgactccaca

SEQ ID NO: 75998 - RNA, 21 nt, synthetic construct
  source 1..21: mol_type = other RNA
accacagcaaccgaaaagaca

SEQ ID NO: 75999 - RNA, 21 nt, synthetic construct
  source 1..21: mol_type = other RNA
tcagtggacagagtggtttga

SEQ ID NO: 76000 - RNA, 21 nt, synthetic construct
  source 1..21: mol_type = other RNA
gctgtgagccccagtgtgcca

SEQ ID NO: 76001 - RNA, 21 nt, synthetic construct
  source 1..21: mol_type = other RNA
gctgtgagccccagtgtgcca

SEQ ID NO: 76002 - RNA, 21 nt, synthetic construct
  source 1..21: mol_type = other RNA
gctgtgagccccagtgtgcca

SEQ ID NO: 76003 - RNA, 21 nt, synthetic construct
  source 1..21: mol_type = other RNA
gctgtgagccccagtgtgcca

SEQ ID NO: 76004 - RNA, 21 nt, synthetic construct
  source 1..21: mol_type = other RNA
cacctgccagccccggtgtca

SEQ ID NO: 76005 - RNA, 21 nt, synthetic construct
  source 1..21: mol_type = other RNA
agcccttcttcaatgaggaca

SEQ ID NO: 76006 - RNA, 21 nt, synthetic construct
  source 1..21: mol_type = other RNA
gagggacggcgtctgcaccaa

SEQ ID NO: 76007 - RNA, 21 nt, synthetic construct
  source 1..21: mol_type = other RNA
gcgggagttgggccaggtcga

SEQ ID NO: 76008 - RNA, 21 nt, synthetic construct
  source 1..21: mol_type = other RNA
gcgggagttgggccaggtcga

SEQ ID NO: 76009 - RNA, 21 nt, synthetic construct
  source 1..21: mol_type = other RNA
gcgggagttgggccaggtcga

SEQ ID NO: 76010 - RNA, 21 nt, synthetic construct
  source 1..21: mol_type = other RNA
agggacggcgtctgcaccaaa

SEQ ID NO: 76011 - RNA, 21 nt, synthetic construct
  source 1..21: mol_type = other RNA
cctgcacctatgaggacagga

SEQ ID NO: 76012 - RNA, 21 nt, synthetic construct
  source 1..21: mol_type = other RNA
cacacccccacagtgctgaca

SEQ ID NO: 76013 - RNA, 21 nt, synthetic construct
  source 1..21: mol_type = other RNA
cacacccccacagtgctgaca

SEQ ID NO: 76014 - RNA, 21 nt, synthetic construct
  source 1..21: mol_type = other RNA
ccctcgggcagtgcccctgca

SEQ ID NO: 76015 - RNA, 21 nt, synthetic construct
  source 1..21: mol_type = other RNA
ccaagtctgaacaacttggaa

SEQ ID NO: 76016 - RNA, 21 nt, synthetic construct
  source 1..21: mol_type = other RNA
gagtgccaggccgagagctta

SEQ ID NO: 76017 - RNA, 21 nt, synthetic construct
  source 1..21: mol_type = other RNA
agtgccaggccgagagcttca

SEQ ID NO: 76018 - RNA, 21 nt, synthetic construct
  source 1..21: mol_type = other RNA
ctggactacagctaccccata

SEQ ID NO: 76019 - RNA, 21 nt, synthetic construct
  source 1..21: mol_type = other RNA
ctggactacagctaccccata

SEQ ID NO: 76020 - RNA, 21 nt, synthetic construct
  source 1..21: mol_type = other RNA
ctggactacagctaccccata

SEQ ID NO: 76021 - RNA, 21 nt, synthetic construct
  source 1..21: mol_type = other RNA
ctggactacagctaccccata

SEQ ID NO: 76022 - RNA, 21 nt, synthetic construct
  source 1..21: mol_type = other RNA
gtgttcctcaactccatctaa

SEQ ID NO: 76023 - RNA, 21 nt, synthetic construct
  source 1..21: mol_type = other RNA
tgttcacaccctcgagcttca

SEQ ID NO: 76024 - RNA, 21 nt, synthetic construct
  source 1..21: mol_type = other RNA
ctaaggacatagagtgccaga

SEQ ID NO: 76025 - RNA, 21 nt, synthetic construct
  source 1..21: mol_type = other RNA
ggctgtgagccccagtgtgca

SEQ ID NO: 76026 - RNA, 21 nt, synthetic construct
  source 1..21: mol_type = other RNA
ggctgtgagccccagtgtgca

SEQ ID NO: 76027 - RNA, 21 nt, synthetic construct
  source 1..21: mol_type = other RNA
ggctgtgagccccagtgtgca

SEQ ID NO: 76028 - RNA, 21 nt, synthetic construct
  source 1..21: mol_type = other RNA
ggctgtgagccccagtgtgca

SEQ ID NO: 76029 - RNA, 21 nt, synthetic construct
  source 1..21: mol_type = other RNA
cctgtggaacggagaggacaa

SEQ ID NO: 76030 - RNA, 21 nt, synthetic construct
  source 1..21: mol_type = other RNA
ggaggagctgccttacagcca

SEQ ID NO: 76031 - RNA, 21 nt, synthetic construct
  source 1..21: mol_type = other RNA
tgtgtctgtcccccggggcta

SEQ ID NO: 76032 - RNA, 21 nt, synthetic construct
  source 1..21: mol_type = other RNA
gtgtgtcctggcggactccga

SEQ ID NO: 76033 - RNA, 21 nt, synthetic construct
  source 1..21: mol_type = other RNA
atcaaccccaagcccttccaa

SEQ ID NO: 76034 - RNA, 21 nt, synthetic construct
  source 1..21: mol_type = other RNA
gtttctgcacggctgtggcta

SEQ ID NO: 76035 - RNA, 21 nt, synthetic construct
  source 1..21: mol_type = other RNA
ctgcctggtggacctgcctga

SEQ ID NO: 76036 - RNA, 21 nt, synthetic construct
  source 1..21: mol_type = other RNA
cggcaggtgaatgagacctga

SEQ ID NO: 76037 - RNA, 21 nt, synthetic construct
  source 1..21: mol_type = other RNA
accgtgaccaggccccgggca

SEQ ID NO: 76038 - RNA, 21 nt, synthetic construct
  source 1..21: mol_type = other RNA
ctgctactcctgtgaggagga

SEQ ID NO: 76039 - RNA, 21 nt, synthetic construct
  source 1..21: mol_type = other RNA
acggagaggacagtgccctga

SEQ ID NO: 76040 - RNA, 21 nt, synthetic construct
  source 1..21: mol_type = other RNA
ctgcttctgccccccaggcaa

SEQ ID NO: 76041 - RNA, 21 nt, synthetic construct
  source 1..21: mol_type = other RNA
cctgcccctcgggcagtgcca

SEQ ID NO: 76042 - RNA, 21 nt, synthetic construct
  source 1..21: mol_type = other RNA
gccgtgccctggcacctgcta

SEQ ID NO: 76043 - RNA, 21 nt, synthetic construct
  source 1..21: mol_type = other RNA
cctcctatgtgcacgcctgta

SEQ ID NO: 76044 - RNA, 21 nt, synthetic construct
  source 1..21: mol_type = other RNA
ctcctatgtgcacgcctgtga

SEQ ID NO: 76045 - RNA, 21 nt, synthetic construct
  source 1..21: mol_type = other RNA
tgttctgtgacttctacaaca

SEQ ID NO: 76046 - RNA, 21 nt, synthetic construct
  source 1..21: mol_type = other RNA
ggctgtgagtggcactaccaa

SEQ ID NO: 76047 - RNA, 21 nt, synthetic construct
  source 1..21: mol_type = other RNA
acgtgccctgtggcccctcca

SEQ ID NO: 76048 - RNA, 21 nt, synthetic construct
  source 1..21: mol_type = other RNA
gtgagccccagtgtgcctgga

SEQ ID NO: 76049 - RNA, 21 nt, synthetic construct
  source 1..21: mol_type = other RNA
ctggtgtccccctgcgggaga

SEQ ID NO: 76050 - RNA, 21 nt, synthetic construct
  source 1..21: mol_type = other RNA
gtgagccccagtgtgcctgga

SEQ ID NO: 76051 - RNA, 21 nt, synthetic construct
  source 1..21: mol_type = other RNA
ctggtgtccccctgcgggaga

SEQ ID NO: 76052 - RNA, 21 nt, synthetic construct
  source 1..21: mol_type = other RNA
gtgagccccagtgtgcctgga

SEQ ID NO: 76053 - RNA, 21 nt, synthetic construct
  source 1..21: mol_type = other RNA
ctggtgtccccctgcgggaga

SEQ ID NO: 76054 - RNA, 21 nt, synthetic construct
  source 1..21: mol_type = other RNA
gtgagccccagtgtgcctgga

SEQ ID NO: 76055 - RNA, 21 nt, synthetic construct
  source 1..21: mol_type = other RNA
tggcggagggctgcttctgca

SEQ ID NO: 76056 - RNA, 21 nt, synthetic construct
  source 1..21: mol_type = other RNA
aaccggctgctgctactccta

SEQ ID NO: 76057 - RNA, 21 nt, synthetic construct
  source 1..21: mol_type = other RNA
cgggtccacgaggagacggta

SEQ ID NO: 76058 - RNA, 21 nt, synthetic construct
  source 1..21: mol_type = other RNA
gggtccacgaggagacggtga

SEQ ID NO: 76059 - RNA, 21 nt, synthetic construct
  source 1..21: mol_type = other RNA
taccagctttacagccatcca

SEQ ID NO: 76060 - RNA, 21 nt, synthetic construct
  source 1..21: mol_type = other RNA
taccagctttacagccatcca

SEQ ID NO: 76061 - RNA, 21 nt, synthetic construct
  source 1..21: mol_type = other RNA
taccagctttacagccatcca

SEQ ID NO: 76062 - RNA, 21 nt, synthetic construct
  source 1..21: mol_type = other RNA
acggtgacttcccacacccca

SEQ ID NO: 76063 - RNA, 21 nt, synthetic construct
  source 1..21: mol_type = other RNA
cgttctgtccaagaaatgtga

SEQ ID NO: 76064 - RNA, 21 nt, synthetic construct
  source 1..21: mol_type = other RNA
atctacacgcagctgccccta

SEQ ID NO: 76065 - RNA, 21 nt, synthetic construct
  source 1..21: mol_type = other RNA
ctgcaccaagtacatgcagaa

SEQ ID NO: 76066 - RNA, 21 nt, synthetic construct
  source 1..21: mol_type = other RNA
tccccctgcgggagttgggca

SEQ ID NO: 76067 - RNA, 21 nt, synthetic construct
  source 1..21: mol_type = other RNA
tccccctgcgggagttgggca

SEQ ID NO: 76068 - RNA, 21 nt, synthetic construct
  source 1..21: mol_type = other RNA
tccccctgcgggagttgggca

SEQ ID NO: 76069 - RNA, 21 nt, synthetic construct
  source 1..21: mol_type = other RNA
ctcgggcagtgcccctgcaca

SEQ ID NO: 76070 - RNA, 21 nt, synthetic construct
  source 1..21: mol_type = other RNA
gttcctcaactccatctacaa

SEQ ID NO: 76071 - RNA, 21 nt, synthetic construct
  source 1..21: mol_type = other RNA
acctgcacctatgaggacaga

SEQ ID NO: 76072 - RNA, 21 nt, synthetic construct
  source 1..21: mol_type = other RNA
ccgtcactgtcttccccagca

SEQ ID NO: 76073 - RNA, 21 nt, synthetic construct
  source 1..21: mol_type = other RNA
gccgctcccaggttgactcca

SEQ ID NO: 76074 - RNA, 21 nt, synthetic construct
  source 1..21: mol_type = other RNA
aagtgcgtggcccagtgtgga

SEQ ID NO: 76075 - RNA, 21 nt, synthetic construct
  source 1..21: mol_type = other RNA
ctcccacttctctactcccta

SEQ ID NO: 76076 - RNA, 21 nt, synthetic construct
  source 1..21: mol_type = other RNA
ggagggacggcgtctgcacca

SEQ ID NO: 76077 - RNA, 21 nt, synthetic construct
  source 1..21: mol_type = other RNA
ccacacccccacagtgctgaa

SEQ ID NO: 76078 - RNA, 21 nt, synthetic construct
  source 1..21: mol_type = other RNA
ccacacccccacagtgctgaa

SEQ ID NO: 76079 - RNA, 21 nt, synthetic construct
  source 1..21: mol_type = other RNA
aactgcacggtggccaggtga

SEQ ID NO: 76080 - RNA, 21 nt, synthetic construct
  source 1..21: mol_type = other RNA
acacccaggacccaacggtga

SEQ ID NO: 76081 - RNA, 21 nt, synthetic construct
  source 1..21: mol_type = other RNA
acctttgtggaatactcacga

SEQ ID NO: 76082 - RNA, 21 nt, synthetic construct
  source 1..21: mol_type = other RNA
agcagccccacatcggcccca

SEQ ID NO: 76083 - RNA, 21 nt, synthetic construct
  source 1..21: mol_type = other RNA
agcagccccacatcggcccca

SEQ ID NO: 76084 - RNA, 21 nt, synthetic construct
  source 1..21: mol_type = other RNA
agcagccccacatcggcccca

SEQ ID NO: 76085 - RNA, 21 nt, synthetic construct
  source 1..21: mol_type = other RNA
actccacgacaagcccggcca

SEQ ID NO: 76086 - RNA, 21 nt, synthetic construct
  source 1..21: mol_type = other RNA
atagagtgccaggccgagaga

SEQ ID NO: 76087 - RNA, 21 nt, synthetic construct
  source 1..21: mol_type = other RNA
gctacatggggatcttcctga

SEQ ID NO: 76088 - RNA, 21 nt, synthetic construct
  source 1..21: mol_type = other RNA
ccccggtgtcagtggacagaa

SEQ ID NO: 76089 - RNA, 21 nt, synthetic construct
  source 1..21: mol_type = other RNA
cgctccagtttgggaacctga

SEQ ID NO: 76090 - RNA, 21 nt, synthetic construct
  source 1..21: mol_type = other RNA
ctgccgtgccctggcacctga

SEQ ID NO: 76091 - RNA, 21 nt, synthetic construct
  source 1..21: mol_type = other RNA
acatgcagaactgccccaaga

SEQ ID NO: 76092 - RNA, 21 nt, synthetic construct
  source 1..21: mol_type = other RNA
tgggagtgcagccaccggcta

SEQ ID NO: 76093 - RNA, 21 nt, synthetic construct
  source 1..21: mol_type = other RNA
ctccctcctctgccctaggga

SEQ ID NO: 76094 - RNA, 21 nt, synthetic construct
  source 1..21: mol_type = other RNA
ctccctcctctgccctaggga

SEQ ID NO: 76095 - RNA, 21 nt, synthetic construct
  source 1..21: mol_type = other RNA
ctccctcctctgccctaggga

SEQ ID NO: 76096 - RNA, 21 nt, synthetic construct
  source 1..21: mol_type = other RNA
ctccctcctctgccctaggga

SEQ ID NO: 76097 - RNA, 21 nt, synthetic construct
  source 1..21: mol_type = other RNA
tcccacttctctactccctga

SEQ ID NO: 76098 - RNA, 21 nt, synthetic construct
  source 1..21: mol_type = other RNA
cctgtgaggaggactcctgta

SEQ ID NO: 76099 - RNA, 21 nt, synthetic construct
  source 1..21: mol_type = other RNA
cctcgggcagtgcccctgcaa

SEQ ID NO: 76100 - RNA, 21 nt, synthetic construct
  source 1..21: mol_type = other RNA
cgccaaccagacctgtggcca

SEQ ID NO: 76101 - RNA, 21 nt, synthetic construct
  source 1..21: mol_type = other RNA
cccactgtcccaggggtggca

SEQ ID NO: 76102 - RNA, 21 nt, synthetic construct
  source 1..21: mol_type = other RNA
ccaagtacatgcagaactgca

SEQ ID NO: 76103 - RNA, 21 nt, synthetic construct
  source 1..21: mol_type = other RNA
cacgctggacgtgggctgtta

SEQ ID NO: 76104 - RNA, 21 nt, synthetic construct
  source 1..21: mol_type = other RNA
ggagcctgctgtgcctaccca

SEQ ID NO: 76105 - RNA, 21 nt, synthetic construct
  source 1..21: mol_type = other RNA
cacccacacccccacagtgca

SEQ ID NO: 76106 - RNA, 21 nt, synthetic construct
  source 1..21: mol_type = other RNA
cacccacacccccacagtgca

SEQ ID NO: 76107 - RNA, 21 nt, synthetic construct
  source 1..21: mol_type = other RNA
agttgggccaggtcgtggaaa

SEQ ID NO: 76108 - RNA, 21 nt, synthetic construct
  source 1..21: mol_type = other RNA
agttgggccaggtcgtggaaa

SEQ ID NO: 76109 - RNA, 21 nt, synthetic construct
  source 1..21: mol_type = other RNA
agttgggccaggtcgtggaaa

SEQ ID NO: 76110 - RNA, 21 nt, synthetic construct
  source 1..21: mol_type = other RNA
agttgggccaggtcgtggaaa

SEQ ID NO: 76111 - RNA, 21 nt, synthetic construct
  source 1..21: mol_type = other RNA
tgagtgcgagtgcatctgcaa

SEQ ID NO: 76112 - RNA, 21 nt, synthetic construct
  source 1..21: mol_type = other RNA
caatgacgcgggcgcctgtga

SEQ ID NO: 76113 - RNA, 21 nt, synthetic construct
  source 1..21: mol_type = other RNA
gtgcgcccacgcggggggcca

SEQ ID NO: 76114 - RNA, 21 nt, synthetic construct
  source 1..21: mol_type = other RNA
aagcccttccactcgaactga

SEQ ID NO: 76115 - RNA, 21 nt, synthetic construct
  source 1..21: mol_type = other RNA
cctgtggacggctgcacctga

SEQ ID NO: 76116 - RNA, 21 nt, synthetic construct
  source 1..21: mol_type = other RNA
cccactattccacctttgaca

SEQ ID NO: 76117 - RNA, 21 nt, synthetic construct
  source 1..21: mol_type = other RNA
cagcctgagccccctgaacca

SEQ ID NO: 76118 - RNA, 21 nt, synthetic construct
  source 1..21: mol_type = other RNA
ctgtggacggctgcacctgca

SEQ ID NO: 76119 - RNA, 21 nt, synthetic construct
  source 1..21: mol_type = other RNA
acatcccctgtgggaccacca

SEQ ID NO: 76120 - RNA, 21 nt, synthetic construct
  source 1..21: mol_type = other RNA
ctgcacctatgtcctcatgaa

SEQ ID NO: 76121 - RNA, 21 nt, synthetic construct
  source 1..21: mol_type = other RNA
tgagcagcggtttcagcaaga

SEQ ID NO: 76122 - RNA, 21 nt, synthetic construct
  source 1..21: mol_type = other RNA
cggctgccctacagcctctta

SEQ ID NO: 76123 - RNA, 21 nt, synthetic construct
  source 1..21: mol_type = other RNA
actgcacctatgtcctcatga

SEQ ID NO: 76124 - RNA, 21 nt, synthetic construct
  source 1..21: mol_type = other RNA
gtggacggctgcttctgccca

SEQ ID NO: 76125 - RNA, 21 nt, synthetic construct
  source 1..21: mol_type = other RNA
ctgcctgcccctcgggcagta

SEQ ID NO: 76126 - RNA, 21 nt, synthetic construct
  source 1..21: mol_type = other RNA
cccaccagggccagatgtgca

SEQ ID NO: 76127 - RNA, 21 nt, synthetic construct
  source 1..21: mol_type = other RNA
acgctggacgtgggctgttta

SEQ ID NO: 76128 - RNA, 21 nt, synthetic construct
  source 1..21: mol_type = other RNA
atggccacttcatcaccttta

SEQ ID NO: 76129 - RNA, 21 nt, synthetic construct
  source 1..21: mol_type = other RNA
ggaccaccggcaccacctgca

SEQ ID NO: 76130 - RNA, 21 nt, synthetic construct
  source 1..21: mol_type = other RNA
ggacctgcctggcctggaaga

SEQ ID NO: 76131 - RNA, 21 nt, synthetic construct
  source 1..21: mol_type = other RNA
tgcgctcacagccttgaggca

SEQ ID NO: 76132 - RNA, 21 nt, synthetic construct
  source 1..21: mol_type = other RNA
acagccttgaggcctgcacca

SEQ ID NO: 76133 - RNA, 21 nt, synthetic construct
  source 1..21: mol_type = other RNA
gtctgccgctggtccagctga

SEQ ID NO: 76134 - RNA, 21 nt, synthetic construct
  source 1..21: mol_type = other RNA
cagcacggagcctgctgtgca

SEQ ID NO: 76135 - RNA, 21 nt, synthetic construct
  source 1..21: mol_type = other RNA
tagagtgccaggccgagagca

SEQ ID NO: 76136 - RNA, 21 nt, synthetic construct
  source 1..21: mol_type = other RNA
tcgaccctgctgcccagcaga

SEQ ID NO: 76137 - RNA, 21 nt, synthetic construct
  source 1..21: mol_type = other RNA
tgagccccagtgtgcctggta

SEQ ID NO: 76138 - RNA, 21 nt, synthetic construct
  source 1..21: mol_type = other RNA
catgccctcctccactccgga

SEQ ID NO: 76139 - RNA, 21 nt, synthetic construct
  source 1..21: mol_type = other RNA
tcgaccctgctgcccagcaga

SEQ ID NO: 76140 - RNA, 21 nt, synthetic construct
  source 1..21: mol_type = other RNA
tgagccccagtgtgcctggta

SEQ ID NO: 76141 - RNA, 21 nt, synthetic construct
  source 1..21: mol_type = other RNA
tcgaccctgctgcccagcaga

SEQ ID NO: 76142 - RNA, 21 nt, synthetic construct
  source 1..21: mol_type = other RNA
tgagccccagtgtgcctggta

SEQ ID NO: 76143 - RNA, 21 nt, synthetic construct
  source 1..21: mol_type = other RNA
tcgaccctgctgcccagcaga

SEQ ID NO: 76144 - RNA, 21 nt, synthetic construct
  source 1..21: mol_type = other RNA
tgagccccagtgtgcctggta

SEQ ID NO: 76145 - RNA, 21 nt, synthetic construct
  source 1..21: mol_type = other RNA
catgccctcctccactccgga

SEQ ID NO: 76146 - RNA, 21 nt, synthetic construct
  source 1..21: mol_type = other RNA
tgcttctgcagggcatttgga

SEQ ID NO: 76147 - RNA, 21 nt, synthetic construct
  source 1..21: mol_type = other RNA
cggggagtgtgcagtgactga

SEQ ID NO: 76148 - RNA, 21 nt, synthetic construct
  source 1..21: mol_type = other RNA
gaccccacagcctgcatccta

SEQ ID NO: 76149 - RNA, 21 nt, synthetic construct
  source 1..21: mol_type = other RNA
gcagggtctgcggcctgtgca

SEQ ID NO: 76150 - RNA, 21 nt, synthetic construct
  source 1..21: mol_type = other RNA
tgcggcctgtgcgggaactta

SEQ ID NO: 76151 - RNA, 21 nt, synthetic construct
  source 1..21: mol_type = other RNA
tgtccccctgcgggagttgga

SEQ ID NO: 76152 - RNA, 21 nt, synthetic construct
  source 1..21: mol_type = other RNA
gtccccctgcgggagttggga

SEQ ID NO: 76153 - RNA, 21 nt, synthetic construct
  source 1..21: mol_type = other RNA
tgtccccctgcgggagttgga

SEQ ID NO: 76154 - RNA, 21 nt, synthetic construct
  source 1..21: mol_type = other RNA
gtccccctgcgggagttggga

SEQ ID NO: 76155 - RNA, 21 nt, synthetic construct
  source 1..21: mol_type = other RNA
tgtccccctgcgggagttgga

SEQ ID NO: 76156 - RNA, 21 nt, synthetic construct
  source 1..21: mol_type = other RNA
gtccccctgcgggagttggga

SEQ ID NO: 76157 - RNA, 21 nt, synthetic construct
  source 1..21: mol_type = other RNA
gccagtgcggcacctgcacca

SEQ ID NO: 76158 - RNA, 21 nt, synthetic construct
  source 1..21: mol_type = other RNA
agatgtgcggcctgtgtggga

SEQ ID NO: 76159 - RNA, 21 nt, synthetic construct
  source 1..21: mol_type = other RNA
cagtgcggcacctgcaccaaa

SEQ ID NO: 76160 - RNA, 21 nt, synthetic construct
  source 1..21: mol_type = other RNA
ggagcctctctgcagaaaaga

SEQ ID NO: 76161 - RNA, 21 nt, synthetic construct
  source 1..21: mol_type = other RNA
gatctgatgctgagccaggta

SEQ ID NO: 76162 - RNA, 21 nt, synthetic construct
  source 1..21: mol_type = other RNA
aagttcaagatgtgcttcaaa

SEQ ID NO: 76163 - RNA, 21 nt, synthetic construct
  source 1..21: mol_type = other RNA
aagttcaagatgtgcttcaaa

SEQ ID NO: 76164 - RNA, 21 nt, synthetic construct
  source 1..21: mol_type = other RNA
aagttcaagatgtgcttcaaa

SEQ ID NO: 76165 - RNA, 21 nt, synthetic construct
  source 1..21: mol_type = other RNA
aagttcaagatgtgcttcaaa

SEQ ID NO: 76166 - RNA, 21 nt, synthetic construct
  source 1..21: mol_type = other RNA
tttgccacgcgtagccggtca

SEQ ID NO: 76167 - RNA, 21 nt, synthetic construct
  source 1..21: mol_type = other RNA
ggccaacgtcacctgcgtgaa

SEQ ID NO: 76168 - RNA, 21 nt, synthetic construct
  source 1..21: mol_type = other RNA
caacgtcacctgcgtgaacaa

SEQ ID NO: 76169 - RNA, 21 nt, synthetic construct
  source 1..21: mol_type = other RNA
gtagccggtccgtggtgggga

SEQ ID NO: 76170 - RNA, 21 nt, synthetic construct
  source 1..21: mol_type = other RNA
ctatgaaatccgtgtgttcta

SEQ ID NO: 76171 - RNA, 21 nt, synthetic construct
  source 1..21: mol_type = other RNA
ctatgaaatccgtgtgttcta

SEQ ID NO: 76172 - RNA, 21 nt, synthetic construct
  source 1..21: mol_type = other RNA
ctatgaaatccgtgtgttcta

SEQ ID NO: 76173 - RNA, 21 nt, synthetic construct
  source 1..21: mol_type = other RNA
ctatgaaatccgtgtgttcta

SEQ ID NO: 76174 - RNA, 21 nt, synthetic construct
  source 1..21: mol_type = other RNA
caactatgaaatccgtgtgta

SEQ ID NO: 76175 - RNA, 21 nt, synthetic construct
  source 1..21: mol_type = other RNA
caactatgaaatccgtgtgta

SEQ ID NO: 76176 - RNA, 21 nt, synthetic construct
  source 1..21: mol_type = other RNA
caactatgaaatccgtgtgta

SEQ ID NO: 76177 - RNA, 21 nt, synthetic construct
  source 1..21: mol_type = other RNA
caactatgaaatccgtgtgta

SEQ ID NO: 76178 - RNA, 21 nt, synthetic construct
  source 1..21: mol_type = other RNA
cccatcaaagtgtcggaccca

SEQ ID NO: 76179 - RNA, 21 nt, synthetic construct
  source 1..21: mol_type = other RNA
tgcggccccatacagcctgca

SEQ ID NO: 76180 - RNA, 21 nt, synthetic construct
  source 1..21: mol_type = other RNA
tggccaacgtcacctgcgtga

SEQ ID NO: 76181 - RNA, 21 nt, synthetic construct
  source 1..21: mol_type = other RNA
tgcccacccaccaaagtgtaa

SEQ ID NO: 76182 - RNA, 21 nt, synthetic construct
  source 1..21: mol_type = other RNA
gccgcgcccggggagtgtgca

SEQ ID NO: 76183 - RNA, 21 nt, synthetic construct
  source 1..21: mol_type = other RNA
tgcacgcccttctgtgtccca

SEQ ID NO: 76184 - RNA, 21 nt, synthetic construct
  source 1..21: mol_type = other RNA
tagccggtccgtggtggggga

SEQ ID NO: 76185 - RNA, 21 nt, synthetic construct
  source 1..21: mol_type = other RNA
agccggtccgtggtgggggaa

SEQ ID NO: 76186 - RNA, 21 nt, synthetic construct
  source 1..21: mol_type = other RNA
ggagagcctgtggcccaccta

SEQ ID NO: 76187 - RNA, 21 nt, synthetic construct
  source 1..21: mol_type = other RNA
tatgaaatccgtgtgttctga

SEQ ID NO: 76188 - RNA, 21 nt, synthetic construct
  source 1..21: mol_type = other RNA
tatgaaatccgtgtgttctga

SEQ ID NO: 76189 - RNA, 21 nt, synthetic construct
  source 1..21: mol_type = other RNA
tatgaaatccgtgtgttctga

SEQ ID NO: 76190 - RNA, 21 nt, synthetic construct
  source 1..21: mol_type = other RNA
tatgaaatccgtgtgttctga

SEQ ID NO: 76191 - RNA, 21 nt, synthetic construct
  source 1..21: mol_type = other RNA
cgcgcccggggagtgtgcaga

SEQ ID NO: 76192 - RNA, 21 nt, synthetic construct
  source 1..21: mol_type = other RNA
cacccaccaaagtgtacaaga

SEQ ID NO: 76193 - RNA, 21 nt, synthetic construct
  source 1..21: mol_type = other RNA
aacgagttctatgcccacaaa

SEQ ID NO: 76194 - RNA, 21 nt, synthetic construct
  source 1..21: mol_type = other RNA
caggtgcgtgggtgacaacca

SEQ ID NO: 76195 - RNA, 21 nt, synthetic construct
  source 1..21: mol_type = other RNA
acgctggtgttggctctggca

SEQ ID NO: 76196 - RNA, 21 nt, synthetic construct
  source 1..21: mol_type = other RNA
gtggccaacgtcacctgcgta

SEQ ID NO: 76197 - RNA, 21 nt, synthetic construct
  source 1..21: mol_type = other RNA
ccggagctgccacacgctgga

SEQ ID NO: 76198 - RNA, 21 nt, synthetic construct
  source 1..21: mol_type = other RNA
agcaggtggactgtgaccgca

SEQ ID NO: 76199 - RNA, 21 nt, synthetic construct
  source 1..21: mol_type = other RNA
cgactgtctccagcgggacga

SEQ ID NO: 76200 - RNA, 21 nt, synthetic construct
  source 1..21: mol_type = other RNA
tcggtgcagtgcaagccccta

SEQ ID NO: 76201 - RNA, 21 nt, synthetic construct
  source 1..21: mol_type = other RNA
cttctgtgtccctgcgcccaa

SEQ ID NO: 76202 - RNA, 21 nt, synthetic construct
  source 1..21: mol_type = other RNA
ccaacaaccagagggacgaca

SEQ ID NO: 76203 - RNA, 21 nt, synthetic construct
  source 1..21: mol_type = other RNA
ccgagtgcctccggagctgca

SEQ ID NO: 76204 - RNA, 21 nt, synthetic construct
  source 1..21: mol_type = other RNA
cttcagcgtgtccactgtgta

SEQ ID NO: 76205 - RNA, 21 nt, synthetic construct
  source 1..21: mol_type = other RNA
ccacgcgtagccggtccgtga

SEQ ID NO: 76206 - RNA, 21 nt, synthetic construct
  source 1..21: mol_type = other RNA
ccggtccgtggtgggggacga

SEQ ID NO: 76207 - RNA, 21 nt, synthetic construct
  source 1..21: mol_type = other RNA
cgagtgcctccggagctgcca

SEQ ID NO: 76208 - RNA, 21 nt, synthetic construct
  source 1..21: mol_type = other RNA
gacgctggtgttggctctgga

SEQ ID NO: 76209 - RNA, 21 nt, synthetic construct
  source 1..21: mol_type = other RNA
acctactccaacatccgtgca

SEQ ID NO: 76210 - RNA, 21 nt, synthetic construct
  source 1..21: mol_type = other RNA
acctactccaacatccgtgca

SEQ ID NO: 76211 - RNA, 21 nt, synthetic construct
  source 1..21: mol_type = other RNA
acctactccaacatccgtgca

SEQ ID NO: 76212 - RNA, 21 nt, synthetic construct
  source 1..21: mol_type = other RNA
acctactccaacatccgtgca

SEQ ID NO: 76213 - RNA, 21 nt, synthetic construct
  source 1..21: mol_type = other RNA
gcccatcaaagtgtcggacca

SEQ ID NO: 76214 - RNA, 21 nt, synthetic construct
  source 1..21: mol_type = other RNA
accagagggacgactgtctca

SEQ ID NO: 76215 - RNA, 21 nt, synthetic construct
  source 1..21: mol_type = other RNA
gcgcccggggagtgtgcagta

SEQ ID NO: 76216 - RNA, 21 nt, synthetic construct
  source 1..21: mol_type = other RNA
ccacccaccaaagtgtacaaa

SEQ ID NO: 76217 - RNA, 21 nt, synthetic construct
  source 1..21: mol_type = other RNA
gaagggtgaggggccagcaga

SEQ ID NO: 76218 - RNA, 21 nt, synthetic construct
  source 1..21: mol_type = other RNA
cctctgctcaacccagcccaa

SEQ ID NO: 76219 - RNA, 21 nt, synthetic construct
  source 1..21: mol_type = other RNA
gcccacccaccaaagtgtaca

SEQ ID NO: 76220 - RNA, 21 nt, synthetic construct
  source 1..21: mol_type = other RNA
gccgagtgcctccggagctga

SEQ ID NO: 76221 - RNA, 21 nt, synthetic construct
  source 1..21: mol_type = other RNA
acgactgtctccagcgggaca

SEQ ID NO: 76222 - RNA, 21 nt, synthetic construct
  source 1..21: mol_type = other RNA
atgtcactgggacgccctgga

SEQ ID NO: 76223 - RNA, 21 nt, synthetic construct
  source 1..21: mol_type = other RNA
gccggtccgtggtgggggaca

SEQ ID NO: 76224 - RNA, 21 nt, synthetic construct
  source 1..21: mol_type = other RNA
gatgtcactgggacgccctga

SEQ ID NO: 76225 - RNA, 21 nt, synthetic construct
  source 1..21: mol_type = other RNA
aactatgaaatccgtgtgtta

SEQ ID NO: 76226 - RNA, 21 nt, synthetic construct
  source 1..21: mol_type = other RNA
aactatgaaatccgtgtgtta

SEQ ID NO: 76227 - RNA, 21 nt, synthetic construct
  source 1..21: mol_type = other RNA
aactatgaaatccgtgtgtta

SEQ ID NO: 76228 - RNA, 21 nt, synthetic construct
  source 1..21: mol_type = other RNA
aactatgaaatccgtgtgtta

SEQ ID NO: 76229 - RNA, 21 nt, synthetic construct
  source 1..21: mol_type = other RNA
gcacgcccttctgtgtcccta

SEQ ID NO: 76230 - RNA, 21 nt, synthetic construct
  source 1..21: mol_type = other RNA
acaggctggtccaggcaagga

SEQ ID NO: 76231 - RNA, 21 nt, synthetic construct
  source 1..21: mol_type = other RNA
cggtgcagtgcaagcccctga

SEQ ID NO: 76232 - RNA, 21 nt, synthetic construct
  source 1..21: mol_type = other RNA
agtgcctccggagctgccaca

SEQ ID NO: 76233 - RNA, 21 nt, synthetic construct
  source 1..21: mol_type = other RNA
ccagggaccacctggatccta

SEQ ID NO: 76234 - RNA, 21 nt, synthetic construct
  source 1..21: mol_type = other RNA
cagggaccacctggatcctca

SEQ ID NO: 76235 - RNA, 21 nt, synthetic construct
  source 1..21: mol_type = other RNA
ccagggaccacctggatccta

SEQ ID NO: 76236 - RNA, 21 nt, synthetic construct
  source 1..21: mol_type = other RNA
cagggaccacctggatcctca

SEQ ID NO: 76237 - RNA, 21 nt, synthetic construct
  source 1..21: mol_type = other RNA
ccagggaccacctggatccta

SEQ ID NO: 76238 - RNA, 21 nt, synthetic construct
  source 1..21: mol_type = other RNA
cagggaccacctggatcctca

SEQ ID NO: 76239 - RNA, 21 nt, synthetic construct
  source 1..21: mol_type = other RNA
ccagggaccacctggatccta

SEQ ID NO: 76240 - RNA, 21 nt, synthetic construct
  source 1..21: mol_type = other RNA
cagggaccacctggatcctca

SEQ ID NO: 76241 - RNA, 21 nt, synthetic construct
  source 1..21: mol_type = other RNA
ccagggaccacctggatccta

SEQ ID NO: 76242 - RNA, 21 nt, synthetic construct
  source 1..21: mol_type = other RNA
cagggaccacctggatcctca

SEQ ID NO: 76243 - RNA, 21 nt, synthetic construct
  source 1..21: mol_type = other RNA
ccagggaccacctggatccta

SEQ ID NO: 76244 - RNA, 21 nt, synthetic construct
  source 1..21: mol_type = other RNA
cagggaccacctggatcctca

SEQ ID NO: 76245 - RNA, 21 nt, synthetic construct
  source 1..21: mol_type = other RNA
ggtgcagtgcaagcccctgca

SEQ ID NO: 76246 - RNA, 21 nt, synthetic construct
  source 1..21: mol_type = other RNA
ccttctgtgtccctgcgccca

SEQ ID NO: 76247 - RNA, 21 nt, synthetic construct
  source 1..21: mol_type = other RNA
gagtgcctccggagctgccaa

SEQ ID NO: 76248 - RNA, 21 nt, synthetic construct
  source 1..21: mol_type = other RNA
cggagctgccacacgctggaa

SEQ ID NO: 76249 - RNA, 21 nt, synthetic construct
  source 1..21: mol_type = other RNA
tgcagtgcaagcccctgccca

SEQ ID NO: 76250 - RNA, 21 nt, synthetic construct
  source 1..21: mol_type = other RNA
agcctgtggcccaccttggca

SEQ ID NO: 76251 - RNA, 21 nt, synthetic construct
  source 1..21: mol_type = other RNA
tggcccaccttggccttgcca

SEQ ID NO: 76252 - RNA, 21 nt, synthetic construct
  source 1..21: mol_type = other RNA
ctgatcctgtttgaccaaata

SEQ ID NO: 76253 - RNA, 21 nt, synthetic construct
  source 1..21: mol_type = other RNA
cctgggagagcctgtggccca

SEQ ID NO: 76254 - RNA, 21 nt, synthetic construct
  source 1..21: mol_type = other RNA
tcacccgtgttgtcatcaaga

SEQ ID NO: 76255 - RNA, 21 nt, synthetic construct
  source 1..21: mol_type = other RNA
gcaactacggccactgcccca

SEQ ID NO: 76256 - RNA, 21 nt, synthetic construct
  source 1..21: mol_type = other RNA
gcaactacggccactgcccca

SEQ ID NO: 76257 - RNA, 21 nt, synthetic construct
  source 1..21: mol_type = other RNA
gcaactacggccactgcccca

SEQ ID NO: 76258 - RNA, 21 nt, synthetic construct
  source 1..21: mol_type = other RNA
gcaactacggccactgcccca

SEQ ID NO: 76259 - RNA, 21 nt, synthetic construct
  source 1..21: mol_type = other RNA
cacggccaccacaactgggga

SEQ ID NO: 76260 - RNA, 21 nt, synthetic construct
  source 1..21: mol_type = other RNA
gtggacaactgcaccgtgtaa

SEQ ID NO: 76261 - RNA, 21 nt, synthetic construct
  source 1..21: mol_type = other RNA
tgagctctgcccccggaccta

SEQ ID NO: 76262 - RNA, 21 nt, synthetic construct
  source 1..21: mol_type = other RNA
cgacgtcacctgcagcgttta

SEQ ID NO: 76263 - RNA, 21 nt, synthetic construct
  source 1..21: mol_type = other RNA
tgggagcctctctgcagaaaa

SEQ ID NO: 76264 - RNA, 21 nt, synthetic construct
  source 1..21: mol_type = other RNA
ccacggccaccacaactggga

SEQ ID NO: 76265 - RNA, 21 nt, synthetic construct
  source 1..21: mol_type = other RNA
ccaaagtgctgactaccacaa

SEQ ID NO: 76266 - RNA, 21 nt, synthetic construct
  source 1..21: mol_type = other RNA
acggttcccagctcgtccaca

SEQ ID NO: 76267 - RNA, 21 nt, synthetic construct
  source 1..21: mol_type = other RNA
acgtcacctgcagcgtttcca

SEQ ID NO: 76268 - RNA, 21 nt, synthetic construct
  source 1..21: mol_type = other RNA
ggggacgcactggagtttgga

SEQ ID NO: 76269 - RNA, 21 nt, synthetic construct
  source 1..21: mol_type = other RNA
ggtcacccgtgttgtcatcaa

SEQ ID NO: 76270 - RNA, 21 nt, synthetic construct
  source 1..21: mol_type = other RNA
ctgagctctgcccccggacca

SEQ ID NO: 76271 - RNA, 21 nt, synthetic construct
  source 1..21: mol_type = other RNA
cggcggccgcacctacagcca

SEQ ID NO: 76272 - RNA, 21 nt, synthetic construct
  source 1..21: mol_type = other RNA
agtgcttaccaccacggccaa

SEQ ID NO: 76273 - RNA, 21 nt, synthetic construct
  source 1..21: mol_type = other RNA
ctaccaaagtgctgactacca

SEQ ID NO: 76274 - RNA, 21 nt, synthetic construct
  source 1..21: mol_type = other RNA
agtgcttaccaccacggccaa

SEQ ID NO: 76275 - RNA, 21 nt, synthetic construct
  source 1..21: mol_type = other RNA
ctgctgtcccaccttccgcta

SEQ ID NO: 76276 - RNA, 21 nt, synthetic construct
  source 1..21: mol_type = other RNA
tacggccactgccccagcaca

SEQ ID NO: 76277 - RNA, 21 nt, synthetic construct
  source 1..21: mol_type = other RNA
tacggccactgccccagcaca

SEQ ID NO: 76278 - RNA, 21 nt, synthetic construct
  source 1..21: mol_type = other RNA
tacggccactgccccagcaca

SEQ ID NO: 76279 - RNA, 21 nt, synthetic construct
  source 1..21: mol_type = other RNA
tacggccactgccccagcaca

SEQ ID NO: 76280 - RNA, 21 nt, synthetic construct
  source 1..21: mol_type = other RNA
ggcggccgcacctacagccca

SEQ ID NO: 76281 - RNA, 21 nt, synthetic construct
  source 1..21: mol_type = other RNA
acggccaccacaactggggca

SEQ ID NO: 76282 - RNA, 21 nt, synthetic construct
  source 1..21: mol_type = other RNA
gacgcactggagtttgggaaa

SEQ ID NO: 76283 - RNA, 21 nt, synthetic construct
  source 1..21: mol_type = other RNA
caactacggccactgccccaa

SEQ ID NO: 76284 - RNA, 21 nt, synthetic construct
  source 1..21: mol_type = other RNA
caactacggccactgccccaa

SEQ ID NO: 76285 - RNA, 21 nt, synthetic construct
  source 1..21: mol_type = other RNA
caactacggccactgccccaa

SEQ ID NO: 76286 - RNA, 21 nt, synthetic construct
  source 1..21: mol_type = other RNA
caactacggccactgccccaa

SEQ ID NO: 76287 - RNA, 21 nt, synthetic construct
  source 1..21: mol_type = other RNA
aggagggcgactgctgtccca

SEQ ID NO: 76288 - RNA, 21 nt, synthetic construct
  source 1..21: mol_type = other RNA
caggcctgtggtcacccgtga

SEQ ID NO: 76289 - RNA, 21 nt, synthetic construct
  source 1..21: mol_type = other RNA
ctgcacccacggcggccgcaa

SEQ ID NO: 76290 - RNA, 21 nt, synthetic construct
  source 1..21: mol_type = other RNA
ccacggcggccgcacctacaa

SEQ ID NO: 76291 - RNA, 21 nt, synthetic construct
  source 1..21: mol_type = other RNA
cacggcggccgcacctacaga

SEQ ID NO: 76292 - RNA, 21 nt, synthetic construct
  source 1..21: mol_type = other RNA
agcggagaactgccagagcta

SEQ ID NO: 76293 - RNA, 21 nt, synthetic construct
  source 1..21: mol_type = other RNA
gcggagaactgccagagctga

SEQ ID NO: 76294 - RNA, 21 nt, synthetic construct
  source 1..21: mol_type = other RNA
ctccactccagagactgccca

SEQ ID NO: 76295 - RNA, 21 nt, synthetic construct
  source 1..21: mol_type = other RNA
ctccactccagagactgccca

SEQ ID NO: 76296 - RNA, 21 nt, synthetic construct
  source 1..21: mol_type = other RNA
ccgagccagccctgtgactta

SEQ ID NO: 76297 - RNA, 21 nt, synthetic construct
  source 1..21: mol_type = other RNA
gagctctgcccccggacctga

SEQ ID NO: 76298 - RNA, 21 nt, synthetic construct
  source 1..21: mol_type = other RNA
tccctcagtgtggagaatgaa

SEQ ID NO: 76299 - RNA, 21 nt, synthetic construct
  source 1..21: mol_type = other RNA
cctcagtgtggagaatgagaa

SEQ ID NO: 76300 - RNA, 21 nt, synthetic construct
  source 1..21: mol_type = other RNA
ggagggcgactgctgtcccaa

SEQ ID NO: 76301 - RNA, 21 nt, synthetic construct
  source 1..21: mol_type = other RNA
ctgtgacttccactatgagta

SEQ ID NO: 76302 - RNA, 21 nt, synthetic construct
  source 1..21: mol_type = other RNA
agcccctgggcctcgagtgca

SEQ ID NO: 76303 - RNA, 21 nt, synthetic construct
  source 1..21: mol_type = other RNA
agcccctgggcctcgagtgca

SEQ ID NO: 76304 - RNA, 21 nt, synthetic construct
  source 1..21: mol_type = other RNA
agcccctgggcctcgagtgca

SEQ ID NO: 76305 - RNA, 21 nt, synthetic construct
  source 1..21: mol_type = other RNA
agcccctgggcctcgagtgca

SEQ ID NO: 76306 - RNA, 21 nt, synthetic construct
  source 1..21: mol_type = other RNA
cacccacggcggccgcaccta

SEQ ID NO: 76307 - RNA, 21 nt, synthetic construct
  source 1..21: mol_type = other RNA
ggcctgtggtcacccgtgtta

SEQ ID NO: 76308 - RNA, 21 nt, synthetic construct
  source 1..21: mol_type = other RNA
tggtgggggacgcactggaga

SEQ ID NO: 76309 - RNA, 21 nt, synthetic construct
  source 1..21: mol_type = other RNA
agtgcccctgcacccacggca

SEQ ID NO: 76310 - RNA, 21 nt, synthetic construct
  source 1..21: mol_type = other RNA
cccacggcggccgcacctaca

SEQ ID NO: 76311 - RNA, 21 nt, synthetic construct
  source 1..21: mol_type = other RNA
tgcttaccaccacggccacca

SEQ ID NO: 76312 - RNA, 21 nt, synthetic construct
  source 1..21: mol_type = other RNA
tgcttaccaccacggccacca

SEQ ID NO: 76313 - RNA, 21 nt, synthetic construct
  source 1..21: mol_type = other RNA
cccgagccagccctgtgacta

SEQ ID NO: 76314 - RNA, 21 nt, synthetic construct
  source 1..21: mol_type = other RNA
gggaccacccacacccccaca

SEQ ID NO: 76315 - RNA, 21 nt, synthetic construct
  source 1..21: mol_type = other RNA
gggaccacccacacccccaca

SEQ ID NO: 76316 - RNA, 21 nt, synthetic construct
  source 1..21: mol_type = other RNA
aacccggcgcacaatgggcga

SEQ ID NO: 76317 - RNA, 21 nt, synthetic construct
  source 1..21: mol_type = other RNA
tgtccaagaaatgtgccgaca

SEQ ID NO: 76318 - RNA, 21 nt, synthetic construct
  source 1..21: mol_type = other RNA
tgtgccgccaagggcgtacaa

SEQ ID NO: 76319 - RNA, 21 nt, synthetic construct
  source 1..21: mol_type = other RNA
cggaaactactatgacgtcga

SEQ ID NO: 76320 - RNA, 21 nt, synthetic construct
  source 1..21: mol_type = other RNA
ggaaactactatgacgtcgga

SEQ ID NO: 76321 - RNA, 21 nt, synthetic construct
  source 1..21: mol_type = other RNA
agagccgagcactatagccaa

SEQ ID NO: 76322 - RNA, 21 nt, synthetic construct
  source 1..21: mol_type = other RNA
tgcaaccgtcccggcttcgta

SEQ ID NO: 76323 - RNA, 21 nt, synthetic construct
  source 1..21: mol_type = other RNA
cagagccgagcactatagcca

SEQ ID NO: 76324 - RNA, 21 nt, synthetic construct
  source 1..21: mol_type = other RNA
gtgccgccaagggcgtacaga

SEQ ID NO: 76325 - RNA, 21 nt, synthetic construct
  source 1..21: mol_type = other RNA
tgaacccggcgcacaatggga

SEQ ID NO: 76326 - RNA, 21 nt, synthetic construct
  source 1..21: mol_type = other RNA
gtcggacccgagccagcccta

SEQ ID NO: 76327 - RNA, 21 nt, synthetic construct
  source 1..21: mol_type = other RNA
gaacgttctgcctccatccca

SEQ ID NO: 76328 - RNA, 21 nt, synthetic construct
  source 1..21: mol_type = other RNA
ccgcatcaacacgaccatcca

SEQ ID NO: 76329 - RNA, 21 nt, synthetic construct
  source 1..21: mol_type = other RNA
aataaaccctgagcattgaga

SEQ ID NO: 76330 - RNA, 21 nt, synthetic construct
  source 1..21: mol_type = other RNA
cagctcacactaccaaagtga

SEQ ID NO: 76331 - RNA, 21 nt, synthetic construct
  source 1..21: mol_type = other RNA
cagctcacactaccaaagtga

SEQ ID NO: 76332 - RNA, 21 nt, synthetic construct
  source 1..21: mol_type = other RNA
cagctcacactaccaaagtga

SEQ ID NO: 76333 - RNA, 21 nt, synthetic construct
  source 1..21: mol_type = other RNA
cagctcacactaccaaagtga

SEQ ID NO: 76334 - RNA, 21 nt, synthetic construct
  source 1..21: mol_type = other RNA
cagctcacactaccaaagtga

SEQ ID NO: 76335 - RNA, 21 nt, synthetic construct
  source 1..21: mol_type = other RNA
tcgacgacaatgccatcaata

SEQ ID NO: 76336 - RNA, 21 nt, synthetic construct
  source 1..21: mol_type = other RNA
atggcggtgccccgacgtcca

SEQ ID NO: 76337 - RNA, 21 nt, synthetic construct
  source 1..21: mol_type = other RNA
gcgatcgctacagctttgaaa

SEQ ID NO: 76338 - RNA, 21 nt, synthetic construct
  source 1..21: mol_type = other RNA
ttcgacgacaatgccatcaaa

SEQ ID NO: 76339 - RNA, 21 nt, synthetic construct
  source 1..21: mol_type = other RNA
accagcgttacagccatccca

SEQ ID NO: 76340 - RNA, 21 nt, synthetic construct
  source 1..21: mol_type = other RNA
tgtcggacccgagccagccca

SEQ ID NO: 76341 - RNA, 21 nt, synthetic construct
  source 1..21: mol_type = other RNA
agatacacaagcacccttgga

SEQ ID NO: 76342 - RNA, 21 nt, synthetic construct
  source 1..21: mol_type = other RNA
tcgagtgccgtgcccaggcca

SEQ ID NO: 76343 - RNA, 21 nt, synthetic construct
  source 1..21: mol_type = other RNA
gctctacggccatgccctcca

SEQ ID NO: 76344 - RNA, 21 nt, synthetic construct
  source 1..21: mol_type = other RNA
tcgagtgccgtgcccaggcca

SEQ ID NO: 76345 - RNA, 21 nt, synthetic construct
  source 1..21: mol_type = other RNA
tcgagtgccgtgcccaggcca

SEQ ID NO: 76346 - RNA, 21 nt, synthetic construct
  source 1..21: mol_type = other RNA
tcgagtgccgtgcccaggcca

SEQ ID NO: 76347 - RNA, 21 nt, synthetic construct
  source 1..21: mol_type = other RNA
gctctacggccatgccctcca

SEQ ID NO: 76348 - RNA, 21 nt, synthetic construct
  source 1..21: mol_type = other RNA
gacgaccactgcaggggacga

SEQ ID NO: 76349 - RNA, 21 nt, synthetic construct
  source 1..21: mol_type = other RNA
taagaccgaccgagccggcta

SEQ ID NO: 76350 - RNA, 21 nt, synthetic construct
  source 1..21: mol_type = other RNA
ccgaaaagaccaccctatgga

SEQ ID NO: 76351 - RNA, 21 nt, synthetic construct
  source 1..21: mol_type = other RNA
gagcatccggtcgacggcgga

SEQ ID NO: 76352 - RNA, 21 nt, synthetic construct
  source 1..21: mol_type = other RNA
ctggcctttgcaactacgtga

SEQ ID NO: 76353 - RNA, 21 nt, synthetic construct
  source 1..21: mol_type = other RNA
tgcgggcctatgtgtccctga

SEQ ID NO: 76354 - RNA, 21 nt, synthetic construct
  source 1..21: mol_type = other RNA
ggcggagactttgagacgtta

SEQ ID NO: 76355 - RNA, 21 nt, synthetic construct
  source 1..21: mol_type = other RNA
gtgtggggacttcaacggcca

SEQ ID NO: 76356 - RNA, 21 nt, synthetic construct
  source 1..21: mol_type = other RNA
agtgcccctgctacgctcaca

SEQ ID NO: 76357 - RNA, 21 nt, synthetic construct
  source 1..21: mol_type = other RNA
gctgcgagtacatcttggcca

SEQ ID NO: 76358 - RNA, 21 nt, synthetic construct
  source 1..21: mol_type = other RNA
agggccaccaattccacggca

SEQ ID NO: 76359 - RNA, 21 nt, synthetic construct
  source 1..21: mol_type = other RNA
agaccgaccgagccggctgca

SEQ ID NO: 76360 - RNA, 21 nt, synthetic construct
  source 1..21: mol_type = other RNA
cacctatgatgagaaactcta

SEQ ID NO: 76361 - RNA, 21 nt, synthetic construct
  source 1..21: mol_type = other RNA
cgcctgaccgatcccaacaga

SEQ ID NO: 76362 - RNA, 21 nt, synthetic construct
  source 1..21: mol_type = other RNA
acggccactacgatcacagca

SEQ ID NO: 76363 - RNA, 21 nt, synthetic construct
  source 1..21: mol_type = other RNA
ccgagccggctgccatttcta

SEQ ID NO: 76364 - RNA, 21 nt, synthetic construct
  source 1..21: mol_type = other RNA
agaccgaggtcaacatcacca

SEQ ID NO: 76365 - RNA, 21 nt, synthetic construct
  source 1..21: mol_type = other RNA
acgacctgcatggtgactgca

SEQ ID NO: 76366 - RNA, 21 nt, synthetic construct
  source 1..21: mol_type = other RNA
ccgcttccaaagagccgctga

SEQ ID NO: 76367 - RNA, 21 nt, synthetic construct
  source 1..21: mol_type = other RNA
ctcgtccaccgtggggaccaa

SEQ ID NO: 76368 - RNA, 21 nt, synthetic construct
  source 1..21: mol_type = other RNA
cagcgaccactgcaggggcca

SEQ ID NO: 76369 - RNA, 21 nt, synthetic construct
  source 1..21: mol_type = other RNA
tgaggtcgcaacggccaggta

SEQ ID NO: 76370 - RNA, 21 nt, synthetic construct
  source 1..21: mol_type = other RNA
cgacgcgtgtgcctgcgacta

SEQ ID NO: 76371 - RNA, 21 nt, synthetic construct
  source 1..21: mol_type = other RNA
cacgctttgggaatctcagca

SEQ ID NO: 76372 - RNA, 21 nt, synthetic construct
  source 1..21: mol_type = other RNA
gtacaagccatgcggccccaa

SEQ ID NO: 76373 - RNA, 21 nt, synthetic construct
  source 1..21: mol_type = other RNA
ccgaggtcaacatcaccttca

SEQ ID NO: 76374 - RNA, 21 nt, synthetic construct
  source 1..21: mol_type = other RNA
tcctaacggctcagccatcca

SEQ ID NO: 76375 - RNA, 21 nt, synthetic construct
  source 1..21: mol_type = other RNA
aacggctcagccatcctgcaa

SEQ ID NO: 76376 - RNA, 21 nt, synthetic construct
  source 1..21: mol_type = other RNA
ccgcctacgaggacttcaaca

SEQ ID NO: 76377 - RNA, 21 nt, synthetic construct
  source 1..21: mol_type = other RNA
cgccgcctacgaggacttcaa

SEQ ID NO: 76378 - RNA, 21 nt, synthetic construct
  source 1..21: mol_type = other RNA
gtgcgggaacttcgacgacaa

SEQ ID NO: 76379 - RNA, 21 nt, synthetic construct
  source 1..21: mol_type = other RNA
gcgactgcgagtgtttctgca

SEQ ID NO: 76380 - RNA, 21 nt, synthetic construct
  source 1..21: mol_type = other RNA
actggcgaggtgcaaccggta

SEQ ID NO: 76381 - RNA, 21 nt, synthetic construct
  source 1..21: mol_type = other RNA
cctgtgccgccaagggcgtaa

SEQ ID NO: 76382 - RNA, 21 nt, synthetic construct
  source 1..21: mol_type = other RNA
tgccgccaagggcgtacagca

SEQ ID NO: 76383 - RNA, 21 nt, synthetic construct
  source 1..21: mol_type = other RNA
ttgatcgccatctgcggaaga

SEQ ID NO: 76384 - RNA, 21 nt, synthetic construct
  source 1..21: mol_type = other RNA
tggaactccagccacaacgca

SEQ ID NO: 76385 - RNA, 21 nt, synthetic construct
  source 1..21: mol_type = other RNA
ccgtgatggtgcccaccggta

SEQ ID NO: 76386 - RNA, 21 nt, synthetic construct
  source 1..21: mol_type = other RNA
ccggctgccatttctacgcaa

SEQ ID NO: 76387 - RNA, 21 nt, synthetic construct
  source 1..21: mol_type = other RNA
gagcctggaggcttacgcaga

SEQ ID NO: 76388 - RNA, 21 nt, synthetic construct
  source 1..21: mol_type = other RNA
ctgatgtcactgggacgccca

SEQ ID NO: 76389 - RNA, 21 nt, synthetic construct
  source 1..21: mol_type = other RNA
ctgtgtgtggcaccccgcgca

SEQ ID NO: 76390 - RNA, 21 nt, synthetic construct
  source 1..21: mol_type = other RNA
tgatggtgcccaccggttcca

SEQ ID NO: 76391 - RNA, 21 nt, synthetic construct
  source 1..21: mol_type = other RNA
cagcactgtgacattgaccga

SEQ ID NO: 76392 - RNA, 21 nt, synthetic construct
  source 1..21: mol_type = other RNA
tgcttgatcgccatctgcgga

SEQ ID NO: 76393 - RNA, 21 nt, synthetic construct
  source 1..21: mol_type = other RNA
ggctgccatttctacgcagta

SEQ ID NO: 76394 - RNA, 21 nt, synthetic construct
  source 1..21: mol_type = other RNA
ccactgccgccagttgcaaga

SEQ ID NO: 76395 - RNA, 21 nt, synthetic construct
  source 1..21: mol_type = other RNA
ggtgccccgacgtcctcgcca

SEQ ID NO: 76396 - RNA, 21 nt, synthetic construct
  source 1..21: mol_type = other RNA
cacctacagcccgggcaccta

SEQ ID NO: 76397 - RNA, 21 nt, synthetic construct
  source 1..21: mol_type = other RNA
cctgatgtcactgggacgcca

SEQ ID NO: 76398 - RNA, 21 nt, synthetic construct
  source 1..21: mol_type = other RNA
acaaccacgggcttcacagca

SEQ ID NO: 76399 - RNA, 21 nt, synthetic construct
  source 1..21: mol_type = other RNA
acaaccacgggcttcacagca

SEQ ID NO: 76400 - RNA, 21 nt, synthetic construct
  source 1..21: mol_type = other RNA
acaaccacgggcttcacagca

SEQ ID NO: 76401 - RNA, 21 nt, synthetic construct
  source 1..21: mol_type = other RNA
acaaccacgggcttcacagca

SEQ ID NO: 76402 - RNA, 21 nt, synthetic construct
  source 1..21: mol_type = other RNA
tacaggatccgggtcctctga

SEQ ID NO: 76403 - RNA, 21 nt, synthetic construct
  source 1..21: mol_type = other RNA
gaacccggcgcacaatgggca

SEQ ID NO: 76404 - RNA, 21 nt, synthetic construct
  source 1..21: mol_type = other RNA
gtacatcttggcccaggacta

SEQ ID NO: 76405 - RNA, 21 nt, synthetic construct
  source 1..21: mol_type = other RNA
agctctacggccatgccctca

SEQ ID NO: 76406 - RNA, 21 nt, synthetic construct
  source 1..21: mol_type = other RNA
agctctacggccatgccctca

SEQ ID NO: 76407 - RNA, 21 nt, synthetic construct
  source 1..21: mol_type = other RNA
gtttttctcgcccggggaaga

SEQ ID NO: 76408 - RNA, 21 nt, synthetic construct
  source 1..21: mol_type = other RNA
ccccatacagcctgccaccta

SEQ ID NO: 76409 - RNA, 21 nt, synthetic construct
  source 1..21: mol_type = other RNA
ccagctacgccgaggcctaga

SEQ ID NO: 76410 - RNA, 21 nt, synthetic construct
  source 1..21: mol_type = other RNA
ccctgaacccggcgcacaata

SEQ ID NO: 76411 - RNA, 21 nt, synthetic construct
  source 1..21: mol_type = other RNA
gaccaccatggccactatgca

SEQ ID NO: 76412 - RNA, 21 nt, synthetic construct
  source 1..21: mol_type = other RNA
acgagaactgcctgaaagcga

SEQ ID NO: 76413 - RNA, 21 nt, synthetic construct
  source 1..21: mol_type = other RNA
tcccaaatacgccaaccagaa

SEQ ID NO: 76414 - RNA, 21 nt, synthetic construct
  source 1..21: mol_type = other RNA
cgactcgggtggcgactgcga

SEQ ID NO: 76415 - RNA, 21 nt, synthetic construct
  source 1..21: mol_type = other RNA
ggaactccagccacaacgcca

SEQ ID NO: 76416 - RNA, 21 nt, synthetic construct
  source 1..21: mol_type = other RNA
acccaacggtgcaatgtcaga

SEQ ID NO: 76417 - RNA, 21 nt, synthetic construct
  source 1..21: mol_type = other RNA
gcctgcctcacgcccgatgga

SEQ ID NO: 76418 - RNA, 21 nt, synthetic construct
  source 1..21: mol_type = other RNA
caccaccgatgggcttggcga

SEQ ID NO: 76419 - RNA, 21 nt, synthetic construct
  source 1..21: mol_type = other RNA
caacgccgcagcctacgagta

SEQ ID NO: 76420 - RNA, 21 nt, synthetic construct
  source 1..21: mol_type = other RNA
catggccaccacacacgggca

SEQ ID NO: 76421 - RNA, 21 nt, synthetic construct
  source 1..21: mol_type = other RNA
ggtcatcgagacccacgggaa

SEQ ID NO: 76422 - RNA, 21 nt, synthetic construct
  source 1..21: mol_type = other RNA
gcctatgtgtccctgccacga

SEQ ID NO: 76423 - RNA, 21 nt, synthetic construct
  source 1..21: mol_type = other RNA
ctcaacgccgcagcctacgaa

SEQ ID NO: 76424 - RNA, 21 nt, synthetic construct
  source 1..21: mol_type = other RNA
aacggtgcaatgtcaggagga

SEQ ID NO: 76425 - RNA, 21 nt, synthetic construct
  source 1..21: mol_type = other RNA
gccgccaagggcgtacagcta

SEQ ID NO: 76426 - RNA, 21 nt, synthetic construct
  source 1..21: mol_type = other RNA
ataagatcagggccgctggaa

SEQ ID NO: 76427 - RNA, 21 nt, synthetic construct
  source 1..21: mol_type = other RNA
cagtgcttaccaccacgacca

SEQ ID NO: 76428 - RNA, 21 nt, synthetic construct
  source 1..21: mol_type = other RNA
cttctacggggttggtgcaaa

SEQ ID NO: 76429 - RNA, 21 nt, synthetic construct
  source 1..21: mol_type = other RNA
acgcgtgtgcctgcgactcga

SEQ ID NO: 76430 - RNA, 21 nt, synthetic construct
  source 1..21: mol_type = other RNA
ctgaacccggcgcacaatgga

SEQ ID NO: 76431 - RNA, 21 nt, synthetic construct
  source 1..21: mol_type = other RNA
acgtccagctacgccgaggca

SEQ ID NO: 76432 - RNA, 21 nt, synthetic construct
  source 1..21: mol_type = other RNA
gcttgatcgccatctgcggaa

SEQ ID NO: 76433 - RNA, 21 nt, synthetic construct
  source 1..21: mol_type = other RNA
tgcgggttctctgctgcgaaa

SEQ ID NO: 76434 - RNA, 21 nt, synthetic construct
  source 1..21: mol_type = other RNA
aaatttcccggggagcggtga

SEQ ID NO: 76435 - RNA, 21 nt, synthetic construct
  source 1..21: mol_type = other RNA
tgtgtggcaccccgcgctcca

SEQ ID NO: 76436 - RNA, 21 nt, synthetic construct
  source 1..21: mol_type = other RNA
gtgttggctctggcggccata

SEQ ID NO: 76437 - RNA, 21 nt, synthetic construct
  source 1..21: mol_type = other RNA
tctggcggccatgctcgtgga

SEQ ID NO: 76438 - RNA, 21 nt, synthetic construct
  source 1..21: mol_type = other RNA
gtgccgcaggcagagacccaa

SEQ ID NO: 76439 - RNA, 21 nt, synthetic construct
  source 1..21: mol_type = other RNA
gttctctgagcactgccgcga

SEQ ID NO: 76440 - RNA, 21 nt, synthetic construct
  source 1..21: mol_type = other RNA
cattcctgtggaacggagaga

SEQ ID NO: 76441 - RNA, 21 nt, synthetic construct
  source 1..21: mol_type = other RNA
atcccaaatacgccaaccaga

SEQ ID NO: 76442 - RNA, 21 nt, synthetic construct
  source 1..21: mol_type = other RNA
tctatgcccacaacgccagga

SEQ ID NO: 76443 - RNA, 21 nt, synthetic construct
  source 1..21: mol_type = other RNA
tgccccctcaacatgcagcaa

SEQ ID NO: 76444 - RNA, 21 nt, synthetic construct
  source 1..21: mol_type = other RNA
tgtgccgacagcagcttcaca

SEQ ID NO: 76445 - RNA, 21 nt, synthetic construct
  source 1..21: mol_type = other RNA
ctcgagcttcttcatcgtgga

SEQ ID NO: 76446 - RNA, 21 nt, synthetic construct
  source 1..21: mol_type = other RNA
aatgccaggaacagctttgaa

SEQ ID NO: 76447 - RNA, 21 nt, synthetic construct
  source 1..21: mol_type = other RNA
gcgctgccactccatcatcaa

SEQ ID NO: 76448 - RNA, 21 nt, synthetic construct
  source 1..21: mol_type = other RNA
ctgtgccgccaagggcgtaca

SEQ ID NO: 76449 - RNA, 21 nt, synthetic construct
  source 1..21: mol_type = other RNA
tactgtggggacaacaccaca

SEQ ID NO: 76450 - RNA, 21 nt, synthetic construct
  source 1..21: mol_type = other RNA
gggtggggacccaccctacaa

SEQ ID NO: 76451 - RNA, 21 nt, synthetic construct
  source 1..21: mol_type = other RNA
ggtggggacccaccctacaaa

SEQ ID NO: 76452 - RNA, 21 nt, synthetic construct
  source 1..21: mol_type = other RNA
aactccagccacaacgccata

SEQ ID NO: 76453 - RNA, 21 nt, synthetic construct
  source 1..21: mol_type = other RNA
gcagcttcccgacatgccgca

SEQ ID NO: 76454 - RNA, 21 nt, synthetic construct
  source 1..21: mol_type = other RNA
ccccgtgacggtcacccccta

SEQ ID NO: 76455 - RNA, 21 nt, synthetic construct
  source 1..21: mol_type = other RNA
cctcggccccaggtaccacca

SEQ ID NO: 76456 - RNA, 21 nt, synthetic construct
  source 1..21: mol_type = other RNA
cgtcttcaagatgtgctacaa

SEQ ID NO: 76457 - RNA, 21 nt, synthetic construct
  source 1..21: mol_type = other RNA
gagtagcccggggctgaccaa

SEQ ID NO: 76458 - RNA, 21 nt, synthetic construct
  source 1..21: mol_type = other RNA
cagaaggactgacatccccca

SEQ ID NO: 76459 - RNA, 21 nt, synthetic construct
  source 1..21: mol_type = other RNA
tacacaagcacccttggtaca

SEQ ID NO: 76460 - RNA, 21 nt, synthetic construct
  source 1..21: mol_type = other RNA
cacatccacccttccaacaca

SEQ ID NO: 76461 - RNA, 21 nt, synthetic construct
  source 1..21: mol_type = other RNA
gagcttgggcacatggcgcca

SEQ ID NO: 76462 - RNA, 21 nt, synthetic construct
  source 1..21: mol_type = other RNA
gcttgggcacatggcgcccca

SEQ ID NO: 76463 - RNA, 21 nt, synthetic construct
  source 1..21: mol_type = other RNA
ggccccaacaacaatggcaaa

SEQ ID NO: 76464 - RNA, 21 nt, synthetic construct
  source 1..21: mol_type = other RNA
gtccacctctcaggccgagaa

SEQ ID NO: 76465 - RNA, 21 nt, synthetic construct
  source 1..21: mol_type = other RNA
cacaaccacgggcttcacaga

SEQ ID NO: 76466 - RNA, 21 nt, synthetic construct
  source 1..21: mol_type = other RNA
agtgtggatcagcacaaccaa

SEQ ID NO: 76467 - RNA, 21 nt, synthetic construct
  source 1..21: mol_type = other RNA
tggccactggttctatggcaa

SEQ ID NO: 76468 - RNA, 21 nt, synthetic construct
  source 1..21: mol_type = other RNA
ggccactggttctatggcaaa

SEQ ID NO: 76469 - RNA, 21 nt, synthetic construct
  source 1..21: mol_type = other RNA
actcctgggacaactcccata

SEQ ID NO: 76470 - RNA, 21 nt, synthetic construct
  source 1..21: mol_type = other RNA
cagtgctgaccaccaccgcca

SEQ ID NO: 76471 - RNA, 21 nt, synthetic construct
  source 1..21: mol_type = other RNA
gtgcgcacagcctggacttca

SEQ ID NO: 76472 - RNA, 21 nt, synthetic construct
  source 1..21: mol_type = other RNA
ccctagcagcagaaccaccga

SEQ ID NO: 76473 - RNA, 21 nt, synthetic construct
  source 1..21: mol_type = other RNA
gccctctggcggggactttga

SEQ ID NO: 76474 - RNA, 21 nt, synthetic construct
  source 1..21: mol_type = other RNA
tgacacctactccaacatcca

SEQ ID NO: 76475 - RNA, 21 nt, synthetic construct
  source 1..21: mol_type = other RNA
gctttacagccatcccctcca

SEQ ID NO: 76476 - RNA, 21 nt, synthetic construct
  source 1..21: mol_type = other RNA
cacaaccacgggcttcacaga

SEQ ID NO: 76477 - RNA, 21 nt, synthetic construct
  source 1..21: mol_type = other RNA
acgcttccagtgtggatcaga

SEQ ID NO: 76478 - RNA, 21 nt, synthetic construct
  source 1..21: mol_type = other RNA
agtgtggatcagcacaaccaa

SEQ ID NO: 76479 - RNA, 21 nt, synthetic construct
  source 1..21: mol_type = other RNA
tggccactggttctatggcaa

SEQ ID NO: 76480 - RNA, 21 nt, synthetic construct
  source 1..21: mol_type = other RNA
ggccactggttctatggcaaa

SEQ ID NO: 76481 - RNA, 21 nt, synthetic construct
  source 1..21: mol_type = other RNA
cagtgctgaccaccaccgcca

SEQ ID NO: 76482 - RNA, 21 nt, synthetic construct
  source 1..21: mol_type = other RNA
gtgcgcacagcctggacttca

SEQ ID NO: 76483 - RNA, 21 nt, synthetic construct
  source 1..21: mol_type = other RNA
gagccttccacggggacttca

SEQ ID NO: 76484 - RNA, 21 nt, synthetic construct
  source 1..21: mol_type = other RNA
ctagcagcaggaccaccgaga

SEQ ID NO: 76485 - RNA, 21 nt, synthetic construct
  source 1..21: mol_type = other RNA
gccctctggcggggactttga

SEQ ID NO: 76486 - RNA, 21 nt, synthetic construct
  source 1..21: mol_type = other RNA
tgacacctactccaacatcca

SEQ ID NO: 76487 - RNA, 21 nt, synthetic construct
  source 1..21: mol_type = other RNA
acccttgggaccaccgggaca

SEQ ID NO: 76488 - RNA, 21 nt, synthetic construct
  source 1..21: mol_type = other RNA
cacgacaagggccaccagtta

SEQ ID NO: 76489 - RNA, 21 nt, synthetic construct
  source 1..21: mol_type = other RNA
gggcaccgcctggacccgcca

SEQ ID NO: 76490 - RNA, 21 nt, synthetic construct
  source 1..21: mol_type = other RNA
cacaaccacgggcttcacaga

SEQ ID NO: 76491 - RNA, 21 nt, synthetic construct
  source 1..21: mol_type = other RNA
agtgtggatcagcacaaccaa

SEQ ID NO: 76492 - RNA, 21 nt, synthetic construct
  source 1..21: mol_type = other RNA
tggccactggttctatggcaa

SEQ ID NO: 76493 - RNA, 21 nt, synthetic construct
  source 1..21: mol_type = other RNA
ggccactggttctatggcaaa

SEQ ID NO: 76494 - RNA, 21 nt, synthetic construct
  source 1..21: mol_type = other RNA
ctcaactccagggacaactca

SEQ ID NO: 76495 - RNA, 21 nt, synthetic construct
  source 1..21: mol_type = other RNA
cagtgctgaccaccaccgcca

SEQ ID NO: 76496 - RNA, 21 nt, synthetic construct
  source 1..21: mol_type = other RNA
gtgcgcacagcctggacttca

SEQ ID NO: 76497 - RNA, 21 nt, synthetic construct
  source 1..21: mol_type = other RNA
ctagcagcaggaccaccgaga

SEQ ID NO: 76498 - RNA, 21 nt, synthetic construct
  source 1..21: mol_type = other RNA
gccctctggcggggactttga

SEQ ID NO: 76499 - RNA, 21 nt, synthetic construct
  source 1..21: mol_type = other RNA
tgacacctactccaacatcca

SEQ ID NO: 76500 - RNA, 21 nt, synthetic construct
  source 1..21: mol_type = other RNA
gctttacagccatcccctcca

SEQ ID NO: 76501 - RNA, 21 nt, synthetic construct
  source 1..21: mol_type = other RNA
cacaaccacgggcttcacaga

SEQ ID NO: 76502 - RNA, 21 nt, synthetic construct
  source 1..21: mol_type = other RNA
agtgtggatcagcacaaccaa

SEQ ID NO: 76503 - RNA, 21 nt, synthetic construct
  source 1..21: mol_type = other RNA
tggccactggttctatggcaa

SEQ ID NO: 76504 - RNA, 21 nt, synthetic construct
  source 1..21: mol_type = other RNA
ggccactggttctatggcaaa

SEQ ID NO: 76505 - RNA, 21 nt, synthetic construct
  source 1..21: mol_type = other RNA
cagtgctgaccaccaccgcca

SEQ ID NO: 76506 - RNA, 21 nt, synthetic construct
  source 1..21: mol_type = other RNA
gtgcgcacagcctggacttca

SEQ ID NO: 76507 - RNA, 21 nt, synthetic construct
  source 1..21: mol_type = other RNA
gagccttccacggggacttca

SEQ ID NO: 76508 - RNA, 21 nt, synthetic construct
  source 1..21: mol_type = other RNA
ctagcagcaggaccaccgaga

SEQ ID NO: 76509 - RNA, 21 nt, synthetic construct
  source 1..21: mol_type = other RNA
gccctctggcggggactttga

SEQ ID NO: 76510 - RNA, 21 nt, synthetic construct
  source 1..21: mol_type = other RNA
tgacacctactccaacatcca

SEQ ID NO: 76511 - RNA, 21 nt, synthetic construct
  source 1..21: mol_type = other RNA
acccttgggaccaccgggaca

SEQ ID NO: 76512 - RNA, 21 nt, synthetic construct
  source 1..21: mol_type = other RNA
cacgacaagggccaccagtta

SEQ ID NO: 76513 - RNA, 21 nt, synthetic construct
  source 1..21: mol_type = other RNA
gctttacagccatcccctcca

SEQ ID NO: 76514 - RNA, 21 nt, synthetic construct
  source 1..21: mol_type = other RNA
cacaaccacgggcttcacaga

SEQ ID NO: 76515 - RNA, 21 nt, synthetic construct
  source 1..21: mol_type = other RNA
agtgtggatcagcacaaccaa

SEQ ID NO: 76516 - RNA, 21 nt, synthetic construct
  source 1..21: mol_type = other RNA
tggccactggttctatggcaa

SEQ ID NO: 76517 - RNA, 21 nt, synthetic construct
  source 1..21: mol_type = other RNA
ggccactggttctatggcaaa

SEQ ID NO: 76518 - RNA, 21 nt, synthetic construct
  source 1..21: mol_type = other RNA
acaaaatccacagctaccaga

SEQ ID NO: 76519 - RNA, 21 nt, synthetic construct
  source 1..21: mol_type = other RNA
tgtccacaatccacacctcca

SEQ ID NO: 76520 - RNA, 21 nt, synthetic construct
  source 1..21: mol_type = other RNA
gtccacaatccacacctccta

SEQ ID NO: 76521 - RNA, 21 nt, synthetic construct
  source 1..21: mol_type = other RNA
ctccactctggggacgaccca

SEQ ID NO: 76522 - RNA, 21 nt, synthetic construct
  source 1..21: mol_type = other RNA
ggaacagctcacacccccaaa

SEQ ID NO: 76523 - RNA, 21 nt, synthetic construct
  source 1..21: mol_type = other RNA
tgcagggcatttggacagtta

SEQ ID NO: 76524 - RNA, 21 nt, synthetic construct
  source 1..21: mol_type = other RNA
ccggggaagtcatctacaata

SEQ ID NO: 76525 - RNA, 21 nt, synthetic construct
  source 1..21: mol_type = other RNA
cggctgccatttctacgcaga

SEQ ID NO: 76526 - RNA, 21 nt, synthetic construct
  source 1..21: mol_type = other RNA
tgtcgtcctgctggacccaaa

SEQ ID NO: 76527 - RNA, 21 nt, synthetic construct
  source 1..21: mol_type = other RNA
aaagcctgtggccaacgtcaa

SEQ ID NO: 76528 - RNA, 21 nt, synthetic construct
  source 1..21: mol_type = other RNA
ctcatgagagagatccatgca

SEQ ID NO: 76529 - RNA, 21 nt, synthetic construct
  source 1..21: mol_type = other RNA
atgagagagatccatgcacga

SEQ ID NO: 76530 - RNA, 21 nt, synthetic construct
  source 1..21: mol_type = other RNA
gaggagggcctgatcctgtta

SEQ ID NO: 76531 - RNA, 21 nt, synthetic construct
  source 1..21: mol_type = other RNA
aggagggcctgatcctgttta

SEQ ID NO: 76532 - RNA, 21 nt, synthetic construct
  source 1..21: mol_type = other RNA
ggggaccaccaccatgcgtga

SEQ ID NO: 76533 - RNA, 21 nt, synthetic construct
  source 1..21: mol_type = other RNA
cgcagccccggtgtctagcaa

SEQ ID NO: 76534 - RNA, 21 nt, synthetic construct
  source 1..21: mol_type = other RNA
gcccattcttcaacgcctgca

SEQ ID NO: 76535 - RNA, 21 nt, synthetic construct
  source 1..21: mol_type = other RNA
acgcacacatgggcatctgca

SEQ ID NO: 76536 - RNA, 21 nt, synthetic construct
  source 1..21: mol_type = other RNA
cggggttggtgcaaccttcca

SEQ ID NO: 76537 - RNA, 21 nt, synthetic construct
  source 1..21: mol_type = other RNA
cctcacgcccgatggccagca

SEQ ID NO: 76538 - RNA, 21 nt, synthetic construct
  source 1..21: mol_type = other RNA
caccacgacaagggccaccaa

SEQ ID NO: 76539 - RNA, 21 nt, synthetic construct
  source 1..21: mol_type = other RNA
caccacgacaagggccaccaa

SEQ ID NO: 76540 - RNA, 21 nt, synthetic construct
  source 1..21: mol_type = other RNA
gtgacgtccacttcggcctga

SEQ ID NO: 76541 - RNA, 21 nt, synthetic construct
  source 1..21: mol_type = other RNA
tgcgtgtggacattcctgcca

SEQ ID NO: 76542 - RNA, 21 nt, synthetic construct
  source 1..21: mol_type = other RNA
ccgactggcacaccccccaca

SEQ ID NO: 76543 - RNA, 21 nt, synthetic construct
  source 1..21: mol_type = other RNA
ggccctgtggagccgagctga

SEQ ID NO: 76544 - RNA, 21 nt, synthetic construct
  source 1..21: mol_type = other RNA
acccggcgcacaatgggcgga

SEQ ID NO: 76545 - RNA, 21 nt, synthetic construct
  source 1..21: mol_type = other RNA
tgatcctccaagaggggacca

SEQ ID NO: 76546 - RNA, 21 nt, synthetic construct
  source 1..21: mol_type = other RNA
tggggacccaccctacaagaa

SEQ ID NO: 76547 - RNA, 21 nt, synthetic construct
  source 1..21: mol_type = other RNA
caacagagtcccccgctctga

SEQ ID NO: 76548 - RNA, 21 nt, synthetic construct
  source 1..21: mol_type = other RNA
cgtgccacaaccccgccacca

SEQ ID NO: 76549 - RNA, 21 nt, synthetic construct
  source 1..21: mol_type = other RNA
agaaggactgacatcccccaa

SEQ ID NO: 76550 - RNA, 21 nt, synthetic construct
  source 1..21: mol_type = other RNA
cacagcctggacttcggccaa

SEQ ID NO: 76551 - RNA, 21 nt, synthetic construct
  source 1..21: mol_type = other RNA
tggtctgcaggaaccgtgaga

SEQ ID NO: 76552 - RNA, 21 nt, synthetic construct
  source 1..21: mol_type = other RNA
cacagcctggacttcggccaa

SEQ ID NO: 76553 - RNA, 21 nt, synthetic construct
  source 1..21: mol_type = other RNA
agccttccacggggacttcca

SEQ ID NO: 76554 - RNA, 21 nt, synthetic construct
  source 1..21: mol_type = other RNA
tggtctgcaggaaccgtgaga

SEQ ID NO: 76555 - RNA, 21 nt, synthetic construct
  source 1..21: mol_type = other RNA
cacagcctggacttcggccaa

SEQ ID NO: 76556 - RNA, 21 nt, synthetic construct
  source 1..21: mol_type = other RNA
tggtctgcaggaaccgtgaga

SEQ ID NO: 76557 - RNA, 21 nt, synthetic construct
  source 1..21: mol_type = other RNA
cacagcctggacttcggccaa

SEQ ID NO: 76558 - RNA, 21 nt, synthetic construct
  source 1..21: mol_type = other RNA
agccttccacggggacttcca

SEQ ID NO: 76559 - RNA, 21 nt, synthetic construct
  source 1..21: mol_type = other RNA
tggtctgcaggaaccgtgaga

SEQ ID NO: 76560 - RNA, 21 nt, synthetic construct
  source 1..21: mol_type = other RNA
ggggttggtgcaaccttccca

SEQ ID NO: 76561 - RNA, 21 nt, synthetic construct
  source 1..21: mol_type = other RNA
gaatgaaacctgggtcaacaa

SEQ ID NO: 76562 - RNA, 21 nt, synthetic construct
  source 1..21: mol_type = other RNA
aactcagggctgaggtcgcaa

SEQ ID NO: 76563 - RNA, 21 nt, synthetic construct
  source 1..21: mol_type = other RNA
aaataaaccctgagcattgaa

SEQ ID NO: 76564 - RNA, 21 nt, synthetic construct
  source 1..21: mol_type = other RNA
cacggtgacttcccacaccca

SEQ ID NO: 76565 - RNA, 21 nt, synthetic construct
  source 1..21: mol_type = other RNA
ggaagtgcggcctgacggaca

SEQ ID NO: 76566 - RNA, 21 nt, synthetic construct
  source 1..21: mol_type = other RNA
gtcacctgcagcgtttcctta

SEQ ID NO: 76567 - RNA, 21 nt, synthetic construct
  source 1..21: mol_type = other RNA
ggggctggtgtcggatgggaa

SEQ ID NO: 76568 - RNA, 21 nt, synthetic construct
  source 1..21: mol_type = other RNA
gccacctacaagcctggagaa

SEQ ID NO: 76569 - RNA, 21 nt, synthetic construct
  source 1..21: mol_type = other RNA
acgagctgcgggttctctgca

SEQ ID NO: 76570 - RNA, 21 nt, synthetic construct
  source 1..21: mol_type = other RNA
ctaccccatgccggggcccta

SEQ ID NO: 76571 - RNA, 21 nt, synthetic construct
  source 1..21: mol_type = other RNA
ctaccccatgccggggcccta

SEQ ID NO: 76572 - RNA, 21 nt, synthetic construct
  source 1..21: mol_type = other RNA
ctaccccatgccggggcccta

SEQ ID NO: 76573 - RNA, 21 nt, synthetic construct
  source 1..21: mol_type = other RNA
ctaccccatgccggggcccta

SEQ ID NO: 76574 - RNA, 21 nt, synthetic construct
  source 1..21: mol_type = other RNA
accgccagagtgctgaccaca

SEQ ID NO: 76575 - RNA, 21 nt, synthetic construct
  source 1..21: mol_type = other RNA
cccgactggcacaccccccaa

SEQ ID NO: 76576 - RNA, 21 nt, synthetic construct
  source 1..21: mol_type = other RNA
cccattcttcaacgcctgcaa

SEQ ID NO: 76577 - RNA, 21 nt, synthetic construct
  source 1..21: mol_type = other RNA
agcctggaggcttacgcagaa

SEQ ID NO: 76578 - RNA, 21 nt, synthetic construct
  source 1..21: mol_type = other RNA
ggtgggtcagcaactgccaga

SEQ ID NO: 76579 - RNA, 21 nt, synthetic construct
  source 1..21: mol_type = other RNA
cttccctgccacatgtgtaca

SEQ ID NO: 76580 - RNA, 21 nt, synthetic construct
  source 1..21: mol_type = other RNA
cagggctgcgagaccgaggta

SEQ ID NO: 76581 - RNA, 21 nt, synthetic construct
  source 1..21: mol_type = other RNA
cacgacgagggcgccgtgtga

SEQ ID NO: 76582 - RNA, 21 nt, synthetic construct
  source 1..21: mol_type = other RNA
gctccggggggctatggcaga

SEQ ID NO: 76583 - RNA, 21 nt, synthetic construct
  source 1..21: mol_type = other RNA
aggtggtgcacgacgagggca

SEQ ID NO: 76584 - RNA, 21 nt, synthetic construct
  source 1..21: mol_type = other RNA
gtgttcatgtacgggtgggaa

SEQ ID NO: 76585 - RNA, 21 nt, synthetic construct
  source 1..21: mol_type = other RNA
cgagcatccggtcgacggcga

SEQ ID NO: 76586 - RNA, 21 nt, synthetic construct
  source 1..21: mol_type = other RNA
agctcacactaccaaagtgca

SEQ ID NO: 76587 - RNA, 21 nt, synthetic construct
  source 1..21: mol_type = other RNA
gactacagctaccccatgcca

SEQ ID NO: 76588 - RNA, 21 nt, synthetic construct
  source 1..21: mol_type = other RNA
agctcacactaccaaagtgca

SEQ ID NO: 76589 - RNA, 21 nt, synthetic construct
  source 1..21: mol_type = other RNA
gactacagctaccccatgcca

SEQ ID NO: 76590 - RNA, 21 nt, synthetic construct
  source 1..21: mol_type = other RNA
agctcacactaccaaagtgca

SEQ ID NO: 76591 - RNA, 21 nt, synthetic construct
  source 1..21: mol_type = other RNA
gactacagctaccccatgcca

SEQ ID NO: 76592 - RNA, 21 nt, synthetic construct
  source 1..21: mol_type = other RNA
agctcacactaccaaagtgca

SEQ ID NO: 76593 - RNA, 21 nt, synthetic construct
  source 1..21: mol_type = other RNA
gactacagctaccccatgcca

SEQ ID NO: 76594 - RNA, 21 nt, synthetic construct
  source 1..21: mol_type = other RNA
agctcacactaccaaagtgca

SEQ ID NO: 76595 - RNA, 21 nt, synthetic construct
  source 1..21: mol_type = other RNA
gaccacgtggaccgtcccaga

SEQ ID NO: 76596 - RNA, 21 nt, synthetic construct
  source 1..21: mol_type = other RNA
catgctcgtggtgccgcagga

SEQ ID NO: 76597 - RNA, 21 nt, synthetic construct
  source 1..21: mol_type = other RNA
gggcacaccatggatggcgga

SEQ ID NO: 76598 - RNA, 21 nt, synthetic construct
  source 1..21: mol_type = other RNA
aagaaatgtgccgacagcaga

SEQ ID NO: 76599 - RNA, 21 nt, synthetic construct
  source 1..21: mol_type = other RNA
ctgccagcccacttgccgcga

SEQ ID NO: 76600 - RNA, 21 nt, synthetic construct
  source 1..21: mol_type = other RNA
agcgtttccttcgtgcctgta

SEQ ID NO: 76601 - RNA, 21 nt, synthetic construct
  source 1..21: mol_type = other RNA
cctgtgtgcccgcccaggaga

SEQ ID NO: 76602 - RNA, 21 nt, synthetic construct
  source 1..21: mol_type = other RNA
ccaggagtgcccctgctacga

SEQ ID NO: 76603 - RNA, 21 nt, synthetic construct
  source 1..21: mol_type = other RNA
ctccagccacaacgccattca

SEQ ID NO: 76604 - RNA, 21 nt, synthetic construct
  source 1..21: mol_type = other RNA
cagctcaggccccgtgacgga

SEQ ID NO: 76605 - RNA, 21 nt, synthetic construct
  source 1..21: mol_type = other RNA
gacgtccacttcggcctggta

SEQ ID NO: 76606 - RNA, 21 nt, synthetic construct
  source 1..21: mol_type = other RNA
ctacaggatccgggtcctcta

SEQ ID NO: 76607 - RNA, 21 nt, synthetic construct
  source 1..21: mol_type = other RNA
tgtccagccctcaccctagca

SEQ ID NO: 76608 - RNA, 21 nt, synthetic construct
  source 1..21: mol_type = other RNA
ccacacctccacagtgctgaa

SEQ ID NO: 76609 - RNA, 21 nt, synthetic construct
  source 1..21: mol_type = other RNA
ctcaaagtgctgaccagcaca

SEQ ID NO: 76610 - RNA, 21 nt, synthetic construct
  source 1..21: mol_type = other RNA
cacacacgggcggtccctgca

SEQ ID NO: 76611 - RNA, 21 nt, synthetic construct
  source 1..21: mol_type = other RNA
tgtccagccctcaccctagca

SEQ ID NO: 76612 - RNA, 21 nt, synthetic construct
  source 1..21: mol_type = other RNA
tgtccagccctcaccctagca

SEQ ID NO: 76613 - RNA, 21 nt, synthetic construct
  source 1..21: mol_type = other RNA
ccacacctccacagtgctgaa

SEQ ID NO: 76614 - RNA, 21 nt, synthetic construct
  source 1..21: mol_type = other RNA
ccacacctccacagtgctgaa

SEQ ID NO: 76615 - RNA, 21 nt, synthetic construct
  source 1..21: mol_type = other RNA
gccatttctacgcagtgtgca

SEQ ID NO: 76616 - RNA, 21 nt, synthetic construct
  source 1..21: mol_type = other RNA
ccatggatatcgtcctcacta

SEQ ID NO: 76617 - RNA, 21 nt, synthetic construct
  source 1..21: mol_type = other RNA
caccacagccgctctgtgata

SEQ ID NO: 76618 - RNA, 21 nt, synthetic construct
  source 1..21: mol_type = other RNA
caaccttgtgcccccgggcca

SEQ ID NO: 76619 - RNA, 21 nt, synthetic construct
  source 1..21: mol_type = other RNA
gcctggaggcttacgcagaga

SEQ ID NO: 76620 - RNA, 21 nt, synthetic construct
  source 1..21: mol_type = other RNA
tggcctgtgcgacctcaccta

SEQ ID NO: 76621 - RNA, 21 nt, synthetic construct
  source 1..21: mol_type = other RNA
ccgatgggtttcctaaattta

SEQ ID NO: 76622 - RNA, 21 nt, synthetic construct
  source 1..21: mol_type = other RNA
cgcctgcctcacgcccgatga

SEQ ID NO: 76623 - RNA, 21 nt, synthetic construct
  source 1..21: mol_type = other RNA
cctgccccggagcgtccaaga

SEQ ID NO: 76624 - RNA, 21 nt, synthetic construct
  source 1..21: mol_type = other RNA
acccacgtggatgagtgtgga

SEQ ID NO: 76625 - RNA, 21 nt, synthetic construct
  source 1..21: mol_type = other RNA
atgaaaaccttgggcctccta

SEQ ID NO: 76626 - RNA, 21 nt, synthetic construct
  source 1..21: mol_type = other RNA
cagctggccacgtccggccga

SEQ ID NO: 76627 - RNA, 21 nt, synthetic construct
  source 1..21: mol_type = other RNA
cccgacctccaccctgagaaa

SEQ ID NO: 76628 - RNA, 21 nt, synthetic construct
  source 1..21: mol_type = other RNA
gagcgcgtgccggacgctgga

SEQ ID NO: 76629 - RNA, 21 nt, synthetic construct
  source 1..21: mol_type = other RNA
gaagtgcggcctgacggacaa

SEQ ID NO: 76630 - RNA, 21 nt, synthetic construct
  source 1..21: mol_type = other RNA
ggggacccaccctacaagata

SEQ ID NO: 76631 - RNA, 21 nt, synthetic construct
  source 1..21: mol_type = other RNA
gtgacggtcaccccctcggca

SEQ ID NO: 76632 - RNA, 21 nt, synthetic construct
  source 1..21: mol_type = other RNA
cccacgacgcctgcaggctca

SEQ ID NO: 76633 - RNA, 21 nt, synthetic construct
  source 1..21: mol_type = other RNA
agtgcttaccgccacggccaa

SEQ ID NO: 76634 - RNA, 21 nt, synthetic construct
  source 1..21: mol_type = other RNA
agtgcttaccgccacggccaa

SEQ ID NO: 76635 - RNA, 21 nt, synthetic construct
  source 1..21: mol_type = other RNA
acacctatccccccagtgcta

SEQ ID NO: 76636 - RNA, 21 nt, synthetic construct
  source 1..21: mol_type = other RNA
acacctatccccccagtgcta

SEQ ID NO: 76637 - RNA, 21 nt, synthetic construct
  source 1..21: mol_type = other RNA
gcgggacggaaccactgccga

SEQ ID NO: 76638 - RNA, 21 nt, synthetic construct
  source 1..21: mol_type = other RNA
gcgggttctctgctgcgaata

SEQ ID NO: 76639 - RNA, 21 nt, synthetic construct
  source 1..21: mol_type = other RNA
ccccacgacgcctgcaggcta

SEQ ID NO: 76640 - RNA, 21 nt, synthetic construct
  source 1..21: mol_type = other RNA
gtcctcatgagagagatccaa

SEQ ID NO: 76641 - RNA, 21 nt, synthetic construct
  source 1..21: mol_type = other RNA
ccgaggcctagtgggctccaa

SEQ ID NO: 76642 - RNA, 21 nt, synthetic construct
  source 1..21: mol_type = other RNA
aaagcggtgacgctcagccta

SEQ ID NO: 76643 - RNA, 21 nt, synthetic construct
  source 1..21: mol_type = other RNA
caagggcgtacagctcagcga

SEQ ID NO: 76644 - RNA, 21 nt, synthetic construct
  source 1..21: mol_type = other RNA
tgagacgtttgaaaacctgaa

SEQ ID NO: 76645 - RNA, 21 nt, synthetic construct
  source 1..21: mol_type = other RNA
tgacggtcaccccctcggcca

SEQ ID NO: 76646 - RNA, 21 nt, synthetic construct
  source 1..21: mol_type = other RNA
gagggcgtcttcaagatgtga

SEQ ID NO: 76647 - RNA, 21 nt, synthetic construct
  source 1..21: mol_type = other RNA
ccacgacgcctgcaggctcca

SEQ ID NO: 76648 - RNA, 21 nt, synthetic construct
  source 1..21: mol_type = other RNA
cagggcacgacccgctgtcaa

SEQ ID NO: 76649 - RNA, 21 nt, synthetic construct
  source 1..21: mol_type = other RNA
agtgccaactaccacaaccaa

SEQ ID NO: 76650 - RNA, 21 nt, synthetic construct
  source 1..21: mol_type = other RNA
ccacaccgccacagtgctgaa

SEQ ID NO: 76651 - RNA, 21 nt, synthetic construct
  source 1..21: mol_type = other RNA
cacggccacgacacccacaga

SEQ ID NO: 76652 - RNA, 21 nt, synthetic construct
  source 1..21: mol_type = other RNA
acggccacgacacccacagta

SEQ ID NO: 76653 - RNA, 21 nt, synthetic construct
  source 1..21: mol_type = other RNA
ccacaccgccacagtgctgaa

SEQ ID NO: 76654 - RNA, 21 nt, synthetic construct
  source 1..21: mol_type = other RNA
cacggccacgacacccacaga

SEQ ID NO: 76655 - RNA, 21 nt, synthetic construct
  source 1..21: mol_type = other RNA
acggccacgacacccacagta

SEQ ID NO: 76656 - RNA, 21 nt, synthetic construct
  source 1..21: mol_type = other RNA
cacggccacgacacccacaga

SEQ ID NO: 76657 - RNA, 21 nt, synthetic construct
  source 1..21: mol_type = other RNA
acggccacgacacccacagta

SEQ ID NO: 76658 - RNA, 21 nt, synthetic construct
  source 1..21: mol_type = other RNA
ctatagccaccgtgatggtga

SEQ ID NO: 76659 - RNA, 21 nt, synthetic construct
  source 1..21: mol_type = other RNA
caactgcaccgtgtacctcta

SEQ ID NO: 76660 - RNA, 21 nt, synthetic construct
  source 1..21: mol_type = other RNA
ggaacaaactaagcatgtgca

SEQ ID NO: 76661 - RNA, 21 nt, synthetic construct
  source 1..21: mol_type = other RNA
ccatgctcgtggtgccgcaga

SEQ ID NO: 76662 - RNA, 21 nt, synthetic construct
  source 1..21: mol_type = other RNA
gatggcggtgccccgacgtca

SEQ ID NO: 76663 - RNA, 21 nt, synthetic construct
  source 1..21: mol_type = other RNA
tggcggtgccccgacgtccta

SEQ ID NO: 76664 - RNA, 21 nt, synthetic construct
  source 1..21: mol_type = other RNA
ctgagcactgccgcgccgcca

SEQ ID NO: 76665 - RNA, 21 nt, synthetic construct
  source 1..21: mol_type = other RNA
cagcatccggctggtgctgaa

SEQ ID NO: 76666 - RNA, 21 nt, synthetic construct
  source 1..21: mol_type = other RNA
gacccgctgcccttgccggca

SEQ ID NO: 76667 - RNA, 21 nt, synthetic construct
  source 1..21: mol_type = other RNA
gcggagtgccacgcactggta

SEQ ID NO: 76668 - RNA, 21 nt, synthetic construct
  source 1..21: mol_type = other RNA
ggagtgccacgcactggtgga

SEQ ID NO: 76669 - RNA, 21 nt, synthetic construct
  source 1..21: mol_type = other RNA
gtgctggatgacatcacgcaa

SEQ ID NO: 76670 - RNA, 21 nt, synthetic construct
  source 1..21: mol_type = other RNA
tgccttctcgcgctgccacta

SEQ ID NO: 76671 - RNA, 21 nt, synthetic construct
  source 1..21: mol_type = other RNA
ccaagggcgtacagctcagca

SEQ ID NO: 76672 - RNA, 21 nt, synthetic construct
  source 1..21: mol_type = other RNA
gcccacttgccgcggcctgaa

SEQ ID NO: 76673 - RNA, 21 nt, synthetic construct
  source 1..21: mol_type = other RNA
cggcctgagtgaggccgacga

SEQ ID NO: 76674 - RNA, 21 nt, synthetic construct
  source 1..21: mol_type = other RNA
gcgtttccttcgtgcctgtga

SEQ ID NO: 76675 - RNA, 21 nt, synthetic construct
  source 1..21: mol_type = other RNA
ccatggtgtacctggactgca

SEQ ID NO: 76676 - RNA, 21 nt, synthetic construct
  source 1..21: mol_type = other RNA
gaccatcagggtcgactgcaa

SEQ ID NO: 76677 - RNA, 21 nt, synthetic construct
  source 1..21: mol_type = other RNA
tcctgggaccggaagaccaga

SEQ ID NO: 76678 - RNA, 21 nt, synthetic construct
  source 1..21: mol_type = other RNA
tgtgcctgcgactcgggtgga

SEQ ID NO: 76679 - RNA, 21 nt, synthetic construct
  source 1..21: mol_type = other RNA
gactcgggtggcgactgcgaa

SEQ ID NO: 76680 - RNA, 21 nt, synthetic construct
  source 1..21: mol_type = other RNA
gccatctgcggaagcaacgga

SEQ ID NO: 76681 - RNA, 21 nt, synthetic construct
  source 1..21: mol_type = other RNA
ccatctgcggaagcaacggca

SEQ ID NO: 76682 - RNA, 21 nt, synthetic construct
  source 1..21: mol_type = other RNA
atctgcggaagcaacggcaca

SEQ ID NO: 76683 - RNA, 21 nt, synthetic construct
  source 1..21: mol_type = other RNA
cggtctccaccgtgtgtgtca

SEQ ID NO: 76684 - RNA, 21 nt, synthetic construct
  source 1..21: mol_type = other RNA
ggtctccaccgtgtgtgtcca

SEQ ID NO: 76685 - RNA, 21 nt, synthetic construct
  source 1..21: mol_type = other RNA
tcaacgccgcagcctacgaga

SEQ ID NO: 76686 - RNA, 21 nt, synthetic construct
  source 1..21: mol_type = other RNA
ccaccacgggaggccccacga

SEQ ID NO: 76687 - RNA, 21 nt, synthetic construct
  source 1..21: mol_type = other RNA
gccccacgacgcctgcaggca

SEQ ID NO: 76688 - RNA, 21 nt, synthetic construct
  source 1..21: mol_type = other RNA
cccttccaacacgctcagcca

SEQ ID NO: 76689 - RNA, 21 nt, synthetic construct
  source 1..21: mol_type = other RNA
gcaacctccagagctcgccca

SEQ ID NO: 76690 - RNA, 21 nt, synthetic construct
  source 1..21: mol_type = other RNA
ctccagagctcgcccgacaga

SEQ ID NO: 76691 - RNA, 21 nt, synthetic construct
  source 1..21: mol_type = other RNA
gttacacccatcccctcttca

SEQ ID NO: 76692 - RNA, 21 nt, synthetic construct
  source 1..21: mol_type = other RNA
acaactggggccaccggctca

SEQ ID NO: 76693 - RNA, 21 nt, synthetic construct
  source 1..21: mol_type = other RNA
ctaccacaaccacgggcttca

SEQ ID NO: 76694 - RNA, 21 nt, synthetic construct
  source 1..21: mol_type = other RNA
caaccagaggctccacggtga

SEQ ID NO: 76695 - RNA, 21 nt, synthetic construct
  source 1..21: mol_type = other RNA
aactgtggccactggttctaa

SEQ ID NO: 76696 - RNA, 21 nt, synthetic construct
  source 1..21: mol_type = other RNA
ctgtggccactggttctatga

SEQ ID NO: 76697 - RNA, 21 nt, synthetic construct
  source 1..21: mol_type = other RNA
tgtggccactggttctatgga

SEQ ID NO: 76698 - RNA, 21 nt, synthetic construct
  source 1..21: mol_type = other RNA
tgacttcccacaccctagcaa

SEQ ID NO: 76699 - RNA, 21 nt, synthetic construct
  source 1..21: mol_type = other RNA
cgcacctcgaccctgctgcca

SEQ ID NO: 76700 - RNA, 21 nt, synthetic construct
  source 1..21: mol_type = other RNA
cccggccaccagctctacgga

SEQ ID NO: 76701 - RNA, 21 nt, synthetic construct
  source 1..21: mol_type = other RNA
ccggccaccagctctacggca

SEQ ID NO: 76702 - RNA, 21 nt, synthetic construct
  source 1..21: mol_type = other RNA
cacagagccgagcactacaga

SEQ ID NO: 76703 - RNA, 21 nt, synthetic construct
  source 1..21: mol_type = other RNA
accgtgacggtgcccaccgga

SEQ ID NO: 76704 - RNA, 21 nt, synthetic construct
  source 1..21: mol_type = other RNA
cggatccacggccaccgccta

SEQ ID NO: 76705 - RNA, 21 nt, synthetic construct
  source 1..21: mol_type = other RNA
ccaggcaactgctggcaccca

SEQ ID NO: 76706 - RNA, 21 nt, synthetic construct
  source 1..21: mol_type = other RNA
aactgctggcaccccacatga

SEQ ID NO: 76707 - RNA, 21 nt, synthetic construct
  source 1..21: mol_type = other RNA
acgacacccacagtcaccaga

SEQ ID NO: 76708 - RNA, 21 nt, synthetic construct
  source 1..21: mol_type = other RNA
ctaccacaaccacgggcttca

SEQ ID NO: 76709 - RNA, 21 nt, synthetic construct
  source 1..21: mol_type = other RNA
aactgtggccactggttctaa

SEQ ID NO: 76710 - RNA, 21 nt, synthetic construct
  source 1..21: mol_type = other RNA
ctgtggccactggttctatga

SEQ ID NO: 76711 - RNA, 21 nt, synthetic construct
  source 1..21: mol_type = other RNA
tgtggccactggttctatgga

SEQ ID NO: 76712 - RNA, 21 nt, synthetic construct
  source 1..21: mol_type = other RNA
gacttcggccacctcaggcaa

SEQ ID NO: 76713 - RNA, 21 nt, synthetic construct
  source 1..21: mol_type = other RNA
ccctagcagcaggaccaccga

SEQ ID NO: 76714 - RNA, 21 nt, synthetic construct
  source 1..21: mol_type = other RNA
cgcacctcgaccctgctgcca

SEQ ID NO: 76715 - RNA, 21 nt, synthetic construct
  source 1..21: mol_type = other RNA
cccggccaccagctctacgga

SEQ ID NO: 76716 - RNA, 21 nt, synthetic construct
  source 1..21: mol_type = other RNA
ccggccaccagctctacggca

SEQ ID NO: 76717 - RNA, 21 nt, synthetic construct
  source 1..21: mol_type = other RNA
accctcccagaacagaccaca

SEQ ID NO: 76718 - RNA, 21 nt, synthetic construct
  source 1..21: mol_type = other RNA
caccatgtccacaatccacca

SEQ ID NO: 76719 - RNA, 21 nt, synthetic construct
  source 1..21: mol_type = other RNA
acgaaggccaccacgacaaga

SEQ ID NO: 76720 - RNA, 21 nt, synthetic construct
  source 1..21: mol_type = other RNA
accgtgacggtgcccaccgga

SEQ ID NO: 76721 - RNA, 21 nt, synthetic construct
  source 1..21: mol_type = other RNA
cggatccacggccaccgccta

SEQ ID NO: 76722 - RNA, 21 nt, synthetic construct
  source 1..21: mol_type = other RNA
ccgggcaactgctggcaccca

SEQ ID NO: 76723 - RNA, 21 nt, synthetic construct
  source 1..21: mol_type = other RNA
ccagcgttacagccatcccca

SEQ ID NO: 76724 - RNA, 21 nt, synthetic construct
  source 1..21: mol_type = other RNA
ccaaagtgccgactaccacaa

SEQ ID NO: 76725 - RNA, 21 nt, synthetic construct
  source 1..21: mol_type = other RNA
ctaccacaaccacgggcttca

SEQ ID NO: 76726 - RNA, 21 nt, synthetic construct
  source 1..21: mol_type = other RNA
caaccagaggctccacggtga

SEQ ID NO: 76727 - RNA, 21 nt, synthetic construct
  source 1..21: mol_type = other RNA
aactgtggccactggttctaa

SEQ ID NO: 76728 - RNA, 21 nt, synthetic construct
  source 1..21: mol_type = other RNA
ctgtggccactggttctatga

SEQ ID NO: 76729 - RNA, 21 nt, synthetic construct
  source 1..21: mol_type = other RNA
tgtggccactggttctatgga

SEQ ID NO: 76730 - RNA, 21 nt, synthetic construct
  source 1..21: mol_type = other RNA
ccctagcagcaggaccaccga

SEQ ID NO: 76731 - RNA, 21 nt, synthetic construct
  source 1..21: mol_type = other RNA
cgcacctcgaccctgctgcca

SEQ ID NO: 76732 - RNA, 21 nt, synthetic construct
  source 1..21: mol_type = other RNA
cccggccaccagctctacgga

SEQ ID NO: 76733 - RNA, 21 nt, synthetic construct
  source 1..21: mol_type = other RNA
ccggccaccagctctacggca

SEQ ID NO: 76734 - RNA, 21 nt, synthetic construct
  source 1..21: mol_type = other RNA
cacagagccgagcactacaga

SEQ ID NO: 76735 - RNA, 21 nt, synthetic construct
  source 1..21: mol_type = other RNA
accgtgacggtgcccaccgga

SEQ ID NO: 76736 - RNA, 21 nt, synthetic construct
  source 1..21: mol_type = other RNA
cggatccacggccaccgccta

SEQ ID NO: 76737 - RNA, 21 nt, synthetic construct
  source 1..21: mol_type = other RNA
ccaggcaactgctggcaccca

SEQ ID NO: 76738 - RNA, 21 nt, synthetic construct
  source 1..21: mol_type = other RNA
aactgctggcaccccacatga

SEQ ID NO: 76739 - RNA, 21 nt, synthetic construct
  source 1..21: mol_type = other RNA
acgacacccacagtcaccaga

SEQ ID NO: 76740 - RNA, 21 nt, synthetic construct
  source 1..21: mol_type = other RNA
ccaaagtgccgactaccacaa

SEQ ID NO: 76741 - RNA, 21 nt, synthetic construct
  source 1..21: mol_type = other RNA
ctaccacaaccacgggcttca

SEQ ID NO: 76742 - RNA, 21 nt, synthetic construct
  source 1..21: mol_type = other RNA
accacacccacaaccagtgga

SEQ ID NO: 76743 - RNA, 21 nt, synthetic construct
  source 1..21: mol_type = other RNA
aactgtggccactggttctaa

SEQ ID NO: 76744 - RNA, 21 nt, synthetic construct
  source 1..21: mol_type = other RNA
ctgtggccactggttctatga

SEQ ID NO: 76745 - RNA, 21 nt, synthetic construct
  source 1..21: mol_type = other RNA
tgtggccactggttctatgga

SEQ ID NO: 76746 - RNA, 21 nt, synthetic construct
  source 1..21: mol_type = other RNA
gacttcggccacctcaggcaa

SEQ ID NO: 76747 - RNA, 21 nt, synthetic construct
  source 1..21: mol_type = other RNA
ccctagcagcaggaccaccga

SEQ ID NO: 76748 - RNA, 21 nt, synthetic construct
  source 1..21: mol_type = other RNA
cgcacctcgaccctgctgcca

SEQ ID NO: 76749 - RNA, 21 nt, synthetic construct
  source 1..21: mol_type = other RNA
cccggccaccagctctacgga

SEQ ID NO: 76750 - RNA, 21 nt, synthetic construct
  source 1..21: mol_type = other RNA
ccggccaccagctctacggca

SEQ ID NO: 76751 - RNA, 21 nt, synthetic construct
  source 1..21: mol_type = other RNA
accctcccagaacagaccaca

SEQ ID NO: 76752 - RNA, 21 nt, synthetic construct
  source 1..21: mol_type = other RNA
caccatgtccacaatccacca

SEQ ID NO: 76753 - RNA, 21 nt, synthetic construct
  source 1..21: mol_type = other RNA
acgaaggccaccacgacaaga

SEQ ID NO: 76754 - RNA, 21 nt, synthetic construct
  source 1..21: mol_type = other RNA
cacagagccgagcactacaga

SEQ ID NO: 76755 - RNA, 21 nt, synthetic construct
  source 1..21: mol_type = other RNA
accgtgacggtgcccaccgga

SEQ ID NO: 76756 - RNA, 21 nt, synthetic construct
  source 1..21: mol_type = other RNA
cggatccacggccaccgccta

SEQ ID NO: 76757 - RNA, 21 nt, synthetic construct
  source 1..21: mol_type = other RNA
ccaggcaactgctggcaccca

SEQ ID NO: 76758 - RNA, 21 nt, synthetic construct
  source 1..21: mol_type = other RNA
aactgctggcaccccacatga

SEQ ID NO: 76759 - RNA, 21 nt, synthetic construct
  source 1..21: mol_type = other RNA
acgacacccacagtcaccaga

SEQ ID NO: 76760 - RNA, 21 nt, synthetic construct
  source 1..21: mol_type = other RNA
ccaaagtgccgactaccacaa

SEQ ID NO: 76761 - RNA, 21 nt, synthetic construct
  source 1..21: mol_type = other RNA
ctaccacaaccacgggcttca

SEQ ID NO: 76762 - RNA, 21 nt, synthetic construct
  source 1..21: mol_type = other RNA
accacacccacaaccagtgga

SEQ ID NO: 76763 - RNA, 21 nt, synthetic construct
  source 1..21: mol_type = other RNA
ccacaccgccagagtgctgaa

SEQ ID NO: 76764 - RNA, 21 nt, synthetic construct
  source 1..21: mol_type = other RNA
aactgtggccactggttctaa

SEQ ID NO: 76765 - RNA, 21 nt, synthetic construct
  source 1..21: mol_type = other RNA
ctgtggccactggttctatga

SEQ ID NO: 76766 - RNA, 21 nt, synthetic construct
  source 1..21: mol_type = other RNA
tgtggccactggttctatgga

SEQ ID NO: 76767 - RNA, 21 nt, synthetic construct
  source 1..21: mol_type = other RNA
gacaacacccatcaccccaga

SEQ ID NO: 76768 - RNA, 21 nt, synthetic construct
  source 1..21: mol_type = other RNA
tatagccaccgtgatggtgca

SEQ ID NO: 76769 - RNA, 21 nt, synthetic construct
  source 1..21: mol_type = other RNA
atggtgcccaccggttccaca

SEQ ID NO: 76770 - RNA, 21 nt, synthetic construct
  source 1..21: mol_type = other RNA
tggtgcccaccggttccacga

SEQ ID NO: 76771 - RNA, 21 nt, synthetic construct
  source 1..21: mol_type = other RNA
ggtgcccaccggttccacgga

SEQ ID NO: 76772 - RNA, 21 nt, synthetic construct
  source 1..21: mol_type = other RNA
cccaaagtggtgaccaccata

SEQ ID NO: 76773 - RNA, 21 nt, synthetic construct
  source 1..21: mol_type = other RNA
tctcgcccggggaagtcatca

SEQ ID NO: 76774 - RNA, 21 nt, synthetic construct
  source 1..21: mol_type = other RNA
ccaaagcctgtggccaacgta

SEQ ID NO: 76775 - RNA, 21 nt, synthetic construct
  source 1..21: mol_type = other RNA
tcggacccgagccagccctga

SEQ ID NO: 76776 - RNA, 21 nt, synthetic construct
  source 1..21: mol_type = other RNA
gcgagtgcatctgcagcatga

SEQ ID NO: 76777 - RNA, 21 nt, synthetic construct
  source 1..21: mol_type = other RNA
acgtggctggtccccgacaga

SEQ ID NO: 76778 - RNA, 21 nt, synthetic construct
  source 1..21: mol_type = other RNA
aaccttgtgcccccgggccca

SEQ ID NO: 76779 - RNA, 21 nt, synthetic construct
  source 1..21: mol_type = other RNA
ccttgaggtgccctgccagaa

SEQ ID NO: 76780 - RNA, 21 nt, synthetic construct
  source 1..21: mol_type = other RNA
cggtggcctgtgcgacctcaa

SEQ ID NO: 76781 - RNA, 21 nt, synthetic construct
  source 1..21: mol_type = other RNA
ggccccatacagcctgccaca

SEQ ID NO: 76782 - RNA, 21 nt, synthetic construct
  source 1..21: mol_type = other RNA
ttggtgcaaccttcccaggca

SEQ ID NO: 76783 - RNA, 21 nt, synthetic construct
  source 1..21: mol_type = other RNA
caacggtgcaatgtcaggaga

SEQ ID NO: 76784 - RNA, 21 nt, synthetic construct
  source 1..21: mol_type = other RNA
gagtgcgtccagaccgcctga

SEQ ID NO: 76785 - RNA, 21 nt, synthetic construct
  source 1..21: mol_type = other RNA
caacagccatgtggacaacta

SEQ ID NO: 76786 - RNA, 21 nt, synthetic construct
  source 1..21: mol_type = other RNA
gcccagatgtgtccagctgca

SEQ ID NO: 76787 - RNA, 21 nt, synthetic construct
  source 1..21: mol_type = other RNA
aacatcaccttctgcgaggga

SEQ ID NO: 76788 - RNA, 21 nt, synthetic construct
  source 1..21: mol_type = other RNA
aaaaccttgggcctcctctga

SEQ ID NO: 76789 - RNA, 21 nt, synthetic construct
  source 1..21: mol_type = other RNA
gcccaccccgtgggtgaaaca

SEQ ID NO: 76790 - RNA, 21 nt, synthetic construct
  source 1..21: mol_type = other RNA
gggtgaaaccggccccagaaa

SEQ ID NO: 76791 - RNA, 21 nt, synthetic construct
  source 1..21: mol_type = other RNA
tcgggagggcgccactcagga

SEQ ID NO: 76792 - RNA, 21 nt, synthetic construct
  source 1..21: mol_type = other RNA
cgggagggcgccactcaggaa

SEQ ID NO: 76793 - RNA, 21 nt, synthetic construct
  source 1..21: mol_type = other RNA
ggccgcctgtccatgcctgca

SEQ ID NO: 76794 - RNA, 21 nt, synthetic construct
  source 1..21: mol_type = other RNA
ctactccagagaccacccaca

SEQ ID NO: 76795 - RNA, 21 nt, synthetic construct
  source 1..21: mol_type = other RNA
ggggaccacccacaccgccaa

SEQ ID NO: 76796 - RNA, 21 nt, synthetic construct
  source 1..21: mol_type = other RNA
ggggaccacccacaccgccaa

SEQ ID NO: 76797 - RNA, 21 nt, synthetic construct
  source 1..21: mol_type = other RNA
ggggaccacccacaccgccaa

SEQ ID NO: 76798 - RNA, 21 nt, synthetic construct
  source 1..21: mol_type = other RNA
gacttcaacggcctcccggca

SEQ ID NO: 76799 - RNA, 21 nt, synthetic construct
  source 1..21: mol_type = other RNA
gccatgtggacaactgcacca

SEQ ID NO: 76800 - RNA, 21 nt, synthetic construct
  source 1..21: mol_type = other RNA
catcacgcactctggctgcca

SEQ ID NO: 76801 - RNA, 21 nt, synthetic construct
  source 1..21: mol_type = other RNA
acttcaacggcctcccggcca

SEQ ID NO: 76802 - RNA, 21 nt, synthetic construct
  source 1..21: mol_type = other RNA
caacgagaactgcctgaaaga

SEQ ID NO: 76803 - RNA, 21 nt, synthetic construct
  source 1..21: mol_type = other RNA
ttcatcgtggtgcagacagga

SEQ ID NO: 76804 - RNA, 21 nt, synthetic construct
  source 1..21: mol_type = other RNA
gagcggggactacatcaagga

SEQ ID NO: 76805 - RNA, 21 nt, synthetic construct
  source 1..21: mol_type = other RNA
caccaattccacggccacaca

SEQ ID NO: 76806 - RNA, 21 nt, synthetic construct
  source 1..21: mol_type = other RNA
ttacaccttccggggcaacta

SEQ ID NO: 76807 - RNA, 21 nt, synthetic construct
  source 1..21: mol_type = other RNA
gaggtcgcaacggccaggtca

SEQ ID NO: 76808 - RNA, 21 nt, synthetic construct
  source 1..21: mol_type = other RNA
gtacctctgtgaggctgagga

SEQ ID NO: 76809 - RNA, 21 nt, synthetic construct
  source 1..21: mol_type = other RNA
acgacgcgtgtgcctgcgaca

SEQ ID NO: 76810 - RNA, 21 nt, synthetic construct
  source 1..21: mol_type = other RNA
agtacatcttggcccaggaca

SEQ ID NO: 76811 - RNA, 21 nt, synthetic construct
  source 1..21: mol_type = other RNA
caatgggcgggtgtgcagcaa

SEQ ID NO: 76812 - RNA, 21 nt, synthetic construct
  source 1..21: mol_type = other RNA
cggcaactgcacggacgagga

SEQ ID NO: 76813 - RNA, 21 nt, synthetic construct
  source 1..21: mol_type = other RNA
gacggtcaccccctcggccca

SEQ ID NO: 76814 - RNA, 21 nt, synthetic construct
  source 1..21: mol_type = other RNA
ccagagctcgcccgacaggca

SEQ ID NO: 76815 - RNA, 21 nt, synthetic construct
  source 1..21: mol_type = other RNA
ggtgccccgagcgcgtgccga

SEQ ID NO: 76816 - RNA, 21 nt, synthetic construct
  source 1..21: mol_type = other RNA
ggtggatgcctgccagcccaa

SEQ ID NO: 76817 - RNA, 21 nt, synthetic construct
  source 1..21: mol_type = other RNA
gacctccaccctgagaacaga

SEQ ID NO: 76818 - RNA, 21 nt, synthetic construct
  source 1..21: mol_type = other RNA
cttccacggggacttcccaca

SEQ ID NO: 76819 - RNA, 21 nt, synthetic construct
  source 1..21: mol_type = other RNA
agtgcttaccaccacgaccaa

SEQ ID NO: 76820 - RNA, 21 nt, synthetic construct
  source 1..21: mol_type = other RNA
gcggccggaggggcagtctga

SEQ ID NO: 76821 - RNA, 21 nt, synthetic construct
  source 1..21: mol_type = other RNA
cttccacggggacttcccaca

SEQ ID NO: 76822 - RNA, 21 nt, synthetic construct
  source 1..21: mol_type = other RNA
agaccaccacacccatgtcca

SEQ ID NO: 76823 - RNA, 21 nt, synthetic construct
  source 1..21: mol_type = other RNA
gcagccactggatccacggca

SEQ ID NO: 76824 - RNA, 21 nt, synthetic construct
  source 1..21: mol_type = other RNA
tatcgtcctcactgtcaccaa

SEQ ID NO: 76825 - RNA, 21 nt, synthetic construct
  source 1..21: mol_type = other RNA
ttcctgccctgggcgtgagca

SEQ ID NO: 76826 - RNA, 21 nt, synthetic construct
  source 1..21: mol_type = other RNA
gttcagtgtcggtgcagtgca

SEQ ID NO: 76827 - RNA, 21 nt, synthetic construct
  source 1..21: mol_type = other RNA
cagcaggacccctttcgggaa

SEQ ID NO: 76828 - RNA, 21 nt, synthetic construct
  source 1..21: mol_type = other RNA
cttgccggccggcaactgcaa

SEQ ID NO: 76829 - RNA, 21 nt, synthetic construct
  source 1..21: mol_type = other RNA
ccgtccccccacccgtgccaa

SEQ ID NO: 76830 - RNA, 21 nt, synthetic construct
  source 1..21: mol_type = other RNA
gccgagaccagcacgcccaga

SEQ ID NO: 76831 - RNA, 21 nt, synthetic construct
  source 1..21: mol_type = other RNA
cccagcactcgactccagcca

SEQ ID NO: 76832 - RNA, 21 nt, synthetic construct
  source 1..21: mol_type = other RNA
cccagcactcgactccagcca

SEQ ID NO: 76833 - RNA, 21 nt, synthetic construct
  source 1..21: mol_type = other RNA
cccagcactcgactccagcca

SEQ ID NO: 76834 - RNA, 21 nt, synthetic construct
  source 1..21: mol_type = other RNA
cccagcactcgactccagcca

SEQ ID NO: 76835 - RNA, 21 nt, synthetic construct
  source 1..21: mol_type = other RNA
cctgtgccaatgccaggaaca

SEQ ID NO: 76836 - RNA, 21 nt, synthetic construct
  source 1..21: mol_type = other RNA
gggactttgacacctactcca

SEQ ID NO: 76837 - RNA, 21 nt, synthetic construct
  source 1..21: mol_type = other RNA
gggactttgacacctactcca

SEQ ID NO: 76838 - RNA, 21 nt, synthetic construct
  source 1..21: mol_type = other RNA
gggactttgacacctactcca

SEQ ID NO: 76839 - RNA, 21 nt, synthetic construct
  source 1..21: mol_type = other RNA
gggactttgacacctactcca

SEQ ID NO: 76840 - RNA, 21 nt, synthetic construct
  source 1..21: mol_type = other RNA
ccaccacacccgtggccacca

SEQ ID NO: 76841 - RNA, 21 nt, synthetic construct
  source 1..21: mol_type = other RNA
gatggtgcccaccggttccaa

SEQ ID NO: 76842 - RNA, 21 nt, synthetic construct
  source 1..21: mol_type = other RNA
agccatgtggacaactgcaca

SEQ ID NO: 76843 - RNA, 21 nt, synthetic construct
  source 1..21: mol_type = other RNA
tgtccctgccacggccggaga

SEQ ID NO: 76844 - RNA, 21 nt, synthetic construct
  source 1..21: mol_type = other RNA
ggtgcacgacgagggcgccga

SEQ ID NO: 76845 - RNA, 21 nt, synthetic construct
  source 1..21: mol_type = other RNA
ccaccgagtcacccccttcca

SEQ ID NO: 76846 - RNA, 21 nt, synthetic construct
  source 1..21: mol_type = other RNA
catcagcgaccactgcaggga

SEQ ID NO: 76847 - RNA, 21 nt, synthetic construct
  source 1..21: mol_type = other RNA
tgctgacattcctgtggaaca

SEQ ID NO: 76848 - RNA, 21 nt, synthetic construct
  source 1..21: mol_type = other RNA
aagcggtgacgctcagcctga

SEQ ID NO: 76849 - RNA, 21 nt, synthetic construct
  source 1..21: mol_type = other RNA
tgtgccaatgccaggaacaga

SEQ ID NO: 76850 - RNA, 21 nt, synthetic construct
  source 1..21: mol_type = other RNA
caaccagaggttccacggtga

SEQ ID NO: 76851 - RNA, 21 nt, synthetic construct
  source 1..21: mol_type = other RNA
cgcaaccactggatccacgga

SEQ ID NO: 76852 - RNA, 21 nt, synthetic construct
  source 1..21: mol_type = other RNA
ggcctgtgcgacctcacctga

SEQ ID NO: 76853 - RNA, 21 nt, synthetic construct
  source 1..21: mol_type = other RNA
ccccgtccccccacccgtgca

SEQ ID NO: 76854 - RNA, 21 nt, synthetic construct
  source 1..21: mol_type = other RNA
acatcacgcactctggctgca

SEQ ID NO: 76855 - RNA, 21 nt, synthetic construct
  source 1..21: mol_type = other RNA
aaatgtgccgacagcagctta

SEQ ID NO: 76856 - RNA, 21 nt, synthetic construct
  source 1..21: mol_type = other RNA
ggcgtgttcctcaactccata

SEQ ID NO: 76857 - RNA, 21 nt, synthetic construct
  source 1..21: mol_type = other RNA
ggtggaggccacgggcgcaga

SEQ ID NO: 76858 - RNA, 21 nt, synthetic construct
  source 1..21: mol_type = other RNA
gtggactgtgaccgcatgcga

SEQ ID NO: 76859 - RNA, 21 nt, synthetic construct
  source 1..21: mol_type = other RNA
acggtcaccccctcggcccca

SEQ ID NO: 76860 - RNA, 21 nt, synthetic construct
  source 1..21: mol_type = other RNA
ggcaacaccctcctctagcaa

SEQ ID NO: 76861 - RNA, 21 nt, synthetic construct
  source 1..21: mol_type = other RNA
acaccctcctctagcacacaa

SEQ ID NO: 76862 - RNA, 21 nt, synthetic construct
  source 1..21: mol_type = other RNA
gctaccccatgccggggccca

SEQ ID NO: 76863 - RNA, 21 nt, synthetic construct
  source 1..21: mol_type = other RNA
ctggtctgcaggaaccgtgaa

SEQ ID NO: 76864 - RNA, 21 nt, synthetic construct
  source 1..21: mol_type = other RNA
ggcaacaccctcctctagcaa

SEQ ID NO: 76865 - RNA, 21 nt, synthetic construct
  source 1..21: mol_type = other RNA
acaccctcctctagcacacaa

SEQ ID NO: 76866 - RNA, 21 nt, synthetic construct
  source 1..21: mol_type = other RNA
gctaccccatgccggggccca

SEQ ID NO: 76867 - RNA, 21 nt, synthetic construct
  source 1..21: mol_type = other RNA
ctggtctgcaggaaccgtgaa

SEQ ID NO: 76868 - RNA, 21 nt, synthetic construct
  source 1..21: mol_type = other RNA
caagcacagccaccaaatcca

SEQ ID NO: 76869 - RNA, 21 nt, synthetic construct
  source 1..21: mol_type = other RNA
ctccggagaccacccacacca

SEQ ID NO: 76870 - RNA, 21 nt, synthetic construct
  source 1..21: mol_type = other RNA
cgttacagccatcccctctta

SEQ ID NO: 76871 - RNA, 21 nt, synthetic construct
  source 1..21: mol_type = other RNA
ggcaacaccctcctctagcaa

SEQ ID NO: 76872 - RNA, 21 nt, synthetic construct
  source 1..21: mol_type = other RNA
acaccctcctctagcacacaa

SEQ ID NO: 76873 - RNA, 21 nt, synthetic construct
  source 1..21: mol_type = other RNA
gctaccccatgccggggccca

SEQ ID NO: 76874 - RNA, 21 nt, synthetic construct
  source 1..21: mol_type = other RNA
ctggtctgcaggaaccgtgaa

SEQ ID NO: 76875 - RNA, 21 nt, synthetic construct
  source 1..21: mol_type = other RNA
ggcaacaccctcctctagcaa

SEQ ID NO: 76876 - RNA, 21 nt, synthetic construct
  source 1..21: mol_type = other RNA
acaccctcctctagcacacaa

SEQ ID NO: 76877 - RNA, 21 nt, synthetic construct
  source 1..21: mol_type = other RNA
gctaccccatgccggggccca

SEQ ID NO: 76878 - RNA, 21 nt, synthetic construct
  source 1..21: mol_type = other RNA
ctggtctgcaggaaccgtgaa

SEQ ID NO: 76879 - RNA, 21 nt, synthetic construct
  source 1..21: mol_type = other RNA
caagcacagccaccaaatcca

SEQ ID NO: 76880 - RNA, 21 nt, synthetic construct
  source 1..21: mol_type = other RNA
ctccggagaccacccacacca

SEQ ID NO: 76881 - RNA, 21 nt, synthetic construct
  source 1..21: mol_type = other RNA
ggcaacaccctcctctagcaa

SEQ ID NO: 76882 - RNA, 21 nt, synthetic construct
  source 1..21: mol_type = other RNA
acaccctcctctagcacacaa

SEQ ID NO: 76883 - RNA, 21 nt, synthetic construct
  source 1..21: mol_type = other RNA
ggacaacacccatcaccccaa

SEQ ID NO: 76884 - RNA, 21 nt, synthetic construct
  source 1..21: mol_type = other RNA
cccgacagcagaaaggatgga

SEQ ID NO: 76885 - RNA, 21 nt, synthetic construct
  source 1..21: mol_type = other RNA
atgtgtacctgcctctctgga

SEQ ID NO: 76886 - RNA, 21 nt, synthetic construct
  source 1..21: mol_type = other RNA
agtcctaccctgggagagcca

SEQ ID NO: 76887 - RNA, 21 nt, synthetic construct
  source 1..21: mol_type = other RNA
tggcctttgcaactacgtgta

SEQ ID NO: 76888 - RNA, 21 nt, synthetic construct
  source 1..21: mol_type = other RNA
accacgtggaccgtcccagca

SEQ ID NO: 76889 - RNA, 21 nt, synthetic construct
  source 1..21: mol_type = other RNA
cgcgcctgaccgatcccaaca

SEQ ID NO: 76890 - RNA, 21 nt, synthetic construct
  source 1..21: mol_type = other RNA
ggagtgcccctgctacgctca

SEQ ID NO: 76891 - RNA, 21 nt, synthetic construct
  source 1..21: mol_type = other RNA
gtgcttaccaccacgaccaca

SEQ ID NO: 76892 - RNA, 21 nt, synthetic construct
  source 1..21: mol_type = other RNA
ccgtggggaccacccgcacca

SEQ ID NO: 76893 - RNA, 21 nt, synthetic construct
  source 1..21: mol_type = other RNA
ttatgccagcagcctaaggaa

SEQ ID NO: 76894 - RNA, 21 nt, synthetic construct
  source 1..21: mol_type = other RNA
cacctttgatggcgatcgcta

SEQ ID NO: 76895 - RNA, 21 nt, synthetic construct
  source 1..21: mol_type = other RNA
tgcgagaccgaggtcaacata

SEQ ID NO: 76896 - RNA, 21 nt, synthetic construct
  source 1..21: mol_type = other RNA
gtgtcggatgggagtggggga

SEQ ID NO: 76897 - RNA, 21 nt, synthetic construct
  source 1..21: mol_type = other RNA
catctgcggaagcaacggcaa

SEQ ID NO: 76898 - RNA, 21 nt, synthetic construct
  source 1..21: mol_type = other RNA
agacggtgtgcgtgtgcaaca

SEQ ID NO: 76899 - RNA, 21 nt, synthetic construct
  source 1..21: mol_type = other RNA
ccgagctgggagaatgcagga

SEQ ID NO: 76900 - RNA, 21 nt, synthetic construct
  source 1..21: mol_type = other RNA
cacaatgggcgggtgtgcaga

SEQ ID NO: 76901 - RNA, 21 nt, synthetic construct
  source 1..21: mol_type = other RNA
cacctacaagcctggagagaa

SEQ ID NO: 76902 - RNA, 21 nt, synthetic construct
  source 1..21: mol_type = other RNA
cccgcctatcacagaccacca

SEQ ID NO: 76903 - RNA, 21 nt, synthetic construct
  source 1..21: mol_type = other RNA
ctcgagtgccgtgcccaggca

SEQ ID NO: 76904 - RNA, 21 nt, synthetic construct
  source 1..21: mol_type = other RNA
cccgcctatcacagaccacca

SEQ ID NO: 76905 - RNA, 21 nt, synthetic construct
  source 1..21: mol_type = other RNA
ctcgagtgccgtgcccaggca

SEQ ID NO: 76906 - RNA, 21 nt, synthetic construct
  source 1..21: mol_type = other RNA
cccgcctatcacagaccacca

SEQ ID NO: 76907 - RNA, 21 nt, synthetic construct
  source 1..21: mol_type = other RNA
ctcgagtgccgtgcccaggca

SEQ ID NO: 76908 - RNA, 21 nt, synthetic construct
  source 1..21: mol_type = other RNA
cccgcctatcacagaccacca

SEQ ID NO: 76909 - RNA, 21 nt, synthetic construct
  source 1..21: mol_type = other RNA
ctcgagtgccgtgcccaggca

SEQ ID NO: 76910 - RNA, 21 nt, synthetic construct
  source 1..21: mol_type = other RNA
cccgcctatcacagaccacca

SEQ ID NO: 76911 - RNA, 21 nt, synthetic construct
  source 1..21: mol_type = other RNA
tgcgacctcacctgcccacca

SEQ ID NO: 76912 - RNA, 21 nt, synthetic construct
  source 1..21: mol_type = other RNA
cgtgtgttcatgtacgggtga

SEQ ID NO: 76913 - RNA, 21 nt, synthetic construct
  source 1..21: mol_type = other RNA
gacctcagctgtgttcgtaca

SEQ ID NO: 76914 - RNA, 21 nt, synthetic construct
  source 1..21: mol_type = other RNA
acgtcggtgcaagggtcccca

SEQ ID NO: 76915 - RNA, 21 nt, synthetic construct
  source 1..21: mol_type = other RNA
acgggcgatccctgcccccca

SEQ ID NO: 76916 - RNA, 21 nt, synthetic construct
  source 1..21: mol_type = other RNA
gaatgcagggcacaccatgga

SEQ ID NO: 76917 - RNA, 21 nt, synthetic construct
  source 1..21: mol_type = other RNA
cgtgcctgtggacggctgcaa

SEQ ID NO: 76918 - RNA, 21 nt, synthetic construct
  source 1..21: mol_type = other RNA
agtgggggctgcattgccgaa

SEQ ID NO: 76919 - RNA, 21 nt, synthetic construct
  source 1..21: mol_type = other RNA
caacctccagagctcgcccga

SEQ ID NO: 76920 - RNA, 21 nt, synthetic construct
  source 1..21: mol_type = other RNA
ctgctggcaccccacatgtga

SEQ ID NO: 76921 - RNA, 21 nt, synthetic construct
  source 1..21: mol_type = other RNA
aaccacccttccagtgctgaa

SEQ ID NO: 76922 - RNA, 21 nt, synthetic construct
  source 1..21: mol_type = other RNA
tcctccacccgggcaactgca

SEQ ID NO: 76923 - RNA, 21 nt, synthetic construct
  source 1..21: mol_type = other RNA
ctgctggcaccccacatgtga

SEQ ID NO: 76924 - RNA, 21 nt, synthetic construct
  source 1..21: mol_type = other RNA
aaccacccttccagtgctgaa

SEQ ID NO: 76925 - RNA, 21 nt, synthetic construct
  source 1..21: mol_type = other RNA
ctgctggcaccccacatgtga

SEQ ID NO: 76926 - RNA, 21 nt, synthetic construct
  source 1..21: mol_type = other RNA
aaccacccttccagtgctgaa

SEQ ID NO: 76927 - RNA, 21 nt, synthetic construct
  source 1..21: mol_type = other RNA
gggccccgactggcacaccca

SEQ ID NO: 76928 - RNA, 21 nt, synthetic construct
  source 1..21: mol_type = other RNA
ggccccgactggcacacccca

SEQ ID NO: 76929 - RNA, 21 nt, synthetic construct
  source 1..21: mol_type = other RNA
aaaccggccccagaagggtga

SEQ ID NO: 76930 - RNA, 21 nt, synthetic construct
  source 1..21: mol_type = other RNA
agacctcagctgtgttcgtaa

SEQ ID NO: 76931 - RNA, 21 nt, synthetic construct
  source 1..21: mol_type = other RNA
tgtggcaccccgcgctccgta

SEQ ID NO: 76932 - RNA, 21 nt, synthetic construct
  source 1..21: mol_type = other RNA
cttacaccttccggggcaaca

SEQ ID NO: 76933 - RNA, 21 nt, synthetic construct
  source 1..21: mol_type = other RNA
agccccttgactaacaccaca

SEQ ID NO: 76934 - RNA, 21 nt, synthetic construct
  source 1..21: mol_type = other RNA
ccccataaccacggtggtgaa

SEQ ID NO: 76935 - RNA, 21 nt, synthetic construct
  source 1..21: mol_type = other RNA
ccccataaccacggtggtgaa

SEQ ID NO: 76936 - RNA, 21 nt, synthetic construct
  source 1..21: mol_type = other RNA
ccccataaccacggtggtgaa

SEQ ID NO: 76937 - RNA, 21 nt, synthetic construct
  source 1..21: mol_type = other RNA
cctccagagctcgcccgacaa

SEQ ID NO: 76938 - RNA, 21 nt, synthetic construct
  source 1..21: mol_type = other RNA
ggtgacttcccacaccccaga

SEQ ID NO: 76939 - RNA, 21 nt, synthetic construct
  source 1..21: mol_type = other RNA
atgggtttcctaaatttccca

SEQ ID NO: 76940 - RNA, 21 nt, synthetic construct
  source 1..21: mol_type = other RNA
tgcgagtacatcttggcccaa

SEQ ID NO: 76941 - RNA, 21 nt, synthetic construct
  source 1..21: mol_type = other RNA
gtgtcgtcctgctggacccaa

SEQ ID NO: 76942 - RNA, 21 nt, synthetic construct
  source 1..21: mol_type = other RNA
cctggcctttgcaactacgta

SEQ ID NO: 76943 - RNA, 21 nt, synthetic construct
  source 1..21: mol_type = other RNA
ggcctttgcaactacgtgtta

SEQ ID NO: 76944 - RNA, 21 nt, synthetic construct
  source 1..21: mol_type = other RNA
gcctttgcaactacgtgttca

SEQ ID NO: 76945 - RNA, 21 nt, synthetic construct
  source 1..21: mol_type = other RNA
cctttgcaactacgtgttcta

SEQ ID NO: 76946 - RNA, 21 nt, synthetic construct
  source 1..21: mol_type = other RNA
tccgtcctcatcaatgggcaa

SEQ ID NO: 76947 - RNA, 21 nt, synthetic construct
  source 1..21: mol_type = other RNA
atcaatgggcagcgggaggaa

SEQ ID NO: 76948 - RNA, 21 nt, synthetic construct
  source 1..21: mol_type = other RNA
ctccaacccccagcgcgcgca

SEQ ID NO: 76949 - RNA, 21 nt, synthetic construct
  source 1..21: mol_type = other RNA
ggtccccacagcggagaacta

SEQ ID NO: 76950 - RNA, 21 nt, synthetic construct
  source 1..21: mol_type = other RNA
ggttctatggcaacaccctca

SEQ ID NO: 76951 - RNA, 21 nt, synthetic construct
  source 1..21: mol_type = other RNA
tcagagtggctggactacaga

SEQ ID NO: 76952 - RNA, 21 nt, synthetic construct
  source 1..21: mol_type = other RNA
caactgctggcaccccacata

SEQ ID NO: 76953 - RNA, 21 nt, synthetic construct
  source 1..21: mol_type = other RNA
ggttctatggcaacaccctca

SEQ ID NO: 76954 - RNA, 21 nt, synthetic construct
  source 1..21: mol_type = other RNA
tcagagtggctggactacaga

SEQ ID NO: 76955 - RNA, 21 nt, synthetic construct
  source 1..21: mol_type = other RNA
gtccaaggactgcaaccacca

SEQ ID NO: 76956 - RNA, 21 nt, synthetic construct
  source 1..21: mol_type = other RNA
taccagctttacacccatcca

SEQ ID NO: 76957 - RNA, 21 nt, synthetic construct
  source 1..21: mol_type = other RNA
ggttctatggcaacaccctca

SEQ ID NO: 76958 - RNA, 21 nt, synthetic construct
  source 1..21: mol_type = other RNA
tcagagtggctggactacaga

SEQ ID NO: 76959 - RNA, 21 nt, synthetic construct
  source 1..21: mol_type = other RNA
caactgctggcaccccacata

SEQ ID NO: 76960 - RNA, 21 nt, synthetic construct
  source 1..21: mol_type = other RNA
ggttctatggcaacaccctca

SEQ ID NO: 76961 - RNA, 21 nt, synthetic construct
  source 1..21: mol_type = other RNA
tcagagtggctggactacaga

SEQ ID NO: 76962 - RNA, 21 nt, synthetic construct
  source 1..21: mol_type = other RNA
gtccaaggactgcaaccacca

SEQ ID NO: 76963 - RNA, 21 nt, synthetic construct
  source 1..21: mol_type = other RNA
caactgctggcaccccacata

SEQ ID NO: 76964 - RNA, 21 nt, synthetic construct
  source 1..21: mol_type = other RNA
ggttctatggcaacaccctca

SEQ ID NO: 76965 - RNA, 21 nt, synthetic construct
  source 1..21: mol_type = other RNA
gtccaaggactgcaaccacca

SEQ ID NO: 76966 - RNA, 21 nt, synthetic construct
  source 1..21: mol_type = other RNA
taccagctttacacccatcca

SEQ ID NO: 76967 - RNA, 21 nt, synthetic construct
  source 1..21: mol_type = other RNA
actgtgacattgaccgcttca

SEQ ID NO: 76968 - RNA, 21 nt, synthetic construct
  source 1..21: mol_type = other RNA
agagctctgccgcgcccggga

SEQ ID NO: 76969 - RNA, 21 nt, synthetic construct
  source 1..21: mol_type = other RNA
aactctaggaaccagagccca

SEQ ID NO: 76970 - RNA, 21 nt, synthetic construct
  source 1..21: mol_type = other RNA
gagaccgaggtcaacatcaca

SEQ ID NO: 76971 - RNA, 21 nt, synthetic construct
  source 1..21: mol_type = other RNA
gtgaacgacgcgtgtgcctga

SEQ ID NO: 76972 - RNA, 21 nt, synthetic construct
  source 1..21: mol_type = other RNA
gacgacaatgccatcaatgaa

SEQ ID NO: 76973 - RNA, 21 nt, synthetic construct
  source 1..21: mol_type = other RNA
acggacgaggagggcatctga

SEQ ID NO: 76974 - RNA, 21 nt, synthetic construct
  source 1..21: mol_type = other RNA
ggcacggtgctggatgacata

SEQ ID NO: 76975 - RNA, 21 nt, synthetic construct
  source 1..21: mol_type = other RNA
gcctgaaagcggtgacgctca

SEQ ID NO: 76976 - RNA, 21 nt, synthetic construct
  source 1..21: mol_type = other RNA
cctgaaagcggtgacgctcaa

SEQ ID NO: 76977 - RNA, 21 nt, synthetic construct
  source 1..21: mol_type = other RNA
ctgcttgatcgccatctgcga

SEQ ID NO: 76978 - RNA, 21 nt, synthetic construct
  source 1..21: mol_type = other RNA
tacgatcacggccaccggcta

SEQ ID NO: 76979 - RNA, 21 nt, synthetic construct
  source 1..21: mol_type = other RNA
accgagtcacccccttctcca

SEQ ID NO: 76980 - RNA, 21 nt, synthetic construct
  source 1..21: mol_type = other RNA
tacgatcacggccaccggcta

SEQ ID NO: 76981 - RNA, 21 nt, synthetic construct
  source 1..21: mol_type = other RNA
accgagtcacccccttctcca

SEQ ID NO: 76982 - RNA, 21 nt, synthetic construct
  source 1..21: mol_type = other RNA
gctaccagctttacacccata

SEQ ID NO: 76983 - RNA, 21 nt, synthetic construct
  source 1..21: mol_type = other RNA
accgagtcacccccttctcca

SEQ ID NO: 76984 - RNA, 21 nt, synthetic construct
  source 1..21: mol_type = other RNA
ccccatcactgatcaccacga

SEQ ID NO: 76985 - RNA, 21 nt, synthetic construct
  source 1..21: mol_type = other RNA
tacgatcacggccaccggcta

SEQ ID NO: 76986 - RNA, 21 nt, synthetic construct
  source 1..21: mol_type = other RNA
ccaaagtgctgaccagcccga

SEQ ID NO: 76987 - RNA, 21 nt, synthetic construct
  source 1..21: mol_type = other RNA
tacgatcacggccaccggcta

SEQ ID NO: 76988 - RNA, 21 nt, synthetic construct
  source 1..21: mol_type = other RNA
gctaccagctttacacccata

SEQ ID NO: 76989 - RNA, 21 nt, synthetic construct
  source 1..21: mol_type = other RNA
gacccggatcctcactgagca

SEQ ID NO: 76990 - RNA, 21 nt, synthetic construct
  source 1..21: mol_type = other RNA
gtgcaaccggtggcctgtgca

SEQ ID NO: 76991 - RNA, 21 nt, synthetic construct
  source 1..21: mol_type = other RNA
cctcagctgtgttcgtacaaa

SEQ ID NO: 76992 - RNA, 21 nt, synthetic construct
  source 1..21: mol_type = other RNA
agcatgtgcgggcctatgtga

SEQ ID NO: 76993 - RNA, 21 nt, synthetic construct
  source 1..21: mol_type = other RNA
tcgcaacggccaggtcagaga

SEQ ID NO: 76994 - RNA, 21 nt, synthetic construct
  source 1..21: mol_type = other RNA
agcacctggggtgacttccaa

SEQ ID NO: 76995 - RNA, 21 nt, synthetic construct
  source 1..21: mol_type = other RNA
gcgacgtcttccgcttcccta

SEQ ID NO: 76996 - RNA, 21 nt, synthetic construct
  source 1..21: mol_type = other RNA
cgacgtcttccgcttccctga

SEQ ID NO: 76997 - RNA, 21 nt, synthetic construct
  source 1..21: mol_type = other RNA
cactgccgcgccgcctacgaa

SEQ ID NO: 76998 - RNA, 21 nt, synthetic construct
  source 1..21: mol_type = other RNA
gctccgtcctcatcaatggga

SEQ ID NO: 76999 - RNA, 21 nt, synthetic construct
  source 1..21: mol_type = other RNA
ctgacattcctgtggaacgga

SEQ ID NO: 77000 - RNA, 21 nt, synthetic construct
  source 1..21: mol_type = other RNA
gtggcctgtgtggggacttca

SEQ ID NO: 77001 - RNA, 21 nt, synthetic construct
  source 1..21: mol_type = other RNA
tggcctgtgtggggacttcaa

SEQ ID NO: 77002 - RNA, 21 nt, synthetic construct
  source 1..21: mol_type = other RNA
tgtgtggggacttcaacggca

SEQ ID NO: 77003 - RNA, 21 nt, synthetic construct
  source 1..21: mol_type = other RNA
cacgcggggggccagccgcga

SEQ ID NO: 77004 - RNA, 21 nt, synthetic construct
  source 1..21: mol_type = other RNA
atgcagcaccaggagtgtgga

SEQ ID NO: 77005 - RNA, 21 nt, synthetic construct
  source 1..21: mol_type = other RNA
gctccaacccccagcgcgcga

SEQ ID NO: 77006 - RNA, 21 nt, synthetic construct
  source 1..21: mol_type = other RNA
ctgtccaagaaatgtgccgaa

SEQ ID NO: 77007 - RNA, 21 nt, synthetic construct
  source 1..21: mol_type = other RNA
gagcttcttcatcgtggtgca

SEQ ID NO: 77008 - RNA, 21 nt, synthetic construct
  source 1..21: mol_type = other RNA
cacggccctcagcggggtgga

SEQ ID NO: 77009 - RNA, 21 nt, synthetic construct
  source 1..21: mol_type = other RNA
tacagctcagcgactggagga

SEQ ID NO: 77010 - RNA, 21 nt, synthetic construct
  source 1..21: mol_type = other RNA
aactgccccaagtcccagcga

SEQ ID NO: 77011 - RNA, 21 nt, synthetic construct
  source 1..21: mol_type = other RNA
cagcaacagctcggcgggcaa

SEQ ID NO: 77012 - RNA, 21 nt, synthetic construct
  source 1..21: mol_type = other RNA
caacagctcggcgggcaccca

SEQ ID NO: 77013 - RNA, 21 nt, synthetic construct
  source 1..21: mol_type = other RNA
ttcatcacctttgatggcgaa

SEQ ID NO: 77014 - RNA, 21 nt, synthetic construct
  source 1..21: mol_type = other RNA
ggacaacaccacccacgggaa

SEQ ID NO: 77015 - RNA, 21 nt, synthetic construct
  source 1..21: mol_type = other RNA
tgcgggaacttcgacgacaaa

SEQ ID NO: 77016 - RNA, 21 nt, synthetic construct
  source 1..21: mol_type = other RNA
acgacaatgccatcaatgaca

SEQ ID NO: 77017 - RNA, 21 nt, synthetic construct
  source 1..21: mol_type = other RNA
acaatgccatcaatgacttta

SEQ ID NO: 77018 - RNA, 21 nt, synthetic construct
  source 1..21: mol_type = other RNA
gtggcgactgcgagtgtttca

SEQ ID NO: 77019 - RNA, 21 nt, synthetic construct
  source 1..21: mol_type = other RNA
caccgcctgggtcccccacta

SEQ ID NO: 77020 - RNA, 21 nt, synthetic construct
  source 1..21: mol_type = other RNA
aaggtgcactgtgacgtccaa

SEQ ID NO: 77021 - RNA, 21 nt, synthetic construct
  source 1..21: mol_type = other RNA
caggagggcgtcttcaagata

SEQ ID NO: 77022 - RNA, 21 nt, synthetic construct
  source 1..21: mol_type = other RNA
tctgctgcagtgacgaccaca

SEQ ID NO: 77023 - RNA, 21 nt, synthetic construct
  source 1..21: mol_type = other RNA
tgctgcagtgacgaccactga

SEQ ID NO: 77024 - RNA, 21 nt, synthetic construct
  source 1..21: mol_type = other RNA
accacgggaggccccacgaca

SEQ ID NO: 77025 - RNA, 21 nt, synthetic construct
  source 1..21: mol_type = other RNA
gcccttccagggacgacggga

SEQ ID NO: 77026 - RNA, 21 nt, synthetic construct
  source 1..21: mol_type = other RNA
cacgctggccccaacaacaaa

SEQ ID NO: 77027 - RNA, 21 nt, synthetic construct
  source 1..21: mol_type = other RNA
gagctgtccacctctcaggca

SEQ ID NO: 77028 - RNA, 21 nt, synthetic construct
  source 1..21: mol_type = other RNA
aatgagccccttgactaacaa

SEQ ID NO: 77029 - RNA, 21 nt, synthetic construct
  source 1..21: mol_type = other RNA
caccagccagggcacgaccca

SEQ ID NO: 77030 - RNA, 21 nt, synthetic construct
  source 1..21: mol_type = other RNA
caccacaactggggccaccga

SEQ ID NO: 77031 - RNA, 21 nt, synthetic construct
  source 1..21: mol_type = other RNA
aggaacagctcacactaccaa

SEQ ID NO: 77032 - RNA, 21 nt, synthetic construct
  source 1..21: mol_type = other RNA
acgcctccagtgtggatcaga

SEQ ID NO: 77033 - RNA, 21 nt, synthetic construct
  source 1..21: mol_type = other RNA
agcacaaccaccacacccaca

SEQ ID NO: 77034 - RNA, 21 nt, synthetic construct
  source 1..21: mol_type = other RNA
gccactggttctatggcaaca

SEQ ID NO: 77035 - RNA, 21 nt, synthetic construct
  source 1..21: mol_type = other RNA
aactcctgggacaactcccaa

SEQ ID NO: 77036 - RNA, 21 nt, synthetic construct
  source 1..21: mol_type = other RNA
ggccacctcgggcatcttgga

SEQ ID NO: 77037 - RNA, 21 nt, synthetic construct
  source 1..21: mol_type = other RNA
gcagcaaccaccggtaccaca

SEQ ID NO: 77038 - RNA, 21 nt, synthetic construct
  source 1..21: mol_type = other RNA
actccaacatccgtgcggcca

SEQ ID NO: 77039 - RNA, 21 nt, synthetic construct
  source 1..21: mol_type = other RNA
cggccaccagctctacggcca

SEQ ID NO: 77040 - RNA, 21 nt, synthetic construct
  source 1..21: mol_type = other RNA
atccacggccaccccgtccta

SEQ ID NO: 77041 - RNA, 21 nt, synthetic construct
  source 1..21: mol_type = other RNA
accccacatgtgagcaccaca

SEQ ID NO: 77042 - RNA, 21 nt, synthetic construct
  source 1..21: mol_type = other RNA
ccactccagagactgtccaca

SEQ ID NO: 77043 - RNA, 21 nt, synthetic construct
  source 1..21: mol_type = other RNA
cactccagagactgtccacaa

SEQ ID NO: 77044 - RNA, 21 nt, synthetic construct
  source 1..21: mol_type = other RNA
aggaacagctcacactaccaa

SEQ ID NO: 77045 - RNA, 21 nt, synthetic construct
  source 1..21: mol_type = other RNA
agcacaaccaccacacccaca

SEQ ID NO: 77046 - RNA, 21 nt, synthetic construct
  source 1..21: mol_type = other RNA
gccactggttctatggcaaca

SEQ ID NO: 77047 - RNA, 21 nt, synthetic construct
  source 1..21: mol_type = other RNA
gcagcaaccaccggtaccaca

SEQ ID NO: 77048 - RNA, 21 nt, synthetic construct
  source 1..21: mol_type = other RNA
actccaacatccgtgcggcca

SEQ ID NO: 77049 - RNA, 21 nt, synthetic construct
  source 1..21: mol_type = other RNA
cggccaccagctctacggcca

SEQ ID NO: 77050 - RNA, 21 nt, synthetic construct
  source 1..21: mol_type = other RNA
cacagagcagaccacagcaga

SEQ ID NO: 77051 - RNA, 21 nt, synthetic construct
  source 1..21: mol_type = other RNA
cctccagtccaaggactgcaa

SEQ ID NO: 77052 - RNA, 21 nt, synthetic construct
  source 1..21: mol_type = other RNA
ctcctccacccgggcaactga

SEQ ID NO: 77053 - RNA, 21 nt, synthetic construct
  source 1..21: mol_type = other RNA
gcaactgctggcaccctcaaa

SEQ ID NO: 77054 - RNA, 21 nt, synthetic construct
  source 1..21: mol_type = other RNA
aactgctggcaccctcaaaga

SEQ ID NO: 77055 - RNA, 21 nt, synthetic construct
  source 1..21: mol_type = other RNA
cacagctaccagcgttacaga

SEQ ID NO: 77056 - RNA, 21 nt, synthetic construct
  source 1..21: mol_type = other RNA
tactccagagactgtccacaa

SEQ ID NO: 77057 - RNA, 21 nt, synthetic construct
  source 1..21: mol_type = other RNA
aggaacagctcacactaccaa

SEQ ID NO: 77058 - RNA, 21 nt, synthetic construct
  source 1..21: mol_type = other RNA
acgcctccagtgtggatcaga

SEQ ID NO: 77059 - RNA, 21 nt, synthetic construct
  source 1..21: mol_type = other RNA
agcacaaccaccacacccaca

SEQ ID NO: 77060 - RNA, 21 nt, synthetic construct
  source 1..21: mol_type = other RNA
gccactggttctatggcaaca

SEQ ID NO: 77061 - RNA, 21 nt, synthetic construct
  source 1..21: mol_type = other RNA
ggccacctcgggcatcttgga

SEQ ID NO: 77062 - RNA, 21 nt, synthetic construct
  source 1..21: mol_type = other RNA
actccaacatccgtgcggcca

SEQ ID NO: 77063 - RNA, 21 nt, synthetic construct
  source 1..21: mol_type = other RNA
cggccaccagctctacggcca

SEQ ID NO: 77064 - RNA, 21 nt, synthetic construct
  source 1..21: mol_type = other RNA
atccacggccaccccgtccta

SEQ ID NO: 77065 - RNA, 21 nt, synthetic construct
  source 1..21: mol_type = other RNA
accccacatgtgagcaccaca

SEQ ID NO: 77066 - RNA, 21 nt, synthetic construct
  source 1..21: mol_type = other RNA
aggaacagctcacactaccaa

SEQ ID NO: 77067 - RNA, 21 nt, synthetic construct
  source 1..21: mol_type = other RNA
acgcctccagtgtggatcaga

SEQ ID NO: 77068 - RNA, 21 nt, synthetic construct
  source 1..21: mol_type = other RNA
agcacaaccaccacacccaca

SEQ ID NO: 77069 - RNA, 21 nt, synthetic construct
  source 1..21: mol_type = other RNA
gccactggttctatggcaaca

SEQ ID NO: 77070 - RNA, 21 nt, synthetic construct
  source 1..21: mol_type = other RNA
actgatcaccacggccactaa

SEQ ID NO: 77071 - RNA, 21 nt, synthetic construct
  source 1..21: mol_type = other RNA
gcagcaaccaccggtaccaca

SEQ ID NO: 77072 - RNA, 21 nt, synthetic construct
  source 1..21: mol_type = other RNA
actccaacatccgtgcggcca

SEQ ID NO: 77073 - RNA, 21 nt, synthetic construct
  source 1..21: mol_type = other RNA
cggccaccagctctacggcca

SEQ ID NO: 77074 - RNA, 21 nt, synthetic construct
  source 1..21: mol_type = other RNA
atccacggccaccccgtccta

SEQ ID NO: 77075 - RNA, 21 nt, synthetic construct
  source 1..21: mol_type = other RNA
cctccagtccaaggactgcaa

SEQ ID NO: 77076 - RNA, 21 nt, synthetic construct
  source 1..21: mol_type = other RNA
agaccaccacacccgtggcca

SEQ ID NO: 77077 - RNA, 21 nt, synthetic construct
  source 1..21: mol_type = other RNA
atccacggccaccccgtccta

SEQ ID NO: 77078 - RNA, 21 nt, synthetic construct
  source 1..21: mol_type = other RNA
accccacatgtgagcaccaca

SEQ ID NO: 77079 - RNA, 21 nt, synthetic construct
  source 1..21: mol_type = other RNA
ccactccagagactgtccaca

SEQ ID NO: 77080 - RNA, 21 nt, synthetic construct
  source 1..21: mol_type = other RNA
cactccagagactgtccacaa

SEQ ID NO: 77081 - RNA, 21 nt, synthetic construct
  source 1..21: mol_type = other RNA
aggaacagctcacactaccaa

SEQ ID NO: 77082 - RNA, 21 nt, synthetic construct
  source 1..21: mol_type = other RNA
acgcctccagtgtggatcaga

SEQ ID NO: 77083 - RNA, 21 nt, synthetic construct
  source 1..21: mol_type = other RNA
agcacaaccaccacacccaca

SEQ ID NO: 77084 - RNA, 21 nt, synthetic construct
  source 1..21: mol_type = other RNA
gccactggttctatggcaaca

SEQ ID NO: 77085 - RNA, 21 nt, synthetic construct
  source 1..21: mol_type = other RNA
cctccagtccaaggactgcaa

SEQ ID NO: 77086 - RNA, 21 nt, synthetic construct
  source 1..21: mol_type = other RNA
ggccaccaattccacggccaa

SEQ ID NO: 77087 - RNA, 21 nt, synthetic construct
  source 1..21: mol_type = other RNA
cactatgcccacagccactga

SEQ ID NO: 77088 - RNA, 21 nt, synthetic construct
  source 1..21: mol_type = other RNA
gtggggaccacccgcacccca

SEQ ID NO: 77089 - RNA, 21 nt, synthetic construct
  source 1..21: mol_type = other RNA
cgcacccctgcagtgctccca

SEQ ID NO: 77090 - RNA, 21 nt, synthetic construct
  source 1..21: mol_type = other RNA
tgacattgaccgcttccagga

SEQ ID NO: 77091 - RNA, 21 nt, synthetic construct
  source 1..21: mol_type = other RNA
ttgaccgcttccagggcgcca

SEQ ID NO: 77092 - RNA, 21 nt, synthetic construct
  source 1..21: mol_type = other RNA
ggcggctcccactattccaca

SEQ ID NO: 77093 - RNA, 21 nt, synthetic construct
  source 1..21: mol_type = other RNA
accttccggggcaactgcaca

SEQ ID NO: 77094 - RNA, 21 nt, synthetic construct
  source 1..21: mol_type = other RNA
ccttccggggcaactgcacca

SEQ ID NO: 77095 - RNA, 21 nt, synthetic construct
  source 1..21: mol_type = other RNA
ctggacaaccactactgcaca

SEQ ID NO: 77096 - RNA, 21 nt, synthetic construct
  source 1..21: mol_type = other RNA
cccgcgccctcagcatccaca

SEQ ID NO: 77097 - RNA, 21 nt, synthetic construct
  source 1..21: mol_type = other RNA
ggaccaccaccatgcgtgtga

SEQ ID NO: 77098 - RNA, 21 nt, synthetic construct
  source 1..21: mol_type = other RNA
acatggccaagacgtggctga

SEQ ID NO: 77099 - RNA, 21 nt, synthetic construct
  source 1..21: mol_type = other RNA
cacaaccttgtgcccccggga

SEQ ID NO: 77100 - RNA, 21 nt, synthetic construct
  source 1..21: mol_type = other RNA
gcagagctctgccgcgcccga

SEQ ID NO: 77101 - RNA, 21 nt, synthetic construct
  source 1..21: mol_type = other RNA
cccaccaaagtgtacaagcca

SEQ ID NO: 77102 - RNA, 21 nt, synthetic construct
  source 1..21: mol_type = other RNA
gccacctgcaactctaggaaa

SEQ ID NO: 77103 - RNA, 21 nt, synthetic construct
  source 1..21: mol_type = other RNA
ccacctgcaactctaggaaca

SEQ ID NO: 77104 - RNA, 21 nt, synthetic construct
  source 1..21: mol_type = other RNA
acctgcaactctaggaaccaa

SEQ ID NO: 77105 - RNA, 21 nt, synthetic construct
  source 1..21: mol_type = other RNA
ccctgaggaccagatcctcta

SEQ ID NO: 77106 - RNA, 21 nt, synthetic construct
  source 1..21: mol_type = other RNA
gtttcctaaatttcccgggga

SEQ ID NO: 77107 - RNA, 21 nt, synthetic construct
  source 1..21: mol_type = other RNA
tcctgcgtgtgtgacgaggga

SEQ ID NO: 77108 - RNA, 21 nt, synthetic construct
  source 1..21: mol_type = other RNA
tgccacatgtgtacctgccta

SEQ ID NO: 77109 - RNA, 21 nt, synthetic construct
  source 1..21: mol_type = other RNA
cctgcaacaatactacctgta

SEQ ID NO: 77110 - RNA, 21 nt, synthetic construct
  source 1..21: mol_type = other RNA
catcaccttctgcgagggcta

SEQ ID NO: 77111 - RNA, 21 nt, synthetic construct
  source 1..21: mol_type = other RNA
tcaccttctgcgagggctcca

SEQ ID NO: 77112 - RNA, 21 nt, synthetic construct
  source 1..21: mol_type = other RNA
gacggtgcccttgcactgtca

SEQ ID NO: 77113 - RNA, 21 nt, synthetic construct
  source 1..21: mol_type = other RNA
cccacacacccgtggcttcca

SEQ ID NO: 77114 - RNA, 21 nt, synthetic construct
  source 1..21: mol_type = other RNA
tggagccaggatgtgcattga

SEQ ID NO: 77115 - RNA, 21 nt, synthetic construct
  source 1..21: mol_type = other RNA
ggagccaggatgtgcattgta

SEQ ID NO: 77116 - RNA, 21 nt, synthetic construct
  source 1..21: mol_type = other RNA
aaggcggccgcctgtccatga

SEQ ID NO: 77117 - RNA, 21 nt, synthetic construct
  source 1..21: mol_type = other RNA
acggtgcccttgcactgtcca

SEQ ID NO: 77118 - RNA, 21 nt, synthetic construct
  source 1..21: mol_type = other RNA
ccaacccccagcgcgcgcaga

SEQ ID NO: 77119 - RNA, 21 nt, synthetic construct
  source 1..21: mol_type = other RNA
cgcctgtgtgcccgcccagga

SEQ ID NO: 77120 - RNA, 21 nt, synthetic construct
  source 1..21: mol_type = other RNA
aaggctgctacccgaagtgca

SEQ ID NO: 77121 - RNA, 21 nt, synthetic construct
  source 1..21: mol_type = other RNA
tgtggctgctacgacaaggaa

SEQ ID NO: 77122 - RNA, 21 nt, synthetic construct
  source 1..21: mol_type = other RNA
cgagtgccgggcggcgcagca

SEQ ID NO: 77123 - RNA, 21 nt, synthetic construct
  source 1..21: mol_type = other RNA
gcggccctcacctcgcagaca

SEQ ID NO: 77124 - RNA, 21 nt, synthetic construct
  source 1..21: mol_type = other RNA
ctcggccccaggtaccaccaa

SEQ ID NO: 77125 - RNA, 21 nt, synthetic construct
  source 1..21: mol_type = other RNA
aggtgcactgtgacgtccaca

SEQ ID NO: 77126 - RNA, 21 nt, synthetic construct
  source 1..21: mol_type = other RNA
ttccagggacgacggggagca

SEQ ID NO: 77127 - RNA, 21 nt, synthetic construct
  source 1..21: mol_type = other RNA
acatcggcccccataaccaca

SEQ ID NO: 77128 - RNA, 21 nt, synthetic construct
  source 1..21: mol_type = other RNA
ccacggggacttcccacacca

SEQ ID NO: 77129 - RNA, 21 nt, synthetic construct
  source 1..21: mol_type = other RNA
cagccccacatcggccccaaa

SEQ ID NO: 77130 - RNA, 21 nt, synthetic construct
  source 1..21: mol_type = other RNA
ccttgggaccaccgggaccca

SEQ ID NO: 77131 - RNA, 21 nt, synthetic construct
  source 1..21: mol_type = other RNA
acatcggcccccataaccaca

SEQ ID NO: 77132 - RNA, 21 nt, synthetic construct
  source 1..21: mol_type = other RNA
ccacggggacttcccacacca

SEQ ID NO: 77133 - RNA, 21 nt, synthetic construct
  source 1..21: mol_type = other RNA
acatcggcccccataaccaca

SEQ ID NO: 77134 - RNA, 21 nt, synthetic construct
  source 1..21: mol_type = other RNA
ccttgggaccaccgggaccca

SEQ ID NO: 77135 - RNA, 21 nt, synthetic construct
  source 1..21: mol_type = other RNA
ccacacacccgtggcttccca

SEQ ID NO: 77136 - RNA, 21 nt, synthetic construct
  source 1..21: mol_type = other RNA
ccggccttcaacgagttctaa

SEQ ID NO: 77137 - RNA, 21 nt, synthetic construct
  source 1..21: mol_type = other RNA
gcgcctgaccgatcccaacaa

SEQ ID NO: 77138 - RNA, 21 nt, synthetic construct
  source 1..21: mol_type = other RNA
cacggccatcccgtcctccaa

SEQ ID NO: 77139 - RNA, 21 nt, synthetic construct
  source 1..21: mol_type = other RNA
tttacacccatcccctcctta

SEQ ID NO: 77140 - RNA, 21 nt, synthetic construct
  source 1..21: mol_type = other RNA
tgcccttgcactgtcctaaca

SEQ ID NO: 77141 - RNA, 21 nt, synthetic construct
  source 1..21: mol_type = other RNA
gtgggggctgcattgccgaga

SEQ ID NO: 77142 - RNA, 21 nt, synthetic construct
  source 1..21: mol_type = other RNA
ggactgcccctgtgtgcacaa

SEQ ID NO: 77143 - RNA, 21 nt, synthetic construct
  source 1..21: mol_type = other RNA
aggctgctacccgaagtgcca

SEQ ID NO: 77144 - RNA, 21 nt, synthetic construct
  source 1..21: mol_type = other RNA
gtggctgctacgacaaggaca

SEQ ID NO: 77145 - RNA, 21 nt, synthetic construct
  source 1..21: mol_type = other RNA
cgaaaagaccaccctatggga

SEQ ID NO: 77146 - RNA, 21 nt, synthetic construct
  source 1..21: mol_type = other RNA
cggccctcacctcgcagacta

SEQ ID NO: 77147 - RNA, 21 nt, synthetic construct
  source 1..21: mol_type = other RNA
ctgctgcagtgacgaccacta

SEQ ID NO: 77148 - RNA, 21 nt, synthetic construct
  source 1..21: mol_type = other RNA
cgcctccagtgtggatcagca

SEQ ID NO: 77149 - RNA, 21 nt, synthetic construct
  source 1..21: mol_type = other RNA
caccctcctctagcacacaga

SEQ ID NO: 77150 - RNA, 21 nt, synthetic construct
  source 1..21: mol_type = other RNA
tctgccctagggaccacccaa

SEQ ID NO: 77151 - RNA, 21 nt, synthetic construct
  source 1..21: mol_type = other RNA
ttcggccacctcgggcatcta

SEQ ID NO: 77152 - RNA, 21 nt, synthetic construct
  source 1..21: mol_type = other RNA
cagagtggctggactacagca

SEQ ID NO: 77153 - RNA, 21 nt, synthetic construct
  source 1..21: mol_type = other RNA
caccctcctctagcacacaga

SEQ ID NO: 77154 - RNA, 21 nt, synthetic construct
  source 1..21: mol_type = other RNA
tctgccctagggaccacccaa

SEQ ID NO: 77155 - RNA, 21 nt, synthetic construct
  source 1..21: mol_type = other RNA
cagagtggctggactacagca

SEQ ID NO: 77156 - RNA, 21 nt, synthetic construct
  source 1..21: mol_type = other RNA
gcaaccacccttccagtgcta

SEQ ID NO: 77157 - RNA, 21 nt, synthetic construct
  source 1..21: mol_type = other RNA
accgcctggacccgcctatca

SEQ ID NO: 77158 - RNA, 21 nt, synthetic construct
  source 1..21: mol_type = other RNA
cgcctccagtgtggatcagca

SEQ ID NO: 77159 - RNA, 21 nt, synthetic construct
  source 1..21: mol_type = other RNA
caccctcctctagcacacaga

SEQ ID NO: 77160 - RNA, 21 nt, synthetic construct
  source 1..21: mol_type = other RNA
gatcacagccaccggctccaa

SEQ ID NO: 77161 - RNA, 21 nt, synthetic construct
  source 1..21: mol_type = other RNA
tctgccctagggaccacccaa

SEQ ID NO: 77162 - RNA, 21 nt, synthetic construct
  source 1..21: mol_type = other RNA
ttcggccacctcgggcatcta

SEQ ID NO: 77163 - RNA, 21 nt, synthetic construct
  source 1..21: mol_type = other RNA
cagagtggctggactacagca

SEQ ID NO: 77164 - RNA, 21 nt, synthetic construct
  source 1..21: mol_type = other RNA
cgcctccagtgtggatcagca

SEQ ID NO: 77165 - RNA, 21 nt, synthetic construct
  source 1..21: mol_type = other RNA
caccctcctctagcacacaga

SEQ ID NO: 77166 - RNA, 21 nt, synthetic construct
  source 1..21: mol_type = other RNA
tctgccctagggaccacccaa

SEQ ID NO: 77167 - RNA, 21 nt, synthetic construct
  source 1..21: mol_type = other RNA
cagagtggctggactacagca

SEQ ID NO: 77168 - RNA, 21 nt, synthetic construct
  source 1..21: mol_type = other RNA
gcaaccacccttccagtgcta

SEQ ID NO: 77169 - RNA, 21 nt, synthetic construct
  source 1..21: mol_type = other RNA
cgcctccagtgtggatcagca

SEQ ID NO: 77170 - RNA, 21 nt, synthetic construct
  source 1..21: mol_type = other RNA
caccctcctctagcacacaga

SEQ ID NO: 77171 - RNA, 21 nt, synthetic construct
  source 1..21: mol_type = other RNA
gcaaccacccttccagtgcta

SEQ ID NO: 77172 - RNA, 21 nt, synthetic construct
  source 1..21: mol_type = other RNA
ctccagagaccacccacacca

SEQ ID NO: 77173 - RNA, 21 nt, synthetic construct
  source 1..21: mol_type = other RNA
cagagaccacccacacctcca

SEQ ID NO: 77174 - RNA, 21 nt, synthetic construct
  source 1..21: mol_type = other RNA
ggtggcctgtgcgacctcaca

SEQ ID NO: 77175 - RNA, 21 nt, synthetic construct
  source 1..21: mol_type = other RNA
ttgtctgatcatgaaaaccta

SEQ ID NO: 77176 - RNA, 21 nt, synthetic construct
  source 1..21: mol_type = other RNA
gcaacagctcggcgggcacca

SEQ ID NO: 77177 - RNA, 21 nt, synthetic construct
  source 1..21: mol_type = other RNA
catctccacctatgatgagaa

SEQ ID NO: 77178 - RNA, 21 nt, synthetic construct
  source 1..21: mol_type = other RNA
gcgagaccgaggtcaacatca

SEQ ID NO: 77179 - RNA, 21 nt, synthetic construct
  source 1..21: mol_type = other RNA
ccacgcactggtggacagcaa

SEQ ID NO: 77180 - RNA, 21 nt, synthetic construct
  source 1..21: mol_type = other RNA
gctgctacccgaagtgcccaa

SEQ ID NO: 77181 - RNA, 21 nt, synthetic construct
  source 1..21: mol_type = other RNA
ggcgcagcttcccgacatgca

SEQ ID NO: 77182 - RNA, 21 nt, synthetic construct
  source 1..21: mol_type = other RNA
catcactgaccaccacggcca

SEQ ID NO: 77183 - RNA, 21 nt, synthetic construct
  source 1..21: mol_type = other RNA
ccccgggccacaccacggcca

SEQ ID NO: 77184 - RNA, 21 nt, synthetic construct
  source 1..21: mol_type = other RNA
caagacccgcacctcgaccca

SEQ ID NO: 77185 - RNA, 21 nt, synthetic construct
  source 1..21: mol_type = other RNA
catcactgaccaccacggcca

SEQ ID NO: 77186 - RNA, 21 nt, synthetic construct
  source 1..21: mol_type = other RNA
caagacccgcacctcgaccca

SEQ ID NO: 77187 - RNA, 21 nt, synthetic construct
  source 1..21: mol_type = other RNA
ccactccggagaccacccaca

SEQ ID NO: 77188 - RNA, 21 nt, synthetic construct
  source 1..21: mol_type = other RNA
catcactgaccaccacggcca

SEQ ID NO: 77189 - RNA, 21 nt, synthetic construct
  source 1..21: mol_type = other RNA
caagacccgcacctcgaccca

SEQ ID NO: 77190 - RNA, 21 nt, synthetic construct
  source 1..21: mol_type = other RNA
ccccgggccacaccacggcca

SEQ ID NO: 77191 - RNA, 21 nt, synthetic construct
  source 1..21: mol_type = other RNA
caagacccgcacctcgaccca

SEQ ID NO: 77192 - RNA, 21 nt, synthetic construct
  source 1..21: mol_type = other RNA
gttacacccatcccctcctca

SEQ ID NO: 77193 - RNA, 21 nt, synthetic construct
  source 1..21: mol_type = other RNA
ccactccggagaccacccaca

SEQ ID NO: 77194 - RNA, 21 nt, synthetic construct
  source 1..21: mol_type = other RNA
catcactgaccaccacggcca

SEQ ID NO: 77195 - RNA, 21 nt, synthetic construct
  source 1..21: mol_type = other RNA
tttacacccatcccctcctca

SEQ ID NO: 77196 - RNA, 21 nt, synthetic construct
  source 1..21: mol_type = other RNA
tgtctgagaacgttctgccta

SEQ ID NO: 77197 - RNA, 21 nt, synthetic construct
  source 1..21: mol_type = other RNA
ccaacggctccgtcctcatca

SEQ ID NO: 77198 - RNA, 21 nt, synthetic construct
  source 1..21: mol_type = other RNA
tcctcatcaatgggcagcgga

SEQ ID NO: 77199 - RNA, 21 nt, synthetic construct
  source 1..21: mol_type = other RNA
tccggctggtgctgacattca

SEQ ID NO: 77200 - RNA, 21 nt, synthetic construct
  source 1..21: mol_type = other RNA
catgcagcaccaggagtgtga

SEQ ID NO: 77201 - RNA, 21 nt, synthetic construct
  source 1..21: mol_type = other RNA
tgcgaggaccactgtgtggaa

SEQ ID NO: 77202 - RNA, 21 nt, synthetic construct
  source 1..21: mol_type = other RNA
acggtgctggatgacatcaca

SEQ ID NO: 77203 - RNA, 21 nt, synthetic construct
  source 1..21: mol_type = other RNA
atctccacctatgatgagaaa

SEQ ID NO: 77204 - RNA, 21 nt, synthetic construct
  source 1..21: mol_type = other RNA
cctgacggacaacgagaacta

SEQ ID NO: 77205 - RNA, 21 nt, synthetic construct
  source 1..21: mol_type = other RNA
ctgcctgaaagcggtgacgca

SEQ ID NO: 77206 - RNA, 21 nt, synthetic construct
  source 1..21: mol_type = other RNA
ggtccaagcggacggcggcga

SEQ ID NO: 77207 - RNA, 21 nt, synthetic construct
  source 1..21: mol_type = other RNA
catcgtggtgcagacaggcca

SEQ ID NO: 77208 - RNA, 21 nt, synthetic construct
  source 1..21: mol_type = other RNA
gtacagctcagcgactggaga

SEQ ID NO: 77209 - RNA, 21 nt, synthetic construct
  source 1..21: mol_type = other RNA
agaggtggtgcacgacgagga

SEQ ID NO: 77210 - RNA, 21 nt, synthetic construct
  source 1..21: mol_type = other RNA
catcacctttgatggcgatca

SEQ ID NO: 77211 - RNA, 21 nt, synthetic construct
  source 1..21: mol_type = other RNA
gcgagtacatcttggcccaga

SEQ ID NO: 77212 - RNA, 21 nt, synthetic construct
  source 1..21: mol_type = other RNA
caggcctgccacgacgcggga

SEQ ID NO: 77213 - RNA, 21 nt, synthetic construct
  source 1..21: mol_type = other RNA
tgaggacaggacctacagcta

SEQ ID NO: 77214 - RNA, 21 nt, synthetic construct
  source 1..21: mol_type = other RNA
ggtggactgtgaccgcatgca

SEQ ID NO: 77215 - RNA, 21 nt, synthetic construct
  source 1..21: mol_type = other RNA
tcggccccaggtaccaccaca

SEQ ID NO: 77216 - RNA, 21 nt, synthetic construct
  source 1..21: mol_type = other RNA
acgtccacttcggcctggtga

SEQ ID NO: 77217 - RNA, 21 nt, synthetic construct
  source 1..21: mol_type = other RNA
cgagtagcccggggctgacca

SEQ ID NO: 77218 - RNA, 21 nt, synthetic construct
  source 1..21: mol_type = other RNA
tgacatcccccagatacacaa

SEQ ID NO: 77219 - RNA, 21 nt, synthetic construct
  source 1..21: mol_type = other RNA
caacacgctcagcccttccaa

SEQ ID NO: 77220 - RNA, 21 nt, synthetic construct
  source 1..21: mol_type = other RNA
tcggccacctcgggcatctta

SEQ ID NO: 77221 - RNA, 21 nt, synthetic construct
  source 1..21: mol_type = other RNA
caccgagtcacccccttctca

SEQ ID NO: 77222 - RNA, 21 nt, synthetic construct
  source 1..21: mol_type = other RNA
caccgagtcacccccttctca

SEQ ID NO: 77223 - RNA, 21 nt, synthetic construct
  source 1..21: mol_type = other RNA
gagaccacccacacctccaca

SEQ ID NO: 77224 - RNA, 21 nt, synthetic construct
  source 1..21: mol_type = other RNA
cctgggcaccgcctggaccca

SEQ ID NO: 77225 - RNA, 21 nt, synthetic construct
  source 1..21: mol_type = other RNA
tcggccacctcgggcatctta

SEQ ID NO: 77226 - RNA, 21 nt, synthetic construct
  source 1..21: mol_type = other RNA
caccgagtcacccccttctca

SEQ ID NO: 77227 - RNA, 21 nt, synthetic construct
  source 1..21: mol_type = other RNA
tgtccccctgggggagttgga

SEQ ID NO: 77228 - RNA, 21 nt, synthetic construct
  source 1..21: mol_type = other RNA
gagaccacccacacctccaca

SEQ ID NO: 77229 - RNA, 21 nt, synthetic construct
  source 1..21: mol_type = other RNA
gagaccacccacacctccaca

SEQ ID NO: 77230 - RNA, 21 nt, synthetic construct
  source 1..21: mol_type = other RNA
cggttccacggccaccgccta

SEQ ID NO: 77231 - RNA, 21 nt, synthetic construct
  source 1..21: mol_type = other RNA
gtgacattgaccgcttccaga

SEQ ID NO: 77232 - RNA, 21 nt, synthetic construct
  source 1..21: mol_type = other RNA
cttccagggcgcctgtcccaa

SEQ ID NO: 77233 - RNA, 21 nt, synthetic construct
  source 1..21: mol_type = other RNA
cagtgtcctccgccccgctga

SEQ ID NO: 77234 - RNA, 21 nt, synthetic construct
  source 1..21: mol_type = other RNA
cctgtggccaacgtcacctga

SEQ ID NO: 77235 - RNA, 21 nt, synthetic construct
  source 1..21: mol_type = other RNA
agatccatgcacgctttggga

SEQ ID NO: 77236 - RNA, 21 nt, synthetic construct
  source 1..21: mol_type = other RNA
catggccaagacgtggctgga

SEQ ID NO: 77237 - RNA, 21 nt, synthetic construct
  source 1..21: mol_type = other RNA
gtggcctgtgcgacctcacca

SEQ ID NO: 77238 - RNA, 21 nt, synthetic construct
  source 1..21: mol_type = other RNA
cctgcaactctaggaaccaga

SEQ ID NO: 77239 - RNA, 21 nt, synthetic construct
  source 1..21: mol_type = other RNA
cctgctgccccgagacggtga

SEQ ID NO: 77240 - RNA, 21 nt, synthetic construct
  source 1..21: mol_type = other RNA
gaggagggcgactgctgtcca

SEQ ID NO: 77241 - RNA, 21 nt, synthetic construct
  source 1..21: mol_type = other RNA
cgtgtacctctgtgaggctga

SEQ ID NO: 77242 - RNA, 21 nt, synthetic construct
  source 1..21: mol_type = other RNA
ctgcgcccatggctcccccaa

SEQ ID NO: 77243 - RNA, 21 nt, synthetic construct
  source 1..21: mol_type = other RNA
tgaaaccggccccagaaggga

SEQ ID NO: 77244 - RNA, 21 nt, synthetic construct
  source 1..21: mol_type = other RNA
ctgccacggccggagcgccca

SEQ ID NO: 77245 - RNA, 21 nt, synthetic construct
  source 1..21: mol_type = other RNA
cggagcgcccgcgcagcacga

SEQ ID NO: 77246 - RNA, 21 nt, synthetic construct
  source 1..21: mol_type = other RNA
gccgctggggcagacaggcta

SEQ ID NO: 77247 - RNA, 21 nt, synthetic construct
  source 1..21: mol_type = other RNA
gccgcctgtccatgcctgcta

SEQ ID NO: 77248 - RNA, 21 nt, synthetic construct
  source 1..21: mol_type = other RNA
cggcctgacggacaacgagaa

SEQ ID NO: 77249 - RNA, 21 nt, synthetic construct
  source 1..21: mol_type = other RNA
tggcgatcgctacagctttga

SEQ ID NO: 77250 - RNA, 21 nt, synthetic construct
  source 1..21: mol_type = other RNA
tacaatgggcaccgcccagaa

SEQ ID NO: 77251 - RNA, 21 nt, synthetic construct
  source 1..21: mol_type = other RNA
tggcggggactttgacaccta

SEQ ID NO: 77252 - RNA, 21 nt, synthetic construct
  source 1..21: mol_type = other RNA
tggcggggactttgacaccta

SEQ ID NO: 77253 - RNA, 21 nt, synthetic construct
  source 1..21: mol_type = other RNA
tggcggggactttgacaccta

SEQ ID NO: 77254 - RNA, 21 nt, synthetic construct
  source 1..21: mol_type = other RNA
tggcggggactttgacaccta

SEQ ID NO: 77255 - RNA, 21 nt, synthetic construct
  source 1..21: mol_type = other RNA
ggggactacatcaaggtcaga

SEQ ID NO: 77256 - RNA, 21 nt, synthetic construct
  source 1..21: mol_type = other RNA
gcgtacctggccgcctgcgca

SEQ ID NO: 77257 - RNA, 21 nt, synthetic construct
  source 1..21: mol_type = other RNA
tcgcgcctgaccgatcccaaa

SEQ ID NO: 77258 - RNA, 21 nt, synthetic construct
  source 1..21: mol_type = other RNA
aatactacctgtccccaggga

SEQ ID NO: 77259 - RNA, 21 nt, synthetic construct
  source 1..21: mol_type = other RNA
gaccgaggtcaacatcaccta

SEQ ID NO: 77260 - RNA, 21 nt, synthetic construct
  source 1..21: mol_type = other RNA
ggtcgcaacggccaggtcaga

SEQ ID NO: 77261 - RNA, 21 nt, synthetic construct
  source 1..21: mol_type = other RNA
ctggtgtcggatgggagtgga

SEQ ID NO: 77262 - RNA, 21 nt, synthetic construct
  source 1..21: mol_type = other RNA
atgcggccccatacagcctga

SEQ ID NO: 77263 - RNA, 21 nt, synthetic construct
  source 1..21: mol_type = other RNA
tgtggggacttcaacggccta

SEQ ID NO: 77264 - RNA, 21 nt, synthetic construct
  source 1..21: mol_type = other RNA
cacggacgaggagggcatcta

SEQ ID NO: 77265 - RNA, 21 nt, synthetic construct
  source 1..21: mol_type = other RNA
agctctgcgaggaccactgta

SEQ ID NO: 77266 - RNA, 21 nt, synthetic construct
  source 1..21: mol_type = other RNA
caacaccacccacgggaccta

SEQ ID NO: 77267 - RNA, 21 nt, synthetic construct
  source 1..21: mol_type = other RNA
ctgctacccgaagtgcccaca

SEQ ID NO: 77268 - RNA, 21 nt, synthetic construct
  source 1..21: mol_type = other RNA
tgctacccgaagtgcccacca

SEQ ID NO: 77269 - RNA, 21 nt, synthetic construct
  source 1..21: mol_type = other RNA
gatcgccatctgcggaagcaa

SEQ ID NO: 77270 - RNA, 21 nt, synthetic construct
  source 1..21: mol_type = other RNA
ctcgcccgacaggcacagcca

SEQ ID NO: 77271 - RNA, 21 nt, synthetic construct
  source 1..21: mol_type = other RNA
ccgagtcacccccttctccaa

SEQ ID NO: 77272 - RNA, 21 nt, synthetic construct
  source 1..21: mol_type = other RNA
catccgtgcggccggagggga

SEQ ID NO: 77273 - RNA, 21 nt, synthetic construct
  source 1..21: mol_type = other RNA
ccgagtcacccccttctccaa

SEQ ID NO: 77274 - RNA, 21 nt, synthetic construct
  source 1..21: mol_type = other RNA
catccgtgcggccggagggga

SEQ ID NO: 77275 - RNA, 21 nt, synthetic construct
  source 1..21: mol_type = other RNA
ccgagtcacccccttctccaa

SEQ ID NO: 77276 - RNA, 21 nt, synthetic construct
  source 1..21: mol_type = other RNA
catccgtgcggccggagggga

SEQ ID NO: 77277 - RNA, 21 nt, synthetic construct
  source 1..21: mol_type = other RNA
catccgtgcggccggagggga

SEQ ID NO: 77278 - RNA, 21 nt, synthetic construct
  source 1..21: mol_type = other RNA
gcgttacacccatcccctcca

SEQ ID NO: 77279 - RNA, 21 nt, synthetic construct
  source 1..21: mol_type = other RNA
gtgtgcaacacaaccacctga

SEQ ID NO: 77280 - RNA, 21 nt, synthetic construct
  source 1..21: mol_type = other RNA
cgcacaatgggcgggtgtgca

SEQ ID NO: 77281 - RNA, 21 nt, synthetic construct
  source 1..21: mol_type = other RNA
gacgtcttccgcttccctgga

SEQ ID NO: 77282 - RNA, 21 nt, synthetic construct
  source 1..21: mol_type = other RNA
cgtccagctacgccgaggcca

SEQ ID NO: 77283 - RNA, 21 nt, synthetic construct
  source 1..21: mol_type = other RNA
cttacagccgcactggcctca

SEQ ID NO: 77284 - RNA, 21 nt, synthetic construct
  source 1..21: mol_type = other RNA
agcggggactacatcaaggta

SEQ ID NO: 77285 - RNA, 21 nt, synthetic construct
  source 1..21: mol_type = other RNA
ctgcgtacctggccgcctgca

SEQ ID NO: 77286 - RNA, 21 nt, synthetic construct
  source 1..21: mol_type = other RNA
tgcgtacctggccgcctgcga

SEQ ID NO: 77287 - RNA, 21 nt, synthetic construct
  source 1..21: mol_type = other RNA
ctacagcccgggcacctccta

SEQ ID NO: 77288 - RNA, 21 nt, synthetic construct
  source 1..21: mol_type = other RNA
atgtgccgacagcagcttcaa

SEQ ID NO: 77289 - RNA, 21 nt, synthetic construct
  source 1..21: mol_type = other RNA
cagctcagcgactggagggaa

SEQ ID NO: 77290 - RNA, 21 nt, synthetic construct
  source 1..21: mol_type = other RNA
ctacgtggtggatgcctgcca

SEQ ID NO: 77291 - RNA, 21 nt, synthetic construct
  source 1..21: mol_type = other RNA
acgtggtggatgcctgccaga

SEQ ID NO: 77292 - RNA, 21 nt, synthetic construct
  source 1..21: mol_type = other RNA
ggaagctaagctgcctgggaa

SEQ ID NO: 77293 - RNA, 21 nt, synthetic construct
  source 1..21: mol_type = other RNA
tggtgtcggatgggagtggga

SEQ ID NO: 77294 - RNA, 21 nt, synthetic construct
  source 1..21: mol_type = other RNA
gtaactgcacacccagtggca

SEQ ID NO: 77295 - RNA, 21 nt, synthetic construct
  source 1..21: mol_type = other RNA
acgacaagcccggccctccca

SEQ ID NO: 77296 - RNA, 21 nt, synthetic construct
  source 1..21: mol_type = other RNA
ttgagacgtttgaaaacctga

SEQ ID NO: 77297 - RNA, 21 nt, synthetic construct
  source 1..21: mol_type = other RNA
ctgtgaccgcatgcgggggca

SEQ ID NO: 77298 - RNA, 21 nt, synthetic construct
  source 1..21: mol_type = other RNA
acaagcacccttggtacagca

SEQ ID NO: 77299 - RNA, 21 nt, synthetic construct
  source 1..21: mol_type = other RNA
ccccttgactaacaccaccaa

SEQ ID NO: 77300 - RNA, 21 nt, synthetic construct
  source 1..21: mol_type = other RNA
caccccgacctccaccctgaa

SEQ ID NO: 77301 - RNA, 21 nt, synthetic construct
  source 1..21: mol_type = other RNA
cagcactcgactccagcccta

SEQ ID NO: 77302 - RNA, 21 nt, synthetic construct
  source 1..21: mol_type = other RNA
acatccgtgcggccggaggga

SEQ ID NO: 77303 - RNA, 21 nt, synthetic construct
  source 1..21: mol_type = other RNA
cagcactcgactccagcccta

SEQ ID NO: 77304 - RNA, 21 nt, synthetic construct
  source 1..21: mol_type = other RNA
acatccgtgcggccggaggga

SEQ ID NO: 77305 - RNA, 21 nt, synthetic construct
  source 1..21: mol_type = other RNA
cagcactcgactccagcccta

SEQ ID NO: 77306 - RNA, 21 nt, synthetic construct
  source 1..21: mol_type = other RNA
acatccgtgcggccggaggga

SEQ ID NO: 77307 - RNA, 21 nt, synthetic construct
  source 1..21: mol_type = other RNA
cactgatcaccacggccacta

SEQ ID NO: 77308 - RNA, 21 nt, synthetic construct
  source 1..21: mol_type = other RNA
cagcactcgactccagcccta

SEQ ID NO: 77309 - RNA, 21 nt, synthetic construct
  source 1..21: mol_type = other RNA
acatccgtgcggccggaggga

SEQ ID NO: 77310 - RNA, 21 nt, synthetic construct
  source 1..21: mol_type = other RNA
cccccaaagtggtgaccacca

SEQ ID NO: 77311 - RNA, 21 nt, synthetic construct
  source 1..21: mol_type = other RNA
ctgcctccacggttcccagca

SEQ ID NO: 77312 - RNA, 21 nt, synthetic construct
  source 1..21: mol_type = other RNA
aagcctgtggccaacgtcaca

SEQ ID NO: 77313 - RNA, 21 nt, synthetic construct
  source 1..21: mol_type = other RNA
ttccggggcaactgcacctaa

SEQ ID NO: 77314 - RNA, 21 nt, synthetic construct
  source 1..21: mol_type = other RNA
agcgaccactgcaggggccga

SEQ ID NO: 77315 - RNA, 21 nt, synthetic construct
  source 1..21: mol_type = other RNA
ctggaggcttacgcagagcta

SEQ ID NO: 77316 - RNA, 21 nt, synthetic construct
  source 1..21: mol_type = other RNA
tggaggcttacgcagagctca

SEQ ID NO: 77317 - RNA, 21 nt, synthetic construct
  source 1..21: mol_type = other RNA
gagacggtgtgcgtgtgcaaa

SEQ ID NO: 77318 - RNA, 21 nt, synthetic construct
  source 1..21: mol_type = other RNA
gcatcaacacgaccatcctga

SEQ ID NO: 77319 - RNA, 21 nt, synthetic construct
  source 1..21: mol_type = other RNA
cgaggtcaacatcaccttcta

SEQ ID NO: 77320 - RNA, 21 nt, synthetic construct
  source 1..21: mol_type = other RNA
cccgtccccccacccgtgcca

SEQ ID NO: 77321 - RNA, 21 nt, synthetic construct
  source 1..21: mol_type = other RNA
cgtgccagcccccaggatgga

SEQ ID NO: 77322 - RNA, 21 nt, synthetic construct
  source 1..21: mol_type = other RNA
ggcggccatgctcgtggtgca

SEQ ID NO: 77323 - RNA, 21 nt, synthetic construct
  source 1..21: mol_type = other RNA
gccgagctgggagaatgcaga

SEQ ID NO: 77324 - RNA, 21 nt, synthetic construct
  source 1..21: mol_type = other RNA
agaatgcagggcacaccatga

SEQ ID NO: 77325 - RNA, 21 nt, synthetic construct
  source 1..21: mol_type = other RNA
gtgccccgacgtcctcgccca

SEQ ID NO: 77326 - RNA, 21 nt, synthetic construct
  source 1..21: mol_type = other RNA
gagccccctgaacccggcgca

SEQ ID NO: 77327 - RNA, 21 nt, synthetic construct
  source 1..21: mol_type = other RNA
gcgcacaatgggcgggtgtga

SEQ ID NO: 77328 - RNA, 21 nt, synthetic construct
  source 1..21: mol_type = other RNA
gcacaatgggcgggtgtgcaa

SEQ ID NO: 77329 - RNA, 21 nt, synthetic construct
  source 1..21: mol_type = other RNA
acgtcttccgcttccctggca

SEQ ID NO: 77330 - RNA, 21 nt, synthetic construct
  source 1..21: mol_type = other RNA
cgtcttccgcttccctggcca

SEQ ID NO: 77331 - RNA, 21 nt, synthetic construct
  source 1..21: mol_type = other RNA
acgtgttctctgagcactgca

SEQ ID NO: 77332 - RNA, 21 nt, synthetic construct
  source 1..21: mol_type = other RNA
tgagcactgccgcgccgccta

SEQ ID NO: 77333 - RNA, 21 nt, synthetic construct
  source 1..21: mol_type = other RNA
gcactgccgcgccgcctacga

SEQ ID NO: 77334 - RNA, 21 nt, synthetic construct
  source 1..21: mol_type = other RNA
aacggctccgtcctcatcaaa

SEQ ID NO: 77335 - RNA, 21 nt, synthetic construct
  source 1..21: mol_type = other RNA
ctccgtcctcatcaatgggca

SEQ ID NO: 77336 - RNA, 21 nt, synthetic construct
  source 1..21: mol_type = other RNA
ctcatcaatgggcagcgggaa

SEQ ID NO: 77337 - RNA, 21 nt, synthetic construct
  source 1..21: mol_type = other RNA
ggtgctgacattcctgtggaa

SEQ ID NO: 77338 - RNA, 21 nt, synthetic construct
  source 1..21: mol_type = other RNA
attcctgtggaacggagagga

SEQ ID NO: 77339 - RNA, 21 nt, synthetic construct
  source 1..21: mol_type = other RNA
ccggacccgctgcccttgcca

SEQ ID NO: 77340 - RNA, 21 nt, synthetic construct
  source 1..21: mol_type = other RNA
catctgccaccgcaccctgca

SEQ ID NO: 77341 - RNA, 21 nt, synthetic construct
  source 1..21: mol_type = other RNA
cctggccgcctgcgcccagga

SEQ ID NO: 77342 - RNA, 21 nt, synthetic construct
  source 1..21: mol_type = other RNA
cagccgcggaactggaggtga

SEQ ID NO: 77343 - RNA, 21 nt, synthetic construct
  source 1..21: mol_type = other RNA
cctgcacggacacctgctcca

SEQ ID NO: 77344 - RNA, 21 nt, synthetic construct
  source 1..21: mol_type = other RNA
caacccccagcgcgcgcagca

SEQ ID NO: 77345 - RNA, 21 nt, synthetic construct
  source 1..21: mol_type = other RNA
tgtgtggacggctgcttctga

SEQ ID NO: 77346 - RNA, 21 nt, synthetic construct
  source 1..21: mol_type = other RNA
cacggtgctggatgacatcaa

SEQ ID NO: 77347 - RNA, 21 nt, synthetic construct
  source 1..21: mol_type = other RNA
ggtgctggatgacatcacgca

SEQ ID NO: 77348 - RNA, 21 nt, synthetic construct
  source 1..21: mol_type = other RNA
ccgggcacctccttcaacaca

SEQ ID NO: 77349 - RNA, 21 nt, synthetic construct
  source 1..21: mol_type = other RNA
ctgtgcagggcggggcccaca

SEQ ID NO: 77350 - RNA, 21 nt, synthetic construct
  source 1..21: mol_type = other RNA
cacatctccacctatgatgaa

SEQ ID NO: 77351 - RNA, 21 nt, synthetic construct
  source 1..21: mol_type = other RNA
cgacagcagcttcaccgtgca

SEQ ID NO: 77352 - RNA, 21 nt, synthetic construct
  source 1..21: mol_type = other RNA
ggcctgacggacaacgagaaa

SEQ ID NO: 77353 - RNA, 21 nt, synthetic construct
  source 1..21: mol_type = other RNA
gacaacgagaactgcctgaaa

SEQ ID NO: 77354 - RNA, 21 nt, synthetic construct
  source 1..21: mol_type = other RNA
tcgagcttcttcatcgtggta

SEQ ID NO: 77355 - RNA, 21 nt, synthetic construct
  source 1..21: mol_type = other RNA
ctggtgccactcatgcaggta

SEQ ID NO: 77356 - RNA, 21 nt, synthetic construct
  source 1..21: mol_type = other RNA
ggccctcagcggggtggtgga

SEQ ID NO: 77357 - RNA, 21 nt, synthetic construct
  source 1..21: mol_type = other RNA
cacgggcgcagccttcgccaa

SEQ ID NO: 77358 - RNA, 21 nt, synthetic construct
  source 1..21: mol_type = other RNA
cagtgccttctcgcgctgcca

SEQ ID NO: 77359 - RNA, 21 nt, synthetic construct
  source 1..21: mol_type = other RNA
agtgccttctcgcgctgccaa

SEQ ID NO: 77360 - RNA, 21 nt, synthetic construct
  source 1..21: mol_type = other RNA
gccactccatcatcaacccca

SEQ ID NO: 77361 - RNA, 21 nt, synthetic construct
  source 1..21: mol_type = other RNA
ccactccatcatcaaccccaa

SEQ ID NO: 77362 - RNA, 21 nt, synthetic construct
  source 1..21: mol_type = other RNA
tacgtggtggatgcctgccaa

SEQ ID NO: 77363 - RNA, 21 nt, synthetic construct
  source 1..21: mol_type = other RNA
cgtggtggatgcctgccagca

SEQ ID NO: 77364 - RNA, 21 nt, synthetic construct
  source 1..21: mol_type = other RNA
gtggtggatgcctgccagcca

SEQ ID NO: 77365 - RNA, 21 nt, synthetic construct
  source 1..21: mol_type = other RNA
gcacctgccccgcgggcacca

SEQ ID NO: 77366 - RNA, 21 nt, synthetic construct
  source 1..21: mol_type = other RNA
cacctgccccgcgggcaccta

SEQ ID NO: 77367 - RNA, 21 nt, synthetic construct
  source 1..21: mol_type = other RNA
cgcgggcaccttcctcaatga

SEQ ID NO: 77368 - RNA, 21 nt, synthetic construct
  source 1..21: mol_type = other RNA
gggaagctaagctgcctggga

SEQ ID NO: 77369 - RNA, 21 nt, synthetic construct
  source 1..21: mol_type = other RNA
cccccatggtgtacctggaca

SEQ ID NO: 77370 - RNA, 21 nt, synthetic construct
  source 1..21: mol_type = other RNA
cccatggtgtacctggactga

SEQ ID NO: 77371 - RNA, 21 nt, synthetic construct
  source 1..21: mol_type = other RNA
catggtgtacctggactgcaa

SEQ ID NO: 77372 - RNA, 21 nt, synthetic construct
  source 1..21: mol_type = other RNA
aacagctcggcgggcacccca

SEQ ID NO: 77373 - RNA, 21 nt, synthetic construct
  source 1..21: mol_type = other RNA
cggcgggcacccctggggcca

SEQ ID NO: 77374 - RNA, 21 nt, synthetic construct
  source 1..21: mol_type = other RNA
attgccgaggaggactgccca

SEQ ID NO: 77375 - RNA, 21 nt, synthetic construct
  source 1..21: mol_type = other RNA
tgccgaggaggactgccccta

SEQ ID NO: 77376 - RNA, 21 nt, synthetic construct
  source 1..21: mol_type = other RNA
acctacaagcctggagagaca

SEQ ID NO: 77377 - RNA, 21 nt, synthetic construct
  source 1..21: mol_type = other RNA
tcatcacctttgatggcgata

SEQ ID NO: 77378 - RNA, 21 nt, synthetic construct
  source 1..21: mol_type = other RNA
ttgaaggcagctgcgagtaca

SEQ ID NO: 77379 - RNA, 21 nt, synthetic construct
  source 1..21: mol_type = other RNA
gaaggcagctgcgagtacata

SEQ ID NO: 77380 - RNA, 21 nt, synthetic construct
  source 1..21: mol_type = other RNA
cccaggactactgtggggaca

SEQ ID NO: 77381 - RNA, 21 nt, synthetic construct
  source 1..21: mol_type = other RNA
ctgtggggacaacaccaccca

SEQ ID NO: 77382 - RNA, 21 nt, synthetic construct
  source 1..21: mol_type = other RNA
tgtggggacaacaccacccaa

SEQ ID NO: 77383 - RNA, 21 nt, synthetic construct
  source 1..21: mol_type = other RNA
tggggacaacaccacccacga

SEQ ID NO: 77384 - RNA, 21 nt, synthetic construct
  source 1..21: mol_type = other RNA
ggccgggtggggacccaccca

SEQ ID NO: 77385 - RNA, 21 nt, synthetic construct
  source 1..21: mol_type = other RNA
agacccacgggatggccgtga

SEQ ID NO: 77386 - RNA, 21 nt, synthetic construct
  source 1..21: mol_type = other RNA
gaagaccagcgtgttcatcca

SEQ ID NO: 77387 - RNA, 21 nt, synthetic construct
  source 1..21: mol_type = other RNA
cgtggtgggggacgcactgga

SEQ ID NO: 77388 - RNA, 21 nt, synthetic construct
  source 1..21: mol_type = other RNA
gccctggcacccaaggaccca

SEQ ID NO: 77389 - RNA, 21 nt, synthetic construct
  source 1..21: mol_type = other RNA
aacgacgcgtgtgcctgcgaa

SEQ ID NO: 77390 - RNA, 21 nt, synthetic construct
  source 1..21: mol_type = other RNA
gtggctgcctacgcccaggca

SEQ ID NO: 77391 - RNA, 21 nt, synthetic construct
  source 1..21: mol_type = other RNA
aggcctgccacgacgcgggca

SEQ ID NO: 77392 - RNA, 21 nt, synthetic construct
  source 1..21: mol_type = other RNA
ggcctgccacgacgcgggcca

SEQ ID NO: 77393 - RNA, 21 nt, synthetic construct
  source 1..21: mol_type = other RNA
gccccttgttctgtgacttca

SEQ ID NO: 77394 - RNA, 21 nt, synthetic construct
  source 1..21: mol_type = other RNA
aactgcacacccagtggcata

SEQ ID NO: 77395 - RNA, 21 nt, synthetic construct
  source 1..21: mol_type = other RNA
cctgcttgatcgccatctgca

SEQ ID NO: 77396 - RNA, 21 nt, synthetic construct
  source 1..21: mol_type = other RNA
gaagcaacggcaccatcatca

SEQ ID NO: 77397 - RNA, 21 nt, synthetic construct
  source 1..21: mol_type = other RNA
tggcatgtcctggaactccaa

SEQ ID NO: 77398 - RNA, 21 nt, synthetic construct
  source 1..21: mol_type = other RNA
caccttcaccaccgcctggga

SEQ ID NO: 77399 - RNA, 21 nt, synthetic construct
  source 1..21: mol_type = other RNA
ccggtctccaccgtgtgtgta

SEQ ID NO: 77400 - RNA, 21 nt, synthetic construct
  source 1..21: mol_type = other RNA
cgacatgccgctggaggagca

SEQ ID NO: 77401 - RNA, 21 nt, synthetic construct
  source 1..21: mol_type = other RNA
gacatgccgctggaggagcta

SEQ ID NO: 77402 - RNA, 21 nt, synthetic construct
  source 1..21: mol_type = other RNA
cgcatgcgggggctgatgtga

SEQ ID NO: 77403 - RNA, 21 nt, synthetic construct
  source 1..21: mol_type = other RNA
tacgagctgcgggttctctga

SEQ ID NO: 77404 - RNA, 21 nt, synthetic construct
  source 1..21: mol_type = other RNA
taccccaacccagaccacaga

SEQ ID NO: 77405 - RNA, 21 nt, synthetic construct
  source 1..21: mol_type = other RNA
gtcgacggcggccctcaccta

SEQ ID NO: 77406 - RNA, 21 nt, synthetic construct
  source 1..21: mol_type = other RNA
cggtcaccccctcggccccaa

SEQ ID NO: 77407 - RNA, 21 nt, synthetic construct
  source 1..21: mol_type = other RNA
ggtcaccccctcggccccaga

SEQ ID NO: 77408 - RNA, 21 nt, synthetic construct
  source 1..21: mol_type = other RNA
ccgagagcttccccaactgga

SEQ ID NO: 77409 - RNA, 21 nt, synthetic construct
  source 1..21: mol_type = other RNA
agagcttccccaactggacca

SEQ ID NO: 77410 - RNA, 21 nt, synthetic construct
  source 1..21: mol_type = other RNA
aactggaccctggcacaggta

SEQ ID NO: 77411 - RNA, 21 nt, synthetic construct
  source 1..21: mol_type = other RNA
gcacaggtggggcagaaggta

SEQ ID NO: 77412 - RNA, 21 nt, synthetic construct
  source 1..21: mol_type = other RNA
cacaggtggggcagaaggtga

SEQ ID NO: 77413 - RNA, 21 nt, synthetic construct
  source 1..21: mol_type = other RNA
acttcggcctggtgtgcagga

SEQ ID NO: 77414 - RNA, 21 nt, synthetic construct
  source 1..21: mol_type = other RNA
ggagcaggagggcgtcttcaa

SEQ ID NO: 77415 - RNA, 21 nt, synthetic construct
  source 1..21: mol_type = other RNA
agtagcccggggctgaccaga

SEQ ID NO: 77416 - RNA, 21 nt, synthetic construct
  source 1..21: mol_type = other RNA
cacaagcacccttggtacaga

SEQ ID NO: 77417 - RNA, 21 nt, synthetic construct
  source 1..21: mol_type = other RNA
caagcacccttggtacagcca

SEQ ID NO: 77418 - RNA, 21 nt, synthetic construct
  source 1..21: mol_type = other RNA
ggaggccccacgacgcctgca

SEQ ID NO: 77419 - RNA, 21 nt, synthetic construct
  source 1..21: mol_type = other RNA
catggcgcccctcacagccaa

SEQ ID NO: 77420 - RNA, 21 nt, synthetic construct
  source 1..21: mol_type = other RNA
tcacagccacccacgctggca

SEQ ID NO: 77421 - RNA, 21 nt, synthetic construct
  source 1..21: mol_type = other RNA
tggccccaacaacaatggcaa

SEQ ID NO: 77422 - RNA, 21 nt, synthetic construct
  source 1..21: mol_type = other RNA
acaacaatggcaacctccaga

SEQ ID NO: 77423 - RNA, 21 nt, synthetic construct
  source 1..21: mol_type = other RNA
cgcttccaaagagccgctgaa

SEQ ID NO: 77424 - RNA, 21 nt, synthetic construct
  source 1..21: mol_type = other RNA
tgaccacgagcctggcgccaa

SEQ ID NO: 77425 - RNA, 21 nt, synthetic construct
  source 1..21: mol_type = other RNA
cacgagcgagctgtccaccta

SEQ ID NO: 77426 - RNA, 21 nt, synthetic construct
  source 1..21: mol_type = other RNA
cgagctgtccacctctcagga

SEQ ID NO: 77427 - RNA, 21 nt, synthetic construct
  source 1..21: mol_type = other RNA
ccgagaccagcacgcccagga

SEQ ID NO: 77428 - RNA, 21 nt, synthetic construct
  source 1..21: mol_type = other RNA
cagcacgcccaggacagagaa

SEQ ID NO: 77429 - RNA, 21 nt, synthetic construct
  source 1..21: mol_type = other RNA
agcacgcccaggacagagaca

SEQ ID NO: 77430 - RNA, 21 nt, synthetic construct
  source 1..21: mol_type = other RNA
gcgtccactggatccacggca

SEQ ID NO: 77431 - RNA, 21 nt, synthetic construct
  source 1..21: mol_type = other RNA
acccacagctaccagcgttaa

SEQ ID NO: 77432 - RNA, 21 nt, synthetic construct
  source 1..21: mol_type = other RNA
cccacagctaccagcgttaca

SEQ ID NO: 77433 - RNA, 21 nt, synthetic construct
  source 1..21: mol_type = other RNA
ccaccacaactggggccacca

SEQ ID NO: 77434 - RNA, 21 nt, synthetic construct
  source 1..21: mol_type = other RNA
gtgccaactaccacaaccaca

SEQ ID NO: 77435 - RNA, 21 nt, synthetic construct
  source 1..21: mol_type = other RNA
gggcttcacagccacccccta

SEQ ID NO: 77436 - RNA, 21 nt, synthetic construct
  source 1..21: mol_type = other RNA
gcactcacgcctccagtgtga

SEQ ID NO: 77437 - RNA, 21 nt, synthetic construct
  source 1..21: mol_type = other RNA
cactcacgcctccagtgtgga

SEQ ID NO: 77438 - RNA, 21 nt, synthetic construct
  source 1..21: mol_type = other RNA
cagtgctgaccaccaccacca

SEQ ID NO: 77439 - RNA, 21 nt, synthetic construct
  source 1..21: mol_type = other RNA
tggttctatggcaacacccta

SEQ ID NO: 77440 - RNA, 21 nt, synthetic construct
  source 1..21: mol_type = other RNA
cgatcacggccaccggctcca

SEQ ID NO: 77441 - RNA, 21 nt, synthetic construct
  source 1..21: mol_type = other RNA
agtgctgaccaccaccgccaa

SEQ ID NO: 77442 - RNA, 21 nt, synthetic construct
  source 1..21: mol_type = other RNA
caacacagtgactccctccta

SEQ ID NO: 77443 - RNA, 21 nt, synthetic construct
  source 1..21: mol_type = other RNA
ggaccacccacacacccccaa

SEQ ID NO: 77444 - RNA, 21 nt, synthetic construct
  source 1..21: mol_type = other RNA
cagtgccgaacaccatggcca

SEQ ID NO: 77445 - RNA, 21 nt, synthetic construct
  source 1..21: mol_type = other RNA
cagcagtccccacacggtgca

SEQ ID NO: 77446 - RNA, 21 nt, synthetic construct
  source 1..21: mol_type = other RNA
cacggtgcgcacagcctggaa

SEQ ID NO: 77447 - RNA, 21 nt, synthetic construct
  source 1..21: mol_type = other RNA
gcacagcctggacttcggcca

SEQ ID NO: 77448 - RNA, 21 nt, synthetic construct
  source 1..21: mol_type = other RNA
cggccacctcgggcatcttga

SEQ ID NO: 77449 - RNA, 21 nt, synthetic construct
  source 1..21: mol_type = other RNA
catcttgggcaccacccacaa

SEQ ID NO: 77450 - RNA, 21 nt, synthetic construct
  source 1..21: mol_type = other RNA
tcttgggcaccacccacatca

SEQ ID NO: 77451 - RNA, 21 nt, synthetic construct
  source 1..21: mol_type = other RNA
gagccttccacggtgacttca

SEQ ID NO: 77452 - RNA, 21 nt, synthetic construct
  source 1..21: mol_type = other RNA
tcaccctagcagcagaaccaa

SEQ ID NO: 77453 - RNA, 21 nt, synthetic construct
  source 1..21: mol_type = other RNA
cgagtcacccccttctccaga

SEQ ID NO: 77454 - RNA, 21 nt, synthetic construct
  source 1..21: mol_type = other RNA
ggactttgacacctactccaa

SEQ ID NO: 77455 - RNA, 21 nt, synthetic construct
  source 1..21: mol_type = other RNA
gactttgacacctactccaaa

SEQ ID NO: 77456 - RNA, 21 nt, synthetic construct
  source 1..21: mol_type = other RNA
actttgacacctactccaaca

SEQ ID NO: 77457 - RNA, 21 nt, synthetic construct
  source 1..21: mol_type = other RNA
tttgacacctactccaacata

SEQ ID NO: 77458 - RNA, 21 nt, synthetic construct
  source 1..21: mol_type = other RNA
ccgtgcggccggaggggccga

SEQ ID NO: 77459 - RNA, 21 nt, synthetic construct
  source 1..21: mol_type = other RNA
ctacggccatgccctcctcca

SEQ ID NO: 77460 - RNA, 21 nt, synthetic construct
  source 1..21: mol_type = other RNA
gagtccactggatccacggca

SEQ ID NO: 77461 - RNA, 21 nt, synthetic construct
  source 1..21: mol_type = other RNA
cagccaccgtgacggtgccca

SEQ ID NO: 77462 - RNA, 21 nt, synthetic construct
  source 1..21: mol_type = other RNA
agccaccgtgacggtgcccaa

SEQ ID NO: 77463 - RNA, 21 nt, synthetic construct
  source 1..21: mol_type = other RNA
tccactccagagactgtccaa

SEQ ID NO: 77464 - RNA, 21 nt, synthetic construct
  source 1..21: mol_type = other RNA
caaccggggccaccggctcta

SEQ ID NO: 77465 - RNA, 21 nt, synthetic construct
  source 1..21: mol_type = other RNA
agtgctgactaccacaaccaa

SEQ ID NO: 77466 - RNA, 21 nt, synthetic construct
  source 1..21: mol_type = other RNA
gggcttcacagccacccccta

SEQ ID NO: 77467 - RNA, 21 nt, synthetic construct
  source 1..21: mol_type = other RNA
gttccacggtgaccccctcca

SEQ ID NO: 77468 - RNA, 21 nt, synthetic construct
  source 1..21: mol_type = other RNA
cagtgctgaccaccaccacca

SEQ ID NO: 77469 - RNA, 21 nt, synthetic construct
  source 1..21: mol_type = other RNA
tggttctatggcaacacccta

SEQ ID NO: 77470 - RNA, 21 nt, synthetic construct
  source 1..21: mol_type = other RNA
cgatcacggccaccggctcca

SEQ ID NO: 77471 - RNA, 21 nt, synthetic construct
  source 1..21: mol_type = other RNA
agtgctgaccaccaccgccaa

SEQ ID NO: 77472 - RNA, 21 nt, synthetic construct
  source 1..21: mol_type = other RNA
ggaccacccacacacccccaa

SEQ ID NO: 77473 - RNA, 21 nt, synthetic construct
  source 1..21: mol_type = other RNA
cagcagtccccacacggtgca

SEQ ID NO: 77474 - RNA, 21 nt, synthetic construct
  source 1..21: mol_type = other RNA
cacggtgcgcacagcctggaa

SEQ ID NO: 77475 - RNA, 21 nt, synthetic construct
  source 1..21: mol_type = other RNA
gcacagcctggacttcggcca

SEQ ID NO: 77476 - RNA, 21 nt, synthetic construct
  source 1..21: mol_type = other RNA
cttcggccacctcaggcacca

SEQ ID NO: 77477 - RNA, 21 nt, synthetic construct
  source 1..21: mol_type = other RNA
ccttgggcaccacccacatca

SEQ ID NO: 77478 - RNA, 21 nt, synthetic construct
  source 1..21: mol_type = other RNA
cgagtcacccccttctccaga

SEQ ID NO: 77479 - RNA, 21 nt, synthetic construct
  source 1..21: mol_type = other RNA
ccaccccgggccacaccagga

SEQ ID NO: 77480 - RNA, 21 nt, synthetic construct
  source 1..21: mol_type = other RNA
caccccgggccacaccaggga

SEQ ID NO: 77481 - RNA, 21 nt, synthetic construct
  source 1..21: mol_type = other RNA
ggactttgacacctactccaa

SEQ ID NO: 77482 - RNA, 21 nt, synthetic construct
  source 1..21: mol_type = other RNA
gactttgacacctactccaaa

SEQ ID NO: 77483 - RNA, 21 nt, synthetic construct
  source 1..21: mol_type = other RNA
actttgacacctactccaaca

SEQ ID NO: 77484 - RNA, 21 nt, synthetic construct
  source 1..21: mol_type = other RNA
tttgacacctactccaacata

SEQ ID NO: 77485 - RNA, 21 nt, synthetic construct
  source 1..21: mol_type = other RNA
ccgtgcggccggaggggccga

SEQ ID NO: 77486 - RNA, 21 nt, synthetic construct
  source 1..21: mol_type = other RNA
ccactccagggacgacctgga

SEQ ID NO: 77487 - RNA, 21 nt, synthetic construct
  source 1..21: mol_type = other RNA
gcaaccactggatccacggca

SEQ ID NO: 77488 - RNA, 21 nt, synthetic construct
  source 1..21: mol_type = other RNA
caaccactggatccacggcca

SEQ ID NO: 77489 - RNA, 21 nt, synthetic construct
  source 1..21: mol_type = other RNA
accacccttccagtgctgaca

SEQ ID NO: 77490 - RNA, 21 nt, synthetic construct
  source 1..21: mol_type = other RNA
ttacacccatcccctccttca

SEQ ID NO: 77491 - RNA, 21 nt, synthetic construct
  source 1..21: mol_type = other RNA
gggaccaccgggaccctccca

SEQ ID NO: 77492 - RNA, 21 nt, synthetic construct
  source 1..21: mol_type = other RNA
gtccacaatccacccctccta

SEQ ID NO: 77493 - RNA, 21 nt, synthetic construct
  source 1..21: mol_type = other RNA
cactccggagaccacccacaa

SEQ ID NO: 77494 - RNA, 21 nt, synthetic construct
  source 1..21: mol_type = other RNA
ggagaccacccacacctccaa

SEQ ID NO: 77495 - RNA, 21 nt, synthetic construct
  source 1..21: mol_type = other RNA
acgacaagggccaccagttca

SEQ ID NO: 77496 - RNA, 21 nt, synthetic construct
  source 1..21: mol_type = other RNA
cgacaagggccaccagttcca

SEQ ID NO: 77497 - RNA, 21 nt, synthetic construct
  source 1..21: mol_type = other RNA
cagccactggccccacggcca

SEQ ID NO: 77498 - RNA, 21 nt, synthetic construct
  source 1..21: mol_type = other RNA
tggatcctcacagagcccaga

SEQ ID NO: 77499 - RNA, 21 nt, synthetic construct
  source 1..21: mol_type = other RNA
agagcccagcactacagccaa

SEQ ID NO: 77500 - RNA, 21 nt, synthetic construct
  source 1..21: mol_type = other RNA
cagccaccgtgacggtgccca

SEQ ID NO: 77501 - RNA, 21 nt, synthetic construct
  source 1..21: mol_type = other RNA
agccaccgtgacggtgcccaa

SEQ ID NO: 77502 - RNA, 21 nt, synthetic construct
  source 1..21: mol_type = other RNA
tccacccgggcaactgctgga

SEQ ID NO: 77503 - RNA, 21 nt, synthetic construct
  source 1..21: mol_type = other RNA
tgctggcaccctcaaagtgca

SEQ ID NO: 77504 - RNA, 21 nt, synthetic construct
  source 1..21: mol_type = other RNA
acccacagctaccagcgttaa

SEQ ID NO: 77505 - RNA, 21 nt, synthetic construct
  source 1..21: mol_type = other RNA
cccacagctaccagcgttaca

SEQ ID NO: 77506 - RNA, 21 nt, synthetic construct
  source 1..21: mol_type = other RNA
tctactccagagactgtccaa

SEQ ID NO: 77507 - RNA, 21 nt, synthetic construct
  source 1..21: mol_type = other RNA
gcttaccaccacgaccaccaa

SEQ ID NO: 77508 - RNA, 21 nt, synthetic construct
  source 1..21: mol_type = other RNA
gtgccgactaccacaaccaca

SEQ ID NO: 77509 - RNA, 21 nt, synthetic construct
  source 1..21: mol_type = other RNA
gggcttcacagccacccccta

SEQ ID NO: 77510 - RNA, 21 nt, synthetic construct
  source 1..21: mol_type = other RNA
gcactcacgcctccagtgtga

SEQ ID NO: 77511 - RNA, 21 nt, synthetic construct
  source 1..21: mol_type = other RNA
cactcacgcctccagtgtgga

SEQ ID NO: 77512 - RNA, 21 nt, synthetic construct
  source 1..21: mol_type = other RNA
cagtgctgaccaccaccacca

SEQ ID NO: 77513 - RNA, 21 nt, synthetic construct
  source 1..21: mol_type = other RNA
tggttctatggcaacacccta

SEQ ID NO: 77514 - RNA, 21 nt, synthetic construct
  source 1..21: mol_type = other RNA
agtgctgaccaccaccgccaa

SEQ ID NO: 77515 - RNA, 21 nt, synthetic construct
  source 1..21: mol_type = other RNA
ggaccacccacacacccccaa

SEQ ID NO: 77516 - RNA, 21 nt, synthetic construct
  source 1..21: mol_type = other RNA
cagcagtccccacacggtgca

SEQ ID NO: 77517 - RNA, 21 nt, synthetic construct
  source 1..21: mol_type = other RNA
cacggtgcgcacagcctggaa

SEQ ID NO: 77518 - RNA, 21 nt, synthetic construct
  source 1..21: mol_type = other RNA
gcacagcctggacttcggcca

SEQ ID NO: 77519 - RNA, 21 nt, synthetic construct
  source 1..21: mol_type = other RNA
cggccacctcgggcatcttga

SEQ ID NO: 77520 - RNA, 21 nt, synthetic construct
  source 1..21: mol_type = other RNA
catcttgggcaccacccacaa

SEQ ID NO: 77521 - RNA, 21 nt, synthetic construct
  source 1..21: mol_type = other RNA
tcttgggcaccacccacatca

SEQ ID NO: 77522 - RNA, 21 nt, synthetic construct
  source 1..21: mol_type = other RNA
gagccttccacggtgacttca

SEQ ID NO: 77523 - RNA, 21 nt, synthetic construct
  source 1..21: mol_type = other RNA
agcaaccaccagtaccaccca

SEQ ID NO: 77524 - RNA, 21 nt, synthetic construct
  source 1..21: mol_type = other RNA
cgagtcacccccttctccaga

SEQ ID NO: 77525 - RNA, 21 nt, synthetic construct
  source 1..21: mol_type = other RNA
ccaccccgggccacaccagga

SEQ ID NO: 77526 - RNA, 21 nt, synthetic construct
  source 1..21: mol_type = other RNA
caccccgggccacaccaggga

SEQ ID NO: 77527 - RNA, 21 nt, synthetic construct
  source 1..21: mol_type = other RNA
ggactttgacacctactccaa

SEQ ID NO: 77528 - RNA, 21 nt, synthetic construct
  source 1..21: mol_type = other RNA
gactttgacacctactccaaa

SEQ ID NO: 77529 - RNA, 21 nt, synthetic construct
  source 1..21: mol_type = other RNA
actttgacacctactccaaca

SEQ ID NO: 77530 - RNA, 21 nt, synthetic construct
  source 1..21: mol_type = other RNA
tttgacacctactccaacata

SEQ ID NO: 77531 - RNA, 21 nt, synthetic construct
  source 1..21: mol_type = other RNA
aggggcagtctgtgagcagca

SEQ ID NO: 77532 - RNA, 21 nt, synthetic construct
  source 1..21: mol_type = other RNA
ggggcagtctgtgagcagcca

SEQ ID NO: 77533 - RNA, 21 nt, synthetic construct
  source 1..21: mol_type = other RNA
gagtccactggatccacggca

SEQ ID NO: 77534 - RNA, 21 nt, synthetic construct
  source 1..21: mol_type = other RNA
cagccaccgtgacggtgccca

SEQ ID NO: 77535 - RNA, 21 nt, synthetic construct
  source 1..21: mol_type = other RNA
agccaccgtgacggtgcccaa

SEQ ID NO: 77536 - RNA, 21 nt, synthetic construct
  source 1..21: mol_type = other RNA
gtgccgactaccacaaccaca

SEQ ID NO: 77537 - RNA, 21 nt, synthetic construct
  source 1..21: mol_type = other RNA
cacgggcttcacagtcaccca

SEQ ID NO: 77538 - RNA, 21 nt, synthetic construct
  source 1..21: mol_type = other RNA
cgggcttcacagtcaccccca

SEQ ID NO: 77539 - RNA, 21 nt, synthetic construct
  source 1..21: mol_type = other RNA
cctcctccgtcccggggacca

SEQ ID NO: 77540 - RNA, 21 nt, synthetic construct
  source 1..21: mol_type = other RNA
ctcctccgtcccggggaccaa

SEQ ID NO: 77541 - RNA, 21 nt, synthetic construct
  source 1..21: mol_type = other RNA
cctccgtcccggggaccacca

SEQ ID NO: 77542 - RNA, 21 nt, synthetic construct
  source 1..21: mol_type = other RNA
cagtgctgaccaccaccacca

SEQ ID NO: 77543 - RNA, 21 nt, synthetic construct
  source 1..21: mol_type = other RNA
tggttctatggcaacacccta

SEQ ID NO: 77544 - RNA, 21 nt, synthetic construct
  source 1..21: mol_type = other RNA
tcactgatcaccacggccaca

SEQ ID NO: 77545 - RNA, 21 nt, synthetic construct
  source 1..21: mol_type = other RNA
cgatcacggccaccggctcca

SEQ ID NO: 77546 - RNA, 21 nt, synthetic construct
  source 1..21: mol_type = other RNA
agtgctgaccaccaccgccaa

SEQ ID NO: 77547 - RNA, 21 nt, synthetic construct
  source 1..21: mol_type = other RNA
ggaccacccacacacccccaa

SEQ ID NO: 77548 - RNA, 21 nt, synthetic construct
  source 1..21: mol_type = other RNA
cagcagtccccacacggtgca

SEQ ID NO: 77549 - RNA, 21 nt, synthetic construct
  source 1..21: mol_type = other RNA
cacggtgcgcacagcctggaa

SEQ ID NO: 77550 - RNA, 21 nt, synthetic construct
  source 1..21: mol_type = other RNA
gcacagcctggacttcggcca

SEQ ID NO: 77551 - RNA, 21 nt, synthetic construct
  source 1..21: mol_type = other RNA
cttcggccacctcaggcacca

SEQ ID NO: 77552 - RNA, 21 nt, synthetic construct
  source 1..21: mol_type = other RNA
ccttgggcaccacccacatca

SEQ ID NO: 77553 - RNA, 21 nt, synthetic construct
  source 1..21: mol_type = other RNA
accgagtcacccccttcccca

SEQ ID NO: 77554 - RNA, 21 nt, synthetic construct
  source 1..21: mol_type = other RNA
ggactttgacacctactccaa

SEQ ID NO: 77555 - RNA, 21 nt, synthetic construct
  source 1..21: mol_type = other RNA
gactttgacacctactccaaa

SEQ ID NO: 77556 - RNA, 21 nt, synthetic construct
  source 1..21: mol_type = other RNA
actttgacacctactccaaca

SEQ ID NO: 77557 - RNA, 21 nt, synthetic construct
  source 1..21: mol_type = other RNA
tttgacacctactccaacata

SEQ ID NO: 77558 - RNA, 21 nt, synthetic construct
  source 1..21: mol_type = other RNA
ccgtgcggccggaggggccga

SEQ ID NO: 77559 - RNA, 21 nt, synthetic construct
  source 1..21: mol_type = other RNA
ccagcctggtgtccccctgga

SEQ ID NO: 77560 - RNA, 21 nt, synthetic construct
  source 1..21: mol_type = other RNA
ctacggccatgccctcctcca

SEQ ID NO: 77561 - RNA, 21 nt, synthetic construct
  source 1..21: mol_type = other RNA
accacccttccagtgctgaca

SEQ ID NO: 77562 - RNA, 21 nt, synthetic construct
  source 1..21: mol_type = other RNA
tccacagctaccagcgttaca

SEQ ID NO: 77563 - RNA, 21 nt, synthetic construct
  source 1..21: mol_type = other RNA
ttacacccatcccctcctcca

SEQ ID NO: 77564 - RNA, 21 nt, synthetic construct
  source 1..21: mol_type = other RNA
gggaccaccgggaccctccca

SEQ ID NO: 77565 - RNA, 21 nt, synthetic construct
  source 1..21: mol_type = other RNA
gtccacaatccacccctccta

SEQ ID NO: 77566 - RNA, 21 nt, synthetic construct
  source 1..21: mol_type = other RNA
cactccggagaccacccacaa

SEQ ID NO: 77567 - RNA, 21 nt, synthetic construct
  source 1..21: mol_type = other RNA
ggagaccacccacacctccaa

SEQ ID NO: 77568 - RNA, 21 nt, synthetic construct
  source 1..21: mol_type = other RNA
acgacaagggccaccagttca

SEQ ID NO: 77569 - RNA, 21 nt, synthetic construct
  source 1..21: mol_type = other RNA
cgacaagggccaccagttcca

SEQ ID NO: 77570 - RNA, 21 nt, synthetic construct
  source 1..21: mol_type = other RNA
cagccactggccccacggcca

SEQ ID NO: 77571 - RNA, 21 nt, synthetic construct
  source 1..21: mol_type = other RNA
gcgtccactggatccacggca

SEQ ID NO: 77572 - RNA, 21 nt, synthetic construct
  source 1..21: mol_type = other RNA
cagccaccgtgacggtgccca

SEQ ID NO: 77573 - RNA, 21 nt, synthetic construct
  source 1..21: mol_type = other RNA
agccaccgtgacggtgcccaa

SEQ ID NO: 77574 - RNA, 21 nt, synthetic construct
  source 1..21: mol_type = other RNA
ggactgcaactgcccttccaa

SEQ ID NO: 77575 - RNA, 21 nt, synthetic construct
  source 1..21: mol_type = other RNA
tccactccagagactgtccaa

SEQ ID NO: 77576 - RNA, 21 nt, synthetic construct
  source 1..21: mol_type = other RNA
caaccggggccaccggctcta

SEQ ID NO: 77577 - RNA, 21 nt, synthetic construct
  source 1..21: mol_type = other RNA
gtgccgactaccacaaccaca

SEQ ID NO: 77578 - RNA, 21 nt, synthetic construct
  source 1..21: mol_type = other RNA
gggcttcacagccacccccta

SEQ ID NO: 77579 - RNA, 21 nt, synthetic construct
  source 1..21: mol_type = other RNA
gcactcacgcctccagtgtga

SEQ ID NO: 77580 - RNA, 21 nt, synthetic construct
  source 1..21: mol_type = other RNA
cactcacgcctccagtgtgga

SEQ ID NO: 77581 - RNA, 21 nt, synthetic construct
  source 1..21: mol_type = other RNA
gagtgctgaccaccaccacca

SEQ ID NO: 77582 - RNA, 21 nt, synthetic construct
  source 1..21: mol_type = other RNA
tggttctatggcaacacccta

SEQ ID NO: 77583 - RNA, 21 nt, synthetic construct
  source 1..21: mol_type = other RNA
cgatcacggccaccggctcca

SEQ ID NO: 77584 - RNA, 21 nt, synthetic construct
  source 1..21: mol_type = other RNA
accacccttccagtgctgaca

SEQ ID NO: 77585 - RNA, 21 nt, synthetic construct
  source 1..21: mol_type = other RNA
ttacacccatcccctcctcca

SEQ ID NO: 77586 - RNA, 21 nt, synthetic construct
  source 1..21: mol_type = other RNA
ccaccctgtggaccacgtgga

SEQ ID NO: 77587 - RNA, 21 nt, synthetic construct
  source 1..21: mol_type = other RNA
cctgtggaccacgtggaccga

SEQ ID NO: 77588 - RNA, 21 nt, synthetic construct
  source 1..21: mol_type = other RNA
cacacccatgtccaccatgta

SEQ ID NO: 77589 - RNA, 21 nt, synthetic construct
  source 1..21: mol_type = other RNA
caccatgtccacaatccacaa

SEQ ID NO: 77590 - RNA, 21 nt, synthetic construct
  source 1..21: mol_type = other RNA
agagaccacccacacctccaa

SEQ ID NO: 77591 - RNA, 21 nt, synthetic construct
  source 1..21: mol_type = other RNA
ccaccatgacaagggccacca

SEQ ID NO: 77592 - RNA, 21 nt, synthetic construct
  source 1..21: mol_type = other RNA
cagccactggatccacggcca

SEQ ID NO: 77593 - RNA, 21 nt, synthetic construct
  source 1..21: mol_type = other RNA
agccaccgtgatggtgcccaa

SEQ ID NO: 77594 - RNA, 21 nt, synthetic construct
  source 1..21: mol_type = other RNA
acacccccaaagtggtgacca

SEQ ID NO: 77595 - RNA, 21 nt, synthetic construct
  source 1..21: mol_type = other RNA
cacccccaaagtggtgaccaa

SEQ ID NO: 77596 - RNA, 21 nt, synthetic construct
  source 1..21: mol_type = other RNA
ccccaaagtggtgaccaccaa

SEQ ID NO: 77597 - RNA, 21 nt, synthetic construct
  source 1..21: mol_type = other RNA
agtggtgaccaccatggccaa

SEQ ID NO: 77598 - RNA, 21 nt, synthetic construct
  source 1..21: mol_type = other RNA
ccaccatggccactatgccca

SEQ ID NO: 77599 - RNA, 21 nt, synthetic construct
  source 1..21: mol_type = other RNA
caccatggccactatgcccaa

SEQ ID NO: 77600 - RNA, 21 nt, synthetic construct
  source 1..21: mol_type = other RNA
gctcgtccaccgtggggacca

SEQ ID NO: 77601 - RNA, 21 nt, synthetic construct
  source 1..21: mol_type = other RNA
cgtggggaccacccgcaccca

SEQ ID NO: 77602 - RNA, 21 nt, synthetic construct
  source 1..21: mol_type = other RNA
gcagggcatttggacagttta

SEQ ID NO: 77603 - RNA, 21 nt, synthetic construct
  source 1..21: mol_type = other RNA
atcagcactgtgacattgaca

SEQ ID NO: 77604 - RNA, 21 nt, synthetic construct
  source 1..21: mol_type = other RNA
ctgtgacattgaccgcttcca

SEQ ID NO: 77605 - RNA, 21 nt, synthetic construct
  source 1..21: mol_type = other RNA
aatgccatccctctccggcaa

SEQ ID NO: 77606 - RNA, 21 nt, synthetic construct
  source 1..21: mol_type = other RNA
ctctccggcaggtgaatgaga

SEQ ID NO: 77607 - RNA, 21 nt, synthetic construct
  source 1..21: mol_type = other RNA
aaccgtgtcgtcctgctggaa

SEQ ID NO: 77608 - RNA, 21 nt, synthetic construct
  source 1..21: mol_type = other RNA
ggacccaaagcctgtggccaa

SEQ ID NO: 77609 - RNA, 21 nt, synthetic construct
  source 1..21: mol_type = other RNA
gcctgtggccaacgtcaccta

SEQ ID NO: 77610 - RNA, 21 nt, synthetic construct
  source 1..21: mol_type = other RNA
ctgtggccaacgtcacctgca

SEQ ID NO: 77611 - RNA, 21 nt, synthetic construct
  source 1..21: mol_type = other RNA
cgagtgcatctgcagcatgta

SEQ ID NO: 77612 - RNA, 21 nt, synthetic construct
  source 1..21: mol_type = other RNA
gggcggctcccactattccaa

SEQ ID NO: 77613 - RNA, 21 nt, synthetic construct
  source 1..21: mol_type = other RNA
gcggctcccactattccacca

SEQ ID NO: 77614 - RNA, 21 nt, synthetic construct
  source 1..21: mol_type = other RNA
cttccggggcaactgcaccta

SEQ ID NO: 77615 - RNA, 21 nt, synthetic construct
  source 1..21: mol_type = other RNA
ccggggcaactgcacctatga

SEQ ID NO: 77616 - RNA, 21 nt, synthetic construct
  source 1..21: mol_type = other RNA
cggggcaactgcacctatgta

SEQ ID NO: 77617 - RNA, 21 nt, synthetic construct
  source 1..21: mol_type = other RNA
ggggcaactgcacctatgtca

SEQ ID NO: 77618 - RNA, 21 nt, synthetic construct
  source 1..21: mol_type = other RNA
acgctttgggaatctcagcca

SEQ ID NO: 77619 - RNA, 21 nt, synthetic construct
  source 1..21: mol_type = other RNA
ctcagcctctacctggacaaa

SEQ ID NO: 77620 - RNA, 21 nt, synthetic construct
  source 1..21: mol_type = other RNA
agcctctacctggacaaccaa

SEQ ID NO: 77621 - RNA, 21 nt, synthetic construct
  source 1..21: mol_type = other RNA
actactgcacggcctctgcca

SEQ ID NO: 77622 - RNA, 21 nt, synthetic construct
  source 1..21: mol_type = other RNA
ggcctgatcctgtttgaccaa

SEQ ID NO: 77623 - RNA, 21 nt, synthetic construct
  source 1..21: mol_type = other RNA
gggaccaccaccatgcgtgta

SEQ ID NO: 77624 - RNA, 21 nt, synthetic construct
  source 1..21: mol_type = other RNA
cgtgtggacattcctgcccta

SEQ ID NO: 77625 - RNA, 21 nt, synthetic construct
  source 1..21: mol_type = other RNA
gtgtggacattcctgccctga

SEQ ID NO: 77626 - RNA, 21 nt, synthetic construct
  source 1..21: mol_type = other RNA
tgtggacattcctgccctgga

SEQ ID NO: 77627 - RNA, 21 nt, synthetic construct
  source 1..21: mol_type = other RNA
agcgtcaccttcaatggccaa

SEQ ID NO: 77628 - RNA, 21 nt, synthetic construct
  source 1..21: mol_type = other RNA
tgcaaggacatggccaagaca

SEQ ID NO: 77629 - RNA, 21 nt, synthetic construct
  source 1..21: mol_type = other RNA
gtccccgacagcagaaaggaa

SEQ ID NO: 77630 - RNA, 21 nt, synthetic construct
  source 1..21: mol_type = other RNA
ggtctttgctgagtgccacaa

SEQ ID NO: 77631 - RNA, 21 nt, synthetic construct
  source 1..21: mol_type = other RNA
gctgagtgccacaaccttgta

SEQ ID NO: 77632 - RNA, 21 nt, synthetic construct
  source 1..21: mol_type = other RNA
cattcttcaacgcctgcatca

SEQ ID NO: 77633 - RNA, 21 nt, synthetic construct
  source 1..21: mol_type = other RNA
tcttcaacgcctgcatcagca

SEQ ID NO: 77634 - RNA, 21 nt, synthetic construct
  source 1..21: mol_type = other RNA
cgaccactgcaggggccgcca

SEQ ID NO: 77635 - RNA, 21 nt, synthetic construct
  source 1..21: mol_type = other RNA
gaggtgcaaccggtggcctga

SEQ ID NO: 77636 - RNA, 21 nt, synthetic construct
  source 1..21: mol_type = other RNA
actctaggaaccagagcccaa

SEQ ID NO: 77637 - RNA, 21 nt, synthetic construct
  source 1..21: mol_type = other RNA
catctgcgtgcaggcctgcca

SEQ ID NO: 77638 - RNA, 21 nt, synthetic construct
  source 1..21: mol_type = other RNA
atctgcgtgcaggcctgccca

SEQ ID NO: 77639 - RNA, 21 nt, synthetic construct
  source 1..21: mol_type = other RNA
gcgtgcaggcctgcccctgca

SEQ ID NO: 77640 - RNA, 21 nt, synthetic construct
  source 1..21: mol_type = other RNA
cgtgcaggcctgcccctgcga

SEQ ID NO: 77641 - RNA, 21 nt, synthetic construct
  source 1..21: mol_type = other RNA
cctgcccctgcgtgggaccca

SEQ ID NO: 77642 - RNA, 21 nt, synthetic construct
  source 1..21: mol_type = other RNA
ggtcagcccccgccgtgcaaa

SEQ ID NO: 77643 - RNA, 21 nt, synthetic construct
  source 1..21: mol_type = other RNA
ggccgagaacccctgctgcca

SEQ ID NO: 77644 - RNA, 21 nt, synthetic construct
  source 1..21: mol_type = other RNA
ctgctgccccgagacggtgta

SEQ ID NO: 77645 - RNA, 21 nt, synthetic construct
  source 1..21: mol_type = other RNA
cgtgtgcaacacaaccaccta

SEQ ID NO: 77646 - RNA, 21 nt, synthetic construct
  source 1..21: mol_type = other RNA
caggagtccatctgcacccaa

SEQ ID NO: 77647 - RNA, 21 nt, synthetic construct
  source 1..21: mol_type = other RNA
ggagtccatctgcacccagga

SEQ ID NO: 77648 - RNA, 21 nt, synthetic construct
  source 1..21: mol_type = other RNA
catctgcacccaggaggagga

SEQ ID NO: 77649 - RNA, 21 nt, synthetic construct
  source 1..21: mol_type = other RNA
caatggcaccttctacgggga

SEQ ID NO: 77650 - RNA, 21 nt, synthetic construct
  source 1..21: mol_type = other RNA
aatgtcaggaggatgcctgca

SEQ ID NO: 77651 - RNA, 21 nt, synthetic construct
  source 1..21: mol_type = other RNA
agaccgcctgcctcacgccca

SEQ ID NO: 77652 - RNA, 21 nt, synthetic construct
  source 1..21: mol_type = other RNA
acgcccgatggccagccagta

SEQ ID NO: 77653 - RNA, 21 nt, synthetic construct
  source 1..21: mol_type = other RNA
agtccagctgaatgaaaccta

SEQ ID NO: 77654 - RNA, 21 nt, synthetic construct
  source 1..21: mol_type = other RNA
ctgaatgaaacctgggtcaaa

SEQ ID NO: 77655 - RNA, 21 nt, synthetic construct
  source 1..21: mol_type = other RNA
aacctgggtcaacagccatga

SEQ ID NO: 77656 - RNA, 21 nt, synthetic construct
  source 1..21: mol_type = other RNA
tgtacctctgtgaggctgaga

SEQ ID NO: 77657 - RNA, 21 nt, synthetic construct
  source 1..21: mol_type = other RNA
cgcatcaacacgaccatccta

SEQ ID NO: 77658 - RNA, 21 nt, synthetic construct
  source 1..21: mol_type = other RNA
cgtccaagtactcagcagaga

SEQ ID NO: 77659 - RNA, 21 nt, synthetic construct
  source 1..21: mol_type = other RNA
cacctgctgccaggagaggca

SEQ ID NO: 77660 - RNA, 21 nt, synthetic construct
  source 1..21: mol_type = other RNA
ggagaggcgggtccacgagga

SEQ ID NO: 77661 - RNA, 21 nt, synthetic construct
  source 1..21: mol_type = other RNA
gagaggcgggtccacgaggaa

SEQ ID NO: 77662 - RNA, 21 nt, synthetic construct
  source 1..21: mol_type = other RNA
cttgcactgtcctaacggcta

SEQ ID NO: 77663 - RNA, 21 nt, synthetic construct
  source 1..21: mol_type = other RNA
agccatcctgcacacctacaa

SEQ ID NO: 77664 - RNA, 21 nt, synthetic construct
  source 1..21: mol_type = other RNA
gccatcctgcacacctacaca

SEQ ID NO: 77665 - RNA, 21 nt, synthetic construct
  source 1..21: mol_type = other RNA
ctgagaacgttctgcctccaa

SEQ ID NO: 77666 - RNA, 21 nt, synthetic construct
  source 1..21: mol_type = other RNA
gagccaggatgtgcattgtca

SEQ ID NO: 77667 - RNA, 21 nt, synthetic construct
  source 1..21: mol_type = other RNA
tgcattgtctgatcatgaaaa

SEQ ID NO: 77668 - RNA, 21 nt, synthetic construct
  source 1..21: mol_type = other RNA
tgaaaaccttgggcctcctca

SEQ ID NO: 77669 - RNA, 21 nt, synthetic construct
  source 1..21: mol_type = other RNA
cccggcctgtgtgtggcacca

SEQ ID NO: 77670 - RNA, 21 nt, synthetic construct
  source 1..21: mol_type = other RNA
ccggcctgtgtgtggcaccca

SEQ ID NO: 77671 - RNA, 21 nt, synthetic construct
  source 1..21: mol_type = other RNA
gtgtggcaccccgcgctccga

SEQ ID NO: 77672 - RNA, 21 nt, synthetic construct
  source 1..21: mol_type = other RNA
gccacggccggagcgcccgca

SEQ ID NO: 77673 - RNA, 21 nt, synthetic construct
  source 1..21: mol_type = other RNA
ggcagacaggctggtccagga

SEQ ID NO: 77674 - RNA, 21 nt, synthetic construct
  source 1..21: mol_type = other RNA
ctgtccatgcctgctgcagga

SEQ ID NO: 77675 - RNA, 21 nt, synthetic construct
  source 1..21: mol_type = other RNA
tgtccatgcctgctgcaggga

SEQ ID NO: 77676 - RNA, 21 nt, synthetic construct
  source 1..21: mol_type = other RNA
ctgcagggtaactcagggcta

SEQ ID NO: 77677 - RNA, 21 nt, synthetic construct
  source 1..21: mol_type = other RNA
gcaactacgtgttctctgaga

SEQ ID NO: 77678 - RNA, 21 nt, synthetic construct
  source 1..21: mol_type = other RNA
ttcaacgtccagctacgccga

SEQ ID NO: 77679 - RNA, 21 nt, synthetic construct
  source 1..21: mol_type = other RNA
ggtgggaagctaagctgccta

SEQ ID NO: 77680 - RNA, 21 nt, synthetic construct
  source 1..21: mol_type = other RNA
gtgggaagctaagctgcctga

SEQ ID NO: 77681 - RNA, 21 nt, synthetic construct
  source 1..21: mol_type = other RNA
ccaccagttccaaagccacta

SEQ ID NO: 77682 - RNA, 21 nt, synthetic construct
  source 1..21: mol_type = other RNA
ccaccagttccaaagccacta

SEQ ID NO: 77683 - RNA, 21 nt, synthetic construct
  source 1..21: mol_type = other RNA
gttgcaaggacatggccaaga

SEQ ID NO: 77684 - RNA, 21 nt, synthetic construct
  source 1..21: mol_type = other RNA
caactacgtgttctctgagca

SEQ ID NO: 77685 - RNA, 21 nt, synthetic construct
  source 1..21: mol_type = other RNA
gggtccccacagcggagaaca

SEQ ID NO: 77686 - RNA, 21 nt, synthetic construct
  source 1..21: mol_type = other RNA
cgcgccgcctacgaggactta

SEQ ID NO: 77687 - RNA, 21 nt, synthetic construct
  source 1..21: mol_type = other RNA
ccttgactaacaccaccacca

SEQ ID NO: 77688 - RNA, 21 nt, synthetic construct
  source 1..21: mol_type = other RNA
cgcagagctctgccgcgccca

SEQ ID NO: 77689 - RNA, 21 nt, synthetic construct
  source 1..21: mol_type = other RNA
catgtggacaactgcaccgta

SEQ ID NO: 77690 - RNA, 21 nt, synthetic construct
  source 1..21: mol_type = other RNA
ccgaccacagagctggagaca

SEQ ID NO: 77691 - RNA, 21 nt, synthetic construct
  source 1..21: mol_type = other RNA
gccgcgccgcctacgaggaca

SEQ ID NO: 77692 - RNA, 21 nt, synthetic construct
  source 1..21: mol_type = other RNA
ctctgcgaggaccactgtgta

SEQ ID NO: 77693 - RNA, 21 nt, synthetic construct
  source 1..21: mol_type = other RNA
gcgccgcctacgaggacttca

SEQ ID NO: 77694 - RNA, 21 nt, synthetic construct
  source 1..21: mol_type = other RNA
ctgcgaggaccactgtgtgga

SEQ ID NO: 77695 - RNA, 21 nt, synthetic construct
  source 1..21: mol_type = other RNA
agaactgccccaagtcccaga

SEQ ID NO: 77696 - RNA, 21 nt, synthetic construct
  source 1..21: mol_type = other RNA
ggcgactgcgagtgtttctga

SEQ ID NO: 77697 - RNA, 21 nt, synthetic construct
  source 1..21: mol_type = other RNA
cagcctggactttggcctgga

SEQ ID NO: 77698 - RNA, 21 nt, synthetic construct
  source 1..21: mol_type = other RNA
cagcctggactttggcctgga

SEQ ID NO: 77699 - RNA, 21 nt, synthetic construct
  source 1..21: mol_type = other RNA
cactacaactgcagccactga

SEQ ID NO: 77700 - RNA, 21 nt, synthetic construct
  source 1..21: mol_type = other RNA
cagcctggactttggcctgga

SEQ ID NO: 77701 - RNA, 21 nt, synthetic construct
  source 1..21: mol_type = other RNA
cagcctggactttggcctgga

SEQ ID NO: 77702 - RNA, 21 nt, synthetic construct
  source 1..21: mol_type = other RNA
cactacaactgcagccactga

SEQ ID NO: 77703 - RNA, 21 nt, synthetic construct
  source 1..21: mol_type = other RNA
cactacaactgcagccactga

SEQ ID NO: 77704 - RNA, 21 nt, synthetic construct
  source 1..21: mol_type = other RNA
cccgccagggcaggagtccaa

SEQ ID NO: 77705 - RNA, 21 nt, synthetic construct
  source 1..21: mol_type = other RNA
cctgccacggccggagcgcca

SEQ ID NO: 77706 - RNA, 21 nt, synthetic construct
  source 1..21: mol_type = other RNA
actcagggctgaggtcgcaaa

SEQ ID NO: 77707 - RNA, 21 nt, synthetic construct
  source 1..21: mol_type = other RNA
cacggccaccacacacgggca

SEQ ID NO: 77708 - RNA, 21 nt, synthetic construct
  source 1..21: mol_type = other RNA
cacggccaccacacacgggca

SEQ ID NO: 77709 - RNA, 21 nt, synthetic construct
  source 1..21: mol_type = other RNA
cacggccaccacacacgggca

SEQ ID NO: 77710 - RNA, 21 nt, synthetic construct
  source 1..21: mol_type = other RNA
ccgccaccgaccacagagcta

SEQ ID NO: 77711 - RNA, 21 nt, synthetic construct
  source 1..21: mol_type = other RNA
gcccgtgtgccacctttgtga

SEQ ID NO: 77712 - RNA, 21 nt, synthetic construct
  source 1..21: mol_type = other RNA
caacggcctcccggccttcaa

SEQ ID NO: 77713 - RNA, 21 nt, synthetic construct
  source 1..21: mol_type = other RNA
cctcaacatgcagcaccagga

SEQ ID NO: 77714 - RNA, 21 nt, synthetic construct
  source 1..21: mol_type = other RNA
tccccacacggtgcgcacaga

SEQ ID NO: 77715 - RNA, 21 nt, synthetic construct
  source 1..21: mol_type = other RNA
tccccacacggtgcgcacaga

SEQ ID NO: 77716 - RNA, 21 nt, synthetic construct
  source 1..21: mol_type = other RNA
tccccacacggtgcgcacaga

SEQ ID NO: 77717 - RNA, 21 nt, synthetic construct
  source 1..21: mol_type = other RNA
gggcttcacagtcacccccta

SEQ ID NO: 77718 - RNA, 21 nt, synthetic construct
  source 1..21: mol_type = other RNA
tccccacacggtgcgcacaga

SEQ ID NO: 77719 - RNA, 21 nt, synthetic construct
  source 1..21: mol_type = other RNA
tccactctgggaacagctcaa

SEQ ID NO: 77720 - RNA, 21 nt, synthetic construct
  source 1..21: mol_type = other RNA
cctgtgcgacctcacctgcca

SEQ ID NO: 77721 - RNA, 21 nt, synthetic construct
  source 1..21: mol_type = other RNA
agggtcagcccccgccgtgca

SEQ ID NO: 77722 - RNA, 21 nt, synthetic construct
  source 1..21: mol_type = other RNA
agcacagccaccaaatccaca

SEQ ID NO: 77723 - RNA, 21 nt, synthetic construct
  source 1..21: mol_type = other RNA
agcacagccaccaaatccaca

SEQ ID NO: 77724 - RNA, 21 nt, synthetic construct
  source 1..21: mol_type = other RNA
cctgccctgtgacgcccagga

SEQ ID NO: 77725 - RNA, 21 nt, synthetic construct
  source 1..21: mol_type = other RNA
gtgcaaccgtcccggcttcga

SEQ ID NO: 77726 - RNA, 21 nt, synthetic construct
  source 1..21: mol_type = other RNA
caccccgcgctccgtgctcca

SEQ ID NO: 77727 - RNA, 21 nt, synthetic construct
  source 1..21: mol_type = other RNA
gaggtggtgcacgacgaggga

SEQ ID NO: 77728 - RNA, 21 nt, synthetic construct
  source 1..21: mol_type = other RNA
ttccctggcctttgcaactaa

SEQ ID NO: 77729 - RNA, 21 nt, synthetic construct
  source 1..21: mol_type = other RNA
aacggcctcccggccttcaaa

SEQ ID NO: 77730 - RNA, 21 nt, synthetic construct
  source 1..21: mol_type = other RNA
atcgtggtgcagacaggccta

SEQ ID NO: 77731 - RNA, 21 nt, synthetic construct
  source 1..21: mol_type = other RNA
gtccagctacgccgaggccta

SEQ ID NO: 77732 - RNA, 21 nt, synthetic construct
  source 1..21: mol_type = other RNA
ccaccatgcgtgtggacatta

SEQ ID NO: 77733 - RNA, 21 nt, synthetic construct
  source 1..21: mol_type = other RNA
tcgtggtgcagacaggcctga

SEQ ID NO: 77734 - RNA, 21 nt, synthetic construct
  source 1..21: mol_type = other RNA
tgtgcgccaacagccaacaga

SEQ ID NO: 77735 - RNA, 21 nt, synthetic construct
  source 1..21: mol_type = other RNA
ccactggttctatggcaacaa

SEQ ID NO: 77736 - RNA, 21 nt, synthetic construct
  source 1..21: mol_type = other RNA
gacttcccacaccctagcaga

SEQ ID NO: 77737 - RNA, 21 nt, synthetic construct
  source 1..21: mol_type = other RNA
ccactggttctatggcaacaa

SEQ ID NO: 77738 - RNA, 21 nt, synthetic construct
  source 1..21: mol_type = other RNA
ccactggttctatggcaacaa

SEQ ID NO: 77739 - RNA, 21 nt, synthetic construct
  source 1..21: mol_type = other RNA
ccactggttctatggcaacaa

SEQ ID NO: 77740 - RNA, 21 nt, synthetic construct
  source 1..21: mol_type = other RNA
ccactggttctatggcaacaa

SEQ ID NO: 77741 - RNA, 21 nt, synthetic construct
  source 1..21: mol_type = other RNA
cacctccccaccgccagtgta

SEQ ID NO: 77742 - RNA, 21 nt, synthetic construct
  source 1..21: mol_type = other RNA
tcatgagagagatccatgcaa

SEQ ID NO: 77743 - RNA, 21 nt, synthetic construct
  source 1..21: mol_type = other RNA
gagaacccctgctgccccgaa

SEQ ID NO: 77744 - RNA, 21 nt, synthetic construct
  source 1..21: mol_type = other RNA
ggctcctgccccggagcgtca

SEQ ID NO: 77745 - RNA, 21 nt, synthetic construct
  source 1..21: mol_type = other RNA
tggcaccccgcgctccgtgca

SEQ ID NO: 77746 - RNA, 21 nt, synthetic construct
  source 1..21: mol_type = other RNA
gatcctcacagagccgagcaa

SEQ ID NO: 77747 - RNA, 21 nt, synthetic construct
  source 1..21: mol_type = other RNA
gatcctcacagagccgagcaa

SEQ ID NO: 77748 - RNA, 21 nt, synthetic construct
  source 1..21: mol_type = other RNA
gatcctcacagagccgagcaa

SEQ ID NO: 77749 - RNA, 21 nt, synthetic construct
  source 1..21: mol_type = other RNA
gatcctcacagagccgagcaa

SEQ ID NO: 77750 - RNA, 21 nt, synthetic construct
  source 1..21: mol_type = other RNA
ccggcctttgcggagtgccaa

SEQ ID NO: 77751 - RNA, 21 nt, synthetic construct
  source 1..21: mol_type = other RNA
tcacactaccaaagtgctgaa

SEQ ID NO: 77752 - RNA, 21 nt, synthetic construct
  source 1..21: mol_type = other RNA
ccctagggaccacccacacaa

SEQ ID NO: 77753 - RNA, 21 nt, synthetic construct
  source 1..21: mol_type = other RNA
ccctagggaccacccacacaa

SEQ ID NO: 77754 - RNA, 21 nt, synthetic construct
  source 1..21: mol_type = other RNA
ccctagggaccacccacacaa

SEQ ID NO: 77755 - RNA, 21 nt, synthetic construct
  source 1..21: mol_type = other RNA
ccctagggaccacccacacaa

SEQ ID NO: 77756 - RNA, 21 nt, synthetic construct
  source 1..21: mol_type = other RNA
aagcaacggcaccatcatcaa

SEQ ID NO: 77757 - RNA, 21 nt, synthetic construct
  source 1..21: mol_type = other RNA
gggtgaccccgagcatccgga

SEQ ID NO: 77758 - RNA, 21 nt, synthetic construct
  source 1..21: mol_type = other RNA
ggaggatgcctgcaacaataa

SEQ ID NO: 77759 - RNA, 21 nt, synthetic construct
  source 1..21: mol_type = other RNA
ggcaaggcggccgcctgtcca

SEQ ID NO: 77760 - RNA, 21 nt, synthetic construct
  source 1..21: mol_type = other RNA
tggggcagaaggtgcactgta

SEQ ID NO: 77761 - RNA, 21 nt, synthetic construct
  source 1..21: mol_type = other RNA
cacacctcctctactccagaa

SEQ ID NO: 77762 - RNA, 21 nt, synthetic construct
  source 1..21: mol_type = other RNA
ctccagcccagggacggcaca

SEQ ID NO: 77763 - RNA, 21 nt, synthetic construct
  source 1..21: mol_type = other RNA
ctccagcccagggacggcaca

SEQ ID NO: 77764 - RNA, 21 nt, synthetic construct
  source 1..21: mol_type = other RNA
ctccagcccagggacggcaca

SEQ ID NO: 77765 - RNA, 21 nt, synthetic construct
  source 1..21: mol_type = other RNA
tacgatcacagccaccggcta

SEQ ID NO: 77766 - RNA, 21 nt, synthetic construct
  source 1..21: mol_type = other RNA
ctccagcccagggacggcaca

SEQ ID NO: 77767 - RNA, 21 nt, synthetic construct
  source 1..21: mol_type = other RNA
ctccagcccagggacggcaca

SEQ ID NO: 77768 - RNA, 21 nt, synthetic construct
  source 1..21: mol_type = other RNA
ctcccggtctccaccgtgtga

SEQ ID NO: 77769 - RNA, 21 nt, synthetic construct
  source 1..21: mol_type = other RNA
gcccacaacgccaggctgaca

SEQ ID NO: 77770 - RNA, 21 nt, synthetic construct
  source 1..21: mol_type = other RNA
ctccggggggctatggcagta

SEQ ID NO: 77771 - RNA, 21 nt, synthetic construct
  source 1..21: mol_type = other RNA
ctcacactaccaaagtgctga

SEQ ID NO: 77772 - RNA, 21 nt, synthetic construct
  source 1..21: mol_type = other RNA
ccagtccaaggactgcaacca

SEQ ID NO: 77773 - RNA, 21 nt, synthetic construct
  source 1..21: mol_type = other RNA
cagggccaccggctctgtgga

SEQ ID NO: 77774 - RNA, 21 nt, synthetic construct
  source 1..21: mol_type = other RNA
cagggccaccggctctgtgga

SEQ ID NO: 77775 - RNA, 21 nt, synthetic construct
  source 1..21: mol_type = other RNA
ccagtccaaggactgcaacca

SEQ ID NO: 77776 - RNA, 21 nt, synthetic construct
  source 1..21: mol_type = other RNA
ccagtccaaggactgcaacca

SEQ ID NO: 77777 - RNA, 21 nt, synthetic construct
  source 1..21: mol_type = other RNA
ccgtcccagcacagaccacca

SEQ ID NO: 77778 - RNA, 21 nt, synthetic construct
  source 1..21: mol_type = other RNA
caaccttcagcgtgtccacta

SEQ ID NO: 77779 - RNA, 21 nt, synthetic construct
  source 1..21: mol_type = other RNA
gccctcagcatccactacaaa

SEQ ID NO: 77780 - RNA, 21 nt, synthetic construct
  source 1..21: mol_type = other RNA
ccgctctgtgatctgatgcta

SEQ ID NO: 77781 - RNA, 21 nt, synthetic construct
  source 1..21: mol_type = other RNA
ctctaggaaccagagcccaca

SEQ ID NO: 77782 - RNA, 21 nt, synthetic construct
  source 1..21: mol_type = other RNA
cttgggcctcctctgcggaga

SEQ ID NO: 77783 - RNA, 21 nt, synthetic construct
  source 1..21: mol_type = other RNA
gggtaactcagggctgaggta

SEQ ID NO: 77784 - RNA, 21 nt, synthetic construct
  source 1..21: mol_type = other RNA
tgcacgacgagggcgccgtga

SEQ ID NO: 77785 - RNA, 21 nt, synthetic construct
  source 1..21: mol_type = other RNA
acctatccccccagtgctgaa

SEQ ID NO: 77786 - RNA, 21 nt, synthetic construct
  source 1..21: mol_type = other RNA
acctatccccccagtgctgaa

SEQ ID NO: 77787 - RNA, 21 nt, synthetic construct
  source 1..21: mol_type = other RNA
ggtgctggaggcgtccaacga

SEQ ID NO: 77788 - RNA, 21 nt, synthetic construct
  source 1..21: mol_type = other RNA
tggtcatcgagacccacggga

SEQ ID NO: 77789 - RNA, 21 nt, synthetic construct
  source 1..21: mol_type = other RNA
ctgggagcaggagggcgtcta

SEQ ID NO: 77790 - RNA, 21 nt, synthetic construct
  source 1..21: mol_type = other RNA
gggcgtcttcaagatgtgcta

SEQ ID NO: 77791 - RNA, 21 nt, synthetic construct
  source 1..21: mol_type = other RNA
cctctgctgcagtgacgacca

SEQ ID NO: 77792 - RNA, 21 nt, synthetic construct
  source 1..21: mol_type = other RNA
agccaccacgggaggccccaa

SEQ ID NO: 77793 - RNA, 21 nt, synthetic construct
  source 1..21: mol_type = other RNA
cacacccacagtcaccagcta

SEQ ID NO: 77794 - RNA, 21 nt, synthetic construct
  source 1..21: mol_type = other RNA
ccagagactgcccacacctca

SEQ ID NO: 77795 - RNA, 21 nt, synthetic construct
  source 1..21: mol_type = other RNA
ctcccccatcactgaccacca

SEQ ID NO: 77796 - RNA, 21 nt, synthetic construct
  source 1..21: mol_type = other RNA
ccatggccaccacacacggga

SEQ ID NO: 77797 - RNA, 21 nt, synthetic construct
  source 1..21: mol_type = other RNA
gacacccacagtcaccagcta

SEQ ID NO: 77798 - RNA, 21 nt, synthetic construct
  source 1..21: mol_type = other RNA
ctcccccatcactgaccacca

SEQ ID NO: 77799 - RNA, 21 nt, synthetic construct
  source 1..21: mol_type = other RNA
ctcccccatcactgaccacca

SEQ ID NO: 77800 - RNA, 21 nt, synthetic construct
  source 1..21: mol_type = other RNA
gacacccacagtcaccagcta

SEQ ID NO: 77801 - RNA, 21 nt, synthetic construct
  source 1..21: mol_type = other RNA
ccagagactgcccacacctca

SEQ ID NO: 77802 - RNA, 21 nt, synthetic construct
  source 1..21: mol_type = other RNA
gacacccacagtcaccagcta

SEQ ID NO: 77803 - RNA, 21 nt, synthetic construct
  source 1..21: mol_type = other RNA
tccagggactgcaactgccca

SEQ ID NO: 77804 - RNA, 21 nt, synthetic construct
  source 1..21: mol_type = other RNA
ctcccccatcactgaccacca

SEQ ID NO: 77805 - RNA, 21 nt, synthetic construct
  source 1..21: mol_type = other RNA
acatcaccttctgcgagggca

SEQ ID NO: 77806 - RNA, 21 nt, synthetic construct
  source 1..21: mol_type = other RNA
gtgtccctgccacggccggaa

SEQ ID NO: 77807 - RNA, 21 nt, synthetic construct
  source 1..21: mol_type = other RNA
caggaagctgcgacaggcaaa

SEQ ID NO: 77808 - RNA, 21 nt, synthetic construct
  source 1..21: mol_type = other RNA
tctgagcactgccgcgccgca

SEQ ID NO: 77809 - RNA, 21 nt, synthetic construct
  source 1..21: mol_type = other RNA
tggtggacagcactgcgtaca

SEQ ID NO: 77810 - RNA, 21 nt, synthetic construct
  source 1..21: mol_type = other RNA
ctttacagccatcccctccta

SEQ ID NO: 77811 - RNA, 21 nt, synthetic construct
  source 1..21: mol_type = other RNA
ctttacagccatcccctccta

SEQ ID NO: 77812 - RNA, 21 nt, synthetic construct
  source 1..21: mol_type = other RNA
ctttacagccatcccctccta

SEQ ID NO: 77813 - RNA, 21 nt, synthetic construct
  source 1..21: mol_type = other RNA
ctcagctgtgttcgtacaata

SEQ ID NO: 77814 - RNA, 21 nt, synthetic construct
  source 1..21: mol_type = other RNA
gagccgctgaccacgagccta

SEQ ID NO: 77815 - RNA, 21 nt, synthetic construct
  source 1..21: mol_type = other RNA
cactgcctccacggttcccaa

SEQ ID NO: 77816 - RNA, 21 nt, synthetic construct
  source 1..21: mol_type = other RNA
tcaacgcctgcatcagcgaca

SEQ ID NO: 77817 - RNA, 21 nt, synthetic construct
  source 1..21: mol_type = other RNA
acacccacaaccagaggttca

SEQ ID NO: 77818 - RNA, 21 nt, synthetic construct
  source 1..21: mol_type = other RNA
agaaatgtgccgacagcagca

SEQ ID NO: 77819 - RNA, 21 nt, synthetic construct
  source 1..21: mol_type = other RNA
ccggaagaccagcgtgttcaa

SEQ ID NO: 77820 - RNA, 21 nt, synthetic construct
  source 1..21: mol_type = other RNA
tgcacacccagtggcatccaa

SEQ ID NO: 77821 - RNA, 21 nt, synthetic construct
  source 1..21: mol_type = other RNA
actccagccacaacgccatta

SEQ ID NO: 77822 - RNA, 21 nt, synthetic construct
  source 1..21: mol_type = other RNA
ccgggcggcgcagcttcccga

SEQ ID NO: 77823 - RNA, 21 nt, synthetic construct
  source 1..21: mol_type = other RNA
tttccagccctcaccctagca

SEQ ID NO: 77824 - RNA, 21 nt, synthetic construct
  source 1..21: mol_type = other RNA
aagcacagccaccaaatccaa

SEQ ID NO: 77825 - RNA, 21 nt, synthetic construct
  source 1..21: mol_type = other RNA
caccctcaaagtgctgaccaa

SEQ ID NO: 77826 - RNA, 21 nt, synthetic construct
  source 1..21: mol_type = other RNA
aagcacagccaccaaatccaa

SEQ ID NO: 77827 - RNA, 21 nt, synthetic construct
  source 1..21: mol_type = other RNA
ctgcgtgcaggcctgccccta

SEQ ID NO: 77828 - RNA, 21 nt, synthetic construct
  source 1..21: mol_type = other RNA
ccgcctgcctcacgcccgata

SEQ ID NO: 77829 - RNA, 21 nt, synthetic construct
  source 1..21: mol_type = other RNA
ttccgcttccctggcctttga

SEQ ID NO: 77830 - RNA, 21 nt, synthetic construct
  source 1..21: mol_type = other RNA
ctcccagaacagaccaccaca

SEQ ID NO: 77831 - RNA, 21 nt, synthetic construct
  source 1..21: mol_type = other RNA
ctcccagaacagaccaccaca

SEQ ID NO: 77832 - RNA, 21 nt, synthetic construct
  source 1..21: mol_type = other RNA
cgtaaccgtgaccaggcccca

SEQ ID NO: 77833 - RNA, 21 nt, synthetic construct
  source 1..21: mol_type = other RNA
cctatgtgtccctgccacgga

SEQ ID NO: 77834 - RNA, 21 nt, synthetic construct
  source 1..21: mol_type = other RNA
cttccctggcctttgcaacta

SEQ ID NO: 77835 - RNA, 21 nt, synthetic construct
  source 1..21: mol_type = other RNA
acggctccgtcctcatcaata

SEQ ID NO: 77836 - RNA, 21 nt, synthetic construct
  source 1..21: mol_type = other RNA
ccaggcacggtgctggatgaa

SEQ ID NO: 77837 - RNA, 21 nt, synthetic construct
  source 1..21: mol_type = other RNA
ctgtgccaatgccaggaacaa

SEQ ID NO: 77838 - RNA, 21 nt, synthetic construct
  source 1..21: mol_type = other RNA
gctggtgtcggatgggagtga

SEQ ID NO: 77839 - RNA, 21 nt, synthetic construct
  source 1..21: mol_type = other RNA
gccgggtggggacccacccta

SEQ ID NO: 77840 - RNA, 21 nt, synthetic construct
  source 1..21: mol_type = other RNA
ccctcccggtctccaccgtga

SEQ ID NO: 77841 - RNA, 21 nt, synthetic construct
  source 1..21: mol_type = other RNA
caccctctcagaaggactgaa

SEQ ID NO: 77842 - RNA, 21 nt, synthetic construct
  source 1..21: mol_type = other RNA
caccacgggaggccccacgaa

SEQ ID NO: 77843 - RNA, 21 nt, synthetic construct
  source 1..21: mol_type = other RNA
ctcagcccttccagggacgaa

SEQ ID NO: 77844 - RNA, 21 nt, synthetic construct
  source 1..21: mol_type = other RNA
agccagggcacgacccgctga

SEQ ID NO: 77845 - RNA, 21 nt, synthetic construct
  source 1..21: mol_type = other RNA
agagactgcccacacctccaa

SEQ ID NO: 77846 - RNA, 21 nt, synthetic construct
  source 1..21: mol_type = other RNA
taccccatgccggggccctca

SEQ ID NO: 77847 - RNA, 21 nt, synthetic construct
  source 1..21: mol_type = other RNA
aaccgtgagcaggtggggaaa

SEQ ID NO: 77848 - RNA, 21 nt, synthetic construct
  source 1..21: mol_type = other RNA
caccccacatgtgagcaccaa

SEQ ID NO: 77849 - RNA, 21 nt, synthetic construct
  source 1..21: mol_type = other RNA
taccccatgccggggccctca

SEQ ID NO: 77850 - RNA, 21 nt, synthetic construct
  source 1..21: mol_type = other RNA
aaccgtgagcaggtggggaaa

SEQ ID NO: 77851 - RNA, 21 nt, synthetic construct
  source 1..21: mol_type = other RNA
taccccatgccggggccctca

SEQ ID NO: 77852 - RNA, 21 nt, synthetic construct
  source 1..21: mol_type = other RNA
aaccgtgagcaggtggggaaa

SEQ ID NO: 77853 - RNA, 21 nt, synthetic construct
  source 1..21: mol_type = other RNA
caccccacatgtgagcaccaa

SEQ ID NO: 77854 - RNA, 21 nt, synthetic construct
  source 1..21: mol_type = other RNA
agagactgcccacacctccaa

SEQ ID NO: 77855 - RNA, 21 nt, synthetic construct
  source 1..21: mol_type = other RNA
taccccatgccggggccctca

SEQ ID NO: 77856 - RNA, 21 nt, synthetic construct
  source 1..21: mol_type = other RNA
aaccgtgagcaggtggggaaa

SEQ ID NO: 77857 - RNA, 21 nt, synthetic construct
  source 1..21: mol_type = other RNA
caccccacatgtgagcaccaa

SEQ ID NO: 77858 - RNA, 21 nt, synthetic construct
  source 1..21: mol_type = other RNA
cgtcccagcacagaccaccaa

SEQ ID NO: 77859 - RNA, 21 nt, synthetic construct
  source 1..21: mol_type = other RNA
ctccactctgggaacagctca

SEQ ID NO: 77860 - RNA, 21 nt, synthetic construct
  source 1..21: mol_type = other RNA
gcatcagcgaccactgcagga

SEQ ID NO: 77861 - RNA, 21 nt, synthetic construct
  source 1..21: mol_type = other RNA
gcaggggccgccttgaggtga

SEQ ID NO: 77862 - RNA, 21 nt, synthetic construct
  source 1..21: mol_type = other RNA
ggcgaggtgcaaccggtggca

SEQ ID NO: 77863 - RNA, 21 nt, synthetic construct
  source 1..21: mol_type = other RNA
gccccatacagcctgccacca

SEQ ID NO: 77864 - RNA, 21 nt, synthetic construct
  source 1..21: mol_type = other RNA
cctgtgacgcccagggtcaga

SEQ ID NO: 77865 - RNA, 21 nt, synthetic construct
  source 1..21: mol_type = other RNA
ttcgtacaatggcaccttcta

SEQ ID NO: 77866 - RNA, 21 nt, synthetic construct
  source 1..21: mol_type = other RNA
aacgttctgcctccatcccca

SEQ ID NO: 77867 - RNA, 21 nt, synthetic construct
  source 1..21: mol_type = other RNA
tgcagggtaactcagggctga

SEQ ID NO: 77868 - RNA, 21 nt, synthetic construct
  source 1..21: mol_type = other RNA
gcgccaacagccaacagagta

SEQ ID NO: 77869 - RNA, 21 nt, synthetic construct
  source 1..21: mol_type = other RNA
ctggatccacggccatcccga

SEQ ID NO: 77870 - RNA, 21 nt, synthetic construct
  source 1..21: mol_type = other RNA
cccctgccctgtgacgcccaa

SEQ ID NO: 77871 - RNA, 21 nt, synthetic construct
  source 1..21: mol_type = other RNA
ccctgccctgtgacgcccaga

SEQ ID NO: 77872 - RNA, 21 nt, synthetic construct
  source 1..21: mol_type = other RNA
gtgaccaggccccgggccgaa

SEQ ID NO: 77873 - RNA, 21 nt, synthetic construct
  source 1..21: mol_type = other RNA
ggaccgtcccagcacagacca

SEQ ID NO: 77874 - RNA, 21 nt, synthetic construct
  source 1..21: mol_type = other RNA
cagctcacacccccaaagtga

SEQ ID NO: 77875 - RNA, 21 nt, synthetic construct
  source 1..21: mol_type = other RNA
cgaggcctagtgggctccaga

SEQ ID NO: 77876 - RNA, 21 nt, synthetic construct
  source 1..21: mol_type = other RNA
caccaccgcctgggtccccca

SEQ ID NO: 77877 - RNA, 21 nt, synthetic construct
  source 1..21: mol_type = other RNA
gggatggcggagggctgctta

SEQ ID NO: 77878 - RNA, 21 nt, synthetic construct
  source 1..21: mol_type = other RNA
gggccctgtggagccgagcta

SEQ ID NO: 77879 - RNA, 21 nt, synthetic construct
  source 1..21: mol_type = other RNA
tgtacctggactgcagcaaca

SEQ ID NO: 77880 - RNA, 21 nt, synthetic construct
  source 1..21: mol_type = other RNA
cacggccaccatgtccacaga

SEQ ID NO: 77881 - RNA, 21 nt, synthetic construct
  source 1..21: mol_type = other RNA
cacggccaccatgtccacaga

SEQ ID NO: 77882 - RNA, 21 nt, synthetic construct
  source 1..21: mol_type = other RNA
cacggccaccatgtccacaga

SEQ ID NO: 77883 - RNA, 21 nt, synthetic construct
  source 1..21: mol_type = other RNA
cacggccaccatgtccacaga

SEQ ID NO: 77884 - RNA, 21 nt, synthetic construct
  source 1..21: mol_type = other RNA
cacggccaccatgtccacaga

SEQ ID NO: 77885 - RNA, 21 nt, synthetic construct
  source 1..21: mol_type = other RNA
gaaacctgggtcaacagccaa

SEQ ID NO: 77886 - RNA, 21 nt, synthetic construct
  source 1..21: mol_type = other RNA
ctgccgcgccgcctacgagga

SEQ ID NO: 77887 - RNA, 21 nt, synthetic construct
  source 1..21: mol_type = other RNA
gcctgccacgacgcgggccta

SEQ ID NO: 77888 - RNA, 21 nt, synthetic construct
  source 1..21: mol_type = other RNA
actgccgcgccgcctacgaga

SEQ ID NO: 77889 - RNA, 21 nt, synthetic construct
  source 1..21: mol_type = other RNA
cctatgatgagaaactctaca

SEQ ID NO: 77890 - RNA, 21 nt, synthetic construct
  source 1..21: mol_type = other RNA
ggcgcctgtgtgcccgcccaa

SEQ ID NO: 77891 - RNA, 21 nt, synthetic construct
  source 1..21: mol_type = other RNA
cactggttctatggcaacaca

SEQ ID NO: 77892 - RNA, 21 nt, synthetic construct
  source 1..21: mol_type = other RNA
cactggttctatggcaacaca

SEQ ID NO: 77893 - RNA, 21 nt, synthetic construct
  source 1..21: mol_type = other RNA
cactggttctatggcaacaca

SEQ ID NO: 77894 - RNA, 21 nt, synthetic construct
  source 1..21: mol_type = other RNA
cactggttctatggcaacaca

SEQ ID NO: 77895 - RNA, 21 nt, synthetic construct
  source 1..21: mol_type = other RNA
cactggttctatggcaacaca

SEQ ID NO: 77896 - RNA, 21 nt, synthetic construct
  source 1..21: mol_type = other RNA
cccgcacccctgcagtgctca

SEQ ID NO: 77897 - RNA, 21 nt, synthetic construct
  source 1..21: mol_type = other RNA
gggaagtcatctacaataaga

SEQ ID NO: 77898 - RNA, 21 nt, synthetic construct
  source 1..21: mol_type = other RNA
ggaagtcatctacaataagaa

SEQ ID NO: 77899 - RNA, 21 nt, synthetic construct
  source 1..21: mol_type = other RNA
ctgaggaccagatcctcttca

SEQ ID NO: 77900 - RNA, 21 nt, synthetic construct
  source 1..21: mol_type = other RNA
ggccccgggccgagaacccca

SEQ ID NO: 77901 - RNA, 21 nt, synthetic construct
  source 1..21: mol_type = other RNA
gaccactgtgtggacggctga

SEQ ID NO: 77902 - RNA, 21 nt, synthetic construct
  source 1..21: mol_type = other RNA
atcatcaaccccaagccctta

SEQ ID NO: 77903 - RNA, 21 nt, synthetic construct
  source 1..21: mol_type = other RNA
aggactgcccctgtgtgcaca

SEQ ID NO: 77904 - RNA, 21 nt, synthetic construct
  source 1..21: mol_type = other RNA
atgaggacaggacctacagca

SEQ ID NO: 77905 - RNA, 21 nt, synthetic construct
  source 1..21: mol_type = other RNA
aaaggatggctgctgggccca

SEQ ID NO: 77906 - RNA, 21 nt, synthetic construct
  source 1..21: mol_type = other RNA
cagtccagctgaatgaaacca

SEQ ID NO: 77907 - RNA, 21 nt, synthetic construct
  source 1..21: mol_type = other RNA
acggctcagccatcctgcaca

SEQ ID NO: 77908 - RNA, 21 nt, synthetic construct
  source 1..21: mol_type = other RNA
acattcctgtggaacggagaa

SEQ ID NO: 77909 - RNA, 21 nt, synthetic construct
  source 1..21: mol_type = other RNA
acctatgatgagaaactctaa

SEQ ID NO: 77910 - RNA, 21 nt, synthetic construct
  source 1..21: mol_type = other RNA
cgggtgggaagctaagctgca

SEQ ID NO: 77911 - RNA, 21 nt, synthetic construct
  source 1..21: mol_type = other RNA
gaccaccacacccgtggccaa

SEQ ID NO: 77912 - RNA, 21 nt, synthetic construct
  source 1..21: mol_type = other RNA
cactgtgtggacggctgctta

SEQ ID NO: 77913 - RNA, 21 nt, synthetic construct
  source 1..21: mol_type = other RNA
gcatggtgactgcagctacga

SEQ ID NO: 77914 - RNA, 21 nt, synthetic construct
  source 1..21: mol_type = other RNA
gggaccacccacacaccccca

SEQ ID NO: 77915 - RNA, 21 nt, synthetic construct
  source 1..21: mol_type = other RNA
gggaccacccacacaccccca

SEQ ID NO: 77916 - RNA, 21 nt, synthetic construct
  source 1..21: mol_type = other RNA
gtcctccaccccgggaacaga

SEQ ID NO: 77917 - RNA, 21 nt, synthetic construct
  source 1..21: mol_type = other RNA
gaccaccgggaccctcccaga

SEQ ID NO: 77918 - RNA, 21 nt, synthetic construct
  source 1..21: mol_type = other RNA
gggaccacccacacaccccca

SEQ ID NO: 77919 - RNA, 21 nt, synthetic construct
  source 1..21: mol_type = other RNA
gggaccacccacacaccccca

SEQ ID NO: 77920 - RNA, 21 nt, synthetic construct
  source 1..21: mol_type = other RNA
gtcctccaccccgggaacaga

SEQ ID NO: 77921 - RNA, 21 nt, synthetic construct
  source 1..21: mol_type = other RNA
gaccaccgggaccctcccaga

SEQ ID NO: 77922 - RNA, 21 nt, synthetic construct
  source 1..21: mol_type = other RNA
gggaccacccacaccgccaga

SEQ ID NO: 77923 - RNA, 21 nt, synthetic construct
  source 1..21: mol_type = other RNA
ggtccccgacagcagaaagga

SEQ ID NO: 77924 - RNA, 21 nt, synthetic construct
  source 1..21: mol_type = other RNA
aaaccttgggcctcctctgca

SEQ ID NO: 77925 - RNA, 21 nt, synthetic construct
  source 1..21: mol_type = other RNA
tgtgaccgcatgcgggggcta

SEQ ID NO: 77926 - RNA, 21 nt, synthetic construct
  source 1..21: mol_type = other RNA
cccgcgggcaccttcctcaaa

SEQ ID NO: 77927 - RNA, 21 nt, synthetic construct
  source 1..21: mol_type = other RNA
tggctgctacgacaaggacga

SEQ ID NO: 77928 - RNA, 21 nt, synthetic construct
  source 1..21: mol_type = other RNA
aacggcaccatcatcaggaaa

SEQ ID NO: 77929 - RNA, 21 nt, synthetic construct
  source 1..21: mol_type = other RNA
cccgccaccgaccacagagca

SEQ ID NO: 77930 - RNA, 21 nt, synthetic construct
  source 1..21: mol_type = other RNA
tggcctcctggtggagcagaa

SEQ ID NO: 77931 - RNA, 21 nt, synthetic construct
  source 1..21: mol_type = other RNA
accactgtgtggacggctgca

SEQ ID NO: 77932 - RNA, 21 nt, synthetic construct
  source 1..21: mol_type = other RNA
ctgtgtggacggctgcttcta

SEQ ID NO: 77933 - RNA, 21 nt, synthetic construct
  source 1..21: mol_type = other RNA
ccccgcgggcaccttcctcaa

SEQ ID NO: 77934 - RNA, 21 nt, synthetic construct
  source 1..21: mol_type = other RNA
agggtgtgcagcccccatgga

SEQ ID NO: 77935 - RNA, 21 nt, synthetic construct
  source 1..21: mol_type = other RNA
ggaggactgcccctgtgtgca

SEQ ID NO: 77936 - RNA, 21 nt, synthetic construct
  source 1..21: mol_type = other RNA
caggactactgtggggacaaa

SEQ ID NO: 77937 - RNA, 21 nt, synthetic construct
  source 1..21: mol_type = other RNA
ccctggcacccaaggacccca

SEQ ID NO: 77938 - RNA, 21 nt, synthetic construct
  source 1..21: mol_type = other RNA
aatgggcaccgcccagagcca

SEQ ID NO: 77939 - RNA, 21 nt, synthetic construct
  source 1..21: mol_type = other RNA
gcttccccaactggaccctga

SEQ ID NO: 77940 - RNA, 21 nt, synthetic construct
  source 1..21: mol_type = other RNA
ccgggtcctctgctgcagtga

SEQ ID NO: 77941 - RNA, 21 nt, synthetic construct
  source 1..21: mol_type = other RNA
ccacggccaccccgacctcca

SEQ ID NO: 77942 - RNA, 21 nt, synthetic construct
  source 1..21: mol_type = other RNA
acccacggccaccatgtccaa

SEQ ID NO: 77943 - RNA, 21 nt, synthetic construct
  source 1..21: mol_type = other RNA
ccacaactggggccaccggca

SEQ ID NO: 77944 - RNA, 21 nt, synthetic construct
  source 1..21: mol_type = other RNA
ggaacagctcacactaccaaa

SEQ ID NO: 77945 - RNA, 21 nt, synthetic construct
  source 1..21: mol_type = other RNA
aagtgccaactaccacaacca

SEQ ID NO: 77946 - RNA, 21 nt, synthetic construct
  source 1..21: mol_type = other RNA
gggaccacccacaccgccaca

SEQ ID NO: 77947 - RNA, 21 nt, synthetic construct
  source 1..21: mol_type = other RNA
tgctgaccaccaccgccacca

SEQ ID NO: 77948 - RNA, 21 nt, synthetic construct
  source 1..21: mol_type = other RNA
caccctagcagcagaaccaca

SEQ ID NO: 77949 - RNA, 21 nt, synthetic construct
  source 1..21: mol_type = other RNA
accctagcagcagaaccacca

SEQ ID NO: 77950 - RNA, 21 nt, synthetic construct
  source 1..21: mol_type = other RNA
ctagcagcagaaccaccgaga

SEQ ID NO: 77951 - RNA, 21 nt, synthetic construct
  source 1..21: mol_type = other RNA
agtggctggactacagctaca

SEQ ID NO: 77952 - RNA, 21 nt, synthetic construct
  source 1..21: mol_type = other RNA
accccatgccggggccctcta

SEQ ID NO: 77953 - RNA, 21 nt, synthetic construct
  source 1..21: mol_type = other RNA
acccacggccaccatgtccaa

SEQ ID NO: 77954 - RNA, 21 nt, synthetic construct
  source 1..21: mol_type = other RNA
cctccactccagagactgtca

SEQ ID NO: 77955 - RNA, 21 nt, synthetic construct
  source 1..21: mol_type = other RNA
ggaacagctcacactaccaaa

SEQ ID NO: 77956 - RNA, 21 nt, synthetic construct
  source 1..21: mol_type = other RNA
cttccagtgtggatcagcaca

SEQ ID NO: 77957 - RNA, 21 nt, synthetic construct
  source 1..21: mol_type = other RNA
tgctgaccaccaccgccacca

SEQ ID NO: 77958 - RNA, 21 nt, synthetic construct
  source 1..21: mol_type = other RNA
acaccccagcagcaaccacca

SEQ ID NO: 77959 - RNA, 21 nt, synthetic construct
  source 1..21: mol_type = other RNA
agtggctggactacagctaca

SEQ ID NO: 77960 - RNA, 21 nt, synthetic construct
  source 1..21: mol_type = other RNA
accccatgccggggccctcta

SEQ ID NO: 77961 - RNA, 21 nt, synthetic construct
  source 1..21: mol_type = other RNA
cgtcctccaccccgggaacaa

SEQ ID NO: 77962 - RNA, 21 nt, synthetic construct
  source 1..21: mol_type = other RNA
acccacggccaccatgtccaa

SEQ ID NO: 77963 - RNA, 21 nt, synthetic construct
  source 1..21: mol_type = other RNA
ggaacagctcacactaccaaa

SEQ ID NO: 77964 - RNA, 21 nt, synthetic construct
  source 1..21: mol_type = other RNA
gggaccacccacaccgccaca

SEQ ID NO: 77965 - RNA, 21 nt, synthetic construct
  source 1..21: mol_type = other RNA
cacagccaccggctccaccaa

SEQ ID NO: 77966 - RNA, 21 nt, synthetic construct
  source 1..21: mol_type = other RNA
tgctgaccaccaccgccacca

SEQ ID NO: 77967 - RNA, 21 nt, synthetic construct
  source 1..21: mol_type = other RNA
acaccccagcagcaaccacca

SEQ ID NO: 77968 - RNA, 21 nt, synthetic construct
  source 1..21: mol_type = other RNA
agtggctggactacagctaca

SEQ ID NO: 77969 - RNA, 21 nt, synthetic construct
  source 1..21: mol_type = other RNA
accccatgccggggccctcta

SEQ ID NO: 77970 - RNA, 21 nt, synthetic construct
  source 1..21: mol_type = other RNA
acccacggccaccatgtccaa

SEQ ID NO: 77971 - RNA, 21 nt, synthetic construct
  source 1..21: mol_type = other RNA
ggaacagctcacactaccaaa

SEQ ID NO: 77972 - RNA, 21 nt, synthetic construct
  source 1..21: mol_type = other RNA
tgctgaccaccaccgccacca

SEQ ID NO: 77973 - RNA, 21 nt, synthetic construct
  source 1..21: mol_type = other RNA
acaccccagcagcaaccacca

SEQ ID NO: 77974 - RNA, 21 nt, synthetic construct
  source 1..21: mol_type = other RNA
agtggctggactacagctaca

SEQ ID NO: 77975 - RNA, 21 nt, synthetic construct
  source 1..21: mol_type = other RNA
accccatgccggggccctcta

SEQ ID NO: 77976 - RNA, 21 nt, synthetic construct
  source 1..21: mol_type = other RNA
cgtcctccaccccgggaacaa

SEQ ID NO: 77977 - RNA, 21 nt, synthetic construct
  source 1..21: mol_type = other RNA
acccacggccaccatgtccaa

SEQ ID NO: 77978 - RNA, 21 nt, synthetic construct
  source 1..21: mol_type = other RNA
cctccactccagagactgtca

SEQ ID NO: 77979 - RNA, 21 nt, synthetic construct
  source 1..21: mol_type = other RNA
ggaacagctcacactaccaaa

SEQ ID NO: 77980 - RNA, 21 nt, synthetic construct
  source 1..21: mol_type = other RNA
ggggaagtcatctacaataaa

SEQ ID NO: 77981 - RNA, 21 nt, synthetic construct
  source 1..21: mol_type = other RNA
gcctgcctgtgtgcccgccaa

SEQ ID NO: 77982 - RNA, 21 nt, synthetic construct
  source 1..21: mol_type = other RNA
ctgtcccaccttccgctgcaa

SEQ ID NO: 77983 - RNA, 21 nt, synthetic construct
  source 1..21: mol_type = other RNA
tccggagaccacccacaccta

SEQ ID NO: 77984 - RNA, 21 nt, synthetic construct
  source 1..21: mol_type = other RNA
tccggagaccacccacaccta

SEQ ID NO: 77985 - RNA, 21 nt, synthetic construct
  source 1..21: mol_type = other RNA
tgcccacaacgccaggctgaa

SEQ ID NO: 77986 - RNA, 21 nt, synthetic construct
  source 1..21: mol_type = other RNA
cacaatccacccctcctccaa

SEQ ID NO: 77987 - RNA, 21 nt, synthetic construct
  source 1..21: mol_type = other RNA
cacaatccacccctcctccaa

SEQ ID NO: 77988 - RNA, 21 nt, synthetic construct
  source 1..21: mol_type = other RNA
gcctgtgcgacctcacctgca

SEQ ID NO: 77989 - RNA, 21 nt, synthetic construct
  source 1..21: mol_type = other RNA
acgtccggccgctggggcaga

SEQ ID NO: 77990 - RNA, 21 nt, synthetic construct
  source 1..21: mol_type = other RNA
acgtcctcgcccacccggcga

SEQ ID NO: 77991 - RNA, 21 nt, synthetic construct
  source 1..21: mol_type = other RNA
tcatcgtggtgcagacaggca

SEQ ID NO: 77992 - RNA, 21 nt, synthetic construct
  source 1..21: mol_type = other RNA
ccactgcctccacggttccca

SEQ ID NO: 77993 - RNA, 21 nt, synthetic construct
  source 1..21: mol_type = other RNA
tggtgccgcaggcagagacca

SEQ ID NO: 77994 - RNA, 21 nt, synthetic construct
  source 1..21: mol_type = other RNA
ccggccccagaagggtgagga

SEQ ID NO: 77995 - RNA, 21 nt, synthetic construct
  source 1..21: mol_type = other RNA
gacatcacgcactctggctga

SEQ ID NO: 77996 - RNA, 21 nt, synthetic construct
  source 1..21: mol_type = other RNA
cctggagaggtggtgcacgaa

SEQ ID NO: 77997 - RNA, 21 nt, synthetic construct
  source 1..21: mol_type = other RNA
taccacaaccacgggcttcaa

SEQ ID NO: 77998 - RNA, 21 nt, synthetic construct
  source 1..21: mol_type = other RNA
taccacaaccacgggcttcaa

SEQ ID NO: 77999 - RNA, 21 nt, synthetic construct
  source 1..21: mol_type = other RNA
taccacaaccacgggcttcaa

SEQ ID NO: 78000 - RNA, 21 nt, synthetic construct
  source 1..21: mol_type = other RNA
taccacaaccacgggcttcaa

SEQ ID NO: 78001 - RNA, 21 nt, synthetic construct
  source 1..21: mol_type = other RNA
taccacaaccacgggcttcaa

SEQ ID NO: 78002 - RNA, 21 nt, synthetic construct
  source 1..21: mol_type = other RNA
gccactgcctccacggttcca

SEQ ID NO: 78003 - RNA, 21 nt, synthetic construct
  source 1..21: mol_type = other RNA
gtacaatgggcaccgcccaga

SEQ ID NO: 78004 - RNA, 21 nt, synthetic construct
  source 1..21: mol_type = other RNA
gggaccggaagaccagcgtga

SEQ ID NO: 78005 - RNA, 21 nt, synthetic construct
  source 1..21: mol_type = other RNA
gctgaccagggctcccccgga

SEQ ID NO: 78006 - RNA, 21 nt, synthetic construct
  source 1..21: mol_type = other RNA
tggacccaaagcctgtggcca

SEQ ID NO: 78007 - RNA, 21 nt, synthetic construct
  source 1..21: mol_type = other RNA
ccctgtgctggctgacatcga

SEQ ID NO: 78008 - RNA, 21 nt, synthetic construct
  source 1..21: mol_type = other RNA
accccaacccagaccacagca

SEQ ID NO: 78009 - RNA, 21 nt, synthetic construct
  source 1..21: mol_type = other RNA
ggcggccctcacctcgcagaa

SEQ ID NO: 78010 - RNA, 21 nt, synthetic construct
  source 1..21: mol_type = other RNA
tccgggtcctctgctgcagta

SEQ ID NO: 78011 - RNA, 21 nt, synthetic construct
  source 1..21: mol_type = other RNA
ttgggaccaccgggaccctca

SEQ ID NO: 78012 - RNA, 21 nt, synthetic construct
  source 1..21: mol_type = other RNA
ttgggaccaccgggaccctca

SEQ ID NO: 78013 - RNA, 21 nt, synthetic construct
  source 1..21: mol_type = other RNA
caagcccctgccctgtgacga

SEQ ID NO: 78014 - RNA, 21 nt, synthetic construct
  source 1..21: mol_type = other RNA
gcaaggcggccgcctgtccaa

SEQ ID NO: 78015 - RNA, 21 nt, synthetic construct
  source 1..21: mol_type = other RNA
agcagccccacatcggcccca

SEQ ID NO: 78016 - RNA, 21 nt, synthetic construct
  source 1..21: mol_type = other RNA
ggaccaccgggaccctcccaa

SEQ ID NO: 78017 - RNA, 21 nt, synthetic construct
  source 1..21: mol_type = other RNA
ggaccaccgggaccctcccaa

SEQ ID NO: 78018 - RNA, 21 nt, synthetic construct
  source 1..21: mol_type = other RNA
ttcccgacatgccgctggaga

SEQ ID NO: 78019 - RNA, 21 nt, synthetic construct
  source 1..21: mol_type = other RNA
acggtgacttcccacacccta

SEQ ID NO: 78020 - RNA, 21 nt, synthetic construct
  source 1..21: mol_type = other RNA
gatccacggccaccccgacca

SEQ ID NO: 78021 - RNA, 21 nt, synthetic construct
  source 1..21: mol_type = other RNA
ccccagtgccgaacaccatga

SEQ ID NO: 78022 - RNA, 21 nt, synthetic construct
  source 1..21: mol_type = other RNA
ttccacggtgacttcccacaa

SEQ ID NO: 78023 - RNA, 21 nt, synthetic construct
  source 1..21: mol_type = other RNA
cacggccacacccagcaagaa

SEQ ID NO: 78024 - RNA, 21 nt, synthetic construct
  source 1..21: mol_type = other RNA
cacggccacacccagcaagaa

SEQ ID NO: 78025 - RNA, 21 nt, synthetic construct
  source 1..21: mol_type = other RNA
ttccacggtgacttcccacaa

SEQ ID NO: 78026 - RNA, 21 nt, synthetic construct
  source 1..21: mol_type = other RNA
cacggccacacccagcaagaa

SEQ ID NO: 78027 - RNA, 21 nt, synthetic construct
  source 1..21: mol_type = other RNA
cacacccccaaagtggtgaca

SEQ ID NO: 78028 - RNA, 21 nt, synthetic construct
  source 1..21: mol_type = other RNA
ttgggcctcctctgcggagca

SEQ ID NO: 78029 - RNA, 21 nt, synthetic construct
  source 1..21: mol_type = other RNA
gcacctcgaccctgctgccca

SEQ ID NO: 78030 - RNA, 21 nt, synthetic construct
  source 1..21: mol_type = other RNA
gcacctcgaccctgctgccca

SEQ ID NO: 78031 - RNA, 21 nt, synthetic construct
  source 1..21: mol_type = other RNA
gcacctcgaccctgctgccca

SEQ ID NO: 78032 - RNA, 21 nt, synthetic construct
  source 1..21: mol_type = other RNA
gcacctcgaccctgctgccca

SEQ ID NO: 78033 - RNA, 21 nt, synthetic construct
  source 1..21: mol_type = other RNA
ggtgtcggatgggagtgggga

SEQ ID NO: 78034 - RNA, 21 nt, synthetic construct
  source 1..21: mol_type = other RNA
ccccctcaacatgcagcacca

SEQ ID NO: 78035 - RNA, 21 nt, synthetic construct
  source 1..21: mol_type = other RNA
cggggggctatggcagtgcca

SEQ ID NO: 78036 - RNA, 21 nt, synthetic construct
  source 1..21: mol_type = other RNA
acacccacaaccagtggctca

SEQ ID NO: 78037 - RNA, 21 nt, synthetic construct
  source 1..21: mol_type = other RNA
acacccacaaccagtggctca

SEQ ID NO: 78038 - RNA, 21 nt, synthetic construct
  source 1..21: mol_type = other RNA
ccgtccccgtccccccaccca

SEQ ID NO: 78039 - RNA, 21 nt, synthetic construct
  source 1..21: mol_type = other RNA
accctgcacggacacctgcta

SEQ ID NO: 78040 - RNA, 21 nt, synthetic construct
  source 1..21: mol_type = other RNA
acggacacctgctccaaccca

SEQ ID NO: 78041 - RNA, 21 nt, synthetic construct
  source 1..21: mol_type = other RNA
cgacctgcatggtgactgcaa

SEQ ID NO: 78042 - RNA, 21 nt, synthetic construct
  source 1..21: mol_type = other RNA
aacgagaactgcctgaaagca

SEQ ID NO: 78043 - RNA, 21 nt, synthetic construct
  source 1..21: mol_type = other RNA
tcagcggggtggtggaggcca

SEQ ID NO: 78044 - RNA, 21 nt, synthetic construct
  source 1..21: mol_type = other RNA
tacaacccacatgggggctga

SEQ ID NO: 78045 - RNA, 21 nt, synthetic construct
  source 1..21: mol_type = other RNA
ggcaccatcatcaggaaggca

SEQ ID NO: 78046 - RNA, 21 nt, synthetic construct
  source 1..21: mol_type = other RNA
ctcagccctccctcagtgcca

SEQ ID NO: 78047 - RNA, 21 nt, synthetic construct
  source 1..21: mol_type = other RNA
tgtgcctaccccaacccagaa

SEQ ID NO: 78048 - RNA, 21 nt, synthetic construct
  source 1..21: mol_type = other RNA
gccccaacaacaatggcaaca

SEQ ID NO: 78049 - RNA, 21 nt, synthetic construct
  source 1..21: mol_type = other RNA
ccccaacaacaatggcaacca

SEQ ID NO: 78050 - RNA, 21 nt, synthetic construct
  source 1..21: mol_type = other RNA
caacaatggcaacctccagaa

SEQ ID NO: 78051 - RNA, 21 nt, synthetic construct
  source 1..21: mol_type = other RNA
tccacggccaccccgacctca

SEQ ID NO: 78052 - RNA, 21 nt, synthetic construct
  source 1..21: mol_type = other RNA
cagcacaaccaccacacccaa

SEQ ID NO: 78053 - RNA, 21 nt, synthetic construct
  source 1..21: mol_type = other RNA
accaccacaactgtggccaca

SEQ ID NO: 78054 - RNA, 21 nt, synthetic construct
  source 1..21: mol_type = other RNA
ctgggacaactcccatcccca

SEQ ID NO: 78055 - RNA, 21 nt, synthetic construct
  source 1..21: mol_type = other RNA
cttccacggtgacttcccaca

SEQ ID NO: 78056 - RNA, 21 nt, synthetic construct
  source 1..21: mol_type = other RNA
tccgtgcggccggaggggcca

SEQ ID NO: 78057 - RNA, 21 nt, synthetic construct
  source 1..21: mol_type = other RNA
cagcacaaccaccacacccaa

SEQ ID NO: 78058 - RNA, 21 nt, synthetic construct
  source 1..21: mol_type = other RNA
accaccacaactgtggccaca

SEQ ID NO: 78059 - RNA, 21 nt, synthetic construct
  source 1..21: mol_type = other RNA
tccgtgcggccggaggggcca

SEQ ID NO: 78060 - RNA, 21 nt, synthetic construct
  source 1..21: mol_type = other RNA
ccgggaacagctccccctcca

SEQ ID NO: 78061 - RNA, 21 nt, synthetic construct
  source 1..21: mol_type = other RNA
cagcacaaccaccacacccaa

SEQ ID NO: 78062 - RNA, 21 nt, synthetic construct
  source 1..21: mol_type = other RNA
accaccacaactgtggccaca

SEQ ID NO: 78063 - RNA, 21 nt, synthetic construct
  source 1..21: mol_type = other RNA
cttccacggtgacttcccaca

SEQ ID NO: 78064 - RNA, 21 nt, synthetic construct
  source 1..21: mol_type = other RNA
cagcacaaccaccacacccaa

SEQ ID NO: 78065 - RNA, 21 nt, synthetic construct
  source 1..21: mol_type = other RNA
acccacaaccagtggctccaa

SEQ ID NO: 78066 - RNA, 21 nt, synthetic construct
  source 1..21: mol_type = other RNA
accaccacaactgtggccaca

SEQ ID NO: 78067 - RNA, 21 nt, synthetic construct
  source 1..21: mol_type = other RNA
tcccccatcactgatcaccaa

SEQ ID NO: 78068 - RNA, 21 nt, synthetic construct
  source 1..21: mol_type = other RNA
tccgtgcggccggaggggcca

SEQ ID NO: 78069 - RNA, 21 nt, synthetic construct
  source 1..21: mol_type = other RNA
ccgggaacagctccccctcca

SEQ ID NO: 78070 - RNA, 21 nt, synthetic construct
  source 1..21: mol_type = other RNA
gggccaccagttccacgtcca

SEQ ID NO: 78071 - RNA, 21 nt, synthetic construct
  source 1..21: mol_type = other RNA
gactgcaactgcccttccaga

SEQ ID NO: 78072 - RNA, 21 nt, synthetic construct
  source 1..21: mol_type = other RNA
cagcacaaccaccacacccaa

SEQ ID NO: 78073 - RNA, 21 nt, synthetic construct
  source 1..21: mol_type = other RNA
acccacaaccagtggctccaa

SEQ ID NO: 78074 - RNA, 21 nt, synthetic construct
  source 1..21: mol_type = other RNA
accaccacaactgtggccaca

SEQ ID NO: 78075 - RNA, 21 nt, synthetic construct
  source 1..21: mol_type = other RNA
ggacccgagccagccctgtga

SEQ ID NO: 78076 - RNA, 21 nt, synthetic construct
  source 1..21: mol_type = other RNA
cccccgcgccctcagcatcca

SEQ ID NO: 78077 - RNA, 21 nt, synthetic construct
  source 1..21: mol_type = other RNA
aagacgtggctggtccccgaa

SEQ ID NO: 78078 - RNA, 21 nt, synthetic construct
  source 1..21: mol_type = other RNA
cagagctctgccgcgcccgga

SEQ ID NO: 78079 - RNA, 21 nt, synthetic construct
  source 1..21: mol_type = other RNA
cccacagctggaggggatgga

SEQ ID NO: 78080 - RNA, 21 nt, synthetic construct
  source 1..21: mol_type = other RNA
gcctgcccctgcgtgggacca

SEQ ID NO: 78081 - RNA, 21 nt, synthetic construct
  source 1..21: mol_type = other RNA
aggagtccatctgcacccaga

SEQ ID NO: 78082 - RNA, 21 nt, synthetic construct
  source 1..21: mol_type = other RNA
agaggcgggtccacgaggaga

SEQ ID NO: 78083 - RNA, 21 nt, synthetic construct
  source 1..21: mol_type = other RNA
ccgtgctcctgctgcccacca

SEQ ID NO: 78084 - RNA, 21 nt, synthetic construct
  source 1..21: mol_type = other RNA
cgacaggcaaggcggccgcca

SEQ ID NO: 78085 - RNA, 21 nt, synthetic construct
  source 1..21: mol_type = other RNA
caggcaaggcggccgcctgta

SEQ ID NO: 78086 - RNA, 21 nt, synthetic construct
  source 1..21: mol_type = other RNA
aggcggccgcctgtccatgca

SEQ ID NO: 78087 - RNA, 21 nt, synthetic construct
  source 1..21: mol_type = other RNA
ataaccacggtggtgaccaca

SEQ ID NO: 78088 - RNA, 21 nt, synthetic construct
  source 1..21: mol_type = other RNA
ataaccacggtggtgaccaca

SEQ ID NO: 78089 - RNA, 21 nt, synthetic construct
  source 1..21: mol_type = other RNA
ctggccgcctgcgcccaggaa

SEQ ID NO: 78090 - RNA, 21 nt, synthetic construct
  source 1..21: mol_type = other RNA
atcctcacagagccgagcaca

SEQ ID NO: 78091 - RNA, 21 nt, synthetic construct
  source 1..21: mol_type = other RNA
atcctcacagagccgagcaca

SEQ ID NO: 78092 - RNA, 21 nt, synthetic construct
  source 1..21: mol_type = other RNA
atcctcacagagccgagcaca

SEQ ID NO: 78093 - RNA, 21 nt, synthetic construct
  source 1..21: mol_type = other RNA
cacccatgtccaccatgtcca

SEQ ID NO: 78094 - RNA, 21 nt, synthetic construct
  source 1..21: mol_type = other RNA
atcctcacagagccgagcaca

SEQ ID NO: 78095 - RNA, 21 nt, synthetic construct
  source 1..21: mol_type = other RNA
actgcctccacggttcccaga

SEQ ID NO: 78096 - RNA, 21 nt, synthetic construct
  source 1..21: mol_type = other RNA
ctcctccactccggagaccaa

SEQ ID NO: 78097 - RNA, 21 nt, synthetic construct
  source 1..21: mol_type = other RNA
cagcctggtgtccccctggga

SEQ ID NO: 78098 - RNA, 21 nt, synthetic construct
  source 1..21: mol_type = other RNA
ctcctccactccggagaccaa

SEQ ID NO: 78099 - RNA, 21 nt, synthetic construct
  source 1..21: mol_type = other RNA
caaccacgggcttcacagcca

SEQ ID NO: 78100 - RNA, 21 nt, synthetic construct
  source 1..21: mol_type = other RNA
caaccacgggcttcacagcca

SEQ ID NO: 78101 - RNA, 21 nt, synthetic construct
  source 1..21: mol_type = other RNA
caaccacgggcttcacagcca

SEQ ID NO: 78102 - RNA, 21 nt, synthetic construct
  source 1..21: mol_type = other RNA
caaccacgggcttcacagcca

SEQ ID NO: 78103 - RNA, 21 nt, synthetic construct
  source 1..21: mol_type = other RNA
ggaggccacgggcgcagccta

SEQ ID NO: 78104 - RNA, 21 nt, synthetic construct
  source 1..21: mol_type = other RNA
cagccaccagctccaaagcca

SEQ ID NO: 78105 - RNA, 21 nt, synthetic construct
  source 1..21: mol_type = other RNA
ccacgggatggccgtgtccta

SEQ ID NO: 78106 - RNA, 21 nt, synthetic construct
  source 1..21: mol_type = other RNA
cctatccccccagtgctgaca

SEQ ID NO: 78107 - RNA, 21 nt, synthetic construct
  source 1..21: mol_type = other RNA
cctatccccccagtgctgaca

SEQ ID NO: 78108 - RNA, 21 nt, synthetic construct
  source 1..21: mol_type = other RNA
aaagagccgctgaccacgaga

SEQ ID NO: 78109 - RNA, 21 nt, synthetic construct
  source 1..21: mol_type = other RNA
aaccagaggctccacggtgaa

SEQ ID NO: 78110 - RNA, 21 nt, synthetic construct
  source 1..21: mol_type = other RNA
aaccagaggctccacggtgaa

SEQ ID NO: 78111 - RNA, 21 nt, synthetic construct
  source 1..21: mol_type = other RNA
cccctcctccgtcccggggaa

SEQ ID NO: 78112 - RNA, 21 nt, synthetic construct
  source 1..21: mol_type = other RNA
tctactccagagaccacccaa

SEQ ID NO: 78113 - RNA, 21 nt, synthetic construct
  source 1..21: mol_type = other RNA
cactctgggaacagctcacaa

SEQ ID NO: 78114 - RNA, 21 nt, synthetic construct
  source 1..21: mol_type = other RNA
ccctgagacccactggcttca

SEQ ID NO: 78115 - RNA, 21 nt, synthetic construct
  source 1..21: mol_type = other RNA
cctcactgtcaccatggtgca

SEQ ID NO: 78116 - RNA, 21 nt, synthetic construct
  source 1..21: mol_type = other RNA
tgaaacctgggtcaacagcca

SEQ ID NO: 78117 - RNA, 21 nt, synthetic construct
  source 1..21: mol_type = other RNA
gacgccctggaacaaactaaa

SEQ ID NO: 78118 - RNA, 21 nt, synthetic construct
  source 1..21: mol_type = other RNA
ccgtgtacctctgtgaggcta

SEQ ID NO: 78119 - RNA, 21 nt, synthetic construct
  source 1..21: mol_type = other RNA
ctaccagctttacacccatca

SEQ ID NO: 78120 - RNA, 21 nt, synthetic construct
  source 1..21: mol_type = other RNA
ctaccagctttacacccatca

SEQ ID NO: 78121 - RNA, 21 nt, synthetic construct
  source 1..21: mol_type = other RNA
gtgccccgagcgcgtgccgga

SEQ ID NO: 78122 - RNA, 21 nt, synthetic construct
  source 1..21: mol_type = other RNA
cacaacgccaggctgacccca

SEQ ID NO: 78123 - RNA, 21 nt, synthetic construct
  source 1..21: mol_type = other RNA
acaacgccaggctgaccccga

SEQ ID NO: 78124 - RNA, 21 nt, synthetic construct
  source 1..21: mol_type = other RNA
gccaatgccaggaacagctta

SEQ ID NO: 78125 - RNA, 21 nt, synthetic construct
  source 1..21: mol_type = other RNA
gtgtgcagcccccatggtgta

SEQ ID NO: 78126 - RNA, 21 nt, synthetic construct
  source 1..21: mol_type = other RNA
cgaggaggactgcccctgtga

SEQ ID NO: 78127 - RNA, 21 nt, synthetic construct
  source 1..21: mol_type = other RNA
gaggaggactgcccctgtgta

SEQ ID NO: 78128 - RNA, 21 nt, synthetic construct
  source 1..21: mol_type = other RNA
cccgaagtgcccacccagcca

SEQ ID NO: 78129 - RNA, 21 nt, synthetic construct
  source 1..21: mol_type = other RNA
ctgcacacccagtggcatcca

SEQ ID NO: 78130 - RNA, 21 nt, synthetic construct
  source 1..21: mol_type = other RNA
gtagcccggggctgaccagga

SEQ ID NO: 78131 - RNA, 21 nt, synthetic construct
  source 1..21: mol_type = other RNA
gctcagcccttccagggacga

SEQ ID NO: 78132 - RNA, 21 nt, synthetic construct
  source 1..21: mol_type = other RNA
cactgagaagcacagccacca

SEQ ID NO: 78133 - RNA, 21 nt, synthetic construct
  source 1..21: mol_type = other RNA
ccatcactgaccaccacggca

SEQ ID NO: 78134 - RNA, 21 nt, synthetic construct
  source 1..21: mol_type = other RNA
atcactgaccaccacggccaa

SEQ ID NO: 78135 - RNA, 21 nt, synthetic construct
  source 1..21: mol_type = other RNA
atcacggccaccggctccaca

SEQ ID NO: 78136 - RNA, 21 nt, synthetic construct
  source 1..21: mol_type = other RNA
gtgagcaccacggccacgaca

SEQ ID NO: 78137 - RNA, 21 nt, synthetic construct
  source 1..21: mol_type = other RNA
cactgagaagcacagccacca

SEQ ID NO: 78138 - RNA, 21 nt, synthetic construct
  source 1..21: mol_type = other RNA
ccatcactgaccaccacggca

SEQ ID NO: 78139 - RNA, 21 nt, synthetic construct
  source 1..21: mol_type = other RNA
atcactgaccaccacggccaa

SEQ ID NO: 78140 - RNA, 21 nt, synthetic construct
  source 1..21: mol_type = other RNA
atcacggccaccggctccaca

SEQ ID NO: 78141 - RNA, 21 nt, synthetic construct
  source 1..21: mol_type = other RNA
cactgagaagcacagccacca

SEQ ID NO: 78142 - RNA, 21 nt, synthetic construct
  source 1..21: mol_type = other RNA
ccatcactgaccaccacggca

SEQ ID NO: 78143 - RNA, 21 nt, synthetic construct
  source 1..21: mol_type = other RNA
atcactgaccaccacggccaa

SEQ ID NO: 78144 - RNA, 21 nt, synthetic construct
  source 1..21: mol_type = other RNA
gcaaccaccagtaccacccaa

SEQ ID NO: 78145 - RNA, 21 nt, synthetic construct
  source 1..21: mol_type = other RNA
gtgagcaccacggccacgaca

SEQ ID NO: 78146 - RNA, 21 nt, synthetic construct
  source 1..21: mol_type = other RNA
cactgagaagcacagccacca

SEQ ID NO: 78147 - RNA, 21 nt, synthetic construct
  source 1..21: mol_type = other RNA
atcacggccaccggctccaca

SEQ ID NO: 78148 - RNA, 21 nt, synthetic construct
  source 1..21: mol_type = other RNA
gtgagcaccacggccacgaca

SEQ ID NO: 78149 - RNA, 21 nt, synthetic construct
  source 1..21: mol_type = other RNA
aactgcccttccagcactgaa

SEQ ID NO: 78150 - RNA, 21 nt, synthetic construct
  source 1..21: mol_type = other RNA
cactgagaagcacagccacca

SEQ ID NO: 78151 - RNA, 21 nt, synthetic construct
  source 1..21: mol_type = other RNA
ccatcactgaccaccacggca

SEQ ID NO: 78152 - RNA, 21 nt, synthetic construct
  source 1..21: mol_type = other RNA
atcactgaccaccacggccaa

SEQ ID NO: 78153 - RNA, 21 nt, synthetic construct
  source 1..21: mol_type = other RNA
atcacggccaccggctccaca

SEQ ID NO: 78154 - RNA, 21 nt, synthetic construct
  source 1..21: mol_type = other RNA
agcacagccacaaaatccaca

SEQ ID NO: 78155 - RNA, 21 nt, synthetic construct
  source 1..21: mol_type = other RNA
cagggcgcctgtcccacctca

SEQ ID NO: 78156 - RNA, 21 nt, synthetic construct
  source 1..21: mol_type = other RNA
gcatgtggggcggctcccaca

SEQ ID NO: 78157 - RNA, 21 nt, synthetic construct
  source 1..21: mol_type = other RNA
ggatggcggagggctgcttca

SEQ ID NO: 78158 - RNA, 21 nt, synthetic construct
  source 1..21: mol_type = other RNA
ccgtggcttcccggcccagga

SEQ ID NO: 78159 - RNA, 21 nt, synthetic construct
  source 1..21: mol_type = other RNA
ggtgtacctggactgcagcaa

SEQ ID NO: 78160 - RNA, 21 nt, synthetic construct
  source 1..21: mol_type = other RNA
cgggtggcgactgcgagtgta

SEQ ID NO: 78161 - RNA, 21 nt, synthetic construct
  source 1..21: mol_type = other RNA
gagactttgagacgtttgaaa

SEQ ID NO: 78162 - RNA, 21 nt, synthetic construct
  source 1..21: mol_type = other RNA
ccagatacacaagcaccctta

SEQ ID NO: 78163 - RNA, 21 nt, synthetic construct
  source 1..21: mol_type = other RNA
cacagagccttccacggggaa

SEQ ID NO: 78164 - RNA, 21 nt, synthetic construct
  source 1..21: mol_type = other RNA
cacagagccttccacggggaa

SEQ ID NO: 78165 - RNA, 21 nt, synthetic construct
  source 1..21: mol_type = other RNA
acatgggcatctgcgtgcaga

SEQ ID NO: 78166 - RNA, 21 nt, synthetic construct
  source 1..21: mol_type = other RNA
ggaccacccacaccgccagaa

SEQ ID NO: 78167 - RNA, 21 nt, synthetic construct
  source 1..21: mol_type = other RNA
ataaccacggtggtgaccata

SEQ ID NO: 78168 - RNA, 21 nt, synthetic construct
  source 1..21: mol_type = other RNA
ataaccacggtggtgaccata

SEQ ID NO: 78169 - RNA, 21 nt, synthetic construct
  source 1..21: mol_type = other RNA
acgcggggggccagccgcgga

SEQ ID NO: 78170 - RNA, 21 nt, synthetic construct
  source 1..21: mol_type = other RNA
tgctgtgcctaccccaaccca

SEQ ID NO: 78171 - RNA, 21 nt, synthetic construct
  source 1..21: mol_type = other RNA
gaccagggctcccccggccaa

SEQ ID NO: 78172 - RNA, 21 nt, synthetic construct
  source 1..21: mol_type = other RNA
gtgacaatgccatccctctca

SEQ ID NO: 78173 - RNA, 21 nt, synthetic construct
  source 1..21: mol_type = other RNA
caggggccgccttgaggtgca

SEQ ID NO: 78174 - RNA, 21 nt, synthetic construct
  source 1..21: mol_type = other RNA
cacacctacacccacgtggaa

SEQ ID NO: 78175 - RNA, 21 nt, synthetic construct
  source 1..21: mol_type = other RNA
caattccacggccacacccta

SEQ ID NO: 78176 - RNA, 21 nt, synthetic construct
  source 1..21: mol_type = other RNA
gggtgacttccactacaagaa

SEQ ID NO: 78177 - RNA, 21 nt, synthetic construct
  source 1..21: mol_type = other RNA
tgctggaggcgtccaacggca

SEQ ID NO: 78178 - RNA, 21 nt, synthetic construct
  source 1..21: mol_type = other RNA
tcaccctgcacggacacctga

SEQ ID NO: 78179 - RNA, 21 nt, synthetic construct
  source 1..21: mol_type = other RNA
gggcacctccttcaacaccaa

SEQ ID NO: 78180 - RNA, 21 nt, synthetic construct
  source 1..21: mol_type = other RNA
ccgcccaggagtgcccctgca

SEQ ID NO: 78181 - RNA, 21 nt, synthetic construct
  source 1..21: mol_type = other RNA
aggaggactgcccctgtgtga

SEQ ID NO: 78182 - RNA, 21 nt, synthetic construct
  source 1..21: mol_type = other RNA
acaacccacatgggggctgta

SEQ ID NO: 78183 - RNA, 21 nt, synthetic construct
  source 1..21: mol_type = other RNA
ggctgctacccgaagtgccca

SEQ ID NO: 78184 - RNA, 21 nt, synthetic construct
  source 1..21: mol_type = other RNA
acacccagtggcatccagtga

SEQ ID NO: 78185 - RNA, 21 nt, synthetic construct
  source 1..21: mol_type = other RNA
caccaacccctcctcaactca

SEQ ID NO: 78186 - RNA, 21 nt, synthetic construct
  source 1..21: mol_type = other RNA
tgccgaacaccatggccacca

SEQ ID NO: 78187 - RNA, 21 nt, synthetic construct
  source 1..21: mol_type = other RNA
caccaacccctcctcaactca

SEQ ID NO: 78188 - RNA, 21 nt, synthetic construct
  source 1..21: mol_type = other RNA
ggccccacggccaccccgtca

SEQ ID NO: 78189 - RNA, 21 nt, synthetic construct
  source 1..21: mol_type = other RNA
caccaacccctcctcaactca

SEQ ID NO: 78190 - RNA, 21 nt, synthetic construct
  source 1..21: mol_type = other RNA
accagtaccacccagcactca

SEQ ID NO: 78191 - RNA, 21 nt, synthetic construct
  source 1..21: mol_type = other RNA
cggccaccacaaccagggcca

SEQ ID NO: 78192 - RNA, 21 nt, synthetic construct
  source 1..21: mol_type = other RNA
ctgatcaccacggccactaca

SEQ ID NO: 78193 - RNA, 21 nt, synthetic construct
  source 1..21: mol_type = other RNA
caccaacccctcctcaactca

SEQ ID NO: 78194 - RNA, 21 nt, synthetic construct
  source 1..21: mol_type = other RNA
ggccccacggccaccccgtca

SEQ ID NO: 78195 - RNA, 21 nt, synthetic construct
  source 1..21: mol_type = other RNA
caccaacccctcctcaactca

SEQ ID NO: 78196 - RNA, 21 nt, synthetic construct
  source 1..21: mol_type = other RNA
tccgccccgctgtcctcgcca

SEQ ID NO: 78197 - RNA, 21 nt, synthetic construct
  source 1..21: mol_type = other RNA
ccccgggccgagaacccctga

SEQ ID NO: 78198 - RNA, 21 nt, synthetic construct
  source 1..21: mol_type = other RNA
cgtgggtgaaaccggccccaa

SEQ ID NO: 78199 - RNA, 21 nt, synthetic construct
  source 1..21: mol_type = other RNA
ggtgacgctcagcctggacga

SEQ ID NO: 78200 - RNA, 21 nt, synthetic construct
  source 1..21: mol_type = other RNA
ggaccacccacaccgccacaa

SEQ ID NO: 78201 - RNA, 21 nt, synthetic construct
  source 1..21: mol_type = other RNA
ggaccacccacaccgccacaa

SEQ ID NO: 78202 - RNA, 21 nt, synthetic construct
  source 1..21: mol_type = other RNA
tcctccgtcccggggaccaca

SEQ ID NO: 78203 - RNA, 21 nt, synthetic construct
  source 1..21: mol_type = other RNA
aggactactgtggggacaaca

SEQ ID NO: 78204 - RNA, 21 nt, synthetic construct
  source 1..21: mol_type = other RNA
tacgagctgatcctccaagaa

SEQ ID NO: 78205 - RNA, 21 nt, synthetic construct
  source 1..21: mol_type = other RNA
catcccggggaccacccacaa

SEQ ID NO: 78206 - RNA, 21 nt, synthetic construct
  source 1..21: mol_type = other RNA
ccgccacagtgctgaccacca

SEQ ID NO: 78207 - RNA, 21 nt, synthetic construct
  source 1..21: mol_type = other RNA
catcccggggaccacccacaa

SEQ ID NO: 78208 - RNA, 21 nt, synthetic construct
  source 1..21: mol_type = other RNA
agaccacccacacctccacaa

SEQ ID NO: 78209 - RNA, 21 nt, synthetic construct
  source 1..21: mol_type = other RNA
catcccggggaccacccacaa

SEQ ID NO: 78210 - RNA, 21 nt, synthetic construct
  source 1..21: mol_type = other RNA
ccgccacagtgctgaccacca

SEQ ID NO: 78211 - RNA, 21 nt, synthetic construct
  source 1..21: mol_type = other RNA
agaccacccacacctccacaa

SEQ ID NO: 78212 - RNA, 21 nt, synthetic construct
  source 1..21: mol_type = other RNA
catcccggggaccacccacaa

SEQ ID NO: 78213 - RNA, 21 nt, synthetic construct
  source 1..21: mol_type = other RNA
agaccacccacacctccacaa

SEQ ID NO: 78214 - RNA, 21 nt, synthetic construct
  source 1..21: mol_type = other RNA
cccccacccgtgccagcccca

SEQ ID NO: 78215 - RNA, 21 nt, synthetic construct
  source 1..21: mol_type = other RNA
ccaggatgggtgccccgagca

SEQ ID NO: 78216 - RNA, 21 nt, synthetic construct
  source 1..21: mol_type = other RNA
ttggctctggcggccatgcta

SEQ ID NO: 78217 - RNA, 21 nt, synthetic construct
  source 1..21: mol_type = other RNA
ccgcttccctggcctttgcaa

SEQ ID NO: 78218 - RNA, 21 nt, synthetic construct
  source 1..21: mol_type = other RNA
ccgtcctcatcaatgggcaga

SEQ ID NO: 78219 - RNA, 21 nt, synthetic construct
  source 1..21: mol_type = other RNA
cagacctgtggcctgtgtgga

SEQ ID NO: 78220 - RNA, 21 nt, synthetic construct
  source 1..21: mol_type = other RNA
agacctgtggcctgtgtggga

SEQ ID NO: 78221 - RNA, 21 nt, synthetic construct
  source 1..21: mol_type = other RNA
cctgtgtggggacttcaacga

SEQ ID NO: 78222 - RNA, 21 nt, synthetic construct
  source 1..21: mol_type = other RNA
cggacccgctgcccttgccga

SEQ ID NO: 78223 - RNA, 21 nt, synthetic construct
  source 1..21: mol_type = other RNA
ggagggcatctgccaccgcaa

SEQ ID NO: 78224 - RNA, 21 nt, synthetic construct
  source 1..21: mol_type = other RNA
gccccacctgcccgtgtgcca

SEQ ID NO: 78225 - RNA, 21 nt, synthetic construct
  source 1..21: mol_type = other RNA
gcagcaccaggagtgtggcta

SEQ ID NO: 78226 - RNA, 21 nt, synthetic construct
  source 1..21: mol_type = other RNA
gcgcgcgcagctctgcgagga

SEQ ID NO: 78227 - RNA, 21 nt, synthetic construct
  source 1..21: mol_type = other RNA
gaggccacgggcgcagcctta

SEQ ID NO: 78228 - RNA, 21 nt, synthetic construct
  source 1..21: mol_type = other RNA
cttccactcgaactgcatgta

SEQ ID NO: 78229 - RNA, 21 nt, synthetic construct
  source 1..21: mol_type = other RNA
gctgcacctgccccgcgggca

SEQ ID NO: 78230 - RNA, 21 nt, synthetic construct
  source 1..21: mol_type = other RNA
ctccccctcctgcccggacga

SEQ ID NO: 78231 - RNA, 21 nt, synthetic construct
  source 1..21: mol_type = other RNA
tacccgaagtgcccacccaga

SEQ ID NO: 78232 - RNA, 21 nt, synthetic construct
  source 1..21: mol_type = other RNA
ccgaagtgcccacccagccaa

SEQ ID NO: 78233 - RNA, 21 nt, synthetic construct
  source 1..21: mol_type = other RNA
gtggcatgtcctggaactcca

SEQ ID NO: 78234 - RNA, 21 nt, synthetic construct
  source 1..21: mol_type = other RNA
cttcaccaccgcctgggtcca

SEQ ID NO: 78235 - RNA, 21 nt, synthetic construct
  source 1..21: mol_type = other RNA
caccgcccagagcccggccta

SEQ ID NO: 78236 - RNA, 21 nt, synthetic construct
  source 1..21: mol_type = other RNA
gcatgcgggggctgatgtgca

SEQ ID NO: 78237 - RNA, 21 nt, synthetic construct
  source 1..21: mol_type = other RNA
tgcgccaacagccaacagaga

SEQ ID NO: 78238 - RNA, 21 nt, synthetic construct
  source 1..21: mol_type = other RNA
agcctgctgtgcctaccccaa

SEQ ID NO: 78239 - RNA, 21 nt, synthetic construct
  source 1..21: mol_type = other RNA
gcaggagggcgtcttcaagaa

SEQ ID NO: 78240 - RNA, 21 nt, synthetic construct
  source 1..21: mol_type = other RNA
caccgaccacagagctggaga

SEQ ID NO: 78241 - RNA, 21 nt, synthetic construct
  source 1..21: mol_type = other RNA
gaccacagagctggagacgga

SEQ ID NO: 78242 - RNA, 21 nt, synthetic construct
  source 1..21: mol_type = other RNA
ccccaccctctcagaaggaca

SEQ ID NO: 78243 - RNA, 21 nt, synthetic construct
  source 1..21: mol_type = other RNA
gtggccacatccacccttcca

SEQ ID NO: 78244 - RNA, 21 nt, synthetic construct
  source 1..21: mol_type = other RNA
ctccctcctccagtccaggga

SEQ ID NO: 78245 - RNA, 21 nt, synthetic construct
  source 1..21: mol_type = other RNA
gagaagcacagccaccacaca

SEQ ID NO: 78246 - RNA, 21 nt, synthetic construct
  source 1..21: mol_type = other RNA
gaagcacagccaccacaccca

SEQ ID NO: 78247 - RNA, 21 nt, synthetic construct
  source 1..21: mol_type = other RNA
catgtccacagccacacccta

SEQ ID NO: 78248 - RNA, 21 nt, synthetic construct
  source 1..21: mol_type = other RNA
tccactccagagactgcccaa

SEQ ID NO: 78249 - RNA, 21 nt, synthetic construct
  source 1..21: mol_type = other RNA
gagactgcccacacctccaca

SEQ ID NO: 78250 - RNA, 21 nt, synthetic construct
  source 1..21: mol_type = other RNA
caccgccacagtgctgaccaa

SEQ ID NO: 78251 - RNA, 21 nt, synthetic construct
  source 1..21: mol_type = other RNA
cgccacagtgctgaccaccaa

SEQ ID NO: 78252 - RNA, 21 nt, synthetic construct
  source 1..21: mol_type = other RNA
agtgctgaccaccaccaccaa

SEQ ID NO: 78253 - RNA, 21 nt, synthetic construct
  source 1..21: mol_type = other RNA
tgggacaactcccatccccca

SEQ ID NO: 78254 - RNA, 21 nt, synthetic construct
  source 1..21: mol_type = other RNA
gggacaactcccatcccccca

SEQ ID NO: 78255 - RNA, 21 nt, synthetic construct
  source 1..21: mol_type = other RNA
ggcgatccctgccccccagca

SEQ ID NO: 78256 - RNA, 21 nt, synthetic construct
  source 1..21: mol_type = other RNA
ccacccacatcacagagccta

SEQ ID NO: 78257 - RNA, 21 nt, synthetic construct
  source 1..21: mol_type = other RNA
tcgactccagccctttccaga

SEQ ID NO: 78258 - RNA, 21 nt, synthetic construct
  source 1..21: mol_type = other RNA
acacccagcaagacccgcaca

SEQ ID NO: 78259 - RNA, 21 nt, synthetic construct
  source 1..21: mol_type = other RNA
ccacggtggtgaccatgggca

SEQ ID NO: 78260 - RNA, 21 nt, synthetic construct
  source 1..21: mol_type = other RNA
ccatgggctgtgagccccaga

SEQ ID NO: 78261 - RNA, 21 nt, synthetic construct
  source 1..21: mol_type = other RNA
tctggcggggactttgacaca

SEQ ID NO: 78262 - RNA, 21 nt, synthetic construct
  source 1..21: mol_type = other RNA
ccaccgtgacggtgcccacca

SEQ ID NO: 78263 - RNA, 21 nt, synthetic construct
  source 1..21: mol_type = other RNA
gagaagcacagccaccacaca

SEQ ID NO: 78264 - RNA, 21 nt, synthetic construct
  source 1..21: mol_type = other RNA
gaagcacagccaccacaccca

SEQ ID NO: 78265 - RNA, 21 nt, synthetic construct
  source 1..21: mol_type = other RNA
tttacagccatcccctcctca

SEQ ID NO: 78266 - RNA, 21 nt, synthetic construct
  source 1..21: mol_type = other RNA
catgtccacagccacacccta

SEQ ID NO: 78267 - RNA, 21 nt, synthetic construct
  source 1..21: mol_type = other RNA
aaccggggccaccggctctga

SEQ ID NO: 78268 - RNA, 21 nt, synthetic construct
  source 1..21: mol_type = other RNA
agtgctgaccaccaccaccaa

SEQ ID NO: 78269 - RNA, 21 nt, synthetic construct
  source 1..21: mol_type = other RNA
ccacccacatcacagagccta

SEQ ID NO: 78270 - RNA, 21 nt, synthetic construct
  source 1..21: mol_type = other RNA
cccacaccccagcagcaacca

SEQ ID NO: 78271 - RNA, 21 nt, synthetic construct
  source 1..21: mol_type = other RNA
acacccagcaagacccgcaca

SEQ ID NO: 78272 - RNA, 21 nt, synthetic construct
  source 1..21: mol_type = other RNA
ccacggtggtgaccatgggca

SEQ ID NO: 78273 - RNA, 21 nt, synthetic construct
  source 1..21: mol_type = other RNA
ccatgggctgtgagccccaga

SEQ ID NO: 78274 - RNA, 21 nt, synthetic construct
  source 1..21: mol_type = other RNA
tctggcggggactttgacaca

SEQ ID NO: 78275 - RNA, 21 nt, synthetic construct
  source 1..21: mol_type = other RNA
ccgtcctccaccccgggaaca

SEQ ID NO: 78276 - RNA, 21 nt, synthetic construct
  source 1..21: mol_type = other RNA
cgggaacagctccccctccca

SEQ ID NO: 78277 - RNA, 21 nt, synthetic construct
  source 1..21: mol_type = other RNA
gaacagaccaccacacccata

SEQ ID NO: 78278 - RNA, 21 nt, synthetic construct
  source 1..21: mol_type = other RNA
cacccacacctccacagtgca

SEQ ID NO: 78279 - RNA, 21 nt, synthetic construct
  source 1..21: mol_type = other RNA
ccactacaactgcagccacta

SEQ ID NO: 78280 - RNA, 21 nt, synthetic construct
  source 1..21: mol_type = other RNA
gagcccagcactacagccaca

SEQ ID NO: 78281 - RNA, 21 nt, synthetic construct
  source 1..21: mol_type = other RNA
ccaccgtgacggtgcccacca

SEQ ID NO: 78282 - RNA, 21 nt, synthetic construct
  source 1..21: mol_type = other RNA
caccacacccacagtcatcaa

SEQ ID NO: 78283 - RNA, 21 nt, synthetic construct
  source 1..21: mol_type = other RNA
ctccctcctccagtccaggga

SEQ ID NO: 78284 - RNA, 21 nt, synthetic construct
  source 1..21: mol_type = other RNA
gagaagcacagccaccacaca

SEQ ID NO: 78285 - RNA, 21 nt, synthetic construct
  source 1..21: mol_type = other RNA
gaagcacagccaccacaccca

SEQ ID NO: 78286 - RNA, 21 nt, synthetic construct
  source 1..21: mol_type = other RNA
catgtccacagccacacccta

SEQ ID NO: 78287 - RNA, 21 nt, synthetic construct
  source 1..21: mol_type = other RNA
acaccctcctctactccagaa

SEQ ID NO: 78288 - RNA, 21 nt, synthetic construct
  source 1..21: mol_type = other RNA
tgcttaccaccacgaccacca

SEQ ID NO: 78289 - RNA, 21 nt, synthetic construct
  source 1..21: mol_type = other RNA
caccgccacagtgctgaccaa

SEQ ID NO: 78290 - RNA, 21 nt, synthetic construct
  source 1..21: mol_type = other RNA
cgccacagtgctgaccaccaa

SEQ ID NO: 78291 - RNA, 21 nt, synthetic construct
  source 1..21: mol_type = other RNA
agtgctgaccaccaccaccaa

SEQ ID NO: 78292 - RNA, 21 nt, synthetic construct
  source 1..21: mol_type = other RNA
cagggacaactcccatcccca

SEQ ID NO: 78293 - RNA, 21 nt, synthetic construct
  source 1..21: mol_type = other RNA
agggacaactcccatccccca

SEQ ID NO: 78294 - RNA, 21 nt, synthetic construct
  source 1..21: mol_type = other RNA
gggacaactcccatcccccca

SEQ ID NO: 78295 - RNA, 21 nt, synthetic construct
  source 1..21: mol_type = other RNA
ccacccacatcacagagccta

SEQ ID NO: 78296 - RNA, 21 nt, synthetic construct
  source 1..21: mol_type = other RNA
cccacaccccagcagcaacca

SEQ ID NO: 78297 - RNA, 21 nt, synthetic construct
  source 1..21: mol_type = other RNA
cagcaaccaccagtaccacca

SEQ ID NO: 78298 - RNA, 21 nt, synthetic construct
  source 1..21: mol_type = other RNA
acacccagcaagacccgcaca

SEQ ID NO: 78299 - RNA, 21 nt, synthetic construct
  source 1..21: mol_type = other RNA
tctggcggggactttgacaca

SEQ ID NO: 78300 - RNA, 21 nt, synthetic construct
  source 1..21: mol_type = other RNA
ccaccgtgacggtgcccacca

SEQ ID NO: 78301 - RNA, 21 nt, synthetic construct
  source 1..21: mol_type = other RNA
gagaagcacagccaccacaca

SEQ ID NO: 78302 - RNA, 21 nt, synthetic construct
  source 1..21: mol_type = other RNA
gaagcacagccaccacaccca

SEQ ID NO: 78303 - RNA, 21 nt, synthetic construct
  source 1..21: mol_type = other RNA
tttacagccatcccctcctca

SEQ ID NO: 78304 - RNA, 21 nt, synthetic construct
  source 1..21: mol_type = other RNA
catgtccacagccacacccta

SEQ ID NO: 78305 - RNA, 21 nt, synthetic construct
  source 1..21: mol_type = other RNA
tccactccagagactgcccaa

SEQ ID NO: 78306 - RNA, 21 nt, synthetic construct
  source 1..21: mol_type = other RNA
gagactgcccacacctccaca

SEQ ID NO: 78307 - RNA, 21 nt, synthetic construct
  source 1..21: mol_type = other RNA
gtgaccccctcctccgtccca

SEQ ID NO: 78308 - RNA, 21 nt, synthetic construct
  source 1..21: mol_type = other RNA
ccctcctccgtcccggggaca

SEQ ID NO: 78309 - RNA, 21 nt, synthetic construct
  source 1..21: mol_type = other RNA
agtgctgaccaccaccaccaa

SEQ ID NO: 78310 - RNA, 21 nt, synthetic construct
  source 1..21: mol_type = other RNA
ccacccacatcacagagccta

SEQ ID NO: 78311 - RNA, 21 nt, synthetic construct
  source 1..21: mol_type = other RNA
cccacaccccagcagcaacca

SEQ ID NO: 78312 - RNA, 21 nt, synthetic construct
  source 1..21: mol_type = other RNA
ccgagtcacccccttccccaa

SEQ ID NO: 78313 - RNA, 21 nt, synthetic construct
  source 1..21: mol_type = other RNA
acacccagcaagacccgcaca

SEQ ID NO: 78314 - RNA, 21 nt, synthetic construct
  source 1..21: mol_type = other RNA
tctggcggggactttgacaca

SEQ ID NO: 78315 - RNA, 21 nt, synthetic construct
  source 1..21: mol_type = other RNA
gcatccactggatccacggca

SEQ ID NO: 78316 - RNA, 21 nt, synthetic construct
  source 1..21: mol_type = other RNA
catccactggatccacggcca

SEQ ID NO: 78317 - RNA, 21 nt, synthetic construct
  source 1..21: mol_type = other RNA
ccgtcctccaccccgggaaca

SEQ ID NO: 78318 - RNA, 21 nt, synthetic construct
  source 1..21: mol_type = other RNA
cgggaacagctccccctccca

SEQ ID NO: 78319 - RNA, 21 nt, synthetic construct
  source 1..21: mol_type = other RNA
cacccacacctccacagtgca

SEQ ID NO: 78320 - RNA, 21 nt, synthetic construct
  source 1..21: mol_type = other RNA
ccactacaactgcagccacta

SEQ ID NO: 78321 - RNA, 21 nt, synthetic construct
  source 1..21: mol_type = other RNA
ccaccgtgacggtgcccacca

SEQ ID NO: 78322 - RNA, 21 nt, synthetic construct
  source 1..21: mol_type = other RNA
ctccctcctccagtccaggga

SEQ ID NO: 78323 - RNA, 21 nt, synthetic construct
  source 1..21: mol_type = other RNA
gagaagcacagccaccacaca

SEQ ID NO: 78324 - RNA, 21 nt, synthetic construct
  source 1..21: mol_type = other RNA
gaagcacagccaccacaccca

SEQ ID NO: 78325 - RNA, 21 nt, synthetic construct
  source 1..21: mol_type = other RNA
tttacagccatcccctcctca

SEQ ID NO: 78326 - RNA, 21 nt, synthetic construct
  source 1..21: mol_type = other RNA
catgtccacagccacacccta

SEQ ID NO: 78327 - RNA, 21 nt, synthetic construct
  source 1..21: mol_type = other RNA
aaccggggccaccggctctga

SEQ ID NO: 78328 - RNA, 21 nt, synthetic construct
  source 1..21: mol_type = other RNA
agtgctgaccaccaccaccaa

SEQ ID NO: 78329 - RNA, 21 nt, synthetic construct
  source 1..21: mol_type = other RNA
cacccacacctccacagtgca

SEQ ID NO: 78330 - RNA, 21 nt, synthetic construct
  source 1..21: mol_type = other RNA
ccactacaactgcagccacta

SEQ ID NO: 78331 - RNA, 21 nt, synthetic construct
  source 1..21: mol_type = other RNA
ctctgggaacagctcacacca

SEQ ID NO: 78332 - RNA, 21 nt, synthetic construct
  source 1..21: mol_type = other RNA
cccagcagcctgccaacctta

SEQ ID NO: 78333 - RNA, 21 nt, synthetic construct
  source 1..21: mol_type = other RNA
accgtgtcgtcctgctggaca

SEQ ID NO: 78334 - RNA, 21 nt, synthetic construct
  source 1..21: mol_type = other RNA
ttgtgtctgtgctggggacca

SEQ ID NO: 78335 - RNA, 21 nt, synthetic construct
  source 1..21: mol_type = other RNA
caccccccactgccagcccca

SEQ ID NO: 78336 - RNA, 21 nt, synthetic construct
  source 1..21: mol_type = other RNA
gtctagcacacccacccccaa

SEQ ID NO: 78337 - RNA, 21 nt, synthetic construct
  source 1..21: mol_type = other RNA
tgctgagtgccacaaccttga

SEQ ID NO: 78338 - RNA, 21 nt, synthetic construct
  source 1..21: mol_type = other RNA
gcgaccactgcaggggccgca

SEQ ID NO: 78339 - RNA, 21 nt, synthetic construct
  source 1..21: mol_type = other RNA
tacaagccatgcggccccata

SEQ ID NO: 78340 - RNA, 21 nt, synthetic construct
  source 1..21: mol_type = other RNA
cagcctgccacctgcaactca

SEQ ID NO: 78341 - RNA, 21 nt, synthetic construct
  source 1..21: mol_type = other RNA
tgaggaccagatcctcttcaa

SEQ ID NO: 78342 - RNA, 21 nt, synthetic construct
  source 1..21: mol_type = other RNA
tgcgtgcaggcctgcccctga

SEQ ID NO: 78343 - RNA, 21 nt, synthetic construct
  source 1..21: mol_type = other RNA
tgcccctgcgtgggacccgaa

SEQ ID NO: 78344 - RNA, 21 nt, synthetic construct
  source 1..21: mol_type = other RNA
cacccaggaggagggcgacta

SEQ ID NO: 78345 - RNA, 21 nt, synthetic construct
  source 1..21: mol_type = other RNA
ttccgctgcagacctcagcta

SEQ ID NO: 78346 - RNA, 21 nt, synthetic construct
  source 1..21: mol_type = other RNA
ccctgccacatgtgtacctga

SEQ ID NO: 78347 - RNA, 21 nt, synthetic construct
  source 1..21: mol_type = other RNA
gaccgcctgcctcacgcccga

SEQ ID NO: 78348 - RNA, 21 nt, synthetic construct
  source 1..21: mol_type = other RNA
ttctgcgagggctcctgccca

SEQ ID NO: 78349 - RNA, 21 nt, synthetic construct
  source 1..21: mol_type = other RNA
cgagggctcctgccccggaga

SEQ ID NO: 78350 - RNA, 21 nt, synthetic construct
  source 1..21: mol_type = other RNA
agtactcagcagaggcccaga

SEQ ID NO: 78351 - RNA, 21 nt, synthetic construct
  source 1..21: mol_type = other RNA
gtactcagcagaggcccagga

SEQ ID NO: 78352 - RNA, 21 nt, synthetic construct
  source 1..21: mol_type = other RNA
gcacctgctgccaggagagga

SEQ ID NO: 78353 - RNA, 21 nt, synthetic construct
  source 1..21: mol_type = other RNA
cggcctgtgtgtggcacccca

SEQ ID NO: 78354 - RNA, 21 nt, synthetic construct
  source 1..21: mol_type = other RNA
ccgcgctccgtgctcctgcta

SEQ ID NO: 78355 - RNA, 21 nt, synthetic construct
  source 1..21: mol_type = other RNA
tgcaactacgtgttctctgaa

SEQ ID NO: 78356 - RNA, 21 nt, synthetic construct
  source 1..21: mol_type = other RNA
tttgcaactacgtgttctcta

SEQ ID NO: 78357 - RNA, 21 nt, synthetic construct
  source 1..21: mol_type = other RNA
aactacgtgttctctgagcaa

SEQ ID NO: 78358 - RNA, 21 nt, synthetic construct
  source 1..21: mol_type = other RNA
gggtgggaagctaagctgcca

SEQ ID NO: 78359 - RNA, 21 nt, synthetic construct
  source 1..21: mol_type = other RNA
ttgcaactacgtgttctctga

SEQ ID NO: 78360 - RNA, 21 nt, synthetic construct
  source 1..21: mol_type = other RNA
cgcgcagctctgcgaggacca

SEQ ID NO: 78361 - RNA, 21 nt, synthetic construct
  source 1..21: mol_type = other RNA
caactggaccctggcacagga

SEQ ID NO: 78362 - RNA, 21 nt, synthetic construct
  source 1..21: mol_type = other RNA
tacagccgcactggcctccta

SEQ ID NO: 78363 - RNA, 21 nt, synthetic construct
  source 1..21: mol_type = other RNA
catcaccccagtgctgaccaa

SEQ ID NO: 78364 - RNA, 21 nt, synthetic construct
  source 1..21: mol_type = other RNA
tgccccacctgcccgtgtgca

SEQ ID NO: 78365 - RNA, 21 nt, synthetic construct
  source 1..21: mol_type = other RNA
gtgcaaccttcccaggcgcca

SEQ ID NO: 78366 - RNA, 21 nt, synthetic construct
  source 1..21: mol_type = other RNA
ctcgactccagccctttccaa

SEQ ID NO: 78367 - RNA, 21 nt, synthetic construct
  source 1..21: mol_type = other RNA
tcacagccaccggctccacca

SEQ ID NO: 78368 - RNA, 21 nt, synthetic construct
  source 1..21: mol_type = other RNA
accgaccacagagctggagaa

SEQ ID NO: 78369 - RNA, 21 nt, synthetic construct
  source 1..21: mol_type = other RNA
gcgatccctgccccccagcaa

SEQ ID NO: 78370 - RNA, 21 nt, synthetic construct
  source 1..21: mol_type = other RNA
ccgaacaccacggccaccaca

SEQ ID NO: 78371 - RNA, 21 nt, synthetic construct
  source 1..21: mol_type = other RNA
cgatcacagccaccggctcca

SEQ ID NO: 78372 - RNA, 21 nt, synthetic construct
  source 1..21: mol_type = other RNA
ccgaacaccacggccaccaca

SEQ ID NO: 78373 - RNA, 21 nt, synthetic construct
  source 1..21: mol_type = other RNA
ccgaacaccacggccaccaca

SEQ ID NO: 78374 - RNA, 21 nt, synthetic construct
  source 1..21: mol_type = other RNA
gatccacggccaccctgtcca

SEQ ID NO: 78375 - RNA, 21 nt, synthetic construct
  source 1..21: mol_type = other RNA
catgggctgtgagccccagta

SEQ ID NO: 78376 - RNA, 21 nt, synthetic construct
  source 1..21: mol_type = other RNA
catgggctgtgagccccagta

SEQ ID NO: 78377 - RNA, 21 nt, synthetic construct
  source 1..21: mol_type = other RNA
cccccagtgccgaacaccata

SEQ ID NO: 78378 - RNA, 21 nt, synthetic construct
  source 1..21: mol_type = other RNA
caaccttcccaggcgccctta

SEQ ID NO: 78379 - RNA, 21 nt, synthetic construct
  source 1..21: mol_type = other RNA
agcagagcggggactacatca

SEQ ID NO: 78380 - RNA, 21 nt, synthetic construct
  source 1..21: mol_type = other RNA
atggctgctgggccccgacta

SEQ ID NO: 78381 - RNA, 21 nt, synthetic construct
  source 1..21: mol_type = other RNA
cagagcctgcctgtgtgccca

SEQ ID NO: 78382 - RNA, 21 nt, synthetic construct
  source 1..21: mol_type = other RNA
cctgtgtgcacaacgaggcca

SEQ ID NO: 78383 - RNA, 21 nt, synthetic construct
  source 1..21: mol_type = other RNA
ctgtgtgcacaacgaggccaa

SEQ ID NO: 78384 - RNA, 21 nt, synthetic construct
  source 1..21: mol_type = other RNA
cacatgggcatctgcgtgcaa

SEQ ID NO: 78385 - RNA, 21 nt, synthetic construct
  source 1..21: mol_type = other RNA
cacccacaccgccacagtgca

SEQ ID NO: 78386 - RNA, 21 nt, synthetic construct
  source 1..21: mol_type = other RNA
cacccacaccgccacagtgca

SEQ ID NO: 78387 - RNA, 21 nt, synthetic construct
  source 1..21: mol_type = other RNA
ccacccacaccgccacagtga

SEQ ID NO: 78388 - RNA, 21 nt, synthetic construct
  source 1..21: mol_type = other RNA
caccaccaacccctcctcaaa

SEQ ID NO: 78389 - RNA, 21 nt, synthetic construct
  source 1..21: mol_type = other RNA
caccaccaacccctcctcaaa

SEQ ID NO: 78390 - RNA, 21 nt, synthetic construct
  source 1..21: mol_type = other RNA
ccacccacaccgccacagtga

SEQ ID NO: 78391 - RNA, 21 nt, synthetic construct
  source 1..21: mol_type = other RNA
caccaccaacccctcctcaaa

SEQ ID NO: 78392 - RNA, 21 nt, synthetic construct
  source 1..21: mol_type = other RNA
caccaccaacccctcctcaaa

SEQ ID NO: 78393 - RNA, 21 nt, synthetic construct
  source 1..21: mol_type = other RNA
caccaccaacccctcctcaaa

SEQ ID NO: 78394 - RNA, 21 nt, synthetic construct
  source 1..21: mol_type = other RNA
ggcctgcgtgaacgacgcgta

SEQ ID NO: 78395 - RNA, 21 nt, synthetic construct
  source 1..21: mol_type = other RNA
actacgaggcctgcgtgaaca

SEQ ID NO: 78396 - RNA, 21 nt, synthetic construct
  source 1..21: mol_type = other RNA
cagagactgtccacacctcca

SEQ ID NO: 78397 - RNA, 21 nt, synthetic construct
  source 1..21: mol_type = other RNA
cagagactgtccacacctcca

SEQ ID NO: 78398 - RNA, 21 nt, synthetic construct
  source 1..21: mol_type = other RNA
gcctgcgtgaacgacgcgtga

SEQ ID NO: 78399 - RNA, 21 nt, synthetic construct
  source 1..21: mol_type = other RNA
aggcctgcgtgaacgacgcga

SEQ ID NO: 78400 - RNA, 21 nt, synthetic construct
  source 1..21: mol_type = other RNA
gtggcctacggggatggccaa

SEQ ID NO: 78401 - RNA, 21 nt, synthetic construct
  source 1..21: mol_type = other RNA
agttggatgggcccacggaga

SEQ ID NO: 78402 - RNA, 21 nt, synthetic construct
  source 1..21: mol_type = other RNA
gggaacttcaaccagaaccaa

SEQ ID NO: 78403 - RNA, 21 nt, synthetic construct
  source 1..21: mol_type = other RNA
gcctgtgcgccgcgctgtcca

SEQ ID NO: 78404 - RNA, 21 nt, synthetic construct
  source 1..21: mol_type = other RNA
caagtactacgaggcctgcga

SEQ ID NO: 78405 - RNA, 21 nt, synthetic construct
  source 1..21: mol_type = other RNA
tactacgaggcctgcgtgaaa

SEQ ID NO: 78406 - RNA, 21 nt, synthetic construct
  source 1..21: mol_type = other RNA
gtcgtggaatgcagcctggaa

SEQ ID NO: 78407 - RNA, 21 nt, synthetic construct
  source 1..21: mol_type = other RNA
gtcgtggaatgcagcctggaa

SEQ ID NO: 78408 - RNA, 21 nt, synthetic construct
  source 1..21: mol_type = other RNA
gtcgtggaatgcagcctggaa

SEQ ID NO: 78409 - RNA, 21 nt, synthetic construct
  source 1..21: mol_type = other RNA
gtcgtggaatgcagcctggaa

SEQ ID NO: 78410 - RNA, 21 nt, synthetic construct
  source 1..21: mol_type = other RNA
gttggatgggcccacggagca

SEQ ID NO: 78411 - RNA, 21 nt, synthetic construct
  source 1..21: mol_type = other RNA
cggcagccaacatcaccctga

SEQ ID NO: 78412 - RNA, 21 nt, synthetic construct
  source 1..21: mol_type = other RNA
tgcggcctgtgtgggaactta

SEQ ID NO: 78413 - RNA, 21 nt, synthetic construct
  source 1..21: mol_type = other RNA
gcggcctgtgtgggaacttca

SEQ ID NO: 78414 - RNA, 21 nt, synthetic construct
  source 1..21: mol_type = other RNA
gactgcctgtgcgccgcgcta

SEQ ID NO: 78415 - RNA, 21 nt, synthetic construct
  source 1..21: mol_type = other RNA
actgcctgtgcgccgcgctga

SEQ ID NO: 78416 - RNA, 21 nt, synthetic construct
  source 1..21: mol_type = other RNA
ctgcctgtgcgccgcgctgta

SEQ ID NO: 78417 - RNA, 21 nt, synthetic construct
  source 1..21: mol_type = other RNA
cctgtgcgccgcgctgtccta

SEQ ID NO: 78418 - RNA, 21 nt, synthetic construct
  source 1..21: mol_type = other RNA
tgtgcgccgcgctgtcctcca

SEQ ID NO: 78419 - RNA, 21 nt, synthetic construct
  source 1..21: mol_type = other RNA
tgtgcacgcctgtgccgccaa

SEQ ID NO: 78420 - RNA, 21 nt, synthetic construct
  source 1..21: mol_type = other RNA
gtgcacgcctgtgccgccaaa

SEQ ID NO: 78421 - RNA, 21 nt, synthetic construct
  source 1..21: mol_type = other RNA
acgcctgtgccgccaagggca

SEQ ID NO: 78422 - RNA, 21 nt, synthetic construct
  source 1..21: mol_type = other RNA
aggccacctacaagcctggaa

SEQ ID NO: 78423 - RNA, 21 nt, synthetic construct
  source 1..21: mol_type = other RNA
ctacgaggcctgcgtgaacga

SEQ ID NO: 78424 - RNA, 21 nt, synthetic construct
  source 1..21: mol_type = other RNA
tacgaggcctgcgtgaacgaa

SEQ ID NO: 78425 - RNA, 21 nt, synthetic construct
  source 1..21: mol_type = other RNA
gaggcctgcgtgaacgacgca

SEQ ID NO: 78426 - RNA, 21 nt, synthetic construct
  source 1..21: mol_type = other RNA
cagagtggtttgacgtggaca

SEQ ID NO: 78427 - RNA, 21 nt, synthetic construct
  source 1..21: mol_type = other RNA
agagtggtttgacgtggacta

SEQ ID NO: 78428 - RNA, 21 nt, synthetic construct
  source 1..21: mol_type = other RNA
gagtggtttgacgtggactta

SEQ ID NO: 78429 - RNA, 21 nt, synthetic construct
  source 1..21: mol_type = other RNA
cggtgagcagcggtttcagca

SEQ ID NO: 78430 - RNA, 21 nt, synthetic construct
  source 1..21: mol_type = other RNA
gagaactacgcccggcactga

SEQ ID NO: 78431 - RNA, 21 nt, synthetic construct
  source 1..21: mol_type = other RNA
cacggccaaccccttccgcaa

SEQ ID NO: 78432 - RNA, 21 nt, synthetic construct
  source 1..21: mol_type = other RNA
ctacgcccggcactggtgcta

SEQ ID NO: 78433 - RNA, 21 nt, synthetic construct
  source 1..21: mol_type = other RNA
tgtgagcggagcgaggactga

SEQ ID NO: 78434 - RNA, 21 nt, synthetic construct
  source 1..21: mol_type = other RNA
gaggactgcctgtgcgccgca

SEQ ID NO: 78435 - RNA, 21 nt, synthetic construct
  source 1..21: mol_type = other RNA
cagaagcagtgcagcatccta

SEQ ID NO: 78436 - RNA, 21 nt, synthetic construct
  source 1..21: mol_type = other RNA
gctgtcaaccgaagtgtgaga

SEQ ID NO: 78437 - RNA, 21 nt, synthetic construct
  source 1..21: mol_type = other RNA
cacctgcaggaaccggaggta

SEQ ID NO: 78438 - RNA, 21 nt, synthetic construct
  source 1..21: mol_type = other RNA
gcctgaccgatcccaacagta

SEQ ID NO: 78439 - RNA, 21 nt, synthetic construct
  source 1..21: mol_type = other RNA
gctgccttacagccgcactga

SEQ ID NO: 78440 - RNA, 21 nt, synthetic construct
  source 1..21: mol_type = other RNA
gcctggacggcggggacacga

SEQ ID NO: 78441 - RNA, 21 nt, synthetic construct
  source 1..21: mol_type = other RNA
agatgtgctacaactacagga

SEQ ID NO: 78442 - RNA, 21 nt, synthetic construct
  source 1..21: mol_type = other RNA
acgtgggctgtttcagcacaa

SEQ ID NO: 78443 - RNA, 21 nt, synthetic construct
  source 1..21: mol_type = other RNA
ggtgagcagcggtttcagcaa

SEQ ID NO: 78444 - RNA, 21 nt, synthetic construct
  source 1..21: mol_type = other RNA
aactccatctacacgcagcta

SEQ ID NO: 78445 - RNA, 21 nt, synthetic construct
  source 1..21: mol_type = other RNA
acctgcaccaacaaccagaga

SEQ ID NO: 78446 - RNA, 21 nt, synthetic construct
  source 1..21: mol_type = other RNA
gcaccaggactacaagggcaa

SEQ ID NO: 78447 - RNA, 21 nt, synthetic construct
  source 1..21: mol_type = other RNA
cctctcaggccgagaccagca

SEQ ID NO: 78448 - RNA, 21 nt, synthetic construct
  source 1..21: mol_type = other RNA
gaaatccgtgtgttctgctga

SEQ ID NO: 78449 - RNA, 21 nt, synthetic construct
  source 1..21: mol_type = other RNA
gaaatccgtgtgttctgctga

SEQ ID NO: 78450 - RNA, 21 nt, synthetic construct
  source 1..21: mol_type = other RNA
gaaatccgtgtgttctgctga

SEQ ID NO: 78451 - RNA, 21 nt, synthetic construct
  source 1..21: mol_type = other RNA
gaaatccgtgtgttctgctga

SEQ ID NO: 78452 - RNA, 21 nt, synthetic construct
  source 1..21: mol_type = other RNA
gtcctacgataagatcaggga

SEQ ID NO: 78453 - RNA, 21 nt, synthetic construct
  source 1..21: mol_type = other RNA
tgtcttccccagcctgagcca

SEQ ID NO: 78454 - RNA, 21 nt, synthetic construct
  source 1..21: mol_type = other RNA
ctgtgagtggcactaccagca

SEQ ID NO: 78455 - RNA, 21 nt, synthetic construct
  source 1..21: mol_type = other RNA
cggaaccccagtgggcactga

SEQ ID NO: 78456 - RNA, 21 nt, synthetic construct
  source 1..21: mol_type = other RNA
gctaccagctttacagccata

SEQ ID NO: 78457 - RNA, 21 nt, synthetic construct
  source 1..21: mol_type = other RNA
gctaccagctttacagccata

SEQ ID NO: 78458 - RNA, 21 nt, synthetic construct
  source 1..21: mol_type = other RNA
gctaccagctttacagccata

SEQ ID NO: 78459 - RNA, 21 nt, synthetic construct
  source 1..21: mol_type = other RNA
cacgcctgtgccgccaaggga

SEQ ID NO: 78460 - RNA, 21 nt, synthetic construct
  source 1..21: mol_type = other RNA
caacaacaccgagggccagta

SEQ ID NO: 78461 - RNA, 21 nt, synthetic construct
  source 1..21: mol_type = other RNA
aagtactacgaggcctgcgta

SEQ ID NO: 78462 - RNA, 21 nt, synthetic construct
  source 1..21: mol_type = other RNA
acaacaacaccgagggccaga

SEQ ID NO: 78463 - RNA, 21 nt, synthetic construct
  source 1..21: mol_type = other RNA
gtgcggcctgtgtgggaacta

SEQ ID NO: 78464 - RNA, 21 nt, synthetic construct
  source 1..21: mol_type = other RNA
aactgtgagcggagcgaggaa

SEQ ID NO: 78465 - RNA, 21 nt, synthetic construct
  source 1..21: mol_type = other RNA
gcacgcctgtgccgccaagga

SEQ ID NO: 78466 - RNA, 21 nt, synthetic construct
  source 1..21: mol_type = other RNA
aggccatcaagctcttcgtga

SEQ ID NO: 78467 - RNA, 21 nt, synthetic construct
  source 1..21: mol_type = other RNA
tgagtggcactaccagcccta

SEQ ID NO: 78468 - RNA, 21 nt, synthetic construct
  source 1..21: mol_type = other RNA
aacaacaccgagggccagtga

SEQ ID NO: 78469 - RNA, 21 nt, synthetic construct
  source 1..21: mol_type = other RNA
tgtgcggcctgtgtgggaaca

SEQ ID NO: 78470 - RNA, 21 nt, synthetic construct
  source 1..21: mol_type = other RNA
ttcgccaacacctggaaggca

SEQ ID NO: 78471 - RNA, 21 nt, synthetic construct
  source 1..21: mol_type = other RNA
cctgcaactgtgagcggagca

SEQ ID NO: 78472 - RNA, 21 nt, synthetic construct
  source 1..21: mol_type = other RNA
ctgcaactgtgagcggagcga

SEQ ID NO: 78473 - RNA, 21 nt, synthetic construct
  source 1..21: mol_type = other RNA
tgcaactgtgagcggagcgaa

SEQ ID NO: 78474 - RNA, 21 nt, synthetic construct
  source 1..21: mol_type = other RNA
gcaactgtgagcggagcgaga

SEQ ID NO: 78475 - RNA, 21 nt, synthetic construct
  source 1..21: mol_type = other RNA
caactgtgagcggagcgagga

SEQ ID NO: 78476 - RNA, 21 nt, synthetic construct
  source 1..21: mol_type = other RNA
ctgtgagcggagcgaggacta

SEQ ID NO: 78477 - RNA, 21 nt, synthetic construct
  source 1..21: mol_type = other RNA
gtgagcggagcgaggactgca

SEQ ID NO: 78478 - RNA, 21 nt, synthetic construct
  source 1..21: mol_type = other RNA
cgaggactgcctgtgcgccga

SEQ ID NO: 78479 - RNA, 21 nt, synthetic construct
  source 1..21: mol_type = other RNA
cgcctgtgccgccaagggcga

SEQ ID NO: 78480 - RNA, 21 nt, synthetic construct
  source 1..21: mol_type = other RNA
ggccatcaagctcttcgtgga

SEQ ID NO: 78481 - RNA, 21 nt, synthetic construct
  source 1..21: mol_type = other RNA
tgccatcaatgactttgccaa

SEQ ID NO: 78482 - RNA, 21 nt, synthetic construct
  source 1..21: mol_type = other RNA
aggacccctgcacggccaaca

SEQ ID NO: 78483 - RNA, 21 nt, synthetic construct
  source 1..21: mol_type = other RNA
gacccctgcacggccaaccca

SEQ ID NO: 78484 - RNA, 21 nt, synthetic construct
  source 1..21: mol_type = other RNA
acggccaaccccttccgcaaa

SEQ ID NO: 78485 - RNA, 21 nt, synthetic construct
  source 1..21: mol_type = other RNA
ggccaaccccttccgcaagta

SEQ ID NO: 78486 - RNA, 21 nt, synthetic construct
  source 1..21: mol_type = other RNA
caaccccttccgcaagtccta

SEQ ID NO: 78487 - RNA, 21 nt, synthetic construct
  source 1..21: mol_type = other RNA
ccgcaagtcctgggcccagaa

SEQ ID NO: 78488 - RNA, 21 nt, synthetic construct
  source 1..21: mol_type = other RNA
tgtttctgcacggctgtggca

SEQ ID NO: 78489 - RNA, 21 nt, synthetic construct
  source 1..21: mol_type = other RNA
gagtggcactaccagccctga

SEQ ID NO: 78490 - RNA, 21 nt, synthetic construct
  source 1..21: mol_type = other RNA
gcactaccagccctgcgggga

SEQ ID NO: 78491 - RNA, 21 nt, synthetic construct
  source 1..21: mol_type = other RNA
ctggaccctggagaactgcaa

SEQ ID NO: 78492 - RNA, 21 nt, synthetic construct
  source 1..21: mol_type = other RNA
ccctggagaactgcacggtga

SEQ ID NO: 78493 - RNA, 21 nt, synthetic construct
  source 1..21: mol_type = other RNA
ccacaacaacaccgagggcca

SEQ ID NO: 78494 - RNA, 21 nt, synthetic construct
  source 1..21: mol_type = other RNA
cacaacaacaccgagggccaa

SEQ ID NO: 78495 - RNA, 21 nt, synthetic construct
  source 1..21: mol_type = other RNA
acaacaccgagggccagtgca

SEQ ID NO: 78496 - RNA, 21 nt, synthetic construct
  source 1..21: mol_type = other RNA
caacaccgagggccagtgcga

SEQ ID NO: 78497 - RNA, 21 nt, synthetic construct
  source 1..21: mol_type = other RNA
aacaccgagggccagtgcgga

SEQ ID NO: 78498 - RNA, 21 nt, synthetic construct
  source 1..21: mol_type = other RNA
accgagggccagtgcggcaca

SEQ ID NO: 78499 - RNA, 21 nt, synthetic construct
  source 1..21: mol_type = other RNA
gtgatctgatgctgagccaga

SEQ ID NO: 78500 - RNA, 21 nt, synthetic construct
  source 1..21: mol_type = other RNA
cccagggctttgagtacaaga

SEQ ID NO: 78501 - RNA, 21 nt, synthetic construct
  source 1..21: mol_type = other RNA
tcaaccagaaccaggctgaca

SEQ ID NO: 78502 - RNA, 21 nt, synthetic construct
  source 1..21: mol_type = other RNA
tcctgtggaacggagaggaca

SEQ ID NO: 78503 - RNA, 21 nt, synthetic construct
  source 1..21: mol_type = other RNA
ggactgcctgtgcgccgcgca

SEQ ID NO: 78504 - RNA, 21 nt, synthetic construct
  source 1..21: mol_type = other RNA
ggggagtgtgcagtgactgga

SEQ ID NO: 78505 - RNA, 21 nt, synthetic construct
  source 1..21: mol_type = other RNA
tggagggacggcgtctgcaca

SEQ ID NO: 78506 - RNA, 21 nt, synthetic construct
  source 1..21: mol_type = other RNA
cacagcctgcatcctgcccaa

SEQ ID NO: 78507 - RNA, 21 nt, synthetic construct
  source 1..21: mol_type = other RNA
tgcgccgcgctgtcctcctaa

SEQ ID NO: 78508 - RNA, 21 nt, synthetic construct
  source 1..21: mol_type = other RNA
tacatggggatcttcctggta

SEQ ID NO: 78509 - RNA, 21 nt, synthetic construct
  source 1..21: mol_type = other RNA
acatggggatcttcctggtca

SEQ ID NO: 78510 - RNA, 21 nt, synthetic construct
  source 1..21: mol_type = other RNA
gcgtggcccagtgtggctgca

SEQ ID NO: 78511 - RNA, 21 nt, synthetic construct
  source 1..21: mol_type = other RNA
ctcaggaaaaccggctgctga

SEQ ID NO: 78512 - RNA, 21 nt, synthetic construct
  source 1..21: mol_type = other RNA
gctgccctacagcctcttcca

SEQ ID NO: 78513 - RNA, 21 nt, synthetic construct
  source 1..21: mol_type = other RNA
ctgtgatctgatgctgagcca

SEQ ID NO: 78514 - RNA, 21 nt, synthetic construct
  source 1..21: mol_type = other RNA
aggactacaagggcagggtca

SEQ ID NO: 78515 - RNA, 21 nt, synthetic construct
  source 1..21: mol_type = other RNA
tccagtttgggaacctgcaga

SEQ ID NO: 78516 - RNA, 21 nt, synthetic construct
  source 1..21: mol_type = other RNA
acctgcaactgtgagcggaga

SEQ ID NO: 78517 - RNA, 21 nt, synthetic construct
  source 1..21: mol_type = other RNA
gctgtggctgcctacgcccaa

SEQ ID NO: 78518 - RNA, 21 nt, synthetic construct
  source 1..21: mol_type = other RNA
ccggtgtcagtggacagagta

SEQ ID NO: 78519 - RNA, 21 nt, synthetic construct
  source 1..21: mol_type = other RNA
acggcaccgtgctggctccta

SEQ ID NO: 78520 - RNA, 21 nt, synthetic construct
  source 1..21: mol_type = other RNA
gaggtctgccgctggtccaga

SEQ ID NO: 78521 - RNA, 21 nt, synthetic construct
  source 1..21: mol_type = other RNA
cccctgcgggagttgggccaa

SEQ ID NO: 78522 - RNA, 21 nt, synthetic construct
  source 1..21: mol_type = other RNA
cccctgcgggagttgggccaa

SEQ ID NO: 78523 - RNA, 21 nt, synthetic construct
  source 1..21: mol_type = other RNA
cccctgcgggagttgggccaa

SEQ ID NO: 78524 - RNA, 21 nt, synthetic construct
  source 1..21: mol_type = other RNA
gccacaacgccattcacctta

SEQ ID NO: 78525 - RNA, 21 nt, synthetic construct
  source 1..21: mol_type = other RNA
tgccccccaggcacggtgcta

SEQ ID NO: 78526 - RNA, 21 nt, synthetic construct
  source 1..21: mol_type = other RNA
agtactacgaggcctgcgtga

SEQ ID NO: 78527 - RNA, 21 nt, synthetic construct
  source 1..21: mol_type = other RNA
cttccgcaagtcctgggccca

SEQ ID NO: 78528 - RNA, 21 nt, synthetic construct
  source 1..21: mol_type = other RNA
tgtgagtggcactaccagcca

SEQ ID NO: 78529 - RNA, 21 nt, synthetic construct
  source 1..21: mol_type = other RNA
gtgagtggcactaccagccca

SEQ ID NO: 78530 - RNA, 21 nt, synthetic construct
  source 1..21: mol_type = other RNA
acaccgagggccagtgcggca

SEQ ID NO: 78531 - RNA, 21 nt, synthetic construct
  source 1..21: mol_type = other RNA
caccgagggccagtgcggcaa

SEQ ID NO: 78532 - RNA, 21 nt, synthetic construct
  source 1..21: mol_type = other RNA
ggcggagggctgcttctgcca

SEQ ID NO: 78533 - RNA, 21 nt, synthetic construct
  source 1..21: mol_type = other RNA
ccccagggctttgagtacaaa

SEQ ID NO: 78534 - RNA, 21 nt, synthetic construct
  source 1..21: mol_type = other RNA
agctcccacttctctactcca

SEQ ID NO: 78535 - RNA, 21 nt, synthetic construct
  source 1..21: mol_type = other RNA
cctgatcctgtttgaccaaaa

SEQ ID NO: 78536 - RNA, 21 nt, synthetic construct
  source 1..21: mol_type = other RNA
aagatgtgcttcaactatgaa

SEQ ID NO: 78537 - RNA, 21 nt, synthetic construct
  source 1..21: mol_type = other RNA
aagatgtgcttcaactatgaa

SEQ ID NO: 78538 - RNA, 21 nt, synthetic construct
  source 1..21: mol_type = other RNA
aagatgtgcttcaactatgaa

SEQ ID NO: 78539 - RNA, 21 nt, synthetic construct
  source 1..21: mol_type = other RNA
aagatgtgcttcaactatgaa

SEQ ID NO: 78540 - RNA, 21 nt, synthetic construct
  source 1..21: mol_type = other RNA
tggggccgagtgcctccggaa

SEQ ID NO: 78541 - RNA, 21 nt, synthetic construct
  source 1..21: mol_type = other RNA
acacatgggcatctgcgtgca

SEQ ID NO: 78542 - RNA, 21 nt, synthetic construct
  source 1..21: mol_type = other RNA
ccagagggacgactgtctcca

SEQ ID NO: 78543 - RNA, 21 nt, synthetic construct
  source 1..21: mol_type = other RNA
gagagcctgtggcccacctta

SEQ ID NO: 78544 - RNA, 21 nt, synthetic construct
  source 1..21: mol_type = other RNA
gtggtgggggacgcactggaa

SEQ ID NO: 78545 - RNA, 21 nt, synthetic construct
  source 1..21: mol_type = other RNA
gacccgagccagccctgtgaa

SEQ ID NO: 78546 - RNA, 21 nt, synthetic construct
  source 1..21: mol_type = other RNA
ggcgactgctgtcccacctta

SEQ ID NO: 78547 - RNA, 21 nt, synthetic construct
  source 1..21: mol_type = other RNA
ctgcaactacggccactgcca

SEQ ID NO: 78548 - RNA, 21 nt, synthetic construct
  source 1..21: mol_type = other RNA
ctgcaactacggccactgcca

SEQ ID NO: 78549 - RNA, 21 nt, synthetic construct
  source 1..21: mol_type = other RNA
ctgcaactacggccactgcca

SEQ ID NO: 78550 - RNA, 21 nt, synthetic construct
  source 1..21: mol_type = other RNA
ctgcaactacggccactgcca

SEQ ID NO: 78551 - RNA, 21 nt, synthetic construct
  source 1..21: mol_type = other RNA
ccctgtgacttccactatgaa

SEQ ID NO: 78552 - RNA, 21 nt, synthetic construct
  source 1..21: mol_type = other RNA
gacttccactacaagacctta

SEQ ID NO: 78553 - RNA, 21 nt, synthetic construct
  source 1..21: mol_type = other RNA
cttccactacaagaccttcga

SEQ ID NO: 78554 - RNA, 21 nt, synthetic construct
  source 1..21: mol_type = other RNA
ttccactacaagaccttcgaa

SEQ ID NO: 78555 - RNA, 21 nt, synthetic construct
  source 1..21: mol_type = other RNA
ccctcagtgtggagaatgaga

SEQ ID NO: 78556 - RNA, 21 nt, synthetic construct
  source 1..21: mol_type = other RNA
cctccactccagagactgcca

SEQ ID NO: 78557 - RNA, 21 nt, synthetic construct
  source 1..21: mol_type = other RNA
cctccactccagagactgcca

SEQ ID NO: 78558 - RNA, 21 nt, synthetic construct
  source 1..21: mol_type = other RNA
gtggtcacccgtgttgtcata

SEQ ID NO: 78559 - RNA, 21 nt, synthetic construct
  source 1..21: mol_type = other RNA
tcgcccggggaagtcatctaa

SEQ ID NO: 78560 - RNA, 21 nt, synthetic construct
  source 1..21: mol_type = other RNA
tgcctgcaacaatactaccta

SEQ ID NO: 78561 - RNA, 21 nt, synthetic construct
  source 1..21: mol_type = other RNA
cccggcgcgtgagctttgtta

SEQ ID NO: 78562 - RNA, 21 nt, synthetic construct
  source 1..21: mol_type = other RNA
actacgagctgcgggttctca

SEQ ID NO: 78563 - RNA, 21 nt, synthetic construct
  source 1..21: mol_type = other RNA
tacgcctacgtggtggatgca

SEQ ID NO: 78564 - RNA, 21 nt, synthetic construct
  source 1..21: mol_type = other RNA
cacgcccgatggccagccaga

SEQ ID NO: 78565 - RNA, 21 nt, synthetic construct
  source 1..21: mol_type = other RNA
caagaccttcgacggcgacga

SEQ ID NO: 78566 - RNA, 21 nt, synthetic construct
  source 1..21: mol_type = other RNA
ctacaagaccttcgacggcga

SEQ ID NO: 78567 - RNA, 21 nt, synthetic construct
  source 1..21: mol_type = other RNA
agaccttcgacggcgacgtca

SEQ ID NO: 78568 - RNA, 21 nt, synthetic construct
  source 1..21: mol_type = other RNA
cggcgacgtcttccgcttcca

SEQ ID NO: 78569 - RNA, 21 nt, synthetic construct
  source 1..21: mol_type = other RNA
caaagcctgtggccaacgtca

SEQ ID NO: 78570 - RNA, 21 nt, synthetic construct
  source 1..21: mol_type = other RNA
ccgacagcagaaaggatggca

SEQ ID NO: 78571 - RNA, 21 nt, synthetic construct
  source 1..21: mol_type = other RNA
agttgcaaggacatggccaaa

SEQ ID NO: 78572 - RNA, 21 nt, synthetic construct
  source 1..21: mol_type = other RNA
ctcgcccggggaagtcatcta

SEQ ID NO: 78573 - RNA, 21 nt, synthetic construct
  source 1..21: mol_type = other RNA
gccgagaacccctgctgccca

SEQ ID NO: 78574 - RNA, 21 nt, synthetic construct
  source 1..21: mol_type = other RNA
ccgagaacccctgctgcccca

SEQ ID NO: 78575 - RNA, 21 nt, synthetic construct
  source 1..21: mol_type = other RNA
cgtacctggccgcctgcgcca

SEQ ID NO: 78576 - RNA, 21 nt, synthetic construct
  source 1..21: mol_type = other RNA
ttgccgaggaggactgcccca

SEQ ID NO: 78577 - RNA, 21 nt, synthetic construct
  source 1..21: mol_type = other RNA
ggggacaacaccacccacgga

SEQ ID NO: 78578 - RNA, 21 nt, synthetic construct
  source 1..21: mol_type = other RNA
ccacggccccaccttcgccga

SEQ ID NO: 78579 - RNA, 21 nt, synthetic construct
  source 1..21: mol_type = other RNA
accgtgagcaggtggggaaga

SEQ ID NO: 78580 - RNA, 21 nt, synthetic construct
  source 1..21: mol_type = other RNA
accgtgagcaggtggggaaga

SEQ ID NO: 78581 - RNA, 21 nt, synthetic construct
  source 1..21: mol_type = other RNA
accgtgagcaggtggggaaga

SEQ ID NO: 78582 - RNA, 21 nt, synthetic construct
  source 1..21: mol_type = other RNA
accgtgagcaggtggggaaga

SEQ ID NO: 78583 - RNA, 21 nt, synthetic construct
  source 1..21: mol_type = other RNA
accctgtggaccacgtggaca

SEQ ID NO: 78584 - RNA, 21 nt, synthetic construct
  source 1..21: mol_type = other RNA
tcacacccccaaagtggtgaa

SEQ ID NO: 78585 - RNA, 21 nt, synthetic construct
  source 1..21: mol_type = other RNA
tgaccaccatggccactatga

SEQ ID NO: 78586 - RNA, 21 nt, synthetic construct
  source 1..21: mol_type = other RNA
ggaccacccgcacccctgcaa

SEQ ID NO: 78587 - RNA, 21 nt, synthetic construct
  source 1..21: mol_type = other RNA
cgcccggggaagtcatctaca

SEQ ID NO: 78588 - RNA, 21 nt, synthetic construct
  source 1..21: mol_type = other RNA
gcccggggaagtcatctacaa

SEQ ID NO: 78589 - RNA, 21 nt, synthetic construct
  source 1..21: mol_type = other RNA
cccggggaagtcatctacaaa

SEQ ID NO: 78590 - RNA, 21 nt, synthetic construct
  source 1..21: mol_type = other RNA
catcctgcccagatgtgtcca

SEQ ID NO: 78591 - RNA, 21 nt, synthetic construct
  source 1..21: mol_type = other RNA
tctgcgagggctcctgcccca

SEQ ID NO: 78592 - RNA, 21 nt, synthetic construct
  source 1..21: mol_type = other RNA
actaccccaagtctgaacaaa

SEQ ID NO: 78593 - RNA, 21 nt, synthetic construct
  source 1..21: mol_type = other RNA
gacggacaacgagaactgcca

SEQ ID NO: 78594 - RNA, 21 nt, synthetic construct
  source 1..21: mol_type = other RNA
gagcgtccaagtactcagcaa

SEQ ID NO: 78595 - RNA, 21 nt, synthetic construct
  source 1..21: mol_type = other RNA
aggtcgcaacggccaggtcaa

SEQ ID NO: 78596 - RNA, 21 nt, synthetic construct
  source 1..21: mol_type = other RNA
tgcccgcccaggagtgcccca

SEQ ID NO: 78597 - RNA, 21 nt, synthetic construct
  source 1..21: mol_type = other RNA
tgcctacgcccaggcctgcca

SEQ ID NO: 78598 - RNA, 21 nt, synthetic construct
  source 1..21: mol_type = other RNA
gatcgctacagctttgaagga

SEQ ID NO: 78599 - RNA, 21 nt, synthetic construct
  source 1..21: mol_type = other RNA
cggggactacatcaaggtcaa

SEQ ID NO: 78600 - RNA, 21 nt, synthetic construct
  source 1..21: mol_type = other RNA
ccaggacccaacggtgcaata

SEQ ID NO: 78601 - RNA, 21 nt, synthetic construct
  source 1..21: mol_type = other RNA
cctcaggaaaaccggctgcta

SEQ ID NO: 78602 - RNA, 21 nt, synthetic construct
  source 1..21: mol_type = other RNA
aagtgtcggacccgagccaga

SEQ ID NO: 78603 - RNA, 21 nt, synthetic construct
  source 1..21: mol_type = other RNA
ctacgaccgcaaccactggaa

SEQ ID NO: 78604 - RNA, 21 nt, synthetic construct
  source 1..21: mol_type = other RNA
accatgcgtgtggacattcca

SEQ ID NO: 78605 - RNA, 21 nt, synthetic construct
  source 1..21: mol_type = other RNA
caacaccctcctctagcacaa

SEQ ID NO: 78606 - RNA, 21 nt, synthetic construct
  source 1..21: mol_type = other RNA
acgtggaccgtcccagcacaa

SEQ ID NO: 78607 - RNA, 21 nt, synthetic construct
  source 1..21: mol_type = other RNA
ccgaccgagccggctgccata

SEQ ID NO: 78608 - RNA, 21 nt, synthetic construct
  source 1..21: mol_type = other RNA
atcagcgaccactgcagggga

SEQ ID NO: 78609 - RNA, 21 nt, synthetic construct
  source 1..21: mol_type = other RNA
agtgacgaccactgcagggga

SEQ ID NO: 78610 - RNA, 21 nt, synthetic construct
  source 1..21: mol_type = other RNA
gacggcacctcttacacctta

SEQ ID NO: 78611 - RNA, 21 nt, synthetic construct
  source 1..21: mol_type = other RNA
gaaatgtgccgacagcagcta

SEQ ID NO: 78612 - RNA, 21 nt, synthetic construct
  source 1..21: mol_type = other RNA
ggtggtgcacgacgagggcga

SEQ ID NO: 78613 - RNA, 21 nt, synthetic construct
  source 1..21: mol_type = other RNA
atgacgtcggtgcaagggtca

SEQ ID NO: 78614 - RNA, 21 nt, synthetic construct
  source 1..21: mol_type = other RNA
gacagagacgacaatgagcca

SEQ ID NO: 78615 - RNA, 21 nt, synthetic construct
  source 1..21: mol_type = other RNA
gtggaccacgtggaccgtcca

SEQ ID NO: 78616 - RNA, 21 nt, synthetic construct
  source 1..21: mol_type = other RNA
tccccgacagcagaaaggata

SEQ ID NO: 78617 - RNA, 21 nt, synthetic construct
  source 1..21: mol_type = other RNA
caccaaagtgtacaagccata

SEQ ID NO: 78618 - RNA, 21 nt, synthetic construct
  source 1..21: mol_type = other RNA
acaactgcaccgtgtacctca

SEQ ID NO: 78619 - RNA, 21 nt, synthetic construct
  source 1..21: mol_type = other RNA
agccgagctgggagaatgcaa

SEQ ID NO: 78620 - RNA, 21 nt, synthetic construct
  source 1..21: mol_type = other RNA
ggcgtccaacggctccgtcca

SEQ ID NO: 78621 - RNA, 21 nt, synthetic construct
  source 1..21: mol_type = other RNA
aacccccagcgcgcgcagcta

SEQ ID NO: 78622 - RNA, 21 nt, synthetic construct
  source 1..21: mol_type = other RNA
cttcctggtcatcgagaccca

SEQ ID NO: 78623 - RNA, 21 nt, synthetic construct
  source 1..21: mol_type = other RNA
tgggaggcggagactttgaga

SEQ ID NO: 78624 - RNA, 21 nt, synthetic construct
  source 1..21: mol_type = other RNA
agagtcccccgctctgtcaca

SEQ ID NO: 78625 - RNA, 21 nt, synthetic construct
  source 1..21: mol_type = other RNA
acctcgcagactgggtccaga

SEQ ID NO: 78626 - RNA, 21 nt, synthetic construct
  source 1..21: mol_type = other RNA
cccgtgacggtcaccccctca

SEQ ID NO: 78627 - RNA, 21 nt, synthetic construct
  source 1..21: mol_type = other RNA
aggatccgggtcctctgctga

SEQ ID NO: 78628 - RNA, 21 nt, synthetic construct
  source 1..21: mol_type = other RNA
accctctcagaaggactgaca

SEQ ID NO: 78629 - RNA, 21 nt, synthetic construct
  source 1..21: mol_type = other RNA
gctggcaccccacatgtgaga

SEQ ID NO: 78630 - RNA, 21 nt, synthetic construct
  source 1..21: mol_type = other RNA
atgtccacaatccacccctca

SEQ ID NO: 78631 - RNA, 21 nt, synthetic construct
  source 1..21: mol_type = other RNA
ggccaccacgacaagggccaa

SEQ ID NO: 78632 - RNA, 21 nt, synthetic construct
  source 1..21: mol_type = other RNA
gctggcaccccacatgtgaga

SEQ ID NO: 78633 - RNA, 21 nt, synthetic construct
  source 1..21: mol_type = other RNA
atgtccacaatccacccctca

SEQ ID NO: 78634 - RNA, 21 nt, synthetic construct
  source 1..21: mol_type = other RNA
ggccaccacgacaagggccaa

SEQ ID NO: 78635 - RNA, 21 nt, synthetic construct
  source 1..21: mol_type = other RNA
gctggcaccccacatgtgaga

SEQ ID NO: 78636 - RNA, 21 nt, synthetic construct
  source 1..21: mol_type = other RNA
atgacaagggccaccaattca

SEQ ID NO: 78637 - RNA, 21 nt, synthetic construct
  source 1..21: mol_type = other RNA
gcagtgtgcaatcagcactga

SEQ ID NO: 78638 - RNA, 21 nt, synthetic construct
  source 1..21: mol_type = other RNA
agtgtgcaatcagcactgtga

SEQ ID NO: 78639 - RNA, 21 nt, synthetic construct
  source 1..21: mol_type = other RNA
agctttacagccatcccctca

SEQ ID NO: 78640 - RNA, 21 nt, synthetic construct
  source 1..21: mol_type = other RNA
agctttacagccatcccctca

SEQ ID NO: 78641 - RNA, 21 nt, synthetic construct
  source 1..21: mol_type = other RNA
agctttacagccatcccctca

SEQ ID NO: 78642 - RNA, 21 nt, synthetic construct
  source 1..21: mol_type = other RNA
acaaccgtgtcgtcctgctga

SEQ ID NO: 78643 - RNA, 21 nt, synthetic construct
  source 1..21: mol_type = other RNA
acaacgagaactgcctgaaaa

SEQ ID NO: 78644 - RNA, 21 nt, synthetic construct
  source 1..21: mol_type = other RNA
ccgtgtgttcatgtacgggta

SEQ ID NO: 78645 - RNA, 21 nt, synthetic construct
  source 1..21: mol_type = other RNA
gtccccacacggtgcgcacaa

SEQ ID NO: 78646 - RNA, 21 nt, synthetic construct
  source 1..21: mol_type = other RNA
tgctggcaccccacatgtgaa

SEQ ID NO: 78647 - RNA, 21 nt, synthetic construct
  source 1..21: mol_type = other RNA
gtccccacacggtgcgcacaa

SEQ ID NO: 78648 - RNA, 21 nt, synthetic construct
  source 1..21: mol_type = other RNA
gtccccacacggtgcgcacaa

SEQ ID NO: 78649 - RNA, 21 nt, synthetic construct
  source 1..21: mol_type = other RNA
tgctggcaccccacatgtgaa

SEQ ID NO: 78650 - RNA, 21 nt, synthetic construct
  source 1..21: mol_type = other RNA
gtccccacacggtgcgcacaa

SEQ ID NO: 78651 - RNA, 21 nt, synthetic construct
  source 1..21: mol_type = other RNA
tgctggcaccccacatgtgaa

SEQ ID NO: 78652 - RNA, 21 nt, synthetic construct
  source 1..21: mol_type = other RNA
tgacaatgccatccctctcca

SEQ ID NO: 78653 - RNA, 21 nt, synthetic construct
  source 1..21: mol_type = other RNA
tcgtcctgctggacccaaaga

SEQ ID NO: 78654 - RNA, 21 nt, synthetic construct
  source 1..21: mol_type = other RNA
gtgcaatgtcaggaggatgca

SEQ ID NO: 78655 - RNA, 21 nt, synthetic construct
  source 1..21: mol_type = other RNA
cccctgggggagttgggccaa

SEQ ID NO: 78656 - RNA, 21 nt, synthetic construct
  source 1..21: mol_type = other RNA
ggctcccactattccacctta

SEQ ID NO: 78657 - RNA, 21 nt, synthetic construct
  source 1..21: mol_type = other RNA
accccgcgctccgtgctccta

SEQ ID NO: 78658 - RNA, 21 nt, synthetic construct
  source 1..21: mol_type = other RNA
cgtgttctctgagcactgcca

SEQ ID NO: 78659 - RNA, 21 nt, synthetic construct
  source 1..21: mol_type = other RNA
cgtacagctcagcgactggaa

SEQ ID NO: 78660 - RNA, 21 nt, synthetic construct
  source 1..21: mol_type = other RNA
gggctggtgtcggatgggaga

SEQ ID NO: 78661 - RNA, 21 nt, synthetic construct
  source 1..21: mol_type = other RNA
cccgcacctcgaccctgctga

SEQ ID NO: 78662 - RNA, 21 nt, synthetic construct
  source 1..21: mol_type = other RNA
ctgcaggaaccgtgagcagga

SEQ ID NO: 78663 - RNA, 21 nt, synthetic construct
  source 1..21: mol_type = other RNA
cccgcacctcgaccctgctga

SEQ ID NO: 78664 - RNA, 21 nt, synthetic construct
  source 1..21: mol_type = other RNA
ctgcaggaaccgtgagcagga

SEQ ID NO: 78665 - RNA, 21 nt, synthetic construct
  source 1..21: mol_type = other RNA
cccgcacctcgaccctgctga

SEQ ID NO: 78666 - RNA, 21 nt, synthetic construct
  source 1..21: mol_type = other RNA
ctgcaggaaccgtgagcagga

SEQ ID NO: 78667 - RNA, 21 nt, synthetic construct
  source 1..21: mol_type = other RNA
cccgcacctcgaccctgctga

SEQ ID NO: 78668 - RNA, 21 nt, synthetic construct
  source 1..21: mol_type = other RNA
ctgcaggaaccgtgagcagga

SEQ ID NO: 78669 - RNA, 21 nt, synthetic construct
  source 1..21: mol_type = other RNA
gatccacggccatcccgtcca

SEQ ID NO: 78670 - RNA, 21 nt, synthetic construct
  source 1..21: mol_type = other RNA
ctccacccgggcaactgctga

SEQ ID NO: 78671 - RNA, 21 nt, synthetic construct
  source 1..21: mol_type = other RNA
agcgggacggaaccactgcca

SEQ ID NO: 78672 - RNA, 21 nt, synthetic construct
  source 1..21: mol_type = other RNA
gcaccgtgtacctctgtgaga

SEQ ID NO: 78673 - RNA, 21 nt, synthetic construct
  source 1..21: mol_type = other RNA
tacgtgttctctgagcactga

SEQ ID NO: 78674 - RNA, 21 nt, synthetic construct
  source 1..21: mol_type = other RNA
atgccaggaacagctttgaga

SEQ ID NO: 78675 - RNA, 21 nt, synthetic construct
  source 1..21: mol_type = other RNA
cgagagcttccccaactggaa

SEQ ID NO: 78676 - RNA, 21 nt, synthetic construct
  source 1..21: mol_type = other RNA
cactccctcctccagtccaga

SEQ ID NO: 78677 - RNA, 21 nt, synthetic construct
  source 1..21: mol_type = other RNA
ttacacccatcccctcttcca

SEQ ID NO: 78678 - RNA, 21 nt, synthetic construct
  source 1..21: mol_type = other RNA
ccggaggggccgtctgtgaga

SEQ ID NO: 78679 - RNA, 21 nt, synthetic construct
  source 1..21: mol_type = other RNA
ggccaccacaaccggggccaa

SEQ ID NO: 78680 - RNA, 21 nt, synthetic construct
  source 1..21: mol_type = other RNA
ccggaggggccgtctgtgaga

SEQ ID NO: 78681 - RNA, 21 nt, synthetic construct
  source 1..21: mol_type = other RNA
cactccctcctccagtccaga

SEQ ID NO: 78682 - RNA, 21 nt, synthetic construct
  source 1..21: mol_type = other RNA
gtgaccacgggctgtgagcca

SEQ ID NO: 78683 - RNA, 21 nt, synthetic construct
  source 1..21: mol_type = other RNA
gccggaggggcagtctgtgaa

SEQ ID NO: 78684 - RNA, 21 nt, synthetic construct
  source 1..21: mol_type = other RNA
gtgaccacgggctgtgagcca

SEQ ID NO: 78685 - RNA, 21 nt, synthetic construct
  source 1..21: mol_type = other RNA
ccggaggggccgtctgtgaga

SEQ ID NO: 78686 - RNA, 21 nt, synthetic construct
  source 1..21: mol_type = other RNA
cactccctcctccagtccaga

SEQ ID NO: 78687 - RNA, 21 nt, synthetic construct
  source 1..21: mol_type = other RNA
caactgcccttccagcactga

SEQ ID NO: 78688 - RNA, 21 nt, synthetic construct
  source 1..21: mol_type = other RNA
ggccaccacaaccggggccaa

SEQ ID NO: 78689 - RNA, 21 nt, synthetic construct
  source 1..21: mol_type = other RNA
cttgaggtgccctgccagaga

SEQ ID NO: 78690 - RNA, 21 nt, synthetic construct
  source 1..21: mol_type = other RNA
caccttctgcgagggctccta

SEQ ID NO: 78691 - RNA, 21 nt, synthetic construct
  source 1..21: mol_type = other RNA
aactgcatgtttgacacctga

SEQ ID NO: 78692 - RNA, 21 nt, synthetic construct
  source 1..21: mol_type = other RNA
actcgaactgcatgtttgaca

SEQ ID NO: 78693 - RNA, 21 nt, synthetic construct
  source 1..21: mol_type = other RNA
ctcgaactgcatgtttgacaa

SEQ ID NO: 78694 - RNA, 21 nt, synthetic construct
  source 1..21: mol_type = other RNA
acggcgacgtcttccgcttca

SEQ ID NO: 78695 - RNA, 21 nt, synthetic construct
  source 1..21: mol_type = other RNA
ctttgcaactacgtgttctca

SEQ ID NO: 78696 - RNA, 21 nt, synthetic construct
  source 1..21: mol_type = other RNA
cttcttcatcgtggtgcagaa

SEQ ID NO: 78697 - RNA, 21 nt, synthetic construct
  source 1..21: mol_type = other RNA
acaatgggcaccgcccagaga

SEQ ID NO: 78698 - RNA, 21 nt, synthetic construct
  source 1..21: mol_type = other RNA
tgacttccactacaagaccta

SEQ ID NO: 78699 - RNA, 21 nt, synthetic construct
  source 1..21: mol_type = other RNA
actacaagaccttcgacggca

SEQ ID NO: 78700 - RNA, 21 nt, synthetic construct
  source 1..21: mol_type = other RNA
tacaagaccttcgacggcgaa

SEQ ID NO: 78701 - RNA, 21 nt, synthetic construct
  source 1..21: mol_type = other RNA
aagaccttcgacggcgacgta

SEQ ID NO: 78702 - RNA, 21 nt, synthetic construct
  source 1..21: mol_type = other RNA
gtacctggccgcctgcgccca

SEQ ID NO: 78703 - RNA, 21 nt, synthetic construct
  source 1..21: mol_type = other RNA
ggggggctatggcagtgccaa

SEQ ID NO: 78704 - RNA, 21 nt, synthetic construct
  source 1..21: mol_type = other RNA
tccactcgaactgcatgttta

SEQ ID NO: 78705 - RNA, 21 nt, synthetic construct
  source 1..21: mol_type = other RNA
ccactcgaactgcatgtttga

SEQ ID NO: 78706 - RNA, 21 nt, synthetic construct
  source 1..21: mol_type = other RNA
gaactgcatgtttgacaccta

SEQ ID NO: 78707 - RNA, 21 nt, synthetic construct
  source 1..21: mol_type = other RNA
actgcatgtttgacacctgca

SEQ ID NO: 78708 - RNA, 21 nt, synthetic construct
  source 1..21: mol_type = other RNA
ctgcatgtttgacacctgcaa

SEQ ID NO: 78709 - RNA, 21 nt, synthetic construct
  source 1..21: mol_type = other RNA
agtgcagcatcctccacggca

SEQ ID NO: 78710 - RNA, 21 nt, synthetic construct
  source 1..21: mol_type = other RNA
cattcaccttcaccaccgcca

SEQ ID NO: 78711 - RNA, 21 nt, synthetic construct
  source 1..21: mol_type = other RNA
caatgggcaccgcccagagca

SEQ ID NO: 78712 - RNA, 21 nt, synthetic construct
  source 1..21: mol_type = other RNA
ctaccccaacccagaccacaa

SEQ ID NO: 78713 - RNA, 21 nt, synthetic construct
  source 1..21: mol_type = other RNA
cggggctgaccagggctccca

SEQ ID NO: 78714 - RNA, 21 nt, synthetic construct
  source 1..21: mol_type = other RNA
cttctccagggacgaccacca

SEQ ID NO: 78715 - RNA, 21 nt, synthetic construct
  source 1..21: mol_type = other RNA
cttctccagggacgaccacca

SEQ ID NO: 78716 - RNA, 21 nt, synthetic construct
  source 1..21: mol_type = other RNA
cttctccagggacgaccacca

SEQ ID NO: 78717 - RNA, 21 nt, synthetic construct
  source 1..21: mol_type = other RNA
agagtgctgaccaccaccaca

SEQ ID NO: 78718 - RNA, 21 nt, synthetic construct
  source 1..21: mol_type = other RNA
ggctgctgggccccgactgga

SEQ ID NO: 78719 - RNA, 21 nt, synthetic construct
  source 1..21: mol_type = other RNA
tttgctgagtgccacaaccta

SEQ ID NO: 78720 - RNA, 21 nt, synthetic construct
  source 1..21: mol_type = other RNA
agggcgtcttcaagatgtgca

SEQ ID NO: 78721 - RNA, 21 nt, synthetic construct
  source 1..21: mol_type = other RNA
gggtcctctgctgcagtgaca

SEQ ID NO: 78722 - RNA, 21 nt, synthetic construct
  source 1..21: mol_type = other RNA
ggccagcaccacagcagtcca

SEQ ID NO: 78723 - RNA, 21 nt, synthetic construct
  source 1..21: mol_type = other RNA
acgaccatcctgtggcaccaa

SEQ ID NO: 78724 - RNA, 21 nt, synthetic construct
  source 1..21: mol_type = other RNA
acggccccaccttcgccgcca

SEQ ID NO: 78725 - RNA, 21 nt, synthetic construct
  source 1..21: mol_type = other RNA
tctaggaaccagagcccacaa

SEQ ID NO: 78726 - RNA, 21 nt, synthetic construct
  source 1..21: mol_type = other RNA
gcctgtgccgccaagggcgta

SEQ ID NO: 78727 - RNA, 21 nt, synthetic construct
  source 1..21: mol_type = other RNA
ctgtgtggggacttcaacgga

SEQ ID NO: 78728 - RNA, 21 nt, synthetic construct
  source 1..21: mol_type = other RNA
cacggccccaccttcgccgca

SEQ ID NO: 78729 - RNA, 21 nt, synthetic construct
  source 1..21: mol_type = other RNA
gccccaccttcgccgcctgca

SEQ ID NO: 78730 - RNA, 21 nt, synthetic construct
  source 1..21: mol_type = other RNA
cttaccaccacgaccaccaca

SEQ ID NO: 78731 - RNA, 21 nt, synthetic construct
  source 1..21: mol_type = other RNA
ggtcaacagccatgtggacaa

SEQ ID NO: 78732 - RNA, 21 nt, synthetic construct
  source 1..21: mol_type = other RNA
acgttctgcctccatccccaa

SEQ ID NO: 78733 - RNA, 21 nt, synthetic construct
  source 1..21: mol_type = other RNA
caacaccctcctctagcacaa

SEQ ID NO: 78734 - RNA, 21 nt, synthetic construct
  source 1..21: mol_type = other RNA
tcacactaccaaagtgccaaa

SEQ ID NO: 78735 - RNA, 21 nt, synthetic construct
  source 1..21: mol_type = other RNA
cagccccggtgtctagcacaa

SEQ ID NO: 78736 - RNA, 21 nt, synthetic construct
  source 1..21: mol_type = other RNA
cctgtgtgcccgccagggcaa

SEQ ID NO: 78737 - RNA, 21 nt, synthetic construct
  source 1..21: mol_type = other RNA
ccggaggggcagtctgtgaga

SEQ ID NO: 78738 - RNA, 21 nt, synthetic construct
  source 1..21: mol_type = other RNA
cattgccgaggaggactgcca

SEQ ID NO: 78739 - RNA, 21 nt, synthetic construct
  source 1..21: mol_type = other RNA
ccgcctgtccatgcctgctga

SEQ ID NO: 78740 - RNA, 21 nt, synthetic construct
  source 1..21: mol_type = other RNA
cgggccgagaacccctgctga

SEQ ID NO: 78741 - RNA, 21 nt, synthetic construct
  source 1..21: mol_type = other RNA
gggccgagaacccctgctgca

SEQ ID NO: 78742 - RNA, 21 nt, synthetic construct
  source 1..21: mol_type = other RNA
aggcacggtgctggatgacaa

SEQ ID NO: 78743 - RNA, 21 nt, synthetic construct
  source 1..21: mol_type = other RNA
ccactgtgtggacggctgcta

SEQ ID NO: 78744 - RNA, 21 nt, synthetic construct
  source 1..21: mol_type = other RNA
ccatcatcaaccccaagccca

SEQ ID NO: 78745 - RNA, 21 nt, synthetic construct
  source 1..21: mol_type = other RNA
catcatcaaccccaagcccta

SEQ ID NO: 78746 - RNA, 21 nt, synthetic construct
  source 1..21: mol_type = other RNA
gtggctggactacagctacca

SEQ ID NO: 78747 - RNA, 21 nt, synthetic construct
  source 1..21: mol_type = other RNA
gtggctggactacagctacca

SEQ ID NO: 78748 - RNA, 21 nt, synthetic construct
  source 1..21: mol_type = other RNA
gtggctggactacagctacca

SEQ ID NO: 78749 - RNA, 21 nt, synthetic construct
  source 1..21: mol_type = other RNA
gtggctggactacagctacca

SEQ ID NO: 78750 - RNA, 21 nt, synthetic construct
  source 1..21: mol_type = other RNA
gctgctgggccccgactggca

SEQ ID NO: 78751 - RNA, 21 nt, synthetic construct
  source 1..21: mol_type = other RNA
ctgctgggccccgactggcaa

SEQ ID NO: 78752 - RNA, 21 nt, synthetic construct
  source 1..21: mol_type = other RNA
tgcagccactggatccacgga

SEQ ID NO: 78753 - RNA, 21 nt, synthetic construct
  source 1..21: mol_type = other RNA
gcctacgcccaggcctgccaa

SEQ ID NO: 78754 - RNA, 21 nt, synthetic construct
  source 1..21: mol_type = other RNA
cctgggaccggaagaccagca

SEQ ID NO: 78755 - RNA, 21 nt, synthetic construct
  source 1..21: mol_type = other RNA
agctgcgggttctctgctgca

SEQ ID NO: 78756 - RNA, 21 nt, synthetic construct
  source 1..21: mol_type = other RNA
ttccttcgtgcctgtggacga

SEQ ID NO: 78757 - RNA, 21 nt, synthetic construct
  source 1..21: mol_type = other RNA
gagtcacccccttctccagga

SEQ ID NO: 78758 - RNA, 21 nt, synthetic construct
  source 1..21: mol_type = other RNA
gagtcacccccttctccagga

SEQ ID NO: 78759 - RNA, 21 nt, synthetic construct
  source 1..21: mol_type = other RNA
gagtcacccccttctccagga

SEQ ID NO: 78760 - RNA, 21 nt, synthetic construct
  source 1..21: mol_type = other RNA
ccagggcgcctgtcccaccta

SEQ ID NO: 78761 - RNA, 21 nt, synthetic construct
  source 1..21: mol_type = other RNA
ctgcctacgcccaggcctgca

SEQ ID NO: 78762 - RNA, 21 nt, synthetic construct
  source 1..21: mol_type = other RNA
cctgcacctgcaggaaccgga

SEQ ID NO: 78763 - RNA, 21 nt, synthetic construct
  source 1..21: mol_type = other RNA
aggccccacgacgcctgcaga

SEQ ID NO: 78764 - RNA, 21 nt, synthetic construct
  source 1..21: mol_type = other RNA
gcctccagtgtggatcagcaa

SEQ ID NO: 78765 - RNA, 21 nt, synthetic construct
  source 1..21: mol_type = other RNA
gggacgaccaccccgggccaa

SEQ ID NO: 78766 - RNA, 21 nt, synthetic construct
  source 1..21: mol_type = other RNA
gggacgaccaccccgggccaa

SEQ ID NO: 78767 - RNA, 21 nt, synthetic construct
  source 1..21: mol_type = other RNA
gcctccagtgtggatcagcaa

SEQ ID NO: 78768 - RNA, 21 nt, synthetic construct
  source 1..21: mol_type = other RNA
gggacgaccaccccgggccaa

SEQ ID NO: 78769 - RNA, 21 nt, synthetic construct
  source 1..21: mol_type = other RNA
gcctccagtgtggatcagcaa

SEQ ID NO: 78770 - RNA, 21 nt, synthetic construct
  source 1..21: mol_type = other RNA
gggacgaccaccccgggccaa

SEQ ID NO: 78771 - RNA, 21 nt, synthetic construct
  source 1..21: mol_type = other RNA
gcctccagtgtggatcagcaa

SEQ ID NO: 78772 - RNA, 21 nt, synthetic construct
  source 1..21: mol_type = other RNA
caggagtcctaccctgggaga

SEQ ID NO: 78773 - RNA, 21 nt, synthetic construct
  source 1..21: mol_type = other RNA
gccccacggccaccccgtcca

SEQ ID NO: 78774 - RNA, 21 nt, synthetic construct
  source 1..21: mol_type = other RNA
gccccacggccaccccgtcca

SEQ ID NO: 78775 - RNA, 21 nt, synthetic construct
  source 1..21: mol_type = other RNA
ttgggcacatggcgcccctca

SEQ ID NO: 78776 - RNA, 21 nt, synthetic construct
  source 1..21: mol_type = other RNA
gggccagccgcggaactggaa

SEQ ID NO: 78777 - RNA, 21 nt, synthetic construct
  source 1..21: mol_type = other RNA
cgcctgtccatgcctgctgca

SEQ ID NO: 78778 - RNA, 21 nt, synthetic construct
  source 1..21: mol_type = other RNA
cgaagtgcccacccagccaga

SEQ ID NO: 78779 - RNA, 21 nt, synthetic construct
  source 1..21: mol_type = other RNA
ggctccctccctgcccgtcca

SEQ ID NO: 78780 - RNA, 21 nt, synthetic construct
  source 1..21: mol_type = other RNA
acctgcccgtgtgccacctta

SEQ ID NO: 78781 - RNA, 21 nt, synthetic construct
  source 1..21: mol_type = other RNA
ggggcagaaggtgcactgtga

SEQ ID NO: 78782 - RNA, 21 nt, synthetic construct
  source 1..21: mol_type = other RNA
agttccacgtccaccccctca

SEQ ID NO: 78783 - RNA, 21 nt, synthetic construct
  source 1..21: mol_type = other RNA
tgcaactctaggaaccagaga

SEQ ID NO: 78784 - RNA, 21 nt, synthetic construct
  source 1..21: mol_type = other RNA
cgcgctccgtgctcctgctga

SEQ ID NO: 78785 - RNA, 21 nt, synthetic construct
  source 1..21: mol_type = other RNA
cccagaagggtgaggggccaa

SEQ ID NO: 78786 - RNA, 21 nt, synthetic construct
  source 1..21: mol_type = other RNA
ggcgacgtcttccgcttccca

SEQ ID NO: 78787 - RNA, 21 nt, synthetic construct
  source 1..21: mol_type = other RNA
ccggctccaccaccaacccca

SEQ ID NO: 78788 - RNA, 21 nt, synthetic construct
  source 1..21: mol_type = other RNA
ccggctccaccaccaacccca

SEQ ID NO: 78789 - RNA, 21 nt, synthetic construct
  source 1..21: mol_type = other RNA
ccggctccaccaccaacccca

SEQ ID NO: 78790 - RNA, 21 nt, synthetic construct
  source 1..21: mol_type = other RNA
ccggctccaccaccaacccca

SEQ ID NO: 78791 - RNA, 21 nt, synthetic construct
  source 1..21: mol_type = other RNA
ccggctccaccaccaacccca

SEQ ID NO: 78792 - RNA, 21 nt, synthetic construct
  source 1..21: mol_type = other RNA
caccacaactgtggccactga

SEQ ID NO: 78793 - RNA, 21 nt, synthetic construct
  source 1..21: mol_type = other RNA
gccgaacaccacggccaccaa

SEQ ID NO: 78794 - RNA, 21 nt, synthetic construct
  source 1..21: mol_type = other RNA
gccacaccacggccacctcca

SEQ ID NO: 78795 - RNA, 21 nt, synthetic construct
  source 1..21: mol_type = other RNA
cgtgcggccggaggggccgta

SEQ ID NO: 78796 - RNA, 21 nt, synthetic construct
  source 1..21: mol_type = other RNA
gaacagaccaccacacccgta

SEQ ID NO: 78797 - RNA, 21 nt, synthetic construct
  source 1..21: mol_type = other RNA
caccacaactgtggccactga

SEQ ID NO: 78798 - RNA, 21 nt, synthetic construct
  source 1..21: mol_type = other RNA
tccacagctaccagctttaca

SEQ ID NO: 78799 - RNA, 21 nt, synthetic construct
  source 1..21: mol_type = other RNA
tgcccaccggttccacggcca

SEQ ID NO: 78800 - RNA, 21 nt, synthetic construct
  source 1..21: mol_type = other RNA
ggaatctcagcctctacctga

SEQ ID NO: 78801 - RNA, 21 nt, synthetic construct
  source 1..21: mol_type = other RNA
tcagcctctacctggacaaca

SEQ ID NO: 78802 - RNA, 21 nt, synthetic construct
  source 1..21: mol_type = other RNA
gagtgccacaaccttgtgcca

SEQ ID NO: 78803 - RNA, 21 nt, synthetic construct
  source 1..21: mol_type = other RNA
gaggggatggcggagggctga

SEQ ID NO: 78804 - RNA, 21 nt, synthetic construct
  source 1..21: mol_type = other RNA
gcatctgcgtgcaggcctgca

SEQ ID NO: 78805 - RNA, 21 nt, synthetic construct
  source 1..21: mol_type = other RNA
gcaggcctgcccctgcgtgga

SEQ ID NO: 78806 - RNA, 21 nt, synthetic construct
  source 1..21: mol_type = other RNA
cgagacggtgtgcgtgtgcaa

SEQ ID NO: 78807 - RNA, 21 nt, synthetic construct
  source 1..21: mol_type = other RNA
acatgtgtacctgcctctcta

SEQ ID NO: 78808 - RNA, 21 nt, synthetic construct
  source 1..21: mol_type = other RNA
ggtggagtccatttgctgaca

SEQ ID NO: 78809 - RNA, 21 nt, synthetic construct
  source 1..21: mol_type = other RNA
gtggagtccatttgctgacca

SEQ ID NO: 78810 - RNA, 21 nt, synthetic construct
  source 1..21: mol_type = other RNA
cccccggcctgtgtgtggcaa

SEQ ID NO: 78811 - RNA, 21 nt, synthetic construct
  source 1..21: mol_type = other RNA
ccgtgggtgaaaccggcccca

SEQ ID NO: 78812 - RNA, 21 nt, synthetic construct
  source 1..21: mol_type = other RNA
gccttgcccctccctgatgta

SEQ ID NO: 78813 - RNA, 21 nt, synthetic construct
  source 1..21: mol_type = other RNA
tgccacggccggagcgcccga

SEQ ID NO: 78814 - RNA, 21 nt, synthetic construct
  source 1..21: mol_type = other RNA
gcaacggccaggtcagagaga

SEQ ID NO: 78815 - RNA, 21 nt, synthetic construct
  source 1..21: mol_type = other RNA
ccgcgccgcctacgaggacta

SEQ ID NO: 78816 - RNA, 21 nt, synthetic construct
  source 1..21: mol_type = other RNA
aggactgcaaccacccttcca

SEQ ID NO: 78817 - RNA, 21 nt, synthetic construct
  source 1..21: mol_type = other RNA
aggactgcaaccacccttcca

SEQ ID NO: 78818 - RNA, 21 nt, synthetic construct
  source 1..21: mol_type = other RNA
aggactgcaaccacccttcca

SEQ ID NO: 78819 - RNA, 21 nt, synthetic construct
  source 1..21: mol_type = other RNA
ggagcagagcggggactacaa

SEQ ID NO: 78820 - RNA, 21 nt, synthetic construct
  source 1..21: mol_type = other RNA
cccccatcactgatcaccaca

SEQ ID NO: 78821 - RNA, 21 nt, synthetic construct
  source 1..21: mol_type = other RNA
gcaggggacgtgccacaacca

SEQ ID NO: 78822 - RNA, 21 nt, synthetic construct
  source 1..21: mol_type = other RNA
caacaccctcctctagcacaa

SEQ ID NO: 78823 - RNA, 21 nt, synthetic construct
  source 1..21: mol_type = other RNA
caacaccctcctctagcacaa

SEQ ID NO: 78824 - RNA, 21 nt, synthetic construct
  source 1..21: mol_type = other RNA
caacaccctcctctagcacaa

SEQ ID NO: 78825 - RNA, 21 nt, synthetic construct
  source 1..21: mol_type = other RNA
gggctgcgagaccgaggtcaa

SEQ ID NO: 78826 - RNA, 21 nt, synthetic construct
  source 1..21: mol_type = other RNA
ctgccccacctgcccgtgtga

SEQ ID NO: 78827 - RNA, 21 nt, synthetic construct
  source 1..21: mol_type = other RNA
acgcgtagccggtccgtggta

SEQ ID NO: 78828 - RNA, 21 nt, synthetic construct
  source 1..21: mol_type = other RNA
cctactccaacatccgtgcga

SEQ ID NO: 78829 - RNA, 21 nt, synthetic construct
  source 1..21: mol_type = other RNA
cctactccaacatccgtgcga

SEQ ID NO: 78830 - RNA, 21 nt, synthetic construct
  source 1..21: mol_type = other RNA
cctactccaacatccgtgcga

SEQ ID NO: 78831 - RNA, 21 nt, synthetic construct
  source 1..21: mol_type = other RNA
cctactccaacatccgtgcga

SEQ ID NO: 78832 - RNA, 21 nt, synthetic construct
  source 1..21: mol_type = other RNA
ctactccaacatccgtgcgga

SEQ ID NO: 78833 - RNA, 21 nt, synthetic construct
  source 1..21: mol_type = other RNA
ctactccaacatccgtgcgga

SEQ ID NO: 78834 - RNA, 21 nt, synthetic construct
  source 1..21: mol_type = other RNA
ctactccaacatccgtgcgga

SEQ ID NO: 78835 - RNA, 21 nt, synthetic construct
  source 1..21: mol_type = other RNA
ctactccaacatccgtgcgga

SEQ ID NO: 78836 - RNA, 21 nt, synthetic construct
  source 1..21: mol_type = other RNA
ccggtaccacccagcactcga

SEQ ID NO: 78837 - RNA, 21 nt, synthetic construct
  source 1..21: mol_type = other RNA
ccggtaccacccagcactcga

SEQ ID NO: 78838 - RNA, 21 nt, synthetic construct
  source 1..21: mol_type = other RNA
ccggtaccacccagcactcga

SEQ ID NO: 78839 - RNA, 21 nt, synthetic construct
  source 1..21: mol_type = other RNA
accagatcctcttcaacgcaa

SEQ ID NO: 78840 - RNA, 21 nt, synthetic construct
  source 1..21: mol_type = other RNA
cccacatcggccccaataaca

SEQ ID NO: 78841 - RNA, 21 nt, synthetic construct
  source 1..21: mol_type = other RNA
cacagagccgagcactataga

SEQ ID NO: 78842 - RNA, 21 nt, synthetic construct
  source 1..21: mol_type = other RNA
acccaccctacaagatacgca

SEQ ID NO: 78843 - RNA, 21 nt, synthetic construct
  source 1..21: mol_type = other RNA
cgggttctctgctgcgaataa

SEQ ID NO: 78844 - RNA, 21 nt, synthetic construct
  source 1..21: mol_type = other RNA
actgtgacgtccacttcggca

SEQ ID NO: 78845 - RNA, 21 nt, synthetic construct
  source 1..21: mol_type = other RNA
cccttgcactgtcctaacgga

SEQ ID NO: 78846 - RNA, 21 nt, synthetic construct
  source 1..21: mol_type = other RNA
aggcggagactttgagacgta

SEQ ID NO: 78847 - RNA, 21 nt, synthetic construct
  source 1..21: mol_type = other RNA
tggggagtgcgtccagaccga

SEQ ID NO: 78848 - RNA, 21 nt, synthetic construct
  source 1..21: mol_type = other RNA
accacggccactacgatcaca

SEQ ID NO: 78849 - RNA, 21 nt, synthetic construct
  source 1..21: mol_type = other RNA
accacggccactacgatcaca

SEQ ID NO: 78850 - RNA, 21 nt, synthetic construct
  source 1..21: mol_type = other RNA
accacggccactacgatcaca

SEQ ID NO: 78851 - RNA, 21 nt, synthetic construct
  source 1..21: mol_type = other RNA
accacggccactacgatcaca

SEQ ID NO: 78852 - RNA, 21 nt, synthetic construct
  source 1..21: mol_type = other RNA
accacggccactacgatcaca

SEQ ID NO: 78853 - RNA, 21 nt, synthetic construct
  source 1..21: mol_type = other RNA
ccgccgtgcaaccgtcccgga

SEQ ID NO: 78854 - RNA, 21 nt, synthetic construct
  source 1..21: mol_type = other RNA
aacactcacgagcgagctgta

SEQ ID NO: 78855 - RNA, 21 nt, synthetic construct
  source 1..21: mol_type = other RNA
gatcccaaatacgccaaccaa

SEQ ID NO: 78856 - RNA, 21 nt, synthetic construct
  source 1..21: mol_type = other RNA
agagcctggaggcttacgcaa

SEQ ID NO: 78857 - RNA, 21 nt, synthetic construct
  source 1..21: mol_type = other RNA
ctgatcctccaagaggggaca

SEQ ID NO: 78858 - RNA, 21 nt, synthetic construct
  source 1..21: mol_type = other RNA
ccaggccctgttctcaacgca

SEQ ID NO: 78859 - RNA, 21 nt, synthetic construct
  source 1..21: mol_type = other RNA
caggccctgttctcaacgcca

SEQ ID NO: 78860 - RNA, 21 nt, synthetic construct
  source 1..21: mol_type = other RNA
ccagtaccacccagcactcga

SEQ ID NO: 78861 - RNA, 21 nt, synthetic construct
  source 1..21: mol_type = other RNA
gatccatgcacgctttgggaa

SEQ ID NO: 78862 - RNA, 21 nt, synthetic construct
  source 1..21: mol_type = other RNA
agatcctcttcaacgcacaca

SEQ ID NO: 78863 - RNA, 21 nt, synthetic construct
  source 1..21: mol_type = other RNA
caagccatgcggccccataca

SEQ ID NO: 78864 - RNA, 21 nt, synthetic construct
  source 1..21: mol_type = other RNA
gtgcccctgctacgctcacga

SEQ ID NO: 78865 - RNA, 21 nt, synthetic construct
  source 1..21: mol_type = other RNA
ctgcccctgtgtgcacaacga

SEQ ID NO: 78866 - RNA, 21 nt, synthetic construct
  source 1..21: mol_type = other RNA
cctccactctggggacgacca

SEQ ID NO: 78867 - RNA, 21 nt, synthetic construct
  source 1..21: mol_type = other RNA
tccacccttccaacacgctca

SEQ ID NO: 78868 - RNA, 21 nt, synthetic construct
  source 1..21: mol_type = other RNA
gcgccaacactcacgagcgaa

SEQ ID NO: 78869 - RNA, 21 nt, synthetic construct
  source 1..21: mol_type = other RNA
ggcgccaacactcacgagcga

SEQ ID NO: 78870 - RNA, 21 nt, synthetic construct
  source 1..21: mol_type = other RNA
gtgcggcctgacggacaacga

SEQ ID NO: 78871 - RNA, 21 nt, synthetic construct
  source 1..21: mol_type = other RNA
ccccacatcggcccccataaa

SEQ ID NO: 78872 - RNA, 21 nt, synthetic construct
  source 1..21: mol_type = other RNA
ccccacatcggcccccataaa

SEQ ID NO: 78873 - RNA, 21 nt, synthetic construct
  source 1..21: mol_type = other RNA
ccccacatcggcccccataaa

SEQ ID NO: 78874 - RNA, 21 nt, synthetic construct
  source 1..21: mol_type = other RNA
ccacgaaggccaccacgacaa

SEQ ID NO: 78875 - RNA, 21 nt, synthetic construct
  source 1..21: mol_type = other RNA
ccacgaaggccaccacgacaa

SEQ ID NO: 78876 - RNA, 21 nt, synthetic construct
  source 1..21: mol_type = other RNA
gtgtgttcatgtacgggtgga

SEQ ID NO: 78877 - RNA, 21 nt, synthetic construct
  source 1..21: mol_type = other RNA
cccaggccctgttctcaacga

SEQ ID NO: 78878 - RNA, 21 nt, synthetic construct
  source 1..21: mol_type = other RNA
cggccccaataaccacggtga

SEQ ID NO: 78879 - RNA, 21 nt, synthetic construct
  source 1..21: mol_type = other RNA
gccggctgccatttctacgca

SEQ ID NO: 78880 - RNA, 21 nt, synthetic construct
  source 1..21: mol_type = other RNA
caaggacatggccaagacgta

SEQ ID NO: 78881 - RNA, 21 nt, synthetic construct
  source 1..21: mol_type = other RNA
ccagggtcagcccccgccgta

SEQ ID NO: 78882 - RNA, 21 nt, synthetic construct
  source 1..21: mol_type = other RNA
ccccaataaccacggtggtga

SEQ ID NO: 78883 - RNA, 21 nt, synthetic construct
  source 1..21: mol_type = other RNA
tggtgactgcagctacgttca

SEQ ID NO: 78884 - RNA, 21 nt, synthetic construct
  source 1..21: mol_type = other RNA
tgagagagatccatgcacgca

SEQ ID NO: 78885 - RNA, 21 nt, synthetic construct
  source 1..21: mol_type = other RNA
ccccaagtcccagcgctacga

SEQ ID NO: 78886 - RNA, 21 nt, synthetic construct
  source 1..21: mol_type = other RNA
ccagtgtggctgctacgacaa

SEQ ID NO: 78887 - RNA, 21 nt, synthetic construct
  source 1..21: mol_type = other RNA
tgccccaagtcccagcgctaa

SEQ ID NO: 78888 - RNA, 21 nt, synthetic construct
  source 1..21: mol_type = other RNA
gtttgatgaggactaccccaa

SEQ ID NO: 78889 - RNA, 21 nt, synthetic construct
  source 1..21: mol_type = other RNA
tgcgtgaacaagcacctgcca

SEQ ID NO: 78890 - RNA, 21 nt, synthetic construct
  source 1..21: mol_type = other RNA
ctcctccactccggggacgaa

SEQ ID NO: 78891 - RNA, 21 nt, synthetic construct
  source 1..21: mol_type = other RNA
tgaggactaccccaagtctga

SEQ ID NO: 78892 - RNA, 21 nt, synthetic construct
  source 1..21: mol_type = other RNA
caaccgaagtgtgagtggaca

SEQ ID NO: 78893 - RNA, 21 nt, synthetic construct
  source 1..21: mol_type = other RNA
caccccgtgggtgaaaccgga

SEQ ID NO: 78894 - RNA, 21 nt, synthetic construct
  source 1..21: mol_type = other RNA
cccctgtgtgcacaacgagga

SEQ ID NO: 78895 - RNA, 21 nt, synthetic construct
  source 1..21: mol_type = other RNA
acctgcagaagttggatggga

SEQ ID NO: 78896 - RNA, 21 nt, synthetic construct
  source 1..21: mol_type = other RNA
cccccagtgccgaacaccaca

SEQ ID NO: 78897 - RNA, 21 nt, synthetic construct
  source 1..21: mol_type = other RNA
agcagtgcccggacccgctga

SEQ ID NO: 78898 - RNA, 21 nt, synthetic construct
  source 1..21: mol_type = other RNA
cccccagtgccgaacaccaca

SEQ ID NO: 78899 - RNA, 21 nt, synthetic construct
  source 1..21: mol_type = other RNA
ggacggcggggacacggccaa

SEQ ID NO: 78900 - RNA, 21 nt, synthetic construct
  source 1..21: mol_type = other RNA
cccccagtgccgaacaccaca

SEQ ID NO: 78901 - RNA, 21 nt, synthetic construct
  source 1..21: mol_type = other RNA
cccagtggcatccagtgcgca

SEQ ID NO: 78902 - RNA, 21 nt, synthetic construct
  source 1..21: mol_type = other RNA
ggagaatgagaactacgccca

SEQ ID NO: 78903 - RNA, 21 nt, synthetic construct
  source 1..21: mol_type = other RNA
cttgtgcccccgggcccatta

SEQ ID NO: 78904 - RNA, 21 nt, synthetic construct
  source 1..21: mol_type = other RNA
gcagctacgttctgtccaaga

SEQ ID NO: 78905 - RNA, 21 nt, synthetic construct
  source 1..21: mol_type = other RNA
ctaccagctttacagccatca

SEQ ID NO: 78906 - RNA, 21 nt, synthetic construct
  source 1..21: mol_type = other RNA
ctaccagctttacagccatca

SEQ ID NO: 78907 - RNA, 21 nt, synthetic construct
  source 1..21: mol_type = other RNA
ctaccagctttacagccatca

SEQ ID NO: 78908 - RNA, 21 nt, synthetic construct
  source 1..21: mol_type = other RNA
ctgcagaagttggatgggcca

SEQ ID NO: 78909 - RNA, 21 nt, synthetic construct
  source 1..21: mol_type = other RNA
gccaacatcaccctgttcaca

SEQ ID NO: 78910 - RNA, 21 nt, synthetic construct
  source 1..21: mol_type = other RNA
cctgccgtgccctggcaccta

SEQ ID NO: 78911 - RNA, 21 nt, synthetic construct
  source 1..21: mol_type = other RNA
ctctggctgcctgcccctcga

SEQ ID NO: 78912 - RNA, 21 nt, synthetic construct
  source 1..21: mol_type = other RNA
accagaaccaggctgacgaca

SEQ ID NO: 78913 - RNA, 21 nt, synthetic construct
  source 1..21: mol_type = other RNA
aaggactgacatcccccagaa

SEQ ID NO: 78914 - RNA, 21 nt, synthetic construct
  source 1..21: mol_type = other RNA
ggccgtctgtgagcagcccca

SEQ ID NO: 78915 - RNA, 21 nt, synthetic construct
  source 1..21: mol_type = other RNA
ccaggtcgtggaatgcagcca

SEQ ID NO: 78916 - RNA, 21 nt, synthetic construct
  source 1..21: mol_type = other RNA
cagccccggtgtcagtggaca

SEQ ID NO: 78917 - RNA, 21 nt, synthetic construct
  source 1..21: mol_type = other RNA
ggccgtctgtgagcagcccca

SEQ ID NO: 78918 - RNA, 21 nt, synthetic construct
  source 1..21: mol_type = other RNA
ccaggtcgtggaatgcagcca

SEQ ID NO: 78919 - RNA, 21 nt, synthetic construct
  source 1..21: mol_type = other RNA
gcaccaacaaccagagggaca

SEQ ID NO: 78920 - RNA, 21 nt, synthetic construct
  source 1..21: mol_type = other RNA
ccaggtcgtggaatgcagcca

SEQ ID NO: 78921 - RNA, 21 nt, synthetic construct
  source 1..21: mol_type = other RNA
caacgccattcaccttcacca

SEQ ID NO: 78922 - RNA, 21 nt, synthetic construct
  source 1..21: mol_type = other RNA
ggccgtctgtgagcagcccca

SEQ ID NO: 78923 - RNA, 21 nt, synthetic construct
  source 1..21: mol_type = other RNA
ccaggtcgtggaatgcagcca

SEQ ID NO: 78924 - RNA, 21 nt, synthetic construct
  source 1..21: mol_type = other RNA
ccgtgtgttctgctgcaacta

SEQ ID NO: 78925 - RNA, 21 nt, synthetic construct
  source 1..21: mol_type = other RNA
ctgatgctgagccaggtctta

SEQ ID NO: 78926 - RNA, 21 nt, synthetic construct
  source 1..21: mol_type = other RNA
accttgtgcccccgggcccaa

SEQ ID NO: 78927 - RNA, 21 nt, synthetic construct
  source 1..21: mol_type = other RNA
gagcagtgcccggacccgcta

SEQ ID NO: 78928 - RNA, 21 nt, synthetic construct
  source 1..21: mol_type = other RNA
ggccaggtcgtggaatgcaga

SEQ ID NO: 78929 - RNA, 21 nt, synthetic construct
  source 1..21: mol_type = other RNA
ggccaggtcgtggaatgcaga

SEQ ID NO: 78930 - RNA, 21 nt, synthetic construct
  source 1..21: mol_type = other RNA
ggccaggtcgtggaatgcaga

SEQ ID NO: 78931 - RNA, 21 nt, synthetic construct
  source 1..21: mol_type = other RNA
ggccaggtcgtggaatgcaga

SEQ ID NO: 78932 - RNA, 21 nt, synthetic construct
  source 1..21: mol_type = other RNA
ccgtgtgttctgctgcaacta

SEQ ID NO: 78933 - RNA, 21 nt, synthetic construct
  source 1..21: mol_type = other RNA
gagtgtgcagtgactggcgaa

SEQ ID NO: 78934 - RNA, 21 nt, synthetic construct
  source 1..21: mol_type = other RNA
ccccgctccagtttgggaaca

SEQ ID NO: 78935 - RNA, 21 nt, synthetic construct
  source 1..21: mol_type = other RNA
tgcagaagttggatgggccca

SEQ ID NO: 78936 - RNA, 21 nt, synthetic construct
  source 1..21: mol_type = other RNA
ccaggacctgtgccgctgcca

SEQ ID NO: 78937 - RNA, 21 nt, synthetic construct
  source 1..21: mol_type = other RNA
cggcggggacacggccatcca

SEQ ID NO: 78938 - RNA, 21 nt, synthetic construct
  source 1..21: mol_type = other RNA
ccgtgtgttctgctgcaacta

SEQ ID NO: 78939 - RNA, 21 nt, synthetic construct
  source 1..21: mol_type = other RNA
ccgtgtgttctgctgcaacta

SEQ ID NO: 78940 - RNA, 21 nt, synthetic construct
  source 1..21: mol_type = other RNA
ctcctccactccggggacgaa

SEQ ID NO: 78941 - RNA, 21 nt, synthetic construct
  source 1..21: mol_type = other RNA
cctgggcacctgcgtggccta

SEQ ID NO: 78942 - RNA, 21 nt, synthetic construct
  source 1..21: mol_type = other RNA
ctacggggatggccacttcaa

SEQ ID NO: 78943 - RNA, 21 nt, synthetic construct
  source 1..21: mol_type = other RNA
cacccacgggaccttccgcaa

SEQ ID NO: 78944 - RNA, 21 nt, synthetic construct
  source 1..21: mol_type = other RNA
gctgtggcatgtcctggaaca

SEQ ID NO: 78945 - RNA, 21 nt, synthetic construct
  source 1..21: mol_type = other RNA
ttcatccgactgcaccaggaa

SEQ ID NO: 78946 - RNA, 21 nt, synthetic construct
  source 1..21: mol_type = other RNA
ctgcacggtggccaggtgcga

SEQ ID NO: 78947 - RNA, 21 nt, synthetic construct
  source 1..21: mol_type = other RNA
accctgcctaaaaacctgcca

SEQ ID NO: 78948 - RNA, 21 nt, synthetic construct
  source 1..21: mol_type = other RNA
cagtggcatccagtgcgctca

SEQ ID NO: 78949 - RNA, 21 nt, synthetic construct
  source 1..21: mol_type = other RNA
accaggacgtcatctacaaca

SEQ ID NO: 78950 - RNA, 21 nt, synthetic construct
  source 1..21: mol_type = other RNA
ccacggagcagtgcccggaca

SEQ ID NO: 78951 - RNA, 21 nt, synthetic construct
  source 1..21: mol_type = other RNA
ccctgcctaaaaacctgccga

SEQ ID NO: 78952 - RNA, 21 nt, synthetic construct
  source 1..21: mol_type = other RNA
gggctgatgtgcgccaacaga

SEQ ID NO: 78953 - RNA, 21 nt, synthetic construct
  source 1..21: mol_type = other RNA
gggatggccacttcatcacca

SEQ ID NO: 78954 - RNA, 21 nt, synthetic construct
  source 1..21: mol_type = other RNA
gccagccccggtgtcagtgga

SEQ ID NO: 78955 - RNA, 21 nt, synthetic construct
  source 1..21: mol_type = other RNA
tggggaagttcaagatgtgca

SEQ ID NO: 78956 - RNA, 21 nt, synthetic construct
  source 1..21: mol_type = other RNA
tggggaagttcaagatgtgca

SEQ ID NO: 78957 - RNA, 21 nt, synthetic construct
  source 1..21: mol_type = other RNA
tggggaagttcaagatgtgca

SEQ ID NO: 78958 - RNA, 21 nt, synthetic construct
  source 1..21: mol_type = other RNA
tggggaagttcaagatgtgca

SEQ ID NO: 78959 - RNA, 21 nt, synthetic construct
  source 1..21: mol_type = other RNA
ttctgcagggcatttggacaa

SEQ ID NO: 78960 - RNA, 21 nt, synthetic construct
  source 1..21: mol_type = other RNA
caggcccggctgccctacaga

SEQ ID NO: 78961 - RNA, 21 nt, synthetic construct
  source 1..21: mol_type = other RNA
tgccggaaccccagtgggcaa

SEQ ID NO: 78962 - RNA, 21 nt, synthetic construct
  source 1..21: mol_type = other RNA
gctactcctgtgaggaggaca

SEQ ID NO: 78963 - RNA, 21 nt, synthetic construct
  source 1..21: mol_type = other RNA
cgtgtccggctgtgtctgtca

SEQ ID NO: 78964 - RNA, 21 nt, synthetic construct
  source 1..21: mol_type = other RNA
tggcccaggactactgtggga

SEQ ID NO: 78965 - RNA, 21 nt, synthetic construct
  source 1..21: mol_type = other RNA
cacgaggagacggtgccctta

SEQ ID NO: 78966 - RNA, 21 nt, synthetic construct
  source 1..21: mol_type = other RNA
tgccaggccgagagcttccca

SEQ ID NO: 78967 - RNA, 21 nt, synthetic construct
  source 1..21: mol_type = other RNA
gtccgcgaggtctgccgctga

SEQ ID NO: 78968 - RNA, 21 nt, synthetic construct
  source 1..21: mol_type = other RNA
acggcggggacacggccatca

SEQ ID NO: 78969 - RNA, 21 nt, synthetic construct
  source 1..21: mol_type = other RNA
gcacggagcctgctgtgccta

SEQ ID NO: 78970 - RNA, 21 nt, synthetic construct
  source 1..21: mol_type = other RNA
tccagtgcgctcacagcctta

SEQ ID NO: 78971 - RNA, 21 nt, synthetic construct
  source 1..21: mol_type = other RNA
acaacgccattcaccttcaca

SEQ ID NO: 78972 - RNA, 21 nt, synthetic construct
  source 1..21: mol_type = other RNA
gggcccacggagcagtgccca

SEQ ID NO: 78973 - RNA, 21 nt, synthetic construct
  source 1..21: mol_type = other RNA
ccacgggctgtgagccccaga

SEQ ID NO: 78974 - RNA, 21 nt, synthetic construct
  source 1..21: mol_type = other RNA
ccacgggctgtgagccccaga

SEQ ID NO: 78975 - RNA, 21 nt, synthetic construct
  source 1..21: mol_type = other RNA
gcacctgcaccaacaaccaga

SEQ ID NO: 78976 - RNA, 21 nt, synthetic construct
  source 1..21: mol_type = other RNA
acttggaggggacgttgagta

SEQ ID NO: 78977 - RNA, 21 nt, synthetic construct
  source 1..21: mol_type = other RNA
tggcggactccggacacctga

SEQ ID NO: 78978 - RNA, 21 nt, synthetic construct
  source 1..21: mol_type = other RNA
tgacttccactatgagtgcga

SEQ ID NO: 78979 - RNA, 21 nt, synthetic construct
  source 1..21: mol_type = other RNA
tggagaactgcacggtggcca

SEQ ID NO: 78980 - RNA, 21 nt, synthetic construct
  source 1..21: mol_type = other RNA
ctgtgtctgtcccccggggca

SEQ ID NO: 78981 - RNA, 21 nt, synthetic construct
  source 1..21: mol_type = other RNA
aaaaacctgccggaaccccaa

SEQ ID NO: 78982 - RNA, 21 nt, synthetic construct
  source 1..21: mol_type = other RNA
tgcaggctccacagaacccaa

SEQ ID NO: 78983 - RNA, 21 nt, synthetic construct
  source 1..21: mol_type = other RNA
gaacaagcacctgcccatcaa

SEQ ID NO: 78984 - RNA, 21 nt, synthetic construct
  source 1..21: mol_type = other RNA
tgcaccaacaaccagagggaa

SEQ ID NO: 78985 - RNA, 21 nt, synthetic construct
  source 1..21: mol_type = other RNA
gcccaggactactgtggggaa

SEQ ID NO: 78986 - RNA, 21 nt, synthetic construct
  source 1..21: mol_type = other RNA
ctgtgtgggaacttcaaccaa

SEQ ID NO: 78987 - RNA, 21 nt, synthetic construct
  source 1..21: mol_type = other RNA
tcaactccatctacacgcaga

SEQ ID NO: 78988 - RNA, 21 nt, synthetic construct
  source 1..21: mol_type = other RNA
gtgggaccaccggcaccacca

SEQ ID NO: 78989 - RNA, 21 nt, synthetic construct
  source 1..21: mol_type = other RNA
gtgtccgcgaggtctgccgca

SEQ ID NO: 78990 - RNA, 21 nt, synthetic construct
  source 1..21: mol_type = other RNA
atacgtgccctgtggccccta

SEQ ID NO: 78991 - RNA, 21 nt, synthetic construct
  source 1..21: mol_type = other RNA
gcaggctccacagaacccaca

SEQ ID NO: 78992 - RNA, 21 nt, synthetic construct
  source 1..21: mol_type = other RNA
gctccacagaacccactgtca

SEQ ID NO: 78993 - RNA, 21 nt, synthetic construct
  source 1..21: mol_type = other RNA
cttcttcaatgaggaccagaa

SEQ ID NO: 78994 - RNA, 21 nt, synthetic construct
  source 1..21: mol_type = other RNA
cgggagttgggccaggtcgta

SEQ ID NO: 78995 - RNA, 21 nt, synthetic construct
  source 1..21: mol_type = other RNA
gtggacagagtggtttgatga

SEQ ID NO: 78996 - RNA, 21 nt, synthetic construct
  source 1..21: mol_type = other RNA
ggcggggacacggccatccga

SEQ ID NO: 78997 - RNA, 21 nt, synthetic construct
  source 1..21: mol_type = other RNA
cgggagttgggccaggtcgta

SEQ ID NO: 78998 - RNA, 21 nt, synthetic construct
  source 1..21: mol_type = other RNA
cgggagttgggccaggtcgta

SEQ ID NO: 78999 - RNA, 21 nt, synthetic construct
  source 1..21: mol_type = other RNA
tcctctgccctagggaccaca

SEQ ID NO: 79000 - RNA, 21 nt, synthetic construct
  source 1..21: mol_type = other RNA
gcagaaggtgcactgtgacga

SEQ ID NO: 79001 - RNA, 21 nt, synthetic construct
  source 1..21: mol_type = other RNA
tgggcccacggagcagtgcca

SEQ ID NO: 79002 - RNA, 21 nt, synthetic construct
  source 1..21: mol_type = other RNA
agtggcatccagtgcgctcaa

SEQ ID NO: 79003 - RNA, 21 nt, synthetic construct
  source 1..21: mol_type = other RNA
gtgtgcagtgactggcgagga

SEQ ID NO: 79004 - RNA, 21 nt, synthetic construct
  source 1..21: mol_type = other RNA
gactgcagctacgttctgtca

SEQ ID NO: 79005 - RNA, 21 nt, synthetic construct
  source 1..21: mol_type = other RNA
gtgcctgtggacggctgcaca

SEQ ID NO: 79006 - RNA, 21 nt, synthetic construct
  source 1..21: mol_type = other RNA
caggtaccaccacctgccaga

SEQ ID NO: 79007 - RNA, 21 nt, synthetic construct
  source 1..21: mol_type = other RNA
cctgcggggcaccctgcctaa

SEQ ID NO: 79008 - RNA, 21 nt, synthetic construct
  source 1..21: mol_type = other RNA
tcctctgccctagggaccaca

SEQ ID NO: 79009 - RNA, 21 nt, synthetic construct
  source 1..21: mol_type = other RNA
tcctctgccctagggaccaca

SEQ ID NO: 79010 - RNA, 21 nt, synthetic construct
  source 1..21: mol_type = other RNA
tcctctgccctagggaccaca

SEQ ID NO: 79011 - RNA, 21 nt, synthetic construct
  source 1..21: mol_type = other RNA
ggaatactcacgccagtgcga

SEQ ID NO: 79012 - RNA, 21 nt, synthetic construct
  source 1..21: mol_type = other RNA
cactattccacctttgacgga

SEQ ID NO: 79013 - RNA, 21 nt, synthetic construct
  source 1..21: mol_type = other RNA
acctgcgtggcctacggggaa

SEQ ID NO: 79014 - RNA, 21 nt, synthetic construct
  source 1..21: mol_type = other RNA
tctgtgacttctacaacccaa

SEQ ID NO: 79015 - RNA, 21 nt, synthetic construct
  source 1..21: mol_type = other RNA
cggtgacttcccacaccccaa

SEQ ID NO: 79016 - RNA, 21 nt, synthetic construct
  source 1..21: mol_type = other RNA
ccaggtgcgtgggtgacaaca

SEQ ID NO: 79017 - RNA, 21 nt, synthetic construct
  source 1..21: mol_type = other RNA
tgaggccgacgtcacctgcaa

SEQ ID NO: 79018 - RNA, 21 nt, synthetic construct
  source 1..21: mol_type = other RNA
acagcaaccgaaaagaccaca

SEQ ID NO: 79019 - RNA, 21 nt, synthetic construct
  source 1..21: mol_type = other RNA
ccagcccttcttcaatgagga

SEQ ID NO: 79020 - RNA, 21 nt, synthetic construct
  source 1..21: mol_type = other RNA
ccaggcctgtggtcacccgta

SEQ ID NO: 79021 - RNA, 21 nt, synthetic construct
  source 1..21: mol_type = other RNA
gaggtgggagtgcagccacca

SEQ ID NO: 79022 - RNA, 21 nt, synthetic construct
  source 1..21: mol_type = other RNA
gcccagtgtggctgctacgaa

SEQ ID NO: 79023 - RNA, 21 nt, synthetic construct
  source 1..21: mol_type = other RNA
ggccgtgtcctgggaccggaa

SEQ ID NO: 79024 - RNA, 21 nt, synthetic construct
  source 1..21: mol_type = other RNA
tgagctttgttccacccgtca

SEQ ID NO: 79025 - RNA, 21 nt, synthetic construct
  source 1..21: mol_type = other RNA
tcctgtgaggaggactcctga

SEQ ID NO: 79026 - RNA, 21 nt, synthetic construct
  source 1..21: mol_type = other RNA
gtgttctgctgcaactacgga

SEQ ID NO: 79027 - RNA, 21 nt, synthetic construct
  source 1..21: mol_type = other RNA
gtgttctgctgcaactacgga

SEQ ID NO: 79028 - RNA, 21 nt, synthetic construct
  source 1..21: mol_type = other RNA
gtgttctgctgcaactacgga

SEQ ID NO: 79029 - RNA, 21 nt, synthetic construct
  source 1..21: mol_type = other RNA
gtgttctgctgcaactacgga

SEQ ID NO: 79030 - RNA, 21 nt, synthetic construct
  source 1..21: mol_type = other RNA
ccttgtgcccccgggcccata

SEQ ID NO: 79031 - RNA, 21 nt, synthetic construct
  source 1..21: mol_type = other RNA
tgtgtccctgcgcccatggca

SEQ ID NO: 79032 - RNA, 21 nt, synthetic construct
  source 1..21: mol_type = other RNA
gagctttgttccacccgtcaa

SEQ ID NO: 79033 - RNA, 21 nt, synthetic construct
  source 1..21: mol_type = other RNA
cttccactatgagtgcgagta

SEQ ID NO: 79034 - RNA, 21 nt, synthetic construct
  source 1..21: mol_type = other RNA
tgcacggtggccaggtgcgta

SEQ ID NO: 79035 - RNA, 21 nt, synthetic construct
  source 1..21: mol_type = other RNA
acctgccagccccggtgtcaa

SEQ ID NO: 79036 - RNA, 21 nt, synthetic construct
  source 1..21: mol_type = other RNA
tgggccaggtcgtggaatgca

SEQ ID NO: 79037 - RNA, 21 nt, synthetic construct
  source 1..21: mol_type = other RNA
cggtttcagcaagaacggcga

SEQ ID NO: 79038 - RNA, 21 nt, synthetic construct
  source 1..21: mol_type = other RNA
tgggccaggtcgtggaatgca

SEQ ID NO: 79039 - RNA, 21 nt, synthetic construct
  source 1..21: mol_type = other RNA
gcgcccacgcggggggccaga

SEQ ID NO: 79040 - RNA, 21 nt, synthetic construct
  source 1..21: mol_type = other RNA
ggacacggccatccgggtcca

SEQ ID NO: 79041 - RNA, 21 nt, synthetic construct
  source 1..21: mol_type = other RNA
tgggccaggtcgtggaatgca

SEQ ID NO: 79042 - RNA, 21 nt, synthetic construct
  source 1..21: mol_type = other RNA
actgcgtgtccggctgtgtca

SEQ ID NO: 79043 - RNA, 21 nt, synthetic construct
  source 1..21: mol_type = other RNA
tgggccaggtcgtggaatgca

SEQ ID NO: 79044 - RNA, 21 nt, synthetic construct
  source 1..21: mol_type = other RNA
caagcccttccactcgaacta

SEQ ID NO: 79045 - RNA, 21 nt, synthetic construct
  source 1..21: mol_type = other RNA
gcccagcagccccacatcgga

SEQ ID NO: 79046 - RNA, 21 nt, synthetic construct
  source 1..21: mol_type = other RNA
gcccagcagccccacatcgga

SEQ ID NO: 79047 - RNA, 21 nt, synthetic construct
  source 1..21: mol_type = other RNA
gccaggacctgccgtgcccta

SEQ ID NO: 79048 - RNA, 21 nt, synthetic construct
  source 1..21: mol_type = other RNA
gcccagcagccccacatcgga

SEQ ID NO: 79049 - RNA, 21 nt, synthetic construct
  source 1..21: mol_type = other RNA
tgtgtgggaacttcaaccaga

SEQ ID NO: 79050 - RNA, 21 nt, synthetic construct
  source 1..21: mol_type = other RNA
accaggactacaagggcagga

SEQ ID NO: 79051 - RNA, 21 nt, synthetic construct
  source 1..21: mol_type = other RNA
gcccagcagccccacatcgga

SEQ ID NO: 79052 - RNA, 21 nt, synthetic construct
  source 1..21: mol_type = other RNA
ttcgtggagagctacgagcta

SEQ ID NO: 79053 - RNA, 21 nt, synthetic construct
  source 1..21: mol_type = other RNA
ctcagtgccagcacggagcca

SEQ ID NO: 79054 - RNA, 21 nt, synthetic construct
  source 1..21: mol_type = other RNA
cagtggacagagtggtttgaa

SEQ ID NO: 79055 - RNA, 21 nt, synthetic construct
  source 1..21: mol_type = other RNA
aggactgacatcccccagata

SEQ ID NO: 79056 - RNA, 21 nt, synthetic construct
  source 1..21: mol_type = other RNA
gagtggacagagtggtttgaa

SEQ ID NO: 79057 - RNA, 21 nt, synthetic construct
  source 1..21: mol_type = other RNA
gtgtgttctgctgcaactaca

SEQ ID NO: 79058 - RNA, 21 nt, synthetic construct
  source 1..21: mol_type = other RNA
acccacagctaccagctttaa

SEQ ID NO: 79059 - RNA, 21 nt, synthetic construct
  source 1..21: mol_type = other RNA
gtgtgttctgctgcaactaca

SEQ ID NO: 79060 - RNA, 21 nt, synthetic construct
  source 1..21: mol_type = other RNA
gtgtgttctgctgcaactaca

SEQ ID NO: 79061 - RNA, 21 nt, synthetic construct
  source 1..21: mol_type = other RNA
acccacagctaccagctttaa

SEQ ID NO: 79062 - RNA, 21 nt, synthetic construct
  source 1..21: mol_type = other RNA
gtgtgttctgctgcaactaca

SEQ ID NO: 79063 - RNA, 21 nt, synthetic construct
  source 1..21: mol_type = other RNA
acccacagctaccagctttaa

SEQ ID NO: 79064 - RNA, 21 nt, synthetic construct
  source 1..21: mol_type = other RNA
ggggacacccaggacccaaca

SEQ ID NO: 79065 - RNA, 21 nt, synthetic construct
  source 1..21: mol_type = other RNA
caacaccaccgatgggcttga

SEQ ID NO: 79066 - RNA, 21 nt, synthetic construct
  source 1..21: mol_type = other RNA
cagccaacatcaccctgttca

SEQ ID NO: 79067 - RNA, 21 nt, synthetic construct
  source 1..21: mol_type = other RNA
gaggggccgtctgtgagcaga

SEQ ID NO: 79068 - RNA, 21 nt, synthetic construct
  source 1..21: mol_type = other RNA
ggcctgagtgaggccgacgta

SEQ ID NO: 79069 - RNA, 21 nt, synthetic construct
  source 1..21: mol_type = other RNA
gaggggccgtctgtgagcaga

SEQ ID NO: 79070 - RNA, 21 nt, synthetic construct
  source 1..21: mol_type = other RNA
tttcagcacacactgcgtgta

SEQ ID NO: 79071 - RNA, 21 nt, synthetic construct
  source 1..21: mol_type = other RNA
tgtcctgggaccggaagacca

SEQ ID NO: 79072 - RNA, 21 nt, synthetic construct
  source 1..21: mol_type = other RNA
gaggggccgtctgtgagcaga

SEQ ID NO: 79073 - RNA, 21 nt, synthetic construct
  source 1..21: mol_type = other RNA
cctgtgtgggaacttcaacca

SEQ ID NO: 79074 - RNA, 21 nt, synthetic construct
  source 1..21: mol_type = other RNA
taaggacatagagtgccagga

SEQ ID NO: 79075 - RNA, 21 nt, synthetic construct
  source 1..21: mol_type = other RNA
tgtcctggcggactccggaca

SEQ ID NO: 79076 - RNA, 21 nt, synthetic construct
  source 1..21: mol_type = other RNA
tgtgtccgcgaggtctgccga

SEQ ID NO: 79077 - RNA, 21 nt, synthetic construct
  source 1..21: mol_type = other RNA
tgggccagcaggtggactgta

SEQ ID NO: 79078 - RNA, 21 nt, synthetic construct
  source 1..21: mol_type = other RNA
tgccagccccggtgtcagtga

SEQ ID NO: 79079 - RNA, 21 nt, synthetic construct
  source 1..21: mol_type = other RNA
agcagcggtttcagcaagaaa

SEQ ID NO: 79080 - RNA, 21 nt, synthetic construct
  source 1..21: mol_type = other RNA
ggaaaaccggctgctgctaca

SEQ ID NO: 79081 - RNA, 21 nt, synthetic construct
  source 1..21: mol_type = other RNA
caacatcaccctgttcacaca

SEQ ID NO: 79082 - RNA, 21 nt, synthetic construct
  source 1..21: mol_type = other RNA
ctgccgctcccaggttgacta

SEQ ID NO: 79083 - RNA, 21 nt, synthetic construct
  source 1..21: mol_type = other RNA
cagagtggtttgatgaggaca

SEQ ID NO: 79084 - RNA, 21 nt, synthetic construct
  source 1..21: mol_type = other RNA
tgtccactgtgtcctcctcaa

SEQ ID NO: 79085 - RNA, 21 nt, synthetic construct
  source 1..21: mol_type = other RNA
ccacttctctactccctgcta

SEQ ID NO: 79086 - RNA, 21 nt, synthetic construct
  source 1..21: mol_type = other RNA
gagaactgcacggtggccaga

SEQ ID NO: 79087 - RNA, 21 nt, synthetic construct
  source 1..21: mol_type = other RNA
gcacctgcccatcaaagtgta

SEQ ID NO: 79088 - RNA, 21 nt, synthetic construct
  source 1..21: mol_type = other RNA
ctgcgcccaggacctgtgcca

SEQ ID NO: 79089 - RNA, 21 nt, synthetic construct
  source 1..21: mol_type = other RNA
tgtgcagtgactggcgaggta

SEQ ID NO: 79090 - RNA, 21 nt, synthetic construct
  source 1..21: mol_type = other RNA
gcccacgcggggggccagcca

SEQ ID NO: 79091 - RNA, 21 nt, synthetic construct
  source 1..21: mol_type = other RNA
gaaaaccggctgctgctacta

SEQ ID NO: 79092 - RNA, 21 nt, synthetic construct
  source 1..21: mol_type = other RNA
cgcagccttcgccaacaccta

SEQ ID NO: 79093 - RNA, 21 nt, synthetic construct
  source 1..21: mol_type = other RNA
aacatcaccctgttcacacca

SEQ ID NO: 79094 - RNA, 21 nt, synthetic construct
  source 1..21: mol_type = other RNA
caggtgtttgtcaggctggaa

SEQ ID NO: 79095 - RNA, 21 nt, synthetic construct
  source 1..21: mol_type = other RNA
acttcaaccagaaccaggcta

SEQ ID NO: 79096 - RNA, 21 nt, synthetic construct
  source 1..21: mol_type = other RNA
ccacagcaaccgaaaagacca

SEQ ID NO: 79097 - RNA, 21 nt, synthetic construct
  source 1..21: mol_type = other RNA
ctggagaactgcacggtggca

SEQ ID NO: 79098 - RNA, 21 nt, synthetic construct
  source 1..21: mol_type = other RNA
gagaacatcccctgtgggaca

SEQ ID NO: 79099 - RNA, 21 nt, synthetic construct
  source 1..21: mol_type = other RNA
gccagcccttcttcaatgaga

SEQ ID NO: 79100 - RNA, 21 nt, synthetic construct
  source 1..21: mol_type = other RNA
tggaatactcacgccagtgca

SEQ ID NO: 79101 - RNA, 21 nt, synthetic construct
  source 1..21: mol_type = other RNA
tccacgacaagcccggcccta

SEQ ID NO: 79102 - RNA, 21 nt, synthetic construct
  source 1..21: mol_type = other RNA
cctgcacctgcacctatgaga

SEQ ID NO: 79103 - RNA, 21 nt, synthetic construct
  source 1..21: mol_type = other RNA
ccctcagtgccagcacggaga

SEQ ID NO: 79104 - RNA, 21 nt, synthetic construct
  source 1..21: mol_type = other RNA
gtggggaagttcaagatgtga

SEQ ID NO: 79105 - RNA, 21 nt, synthetic construct
  source 1..21: mol_type = other RNA
aaggacatagagtgccaggca

SEQ ID NO: 79106 - RNA, 21 nt, synthetic construct
  source 1..21: mol_type = other RNA
gccaggccgagagcttcccca

SEQ ID NO: 79107 - RNA, 21 nt, synthetic construct
  source 1..21: mol_type = other RNA
gtggggaagttcaagatgtga

SEQ ID NO: 79108 - RNA, 21 nt, synthetic construct
  source 1..21: mol_type = other RNA
agccgctgaccacgagcctga

SEQ ID NO: 79109 - RNA, 21 nt, synthetic construct
  source 1..21: mol_type = other RNA
gtggggaagttcaagatgtga

SEQ ID NO: 79110 - RNA, 21 nt, synthetic construct
  source 1..21: mol_type = other RNA
gtggggaagttcaagatgtga

SEQ ID NO: 79111 - RNA, 21 nt, synthetic construct
  source 1..21: mol_type = other RNA
acacccacagctaccagctta

SEQ ID NO: 79112 - RNA, 21 nt, synthetic construct
  source 1..21: mol_type = other RNA
accacccacacccccacagta

SEQ ID NO: 79113 - RNA, 21 nt, synthetic construct
  source 1..21: mol_type = other RNA
tgtgttctgctgcaactacga

SEQ ID NO: 79114 - RNA, 21 nt, synthetic construct
  source 1..21: mol_type = other RNA
tgtgttctgctgcaactacga

SEQ ID NO: 79115 - RNA, 21 nt, synthetic construct
  source 1..21: mol_type = other RNA
tgtgttctgctgcaactacga

SEQ ID NO: 79116 - RNA, 21 nt, synthetic construct
  source 1..21: mol_type = other RNA
tgtgttctgctgcaactacga

SEQ ID NO: 79117 - RNA, 21 nt, synthetic construct
  source 1..21: mol_type = other RNA
acacccacagctaccagctta

SEQ ID NO: 79118 - RNA, 21 nt, synthetic construct
  source 1..21: mol_type = other RNA
accacccacacccccacagta

SEQ ID NO: 79119 - RNA, 21 nt, synthetic construct
  source 1..21: mol_type = other RNA
cctgctggggccggcctttga

SEQ ID NO: 79120 - RNA, 21 nt, synthetic construct
  source 1..21: mol_type = other RNA
gctggggccggcctttgcgga

SEQ ID NO: 79121 - RNA, 21 nt, synthetic construct
  source 1..21: mol_type = other RNA
acacccacagctaccagctta

SEQ ID NO: 79122 - RNA, 21 nt, synthetic construct
  source 1..21: mol_type = other RNA
cccagctcccacttctctaca

SEQ ID NO: 79123 - RNA, 21 nt, synthetic construct
  source 1..21: mol_type = other RNA
acttccactatgagtgcgaga

SEQ ID NO: 79124 - RNA, 21 nt, synthetic construct
  source 1..21: mol_type = other RNA
gcctgcgcccaggacctgtga

SEQ ID NO: 79125 - RNA, 21 nt, synthetic construct
  source 1..21: mol_type = other RNA
aggaaaaccggctgctgctaa

SEQ ID NO: 79126 - RNA, 21 nt, synthetic construct
  source 1..21: mol_type = other RNA
tctgccccccaggcacggtga

SEQ ID NO: 79127 - RNA, 21 nt, synthetic construct
  source 1..21: mol_type = other RNA
acgcagctgcccctgtcggca

SEQ ID NO: 79128 - RNA, 21 nt, synthetic construct
  source 1..21: mol_type = other RNA
ggaggtgggagtgcagccaca

SEQ ID NO: 79129 - RNA, 21 nt, synthetic construct
  source 1..21: mol_type = other RNA
gcgcagccttcgccaacacca

SEQ ID NO: 79130 - RNA, 21 nt, synthetic construct
  source 1..21: mol_type = other RNA
cagctaccagctttacagcca

SEQ ID NO: 79131 - RNA, 21 nt, synthetic construct
  source 1..21: mol_type = other RNA
cagctaccagctttacagcca

SEQ ID NO: 79132 - RNA, 21 nt, synthetic construct
  source 1..21: mol_type = other RNA
cagctaccagctttacagcca

SEQ ID NO: 79133 - RNA, 21 nt, synthetic construct
  source 1..21: mol_type = other RNA
cctgcgtggcctacggggata

SEQ ID NO: 79134 - RNA, 21 nt, synthetic construct
  source 1..21: mol_type = other RNA
ctgcaccaacaaccagaggga

SEQ ID NO: 79135 - RNA, 21 nt, synthetic construct
  source 1..21: mol_type = other RNA
aactgccagagctgtaactga

SEQ ID NO: 79136 - RNA, 21 nt, synthetic construct
  source 1..21: mol_type = other RNA
actgccagagctgtaactgca

SEQ ID NO: 79137 - RNA, 21 nt, synthetic construct
  source 1..21: mol_type = other RNA
cctgaggcagagagggtacca

SEQ ID NO: 79138 - RNA, 21 nt, synthetic construct
  source 1..21: mol_type = other RNA
acagagtggtttgatgaggaa

SEQ ID NO: 79139 - RNA, 21 nt, synthetic construct
  source 1..21: mol_type = other RNA
aacccactgtcccaggggtga

SEQ ID NO: 79140 - RNA, 21 nt, synthetic construct
  source 1..21: mol_type = other RNA
cccagtgtggctgctacgaca

SEQ ID NO: 79141 - RNA, 21 nt, synthetic construct
  source 1..21: mol_type = other RNA
ccaacatcaccctgttcacaa

SEQ ID NO: 79142 - RNA, 21 nt, synthetic construct
  source 1..21: mol_type = other RNA
gagccccagtgtgcctggtca

SEQ ID NO: 79143 - RNA, 21 nt, synthetic construct
  source 1..21: mol_type = other RNA
cgcctgccgctcccaggttga

SEQ ID NO: 79144 - RNA, 21 nt, synthetic construct
  source 1..21: mol_type = other RNA
atcaccctgttcacaccctca

SEQ ID NO: 79145 - RNA, 21 nt, synthetic construct
  source 1..21: mol_type = other RNA
ggcagaaggtgcactgtgaca

SEQ ID NO: 79146 - RNA, 21 nt, synthetic construct
  source 1..21: mol_type = other RNA
ttgggccaggtcgtggaatga

SEQ ID NO: 79147 - RNA, 21 nt, synthetic construct
  source 1..21: mol_type = other RNA
gctgtttcagcacacactgca

SEQ ID NO: 79148 - RNA, 21 nt, synthetic construct
  source 1..21: mol_type = other RNA
gagccccagtgtgcctggtca

SEQ ID NO: 79149 - RNA, 21 nt, synthetic construct
  source 1..21: mol_type = other RNA
ttgggccaggtcgtggaatga

SEQ ID NO: 79150 - RNA, 21 nt, synthetic construct
  source 1..21: mol_type = other RNA
gagccccagtgtgcctggtca

SEQ ID NO: 79151 - RNA, 21 nt, synthetic construct
  source 1..21: mol_type = other RNA
ttgggccaggtcgtggaatga

SEQ ID NO: 79152 - RNA, 21 nt, synthetic construct
  source 1..21: mol_type = other RNA
gagccccagtgtgcctggtca

SEQ ID NO: 79153 - RNA, 21 nt, synthetic construct
  source 1..21: mol_type = other RNA
ttgggccaggtcgtggaatga

SEQ ID NO: 79154 - RNA, 21 nt, synthetic construct
  source 1..21: mol_type = other RNA
tgcccccgggcccattcttca

SEQ ID NO: 79155 - RNA, 21 nt, synthetic construct
  source 1..21: mol_type = other RNA
cggaggtgggagtgcagccaa

SEQ ID NO: 79156 - RNA, 21 nt, synthetic construct
  source 1..21: mol_type = other RNA
gcaactgccagtcctgcgtga

SEQ ID NO: 79157 - RNA, 21 nt, synthetic construct
  source 1..21: mol_type = other RNA
ccaggccatgcagcaccagta

SEQ ID NO: 79158 - RNA, 21 nt, synthetic construct
  source 1..21: mol_type = other RNA
ggatgagtgtggctgcacgca

SEQ ID NO: 79159 - RNA, 21 nt, synthetic construct
  source 1..21: mol_type = other RNA
agaaggtgcactgtgacgtca

SEQ ID NO: 79160 - RNA, 21 nt, synthetic construct
  source 1..21: mol_type = other RNA
aggagctgccttacagccgca

SEQ ID NO: 79161 - RNA, 21 nt, synthetic construct
  source 1..21: mol_type = other RNA
tggcccagtgtggctgctaca

SEQ ID NO: 79162 - RNA, 21 nt, synthetic construct
  source 1..21: mol_type = other RNA
cggacaacgagaactgcctga

SEQ ID NO: 79163 - RNA, 21 nt, synthetic construct
  source 1..21: mol_type = other RNA
ctgggcacctgcgtggcctaa

SEQ ID NO: 79164 - RNA, 21 nt, synthetic construct
  source 1..21: mol_type = other RNA
tgcgggagttgggccaggtca

SEQ ID NO: 79165 - RNA, 21 nt, synthetic construct
  source 1..21: mol_type = other RNA
tgcgggagttgggccaggtca

SEQ ID NO: 79166 - RNA, 21 nt, synthetic construct
  source 1..21: mol_type = other RNA
tgcgggagttgggccaggtca

SEQ ID NO: 79167 - RNA, 21 nt, synthetic construct
  source 1..21: mol_type = other RNA
ggggctgtgagtggcactaca

SEQ ID NO: 79168 - RNA, 21 nt, synthetic construct
  source 1..21: mol_type = other RNA
cctgcgggagttgggccagga

SEQ ID NO: 79169 - RNA, 21 nt, synthetic construct
  source 1..21: mol_type = other RNA
ctgcgggagttgggccaggta

SEQ ID NO: 79170 - RNA, 21 nt, synthetic construct
  source 1..21: mol_type = other RNA
agtgcgctcacagccttgaga

SEQ ID NO: 79171 - RNA, 21 nt, synthetic construct
  source 1..21: mol_type = other RNA
cctgcgggagttgggccagga

SEQ ID NO: 79172 - RNA, 21 nt, synthetic construct
  source 1..21: mol_type = other RNA
ctgcgggagttgggccaggta

SEQ ID NO: 79173 - RNA, 21 nt, synthetic construct
  source 1..21: mol_type = other RNA
cctggtgtccccctgcgggaa

SEQ ID NO: 79174 - RNA, 21 nt, synthetic construct
  source 1..21: mol_type = other RNA
cctgcgggagttgggccagga

SEQ ID NO: 79175 - RNA, 21 nt, synthetic construct
  source 1..21: mol_type = other RNA
ctgcgggagttgggccaggta

SEQ ID NO: 79176 - RNA, 21 nt, synthetic construct
  source 1..21: mol_type = other RNA
cctggtgtccccctgcgggaa

SEQ ID NO: 79177 - RNA, 21 nt, synthetic construct
  source 1..21: mol_type = other RNA
cacgccctcctccactccaga

SEQ ID NO: 79178 - RNA, 21 nt, synthetic construct
  source 1..21: mol_type = other RNA
cctggtgtccccctgcgggaa

SEQ ID NO: 79179 - RNA, 21 nt, synthetic construct
  source 1..21: mol_type = other RNA
gtgcccccgggcccattctta

SEQ ID NO: 79180 - RNA, 21 nt, synthetic construct
  source 1..21: mol_type = other RNA
accagggccagatgtgcggca

SEQ ID NO: 79181 - RNA, 21 nt, synthetic construct
  source 1..21: mol_type = other RNA
actcctgtgaggaggactcca

SEQ ID NO: 79182 - RNA, 21 nt, synthetic construct
  source 1..21: mol_type = other RNA
gcctacggggatggccactta

SEQ ID NO: 79183 - RNA, 21 nt, synthetic construct
  source 1..21: mol_type = other RNA
ctgggtcccccactccacgaa

SEQ ID NO: 79184 - RNA, 21 nt, synthetic construct
  source 1..21: mol_type = other RNA
gctaccaggacgtcatctaca

SEQ ID NO: 79185 - RNA, 21 nt, synthetic construct
  source 1..21: mol_type = other RNA
caccaacaaccagagggacga

SEQ ID NO: 79186 - RNA, 21 nt, synthetic construct
  source 1..21: mol_type = other RNA
cctcctccactccggggacga

SEQ ID NO: 79187 - RNA, 21 nt, synthetic construct
  source 1..21: mol_type = other RNA
gaagtgcgtggcccagtgtga

SEQ ID NO: 79188 - RNA, 21 nt, synthetic construct
  source 1..21: mol_type = other RNA
cctcctccactccggggacga

SEQ ID NO: 79189 - RNA, 21 nt, synthetic construct
  source 1..21: mol_type = other RNA
cagaacccactgtcccaggga

SEQ ID NO: 79190 - RNA, 21 nt, synthetic construct
  source 1..21: mol_type = other RNA
cctcctccactccggggacga

SEQ ID NO: 79191 - RNA, 21 nt, synthetic construct
  source 1..21: mol_type = other RNA
cctcctccactccggggacga

SEQ ID NO: 79192 - RNA, 21 nt, synthetic construct
  source 1..21: mol_type = other RNA
gcttctgcagggcatttggaa

SEQ ID NO: 79193 - RNA, 21 nt, synthetic construct
  source 1..21: mol_type = other RNA
gaggtgccctgccagagccta

SEQ ID NO: 79194 - RNA, 21 nt, synthetic construct
  source 1..21: mol_type = other RNA
tgggaccaccggcaccaccta

SEQ ID NO: 79195 - RNA, 21 nt, synthetic construct
  source 1..21: mol_type = other RNA
ctgccgctggtccagctggta

SEQ ID NO: 79196 - RNA, 21 nt, synthetic construct
  source 1..21: mol_type = other RNA
cccaggacctgtgccgctgca

SEQ ID NO: 79197 - RNA, 21 nt, synthetic construct
  source 1..21: mol_type = other RNA
cgcccacgcggggggccagca

SEQ ID NO: 79198 - RNA, 21 nt, synthetic construct
  source 1..21: mol_type = other RNA
tgcccctcgggcagtgcccca

SEQ ID NO: 79199 - RNA, 21 nt, synthetic construct
  source 1..21: mol_type = other RNA
acctgccgtgccctggcacca

SEQ ID NO: 79200 - RNA, 21 nt, synthetic construct
  source 1..21: mol_type = other RNA
ggtgtttgtcaggctggacca

SEQ ID NO: 79201 - RNA, 21 nt, synthetic construct
  source 1..21: mol_type = other RNA
tttgtcaggctggaccccgca

SEQ ID NO: 79202 - RNA, 21 nt, synthetic construct
  source 1..21: mol_type = other RNA
caccagggccagatgtgcgga

SEQ ID NO: 79203 - RNA, 21 nt, synthetic construct
  source 1..21: mol_type = other RNA
cccctggggccgagtgcctca

SEQ ID NO: 79204 - RNA, 21 nt, synthetic construct
  source 1..21: mol_type = other RNA
ccggctgtgtctgtcccccga

SEQ ID NO: 79205 - RNA, 21 nt, synthetic construct
  source 1..21: mol_type = other RNA
accaccggcaccacctgctca

SEQ ID NO: 79206 - RNA, 21 nt, synthetic construct
  source 1..21: mol_type = other RNA
accagccctgcggggcaccca

SEQ ID NO: 79207 - RNA, 21 nt, synthetic construct
  source 1..21: mol_type = other RNA
gggcaccctgcctaaaaacca

SEQ ID NO: 79208 - RNA, 21 nt, synthetic construct
  source 1..21: mol_type = other RNA
caggaaggctgtggcatgtca

SEQ ID NO: 79209 - RNA, 21 nt, synthetic construct
  source 1..21: mol_type = other RNA
tgccgctggtccagctggtaa

SEQ ID NO: 79210 - RNA, 21 nt, synthetic construct
  source 1..21: mol_type = other RNA
acctgaggcagagagggtaca

SEQ ID NO: 79211 - RNA, 21 nt, synthetic construct
  source 1..21: mol_type = other RNA
ctccacagaacccactgtcca

SEQ ID NO: 79212 - RNA, 21 nt, synthetic construct
  source 1..21: mol_type = other RNA
ccacagctaccagctttacaa

SEQ ID NO: 79213 - RNA, 21 nt, synthetic construct
  source 1..21: mol_type = other RNA
cctccaggaccacggccacga

SEQ ID NO: 79214 - RNA, 21 nt, synthetic construct
  source 1..21: mol_type = other RNA
ctccaggaccacggccacgga

SEQ ID NO: 79215 - RNA, 21 nt, synthetic construct
  source 1..21: mol_type = other RNA
tccaggaccacggccacggca

SEQ ID NO: 79216 - RNA, 21 nt, synthetic construct
  source 1..21: mol_type = other RNA
ccaggaccacggccacggcca

SEQ ID NO: 79217 - RNA, 21 nt, synthetic construct
  source 1..21: mol_type = other RNA
ccacagctaccagctttacaa

SEQ ID NO: 79218 - RNA, 21 nt, synthetic construct
  source 1..21: mol_type = other RNA
cctccaggaccacggccacga

SEQ ID NO: 79219 - RNA, 21 nt, synthetic construct
  source 1..21: mol_type = other RNA
ctccaggaccacggccacgga

SEQ ID NO: 79220 - RNA, 21 nt, synthetic construct
  source 1..21: mol_type = other RNA
tccaggaccacggccacggca

SEQ ID NO: 79221 - RNA, 21 nt, synthetic construct
  source 1..21: mol_type = other RNA
ccaggaccacggccacggcca

SEQ ID NO: 79222 - RNA, 21 nt, synthetic construct
  source 1..21: mol_type = other RNA
ccacagctaccagctttacaa

SEQ ID NO: 79223 - RNA, 21 nt, synthetic construct
  source 1..21: mol_type = other RNA
aacaagcacctgcccatcaaa

SEQ ID NO: 79224 - RNA, 21 nt, synthetic construct
  source 1..21: mol_type = other RNA
aggtgccctgccagagcctga

SEQ ID NO: 79225 - RNA, 21 nt, synthetic construct
  source 1..21: mol_type = other RNA
tccagctgcagggggagccta

SEQ ID NO: 79226 - RNA, 21 nt, synthetic construct
  source 1..21: mol_type = other RNA
gccccaggtaccaccacctga

SEQ ID NO: 79227 - RNA, 21 nt, synthetic construct
  source 1..21: mol_type = other RNA
ccggctctgcctgggcaccta

SEQ ID NO: 79228 - RNA, 21 nt, synthetic construct
  source 1..21: mol_type = other RNA
ccctgcccctggctgtgacaa

SEQ ID NO: 79229 - RNA, 21 nt, synthetic construct
  source 1..21: mol_type = other RNA
gtccggctgtgtctgtcccca

SEQ ID NO: 79230 - RNA, 21 nt, synthetic construct
  source 1..21: mol_type = other RNA
cagcacacactgcgtgtccga

SEQ ID NO: 79231 - RNA, 21 nt, synthetic construct
  source 1..21: mol_type = other RNA
gcccaggcccagcctggtgta

SEQ ID NO: 79232 - RNA, 21 nt, synthetic construct
  source 1..21: mol_type = other RNA
gcccaggcccagcctggtgta

SEQ ID NO: 79233 - RNA, 21 nt, synthetic construct
  source 1..21: mol_type = other RNA
gcccaggcccagcctggtgta

SEQ ID NO: 79234 - RNA, 21 nt, synthetic construct
  source 1..21: mol_type = other RNA
gcccaggcccagcctggtgta

SEQ ID NO: 79235 - RNA, 21 nt, synthetic construct
  source 1..21: mol_type = other RNA
caaccagagggacgactgtca

SEQ ID NO: 79236 - RNA, 21 nt, synthetic construct
  source 1..21: mol_type = other RNA
tgccacgcgtagccggtccga

SEQ ID NO: 79237 - RNA, 21 nt, synthetic construct
  source 1..21: mol_type = other RNA
agttctatgcccacaacgcca

SEQ ID NO: 79238 - RNA, 21 nt, synthetic construct
  source 1..21: mol_type = other RNA
tctccagcgggacggaaccaa

SEQ ID NO: 79239 - RNA, 21 nt, synthetic construct
  source 1..21: mol_type = other RNA
gtgtggctgcacgcccttcta

SEQ ID NO: 79240 - RNA, 21 nt, synthetic construct
  source 1..21: mol_type = other RNA
gccggacgctggtgttggcta

SEQ ID NO: 79241 - RNA, 21 nt, synthetic construct
  source 1..21: mol_type = other RNA
cgcgtagccggtccgtggtga

SEQ ID NO: 79242 - RNA, 21 nt, synthetic construct
  source 1..21: mol_type = other RNA
aacaaccagagggacgactga

SEQ ID NO: 79243 - RNA, 21 nt, synthetic construct
  source 1..21: mol_type = other RNA
cagcgtgtccactgtgtccta

SEQ ID NO: 79244 - RNA, 21 nt, synthetic construct
  source 1..21: mol_type = other RNA
caaagccccctctgctcaaca

SEQ ID NO: 79245 - RNA, 21 nt, synthetic construct
  source 1..21: mol_type = other RNA
ttgccacgcgtagccggtcca

SEQ ID NO: 79246 - RNA, 21 nt, synthetic construct
  source 1..21: mol_type = other RNA
gcaggtggactgtgaccgcaa

SEQ ID NO: 79247 - RNA, 21 nt, synthetic construct
  source 1..21: mol_type = other RNA
ctgcccatcaaagtgtcggaa

SEQ ID NO: 79248 - RNA, 21 nt, synthetic construct
  source 1..21: mol_type = other RNA
tgcccatcaaagtgtcggaca

SEQ ID NO: 79249 - RNA, 21 nt, synthetic construct
  source 1..21: mol_type = other RNA
gagtgtggctgcacgccctta

SEQ ID NO: 79250 - RNA, 21 nt, synthetic construct
  source 1..21: mol_type = other RNA
cactgggacgccctggaacaa

SEQ ID NO: 79251 - RNA, 21 nt, synthetic construct
  source 1..21: mol_type = other RNA
ggaccacctggatcctcacaa

SEQ ID NO: 79252 - RNA, 21 nt, synthetic construct
  source 1..21: mol_type = other RNA
ggaccacctggatcctcacaa

SEQ ID NO: 79253 - RNA, 21 nt, synthetic construct
  source 1..21: mol_type = other RNA
ggaccacctggatcctcacaa

SEQ ID NO: 79254 - RNA, 21 nt, synthetic construct
  source 1..21: mol_type = other RNA
ggaccacctggatcctcacaa

SEQ ID NO: 79255 - RNA, 21 nt, synthetic construct
  source 1..21: mol_type = other RNA
ggaccacctggatcctcacaa

SEQ ID NO: 79256 - RNA, 21 nt, synthetic construct
  source 1..21: mol_type = other RNA
ggaccacctggatcctcacaa

SEQ ID NO: 79257 - RNA, 21 nt, synthetic construct
  source 1..21: mol_type = other RNA
cccatgctctgtccacctgga

SEQ ID NO: 79258 - RNA, 21 nt, synthetic construct
  source 1..21: mol_type = other RNA
tcaaagtgtcggacccgagca

SEQ ID NO: 79259 - RNA, 21 nt, synthetic construct
  source 1..21: mol_type = other RNA
catcaaagtgtcggacccgaa

SEQ ID NO: 79260 - RNA, 21 nt, synthetic construct
  source 1..21: mol_type = other RNA
tgtcactgggacgccctggaa

SEQ ID NO: 79261 - RNA, 21 nt, synthetic construct
  source 1..21: mol_type = other RNA
catgctctgtccacctggaga

SEQ ID NO: 79262 - RNA, 21 nt, synthetic construct
  source 1..21: mol_type = other RNA
gtgcttcaactatgaaatcca

SEQ ID NO: 79263 - RNA, 21 nt, synthetic construct
  source 1..21: mol_type = other RNA
gtgcttcaactatgaaatcca

SEQ ID NO: 79264 - RNA, 21 nt, synthetic construct
  source 1..21: mol_type = other RNA
gtgcttcaactatgaaatcca

SEQ ID NO: 79265 - RNA, 21 nt, synthetic construct
  source 1..21: mol_type = other RNA
gtgcttcaactatgaaatcca

SEQ ID NO: 79266 - RNA, 21 nt, synthetic construct
  source 1..21: mol_type = other RNA
cagacaggctggtccaggcaa

SEQ ID NO: 79267 - RNA, 21 nt, synthetic construct
  source 1..21: mol_type = other RNA
agtgtggctgcacgcccttca

SEQ ID NO: 79268 - RNA, 21 nt, synthetic construct
  source 1..21: mol_type = other RNA
cgtgccggacgctggtgttga

SEQ ID NO: 79269 - RNA, 21 nt, synthetic construct
  source 1..21: mol_type = other RNA
tcctccactccagggacgaca

SEQ ID NO: 79270 - RNA, 21 nt, synthetic construct
  source 1..21: mol_type = other RNA
tgccgcgcccggggagtgtga

SEQ ID NO: 79271 - RNA, 21 nt, synthetic construct
  source 1..21: mol_type = other RNA
tccccatgctctgtccaccta

SEQ ID NO: 79272 - RNA, 21 nt, synthetic construct
  source 1..21: mol_type = other RNA
cgtgtccactgtgtcctccta

SEQ ID NO: 79273 - RNA, 21 nt, synthetic construct
  source 1..21: mol_type = other RNA
tgccggacgctggtgttggca

SEQ ID NO: 79274 - RNA, 21 nt, synthetic construct
  source 1..21: mol_type = other RNA
ccggacgctggtgttggctca

SEQ ID NO: 79275 - RNA, 21 nt, synthetic construct
  source 1..21: mol_type = other RNA
cggacgctggtgttggctcta

SEQ ID NO: 79276 - RNA, 21 nt, synthetic construct
  source 1..21: mol_type = other RNA
tgcctccggagctgccacaca

SEQ ID NO: 79277 - RNA, 21 nt, synthetic construct
  source 1..21: mol_type = other RNA
cctccactccagggacgacca

SEQ ID NO: 79278 - RNA, 21 nt, synthetic construct
  source 1..21: mol_type = other RNA
acctgcccacccaccaaagta

SEQ ID NO: 79279 - RNA, 21 nt, synthetic construct
  source 1..21: mol_type = other RNA
tgctctgtccacctggagcca

SEQ ID NO: 79280 - RNA, 21 nt, synthetic construct
  source 1..21: mol_type = other RNA
cccagggaccacctggatcca

SEQ ID NO: 79281 - RNA, 21 nt, synthetic construct
  source 1..21: mol_type = other RNA
cccagggaccacctggatcca

SEQ ID NO: 79282 - RNA, 21 nt, synthetic construct
  source 1..21: mol_type = other RNA
cccagggaccacctggatcca

SEQ ID NO: 79283 - RNA, 21 nt, synthetic construct
  source 1..21: mol_type = other RNA
cccagggaccacctggatcca

SEQ ID NO: 79284 - RNA, 21 nt, synthetic construct
  source 1..21: mol_type = other RNA
cccagggaccacctggatcca

SEQ ID NO: 79285 - RNA, 21 nt, synthetic construct
  source 1..21: mol_type = other RNA
cccagggaccacctggatcca

SEQ ID NO: 79286 - RNA, 21 nt, synthetic construct
  source 1..21: mol_type = other RNA
gcctccggagctgccacacga

SEQ ID NO: 79287 - RNA, 21 nt, synthetic construct
  source 1..21: mol_type = other RNA
tcactgggacgccctggaaca

SEQ ID NO: 79288 - RNA, 21 nt, synthetic construct
  source 1..21: mol_type = other RNA
gtgcctccggagctgccacaa

SEQ ID NO: 79289 - RNA, 21 nt, synthetic construct
  source 1..21: mol_type = other RNA
tggctgcacgcccttctgtga

SEQ ID NO: 79290 - RNA, 21 nt, synthetic construct
  source 1..21: mol_type = other RNA
agatgtgcttcaactatgaaa

SEQ ID NO: 79291 - RNA, 21 nt, synthetic construct
  source 1..21: mol_type = other RNA
agatgtgcttcaactatgaaa

SEQ ID NO: 79292 - RNA, 21 nt, synthetic construct
  source 1..21: mol_type = other RNA
cccacagccaccagttccaaa

SEQ ID NO: 79293 - RNA, 21 nt, synthetic construct
  source 1..21: mol_type = other RNA
agatgtgcttcaactatgaaa

SEQ ID NO: 79294 - RNA, 21 nt, synthetic construct
  source 1..21: mol_type = other RNA
agatgtgcttcaactatgaaa

SEQ ID NO: 79295 - RNA, 21 nt, synthetic construct
  source 1..21: mol_type = other RNA
cccacagccaccagttccaaa

SEQ ID NO: 79296 - RNA, 21 nt, synthetic construct
  source 1..21: mol_type = other RNA
ctcctccactctggggacgaa

SEQ ID NO: 79297 - RNA, 21 nt, synthetic construct
  source 1..21: mol_type = other RNA
tctgcctccatccccatgcta

SEQ ID NO: 79298 - RNA, 21 nt, synthetic construct
  source 1..21: mol_type = other RNA
aggggccagcaggacccctta

SEQ ID NO: 79299 - RNA, 21 nt, synthetic construct
  source 1..21: mol_type = other RNA
gtgcttaccaccacggccaca

SEQ ID NO: 79300 - RNA, 21 nt, synthetic construct
  source 1..21: mol_type = other RNA
gtgcttaccaccacggccaca

SEQ ID NO: 79301 - RNA, 21 nt, synthetic construct
  source 1..21: mol_type = other RNA
cgtgttgtcatcaaggcccaa

SEQ ID NO: 79302 - RNA, 21 nt, synthetic construct
  source 1..21: mol_type = other RNA
tgtggagaatgagaactacga

SEQ ID NO: 79303 - RNA, 21 nt, synthetic construct
  source 1..21: mol_type = other RNA
gtcacccgtgttgtcatcaaa

SEQ ID NO: 79304 - RNA, 21 nt, synthetic construct
  source 1..21: mol_type = other RNA
cactcgactccagccctgtca

SEQ ID NO: 79305 - RNA, 21 nt, synthetic construct
  source 1..21: mol_type = other RNA
cactcgactccagccctgtca

SEQ ID NO: 79306 - RNA, 21 nt, synthetic construct
  source 1..21: mol_type = other RNA
cactcgactccagccctgtca

SEQ ID NO: 79307 - RNA, 21 nt, synthetic construct
  source 1..21: mol_type = other RNA
ccacggttcccagctcgtcca

SEQ ID NO: 79308 - RNA, 21 nt, synthetic construct
  source 1..21: mol_type = other RNA
tcagtgtggagaatgagaaca

SEQ ID NO: 79309 - RNA, 21 nt, synthetic construct
  source 1..21: mol_type = other RNA
cacagtgcttaccaccacgga

SEQ ID NO: 79310 - RNA, 21 nt, synthetic construct
  source 1..21: mol_type = other RNA
cacagtgcttaccaccacgga

SEQ ID NO: 79311 - RNA, 21 nt, synthetic construct
  source 1..21: mol_type = other RNA
cctgtgacttccactatgaga

SEQ ID NO: 79312 - RNA, 21 nt, synthetic construct
  source 1..21: mol_type = other RNA
gtgcccctgcacccacggcga

SEQ ID NO: 79313 - RNA, 21 nt, synthetic construct
  source 1..21: mol_type = other RNA
ctccacggttcccagctcgta

SEQ ID NO: 79314 - RNA, 21 nt, synthetic construct
  source 1..21: mol_type = other RNA
tccacggttcccagctcgtca

SEQ ID NO: 79315 - RNA, 21 nt, synthetic construct
  source 1..21: mol_type = other RNA
taccaaagtgctgactaccaa

SEQ ID NO: 79316 - RNA, 21 nt, synthetic construct
  source 1..21: mol_type = other RNA
acccagaccacagcaaccgaa

SEQ ID NO: 79317 - RNA, 21 nt, synthetic construct
  source 1..21: mol_type = other RNA
tgttgtcatcaaggcccagga

SEQ ID NO: 79318 - RNA, 21 nt, synthetic construct
  source 1..21: mol_type = other RNA
tgcacccacggcggccgcaca

SEQ ID NO: 79319 - RNA, 21 nt, synthetic construct
  source 1..21: mol_type = other RNA
acccgagccagccctgtgaca

SEQ ID NO: 79320 - RNA, 21 nt, synthetic construct
  source 1..21: mol_type = other RNA
caccccaggaacagctcacaa

SEQ ID NO: 79321 - RNA, 21 nt, synthetic construct
  source 1..21: mol_type = other RNA
caccccaggaacagctcacaa

SEQ ID NO: 79322 - RNA, 21 nt, synthetic construct
  source 1..21: mol_type = other RNA
caccccaggaacagctcacaa

SEQ ID NO: 79323 - RNA, 21 nt, synthetic construct
  source 1..21: mol_type = other RNA
caccccaggaacagctcacaa

SEQ ID NO: 79324 - RNA, 21 nt, synthetic construct
  source 1..21: mol_type = other RNA
caccccaggaacagctcacaa

SEQ ID NO: 79325 - RNA, 21 nt, synthetic construct
  source 1..21: mol_type = other RNA
tctgctgcaactacggccaca

SEQ ID NO: 79326 - RNA, 21 nt, synthetic construct
  source 1..21: mol_type = other RNA
tctgctgcaactacggccaca

SEQ ID NO: 79327 - RNA, 21 nt, synthetic construct
  source 1..21: mol_type = other RNA
tctgctgcaactacggccaca

SEQ ID NO: 79328 - RNA, 21 nt, synthetic construct
  source 1..21: mol_type = other RNA
tctgctgcaactacggccaca

SEQ ID NO: 79329 - RNA, 21 nt, synthetic construct
  source 1..21: mol_type = other RNA
tcatctacaataagaccgaca

SEQ ID NO: 79330 - RNA, 21 nt, synthetic construct
  source 1..21: mol_type = other RNA
agtgcggcctgacggacaaca

SEQ ID NO: 79331 - RNA, 21 nt, synthetic construct
  source 1..21: mol_type = other RNA
gccactacgatcacggccaca

SEQ ID NO: 79332 - RNA, 21 nt, synthetic construct
  source 1..21: mol_type = other RNA
gccactacgatcacggccaca

SEQ ID NO: 79333 - RNA, 21 nt, synthetic construct
  source 1..21: mol_type = other RNA
gccactacgatcacggccaca

SEQ ID NO: 79334 - RNA, 21 nt, synthetic construct
  source 1..21: mol_type = other RNA
gccactacgatcacggccaca

SEQ ID NO: 79335 - RNA, 21 nt, synthetic construct
  source 1..21: mol_type = other RNA
cgagggttcagtgtcggtgca

SEQ ID NO: 79336 - RNA, 21 nt, synthetic construct
  source 1..21: mol_type = other RNA
aagtgcggcctgacggacaaa

SEQ ID NO: 79337 - RNA, 21 nt, synthetic construct
  source 1..21: mol_type = other RNA
agacgacaatgagccccttga

SEQ ID NO: 79338 - RNA, 21 nt, synthetic construct
  source 1..21: mol_type = other RNA
acgagcctggcgccaacacta

SEQ ID NO: 79339 - RNA, 21 nt, synthetic construct
  source 1..21: mol_type = other RNA
tgcggagtgccacgcactgga

SEQ ID NO: 79340 - RNA, 21 nt, synthetic construct
  source 1..21: mol_type = other RNA
accgcatgcgggggctgatga

SEQ ID NO: 79341 - RNA, 21 nt, synthetic construct
  source 1..21: mol_type = other RNA
acgactgagtccactggatca

SEQ ID NO: 79342 - RNA, 21 nt, synthetic construct
  source 1..21: mol_type = other RNA
acgactgagtccactggatca

SEQ ID NO: 79343 - RNA, 21 nt, synthetic construct
  source 1..21: mol_type = other RNA
ccctatgggtgaccccgagca

SEQ ID NO: 79344 - RNA, 21 nt, synthetic construct
  source 1..21: mol_type = other RNA
cactcgactccagccctttca

SEQ ID NO: 79345 - RNA, 21 nt, synthetic construct
  source 1..21: mol_type = other RNA
cacaaccggggccaccggcta

SEQ ID NO: 79346 - RNA, 21 nt, synthetic construct
  source 1..21: mol_type = other RNA
cacgcttccagtgtggatcaa

SEQ ID NO: 79347 - RNA, 21 nt, synthetic construct
  source 1..21: mol_type = other RNA
cacaaccggggccaccggcta

SEQ ID NO: 79348 - RNA, 21 nt, synthetic construct
  source 1..21: mol_type = other RNA
ccatgcgtgtggacattccta

SEQ ID NO: 79349 - RNA, 21 nt, synthetic construct
  source 1..21: mol_type = other RNA
ttctacaacccacatggggga

SEQ ID NO: 79350 - RNA, 21 nt, synthetic construct
  source 1..21: mol_type = other RNA
tctacggccatgccctcctca

SEQ ID NO: 79351 - RNA, 21 nt, synthetic construct
  source 1..21: mol_type = other RNA
tctacggccatgccctcctca

SEQ ID NO: 79352 - RNA, 21 nt, synthetic construct
  source 1..21: mol_type = other RNA
cactacgactgagtccactga

SEQ ID NO: 79353 - RNA, 21 nt, synthetic construct
  source 1..21: mol_type = other RNA
cactacgactgagtccactga

SEQ ID NO: 79354 - RNA, 21 nt, synthetic construct
  source 1..21: mol_type = other RNA
tggactacagctaccccatga

SEQ ID NO: 79355 - RNA, 21 nt, synthetic construct
  source 1..21: mol_type = other RNA
tggactacagctaccccatga

SEQ ID NO: 79356 - RNA, 21 nt, synthetic construct
  source 1..21: mol_type = other RNA
tggactacagctaccccatga

SEQ ID NO: 79357 - RNA, 21 nt, synthetic construct
  source 1..21: mol_type = other RNA
tggactacagctaccccatga

SEQ ID NO: 79358 - RNA, 21 nt, synthetic construct
  source 1..21: mol_type = other RNA
cgtccaacggctccgtcctca

SEQ ID NO: 79359 - RNA, 21 nt, synthetic construct
  source 1..21: mol_type = other RNA
ccctgggcctcgagtgccgta

SEQ ID NO: 79360 - RNA, 21 nt, synthetic construct
  source 1..21: mol_type = other RNA
ccctgggcctcgagtgccgta

SEQ ID NO: 79361 - RNA, 21 nt, synthetic construct
  source 1..21: mol_type = other RNA
ccctgggcctcgagtgccgta

SEQ ID NO: 79362 - RNA, 21 nt, synthetic construct
  source 1..21: mol_type = other RNA
ccctgggcctcgagtgccgta

SEQ ID NO: 79363 - RNA, 21 nt, synthetic construct
  source 1..21: mol_type = other RNA
gacccaccctacaagatacga

SEQ ID NO: 79364 - RNA, 21 nt, synthetic construct
  source 1..21: mol_type = other RNA
cactgtgacgtccacttcgga

SEQ ID NO: 79365 - RNA, 21 nt, synthetic construct
  source 1..21: mol_type = other RNA
gcttggcgcctgcttgatcga

SEQ ID NO: 79366 - RNA, 21 nt, synthetic construct
  source 1..21: mol_type = other RNA
atggatggcggtgccccgaca

SEQ ID NO: 79367 - RNA, 21 nt, synthetic construct
  source 1..21: mol_type = other RNA
gcccagggacggcacgcacga

SEQ ID NO: 79368 - RNA, 21 nt, synthetic construct
  source 1..21: mol_type = other RNA
gcccagggacggcacgcacga

SEQ ID NO: 79369 - RNA, 21 nt, synthetic construct
  source 1..21: mol_type = other RNA
agcgcccgcgcagcacggata

SEQ ID NO: 79370 - RNA, 21 nt, synthetic construct
  source 1..21: mol_type = other RNA
ggcttggcgcctgcttgatca

SEQ ID NO: 79371 - RNA, 21 nt, synthetic construct
  source 1..21: mol_type = other RNA
actcctgtcaagtccgcatca

SEQ ID NO: 79372 - RNA, 21 nt, synthetic construct
  source 1..21: mol_type = other RNA
gaggggacctttaaggcggta

SEQ ID NO: 79373 - RNA, 21 nt, synthetic construct
  source 1..21: mol_type = other RNA
gcaaggacatggccaagacga

SEQ ID NO: 79374 - RNA, 21 nt, synthetic construct
  source 1..21: mol_type = other RNA
agggacgacggggagcttgga

SEQ ID NO: 79375 - RNA, 21 nt, synthetic construct
  source 1..21: mol_type = other RNA
tcctccaagaggggaccttta

SEQ ID NO: 79376 - RNA, 21 nt, synthetic construct
  source 1..21: mol_type = other RNA
ctccactccggggacgaccta

SEQ ID NO: 79377 - RNA, 21 nt, synthetic construct
  source 1..21: mol_type = other RNA
ctccactccggggacgaccta

SEQ ID NO: 79378 - RNA, 21 nt, synthetic construct
  source 1..21: mol_type = other RNA
ctccactccggggacgaccta

SEQ ID NO: 79379 - RNA, 21 nt, synthetic construct
  source 1..21: mol_type = other RNA
ctccactccggggacgaccta

SEQ ID NO: 79380 - RNA, 21 nt, synthetic construct
  source 1..21: mol_type = other RNA
accactgccgccagttgcaaa

SEQ ID NO: 79381 - RNA, 21 nt, synthetic construct
  source 1..21: mol_type = other RNA
ggacccaacggtgcaatgtca

SEQ ID NO: 79382 - RNA, 21 nt, synthetic construct
  source 1..21: mol_type = other RNA
cctatgaggacaggacctaca

SEQ ID NO: 79383 - RNA, 21 nt, synthetic construct
  source 1..21: mol_type = other RNA
agcggacggcggcgtgttcca

SEQ ID NO: 79384 - RNA, 21 nt, synthetic construct
  source 1..21: mol_type = other RNA
caccctatgggtgaccccgaa

SEQ ID NO: 79385 - RNA, 21 nt, synthetic construct
  source 1..21: mol_type = other RNA
cttcgtgcctgtggacggcta

SEQ ID NO: 79386 - RNA, 21 nt, synthetic construct
  source 1..21: mol_type = other RNA
agcaccgcttccaaagagcca

SEQ ID NO: 79387 - RNA, 21 nt, synthetic construct
  source 1..21: mol_type = other RNA
aaccgcccttccagcactgaa

SEQ ID NO: 79388 - RNA, 21 nt, synthetic construct
  source 1..21: mol_type = other RNA
aaccgcccttccagcactgaa

SEQ ID NO: 79389 - RNA, 21 nt, synthetic construct
  source 1..21: mol_type = other RNA
agctctacggccacgccctca

SEQ ID NO: 79390 - RNA, 21 nt, synthetic construct
  source 1..21: mol_type = other RNA
aaccgcccttccagcactgaa

SEQ ID NO: 79391 - RNA, 21 nt, synthetic construct
  source 1..21: mol_type = other RNA
agctctacggccacgccctca

SEQ ID NO: 79392 - RNA, 21 nt, synthetic construct
  source 1..21: mol_type = other RNA
aaccgcccttccagcactgaa

SEQ ID NO: 79393 - RNA, 21 nt, synthetic construct
  source 1..21: mol_type = other RNA
actatagccaccgtgatggta

SEQ ID NO: 79394 - RNA, 21 nt, synthetic construct
  source 1..21: mol_type = other RNA
caacgcacacatgggcatcta

SEQ ID NO: 79395 - RNA, 21 nt, synthetic construct
  source 1..21: mol_type = other RNA
catcttggcccaggactacta

SEQ ID NO: 79396 - RNA, 21 nt, synthetic construct
  source 1..21: mol_type = other RNA
accctatgggtgaccccgaga

SEQ ID NO: 79397 - RNA, 21 nt, synthetic construct
  source 1..21: mol_type = other RNA
ctatgggtgaccccgagcata

SEQ ID NO: 79398 - RNA, 21 nt, synthetic construct
  source 1..21: mol_type = other RNA
cctcgagtgccgtgcccagga

SEQ ID NO: 79399 - RNA, 21 nt, synthetic construct
  source 1..21: mol_type = other RNA
cctcgagtgccgtgcccagga

SEQ ID NO: 79400 - RNA, 21 nt, synthetic construct
  source 1..21: mol_type = other RNA
cctcgagtgccgtgcccagga

SEQ ID NO: 79401 - RNA, 21 nt, synthetic construct
  source 1..21: mol_type = other RNA
cctcgagtgccgtgcccagga

SEQ ID NO: 79402 - RNA, 21 nt, synthetic construct
  source 1..21: mol_type = other RNA
tccggtcgacggcggccctca

SEQ ID NO: 79403 - RNA, 21 nt, synthetic construct
  source 1..21: mol_type = other RNA
ctggatcctcacagagccgaa

SEQ ID NO: 79404 - RNA, 21 nt, synthetic construct
  source 1..21: mol_type = other RNA
ctggatcctcacagagccgaa

SEQ ID NO: 79405 - RNA, 21 nt, synthetic construct
  source 1..21: mol_type = other RNA
ctggatcctcacagagccgaa

SEQ ID NO: 79406 - RNA, 21 nt, synthetic construct
  source 1..21: mol_type = other RNA
ctggatcctcacagagccgaa

SEQ ID NO: 79407 - RNA, 21 nt, synthetic construct
  source 1..21: mol_type = other RNA
ctgctgcgaatacgtgcccta

SEQ ID NO: 79408 - RNA, 21 nt, synthetic construct
  source 1..21: mol_type = other RNA
ccaccccgtgggtgaaaccga

SEQ ID NO: 79409 - RNA, 21 nt, synthetic construct
  source 1..21: mol_type = other RNA
tcagcccttccagggacgaca

SEQ ID NO: 79410 - RNA, 21 nt, synthetic construct
  source 1..21: mol_type = other RNA
gcagccactacgaccgcaaca

SEQ ID NO: 79411 - RNA, 21 nt, synthetic construct
  source 1..21: mol_type = other RNA
aggacccaacggtgcaatgta

SEQ ID NO: 79412 - RNA, 21 nt, synthetic construct
  source 1..21: mol_type = other RNA
ctgggaccggaagaccagcga

SEQ ID NO: 79413 - RNA, 21 nt, synthetic construct
  source 1..21: mol_type = other RNA
ctcacgcctccagtgtggata

SEQ ID NO: 79414 - RNA, 21 nt, synthetic construct
  source 1..21: mol_type = other RNA
ctcacgcctccagtgtggata

SEQ ID NO: 79415 - RNA, 21 nt, synthetic construct
  source 1..21: mol_type = other RNA
ctcacgcctccagtgtggata

SEQ ID NO: 79416 - RNA, 21 nt, synthetic construct
  source 1..21: mol_type = other RNA
cgtgtcgtcctgctggaccca

SEQ ID NO: 79417 - RNA, 21 nt, synthetic construct
  source 1..21: mol_type = other RNA
tgacgaccactgcaggggaca

SEQ ID NO: 79418 - RNA, 21 nt, synthetic construct
  source 1..21: mol_type = other RNA
gggttcagtgtcggtgcagta

SEQ ID NO: 79419 - RNA, 21 nt, synthetic construct
  source 1..21: mol_type = other RNA
gccactacgactgagtccaca

SEQ ID NO: 79420 - RNA, 21 nt, synthetic construct
  source 1..21: mol_type = other RNA
gccactacgactgagtccaca

SEQ ID NO: 79421 - RNA, 21 nt, synthetic construct
  source 1..21: mol_type = other RNA
cacctgcagcgtttccttcga

SEQ ID NO: 79422 - RNA, 21 nt, synthetic construct
  source 1..21: mol_type = other RNA
atccacccttccaacacgcta

SEQ ID NO: 79423 - RNA, 21 nt, synthetic construct
  source 1..21: mol_type = other RNA
cccagggacggcacgcacgca

SEQ ID NO: 79424 - RNA, 21 nt, synthetic construct
  source 1..21: mol_type = other RNA
cccagggacggcacgcacgca

SEQ ID NO: 79425 - RNA, 21 nt, synthetic construct
  source 1..21: mol_type = other RNA
aaccagaggttccacggtgaa

SEQ ID NO: 79426 - RNA, 21 nt, synthetic construct
  source 1..21: mol_type = other RNA
tgcaggggccgccttgaggta

SEQ ID NO: 79427 - RNA, 21 nt, synthetic construct
  source 1..21: mol_type = other RNA
gatacacaagcacccttggta

SEQ ID NO: 79428 - RNA, 21 nt, synthetic construct
  source 1..21: mol_type = other RNA
tccctctccggcaggtgaata

SEQ ID NO: 79429 - RNA, 21 nt, synthetic construct
  source 1..21: mol_type = other RNA
ctggaacaaactaagcatgta

SEQ ID NO: 79430 - RNA, 21 nt, synthetic construct
  source 1..21: mol_type = other RNA
ggagctggatcccaaatacga

SEQ ID NO: 79431 - RNA, 21 nt, synthetic construct
  source 1..21: mol_type = other RNA
ccagggacggcacgcacgcca

SEQ ID NO: 79432 - RNA, 21 nt, synthetic construct
  source 1..21: mol_type = other RNA
gccggcaactgcacggacgaa

SEQ ID NO: 79433 - RNA, 21 nt, synthetic construct
  source 1..21: mol_type = other RNA
ctacgacaaggacggaaacta

SEQ ID NO: 79434 - RNA, 21 nt, synthetic construct
  source 1..21: mol_type = other RNA
ggtccgtggtgggggacgcaa

SEQ ID NO: 79435 - RNA, 21 nt, synthetic construct
  source 1..21: mol_type = other RNA
aagtcccagcgctacgcctaa

SEQ ID NO: 79436 - RNA, 21 nt, synthetic construct
  source 1..21: mol_type = other RNA
acagaccagtggtactcccca

SEQ ID NO: 79437 - RNA, 21 nt, synthetic construct
  source 1..21: mol_type = other RNA
acagaccagtggtactcccca

SEQ ID NO: 79438 - RNA, 21 nt, synthetic construct
  source 1..21: mol_type = other RNA
acagaccagtggtactcccca

SEQ ID NO: 79439 - RNA, 21 nt, synthetic construct
  source 1..21: mol_type = other RNA
acagaccagtggtactcccca

SEQ ID NO: 79440 - RNA, 21 nt, synthetic construct
  source 1..21: mol_type = other RNA
acagaccagtggtactcccca

SEQ ID NO: 79441 - RNA, 21 nt, synthetic construct
  source 1..21: mol_type = other RNA
accgtgtgtgtccgcgaggta

SEQ ID NO: 79442 - RNA, 21 nt, synthetic construct
  source 1..21: mol_type = other RNA
cagccaacagagtcccccgca

SEQ ID NO: 79443 - RNA, 21 nt, synthetic construct
  source 1..21: mol_type = other RNA
cggtaccacccagcactcgaa

SEQ ID NO: 79444 - RNA, 21 nt, synthetic construct
  source 1..21: mol_type = other RNA
cggtaccacccagcactcgaa

SEQ ID NO: 79445 - RNA, 21 nt, synthetic construct
  source 1..21: mol_type = other RNA
cggtaccacccagcactcgaa

SEQ ID NO: 79446 - RNA, 21 nt, synthetic construct
  source 1..21: mol_type = other RNA
agtcatctacaataagaccga

SEQ ID NO: 79447 - RNA, 21 nt, synthetic construct
  source 1..21: mol_type = other RNA
cggcactggtgctcgcgccta

SEQ ID NO: 79448 - RNA, 21 nt, synthetic construct
  source 1..21: mol_type = other RNA
acggcggcgtgttcctcaaca

SEQ ID NO: 79449 - RNA, 21 nt, synthetic construct
  source 1..21: mol_type = other RNA
tgccagcccacttgccgcgga

SEQ ID NO: 79450 - RNA, 21 nt, synthetic construct
  source 1..21: mol_type = other RNA
gggacgacggggagcttggga

SEQ ID NO: 79451 - RNA, 21 nt, synthetic construct
  source 1..21: mol_type = other RNA
atggcaccttctacggggtta

SEQ ID NO: 79452 - RNA, 21 nt, synthetic construct
  source 1..21: mol_type = other RNA
ccagggactgcaaccgcccta

SEQ ID NO: 79453 - RNA, 21 nt, synthetic construct
  source 1..21: mol_type = other RNA
aacagccactacgactgagta

SEQ ID NO: 79454 - RNA, 21 nt, synthetic construct
  source 1..21: mol_type = other RNA
ccagggactgcaaccgcccta

SEQ ID NO: 79455 - RNA, 21 nt, synthetic construct
  source 1..21: mol_type = other RNA
ccagggactgcaaccgcccta

SEQ ID NO: 79456 - RNA, 21 nt, synthetic construct
  source 1..21: mol_type = other RNA
aacagccactacgactgagta

SEQ ID NO: 79457 - RNA, 21 nt, synthetic construct
  source 1..21: mol_type = other RNA
ccagggactgcaaccgcccta

SEQ ID NO: 79458 - RNA, 21 nt, synthetic construct
  source 1..21: mol_type = other RNA
aggacccctttcgggagggca

SEQ ID NO: 79459 - RNA, 21 nt, synthetic construct
  source 1..21: mol_type = other RNA
tcacctgcagcgtttccttca

SEQ ID NO: 79460 - RNA, 21 nt, synthetic construct
  source 1..21: mol_type = other RNA
cagagctcgcccgacaggcaa

SEQ ID NO: 79461 - RNA, 21 nt, synthetic construct
  source 1..21: mol_type = other RNA
cctccactccggggacgacca

SEQ ID NO: 79462 - RNA, 21 nt, synthetic construct
  source 1..21: mol_type = other RNA
caagatacgctacatggggaa

SEQ ID NO: 79463 - RNA, 21 nt, synthetic construct
  source 1..21: mol_type = other RNA
cgtgttcatccgactgcacca

SEQ ID NO: 79464 - RNA, 21 nt, synthetic construct
  source 1..21: mol_type = other RNA
gacctttaaggcggtggcgaa

SEQ ID NO: 79465 - RNA, 21 nt, synthetic construct
  source 1..21: mol_type = other RNA
acaaccccgccaccgaccaca

SEQ ID NO: 79466 - RNA, 21 nt, synthetic construct
  source 1..21: mol_type = other RNA
gctggatgacatcacgcacta

SEQ ID NO: 79467 - RNA, 21 nt, synthetic construct
  source 1..21: mol_type = other RNA
tgggaccggaagaccagcgta

SEQ ID NO: 79468 - RNA, 21 nt, synthetic construct
  source 1..21: mol_type = other RNA
cccggggaccacccacaccga

SEQ ID NO: 79469 - RNA, 21 nt, synthetic construct
  source 1..21: mol_type = other RNA
cccggggaccacccacaccga

SEQ ID NO: 79470 - RNA, 21 nt, synthetic construct
  source 1..21: mol_type = other RNA
cccggggaccacccacaccga

SEQ ID NO: 79471 - RNA, 21 nt, synthetic construct
  source 1..21: mol_type = other RNA
cctgggcgtgagcgtcaccta

SEQ ID NO: 79472 - RNA, 21 nt, synthetic construct
  source 1..21: mol_type = other RNA
cagcccccgccgtgcaaccga

SEQ ID NO: 79473 - RNA, 21 nt, synthetic construct
  source 1..21: mol_type = other RNA
ggactcctgtcaagtccgcaa

SEQ ID NO: 79474 - RNA, 21 nt, synthetic construct
  source 1..21: mol_type = other RNA
ccctgatgtcactgggacgca

SEQ ID NO: 79475 - RNA, 21 nt, synthetic construct
  source 1..21: mol_type = other RNA
gctggaggcgtccaacggcta

SEQ ID NO: 79476 - RNA, 21 nt, synthetic construct
  source 1..21: mol_type = other RNA
actgcctgaaagcggtgacga

SEQ ID NO: 79477 - RNA, 21 nt, synthetic construct
  source 1..21: mol_type = other RNA
ggacggcggcgtgttcctcaa

SEQ ID NO: 79478 - RNA, 21 nt, synthetic construct
  source 1..21: mol_type = other RNA
gaaccaggctgacgacttcaa

SEQ ID NO: 79479 - RNA, 21 nt, synthetic construct
  source 1..21: mol_type = other RNA
gcactggtgctcgcgcctgaa

SEQ ID NO: 79480 - RNA, 21 nt, synthetic construct
  source 1..21: mol_type = other RNA
cgctcacggcaccgtgctgga

SEQ ID NO: 79481 - RNA, 21 nt, synthetic construct
  source 1..21: mol_type = other RNA
cctccaagaggggacctttaa

SEQ ID NO: 79482 - RNA, 21 nt, synthetic construct
  source 1..21: mol_type = other RNA
gtggggacccaccctacaaga

SEQ ID NO: 79483 - RNA, 21 nt, synthetic construct
  source 1..21: mol_type = other RNA
ccaccctatgggtgaccccga

SEQ ID NO: 79484 - RNA, 21 nt, synthetic construct
  source 1..21: mol_type = other RNA
catcccccagatacacaagca

SEQ ID NO: 79485 - RNA, 21 nt, synthetic construct
  source 1..21: mol_type = other RNA
gaggccccacgacgcctgcaa

SEQ ID NO: 79486 - RNA, 21 nt, synthetic construct
  source 1..21: mol_type = other RNA
cttgggcacatggcgccccta

SEQ ID NO: 79487 - RNA, 21 nt, synthetic construct
  source 1..21: mol_type = other RNA
ccagtgtggatcagcacaaca

SEQ ID NO: 79488 - RNA, 21 nt, synthetic construct
  source 1..21: mol_type = other RNA
cagtgtggatcagcacaacca

SEQ ID NO: 79489 - RNA, 21 nt, synthetic construct
  source 1..21: mol_type = other RNA
ggtgcccaccggatccacgga

SEQ ID NO: 79490 - RNA, 21 nt, synthetic construct
  source 1..21: mol_type = other RNA
ccagggacggcacgcacgcta

SEQ ID NO: 79491 - RNA, 21 nt, synthetic construct
  source 1..21: mol_type = other RNA
ccagtgtggatcagcacaaca

SEQ ID NO: 79492 - RNA, 21 nt, synthetic construct
  source 1..21: mol_type = other RNA
cagtgtggatcagcacaacca

SEQ ID NO: 79493 - RNA, 21 nt, synthetic construct
  source 1..21: mol_type = other RNA
ggtgcccaccggatccacgga

SEQ ID NO: 79494 - RNA, 21 nt, synthetic construct
  source 1..21: mol_type = other RNA
ccagtgtggatcagcacaaca

SEQ ID NO: 79495 - RNA, 21 nt, synthetic construct
  source 1..21: mol_type = other RNA
cagtgtggatcagcacaacca

SEQ ID NO: 79496 - RNA, 21 nt, synthetic construct
  source 1..21: mol_type = other RNA
ggtgcccaccggatccacgga

SEQ ID NO: 79497 - RNA, 21 nt, synthetic construct
  source 1..21: mol_type = other RNA
ccagtgtggatcagcacaaca

SEQ ID NO: 79498 - RNA, 21 nt, synthetic construct
  source 1..21: mol_type = other RNA
cagtgtggatcagcacaacca

SEQ ID NO: 79499 - RNA, 21 nt, synthetic construct
  source 1..21: mol_type = other RNA
ctccacccttgggaccaccga

SEQ ID NO: 79500 - RNA, 21 nt, synthetic construct
  source 1..21: mol_type = other RNA
ggtgcccaccggatccacgga

SEQ ID NO: 79501 - RNA, 21 nt, synthetic construct
  source 1..21: mol_type = other RNA
ccagtgtggatcagcacaaca

SEQ ID NO: 79502 - RNA, 21 nt, synthetic construct
  source 1..21: mol_type = other RNA
cagtgtggatcagcacaacca

SEQ ID NO: 79503 - RNA, 21 nt, synthetic construct
  source 1..21: mol_type = other RNA
ggcggtgccccgacgtcctca

SEQ ID NO: 79504 - RNA, 21 nt, synthetic construct
  source 1..21: mol_type = other RNA
tggggacttcaacggcctcca

SEQ ID NO: 79505 - RNA, 21 nt, synthetic construct
  source 1..21: mol_type = other RNA
gacgaggagggcatctgccaa

SEQ ID NO: 79506 - RNA, 21 nt, synthetic construct
  source 1..21: mol_type = other RNA
gggcgcagccttcgccaacaa

SEQ ID NO: 79507 - RNA, 21 nt, synthetic construct
  source 1..21: mol_type = other RNA
cgccaagggcgtacagctcaa

SEQ ID NO: 79508 - RNA, 21 nt, synthetic construct
  source 1..21: mol_type = other RNA
agggcgtacagctcagcgaca

SEQ ID NO: 79509 - RNA, 21 nt, synthetic construct
  source 1..21: mol_type = other RNA
ccttcgtgcctgtggacggca

SEQ ID NO: 79510 - RNA, 21 nt, synthetic construct
  source 1..21: mol_type = other RNA
ggcggtggcgagagggccgga

SEQ ID NO: 79511 - RNA, 21 nt, synthetic construct
  source 1..21: mol_type = other RNA
cgtgtgcctgcgactcgggta

SEQ ID NO: 79512 - RNA, 21 nt, synthetic construct
  source 1..21: mol_type = other RNA
ctggaactccagccacaacga

SEQ ID NO: 79513 - RNA, 21 nt, synthetic construct
  source 1..21: mol_type = other RNA
agagagggtaccaggtatgca

SEQ ID NO: 79514 - RNA, 21 nt, synthetic construct
  source 1..21: mol_type = other RNA
gagagggtaccaggtatgcca

SEQ ID NO: 79515 - RNA, 21 nt, synthetic construct
  source 1..21: mol_type = other RNA
ccaggtatgccctgtgctgga

SEQ ID NO: 79516 - RNA, 21 nt, synthetic construct
  source 1..21: mol_type = other RNA
caggtatgccctgtgctggca

SEQ ID NO: 79517 - RNA, 21 nt, synthetic construct
  source 1..21: mol_type = other RNA
ccctcggccccaggtaccaca

SEQ ID NO: 79518 - RNA, 21 nt, synthetic construct
  source 1..21: mol_type = other RNA
taagatcagggccgctggaga

SEQ ID NO: 79519 - RNA, 21 nt, synthetic construct
  source 1..21: mol_type = other RNA
gagggcacttatgccagcaga

SEQ ID NO: 79520 - RNA, 21 nt, synthetic construct
  source 1..21: mol_type = other RNA
ggcgtcttcaagatgtgctaa

SEQ ID NO: 79521 - RNA, 21 nt, synthetic construct
  source 1..21: mol_type = other RNA
ggtacagccaccacgggagga

SEQ ID NO: 79522 - RNA, 21 nt, synthetic construct
  source 1..21: mol_type = other RNA
acgacgcctgcaggctccaca

SEQ ID NO: 79523 - RNA, 21 nt, synthetic construct
  source 1..21: mol_type = other RNA
ggacgacggggagcttgggca

SEQ ID NO: 79524 - RNA, 21 nt, synthetic construct
  source 1..21: mol_type = other RNA
tcacgagcgagctgtccacca

SEQ ID NO: 79525 - RNA, 21 nt, synthetic construct
  source 1..21: mol_type = other RNA
gcgagctgtccacctctcaga

SEQ ID NO: 79526 - RNA, 21 nt, synthetic construct
  source 1..21: mol_type = other RNA
acccgcctatcacagaccaca

SEQ ID NO: 79527 - RNA, 21 nt, synthetic construct
  source 1..21: mol_type = other RNA
accacaaccacgggcttcaca

SEQ ID NO: 79528 - RNA, 21 nt, synthetic construct
  source 1..21: mol_type = other RNA
gacggcactcacgcctccaga

SEQ ID NO: 79529 - RNA, 21 nt, synthetic construct
  source 1..21: mol_type = other RNA
cggcactcacgcctccagtga

SEQ ID NO: 79530 - RNA, 21 nt, synthetic construct
  source 1..21: mol_type = other RNA
ctccacggtgaccccctccta

SEQ ID NO: 79531 - RNA, 21 nt, synthetic construct
  source 1..21: mol_type = other RNA
ctctggcggggactttgacaa

SEQ ID NO: 79532 - RNA, 21 nt, synthetic construct
  source 1..21: mol_type = other RNA
cctgggcctcgagtgccgtga

SEQ ID NO: 79533 - RNA, 21 nt, synthetic construct
  source 1..21: mol_type = other RNA
ctgggcctcgagtgccgtgca

SEQ ID NO: 79534 - RNA, 21 nt, synthetic construct
  source 1..21: mol_type = other RNA
tgggcctcgagtgccgtgcca

SEQ ID NO: 79535 - RNA, 21 nt, synthetic construct
  source 1..21: mol_type = other RNA
tccactccggggacgacctga

SEQ ID NO: 79536 - RNA, 21 nt, synthetic construct
  source 1..21: mol_type = other RNA
agccgagcactacagccacca

SEQ ID NO: 79537 - RNA, 21 nt, synthetic construct
  source 1..21: mol_type = other RNA
gccgagcactacagccaccga

SEQ ID NO: 79538 - RNA, 21 nt, synthetic construct
  source 1..21: mol_type = other RNA
acccgcctatcacagaccaca

SEQ ID NO: 79539 - RNA, 21 nt, synthetic construct
  source 1..21: mol_type = other RNA
caccacaaccggggccaccga

SEQ ID NO: 79540 - RNA, 21 nt, synthetic construct
  source 1..21: mol_type = other RNA
accacaaccggggccaccgga

SEQ ID NO: 79541 - RNA, 21 nt, synthetic construct
  source 1..21: mol_type = other RNA
accacaaccacgggcttcaca

SEQ ID NO: 79542 - RNA, 21 nt, synthetic construct
  source 1..21: mol_type = other RNA
ttccacggtgaccccctccta

SEQ ID NO: 79543 - RNA, 21 nt, synthetic construct
  source 1..21: mol_type = other RNA
acggccaccacacacgggcga

SEQ ID NO: 79544 - RNA, 21 nt, synthetic construct
  source 1..21: mol_type = other RNA
ctctggcggggactttgacaa

SEQ ID NO: 79545 - RNA, 21 nt, synthetic construct
  source 1..21: mol_type = other RNA
cctgggcctcgagtgccgtga

SEQ ID NO: 79546 - RNA, 21 nt, synthetic construct
  source 1..21: mol_type = other RNA
ctgggcctcgagtgccgtgca

SEQ ID NO: 79547 - RNA, 21 nt, synthetic construct
  source 1..21: mol_type = other RNA
tgggcctcgagtgccgtgcca

SEQ ID NO: 79548 - RNA, 21 nt, synthetic construct
  source 1..21: mol_type = other RNA
cagctctacggccacgcccta

SEQ ID NO: 79549 - RNA, 21 nt, synthetic construct
  source 1..21: mol_type = other RNA
ctctacggccacgccctccta

SEQ ID NO: 79550 - RNA, 21 nt, synthetic construct
  source 1..21: mol_type = other RNA
cacagcagccactacgaccga

SEQ ID NO: 79551 - RNA, 21 nt, synthetic construct
  source 1..21: mol_type = other RNA
ggatccacggccatcccgtca

SEQ ID NO: 79552 - RNA, 21 nt, synthetic construct
  source 1..21: mol_type = other RNA
tccactccggggacgacctga

SEQ ID NO: 79553 - RNA, 21 nt, synthetic construct
  source 1..21: mol_type = other RNA
cacccgggcaactgctggcaa

SEQ ID NO: 79554 - RNA, 21 nt, synthetic construct
  source 1..21: mol_type = other RNA
acccgcctatcacagaccaca

SEQ ID NO: 79555 - RNA, 21 nt, synthetic construct
  source 1..21: mol_type = other RNA
cacaaccagggccaccggcta

SEQ ID NO: 79556 - RNA, 21 nt, synthetic construct
  source 1..21: mol_type = other RNA
accacaaccacgggcttcaca

SEQ ID NO: 79557 - RNA, 21 nt, synthetic construct
  source 1..21: mol_type = other RNA
gacggcactcacgcctccaga

SEQ ID NO: 79558 - RNA, 21 nt, synthetic construct
  source 1..21: mol_type = other RNA
cggcactcacgcctccagtga

SEQ ID NO: 79559 - RNA, 21 nt, synthetic construct
  source 1..21: mol_type = other RNA
ctccacggtgaccccctccta

SEQ ID NO: 79560 - RNA, 21 nt, synthetic construct
  source 1..21: mol_type = other RNA
ggccactacgatcacagccaa

SEQ ID NO: 79561 - RNA, 21 nt, synthetic construct
  source 1..21: mol_type = other RNA
acggccaccacacacgggcga

SEQ ID NO: 79562 - RNA, 21 nt, synthetic construct
  source 1..21: mol_type = other RNA
ctctggcggggactttgacaa

SEQ ID NO: 79563 - RNA, 21 nt, synthetic construct
  source 1..21: mol_type = other RNA
cctgggcctcgagtgccgtga

SEQ ID NO: 79564 - RNA, 21 nt, synthetic construct
  source 1..21: mol_type = other RNA
ctgggcctcgagtgccgtgca

SEQ ID NO: 79565 - RNA, 21 nt, synthetic construct
  source 1..21: mol_type = other RNA
tgggcctcgagtgccgtgcca

SEQ ID NO: 79566 - RNA, 21 nt, synthetic construct
  source 1..21: mol_type = other RNA
cagctctacggccacgcccta

SEQ ID NO: 79567 - RNA, 21 nt, synthetic construct
  source 1..21: mol_type = other RNA
ctctacggccacgccctccta

SEQ ID NO: 79568 - RNA, 21 nt, synthetic construct
  source 1..21: mol_type = other RNA
agccgagcactacagccacca

SEQ ID NO: 79569 - RNA, 21 nt, synthetic construct
  source 1..21: mol_type = other RNA
gccgagcactacagccaccga

SEQ ID NO: 79570 - RNA, 21 nt, synthetic construct
  source 1..21: mol_type = other RNA
acccgcctatcacagaccaca

SEQ ID NO: 79571 - RNA, 21 nt, synthetic construct
  source 1..21: mol_type = other RNA
cacaaccagggccaccggcta

SEQ ID NO: 79572 - RNA, 21 nt, synthetic construct
  source 1..21: mol_type = other RNA
accacaaccacgggcttcaca

SEQ ID NO: 79573 - RNA, 21 nt, synthetic construct
  source 1..21: mol_type = other RNA
ctccacggtgaccccctccta

SEQ ID NO: 79574 - RNA, 21 nt, synthetic construct
  source 1..21: mol_type = other RNA
acggccaccacacacgggcga

SEQ ID NO: 79575 - RNA, 21 nt, synthetic construct
  source 1..21: mol_type = other RNA
ctctggcggggactttgacaa

SEQ ID NO: 79576 - RNA, 21 nt, synthetic construct
  source 1..21: mol_type = other RNA
cctgggcctcgagtgccgtga

SEQ ID NO: 79577 - RNA, 21 nt, synthetic construct
  source 1..21: mol_type = other RNA
ctgggcctcgagtgccgtgca

SEQ ID NO: 79578 - RNA, 21 nt, synthetic construct
  source 1..21: mol_type = other RNA
tgggcctcgagtgccgtgcca

SEQ ID NO: 79579 - RNA, 21 nt, synthetic construct
  source 1..21: mol_type = other RNA
tccactccggggacgacctga

SEQ ID NO: 79580 - RNA, 21 nt, synthetic construct
  source 1..21: mol_type = other RNA
tccactccggggacgacctga

SEQ ID NO: 79581 - RNA, 21 nt, synthetic construct
  source 1..21: mol_type = other RNA
agccgagcactacagccacca

SEQ ID NO: 79582 - RNA, 21 nt, synthetic construct
  source 1..21: mol_type = other RNA
gccgagcactacagccaccga

SEQ ID NO: 79583 - RNA, 21 nt, synthetic construct
  source 1..21: mol_type = other RNA
acccgcctatcacagaccaca

SEQ ID NO: 79584 - RNA, 21 nt, synthetic construct
  source 1..21: mol_type = other RNA
caccacaaccggggccaccga

SEQ ID NO: 79585 - RNA, 21 nt, synthetic construct
  source 1..21: mol_type = other RNA
accacaaccggggccaccgga

SEQ ID NO: 79586 - RNA, 21 nt, synthetic construct
  source 1..21: mol_type = other RNA
accacaaccacgggcttcaca

SEQ ID NO: 79587 - RNA, 21 nt, synthetic construct
  source 1..21: mol_type = other RNA
gacggcactcacgcctccaga

SEQ ID NO: 79588 - RNA, 21 nt, synthetic construct
  source 1..21: mol_type = other RNA
cggcactcacgcctccagtga

SEQ ID NO: 79589 - RNA, 21 nt, synthetic construct
  source 1..21: mol_type = other RNA
ctccacggtgaccccctccta

SEQ ID NO: 79590 - RNA, 21 nt, synthetic construct
  source 1..21: mol_type = other RNA
acccacaccgccagagtgcta

SEQ ID NO: 79591 - RNA, 21 nt, synthetic construct
  source 1..21: mol_type = other RNA
cacaccgccagagtgctgaca

SEQ ID NO: 79592 - RNA, 21 nt, synthetic construct
  source 1..21: mol_type = other RNA
ccaaccttcagcgtgtccaca

SEQ ID NO: 79593 - RNA, 21 nt, synthetic construct
  source 1..21: mol_type = other RNA
ctgagacccactggcttccca

SEQ ID NO: 79594 - RNA, 21 nt, synthetic construct
  source 1..21: mol_type = other RNA
tcagcactgtgacattgacca

SEQ ID NO: 79595 - RNA, 21 nt, synthetic construct
  source 1..21: mol_type = other RNA
gacaatgccatccctctccga

SEQ ID NO: 79596 - RNA, 21 nt, synthetic construct
  source 1..21: mol_type = other RNA
ccctctccggcaggtgaatga

SEQ ID NO: 79597 - RNA, 21 nt, synthetic construct
  source 1..21: mol_type = other RNA
gagggcctgatcctgtttgaa

SEQ ID NO: 79598 - RNA, 21 nt, synthetic construct
  source 1..21: mol_type = other RNA
caccatgcgtgtggacattca

SEQ ID NO: 79599 - RNA, 21 nt, synthetic construct
  source 1..21: mol_type = other RNA
caggtctttgctgagtgccaa

SEQ ID NO: 79600 - RNA, 21 nt, synthetic construct
  source 1..21: mol_type = other RNA
cttcaacgcctgcatcagcga

SEQ ID NO: 79601 - RNA, 21 nt, synthetic construct
  source 1..21: mol_type = other RNA
ttcaacgcctgcatcagcgaa

SEQ ID NO: 79602 - RNA, 21 nt, synthetic construct
  source 1..21: mol_type = other RNA
gtgcgacctcacctgcccaca

SEQ ID NO: 79603 - RNA, 21 nt, synthetic construct
  source 1..21: mol_type = other RNA
ttcaacgcacacatgggcata

SEQ ID NO: 79604 - RNA, 21 nt, synthetic construct
  source 1..21: mol_type = other RNA
tgggcatctgcgtgcaggcca

SEQ ID NO: 79605 - RNA, 21 nt, synthetic construct
  source 1..21: mol_type = other RNA
cccgggccgagaacccctgca

SEQ ID NO: 79606 - RNA, 21 nt, synthetic construct
  source 1..21: mol_type = other RNA
cagaccgcctgcctcacgcca

SEQ ID NO: 79607 - RNA, 21 nt, synthetic construct
  source 1..21: mol_type = other RNA
ggtgcccttgcactgtcctaa

SEQ ID NO: 79608 - RNA, 21 nt, synthetic construct
  source 1..21: mol_type = other RNA
tctgagaacgttctgcctcca

SEQ ID NO: 79609 - RNA, 21 nt, synthetic construct
  source 1..21: mol_type = other RNA
tggaacaaactaagcatgtga

SEQ ID NO: 79610 - RNA, 21 nt, synthetic construct
  source 1..21: mol_type = other RNA
tgtgtccctgccacggccgga

SEQ ID NO: 79611 - RNA, 21 nt, synthetic construct
  source 1..21: mol_type = other RNA
gcacggattccagctggccaa

SEQ ID NO: 79612 - RNA, 21 nt, synthetic construct
  source 1..21: mol_type = other RNA
cacggattccagctggccaca

SEQ ID NO: 79613 - RNA, 21 nt, synthetic construct
  source 1..21: mol_type = other RNA
caacggccaggtcagagagga

SEQ ID NO: 79614 - RNA, 21 nt, synthetic construct
  source 1..21: mol_type = other RNA
cggctccgtcctcatcaatga

SEQ ID NO: 79615 - RNA, 21 nt, synthetic construct
  source 1..21: mol_type = other RNA
tacgacctgcatggtgactga

SEQ ID NO: 79616 - RNA, 21 nt, synthetic construct
  source 1..21: mol_type = other RNA
cggacgccctggcacccaaga

SEQ ID NO: 79617 - RNA, 21 nt, synthetic construct
  source 1..21: mol_type = other RNA
ctatgaggacaggacctacaa

SEQ ID NO: 79618 - RNA, 21 nt, synthetic construct
  source 1..21: mol_type = other RNA
aacaccaccgatgggcttgga

SEQ ID NO: 79619 - RNA, 21 nt, synthetic construct
  source 1..21: mol_type = other RNA
cgcctgcttgatcgccatcta

SEQ ID NO: 79620 - RNA, 21 nt, synthetic construct
  source 1..21: mol_type = other RNA
ccacaaccccgccaccgacca

SEQ ID NO: 79621 - RNA, 21 nt, synthetic construct
  source 1..21: mol_type = other RNA
aaccacgggcttcacagccaa

SEQ ID NO: 79622 - RNA, 21 nt, synthetic construct
  source 1..21: mol_type = other RNA
acaactgtggccactggttca

SEQ ID NO: 79623 - RNA, 21 nt, synthetic construct
  source 1..21: mol_type = other RNA
caaccaccggtaccacccaga

SEQ ID NO: 79624 - RNA, 21 nt, synthetic construct
  source 1..21: mol_type = other RNA
aaccaccggtaccacccagca

SEQ ID NO: 79625 - RNA, 21 nt, synthetic construct
  source 1..21: mol_type = other RNA
aaccacgggcttcacagccaa

SEQ ID NO: 79626 - RNA, 21 nt, synthetic construct
  source 1..21: mol_type = other RNA
acaactgtggccactggttca

SEQ ID NO: 79627 - RNA, 21 nt, synthetic construct
  source 1..21: mol_type = other RNA
agggacaacacctatccccca

SEQ ID NO: 79628 - RNA, 21 nt, synthetic construct
  source 1..21: mol_type = other RNA
caaccaccggtaccacccaga

SEQ ID NO: 79629 - RNA, 21 nt, synthetic construct
  source 1..21: mol_type = other RNA
aaccaccggtaccacccagca

SEQ ID NO: 79630 - RNA, 21 nt, synthetic construct
  source 1..21: mol_type = other RNA
aaccacgggcttcacagccaa

SEQ ID NO: 79631 - RNA, 21 nt, synthetic construct
  source 1..21: mol_type = other RNA
acaactgtggccactggttca

SEQ ID NO: 79632 - RNA, 21 nt, synthetic construct
  source 1..21: mol_type = other RNA
acaactgtggccactggttca

SEQ ID NO: 79633 - RNA, 21 nt, synthetic construct
  source 1..21: mol_type = other RNA
agggacaacacctatccccca

SEQ ID NO: 79634 - RNA, 21 nt, synthetic construct
  source 1..21: mol_type = other RNA
caaccaccggtaccacccaga

SEQ ID NO: 79635 - RNA, 21 nt, synthetic construct
  source 1..21: mol_type = other RNA
aaccaccggtaccacccagca

SEQ ID NO: 79636 - RNA, 21 nt, synthetic construct
  source 1..21: mol_type = other RNA
aaccacgggcttcacagccaa

SEQ ID NO: 79637 - RNA, 21 nt, synthetic construct
  source 1..21: mol_type = other RNA
acaactgtggccactggttca

SEQ ID NO: 79638 - RNA, 21 nt, synthetic construct
  source 1..21: mol_type = other RNA
gacgacccggatcctcactga

SEQ ID NO: 79639 - RNA, 21 nt, synthetic construct
  source 1..21: mol_type = other RNA
ttctcgcccggggaagtcata

SEQ ID NO: 79640 - RNA, 21 nt, synthetic construct
  source 1..21: mol_type = other RNA
cggtgtgcgtgtgcaacacaa

SEQ ID NO: 79641 - RNA, 21 nt, synthetic construct
  source 1..21: mol_type = other RNA
tgcgtgtgcaacacaaccaca

SEQ ID NO: 79642 - RNA, 21 nt, synthetic construct
  source 1..21: mol_type = other RNA
atgaaacctgggtcaacagca

SEQ ID NO: 79643 - RNA, 21 nt, synthetic construct
  source 1..21: mol_type = other RNA
cactggtggacagcactgcga

SEQ ID NO: 79644 - RNA, 21 nt, synthetic construct
  source 1..21: mol_type = other RNA
agcaacagctcggcgggcaca

SEQ ID NO: 79645 - RNA, 21 nt, synthetic construct
  source 1..21: mol_type = other RNA
ggctgcattgccgaggaggaa

SEQ ID NO: 79646 - RNA, 21 nt, synthetic construct
  source 1..21: mol_type = other RNA
acatcccccagatacacaaga

SEQ ID NO: 79647 - RNA, 21 nt, synthetic construct
  source 1..21: mol_type = other RNA
gcaaccaccggtaccacccaa

SEQ ID NO: 79648 - RNA, 21 nt, synthetic construct
  source 1..21: mol_type = other RNA
tacgactgagtccactggata

SEQ ID NO: 79649 - RNA, 21 nt, synthetic construct
  source 1..21: mol_type = other RNA
gcccaccggatccacggccaa

SEQ ID NO: 79650 - RNA, 21 nt, synthetic construct
  source 1..21: mol_type = other RNA
gcaaccaccggtaccacccaa

SEQ ID NO: 79651 - RNA, 21 nt, synthetic construct
  source 1..21: mol_type = other RNA
gccaccacgacaagggccaca

SEQ ID NO: 79652 - RNA, 21 nt, synthetic construct
  source 1..21: mol_type = other RNA
gcccaccggatccacggccaa

SEQ ID NO: 79653 - RNA, 21 nt, synthetic construct
  source 1..21: mol_type = other RNA
gcaccgcctggacccgcctaa

SEQ ID NO: 79654 - RNA, 21 nt, synthetic construct
  source 1..21: mol_type = other RNA
cacaaagctgaccacaacaga

SEQ ID NO: 79655 - RNA, 21 nt, synthetic construct
  source 1..21: mol_type = other RNA
tacgactgagtccactggata

SEQ ID NO: 79656 - RNA, 21 nt, synthetic construct
  source 1..21: mol_type = other RNA
gcccaccggatccacggccaa

SEQ ID NO: 79657 - RNA, 21 nt, synthetic construct
  source 1..21: mol_type = other RNA
gcaaccaccggtaccacccaa

SEQ ID NO: 79658 - RNA, 21 nt, synthetic construct
  source 1..21: mol_type = other RNA
gccaccacgacaagggccaca

SEQ ID NO: 79659 - RNA, 21 nt, synthetic construct
  source 1..21: mol_type = other RNA
gcccaccggatccacggccaa

SEQ ID NO: 79660 - RNA, 21 nt, synthetic construct
  source 1..21: mol_type = other RNA
gcacctcttacaccttccgga

SEQ ID NO: 79661 - RNA, 21 nt, synthetic construct
  source 1..21: mol_type = other RNA
ccaccaccatgcgtgtggaca

SEQ ID NO: 79662 - RNA, 21 nt, synthetic construct
  source 1..21: mol_type = other RNA
gactcctgtcaagtccgcata

SEQ ID NO: 79663 - RNA, 21 nt, synthetic construct
  source 1..21: mol_type = other RNA
gacttcacggccctcagcgga

SEQ ID NO: 79664 - RNA, 21 nt, synthetic construct
  source 1..21: mol_type = other RNA
cactggtgctcgcgcctgaca

SEQ ID NO: 79665 - RNA, 21 nt, synthetic construct
  source 1..21: mol_type = other RNA
ggagagaccatcagggtcgaa

SEQ ID NO: 79666 - RNA, 21 nt, synthetic construct
  source 1..21: mol_type = other RNA
gagtacatcttggcccaggaa

SEQ ID NO: 79667 - RNA, 21 nt, synthetic construct
  source 1..21: mol_type = other RNA
ccaccctctcagaaggactga

SEQ ID NO: 79668 - RNA, 21 nt, synthetic construct
  source 1..21: mol_type = other RNA
ggccccacgacgcctgcagga

SEQ ID NO: 79669 - RNA, 21 nt, synthetic construct
  source 1..21: mol_type = other RNA
cagggactgcaaccgccctta

SEQ ID NO: 79670 - RNA, 21 nt, synthetic construct
  source 1..21: mol_type = other RNA
agggactgcaaccgcccttca

SEQ ID NO: 79671 - RNA, 21 nt, synthetic construct
  source 1..21: mol_type = other RNA
gactgcaaccgcccttccaga

SEQ ID NO: 79672 - RNA, 21 nt, synthetic construct
  source 1..21: mol_type = other RNA
cagcccagggacggcactcaa

SEQ ID NO: 79673 - RNA, 21 nt, synthetic construct
  source 1..21: mol_type = other RNA
ccacacggtgcgcacagccta

SEQ ID NO: 79674 - RNA, 21 nt, synthetic construct
  source 1..21: mol_type = other RNA
cacacggtgcgcacagcctga

SEQ ID NO: 79675 - RNA, 21 nt, synthetic construct
  source 1..21: mol_type = other RNA
ccctcaccctagcagcagaaa

SEQ ID NO: 79676 - RNA, 21 nt, synthetic construct
  source 1..21: mol_type = other RNA
ctccagggacgaccaccccga

SEQ ID NO: 79677 - RNA, 21 nt, synthetic construct
  source 1..21: mol_type = other RNA
cggccggaggggccgtctgta

SEQ ID NO: 79678 - RNA, 21 nt, synthetic construct
  source 1..21: mol_type = other RNA
ggccggaggggccgtctgtga

SEQ ID NO: 79679 - RNA, 21 nt, synthetic construct
  source 1..21: mol_type = other RNA
actacgactgagtccactgga

SEQ ID NO: 79680 - RNA, 21 nt, synthetic construct
  source 1..21: mol_type = other RNA
ggccacgacacccacagtcaa

SEQ ID NO: 79681 - RNA, 21 nt, synthetic construct
  source 1..21: mol_type = other RNA
cagggactgcaaccgccctta

SEQ ID NO: 79682 - RNA, 21 nt, synthetic construct
  source 1..21: mol_type = other RNA
agggactgcaaccgcccttca

SEQ ID NO: 79683 - RNA, 21 nt, synthetic construct
  source 1..21: mol_type = other RNA
gactgcaaccgcccttccaga

SEQ ID NO: 79684 - RNA, 21 nt, synthetic construct
  source 1..21: mol_type = other RNA
ccacacggtgcgcacagccta

SEQ ID NO: 79685 - RNA, 21 nt, synthetic construct
  source 1..21: mol_type = other RNA
cacacggtgcgcacagcctga

SEQ ID NO: 79686 - RNA, 21 nt, synthetic construct
  source 1..21: mol_type = other RNA
gccttccacggggacttccca

SEQ ID NO: 79687 - RNA, 21 nt, synthetic construct
  source 1..21: mol_type = other RNA
ccctcaccctagcagcaggaa

SEQ ID NO: 79688 - RNA, 21 nt, synthetic construct
  source 1..21: mol_type = other RNA
caccctagcagcaggaccaca

SEQ ID NO: 79689 - RNA, 21 nt, synthetic construct
  source 1..21: mol_type = other RNA
accctagcagcaggaccacca

SEQ ID NO: 79690 - RNA, 21 nt, synthetic construct
  source 1..21: mol_type = other RNA
ctccagggacgaccaccccga

SEQ ID NO: 79691 - RNA, 21 nt, synthetic construct
  source 1..21: mol_type = other RNA
cggccggaggggccgtctgta

SEQ ID NO: 79692 - RNA, 21 nt, synthetic construct
  source 1..21: mol_type = other RNA
ggccggaggggccgtctgtga

SEQ ID NO: 79693 - RNA, 21 nt, synthetic construct
  source 1..21: mol_type = other RNA
caccagctctacggccacgca

SEQ ID NO: 79694 - RNA, 21 nt, synthetic construct
  source 1..21: mol_type = other RNA
accagttccatgtccacccca

SEQ ID NO: 79695 - RNA, 21 nt, synthetic construct
  source 1..21: mol_type = other RNA
cagttccatgtccacccccta

SEQ ID NO: 79696 - RNA, 21 nt, synthetic construct
  source 1..21: mol_type = other RNA
actgctggcaccctcaaagta

SEQ ID NO: 79697 - RNA, 21 nt, synthetic construct
  source 1..21: mol_type = other RNA
cagggactgcaaccgccctta

SEQ ID NO: 79698 - RNA, 21 nt, synthetic construct
  source 1..21: mol_type = other RNA
agggactgcaaccgcccttca

SEQ ID NO: 79699 - RNA, 21 nt, synthetic construct
  source 1..21: mol_type = other RNA
gactgcaaccgcccttccaga

SEQ ID NO: 79700 - RNA, 21 nt, synthetic construct
  source 1..21: mol_type = other RNA
cagcccagggacggcactcaa

SEQ ID NO: 79701 - RNA, 21 nt, synthetic construct
  source 1..21: mol_type = other RNA
ccacacggtgcgcacagccta

SEQ ID NO: 79702 - RNA, 21 nt, synthetic construct
  source 1..21: mol_type = other RNA
cacacggtgcgcacagcctga

SEQ ID NO: 79703 - RNA, 21 nt, synthetic construct
  source 1..21: mol_type = other RNA
ccctcaccctagcagcaggaa

SEQ ID NO: 79704 - RNA, 21 nt, synthetic construct
  source 1..21: mol_type = other RNA
caccctagcagcaggaccaca

SEQ ID NO: 79705 - RNA, 21 nt, synthetic construct
  source 1..21: mol_type = other RNA
accctagcagcaggaccacca

SEQ ID NO: 79706 - RNA, 21 nt, synthetic construct
  source 1..21: mol_type = other RNA
ctccagggacgaccaccccga

SEQ ID NO: 79707 - RNA, 21 nt, synthetic construct
  source 1..21: mol_type = other RNA
caccagctctacggccacgca

SEQ ID NO: 79708 - RNA, 21 nt, synthetic construct
  source 1..21: mol_type = other RNA
actacgactgagtccactgga

SEQ ID NO: 79709 - RNA, 21 nt, synthetic construct
  source 1..21: mol_type = other RNA
ggccacgacacccacagtcaa

SEQ ID NO: 79710 - RNA, 21 nt, synthetic construct
  source 1..21: mol_type = other RNA
cagggactgcaaccgccctta

SEQ ID NO: 79711 - RNA, 21 nt, synthetic construct
  source 1..21: mol_type = other RNA
agggactgcaaccgcccttca

SEQ ID NO: 79712 - RNA, 21 nt, synthetic construct
  source 1..21: mol_type = other RNA
gactgcaaccgcccttccaga

SEQ ID NO: 79713 - RNA, 21 nt, synthetic construct
  source 1..21: mol_type = other RNA
ccacacggtgcgcacagccta

SEQ ID NO: 79714 - RNA, 21 nt, synthetic construct
  source 1..21: mol_type = other RNA
cacacggtgcgcacagcctga

SEQ ID NO: 79715 - RNA, 21 nt, synthetic construct
  source 1..21: mol_type = other RNA
gccttccacggggacttccca

SEQ ID NO: 79716 - RNA, 21 nt, synthetic construct
  source 1..21: mol_type = other RNA
ccctcaccctagcagcaggaa

SEQ ID NO: 79717 - RNA, 21 nt, synthetic construct
  source 1..21: mol_type = other RNA
caccctagcagcaggaccaca

SEQ ID NO: 79718 - RNA, 21 nt, synthetic construct
  source 1..21: mol_type = other RNA
accctagcagcaggaccacca

SEQ ID NO: 79719 - RNA, 21 nt, synthetic construct
  source 1..21: mol_type = other RNA
cggccggaggggccgtctgta

SEQ ID NO: 79720 - RNA, 21 nt, synthetic construct
  source 1..21: mol_type = other RNA
ggccggaggggccgtctgtga

SEQ ID NO: 79721 - RNA, 21 nt, synthetic construct
  source 1..21: mol_type = other RNA
ggccacgacacccacagtcaa

SEQ ID NO: 79722 - RNA, 21 nt, synthetic construct
  source 1..21: mol_type = other RNA
cagcccagggacggcactcaa

SEQ ID NO: 79723 - RNA, 21 nt, synthetic construct
  source 1..21: mol_type = other RNA
gggacgacccggatcctcaca

SEQ ID NO: 79724 - RNA, 21 nt, synthetic construct
  source 1..21: mol_type = other RNA
gccaagacgtggctggtccca

SEQ ID NO: 79725 - RNA, 21 nt, synthetic construct
  source 1..21: mol_type = other RNA
ggctttgagtacaagagagta

SEQ ID NO: 79726 - RNA, 21 nt, synthetic construct
  source 1..21: mol_type = other RNA
tcacgcccgatggccagccaa

SEQ ID NO: 79727 - RNA, 21 nt, synthetic construct
  source 1..21: mol_type = other RNA
atcaccttctgcgagggctca

SEQ ID NO: 79728 - RNA, 21 nt, synthetic construct
  source 1..21: mol_type = other RNA
ccacgtggatgagtgtggcta

SEQ ID NO: 79729 - RNA, 21 nt, synthetic construct
  source 1..21: mol_type = other RNA
gccctggaacaaactaagcaa

SEQ ID NO: 79730 - RNA, 21 nt, synthetic construct
  source 1..21: mol_type = other RNA
cacgtccggccgctggggcaa

SEQ ID NO: 79731 - RNA, 21 nt, synthetic construct
  source 1..21: mol_type = other RNA
aggatgggtgccccgagcgca

SEQ ID NO: 79732 - RNA, 21 nt, synthetic construct
  source 1..21: mol_type = other RNA
gagcactgccgcgccgcctaa

SEQ ID NO: 79733 - RNA, 21 nt, synthetic construct
  source 1..21: mol_type = other RNA
gtggagcagagcggggactaa

SEQ ID NO: 79734 - RNA, 21 nt, synthetic construct
  source 1..21: mol_type = other RNA
aggctgaccccgctccagtta

SEQ ID NO: 79735 - RNA, 21 nt, synthetic construct
  source 1..21: mol_type = other RNA
ccccacctgcccgtgtgccaa

SEQ ID NO: 79736 - RNA, 21 nt, synthetic construct
  source 1..21: mol_type = other RNA
tacagcccgggcacctcctta

SEQ ID NO: 79737 - RNA, 21 nt, synthetic construct
  source 1..21: mol_type = other RNA
gagaaactctacgacctgcaa

SEQ ID NO: 79738 - RNA, 21 nt, synthetic construct
  source 1..21: mol_type = other RNA
ttctgtccaagaaatgtgcca

SEQ ID NO: 79739 - RNA, 21 nt, synthetic construct
  source 1..21: mol_type = other RNA
actcatgcaggtgtttgtcaa

SEQ ID NO: 79740 - RNA, 21 nt, synthetic construct
  source 1..21: mol_type = other RNA
aaccaggctgacgacttcaca

SEQ ID NO: 79741 - RNA, 21 nt, synthetic construct
  source 1..21: mol_type = other RNA
cgggcgcagccttcgccaaca

SEQ ID NO: 79742 - RNA, 21 nt, synthetic construct
  source 1..21: mol_type = other RNA
ggcactggtgctcgcgcctga

SEQ ID NO: 79743 - RNA, 21 nt, synthetic construct
  source 1..21: mol_type = other RNA
gccaagggcgtacagctcaga

SEQ ID NO: 79744 - RNA, 21 nt, synthetic construct
  source 1..21: mol_type = other RNA
gccgcggcctgagtgaggcca

SEQ ID NO: 79745 - RNA, 21 nt, synthetic construct
  source 1..21: mol_type = other RNA
ccgcggcctgagtgaggccga

SEQ ID NO: 79746 - RNA, 21 nt, synthetic construct
  source 1..21: mol_type = other RNA
gctcacggcaccgtgctggca

SEQ ID NO: 79747 - RNA, 21 nt, synthetic construct
  source 1..21: mol_type = other RNA
ctggtcatcgagacccacgga

SEQ ID NO: 79748 - RNA, 21 nt, synthetic construct
  source 1..21: mol_type = other RNA
gtgtgcctgcgactcgggtga

SEQ ID NO: 79749 - RNA, 21 nt, synthetic construct
  source 1..21: mol_type = other RNA
gtgcaagggtccccacagcga

SEQ ID NO: 79750 - RNA, 21 nt, synthetic construct
  source 1..21: mol_type = other RNA
acaggacctacagctaccaga

SEQ ID NO: 79751 - RNA, 21 nt, synthetic construct
  source 1..21: mol_type = other RNA
cctacagctaccaggacgtca

SEQ ID NO: 79752 - RNA, 21 nt, synthetic construct
  source 1..21: mol_type = other RNA
tccagccacaacgccattcaa

SEQ ID NO: 79753 - RNA, 21 nt, synthetic construct
  source 1..21: mol_type = other RNA
gctggtacaatgggcaccgca

SEQ ID NO: 79754 - RNA, 21 nt, synthetic construct
  source 1..21: mol_type = other RNA
gggttctctgctgcgaataca

SEQ ID NO: 79755 - RNA, 21 nt, synthetic construct
  source 1..21: mol_type = other RNA
cgctggagggcacttatgcca

SEQ ID NO: 79756 - RNA, 21 nt, synthetic construct
  source 1..21: mol_type = other RNA
tggagggcacttatgccagca

SEQ ID NO: 79757 - RNA, 21 nt, synthetic construct
  source 1..21: mol_type = other RNA
gagagcttccccaactggaca

SEQ ID NO: 79758 - RNA, 21 nt, synthetic construct
  source 1..21: mol_type = other RNA
tccccaactggaccctggcaa

SEQ ID NO: 79759 - RNA, 21 nt, synthetic construct
  source 1..21: mol_type = other RNA
agcagtccccaccctctcaga

SEQ ID NO: 79760 - RNA, 21 nt, synthetic construct
  source 1..21: mol_type = other RNA
cacgggaggccccacgacgca

SEQ ID NO: 79761 - RNA, 21 nt, synthetic construct
  source 1..21: mol_type = other RNA
cgggaggccccacgacgccta

SEQ ID NO: 79762 - RNA, 21 nt, synthetic construct
  source 1..21: mol_type = other RNA
cggggagcttgggcacatgga

SEQ ID NO: 79763 - RNA, 21 nt, synthetic construct
  source 1..21: mol_type = other RNA
ctcaggccgagaccagcacga

SEQ ID NO: 79764 - RNA, 21 nt, synthetic construct
  source 1..21: mol_type = other RNA
cacgcccaggacagagacgaa

SEQ ID NO: 79765 - RNA, 21 nt, synthetic construct
  source 1..21: mol_type = other RNA
cacaactggggccaccggcta

SEQ ID NO: 79766 - RNA, 21 nt, synthetic construct
  source 1..21: mol_type = other RNA
caggaacagctcacactacca

SEQ ID NO: 79767 - RNA, 21 nt, synthetic construct
  source 1..21: mol_type = other RNA
acggcactcacgcctccagta

SEQ ID NO: 79768 - RNA, 21 nt, synthetic construct
  source 1..21: mol_type = other RNA
gtggtactcccccatcactga

SEQ ID NO: 79769 - RNA, 21 nt, synthetic construct
  source 1..21: mol_type = other RNA
tactcccccatcactgaccaa

SEQ ID NO: 79770 - RNA, 21 nt, synthetic construct
  source 1..21: mol_type = other RNA
cacacacccccagtgccgaaa

SEQ ID NO: 79771 - RNA, 21 nt, synthetic construct
  source 1..21: mol_type = other RNA
gtgacttcccacaccctagca

SEQ ID NO: 79772 - RNA, 21 nt, synthetic construct
  source 1..21: mol_type = other RNA
cagcaagacccgcacctcgaa

SEQ ID NO: 79773 - RNA, 21 nt, synthetic construct
  source 1..21: mol_type = other RNA
gtcagagtggctggactacaa

SEQ ID NO: 79774 - RNA, 21 nt, synthetic construct
  source 1..21: mol_type = other RNA
agccactacgactgagtccaa

SEQ ID NO: 79775 - RNA, 21 nt, synthetic construct
  source 1..21: mol_type = other RNA
ggatcctcacagagccgagca

SEQ ID NO: 79776 - RNA, 21 nt, synthetic construct
  source 1..21: mol_type = other RNA
caccggatccacggccaccga

SEQ ID NO: 79777 - RNA, 21 nt, synthetic construct
  source 1..21: mol_type = other RNA
accggatccacggccaccgca

SEQ ID NO: 79778 - RNA, 21 nt, synthetic construct
  source 1..21: mol_type = other RNA
ggcaactgctggcaccccaca

SEQ ID NO: 79779 - RNA, 21 nt, synthetic construct
  source 1..21: mol_type = other RNA
ggcaccccacatgtgagcaca

SEQ ID NO: 79780 - RNA, 21 nt, synthetic construct
  source 1..21: mol_type = other RNA
caggaacagctcacactacca

SEQ ID NO: 79781 - RNA, 21 nt, synthetic construct
  source 1..21: mol_type = other RNA
gtggtactcccccatcactga

SEQ ID NO: 79782 - RNA, 21 nt, synthetic construct
  source 1..21: mol_type = other RNA
tactcccccatcactgaccaa

SEQ ID NO: 79783 - RNA, 21 nt, synthetic construct
  source 1..21: mol_type = other RNA
cacacacccccagtgccgaaa

SEQ ID NO: 79784 - RNA, 21 nt, synthetic construct
  source 1..21: mol_type = other RNA
acttcggccacctcaggcaca

SEQ ID NO: 79785 - RNA, 21 nt, synthetic construct
  source 1..21: mol_type = other RNA
cagagccttccacggggacta

SEQ ID NO: 79786 - RNA, 21 nt, synthetic construct
  source 1..21: mol_type = other RNA
cagcaagacccgcacctcgaa

SEQ ID NO: 79787 - RNA, 21 nt, synthetic construct
  source 1..21: mol_type = other RNA
gtcagagtggctggactacaa

SEQ ID NO: 79788 - RNA, 21 nt, synthetic construct
  source 1..21: mol_type = other RNA
accagctctacggccacgcca

SEQ ID NO: 79789 - RNA, 21 nt, synthetic construct
  source 1..21: mol_type = other RNA
ccactggatccacggccatca

SEQ ID NO: 79790 - RNA, 21 nt, synthetic construct
  source 1..21: mol_type = other RNA
gccatcccgtcctccacccca

SEQ ID NO: 79791 - RNA, 21 nt, synthetic construct
  source 1..21: mol_type = other RNA
ccatcccgtcctccaccccga

SEQ ID NO: 79792 - RNA, 21 nt, synthetic construct
  source 1..21: mol_type = other RNA
caccggatccacggccaccga

SEQ ID NO: 79793 - RNA, 21 nt, synthetic construct
  source 1..21: mol_type = other RNA
accggatccacggccaccgca

SEQ ID NO: 79794 - RNA, 21 nt, synthetic construct
  source 1..21: mol_type = other RNA
caggaacagctcacactacca

SEQ ID NO: 79795 - RNA, 21 nt, synthetic construct
  source 1..21: mol_type = other RNA
acggcactcacgcctccagta

SEQ ID NO: 79796 - RNA, 21 nt, synthetic construct
  source 1..21: mol_type = other RNA
gtggtactcccccatcactga

SEQ ID NO: 79797 - RNA, 21 nt, synthetic construct
  source 1..21: mol_type = other RNA
tactcccccatcactgaccaa

SEQ ID NO: 79798 - RNA, 21 nt, synthetic construct
  source 1..21: mol_type = other RNA
cacacacccccagtgccgaaa

SEQ ID NO: 79799 - RNA, 21 nt, synthetic construct
  source 1..21: mol_type = other RNA
cagcaagacccgcacctcgaa

SEQ ID NO: 79800 - RNA, 21 nt, synthetic construct
  source 1..21: mol_type = other RNA
gtcagagtggctggactacaa

SEQ ID NO: 79801 - RNA, 21 nt, synthetic construct
  source 1..21: mol_type = other RNA
cggaggggcagtctgtgagca

SEQ ID NO: 79802 - RNA, 21 nt, synthetic construct
  source 1..21: mol_type = other RNA
accagctctacggccacgcca

SEQ ID NO: 79803 - RNA, 21 nt, synthetic construct
  source 1..21: mol_type = other RNA
agccactacgactgagtccaa

SEQ ID NO: 79804 - RNA, 21 nt, synthetic construct
  source 1..21: mol_type = other RNA
ggatcctcacagagccgagca

SEQ ID NO: 79805 - RNA, 21 nt, synthetic construct
  source 1..21: mol_type = other RNA
caccggatccacggccaccga

SEQ ID NO: 79806 - RNA, 21 nt, synthetic construct
  source 1..21: mol_type = other RNA
accggatccacggccaccgca

SEQ ID NO: 79807 - RNA, 21 nt, synthetic construct
  source 1..21: mol_type = other RNA
ggcaactgctggcaccccaca

SEQ ID NO: 79808 - RNA, 21 nt, synthetic construct
  source 1..21: mol_type = other RNA
ggcaccccacatgtgagcaca

SEQ ID NO: 79809 - RNA, 21 nt, synthetic construct
  source 1..21: mol_type = other RNA
caggaacagctcacactacca

SEQ ID NO: 79810 - RNA, 21 nt, synthetic construct
  source 1..21: mol_type = other RNA
gtggtactcccccatcactga

SEQ ID NO: 79811 - RNA, 21 nt, synthetic construct
  source 1..21: mol_type = other RNA
atcaccacggccactacgata

SEQ ID NO: 79812 - RNA, 21 nt, synthetic construct
  source 1..21: mol_type = other RNA
cacacacccccagtgccgaaa

SEQ ID NO: 79813 - RNA, 21 nt, synthetic construct
  source 1..21: mol_type = other RNA
acttcggccacctcaggcaca

SEQ ID NO: 79814 - RNA, 21 nt, synthetic construct
  source 1..21: mol_type = other RNA
cagagccttccacggggacta

SEQ ID NO: 79815 - RNA, 21 nt, synthetic construct
  source 1..21: mol_type = other RNA
cagcaagacccgcacctcgaa

SEQ ID NO: 79816 - RNA, 21 nt, synthetic construct
  source 1..21: mol_type = other RNA
gtcagagtggctggactacaa

SEQ ID NO: 79817 - RNA, 21 nt, synthetic construct
  source 1..21: mol_type = other RNA
agggccaccagttccacgtca

SEQ ID NO: 79818 - RNA, 21 nt, synthetic construct
  source 1..21: mol_type = other RNA
ggatcctcacagagccgagca

SEQ ID NO: 79819 - RNA, 21 nt, synthetic construct
  source 1..21: mol_type = other RNA
caccggatccacggccaccga

SEQ ID NO: 79820 - RNA, 21 nt, synthetic construct
  source 1..21: mol_type = other RNA
accggatccacggccaccgca

SEQ ID NO: 79821 - RNA, 21 nt, synthetic construct
  source 1..21: mol_type = other RNA
ggcaactgctggcaccccaca

SEQ ID NO: 79822 - RNA, 21 nt, synthetic construct
  source 1..21: mol_type = other RNA
ggcaccccacatgtgagcaca

SEQ ID NO: 79823 - RNA, 21 nt, synthetic construct
  source 1..21: mol_type = other RNA
agggactgcaactgcccttca

SEQ ID NO: 79824 - RNA, 21 nt, synthetic construct
  source 1..21: mol_type = other RNA
caggaacagctcacactacca

SEQ ID NO: 79825 - RNA, 21 nt, synthetic construct
  source 1..21: mol_type = other RNA
acggcactcacgcctccagta

SEQ ID NO: 79826 - RNA, 21 nt, synthetic construct
  source 1..21: mol_type = other RNA
caccgccagagtgctgaccaa

SEQ ID NO: 79827 - RNA, 21 nt, synthetic construct
  source 1..21: mol_type = other RNA
gtggtactcccccatcactga

SEQ ID NO: 79828 - RNA, 21 nt, synthetic construct
  source 1..21: mol_type = other RNA
tactcccccatcactgaccaa

SEQ ID NO: 79829 - RNA, 21 nt, synthetic construct
  source 1..21: mol_type = other RNA
gaccgtcccagcacagaccaa

SEQ ID NO: 79830 - RNA, 21 nt, synthetic construct
  source 1..21: mol_type = other RNA
acaacagccactacaactgca

SEQ ID NO: 79831 - RNA, 21 nt, synthetic construct
  source 1..21: mol_type = other RNA
ggatcctcacagagccgagca

SEQ ID NO: 79832 - RNA, 21 nt, synthetic construct
  source 1..21: mol_type = other RNA
ttcccagctcgtccaccgtga

SEQ ID NO: 79833 - RNA, 21 nt, synthetic construct
  source 1..21: mol_type = other RNA
cgcagtgtgcaatcagcacta

SEQ ID NO: 79834 - RNA, 21 nt, synthetic construct
  source 1..21: mol_type = other RNA
ccagtgtcctccgccccgcta

SEQ ID NO: 79835 - RNA, 21 nt, synthetic construct
  source 1..21: mol_type = other RNA
cggctcccactattccaccta

SEQ ID NO: 79836 - RNA, 21 nt, synthetic construct
  source 1..21: mol_type = other RNA
acaccttccggggcaactgca

SEQ ID NO: 79837 - RNA, 21 nt, synthetic construct
  source 1..21: mol_type = other RNA
atccatgcacgctttgggaaa

SEQ ID NO: 79838 - RNA, 21 nt, synthetic construct
  source 1..21: mol_type = other RNA
ctgtcaccatggtgcatggga

SEQ ID NO: 79839 - RNA, 21 nt, synthetic construct
  source 1..21: mol_type = other RNA
gtcaccttcaatggccaagta

SEQ ID NO: 79840 - RNA, 21 nt, synthetic construct
  source 1..21: mol_type = other RNA
gtgccacaaccttgtgcccca

SEQ ID NO: 79841 - RNA, 21 nt, synthetic construct
  source 1..21: mol_type = other RNA
agccatgcggccccatacaga

SEQ ID NO: 79842 - RNA, 21 nt, synthetic construct
  source 1..21: mol_type = other RNA
atcctcttcaacgcacacata

SEQ ID NO: 79843 - RNA, 21 nt, synthetic construct
  source 1..21: mol_type = other RNA
ctgccacatgtgtacctgcca

SEQ ID NO: 79844 - RNA, 21 nt, synthetic construct
  source 1..21: mol_type = other RNA
gacccaacggtgcaatgtcaa

SEQ ID NO: 79845 - RNA, 21 nt, synthetic construct
  source 1..21: mol_type = other RNA
ttgagtacaagagagtggcca

SEQ ID NO: 79846 - RNA, 21 nt, synthetic construct
  source 1..21: mol_type = other RNA
agtacaagagagtggccggga

SEQ ID NO: 79847 - RNA, 21 nt, synthetic construct
  source 1..21: mol_type = other RNA
gagtggccgggcagtgctgta

SEQ ID NO: 79848 - RNA, 21 nt, synthetic construct
  source 1..21: mol_type = other RNA
ccagtccagctgaatgaaaca

SEQ ID NO: 79849 - RNA, 21 nt, synthetic construct
  source 1..21: mol_type = other RNA
attgtctgatcatgaaaacca

SEQ ID NO: 79850 - RNA, 21 nt, synthetic construct
  source 1..21: mol_type = other RNA
cctggaacaaactaagcatga

SEQ ID NO: 79851 - RNA, 21 nt, synthetic construct
  source 1..21: mol_type = other RNA
gattccagctggccacgtcca

SEQ ID NO: 79852 - RNA, 21 nt, synthetic construct
  source 1..21: mol_type = other RNA
gcggccgcctgtccatgccta

SEQ ID NO: 79853 - RNA, 21 nt, synthetic construct
  source 1..21: mol_type = other RNA
catgcgtgtggacattcctga

SEQ ID NO: 79854 - RNA, 21 nt, synthetic construct
  source 1..21: mol_type = other RNA
ccccggtgtctagcacaccca

SEQ ID NO: 79855 - RNA, 21 nt, synthetic construct
  source 1..21: mol_type = other RNA
cagagccgagcactacagcca

SEQ ID NO: 79856 - RNA, 21 nt, synthetic construct
  source 1..21: mol_type = other RNA
cagagccgagcactacagcca

SEQ ID NO: 79857 - RNA, 21 nt, synthetic construct
  source 1..21: mol_type = other RNA
cagagccgagcactacagcca

SEQ ID NO: 79858 - RNA, 21 nt, synthetic construct
  source 1..21: mol_type = other RNA
tggggacgacccggatcctca

SEQ ID NO: 79859 - RNA, 21 nt, synthetic construct
  source 1..21: mol_type = other RNA
gcgtgttcatccgactgcaca

SEQ ID NO: 79860 - RNA, 21 nt, synthetic construct
  source 1..21: mol_type = other RNA
gctgcccaccccgtgggtgaa

SEQ ID NO: 79861 - RNA, 21 nt, synthetic construct
  source 1..21: mol_type = other RNA
aggacagagacgacaatgaga

SEQ ID NO: 79862 - RNA, 21 nt, synthetic construct
  source 1..21: mol_type = other RNA
caaccccgccaccgaccacaa

SEQ ID NO: 79863 - RNA, 21 nt, synthetic construct
  source 1..21: mol_type = other RNA
cacagaccagtggtactccca

SEQ ID NO: 79864 - RNA, 21 nt, synthetic construct
  source 1..21: mol_type = other RNA
cacagaccagtggtactccca

SEQ ID NO: 79865 - RNA, 21 nt, synthetic construct
  source 1..21: mol_type = other RNA
cacagaccagtggtactccca

SEQ ID NO: 79866 - RNA, 21 nt, synthetic construct
  source 1..21: mol_type = other RNA
cacagaccagtggtactccca

SEQ ID NO: 79867 - RNA, 21 nt, synthetic construct
  source 1..21: mol_type = other RNA
cacagaccagtggtactccca

SEQ ID NO: 79868 - RNA, 21 nt, synthetic construct
  source 1..21: mol_type = other RNA
acctgcatggtgactgcagca

SEQ ID NO: 79869 - RNA, 21 nt, synthetic construct
  source 1..21: mol_type = other RNA
gctggtgccactcatgcagga

SEQ ID NO: 79870 - RNA, 21 nt, synthetic construct
  source 1..21: mol_type = other RNA
cagtggtactcccccatcaca

SEQ ID NO: 79871 - RNA, 21 nt, synthetic construct
  source 1..21: mol_type = other RNA
cctggtctgcaggaaccgtga

SEQ ID NO: 79872 - RNA, 21 nt, synthetic construct
  source 1..21: mol_type = other RNA
actccagagactgtccacaca

SEQ ID NO: 79873 - RNA, 21 nt, synthetic construct
  source 1..21: mol_type = other RNA
cagtggtactcccccatcaca

SEQ ID NO: 79874 - RNA, 21 nt, synthetic construct
  source 1..21: mol_type = other RNA
cctggtctgcaggaaccgtga

SEQ ID NO: 79875 - RNA, 21 nt, synthetic construct
  source 1..21: mol_type = other RNA
actccagagactgtccacaca

SEQ ID NO: 79876 - RNA, 21 nt, synthetic construct
  source 1..21: mol_type = other RNA
cagtggtactcccccatcaca

SEQ ID NO: 79877 - RNA, 21 nt, synthetic construct
  source 1..21: mol_type = other RNA
cctggtctgcaggaaccgtga

SEQ ID NO: 79878 - RNA, 21 nt, synthetic construct
  source 1..21: mol_type = other RNA
cagtggtactcccccatcaca

SEQ ID NO: 79879 - RNA, 21 nt, synthetic construct
  source 1..21: mol_type = other RNA
cctggtctgcaggaaccgtga

SEQ ID NO: 79880 - RNA, 21 nt, synthetic construct
  source 1..21: mol_type = other RNA
actccagagactgtccacaca

SEQ ID NO: 79881 - RNA, 21 nt, synthetic construct
  source 1..21: mol_type = other RNA
cagtggtactcccccatcaca

SEQ ID NO: 79882 - RNA, 21 nt, synthetic construct
  source 1..21: mol_type = other RNA
gaacttcgacgacaatgccaa

SEQ ID NO: 79883 - RNA, 21 nt, synthetic construct
  source 1..21: mol_type = other RNA
tctccacctatgatgagaaaa

SEQ ID NO: 79884 - RNA, 21 nt, synthetic construct
  source 1..21: mol_type = other RNA
atcctccaagaggggacctta

SEQ ID NO: 79885 - RNA, 21 nt, synthetic construct
  source 1..21: mol_type = other RNA
agagccttccacggggactta

SEQ ID NO: 79886 - RNA, 21 nt, synthetic construct
  source 1..21: mol_type = other RNA
agagccttccacggggactta

SEQ ID NO: 79887 - RNA, 21 nt, synthetic construct
  source 1..21: mol_type = other RNA
caatccacacctcctctacta

SEQ ID NO: 79888 - RNA, 21 nt, synthetic construct
  source 1..21: mol_type = other RNA
gtgcatctgcagcatgtggga

SEQ ID NO: 79889 - RNA, 21 nt, synthetic construct
  source 1..21: mol_type = other RNA
gtacaagagagtggccgggca

SEQ ID NO: 79890 - RNA, 21 nt, synthetic construct
  source 1..21: mol_type = other RNA
tgggtgccccgagcgcgtgca

SEQ ID NO: 79891 - RNA, 21 nt, synthetic construct
  source 1..21: mol_type = other RNA
ggcacctccttcaacaccaca

SEQ ID NO: 79892 - RNA, 21 nt, synthetic construct
  source 1..21: mol_type = other RNA
gcggtgacgctcagcctggaa

SEQ ID NO: 79893 - RNA, 21 nt, synthetic construct
  source 1..21: mol_type = other RNA
ccagagctgtaactgcacaca

SEQ ID NO: 79894 - RNA, 21 nt, synthetic construct
  source 1..21: mol_type = other RNA
ccggtcgacggcggccctcaa

SEQ ID NO: 79895 - RNA, 21 nt, synthetic construct
  source 1..21: mol_type = other RNA
ccaacacgctcagcccttcca

SEQ ID NO: 79896 - RNA, 21 nt, synthetic construct
  source 1..21: mol_type = other RNA
ctccaccctgagaacagctca

SEQ ID NO: 79897 - RNA, 21 nt, synthetic construct
  source 1..21: mol_type = other RNA
ctccactccagagactgtcca

SEQ ID NO: 79898 - RNA, 21 nt, synthetic construct
  source 1..21: mol_type = other RNA
aagtgctgaccagcacggcca

SEQ ID NO: 79899 - RNA, 21 nt, synthetic construct
  source 1..21: mol_type = other RNA
cacagagcccagcactacaga

SEQ ID NO: 79900 - RNA, 21 nt, synthetic construct
  source 1..21: mol_type = other RNA
aagtgctgaccagcacggcca

SEQ ID NO: 79901 - RNA, 21 nt, synthetic construct
  source 1..21: mol_type = other RNA
tactcccccatcactgatcaa

SEQ ID NO: 79902 - RNA, 21 nt, synthetic construct
  source 1..21: mol_type = other RNA
ctccactccagagactgtcca

SEQ ID NO: 79903 - RNA, 21 nt, synthetic construct
  source 1..21: mol_type = other RNA
cagtgctgaccagcacggcca

SEQ ID NO: 79904 - RNA, 21 nt, synthetic construct
  source 1..21: mol_type = other RNA
tgcctccacggttcccagcta

SEQ ID NO: 79905 - RNA, 21 nt, synthetic construct
  source 1..21: mol_type = other RNA
ttgggaatctcagcctctaca

SEQ ID NO: 79906 - RNA, 21 nt, synthetic construct
  source 1..21: mol_type = other RNA
attcctgccctgggcgtgaga

SEQ ID NO: 79907 - RNA, 21 nt, synthetic construct
  source 1..21: mol_type = other RNA
ctgcaacaatactacctgtca

SEQ ID NO: 79908 - RNA, 21 nt, synthetic construct
  source 1..21: mol_type = other RNA
gggctttgagtacaagagaga

SEQ ID NO: 79909 - RNA, 21 nt, synthetic construct
  source 1..21: mol_type = other RNA
gagggtggagtccatttgcta

SEQ ID NO: 79910 - RNA, 21 nt, synthetic construct
  source 1..21: mol_type = other RNA
ccactacgactgagtccacta

SEQ ID NO: 79911 - RNA, 21 nt, synthetic construct
  source 1..21: mol_type = other RNA
ccactacgactgagtccacta

SEQ ID NO: 79912 - RNA, 21 nt, synthetic construct
  source 1..21: mol_type = other RNA
cgggcaactgctggcacccta

SEQ ID NO: 79913 - RNA, 21 nt, synthetic construct
  source 1..21: mol_type = other RNA
cccgcagccccggtgtctaga

SEQ ID NO: 79914 - RNA, 21 nt, synthetic construct
  source 1..21: mol_type = other RNA
cctggtcatcgagacccacga

SEQ ID NO: 79915 - RNA, 21 nt, synthetic construct
  source 1..21: mol_type = other RNA
gatcctcttcaacgcacacaa

SEQ ID NO: 79916 - RNA, 21 nt, synthetic construct
  source 1..21: mol_type = other RNA
gcgcgtgccggacgctggtga

SEQ ID NO: 79917 - RNA, 21 nt, synthetic construct
  source 1..21: mol_type = other RNA
tggtgccactcatgcaggtga

SEQ ID NO: 79918 - RNA, 21 nt, synthetic construct
  source 1..21: mol_type = other RNA
cggccaccacaaccggggcca

SEQ ID NO: 79919 - RNA, 21 nt, synthetic construct
  source 1..21: mol_type = other RNA
cggccaccacaaccggggcca

SEQ ID NO: 79920 - RNA, 21 nt, synthetic construct
  source 1..21: mol_type = other RNA
agctgcgacaggcaaggcgga

SEQ ID NO: 79921 - RNA, 21 nt, synthetic construct
  source 1..21: mol_type = other RNA
accagtggtactcccccatca

SEQ ID NO: 79922 - RNA, 21 nt, synthetic construct
  source 1..21: mol_type = other RNA
accagtggtactcccccatca

SEQ ID NO: 79923 - RNA, 21 nt, synthetic construct
  source 1..21: mol_type = other RNA
accagtggtactcccccatca

SEQ ID NO: 79924 - RNA, 21 nt, synthetic construct
  source 1..21: mol_type = other RNA
accagtggtactcccccatca

SEQ ID NO: 79925 - RNA, 21 nt, synthetic construct
  source 1..21: mol_type = other RNA
accagtggtactcccccatca

SEQ ID NO: 79926 - RNA, 21 nt, synthetic construct
  source 1..21: mol_type = other RNA
ggacgacccggatcctcacta

SEQ ID NO: 79927 - RNA, 21 nt, synthetic construct
  source 1..21: mol_type = other RNA
ccaccttccgctgcagaccta

SEQ ID NO: 79928 - RNA, 21 nt, synthetic construct
  source 1..21: mol_type = other RNA
ggccttcaacgagttctatga

SEQ ID NO: 79929 - RNA, 21 nt, synthetic construct
  source 1..21: mol_type = other RNA
tatgcccacaacgccaggcta

SEQ ID NO: 79930 - RNA, 21 nt, synthetic construct
  source 1..21: mol_type = other RNA
gactgcaaccacccttccaga

SEQ ID NO: 79931 - RNA, 21 nt, synthetic construct
  source 1..21: mol_type = other RNA
aactccagggacaactcccaa

SEQ ID NO: 79932 - RNA, 21 nt, synthetic construct
  source 1..21: mol_type = other RNA
gactgcaaccacccttccaga

SEQ ID NO: 79933 - RNA, 21 nt, synthetic construct
  source 1..21: mol_type = other RNA
gactgcaaccacccttccaga

SEQ ID NO: 79934 - RNA, 21 nt, synthetic construct
  source 1..21: mol_type = other RNA
gtgactgcagctacgttctga

SEQ ID NO: 79935 - RNA, 21 nt, synthetic construct
  source 1..21: mol_type = other RNA
cactcatgcaggtgtttgtca

SEQ ID NO: 79936 - RNA, 21 nt, synthetic construct
  source 1..21: mol_type = other RNA
cagaaaagcacagggtgtgca

SEQ ID NO: 79937 - RNA, 21 nt, synthetic construct
  source 1..21: mol_type = other RNA
agaaaagcacagggtgtgcaa

SEQ ID NO: 79938 - RNA, 21 nt, synthetic construct
  source 1..21: mol_type = other RNA
gctcggcgggcacccctggga

SEQ ID NO: 79939 - RNA, 21 nt, synthetic construct
  source 1..21: mol_type = other RNA
tatgggtgaccccgagcatca

SEQ ID NO: 79940 - RNA, 21 nt, synthetic construct
  source 1..21: mol_type = other RNA
cagaccaccacacccacggca

SEQ ID NO: 79941 - RNA, 21 nt, synthetic construct
  source 1..21: mol_type = other RNA
gggcgatccctgccccccaga

SEQ ID NO: 79942 - RNA, 21 nt, synthetic construct
  source 1..21: mol_type = other RNA
cagaccaccacacccacggca

SEQ ID NO: 79943 - RNA, 21 nt, synthetic construct
  source 1..21: mol_type = other RNA
tcaactccagggacaacacca

SEQ ID NO: 79944 - RNA, 21 nt, synthetic construct
  source 1..21: mol_type = other RNA
cctcctccagtccaaggacta

SEQ ID NO: 79945 - RNA, 21 nt, synthetic construct
  source 1..21: mol_type = other RNA
cagaccaccacacccacggca

SEQ ID NO: 79946 - RNA, 21 nt, synthetic construct
  source 1..21: mol_type = other RNA
cagaccaccacacccacggca

SEQ ID NO: 79947 - RNA, 21 nt, synthetic construct
  source 1..21: mol_type = other RNA
tcaactccagggacaacacca

SEQ ID NO: 79948 - RNA, 21 nt, synthetic construct
  source 1..21: mol_type = other RNA
cctcctccagtccaaggacta

SEQ ID NO: 79949 - RNA, 21 nt, synthetic construct
  source 1..21: mol_type = other RNA
cagaccaccacacccacggca

SEQ ID NO: 79950 - RNA, 21 nt, synthetic construct
  source 1..21: mol_type = other RNA
tcaactccagggacaacacca

SEQ ID NO: 79951 - RNA, 21 nt, synthetic construct
  source 1..21: mol_type = other RNA
cctcctccagtccaaggacta

SEQ ID NO: 79952 - RNA, 21 nt, synthetic construct
  source 1..21: mol_type = other RNA
tggggaccacccgcaccccta

SEQ ID NO: 79953 - RNA, 21 nt, synthetic construct
  source 1..21: mol_type = other RNA
tttcccggggagcggtgggta

SEQ ID NO: 79954 - RNA, 21 nt, synthetic construct
  source 1..21: mol_type = other RNA
gtacaatggcaccttctacga

SEQ ID NO: 79955 - RNA, 21 nt, synthetic construct
  source 1..21: mol_type = other RNA
tacaatggcaccttctacgga

SEQ ID NO: 79956 - RNA, 21 nt, synthetic construct
  source 1..21: mol_type = other RNA
ctggccacgtccggccgctga

SEQ ID NO: 79957 - RNA, 21 nt, synthetic construct
  source 1..21: mol_type = other RNA
ggaacttcgacgacaatgcca

SEQ ID NO: 79958 - RNA, 21 nt, synthetic construct
  source 1..21: mol_type = other RNA
cacggccaccacaaccgggga

SEQ ID NO: 79959 - RNA, 21 nt, synthetic construct
  source 1..21: mol_type = other RNA
cacggccaccacaaccgggga

SEQ ID NO: 79960 - RNA, 21 nt, synthetic construct
  source 1..21: mol_type = other RNA
ctatgatgagaaactctacga

SEQ ID NO: 79961 - RNA, 21 nt, synthetic construct
  source 1..21: mol_type = other RNA
caccacggccacgacacccaa

SEQ ID NO: 79962 - RNA, 21 nt, synthetic construct
  source 1..21: mol_type = other RNA
caccacggccacgacacccaa

SEQ ID NO: 79963 - RNA, 21 nt, synthetic construct
  source 1..21: mol_type = other RNA
caccacggccacgacacccaa

SEQ ID NO: 79964 - RNA, 21 nt, synthetic construct
  source 1..21: mol_type = other RNA
tgccggccggcaactgcacga

SEQ ID NO: 79965 - RNA, 21 nt, synthetic construct
  source 1..21: mol_type = other RNA
ccaaggactgcaaccacccta

SEQ ID NO: 79966 - RNA, 21 nt, synthetic construct
  source 1..21: mol_type = other RNA
ccaaggactgcaaccacccta

SEQ ID NO: 79967 - RNA, 21 nt, synthetic construct
  source 1..21: mol_type = other RNA
ccaaggactgcaaccacccta

SEQ ID NO: 79968 - RNA, 21 nt, synthetic construct
  source 1..21: mol_type = other RNA
agccactggatccacggccaa

SEQ ID NO: 79969 - RNA, 21 nt, synthetic construct
  source 1..21: mol_type = other RNA
aggcagagagggtaccaggta

SEQ ID NO: 79970 - RNA, 21 nt, synthetic construct
  source 1..21: mol_type = other RNA
acggccatcccgtcctccaca

SEQ ID NO: 79971 - RNA, 21 nt, synthetic construct
  source 1..21: mol_type = other RNA
catggatggcggtgccccgaa

SEQ ID NO: 79972 - RNA, 21 nt, synthetic construct
  source 1..21: mol_type = other RNA
tgccacctttgtggaatacta

SEQ ID NO: 79973 - RNA, 21 nt, synthetic construct
  source 1..21: mol_type = other RNA
gagacccacgggatggccgta

SEQ ID NO: 79974 - RNA, 21 nt, synthetic construct
  source 1..21: mol_type = other RNA
atggcaacctccagagctcga

SEQ ID NO: 79975 - RNA, 21 nt, synthetic construct
  source 1..21: mol_type = other RNA
tgcttaccgccacggccacca

SEQ ID NO: 79976 - RNA, 21 nt, synthetic construct
  source 1..21: mol_type = other RNA
gttctatggcaacaccctcca

SEQ ID NO: 79977 - RNA, 21 nt, synthetic construct
  source 1..21: mol_type = other RNA
ctcaactcctgggacaactca

SEQ ID NO: 79978 - RNA, 21 nt, synthetic construct
  source 1..21: mol_type = other RNA
cctgggacaactcccatccca

SEQ ID NO: 79979 - RNA, 21 nt, synthetic construct
  source 1..21: mol_type = other RNA
gttctatggcaacaccctcca

SEQ ID NO: 79980 - RNA, 21 nt, synthetic construct
  source 1..21: mol_type = other RNA
agcactcgactccagccctga

SEQ ID NO: 79981 - RNA, 21 nt, synthetic construct
  source 1..21: mol_type = other RNA
gctctacggccacgccctcca

SEQ ID NO: 79982 - RNA, 21 nt, synthetic construct
  source 1..21: mol_type = other RNA
caactgctggcaccctcaaaa

SEQ ID NO: 79983 - RNA, 21 nt, synthetic construct
  source 1..21: mol_type = other RNA
gttctatggcaacaccctcca

SEQ ID NO: 79984 - RNA, 21 nt, synthetic construct
  source 1..21: mol_type = other RNA
agcactcgactccagccctga

SEQ ID NO: 79985 - RNA, 21 nt, synthetic construct
  source 1..21: mol_type = other RNA
gctctacggccacgccctcca

SEQ ID NO: 79986 - RNA, 21 nt, synthetic construct
  source 1..21: mol_type = other RNA
gttctatggcaacaccctcca

SEQ ID NO: 79987 - RNA, 21 nt, synthetic construct
  source 1..21: mol_type = other RNA
agcactcgactccagccctga

SEQ ID NO: 79988 - RNA, 21 nt, synthetic construct
  source 1..21: mol_type = other RNA
tgcttaccgccacggccacca

SEQ ID NO: 79989 - RNA, 21 nt, synthetic construct
  source 1..21: mol_type = other RNA
gttctatggcaacaccctcca

SEQ ID NO: 79990 - RNA, 21 nt, synthetic construct
  source 1..21: mol_type = other RNA
acccggatcctcactgagcta

SEQ ID NO: 79991 - RNA, 21 nt, synthetic construct
  source 1..21: mol_type = other RNA
tcctccactctgggaacagca

SEQ ID NO: 79992 - RNA, 21 nt, synthetic construct
  source 1..21: mol_type = other RNA
caactctaggaaccagagcca

SEQ ID NO: 79993 - RNA, 21 nt, synthetic construct
  source 1..21: mol_type = other RNA
caagagagtggccgggcagta

SEQ ID NO: 79994 - RNA, 21 nt, synthetic construct
  source 1..21: mol_type = other RNA
agagagtggccgggcagtgca

SEQ ID NO: 79995 - RNA, 21 nt, synthetic construct
  source 1..21: mol_type = other RNA
tccagctgaatgaaacctgga

SEQ ID NO: 79996 - RNA, 21 nt, synthetic construct
  source 1..21: mol_type = other RNA
gtgtacctctgtgaggctgaa

SEQ ID NO: 79997 - RNA, 21 nt, synthetic construct
  source 1..21: mol_type = other RNA
cggtgcccttgcactgtccta

SEQ ID NO: 79998 - RNA, 21 nt, synthetic construct
  source 1..21: mol_type = other RNA
cacacacccgtggcttcccga

SEQ ID NO: 79999 - RNA, 21 nt, synthetic construct
  source 1..21: mol_type = other RNA
ccctgccacggccggagcgca

SEQ ID NO: 80000 - RNA, 21 nt, synthetic construct
  source 1..21: mol_type = other RNA
ctgggagaatgcagggcacaa

SEQ ID NO: 80001 - RNA, 21 nt, synthetic construct
  source 1..21: mol_type = other RNA
tttgagacgtttgaaaaccta

SEQ ID NO: 80002 - RNA, 21 nt, synthetic construct
  source 1..21: mol_type = other RNA
aggagggcgtcttcaagatga

SEQ ID NO: 80003 - RNA, 21 nt, synthetic construct
  source 1..21: mol_type = other RNA
cgcacagcctggacttcggca

SEQ ID NO: 80004 - RNA, 21 nt, synthetic construct
  source 1..21: mol_type = other RNA
cgcacagcctggacttcggca

SEQ ID NO: 80005 - RNA, 21 nt, synthetic construct
  source 1..21: mol_type = other RNA
cgcacagcctggacttcggca

SEQ ID NO: 80006 - RNA, 21 nt, synthetic construct
  source 1..21: mol_type = other RNA
cgcacagcctggacttcggca

SEQ ID NO: 80007 - RNA, 21 nt, synthetic construct
  source 1..21: mol_type = other RNA
aagggccaccagttccacgta

SEQ ID NO: 80008 - RNA, 21 nt, synthetic construct
  source 1..21: mol_type = other RNA
agggcacaccatggatggcga

SEQ ID NO: 80009 - RNA, 21 nt, synthetic construct
  source 1..21: mol_type = other RNA
gccaccacaaccggggccaca

SEQ ID NO: 80010 - RNA, 21 nt, synthetic construct
  source 1..21: mol_type = other RNA
gccaccacaaccggggccaca

SEQ ID NO: 80011 - RNA, 21 nt, synthetic construct
  source 1..21: mol_type = other RNA
agctgaatgaaacctgggtca

SEQ ID NO: 80012 - RNA, 21 nt, synthetic construct
  source 1..21: mol_type = other RNA
ctttgagacgtttgaaaacca

SEQ ID NO: 80013 - RNA, 21 nt, synthetic construct
  source 1..21: mol_type = other RNA
cacgggcgatccctgccccca

SEQ ID NO: 80014 - RNA, 21 nt, synthetic construct
  source 1..21: mol_type = other RNA
accccgggccacaccacggca

SEQ ID NO: 80015 - RNA, 21 nt, synthetic construct
  source 1..21: mol_type = other RNA
accccgggccacaccacggca

SEQ ID NO: 80016 - RNA, 21 nt, synthetic construct
  source 1..21: mol_type = other RNA
cacctggggtgacttccacta

SEQ ID NO: 80017 - RNA, 21 nt, synthetic construct
  source 1..21: mol_type = other RNA
tatgatgagaaactctacgaa

SEQ ID NO: 80018 - RNA, 21 nt, synthetic construct
  source 1..21: mol_type = other RNA
cgcggcctgagtgaggccgaa

SEQ ID NO: 80019 - RNA, 21 nt, synthetic construct
  source 1..21: mol_type = other RNA
aggaaccggaggtgggagtga

SEQ ID NO: 80020 - RNA, 21 nt, synthetic construct
  source 1..21: mol_type = other RNA
cggactccggacacctgccca

SEQ ID NO: 80021 - RNA, 21 nt, synthetic construct
  source 1..21: mol_type = other RNA
gaggacaggacctacagctaa

SEQ ID NO: 80022 - RNA, 21 nt, synthetic construct
  source 1..21: mol_type = other RNA
cagagagggtaccaggtatga

SEQ ID NO: 80023 - RNA, 21 nt, synthetic construct
  source 1..21: mol_type = other RNA
gtgctggctgacatcgagtga

SEQ ID NO: 80024 - RNA, 21 nt, synthetic construct
  source 1..21: mol_type = other RNA
ggccctcacctcgcagactga

SEQ ID NO: 80025 - RNA, 21 nt, synthetic construct
  source 1..21: mol_type = other RNA
aagatcagggccgctggagga

SEQ ID NO: 80026 - RNA, 21 nt, synthetic construct
  source 1..21: mol_type = other RNA
ctgcagtgacgaccactgcaa

SEQ ID NO: 80027 - RNA, 21 nt, synthetic construct
  source 1..21: mol_type = other RNA
gaccactgcaggggacgtgca

SEQ ID NO: 80028 - RNA, 21 nt, synthetic construct
  source 1..21: mol_type = other RNA
gcacagccagcaccgcttcca

SEQ ID NO: 80029 - RNA, 21 nt, synthetic construct
  source 1..21: mol_type = other RNA
tgcgtccactggatccacgga

SEQ ID NO: 80030 - RNA, 21 nt, synthetic construct
  source 1..21: mol_type = other RNA
ggcactcacgcctccagtgta

SEQ ID NO: 80031 - RNA, 21 nt, synthetic construct
  source 1..21: mol_type = other RNA
gcatcttgggcaccacccaca

SEQ ID NO: 80032 - RNA, 21 nt, synthetic construct
  source 1..21: mol_type = other RNA
ctacagctaccccatgccgga

SEQ ID NO: 80033 - RNA, 21 nt, synthetic construct
  source 1..21: mol_type = other RNA
tggcaccccacatgtgagcaa

SEQ ID NO: 80034 - RNA, 21 nt, synthetic construct
  source 1..21: mol_type = other RNA
acggccaccacaaccggggca

SEQ ID NO: 80035 - RNA, 21 nt, synthetic construct
  source 1..21: mol_type = other RNA
caactccagggacaacaccta

SEQ ID NO: 80036 - RNA, 21 nt, synthetic construct
  source 1..21: mol_type = other RNA
ctacagctaccccatgccgga

SEQ ID NO: 80037 - RNA, 21 nt, synthetic construct
  source 1..21: mol_type = other RNA
aaggactgcaaccacccttca

SEQ ID NO: 80038 - RNA, 21 nt, synthetic construct
  source 1..21: mol_type = other RNA
gcacagccaccaaatccacaa

SEQ ID NO: 80039 - RNA, 21 nt, synthetic construct
  source 1..21: mol_type = other RNA
cgaaggccaccacgacaagga

SEQ ID NO: 80040 - RNA, 21 nt, synthetic construct
  source 1..21: mol_type = other RNA
ggcactcacgcctccagtgta

SEQ ID NO: 80041 - RNA, 21 nt, synthetic construct
  source 1..21: mol_type = other RNA
gcatcttgggcaccacccaca

SEQ ID NO: 80042 - RNA, 21 nt, synthetic construct
  source 1..21: mol_type = other RNA
ctacagctaccccatgccgga

SEQ ID NO: 80043 - RNA, 21 nt, synthetic construct
  source 1..21: mol_type = other RNA
tggcaccccacatgtgagcaa

SEQ ID NO: 80044 - RNA, 21 nt, synthetic construct
  source 1..21: mol_type = other RNA
caactccagggacaacaccta

SEQ ID NO: 80045 - RNA, 21 nt, synthetic construct
  source 1..21: mol_type = other RNA
ctacagctaccccatgccgga

SEQ ID NO: 80046 - RNA, 21 nt, synthetic construct
  source 1..21: mol_type = other RNA
aaggactgcaaccacccttca

SEQ ID NO: 80047 - RNA, 21 nt, synthetic construct
  source 1..21: mol_type = other RNA
gcacagccaccaaatccacaa

SEQ ID NO: 80048 - RNA, 21 nt, synthetic construct
  source 1..21: mol_type = other RNA
cgaaggccaccacgacaagga

SEQ ID NO: 80049 - RNA, 21 nt, synthetic construct
  source 1..21: mol_type = other RNA
tgcgtccactggatccacgga

SEQ ID NO: 80050 - RNA, 21 nt, synthetic construct
  source 1..21: mol_type = other RNA
tggcaccccacatgtgagcaa

SEQ ID NO: 80051 - RNA, 21 nt, synthetic construct
  source 1..21: mol_type = other RNA
acggccaccacaaccggggca

SEQ ID NO: 80052 - RNA, 21 nt, synthetic construct
  source 1..21: mol_type = other RNA
ggcactcacgcctccagtgta

SEQ ID NO: 80053 - RNA, 21 nt, synthetic construct
  source 1..21: mol_type = other RNA
aaggactgcaaccacccttca

SEQ ID NO: 80054 - RNA, 21 nt, synthetic construct
  source 1..21: mol_type = other RNA
acggcacctcttacaccttca

SEQ ID NO: 80055 - RNA, 21 nt, synthetic construct
  source 1..21: mol_type = other RNA
cagcatccactacaagtccaa

SEQ ID NO: 80056 - RNA, 21 nt, synthetic construct
  source 1..21: mol_type = other RNA
gtcagcccccgccgtgcaaca

SEQ ID NO: 80057 - RNA, 21 nt, synthetic construct
  source 1..21: mol_type = other RNA
tgcgtccagaccgcctgccta

SEQ ID NO: 80058 - RNA, 21 nt, synthetic construct
  source 1..21: mol_type = other RNA
tcagccatcctgcacacctaa

SEQ ID NO: 80059 - RNA, 21 nt, synthetic construct
  source 1..21: mol_type = other RNA
gaaaccggccccagaagggta

SEQ ID NO: 80060 - RNA, 21 nt, synthetic construct
  source 1..21: mol_type = other RNA
ctgccaggaagctgcgacaga

SEQ ID NO: 80061 - RNA, 21 nt, synthetic construct
  source 1..21: mol_type = other RNA
ctcctccactctgggaacaga

SEQ ID NO: 80062 - RNA, 21 nt, synthetic construct
  source 1..21: mol_type = other RNA
ttctacggggttggtgcaaca

SEQ ID NO: 80063 - RNA, 21 nt, synthetic construct
  source 1..21: mol_type = other RNA
aagaggggacctttaaggcga

SEQ ID NO: 80064 - RNA, 21 nt, synthetic construct
  source 1..21: mol_type = other RNA
gcggcgcagcttcccgacata

SEQ ID NO: 80065 - RNA, 21 nt, synthetic construct
  source 1..21: mol_type = other RNA
cacagtgcttaccaccacgaa

SEQ ID NO: 80066 - RNA, 21 nt, synthetic construct
  source 1..21: mol_type = other RNA
gccaccagctctacggccata

SEQ ID NO: 80067 - RNA, 21 nt, synthetic construct
  source 1..21: mol_type = other RNA
gccaccagctctacggccata

SEQ ID NO: 80068 - RNA, 21 nt, synthetic construct
  source 1..21: mol_type = other RNA
tggcaccttctacggggttga

SEQ ID NO: 80069 - RNA, 21 nt, synthetic construct
  source 1..21: mol_type = other RNA
gtcctctgctgcagtgacgaa

SEQ ID NO: 80070 - RNA, 21 nt, synthetic construct
  source 1..21: mol_type = other RNA
cacgaaggccaccacgacaaa

SEQ ID NO: 80071 - RNA, 21 nt, synthetic construct
  source 1..21: mol_type = other RNA
cacgaaggccaccacgacaaa

SEQ ID NO: 80072 - RNA, 21 nt, synthetic construct
  source 1..21: mol_type = other RNA
ggcacgacccgctgtcaacca

SEQ ID NO: 80073 - RNA, 21 nt, synthetic construct
  source 1..21: mol_type = other RNA
ctggatgacatcacgcactca

SEQ ID NO: 80074 - RNA, 21 nt, synthetic construct
  source 1..21: mol_type = other RNA
tgagcaccacggccacgacaa

SEQ ID NO: 80075 - RNA, 21 nt, synthetic construct
  source 1..21: mol_type = other RNA
tgagcaccacggccacgacaa

SEQ ID NO: 80076 - RNA, 21 nt, synthetic construct
  source 1..21: mol_type = other RNA
tgagcaccacggccacgacaa

SEQ ID NO: 80077 - RNA, 21 nt, synthetic construct
  source 1..21: mol_type = other RNA
gaccacgaaggccaccacgaa

SEQ ID NO: 80078 - RNA, 21 nt, synthetic construct
  source 1..21: mol_type = other RNA
gaccacgaaggccaccacgaa

SEQ ID NO: 80079 - RNA, 21 nt, synthetic construct
  source 1..21: mol_type = other RNA
cctccacggttcccagctcga

SEQ ID NO: 80080 - RNA, 21 nt, synthetic construct
  source 1..21: mol_type = other RNA
tggggaccaccaccatgcgta

SEQ ID NO: 80081 - RNA, 21 nt, synthetic construct
  source 1..21: mol_type = other RNA
ggatgcctgcaacaatactaa

SEQ ID NO: 80082 - RNA, 21 nt, synthetic construct
  source 1..21: mol_type = other RNA
gtgcgtgtgcaacacaaccaa

SEQ ID NO: 80083 - RNA, 21 nt, synthetic construct
  source 1..21: mol_type = other RNA
cggggaccacccacaccgcca

SEQ ID NO: 80084 - RNA, 21 nt, synthetic construct
  source 1..21: mol_type = other RNA
cggggaccacccacaccgcca

SEQ ID NO: 80085 - RNA, 21 nt, synthetic construct
  source 1..21: mol_type = other RNA
cggggaccacccacaccgcca

SEQ ID NO: 80086 - RNA, 21 nt, synthetic construct
  source 1..21: mol_type = other RNA
cagagcctggaggcttacgca

SEQ ID NO: 80087 - RNA, 21 nt, synthetic construct
  source 1..21: mol_type = other RNA
caggatgggtgccccgagcga

SEQ ID NO: 80088 - RNA, 21 nt, synthetic construct
  source 1..21: mol_type = other RNA
caaggactgcaaccaccctta

SEQ ID NO: 80089 - RNA, 21 nt, synthetic construct
  source 1..21: mol_type = other RNA
caaggactgcaaccaccctta

SEQ ID NO: 80090 - RNA, 21 nt, synthetic construct
  source 1..21: mol_type = other RNA
caaggactgcaaccaccctta

SEQ ID NO: 80091 - RNA, 21 nt, synthetic construct
  source 1..21: mol_type = other RNA
cagaaccaccgagtcacccca

SEQ ID NO: 80092 - RNA, 21 nt, synthetic construct
  source 1..21: mol_type = other RNA
tccgtggtgggggacgcacta

SEQ ID NO: 80093 - RNA, 21 nt, synthetic construct
  source 1..21: mol_type = other RNA
ggggagcttgggcacatggca

SEQ ID NO: 80094 - RNA, 21 nt, synthetic construct
  source 1..21: mol_type = other RNA
ttcccacaccctagcagcaaa

SEQ ID NO: 80095 - RNA, 21 nt, synthetic construct
  source 1..21: mol_type = other RNA
ccccttccccagggacgacca

SEQ ID NO: 80096 - RNA, 21 nt, synthetic construct
  source 1..21: mol_type = other RNA
ctgcatggtgactgcagctaa

SEQ ID NO: 80097 - RNA, 21 nt, synthetic construct
  source 1..21: mol_type = other RNA
gacttctacaacccacatgga

SEQ ID NO: 80098 - RNA, 21 nt, synthetic construct
  source 1..21: mol_type = other RNA
ctggttctatggcaacaccca

SEQ ID NO: 80099 - RNA, 21 nt, synthetic construct
  source 1..21: mol_type = other RNA
ttctatggcaacaccctccta

SEQ ID NO: 80100 - RNA, 21 nt, synthetic construct
  source 1..21: mol_type = other RNA
agcaccacggccacgacacca

SEQ ID NO: 80101 - RNA, 21 nt, synthetic construct
  source 1..21: mol_type = other RNA
ctggttctatggcaacaccca

SEQ ID NO: 80102 - RNA, 21 nt, synthetic construct
  source 1..21: mol_type = other RNA
ttctatggcaacaccctccta

SEQ ID NO: 80103 - RNA, 21 nt, synthetic construct
  source 1..21: mol_type = other RNA
ctggttctatggcaacaccca

SEQ ID NO: 80104 - RNA, 21 nt, synthetic construct
  source 1..21: mol_type = other RNA
ttctatggcaacaccctccta

SEQ ID NO: 80105 - RNA, 21 nt, synthetic construct
  source 1..21: mol_type = other RNA
agcaccacggccacgacacca

SEQ ID NO: 80106 - RNA, 21 nt, synthetic construct
  source 1..21: mol_type = other RNA
ctggttctatggcaacaccca

SEQ ID NO: 80107 - RNA, 21 nt, synthetic construct
  source 1..21: mol_type = other RNA
ttctatggcaacaccctccta

SEQ ID NO: 80108 - RNA, 21 nt, synthetic construct
  source 1..21: mol_type = other RNA
agcaccacggccacgacacca

SEQ ID NO: 80109 - RNA, 21 nt, synthetic construct
  source 1..21: mol_type = other RNA
ctggttctatggcaacaccca

SEQ ID NO: 80110 - RNA, 21 nt, synthetic construct
  source 1..21: mol_type = other RNA
ttctatggcaacaccctccta

SEQ ID NO: 80111 - RNA, 21 nt, synthetic construct
  source 1..21: mol_type = other RNA
gtccgtggtgggggacgcaca

SEQ ID NO: 80112 - RNA, 21 nt, synthetic construct
  source 1..21: mol_type = other RNA
atacacaagcacccttggtaa

SEQ ID NO: 80113 - RNA, 21 nt, synthetic construct
  source 1..21: mol_type = other RNA
acactaccaaagtgccaacta

SEQ ID NO: 80114 - RNA, 21 nt, synthetic construct
  source 1..21: mol_type = other RNA
tgggcaccgcctggacccgca

SEQ ID NO: 80115 - RNA, 21 nt, synthetic construct
  source 1..21: mol_type = other RNA
ccggacgccctggcacccaaa

SEQ ID NO: 80116 - RNA, 21 nt, synthetic construct
  source 1..21: mol_type = other RNA
agggacaacacccatcaccca

SEQ ID NO: 80117 - RNA, 21 nt, synthetic construct
  source 1..21: mol_type = other RNA
aagtcatctacaataagacca

SEQ ID NO: 80118 - RNA, 21 nt, synthetic construct
  source 1..21: mol_type = other RNA
ccttggtacagccaccacgga

SEQ ID NO: 80119 - RNA, 21 nt, synthetic construct
  source 1..21: mol_type = other RNA
tcagcccccgccgtgcaacca

SEQ ID NO: 80120 - RNA, 21 nt, synthetic construct
  source 1..21: mol_type = other RNA
ccggcaactgcacggacgaga

SEQ ID NO: 80121 - RNA, 21 nt, synthetic construct
  source 1..21: mol_type = other RNA
cacctgctccggggggctata

SEQ ID NO: 80122 - RNA, 21 nt, synthetic construct
  source 1..21: mol_type = other RNA
tgcatggtgactgcagctaca

SEQ ID NO: 80123 - RNA, 21 nt, synthetic construct
  source 1..21: mol_type = other RNA
tgcagctggtgccactcatga

SEQ ID NO: 80124 - RNA, 21 nt, synthetic construct
  source 1..21: mol_type = other RNA
cgatcccaacagtgccttcta

SEQ ID NO: 80125 - RNA, 21 nt, synthetic construct
  source 1..21: mol_type = other RNA
gccttctcgcgctgccactca

SEQ ID NO: 80126 - RNA, 21 nt, synthetic construct
  source 1..21: mol_type = other RNA
cagctcggcgggcacccctga

SEQ ID NO: 80127 - RNA, 21 nt, synthetic construct
  source 1..21: mol_type = other RNA
ggggctgcattgccgaggaga

SEQ ID NO: 80128 - RNA, 21 nt, synthetic construct
  source 1..21: mol_type = other RNA
aggacctacagctaccaggaa

SEQ ID NO: 80129 - RNA, 21 nt, synthetic construct
  source 1..21: mol_type = other RNA
cctgggaggcggagactttga

SEQ ID NO: 80130 - RNA, 21 nt, synthetic construct
  source 1..21: mol_type = other RNA
gcacacagaccagtggtacta

SEQ ID NO: 80131 - RNA, 21 nt, synthetic construct
  source 1..21: mol_type = other RNA
tcctgggacaactcccatcca

SEQ ID NO: 80132 - RNA, 21 nt, synthetic construct
  source 1..21: mol_type = other RNA
agacccgcacctcgaccctga

SEQ ID NO: 80133 - RNA, 21 nt, synthetic construct
  source 1..21: mol_type = other RNA
gcaactgctggcaccccacaa

SEQ ID NO: 80134 - RNA, 21 nt, synthetic construct
  source 1..21: mol_type = other RNA
ccacgacacccacagtcacca

SEQ ID NO: 80135 - RNA, 21 nt, synthetic construct
  source 1..21: mol_type = other RNA
ctccacagtgcttaccaccaa

SEQ ID NO: 80136 - RNA, 21 nt, synthetic construct
  source 1..21: mol_type = other RNA
cggcacgcacgcttccagtga

SEQ ID NO: 80137 - RNA, 21 nt, synthetic construct
  source 1..21: mol_type = other RNA
gcacacagaccagtggtacta

SEQ ID NO: 80138 - RNA, 21 nt, synthetic construct
  source 1..21: mol_type = other RNA
agacccgcacctcgaccctga

SEQ ID NO: 80139 - RNA, 21 nt, synthetic construct
  source 1..21: mol_type = other RNA
ggatcctcacagagcagacca

SEQ ID NO: 80140 - RNA, 21 nt, synthetic construct
  source 1..21: mol_type = other RNA
ctccaccccgggaacagctca

SEQ ID NO: 80141 - RNA, 21 nt, synthetic construct
  source 1..21: mol_type = other RNA
ctccacagtgcttaccaccaa

SEQ ID NO: 80142 - RNA, 21 nt, synthetic construct
  source 1..21: mol_type = other RNA
gcacacagaccagtggtacta

SEQ ID NO: 80143 - RNA, 21 nt, synthetic construct
  source 1..21: mol_type = other RNA
actacgatcacagccaccgga

SEQ ID NO: 80144 - RNA, 21 nt, synthetic construct
  source 1..21: mol_type = other RNA
agacccgcacctcgaccctga

SEQ ID NO: 80145 - RNA, 21 nt, synthetic construct
  source 1..21: mol_type = other RNA
gcaactgctggcaccccacaa

SEQ ID NO: 80146 - RNA, 21 nt, synthetic construct
  source 1..21: mol_type = other RNA
ccacgacacccacagtcacca

SEQ ID NO: 80147 - RNA, 21 nt, synthetic construct
  source 1..21: mol_type = other RNA
ctccacagtgcttaccaccaa

SEQ ID NO: 80148 - RNA, 21 nt, synthetic construct
  source 1..21: mol_type = other RNA
gcacacagaccagtggtacta

SEQ ID NO: 80149 - RNA, 21 nt, synthetic construct
  source 1..21: mol_type = other RNA
agacccgcacctcgaccctga

SEQ ID NO: 80150 - RNA, 21 nt, synthetic construct
  source 1..21: mol_type = other RNA
ctccaccccgggaacagctca

SEQ ID NO: 80151 - RNA, 21 nt, synthetic construct
  source 1..21: mol_type = other RNA
tccacccttgggaccaccgga

SEQ ID NO: 80152 - RNA, 21 nt, synthetic construct
  source 1..21: mol_type = other RNA
gcaactgctggcaccccacaa

SEQ ID NO: 80153 - RNA, 21 nt, synthetic construct
  source 1..21: mol_type = other RNA
ccacgacacccacagtcacca

SEQ ID NO: 80154 - RNA, 21 nt, synthetic construct
  source 1..21: mol_type = other RNA
gcacacagaccagtggtacta

SEQ ID NO: 80155 - RNA, 21 nt, synthetic construct
  source 1..21: mol_type = other RNA
gccaccatgacaagggccaca

SEQ ID NO: 80156 - RNA, 21 nt, synthetic construct
  source 1..21: mol_type = other RNA
ctccccaccgccagtgtccta

SEQ ID NO: 80157 - RNA, 21 nt, synthetic construct
  source 1..21: mol_type = other RNA
ggcgggtccacgaggagacga

SEQ ID NO: 80158 - RNA, 21 nt, synthetic construct
  source 1..21: mol_type = other RNA
ggcctatgtgtccctgccaca

SEQ ID NO: 80159 - RNA, 21 nt, synthetic construct
  source 1..21: mol_type = other RNA
acagccactacgactgagtca

SEQ ID NO: 80160 - RNA, 21 nt, synthetic construct
  source 1..21: mol_type = other RNA
acagccactacgactgagtca

SEQ ID NO: 80161 - RNA, 21 nt, synthetic construct
  source 1..21: mol_type = other RNA
cctgccacctgcaactctaga

SEQ ID NO: 80162 - RNA, 21 nt, synthetic construct
  source 1..21: mol_type = other RNA
cagcgtttccttcgtgcctga

SEQ ID NO: 80163 - RNA, 21 nt, synthetic construct
  source 1..21: mol_type = other RNA
cagaccagtggtactccccca

SEQ ID NO: 80164 - RNA, 21 nt, synthetic construct
  source 1..21: mol_type = other RNA
cagaccagtggtactccccca

SEQ ID NO: 80165 - RNA, 21 nt, synthetic construct
  source 1..21: mol_type = other RNA
cagaccagtggtactccccca

SEQ ID NO: 80166 - RNA, 21 nt, synthetic construct
  source 1..21: mol_type = other RNA
cagaccagtggtactccccca

SEQ ID NO: 80167 - RNA, 21 nt, synthetic construct
  source 1..21: mol_type = other RNA
cagaccagtggtactccccca

SEQ ID NO: 80168 - RNA, 21 nt, synthetic construct
  source 1..21: mol_type = other RNA
agccccctgaacccggcgcaa

SEQ ID NO: 80169 - RNA, 21 nt, synthetic construct
  source 1..21: mol_type = other RNA
gggtaccaggtatgccctgta

SEQ ID NO: 80170 - RNA, 21 nt, synthetic construct
  source 1..21: mol_type = other RNA
ggatggcggtgccccgacgta

SEQ ID NO: 80171 - RNA, 21 nt, synthetic construct
  source 1..21: mol_type = other RNA
gaaggccaccacgacaaggga

SEQ ID NO: 80172 - RNA, 21 nt, synthetic construct
  source 1..21: mol_type = other RNA
gaaggccaccacgacaaggga

SEQ ID NO: 80173 - RNA, 21 nt, synthetic construct
  source 1..21: mol_type = other RNA
ggaaccactgccgccagttga

SEQ ID NO: 80174 - RNA, 21 nt, synthetic construct
  source 1..21: mol_type = other RNA
cgcacacatgggcatctgcga

SEQ ID NO: 80175 - RNA, 21 nt, synthetic construct
  source 1..21: mol_type = other RNA
gccagcaggacccctttcgga

SEQ ID NO: 80176 - RNA, 21 nt, synthetic construct
  source 1..21: mol_type = other RNA
atcgagtgccgggcggcgcaa

SEQ ID NO: 80177 - RNA, 21 nt, synthetic construct
  source 1..21: mol_type = other RNA
gctgtccacctctcaggccga

SEQ ID NO: 80178 - RNA, 21 nt, synthetic construct
  source 1..21: mol_type = other RNA
ttctcaacgccgcagcctaca

SEQ ID NO: 80179 - RNA, 21 nt, synthetic construct
  source 1..21: mol_type = other RNA
agggacggcacgcacgcctca

SEQ ID NO: 80180 - RNA, 21 nt, synthetic construct
  source 1..21: mol_type = other RNA
tcccaccttccgctgcagaca

SEQ ID NO: 80181 - RNA, 21 nt, synthetic construct
  source 1..21: mol_type = other RNA
cactccatcatcaaccccaaa

SEQ ID NO: 80182 - RNA, 21 nt, synthetic construct
  source 1..21: mol_type = other RNA
gtgacgaccactgcaggggaa

SEQ ID NO: 80183 - RNA, 21 nt, synthetic construct
  source 1..21: mol_type = other RNA
ccagcacgcccaggacagaga

SEQ ID NO: 80184 - RNA, 21 nt, synthetic construct
  source 1..21: mol_type = other RNA
cccacacctccacagtgctta

SEQ ID NO: 80185 - RNA, 21 nt, synthetic construct
  source 1..21: mol_type = other RNA
gccacggccaccacaactgga

SEQ ID NO: 80186 - RNA, 21 nt, synthetic construct
  source 1..21: mol_type = other RNA
tccacacctccacagtgctta

SEQ ID NO: 80187 - RNA, 21 nt, synthetic construct
  source 1..21: mol_type = other RNA
tccacacctccacagtgctta

SEQ ID NO: 80188 - RNA, 21 nt, synthetic construct
  source 1..21: mol_type = other RNA
cccacacctccacagtgctta

SEQ ID NO: 80189 - RNA, 21 nt, synthetic construct
  source 1..21: mol_type = other RNA
tccacacctccacagtgctta

SEQ ID NO: 80190 - RNA, 21 nt, synthetic construct
  source 1..21: mol_type = other RNA
agtgcgagtgcatctgcagca

SEQ ID NO: 80191 - RNA, 21 nt, synthetic construct
  source 1..21: mol_type = other RNA
cgctctgtgatctgatgctga

SEQ ID NO: 80192 - RNA, 21 nt, synthetic construct
  source 1..21: mol_type = other RNA
acacacccgtggcttcccgga

SEQ ID NO: 80193 - RNA, 21 nt, synthetic construct
  source 1..21: mol_type = other RNA
cctcccggtctccaccgtgta

SEQ ID NO: 80194 - RNA, 21 nt, synthetic construct
  source 1..21: mol_type = other RNA
tgcctaccccaacccagacca

SEQ ID NO: 80195 - RNA, 21 nt, synthetic construct
  source 1..21: mol_type = other RNA
cggccaggtcagagaggggta

SEQ ID NO: 80196 - RNA, 21 nt, synthetic construct
  source 1..21: mol_type = other RNA
cggaagtgcggcctgacggaa

SEQ ID NO: 80197 - RNA, 21 nt, synthetic construct
  source 1..21: mol_type = other RNA
acacccacaaccagaggctca

SEQ ID NO: 80198 - RNA, 21 nt, synthetic construct
  source 1..21: mol_type = other RNA
ctgagtccactggatccacga

SEQ ID NO: 80199 - RNA, 21 nt, synthetic construct
  source 1..21: mol_type = other RNA
accaccgggaccctcccagaa

SEQ ID NO: 80200 - RNA, 21 nt, synthetic construct
  source 1..21: mol_type = other RNA
acacccacaaccagaggctca

SEQ ID NO: 80201 - RNA, 21 nt, synthetic construct
  source 1..21: mol_type = other RNA
ctcacaaagctgaccacaaca

SEQ ID NO: 80202 - RNA, 21 nt, synthetic construct
  source 1..21: mol_type = other RNA
ctgagtccactggatccacga

SEQ ID NO: 80203 - RNA, 21 nt, synthetic construct
  source 1..21: mol_type = other RNA
accaccgggaccctcccagaa

SEQ ID NO: 80204 - RNA, 21 nt, synthetic construct
  source 1..21: mol_type = other RNA
ccactcaggagtcctacccta

SEQ ID NO: 80205 - RNA, 21 nt, synthetic construct
  source 1..21: mol_type = other RNA
cccacaacgccaggctgacca

SEQ ID NO: 80206 - RNA, 21 nt, synthetic construct
  source 1..21: mol_type = other RNA
tgcacctgccccgcgggcaca

SEQ ID NO: 80207 - RNA, 21 nt, synthetic construct
  source 1..21: mol_type = other RNA
gggggctgcattgccgaggaa

SEQ ID NO: 80208 - RNA, 21 nt, synthetic construct
  source 1..21: mol_type = other RNA
cccacatgggggctgtgagta

SEQ ID NO: 80209 - RNA, 21 nt, synthetic construct
  source 1..21: mol_type = other RNA
ctggtacaatgggcaccgcca

SEQ ID NO: 80210 - RNA, 21 nt, synthetic construct
  source 1..21: mol_type = other RNA
gggaggccccacgacgcctga

SEQ ID NO: 80211 - RNA, 21 nt, synthetic construct
  source 1..21: mol_type = other RNA
cacagccagcaccgcttccaa

SEQ ID NO: 80212 - RNA, 21 nt, synthetic construct
  source 1..21: mol_type = other RNA
accagctctacggccatgcca

SEQ ID NO: 80213 - RNA, 21 nt, synthetic construct
  source 1..21: mol_type = other RNA
tgggaccaccgggaccctcca

SEQ ID NO: 80214 - RNA, 21 nt, synthetic construct
  source 1..21: mol_type = other RNA
accagctctacggccatgcca

SEQ ID NO: 80215 - RNA, 21 nt, synthetic construct
  source 1..21: mol_type = other RNA
tgggaccaccgggaccctcca

SEQ ID NO: 80216 - RNA, 21 nt, synthetic construct
  source 1..21: mol_type = other RNA
gacaagggccaccaattccaa

SEQ ID NO: 80217 - RNA, 21 nt, synthetic construct
  source 1..21: mol_type = other RNA
ctcagtcctcaccaccctgaa

SEQ ID NO: 80218 - RNA, 21 nt, synthetic construct
  source 1..21: mol_type = other RNA
cagcatgtggggcggctccca

SEQ ID NO: 80219 - RNA, 21 nt, synthetic construct
  source 1..21: mol_type = other RNA
agtccatttgctgaccccaca

SEQ ID NO: 80220 - RNA, 21 nt, synthetic construct
  source 1..21: mol_type = other RNA
ccttgggcctcctctgcggaa

SEQ ID NO: 80221 - RNA, 21 nt, synthetic construct
  source 1..21: mol_type = other RNA
cgctccgtgctcctgctgcca

SEQ ID NO: 80222 - RNA, 21 nt, synthetic construct
  source 1..21: mol_type = other RNA
cagaagggtgaggggccagca

SEQ ID NO: 80223 - RNA, 21 nt, synthetic construct
  source 1..21: mol_type = other RNA
gagaggggtcagcatcccaaa

SEQ ID NO: 80224 - RNA, 21 nt, synthetic construct
  source 1..21: mol_type = other RNA
acctacagctaccaggacgta

SEQ ID NO: 80225 - RNA, 21 nt, synthetic construct
  source 1..21: mol_type = other RNA
ttggcgcctgcttgatcgcca

SEQ ID NO: 80226 - RNA, 21 nt, synthetic construct
  source 1..21: mol_type = other RNA
tggtgcaaccttcccaggcga

SEQ ID NO: 80227 - RNA, 21 nt, synthetic construct
  source 1..21: mol_type = other RNA
tccagggactgcaaccgccca

SEQ ID NO: 80228 - RNA, 21 nt, synthetic construct
  source 1..21: mol_type = other RNA
tccagggactgcaaccgccca

SEQ ID NO: 80229 - RNA, 21 nt, synthetic construct
  source 1..21: mol_type = other RNA
tccagggactgcaaccgccca

SEQ ID NO: 80230 - RNA, 21 nt, synthetic construct
  source 1..21: mol_type = other RNA
tccagggactgcaaccgccca

SEQ ID NO: 80231 - RNA, 21 nt, synthetic construct
  source 1..21: mol_type = other RNA
cgccgtgtgttcatgtacgga

SEQ ID NO: 80232 - RNA, 21 nt, synthetic construct
  source 1..21: mol_type = other RNA
tggcgccaacactcacgagca

SEQ ID NO: 80233 - RNA, 21 nt, synthetic construct
  source 1..21: mol_type = other RNA
ttccagctggccacgtccgga

SEQ ID NO: 80234 - RNA, 21 nt, synthetic construct
  source 1..21: mol_type = other RNA
tccagctggccacgtccggca

SEQ ID NO: 80235 - RNA, 21 nt, synthetic construct
  source 1..21: mol_type = other RNA
tgcctgctgcagggtaactca

SEQ ID NO: 80236 - RNA, 21 nt, synthetic construct
  source 1..21: mol_type = other RNA
ccacccttccaacacgctcaa

SEQ ID NO: 80237 - RNA, 21 nt, synthetic construct
  source 1..21: mol_type = other RNA
cctccacagtgcttaccgcca

SEQ ID NO: 80238 - RNA, 21 nt, synthetic construct
  source 1..21: mol_type = other RNA
cctccacagtgcttaccgcca

SEQ ID NO: 80239 - RNA, 21 nt, synthetic construct
  source 1..21: mol_type = other RNA
tgtggggagtgcgtccagaca

SEQ ID NO: 80240 - RNA, 21 nt, synthetic construct
  source 1..21: mol_type = other RNA
cccttccccagggacgaccaa

SEQ ID NO: 80241 - RNA, 21 nt, synthetic construct
  source 1..21: mol_type = other RNA
agccaacagagtcccccgcta

SEQ ID NO: 80242 - RNA, 21 nt, synthetic construct
  source 1..21: mol_type = other RNA
ggttcccagctcgtccaccga

SEQ ID NO: 80243 - RNA, 21 nt, synthetic construct
  source 1..21: mol_type = other RNA
gctttgaaggcagctgcgaga

SEQ ID NO: 80244 - RNA, 21 nt, synthetic construct
  source 1..21: mol_type = other RNA
accacctggacccgcctatca

SEQ ID NO: 80245 - RNA, 21 nt, synthetic construct
  source 1..21: mol_type = other RNA
accacctggacccgcctatca

SEQ ID NO: 80246 - RNA, 21 nt, synthetic construct
  source 1..21: mol_type = other RNA
accacctggacccgcctatca

SEQ ID NO: 80247 - RNA, 21 nt, synthetic construct
  source 1..21: mol_type = other RNA
accacctggacccgcctatca

SEQ ID NO: 80248 - RNA, 21 nt, synthetic construct
  source 1..21: mol_type = other RNA
cgccagtgtcctccgccccga

SEQ ID NO: 80249 - RNA, 21 nt, synthetic construct
  source 1..21: mol_type = other RNA
cggggctggtgtcggatggga

SEQ ID NO: 80250 - RNA, 21 nt, synthetic construct
  source 1..21: mol_type = other RNA
cagagctgtaactgcacacca

SEQ ID NO: 80251 - RNA, 21 nt, synthetic construct
  source 1..21: mol_type = other RNA
gagggtaccaggtatgcccta

SEQ ID NO: 80252 - RNA, 21 nt, synthetic construct
  source 1..21: mol_type = other RNA
gggccgctggagggcacttaa

SEQ ID NO: 80253 - RNA, 21 nt, synthetic construct
  source 1..21: mol_type = other RNA
actggatccacggccatccca

SEQ ID NO: 80254 - RNA, 21 nt, synthetic construct
  source 1..21: mol_type = other RNA
gttcccagctcgtccaccgta

SEQ ID NO: 80255 - RNA, 21 nt, synthetic construct
  source 1..21: mol_type = other RNA
accactgcaggggccgcctta

SEQ ID NO: 80256 - RNA, 21 nt, synthetic construct
  source 1..21: mol_type = other RNA
ggtcaacatcaccttctgcga

SEQ ID NO: 80257 - RNA, 21 nt, synthetic construct
  source 1..21: mol_type = other RNA
tgccacaaccccgccaccgaa

SEQ ID NO: 80258 - RNA, 21 nt, synthetic construct
  source 1..21: mol_type = other RNA
gcctggcgccaacactcacga

SEQ ID NO: 80259 - RNA, 21 nt, synthetic construct
  source 1..21: mol_type = other RNA
aaccaccgagtcaccccctta

SEQ ID NO: 80260 - RNA, 21 nt, synthetic construct
  source 1..21: mol_type = other RNA
gaccaccgagtcaccccctta

SEQ ID NO: 80261 - RNA, 21 nt, synthetic construct
  source 1..21: mol_type = other RNA
gaccaccgagtcaccccctta

SEQ ID NO: 80262 - RNA, 21 nt, synthetic construct
  source 1..21: mol_type = other RNA
gaccaccgagtcaccccctta

SEQ ID NO: 80263 - RNA, 21 nt, synthetic construct
  source 1..21: mol_type = other RNA
agcccagggacggcactcaca

SEQ ID NO: 80264 - RNA, 21 nt, synthetic construct
  source 1..21: mol_type = other RNA
agcccagggacggcactcaca

SEQ ID NO: 80265 - RNA, 21 nt, synthetic construct
  source 1..21: mol_type = other RNA
agcccagggacggcactcaca

SEQ ID NO: 80266 - RNA, 21 nt, synthetic construct
  source 1..21: mol_type = other RNA
gcggacggcggcgtgttccta

SEQ ID NO: 80267 - RNA, 21 nt, synthetic construct
  source 1..21: mol_type = other RNA
cgtcggtgcaagggtccccaa

SEQ ID NO: 80268 - RNA, 21 nt, synthetic construct
  source 1..21: mol_type = other RNA
tgggtgaccccgagcatccga

SEQ ID NO: 80269 - RNA, 21 nt, synthetic construct
  source 1..21: mol_type = other RNA
ctggcgccaacactcacgaga

SEQ ID NO: 80270 - RNA, 21 nt, synthetic construct
  source 1..21: mol_type = other RNA
ccataaccacggtggtgacca

SEQ ID NO: 80271 - RNA, 21 nt, synthetic construct
  source 1..21: mol_type = other RNA
ccataaccacggtggtgacca

SEQ ID NO: 80272 - RNA, 21 nt, synthetic construct
  source 1..21: mol_type = other RNA
ccataaccacggtggtgacca

SEQ ID NO: 80273 - RNA, 21 nt, synthetic construct
  source 1..21: mol_type = other RNA
gtggggagtgcgtccagacca

SEQ ID NO: 80274 - RNA, 21 nt, synthetic construct
  source 1..21: mol_type = other RNA
tgctcgtggtgccgcaggcaa

SEQ ID NO: 80275 - RNA, 21 nt, synthetic construct
  source 1..21: mol_type = other RNA
gacacggccatccgggtccaa

SEQ ID NO: 80276 - RNA, 21 nt, synthetic construct
  source 1..21: mol_type = other RNA
acctgcagcgtttccttcgta

SEQ ID NO: 80277 - RNA, 21 nt, synthetic construct
  source 1..21: mol_type = other RNA
ctttgaaggcagctgcgagta

SEQ ID NO: 80278 - RNA, 21 nt, synthetic construct
  source 1..21: mol_type = other RNA
tttgaaggcagctgcgagtaa

SEQ ID NO: 80279 - RNA, 21 nt, synthetic construct
  source 1..21: mol_type = other RNA
agtgtggctgctacgacaaga

SEQ ID NO: 80280 - RNA, 21 nt, synthetic construct
  source 1..21: mol_type = other RNA
agagctcgcccgacaggcaca

SEQ ID NO: 80281 - RNA, 21 nt, synthetic construct
  source 1..21: mol_type = other RNA
gcagtccccacacggtgcgca

SEQ ID NO: 80282 - RNA, 21 nt, synthetic construct
  source 1..21: mol_type = other RNA
ccaccagctctacggccatga

SEQ ID NO: 80283 - RNA, 21 nt, synthetic construct
  source 1..21: mol_type = other RNA
caccagctctacggccatgca

SEQ ID NO: 80284 - RNA, 21 nt, synthetic construct
  source 1..21: mol_type = other RNA
gcagtccccacacggtgcgca

SEQ ID NO: 80285 - RNA, 21 nt, synthetic construct
  source 1..21: mol_type = other RNA
cttcacccttgggaccaccga

SEQ ID NO: 80286 - RNA, 21 nt, synthetic construct
  source 1..21: mol_type = other RNA
gcagtccccacacggtgcgca

SEQ ID NO: 80287 - RNA, 21 nt, synthetic construct
  source 1..21: mol_type = other RNA
gcagtccccacacggtgcgca

SEQ ID NO: 80288 - RNA, 21 nt, synthetic construct
  source 1..21: mol_type = other RNA
ccaccagctctacggccatga

SEQ ID NO: 80289 - RNA, 21 nt, synthetic construct
  source 1..21: mol_type = other RNA
caccagctctacggccatgca

SEQ ID NO: 80290 - RNA, 21 nt, synthetic construct
  source 1..21: mol_type = other RNA
gccaccagttccacgtccaca

SEQ ID NO: 80291 - RNA, 21 nt, synthetic construct
  source 1..21: mol_type = other RNA
tgccatccctctccggcagga

SEQ ID NO: 80292 - RNA, 21 nt, synthetic construct
  source 1..21: mol_type = other RNA
aaggacatggccaagacgtga

SEQ ID NO: 80293 - RNA, 21 nt, synthetic construct
  source 1..21: mol_type = other RNA
gggtttcctaaatttcccgga

SEQ ID NO: 80294 - RNA, 21 nt, synthetic construct
  source 1..21: mol_type = other RNA
cagtgctgtggggagtgcgta

SEQ ID NO: 80295 - RNA, 21 nt, synthetic construct
  source 1..21: mol_type = other RNA
ggatgtgcattgtctgatcaa

SEQ ID NO: 80296 - RNA, 21 nt, synthetic construct
  source 1..21: mol_type = other RNA
attccagctggccacgtccga

SEQ ID NO: 80297 - RNA, 21 nt, synthetic construct
  source 1..21: mol_type = other RNA
cagcgcgcgcagctctgcgaa

SEQ ID NO: 80298 - RNA, 21 nt, synthetic construct
  source 1..21: mol_type = other RNA
ctctacgacctgcatggtgaa

SEQ ID NO: 80299 - RNA, 21 nt, synthetic construct
  source 1..21: mol_type = other RNA
ggctgagctgcggaagtgcga

SEQ ID NO: 80300 - RNA, 21 nt, synthetic construct
  source 1..21: mol_type = other RNA
aggccacgggcgcagccttca

SEQ ID NO: 80301 - RNA, 21 nt, synthetic construct
  source 1..21: mol_type = other RNA
ctcgcgctgccactccatcaa

SEQ ID NO: 80302 - RNA, 21 nt, synthetic construct
  source 1..21: mol_type = other RNA
aagggcgtacagctcagcgaa

SEQ ID NO: 80303 - RNA, 21 nt, synthetic construct
  source 1..21: mol_type = other RNA
gccccgcgggcaccttcctca

SEQ ID NO: 80304 - RNA, 21 nt, synthetic construct
  source 1..21: mol_type = other RNA
gaaccggaggtgggagtgcaa

SEQ ID NO: 80305 - RNA, 21 nt, synthetic construct
  source 1..21: mol_type = other RNA
gactactgtggggacaacaca

SEQ ID NO: 80306 - RNA, 21 nt, synthetic construct
  source 1..21: mol_type = other RNA
cctgcccggacgccctggcaa

SEQ ID NO: 80307 - RNA, 21 nt, synthetic construct
  source 1..21: mol_type = other RNA
agggtaccaggtatgccctga

SEQ ID NO: 80308 - RNA, 21 nt, synthetic construct
  source 1..21: mol_type = other RNA
gccctgtgctggctgacatca

SEQ ID NO: 80309 - RNA, 21 nt, synthetic construct
  source 1..21: mol_type = other RNA
ccccctcggccccaggtacca

SEQ ID NO: 80310 - RNA, 21 nt, synthetic construct
  source 1..21: mol_type = other RNA
ccccaactggaccctggcaca

SEQ ID NO: 80311 - RNA, 21 nt, synthetic construct
  source 1..21: mol_type = other RNA
acccaggccctgttctcaaca

SEQ ID NO: 80312 - RNA, 21 nt, synthetic construct
  source 1..21: mol_type = other RNA
tggtacagccaccacgggaga

SEQ ID NO: 80313 - RNA, 21 nt, synthetic construct
  source 1..21: mol_type = other RNA
gctggccccaacaacaatgga

SEQ ID NO: 80314 - RNA, 21 nt, synthetic construct
  source 1..21: mol_type = other RNA
gcaaccgcccttccagcacta

SEQ ID NO: 80315 - RNA, 21 nt, synthetic construct
  source 1..21: mol_type = other RNA
cgttacacccatcccctctta

SEQ ID NO: 80316 - RNA, 21 nt, synthetic construct
  source 1..21: mol_type = other RNA
cgcctatcacagaccaccaca

SEQ ID NO: 80317 - RNA, 21 nt, synthetic construct
  source 1..21: mol_type = other RNA
accaccacacccacggccaca

SEQ ID NO: 80318 - RNA, 21 nt, synthetic construct
  source 1..21: mol_type = other RNA
cagagactgcccacacctcca

SEQ ID NO: 80319 - RNA, 21 nt, synthetic construct
  source 1..21: mol_type = other RNA
ccctcctctagcacacagaca

SEQ ID NO: 80320 - RNA, 21 nt, synthetic construct
  source 1..21: mol_type = other RNA
actacgatcacggccaccgga

SEQ ID NO: 80321 - RNA, 21 nt, synthetic construct
  source 1..21: mol_type = other RNA
caactcccatccccccagtga

SEQ ID NO: 80322 - RNA, 21 nt, synthetic construct
  source 1..21: mol_type = other RNA
gccacctcgggcatcttggga

SEQ ID NO: 80323 - RNA, 21 nt, synthetic construct
  source 1..21: mol_type = other RNA
ggacgaccaccccgggccaca

SEQ ID NO: 80324 - RNA, 21 nt, synthetic construct
  source 1..21: mol_type = other RNA
ggaaccgtgagcaggtgggga

SEQ ID NO: 80325 - RNA, 21 nt, synthetic construct
  source 1..21: mol_type = other RNA
cactacagccaccgtgacgga

SEQ ID NO: 80326 - RNA, 21 nt, synthetic construct
  source 1..21: mol_type = other RNA
gcaaccgcccttccagcacta

SEQ ID NO: 80327 - RNA, 21 nt, synthetic construct
  source 1..21: mol_type = other RNA
cgcctatcacagaccaccaca

SEQ ID NO: 80328 - RNA, 21 nt, synthetic construct
  source 1..21: mol_type = other RNA
accaccacacccacggccaca

SEQ ID NO: 80329 - RNA, 21 nt, synthetic construct
  source 1..21: mol_type = other RNA
cgcacgcttccagtgtggata

SEQ ID NO: 80330 - RNA, 21 nt, synthetic construct
  source 1..21: mol_type = other RNA
ccctcctctagcacacagaca

SEQ ID NO: 80331 - RNA, 21 nt, synthetic construct
  source 1..21: mol_type = other RNA
actacgatcacggccaccgga

SEQ ID NO: 80332 - RNA, 21 nt, synthetic construct
  source 1..21: mol_type = other RNA
gtgccgaacaccacggccaca

SEQ ID NO: 80333 - RNA, 21 nt, synthetic construct
  source 1..21: mol_type = other RNA
ctggacttcggccacctcaga

SEQ ID NO: 80334 - RNA, 21 nt, synthetic construct
  source 1..21: mol_type = other RNA
ggacgaccaccccgggccaca

SEQ ID NO: 80335 - RNA, 21 nt, synthetic construct
  source 1..21: mol_type = other RNA
ggaaccgtgagcaggtgggga

SEQ ID NO: 80336 - RNA, 21 nt, synthetic construct
  source 1..21: mol_type = other RNA
tcccaaagtgctgaccagcaa

SEQ ID NO: 80337 - RNA, 21 nt, synthetic construct
  source 1..21: mol_type = other RNA
cttccagtgctgacaagcaca

SEQ ID NO: 80338 - RNA, 21 nt, synthetic construct
  source 1..21: mol_type = other RNA
cccagcactacagccaccgta

SEQ ID NO: 80339 - RNA, 21 nt, synthetic construct
  source 1..21: mol_type = other RNA
cactacagccaccgtgacgga

SEQ ID NO: 80340 - RNA, 21 nt, synthetic construct
  source 1..21: mol_type = other RNA
gcaaccgcccttccagcacta

SEQ ID NO: 80341 - RNA, 21 nt, synthetic construct
  source 1..21: mol_type = other RNA
cgcctatcacagaccaccaca

SEQ ID NO: 80342 - RNA, 21 nt, synthetic construct
  source 1..21: mol_type = other RNA
accaccacacccacggccaca

SEQ ID NO: 80343 - RNA, 21 nt, synthetic construct
  source 1..21: mol_type = other RNA
ccctcctctagcacacagaca

SEQ ID NO: 80344 - RNA, 21 nt, synthetic construct
  source 1..21: mol_type = other RNA
caactcccatccccccagtga

SEQ ID NO: 80345 - RNA, 21 nt, synthetic construct
  source 1..21: mol_type = other RNA
gtgccgaacaccacggccaca

SEQ ID NO: 80346 - RNA, 21 nt, synthetic construct
  source 1..21: mol_type = other RNA
cacacgggcggtccctgccca

SEQ ID NO: 80347 - RNA, 21 nt, synthetic construct
  source 1..21: mol_type = other RNA
gccacctcgggcatcttggga

SEQ ID NO: 80348 - RNA, 21 nt, synthetic construct
  source 1..21: mol_type = other RNA
ggacgaccaccccgggccaca

SEQ ID NO: 80349 - RNA, 21 nt, synthetic construct
  source 1..21: mol_type = other RNA
ggaaccgtgagcaggtgggga

SEQ ID NO: 80350 - RNA, 21 nt, synthetic construct
  source 1..21: mol_type = other RNA
cactacagccaccgtgacgga

SEQ ID NO: 80351 - RNA, 21 nt, synthetic construct
  source 1..21: mol_type = other RNA
gcaaccgcccttccagcacta

SEQ ID NO: 80352 - RNA, 21 nt, synthetic construct
  source 1..21: mol_type = other RNA
cgcctatcacagaccaccaca

SEQ ID NO: 80353 - RNA, 21 nt, synthetic construct
  source 1..21: mol_type = other RNA
accaccacacccacggccaca

SEQ ID NO: 80354 - RNA, 21 nt, synthetic construct
  source 1..21: mol_type = other RNA
cagagactgcccacacctcca

SEQ ID NO: 80355 - RNA, 21 nt, synthetic construct
  source 1..21: mol_type = other RNA
accagtggctccacggtgaca

SEQ ID NO: 80356 - RNA, 21 nt, synthetic construct
  source 1..21: mol_type = other RNA
ccctcctctagcacacagaca

SEQ ID NO: 80357 - RNA, 21 nt, synthetic construct
  source 1..21: mol_type = other RNA
actacgatcacggccaccgga

SEQ ID NO: 80358 - RNA, 21 nt, synthetic construct
  source 1..21: mol_type = other RNA
gtgccgaacaccacggccaca

SEQ ID NO: 80359 - RNA, 21 nt, synthetic construct
  source 1..21: mol_type = other RNA
ctggacttcggccacctcaga

SEQ ID NO: 80360 - RNA, 21 nt, synthetic construct
  source 1..21: mol_type = other RNA
ggacgaccaccccgggccaca

SEQ ID NO: 80361 - RNA, 21 nt, synthetic construct
  source 1..21: mol_type = other RNA
ggaaccgtgagcaggtgggga

SEQ ID NO: 80362 - RNA, 21 nt, synthetic construct
  source 1..21: mol_type = other RNA
cttccagtgctgacaagcaca

SEQ ID NO: 80363 - RNA, 21 nt, synthetic construct
  source 1..21: mol_type = other RNA
cactacagccaccgtgacgga

SEQ ID NO: 80364 - RNA, 21 nt, synthetic construct
  source 1..21: mol_type = other RNA
cgcctatcacagaccaccaca

SEQ ID NO: 80365 - RNA, 21 nt, synthetic construct
  source 1..21: mol_type = other RNA
accaccacacccacggccaca

SEQ ID NO: 80366 - RNA, 21 nt, synthetic construct
  source 1..21: mol_type = other RNA
accagtggctccacggtgaca

SEQ ID NO: 80367 - RNA, 21 nt, synthetic construct
  source 1..21: mol_type = other RNA
ccctcctctagcacacagaca

SEQ ID NO: 80368 - RNA, 21 nt, synthetic construct
  source 1..21: mol_type = other RNA
actacgatcacggccaccgga

SEQ ID NO: 80369 - RNA, 21 nt, synthetic construct
  source 1..21: mol_type = other RNA
cttccagtgctgacaagcaca

SEQ ID NO: 80370 - RNA, 21 nt, synthetic construct
  source 1..21: mol_type = other RNA
gacaagcacagccacaaaata

SEQ ID NO: 80371 - RNA, 21 nt, synthetic construct
  source 1..21: mol_type = other RNA
tcagtcctcaccaccctgaga

SEQ ID NO: 80372 - RNA, 21 nt, synthetic construct
  source 1..21: mol_type = other RNA
gtgcaatcagcactgtgacaa

SEQ ID NO: 80373 - RNA, 21 nt, synthetic construct
  source 1..21: mol_type = other RNA
attgaccgcttccagggcgca

SEQ ID NO: 80374 - RNA, 21 nt, synthetic construct
  source 1..21: mol_type = other RNA
cgtcctcactgtcaccatgga

SEQ ID NO: 80375 - RNA, 21 nt, synthetic construct
  source 1..21: mol_type = other RNA
tcaccatggtgcatgggaaga

SEQ ID NO: 80376 - RNA, 21 nt, synthetic construct
  source 1..21: mol_type = other RNA
agggcctgatcctgtttgaca

SEQ ID NO: 80377 - RNA, 21 nt, synthetic construct
  source 1..21: mol_type = other RNA
tggacattcctgccctgggca

SEQ ID NO: 80378 - RNA, 21 nt, synthetic construct
  source 1..21: mol_type = other RNA
ccagttgcaaggacatggcca

SEQ ID NO: 80379 - RNA, 21 nt, synthetic construct
  source 1..21: mol_type = other RNA
acagccgctctgtgatctgaa

SEQ ID NO: 80380 - RNA, 21 nt, synthetic construct
  source 1..21: mol_type = other RNA
ttgaggtgccctgccagagca

SEQ ID NO: 80381 - RNA, 21 nt, synthetic construct
  source 1..21: mol_type = other RNA
gggagcggtgggtcagcaaca

SEQ ID NO: 80382 - RNA, 21 nt, synthetic construct
  source 1..21: mol_type = other RNA
ccaggcgcccttccctgccaa

SEQ ID NO: 80383 - RNA, 21 nt, synthetic construct
  source 1..21: mol_type = other RNA
gccacatgtgtacctgcctca

SEQ ID NO: 80384 - RNA, 21 nt, synthetic construct
  source 1..21: mol_type = other RNA
cacatgtgtacctgcctctca

SEQ ID NO: 80385 - RNA, 21 nt, synthetic construct
  source 1..21: mol_type = other RNA
gtccagaccgcctgcctcaca

SEQ ID NO: 80386 - RNA, 21 nt, synthetic construct
  source 1..21: mol_type = other RNA
caagtactcagcagaggccca

SEQ ID NO: 80387 - RNA, 21 nt, synthetic construct
  source 1..21: mol_type = other RNA
cacacccgtggcttcccggca

SEQ ID NO: 80388 - RNA, 21 nt, synthetic construct
  source 1..21: mol_type = other RNA
gccactgctgtctgagaacga

SEQ ID NO: 80389 - RNA, 21 nt, synthetic construct
  source 1..21: mol_type = other RNA
gagaacgttctgcctccatca

SEQ ID NO: 80390 - RNA, 21 nt, synthetic construct
  source 1..21: mol_type = other RNA
gggacgccctggaacaaacta

SEQ ID NO: 80391 - RNA, 21 nt, synthetic construct
  source 1..21: mol_type = other RNA
tccagctacgccgaggcctaa

SEQ ID NO: 80392 - RNA, 21 nt, synthetic construct
  source 1..21: mol_type = other RNA
actctacgacctgcatggtga

SEQ ID NO: 80393 - RNA, 21 nt, synthetic construct
  source 1..21: mol_type = other RNA
gcttcaccgtgctggctgaga

SEQ ID NO: 80394 - RNA, 21 nt, synthetic construct
  source 1..21: mol_type = other RNA
acgggcgcagccttcgccaaa

SEQ ID NO: 80395 - RNA, 21 nt, synthetic construct
  source 1..21: mol_type = other RNA
gcgtcttcaagatgtgctaca

SEQ ID NO: 80396 - RNA, 21 nt, synthetic construct
  source 1..21: mol_type = other RNA
cagagacgacaatgagcccca

SEQ ID NO: 80397 - RNA, 21 nt, synthetic construct
  source 1..21: mol_type = other RNA
ccggggaccacccacaccgca

SEQ ID NO: 80398 - RNA, 21 nt, synthetic construct
  source 1..21: mol_type = other RNA
ccccatcactgaccaccacga

SEQ ID NO: 80399 - RNA, 21 nt, synthetic construct
  source 1..21: mol_type = other RNA
acttcccacaccctagcagca

SEQ ID NO: 80400 - RNA, 21 nt, synthetic construct
  source 1..21: mol_type = other RNA
gcggccggaggggccgtctga

SEQ ID NO: 80401 - RNA, 21 nt, synthetic construct
  source 1..21: mol_type = other RNA
ccccatcactgaccaccacga

SEQ ID NO: 80402 - RNA, 21 nt, synthetic construct
  source 1..21: mol_type = other RNA
gcggccggaggggccgtctga

SEQ ID NO: 80403 - RNA, 21 nt, synthetic construct
  source 1..21: mol_type = other RNA
ccagctctacggccacgccca

SEQ ID NO: 80404 - RNA, 21 nt, synthetic construct
  source 1..21: mol_type = other RNA
cagccaccaaatccacagcta

SEQ ID NO: 80405 - RNA, 21 nt, synthetic construct
  source 1..21: mol_type = other RNA
ttcacccttgggaccaccgga

SEQ ID NO: 80406 - RNA, 21 nt, synthetic construct
  source 1..21: mol_type = other RNA
ccggggaccacccacaccgca

SEQ ID NO: 80407 - RNA, 21 nt, synthetic construct
  source 1..21: mol_type = other RNA
ccccatcactgaccaccacga

SEQ ID NO: 80408 - RNA, 21 nt, synthetic construct
  source 1..21: mol_type = other RNA
ccagctctacggccacgccca

SEQ ID NO: 80409 - RNA, 21 nt, synthetic construct
  source 1..21: mol_type = other RNA
ccatcactgatcaccacggca

SEQ ID NO: 80410 - RNA, 21 nt, synthetic construct
  source 1..21: mol_type = other RNA
gcggccggaggggccgtctga

SEQ ID NO: 80411 - RNA, 21 nt, synthetic construct
  source 1..21: mol_type = other RNA
ggggagttgggccaggtcgta

SEQ ID NO: 80412 - RNA, 21 nt, synthetic construct
  source 1..21: mol_type = other RNA
cagccaccaaatccacagcta

SEQ ID NO: 80413 - RNA, 21 nt, synthetic construct
  source 1..21: mol_type = other RNA
ccggggaccacccacaccgca

SEQ ID NO: 80414 - RNA, 21 nt, synthetic construct
  source 1..21: mol_type = other RNA
ccccatcactgaccaccacga

SEQ ID NO: 80415 - RNA, 21 nt, synthetic construct
  source 1..21: mol_type = other RNA
ggatatcgtcctcactgtcaa

SEQ ID NO: 80416 - RNA, 21 nt, synthetic construct
  source 1..21: mol_type = other RNA
gcaactctaggaaccagagca

SEQ ID NO: 80417 - RNA, 21 nt, synthetic construct
  source 1..21: mol_type = other RNA
ccagaccgcctgcctcacgca

SEQ ID NO: 80418 - RNA, 21 nt, synthetic construct
  source 1..21: mol_type = other RNA
gtccatttgctgaccccacaa

SEQ ID NO: 80419 - RNA, 21 nt, synthetic construct
  source 1..21: mol_type = other RNA
ctgcccaccccgtgggtgaaa

SEQ ID NO: 80420 - RNA, 21 nt, synthetic construct
  source 1..21: mol_type = other RNA
cggcctcccggccttcaacga

SEQ ID NO: 80421 - RNA, 21 nt, synthetic construct
  source 1..21: mol_type = other RNA
agcccttccactcgaactgca

SEQ ID NO: 80422 - RNA, 21 nt, synthetic construct
  source 1..21: mol_type = other RNA
acgcctacgtggtggatgcca

SEQ ID NO: 80423 - RNA, 21 nt, synthetic construct
  source 1..21: mol_type = other RNA
ccacttgccgcggcctgagta

SEQ ID NO: 80424 - RNA, 21 nt, synthetic construct
  source 1..21: mol_type = other RNA
cccaggagtgcccctgctaca

SEQ ID NO: 80425 - RNA, 21 nt, synthetic construct
  source 1..21: mol_type = other RNA
gtggtgcacgacgagggcgca

SEQ ID NO: 80426 - RNA, 21 nt, synthetic construct
  source 1..21: mol_type = other RNA
gccagcaccgcttccaaagaa

SEQ ID NO: 80427 - RNA, 21 nt, synthetic construct
  source 1..21: mol_type = other RNA
cccaggcaactgctggcacca

SEQ ID NO: 80428 - RNA, 21 nt, synthetic construct
  source 1..21: mol_type = other RNA
agtgccgaacaccacggccaa

SEQ ID NO: 80429 - RNA, 21 nt, synthetic construct
  source 1..21: mol_type = other RNA
accaccccgggccacaccaga

SEQ ID NO: 80430 - RNA, 21 nt, synthetic construct
  source 1..21: mol_type = other RNA
ctgggcaccgcctggacccga

SEQ ID NO: 80431 - RNA, 21 nt, synthetic construct
  source 1..21: mol_type = other RNA
agtgccgaacaccacggccaa

SEQ ID NO: 80432 - RNA, 21 nt, synthetic construct
  source 1..21: mol_type = other RNA
accaccccgggccacaccaga

SEQ ID NO: 80433 - RNA, 21 nt, synthetic construct
  source 1..21: mol_type = other RNA
cccaggcaactgctggcacca

SEQ ID NO: 80434 - RNA, 21 nt, synthetic construct
  source 1..21: mol_type = other RNA
ccagtggctccacggtgacca

SEQ ID NO: 80435 - RNA, 21 nt, synthetic construct
  source 1..21: mol_type = other RNA
agtgccgaacaccacggccaa

SEQ ID NO: 80436 - RNA, 21 nt, synthetic construct
  source 1..21: mol_type = other RNA
cccaggcaactgctggcacca

SEQ ID NO: 80437 - RNA, 21 nt, synthetic construct
  source 1..21: mol_type = other RNA
ccagtggctccacggtgacca

SEQ ID NO: 80438 - RNA, 21 nt, synthetic construct
  source 1..21: mol_type = other RNA
tggccactatgcccacagcca

SEQ ID NO: 80439 - RNA, 21 nt, synthetic construct
  source 1..21: mol_type = other RNA
cgccactcaggagtcctacca

SEQ ID NO: 80440 - RNA, 21 nt, synthetic construct
  source 1..21: mol_type = other RNA
gcgtgccggacgctggtgtta

SEQ ID NO: 80441 - RNA, 21 nt, synthetic construct
  source 1..21: mol_type = other RNA
cggccatgctcgtggtgccga

SEQ ID NO: 80442 - RNA, 21 nt, synthetic construct
  source 1..21: mol_type = other RNA
cgtgagctttgttccacccga

SEQ ID NO: 80443 - RNA, 21 nt, synthetic construct
  source 1..21: mol_type = other RNA
ccttcaacaccacctgcagca

SEQ ID NO: 80444 - RNA, 21 nt, synthetic construct
  source 1..21: mol_type = other RNA
tggatgcctgccagcccacta

SEQ ID NO: 80445 - RNA, 21 nt, synthetic construct
  source 1..21: mol_type = other RNA
cctgccacgacgcgggcctga

SEQ ID NO: 80446 - RNA, 21 nt, synthetic construct
  source 1..21: mol_type = other RNA
gtcggtgcaagggtccccaca

SEQ ID NO: 80447 - RNA, 21 nt, synthetic construct
  source 1..21: mol_type = other RNA
ccaccgatgggcttggcgcca

SEQ ID NO: 80448 - RNA, 21 nt, synthetic construct
  source 1..21: mol_type = other RNA
cggcgcagcttcccgacatga

SEQ ID NO: 80449 - RNA, 21 nt, synthetic construct
  source 1..21: mol_type = other RNA
aggccccgtgacggtcaccca

SEQ ID NO: 80450 - RNA, 21 nt, synthetic construct
  source 1..21: mol_type = other RNA
accccgccaccgaccacagaa

SEQ ID NO: 80451 - RNA, 21 nt, synthetic construct
  source 1..21: mol_type = other RNA
agagctggagacggccaccaa

SEQ ID NO: 80452 - RNA, 21 nt, synthetic construct
  source 1..21: mol_type = other RNA
agggcacgacccgctgtcaaa

SEQ ID NO: 80453 - RNA, 21 nt, synthetic construct
  source 1..21: mol_type = other RNA
cacacccacggccaccatgta

SEQ ID NO: 80454 - RNA, 21 nt, synthetic construct
  source 1..21: mol_type = other RNA
tagggaccacccacacaccca

SEQ ID NO: 80455 - RNA, 21 nt, synthetic construct
  source 1..21: mol_type = other RNA
tccagggacgaccaccccgga

SEQ ID NO: 80456 - RNA, 21 nt, synthetic construct
  source 1..21: mol_type = other RNA
ccagggacgaccaccccggga

SEQ ID NO: 80457 - RNA, 21 nt, synthetic construct
  source 1..21: mol_type = other RNA
cacacccacggccaccatgta

SEQ ID NO: 80458 - RNA, 21 nt, synthetic construct
  source 1..21: mol_type = other RNA
tagggaccacccacacaccca

SEQ ID NO: 80459 - RNA, 21 nt, synthetic construct
  source 1..21: mol_type = other RNA
caccacggccaccacacacga

SEQ ID NO: 80460 - RNA, 21 nt, synthetic construct
  source 1..21: mol_type = other RNA
cctcaccctagcagcaggaca

SEQ ID NO: 80461 - RNA, 21 nt, synthetic construct
  source 1..21: mol_type = other RNA
tccagggacgaccaccccgga

SEQ ID NO: 80462 - RNA, 21 nt, synthetic construct
  source 1..21: mol_type = other RNA
ccagggacgaccaccccggga

SEQ ID NO: 80463 - RNA, 21 nt, synthetic construct
  source 1..21: mol_type = other RNA
aaggccaccacgacaagggca

SEQ ID NO: 80464 - RNA, 21 nt, synthetic construct
  source 1..21: mol_type = other RNA
aggccaccacgacaagggcca

SEQ ID NO: 80465 - RNA, 21 nt, synthetic construct
  source 1..21: mol_type = other RNA
cacacccacggccaccatgta

SEQ ID NO: 80466 - RNA, 21 nt, synthetic construct
  source 1..21: mol_type = other RNA
tagggaccacccacacaccca

SEQ ID NO: 80467 - RNA, 21 nt, synthetic construct
  source 1..21: mol_type = other RNA
caccacggccaccacacacga

SEQ ID NO: 80468 - RNA, 21 nt, synthetic construct
  source 1..21: mol_type = other RNA
cctcaccctagcagcaggaca

SEQ ID NO: 80469 - RNA, 21 nt, synthetic construct
  source 1..21: mol_type = other RNA
tccagggacgaccaccccgga

SEQ ID NO: 80470 - RNA, 21 nt, synthetic construct
  source 1..21: mol_type = other RNA
ccagggacgaccaccccggga

SEQ ID NO: 80471 - RNA, 21 nt, synthetic construct
  source 1..21: mol_type = other RNA
accacggtggtgaccacggga

SEQ ID NO: 80472 - RNA, 21 nt, synthetic construct
  source 1..21: mol_type = other RNA
cacacccacggccaccatgta

SEQ ID NO: 80473 - RNA, 21 nt, synthetic construct
  source 1..21: mol_type = other RNA
tagggaccacccacacaccca

SEQ ID NO: 80474 - RNA, 21 nt, synthetic construct
  source 1..21: mol_type = other RNA
caccacggccaccacacacga

SEQ ID NO: 80475 - RNA, 21 nt, synthetic construct
  source 1..21: mol_type = other RNA
cctcaccctagcagcaggaca

SEQ ID NO: 80476 - RNA, 21 nt, synthetic construct
  source 1..21: mol_type = other RNA
cccagggacgaccaccccgga

SEQ ID NO: 80477 - RNA, 21 nt, synthetic construct
  source 1..21: mol_type = other RNA
ccagggacgaccaccccggga

SEQ ID NO: 80478 - RNA, 21 nt, synthetic construct
  source 1..21: mol_type = other RNA
accacggtggtgaccacggga

SEQ ID NO: 80479 - RNA, 21 nt, synthetic construct
  source 1..21: mol_type = other RNA
aaggccaccacgacaagggca

SEQ ID NO: 80480 - RNA, 21 nt, synthetic construct
  source 1..21: mol_type = other RNA
aggccaccacgacaagggcca

SEQ ID NO: 80481 - RNA, 21 nt, synthetic construct
  source 1..21: mol_type = other RNA
cacacccacggccaccatgta

SEQ ID NO: 80482 - RNA, 21 nt, synthetic construct
  source 1..21: mol_type = other RNA
ccagagtgctgaccaccacca

SEQ ID NO: 80483 - RNA, 21 nt, synthetic construct
  source 1..21: mol_type = other RNA
ccatgtccacaatccacacca

SEQ ID NO: 80484 - RNA, 21 nt, synthetic construct
  source 1..21: mol_type = other RNA
ccaccaattccacggccacaa

SEQ ID NO: 80485 - RNA, 21 nt, synthetic construct
  source 1..21: mol_type = other RNA
ccaattccacggccacaccca

SEQ ID NO: 80486 - RNA, 21 nt, synthetic construct
  source 1..21: mol_type = other RNA
ggggacgacccggatcctcaa

SEQ ID NO: 80487 - RNA, 21 nt, synthetic construct
  source 1..21: mol_type = other RNA
gacattgaccgcttccaggga

SEQ ID NO: 80488 - RNA, 21 nt, synthetic construct
  source 1..21: mol_type = other RNA
acaatgccatccctctccgga

SEQ ID NO: 80489 - RNA, 21 nt, synthetic construct
  source 1..21: mol_type = other RNA
ggcgtgagcgtcaccttcaaa

SEQ ID NO: 80490 - RNA, 21 nt, synthetic construct
  source 1..21: mol_type = other RNA
ttcttcaacgcctgcatcaga

SEQ ID NO: 80491 - RNA, 21 nt, synthetic construct
  source 1..21: mol_type = other RNA
gctgggagaatgcagggcaca

SEQ ID NO: 80492 - RNA, 21 nt, synthetic construct
  source 1..21: mol_type = other RNA
tcctcgcccacccggcgcgta

SEQ ID NO: 80493 - RNA, 21 nt, synthetic construct
  source 1..21: mol_type = other RNA
cctcgcccacccggcgcgtga

SEQ ID NO: 80494 - RNA, 21 nt, synthetic construct
  source 1..21: mol_type = other RNA
gccccctgaacccggcgcaca

SEQ ID NO: 80495 - RNA, 21 nt, synthetic construct
  source 1..21: mol_type = other RNA
tacatcaaggtcagcatccga

SEQ ID NO: 80496 - RNA, 21 nt, synthetic construct
  source 1..21: mol_type = other RNA
acatcaaggtcagcatccgga

SEQ ID NO: 80497 - RNA, 21 nt, synthetic construct
  source 1..21: mol_type = other RNA
aaggtcagcatccggctggta

SEQ ID NO: 80498 - RNA, 21 nt, synthetic construct
  source 1..21: mol_type = other RNA
gccaccgcaccctgctgggga

SEQ ID NO: 80499 - RNA, 21 nt, synthetic construct
  source 1..21: mol_type = other RNA
gcacctgctccggggggctaa

SEQ ID NO: 80500 - RNA, 21 nt, synthetic construct
  source 1..21: mol_type = other RNA
ctctgtgcagggcggggccca

SEQ ID NO: 80501 - RNA, 21 nt, synthetic construct
  source 1..21: mol_type = other RNA
cccacatctccacctatgata

SEQ ID NO: 80502 - RNA, 21 nt, synthetic construct
  source 1..21: mol_type = other RNA
gcagcttcaccgtgctggcta

SEQ ID NO: 80503 - RNA, 21 nt, synthetic construct
  source 1..21: mol_type = other RNA
tcttcatcgtggtgcagacaa

SEQ ID NO: 80504 - RNA, 21 nt, synthetic construct
  source 1..21: mol_type = other RNA
gcagctggtgccactcatgca

SEQ ID NO: 80505 - RNA, 21 nt, synthetic construct
  source 1..21: mol_type = other RNA
gctgacgacttcacggcccta

SEQ ID NO: 80506 - RNA, 21 nt, synthetic construct
  source 1..21: mol_type = other RNA
atcccaacagtgccttctcga

SEQ ID NO: 80507 - RNA, 21 nt, synthetic construct
  source 1..21: mol_type = other RNA
agcccacttgccgcggcctga

SEQ ID NO: 80508 - RNA, 21 nt, synthetic construct
  source 1..21: mol_type = other RNA
gcccaggagtgcccctgctaa

SEQ ID NO: 80509 - RNA, 21 nt, synthetic construct
  source 1..21: mol_type = other RNA
cccccggggctggtgtcggaa

SEQ ID NO: 80510 - RNA, 21 nt, synthetic construct
  source 1..21: mol_type = other RNA
ccccggggctggtgtcggata

SEQ ID NO: 80511 - RNA, 21 nt, synthetic construct
  source 1..21: mol_type = other RNA
agaccatcagggtcgactgca

SEQ ID NO: 80512 - RNA, 21 nt, synthetic construct
  source 1..21: mol_type = other RNA
agctttgaaggcagctgcgaa

SEQ ID NO: 80513 - RNA, 21 nt, synthetic construct
  source 1..21: mol_type = other RNA
actactgtggggacaacacca

SEQ ID NO: 80514 - RNA, 21 nt, synthetic construct
  source 1..21: mol_type = other RNA
agctgatcctccaagagggga

SEQ ID NO: 80515 - RNA, 21 nt, synthetic construct
  source 1..21: mol_type = other RNA
gacaatgccatcaatgactta

SEQ ID NO: 80516 - RNA, 21 nt, synthetic construct
  source 1..21: mol_type = other RNA
aatgccatcaatgactttgca

SEQ ID NO: 80517 - RNA, 21 nt, synthetic construct
  source 1..21: mol_type = other RNA
acgcccaggcctgccacgaca

SEQ ID NO: 80518 - RNA, 21 nt, synthetic construct
  source 1..21: mol_type = other RNA
cgcccaggcctgccacgacga

SEQ ID NO: 80519 - RNA, 21 nt, synthetic construct
  source 1..21: mol_type = other RNA
ctccggacacctgccccttga

SEQ ID NO: 80520 - RNA, 21 nt, synthetic construct
  source 1..21: mol_type = other RNA
gtgtggctgctacgacaagga

SEQ ID NO: 80521 - RNA, 21 nt, synthetic construct
  source 1..21: mol_type = other RNA
cggtgcaagggtccccacaga

SEQ ID NO: 80522 - RNA, 21 nt, synthetic construct
  source 1..21: mol_type = other RNA
gctgtaactgcacacccagta

SEQ ID NO: 80523 - RNA, 21 nt, synthetic construct
  source 1..21: mol_type = other RNA
ccagctggtacaatgggcaca

SEQ ID NO: 80524 - RNA, 21 nt, synthetic construct
  source 1..21: mol_type = other RNA
ggcggcgcagcttcccgacaa

SEQ ID NO: 80525 - RNA, 21 nt, synthetic construct
  source 1..21: mol_type = other RNA
acagccaacagagtcccccga

SEQ ID NO: 80526 - RNA, 21 nt, synthetic construct
  source 1..21: mol_type = other RNA
gctgtgcctaccccaacccaa

SEQ ID NO: 80527 - RNA, 21 nt, synthetic construct
  source 1..21: mol_type = other RNA
cacctcgcagactgggtccaa

SEQ ID NO: 80528 - RNA, 21 nt, synthetic construct
  source 1..21: mol_type = other RNA
agggcacttatgccagcagca

SEQ ID NO: 80529 - RNA, 21 nt, synthetic construct
  source 1..21: mol_type = other RNA
cacttatgccagcagcctaaa

SEQ ID NO: 80530 - RNA, 21 nt, synthetic construct
  source 1..21: mol_type = other RNA
gccagcagcctaaggacataa

SEQ ID NO: 80531 - RNA, 21 nt, synthetic construct
  source 1..21: mol_type = other RNA
tgggagcaggagggcgtctta

SEQ ID NO: 80532 - RNA, 21 nt, synthetic construct
  source 1..21: mol_type = other RNA
cccaccctctcagaaggacta

SEQ ID NO: 80533 - RNA, 21 nt, synthetic construct
  source 1..21: mol_type = other RNA
ctctcagaaggactgacatca

SEQ ID NO: 80534 - RNA, 21 nt, synthetic construct
  source 1..21: mol_type = other RNA
tcagaaggactgacatcccca

SEQ ID NO: 80535 - RNA, 21 nt, synthetic construct
  source 1..21: mol_type = other RNA
acacaagcacccttggtacaa

SEQ ID NO: 80536 - RNA, 21 nt, synthetic construct
  source 1..21: mol_type = other RNA
cgacgcctgcaggctccacaa

SEQ ID NO: 80537 - RNA, 21 nt, synthetic construct
  source 1..21: mol_type = other RNA
ggtggccacatccacccttca

SEQ ID NO: 80538 - RNA, 21 nt, synthetic construct
  source 1..21: mol_type = other RNA
gccacatccacccttccaaca

SEQ ID NO: 80539 - RNA, 21 nt, synthetic construct
  source 1..21: mol_type = other RNA
ccttccagggacgacggggaa

SEQ ID NO: 80540 - RNA, 21 nt, synthetic construct
  source 1..21: mol_type = other RNA
cgacggggagcttgggcacaa

SEQ ID NO: 80541 - RNA, 21 nt, synthetic construct
  source 1..21: mol_type = other RNA
agcttgggcacatggcgccca

SEQ ID NO: 80542 - RNA, 21 nt, synthetic construct
  source 1..21: mol_type = other RNA
gagctcgcccgacaggcacaa

SEQ ID NO: 80543 - RNA, 21 nt, synthetic construct
  source 1..21: mol_type = other RNA
cgagcctggcgccaacactca

SEQ ID NO: 80544 - RNA, 21 nt, synthetic construct
  source 1..21: mol_type = other RNA
gagcctggcgccaacactcaa

SEQ ID NO: 80545 - RNA, 21 nt, synthetic construct
  source 1..21: mol_type = other RNA
tgagccccttgactaacacca

SEQ ID NO: 80546 - RNA, 21 nt, synthetic construct
  source 1..21: mol_type = other RNA
cagccagggcacgacccgcta

SEQ ID NO: 80547 - RNA, 21 nt, synthetic construct
  source 1..21: mol_type = other RNA
ctcccaaagtgctgaccacca

SEQ ID NO: 80548 - RNA, 21 nt, synthetic construct
  source 1..21: mol_type = other RNA
gtccagggactgcaaccgcca

SEQ ID NO: 80549 - RNA, 21 nt, synthetic construct
  source 1..21: mol_type = other RNA
acctccacagtgcttaccgca

SEQ ID NO: 80550 - RNA, 21 nt, synthetic construct
  source 1..21: mol_type = other RNA
ccaggaacagctcacactaca

SEQ ID NO: 80551 - RNA, 21 nt, synthetic construct
  source 1..21: mol_type = other RNA
ccagcccagggacggcactca

SEQ ID NO: 80552 - RNA, 21 nt, synthetic construct
  source 1..21: mol_type = other RNA
tccacggtgaccccctcctca

SEQ ID NO: 80553 - RNA, 21 nt, synthetic construct
  source 1..21: mol_type = other RNA
tcccggggaccacccacacca

SEQ ID NO: 80554 - RNA, 21 nt, synthetic construct
  source 1..21: mol_type = other RNA
cacggccaccggctccaccaa

SEQ ID NO: 80555 - RNA, 21 nt, synthetic construct
  source 1..21: mol_type = other RNA
cccctcctcaactcctgggaa

SEQ ID NO: 80556 - RNA, 21 nt, synthetic construct
  source 1..21: mol_type = other RNA
acaccatggccaccacacaca

SEQ ID NO: 80557 - RNA, 21 nt, synthetic construct
  source 1..21: mol_type = other RNA
tggccaccacacacgggcgaa

SEQ ID NO: 80558 - RNA, 21 nt, synthetic construct
  source 1..21: mol_type = other RNA
cccagcagtccccacacggta

SEQ ID NO: 80559 - RNA, 21 nt, synthetic construct
  source 1..21: mol_type = other RNA
agcagtccccacacggtgcga

SEQ ID NO: 80560 - RNA, 21 nt, synthetic construct
  source 1..21: mol_type = other RNA
tgcgcacagcctggacttcga

SEQ ID NO: 80561 - RNA, 21 nt, synthetic construct
  source 1..21: mol_type = other RNA
tggacttcggccacctcggga

SEQ ID NO: 80562 - RNA, 21 nt, synthetic construct
  source 1..21: mol_type = other RNA
ggacttcggccacctcgggca

SEQ ID NO: 80563 - RNA, 21 nt, synthetic construct
  source 1..21: mol_type = other RNA
acctcgggcatcttgggcaca

SEQ ID NO: 80564 - RNA, 21 nt, synthetic construct
  source 1..21: mol_type = other RNA
cacatcacagagccttccaca

SEQ ID NO: 80565 - RNA, 21 nt, synthetic construct
  source 1..21: mol_type = other RNA
acatcacagagccttccacga

SEQ ID NO: 80566 - RNA, 21 nt, synthetic construct
  source 1..21: mol_type = other RNA
cacaccctagcagcaaccaca

SEQ ID NO: 80567 - RNA, 21 nt, synthetic construct
  source 1..21: mol_type = other RNA
gtgcctggtcagagtggctga

SEQ ID NO: 80568 - RNA, 21 nt, synthetic construct
  source 1..21: mol_type = other RNA
acagctaccccatgccgggga

SEQ ID NO: 80569 - RNA, 21 nt, synthetic construct
  source 1..21: mol_type = other RNA
ccggggccctctggcggggaa

SEQ ID NO: 80570 - RNA, 21 nt, synthetic construct
  source 1..21: mol_type = other RNA
acacctactccaacatccgta

SEQ ID NO: 80571 - RNA, 21 nt, synthetic construct
  source 1..21: mol_type = other RNA
gcctggtctgcaggaaccgta

SEQ ID NO: 80572 - RNA, 21 nt, synthetic construct
  source 1..21: mol_type = other RNA
gagcaggtggggaagttcaaa

SEQ ID NO: 80573 - RNA, 21 nt, synthetic construct
  source 1..21: mol_type = other RNA
ctctacggccatgccctccta

SEQ ID NO: 80574 - RNA, 21 nt, synthetic construct
  source 1..21: mol_type = other RNA
tggatcctcacagagccgaga

SEQ ID NO: 80575 - RNA, 21 nt, synthetic construct
  source 1..21: mol_type = other RNA
caccgtgacggtgcccaccga

SEQ ID NO: 80576 - RNA, 21 nt, synthetic construct
  source 1..21: mol_type = other RNA
acccaggcaactgctggcaca

SEQ ID NO: 80577 - RNA, 21 nt, synthetic construct
  source 1..21: mol_type = other RNA
gccacgacacccacagtcaca

SEQ ID NO: 80578 - RNA, 21 nt, synthetic construct
  source 1..21: mol_type = other RNA
gtccagggactgcaaccgcca

SEQ ID NO: 80579 - RNA, 21 nt, synthetic construct
  source 1..21: mol_type = other RNA
ccaggaacagctcacactaca

SEQ ID NO: 80580 - RNA, 21 nt, synthetic construct
  source 1..21: mol_type = other RNA
accagaggttccacggtgaca

SEQ ID NO: 80581 - RNA, 21 nt, synthetic construct
  source 1..21: mol_type = other RNA
tccacggtgaccccctcctca

SEQ ID NO: 80582 - RNA, 21 nt, synthetic construct
  source 1..21: mol_type = other RNA
tcccggggaccacccacacca

SEQ ID NO: 80583 - RNA, 21 nt, synthetic construct
  source 1..21: mol_type = other RNA
cacggccaccggctccaccaa

SEQ ID NO: 80584 - RNA, 21 nt, synthetic construct
  source 1..21: mol_type = other RNA
accagcagcacagtgactcca

SEQ ID NO: 80585 - RNA, 21 nt, synthetic construct
  source 1..21: mol_type = other RNA
cggccaccacacacgggcgaa

SEQ ID NO: 80586 - RNA, 21 nt, synthetic construct
  source 1..21: mol_type = other RNA
cccagcagtccccacacggta

SEQ ID NO: 80587 - RNA, 21 nt, synthetic construct
  source 1..21: mol_type = other RNA
agcagtccccacacggtgcga

SEQ ID NO: 80588 - RNA, 21 nt, synthetic construct
  source 1..21: mol_type = other RNA
tgcgcacagcctggacttcga

SEQ ID NO: 80589 - RNA, 21 nt, synthetic construct
  source 1..21: mol_type = other RNA
tggacttcggccacctcagga

SEQ ID NO: 80590 - RNA, 21 nt, synthetic construct
  source 1..21: mol_type = other RNA
ggacttcggccacctcaggca

SEQ ID NO: 80591 - RNA, 21 nt, synthetic construct
  source 1..21: mol_type = other RNA
acctcaggcaccttgggcaca

SEQ ID NO: 80592 - RNA, 21 nt, synthetic construct
  source 1..21: mol_type = other RNA
caggcaccttgggcaccacca

SEQ ID NO: 80593 - RNA, 21 nt, synthetic construct
  source 1..21: mol_type = other RNA
cacatcacagagccttccaca

SEQ ID NO: 80594 - RNA, 21 nt, synthetic construct
  source 1..21: mol_type = other RNA
acatcacagagccttccacga

SEQ ID NO: 80595 - RNA, 21 nt, synthetic construct
  source 1..21: mol_type = other RNA
gtgcctggtcagagtggctga

SEQ ID NO: 80596 - RNA, 21 nt, synthetic construct
  source 1..21: mol_type = other RNA
acagctaccccatgccgggga

SEQ ID NO: 80597 - RNA, 21 nt, synthetic construct
  source 1..21: mol_type = other RNA
ccggggccctctggcggggaa

SEQ ID NO: 80598 - RNA, 21 nt, synthetic construct
  source 1..21: mol_type = other RNA
acacctactccaacatccgta

SEQ ID NO: 80599 - RNA, 21 nt, synthetic construct
  source 1..21: mol_type = other RNA
gcctggtctgcaggaaccgta

SEQ ID NO: 80600 - RNA, 21 nt, synthetic construct
  source 1..21: mol_type = other RNA
gagcaggtggggaagttcaaa

SEQ ID NO: 80601 - RNA, 21 nt, synthetic construct
  source 1..21: mol_type = other RNA
tggatcctcacagagcagaca

SEQ ID NO: 80602 - RNA, 21 nt, synthetic construct
  source 1..21: mol_type = other RNA
gaccacagcagccactacgaa

SEQ ID NO: 80603 - RNA, 21 nt, synthetic construct
  source 1..21: mol_type = other RNA
agccaccagttccaaagccaa

SEQ ID NO: 80604 - RNA, 21 nt, synthetic construct
  source 1..21: mol_type = other RNA
caccaaatccacagctaccaa

SEQ ID NO: 80605 - RNA, 21 nt, synthetic construct
  source 1..21: mol_type = other RNA
atccacagctaccagctttaa

SEQ ID NO: 80606 - RNA, 21 nt, synthetic construct
  source 1..21: mol_type = other RNA
ccttcacccttgggaccacca

SEQ ID NO: 80607 - RNA, 21 nt, synthetic construct
  source 1..21: mol_type = other RNA
atggccaccatgtccacaata

SEQ ID NO: 80608 - RNA, 21 nt, synthetic construct
  source 1..21: mol_type = other RNA
tggccaccatgtccacaatca

SEQ ID NO: 80609 - RNA, 21 nt, synthetic construct
  source 1..21: mol_type = other RNA
accatgtccacaatccaccca

SEQ ID NO: 80610 - RNA, 21 nt, synthetic construct
  source 1..21: mol_type = other RNA
ccctcctccactccggagaca

SEQ ID NO: 80611 - RNA, 21 nt, synthetic construct
  source 1..21: mol_type = other RNA
ctccacagtgctgaccacgaa

SEQ ID NO: 80612 - RNA, 21 nt, synthetic construct
  source 1..21: mol_type = other RNA
caagggccaccagttccatga

SEQ ID NO: 80613 - RNA, 21 nt, synthetic construct
  source 1..21: mol_type = other RNA
acagagcccagcactacagca

SEQ ID NO: 80614 - RNA, 21 nt, synthetic construct
  source 1..21: mol_type = other RNA
ccagcactacagccaccgtga

SEQ ID NO: 80615 - RNA, 21 nt, synthetic construct
  source 1..21: mol_type = other RNA
caccgtgacggtgcccaccga

SEQ ID NO: 80616 - RNA, 21 nt, synthetic construct
  source 1..21: mol_type = other RNA
gtccagggactgcaaccgcca

SEQ ID NO: 80617 - RNA, 21 nt, synthetic construct
  source 1..21: mol_type = other RNA
ggcaccgcctggacccgccta

SEQ ID NO: 80618 - RNA, 21 nt, synthetic construct
  source 1..21: mol_type = other RNA
ccaggaacagctcacactaca

SEQ ID NO: 80619 - RNA, 21 nt, synthetic construct
  source 1..21: mol_type = other RNA
ccagcccagggacggcactca

SEQ ID NO: 80620 - RNA, 21 nt, synthetic construct
  source 1..21: mol_type = other RNA
tccacggtgaccccctcctca

SEQ ID NO: 80621 - RNA, 21 nt, synthetic construct
  source 1..21: mol_type = other RNA
tcccggggaccacccacacca

SEQ ID NO: 80622 - RNA, 21 nt, synthetic construct
  source 1..21: mol_type = other RNA
ccactacgatcacagccacca

SEQ ID NO: 80623 - RNA, 21 nt, synthetic construct
  source 1..21: mol_type = other RNA
accagcagcacagtgactcca

SEQ ID NO: 80624 - RNA, 21 nt, synthetic construct
  source 1..21: mol_type = other RNA
cccagcagtccccacacggta

SEQ ID NO: 80625 - RNA, 21 nt, synthetic construct
  source 1..21: mol_type = other RNA
agcagtccccacacggtgcga

SEQ ID NO: 80626 - RNA, 21 nt, synthetic construct
  source 1..21: mol_type = other RNA
tgcgcacagcctggacttcga

SEQ ID NO: 80627 - RNA, 21 nt, synthetic construct
  source 1..21: mol_type = other RNA
tggacttcggccacctcggga

SEQ ID NO: 80628 - RNA, 21 nt, synthetic construct
  source 1..21: mol_type = other RNA
ggacttcggccacctcgggca

SEQ ID NO: 80629 - RNA, 21 nt, synthetic construct
  source 1..21: mol_type = other RNA
acctcgggcatcttgggcaca

SEQ ID NO: 80630 - RNA, 21 nt, synthetic construct
  source 1..21: mol_type = other RNA
cacatcacagagccttccaca

SEQ ID NO: 80631 - RNA, 21 nt, synthetic construct
  source 1..21: mol_type = other RNA
acatcacagagccttccacga

SEQ ID NO: 80632 - RNA, 21 nt, synthetic construct
  source 1..21: mol_type = other RNA
acagccacacccagcaagaca

SEQ ID NO: 80633 - RNA, 21 nt, synthetic construct
  source 1..21: mol_type = other RNA
taaccacggtggtgaccacga

SEQ ID NO: 80634 - RNA, 21 nt, synthetic construct
  source 1..21: mol_type = other RNA
cggtggtgaccacgggctgta

SEQ ID NO: 80635 - RNA, 21 nt, synthetic construct
  source 1..21: mol_type = other RNA
accacgggctgtgagccccaa

SEQ ID NO: 80636 - RNA, 21 nt, synthetic construct
  source 1..21: mol_type = other RNA
gtgcctggtcagagtggctga

SEQ ID NO: 80637 - RNA, 21 nt, synthetic construct
  source 1..21: mol_type = other RNA
acagctaccccatgccgggga

SEQ ID NO: 80638 - RNA, 21 nt, synthetic construct
  source 1..21: mol_type = other RNA
ccggggccctctggcggggaa

SEQ ID NO: 80639 - RNA, 21 nt, synthetic construct
  source 1..21: mol_type = other RNA
acacctactccaacatccgta

SEQ ID NO: 80640 - RNA, 21 nt, synthetic construct
  source 1..21: mol_type = other RNA
cggccggaggggcagtctgta

SEQ ID NO: 80641 - RNA, 21 nt, synthetic construct
  source 1..21: mol_type = other RNA
ggccggaggggcagtctgtga

SEQ ID NO: 80642 - RNA, 21 nt, synthetic construct
  source 1..21: mol_type = other RNA
gcctggtctgcaggaaccgta

SEQ ID NO: 80643 - RNA, 21 nt, synthetic construct
  source 1..21: mol_type = other RNA
gagcaggtggggaagttcaaa

SEQ ID NO: 80644 - RNA, 21 nt, synthetic construct
  source 1..21: mol_type = other RNA
tggatcctcacagagccgaga

SEQ ID NO: 80645 - RNA, 21 nt, synthetic construct
  source 1..21: mol_type = other RNA
caccgtgacggtgcccaccga

SEQ ID NO: 80646 - RNA, 21 nt, synthetic construct
  source 1..21: mol_type = other RNA
acccaggcaactgctggcaca

SEQ ID NO: 80647 - RNA, 21 nt, synthetic construct
  source 1..21: mol_type = other RNA
gccacgacacccacagtcaca

SEQ ID NO: 80648 - RNA, 21 nt, synthetic construct
  source 1..21: mol_type = other RNA
gtccagggactgcaaccgcca

SEQ ID NO: 80649 - RNA, 21 nt, synthetic construct
  source 1..21: mol_type = other RNA
ccctcttccaccccaggaaca

SEQ ID NO: 80650 - RNA, 21 nt, synthetic construct
  source 1..21: mol_type = other RNA
ccaggaacagctcacactaca

SEQ ID NO: 80651 - RNA, 21 nt, synthetic construct
  source 1..21: mol_type = other RNA
accacgggcttcacagtcaca

SEQ ID NO: 80652 - RNA, 21 nt, synthetic construct
  source 1..21: mol_type = other RNA
aaccagtggctccacggtgaa

SEQ ID NO: 80653 - RNA, 21 nt, synthetic construct
  source 1..21: mol_type = other RNA
tccacggtgaccccctcctca

SEQ ID NO: 80654 - RNA, 21 nt, synthetic construct
  source 1..21: mol_type = other RNA
tcccggggaccacccacacca

SEQ ID NO: 80655 - RNA, 21 nt, synthetic construct
  source 1..21: mol_type = other RNA
cacggccaccggctccaccaa

SEQ ID NO: 80656 - RNA, 21 nt, synthetic construct
  source 1..21: mol_type = other RNA
accagcagcacagtgactcca

SEQ ID NO: 80657 - RNA, 21 nt, synthetic construct
  source 1..21: mol_type = other RNA
cggccaccacacacgggcgaa

SEQ ID NO: 80658 - RNA, 21 nt, synthetic construct
  source 1..21: mol_type = other RNA
cccagcagtccccacacggta

SEQ ID NO: 80659 - RNA, 21 nt, synthetic construct
  source 1..21: mol_type = other RNA
agcagtccccacacggtgcga

SEQ ID NO: 80660 - RNA, 21 nt, synthetic construct
  source 1..21: mol_type = other RNA
tgcgcacagcctggacttcga

SEQ ID NO: 80661 - RNA, 21 nt, synthetic construct
  source 1..21: mol_type = other RNA
tggacttcggccacctcagga

SEQ ID NO: 80662 - RNA, 21 nt, synthetic construct
  source 1..21: mol_type = other RNA
ggacttcggccacctcaggca

SEQ ID NO: 80663 - RNA, 21 nt, synthetic construct
  source 1..21: mol_type = other RNA
acctcaggcaccttgggcaca

SEQ ID NO: 80664 - RNA, 21 nt, synthetic construct
  source 1..21: mol_type = other RNA
caggcaccttgggcaccacca

SEQ ID NO: 80665 - RNA, 21 nt, synthetic construct
  source 1..21: mol_type = other RNA
cacatcacagagccttccaca

SEQ ID NO: 80666 - RNA, 21 nt, synthetic construct
  source 1..21: mol_type = other RNA
acatcacagagccttccacga

SEQ ID NO: 80667 - RNA, 21 nt, synthetic construct
  source 1..21: mol_type = other RNA
ccttccccagggacgaccaca

SEQ ID NO: 80668 - RNA, 21 nt, synthetic construct
  source 1..21: mol_type = other RNA
ccccagggacgaccaccccga

SEQ ID NO: 80669 - RNA, 21 nt, synthetic construct
  source 1..21: mol_type = other RNA
taaccacggtggtgaccacga

SEQ ID NO: 80670 - RNA, 21 nt, synthetic construct
  source 1..21: mol_type = other RNA
cggtggtgaccacgggctgta

SEQ ID NO: 80671 - RNA, 21 nt, synthetic construct
  source 1..21: mol_type = other RNA
accacgggctgtgagccccaa

SEQ ID NO: 80672 - RNA, 21 nt, synthetic construct
  source 1..21: mol_type = other RNA
gtgcctggtcagagtggctga

SEQ ID NO: 80673 - RNA, 21 nt, synthetic construct
  source 1..21: mol_type = other RNA
acagctaccccatgccgggga

SEQ ID NO: 80674 - RNA, 21 nt, synthetic construct
  source 1..21: mol_type = other RNA
ccggggccctctggcggggaa

SEQ ID NO: 80675 - RNA, 21 nt, synthetic construct
  source 1..21: mol_type = other RNA
acacctactccaacatccgta

SEQ ID NO: 80676 - RNA, 21 nt, synthetic construct
  source 1..21: mol_type = other RNA
gcctggtctgcaggaaccgta

SEQ ID NO: 80677 - RNA, 21 nt, synthetic construct
  source 1..21: mol_type = other RNA
gagcaggtggggaagttcaaa

SEQ ID NO: 80678 - RNA, 21 nt, synthetic construct
  source 1..21: mol_type = other RNA
ctctacggccatgccctccta

SEQ ID NO: 80679 - RNA, 21 nt, synthetic construct
  source 1..21: mol_type = other RNA
agccaccagttccaaagccaa

SEQ ID NO: 80680 - RNA, 21 nt, synthetic construct
  source 1..21: mol_type = other RNA
caccaaatccacagctaccaa

SEQ ID NO: 80681 - RNA, 21 nt, synthetic construct
  source 1..21: mol_type = other RNA
caaatccacagctaccagcga

SEQ ID NO: 80682 - RNA, 21 nt, synthetic construct
  source 1..21: mol_type = other RNA
aatccacagctaccagcgtta

SEQ ID NO: 80683 - RNA, 21 nt, synthetic construct
  source 1..21: mol_type = other RNA
gtggccaccatgtccacaata

SEQ ID NO: 80684 - RNA, 21 nt, synthetic construct
  source 1..21: mol_type = other RNA
tggccaccatgtccacaatca

SEQ ID NO: 80685 - RNA, 21 nt, synthetic construct
  source 1..21: mol_type = other RNA
accatgtccacaatccaccca

SEQ ID NO: 80686 - RNA, 21 nt, synthetic construct
  source 1..21: mol_type = other RNA
ccctcctccactccggagaca

SEQ ID NO: 80687 - RNA, 21 nt, synthetic construct
  source 1..21: mol_type = other RNA
ctccacagtgctgaccacgaa

SEQ ID NO: 80688 - RNA, 21 nt, synthetic construct
  source 1..21: mol_type = other RNA
tggatcctcacagagccgaga

SEQ ID NO: 80689 - RNA, 21 nt, synthetic construct
  source 1..21: mol_type = other RNA
caccgtgacggtgcccaccga

SEQ ID NO: 80690 - RNA, 21 nt, synthetic construct
  source 1..21: mol_type = other RNA
acccaggcaactgctggcaca

SEQ ID NO: 80691 - RNA, 21 nt, synthetic construct
  source 1..21: mol_type = other RNA
gccacgacacccacagtcaca

SEQ ID NO: 80692 - RNA, 21 nt, synthetic construct
  source 1..21: mol_type = other RNA
cagggactgcaactgccctta

SEQ ID NO: 80693 - RNA, 21 nt, synthetic construct
  source 1..21: mol_type = other RNA
acctccacagtgcttaccgca

SEQ ID NO: 80694 - RNA, 21 nt, synthetic construct
  source 1..21: mol_type = other RNA
ccaggaacagctcacactaca

SEQ ID NO: 80695 - RNA, 21 nt, synthetic construct
  source 1..21: mol_type = other RNA
ccagcccagggacggcactca

SEQ ID NO: 80696 - RNA, 21 nt, synthetic construct
  source 1..21: mol_type = other RNA
aaccagtggctccacggtgaa

SEQ ID NO: 80697 - RNA, 21 nt, synthetic construct
  source 1..21: mol_type = other RNA
tccacggtgaccccctcctca

SEQ ID NO: 80698 - RNA, 21 nt, synthetic construct
  source 1..21: mol_type = other RNA
tcccggggaccacccacacca

SEQ ID NO: 80699 - RNA, 21 nt, synthetic construct
  source 1..21: mol_type = other RNA
cacggccaccggctccaccaa

SEQ ID NO: 80700 - RNA, 21 nt, synthetic construct
  source 1..21: mol_type = other RNA
ccagggacaacacccatcaca

SEQ ID NO: 80701 - RNA, 21 nt, synthetic construct
  source 1..21: mol_type = other RNA
ctgacaagcacagccacaaaa

SEQ ID NO: 80702 - RNA, 21 nt, synthetic construct
  source 1..21: mol_type = other RNA
gccacaaaatccacagctaca

SEQ ID NO: 80703 - RNA, 21 nt, synthetic construct
  source 1..21: mol_type = other RNA
atccacagctaccagctttaa

SEQ ID NO: 80704 - RNA, 21 nt, synthetic construct
  source 1..21: mol_type = other RNA
accgtcccagcacagaccaca

SEQ ID NO: 80705 - RNA, 21 nt, synthetic construct
  source 1..21: mol_type = other RNA
tgtccaccatgtccacaatca

SEQ ID NO: 80706 - RNA, 21 nt, synthetic construct
  source 1..21: mol_type = other RNA
accatgtccacaatccacaca

SEQ ID NO: 80707 - RNA, 21 nt, synthetic construct
  source 1..21: mol_type = other RNA
atgtccacaatccacacctca

SEQ ID NO: 80708 - RNA, 21 nt, synthetic construct
  source 1..21: mol_type = other RNA
ccacaatccacacctcctcta

SEQ ID NO: 80709 - RNA, 21 nt, synthetic construct
  source 1..21: mol_type = other RNA
cacagccaccatgacaaggga

SEQ ID NO: 80710 - RNA, 21 nt, synthetic construct
  source 1..21: mol_type = other RNA
tacaactgcagccactggata

SEQ ID NO: 80711 - RNA, 21 nt, synthetic construct
  source 1..21: mol_type = other RNA
tccacggccaccctgtcctca

SEQ ID NO: 80712 - RNA, 21 nt, synthetic construct
  source 1..21: mol_type = other RNA
tggatcctcacagagccgaga

SEQ ID NO: 80713 - RNA, 21 nt, synthetic construct
  source 1..21: mol_type = other RNA
tcacagagccgagcactataa

SEQ ID NO: 80714 - RNA, 21 nt, synthetic construct
  source 1..21: mol_type = other RNA
accgtgatggtgcccaccgga

SEQ ID NO: 80715 - RNA, 21 nt, synthetic construct
  source 1..21: mol_type = other RNA
accaccatggccactatgcca

SEQ ID NO: 80716 - RNA, 21 nt, synthetic construct
  source 1..21: mol_type = other RNA
catggccactatgcccacaga

SEQ ID NO: 80717 - RNA, 21 nt, synthetic construct
  source 1..21: mol_type = other RNA
atggccactatgcccacagca

SEQ ID NO: 80718 - RNA, 21 nt, synthetic construct
  source 1..21: mol_type = other RNA
cggttcccagctcgtccacca

SEQ ID NO: 80719 - RNA, 21 nt, synthetic construct
  source 1..21: mol_type = other RNA
tcccagctcgtccaccgtgga

SEQ ID NO: 80720 - RNA, 21 nt, synthetic construct
  source 1..21: mol_type = other RNA
ccagctcgtccaccgtgggga

SEQ ID NO: 80721 - RNA, 21 nt, synthetic construct
  source 1..21: mol_type = other RNA
agctcgtccaccgtggggaca

SEQ ID NO: 80722 - RNA, 21 nt, synthetic construct
  source 1..21: mol_type = other RNA
tccaccgtggggaccacccga

SEQ ID NO: 80723 - RNA, 21 nt, synthetic construct
  source 1..21: mol_type = other RNA
tcaccaccctgagacccacta

SEQ ID NO: 80724 - RNA, 21 nt, synthetic construct
  source 1..21: mol_type = other RNA
catttggacagtttttctcga

SEQ ID NO: 80725 - RNA, 21 nt, synthetic construct
  source 1..21: mol_type = other RNA
acctccccaccgccagtgtca

SEQ ID NO: 80726 - RNA, 21 nt, synthetic construct
  source 1..21: mol_type = other RNA
gccatccctctccggcaggta

SEQ ID NO: 80727 - RNA, 21 nt, synthetic construct
  source 1..21: mol_type = other RNA
cacggcctctgccactgccga

SEQ ID NO: 80728 - RNA, 21 nt, synthetic construct
  source 1..21: mol_type = other RNA
ctcactgtcaccatggtgcaa

SEQ ID NO: 80729 - RNA, 21 nt, synthetic construct
  source 1..21: mol_type = other RNA
gtcaccatggtgcatgggaaa

SEQ ID NO: 80730 - RNA, 21 nt, synthetic construct
  source 1..21: mol_type = other RNA
ctggggaccaccaccatgcga

SEQ ID NO: 80731 - RNA, 21 nt, synthetic construct
  source 1..21: mol_type = other RNA
accaccaccatgcgtgtggaa

SEQ ID NO: 80732 - RNA, 21 nt, synthetic construct
  source 1..21: mol_type = other RNA
ttcaatggccaagtcttccaa

SEQ ID NO: 80733 - RNA, 21 nt, synthetic construct
  source 1..21: mol_type = other RNA
ggccaagtcttccaggcccga

SEQ ID NO: 80734 - RNA, 21 nt, synthetic construct
  source 1..21: mol_type = other RNA
aggacatggccaagacgtgga

SEQ ID NO: 80735 - RNA, 21 nt, synthetic construct
  source 1..21: mol_type = other RNA
cagccgctctgtgatctgata

SEQ ID NO: 80736 - RNA, 21 nt, synthetic construct
  source 1..21: mol_type = other RNA
accaaagtgtacaagccatga

SEQ ID NO: 80737 - RNA, 21 nt, synthetic construct
  source 1..21: mol_type = other RNA
gcctgccacctgcaactctaa

SEQ ID NO: 80738 - RNA, 21 nt, synthetic construct
  source 1..21: mol_type = other RNA
cagctggaggggatggcggaa

SEQ ID NO: 80739 - RNA, 21 nt, synthetic construct
  source 1..21: mol_type = other RNA
gagcggtgggtcagcaactga

SEQ ID NO: 80740 - RNA, 21 nt, synthetic construct
  source 1..21: mol_type = other RNA
ccaggccccgggccgagaaca

SEQ ID NO: 80741 - RNA, 21 nt, synthetic construct
  source 1..21: mol_type = other RNA
gcaatgtcaggaggatgccta

SEQ ID NO: 80742 - RNA, 21 nt, synthetic construct
  source 1..21: mol_type = other RNA
tgagtacaagagagtggccga

SEQ ID NO: 80743 - RNA, 21 nt, synthetic construct
  source 1..21: mol_type = other RNA
gtgaggctgagggtggagtca

SEQ ID NO: 80744 - RNA, 21 nt, synthetic construct
  source 1..21: mol_type = other RNA
cccagatgtgtccagctgcaa

SEQ ID NO: 80745 - RNA, 21 nt, synthetic construct
  source 1..21: mol_type = other RNA
gctcctgccccggagcgtcca

SEQ ID NO: 80746 - RNA, 21 nt, synthetic construct
  source 1..21: mol_type = other RNA
ccaggagaggcgggtccacga

SEQ ID NO: 80747 - RNA, 21 nt, synthetic construct
  source 1..21: mol_type = other RNA
caggagaggcgggtccacgaa

SEQ ID NO: 80748 - RNA, 21 nt, synthetic construct
  source 1..21: mol_type = other RNA
aggcgggtccacgaggagaca

SEQ ID NO: 80749 - RNA, 21 nt, synthetic construct
  source 1..21: mol_type = other RNA
cccccacacacccgtggctta

SEQ ID NO: 80750 - RNA, 21 nt, synthetic construct
  source 1..21: mol_type = other RNA
ccccacacacccgtggcttca

SEQ ID NO: 80751 - RNA, 21 nt, synthetic construct
  source 1..21: mol_type = other RNA
ccaggatgtgcattgtctgaa

SEQ ID NO: 80752 - RNA, 21 nt, synthetic construct
  source 1..21: mol_type = other RNA
caggatgtgcattgtctgata

SEQ ID NO: 80753 - RNA, 21 nt, synthetic construct
  source 1..21: mol_type = other RNA
ctgatcatgaaaaccttggga

SEQ ID NO: 80754 - RNA, 21 nt, synthetic construct
  source 1..21: mol_type = other RNA
atcatgaaaaccttgggccta

SEQ ID NO: 80755 - RNA, 21 nt, synthetic construct
  source 1..21: mol_type = other RNA
tcaggagtcctaccctgggaa

SEQ ID NO: 80756 - RNA, 21 nt, synthetic construct
  source 1..21: mol_type = other RNA
gcgcagcacggattccagcta

SEQ ID NO: 80757 - RNA, 21 nt, synthetic construct
  source 1..21: mol_type = other RNA
gctggccacgtccggccgcta

SEQ ID NO: 80758 - RNA, 21 nt, synthetic construct
  source 1..21: mol_type = other RNA
gccacgtccggccgctgggga

SEQ ID NO: 80759 - RNA, 21 nt, synthetic construct
  source 1..21: mol_type = other RNA
cagggtaactcagggctgaga

SEQ ID NO: 80760 - RNA, 21 nt, synthetic construct
  source 1..21: mol_type = other RNA
ggccaggtcagagaggggtca

SEQ ID NO: 80761 - RNA, 21 nt, synthetic construct
  source 1..21: mol_type = other RNA
agagaggggtcagcatcccaa

SEQ ID NO: 80762 - RNA, 21 nt, synthetic construct
  source 1..21: mol_type = other RNA
tttgcaaataaaccctgagca

SEQ ID NO: 80763 - RNA, 21 nt, synthetic construct
  source 1..21: mol_type = other RNA
tccagggacaactcccatcca

SEQ ID NO: 80764 - RNA, 21 nt, synthetic construct
  source 1..21: mol_type = other RNA
gggacaacacccatcacccca

SEQ ID NO: 80765 - RNA, 21 nt, synthetic construct
  source 1..21: mol_type = other RNA
ccagcccccaggatgggtgca

SEQ ID NO: 80766 - RNA, 21 nt, synthetic construct
  source 1..21: mol_type = other RNA
acttcgacgacaatgccatca

SEQ ID NO: 80767 - RNA, 21 nt, synthetic construct
  source 1..21: mol_type = other RNA
ctgggaggcggagactttgaa

SEQ ID NO: 80768 - RNA, 21 nt, synthetic construct
  source 1..21: mol_type = other RNA
agcctgccacctgcaactcta

SEQ ID NO: 80769 - RNA, 21 nt, synthetic construct
  source 1..21: mol_type = other RNA
atccctctccggcaggtgaaa

SEQ ID NO: 80770 - RNA, 21 nt, synthetic construct
  source 1..21: mol_type = other RNA
acggccctcagcggggtggta

SEQ ID NO: 80771 - RNA, 21 nt, synthetic construct
  source 1..21: mol_type = other RNA
gaagtcatctacaataagaca

SEQ ID NO: 80772 - RNA, 21 nt, synthetic construct
  source 1..21: mol_type = other RNA
gtccagctgaatgaaacctga

SEQ ID NO: 80773 - RNA, 21 nt, synthetic construct
  source 1..21: mol_type = other RNA
tcctaccctgggagagcctga

SEQ ID NO: 80774 - RNA, 21 nt, synthetic construct
  source 1..21: mol_type = other RNA
ggtgactgcagctacgttcta

SEQ ID NO: 80775 - RNA, 21 nt, synthetic construct
  source 1..21: mol_type = other RNA
agggccctgtggagccgagca

SEQ ID NO: 80776 - RNA, 21 nt, synthetic construct
  source 1..21: mol_type = other RNA
ccttccaacacgctcagccca

SEQ ID NO: 80777 - RNA, 21 nt, synthetic construct
  source 1..21: mol_type = other RNA
tccaacacgctcagcccttca

SEQ ID NO: 80778 - RNA, 21 nt, synthetic construct
  source 1..21: mol_type = other RNA
accccgacctccaccctgaga

SEQ ID NO: 80779 - RNA, 21 nt, synthetic construct
  source 1..21: mol_type = other RNA
ccccgggccacaccagggcca

SEQ ID NO: 80780 - RNA, 21 nt, synthetic construct
  source 1..21: mol_type = other RNA
tccaaggactgcaaccaccca

SEQ ID NO: 80781 - RNA, 21 nt, synthetic construct
  source 1..21: mol_type = other RNA
gtgcggccggaggggcagtca

SEQ ID NO: 80782 - RNA, 21 nt, synthetic construct
  source 1..21: mol_type = other RNA
tccaaggactgcaaccaccca

SEQ ID NO: 80783 - RNA, 21 nt, synthetic construct
  source 1..21: mol_type = other RNA
tccaaggactgcaaccaccca

SEQ ID NO: 80784 - RNA, 21 nt, synthetic construct
  source 1..21: mol_type = other RNA
aggccccgggccgagaaccca

SEQ ID NO: 80785 - RNA, 21 nt, synthetic construct
  source 1..21: mol_type = other RNA
cctgcctgtgtgcccgccaga

SEQ ID NO: 80786 - RNA, 21 nt, synthetic construct
  source 1..21: mol_type = other RNA
tgggagaatgcagggcacaca

SEQ ID NO: 80787 - RNA, 21 nt, synthetic construct
  source 1..21: mol_type = other RNA
tgtctgatcatgaaaacctta

SEQ ID NO: 80788 - RNA, 21 nt, synthetic construct
  source 1..21: mol_type = other RNA
tgccgcgccgcctacgaggaa

SEQ ID NO: 80789 - RNA, 21 nt, synthetic construct
  source 1..21: mol_type = other RNA
gagcagagcggggactacata

SEQ ID NO: 80790 - RNA, 21 nt, synthetic construct
  source 1..21: mol_type = other RNA
caggagtgtggctcaccctga

SEQ ID NO: 80791 - RNA, 21 nt, synthetic construct
  source 1..21: mol_type = other RNA
agctcggcgggcacccctgga

SEQ ID NO: 80792 - RNA, 21 nt, synthetic construct
  source 1..21: mol_type = other RNA
actgcccctgtgtgcacaaca

SEQ ID NO: 80793 - RNA, 21 nt, synthetic construct
  source 1..21: mol_type = other RNA
ctgcccggacgccctggcaca

SEQ ID NO: 80794 - RNA, 21 nt, synthetic construct
  source 1..21: mol_type = other RNA
gtgccgggcggcgcagcttca

SEQ ID NO: 80795 - RNA, 21 nt, synthetic construct
  source 1..21: mol_type = other RNA
cctgctgtgcctaccccaaca

SEQ ID NO: 80796 - RNA, 21 nt, synthetic construct
  source 1..21: mol_type = other RNA
cccacacacccccagtgccga

SEQ ID NO: 80797 - RNA, 21 nt, synthetic construct
  source 1..21: mol_type = other RNA
cccacacacccccagtgccga

SEQ ID NO: 80798 - RNA, 21 nt, synthetic construct
  source 1..21: mol_type = other RNA
cccctcctccactccggagaa

SEQ ID NO: 80799 - RNA, 21 nt, synthetic construct
  source 1..21: mol_type = other RNA
cccacacacccccagtgccga

SEQ ID NO: 80800 - RNA, 21 nt, synthetic construct
  source 1..21: mol_type = other RNA
gggccacaccaggggcaccta

SEQ ID NO: 80801 - RNA, 21 nt, synthetic construct
  source 1..21: mol_type = other RNA
cccacacacccccagtgccga

SEQ ID NO: 80802 - RNA, 21 nt, synthetic construct
  source 1..21: mol_type = other RNA
tccccctgggggagttgggca

SEQ ID NO: 80803 - RNA, 21 nt, synthetic construct
  source 1..21: mol_type = other RNA
cccctcctccactccggagaa

SEQ ID NO: 80804 - RNA, 21 nt, synthetic construct
  source 1..21: mol_type = other RNA
accatggtgcatgggaaggaa

SEQ ID NO: 80805 - RNA, 21 nt, synthetic construct
  source 1..21: mol_type = other RNA
caggccccgggccgagaacca

SEQ ID NO: 80806 - RNA, 21 nt, synthetic construct
  source 1..21: mol_type = other RNA
gagcctgcctgtgtgcccgca

SEQ ID NO: 80807 - RNA, 21 nt, synthetic construct
  source 1..21: mol_type = other RNA
aagagagtggccgggcagtga

SEQ ID NO: 80808 - RNA, 21 nt, synthetic construct
  source 1..21: mol_type = other RNA
cccagtgctgaccagcacgga

SEQ ID NO: 80809 - RNA, 21 nt, synthetic construct
  source 1..21: mol_type = other RNA
ctccatcccggggaccaccca

SEQ ID NO: 80810 - RNA, 21 nt, synthetic construct
  source 1..21: mol_type = other RNA
ctccatcccggggaccaccca

SEQ ID NO: 80811 - RNA, 21 nt, synthetic construct
  source 1..21: mol_type = other RNA
ctccatcccggggaccaccca

SEQ ID NO: 80812 - RNA, 21 nt, synthetic construct
  source 1..21: mol_type = other RNA
ctccatcccggggaccaccca

SEQ ID NO: 80813 - RNA, 21 nt, synthetic construct
  source 1..21: mol_type = other RNA
cctccctgatgtcactgggaa

SEQ ID NO: 80814 - RNA, 21 nt, synthetic construct
  source 1..21: mol_type = other RNA
cggtggcgagagggccgggta

SEQ ID NO: 80815 - RNA, 21 nt, synthetic construct
  source 1..21: mol_type = other RNA
tcacggccctcagcggggtga

SEQ ID NO: 80816 - RNA, 21 nt, synthetic construct
  source 1..21: mol_type = other RNA
ccacaactgtggccactggta

SEQ ID NO: 80817 - RNA, 21 nt, synthetic construct
  source 1..21: mol_type = other RNA
ccacaactgtggccactggta

SEQ ID NO: 80818 - RNA, 21 nt, synthetic construct
  source 1..21: mol_type = other RNA
ccacaactgtggccactggta

SEQ ID NO: 80819 - RNA, 21 nt, synthetic construct
  source 1..21: mol_type = other RNA
ccacaactgtggccactggta

SEQ ID NO: 80820 - RNA, 21 nt, synthetic construct
  source 1..21: mol_type = other RNA
ccacaactgtggccactggta

SEQ ID NO: 80821 - RNA, 21 nt, synthetic construct
  source 1..21: mol_type = other RNA
acggcggccctcacctcgcaa

SEQ ID NO: 80822 - RNA, 21 nt, synthetic construct
  source 1..21: mol_type = other RNA
agtggtactcccccatcacta

SEQ ID NO: 80823 - RNA, 21 nt, synthetic construct
  source 1..21: mol_type = other RNA
agtggtactcccccatcacta

SEQ ID NO: 80824 - RNA, 21 nt, synthetic construct
  source 1..21: mol_type = other RNA
cagaacagaccaccacaccca

SEQ ID NO: 80825 - RNA, 21 nt, synthetic construct
  source 1..21: mol_type = other RNA
ccggagaccacccacacctca

SEQ ID NO: 80826 - RNA, 21 nt, synthetic construct
  source 1..21: mol_type = other RNA
agtggtactcccccatcacta

SEQ ID NO: 80827 - RNA, 21 nt, synthetic construct
  source 1..21: mol_type = other RNA
agtggtactcccccatcacta

SEQ ID NO: 80828 - RNA, 21 nt, synthetic construct
  source 1..21: mol_type = other RNA
cgttacacccatcccctccta

SEQ ID NO: 80829 - RNA, 21 nt, synthetic construct
  source 1..21: mol_type = other RNA
cagaacagaccaccacaccca

SEQ ID NO: 80830 - RNA, 21 nt, synthetic construct
  source 1..21: mol_type = other RNA
ccggagaccacccacacctca

SEQ ID NO: 80831 - RNA, 21 nt, synthetic construct
  source 1..21: mol_type = other RNA
agtggtactcccccatcacta

SEQ ID NO: 80832 - RNA, 21 nt, synthetic construct
  source 1..21: mol_type = other RNA
tggctggtccccgacagcaga

SEQ ID NO: 80833 - RNA, 21 nt, synthetic construct
  source 1..21: mol_type = other RNA
gactggcacaccccccactga

SEQ ID NO: 80834 - RNA, 21 nt, synthetic construct
  source 1..21: mol_type = other RNA
tctccaccgtgtgtgtccgca

SEQ ID NO: 80835 - RNA, 21 nt, synthetic construct
  source 1..21: mol_type = other RNA
tcgcccgacaggcacagccaa

SEQ ID NO: 80836 - RNA, 21 nt, synthetic construct
  source 1..21: mol_type = other RNA
gagcactacagccaccgtgaa

SEQ ID NO: 80837 - RNA, 21 nt, synthetic construct
  source 1..21: mol_type = other RNA
cagcactacagccaccgtgaa

SEQ ID NO: 80838 - RNA, 21 nt, synthetic construct
  source 1..21: mol_type = other RNA
gagcactacagccaccgtgaa

SEQ ID NO: 80839 - RNA, 21 nt, synthetic construct
  source 1..21: mol_type = other RNA
gagcactacagccaccgtgaa

SEQ ID NO: 80840 - RNA, 21 nt, synthetic construct
  source 1..21: mol_type = other RNA
gtggctggtccccgacagcaa

SEQ ID NO: 80841 - RNA, 21 nt, synthetic construct
  source 1..21: mol_type = other RNA
caggaaccggaggtgggagta

SEQ ID NO: 80842 - RNA, 21 nt, synthetic construct
  source 1..21: mol_type = other RNA
cgcttccagtgtggatcagca

SEQ ID NO: 80843 - RNA, 21 nt, synthetic construct
  source 1..21: mol_type = other RNA
cgtccaccgtggggaccacca

SEQ ID NO: 80844 - RNA, 21 nt, synthetic construct
  source 1..21: mol_type = other RNA
accacccacaccgccacagta

SEQ ID NO: 80845 - RNA, 21 nt, synthetic construct
  source 1..21: mol_type = other RNA
cagccctcaccctagcagcaa

SEQ ID NO: 80846 - RNA, 21 nt, synthetic construct
  source 1..21: mol_type = other RNA
cagccctcaccctagcagcaa

SEQ ID NO: 80847 - RNA, 21 nt, synthetic construct
  source 1..21: mol_type = other RNA
accacccacaccgccacagta

SEQ ID NO: 80848 - RNA, 21 nt, synthetic construct
  source 1..21: mol_type = other RNA
cccagcagcaaccaccagtaa

SEQ ID NO: 80849 - RNA, 21 nt, synthetic construct
  source 1..21: mol_type = other RNA
cagccctcaccctagcagcaa

SEQ ID NO: 80850 - RNA, 21 nt, synthetic construct
  source 1..21: mol_type = other RNA
cagccctcaccctagcagcaa

SEQ ID NO: 80851 - RNA, 21 nt, synthetic construct
  source 1..21: mol_type = other RNA
catctgcagcatgtggggcga

SEQ ID NO: 80852 - RNA, 21 nt, synthetic construct
  source 1..21: mol_type = other RNA
ccccgcgccctcagcatccaa

SEQ ID NO: 80853 - RNA, 21 nt, synthetic construct
  source 1..21: mol_type = other RNA
gctggtccccgacagcagaaa

SEQ ID NO: 80854 - RNA, 21 nt, synthetic construct
  source 1..21: mol_type = other RNA
gccgcggaactggaggtgcca

SEQ ID NO: 80855 - RNA, 21 nt, synthetic construct
  source 1..21: mol_type = other RNA
tgctctgtgcagggcggggca

SEQ ID NO: 80856 - RNA, 21 nt, synthetic construct
  source 1..21: mol_type = other RNA
ggtgcagctggtgccactcaa

SEQ ID NO: 80857 - RNA, 21 nt, synthetic construct
  source 1..21: mol_type = other RNA
cccaggctgcctgtgccaata

SEQ ID NO: 80858 - RNA, 21 nt, synthetic construct
  source 1..21: mol_type = other RNA
acagctcggcgggcaccccta

SEQ ID NO: 80859 - RNA, 21 nt, synthetic construct
  source 1..21: mol_type = other RNA
tgccagagctgtaactgcaca

SEQ ID NO: 80860 - RNA, 21 nt, synthetic construct
  source 1..21: mol_type = other RNA
gagcttccccaactggaccca

SEQ ID NO: 80861 - RNA, 21 nt, synthetic construct
  source 1..21: mol_type = other RNA
cccaggggtggccacatccaa

SEQ ID NO: 80862 - RNA, 21 nt, synthetic construct
  source 1..21: mol_type = other RNA
cacagccacccacgctggcca

SEQ ID NO: 80863 - RNA, 21 nt, synthetic construct
  source 1..21: mol_type = other RNA
acctccaccctgagaacagca

SEQ ID NO: 80864 - RNA, 21 nt, synthetic construct
  source 1..21: mol_type = other RNA
ccagctccaaagccactccca

SEQ ID NO: 80865 - RNA, 21 nt, synthetic construct
  source 1..21: mol_type = other RNA
ccacacccacggccaccatga

SEQ ID NO: 80866 - RNA, 21 nt, synthetic construct
  source 1..21: mol_type = other RNA
gcagccaccagcaacacagta

SEQ ID NO: 80867 - RNA, 21 nt, synthetic construct
  source 1..21: mol_type = other RNA
agccctcaccctagcagcaga

SEQ ID NO: 80868 - RNA, 21 nt, synthetic construct
  source 1..21: mol_type = other RNA
cggccacacccagcaagacca

SEQ ID NO: 80869 - RNA, 21 nt, synthetic construct
  source 1..21: mol_type = other RNA
gccggggccctctggcgggga

SEQ ID NO: 80870 - RNA, 21 nt, synthetic construct
  source 1..21: mol_type = other RNA
ctggactttggcctggtctga

SEQ ID NO: 80871 - RNA, 21 nt, synthetic construct
  source 1..21: mol_type = other RNA
ccagctccaaagccactccca

SEQ ID NO: 80872 - RNA, 21 nt, synthetic construct
  source 1..21: mol_type = other RNA
ccacacccacggccaccatga

SEQ ID NO: 80873 - RNA, 21 nt, synthetic construct
  source 1..21: mol_type = other RNA
agccctcaccctagcagcaga

SEQ ID NO: 80874 - RNA, 21 nt, synthetic construct
  source 1..21: mol_type = other RNA
cggccacacccagcaagacca

SEQ ID NO: 80875 - RNA, 21 nt, synthetic construct
  source 1..21: mol_type = other RNA
gccggggccctctggcgggga

SEQ ID NO: 80876 - RNA, 21 nt, synthetic construct
  source 1..21: mol_type = other RNA
ctggactttggcctggtctga

SEQ ID NO: 80877 - RNA, 21 nt, synthetic construct
  source 1..21: mol_type = other RNA
ctggatcctcacagagcagaa

SEQ ID NO: 80878 - RNA, 21 nt, synthetic construct
  source 1..21: mol_type = other RNA
accacgaaggccaccacgaca

SEQ ID NO: 80879 - RNA, 21 nt, synthetic construct
  source 1..21: mol_type = other RNA
ccacacccacggccaccatga

SEQ ID NO: 80880 - RNA, 21 nt, synthetic construct
  source 1..21: mol_type = other RNA
agccctcaccctagcagcaga

SEQ ID NO: 80881 - RNA, 21 nt, synthetic construct
  source 1..21: mol_type = other RNA
cagccacacccagcaagacca

SEQ ID NO: 80882 - RNA, 21 nt, synthetic construct
  source 1..21: mol_type = other RNA
aaccacggtggtgaccacgga

SEQ ID NO: 80883 - RNA, 21 nt, synthetic construct
  source 1..21: mol_type = other RNA
gccggggccctctggcgggga

SEQ ID NO: 80884 - RNA, 21 nt, synthetic construct
  source 1..21: mol_type = other RNA
ctggactttggcctggtctga

SEQ ID NO: 80885 - RNA, 21 nt, synthetic construct
  source 1..21: mol_type = other RNA
ccagctccaaagccactccca

SEQ ID NO: 80886 - RNA, 21 nt, synthetic construct
  source 1..21: mol_type = other RNA
ccacacccacggccaccatga

SEQ ID NO: 80887 - RNA, 21 nt, synthetic construct
  source 1..21: mol_type = other RNA
ccacggccaccacaaccagga

SEQ ID NO: 80888 - RNA, 21 nt, synthetic construct
  source 1..21: mol_type = other RNA
agccctcaccctagcagcaga

SEQ ID NO: 80889 - RNA, 21 nt, synthetic construct
  source 1..21: mol_type = other RNA
cggccacacccagcaagacca

SEQ ID NO: 80890 - RNA, 21 nt, synthetic construct
  source 1..21: mol_type = other RNA
aaccacggtggtgaccacgga

SEQ ID NO: 80891 - RNA, 21 nt, synthetic construct
  source 1..21: mol_type = other RNA
gccggggccctctggcgggga

SEQ ID NO: 80892 - RNA, 21 nt, synthetic construct
  source 1..21: mol_type = other RNA
ctggactttggcctggtctga

SEQ ID NO: 80893 - RNA, 21 nt, synthetic construct
  source 1..21: mol_type = other RNA
accacgaaggccaccacgaca

SEQ ID NO: 80894 - RNA, 21 nt, synthetic construct
  source 1..21: mol_type = other RNA
ccagctccaaagccactccca

SEQ ID NO: 80895 - RNA, 21 nt, synthetic construct
  source 1..21: mol_type = other RNA
ccacacccacggccaccatga

SEQ ID NO: 80896 - RNA, 21 nt, synthetic construct
  source 1..21: mol_type = other RNA
ccccagtgctgaccagcacga

SEQ ID NO: 80897 - RNA, 21 nt, synthetic construct
  source 1..21: mol_type = other RNA
agcacggccaccacacccgca

SEQ ID NO: 80898 - RNA, 21 nt, synthetic construct
  source 1..21: mol_type = other RNA
ccagagaccacccacacctca

SEQ ID NO: 80899 - RNA, 21 nt, synthetic construct
  source 1..21: mol_type = other RNA
cctccactctgggaacagcta

SEQ ID NO: 80900 - RNA, 21 nt, synthetic construct
  source 1..21: mol_type = other RNA
ggccactatgcccacagccaa

SEQ ID NO: 80901 - RNA, 21 nt, synthetic construct
  source 1..21: mol_type = other RNA
gcctccacggttcccagctca

SEQ ID NO: 80902 - RNA, 21 nt, synthetic construct
  source 1..21: mol_type = other RNA
cagcctgccaaccttcagcga

SEQ ID NO: 80903 - RNA, 21 nt, synthetic construct
  source 1..21: mol_type = other RNA
tgccctgggcgtgagcgtcaa

SEQ ID NO: 80904 - RNA, 21 nt, synthetic construct
  source 1..21: mol_type = other RNA
actggcacaccccccactgca

SEQ ID NO: 80905 - RNA, 21 nt, synthetic construct
  source 1..21: mol_type = other RNA
atgcccaccacagccgctcta

SEQ ID NO: 80906 - RNA, 21 nt, synthetic construct
  source 1..21: mol_type = other RNA
gcacacatgggcatctgcgta

SEQ ID NO: 80907 - RNA, 21 nt, synthetic construct
  source 1..21: mol_type = other RNA
cactcaggagtcctaccctga

SEQ ID NO: 80908 - RNA, 21 nt, synthetic construct
  source 1..21: mol_type = other RNA
cgccctggaacaaactaagca

SEQ ID NO: 80909 - RNA, 21 nt, synthetic construct
  source 1..21: mol_type = other RNA
ccggccgctggggcagacaga

SEQ ID NO: 80910 - RNA, 21 nt, synthetic construct
  source 1..21: mol_type = other RNA
ggccgctggggcagacaggca

SEQ ID NO: 80911 - RNA, 21 nt, synthetic construct
  source 1..21: mol_type = other RNA
gtcagcatcccaaagccccca

SEQ ID NO: 80912 - RNA, 21 nt, synthetic construct
  source 1..21: mol_type = other RNA
agcctggacttcggccaccta

SEQ ID NO: 80913 - RNA, 21 nt, synthetic construct
  source 1..21: mol_type = other RNA
agcctggacttcggccaccta

SEQ ID NO: 80914 - RNA, 21 nt, synthetic construct
  source 1..21: mol_type = other RNA
agcctggacttcggccaccta

SEQ ID NO: 80915 - RNA, 21 nt, synthetic construct
  source 1..21: mol_type = other RNA
agcctggacttcggccaccta

SEQ ID NO: 80916 - RNA, 21 nt, synthetic construct
  source 1..21: mol_type = other RNA
tgcttctgccctgaggaccaa

SEQ ID NO: 80917 - RNA, 21 nt, synthetic construct
  source 1..21: mol_type = other RNA
gcgccactcaggagtcctaca

SEQ ID NO: 80918 - RNA, 21 nt, synthetic construct
  source 1..21: mol_type = other RNA
tgggggagttgggccaggtca

SEQ ID NO: 80919 - RNA, 21 nt, synthetic construct
  source 1..21: mol_type = other RNA
cccagggtcagcccccgccga

SEQ ID NO: 80920 - RNA, 21 nt, synthetic construct
  source 1..21: mol_type = other RNA
gccccagaagggtgaggggca

SEQ ID NO: 80921 - RNA, 21 nt, synthetic construct
  source 1..21: mol_type = other RNA
tgcccctgtgtgcacaacgaa

SEQ ID NO: 80922 - RNA, 21 nt, synthetic construct
  source 1..21: mol_type = other RNA
ggacattcctgccctgggcga

SEQ ID NO: 80923 - RNA, 21 nt, synthetic construct
  source 1..21: mol_type = other RNA
tgagtccactggatccacgga

SEQ ID NO: 80924 - RNA, 21 nt, synthetic construct
  source 1..21: mol_type = other RNA
tgagtccactggatccacgga

SEQ ID NO: 80925 - RNA, 21 nt, synthetic construct
  source 1..21: mol_type = other RNA
ctcccactattccacctttga

SEQ ID NO: 80926 - RNA, 21 nt, synthetic construct
  source 1..21: mol_type = other RNA
caagggtccccacagcggaga

SEQ ID NO: 80927 - RNA, 21 nt, synthetic construct
  source 1..21: mol_type = other RNA
ccccaacccagaccacagcaa

SEQ ID NO: 80928 - RNA, 21 nt, synthetic construct
  source 1..21: mol_type = other RNA
tgggcacatggcgcccctcaa

SEQ ID NO: 80929 - RNA, 21 nt, synthetic construct
  source 1..21: mol_type = other RNA
gcccagggtcagcccccgcca

SEQ ID NO: 80930 - RNA, 21 nt, synthetic construct
  source 1..21: mol_type = other RNA
gaggagacggtgcccttgcaa

SEQ ID NO: 80931 - RNA, 21 nt, synthetic construct
  source 1..21: mol_type = other RNA
aggatgtgcattgtctgatca

SEQ ID NO: 80932 - RNA, 21 nt, synthetic construct
  source 1..21: mol_type = other RNA
gggccctctggcggggactta

SEQ ID NO: 80933 - RNA, 21 nt, synthetic construct
  source 1..21: mol_type = other RNA
gggccctctggcggggactta

SEQ ID NO: 80934 - RNA, 21 nt, synthetic construct
  source 1..21: mol_type = other RNA
gggccctctggcggggactta

SEQ ID NO: 80935 - RNA, 21 nt, synthetic construct
  source 1..21: mol_type = other RNA
gggccctctggcggggactta

SEQ ID NO: 80936 - RNA, 21 nt, synthetic construct
  source 1..21: mol_type = other RNA
atgggtgaccccgagcatcca

SEQ ID NO: 80937 - RNA, 21 nt, synthetic construct
  source 1..21: mol_type = other RNA
tgactgcagctacgttctgta

SEQ ID NO: 80938 - RNA, 21 nt, synthetic construct
  source 1..21: mol_type = other RNA
cttccagggacgacggggaga

SEQ ID NO: 80939 - RNA, 21 nt, synthetic construct
  source 1..21: mol_type = other RNA
atgggtgccccgagcgcgtga

SEQ ID NO: 80940 - RNA, 21 nt, synthetic construct
  source 1..21: mol_type = other RNA
caacggcaccatcatcaggaa

SEQ ID NO: 80941 - RNA, 21 nt, synthetic construct
  source 1..21: mol_type = other RNA
gggcacttatgccagcagcca

SEQ ID NO: 80942 - RNA, 21 nt, synthetic construct
  source 1..21: mol_type = other RNA
cagcctggacttcggccacca

SEQ ID NO: 80943 - RNA, 21 nt, synthetic construct
  source 1..21: mol_type = other RNA
cccagcaagacccgcacctca

SEQ ID NO: 80944 - RNA, 21 nt, synthetic construct
  source 1..21: mol_type = other RNA
cagcctggacttcggccacca

SEQ ID NO: 80945 - RNA, 21 nt, synthetic construct
  source 1..21: mol_type = other RNA
acggggacttcccacacccca

SEQ ID NO: 80946 - RNA, 21 nt, synthetic construct
  source 1..21: mol_type = other RNA
cagcaggaccaccgagtcaca

SEQ ID NO: 80947 - RNA, 21 nt, synthetic construct
  source 1..21: mol_type = other RNA
cccagcaagacccgcacctca

SEQ ID NO: 80948 - RNA, 21 nt, synthetic construct
  source 1..21: mol_type = other RNA
cagcctggacttcggccacca

SEQ ID NO: 80949 - RNA, 21 nt, synthetic construct
  source 1..21: mol_type = other RNA
cagcaggaccaccgagtcaca

SEQ ID NO: 80950 - RNA, 21 nt, synthetic construct
  source 1..21: mol_type = other RNA
cccgggccacaccaggggcaa

SEQ ID NO: 80951 - RNA, 21 nt, synthetic construct
  source 1..21: mol_type = other RNA
ccgggccacaccaggggcaca

SEQ ID NO: 80952 - RNA, 21 nt, synthetic construct
  source 1..21: mol_type = other RNA
cccagcaagacccgcacctca

SEQ ID NO: 80953 - RNA, 21 nt, synthetic construct
  source 1..21: mol_type = other RNA
cagcctggacttcggccacca

SEQ ID NO: 80954 - RNA, 21 nt, synthetic construct
  source 1..21: mol_type = other RNA
acggggacttcccacacccca

SEQ ID NO: 80955 - RNA, 21 nt, synthetic construct
  source 1..21: mol_type = other RNA
cagcaggaccaccgagtcaca

SEQ ID NO: 80956 - RNA, 21 nt, synthetic construct
  source 1..21: mol_type = other RNA
cccagcaagacccgcacctca

SEQ ID NO: 80957 - RNA, 21 nt, synthetic construct
  source 1..21: mol_type = other RNA
ccctgggggagttgggccaga

SEQ ID NO: 80958 - RNA, 21 nt, synthetic construct
  source 1..21: mol_type = other RNA
gccagtccagctgaatgaaaa

SEQ ID NO: 80959 - RNA, 21 nt, synthetic construct
  source 1..21: mol_type = other RNA
cccgcgctccgtgctcctgca

SEQ ID NO: 80960 - RNA, 21 nt, synthetic construct
  source 1..21: mol_type = other RNA
actgcgtacctggccgcctga

SEQ ID NO: 80961 - RNA, 21 nt, synthetic construct
  source 1..21: mol_type = other RNA
ccgtcccggggaccacccaca

SEQ ID NO: 80962 - RNA, 21 nt, synthetic construct
  source 1..21: mol_type = other RNA
gggcgccactcaggagtccta

SEQ ID NO: 80963 - RNA, 21 nt, synthetic construct
  source 1..21: mol_type = other RNA
tgctggagctggatcccaaaa

SEQ ID NO: 80964 - RNA, 21 nt, synthetic construct
  source 1..21: mol_type = other RNA
gggcccacatctccacctata

SEQ ID NO: 80965 - RNA, 21 nt, synthetic construct
  source 1..21: mol_type = other RNA
tggctgagctgcggaagtgca

SEQ ID NO: 80966 - RNA, 21 nt, synthetic construct
  source 1..21: mol_type = other RNA
agggtccccacagcggagaaa

SEQ ID NO: 80967 - RNA, 21 nt, synthetic construct
  source 1..21: mol_type = other RNA
ccagaggctccacggtgacca

SEQ ID NO: 80968 - RNA, 21 nt, synthetic construct
  source 1..21: mol_type = other RNA
cgaacaccatggccaccacaa

SEQ ID NO: 80969 - RNA, 21 nt, synthetic construct
  source 1..21: mol_type = other RNA
tcacagagcagaccacagcaa

SEQ ID NO: 80970 - RNA, 21 nt, synthetic construct
  source 1..21: mol_type = other RNA
ccaccagttccatgtccacca

SEQ ID NO: 80971 - RNA, 21 nt, synthetic construct
  source 1..21: mol_type = other RNA
ccagaggctccacggtgacca

SEQ ID NO: 80972 - RNA, 21 nt, synthetic construct
  source 1..21: mol_type = other RNA
gaccacgggctgtgagcccca

SEQ ID NO: 80973 - RNA, 21 nt, synthetic construct
  source 1..21: mol_type = other RNA
ttccccagggacgaccaccca

SEQ ID NO: 80974 - RNA, 21 nt, synthetic construct
  source 1..21: mol_type = other RNA
gaccacgggctgtgagcccca

SEQ ID NO: 80975 - RNA, 21 nt, synthetic construct
  source 1..21: mol_type = other RNA
caagggccaccagttccacga

SEQ ID NO: 80976 - RNA, 21 nt, synthetic construct
  source 1..21: mol_type = other RNA
ccccgcagccccggtgtctaa

SEQ ID NO: 80977 - RNA, 21 nt, synthetic construct
  source 1..21: mol_type = other RNA
ctgtggcaccagggctgcgaa

SEQ ID NO: 80978 - RNA, 21 nt, synthetic construct
  source 1..21: mol_type = other RNA
tggccacgtccggccgctgga

SEQ ID NO: 80979 - RNA, 21 nt, synthetic construct
  source 1..21: mol_type = other RNA
gctggggcagacaggctggta

SEQ ID NO: 80980 - RNA, 21 nt, synthetic construct
  source 1..21: mol_type = other RNA
gtcagagaggggtcagcatca

SEQ ID NO: 80981 - RNA, 21 nt, synthetic construct
  source 1..21: mol_type = other RNA
cgacggcggccctcacctcga

SEQ ID NO: 80982 - RNA, 21 nt, synthetic construct
  source 1..21: mol_type = other RNA
accactgcaggggacgtgcca

SEQ ID NO: 80983 - RNA, 21 nt, synthetic construct
  source 1..21: mol_type = other RNA
ctccagagactgtccacacca

SEQ ID NO: 80984 - RNA, 21 nt, synthetic construct
  source 1..21: mol_type = other RNA
ctccagagactgtccacacca

SEQ ID NO: 80985 - RNA, 21 nt, synthetic construct
  source 1..21: mol_type = other RNA
ctccagagactgtccacacca

SEQ ID NO: 80986 - RNA, 21 nt, synthetic construct
  source 1..21: mol_type = other RNA
acctgcacctgcaggaaccga

SEQ ID NO: 80987 - RNA, 21 nt, synthetic construct
  source 1..21: mol_type = other RNA
aaagaccaccctatgggtgaa

SEQ ID NO: 80988 - RNA, 21 nt, synthetic construct
  source 1..21: mol_type = other RNA
tgccagcagcctaaggacata

SEQ ID NO: 80989 - RNA, 21 nt, synthetic construct
  source 1..21: mol_type = other RNA
ccacggccaccacaaccggga

SEQ ID NO: 80990 - RNA, 21 nt, synthetic construct
  source 1..21: mol_type = other RNA
ccacggccaccacaaccggga

SEQ ID NO: 80991 - RNA, 21 nt, synthetic construct
  source 1..21: mol_type = other RNA
tcctgccctgggcgtgagcga

SEQ ID NO: 80992 - RNA, 21 nt, synthetic construct
  source 1..21: mol_type = other RNA
ctgagtgccacaaccttgtga

SEQ ID NO: 80993 - RNA, 21 nt, synthetic construct
  source 1..21: mol_type = other RNA
gaggcctagtgggctccagga

SEQ ID NO: 80994 - RNA, 21 nt, synthetic construct
  source 1..21: mol_type = other RNA
ggatgcctgccagcccactta

SEQ ID NO: 80995 - RNA, 21 nt, synthetic construct
  source 1..21: mol_type = other RNA
tggtccagctggtacaatgga

SEQ ID NO: 80996 - RNA, 21 nt, synthetic construct
  source 1..21: mol_type = other RNA
aggtatgccctgtgctggcta

SEQ ID NO: 80997 - RNA, 21 nt, synthetic construct
  source 1..21: mol_type = other RNA
tccacttcggcctggtgtgca

SEQ ID NO: 80998 - RNA, 21 nt, synthetic construct
  source 1..21: mol_type = other RNA
cacacccacagctaccagcga

SEQ ID NO: 80999 - RNA, 21 nt, synthetic construct
  source 1..21: mol_type = other RNA
cccacaccgccacagtgctga

SEQ ID NO: 81000 - RNA, 21 nt, synthetic construct
  source 1..21: mol_type = other RNA
gtactcccccatcactgacca

SEQ ID NO: 81001 - RNA, 21 nt, synthetic construct
  source 1..21: mol_type = other RNA
atgtgagcaccacggccacga

SEQ ID NO: 81002 - RNA, 21 nt, synthetic construct
  source 1..21: mol_type = other RNA
gtactcccccatcactgacca

SEQ ID NO: 81003 - RNA, 21 nt, synthetic construct
  source 1..21: mol_type = other RNA
cccttccagtgctgacaagca

SEQ ID NO: 81004 - RNA, 21 nt, synthetic construct
  source 1..21: mol_type = other RNA
cacacccacagctaccagcga

SEQ ID NO: 81005 - RNA, 21 nt, synthetic construct
  source 1..21: mol_type = other RNA
ccacaaccagggccaccggca

SEQ ID NO: 81006 - RNA, 21 nt, synthetic construct
  source 1..21: mol_type = other RNA
cccacaccgccacagtgctga

SEQ ID NO: 81007 - RNA, 21 nt, synthetic construct
  source 1..21: mol_type = other RNA
gtactcccccatcactgacca

SEQ ID NO: 81008 - RNA, 21 nt, synthetic construct
  source 1..21: mol_type = other RNA
atgtgagcaccacggccacga

SEQ ID NO: 81009 - RNA, 21 nt, synthetic construct
  source 1..21: mol_type = other RNA
ccacaaccagggccaccggca

SEQ ID NO: 81010 - RNA, 21 nt, synthetic construct
  source 1..21: mol_type = other RNA
acgggcttcacagtcacccca

SEQ ID NO: 81011 - RNA, 21 nt, synthetic construct
  source 1..21: mol_type = other RNA
agtgctgaccagcccggccaa

SEQ ID NO: 81012 - RNA, 21 nt, synthetic construct
  source 1..21: mol_type = other RNA
cccttccagtgctgacaagca

SEQ ID NO: 81013 - RNA, 21 nt, synthetic construct
  source 1..21: mol_type = other RNA
atgtgagcaccacggccacga

SEQ ID NO: 81014 - RNA, 21 nt, synthetic construct
  source 1..21: mol_type = other RNA
gtactcccccatcactgacca

SEQ ID NO: 81015 - RNA, 21 nt, synthetic construct
  source 1..21: mol_type = other RNA
cccttccagtgctgacaagca

SEQ ID NO: 81016 - RNA, 21 nt, synthetic construct
  source 1..21: mol_type = other RNA
ccacaaaatccacagctacca

SEQ ID NO: 81017 - RNA, 21 nt, synthetic construct
  source 1..21: mol_type = other RNA
tggatccacggccaccctgta

SEQ ID NO: 81018 - RNA, 21 nt, synthetic construct
  source 1..21: mol_type = other RNA
ccaccgtgatggtgcccacca

SEQ ID NO: 81019 - RNA, 21 nt, synthetic construct
  source 1..21: mol_type = other RNA
cgactggcacaccccccacta

SEQ ID NO: 81020 - RNA, 21 nt, synthetic construct
  source 1..21: mol_type = other RNA
aggggccgccttgaggtgcca

SEQ ID NO: 81021 - RNA, 21 nt, synthetic construct
  source 1..21: mol_type = other RNA
gagctctgccgcgcccgggga

SEQ ID NO: 81022 - RNA, 21 nt, synthetic construct
  source 1..21: mol_type = other RNA
atacagcctgccacctgcaaa

SEQ ID NO: 81023 - RNA, 21 nt, synthetic construct
  source 1..21: mol_type = other RNA
cccaccttccgctgcagacca

SEQ ID NO: 81024 - RNA, 21 nt, synthetic construct
  source 1..21: mol_type = other RNA
gcctgcatcctgcccagatga

SEQ ID NO: 81025 - RNA, 21 nt, synthetic construct
  source 1..21: mol_type = other RNA
tccctgcgcccatggctccca

SEQ ID NO: 81026 - RNA, 21 nt, synthetic construct
  source 1..21: mol_type = other RNA
ccctgcgcccatggctcccca

SEQ ID NO: 81027 - RNA, 21 nt, synthetic construct
  source 1..21: mol_type = other RNA
gccgggcggcgcagcttccca

SEQ ID NO: 81028 - RNA, 21 nt, synthetic construct
  source 1..21: mol_type = other RNA
agctccaaagccactccctca

SEQ ID NO: 81029 - RNA, 21 nt, synthetic construct
  source 1..21: mol_type = other RNA
actcgactccagccctttcca

SEQ ID NO: 81030 - RNA, 21 nt, synthetic construct
  source 1..21: mol_type = other RNA
agctccaaagccactccctca

SEQ ID NO: 81031 - RNA, 21 nt, synthetic construct
  source 1..21: mol_type = other RNA
accacccgcacccctgcagta

SEQ ID NO: 81032 - RNA, 21 nt, synthetic construct
  source 1..21: mol_type = other RNA
ggggagcggtgggtcagcaaa

SEQ ID NO: 81033 - RNA, 21 nt, synthetic construct
  source 1..21: mol_type = other RNA
gcacacctacacccacgtgga

SEQ ID NO: 81034 - RNA, 21 nt, synthetic construct
  source 1..21: mol_type = other RNA
agaacgttctgcctccatcca

SEQ ID NO: 81035 - RNA, 21 nt, synthetic construct
  source 1..21: mol_type = other RNA
gctgcccttgccggccggcaa

SEQ ID NO: 81036 - RNA, 21 nt, synthetic construct
  source 1..21: mol_type = other RNA
gaaccaccgagtcacccccta

SEQ ID NO: 81037 - RNA, 21 nt, synthetic construct
  source 1..21: mol_type = other RNA
cctcctctactccagagacta

SEQ ID NO: 81038 - RNA, 21 nt, synthetic construct
  source 1..21: mol_type = other RNA
tagccaccgtgatggtgccca

SEQ ID NO: 81039 - RNA, 21 nt, synthetic construct
  source 1..21: mol_type = other RNA
tgtgtctgtgctggggaccaa

SEQ ID NO: 81040 - RNA, 21 nt, synthetic construct
  source 1..21: mol_type = other RNA
gaggaccagatcctcttcaaa

SEQ ID NO: 81041 - RNA, 21 nt, synthetic construct
  source 1..21: mol_type = other RNA
gagagtggccgggcagtgcta

SEQ ID NO: 81042 - RNA, 21 nt, synthetic construct
  source 1..21: mol_type = other RNA
gaggaggactcctgtcaagta

SEQ ID NO: 81043 - RNA, 21 nt, synthetic construct
  source 1..21: mol_type = other RNA
cctggggtgacttccactaca

SEQ ID NO: 81044 - RNA, 21 nt, synthetic construct
  source 1..21: mol_type = other RNA
ttgccgcggcctgagtgagga

SEQ ID NO: 81045 - RNA, 21 nt, synthetic construct
  source 1..21: mol_type = other RNA
tgcattgccgaggaggactga

SEQ ID NO: 81046 - RNA, 21 nt, synthetic construct
  source 1..21: mol_type = other RNA
gacaggacctacagctaccaa

SEQ ID NO: 81047 - RNA, 21 nt, synthetic construct
  source 1..21: mol_type = other RNA
atgggcttggcgcctgcttga

SEQ ID NO: 81048 - RNA, 21 nt, synthetic construct
  source 1..21: mol_type = other RNA
gcagagagggtaccaggtata

SEQ ID NO: 81049 - RNA, 21 nt, synthetic construct
  source 1..21: mol_type = other RNA
cggcggccctcacctcgcaga

SEQ ID NO: 81050 - RNA, 21 nt, synthetic construct
  source 1..21: mol_type = other RNA
agatcagggccgctggaggga

SEQ ID NO: 81051 - RNA, 21 nt, synthetic construct
  source 1..21: mol_type = other RNA
tatgccagcagcctaaggaca

SEQ ID NO: 81052 - RNA, 21 nt, synthetic construct
  source 1..21: mol_type = other RNA
gccaccgaccacagagctgga

SEQ ID NO: 81053 - RNA, 21 nt, synthetic construct
  source 1..21: mol_type = other RNA
ttccaacacgctcagccctta

SEQ ID NO: 81054 - RNA, 21 nt, synthetic construct
  source 1..21: mol_type = other RNA
accacgggcttcacagccaca

SEQ ID NO: 81055 - RNA, 21 nt, synthetic construct
  source 1..21: mol_type = other RNA
cccccatcactgaccaccaca

SEQ ID NO: 81056 - RNA, 21 nt, synthetic construct
  source 1..21: mol_type = other RNA
cccccagtgctgaccaccaca

SEQ ID NO: 81057 - RNA, 21 nt, synthetic construct
  source 1..21: mol_type = other RNA
ccgaacaccatggccaccaca

SEQ ID NO: 81058 - RNA, 21 nt, synthetic construct
  source 1..21: mol_type = other RNA
gcctggactttggcctggtca

SEQ ID NO: 81059 - RNA, 21 nt, synthetic construct
  source 1..21: mol_type = other RNA
accacgggcttcacagccaca

SEQ ID NO: 81060 - RNA, 21 nt, synthetic construct
  source 1..21: mol_type = other RNA
cccccatcactgaccaccaca

SEQ ID NO: 81061 - RNA, 21 nt, synthetic construct
  source 1..21: mol_type = other RNA
cccccagtgctgaccaccaca

SEQ ID NO: 81062 - RNA, 21 nt, synthetic construct
  source 1..21: mol_type = other RNA
gcctggactttggcctggtca

SEQ ID NO: 81063 - RNA, 21 nt, synthetic construct
  source 1..21: mol_type = other RNA
accacgggcttcacagccaca

SEQ ID NO: 81064 - RNA, 21 nt, synthetic construct
  source 1..21: mol_type = other RNA
cccccatcactgaccaccaca

SEQ ID NO: 81065 - RNA, 21 nt, synthetic construct
  source 1..21: mol_type = other RNA
cccccagtgctgaccaccaca

SEQ ID NO: 81066 - RNA, 21 nt, synthetic construct
  source 1..21: mol_type = other RNA
gcctggactttggcctggtca

SEQ ID NO: 81067 - RNA, 21 nt, synthetic construct
  source 1..21: mol_type = other RNA
cccccagtgctgaccaccaca

SEQ ID NO: 81068 - RNA, 21 nt, synthetic construct
  source 1..21: mol_type = other RNA
cctggtgtccccctgggggaa

SEQ ID NO: 81069 - RNA, 21 nt, synthetic construct
  source 1..21: mol_type = other RNA
ggtgtccccctgggggagtta

SEQ ID NO: 81070 - RNA, 21 nt, synthetic construct
  source 1..21: mol_type = other RNA
gcctggactttggcctggtca

SEQ ID NO: 81071 - RNA, 21 nt, synthetic construct
  source 1..21: mol_type = other RNA
accacgggcttcacagccaca

SEQ ID NO: 81072 - RNA, 21 nt, synthetic construct
  source 1..21: mol_type = other RNA
cccccatcactgaccaccaca

SEQ ID NO: 81073 - RNA, 21 nt, synthetic construct
  source 1..21: mol_type = other RNA
actccagggacaacacccata

SEQ ID NO: 81074 - RNA, 21 nt, synthetic construct
  source 1..21: mol_type = other RNA
atgccatccctctccggcaga

SEQ ID NO: 81075 - RNA, 21 nt, synthetic construct
  source 1..21: mol_type = other RNA
catccctctccggcaggtgaa

SEQ ID NO: 81076 - RNA, 21 nt, synthetic construct
  source 1..21: mol_type = other RNA
ccttgcccctccctgatgtca

SEQ ID NO: 81077 - RNA, 21 nt, synthetic construct
  source 1..21: mol_type = other RNA
gccagcccccaggatgggtga

SEQ ID NO: 81078 - RNA, 21 nt, synthetic construct
  source 1..21: mol_type = other RNA
ctctggcggccatgctcgtga

SEQ ID NO: 81079 - RNA, 21 nt, synthetic construct
  source 1..21: mol_type = other RNA
acctggggtgacttccactaa

SEQ ID NO: 81080 - RNA, 21 nt, synthetic construct
  source 1..21: mol_type = other RNA
ctggggtgacttccactacaa

SEQ ID NO: 81081 - RNA, 21 nt, synthetic construct
  source 1..21: mol_type = other RNA
agcactgccgcgccgcctaca

SEQ ID NO: 81082 - RNA, 21 nt, synthetic construct
  source 1..21: mol_type = other RNA
cctcatcaatgggcagcggga

SEQ ID NO: 81083 - RNA, 21 nt, synthetic construct
  source 1..21: mol_type = other RNA
tggagcagagcggggactaca

SEQ ID NO: 81084 - RNA, 21 nt, synthetic construct
  source 1..21: mol_type = other RNA
gctgccccacctgcccgtgta

SEQ ID NO: 81085 - RNA, 21 nt, synthetic construct
  source 1..21: mol_type = other RNA
acctgccccctcaacatgcaa

SEQ ID NO: 81086 - RNA, 21 nt, synthetic construct
  source 1..21: mol_type = other RNA
cctgccccctcaacatgcaga

SEQ ID NO: 81087 - RNA, 21 nt, synthetic construct
  source 1..21: mol_type = other RNA
accaggagtgtggctcaccca

SEQ ID NO: 81088 - RNA, 21 nt, synthetic construct
  source 1..21: mol_type = other RNA
ccaggagtgtggctcacccta

SEQ ID NO: 81089 - RNA, 21 nt, synthetic construct
  source 1..21: mol_type = other RNA
ggggcccacatctccacctaa

SEQ ID NO: 81090 - RNA, 21 nt, synthetic construct
  source 1..21: mol_type = other RNA
agcagcttcaccgtgctggca

SEQ ID NO: 81091 - RNA, 21 nt, synthetic construct
  source 1..21: mol_type = other RNA
atgggagtgggggctgcatta

SEQ ID NO: 81092 - RNA, 21 nt, synthetic construct
  source 1..21: mol_type = other RNA
ctgcacctgcaggaaccggaa

SEQ ID NO: 81093 - RNA, 21 nt, synthetic construct
  source 1..21: mol_type = other RNA
cgagagggccgggtggggaca

SEQ ID NO: 81094 - RNA, 21 nt, synthetic construct
  source 1..21: mol_type = other RNA
actccggacacctgcccctta

SEQ ID NO: 81095 - RNA, 21 nt, synthetic construct
  source 1..21: mol_type = other RNA
ccccttgttctgtgacttcta

SEQ ID NO: 81096 - RNA, 21 nt, synthetic construct
  source 1..21: mol_type = other RNA
aagggtccccacagcggagaa

SEQ ID NO: 81097 - RNA, 21 nt, synthetic construct
  source 1..21: mol_type = other RNA
ccttcaccaccgcctgggtca

SEQ ID NO: 81098 - RNA, 21 nt, synthetic construct
  source 1..21: mol_type = other RNA
ggtccagctggtacaatggga

SEQ ID NO: 81099 - RNA, 21 nt, synthetic construct
  source 1..21: mol_type = other RNA
tgccgggcggcgcagcttcca

SEQ ID NO: 81100 - RNA, 21 nt, synthetic construct
  source 1..21: mol_type = other RNA
cccaacccagaccacagcaaa

SEQ ID NO: 81101 - RNA, 21 nt, synthetic construct
  source 1..21: mol_type = other RNA
aactgggagcaggagggcgta

SEQ ID NO: 81102 - RNA, 21 nt, synthetic construct
  source 1..21: mol_type = other RNA
gggagcaggagggcgtcttca

SEQ ID NO: 81103 - RNA, 21 nt, synthetic construct
  source 1..21: mol_type = other RNA
acagccaccacgggaggccca

SEQ ID NO: 81104 - RNA, 21 nt, synthetic construct
  source 1..21: mol_type = other RNA
ccaggggtggccacatccaca

SEQ ID NO: 81105 - RNA, 21 nt, synthetic construct
  source 1..21: mol_type = other RNA
caggggtggccacatccacca

SEQ ID NO: 81106 - RNA, 21 nt, synthetic construct
  source 1..21: mol_type = other RNA
acctccagagctcgcccgaca

SEQ ID NO: 81107 - RNA, 21 nt, synthetic construct
  source 1..21: mol_type = other RNA
ggacagagacgacaatgagca

SEQ ID NO: 81108 - RNA, 21 nt, synthetic construct
  source 1..21: mol_type = other RNA
ctgcgtccactggatccacga

SEQ ID NO: 81109 - RNA, 21 nt, synthetic construct
  source 1..21: mol_type = other RNA
cctccagtccagggactgcaa

SEQ ID NO: 81110 - RNA, 21 nt, synthetic construct
  source 1..21: mol_type = other RNA
cccacggccaccatgtccaca

SEQ ID NO: 81111 - RNA, 21 nt, synthetic construct
  source 1..21: mol_type = other RNA
cagaggctccacggtgaccca

SEQ ID NO: 81112 - RNA, 21 nt, synthetic construct
  source 1..21: mol_type = other RNA
cctcgggcatcttgggcacca

SEQ ID NO: 81113 - RNA, 21 nt, synthetic construct
  source 1..21: mol_type = other RNA
acccccttctccagggacgaa

SEQ ID NO: 81114 - RNA, 21 nt, synthetic construct
  source 1..21: mol_type = other RNA
ggccacaccacggccacctca

SEQ ID NO: 81115 - RNA, 21 nt, synthetic construct
  source 1..21: mol_type = other RNA
ttggcctggtctgcaggaaca

SEQ ID NO: 81116 - RNA, 21 nt, synthetic construct
  source 1..21: mol_type = other RNA
cgtgagcaggtggggaagtta

SEQ ID NO: 81117 - RNA, 21 nt, synthetic construct
  source 1..21: mol_type = other RNA
cccaccggatccacggccaca

SEQ ID NO: 81118 - RNA, 21 nt, synthetic construct
  source 1..21: mol_type = other RNA
tctccagtccagggactgcaa

SEQ ID NO: 81119 - RNA, 21 nt, synthetic construct
  source 1..21: mol_type = other RNA
cccacggccaccatgtccaca

SEQ ID NO: 81120 - RNA, 21 nt, synthetic construct
  source 1..21: mol_type = other RNA
tccagagactgtccacaccta

SEQ ID NO: 81121 - RNA, 21 nt, synthetic construct
  source 1..21: mol_type = other RNA
ccagagactgtccacacctca

SEQ ID NO: 81122 - RNA, 21 nt, synthetic construct
  source 1..21: mol_type = other RNA
cgaacaccacggccaccacaa

SEQ ID NO: 81123 - RNA, 21 nt, synthetic construct
  source 1..21: mol_type = other RNA
aacaccacggccaccacacaa

SEQ ID NO: 81124 - RNA, 21 nt, synthetic construct
  source 1..21: mol_type = other RNA
acaccacggccaccacacaca

SEQ ID NO: 81125 - RNA, 21 nt, synthetic construct
  source 1..21: mol_type = other RNA
acccccttctccagggacgaa

SEQ ID NO: 81126 - RNA, 21 nt, synthetic construct
  source 1..21: mol_type = other RNA
ttggcctggtctgcaggaaca

SEQ ID NO: 81127 - RNA, 21 nt, synthetic construct
  source 1..21: mol_type = other RNA
cgtgagcaggtggggaagtta

SEQ ID NO: 81128 - RNA, 21 nt, synthetic construct
  source 1..21: mol_type = other RNA
tcctccagtccaaggactgca

SEQ ID NO: 81129 - RNA, 21 nt, synthetic construct
  source 1..21: mol_type = other RNA
caaatccacagctaccagcta

SEQ ID NO: 81130 - RNA, 21 nt, synthetic construct
  source 1..21: mol_type = other RNA
ccacagctaccagctttacaa

SEQ ID NO: 81131 - RNA, 21 nt, synthetic construct
  source 1..21: mol_type = other RNA
tcctccactccggagaccaca

SEQ ID NO: 81132 - RNA, 21 nt, synthetic construct
  source 1..21: mol_type = other RNA
cctccactccggagaccacca

SEQ ID NO: 81133 - RNA, 21 nt, synthetic construct
  source 1..21: mol_type = other RNA
ccacagcagccactacaacta

SEQ ID NO: 81134 - RNA, 21 nt, synthetic construct
  source 1..21: mol_type = other RNA
cccaccggatccacggccaca

SEQ ID NO: 81135 - RNA, 21 nt, synthetic construct
  source 1..21: mol_type = other RNA
ccaccacacccacagtcatca

SEQ ID NO: 81136 - RNA, 21 nt, synthetic construct
  source 1..21: mol_type = other RNA
ctccagagccactccctccta

SEQ ID NO: 81137 - RNA, 21 nt, synthetic construct
  source 1..21: mol_type = other RNA
cctccagtccagggactgcaa

SEQ ID NO: 81138 - RNA, 21 nt, synthetic construct
  source 1..21: mol_type = other RNA
cccacggccaccatgtccaca

SEQ ID NO: 81139 - RNA, 21 nt, synthetic construct
  source 1..21: mol_type = other RNA
tccagagactgtccacaccta

SEQ ID NO: 81140 - RNA, 21 nt, synthetic construct
  source 1..21: mol_type = other RNA
ccagagactgtccacacctca

SEQ ID NO: 81141 - RNA, 21 nt, synthetic construct
  source 1..21: mol_type = other RNA
cagaggctccacggtgaccca

SEQ ID NO: 81142 - RNA, 21 nt, synthetic construct
  source 1..21: mol_type = other RNA
cgaacaccacggccaccacaa

SEQ ID NO: 81143 - RNA, 21 nt, synthetic construct
  source 1..21: mol_type = other RNA
aacaccacggccaccacacaa

SEQ ID NO: 81144 - RNA, 21 nt, synthetic construct
  source 1..21: mol_type = other RNA
acaccacggccaccacacaca

SEQ ID NO: 81145 - RNA, 21 nt, synthetic construct
  source 1..21: mol_type = other RNA
cctcgggcatcttgggcacca

SEQ ID NO: 81146 - RNA, 21 nt, synthetic construct
  source 1..21: mol_type = other RNA
acccccttctccagggacgaa

SEQ ID NO: 81147 - RNA, 21 nt, synthetic construct
  source 1..21: mol_type = other RNA
cgggccacaccaggggcacca

SEQ ID NO: 81148 - RNA, 21 nt, synthetic construct
  source 1..21: mol_type = other RNA
ggcagtctgtgagcagcccca

SEQ ID NO: 81149 - RNA, 21 nt, synthetic construct
  source 1..21: mol_type = other RNA
ttggcctggtctgcaggaaca

SEQ ID NO: 81150 - RNA, 21 nt, synthetic construct
  source 1..21: mol_type = other RNA
cgtgagcaggtggggaagtta

SEQ ID NO: 81151 - RNA, 21 nt, synthetic construct
  source 1..21: mol_type = other RNA
cccaccggatccacggccaca

SEQ ID NO: 81152 - RNA, 21 nt, synthetic construct
  source 1..21: mol_type = other RNA
tctccagtccagggactgcaa

SEQ ID NO: 81153 - RNA, 21 nt, synthetic construct
  source 1..21: mol_type = other RNA
cccacggccaccatgtccaca

SEQ ID NO: 81154 - RNA, 21 nt, synthetic construct
  source 1..21: mol_type = other RNA
ctctgtggccaccccctctta

SEQ ID NO: 81155 - RNA, 21 nt, synthetic construct
  source 1..21: mol_type = other RNA
cgaacaccacggccaccacaa

SEQ ID NO: 81156 - RNA, 21 nt, synthetic construct
  source 1..21: mol_type = other RNA
aacaccacggccaccacacaa

SEQ ID NO: 81157 - RNA, 21 nt, synthetic construct
  source 1..21: mol_type = other RNA
acaccacggccaccacacaca

SEQ ID NO: 81158 - RNA, 21 nt, synthetic construct
  source 1..21: mol_type = other RNA
ggccacaccacggccacctca

SEQ ID NO: 81159 - RNA, 21 nt, synthetic construct
  source 1..21: mol_type = other RNA
ttggcctggtctgcaggaaca

SEQ ID NO: 81160 - RNA, 21 nt, synthetic construct
  source 1..21: mol_type = other RNA
cgtgagcaggtggggaagtta

SEQ ID NO: 81161 - RNA, 21 nt, synthetic construct
  source 1..21: mol_type = other RNA
tcctccagtccaaggactgca

SEQ ID NO: 81162 - RNA, 21 nt, synthetic construct
  source 1..21: mol_type = other RNA
cagaccaccacacccgtggca

SEQ ID NO: 81163 - RNA, 21 nt, synthetic construct
  source 1..21: mol_type = other RNA
tcctccactccggagaccaca

SEQ ID NO: 81164 - RNA, 21 nt, synthetic construct
  source 1..21: mol_type = other RNA
cctccactccggagaccacca

SEQ ID NO: 81165 - RNA, 21 nt, synthetic construct
  source 1..21: mol_type = other RNA
ccacagcagccactacaacta

SEQ ID NO: 81166 - RNA, 21 nt, synthetic construct
  source 1..21: mol_type = other RNA
ctgcgtccactggatccacga

SEQ ID NO: 81167 - RNA, 21 nt, synthetic construct
  source 1..21: mol_type = other RNA
cccaccggatccacggccaca

SEQ ID NO: 81168 - RNA, 21 nt, synthetic construct
  source 1..21: mol_type = other RNA
cctccagtccagggactgcaa

SEQ ID NO: 81169 - RNA, 21 nt, synthetic construct
  source 1..21: mol_type = other RNA
cccacggccaccatgtccaca

SEQ ID NO: 81170 - RNA, 21 nt, synthetic construct
  source 1..21: mol_type = other RNA
tccagagactgtccacaccta

SEQ ID NO: 81171 - RNA, 21 nt, synthetic construct
  source 1..21: mol_type = other RNA
ccagagactgtccacacctca

SEQ ID NO: 81172 - RNA, 21 nt, synthetic construct
  source 1..21: mol_type = other RNA
tcctccagtccaaggactgca

SEQ ID NO: 81173 - RNA, 21 nt, synthetic construct
  source 1..21: mol_type = other RNA
aaaatccacagctaccagcta

SEQ ID NO: 81174 - RNA, 21 nt, synthetic construct
  source 1..21: mol_type = other RNA
ccacagctaccagctttacaa

SEQ ID NO: 81175 - RNA, 21 nt, synthetic construct
  source 1..21: mol_type = other RNA
acagaccaccacacccatgta

SEQ ID NO: 81176 - RNA, 21 nt, synthetic construct
  source 1..21: mol_type = other RNA
tcctctactccagagaccaca

SEQ ID NO: 81177 - RNA, 21 nt, synthetic construct
  source 1..21: mol_type = other RNA
tccagagaccacccacaccta

SEQ ID NO: 81178 - RNA, 21 nt, synthetic construct
  source 1..21: mol_type = other RNA
acagccaccatgacaagggca

SEQ ID NO: 81179 - RNA, 21 nt, synthetic construct
  source 1..21: mol_type = other RNA
ccactctggggacgacccgga

SEQ ID NO: 81180 - RNA, 21 nt, synthetic construct
  source 1..21: mol_type = other RNA
tcactgagctgaccacaacaa

SEQ ID NO: 81181 - RNA, 21 nt, synthetic construct
  source 1..21: mol_type = other RNA
gtggtgaccaccatggccaca

SEQ ID NO: 81182 - RNA, 21 nt, synthetic construct
  source 1..21: mol_type = other RNA
gaccgcttccagggcgcctga

SEQ ID NO: 81183 - RNA, 21 nt, synthetic construct
  source 1..21: mol_type = other RNA
ttccagggcgcctgtcccaca

SEQ ID NO: 81184 - RNA, 21 nt, synthetic construct
  source 1..21: mol_type = other RNA
ctccgccccgctgtcctcgca

SEQ ID NO: 81185 - RNA, 21 nt, synthetic construct
  source 1..21: mol_type = other RNA
gcagcatgtggggcggctcca

SEQ ID NO: 81186 - RNA, 21 nt, synthetic construct
  source 1..21: mol_type = other RNA
tgctggggaccaccaccatga

SEQ ID NO: 81187 - RNA, 21 nt, synthetic construct
  source 1..21: mol_type = other RNA
ttcccggggagcggtgggtca

SEQ ID NO: 81188 - RNA, 21 nt, synthetic construct
  source 1..21: mol_type = other RNA
cgcccagggtcagcccccgca

SEQ ID NO: 81189 - RNA, 21 nt, synthetic construct
  source 1..21: mol_type = other RNA
cccctgctgccccgagacgga

SEQ ID NO: 81190 - RNA, 21 nt, synthetic construct
  source 1..21: mol_type = other RNA
agcctgcctgtgtgcccgcca

SEQ ID NO: 81191 - RNA, 21 nt, synthetic construct
  source 1..21: mol_type = other RNA
tgcctgtgtgcccgccaggga

SEQ ID NO: 81192 - RNA, 21 nt, synthetic construct
  source 1..21: mol_type = other RNA
tgaggaggactcctgtcaaga

SEQ ID NO: 81193 - RNA, 21 nt, synthetic construct
  source 1..21: mol_type = other RNA
tcctgtggcaccagggctgca

SEQ ID NO: 81194 - RNA, 21 nt, synthetic construct
  source 1..21: mol_type = other RNA
tggctcccccacacacccgta

SEQ ID NO: 81195 - RNA, 21 nt, synthetic construct
  source 1..21: mol_type = other RNA
gcctcctctgcggagccccca

SEQ ID NO: 81196 - RNA, 21 nt, synthetic construct
  source 1..21: mol_type = other RNA
acggccaggtcagagagggga

SEQ ID NO: 81197 - RNA, 21 nt, synthetic construct
  source 1..21: mol_type = other RNA
ggtcagagaggggtcagcata

SEQ ID NO: 81198 - RNA, 21 nt, synthetic construct
  source 1..21: mol_type = other RNA
gtggtgccgcaggcagagaca

SEQ ID NO: 81199 - RNA, 21 nt, synthetic construct
  source 1..21: mol_type = other RNA
gtcctgctggacccaaagcca

SEQ ID NO: 81200 - RNA, 21 nt, synthetic construct
  source 1..21: mol_type = other RNA
ggcacttatgccagcagccta

SEQ ID NO: 81201 - RNA, 21 nt, synthetic construct
  source 1..21: mol_type = other RNA
tgcaaccttcccaggcgccca

SEQ ID NO: 81202 - RNA, 21 nt, synthetic construct
  source 1..21: mol_type = other RNA
tccagggacaacacccatcaa

SEQ ID NO: 81203 - RNA, 21 nt, synthetic construct
  source 1..21: mol_type = other RNA
ccccagcgcgcgcagctctga

SEQ ID NO: 81204 - RNA, 21 nt, synthetic construct
  source 1..21: mol_type = other RNA
cctccaccccgggaacagcta

SEQ ID NO: 81205 - RNA, 21 nt, synthetic construct
  source 1..21: mol_type = other RNA
cctccaccccgggaacagcta

SEQ ID NO: 81206 - RNA, 21 nt, synthetic construct
  source 1..21: mol_type = other RNA
gcagggcacaccatggatgga

SEQ ID NO: 81207 - RNA, 21 nt, synthetic construct
  source 1..21: mol_type = other RNA
ggctcagccatcctgcacaca

SEQ ID NO: 81208 - RNA, 21 nt, synthetic construct
  source 1..21: mol_type = other RNA
cccttccactcgaactgcata

SEQ ID NO: 81209 - RNA, 21 nt, synthetic construct
  source 1..21: mol_type = other RNA
ccttccactcgaactgcatga

SEQ ID NO: 81210 - RNA, 21 nt, synthetic construct
  source 1..21: mol_type = other RNA
aggcagctgcgagtacatcta

SEQ ID NO: 81211 - RNA, 21 nt, synthetic construct
  source 1..21: mol_type = other RNA
atcggccccaataaccacgga

SEQ ID NO: 81212 - RNA, 21 nt, synthetic construct
  source 1..21: mol_type = other RNA
tccacagtgctgaccacgaaa

SEQ ID NO: 81213 - RNA, 21 nt, synthetic construct
  source 1..21: mol_type = other RNA
tccacagtgctgaccacgaaa

SEQ ID NO: 81214 - RNA, 21 nt, synthetic construct
  source 1..21: mol_type = other RNA
agcggtgggtcagcaactgca

SEQ ID NO: 81215 - RNA, 21 nt, synthetic construct
  source 1..21: mol_type = other RNA
ccttccagcactgagaagcaa

SEQ ID NO: 81216 - RNA, 21 nt, synthetic construct
  source 1..21: mol_type = other RNA
ccttccagcactgagaagcaa

SEQ ID NO: 81217 - RNA, 21 nt, synthetic construct
  source 1..21: mol_type = other RNA
ccttccagcactgagaagcaa

SEQ ID NO: 81218 - RNA, 21 nt, synthetic construct
  source 1..21: mol_type = other RNA
ccttccagcactgagaagcaa

SEQ ID NO: 81219 - RNA, 21 nt, synthetic construct
  source 1..21: mol_type = other RNA
ccttccagcactgagaagcaa

SEQ ID NO: 81220 - RNA, 21 nt, synthetic construct
  source 1..21: mol_type = other RNA
acagggtgtgcagcccccata

SEQ ID NO: 81221 - RNA, 21 nt, synthetic construct
  source 1..21: mol_type = other RNA
ggtggcgagagggccgggtga

SEQ ID NO: 81222 - RNA, 21 nt, synthetic construct
  source 1..21: mol_type = other RNA
ctggctgagctgcggaagtga

SEQ ID NO: 81223 - RNA, 21 nt, synthetic construct
  source 1..21: mol_type = other RNA
aacagaccaccacacccatga

SEQ ID NO: 81224 - RNA, 21 nt, synthetic construct
  source 1..21: mol_type = other RNA
cacagaccaccacacccatga

SEQ ID NO: 81225 - RNA, 21 nt, synthetic construct
  source 1..21: mol_type = other RNA
gacggcgtctgcaccaagtaa

SEQ ID NO: 81226 - RNA, 21 nt, synthetic construct
  source 1..21: mol_type = other RNA
cacctatgaggacaggaccta

SEQ ID NO: 81227 - RNA, 21 nt, synthetic construct
  source 1..21: mol_type = other RNA
tacgccaaccagacctgtgga

SEQ ID NO: 81228 - RNA, 21 nt, synthetic construct
  source 1..21: mol_type = other RNA
cgcgctgtcctcctatgtgca

SEQ ID NO: 81229 - RNA, 21 nt, synthetic construct
  source 1..21: mol_type = other RNA
tatgtcctcatgagagagata

SEQ ID NO: 81230 - RNA, 21 nt, synthetic construct
  source 1..21: mol_type = other RNA
agcacctgcccatcaaagtga

SEQ ID NO: 81231 - RNA, 21 nt, synthetic construct
  source 1..21: mol_type = other RNA
ggactaccccaagtctgaaca

SEQ ID NO: 81232 - RNA, 21 nt, synthetic construct
  source 1..21: mol_type = other RNA
cgtgggctgtttcagcacaca

SEQ ID NO: 81233 - RNA, 21 nt, synthetic construct
  source 1..21: mol_type = other RNA
ggactacaagggcagggtcta

SEQ ID NO: 81234 - RNA, 21 nt, synthetic construct
  source 1..21: mol_type = other RNA
gaccacagcaaccgaaaagaa

SEQ ID NO: 81235 - RNA, 21 nt, synthetic construct
  source 1..21: mol_type = other RNA
aaagtgctgaccaccacggca

SEQ ID NO: 81236 - RNA, 21 nt, synthetic construct
  source 1..21: mol_type = other RNA
gtgggagtgcagccaccggca

SEQ ID NO: 81237 - RNA, 21 nt, synthetic construct
  source 1..21: mol_type = other RNA
ggggagcctcaggaaaaccga

SEQ ID NO: 81238 - RNA, 21 nt, synthetic construct
  source 1..21: mol_type = other RNA
ctgccccccaggcacggtgca

SEQ ID NO: 81239 - RNA, 21 nt, synthetic construct
  source 1..21: mol_type = other RNA
gctttgaggacccctgctcca

SEQ ID NO: 81240 - RNA, 21 nt, synthetic construct
  source 1..21: mol_type = other RNA
gggcacctgcgtggcctacga

SEQ ID NO: 81241 - RNA, 21 nt, synthetic construct
  source 1..21: mol_type = other RNA
gactgcaccaggactacaaga

SEQ ID NO: 81242 - RNA, 21 nt, synthetic construct
  source 1..21: mol_type = other RNA
cccccactccacgacaagcca

SEQ ID NO: 81243 - RNA, 21 nt, synthetic construct
  source 1..21: mol_type = other RNA
ccccactccacgacaagccca

SEQ ID NO: 81244 - RNA, 21 nt, synthetic construct
  source 1..21: mol_type = other RNA
cccagcagccccacatcggca

SEQ ID NO: 81245 - RNA, 21 nt, synthetic construct
  source 1..21: mol_type = other RNA
cccagcagccccacatcggca

SEQ ID NO: 81246 - RNA, 21 nt, synthetic construct
  source 1..21: mol_type = other RNA
cccagcagccccacatcggca

SEQ ID NO: 81247 - RNA, 21 nt, synthetic construct
  source 1..21: mol_type = other RNA
cccagcagccccacatcggca

SEQ ID NO: 81248 - RNA, 21 nt, synthetic construct
  source 1..21: mol_type = other RNA
atgtcctcatgagagagatca

SEQ ID NO: 81249 - RNA, 21 nt, synthetic construct
  source 1..21: mol_type = other RNA
gtgtacctgcctctctgggga

SEQ ID NO: 81250 - RNA, 21 nt, synthetic construct
  source 1..21: mol_type = other RNA
gggacacccaggacccaacga

SEQ ID NO: 81251 - RNA, 21 nt, synthetic construct
  source 1..21: mol_type = other RNA
tgctggggccggcctttgcga

SEQ ID NO: 81252 - RNA, 21 nt, synthetic construct
  source 1..21: mol_type = other RNA
cccactccacgacaagcccga

SEQ ID NO: 81253 - RNA, 21 nt, synthetic construct
  source 1..21: mol_type = other RNA
tctgtgtccctgcgcccatga

SEQ ID NO: 81254 - RNA, 21 nt, synthetic construct
  source 1..21: mol_type = other RNA
cacagccttgaggcctgcaca

SEQ ID NO: 81255 - RNA, 21 nt, synthetic construct
  source 1..21: mol_type = other RNA
gtcctgggaccggaagaccaa

SEQ ID NO: 81256 - RNA, 21 nt, synthetic construct
  source 1..21: mol_type = other RNA
acccgtcactgtcttccccaa

SEQ ID NO: 81257 - RNA, 21 nt, synthetic construct
  source 1..21: mol_type = other RNA
aacctgcagaagttggatgga

SEQ ID NO: 81258 - RNA, 21 nt, synthetic construct
  source 1..21: mol_type = other RNA
tcacgcactctggctgcctga

SEQ ID NO: 81259 - RNA, 21 nt, synthetic construct
  source 1..21: mol_type = other RNA
aacttcaaccagaaccaggca

SEQ ID NO: 81260 - RNA, 21 nt, synthetic construct
  source 1..21: mol_type = other RNA
gccacgacgcgggcctgtgta

SEQ ID NO: 81261 - RNA, 21 nt, synthetic construct
  source 1..21: mol_type = other RNA
aacgccattcaccttcaccaa

SEQ ID NO: 81262 - RNA, 21 nt, synthetic construct
  source 1..21: mol_type = other RNA
aggccgagagcttccccaaca

SEQ ID NO: 81263 - RNA, 21 nt, synthetic construct
  source 1..21: mol_type = other RNA
caccacccacatcacagagca

SEQ ID NO: 81264 - RNA, 21 nt, synthetic construct
  source 1..21: mol_type = other RNA
caccacccacatcacagagca

SEQ ID NO: 81265 - RNA, 21 nt, synthetic construct
  source 1..21: mol_type = other RNA
caccacccacatcacagagca

SEQ ID NO: 81266 - RNA, 21 nt, synthetic construct
  source 1..21: mol_type = other RNA
caccacccacatcacagagca

SEQ ID NO: 81267 - RNA, 21 nt, synthetic construct
  source 1..21: mol_type = other RNA
cctcttccacaacaacaccga

SEQ ID NO: 81268 - RNA, 21 nt, synthetic construct
  source 1..21: mol_type = other RNA
ggaagttcaagatgtgcttca

SEQ ID NO: 81269 - RNA, 21 nt, synthetic construct
  source 1..21: mol_type = other RNA
ggaagttcaagatgtgcttca

SEQ ID NO: 81270 - RNA, 21 nt, synthetic construct
  source 1..21: mol_type = other RNA
ggaagttcaagatgtgcttca

SEQ ID NO: 81271 - RNA, 21 nt, synthetic construct
  source 1..21: mol_type = other RNA
ggaagttcaagatgtgcttca

SEQ ID NO: 81272 - RNA, 21 nt, synthetic construct
  source 1..21: mol_type = other RNA
caaccagaaccaggctgacga

SEQ ID NO: 81273 - RNA, 21 nt, synthetic construct
  source 1..21: mol_type = other RNA
ggggcaccctgcctaaaaaca

SEQ ID NO: 81274 - RNA, 21 nt, synthetic construct
  source 1..21: mol_type = other RNA
cctaaggacatagagtgccaa

SEQ ID NO: 81275 - RNA, 21 nt, synthetic construct
  source 1..21: mol_type = other RNA
ccctcctctgccctagggaca

SEQ ID NO: 81276 - RNA, 21 nt, synthetic construct
  source 1..21: mol_type = other RNA
gggccgtctgtgagcagccca

SEQ ID NO: 81277 - RNA, 21 nt, synthetic construct
  source 1..21: mol_type = other RNA
tgccctcctccactccgggga

SEQ ID NO: 81278 - RNA, 21 nt, synthetic construct
  source 1..21: mol_type = other RNA
ccctcctctgccctagggaca

SEQ ID NO: 81279 - RNA, 21 nt, synthetic construct
  source 1..21: mol_type = other RNA
caggaccacggccacggccaa

SEQ ID NO: 81280 - RNA, 21 nt, synthetic construct
  source 1..21: mol_type = other RNA
gggccgtctgtgagcagccca

SEQ ID NO: 81281 - RNA, 21 nt, synthetic construct
  source 1..21: mol_type = other RNA
ccctcctctgccctagggaca

SEQ ID NO: 81282 - RNA, 21 nt, synthetic construct
  source 1..21: mol_type = other RNA
ccctcctctgccctagggaca

SEQ ID NO: 81283 - RNA, 21 nt, synthetic construct
  source 1..21: mol_type = other RNA
caggaccacggccacggccaa

SEQ ID NO: 81284 - RNA, 21 nt, synthetic construct
  source 1..21: mol_type = other RNA
gggccgtctgtgagcagccca

SEQ ID NO: 81285 - RNA, 21 nt, synthetic construct
  source 1..21: mol_type = other RNA
tgccctcctccactccgggga

SEQ ID NO: 81286 - RNA, 21 nt, synthetic construct
  source 1..21: mol_type = other RNA
caagcacctgcccatcaaaga

SEQ ID NO: 81287 - RNA, 21 nt, synthetic construct
  source 1..21: mol_type = other RNA
gggggagcctcaggaaaacca

SEQ ID NO: 81288 - RNA, 21 nt, synthetic construct
  source 1..21: mol_type = other RNA
cgactgcaccaggactacaaa

SEQ ID NO: 81289 - RNA, 21 nt, synthetic construct
  source 1..21: mol_type = other RNA
cccggacccgctgcccttgca

SEQ ID NO: 81290 - RNA, 21 nt, synthetic construct
  source 1..21: mol_type = other RNA
tccacagaacccactgtccca

SEQ ID NO: 81291 - RNA, 21 nt, synthetic construct
  source 1..21: mol_type = other RNA
gtcccccactccacgacaaga

SEQ ID NO: 81292 - RNA, 21 nt, synthetic construct
  source 1..21: mol_type = other RNA
gtgtgtccgcgaggtctgcca

SEQ ID NO: 81293 - RNA, 21 nt, synthetic construct
  source 1..21: mol_type = other RNA
ggccccaggtaccaccaccta

SEQ ID NO: 81294 - RNA, 21 nt, synthetic construct
  source 1..21: mol_type = other RNA
acgttctgtccaagaaatgta

SEQ ID NO: 81295 - RNA, 21 nt, synthetic construct
  source 1..21: mol_type = other RNA
agtgcgtggcccagtgtggca

SEQ ID NO: 81296 - RNA, 21 nt, synthetic construct
  source 1..21: mol_type = other RNA
tggacagagtggtttgatgaa

SEQ ID NO: 81297 - RNA, 21 nt, synthetic construct
  source 1..21: mol_type = other RNA
ggacagagtggtttgatgaga

SEQ ID NO: 81298 - RNA, 21 nt, synthetic construct
  source 1..21: mol_type = other RNA
tgtgatctgatgctgagccaa

SEQ ID NO: 81299 - RNA, 21 nt, synthetic construct
  source 1..21: mol_type = other RNA
cactgtcttccccagcctgaa

SEQ ID NO: 81300 - RNA, 21 nt, synthetic construct
  source 1..21: mol_type = other RNA
cctgccggaaccccagtggga

SEQ ID NO: 81301 - RNA, 21 nt, synthetic construct
  source 1..21: mol_type = other RNA
aatccgtgtgttctgctgcaa

SEQ ID NO: 81302 - RNA, 21 nt, synthetic construct
  source 1..21: mol_type = other RNA
aatccgtgtgttctgctgcaa

SEQ ID NO: 81303 - RNA, 21 nt, synthetic construct
  source 1..21: mol_type = other RNA
aatccgtgtgttctgctgcaa

SEQ ID NO: 81304 - RNA, 21 nt, synthetic construct
  source 1..21: mol_type = other RNA
aatccgtgtgttctgctgcaa

SEQ ID NO: 81305 - RNA, 21 nt, synthetic construct
  source 1..21: mol_type = other RNA
cgcagctgcccctgtcggcaa

SEQ ID NO: 81306 - RNA, 21 nt, synthetic construct
  source 1..21: mol_type = other RNA
gcagctgcccctgtcggcaga

SEQ ID NO: 81307 - RNA, 21 nt, synthetic construct
  source 1..21: mol_type = other RNA
cctctgccctagggaccacca

SEQ ID NO: 81308 - RNA, 21 nt, synthetic construct
  source 1..21: mol_type = other RNA
cctctgccctagggaccacca

SEQ ID NO: 81309 - RNA, 21 nt, synthetic construct
  source 1..21: mol_type = other RNA
cctctgccctagggaccacca

SEQ ID NO: 81310 - RNA, 21 nt, synthetic construct
  source 1..21: mol_type = other RNA
cctctgccctagggaccacca

SEQ ID NO: 81311 - RNA, 21 nt, synthetic construct
  source 1..21: mol_type = other RNA
cgaggccacctacaagcctga

SEQ ID NO: 81312 - RNA, 21 nt, synthetic construct
  source 1..21: mol_type = other RNA
gccacttcatcacctttgata

SEQ ID NO: 81313 - RNA, 21 nt, synthetic construct
  source 1..21: mol_type = other RNA
tggccgtgtcctgggaccgga

SEQ ID NO: 81314 - RNA, 21 nt, synthetic construct
  source 1..21: mol_type = other RNA
cttcaatgaggaccagatgaa

SEQ ID NO: 81315 - RNA, 21 nt, synthetic construct
  source 1..21: mol_type = other RNA
ccttgaggcctgcacctgcaa

SEQ ID NO: 81316 - RNA, 21 nt, synthetic construct
  source 1..21: mol_type = other RNA
ctctgccctagggaccaccca

SEQ ID NO: 81317 - RNA, 21 nt, synthetic construct
  source 1..21: mol_type = other RNA
ctctgccctagggaccaccca

SEQ ID NO: 81318 - RNA, 21 nt, synthetic construct
  source 1..21: mol_type = other RNA
ctctgccctagggaccaccca

SEQ ID NO: 81319 - RNA, 21 nt, synthetic construct
  source 1..21: mol_type = other RNA
ctctgccctagggaccaccca

SEQ ID NO: 81320 - RNA, 21 nt, synthetic construct
  source 1..21: mol_type = other RNA
gtcctcctcagtcctcaccaa

SEQ ID NO: 81321 - RNA, 21 nt, synthetic construct
  source 1..21: mol_type = other RNA
cccacttctctactccctgca

SEQ ID NO: 81322 - RNA, 21 nt, synthetic construct
  source 1..21: mol_type = other RNA
ccggggagtgtgcagtgacta

SEQ ID NO: 81323 - RNA, 21 nt, synthetic construct
  source 1..21: mol_type = other RNA
cgccaacacctggaaggccca

SEQ ID NO: 81324 - RNA, 21 nt, synthetic construct
  source 1..21: mol_type = other RNA
tgcacggctgtggctgcctaa

SEQ ID NO: 81325 - RNA, 21 nt, synthetic construct
  source 1..21: mol_type = other RNA
caggacgtcatctacaacaca

SEQ ID NO: 81326 - RNA, 21 nt, synthetic construct
  source 1..21: mol_type = other RNA
cagcctaaggacatagagtga

SEQ ID NO: 81327 - RNA, 21 nt, synthetic construct
  source 1..21: mol_type = other RNA
cagggctttgagtacaagaga

SEQ ID NO: 81328 - RNA, 21 nt, synthetic construct
  source 1..21: mol_type = other RNA
ccacgaggagacggtgcccta

SEQ ID NO: 81329 - RNA, 21 nt, synthetic construct
  source 1..21: mol_type = other RNA
gtgtccctgcgcccatggcta

SEQ ID NO: 81330 - RNA, 21 nt, synthetic construct
  source 1..21: mol_type = other RNA
cctatgtcctcatgagagaga

SEQ ID NO: 81331 - RNA, 21 nt, synthetic construct
  source 1..21: mol_type = other RNA
aagctcttcgtggagagctaa

SEQ ID NO: 81332 - RNA, 21 nt, synthetic construct
  source 1..21: mol_type = other RNA
tgtggcatgtcctggaactca

SEQ ID NO: 81333 - RNA, 21 nt, synthetic construct
  source 1..21: mol_type = other RNA
atgaggactaccccaagtcta

SEQ ID NO: 81334 - RNA, 21 nt, synthetic construct
  source 1..21: mol_type = other RNA
ctgcaccaggactacaaggga

SEQ ID NO: 81335 - RNA, 21 nt, synthetic construct
  source 1..21: mol_type = other RNA
cccttcttcaatgaggaccaa

SEQ ID NO: 81336 - RNA, 21 nt, synthetic construct
  source 1..21: mol_type = other RNA
cctccctcagtgccagcacga

SEQ ID NO: 81337 - RNA, 21 nt, synthetic construct
  source 1..21: mol_type = other RNA
tgatcctgtttgaccaaatta

SEQ ID NO: 81338 - RNA, 21 nt, synthetic construct
  source 1..21: mol_type = other RNA
cgccgcgctgtcctcctatga

SEQ ID NO: 81339 - RNA, 21 nt, synthetic construct
  source 1..21: mol_type = other RNA
tgtgggaccaccggcaccaca

SEQ ID NO: 81340 - RNA, 21 nt, synthetic construct
  source 1..21: mol_type = other RNA
ctccaaggccatcaagctcta

SEQ ID NO: 81341 - RNA, 21 nt, synthetic construct
  source 1..21: mol_type = other RNA
gccatcaatgactttgccaca

SEQ ID NO: 81342 - RNA, 21 nt, synthetic construct
  source 1..21: mol_type = other RNA
cctgccgctcccaggttgaca

SEQ ID NO: 81343 - RNA, 21 nt, synthetic construct
  source 1..21: mol_type = other RNA
taccagccctgcggggcacca

SEQ ID NO: 81344 - RNA, 21 nt, synthetic construct
  source 1..21: mol_type = other RNA
ggcctggtgtgcaggaactga

SEQ ID NO: 81345 - RNA, 21 nt, synthetic construct
  source 1..21: mol_type = other RNA
cgtggaatgcagcctggacta

SEQ ID NO: 81346 - RNA, 21 nt, synthetic construct
  source 1..21: mol_type = other RNA
cgtggaatgcagcctggacta

SEQ ID NO: 81347 - RNA, 21 nt, synthetic construct
  source 1..21: mol_type = other RNA
cgtggaatgcagcctggacta

SEQ ID NO: 81348 - RNA, 21 nt, synthetic construct
  source 1..21: mol_type = other RNA
cgtggaatgcagcctggacta

SEQ ID NO: 81349 - RNA, 21 nt, synthetic construct
  source 1..21: mol_type = other RNA
ctgcagggcatttggacagta

SEQ ID NO: 81350 - RNA, 21 nt, synthetic construct
  source 1..21: mol_type = other RNA
cctggagaactgcacggtgga

SEQ ID NO: 81351 - RNA, 21 nt, synthetic construct
  source 1..21: mol_type = other RNA
gcgtgaacaagcacctgccca

SEQ ID NO: 81352 - RNA, 21 nt, synthetic construct
  source 1..21: mol_type = other RNA
cgtgaacaagcacctgcccaa

SEQ ID NO: 81353 - RNA, 21 nt, synthetic construct
  source 1..21: mol_type = other RNA
tccacctttgacggcacctca

SEQ ID NO: 81354 - RNA, 21 nt, synthetic construct
  source 1..21: mol_type = other RNA
agcctggtgtccccctgcgga

SEQ ID NO: 81355 - RNA, 21 nt, synthetic construct
  source 1..21: mol_type = other RNA
agcctggtgtccccctgcgga

SEQ ID NO: 81356 - RNA, 21 nt, synthetic construct
  source 1..21: mol_type = other RNA
agcctggtgtccccctgcgga

SEQ ID NO: 81357 - RNA, 21 nt, synthetic construct
  source 1..21: mol_type = other RNA
ggaacctgcagaagttggata

SEQ ID NO: 81358 - RNA, 21 nt, synthetic construct
  source 1..21: mol_type = other RNA
ccaggaacagctttgaggaca

SEQ ID NO: 81359 - RNA, 21 nt, synthetic construct
  source 1..21: mol_type = other RNA
ccccaagtctgaacaacttga

SEQ ID NO: 81360 - RNA, 21 nt, synthetic construct
  source 1..21: mol_type = other RNA
ggacacctgctccaaccccca

SEQ ID NO: 81361 - RNA, 21 nt, synthetic construct
  source 1..21: mol_type = other RNA
gggaacctgcagaagttggaa

SEQ ID NO: 81362 - RNA, 21 nt, synthetic construct
  source 1..21: mol_type = other RNA
ggcagccaacatcaccctgta

SEQ ID NO: 81363 - RNA, 21 nt, synthetic construct
  source 1..21: mol_type = other RNA
gcagccttcgccaacacctga

SEQ ID NO: 81364 - RNA, 21 nt, synthetic construct
  source 1..21: mol_type = other RNA
caggtgaatgagacctggaca

SEQ ID NO: 81365 - RNA, 21 nt, synthetic construct
  source 1..21: mol_type = other RNA
gctgtcctcctatgtgcacga

SEQ ID NO: 81366 - RNA, 21 nt, synthetic construct
  source 1..21: mol_type = other RNA
tcccccactccacgacaagca

SEQ ID NO: 81367 - RNA, 21 nt, synthetic construct
  source 1..21: mol_type = other RNA
ccactccacgacaagcccgga

SEQ ID NO: 81368 - RNA, 21 nt, synthetic construct
  source 1..21: mol_type = other RNA
gccagcaggtggactgtgaca

SEQ ID NO: 81369 - RNA, 21 nt, synthetic construct
  source 1..21: mol_type = other RNA
gcctggtgtccccctgcggga

SEQ ID NO: 81370 - RNA, 21 nt, synthetic construct
  source 1..21: mol_type = other RNA
gcctggtgtccccctgcggga

SEQ ID NO: 81371 - RNA, 21 nt, synthetic construct
  source 1..21: mol_type = other RNA
gcctggtgtccccctgcggga

SEQ ID NO: 81372 - RNA, 21 nt, synthetic construct
  source 1..21: mol_type = other RNA
gtgtcctcctcagtcctcaca

SEQ ID NO: 81373 - RNA, 21 nt, synthetic construct
  source 1..21: mol_type = other RNA
tgtttgtcaggctggacccca

SEQ ID NO: 81374 - RNA, 21 nt, synthetic construct
  source 1..21: mol_type = other RNA
ctgtcctcctatgtgcacgca

SEQ ID NO: 81375 - RNA, 21 nt, synthetic construct
  source 1..21: mol_type = other RNA
gatggccgtgtcctgggacca

SEQ ID NO: 81376 - RNA, 21 nt, synthetic construct
  source 1..21: mol_type = other RNA
tggaccctggagaactgcaca

SEQ ID NO: 81377 - RNA, 21 nt, synthetic construct
  source 1..21: mol_type = other RNA
tgatgctgagccaggtcttta

SEQ ID NO: 81378 - RNA, 21 nt, synthetic construct
  source 1..21: mol_type = other RNA
agtgctgaccaccacggccaa

SEQ ID NO: 81379 - RNA, 21 nt, synthetic construct
  source 1..21: mol_type = other RNA
caggacctgccgtgccctgga

SEQ ID NO: 81380 - RNA, 21 nt, synthetic construct
  source 1..21: mol_type = other RNA
caaccccaagcccttccacta

SEQ ID NO: 81381 - RNA, 21 nt, synthetic construct
  source 1..21: mol_type = other RNA
atggcaacaccctcctctaga

SEQ ID NO: 81382 - RNA, 21 nt, synthetic construct
  source 1..21: mol_type = other RNA
atggcaacaccctcctctaga

SEQ ID NO: 81383 - RNA, 21 nt, synthetic construct
  source 1..21: mol_type = other RNA
atggcaacaccctcctctaga

SEQ ID NO: 81384 - RNA, 21 nt, synthetic construct
  source 1..21: mol_type = other RNA
atggcaacaccctcctctaga

SEQ ID NO: 81385 - RNA, 21 nt, synthetic construct
  source 1..21: mol_type = other RNA
atggcaacaccctcctctaga

SEQ ID NO: 81386 - RNA, 21 nt, synthetic construct
  source 1..21: mol_type = other RNA
ctgccagtcctgcgtgtgtga

SEQ ID NO: 81387 - RNA, 21 nt, synthetic construct
  source 1..21: mol_type = other RNA
gaggacagtgccctgctggaa

SEQ ID NO: 81388 - RNA, 21 nt, synthetic construct
  source 1..21: mol_type = other RNA
agtgccaggacctgccgtgca

SEQ ID NO: 81389 - RNA, 21 nt, synthetic construct
  source 1..21: mol_type = other RNA
ggccagatgtgcggcctgtga

SEQ ID NO: 81390 - RNA, 21 nt, synthetic construct
  source 1..21: mol_type = other RNA
cgggcgcctgtgtgcccgcca

SEQ ID NO: 81391 - RNA, 21 nt, synthetic construct
  source 1..21: mol_type = other RNA
ggcccaggactactgtgggga

SEQ ID NO: 81392 - RNA, 21 nt, synthetic construct
  source 1..21: mol_type = other RNA
cgtcaccgagaacatccccta

SEQ ID NO: 81393 - RNA, 21 nt, synthetic construct
  source 1..21: mol_type = other RNA
tgcctggtggacctgcctgga

SEQ ID NO: 81394 - RNA, 21 nt, synthetic construct
  source 1..21: mol_type = other RNA
gtggcatccagtgcgctcaca

SEQ ID NO: 81395 - RNA, 21 nt, synthetic construct
  source 1..21: mol_type = other RNA
caagtctgaacaacttggaga

SEQ ID NO: 81396 - RNA, 21 nt, synthetic construct
  source 1..21: mol_type = other RNA
agcaggtggggaagttcaaga

SEQ ID NO: 81397 - RNA, 21 nt, synthetic construct
  source 1..21: mol_type = other RNA
agctaccagctttacagccaa

SEQ ID NO: 81398 - RNA, 21 nt, synthetic construct
  source 1..21: mol_type = other RNA
agcaggtggggaagttcaaga

SEQ ID NO: 81399 - RNA, 21 nt, synthetic construct
  source 1..21: mol_type = other RNA
agcaggtggggaagttcaaga

SEQ ID NO: 81400 - RNA, 21 nt, synthetic construct
  source 1..21: mol_type = other RNA
agctaccagctttacagccaa

SEQ ID NO: 81401 - RNA, 21 nt, synthetic construct
  source 1..21: mol_type = other RNA
agcaggtggggaagttcaaga

SEQ ID NO: 81402 - RNA, 21 nt, synthetic construct
  source 1..21: mol_type = other RNA
agctaccagctttacagccaa

SEQ ID NO: 81403 - RNA, 21 nt, synthetic construct
  source 1..21: mol_type = other RNA
tgggaacctgcagaagttgga

SEQ ID NO: 81404 - RNA, 21 nt, synthetic construct
  source 1..21: mol_type = other RNA
ctgtgccgctgccccacctga

SEQ ID NO: 81405 - RNA, 21 nt, synthetic construct
  source 1..21: mol_type = other RNA
acgcactctggctgcctgcca

SEQ ID NO: 81406 - RNA, 21 nt, synthetic construct
  source 1..21: mol_type = other RNA
cccctcgggcagtgcccctga

SEQ ID NO: 81407 - RNA, 21 nt, synthetic construct
  source 1..21: mol_type = other RNA
acgctcagcctggacggcgga

SEQ ID NO: 81408 - RNA, 21 nt, synthetic construct
  source 1..21: mol_type = other RNA
tgtgggaacttcaaccagaaa

SEQ ID NO: 81409 - RNA, 21 nt, synthetic construct
  source 1..21: mol_type = other RNA
gtgggaacttcaaccagaaca

SEQ ID NO: 81410 - RNA, 21 nt, synthetic construct
  source 1..21: mol_type = other RNA
gaacagctttgaggaccccta

SEQ ID NO: 81411 - RNA, 21 nt, synthetic construct
  source 1..21: mol_type = other RNA
caccaagtacatgcagaacta

SEQ ID NO: 81412 - RNA, 21 nt, synthetic construct
  source 1..21: mol_type = other RNA
cacacgctggacgtgggctga

SEQ ID NO: 81413 - RNA, 21 nt, synthetic construct
  source 1..21: mol_type = other RNA
agtgcagccaccggctctgca

SEQ ID NO: 81414 - RNA, 21 nt, synthetic construct
  source 1..21: mol_type = other RNA
ggccacttcatcacctttgaa

SEQ ID NO: 81415 - RNA, 21 nt, synthetic construct
  source 1..21: mol_type = other RNA
tgctccaaggccatcaagcta

SEQ ID NO: 81416 - RNA, 21 nt, synthetic construct
  source 1..21: mol_type = other RNA
aaccccagtgggcactgccta

SEQ ID NO: 81417 - RNA, 21 nt, synthetic construct
  source 1..21: mol_type = other RNA
tcaatgaggaccagatgaaga

SEQ ID NO: 81418 - RNA, 21 nt, synthetic construct
  source 1..21: mol_type = other RNA
tgcgtggcccagtgtggctga

SEQ ID NO: 81419 - RNA, 21 nt, synthetic construct
  source 1..21: mol_type = other RNA
gcgctcacagccttgaggcca

SEQ ID NO: 81420 - RNA, 21 nt, synthetic construct
  source 1..21: mol_type = other RNA
tttgaaaacctgaggcagaga

SEQ ID NO: 81421 - RNA, 21 nt, synthetic construct
  source 1..21: mol_type = other RNA
ttgaaaacctgaggcagagaa

SEQ ID NO: 81422 - RNA, 21 nt, synthetic construct
  source 1..21: mol_type = other RNA
gccctccctcagtgccagcaa

SEQ ID NO: 81423 - RNA, 21 nt, synthetic construct
  source 1..21: mol_type = other RNA
agtgccagcacggagcctgca

SEQ ID NO: 81424 - RNA, 21 nt, synthetic construct
  source 1..21: mol_type = other RNA
aagtgtgagtggacagagtga

SEQ ID NO: 81425 - RNA, 21 nt, synthetic construct
  source 1..21: mol_type = other RNA
tcgtggaatgcagcctggaca

SEQ ID NO: 81426 - RNA, 21 nt, synthetic construct
  source 1..21: mol_type = other RNA
aggaccacggccacggccaca

SEQ ID NO: 81427 - RNA, 21 nt, synthetic construct
  source 1..21: mol_type = other RNA
tcgtggaatgcagcctggaca

SEQ ID NO: 81428 - RNA, 21 nt, synthetic construct
  source 1..21: mol_type = other RNA
tcgtggaatgcagcctggaca

SEQ ID NO: 81429 - RNA, 21 nt, synthetic construct
  source 1..21: mol_type = other RNA
aggaccacggccacggccaca

SEQ ID NO: 81430 - RNA, 21 nt, synthetic construct
  source 1..21: mol_type = other RNA
tcgtggaatgcagcctggaca

SEQ ID NO: 81431 - RNA, 21 nt, synthetic construct
  source 1..21: mol_type = other RNA
tgcggcacctgcaccaacaaa

SEQ ID NO: 81432 - RNA, 21 nt, synthetic construct
  source 1..21: mol_type = other RNA
agaggcccaggccatgcagca

SEQ ID NO: 81433 - RNA, 21 nt, synthetic construct
  source 1..21: mol_type = other RNA
tgtccctgcgcccatggctca

SEQ ID NO: 81434 - RNA, 21 nt, synthetic construct
  source 1..21: mol_type = other RNA
accaagtactacgaggcctga

SEQ ID NO: 81435 - RNA, 21 nt, synthetic construct
  source 1..21: mol_type = other RNA
cgcccaggacctgtgccgcta

SEQ ID NO: 81436 - RNA, 21 nt, synthetic construct
  source 1..21: mol_type = other RNA
aggacctgccgtgccctggca

SEQ ID NO: 81437 - RNA, 21 nt, synthetic construct
  source 1..21: mol_type = other RNA
cagccttcgccaacacctgga

SEQ ID NO: 81438 - RNA, 21 nt, synthetic construct
  source 1..21: mol_type = other RNA
ggaacagctttgaggacccca

SEQ ID NO: 81439 - RNA, 21 nt, synthetic construct
  source 1..21: mol_type = other RNA
caccaagtactacgaggccta

SEQ ID NO: 81440 - RNA, 21 nt, synthetic construct
  source 1..21: mol_type = other RNA
aggtctgccgctggtccagca

SEQ ID NO: 81441 - RNA, 21 nt, synthetic construct
  source 1..21: mol_type = other RNA
gcctggtgtgcaggaactgga

SEQ ID NO: 81442 - RNA, 21 nt, synthetic construct
  source 1..21: mol_type = other RNA
aggtgtttgtcaggctggaca

SEQ ID NO: 81443 - RNA, 21 nt, synthetic construct
  source 1..21: mol_type = other RNA
gcagaactgccccaagtccca

SEQ ID NO: 81444 - RNA, 21 nt, synthetic construct
  source 1..21: mol_type = other RNA
cagaactgccccaagtcccaa

SEQ ID NO: 81445 - RNA, 21 nt, synthetic construct
  source 1..21: mol_type = other RNA
caagctcttcgtggagagcta

SEQ ID NO: 81446 - RNA, 21 nt, synthetic construct
  source 1..21: mol_type = other RNA
gtctgaacaacttggagggga

SEQ ID NO: 81447 - RNA, 21 nt, synthetic construct
  source 1..21: mol_type = other RNA
cacctgcaccaacaaccagaa

SEQ ID NO: 81448 - RNA, 21 nt, synthetic construct
  source 1..21: mol_type = other RNA
cccgctccagtttgggaacca

SEQ ID NO: 81449 - RNA, 21 nt, synthetic construct
  source 1..21: mol_type = other RNA
agtgcccggacccgctgccca

SEQ ID NO: 81450 - RNA, 21 nt, synthetic construct
  source 1..21: mol_type = other RNA
tggggccggcctttgcggaga

SEQ ID NO: 81451 - RNA, 21 nt, synthetic construct
  source 1..21: mol_type = other RNA
ccccccaggcacggtgctgga

SEQ ID NO: 81452 - RNA, 21 nt, synthetic construct
  source 1..21: mol_type = other RNA
gtgccaggacctgccgtgcca

SEQ ID NO: 81453 - RNA, 21 nt, synthetic construct
  source 1..21: mol_type = other RNA
tcggcagccaacatcacccta

SEQ ID NO: 81454 - RNA, 21 nt, synthetic construct
  source 1..21: mol_type = other RNA
catgcaggtgtttgtcaggca

SEQ ID NO: 81455 - RNA, 21 nt, synthetic construct
  source 1..21: mol_type = other RNA
caggctggaccccgcccacca

SEQ ID NO: 81456 - RNA, 21 nt, synthetic construct
  source 1..21: mol_type = other RNA
ttgaggacccctgctccctca

SEQ ID NO: 81457 - RNA, 21 nt, synthetic construct
  source 1..21: mol_type = other RNA
tggagaatgagaactacgcca

SEQ ID NO: 81458 - RNA, 21 nt, synthetic construct
  source 1..21: mol_type = other RNA
aagtacatgcagaactgccca

SEQ ID NO: 81459 - RNA, 21 nt, synthetic construct
  source 1..21: mol_type = other RNA
agtacatgcagaactgcccca

SEQ ID NO: 81460 - RNA, 21 nt, synthetic construct
  source 1..21: mol_type = other RNA
gtgtctgtcccccggggctga

SEQ ID NO: 81461 - RNA, 21 nt, synthetic construct
  source 1..21: mol_type = other RNA
ccacttcatcacctttgatga

SEQ ID NO: 81462 - RNA, 21 nt, synthetic construct
  source 1..21: mol_type = other RNA
accgagaacatcccctgtgga

SEQ ID NO: 81463 - RNA, 21 nt, synthetic construct
  source 1..21: mol_type = other RNA
tcaagctcttcgtggagagca

SEQ ID NO: 81464 - RNA, 21 nt, synthetic construct
  source 1..21: mol_type = other RNA
tcgtggagagctacgagctga

SEQ ID NO: 81465 - RNA, 21 nt, synthetic construct
  source 1..21: mol_type = other RNA
actgcaccaggactacaagga

SEQ ID NO: 81466 - RNA, 21 nt, synthetic construct
  source 1..21: mol_type = other RNA
ccatcaatgactttgccacga

SEQ ID NO: 81467 - RNA, 21 nt, synthetic construct
  source 1..21: mol_type = other RNA
gccttgaggcctgcacctgca

SEQ ID NO: 81468 - RNA, 21 nt, synthetic construct
  source 1..21: mol_type = other RNA
ggcctgcacctgcacctatga

SEQ ID NO: 81469 - RNA, 21 nt, synthetic construct
  source 1..21: mol_type = other RNA
ctgcacctgcacctatgagga

SEQ ID NO: 81470 - RNA, 21 nt, synthetic construct
  source 1..21: mol_type = other RNA
ccagcaccacagcagtcccca

SEQ ID NO: 81471 - RNA, 21 nt, synthetic construct
  source 1..21: mol_type = other RNA
caggctccacagaacccacta

SEQ ID NO: 81472 - RNA, 21 nt, synthetic construct
  source 1..21: mol_type = other RNA
agtgtgagtggacagagtgga

SEQ ID NO: 81473 - RNA, 21 nt, synthetic construct
  source 1..21: mol_type = other RNA
ccaccacacccacagctacca

SEQ ID NO: 81474 - RNA, 21 nt, synthetic construct
  source 1..21: mol_type = other RNA
caccacacccacagctaccaa

SEQ ID NO: 81475 - RNA, 21 nt, synthetic construct
  source 1..21: mol_type = other RNA
gccccagtgtgcctggtcaga

SEQ ID NO: 81476 - RNA, 21 nt, synthetic construct
  source 1..21: mol_type = other RNA
gcaggtggggaagttcaagaa

SEQ ID NO: 81477 - RNA, 21 nt, synthetic construct
  source 1..21: mol_type = other RNA
ccaccacacccacagctacca

SEQ ID NO: 81478 - RNA, 21 nt, synthetic construct
  source 1..21: mol_type = other RNA
caccacacccacagctaccaa

SEQ ID NO: 81479 - RNA, 21 nt, synthetic construct
  source 1..21: mol_type = other RNA
gccccagtgtgcctggtcaga

SEQ ID NO: 81480 - RNA, 21 nt, synthetic construct
  source 1..21: mol_type = other RNA
gcaggtggggaagttcaagaa

SEQ ID NO: 81481 - RNA, 21 nt, synthetic construct
  source 1..21: mol_type = other RNA
ccaccacacccacagctacca

SEQ ID NO: 81482 - RNA, 21 nt, synthetic construct
  source 1..21: mol_type = other RNA
caccacacccacagctaccaa

SEQ ID NO: 81483 - RNA, 21 nt, synthetic construct
  source 1..21: mol_type = other RNA
gccccagtgtgcctggtcaga

SEQ ID NO: 81484 - RNA, 21 nt, synthetic construct
  source 1..21: mol_type = other RNA
gcaggtggggaagttcaagaa

SEQ ID NO: 81485 - RNA, 21 nt, synthetic construct
  source 1..21: mol_type = other RNA
ccaccacacccacagctacca

SEQ ID NO: 81486 - RNA, 21 nt, synthetic construct
  source 1..21: mol_type = other RNA
caccacacccacagctaccaa

SEQ ID NO: 81487 - RNA, 21 nt, synthetic construct
  source 1..21: mol_type = other RNA
gccccagtgtgcctggtcaga

SEQ ID NO: 81488 - RNA, 21 nt, synthetic construct
  source 1..21: mol_type = other RNA
gcaggtggggaagttcaagaa

SEQ ID NO: 81489 - RNA, 21 nt, synthetic construct
  source 1..21: mol_type = other RNA
ccaccacacccacagctacca

SEQ ID NO: 81490 - RNA, 21 nt, synthetic construct
  source 1..21: mol_type = other RNA
caccacacccacagctaccaa

SEQ ID NO: 81491 - RNA, 21 nt, synthetic construct
  source 1..21: mol_type = other RNA
gcaggtgaatgagacctggaa

SEQ ID NO: 81492 - RNA, 21 nt, synthetic construct
  source 1..21: mol_type = other RNA
acctggaccctggagaactga

SEQ ID NO: 81493 - RNA, 21 nt, synthetic construct
  source 1..21: mol_type = other RNA
acctgcgtgaacaagcaccta

SEQ ID NO: 81494 - RNA, 21 nt, synthetic construct
  source 1..21: mol_type = other RNA
ctatgtcctcatgagagagaa

SEQ ID NO: 81495 - RNA, 21 nt, synthetic construct
  source 1..21: mol_type = other RNA
gatcctgtttgaccaaattca

SEQ ID NO: 81496 - RNA, 21 nt, synthetic construct
  source 1..21: mol_type = other RNA
cccggctgccctacagcctca

SEQ ID NO: 81497 - RNA, 21 nt, synthetic construct
  source 1..21: mol_type = other RNA
ccggctgccctacagcctcta

SEQ ID NO: 81498 - RNA, 21 nt, synthetic construct
  source 1..21: mol_type = other RNA
ggtgccctgccagagcctgga

SEQ ID NO: 81499 - RNA, 21 nt, synthetic construct
  source 1..21: mol_type = other RNA
actgccagtcctgcgtgtgta

SEQ ID NO: 81500 - RNA, 21 nt, synthetic construct
  source 1..21: mol_type = other RNA
ccatgcagcaccagtgcacca

SEQ ID NO: 81501 - RNA, 21 nt, synthetic construct
  source 1..21: mol_type = other RNA
tgctgaccccacagcctgcaa

SEQ ID NO: 81502 - RNA, 21 nt, synthetic construct
  source 1..21: mol_type = other RNA
aatgagacctggaccctggaa

SEQ ID NO: 81503 - RNA, 21 nt, synthetic construct
  source 1..21: mol_type = other RNA
gcgctgtcctcctatgtgcaa

SEQ ID NO: 81504 - RNA, 21 nt, synthetic construct
  source 1..21: mol_type = other RNA
actgcgagtgtttctgcacga

SEQ ID NO: 81505 - RNA, 21 nt, synthetic construct
  source 1..21: mol_type = other RNA
tctgcggcctgtgcgggaaca

SEQ ID NO: 81506 - RNA, 21 nt, synthetic construct
  source 1..21: mol_type = other RNA
gcaccctgcctaaaaacctga

SEQ ID NO: 81507 - RNA, 21 nt, synthetic construct
  source 1..21: mol_type = other RNA
ggctgtgtctgtcccccggga

SEQ ID NO: 81508 - RNA, 21 nt, synthetic construct
  source 1..21: mol_type = other RNA
ctgcgagtgtttctgcacgga

SEQ ID NO: 81509 - RNA, 21 nt, synthetic construct
  source 1..21: mol_type = other RNA
gagtgtttctgcacggctgta

SEQ ID NO: 81510 - RNA, 21 nt, synthetic construct
  source 1..21: mol_type = other RNA
cgcgggcctgtgtgtgtccta

SEQ ID NO: 81511 - RNA, 21 nt, synthetic construct
  source 1..21: mol_type = other RNA
tgtcaggctggaccccgccca

SEQ ID NO: 81512 - RNA, 21 nt, synthetic construct
  source 1..21: mol_type = other RNA
ccagatgtgcggcctgtgtga

SEQ ID NO: 81513 - RNA, 21 nt, synthetic construct
  source 1..21: mol_type = other RNA
agtgtttctgcacggctgtga

SEQ ID NO: 81514 - RNA, 21 nt, synthetic construct
  source 1..21: mol_type = other RNA
cggctgtggctgcctacgcca

SEQ ID NO: 81515 - RNA, 21 nt, synthetic construct
  source 1..21: mol_type = other RNA
aacctgaggcagagagggtaa

SEQ ID NO: 81516 - RNA, 21 nt, synthetic construct
  source 1..21: mol_type = other RNA
ttccacctttgacggcaccta

SEQ ID NO: 81517 - RNA, 21 nt, synthetic construct
  source 1..21: mol_type = other RNA
gaggcagagagggtaccagga

SEQ ID NO: 81518 - RNA, 21 nt, synthetic construct
  source 1..21: mol_type = other RNA
ttctgtgtccctgcgcccata

SEQ ID NO: 81519 - RNA, 21 nt, synthetic construct
  source 1..21: mol_type = other RNA
ggatggccacttcatcaccta

SEQ ID NO: 81520 - RNA, 21 nt, synthetic construct
  source 1..21: mol_type = other RNA
ccacccgtcactgtcttccca

SEQ ID NO: 81521 - RNA, 21 nt, synthetic construct
  source 1..21: mol_type = other RNA
gccatgcagcaccagtgcaca

SEQ ID NO: 81522 - RNA, 21 nt, synthetic construct
  source 1..21: mol_type = other RNA
tttgaggacccctgctcccta

SEQ ID NO: 81523 - RNA, 21 nt, synthetic construct
  source 1..21: mol_type = other RNA
tgtttcagcacacactgcgta

SEQ ID NO: 81524 - RNA, 21 nt, synthetic construct
  source 1..21: mol_type = other RNA
cacagcaaccgaaaagaccaa

SEQ ID NO: 81525 - RNA, 21 nt, synthetic construct
  source 1..21: mol_type = other RNA
cagtgcccctgcacccacgga

SEQ ID NO: 81526 - RNA, 21 nt, synthetic construct
  source 1..21: mol_type = other RNA
cggggcaccctgcctaaaaaa

SEQ ID NO: 81527 - RNA, 21 nt, synthetic construct
  source 1..21: mol_type = other RNA
tttgacgtggacttcccaaca

SEQ ID NO: 81528 - RNA, 21 nt, synthetic construct
  source 1..21: mol_type = other RNA
tcaatgactttgccacgcgta

SEQ ID NO: 81529 - RNA, 21 nt, synthetic construct
  source 1..21: mol_type = other RNA
ccccaggcacggtgctggata

SEQ ID NO: 81530 - RNA, 21 nt, synthetic construct
  source 1..21: mol_type = other RNA
gacacccaggacccaacggta

SEQ ID NO: 81531 - RNA, 21 nt, synthetic construct
  source 1..21: mol_type = other RNA
ctgtgaggaggactcctgtca

SEQ ID NO: 81532 - RNA, 21 nt, synthetic construct
  source 1..21: mol_type = other RNA
ctgaggcagagagggtaccaa

SEQ ID NO: 81533 - RNA, 21 nt, synthetic construct
  source 1..21: mol_type = other RNA
gcagcgggaggagctgcctta

SEQ ID NO: 81534 - RNA, 21 nt, synthetic construct
  source 1..21: mol_type = other RNA
gcttctgccccccaggcacga

SEQ ID NO: 81535 - RNA, 21 nt, synthetic construct
  source 1..21: mol_type = other RNA
cttctgccccccaggcacgga

SEQ ID NO: 81536 - RNA, 21 nt, synthetic construct
  source 1..21: mol_type = other RNA
gacggcggggacacggccata

SEQ ID NO: 81537 - RNA, 21 nt, synthetic construct
  source 1..21: mol_type = other RNA
gcaccacccacatcacagaga

SEQ ID NO: 81538 - RNA, 21 nt, synthetic construct
  source 1..21: mol_type = other RNA
gcaccacccacatcacagaga

SEQ ID NO: 81539 - RNA, 21 nt, synthetic construct
  source 1..21: mol_type = other RNA
gcaccacccacatcacagaga

SEQ ID NO: 81540 - RNA, 21 nt, synthetic construct
  source 1..21: mol_type = other RNA
gcaccacccacatcacagaga

SEQ ID NO: 81541 - RNA, 21 nt, synthetic construct
  source 1..21: mol_type = other RNA
ggggatggccacttcatcaca

SEQ ID NO: 81542 - RNA, 21 nt, synthetic construct
  source 1..21: mol_type = other RNA
gaacaacttggaggggacgta

SEQ ID NO: 81543 - RNA, 21 nt, synthetic construct
  source 1..21: mol_type = other RNA
ccaaatacgccaaccagacca

SEQ ID NO: 81544 - RNA, 21 nt, synthetic construct
  source 1..21: mol_type = other RNA
aaccagaaccaggctgacgaa

SEQ ID NO: 81545 - RNA, 21 nt, synthetic construct
  source 1..21: mol_type = other RNA
aggtgggagtgcagccaccga

SEQ ID NO: 81546 - RNA, 21 nt, synthetic construct
  source 1..21: mol_type = other RNA
gggctccaggcctgtggtcaa

SEQ ID NO: 81547 - RNA, 21 nt, synthetic construct
  source 1..21: mol_type = other RNA
tccaggcctgtggtcacccga

SEQ ID NO: 81548 - RNA, 21 nt, synthetic construct
  source 1..21: mol_type = other RNA
tgcccggacccgctgccctta

SEQ ID NO: 81549 - RNA, 21 nt, synthetic construct
  source 1..21: mol_type = other RNA
accctgctggggccggcctta

SEQ ID NO: 81550 - RNA, 21 nt, synthetic construct
  source 1..21: mol_type = other RNA
gggccggcctttgcggagtga

SEQ ID NO: 81551 - RNA, 21 nt, synthetic construct
  source 1..21: mol_type = other RNA
tcgggcagtgcccctgcacca

SEQ ID NO: 81552 - RNA, 21 nt, synthetic construct
  source 1..21: mol_type = other RNA
tgcagccaccggctctgccta

SEQ ID NO: 81553 - RNA, 21 nt, synthetic construct
  source 1..21: mol_type = other RNA
tgtgtgtccgcgaggtctgca

SEQ ID NO: 81554 - RNA, 21 nt, synthetic construct
  source 1..21: mol_type = other RNA
gacagagtggtttgatgagga

SEQ ID NO: 81555 - RNA, 21 nt, synthetic construct
  source 1..21: mol_type = other RNA
cggggccctctggcggggaca

SEQ ID NO: 81556 - RNA, 21 nt, synthetic construct
  source 1..21: mol_type = other RNA
cacccacagctaccagcttta

SEQ ID NO: 81557 - RNA, 21 nt, synthetic construct
  source 1..21: mol_type = other RNA
cggggccctctggcggggaca

SEQ ID NO: 81558 - RNA, 21 nt, synthetic construct
  source 1..21: mol_type = other RNA
cggggccctctggcggggaca

SEQ ID NO: 81559 - RNA, 21 nt, synthetic construct
  source 1..21: mol_type = other RNA
cacccacagctaccagcttta

SEQ ID NO: 81560 - RNA, 21 nt, synthetic construct
  source 1..21: mol_type = other RNA
cggggccctctggcggggaca

SEQ ID NO: 81561 - RNA, 21 nt, synthetic construct
  source 1..21: mol_type = other RNA
cacccacagctaccagcttta

SEQ ID NO: 81562 - RNA, 21 nt, synthetic construct
  source 1..21: mol_type = other RNA
cgggcagtgctgtggggagta

SEQ ID NO: 81563 - RNA, 21 nt, synthetic construct
  source 1..21: mol_type = other RNA
agagtgccaggccgagagcta

SEQ ID NO: 81564 - RNA, 21 nt, synthetic construct
  source 1..21: mol_type = other RNA
tccgtgtgttctgctgcaaca

SEQ ID NO: 81565 - RNA, 21 nt, synthetic construct
  source 1..21: mol_type = other RNA
tccgtgtgttctgctgcaaca

SEQ ID NO: 81566 - RNA, 21 nt, synthetic construct
  source 1..21: mol_type = other RNA
tccgtgtgttctgctgcaaca

SEQ ID NO: 81567 - RNA, 21 nt, synthetic construct
  source 1..21: mol_type = other RNA
tccgtgtgttctgctgcaaca

SEQ ID NO: 81568 - RNA, 21 nt, synthetic construct
  source 1..21: mol_type = other RNA
atccgactgcaccaggactaa

SEQ ID NO: 81569 - RNA, 21 nt, synthetic construct
  source 1..21: mol_type = other RNA
ggggccctctggcggggacta

SEQ ID NO: 81570 - RNA, 21 nt, synthetic construct
  source 1..21: mol_type = other RNA
ggggccctctggcggggacta

SEQ ID NO: 81571 - RNA, 21 nt, synthetic construct
  source 1..21: mol_type = other RNA
ggggccctctggcggggacta

SEQ ID NO: 81572 - RNA, 21 nt, synthetic construct
  source 1..21: mol_type = other RNA
ggggccctctggcggggacta

SEQ ID NO: 81573 - RNA, 21 nt, synthetic construct
  source 1..21: mol_type = other RNA
caggccatgcagcaccagtga

SEQ ID NO: 81574 - RNA, 21 nt, synthetic construct
  source 1..21: mol_type = other RNA
gcatccagtgcgctcacagca

SEQ ID NO: 81575 - RNA, 21 nt, synthetic construct
  source 1..21: mol_type = other RNA
tgggcacctgcgtggcctaca

SEQ ID NO: 81576 - RNA, 21 nt, synthetic construct
  source 1..21: mol_type = other RNA
cctgcctctctggggacacca

SEQ ID NO: 81577 - RNA, 21 nt, synthetic construct
  source 1..21: mol_type = other RNA
tggatgagtgtggctgcacga

SEQ ID NO: 81578 - RNA, 21 nt, synthetic construct
  source 1..21: mol_type = other RNA
aacggagaggacagtgcccta

SEQ ID NO: 81579 - RNA, 21 nt, synthetic construct
  source 1..21: mol_type = other RNA
aggaaggctgtggcatgtcca

SEQ ID NO: 81580 - RNA, 21 nt, synthetic construct
  source 1..21: mol_type = other RNA
agcctcttccacaacaacaca

SEQ ID NO: 81581 - RNA, 21 nt, synthetic construct
  source 1..21: mol_type = other RNA
aggctgtggcatgtcctggaa

SEQ ID NO: 81582 - RNA, 21 nt, synthetic construct
  source 1..21: mol_type = other RNA
gcacccttggtacagccacca

SEQ ID NO: 81583 - RNA, 21 nt, synthetic construct
  source 1..21: mol_type = other RNA
ccaaagtgctgaccaccacga

SEQ ID NO: 81584 - RNA, 21 nt, synthetic construct
  source 1..21: mol_type = other RNA
aggaacagctttgaggaccca

SEQ ID NO: 81585 - RNA, 21 nt, synthetic construct
  source 1..21: mol_type = other RNA
gtgtgcaggaactgggagcaa

SEQ ID NO: 81586 - RNA, 21 nt, synthetic construct
  source 1..21: mol_type = other RNA
cgtgtgttctgctgcaactaa

SEQ ID NO: 81587 - RNA, 21 nt, synthetic construct
  source 1..21: mol_type = other RNA
cgtgtgttctgctgcaactaa

SEQ ID NO: 81588 - RNA, 21 nt, synthetic construct
  source 1..21: mol_type = other RNA
cgtgtgttctgctgcaactaa

SEQ ID NO: 81589 - RNA, 21 nt, synthetic construct
  source 1..21: mol_type = other RNA
cgtgtgttctgctgcaactaa

SEQ ID NO: 81590 - RNA, 21 nt, synthetic construct
  source 1..21: mol_type = other RNA
ccaccggcaccacctgctcca

SEQ ID NO: 81591 - RNA, 21 nt, synthetic construct
  source 1..21: mol_type = other RNA
acaagcacctgcccatcaaaa

SEQ ID NO: 81592 - RNA, 21 nt, synthetic construct
  source 1..21: mol_type = other RNA
tcccaggttgactccaccaaa

SEQ ID NO: 81593 - RNA, 21 nt, synthetic construct
  source 1..21: mol_type = other RNA
gccacaccctcctccactcta

SEQ ID NO: 81594 - RNA, 21 nt, synthetic construct
  source 1..21: mol_type = other RNA
caatgaggaccagatgaagta

SEQ ID NO: 81595 - RNA, 21 nt, synthetic construct
  source 1..21: mol_type = other RNA
ggccgggcagtgctgtgggga

SEQ ID NO: 81596 - RNA, 21 nt, synthetic construct
  source 1..21: mol_type = other RNA
ggaacggagaggacagtgcca

SEQ ID NO: 81597 - RNA, 21 nt, synthetic construct
  source 1..21: mol_type = other RNA
tcttcaatgaggaccagatga

SEQ ID NO: 81598 - RNA, 21 nt, synthetic construct
  source 1..21: mol_type = other RNA
gtgtcagtggacagagtggta

SEQ ID NO: 81599 - RNA, 21 nt, synthetic construct
  source 1..21: mol_type = other RNA
cactgtcccaggggtggccaa

SEQ ID NO: 81600 - RNA, 21 nt, synthetic construct
  source 1..21: mol_type = other RNA
tggccaggtgcgtgggtgaca

SEQ ID NO: 81601 - RNA, 21 nt, synthetic construct
  source 1..21: mol_type = other RNA
tgcttctgccccccaggcaca

SEQ ID NO: 81602 - RNA, 21 nt, synthetic construct
  source 1..21: mol_type = other RNA
cccaggcacggtgctggatga

SEQ ID NO: 81603 - RNA, 21 nt, synthetic construct
  source 1..21: mol_type = other RNA
tgcaccaagtacatgcagaaa

SEQ ID NO: 81604 - RNA, 21 nt, synthetic construct
  source 1..21: mol_type = other RNA
cagccagcccttcttcaatga

SEQ ID NO: 81605 - RNA, 21 nt, synthetic construct
  source 1..21: mol_type = other RNA
agccagcccttcttcaatgaa

SEQ ID NO: 81606 - RNA, 21 nt, synthetic construct
  source 1..21: mol_type = other RNA
tggcatccagtgcgctcacaa

SEQ ID NO: 81607 - RNA, 21 nt, synthetic construct
  source 1..21: mol_type = other RNA
ggtcccccactccacgacaaa

SEQ ID NO: 81608 - RNA, 21 nt, synthetic construct
  source 1..21: mol_type = other RNA
gaacccactgtcccaggggta

SEQ ID NO: 81609 - RNA, 21 nt, synthetic construct
  source 1..21: mol_type = other RNA
ctgtcccaggggtggccacaa

SEQ ID NO: 81610 - RNA, 21 nt, synthetic construct
  source 1..21: mol_type = other RNA
tgagtggacagagtggtttga

SEQ ID NO: 81611 - RNA, 21 nt, synthetic construct
  source 1..21: mol_type = other RNA
accacacccacagctaccaga

SEQ ID NO: 81612 - RNA, 21 nt, synthetic construct
  source 1..21: mol_type = other RNA
gggcaccacccacatcacaga

SEQ ID NO: 81613 - RNA, 21 nt, synthetic construct
  source 1..21: mol_type = other RNA
gaagttcaagatgtgcttcaa

SEQ ID NO: 81614 - RNA, 21 nt, synthetic construct
  source 1..21: mol_type = other RNA
accacacccacagctaccaga

SEQ ID NO: 81615 - RNA, 21 nt, synthetic construct
  source 1..21: mol_type = other RNA
ccacccacacccccacagtga

SEQ ID NO: 81616 - RNA, 21 nt, synthetic construct
  source 1..21: mol_type = other RNA
gggcaccacccacatcacaga

SEQ ID NO: 81617 - RNA, 21 nt, synthetic construct
  source 1..21: mol_type = other RNA
gaagttcaagatgtgcttcaa

SEQ ID NO: 81618 - RNA, 21 nt, synthetic construct
  source 1..21: mol_type = other RNA
tgctgacaagcacagccacca

SEQ ID NO: 81619 - RNA, 21 nt, synthetic construct
  source 1..21: mol_type = other RNA
accacacccacagctaccaga

SEQ ID NO: 81620 - RNA, 21 nt, synthetic construct
  source 1..21: mol_type = other RNA
gggcaccacccacatcacaga

SEQ ID NO: 81621 - RNA, 21 nt, synthetic construct
  source 1..21: mol_type = other RNA
gaagttcaagatgtgcttcaa

SEQ ID NO: 81622 - RNA, 21 nt, synthetic construct
  source 1..21: mol_type = other RNA
accacacccacagctaccaga

SEQ ID NO: 81623 - RNA, 21 nt, synthetic construct
  source 1..21: mol_type = other RNA
ccacccacacccccacagtga

SEQ ID NO: 81624 - RNA, 21 nt, synthetic construct
  source 1..21: mol_type = other RNA
gggcaccacccacatcacaga

SEQ ID NO: 81625 - RNA, 21 nt, synthetic construct
  source 1..21: mol_type = other RNA
gaagttcaagatgtgcttcaa

SEQ ID NO: 81626 - RNA, 21 nt, synthetic construct
  source 1..21: mol_type = other RNA
tgctgacaagcacagccacca

SEQ ID NO: 81627 - RNA, 21 nt, synthetic construct
  source 1..21: mol_type = other RNA
accacacccacagctaccaga

SEQ ID NO: 81628 - RNA, 21 nt, synthetic construct
  source 1..21: mol_type = other RNA
ccctggctgtgacaatgccaa

SEQ ID NO: 81629 - RNA, 21 nt, synthetic construct
  source 1..21: mol_type = other RNA
ctggctgtgacaatgccatca

SEQ ID NO: 81630 - RNA, 21 nt, synthetic construct
  source 1..21: mol_type = other RNA
tggctgtgacaatgccatcca

SEQ ID NO: 81631 - RNA, 21 nt, synthetic construct
  source 1..21: mol_type = other RNA
gctgtgacaatgccatcccta

SEQ ID NO: 81632 - RNA, 21 nt, synthetic construct
  source 1..21: mol_type = other RNA
ctttgacggcacctcttacaa

SEQ ID NO: 81633 - RNA, 21 nt, synthetic construct
  source 1..21: mol_type = other RNA
atctgatgctgagccaggtca

SEQ ID NO: 81634 - RNA, 21 nt, synthetic construct
  source 1..21: mol_type = other RNA
tctgatgctgagccaggtcta

SEQ ID NO: 81635 - RNA, 21 nt, synthetic construct
  source 1..21: mol_type = other RNA
gatgctgagccaggtctttga

SEQ ID NO: 81636 - RNA, 21 nt, synthetic construct
  source 1..21: mol_type = other RNA
tggggacacccaggacccaaa

SEQ ID NO: 81637 - RNA, 21 nt, synthetic construct
  source 1..21: mol_type = other RNA
gcagggggagcctcaggaaaa

SEQ ID NO: 81638 - RNA, 21 nt, synthetic construct
  source 1..21: mol_type = other RNA
tgccgctcccaggttgactca

SEQ ID NO: 81639 - RNA, 21 nt, synthetic construct
  source 1..21: mol_type = other RNA
aggtaccaccacctgccagca

SEQ ID NO: 81640 - RNA, 21 nt, synthetic construct
  source 1..21: mol_type = other RNA
tgtcctcctcagtcctcacca

SEQ ID NO: 81641 - RNA, 21 nt, synthetic construct
  source 1..21: mol_type = other RNA
catcaaccccaagcccttcca

SEQ ID NO: 81642 - RNA, 21 nt, synthetic construct
  source 1..21: mol_type = other RNA
acacccccacagtgctgacca

SEQ ID NO: 81643 - RNA, 21 nt, synthetic construct
  source 1..21: mol_type = other RNA
acacccccacagtgctgacca

SEQ ID NO: 81644 - RNA, 21 nt, synthetic construct
  source 1..21: mol_type = other RNA
tcaaccccaagcccttccaca

SEQ ID NO: 81645 - RNA, 21 nt, synthetic construct
  source 1..21: mol_type = other RNA
tgtgtgtcctggcggactcca

SEQ ID NO: 81646 - RNA, 21 nt, synthetic construct
  source 1..21: mol_type = other RNA
ttgggaacctgcagaagttga

SEQ ID NO: 81647 - RNA, 21 nt, synthetic construct
  source 1..21: mol_type = other RNA
cagggccagatgtgcggccta

SEQ ID NO: 81648 - RNA, 21 nt, synthetic construct
  source 1..21: mol_type = other RNA
tgcccctggctgtgacaatga

SEQ ID NO: 81649 - RNA, 21 nt, synthetic construct
  source 1..21: mol_type = other RNA
ggacctgtgccgctgccccaa

SEQ ID NO: 81650 - RNA, 21 nt, synthetic construct
  source 1..21: mol_type = other RNA
gcctgagccccctgaacccga

SEQ ID NO: 81651 - RNA, 21 nt, synthetic construct
  source 1..21: mol_type = other RNA
tgccgtgccctggcacctgca

SEQ ID NO: 81652 - RNA, 21 nt, synthetic construct
  source 1..21: mol_type = other RNA
tcatcaaccccaagcccttca

SEQ ID NO: 81653 - RNA, 21 nt, synthetic construct
  source 1..21: mol_type = other RNA
ctgtcccccggggctggtgta

SEQ ID NO: 81654 - RNA, 21 nt, synthetic construct
  source 1..21: mol_type = other RNA
tttctgcacggctgtggctga

SEQ ID NO: 81655 - RNA, 21 nt, synthetic construct
  source 1..21: mol_type = other RNA
tctgcacggctgtggctgcca

SEQ ID NO: 81656 - RNA, 21 nt, synthetic construct
  source 1..21: mol_type = other RNA
aggaccagatgaagtgcgtga

SEQ ID NO: 81657 - RNA, 21 nt, synthetic construct
  source 1..21: mol_type = other RNA
ctgtggcatgtcctggaacta

SEQ ID NO: 81658 - RNA, 21 nt, synthetic construct
  source 1..21: mol_type = other RNA
cagcggtttcagcaagaacga

SEQ ID NO: 81659 - RNA, 21 nt, synthetic construct
  source 1..21: mol_type = other RNA
cctggtgtgcaggaactggga

SEQ ID NO: 81660 - RNA, 21 nt, synthetic construct
  source 1..21: mol_type = other RNA
tacctgcctctctggggacaa

SEQ ID NO: 81661 - RNA, 21 nt, synthetic construct
  source 1..21: mol_type = other RNA
ggctgccctacagcctcttca

SEQ ID NO: 81662 - RNA, 21 nt, synthetic construct
  source 1..21: mol_type = other RNA
ctggtgtgcaggaactgggaa

SEQ ID NO: 81663 - RNA, 21 nt, synthetic construct
  source 1..21: mol_type = other RNA
tcctcctcagtcctcaccaca

SEQ ID NO: 81664 - RNA, 21 nt, synthetic construct
  source 1..21: mol_type = other RNA
caccagtgcacctgctgccaa

SEQ ID NO: 81665 - RNA, 21 nt, synthetic construct
  source 1..21: mol_type = other RNA
caaggcccaggggctggtgca

SEQ ID NO: 81666 - RNA, 21 nt, synthetic construct
  source 1..21: mol_type = other RNA
gcaggtgtttgtcaggctgga

SEQ ID NO: 81667 - RNA, 21 nt, synthetic construct
  source 1..21: mol_type = other RNA
ctgcctgggcacctgcgtgga

SEQ ID NO: 81668 - RNA, 21 nt, synthetic construct
  source 1..21: mol_type = other RNA
gctccaaggccatcaagctca

SEQ ID NO: 81669 - RNA, 21 nt, synthetic construct
  source 1..21: mol_type = other RNA
ctgcacggctgtggctgccta

SEQ ID NO: 81670 - RNA, 21 nt, synthetic construct
  source 1..21: mol_type = other RNA
caccacctgccagccccggta

SEQ ID NO: 81671 - RNA, 21 nt, synthetic construct
  source 1..21: mol_type = other RNA
ctgcaggctccacagaaccca

SEQ ID NO: 81672 - RNA, 21 nt, synthetic construct
  source 1..21: mol_type = other RNA
tgtacctgcctctctggggaa

SEQ ID NO: 81673 - RNA, 21 nt, synthetic construct
  source 1..21: mol_type = other RNA
gctgctactcctgtgaggaga

SEQ ID NO: 81674 - RNA, 21 nt, synthetic construct
  source 1..21: mol_type = other RNA
gtccacgaggagacggtgcca

SEQ ID NO: 81675 - RNA, 21 nt, synthetic construct
  source 1..21: mol_type = other RNA
agccccagtgtgcctggtcaa

SEQ ID NO: 81676 - RNA, 21 nt, synthetic construct
  source 1..21: mol_type = other RNA
ggtggggaagttcaagatgta

SEQ ID NO: 81677 - RNA, 21 nt, synthetic construct
  source 1..21: mol_type = other RNA
agccccagtgtgcctggtcaa

SEQ ID NO: 81678 - RNA, 21 nt, synthetic construct
  source 1..21: mol_type = other RNA
ggtggggaagttcaagatgta

SEQ ID NO: 81679 - RNA, 21 nt, synthetic construct
  source 1..21: mol_type = other RNA
agccccagtgtgcctggtcaa

SEQ ID NO: 81680 - RNA, 21 nt, synthetic construct
  source 1..21: mol_type = other RNA
ggtggggaagttcaagatgta

SEQ ID NO: 81681 - RNA, 21 nt, synthetic construct
  source 1..21: mol_type = other RNA
agccccagtgtgcctggtcaa

SEQ ID NO: 81682 - RNA, 21 nt, synthetic construct
  source 1..21: mol_type = other RNA
ggtggggaagttcaagatgta

SEQ ID NO: 81683 - RNA, 21 nt, synthetic construct
  source 1..21: mol_type = other RNA
cgggcaccttcctcaatgaca

SEQ ID NO: 81684 - RNA, 21 nt, synthetic construct
  source 1..21: mol_type = other RNA
tgttcctcaactccatctaca

SEQ ID NO: 81685 - RNA, 21 nt, synthetic construct
  source 1..21: mol_type = other RNA
caaccagacctgtggcctgta

SEQ ID NO: 81686 - RNA, 21 nt, synthetic construct
  source 1..21: mol_type = other RNA
tgaggcagagagggtaccaga

SEQ ID NO: 81687 - RNA, 21 nt, synthetic construct
  source 1..21: mol_type = other RNA
gtcccaggggtggccacatca

SEQ ID NO: 81688 - RNA, 21 nt, synthetic construct
  source 1..21: mol_type = other RNA
catcaccctgttcacacccta

SEQ ID NO: 81689 - RNA, 21 nt, synthetic construct
  source 1..21: mol_type = other RNA
acatcaccctgttcacaccca

SEQ ID NO: 81690 - RNA, 21 nt, synthetic construct
  source 1..21: mol_type = other RNA
cccaagcccttccactcgaaa

SEQ ID NO: 81691 - RNA, 21 nt, synthetic construct
  source 1..21: mol_type = other RNA
ccaagcccttccactcgaaca

SEQ ID NO: 81692 - RNA, 21 nt, synthetic construct
  source 1..21: mol_type = other RNA
tcaggaaggctgtggcatgta

SEQ ID NO: 81693 - RNA, 21 nt, synthetic construct
  source 1..21: mol_type = other RNA
ccacctgccagccccggtgta

SEQ ID NO: 81694 - RNA, 21 nt, synthetic construct
  source 1..21: mol_type = other RNA
ctgccagagctgtaactgcaa

SEQ ID NO: 81695 - RNA, 21 nt, synthetic construct
  source 1..21: mol_type = other RNA
cagcctcttccacaacaacaa

SEQ ID NO: 81696 - RNA, 21 nt, synthetic construct
  source 1..21: mol_type = other RNA
cgctcacagccttgaggccta

SEQ ID NO: 81697 - RNA, 21 nt, synthetic construct
  source 1..21: mol_type = other RNA
cacacccacagctaccagcta

SEQ ID NO: 81698 - RNA, 21 nt, synthetic construct
  source 1..21: mol_type = other RNA
cacacccacagctaccagcta

SEQ ID NO: 81699 - RNA, 21 nt, synthetic construct
  source 1..21: mol_type = other RNA
cacacccacagctaccagcta

SEQ ID NO: 81700 - RNA, 21 nt, synthetic construct
  source 1..21: mol_type = other RNA
cccagtgggcactgcctggta

SEQ ID NO: 81701 - RNA, 21 nt, synthetic construct
  source 1..21: mol_type = other RNA
acctgtgccgctgccccacca

SEQ ID NO: 81702 - RNA, 21 nt, synthetic construct
  source 1..21: mol_type = other RNA
cagtgccagcacggagcctga

SEQ ID NO: 81703 - RNA, 21 nt, synthetic construct
  source 1..21: mol_type = other RNA
actgtcttccccagcctgaga

SEQ ID NO: 81704 - RNA, 21 nt, synthetic construct
  source 1..21: mol_type = other RNA
cctgagccccctgaacccgga

SEQ ID NO: 81705 - RNA, 21 nt, synthetic construct
  source 1..21: mol_type = other RNA
gctccaggcctgtggtcacca

SEQ ID NO: 81706 - RNA, 21 nt, synthetic construct
  source 1..21: mol_type = other RNA
ctccaggcctgtggtcaccca

SEQ ID NO: 81707 - RNA, 21 nt, synthetic construct
  source 1..21: mol_type = other RNA
gccccccaggcacggtgctga

SEQ ID NO: 81708 - RNA, 21 nt, synthetic construct
  source 1..21: mol_type = other RNA
ccaggacctgccgtgccctga

SEQ ID NO: 81709 - RNA, 21 nt, synthetic construct
  source 1..21: mol_type = other RNA
ggctgtttcagcacacactga

SEQ ID NO: 81710 - RNA, 21 nt, synthetic construct
  source 1..21: mol_type = other RNA
agaacatcccctgtgggacca

SEQ ID NO: 81711 - RNA, 21 nt, synthetic construct
  source 1..21: mol_type = other RNA
gccgcctgccgctcccaggta

SEQ ID NO: 81712 - RNA, 21 nt, synthetic construct
  source 1..21: mol_type = other RNA
gtgggcactgcctggtggaca

SEQ ID NO: 81713 - RNA, 21 nt, synthetic construct
  source 1..21: mol_type = other RNA
tgggcactgcctggtggacca

SEQ ID NO: 81714 - RNA, 21 nt, synthetic construct
  source 1..21: mol_type = other RNA
ggctgtggcatgtcctggaaa

SEQ ID NO: 81715 - RNA, 21 nt, synthetic construct
  source 1..21: mol_type = other RNA
tgcaggaactgggagcaggaa

SEQ ID NO: 81716 - RNA, 21 nt, synthetic construct
  source 1..21: mol_type = other RNA
accacagcagtccccacccta

SEQ ID NO: 81717 - RNA, 21 nt, synthetic construct
  source 1..21: mol_type = other RNA
tgtcccaggggtggccacata

SEQ ID NO: 81718 - RNA, 21 nt, synthetic construct
  source 1..21: mol_type = other RNA
tccctcctctgccctagggaa

SEQ ID NO: 81719 - RNA, 21 nt, synthetic construct
  source 1..21: mol_type = other RNA
tccctcctctgccctagggaa

SEQ ID NO: 81720 - RNA, 21 nt, synthetic construct
  source 1..21: mol_type = other RNA
tccctcctctgccctagggaa

SEQ ID NO: 81721 - RNA, 21 nt, synthetic construct
  source 1..21: mol_type = other RNA
tccctcctctgccctagggaa

SEQ ID NO: 81722 - RNA, 21 nt, synthetic construct
  source 1..21: mol_type = other RNA
tccactgtgtcctcctcagta

SEQ ID NO: 81723 - RNA, 21 nt, synthetic construct
  source 1..21: mol_type = other RNA
tgtgacttccactatgagtga

SEQ ID NO: 81724 - RNA, 21 nt, synthetic construct
  source 1..21: mol_type = other RNA
tctgtgatctgatgctgagca

SEQ ID NO: 81725 - RNA, 21 nt, synthetic construct
  source 1..21: mol_type = other RNA
gcacggctgtggctgcctaca

SEQ ID NO: 81726 - RNA, 21 nt, synthetic construct
  source 1..21: mol_type = other RNA
ctcctgtgaggaggactccta

SEQ ID NO: 81727 - RNA, 21 nt, synthetic construct
  source 1..21: mol_type = other RNA
cacttcatcacctttgatgga

SEQ ID NO: 81728 - RNA, 21 nt, synthetic construct
  source 1..21: mol_type = other RNA
tactcctgtgaggaggactca

SEQ ID NO: 81729 - RNA, 21 nt, synthetic construct
  source 1..21: mol_type = other RNA
ggcacccctggggccgagtga

SEQ ID NO: 81730 - RNA, 21 nt, synthetic construct
  source 1..21: mol_type = other RNA
tcctccactccggggacgaca

SEQ ID NO: 81731 - RNA, 21 nt, synthetic construct
  source 1..21: mol_type = other RNA
tcctccactccggggacgaca

SEQ ID NO: 81732 - RNA, 21 nt, synthetic construct
  source 1..21: mol_type = other RNA
tcctccactccggggacgaca

SEQ ID NO: 81733 - RNA, 21 nt, synthetic construct
  source 1..21: mol_type = other RNA
tcctccactccggggacgaca

SEQ ID NO: 81734 - RNA, 21 nt, synthetic construct
  source 1..21: mol_type = other RNA
cctgtgggaccaccggcacca

SEQ ID NO: 81735 - RNA, 21 nt, synthetic construct
  source 1..21: mol_type = other RNA
ggctggaccccgcccaccaga

SEQ ID NO: 81736 - RNA, 21 nt, synthetic construct
  source 1..21: mol_type = other RNA
gcgccgcgctgtcctcctata

SEQ ID NO: 81737 - RNA, 21 nt, synthetic construct
  source 1..21: mol_type = other RNA
ggtgggagtgcagccaccgga

SEQ ID NO: 81738 - RNA, 21 nt, synthetic construct
  source 1..21: mol_type = other RNA
gttctgtgacttctacaacca

SEQ ID NO: 81739 - RNA, 21 nt, synthetic construct
  source 1..21: mol_type = other RNA
ttctgtgacttctacaaccca

SEQ ID NO: 81740 - RNA, 21 nt, synthetic construct
  source 1..21: mol_type = other RNA
tgggctgtttcagcacacaca

SEQ ID NO: 81741 - RNA, 21 nt, synthetic construct
  source 1..21: mol_type = other RNA
ctgtgtccctgcgcccatgga

SEQ ID NO: 81742 - RNA, 21 nt, synthetic construct
  source 1..21: mol_type = other RNA
gcgcccaggacctgtgccgca

SEQ ID NO: 81743 - RNA, 21 nt, synthetic construct
  source 1..21: mol_type = other RNA
tcaggctggaccccgcccaca

SEQ ID NO: 81744 - RNA, 21 nt, synthetic construct
  source 1..21: mol_type = other RNA
caggtggggaagttcaagata

SEQ ID NO: 81745 - RNA, 21 nt, synthetic construct
  source 1..21: mol_type = other RNA
caggtggggaagttcaagata

SEQ ID NO: 81746 - RNA, 21 nt, synthetic construct
  source 1..21: mol_type = other RNA
caggtggggaagttcaagata

SEQ ID NO: 81747 - RNA, 21 nt, synthetic construct
  source 1..21: mol_type = other RNA
caggtggggaagttcaagata

SEQ ID NO: 81748 - RNA, 21 nt, synthetic construct
  source 1..21: mol_type = other RNA
agaggacagtgccctgctgga

SEQ ID NO: 81749 - RNA, 21 nt, synthetic construct
  source 1..21: mol_type = other RNA
gcccggacccgctgcccttga

SEQ ID NO: 81750 - RNA, 21 nt, synthetic construct
  source 1..21: mol_type = other RNA
aggctggaccccgcccaccaa

SEQ ID NO: 81751 - RNA, 21 nt, synthetic construct
  source 1..21: mol_type = other RNA
agcctctctgcagaaaagcaa

SEQ ID NO: 81752 - RNA, 21 nt, synthetic construct
  source 1..21: mol_type = other RNA
gggcacccctggggccgagta

SEQ ID NO: 81753 - RNA, 21 nt, synthetic construct
  source 1..21: mol_type = other RNA
aggctccacagaacccactga

SEQ ID NO: 81754 - RNA, 21 nt, synthetic construct
  source 1..21: mol_type = other RNA
ttctctactccctgcttctga

SEQ ID NO: 81755 - RNA, 21 nt, synthetic construct
  source 1..21: mol_type = other RNA
ccaggcccggctgccctacaa

SEQ ID NO: 81756 - RNA, 21 nt, synthetic construct
  source 1..21: mol_type = other RNA
ctactcctgtgaggaggacta

SEQ ID NO: 81757 - RNA, 21 nt, synthetic construct
  source 1..21: mol_type = other RNA
gggtcccccactccacgacaa

SEQ ID NO: 81758 - RNA, 21 nt, synthetic construct
  source 1..21: mol_type = other RNA
aattccggtgagcagcggtta

SEQ ID NO: 81759 - RNA, 21 nt, synthetic construct
  source 1..21: mol_type = other RNA
caccacggccacctccaggaa

SEQ ID NO: 81760 - RNA, 21 nt, synthetic construct
  source 1..21: mol_type = other RNA
caccacggccacctccaggaa

SEQ ID NO: 81761 - RNA, 21 nt, synthetic construct
  source 1..21: mol_type = other RNA
ccaggactacaagggcaggga

SEQ ID NO: 81762 - RNA, 21 nt, synthetic construct
  source 1..21: mol_type = other RNA
tgggctccaggcctgtggtca

SEQ ID NO: 81763 - RNA, 21 nt, synthetic construct
  source 1..21: mol_type = other RNA
cctgcctaaaaacctgccgga

SEQ ID NO: 81764 - RNA, 21 nt, synthetic construct
  source 1..21: mol_type = other RNA
cctgcctggcctggaaggcta

SEQ ID NO: 81765 - RNA, 21 nt, synthetic construct
  source 1..21: mol_type = other RNA
cccaagtctgaacaacttgga

SEQ ID NO: 81766 - RNA, 21 nt, synthetic construct
  source 1..21: mol_type = other RNA
ggctccacagaacccactgta

SEQ ID NO: 81767 - RNA, 21 nt, synthetic construct
  source 1..21: mol_type = other RNA
ccctgcgggagttgggccaga

SEQ ID NO: 81768 - RNA, 21 nt, synthetic construct
  source 1..21: mol_type = other RNA
ccctgcgggagttgggccaga

SEQ ID NO: 81769 - RNA, 21 nt, synthetic construct
  source 1..21: mol_type = other RNA
ccctgcgggagttgggccaga

SEQ ID NO: 81770 - RNA, 21 nt, synthetic construct
  source 1..21: mol_type = other RNA
ctgcccctggctgtgacaata

SEQ ID NO: 81771 - RNA, 21 nt, synthetic construct
  source 1..21: mol_type = other RNA
tgctgctactcctgtgaggaa

SEQ ID NO: 81772 - RNA, 21 nt, synthetic construct
  source 1..21: mol_type = other RNA
cctgcccctggctgtgacaaa

SEQ ID NO: 81773 - RNA, 21 nt, synthetic construct
  source 1..21: mol_type = other RNA
tcaccgagaacatcccctgta

SEQ ID NO: 81774 - RNA, 21 nt, synthetic construct
  source 1..21: mol_type = other RNA
ccaggcccagcctggtgtcca

SEQ ID NO: 81775 - RNA, 21 nt, synthetic construct
  source 1..21: mol_type = other RNA
ccaggcccagcctggtgtcca

SEQ ID NO: 81776 - RNA, 21 nt, synthetic construct
  source 1..21: mol_type = other RNA
ccaggcccagcctggtgtcca

SEQ ID NO: 81777 - RNA, 21 nt, synthetic construct
  source 1..21: mol_type = other RNA
ccaggcccagcctggtgtcca

SEQ ID NO: 81778 - RNA, 21 nt, synthetic construct
  source 1..21: mol_type = other RNA
ggcaccgtgctggctcctgga

SEQ ID NO: 81779 - RNA, 21 nt, synthetic construct
  source 1..21: mol_type = other RNA
gcctgggcacctgcgtggcca

SEQ ID NO: 81780 - RNA, 21 nt, synthetic construct
  source 1..21: mol_type = other RNA
gggggctgtgagtggcactaa

SEQ ID NO: 81781 - RNA, 21 nt, synthetic construct
  source 1..21: mol_type = other RNA
tgcctggcctggaaggctgca

SEQ ID NO: 81782 - RNA, 21 nt, synthetic construct
  source 1..21: mol_type = other RNA
cgggctgtgagccccagtgta

SEQ ID NO: 81783 - RNA, 21 nt, synthetic construct
  source 1..21: mol_type = other RNA
cgggctgtgagccccagtgta

SEQ ID NO: 81784 - RNA, 21 nt, synthetic construct
  source 1..21: mol_type = other RNA
ggctgtgacaatgccatccca

SEQ ID NO: 81785 - RNA, 21 nt, synthetic construct
  source 1..21: mol_type = other RNA
tacagcctcttccacaacaaa

SEQ ID NO: 81786 - RNA, 21 nt, synthetic construct
  source 1..21: mol_type = other RNA
ctgcctctctggggacaccca

SEQ ID NO: 81787 - RNA, 21 nt, synthetic construct
  source 1..21: mol_type = other RNA
cccacagcctgcatcctgcca

SEQ ID NO: 81788 - RNA, 21 nt, synthetic construct
  source 1..21: mol_type = other RNA
agggggagcctcaggaaaaca

SEQ ID NO: 81789 - RNA, 21 nt, synthetic construct
  source 1..21: mol_type = other RNA
agggccagatgtgcggcctga

SEQ ID NO: 81790 - RNA, 21 nt, synthetic construct
  source 1..21: mol_type = other RNA
ggcctacggggatggccacta

SEQ ID NO: 81791 - RNA, 21 nt, synthetic construct
  source 1..21: mol_type = other RNA
ggatcttcctggtcatcgaga

SEQ ID NO: 81792 - RNA, 21 nt, synthetic construct
  source 1..21: mol_type = other RNA
aagtgctgaccaccacggcca

SEQ ID NO: 81793 - RNA, 21 nt, synthetic construct
  source 1..21: mol_type = other RNA
ctgctggggccggcctttgca

SEQ ID NO: 81794 - RNA, 21 nt, synthetic construct
  source 1..21: mol_type = other RNA
gtgtccggctgtgtctgtcca

SEQ ID NO: 81795 - RNA, 21 nt, synthetic construct
  source 1..21: mol_type = other RNA
catggggatcttcctggtcaa

SEQ ID NO: 81796 - RNA, 21 nt, synthetic construct
  source 1..21: mol_type = other RNA
ccccaggtaccaccacctgca

SEQ ID NO: 81797 - RNA, 21 nt, synthetic construct
  source 1..21: mol_type = other RNA
ccagcctgagccccctgaaca

SEQ ID NO: 81798 - RNA, 21 nt, synthetic construct
  source 1..21: mol_type = other RNA
ccaggttgactccaccaagta

SEQ ID NO: 81799 - RNA, 21 nt, synthetic construct
  source 1..21: mol_type = other RNA
ccatgccctcctccactccga

SEQ ID NO: 81800 - RNA, 21 nt, synthetic construct
  source 1..21: mol_type = other RNA
acccacacccccacagtgcta

SEQ ID NO: 81801 - RNA, 21 nt, synthetic construct
  source 1..21: mol_type = other RNA
acccacacccccacagtgcta

SEQ ID NO: 81802 - RNA, 21 nt, synthetic construct
  source 1..21: mol_type = other RNA
ccatgccctcctccactccga

SEQ ID NO: 81803 - RNA, 21 nt, synthetic construct
  source 1..21: mol_type = other RNA
gccgtgtcctgggaccggaaa

SEQ ID NO: 81804 - RNA, 21 nt, synthetic construct
  source 1..21: mol_type = other RNA
gtgaacaagcacctgcccata

SEQ ID NO: 81805 - RNA, 21 nt, synthetic construct
  source 1..21: mol_type = other RNA
gtcactgtcttccccagccta

SEQ ID NO: 81806 - RNA, 21 nt, synthetic construct
  source 1..21: mol_type = other RNA
agcctgagccccctgaaccca

SEQ ID NO: 81807 - RNA, 21 nt, synthetic construct
  source 1..21: mol_type = other RNA
tcaaggtcagcatccggctga

SEQ ID NO: 81808 - RNA, 21 nt, synthetic construct
  source 1..21: mol_type = other RNA
caaggtcagcatccggctgga

SEQ ID NO: 81809 - RNA, 21 nt, synthetic construct
  source 1..21: mol_type = other RNA
cgggcagtgcccctgcaccca

SEQ ID NO: 81810 - RNA, 21 nt, synthetic construct
  source 1..21: mol_type = other RNA
cagcctggacggcggggacaa

SEQ ID NO: 81811 - RNA, 21 nt, synthetic construct
  source 1..21: mol_type = other RNA
gtttgtcaggctggaccccga

SEQ ID NO: 81812 - RNA, 21 nt, synthetic construct
  source 1..21: mol_type = other RNA
tgccaggaacagctttgagga

SEQ ID NO: 81813 - RNA, 21 nt, synthetic construct
  source 1..21: mol_type = other RNA
gccaggaacagctttgaggaa

SEQ ID NO: 81814 - RNA, 21 nt, synthetic construct
  source 1..21: mol_type = other RNA
gggcaccttcctcaatgacga

SEQ ID NO: 81815 - RNA, 21 nt, synthetic construct
  source 1..21: mol_type = other RNA
ggcaccttcctcaatgacgca

SEQ ID NO: 81816 - RNA, 21 nt, synthetic construct
  source 1..21: mol_type = other RNA
ctgctccaaggccatcaagca

SEQ ID NO: 81817 - RNA, 21 nt, synthetic construct
  source 1..21: mol_type = other RNA
tccaaggccatcaagctctta

SEQ ID NO: 81818 - RNA, 21 nt, synthetic construct
  source 1..21: mol_type = other RNA
gcctggaaggctgctacccga

SEQ ID NO: 81819 - RNA, 21 nt, synthetic construct
  source 1..21: mol_type = other RNA
gaactgccagagctgtaacta

SEQ ID NO: 81820 - RNA, 21 nt, synthetic construct
  source 1..21: mol_type = other RNA
agcacggagcctgctgtgcca

SEQ ID NO: 81821 - RNA, 21 nt, synthetic construct
  source 1..21: mol_type = other RNA
actgggtccagctcaggccca

SEQ ID NO: 81822 - RNA, 21 nt, synthetic construct
  source 1..21: mol_type = other RNA
ccagccccggtgtcagtggaa

SEQ ID NO: 81823 - RNA, 21 nt, synthetic construct
  source 1..21: mol_type = other RNA
agtctgaacaacttggaggga

SEQ ID NO: 81824 - RNA, 21 nt, synthetic construct
  source 1..21: mol_type = other RNA
cggcctggtgtgcaggaacta

SEQ ID NO: 81825 - RNA, 21 nt, synthetic construct
  source 1..21: mol_type = other RNA
acccactgtcccaggggtgga

SEQ ID NO: 81826 - RNA, 21 nt, synthetic construct
  source 1..21: mol_type = other RNA
tcccaggggtggccacatcca

SEQ ID NO: 81827 - RNA, 21 nt, synthetic construct
  source 1..21: mol_type = other RNA
acaatggcaacctccagagca

SEQ ID NO: 81828 - RNA, 21 nt, synthetic construct
  source 1..21: mol_type = other RNA
cacggccacctccaggaccaa

SEQ ID NO: 81829 - RNA, 21 nt, synthetic construct
  source 1..21: mol_type = other RNA
ctgtgagccccagtgtgccta

SEQ ID NO: 81830 - RNA, 21 nt, synthetic construct
  source 1..21: mol_type = other RNA
gccctcctccactccggggaa

SEQ ID NO: 81831 - RNA, 21 nt, synthetic construct
  source 1..21: mol_type = other RNA
ctgtgagccccagtgtgccta

SEQ ID NO: 81832 - RNA, 21 nt, synthetic construct
  source 1..21: mol_type = other RNA
ctgtgagccccagtgtgccta

SEQ ID NO: 81833 - RNA, 21 nt, synthetic construct
  source 1..21: mol_type = other RNA
cacggccacctccaggaccaa

SEQ ID NO: 81834 - RNA, 21 nt, synthetic construct
  source 1..21: mol_type = other RNA
ctgtgagccccagtgtgccta

SEQ ID NO: 81835 - RNA, 21 nt, synthetic construct
  source 1..21: mol_type = other RNA
gccctcctccactccggggaa

SEQ ID NO: 81836 - RNA, 21 nt, synthetic construct
  source 1..21: mol_type = other RNA
cttccccagctcccacttcta

SEQ ID NO: 81837 - RNA, 21 nt, synthetic construct
  source 1..21: mol_type = other RNA
ccccagctcccacttctctaa

SEQ ID NO: 81838 - RNA, 21 nt, synthetic construct
  source 1..21: mol_type = other RNA
cctgcttctgcagggcattta

SEQ ID NO: 81839 - RNA, 21 nt, synthetic construct
  source 1..21: mol_type = other RNA
ccctacagcctcttccacaaa

SEQ ID NO: 81840 - RNA, 21 nt, synthetic construct
  source 1..21: mol_type = other RNA
ggagtgtgcagtgactggcga

SEQ ID NO: 81841 - RNA, 21 nt, synthetic construct
  source 1..21: mol_type = other RNA
ctggggacacccaggacccaa

SEQ ID NO: 81842 - RNA, 21 nt, synthetic construct
  source 1..21: mol_type = other RNA
ctgctgctactcctgtgagga

SEQ ID NO: 81843 - RNA, 21 nt, synthetic construct
  source 1..21: mol_type = other RNA
gcagaggcccaggccatgcaa

SEQ ID NO: 81844 - RNA, 21 nt, synthetic construct
  source 1..21: mol_type = other RNA
ctcagcctggacggcggggaa

SEQ ID NO: 81845 - RNA, 21 nt, synthetic construct
  source 1..21: mol_type = other RNA
ctaccagccctgcggggcaca

SEQ ID NO: 81846 - RNA, 21 nt, synthetic construct
  source 1..21: mol_type = other RNA
agcctggacggcggggacaca

SEQ ID NO: 81847 - RNA, 21 nt, synthetic construct
  source 1..21: mol_type = other RNA
cactgcctggtggacctgcca

SEQ ID NO: 81848 - RNA, 21 nt, synthetic construct
  source 1..21: mol_type = other RNA
gtcagtggacagagtggttta

SEQ ID NO: 81849 - RNA, 21 nt, synthetic construct
  source 1..21: mol_type = other RNA
gttcaagatgtgcttcaacta

SEQ ID NO: 81850 - RNA, 21 nt, synthetic construct
  source 1..21: mol_type = other RNA
gttcaagatgtgcttcaacta

SEQ ID NO: 81851 - RNA, 21 nt, synthetic construct
  source 1..21: mol_type = other RNA
gttcaagatgtgcttcaacta

SEQ ID NO: 81852 - RNA, 21 nt, synthetic construct
  source 1..21: mol_type = other RNA
gttcaagatgtgcttcaacta

SEQ ID NO: 81853 - RNA, 21 nt, synthetic construct
  source 1..21: mol_type = other RNA
gacagtgccctgctggagcta

SEQ ID NO: 81854 - RNA, 21 nt, synthetic construct
  source 1..21: mol_type = other RNA
gctccagtttgggaacctgca

SEQ ID NO: 81855 - RNA, 21 nt, synthetic construct
  source 1..21: mol_type = other RNA
gcccaggacctgtgccgctga

SEQ ID NO: 81856 - RNA, 21 nt, synthetic construct
  source 1..21: mol_type = other RNA
cgctgtcctcctatgtgcaca

SEQ ID NO: 81857 - RNA, 21 nt, synthetic construct
  source 1..21: mol_type = other RNA
tcagcacacactgcgtgtcca

SEQ ID NO: 81858 - RNA, 21 nt, synthetic construct
  source 1..21: mol_type = other RNA
tcacagccttgaggcctgcaa

SEQ ID NO: 81859 - RNA, 21 nt, synthetic construct
  source 1..21: mol_type = other RNA
cccagcctggtgtccccctga

SEQ ID NO: 81860 - RNA, 21 nt, synthetic construct
  source 1..21: mol_type = other RNA
cccagcctggtgtccccctga

SEQ ID NO: 81861 - RNA, 21 nt, synthetic construct
  source 1..21: mol_type = other RNA
cccagcctggtgtccccctga

SEQ ID NO: 81862 - RNA, 21 nt, synthetic construct
  source 1..21: mol_type = other RNA
acggccacctccaggaccaca

SEQ ID NO: 81863 - RNA, 21 nt, synthetic construct
  source 1..21: mol_type = other RNA
ccaaccagacctgtggcctga

SEQ ID NO: 81864 - RNA, 21 nt, synthetic construct
  source 1..21: mol_type = other RNA
gccgctgccccacctgcccga

SEQ ID NO: 81865 - RNA, 21 nt, synthetic construct
  source 1..21: mol_type = other RNA
tgctgaccaccacggccacca

SEQ ID NO: 81866 - RNA, 21 nt, synthetic construct
  source 1..21: mol_type = other RNA
cgctcagcctggacggcggga

SEQ ID NO: 81867 - RNA, 21 nt, synthetic construct
  source 1..21: mol_type = other RNA
cacttctctactccctgctta

SEQ ID NO: 81868 - RNA, 21 nt, synthetic construct
  source 1..21: mol_type = other RNA
gtttgggaacctgcagaagta

SEQ ID NO: 81869 - RNA, 21 nt, synthetic construct
  source 1..21: mol_type = other RNA
cctgcgcccaggacctgtgca

SEQ ID NO: 81870 - RNA, 21 nt, synthetic construct
  source 1..21: mol_type = other RNA
tcagcctggacggcggggaca

SEQ ID NO: 81871 - RNA, 21 nt, synthetic construct
  source 1..21: mol_type = other RNA
caggaacagctttgaggacca

SEQ ID NO: 81872 - RNA, 21 nt, synthetic construct
  source 1..21: mol_type = other RNA
gcctctctgcagaaaagcaca

SEQ ID NO: 81873 - RNA, 21 nt, synthetic construct
  source 1..21: mol_type = other RNA
ccggaggtgggagtgcagcca

SEQ ID NO: 81874 - RNA, 21 nt, synthetic construct
  source 1..21: mol_type = other RNA
gaaggctgtggcatgtcctga

SEQ ID NO: 81875 - RNA, 21 nt, synthetic construct
  source 1..21: mol_type = other RNA
ttgatgaggactaccccaaga

SEQ ID NO: 81876 - RNA, 21 nt, synthetic construct
  source 1..21: mol_type = other RNA
caatggcaacctccagagcta

SEQ ID NO: 81877 - RNA, 21 nt, synthetic construct
  source 1..21: mol_type = other RNA
ctatggcaacaccctcctcta

SEQ ID NO: 81878 - RNA, 21 nt, synthetic construct
  source 1..21: mol_type = other RNA
ccacggccacctccaggacca

SEQ ID NO: 81879 - RNA, 21 nt, synthetic construct
  source 1..21: mol_type = other RNA
ctatggcaacaccctcctcta

SEQ ID NO: 81880 - RNA, 21 nt, synthetic construct
  source 1..21: mol_type = other RNA
ctatggcaacaccctcctcta

SEQ ID NO: 81881 - RNA, 21 nt, synthetic construct
  source 1..21: mol_type = other RNA
ctatggcaacaccctcctcta

SEQ ID NO: 81882 - RNA, 21 nt, synthetic construct
  source 1..21: mol_type = other RNA
ccacggccacctccaggacca

SEQ ID NO: 81883 - RNA, 21 nt, synthetic construct
  source 1..21: mol_type = other RNA
ctatggcaacaccctcctcta

SEQ ID NO: 81884 - RNA, 21 nt, synthetic construct
  source 1..21: mol_type = other RNA
ttcggcctggtgtgcaggaaa

SEQ ID NO: 81885 - RNA, 21 nt, synthetic construct
  source 1..21: mol_type = other RNA
tgtgagtggacagagtggtta

SEQ ID NO: 81886 - RNA, 21 nt, synthetic construct
  source 1..21: mol_type = other RNA
ccttcttcaatgaggaccaga

SEQ ID NO: 81887 - RNA, 21 nt, synthetic construct
  source 1..21: mol_type = other RNA
tgcccctgtcggcagccaaca

SEQ ID NO: 81888 - RNA, 21 nt, synthetic construct
  source 1..21: mol_type = other RNA
gccagatgtgcggcctgtgta

SEQ ID NO: 81889 - RNA, 21 nt, synthetic construct
  source 1..21: mol_type = other RNA
gtgagcagcggtttcagcaaa

SEQ ID NO: 81890 - RNA, 21 nt, synthetic construct
  source 1..21: mol_type = other RNA
agcaactgccagtcctgcgta

SEQ ID NO: 81891 - RNA, 21 nt, synthetic construct
  source 1..21: mol_type = other RNA
gtcttccccagcctgagccca

SEQ ID NO: 81892 - RNA, 21 nt, synthetic construct
  source 1..21: mol_type = other RNA
acctgcagctcctgcacctga

SEQ ID NO: 81893 - RNA, 21 nt, synthetic construct
  source 1..21: mol_type = other RNA
gctcagcctggacggcgggga

SEQ ID NO: 81894 - RNA, 21 nt, synthetic construct
  source 1..21: mol_type = other RNA
cacgcagctgcccctgtcgga

SEQ ID NO: 81895 - RNA, 21 nt, synthetic construct
  source 1..21: mol_type = other RNA
gccaacacctggaaggcccaa

SEQ ID NO: 81896 - RNA, 21 nt, synthetic construct
  source 1..21: mol_type = other RNA
gtggagaatgagaactacgca

SEQ ID NO: 81897 - RNA, 21 nt, synthetic construct
  source 1..21: mol_type = other RNA
tgcagaaaagcacagggtgta

SEQ ID NO: 81898 - RNA, 21 nt, synthetic construct
  source 1..21: mol_type = other RNA
gtgcagccaccggctctgcca

SEQ ID NO: 81899 - RNA, 21 nt, synthetic construct
  source 1..21: mol_type = other RNA
cgccgcctgccgctcccagga

SEQ ID NO: 81900 - RNA, 21 nt, synthetic construct
  source 1..21: mol_type = other RNA
ggtgtgcaggaactgggagca

SEQ ID NO: 81901 - RNA, 21 nt, synthetic construct
  source 1..21: mol_type = other RNA
cacagccaccccctcctccaa

SEQ ID NO: 81902 - RNA, 21 nt, synthetic construct
  source 1..21: mol_type = other RNA
cacagccaccccctcctccaa

SEQ ID NO: 81903 - RNA, 21 nt, synthetic construct
  source 1..21: mol_type = other RNA
ccacgccctcctccactccaa

SEQ ID NO: 81904 - RNA, 21 nt, synthetic construct
  source 1..21: mol_type = other RNA
cgccctcctccactccaggga

SEQ ID NO: 81905 - RNA, 21 nt, synthetic construct
  source 1..21: mol_type = other RNA
cacagccaccccctcctccaa

SEQ ID NO: 81906 - RNA, 21 nt, synthetic construct
  source 1..21: mol_type = other RNA
actccagggacaactcccata

SEQ ID NO: 81907 - RNA, 21 nt, synthetic construct
  source 1..21: mol_type = other RNA
cacagccaccccctcctccaa

SEQ ID NO: 81908 - RNA, 21 nt, synthetic construct
  source 1..21: mol_type = other RNA
cacaccctcctccactctgga

SEQ ID NO: 81909 - RNA, 21 nt, synthetic construct
  source 1..21: mol_type = other RNA
ctctactccctgcttctgcaa

SEQ ID NO: 81910 - RNA, 21 nt, synthetic construct
  source 1..21: mol_type = other RNA
ctacagcctcttccacaacaa

SEQ ID NO: 81911 - RNA, 21 nt, synthetic construct
  source 1..21: mol_type = other RNA
ggacggctgcttctgccccca

SEQ ID NO: 81912 - RNA, 21 nt, synthetic construct
  source 1..21: mol_type = other RNA
cactctggctgcctgccccta

SEQ ID NO: 81913 - RNA, 21 nt, synthetic construct
  source 1..21: mol_type = other RNA
ggacaacgagaactgcctgaa

SEQ ID NO: 81914 - RNA, 21 nt, synthetic construct
  source 1..21: mol_type = other RNA
ttcctcaactccatctacaca

SEQ ID NO: 81915 - RNA, 21 nt, synthetic construct
  source 1..21: mol_type = other RNA
acacgcagctgcccctgtcga

SEQ ID NO: 81916 - RNA, 21 nt, synthetic construct
  source 1..21: mol_type = other RNA
gctgcccctgtcggcagccaa

SEQ ID NO: 81917 - RNA, 21 nt, synthetic construct
  source 1..21: mol_type = other RNA
gtcggcagccaacatcaccca

SEQ ID NO: 81918 - RNA, 21 nt, synthetic construct
  source 1..21: mol_type = other RNA
cttcgccaacacctggaagga

SEQ ID NO: 81919 - RNA, 21 nt, synthetic construct
  source 1..21: mol_type = other RNA
gtggacggctgcacctgccca

SEQ ID NO: 81920 - RNA, 21 nt, synthetic construct
  source 1..21: mol_type = other RNA
cggcaccgtgctggctcctga

SEQ ID NO: 81921 - RNA, 21 nt, synthetic construct
  source 1..21: mol_type = other RNA
gcgggcacccctggggccgaa

SEQ ID NO: 81922 - RNA, 21 nt, synthetic construct
  source 1..21: mol_type = other RNA
tgtccggctgtgtctgtccca

SEQ ID NO: 81923 - RNA, 21 nt, synthetic construct
  source 1..21: mol_type = other RNA
gaccaccggcaccacctgcta

SEQ ID NO: 81924 - RNA, 21 nt, synthetic construct
  source 1..21: mol_type = other RNA
atggggatcttcctggtcata

SEQ ID NO: 81925 - RNA, 21 nt, synthetic construct
  source 1..21: mol_type = other RNA
agccctgcggggcaccctgca

SEQ ID NO: 81926 - RNA, 21 nt, synthetic construct
  source 1..21: mol_type = other RNA
ccagtgggcactgcctggtga

SEQ ID NO: 81927 - RNA, 21 nt, synthetic construct
  source 1..21: mol_type = other RNA
tggtggacctgcctggcctga

SEQ ID NO: 81928 - RNA, 21 nt, synthetic construct
  source 1..21: mol_type = other RNA
gacctgcctggcctggaagga

SEQ ID NO: 81929 - RNA, 21 nt, synthetic construct
  source 1..21: mol_type = other RNA
tgaggaccagatgaagtgcga

SEQ ID NO: 81930 - RNA, 21 nt, synthetic construct
  source 1..21: mol_type = other RNA
caggccgagagcttccccaaa

SEQ ID NO: 81931 - RNA, 21 nt, synthetic construct
  source 1..21: mol_type = other RNA
agcaccacagcagtccccaca

SEQ ID NO: 81932 - RNA, 21 nt, synthetic construct
  source 1..21: mol_type = other RNA
acagaacccactgtcccagga

SEQ ID NO: 81933 - RNA, 21 nt, synthetic construct
  source 1..21: mol_type = other RNA
gctgaccaccacggccaccaa

SEQ ID NO: 81934 - RNA, 21 nt, synthetic construct
  source 1..21: mol_type = other RNA
aagcacagccaccacacccaa

SEQ ID NO: 81935 - RNA, 21 nt, synthetic construct
  source 1..21: mol_type = other RNA
gccgtctgtgagcagccccta

SEQ ID NO: 81936 - RNA, 21 nt, synthetic construct
  source 1..21: mol_type = other RNA
ctgtgagcagcccctgggcca

SEQ ID NO: 81937 - RNA, 21 nt, synthetic construct
  source 1..21: mol_type = other RNA
aggtggggaagttcaagatga

SEQ ID NO: 81938 - RNA, 21 nt, synthetic construct
  source 1..21: mol_type = other RNA
aagcacagccaccacacccaa

SEQ ID NO: 81939 - RNA, 21 nt, synthetic construct
  source 1..21: mol_type = other RNA
cacctccaggaccacggccaa

SEQ ID NO: 81940 - RNA, 21 nt, synthetic construct
  source 1..21: mol_type = other RNA
gccgtctgtgagcagccccta

SEQ ID NO: 81941 - RNA, 21 nt, synthetic construct
  source 1..21: mol_type = other RNA
ctgtgagcagcccctgggcca

SEQ ID NO: 81942 - RNA, 21 nt, synthetic construct
  source 1..21: mol_type = other RNA
aggtggggaagttcaagatga

SEQ ID NO: 81943 - RNA, 21 nt, synthetic construct
  source 1..21: mol_type = other RNA
aagcacagccaccacacccaa

SEQ ID NO: 81944 - RNA, 21 nt, synthetic construct
  source 1..21: mol_type = other RNA
ctgtgagcagcccctgggcca

SEQ ID NO: 81945 - RNA, 21 nt, synthetic construct
  source 1..21: mol_type = other RNA
aggtggggaagttcaagatga

SEQ ID NO: 81946 - RNA, 21 nt, synthetic construct
  source 1..21: mol_type = other RNA
aagcacagccaccacacccaa

SEQ ID NO: 81947 - RNA, 21 nt, synthetic construct
  source 1..21: mol_type = other RNA
cacctccaggaccacggccaa

SEQ ID NO: 81948 - RNA, 21 nt, synthetic construct
  source 1..21: mol_type = other RNA
gccgtctgtgagcagccccta

SEQ ID NO: 81949 - RNA, 21 nt, synthetic construct
  source 1..21: mol_type = other RNA
ctgtgagcagcccctgggcca

SEQ ID NO: 81950 - RNA, 21 nt, synthetic construct
  source 1..21: mol_type = other RNA
aggtggggaagttcaagatga

SEQ ID NO: 81951 - RNA, 21 nt, synthetic construct
  source 1..21: mol_type = other RNA
aagcacagccaccacacccaa

SEQ ID NO: 81952 - RNA, 21 nt, synthetic construct
  source 1..21: mol_type = other RNA
acaccctcctccactctggga

SEQ ID NO: 81953 - RNA, 21 nt, synthetic construct
  source 1..21: mol_type = other RNA
ctactccctgcttctgcagga

SEQ ID NO: 81954 - RNA, 21 nt, synthetic construct
  source 1..21: mol_type = other RNA
gccctacagcctcttccacaa

SEQ ID NO: 81955 - RNA, 21 nt, synthetic construct
  source 1..21: mol_type = other RNA
atgcagcaccagtgcacctga

SEQ ID NO: 81956 - RNA, 21 nt, synthetic construct
  source 1..21: mol_type = other RNA
gtccctgcgcccatggctcca

SEQ ID NO: 81957 - RNA, 21 nt, synthetic construct
  source 1..21: mol_type = other RNA
ggcccacggagcagtgcccga

SEQ ID NO: 81958 - RNA, 21 nt, synthetic construct
  source 1..21: mol_type = other RNA
gacctgccgtgccctggcaca

SEQ ID NO: 81959 - RNA, 21 nt, synthetic construct
  source 1..21: mol_type = other RNA
gtgtgggaacttcaaccagaa

SEQ ID NO: 81960 - RNA, 21 nt, synthetic construct
  source 1..21: mol_type = other RNA
ggcgggcacccctggggccga

SEQ ID NO: 81961 - RNA, 21 nt, synthetic construct
  source 1..21: mol_type = other RNA
tcgactgcaacacctgcacca

SEQ ID NO: 81962 - RNA, 21 nt, synthetic construct
  source 1..21: mol_type = other RNA
caccggcaccacctgctccaa

SEQ ID NO: 81963 - RNA, 21 nt, synthetic construct
  source 1..21: mol_type = other RNA
cgggatggccgtgtcctggga

SEQ ID NO: 81964 - RNA, 21 nt, synthetic construct
  source 1..21: mol_type = other RNA
accccagtgggcactgcctga

SEQ ID NO: 81965 - RNA, 21 nt, synthetic construct
  source 1..21: mol_type = other RNA
agttcaagatgtgcttcaaca

SEQ ID NO: 81966 - RNA, 21 nt, synthetic construct
  source 1..21: mol_type = other RNA
cccacacccccacagtgctga

SEQ ID NO: 81967 - RNA, 21 nt, synthetic construct
  source 1..21: mol_type = other RNA
agttcaagatgtgcttcaaca

SEQ ID NO: 81968 - RNA, 21 nt, synthetic construct
  source 1..21: mol_type = other RNA
agttcaagatgtgcttcaaca

SEQ ID NO: 81969 - RNA, 21 nt, synthetic construct
  source 1..21: mol_type = other RNA
cccacacccccacagtgctga

SEQ ID NO: 81970 - RNA, 21 nt, synthetic construct
  source 1..21: mol_type = other RNA
agttcaagatgtgcttcaaca

SEQ ID NO: 81971 - RNA, 21 nt, synthetic construct
  source 1..21: mol_type = other RNA
gcctcttccacaacaacacca

SEQ ID NO: 81972 - RNA, 21 nt, synthetic construct
  source 1..21: mol_type = other RNA
ccccagcctgagccccctgaa

SEQ ID NO: 81973 - RNA, 21 nt, synthetic construct
  source 1..21: mol_type = other RNA
gtggaacggagaggacagtga

SEQ ID NO: 81974 - RNA, 21 nt, synthetic construct
  source 1..21: mol_type = other RNA
gtcgactgcaacacctgcaca

SEQ ID NO: 81975 - RNA, 21 nt, synthetic construct
  source 1..21: mol_type = other RNA
gggaccaccggcaccacctga

SEQ ID NO: 81976 - RNA, 21 nt, synthetic construct
  source 1..21: mol_type = other RNA
ctccctcagtgccagcacgga

SEQ ID NO: 81977 - RNA, 21 nt, synthetic construct
  source 1..21: mol_type = other RNA
ggtttgacgtggacttcccaa

SEQ ID NO: 81978 - RNA, 21 nt, synthetic construct
  source 1..21: mol_type = other RNA
tgccctacagcctcttccaca

SEQ ID NO: 81979 - RNA, 21 nt, synthetic construct
  source 1..21: mol_type = other RNA
gtacctgcctctctggggaca

SEQ ID NO: 81980 - RNA, 21 nt, synthetic construct
  source 1..21: mol_type = other RNA
tgcgcccaggacctgtgccga

SEQ ID NO: 81981 - RNA, 21 nt, synthetic construct
  source 1..21: mol_type = other RNA
gacctgtgccgctgccccaca

SEQ ID NO: 81982 - RNA, 21 nt, synthetic construct
  source 1..21: mol_type = other RNA
ggaccccgcccaccagggcca

SEQ ID NO: 81983 - RNA, 21 nt, synthetic construct
  source 1..21: mol_type = other RNA
cgctggacgtgggctgtttca

SEQ ID NO: 81984 - RNA, 21 nt, synthetic construct
  source 1..21: mol_type = other RNA
acttcatcacctttgatggca

SEQ ID NO: 81985 - RNA, 21 nt, synthetic construct
  source 1..21: mol_type = other RNA
caaggccatcaagctcttcga

SEQ ID NO: 81986 - RNA, 21 nt, synthetic construct
  source 1..21: mol_type = other RNA
tgcaccaggactacaagggca

SEQ ID NO: 81987 - RNA, 21 nt, synthetic construct
  source 1..21: mol_type = other RNA
ggcactgcctggtggacctga

SEQ ID NO: 81988 - RNA, 21 nt, synthetic construct
  source 1..21: mol_type = other RNA
gcctggtggacctgcctggca

SEQ ID NO: 81989 - RNA, 21 nt, synthetic construct
  source 1..21: mol_type = other RNA
ctggtggacctgcctggccta

SEQ ID NO: 81990 - RNA, 21 nt, synthetic construct
  source 1..21: mol_type = other RNA
ggtctgccgctggtccagcta

SEQ ID NO: 81991 - RNA, 21 nt, synthetic construct
  source 1..21: mol_type = other RNA
tctgccgctggtccagctgga

SEQ ID NO: 81992 - RNA, 21 nt, synthetic construct
  source 1..21: mol_type = other RNA
gccaccccctcctccagccca

SEQ ID NO: 81993 - RNA, 21 nt, synthetic construct
  source 1..21: mol_type = other RNA
ctcctctgccctagggaccaa

SEQ ID NO: 81994 - RNA, 21 nt, synthetic construct
  source 1..21: mol_type = other RNA
gccaccccctcctccagccca

SEQ ID NO: 81995 - RNA, 21 nt, synthetic construct
  source 1..21: mol_type = other RNA
ctcctctgccctagggaccaa

SEQ ID NO: 81996 - RNA, 21 nt, synthetic construct
  source 1..21: mol_type = other RNA
gccaccccctcctccagccca

SEQ ID NO: 81997 - RNA, 21 nt, synthetic construct
  source 1..21: mol_type = other RNA
ctcctctgccctagggaccaa

SEQ ID NO: 81998 - RNA, 21 nt, synthetic construct
  source 1..21: mol_type = other RNA
ctcctctgccctagggaccaa

SEQ ID NO: 81999 - RNA, 21 nt, synthetic construct
  source 1..21: mol_type = other RNA
gccaccccctcctccagccca

SEQ ID NO: 82000 - RNA, 21 nt, synthetic construct
  source 1..21: mol_type = other RNA
cttctctactccctgcttcta

SEQ ID NO: 82001 - RNA, 21 nt, synthetic construct
  source 1..21: mol_type = other RNA
tctctactccctgcttctgca

SEQ ID NO: 82002 - RNA, 21 nt, synthetic construct
  source 1..21: mol_type = other RNA
gagacctggaccctggagaaa

SEQ ID NO: 82003 - RNA, 21 nt, synthetic construct
  source 1..21: mol_type = other RNA
ggcccaggccatgcagcacca

SEQ ID NO: 82004 - RNA, 21 nt, synthetic construct
  source 1..21: mol_type = other RNA
gcccaggccatgcagcaccaa

SEQ ID NO: 82005 - RNA, 21 nt, synthetic construct
  source 1..21: mol_type = other RNA
gcagcaccagtgcacctgcta

SEQ ID NO: 82006 - RNA, 21 nt, synthetic construct
  source 1..21: mol_type = other RNA
cccgtcactgtcttccccaga

SEQ ID NO: 82007 - RNA, 21 nt, synthetic construct
  source 1..21: mol_type = other RNA
cgtcactgtcttccccagcca

SEQ ID NO: 82008 - RNA, 21 nt, synthetic construct
  source 1..21: mol_type = other RNA
tcactgtcttccccagcctga

SEQ ID NO: 82009 - RNA, 21 nt, synthetic construct
  source 1..21: mol_type = other RNA
tcttccccagcctgagcccca

SEQ ID NO: 82010 - RNA, 21 nt, synthetic construct
  source 1..21: mol_type = other RNA
cccagcctgagccccctgaaa

SEQ ID NO: 82011 - RNA, 21 nt, synthetic construct
  source 1..21: mol_type = other RNA
gtgggctccaggcctgtggta

SEQ ID NO: 82012 - RNA, 21 nt, synthetic construct
  source 1..21: mol_type = other RNA
ggctccaggcctgtggtcaca

SEQ ID NO: 82013 - RNA, 21 nt, synthetic construct
  source 1..21: mol_type = other RNA
tgtcatcaaggcccaggggca

SEQ ID NO: 82014 - RNA, 21 nt, synthetic construct
  source 1..21: mol_type = other RNA
gtcatcaaggcccaggggcta

SEQ ID NO: 82015 - RNA, 21 nt, synthetic construct
  source 1..21: mol_type = other RNA
tcatcaaggcccaggggctga

SEQ ID NO: 82016 - RNA, 21 nt, synthetic construct
  source 1..21: mol_type = other RNA
gggcagcgggaggagctgcca

SEQ ID NO: 82017 - RNA, 21 nt, synthetic construct
  source 1..21: mol_type = other RNA
ggcagcgggaggagctgccta

SEQ ID NO: 82018 - RNA, 21 nt, synthetic construct
  source 1..21: mol_type = other RNA
aggacagtgccctgctggaga

SEQ ID NO: 82019 - RNA, 21 nt, synthetic construct
  source 1..21: mol_type = other RNA
tgccgctgccccacctgccca

SEQ ID NO: 82020 - RNA, 21 nt, synthetic construct
  source 1..21: mol_type = other RNA
ccgctgccccacctgcccgta

SEQ ID NO: 82021 - RNA, 21 nt, synthetic construct
  source 1..21: mol_type = other RNA
gacacctgctccaacccccaa

SEQ ID NO: 82022 - RNA, 21 nt, synthetic construct
  source 1..21: mol_type = other RNA
acacctgctccaacccccaga

SEQ ID NO: 82023 - RNA, 21 nt, synthetic construct
  source 1..21: mol_type = other RNA
cacctgctccaacccccagca

SEQ ID NO: 82024 - RNA, 21 nt, synthetic construct
  source 1..21: mol_type = other RNA
cctgctccaacccccagcgca

SEQ ID NO: 82025 - RNA, 21 nt, synthetic construct
  source 1..21: mol_type = other RNA
gctgcttctgccccccaggca

SEQ ID NO: 82026 - RNA, 21 nt, synthetic construct
  source 1..21: mol_type = other RNA
cgcactctggctgcctgccca

SEQ ID NO: 82027 - RNA, 21 nt, synthetic construct
  source 1..21: mol_type = other RNA
gcactctggctgcctgcccca

SEQ ID NO: 82028 - RNA, 21 nt, synthetic construct
  source 1..21: mol_type = other RNA
gctgcctgcccctcgggcaga

SEQ ID NO: 82029 - RNA, 21 nt, synthetic construct
  source 1..21: mol_type = other RNA
tgcctgcccctcgggcagtga

SEQ ID NO: 82030 - RNA, 21 nt, synthetic construct
  source 1..21: mol_type = other RNA
ctgcccctcgggcagtgccca

SEQ ID NO: 82031 - RNA, 21 nt, synthetic construct
  source 1..21: mol_type = other RNA
gcccctcgggcagtgccccta

SEQ ID NO: 82032 - RNA, 21 nt, synthetic construct
  source 1..21: mol_type = other RNA
tcaacaccacctgcagctcca

SEQ ID NO: 82033 - RNA, 21 nt, synthetic construct
  source 1..21: mol_type = other RNA
ccacctgcagctcctgcacca

SEQ ID NO: 82034 - RNA, 21 nt, synthetic construct
  source 1..21: mol_type = other RNA
cacctgcagctcctgcaccta

SEQ ID NO: 82035 - RNA, 21 nt, synthetic construct
  source 1..21: mol_type = other RNA
ggcagtgccaggacctgccga

SEQ ID NO: 82036 - RNA, 21 nt, synthetic construct
  source 1..21: mol_type = other RNA
gtgcagggcggggcccacata

SEQ ID NO: 82037 - RNA, 21 nt, synthetic construct
  source 1..21: mol_type = other RNA
tacacgcagctgcccctgtca

SEQ ID NO: 82038 - RNA, 21 nt, synthetic construct
  source 1..21: mol_type = other RNA
gggctgcagctgctggtgcaa

SEQ ID NO: 82039 - RNA, 21 nt, synthetic construct
  source 1..21: mol_type = other RNA
agctgctggtgcagctggtga

SEQ ID NO: 82040 - RNA, 21 nt, synthetic construct
  source 1..21: mol_type = other RNA
gtgtttgtcaggctggaccca

SEQ ID NO: 82041 - RNA, 21 nt, synthetic construct
  source 1..21: mol_type = other RNA
gtcaggctggaccccgcccaa

SEQ ID NO: 82042 - RNA, 21 nt, synthetic construct
  source 1..21: mol_type = other RNA
tggaccccgcccaccagggca

SEQ ID NO: 82043 - RNA, 21 nt, synthetic construct
  source 1..21: mol_type = other RNA
ccccgcccaccagggccagaa

SEQ ID NO: 82044 - RNA, 21 nt, synthetic construct
  source 1..21: mol_type = other RNA
gcccaccagggccagatgtga

SEQ ID NO: 82045 - RNA, 21 nt, synthetic construct
  source 1..21: mol_type = other RNA
gggccagatgtgcggcctgta

SEQ ID NO: 82046 - RNA, 21 nt, synthetic construct
  source 1..21: mol_type = other RNA
ctttgaggacccctgctccca

SEQ ID NO: 82047 - RNA, 21 nt, synthetic construct
  source 1..21: mol_type = other RNA
tgaggacccctgctccctcaa

SEQ ID NO: 82048 - RNA, 21 nt, synthetic construct
  source 1..21: mol_type = other RNA
aaccccaagcccttccactca

SEQ ID NO: 82049 - RNA, 21 nt, synthetic construct
  source 1..21: mol_type = other RNA
accccaagcccttccactcga

SEQ ID NO: 82050 - RNA, 21 nt, synthetic construct
  source 1..21: mol_type = other RNA
tctgcaccaagtacatgcaga

SEQ ID NO: 82051 - RNA, 21 nt, synthetic construct
  source 1..21: mol_type = other RNA
tgcagaactgccccaagtcca

SEQ ID NO: 82052 - RNA, 21 nt, synthetic construct
  source 1..21: mol_type = other RNA
accgtgctggctcctggagaa

SEQ ID NO: 82053 - RNA, 21 nt, synthetic construct
  source 1..21: mol_type = other RNA
ccgtgctggctcctggagaga

SEQ ID NO: 82054 - RNA, 21 nt, synthetic construct
  source 1..21: mol_type = other RNA
cgtgctggctcctggagagga

SEQ ID NO: 82055 - RNA, 21 nt, synthetic construct
  source 1..21: mol_type = other RNA
ctgcagaaaagcacagggtga

SEQ ID NO: 82056 - RNA, 21 nt, synthetic construct
  source 1..21: mol_type = other RNA
ccctggggccgagtgcctcca

SEQ ID NO: 82057 - RNA, 21 nt, synthetic construct
  source 1..21: mol_type = other RNA
tccggctgtgtctgtccccca

SEQ ID NO: 82058 - RNA, 21 nt, synthetic construct
  source 1..21: mol_type = other RNA
cggctgtgtctgtcccccgga

SEQ ID NO: 82059 - RNA, 21 nt, synthetic construct
  source 1..21: mol_type = other RNA
accggaggtgggagtgcagca

SEQ ID NO: 82060 - RNA, 21 nt, synthetic construct
  source 1..21: mol_type = other RNA
cagccaccggctctgcctgga

SEQ ID NO: 82061 - RNA, 21 nt, synthetic construct
  source 1..21: mol_type = other RNA
agccaccggctctgcctggga

SEQ ID NO: 82062 - RNA, 21 nt, synthetic construct
  source 1..21: mol_type = other RNA
gccaccggctctgcctgggca

SEQ ID NO: 82063 - RNA, 21 nt, synthetic construct
  source 1..21: mol_type = other RNA
cggctctgcctgggcacctga

SEQ ID NO: 82064 - RNA, 21 nt, synthetic construct
  source 1..21: mol_type = other RNA
ggctctgcctgggcacctgca

SEQ ID NO: 82065 - RNA, 21 nt, synthetic construct
  source 1..21: mol_type = other RNA
ctctgcctgggcacctgcgta

SEQ ID NO: 82066 - RNA, 21 nt, synthetic construct
  source 1..21: mol_type = other RNA
tgcctgggcacctgcgtggca

SEQ ID NO: 82067 - RNA, 21 nt, synthetic construct
  source 1..21: mol_type = other RNA
ccaaggccatcaagctcttca

SEQ ID NO: 82068 - RNA, 21 nt, synthetic construct
  source 1..21: mol_type = other RNA
gatcttcctggtcatcgagaa

SEQ ID NO: 82069 - RNA, 21 nt, synthetic construct
  source 1..21: mol_type = other RNA
atcttcctggtcatcgagaca

SEQ ID NO: 82070 - RNA, 21 nt, synthetic construct
  source 1..21: mol_type = other RNA
gggatggccgtgtcctgggaa

SEQ ID NO: 82071 - RNA, 21 nt, synthetic construct
  source 1..21: mol_type = other RNA
ggatggccgtgtcctgggaca

SEQ ID NO: 82072 - RNA, 21 nt, synthetic construct
  source 1..21: mol_type = other RNA
tccgactgcaccaggactaca

SEQ ID NO: 82073 - RNA, 21 nt, synthetic construct
  source 1..21: mol_type = other RNA
accttcgccgcctgccgctca

SEQ ID NO: 82074 - RNA, 21 nt, synthetic construct
  source 1..21: mol_type = other RNA
tcgccgcctgccgctcccaga

SEQ ID NO: 82075 - RNA, 21 nt, synthetic construct
  source 1..21: mol_type = other RNA
ccagccctgcggggcacccta

SEQ ID NO: 82076 - RNA, 21 nt, synthetic construct
  source 1..21: mol_type = other RNA
ccccagtgggcactgcctgga

SEQ ID NO: 82077 - RNA, 21 nt, synthetic construct
  source 1..21: mol_type = other RNA
gggcactgcctggtggaccta

SEQ ID NO: 82078 - RNA, 21 nt, synthetic construct
  source 1..21: mol_type = other RNA
actgcctggtggacctgccta

SEQ ID NO: 82079 - RNA, 21 nt, synthetic construct
  source 1..21: mol_type = other RNA
cctggtggacctgcctggcca

SEQ ID NO: 82080 - RNA, 21 nt, synthetic construct
  source 1..21: mol_type = other RNA
gtggacctgcctggcctggaa

SEQ ID NO: 82081 - RNA, 21 nt, synthetic construct
  source 1..21: mol_type = other RNA
tggacctgcctggcctggaaa

SEQ ID NO: 82082 - RNA, 21 nt, synthetic construct
  source 1..21: mol_type = other RNA
acctgcctggcctggaaggca

SEQ ID NO: 82083 - RNA, 21 nt, synthetic construct
  source 1..21: mol_type = other RNA
ctgcctggcctggaaggctga

SEQ ID NO: 82084 - RNA, 21 nt, synthetic construct
  source 1..21: mol_type = other RNA
cacccagccagcccttcttca

SEQ ID NO: 82085 - RNA, 21 nt, synthetic construct
  source 1..21: mol_type = other RNA
ccagccagcccttcttcaata

SEQ ID NO: 82086 - RNA, 21 nt, synthetic construct
  source 1..21: mol_type = other RNA
atgaggaccagatgaagtgca

SEQ ID NO: 82087 - RNA, 21 nt, synthetic construct
  source 1..21: mol_type = other RNA
agccttgaggcctgcacctga

SEQ ID NO: 82088 - RNA, 21 nt, synthetic construct
  source 1..21: mol_type = other RNA
cttgaggcctgcacctgcaca

SEQ ID NO: 82089 - RNA, 21 nt, synthetic construct
  source 1..21: mol_type = other RNA
ggaaggctgtggcatgtccta

SEQ ID NO: 82090 - RNA, 21 nt, synthetic construct
  source 1..21: mol_type = other RNA
ccacgacaagcccggccctca

SEQ ID NO: 82091 - RNA, 21 nt, synthetic construct
  source 1..21: mol_type = other RNA
cacgacaagcccggccctcca

SEQ ID NO: 82092 - RNA, 21 nt, synthetic construct
  source 1..21: mol_type = other RNA
gagctgggccagcaggtggaa

SEQ ID NO: 82093 - RNA, 21 nt, synthetic construct
  source 1..21: mol_type = other RNA
agctgggccagcaggtggaca

SEQ ID NO: 82094 - RNA, 21 nt, synthetic construct
  source 1..21: mol_type = other RNA
gctgggccagcaggtggacta

SEQ ID NO: 82095 - RNA, 21 nt, synthetic construct
  source 1..21: mol_type = other RNA
ctgggccagcaggtggactga

SEQ ID NO: 82096 - RNA, 21 nt, synthetic construct
  source 1..21: mol_type = other RNA
cagccctccctcagtgccaga

SEQ ID NO: 82097 - RNA, 21 nt, synthetic construct
  source 1..21: mol_type = other RNA
ccctccctcagtgccagcaca

SEQ ID NO: 82098 - RNA, 21 nt, synthetic construct
  source 1..21: mol_type = other RNA
ccaggtaccaccacctgccaa

SEQ ID NO: 82099 - RNA, 21 nt, synthetic construct
  source 1..21: mol_type = other RNA
accaccacctgccagccccga

SEQ ID NO: 82100 - RNA, 21 nt, synthetic construct
  source 1..21: mol_type = other RNA
accacctgccagccccggtga

SEQ ID NO: 82101 - RNA, 21 nt, synthetic construct
  source 1..21: mol_type = other RNA
aagtctgaacaacttggagga

SEQ ID NO: 82102 - RNA, 21 nt, synthetic construct
  source 1..21: mol_type = other RNA
tcggcctggtgtgcaggaaca

SEQ ID NO: 82103 - RNA, 21 nt, synthetic construct
  source 1..21: mol_type = other RNA
tgtgcaggaactgggagcaga

SEQ ID NO: 82104 - RNA, 21 nt, synthetic construct
  source 1..21: mol_type = other RNA
gagacggccaccaccaccaca

SEQ ID NO: 82105 - RNA, 21 nt, synthetic construct
  source 1..21: mol_type = other RNA
ccacagcagtccccaccctca

SEQ ID NO: 82106 - RNA, 21 nt, synthetic construct
  source 1..21: mol_type = other RNA
cacagcagtccccaccctcta

SEQ ID NO: 82107 - RNA, 21 nt, synthetic construct
  source 1..21: mol_type = other RNA
cacagaacccactgtcccaga

SEQ ID NO: 82108 - RNA, 21 nt, synthetic construct
  source 1..21: mol_type = other RNA
ccactgtcccaggggtggcca

SEQ ID NO: 82109 - RNA, 21 nt, synthetic construct
  source 1..21: mol_type = other RNA
agcacagccaccacacccaca

SEQ ID NO: 82110 - RNA, 21 nt, synthetic construct
  source 1..21: mol_type = other RNA
gccaccacacccacagctaca

SEQ ID NO: 82111 - RNA, 21 nt, synthetic construct
  source 1..21: mol_type = other RNA
acagccaccccctcctccaga

SEQ ID NO: 82112 - RNA, 21 nt, synthetic construct
  source 1..21: mol_type = other RNA
cagccaccccctcctccagca

SEQ ID NO: 82113 - RNA, 21 nt, synthetic construct
  source 1..21: mol_type = other RNA
agccaccccctcctccagcca

SEQ ID NO: 82114 - RNA, 21 nt, synthetic construct
  source 1..21: mol_type = other RNA
ccaccccctcctccagcccaa

SEQ ID NO: 82115 - RNA, 21 nt, synthetic construct
  source 1..21: mol_type = other RNA
gccaccacacctgcagccaca

SEQ ID NO: 82116 - RNA, 21 nt, synthetic construct
  source 1..21: mol_type = other RNA
ccaccacacctgcagccacca

SEQ ID NO: 82117 - RNA, 21 nt, synthetic construct
  source 1..21: mol_type = other RNA
caccacacctgcagccaccaa

SEQ ID NO: 82118 - RNA, 21 nt, synthetic construct
  source 1..21: mol_type = other RNA
accacacctgcagccaccaga

SEQ ID NO: 82119 - RNA, 21 nt, synthetic construct
  source 1..21: mol_type = other RNA
cacctcgaccctgctgcccaa

SEQ ID NO: 82120 - RNA, 21 nt, synthetic construct
  source 1..21: mol_type = other RNA
acctcgaccctgctgcccaga

SEQ ID NO: 82121 - RNA, 21 nt, synthetic construct
  source 1..21: mol_type = other RNA
cctcgaccctgctgcccagca

SEQ ID NO: 82122 - RNA, 21 nt, synthetic construct
  source 1..21: mol_type = other RNA
ctcgaccctgctgcccagcaa

SEQ ID NO: 82123 - RNA, 21 nt, synthetic construct
  source 1..21: mol_type = other RNA
ctgctgcccagcagccccaca

SEQ ID NO: 82124 - RNA, 21 nt, synthetic construct
  source 1..21: mol_type = other RNA
gctgcccagcagccccacata

SEQ ID NO: 82125 - RNA, 21 nt, synthetic construct
  source 1..21: mol_type = other RNA
ctgcccagcagccccacatca

SEQ ID NO: 82126 - RNA, 21 nt, synthetic construct
  source 1..21: mol_type = other RNA
gcagccccacatcggccccca

SEQ ID NO: 82127 - RNA, 21 nt, synthetic construct
  source 1..21: mol_type = other RNA
gggctgtgagccccagtgtga

SEQ ID NO: 82128 - RNA, 21 nt, synthetic construct
  source 1..21: mol_type = other RNA
tgtgagccccagtgtgcctga

SEQ ID NO: 82129 - RNA, 21 nt, synthetic construct
  source 1..21: mol_type = other RNA
tctgtgagcagcccctgggca

SEQ ID NO: 82130 - RNA, 21 nt, synthetic construct
  source 1..21: mol_type = other RNA
cccaggcccagcctggtgtca

SEQ ID NO: 82131 - RNA, 21 nt, synthetic construct
  source 1..21: mol_type = other RNA
caggcccagcctggtgtccca

SEQ ID NO: 82132 - RNA, 21 nt, synthetic construct
  source 1..21: mol_type = other RNA
ggggaagttcaagatgtgcta

SEQ ID NO: 82133 - RNA, 21 nt, synthetic construct
  source 1..21: mol_type = other RNA
ctgccccagcaccccggccaa

SEQ ID NO: 82134 - RNA, 21 nt, synthetic construct
  source 1..21: mol_type = other RNA
gccccagcaccccggccacca

SEQ ID NO: 82135 - RNA, 21 nt, synthetic construct
  source 1..21: mol_type = other RNA
ccccagcaccccggccaccaa

SEQ ID NO: 82136 - RNA, 21 nt, synthetic construct
  source 1..21: mol_type = other RNA
ccctcctccactccggggaca

SEQ ID NO: 82137 - RNA, 21 nt, synthetic construct
  source 1..21: mol_type = other RNA
agcacagccaccacacccaca

SEQ ID NO: 82138 - RNA, 21 nt, synthetic construct
  source 1..21: mol_type = other RNA
gccaccacacccacagctaca

SEQ ID NO: 82139 - RNA, 21 nt, synthetic construct
  source 1..21: mol_type = other RNA
acagccaccccctcctccaga

SEQ ID NO: 82140 - RNA, 21 nt, synthetic construct
  source 1..21: mol_type = other RNA
cagccaccccctcctccagca

SEQ ID NO: 82141 - RNA, 21 nt, synthetic construct
  source 1..21: mol_type = other RNA
agccaccccctcctccagcca

SEQ ID NO: 82142 - RNA, 21 nt, synthetic construct
  source 1..21: mol_type = other RNA
ccaccccctcctccagcccaa

SEQ ID NO: 82143 - RNA, 21 nt, synthetic construct
  source 1..21: mol_type = other RNA
gccaccacacctgcagccaca

SEQ ID NO: 82144 - RNA, 21 nt, synthetic construct
  source 1..21: mol_type = other RNA
ccaccacacctgcagccacca

SEQ ID NO: 82145 - RNA, 21 nt, synthetic construct
  source 1..21: mol_type = other RNA
caccacacctgcagccaccaa

SEQ ID NO: 82146 - RNA, 21 nt, synthetic construct
  source 1..21: mol_type = other RNA
accacacctgcagccaccaga

SEQ ID NO: 82147 - RNA, 21 nt, synthetic construct
  source 1..21: mol_type = other RNA
gccacctccaggaccacggca

SEQ ID NO: 82148 - RNA, 21 nt, synthetic construct
  source 1..21: mol_type = other RNA
ccacctccaggaccacggcca

SEQ ID NO: 82149 - RNA, 21 nt, synthetic construct
  source 1..21: mol_type = other RNA
cacctcgaccctgctgcccaa

SEQ ID NO: 82150 - RNA, 21 nt, synthetic construct
  source 1..21: mol_type = other RNA
acctcgaccctgctgcccaga

SEQ ID NO: 82151 - RNA, 21 nt, synthetic construct
  source 1..21: mol_type = other RNA
cctcgaccctgctgcccagca

SEQ ID NO: 82152 - RNA, 21 nt, synthetic construct
  source 1..21: mol_type = other RNA
ctcgaccctgctgcccagcaa

SEQ ID NO: 82153 - RNA, 21 nt, synthetic construct
  source 1..21: mol_type = other RNA
ctgctgcccagcagccccaca

SEQ ID NO: 82154 - RNA, 21 nt, synthetic construct
  source 1..21: mol_type = other RNA
gctgcccagcagccccacata

SEQ ID NO: 82155 - RNA, 21 nt, synthetic construct
  source 1..21: mol_type = other RNA
ctgcccagcagccccacatca

SEQ ID NO: 82156 - RNA, 21 nt, synthetic construct
  source 1..21: mol_type = other RNA
gggctgtgagccccagtgtga

SEQ ID NO: 82157 - RNA, 21 nt, synthetic construct
  source 1..21: mol_type = other RNA
tgtgagccccagtgtgcctga

SEQ ID NO: 82158 - RNA, 21 nt, synthetic construct
  source 1..21: mol_type = other RNA
tctgtgagcagcccctgggca

SEQ ID NO: 82159 - RNA, 21 nt, synthetic construct
  source 1..21: mol_type = other RNA
cccaggcccagcctggtgtca

SEQ ID NO: 82160 - RNA, 21 nt, synthetic construct
  source 1..21: mol_type = other RNA
caggcccagcctggtgtccca

SEQ ID NO: 82161 - RNA, 21 nt, synthetic construct
  source 1..21: mol_type = other RNA
ggggaagttcaagatgtgcta

SEQ ID NO: 82162 - RNA, 21 nt, synthetic construct
  source 1..21: mol_type = other RNA
ctgccccagcaccccggccaa

SEQ ID NO: 82163 - RNA, 21 nt, synthetic construct
  source 1..21: mol_type = other RNA
gccccagcaccccggccacca

SEQ ID NO: 82164 - RNA, 21 nt, synthetic construct
  source 1..21: mol_type = other RNA
ccccagcaccccggccaccaa

SEQ ID NO: 82165 - RNA, 21 nt, synthetic construct
  source 1..21: mol_type = other RNA
cggccacgccctcctccacta

SEQ ID NO: 82166 - RNA, 21 nt, synthetic construct
  source 1..21: mol_type = other RNA
ggccacgccctcctccactca

SEQ ID NO: 82167 - RNA, 21 nt, synthetic construct
  source 1..21: mol_type = other RNA
ccctcctccactccggggaca

SEQ ID NO: 82168 - RNA, 21 nt, synthetic construct
  source 1..21: mol_type = other RNA
agcacagccaccacacccaca

SEQ ID NO: 82169 - RNA, 21 nt, synthetic construct
  source 1..21: mol_type = other RNA
gccaccacacccacagctaca

SEQ ID NO: 82170 - RNA, 21 nt, synthetic construct
  source 1..21: mol_type = other RNA
acagccaccccctcctccaga

SEQ ID NO: 82171 - RNA, 21 nt, synthetic construct
  source 1..21: mol_type = other RNA
cagccaccccctcctccagca

SEQ ID NO: 82172 - RNA, 21 nt, synthetic construct
  source 1..21: mol_type = other RNA
agccaccccctcctccagcca

SEQ ID NO: 82173 - RNA, 21 nt, synthetic construct
  source 1..21: mol_type = other RNA
ccaccccctcctccagcccaa

SEQ ID NO: 82174 - RNA, 21 nt, synthetic construct
  source 1..21: mol_type = other RNA
gccaccacacctgcagccaca

SEQ ID NO: 82175 - RNA, 21 nt, synthetic construct
  source 1..21: mol_type = other RNA
ccaccacacctgcagccacca

SEQ ID NO: 82176 - RNA, 21 nt, synthetic construct
  source 1..21: mol_type = other RNA
caccacacctgcagccaccaa

SEQ ID NO: 82177 - RNA, 21 nt, synthetic construct
  source 1..21: mol_type = other RNA
accacacctgcagccaccaga

SEQ ID NO: 82178 - RNA, 21 nt, synthetic construct
  source 1..21: mol_type = other RNA
cacctcgaccctgctgcccaa

SEQ ID NO: 82179 - RNA, 21 nt, synthetic construct
  source 1..21: mol_type = other RNA
acctcgaccctgctgcccaga

SEQ ID NO: 82180 - RNA, 21 nt, synthetic construct
  source 1..21: mol_type = other RNA
cctcgaccctgctgcccagca

SEQ ID NO: 82181 - RNA, 21 nt, synthetic construct
  source 1..21: mol_type = other RNA
ctcgaccctgctgcccagcaa

SEQ ID NO: 82182 - RNA, 21 nt, synthetic construct
  source 1..21: mol_type = other RNA
ctgctgcccagcagccccaca

SEQ ID NO: 82183 - RNA, 21 nt, synthetic construct
  source 1..21: mol_type = other RNA
gctgcccagcagccccacata

SEQ ID NO: 82184 - RNA, 21 nt, synthetic construct
  source 1..21: mol_type = other RNA
ctgcccagcagccccacatca

SEQ ID NO: 82185 - RNA, 21 nt, synthetic construct
  source 1..21: mol_type = other RNA
gcagccccacatcggccccca

SEQ ID NO: 82186 - RNA, 21 nt, synthetic construct
  source 1..21: mol_type = other RNA
gggctgtgagccccagtgtga

SEQ ID NO: 82187 - RNA, 21 nt, synthetic construct
  source 1..21: mol_type = other RNA
tgtgagccccagtgtgcctga

SEQ ID NO: 82188 - RNA, 21 nt, synthetic construct
  source 1..21: mol_type = other RNA
tctgtgagcagcccctgggca

SEQ ID NO: 82189 - RNA, 21 nt, synthetic construct
  source 1..21: mol_type = other RNA
cccaggcccagcctggtgtca

SEQ ID NO: 82190 - RNA, 21 nt, synthetic construct
  source 1..21: mol_type = other RNA
caggcccagcctggtgtccca

SEQ ID NO: 82191 - RNA, 21 nt, synthetic construct
  source 1..21: mol_type = other RNA
ggggaagttcaagatgtgcta

SEQ ID NO: 82192 - RNA, 21 nt, synthetic construct
  source 1..21: mol_type = other RNA
ctgccccagcaccccggccaa

SEQ ID NO: 82193 - RNA, 21 nt, synthetic construct
  source 1..21: mol_type = other RNA
gccccagcaccccggccacca

SEQ ID NO: 82194 - RNA, 21 nt, synthetic construct
  source 1..21: mol_type = other RNA
ccccagcaccccggccaccaa

SEQ ID NO: 82195 - RNA, 21 nt, synthetic construct
  source 1..21: mol_type = other RNA
agcacagccaccacacccaca

SEQ ID NO: 82196 - RNA, 21 nt, synthetic construct
  source 1..21: mol_type = other RNA
gccaccacacccacagctaca

SEQ ID NO: 82197 - RNA, 21 nt, synthetic construct
  source 1..21: mol_type = other RNA
gccaccacacctgcagccaca

SEQ ID NO: 82198 - RNA, 21 nt, synthetic construct
  source 1..21: mol_type = other RNA
ccaccacacctgcagccacca

SEQ ID NO: 82199 - RNA, 21 nt, synthetic construct
  source 1..21: mol_type = other RNA
caccacacctgcagccaccaa

SEQ ID NO: 82200 - RNA, 21 nt, synthetic construct
  source 1..21: mol_type = other RNA
accacacctgcagccaccaga

SEQ ID NO: 82201 - RNA, 21 nt, synthetic construct
  source 1..21: mol_type = other RNA
cggccacctccaggaccacga

SEQ ID NO: 82202 - RNA, 21 nt, synthetic construct
  source 1..21: mol_type = other RNA
gccacctccaggaccacggca

SEQ ID NO: 82203 - RNA, 21 nt, synthetic construct
  source 1..21: mol_type = other RNA
ccacctccaggaccacggcca

SEQ ID NO: 82204 - RNA, 21 nt, synthetic construct
  source 1..21: mol_type = other RNA
cacctcgaccctgctgcccaa

SEQ ID NO: 82205 - RNA, 21 nt, synthetic construct
  source 1..21: mol_type = other RNA
acctcgaccctgctgcccaga

SEQ ID NO: 82206 - RNA, 21 nt, synthetic construct
  source 1..21: mol_type = other RNA
cctcgaccctgctgcccagca

SEQ ID NO: 82207 - RNA, 21 nt, synthetic construct
  source 1..21: mol_type = other RNA
ctcgaccctgctgcccagcaa

SEQ ID NO: 82208 - RNA, 21 nt, synthetic construct
  source 1..21: mol_type = other RNA
ctgctgcccagcagccccaca

SEQ ID NO: 82209 - RNA, 21 nt, synthetic construct
  source 1..21: mol_type = other RNA
gctgcccagcagccccacata

SEQ ID NO: 82210 - RNA, 21 nt, synthetic construct
  source 1..21: mol_type = other RNA
ctgcccagcagccccacatca

SEQ ID NO: 82211 - RNA, 21 nt, synthetic construct
  source 1..21: mol_type = other RNA
gcagccccacatcggccccca

SEQ ID NO: 82212 - RNA, 21 nt, synthetic construct
  source 1..21: mol_type = other RNA
gggctgtgagccccagtgtga

SEQ ID NO: 82213 - RNA, 21 nt, synthetic construct
  source 1..21: mol_type = other RNA
tgtgagccccagtgtgcctga

SEQ ID NO: 82214 - RNA, 21 nt, synthetic construct
  source 1..21: mol_type = other RNA
tctgtgagcagcccctgggca

SEQ ID NO: 82215 - RNA, 21 nt, synthetic construct
  source 1..21: mol_type = other RNA
cccaggcccagcctggtgtca

SEQ ID NO: 82216 - RNA, 21 nt, synthetic construct
  source 1..21: mol_type = other RNA
caggcccagcctggtgtccca

SEQ ID NO: 82217 - RNA, 21 nt, synthetic construct
  source 1..21: mol_type = other RNA
ggggaagttcaagatgtgcta

SEQ ID NO: 82218 - RNA, 21 nt, synthetic construct
  source 1..21: mol_type = other RNA
ctgccccagcaccccggccaa

SEQ ID NO: 82219 - RNA, 21 nt, synthetic construct
  source 1..21: mol_type = other RNA
gccccagcaccccggccacca

SEQ ID NO: 82220 - RNA, 21 nt, synthetic construct
  source 1..21: mol_type = other RNA
ccccagcaccccggccaccaa

SEQ ID NO: 82221 - RNA, 21 nt, synthetic construct
  source 1..21: mol_type = other RNA
ccctcctccactccggggaca

SEQ ID NO: 82222 - RNA, 21 nt, synthetic construct
  source 1..21: mol_type = other RNA
ccctcctccactccggggaca

SEQ ID NO: 82223 - RNA, 21 nt, synthetic construct
  source 1..21: mol_type = other RNA
agcacagccaccacacccaca

SEQ ID NO: 82224 - RNA, 21 nt, synthetic construct
  source 1..21: mol_type = other RNA
gccaccacacccacagctaca

SEQ ID NO: 82225 - RNA, 21 nt, synthetic construct
  source 1..21: mol_type = other RNA
acagccaccccctcctccaga

SEQ ID NO: 82226 - RNA, 21 nt, synthetic construct
  source 1..21: mol_type = other RNA
cagccaccccctcctccagca

SEQ ID NO: 82227 - RNA, 21 nt, synthetic construct
  source 1..21: mol_type = other RNA
agccaccccctcctccagcca

SEQ ID NO: 82228 - RNA, 21 nt, synthetic construct
  source 1..21: mol_type = other RNA
ccaccccctcctccagcccaa

SEQ ID NO: 82229 - RNA, 21 nt, synthetic construct
  source 1..21: mol_type = other RNA
ggccacaccctcctccactca

SEQ ID NO: 82230 - RNA, 21 nt, synthetic construct
  source 1..21: mol_type = other RNA
ccacaccctcctccactctga

SEQ ID NO: 82231 - RNA, 21 nt, synthetic construct
  source 1..21: mol_type = other RNA
cagtgctccccagcagcctga

SEQ ID NO: 82232 - RNA, 21 nt, synthetic construct
  source 1..21: mol_type = other RNA
gtgctccccagcagcctgcca

SEQ ID NO: 82233 - RNA, 21 nt, synthetic construct
  source 1..21: mol_type = other RNA
gtccactgtgtcctcctcaga

SEQ ID NO: 82234 - RNA, 21 nt, synthetic construct
  source 1..21: mol_type = other RNA
ctgtgtcctcctcagtcctca

SEQ ID NO: 82235 - RNA, 21 nt, synthetic construct
  source 1..21: mol_type = other RNA
tccccagctcccacttctcta

SEQ ID NO: 82236 - RNA, 21 nt, synthetic construct
  source 1..21: mol_type = other RNA
acttctctactccctgcttca

SEQ ID NO: 82237 - RNA, 21 nt, synthetic construct
  source 1..21: mol_type = other RNA
tactccctgcttctgcaggga

SEQ ID NO: 82238 - RNA, 21 nt, synthetic construct
  source 1..21: mol_type = other RNA
actccctgcttctgcagggca

SEQ ID NO: 82239 - RNA, 21 nt, synthetic construct
  source 1..21: mol_type = other RNA
tccctgcttctgcagggcata

SEQ ID NO: 82240 - RNA, 21 nt, synthetic construct
  source 1..21: mol_type = other RNA
ctgcttctgcagggcatttga

SEQ ID NO: 82241 - RNA, 21 nt, synthetic construct
  source 1..21: mol_type = other RNA
ccctcccctgcccctggctga

SEQ ID NO: 82242 - RNA, 21 nt, synthetic construct
  source 1..21: mol_type = other RNA
cctcccctgcccctggctgta

SEQ ID NO: 82243 - RNA, 21 nt, synthetic construct
  source 1..21: mol_type = other RNA
ctcccctgcccctggctgtga

SEQ ID NO: 82244 - RNA, 21 nt, synthetic construct
  source 1..21: mol_type = other RNA
cccctggctgtgacaatgcca

SEQ ID NO: 82245 - RNA, 21 nt, synthetic construct
  source 1..21: mol_type = other RNA
gacctggaccctggagaacta

SEQ ID NO: 82246 - RNA, 21 nt, synthetic construct
  source 1..21: mol_type = other RNA
actgcacggtggccaggtgca

SEQ ID NO: 82247 - RNA, 21 nt, synthetic construct
  source 1..21: mol_type = other RNA
atcctgtttgaccaaattcca

SEQ ID NO: 82248 - RNA, 21 nt, synthetic construct
  source 1..21: mol_type = other RNA
tccaggcccggctgccctaca

SEQ ID NO: 82249 - RNA, 21 nt, synthetic construct
  source 1..21: mol_type = other RNA
ctctgtgatctgatgctgaga

SEQ ID NO: 82250 - RNA, 21 nt, synthetic construct
  source 1..21: mol_type = other RNA
tgatctgatgctgagccagga

SEQ ID NO: 82251 - RNA, 21 nt, synthetic construct
  source 1..21: mol_type = other RNA
tgccctgccagagcctggaga

SEQ ID NO: 82252 - RNA, 21 nt, synthetic construct
  source 1..21: mol_type = other RNA
gccctgccagagcctggagga

SEQ ID NO: 82253 - RNA, 21 nt, synthetic construct
  source 1..21: mol_type = other RNA
caactgccagtcctgcgtgta

SEQ ID NO: 82254 - RNA, 21 nt, synthetic construct
  source 1..21: mol_type = other RNA
cctctctggggacacccagga

SEQ ID NO: 82255 - RNA, 21 nt, synthetic construct
  source 1..21: mol_type = other RNA
ctctctggggacacccaggaa

SEQ ID NO: 82256 - RNA, 21 nt, synthetic construct
  source 1..21: mol_type = other RNA
ccagggctttgagtacaagaa

SEQ ID NO: 82257 - RNA, 21 nt, synthetic construct
  source 1..21: mol_type = other RNA
ccgggcagtgctgtggggaga

SEQ ID NO: 82258 - RNA, 21 nt, synthetic construct
  source 1..21: mol_type = other RNA
atttgctgaccccacagccta

SEQ ID NO: 82259 - RNA, 21 nt, synthetic construct
  source 1..21: mol_type = other RNA
gctgaccccacagcctgcata

SEQ ID NO: 82260 - RNA, 21 nt, synthetic construct
  source 1..21: mol_type = other RNA
tgaccccacagcctgcatcca

SEQ ID NO: 82261 - RNA, 21 nt, synthetic construct
  source 1..21: mol_type = other RNA
accccacagcctgcatcctga

SEQ ID NO: 82262 - RNA, 21 nt, synthetic construct
  source 1..21: mol_type = other RNA
ccccacagcctgcatcctgca

SEQ ID NO: 82263 - RNA, 21 nt, synthetic construct
  source 1..21: mol_type = other RNA
tgtccagctgcagggggagca

SEQ ID NO: 82264 - RNA, 21 nt, synthetic construct
  source 1..21: mol_type = other RNA
ccagctgcagggggagcctca

SEQ ID NO: 82265 - RNA, 21 nt, synthetic construct
  source 1..21: mol_type = other RNA
cagggggagcctcaggaaaaa

SEQ ID NO: 82266 - RNA, 21 nt, synthetic construct
  source 1..21: mol_type = other RNA
cagaggcccaggccatgcaga

SEQ ID NO: 82267 - RNA, 21 nt, synthetic construct
  source 1..21: mol_type = other RNA
gaggcccaggccatgcagcaa

SEQ ID NO: 82268 - RNA, 21 nt, synthetic construct
  source 1..21: mol_type = other RNA
aggcccaggccatgcagcaca

SEQ ID NO: 82269 - RNA, 21 nt, synthetic construct
  source 1..21: mol_type = other RNA
ggccatgcagcaccagtgcaa

SEQ ID NO: 82270 - RNA, 21 nt, synthetic construct
  source 1..21: mol_type = other RNA
gcaccagtgcacctgctgcca

SEQ ID NO: 82271 - RNA, 21 nt, synthetic construct
  source 1..21: mol_type = other RNA
accagtgcacctgctgccaga

SEQ ID NO: 82272 - RNA, 21 nt, synthetic construct
  source 1..21: mol_type = other RNA
gtgcacctgctgccaggagaa

SEQ ID NO: 82273 - RNA, 21 nt, synthetic construct
  source 1..21: mol_type = other RNA
gtctgtcccccggggctggta

SEQ ID NO: 82274 - RNA, 21 nt, synthetic construct
  source 1..21: mol_type = other RNA
ccagtttgggaacctgcagaa

SEQ ID NO: 82275 - RNA, 21 nt, synthetic construct
  source 1..21: mol_type = other RNA
gtgtccccctgcgggagttga

SEQ ID NO: 82276 - RNA, 21 nt, synthetic construct
  source 1..21: mol_type = other RNA
gtgtccccctgcgggagttga

SEQ ID NO: 82277 - RNA, 21 nt, synthetic construct
  source 1..21: mol_type = other RNA
gtgtccccctgcgggagttga

SEQ ID NO: 82278 - RNA, 21 nt, synthetic construct
  source 1..21: mol_type = other RNA
acagcctgcatcctgcccaga

SEQ ID NO: 82279 - RNA, 21 nt, synthetic construct
  source 1..21: mol_type = other RNA
agtgggcactgcctggtggaa

SEQ ID NO: 82280 - RNA, 21 nt, synthetic construct
  source 1..21: mol_type = other RNA
cccctcctccagcccagggaa

SEQ ID NO: 82281 - RNA, 21 nt, synthetic construct
  source 1..21: mol_type = other RNA
cccctcctccagcccagggaa

SEQ ID NO: 82282 - RNA, 21 nt, synthetic construct
  source 1..21: mol_type = other RNA
cccctcctccagcccagggaa

SEQ ID NO: 82283 - RNA, 21 nt, synthetic construct
  source 1..21: mol_type = other RNA
cccctcctccagcccagggaa

SEQ ID NO: 82284 - RNA, 21 nt, synthetic construct
  source 1..21: mol_type = other RNA
cccctcctccagcccagggaa

SEQ ID NO: 82285 - RNA, 21 nt, synthetic construct
  source 1..21: mol_type = other RNA
gtccagctgcagggggagcca

SEQ ID NO: 82286 - RNA, 21 nt, synthetic construct
  source 1..21: mol_type = other RNA
tgagacctggaccctggagaa

SEQ ID NO: 82287 - RNA, 21 nt, synthetic construct
  source 1..21: mol_type = other RNA
ggctgtggctgcctacgccca

SEQ ID NO: 82288 - RNA, 21 nt, synthetic construct
  source 1..21: mol_type = other RNA
atgagacctggaccctggaga

SEQ ID NO: 82289 - RNA, 21 nt, synthetic construct
  source 1..21: mol_type = other RNA
caccggctctgcctgggcaca

SEQ ID NO: 82290 - RNA, 21 nt, synthetic construct
  source 1..21: mol_type = other RNA
accggctctgcctgggcacca

SEQ ID NO: 82291 - RNA, 21 nt, synthetic construct
  source 1..21: mol_type = other RNA
ctctggggacacccaggacca

SEQ ID NO: 82292 - RNA, 21 nt, synthetic construct
  source 1..21: mol_type = other RNA
caccacctgcagctcctgcaa

SEQ ID NO: 82293 - RNA, 21 nt, synthetic construct
  source 1..21: mol_type = other RNA
accacctgcagctcctgcaca

SEQ ID NO: 82294 - RNA, 21 nt, synthetic construct
  source 1..21: mol_type = other RNA
tctggggacacccaggaccca

SEQ ID NO: 82295 - RNA, 21 nt, synthetic construct
  source 1..21: mol_type = other RNA
agctgcagggggagcctcaga

SEQ ID NO: 82296 - RNA, 21 nt, synthetic construct
  source 1..21: mol_type = other RNA
gggatcttcctggtcatcgaa

SEQ ID NO: 82297 - RNA, 21 nt, synthetic construct
  source 1..21: mol_type = other RNA
ggcaccctgcctaaaaaccta

SEQ ID NO: 82298 - RNA, 21 nt, synthetic construct
  source 1..21: mol_type = other RNA
tgtctgtcccccggggctgga

SEQ ID NO: 82299 - RNA, 21 nt, synthetic construct
  source 1..21: mol_type = other RNA
gccgctggtccagctggtaca

SEQ ID NO: 82300 - RNA, 21 nt, synthetic construct
  source 1..21: mol_type = other RNA
gtgcggcacctgcaccaacaa

SEQ ID NO: 82301 - RNA, 21 nt, synthetic construct
  source 1..21: mol_type = other RNA
ccgctggtccagctggtacaa

SEQ ID NO: 82302 - RNA, 21 nt, synthetic construct
  source 1..21: mol_type = other RNA
ggccagtgcggcacctgcaca

SEQ ID NO: 82303 - RNA, 21 nt, synthetic construct
  source 1..21: mol_type = other RNA
gctgtgtctgtcccccgggga

SEQ ID NO: 82304 - RNA, 21 nt, synthetic construct
  source 1..21: mol_type = other RNA
tctgtcccccggggctggtga

SEQ ID NO: 82305 - RNA, 21 nt, synthetic construct
  source 1..21: mol_type = other RNA
gtctgcggcctgtgcgggaaa

SEQ ID NO: 82306 - RNA, 21 nt, synthetic construct
  source 1..21: mol_type = other RNA
ttccccagcctgagcccccta

SEQ ID NO: 82307 - RNA, 21 nt, synthetic construct
  source 1..21: mol_type = other RNA
cagtgccctgctggagctgga

SEQ ID NO: 82308 - RNA, 21 nt, synthetic construct
  source 1..21: mol_type = other RNA
cagtttgggaacctgcagaaa

SEQ ID NO: 82309 - RNA, 21 nt, synthetic construct
  source 1..21: mol_type = other RNA
agtttgggaacctgcagaaga

SEQ ID NO: 82310 - RNA, 21 nt, synthetic construct
  source 1..21: mol_type = other RNA
aacaccacctgcagctcctga

SEQ ID NO: 82311 - RNA, 21 nt, synthetic construct
  source 1..21: mol_type = other RNA
ccagggccagatgtgcggcca

SEQ ID NO: 82312 - RNA, 21 nt, synthetic construct
  source 1..21: mol_type = other RNA
gctctgcctgggcacctgcga

SEQ ID NO: 82313 - RNA, 21 nt, synthetic construct
  source 1..21: mol_type = other RNA
cagggtctgcggcctgtgcga

SEQ ID NO: 82314 - RNA, 21 nt, synthetic construct
  source 1..21: mol_type = other RNA
gggtctgcggcctgtgcggga

SEQ ID NO: 82315 - RNA, 21 nt, synthetic construct
  source 1..21: mol_type = other RNA
gccctgcggggcaccctgcca

SEQ ID NO: 82316 - RNA, 21 nt, synthetic construct
  source 1..21: mol_type = other RNA
cctcgccctcccctgccccta

SEQ ID NO: 82317 - RNA, 21 nt, synthetic construct
  source 1..21: mol_type = other RNA
accggctgctgctactcctga

SEQ ID NO: 82318 - RNA, 21 nt, synthetic construct
  source 1..21: mol_type = other RNA
ctacacgcagctgcccctgta

SEQ ID NO: 82319 - RNA, 21 nt, synthetic construct
  source 1..21: mol_type = other RNA
gcctctctggggacacccaga

SEQ ID NO: 82320 - RNA, 21 nt, synthetic construct
  source 1..21: mol_type = other RNA
acggccacgccctcctccaca

SEQ ID NO: 82321 - RNA, 21 nt, synthetic construct
  source 1..21: mol_type = other RNA
gcagccaccggctctgcctga

SEQ ID NO: 82322 - RNA, 21 nt, synthetic construct
  source 1..21: mol_type = other RNA
acccagccagcccttcttcaa

SEQ ID NO: 82323 - RNA, 21 nt, synthetic construct
  source 1..21: mol_type = other RNA
ggccacctccaggaccacgga

SEQ ID NO: 82324 - RNA, 21 nt, synthetic construct
  source 1..21: mol_type = other RNA
ggccacctccaggaccacgga

SEQ ID NO: 82325 - RNA, 21 nt, synthetic construct
  source 1..21: mol_type = other RNA
cctacagcctcttccacaaca

SEQ ID NO: 82326 - RNA, 21 nt, synthetic construct
  source 1..21: mol_type = other RNA
cccagccagcccttcttcaaa

SEQ ID NO: 82327 - RNA, 21 nt, synthetic construct
  source 1..21: mol_type = other RNA
gaggaccagatgaagtgcgta

SEQ ID NO: 82328 - RNA, 21 nt, synthetic construct
  source 1..21: mol_type = other RNA
acgggctgtgagccccagtga

SEQ ID NO: 82329 - RNA, 21 nt, synthetic construct
  source 1..21: mol_type = other RNA
acgggctgtgagccccagtga

SEQ ID NO: 82330 - RNA, 21 nt, synthetic construct
  source 1..21: mol_type = other RNA
gccctcccctgcccctggcta

SEQ ID NO: 82331 - RNA, 21 nt, synthetic construct
  source 1..21: mol_type = other RNA
tctacacgcagctgcccctga

SEQ ID NO: 82332 - RNA, 21 nt, synthetic construct
  source 1..21: mol_type = other RNA
gagcctctctgcagaaaagca

SEQ ID NO: 82333 - RNA, 21 nt, synthetic construct
  source 1..21: mol_type = other RNA
cccacccagccagcccttcta

SEQ ID NO: 82334 - RNA, 21 nt, synthetic construct
  source 1..21: mol_type = other RNA
ccacccagccagcccttctta

SEQ ID NO: 82335 - RNA, 21 nt, synthetic construct
  source 1..21: mol_type = other RNA
ccagctcccacttctctacta

SEQ ID NO: 82336 - RNA, 21 nt, synthetic construct
  source 1..21: mol_type = other RNA
acagcctcttccacaacaaca

SEQ ID NO: 82337 - RNA, 21 nt, synthetic construct
  source 1..21: mol_type = other RNA
tgcctctctggggacacccaa

SEQ ID NO: 82338 - RNA, 21 nt, synthetic construct
  source 1..21: mol_type = other RNA
ccttcgccgcctgccgctcca

SEQ ID NO: 82339 - RNA, 21 nt, synthetic construct
  source 1..21: mol_type = other RNA
gtggatgagtgtggctgcaca

SEQ ID NO: 82340 - RNA, 21 nt, synthetic construct
  source 1..21: mol_type = other RNA
tgcccagcagccccacatcga

SEQ ID NO: 82341 - RNA, 21 nt, synthetic construct
  source 1..21: mol_type = other RNA
tgcccagcagccccacatcga

SEQ ID NO: 82342 - RNA, 21 nt, synthetic construct
  source 1..21: mol_type = other RNA
tgcccagcagccccacatcga

SEQ ID NO: 82343 - RNA, 21 nt, synthetic construct
  source 1..21: mol_type = other RNA
tgcccagcagccccacatcga

SEQ ID NO: 82344 - RNA, 21 nt, synthetic construct
  source 1..21: mol_type = other RNA
cttcgccgcctgccgctccca

SEQ ID NO: 82345 - RNA, 21 nt, synthetic construct
  source 1..21: mol_type = other RNA
gcaggaactgggagcaggaga

SEQ ID NO: 82346 - RNA, 21 nt, synthetic construct
  source 1..21: mol_type = other RNA
aggaactgggagcaggaggga

SEQ ID NO: 82347 - RNA, 21 nt, synthetic construct
  source 1..21: mol_type = other RNA
acaccacctgcagctcctgca

SEQ ID NO: 82348 - RNA, 21 nt, synthetic construct
  source 1..21: mol_type = other RNA
ttcgccgcctgccgctcccaa

SEQ ID NO: 82349 - RNA, 21 nt, synthetic construct
  source 1..21: mol_type = other RNA
cccagcaccccggccaccaga

SEQ ID NO: 82350 - RNA, 21 nt, synthetic construct
  source 1..21: mol_type = other RNA
cccagcaccccggccaccaga

SEQ ID NO: 82351 - RNA, 21 nt, synthetic construct
  source 1..21: mol_type = other RNA
cccagcaccccggccaccaga

SEQ ID NO: 82352 - RNA, 21 nt, synthetic construct
  source 1..21: mol_type = other RNA
cccagcaccccggccaccaga

SEQ ID NO: 82353 - RNA, 21 nt, synthetic construct
  source 1..21: mol_type = other RNA
cgccctcccctgcccctggca

SEQ ID NO: 82354 - RNA, 21 nt, synthetic construct
  source 1..21: mol_type = other RNA
cccaggccatgcagcaccaga

SEQ ID NO: 82355 - RNA, 21 nt, synthetic construct
  source 1..21: mol_type = other RNA
ttgaggcctgcacctgcacca

SEQ ID NO: 82356 - RNA, 21 nt, synthetic construct
  source 1..21: mol_type = other RNA
cacgcgtagccggtccgtgga

SEQ ID NO: 82357 - RNA, 21 nt, synthetic construct
  source 1..21: mol_type = other RNA
accacctggatcctcacagaa

SEQ ID NO: 82358 - RNA, 21 nt, synthetic construct
  source 1..21: mol_type = other RNA
accacctggatcctcacagaa

SEQ ID NO: 82359 - RNA, 21 nt, synthetic construct
  source 1..21: mol_type = other RNA
accacctggatcctcacagaa

SEQ ID NO: 82360 - RNA, 21 nt, synthetic construct
  source 1..21: mol_type = other RNA
accacctggatcctcacagaa

SEQ ID NO: 82361 - RNA, 21 nt, synthetic construct
  source 1..21: mol_type = other RNA
accacctggatcctcacagaa

SEQ ID NO: 82362 - RNA, 21 nt, synthetic construct
  source 1..21: mol_type = other RNA
accacctggatcctcacagaa

SEQ ID NO: 82363 - RNA, 21 nt, synthetic construct
  source 1..21: mol_type = other RNA
ccagcccagttttgcaaataa

SEQ ID NO: 82364 - RNA, 21 nt, synthetic construct
  source 1..21: mol_type = other RNA
aaagccccctctgctcaacca

SEQ ID NO: 82365 - RNA, 21 nt, synthetic construct
  source 1..21: mol_type = other RNA
acctggatcctcacagagcca

SEQ ID NO: 82366 - RNA, 21 nt, synthetic construct
  source 1..21: mol_type = other RNA
acctggatcctcacagagcca

SEQ ID NO: 82367 - RNA, 21 nt, synthetic construct
  source 1..21: mol_type = other RNA
acctggatcctcacagagcca

SEQ ID NO: 82368 - RNA, 21 nt, synthetic construct
  source 1..21: mol_type = other RNA
acctggatcctcacagagcca

SEQ ID NO: 82369 - RNA, 21 nt, synthetic construct
  source 1..21: mol_type = other RNA
acctggatcctcacagagcca

SEQ ID NO: 82370 - RNA, 21 nt, synthetic construct
  source 1..21: mol_type = other RNA
agagcctgtggcccaccttga

SEQ ID NO: 82371 - RNA, 21 nt, synthetic construct
  source 1..21: mol_type = other RNA
gtggctgcacgcccttctgta

SEQ ID NO: 82372 - RNA, 21 nt, synthetic construct
  source 1..21: mol_type = other RNA
ccctctgctcaacccagccca

SEQ ID NO: 82373 - RNA, 21 nt, synthetic construct
  source 1..21: mol_type = other RNA
ccacctggatcctcacagaga

SEQ ID NO: 82374 - RNA, 21 nt, synthetic construct
  source 1..21: mol_type = other RNA
ccacctggatcctcacagaga

SEQ ID NO: 82375 - RNA, 21 nt, synthetic construct
  source 1..21: mol_type = other RNA
ccacctggatcctcacagaga

SEQ ID NO: 82376 - RNA, 21 nt, synthetic construct
  source 1..21: mol_type = other RNA
ccacctggatcctcacagaga

SEQ ID NO: 82377 - RNA, 21 nt, synthetic construct
  source 1..21: mol_type = other RNA
ccacctggatcctcacagaga

SEQ ID NO: 82378 - RNA, 21 nt, synthetic construct
  source 1..21: mol_type = other RNA
ccacctggatcctcacagaga

SEQ ID NO: 82379 - RNA, 21 nt, synthetic construct
  source 1..21: mol_type = other RNA
gccccctctgctcaacccaga

SEQ ID NO: 82380 - RNA, 21 nt, synthetic construct
  source 1..21: mol_type = other RNA
aacccagcccagttttgcaaa

SEQ ID NO: 82381 - RNA, 21 nt, synthetic construct
  source 1..21: mol_type = other RNA
gaccacctggatcctcacaga

SEQ ID NO: 82382 - RNA, 21 nt, synthetic construct
  source 1..21: mol_type = other RNA
gaccacctggatcctcacaga

SEQ ID NO: 82383 - RNA, 21 nt, synthetic construct
  source 1..21: mol_type = other RNA
gaccacctggatcctcacaga

SEQ ID NO: 82384 - RNA, 21 nt, synthetic construct
  source 1..21: mol_type = other RNA
gaccacctggatcctcacaga

SEQ ID NO: 82385 - RNA, 21 nt, synthetic construct
  source 1..21: mol_type = other RNA
gaccacctggatcctcacaga

SEQ ID NO: 82386 - RNA, 21 nt, synthetic construct
  source 1..21: mol_type = other RNA
gaccacctggatcctcacaga

SEQ ID NO: 82387 - RNA, 21 nt, synthetic construct
  source 1..21: mol_type = other RNA
ttcaagatgtgcttcaactaa

SEQ ID NO: 82388 - RNA, 21 nt, synthetic construct
  source 1..21: mol_type = other RNA
ttcaagatgtgcttcaactaa

SEQ ID NO: 82389 - RNA, 21 nt, synthetic construct
  source 1..21: mol_type = other RNA
ttcaagatgtgcttcaactaa

SEQ ID NO: 82390 - RNA, 21 nt, synthetic construct
  source 1..21: mol_type = other RNA
ttcaagatgtgcttcaactaa

SEQ ID NO: 82391 - RNA, 21 nt, synthetic construct
  source 1..21: mol_type = other RNA
ttcagcgtgtccactgtgtca

SEQ ID NO: 82392 - RNA, 21 nt, synthetic construct
  source 1..21: mol_type = other RNA
caagatgtgcttcaactatga

SEQ ID NO: 82393 - RNA, 21 nt, synthetic construct
  source 1..21: mol_type = other RNA
caagatgtgcttcaactatga

SEQ ID NO: 82394 - RNA, 21 nt, synthetic construct
  source 1..21: mol_type = other RNA
caagatgtgcttcaactatga

SEQ ID NO: 82395 - RNA, 21 nt, synthetic construct
  source 1..21: mol_type = other RNA
caagatgtgcttcaactatga

SEQ ID NO: 82396 - RNA, 21 nt, synthetic construct
  source 1..21: mol_type = other RNA
tgtggctgcacgcccttctga

SEQ ID NO: 82397 - RNA, 21 nt, synthetic construct
  source 1..21: mol_type = other RNA
acctgcccatcaaagtgtcga

SEQ ID NO: 82398 - RNA, 21 nt, synthetic construct
  source 1..21: mol_type = other RNA
agccccctctgctcaacccaa

SEQ ID NO: 82399 - RNA, 21 nt, synthetic construct
  source 1..21: mol_type = other RNA
acccagcccagttttgcaaaa

SEQ ID NO: 82400 - RNA, 21 nt, synthetic construct
  source 1..21: mol_type = other RNA
ccatcaaagtgtcggacccga

SEQ ID NO: 82401 - RNA, 21 nt, synthetic construct
  source 1..21: mol_type = other RNA
cacctgcccatcaaagtgtca

SEQ ID NO: 82402 - RNA, 21 nt, synthetic construct
  source 1..21: mol_type = other RNA
gctctgccgcgcccggggaga

SEQ ID NO: 82403 - RNA, 21 nt, synthetic construct
  source 1..21: mol_type = other RNA
aagccccctctgctcaaccca

SEQ ID NO: 82404 - RNA, 21 nt, synthetic construct
  source 1..21: mol_type = other RNA
atcaaagtgtcggacccgaga

SEQ ID NO: 82405 - RNA, 21 nt, synthetic construct
  source 1..21: mol_type = other RNA
ccatgctctgtccacctggaa

SEQ ID NO: 82406 - RNA, 21 nt, synthetic construct
  source 1..21: mol_type = other RNA
atgagtgtggctgcacgccca

SEQ ID NO: 82407 - RNA, 21 nt, synthetic construct
  source 1..21: mol_type = other RNA
gcctccatccccatgctctga

SEQ ID NO: 82408 - RNA, 21 nt, synthetic construct
  source 1..21: mol_type = other RNA
cccctctgctcaacccagcca

SEQ ID NO: 82409 - RNA, 21 nt, synthetic construct
  source 1..21: mol_type = other RNA
tgagtgtggctgcacgcccta

SEQ ID NO: 82410 - RNA, 21 nt, synthetic construct
  source 1..21: mol_type = other RNA
gcatcccaaagccccctctga

SEQ ID NO: 82411 - RNA, 21 nt, synthetic construct
  source 1..21: mol_type = other RNA
gggaccacctggatcctcaca

SEQ ID NO: 82412 - RNA, 21 nt, synthetic construct
  source 1..21: mol_type = other RNA
gggaccacctggatcctcaca

SEQ ID NO: 82413 - RNA, 21 nt, synthetic construct
  source 1..21: mol_type = other RNA
gggaccacctggatcctcaca

SEQ ID NO: 82414 - RNA, 21 nt, synthetic construct
  source 1..21: mol_type = other RNA
gggaccacctggatcctcaca

SEQ ID NO: 82415 - RNA, 21 nt, synthetic construct
  source 1..21: mol_type = other RNA
gggaccacctggatcctcaca

SEQ ID NO: 82416 - RNA, 21 nt, synthetic construct
  source 1..21: mol_type = other RNA
gggaccacctggatcctcaca

SEQ ID NO: 82417 - RNA, 21 nt, synthetic construct
  source 1..21: mol_type = other RNA
tctgctcaacccagcccagta

SEQ ID NO: 82418 - RNA, 21 nt, synthetic construct
  source 1..21: mol_type = other RNA
agacaggctggtccaggcaaa

SEQ ID NO: 82419 - RNA, 21 nt, synthetic construct
  source 1..21: mol_type = other RNA
cgacctggatcctcacagaga

SEQ ID NO: 82420 - RNA, 21 nt, synthetic construct
  source 1..21: mol_type = other RNA
agggaccacctggatcctcaa

SEQ ID NO: 82421 - RNA, 21 nt, synthetic construct
  source 1..21: mol_type = other RNA
cgacctggatcctcacagaga

SEQ ID NO: 82422 - RNA, 21 nt, synthetic construct
  source 1..21: mol_type = other RNA
cgacctggatcctcacagaga

SEQ ID NO: 82423 - RNA, 21 nt, synthetic construct
  source 1..21: mol_type = other RNA
agggaccacctggatcctcaa

SEQ ID NO: 82424 - RNA, 21 nt, synthetic construct
  source 1..21: mol_type = other RNA
agggaccacctggatcctcaa

SEQ ID NO: 82425 - RNA, 21 nt, synthetic construct
  source 1..21: mol_type = other RNA
cgacctggatcctcacagaga

SEQ ID NO: 82426 - RNA, 21 nt, synthetic construct
  source 1..21: mol_type = other RNA
cgacctggatcctcacagaga

SEQ ID NO: 82427 - RNA, 21 nt, synthetic construct
  source 1..21: mol_type = other RNA
agggaccacctggatcctcaa

SEQ ID NO: 82428 - RNA, 21 nt, synthetic construct
  source 1..21: mol_type = other RNA
agggaccacctggatcctcaa

SEQ ID NO: 82429 - RNA, 21 nt, synthetic construct
  source 1..21: mol_type = other RNA
agggaccacctggatcctcaa

SEQ ID NO: 82430 - RNA, 21 nt, synthetic construct
  source 1..21: mol_type = other RNA
ctgcccacccaccaaagtgta

SEQ ID NO: 82431 - RNA, 21 nt, synthetic construct
  source 1..21: mol_type = other RNA
tgtcggtgcagtgcaagccca

SEQ ID NO: 82432 - RNA, 21 nt, synthetic construct
  source 1..21: mol_type = other RNA
ccccatgctctgtccacctga

SEQ ID NO: 82433 - RNA, 21 nt, synthetic construct
  source 1..21: mol_type = other RNA
gctctgtccacctggagccaa

SEQ ID NO: 82434 - RNA, 21 nt, synthetic construct
  source 1..21: mol_type = other RNA
gatcatgaaaaccttgggcca

SEQ ID NO: 82435 - RNA, 21 nt, synthetic construct
  source 1..21: mol_type = other RNA
gacaggctggtccaggcaaga

SEQ ID NO: 82436 - RNA, 21 nt, synthetic construct
  source 1..21: mol_type = other RNA
caggctggtccaggcaaggca

SEQ ID NO: 82437 - RNA, 21 nt, synthetic construct
  source 1..21: mol_type = other RNA
ctcaacccagcccagttttga

SEQ ID NO: 82438 - RNA, 21 nt, synthetic construct
  source 1..21: mol_type = other RNA
agcgtgtccactgtgtcctca

SEQ ID NO: 82439 - RNA, 21 nt, synthetic construct
  source 1..21: mol_type = other RNA
atgctctgtccacctggagca

SEQ ID NO: 82440 - RNA, 21 nt, synthetic construct
  source 1..21: mol_type = other RNA
ggcccaccttggccttgccca

SEQ ID NO: 82441 - RNA, 21 nt, synthetic construct
  source 1..21: mol_type = other RNA
ccaaagccccctctgctcaaa

SEQ ID NO: 82442 - RNA, 21 nt, synthetic construct
  source 1..21: mol_type = other RNA
gctggtgttggctctggcgga

SEQ ID NO: 82443 - RNA, 21 nt, synthetic construct
  source 1..21: mol_type = other RNA
ctcctccactccagggacgaa

SEQ ID NO: 82444 - RNA, 21 nt, synthetic construct
  source 1..21: mol_type = other RNA
ctccatccccatgctctgtca

SEQ ID NO: 82445 - RNA, 21 nt, synthetic construct
  source 1..21: mol_type = other RNA
tctgccgcgcccggggagtga

SEQ ID NO: 82446 - RNA, 21 nt, synthetic construct
  source 1..21: mol_type = other RNA
accacacccacagccaccaga

SEQ ID NO: 82447 - RNA, 21 nt, synthetic construct
  source 1..21: mol_type = other RNA
cacacccacagccaccagtta

SEQ ID NO: 82448 - RNA, 21 nt, synthetic construct
  source 1..21: mol_type = other RNA
accacacccacagccaccaga

SEQ ID NO: 82449 - RNA, 21 nt, synthetic construct
  source 1..21: mol_type = other RNA
cacacccacagccaccagtta

SEQ ID NO: 82450 - RNA, 21 nt, synthetic construct
  source 1..21: mol_type = other RNA
cccaaagccccctctgctcaa

SEQ ID NO: 82451 - RNA, 21 nt, synthetic construct
  source 1..21: mol_type = other RNA
tgtggcccaccttggccttga

SEQ ID NO: 82452 - RNA, 21 nt, synthetic construct
  source 1..21: mol_type = other RNA
ggggccgagtgcctccggaga

SEQ ID NO: 82453 - RNA, 21 nt, synthetic construct
  source 1..21: mol_type = other RNA
atccccatgctctgtccacca

SEQ ID NO: 82454 - RNA, 21 nt, synthetic construct
  source 1..21: mol_type = other RNA
tctgtccacctggagccagga

SEQ ID NO: 82455 - RNA, 21 nt, synthetic construct
  source 1..21: mol_type = other RNA
gtgtgcccgccagggcaggaa

SEQ ID NO: 82456 - RNA, 21 nt, synthetic construct
  source 1..21: mol_type = other RNA
cccttctgtgtccctgcgcca

SEQ ID NO: 82457 - RNA, 21 nt, synthetic construct
  source 1..21: mol_type = other RNA
tccatccccatgctctgtcca

SEQ ID NO: 82458 - RNA, 21 nt, synthetic construct
  source 1..21: mol_type = other RNA
gcccaccttggccttgcccca

SEQ ID NO: 82459 - RNA, 21 nt, synthetic construct
  source 1..21: mol_type = other RNA
gttctgcctccatccccatga

SEQ ID NO: 82460 - RNA, 21 nt, synthetic construct
  source 1..21: mol_type = other RNA
ttctgcctccatccccatgca

SEQ ID NO: 82461 - RNA, 21 nt, synthetic construct
  source 1..21: mol_type = other RNA
ctgcctccatccccatgctca

SEQ ID NO: 82462 - RNA, 21 nt, synthetic construct
  source 1..21: mol_type = other RNA
tcagcgtgtccactgtgtcca

SEQ ID NO: 82463 - RNA, 21 nt, synthetic construct
  source 1..21: mol_type = other RNA
tcaagatgtgcttcaactata

SEQ ID NO: 82464 - RNA, 21 nt, synthetic construct
  source 1..21: mol_type = other RNA
tcaagatgtgcttcaactata

SEQ ID NO: 82465 - RNA, 21 nt, synthetic construct
  source 1..21: mol_type = other RNA
tcaagatgtgcttcaactata

SEQ ID NO: 82466 - RNA, 21 nt, synthetic construct
  source 1..21: mol_type = other RNA
tcaagatgtgcttcaactata

SEQ ID NO: 82467 - RNA, 21 nt, synthetic construct
  source 1..21: mol_type = other RNA
gaggggccagcaggaccccta

SEQ ID NO: 82468 - RNA, 21 nt, synthetic construct
  source 1..21: mol_type = other RNA
ggagctgccacacgctggaca

SEQ ID NO: 82469 - RNA, 21 nt, synthetic construct
  source 1..21: mol_type = other RNA
acggccacaccctcctccaca

SEQ ID NO: 82470 - RNA, 21 nt, synthetic construct
  source 1..21: mol_type = other RNA
gagggacgactgtctccagca

SEQ ID NO: 82471 - RNA, 21 nt, synthetic construct
  source 1..21: mol_type = other RNA
cacgcccttctgtgtccctga

SEQ ID NO: 82472 - RNA, 21 nt, synthetic construct
  source 1..21: mol_type = other RNA
catccccatgctctgtccaca

SEQ ID NO: 82473 - RNA, 21 nt, synthetic construct
  source 1..21: mol_type = other RNA
gtgaggggccagcaggaccca

SEQ ID NO: 82474 - RNA, 21 nt, synthetic construct
  source 1..21: mol_type = other RNA
gcctgtggcccaccttggcca

SEQ ID NO: 82475 - RNA, 21 nt, synthetic construct
  source 1..21: mol_type = other RNA
caacccagcccagttttgcaa

SEQ ID NO: 82476 - RNA, 21 nt, synthetic construct
  source 1..21: mol_type = other RNA
gagcctgtggcccaccttgga

SEQ ID NO: 82477 - RNA, 21 nt, synthetic construct
  source 1..21: mol_type = other RNA
cacagccacaccctcctccaa

SEQ ID NO: 82478 - RNA, 21 nt, synthetic construct
  source 1..21: mol_type = other RNA
acggccatgccctcctccaca

SEQ ID NO: 82479 - RNA, 21 nt, synthetic construct
  source 1..21: mol_type = other RNA
cacagccacaccctcctccaa

SEQ ID NO: 82480 - RNA, 21 nt, synthetic construct
  source 1..21: mol_type = other RNA
cacagccacaccctcctccaa

SEQ ID NO: 82481 - RNA, 21 nt, synthetic construct
  source 1..21: mol_type = other RNA
acggccatgccctcctccaca

SEQ ID NO: 82482 - RNA, 21 nt, synthetic construct
  source 1..21: mol_type = other RNA
cacagccacaccctcctccaa

SEQ ID NO: 82483 - RNA, 21 nt, synthetic construct
  source 1..21: mol_type = other RNA
ctctgccgcgcccggggagta

SEQ ID NO: 82484 - RNA, 21 nt, synthetic construct
  source 1..21: mol_type = other RNA
cgcccggggagtgtgcagtga

SEQ ID NO: 82485 - RNA, 21 nt, synthetic construct
  source 1..21: mol_type = other RNA
ccgtgaccaggccccgggcca

SEQ ID NO: 82486 - RNA, 21 nt, synthetic construct
  source 1..21: mol_type = other RNA
ggacgctggtgttggctctga

SEQ ID NO: 82487 - RNA, 21 nt, synthetic construct
  source 1..21: mol_type = other RNA
caggcagagacccagggccca

SEQ ID NO: 82488 - RNA, 21 nt, synthetic construct
  source 1..21: mol_type = other RNA
acagccacaccctcctccaca

SEQ ID NO: 82489 - RNA, 21 nt, synthetic construct
  source 1..21: mol_type = other RNA
cagccacaccctcctccacta

SEQ ID NO: 82490 - RNA, 21 nt, synthetic construct
  source 1..21: mol_type = other RNA
agccacaccctcctccactca

SEQ ID NO: 82491 - RNA, 21 nt, synthetic construct
  source 1..21: mol_type = other RNA
ccacaccctcctccactccaa

SEQ ID NO: 82492 - RNA, 21 nt, synthetic construct
  source 1..21: mol_type = other RNA
tcctccaccccagggaccaca

SEQ ID NO: 82493 - RNA, 21 nt, synthetic construct
  source 1..21: mol_type = other RNA
accccagggaccacctggata

SEQ ID NO: 82494 - RNA, 21 nt, synthetic construct
  source 1..21: mol_type = other RNA
ccccagggaccacctggatca

SEQ ID NO: 82495 - RNA, 21 nt, synthetic construct
  source 1..21: mol_type = other RNA
acagccacaccctcctccaca

SEQ ID NO: 82496 - RNA, 21 nt, synthetic construct
  source 1..21: mol_type = other RNA
cagccacaccctcctccacta

SEQ ID NO: 82497 - RNA, 21 nt, synthetic construct
  source 1..21: mol_type = other RNA
agccacaccctcctccactca

SEQ ID NO: 82498 - RNA, 21 nt, synthetic construct
  source 1..21: mol_type = other RNA
ccacaccctcctccactccaa

SEQ ID NO: 82499 - RNA, 21 nt, synthetic construct
  source 1..21: mol_type = other RNA
ccctcctccactccagggaca

SEQ ID NO: 82500 - RNA, 21 nt, synthetic construct
  source 1..21: mol_type = other RNA
cctcctccactccagggacga

SEQ ID NO: 82501 - RNA, 21 nt, synthetic construct
  source 1..21: mol_type = other RNA
ccacacccacagccaccagta

SEQ ID NO: 82502 - RNA, 21 nt, synthetic construct
  source 1..21: mol_type = other RNA
tcctccaccccagggaccaca

SEQ ID NO: 82503 - RNA, 21 nt, synthetic construct
  source 1..21: mol_type = other RNA
accccagggaccacctggata

SEQ ID NO: 82504 - RNA, 21 nt, synthetic construct
  source 1..21: mol_type = other RNA
ccccagggaccacctggatca

SEQ ID NO: 82505 - RNA, 21 nt, synthetic construct
  source 1..21: mol_type = other RNA
tcctccaccccagggaccaca

SEQ ID NO: 82506 - RNA, 21 nt, synthetic construct
  source 1..21: mol_type = other RNA
accccagggaccacctggata

SEQ ID NO: 82507 - RNA, 21 nt, synthetic construct
  source 1..21: mol_type = other RNA
ccccagggaccacctggatca

SEQ ID NO: 82508 - RNA, 21 nt, synthetic construct
  source 1..21: mol_type = other RNA
acagccacaccctcctccaca

SEQ ID NO: 82509 - RNA, 21 nt, synthetic construct
  source 1..21: mol_type = other RNA
cagccacaccctcctccacta

SEQ ID NO: 82510 - RNA, 21 nt, synthetic construct
  source 1..21: mol_type = other RNA
agccacaccctcctccactca

SEQ ID NO: 82511 - RNA, 21 nt, synthetic construct
  source 1..21: mol_type = other RNA
ccacaccctcctccactccaa

SEQ ID NO: 82512 - RNA, 21 nt, synthetic construct
  source 1..21: mol_type = other RNA
ccacacccacagccaccagta

SEQ ID NO: 82513 - RNA, 21 nt, synthetic construct
  source 1..21: mol_type = other RNA
tcctccaccccagggaccaca

SEQ ID NO: 82514 - RNA, 21 nt, synthetic construct
  source 1..21: mol_type = other RNA
accccagggaccacctggata

SEQ ID NO: 82515 - RNA, 21 nt, synthetic construct
  source 1..21: mol_type = other RNA
ccccagggaccacctggatca

SEQ ID NO: 82516 - RNA, 21 nt, synthetic construct
  source 1..21: mol_type = other RNA
tcctccaccccagggaccaca

SEQ ID NO: 82517 - RNA, 21 nt, synthetic construct
  source 1..21: mol_type = other RNA
accccagggaccacctggata

SEQ ID NO: 82518 - RNA, 21 nt, synthetic construct
  source 1..21: mol_type = other RNA
ccccagggaccacctggatca

SEQ ID NO: 82519 - RNA, 21 nt, synthetic construct
  source 1..21: mol_type = other RNA
acagccacaccctcctccaca

SEQ ID NO: 82520 - RNA, 21 nt, synthetic construct
  source 1..21: mol_type = other RNA
cagccacaccctcctccacta

SEQ ID NO: 82521 - RNA, 21 nt, synthetic construct
  source 1..21: mol_type = other RNA
agccacaccctcctccactca

SEQ ID NO: 82522 - RNA, 21 nt, synthetic construct
  source 1..21: mol_type = other RNA
ccacaccctcctccactccaa

SEQ ID NO: 82523 - RNA, 21 nt, synthetic construct
  source 1..21: mol_type = other RNA
ccacggccacaccctcctcca

SEQ ID NO: 82524 - RNA, 21 nt, synthetic construct
  source 1..21: mol_type = other RNA
cacggccacaccctcctccaa

SEQ ID NO: 82525 - RNA, 21 nt, synthetic construct
  source 1..21: mol_type = other RNA
cggccacaccctcctccacta

SEQ ID NO: 82526 - RNA, 21 nt, synthetic construct
  source 1..21: mol_type = other RNA
caccctcctccactctgggga

SEQ ID NO: 82527 - RNA, 21 nt, synthetic construct
  source 1..21: mol_type = other RNA
tcctccactctggggacgaca

SEQ ID NO: 82528 - RNA, 21 nt, synthetic construct
  source 1..21: mol_type = other RNA
tcctccaccccagggaccaca

SEQ ID NO: 82529 - RNA, 21 nt, synthetic construct
  source 1..21: mol_type = other RNA
accccagggaccacctggata

SEQ ID NO: 82530 - RNA, 21 nt, synthetic construct
  source 1..21: mol_type = other RNA
ccccagggaccacctggatca

SEQ ID NO: 82531 - RNA, 21 nt, synthetic construct
  source 1..21: mol_type = other RNA
gtgtccactgtgtcctcctca

SEQ ID NO: 82532 - RNA, 21 nt, synthetic construct
  source 1..21: mol_type = other RNA
ctcacctgcccacccaccaaa

SEQ ID NO: 82533 - RNA, 21 nt, synthetic construct
  source 1..21: mol_type = other RNA
gtgcagtgcaagcccctgcca

SEQ ID NO: 82534 - RNA, 21 nt, synthetic construct
  source 1..21: mol_type = other RNA
gtgcaagcccctgccctgtga

SEQ ID NO: 82535 - RNA, 21 nt, synthetic construct
  source 1..21: mol_type = other RNA
tgtgcccgccagggcaggaga

SEQ ID NO: 82536 - RNA, 21 nt, synthetic construct
  source 1..21: mol_type = other RNA
cgcccttctgtgtccctgcga

SEQ ID NO: 82537 - RNA, 21 nt, synthetic construct
  source 1..21: mol_type = other RNA
gcccttctgtgtccctgcgca

SEQ ID NO: 82538 - RNA, 21 nt, synthetic construct
  source 1..21: mol_type = other RNA
tgcctccatccccatgctcta

SEQ ID NO: 82539 - RNA, 21 nt, synthetic construct
  source 1..21: mol_type = other RNA
ccatccccatgctctgtccaa

SEQ ID NO: 82540 - RNA, 21 nt, synthetic construct
  source 1..21: mol_type = other RNA
agggtgaggggccagcaggaa

SEQ ID NO: 82541 - RNA, 21 nt, synthetic construct
  source 1..21: mol_type = other RNA
ggtgaggggccagcaggacca

SEQ ID NO: 82542 - RNA, 21 nt, synthetic construct
  source 1..21: mol_type = other RNA
ggggccagcaggaccccttta

SEQ ID NO: 82543 - RNA, 21 nt, synthetic construct
  source 1..21: mol_type = other RNA
tgggagagcctgtggcccaca

SEQ ID NO: 82544 - RNA, 21 nt, synthetic construct
  source 1..21: mol_type = other RNA
cctgtggcccaccttggccta

SEQ ID NO: 82545 - RNA, 21 nt, synthetic construct
  source 1..21: mol_type = other RNA
ctgtggcccaccttggcctta

SEQ ID NO: 82546 - RNA, 21 nt, synthetic construct
  source 1..21: mol_type = other RNA
atcccaaagccccctctgcta

SEQ ID NO: 82547 - RNA, 21 nt, synthetic construct
  source 1..21: mol_type = other RNA
ccccctctgctcaacccagca

SEQ ID NO: 82548 - RNA, 21 nt, synthetic construct
  source 1..21: mol_type = other RNA
tcccaaagccccctctgctca

SEQ ID NO: 82549 - RNA, 21 nt, synthetic construct
  source 1..21: mol_type = other RNA
cacccacagccaccagttcca

SEQ ID NO: 82550 - RNA, 21 nt, synthetic construct
  source 1..21: mol_type = other RNA
acccacagccaccagttccaa

SEQ ID NO: 82551 - RNA, 21 nt, synthetic construct
  source 1..21: mol_type = other RNA
cacccacagccaccagttcca

SEQ ID NO: 82552 - RNA, 21 nt, synthetic construct
  source 1..21: mol_type = other RNA
acccacagccaccagttccaa

SEQ ID NO: 82553 - RNA, 21 nt, synthetic construct
  source 1..21: mol_type = other RNA
ccacagccacaccctcctcca

SEQ ID NO: 82554 - RNA, 21 nt, synthetic construct
  source 1..21: mol_type = other RNA
cccctcctccaccccaggaaa

SEQ ID NO: 82555 - RNA, 21 nt, synthetic construct
  source 1..21: mol_type = other RNA
ccacagccacaccctcctcca

SEQ ID NO: 82556 - RNA, 21 nt, synthetic construct
  source 1..21: mol_type = other RNA
cccctcctccaccccaggaaa

SEQ ID NO: 82557 - RNA, 21 nt, synthetic construct
  source 1..21: mol_type = other RNA
cccctcctccaccccaggaaa

SEQ ID NO: 82558 - RNA, 21 nt, synthetic construct
  source 1..21: mol_type = other RNA
ccacagccacaccctcctcca

SEQ ID NO: 82559 - RNA, 21 nt, synthetic construct
  source 1..21: mol_type = other RNA
ccacagccacaccctcctcca

SEQ ID NO: 82560 - RNA, 21 nt, synthetic construct
  source 1..21: mol_type = other RNA
cccctcctccaccccaggaaa

SEQ ID NO: 82561 - RNA, 21 nt, synthetic construct
  source 1..21: mol_type = other RNA
ctgggagagcctgtggcccaa

SEQ ID NO: 82562 - RNA, 21 nt, synthetic construct
  source 1..21: mol_type = other RNA
tccacagccacaccctcctca

SEQ ID NO: 82563 - RNA, 21 nt, synthetic construct
  source 1..21: mol_type = other RNA
tccacagccacaccctcctca

SEQ ID NO: 82564 - RNA, 21 nt, synthetic construct
  source 1..21: mol_type = other RNA
gccaccacacccacagccaca

SEQ ID NO: 82565 - RNA, 21 nt, synthetic construct
  source 1..21: mol_type = other RNA
tccacagccacaccctcctca

SEQ ID NO: 82566 - RNA, 21 nt, synthetic construct
  source 1..21: mol_type = other RNA
gccaccacacccacagccaca

SEQ ID NO: 82567 - RNA, 21 nt, synthetic construct
  source 1..21: mol_type = other RNA
tccacagccacaccctcctca

SEQ ID NO: 82568 - RNA, 21 nt, synthetic construct
  source 1..21: mol_type = other RNA
accctcctccactctggggaa

SEQ ID NO: 82569 - RNA, 21 nt, synthetic construct
  source 1..21: mol_type = other RNA
acactaccaaagtgctgacta

SEQ ID NO: 82570 - RNA, 21 nt, synthetic construct
  source 1..21: mol_type = other RNA
tgcccctgcacccacggcgga

SEQ ID NO: 82571 - RNA, 21 nt, synthetic construct
  source 1..21: mol_type = other RNA
tccccacagcggagaactgca

SEQ ID NO: 82572 - RNA, 21 nt, synthetic construct
  source 1..21: mol_type = other RNA
acccgtgttgtcatcaaggca

SEQ ID NO: 82573 - RNA, 21 nt, synthetic construct
  source 1..21: mol_type = other RNA
ccgtgttgtcatcaaggccca

SEQ ID NO: 82574 - RNA, 21 nt, synthetic construct
  source 1..21: mol_type = other RNA
cgcactggagtttgggaacaa

SEQ ID NO: 82575 - RNA, 21 nt, synthetic construct
  source 1..21: mol_type = other RNA
ggccgacgtcacctgcagcga

SEQ ID NO: 82576 - RNA, 21 nt, synthetic construct
  source 1..21: mol_type = other RNA
actcgactccagccctgtcca

SEQ ID NO: 82577 - RNA, 21 nt, synthetic construct
  source 1..21: mol_type = other RNA
actcgactccagccctgtcca

SEQ ID NO: 82578 - RNA, 21 nt, synthetic construct
  source 1..21: mol_type = other RNA
actcgactccagccctgtcca

SEQ ID NO: 82579 - RNA, 21 nt, synthetic construct
  source 1..21: mol_type = other RNA
agtgtggagaatgagaactaa

SEQ ID NO: 82580 - RNA, 21 nt, synthetic construct
  source 1..21: mol_type = other RNA
gtccccacagcggagaactga

SEQ ID NO: 82581 - RNA, 21 nt, synthetic construct
  source 1..21: mol_type = other RNA
gccctgtgacttccactatga

SEQ ID NO: 82582 - RNA, 21 nt, synthetic construct
  source 1..21: mol_type = other RNA
accccaggaacagctcacaca

SEQ ID NO: 82583 - RNA, 21 nt, synthetic construct
  source 1..21: mol_type = other RNA
accccaggaacagctcacaca

SEQ ID NO: 82584 - RNA, 21 nt, synthetic construct
  source 1..21: mol_type = other RNA
accccaggaacagctcacaca

SEQ ID NO: 82585 - RNA, 21 nt, synthetic construct
  source 1..21: mol_type = other RNA
accccaggaacagctcacaca

SEQ ID NO: 82586 - RNA, 21 nt, synthetic construct
  source 1..21: mol_type = other RNA
accccaggaacagctcacaca

SEQ ID NO: 82587 - RNA, 21 nt, synthetic construct
  source 1..21: mol_type = other RNA
actacggccactgccccagca

SEQ ID NO: 82588 - RNA, 21 nt, synthetic construct
  source 1..21: mol_type = other RNA
actacggccactgccccagca

SEQ ID NO: 82589 - RNA, 21 nt, synthetic construct
  source 1..21: mol_type = other RNA
actacggccactgccccagca

SEQ ID NO: 82590 - RNA, 21 nt, synthetic construct
  source 1..21: mol_type = other RNA
actacggccactgccccagca

SEQ ID NO: 82591 - RNA, 21 nt, synthetic construct
  source 1..21: mol_type = other RNA
aggacccctgctccctcagta

SEQ ID NO: 82592 - RNA, 21 nt, synthetic construct
  source 1..21: mol_type = other RNA
acgcactggagtttgggaaca

SEQ ID NO: 82593 - RNA, 21 nt, synthetic construct
  source 1..21: mol_type = other RNA
aactacggccactgccccaga

SEQ ID NO: 82594 - RNA, 21 nt, synthetic construct
  source 1..21: mol_type = other RNA
ctacggccactgccccagcaa

SEQ ID NO: 82595 - RNA, 21 nt, synthetic construct
  source 1..21: mol_type = other RNA
aactacggccactgccccaga

SEQ ID NO: 82596 - RNA, 21 nt, synthetic construct
  source 1..21: mol_type = other RNA
ctacggccactgccccagcaa

SEQ ID NO: 82597 - RNA, 21 nt, synthetic construct
  source 1..21: mol_type = other RNA
aactacggccactgccccaga

SEQ ID NO: 82598 - RNA, 21 nt, synthetic construct
  source 1..21: mol_type = other RNA
ctacggccactgccccagcaa

SEQ ID NO: 82599 - RNA, 21 nt, synthetic construct
  source 1..21: mol_type = other RNA
aactacggccactgccccaga

SEQ ID NO: 82600 - RNA, 21 nt, synthetic construct
  source 1..21: mol_type = other RNA
ctacggccactgccccagcaa

SEQ ID NO: 82601 - RNA, 21 nt, synthetic construct
  source 1..21: mol_type = other RNA
gcgactgctgtcccaccttca

SEQ ID NO: 82602 - RNA, 21 nt, synthetic construct
  source 1..21: mol_type = other RNA
aggccgacgtcacctgcagca

SEQ ID NO: 82603 - RNA, 21 nt, synthetic construct
  source 1..21: mol_type = other RNA
ccctgcacccacggcggccga

SEQ ID NO: 82604 - RNA, 21 nt, synthetic construct
  source 1..21: mol_type = other RNA
gctccctcagtgtggagaata

SEQ ID NO: 82605 - RNA, 21 nt, synthetic construct
  source 1..21: mol_type = other RNA
cccctgcacccacggcggcca

SEQ ID NO: 82606 - RNA, 21 nt, synthetic construct
  source 1..21: mol_type = other RNA
acggcggccgcacctacagca

SEQ ID NO: 82607 - RNA, 21 nt, synthetic construct
  source 1..21: mol_type = other RNA
ctgggagcctctctgcagaaa

SEQ ID NO: 82608 - RNA, 21 nt, synthetic construct
  source 1..21: mol_type = other RNA
tcctccactccagagactgca

SEQ ID NO: 82609 - RNA, 21 nt, synthetic construct
  source 1..21: mol_type = other RNA
tcctccactccagagactgca

SEQ ID NO: 82610 - RNA, 21 nt, synthetic construct
  source 1..21: mol_type = other RNA
ccacaaccaccacacccacaa

SEQ ID NO: 82611 - RNA, 21 nt, synthetic construct
  source 1..21: mol_type = other RNA
agccagccctgtgacttccaa

SEQ ID NO: 82612 - RNA, 21 nt, synthetic construct
  source 1..21: mol_type = other RNA
gagccagccctgtgacttcca

SEQ ID NO: 82613 - RNA, 21 nt, synthetic construct
  source 1..21: mol_type = other RNA
agccctgtgacttccactata

SEQ ID NO: 82614 - RNA, 21 nt, synthetic construct
  source 1..21: mol_type = other RNA
tgtggtcacccgtgttgtcaa

SEQ ID NO: 82615 - RNA, 21 nt, synthetic construct
  source 1..21: mol_type = other RNA
gggcgactgctgtcccaccta

SEQ ID NO: 82616 - RNA, 21 nt, synthetic construct
  source 1..21: mol_type = other RNA
gggagcctctctgcagaaaaa

SEQ ID NO: 82617 - RNA, 21 nt, synthetic construct
  source 1..21: mol_type = other RNA
cagccctgtgacttccactaa

SEQ ID NO: 82618 - RNA, 21 nt, synthetic construct
  source 1..21: mol_type = other RNA
ctgtggtcacccgtgttgtca

SEQ ID NO: 82619 - RNA, 21 nt, synthetic construct
  source 1..21: mol_type = other RNA
gcagcccctgggcctcgagta

SEQ ID NO: 82620 - RNA, 21 nt, synthetic construct
  source 1..21: mol_type = other RNA
gccactgccccagcaccccga

SEQ ID NO: 82621 - RNA, 21 nt, synthetic construct
  source 1..21: mol_type = other RNA
gcagcccctgggcctcgagta

SEQ ID NO: 82622 - RNA, 21 nt, synthetic construct
  source 1..21: mol_type = other RNA
gccactgccccagcaccccga

SEQ ID NO: 82623 - RNA, 21 nt, synthetic construct
  source 1..21: mol_type = other RNA
gcagcccctgggcctcgagta

SEQ ID NO: 82624 - RNA, 21 nt, synthetic construct
  source 1..21: mol_type = other RNA
gccactgccccagcaccccga

SEQ ID NO: 82625 - RNA, 21 nt, synthetic construct
  source 1..21: mol_type = other RNA
gcagcccctgggcctcgagta

SEQ ID NO: 82626 - RNA, 21 nt, synthetic construct
  source 1..21: mol_type = other RNA
gccactgccccagcaccccga

SEQ ID NO: 82627 - RNA, 21 nt, synthetic construct
  source 1..21: mol_type = other RNA
gttgtcatcaaggcccaggga

SEQ ID NO: 82628 - RNA, 21 nt, synthetic construct
  source 1..21: mol_type = other RNA
cccgtgttgtcatcaaggcca

SEQ ID NO: 82629 - RNA, 21 nt, synthetic construct
  source 1..21: mol_type = other RNA
gctgcaactacggccactgca

SEQ ID NO: 82630 - RNA, 21 nt, synthetic construct
  source 1..21: mol_type = other RNA
gctgcaactacggccactgca

SEQ ID NO: 82631 - RNA, 21 nt, synthetic construct
  source 1..21: mol_type = other RNA
gctgcaactacggccactgca

SEQ ID NO: 82632 - RNA, 21 nt, synthetic construct
  source 1..21: mol_type = other RNA
gctgcaactacggccactgca

SEQ ID NO: 82633 - RNA, 21 nt, synthetic construct
  source 1..21: mol_type = other RNA
cctcctccagtccagggacta

SEQ ID NO: 82634 - RNA, 21 nt, synthetic construct
  source 1..21: mol_type = other RNA
ctcctccagtccagggactga

SEQ ID NO: 82635 - RNA, 21 nt, synthetic construct
  source 1..21: mol_type = other RNA
tccaccccaggaacagctcaa

SEQ ID NO: 82636 - RNA, 21 nt, synthetic construct
  source 1..21: mol_type = other RNA
tccaccccaggaacagctcaa

SEQ ID NO: 82637 - RNA, 21 nt, synthetic construct
  source 1..21: mol_type = other RNA
cctcctccagtccagggacta

SEQ ID NO: 82638 - RNA, 21 nt, synthetic construct
  source 1..21: mol_type = other RNA
ctcctccagtccagggactga

SEQ ID NO: 82639 - RNA, 21 nt, synthetic construct
  source 1..21: mol_type = other RNA
tccaccccaggaacagctcaa

SEQ ID NO: 82640 - RNA, 21 nt, synthetic construct
  source 1..21: mol_type = other RNA
tccaccccaggaacagctcaa

SEQ ID NO: 82641 - RNA, 21 nt, synthetic construct
  source 1..21: mol_type = other RNA
cctcctccagtccagggacta

SEQ ID NO: 82642 - RNA, 21 nt, synthetic construct
  source 1..21: mol_type = other RNA
ctcctccagtccagggactga

SEQ ID NO: 82643 - RNA, 21 nt, synthetic construct
  source 1..21: mol_type = other RNA
tccaccccaggaacagctcaa

SEQ ID NO: 82644 - RNA, 21 nt, synthetic construct
  source 1..21: mol_type = other RNA
ccagccctgtgacttccacta

SEQ ID NO: 82645 - RNA, 21 nt, synthetic construct
  source 1..21: mol_type = other RNA
cacccctgcagtgctccccaa

SEQ ID NO: 82646 - RNA, 21 nt, synthetic construct
  source 1..21: mol_type = other RNA
ctcctccaccccaggaacaga

SEQ ID NO: 82647 - RNA, 21 nt, synthetic construct
  source 1..21: mol_type = other RNA
ctcctccaccccaggaacaga

SEQ ID NO: 82648 - RNA, 21 nt, synthetic construct
  source 1..21: mol_type = other RNA
ctcctccaccccaggaacaga

SEQ ID NO: 82649 - RNA, 21 nt, synthetic construct
  source 1..21: mol_type = other RNA
ctcctccaccccaggaacaga

SEQ ID NO: 82650 - RNA, 21 nt, synthetic construct
  source 1..21: mol_type = other RNA
ctctgcccccggacctgccca

SEQ ID NO: 82651 - RNA, 21 nt, synthetic construct
  source 1..21: mol_type = other RNA
cctgggagcctctctgcagaa

SEQ ID NO: 82652 - RNA, 21 nt, synthetic construct
  source 1..21: mol_type = other RNA
acggccactgccccagcacca

SEQ ID NO: 82653 - RNA, 21 nt, synthetic construct
  source 1..21: mol_type = other RNA
acggccactgccccagcacca

SEQ ID NO: 82654 - RNA, 21 nt, synthetic construct
  source 1..21: mol_type = other RNA
acggccactgccccagcacca

SEQ ID NO: 82655 - RNA, 21 nt, synthetic construct
  source 1..21: mol_type = other RNA
acggccactgccccagcacca

SEQ ID NO: 82656 - RNA, 21 nt, synthetic construct
  source 1..21: mol_type = other RNA
ctccaccccaggaacagctca

SEQ ID NO: 82657 - RNA, 21 nt, synthetic construct
  source 1..21: mol_type = other RNA
ctccaccccaggaacagctca

SEQ ID NO: 82658 - RNA, 21 nt, synthetic construct
  source 1..21: mol_type = other RNA
ctccaccccaggaacagctca

SEQ ID NO: 82659 - RNA, 21 nt, synthetic construct
  source 1..21: mol_type = other RNA
ctccaccccaggaacagctca

SEQ ID NO: 82660 - RNA, 21 nt, synthetic construct
  source 1..21: mol_type = other RNA
cccctgcagtgctccccagca

SEQ ID NO: 82661 - RNA, 21 nt, synthetic construct
  source 1..21: mol_type = other RNA
ccctgcagtgctccccagcaa

SEQ ID NO: 82662 - RNA, 21 nt, synthetic construct
  source 1..21: mol_type = other RNA
tccctcctccagtccagggaa

SEQ ID NO: 82663 - RNA, 21 nt, synthetic construct
  source 1..21: mol_type = other RNA
accctcctccactccagagaa

SEQ ID NO: 82664 - RNA, 21 nt, synthetic construct
  source 1..21: mol_type = other RNA
accctcctccactccagagaa

SEQ ID NO: 82665 - RNA, 21 nt, synthetic construct
  source 1..21: mol_type = other RNA
tccctcctccagtccagggaa

SEQ ID NO: 82666 - RNA, 21 nt, synthetic construct
  source 1..21: mol_type = other RNA
accctcctccactccagagaa

SEQ ID NO: 82667 - RNA, 21 nt, synthetic construct
  source 1..21: mol_type = other RNA
tccctcctccagtccagggaa

SEQ ID NO: 82668 - RNA, 21 nt, synthetic construct
  source 1..21: mol_type = other RNA
accctcctccactccagagaa

SEQ ID NO: 82669 - RNA, 21 nt, synthetic construct
  source 1..21: mol_type = other RNA
ggcagtgctgtggggagtgca

SEQ ID NO: 82670 - RNA, 21 nt, synthetic construct
  source 1..21: mol_type = other RNA
ggtgaccccctcctccatcca

SEQ ID NO: 82671 - RNA, 21 nt, synthetic construct
  source 1..21: mol_type = other RNA
ggtgaccccctcctccatcca

SEQ ID NO: 82672 - RNA, 21 nt, synthetic construct
  source 1..21: mol_type = other RNA
ggtgaccccctcctccatcca

SEQ ID NO: 82673 - RNA, 21 nt, synthetic construct
  source 1..21: mol_type = other RNA
ggtgaccccctcctccatcca

SEQ ID NO: 82674 - RNA, 21 nt, synthetic construct
  source 1..21: mol_type = other RNA
gcacccacggcggccgcacca

SEQ ID NO: 82675 - RNA, 21 nt, synthetic construct
  source 1..21: mol_type = other RNA
ctcgactccagccctgtccaa

SEQ ID NO: 82676 - RNA, 21 nt, synthetic construct
  source 1..21: mol_type = other RNA
ctcgactccagccctgtccaa

SEQ ID NO: 82677 - RNA, 21 nt, synthetic construct
  source 1..21: mol_type = other RNA
ctcgactccagccctgtccaa

SEQ ID NO: 82678 - RNA, 21 nt, synthetic construct
  source 1..21: mol_type = other RNA
cggccgcacctacagcccgga

SEQ ID NO: 82679 - RNA, 21 nt, synthetic construct
  source 1..21: mol_type = other RNA
gactgctgtcccaccttccga

SEQ ID NO: 82680 - RNA, 21 nt, synthetic construct
  source 1..21: mol_type = other RNA
ccctgagctctgcccccggaa

SEQ ID NO: 82681 - RNA, 21 nt, synthetic construct
  source 1..21: mol_type = other RNA
cctgagctctgcccccggaca

SEQ ID NO: 82682 - RNA, 21 nt, synthetic construct
  source 1..21: mol_type = other RNA
ggccgcacctacagcccggga

SEQ ID NO: 82683 - RNA, 21 nt, synthetic construct
  source 1..21: mol_type = other RNA
agctgcctgggagcctctcta

SEQ ID NO: 82684 - RNA, 21 nt, synthetic construct
  source 1..21: mol_type = other RNA
gctgcctgggagcctctctga

SEQ ID NO: 82685 - RNA, 21 nt, synthetic construct
  source 1..21: mol_type = other RNA
cagcccctgggcctcgagtga

SEQ ID NO: 82686 - RNA, 21 nt, synthetic construct
  source 1..21: mol_type = other RNA
cagcccctgggcctcgagtga

SEQ ID NO: 82687 - RNA, 21 nt, synthetic construct
  source 1..21: mol_type = other RNA
cagcccctgggcctcgagtga

SEQ ID NO: 82688 - RNA, 21 nt, synthetic construct
  source 1..21: mol_type = other RNA
cagcccctgggcctcgagtga

SEQ ID NO: 82689 - RNA, 21 nt, synthetic construct
  source 1..21: mol_type = other RNA
actgctgtcccaccttccgca

SEQ ID NO: 82690 - RNA, 21 nt, synthetic construct
  source 1..21: mol_type = other RNA
cctgctccctcagtgtggaga

SEQ ID NO: 82691 - RNA, 21 nt, synthetic construct
  source 1..21: mol_type = other RNA
cggccaccacaactggggcca

SEQ ID NO: 82692 - RNA, 21 nt, synthetic construct
  source 1..21: mol_type = other RNA
acaaccaccacacccacaaca

SEQ ID NO: 82693 - RNA, 21 nt, synthetic construct
  source 1..21: mol_type = other RNA
acaaccaccacacccacaaca

SEQ ID NO: 82694 - RNA, 21 nt, synthetic construct
  source 1..21: mol_type = other RNA
acaaccaccacacccacaaca

SEQ ID NO: 82695 - RNA, 21 nt, synthetic construct
  source 1..21: mol_type = other RNA
acaaccaccacacccacaaca

SEQ ID NO: 82696 - RNA, 21 nt, synthetic construct
  source 1..21: mol_type = other RNA
acaaccaccacacccacaaca

SEQ ID NO: 82697 - RNA, 21 nt, synthetic construct
  source 1..21: mol_type = other RNA
acaaccaccacacccacaaca

SEQ ID NO: 82698 - RNA, 21 nt, synthetic construct
  source 1..21: mol_type = other RNA
cctgcacccacggcggccgca

SEQ ID NO: 82699 - RNA, 21 nt, synthetic construct
  source 1..21: mol_type = other RNA
ctcagtgtggagaatgagaaa

SEQ ID NO: 82700 - RNA, 21 nt, synthetic construct
  source 1..21: mol_type = other RNA
gtgtggagaatgagaactaca

SEQ ID NO: 82701 - RNA, 21 nt, synthetic construct
  source 1..21: mol_type = other RNA
ccaccccaggaacagctcaca

SEQ ID NO: 82702 - RNA, 21 nt, synthetic construct
  source 1..21: mol_type = other RNA
caaccaccacacccacaacca

SEQ ID NO: 82703 - RNA, 21 nt, synthetic construct
  source 1..21: mol_type = other RNA
ccaccccaggaacagctcaca

SEQ ID NO: 82704 - RNA, 21 nt, synthetic construct
  source 1..21: mol_type = other RNA
caaccaccacacccacaacca

SEQ ID NO: 82705 - RNA, 21 nt, synthetic construct
  source 1..21: mol_type = other RNA
ccaccccaggaacagctcaca

SEQ ID NO: 82706 - RNA, 21 nt, synthetic construct
  source 1..21: mol_type = other RNA
caaccaccacacccacaacca

SEQ ID NO: 82707 - RNA, 21 nt, synthetic construct
  source 1..21: mol_type = other RNA
ccaccccaggaacagctcaca

SEQ ID NO: 82708 - RNA, 21 nt, synthetic construct
  source 1..21: mol_type = other RNA
caaccaccacacccacaacca

SEQ ID NO: 82709 - RNA, 21 nt, synthetic construct
  source 1..21: mol_type = other RNA
ccaccccaggaacagctcaca

SEQ ID NO: 82710 - RNA, 21 nt, synthetic construct
  source 1..21: mol_type = other RNA
caaccaccacacccacaacca

SEQ ID NO: 82711 - RNA, 21 nt, synthetic construct
  source 1..21: mol_type = other RNA
caaccaccacacccacaacca

SEQ ID NO: 82712 - RNA, 21 nt, synthetic construct
  source 1..21: mol_type = other RNA
tgcagtgctccccagcagcca

SEQ ID NO: 82713 - RNA, 21 nt, synthetic construct
  source 1..21: mol_type = other RNA
cgagccagccctgtgacttca

SEQ ID NO: 82714 - RNA, 21 nt, synthetic construct
  source 1..21: mol_type = other RNA
ctgcagtgctccccagcagca

SEQ ID NO: 82715 - RNA, 21 nt, synthetic construct
  source 1..21: mol_type = other RNA
tcctccaccccaggaacagca

SEQ ID NO: 82716 - RNA, 21 nt, synthetic construct
  source 1..21: mol_type = other RNA
tcctccaccccaggaacagca

SEQ ID NO: 82717 - RNA, 21 nt, synthetic construct
  source 1..21: mol_type = other RNA
tcctccaccccaggaacagca

SEQ ID NO: 82718 - RNA, 21 nt, synthetic construct
  source 1..21: mol_type = other RNA
tcctccaccccaggaacagca

SEQ ID NO: 82719 - RNA, 21 nt, synthetic construct
  source 1..21: mol_type = other RNA
gaggacccctgctccctcaga

SEQ ID NO: 82720 - RNA, 21 nt, synthetic construct
  source 1..21: mol_type = other RNA
gtgagcagcccctgggcctca

SEQ ID NO: 82721 - RNA, 21 nt, synthetic construct
  source 1..21: mol_type = other RNA
gtgagcagcccctgggcctca

SEQ ID NO: 82722 - RNA, 21 nt, synthetic construct
  source 1..21: mol_type = other RNA
gtgagcagcccctgggcctca

SEQ ID NO: 82723 - RNA, 21 nt, synthetic construct
  source 1..21: mol_type = other RNA
gtgagcagcccctgggcctca

SEQ ID NO: 82724 - RNA, 21 nt, synthetic construct
  source 1..21: mol_type = other RNA
aggcctgtggtcacccgtgta

SEQ ID NO: 82725 - RNA, 21 nt, synthetic construct
  source 1..21: mol_type = other RNA
gtgttgtcatcaaggcccaga

SEQ ID NO: 82726 - RNA, 21 nt, synthetic construct
  source 1..21: mol_type = other RNA
agctctgcccccggacctgca

SEQ ID NO: 82727 - RNA, 21 nt, synthetic construct
  source 1..21: mol_type = other RNA
acccacggcggccgcacctaa

SEQ ID NO: 82728 - RNA, 21 nt, synthetic construct
  source 1..21: mol_type = other RNA
ggacccctgctccctcagtga

SEQ ID NO: 82729 - RNA, 21 nt, synthetic construct
  source 1..21: mol_type = other RNA
gacccctgctccctcagtgta

SEQ ID NO: 82730 - RNA, 21 nt, synthetic construct
  source 1..21: mol_type = other RNA
tgctccctcagtgtggagaaa

SEQ ID NO: 82731 - RNA, 21 nt, synthetic construct
  source 1..21: mol_type = other RNA
ctccctcagtgtggagaatga

SEQ ID NO: 82732 - RNA, 21 nt, synthetic construct
  source 1..21: mol_type = other RNA
cagtgtggagaatgagaacta

SEQ ID NO: 82733 - RNA, 21 nt, synthetic construct
  source 1..21: mol_type = other RNA
ctgcctgggagcctctctgca

SEQ ID NO: 82734 - RNA, 21 nt, synthetic construct
  source 1..21: mol_type = other RNA
tgcctgggagcctctctgcaa

SEQ ID NO: 82735 - RNA, 21 nt, synthetic construct
  source 1..21: mol_type = other RNA
cctccaccccaggaacagcta

SEQ ID NO: 82736 - RNA, 21 nt, synthetic construct
  source 1..21: mol_type = other RNA
cacaaccaccacacccacaaa

SEQ ID NO: 82737 - RNA, 21 nt, synthetic construct
  source 1..21: mol_type = other RNA
aaccaccacacccacaaccaa

SEQ ID NO: 82738 - RNA, 21 nt, synthetic construct
  source 1..21: mol_type = other RNA
tgtgagcagcccctgggccta

SEQ ID NO: 82739 - RNA, 21 nt, synthetic construct
  source 1..21: mol_type = other RNA
tgagcagcccctgggcctcga

SEQ ID NO: 82740 - RNA, 21 nt, synthetic construct
  source 1..21: mol_type = other RNA
agcagcccctgggcctcgaga

SEQ ID NO: 82741 - RNA, 21 nt, synthetic construct
  source 1..21: mol_type = other RNA
cggccactgccccagcaccca

SEQ ID NO: 82742 - RNA, 21 nt, synthetic construct
  source 1..21: mol_type = other RNA
ggccactgccccagcacccca

SEQ ID NO: 82743 - RNA, 21 nt, synthetic construct
  source 1..21: mol_type = other RNA
ccactgccccagcaccccgga

SEQ ID NO: 82744 - RNA, 21 nt, synthetic construct
  source 1..21: mol_type = other RNA
cctccaccccaggaacagcta

SEQ ID NO: 82745 - RNA, 21 nt, synthetic construct
  source 1..21: mol_type = other RNA
cacaaccaccacacccacaaa

SEQ ID NO: 82746 - RNA, 21 nt, synthetic construct
  source 1..21: mol_type = other RNA
aaccaccacacccacaaccaa

SEQ ID NO: 82747 - RNA, 21 nt, synthetic construct
  source 1..21: mol_type = other RNA
gaccacccacacccccacaga

SEQ ID NO: 82748 - RNA, 21 nt, synthetic construct
  source 1..21: mol_type = other RNA
tccagccctgtccagccctca

SEQ ID NO: 82749 - RNA, 21 nt, synthetic construct
  source 1..21: mol_type = other RNA
ccagccctgtccagccctcaa

SEQ ID NO: 82750 - RNA, 21 nt, synthetic construct
  source 1..21: mol_type = other RNA
tgtgagcagcccctgggccta

SEQ ID NO: 82751 - RNA, 21 nt, synthetic construct
  source 1..21: mol_type = other RNA
tgagcagcccctgggcctcga

SEQ ID NO: 82752 - RNA, 21 nt, synthetic construct
  source 1..21: mol_type = other RNA
agcagcccctgggcctcgaga

SEQ ID NO: 82753 - RNA, 21 nt, synthetic construct
  source 1..21: mol_type = other RNA
cggccactgccccagcaccca

SEQ ID NO: 82754 - RNA, 21 nt, synthetic construct
  source 1..21: mol_type = other RNA
ggccactgccccagcacccca

SEQ ID NO: 82755 - RNA, 21 nt, synthetic construct
  source 1..21: mol_type = other RNA
ccactgccccagcaccccgga

SEQ ID NO: 82756 - RNA, 21 nt, synthetic construct
  source 1..21: mol_type = other RNA
cctccaccccaggaacagcta

SEQ ID NO: 82757 - RNA, 21 nt, synthetic construct
  source 1..21: mol_type = other RNA
cacaaccaccacacccacaaa

SEQ ID NO: 82758 - RNA, 21 nt, synthetic construct
  source 1..21: mol_type = other RNA
aaccaccacacccacaaccaa

SEQ ID NO: 82759 - RNA, 21 nt, synthetic construct
  source 1..21: mol_type = other RNA
tccagccctgtccagccctca

SEQ ID NO: 82760 - RNA, 21 nt, synthetic construct
  source 1..21: mol_type = other RNA
ccagccctgtccagccctcaa

SEQ ID NO: 82761 - RNA, 21 nt, synthetic construct
  source 1..21: mol_type = other RNA
tgtgagcagcccctgggccta

SEQ ID NO: 82762 - RNA, 21 nt, synthetic construct
  source 1..21: mol_type = other RNA
tgagcagcccctgggcctcga

SEQ ID NO: 82763 - RNA, 21 nt, synthetic construct
  source 1..21: mol_type = other RNA
agcagcccctgggcctcgaga

SEQ ID NO: 82764 - RNA, 21 nt, synthetic construct
  source 1..21: mol_type = other RNA
cggccactgccccagcaccca

SEQ ID NO: 82765 - RNA, 21 nt, synthetic construct
  source 1..21: mol_type = other RNA
ggccactgccccagcacccca

SEQ ID NO: 82766 - RNA, 21 nt, synthetic construct
  source 1..21: mol_type = other RNA
ccactgccccagcaccccgga

SEQ ID NO: 82767 - RNA, 21 nt, synthetic construct
  source 1..21: mol_type = other RNA
cacaaccaccacacccacaaa

SEQ ID NO: 82768 - RNA, 21 nt, synthetic construct
  source 1..21: mol_type = other RNA
aaccaccacacccacaaccaa

SEQ ID NO: 82769 - RNA, 21 nt, synthetic construct
  source 1..21: mol_type = other RNA
gaccacccacacccccacaga

SEQ ID NO: 82770 - RNA, 21 nt, synthetic construct
  source 1..21: mol_type = other RNA
tccagccctgtccagccctca

SEQ ID NO: 82771 - RNA, 21 nt, synthetic construct
  source 1..21: mol_type = other RNA
ccagccctgtccagccctcaa

SEQ ID NO: 82772 - RNA, 21 nt, synthetic construct
  source 1..21: mol_type = other RNA
tgtgagcagcccctgggccta

SEQ ID NO: 82773 - RNA, 21 nt, synthetic construct
  source 1..21: mol_type = other RNA
tgagcagcccctgggcctcga

SEQ ID NO: 82774 - RNA, 21 nt, synthetic construct
  source 1..21: mol_type = other RNA
agcagcccctgggcctcgaga

SEQ ID NO: 82775 - RNA, 21 nt, synthetic construct
  source 1..21: mol_type = other RNA
cggccactgccccagcaccca

SEQ ID NO: 82776 - RNA, 21 nt, synthetic construct
  source 1..21: mol_type = other RNA
ggccactgccccagcacccca

SEQ ID NO: 82777 - RNA, 21 nt, synthetic construct
  source 1..21: mol_type = other RNA
ccactgccccagcaccccgga

SEQ ID NO: 82778 - RNA, 21 nt, synthetic construct
  source 1..21: mol_type = other RNA
cctccaccccaggaacagcta

SEQ ID NO: 82779 - RNA, 21 nt, synthetic construct
  source 1..21: mol_type = other RNA
cacaaccaccacacccacaaa

SEQ ID NO: 82780 - RNA, 21 nt, synthetic construct
  source 1..21: mol_type = other RNA
cacaaccaccacacccacaaa

SEQ ID NO: 82781 - RNA, 21 nt, synthetic construct
  source 1..21: mol_type = other RNA
aaccaccacacccacaaccaa

SEQ ID NO: 82782 - RNA, 21 nt, synthetic construct
  source 1..21: mol_type = other RNA
gccagccctgtgacttccaca

SEQ ID NO: 82783 - RNA, 21 nt, synthetic construct
  source 1..21: mol_type = other RNA
ctcctccactccagagactga

SEQ ID NO: 82784 - RNA, 21 nt, synthetic construct
  source 1..21: mol_type = other RNA
ctcctccactccagagactga

SEQ ID NO: 82785 - RNA, 21 nt, synthetic construct
  source 1..21: mol_type = other RNA
ggaccacccacacccccacaa

SEQ ID NO: 82786 - RNA, 21 nt, synthetic construct
  source 1..21: mol_type = other RNA
ggaccacccacacccccacaa

SEQ ID NO: 82787 - RNA, 21 nt, synthetic construct
  source 1..21: mol_type = other RNA
ccctcctccagtccagggaca

SEQ ID NO: 82788 - RNA, 21 nt, synthetic construct
  source 1..21: mol_type = other RNA
ccctcctccagtccagggaca

SEQ ID NO: 82789 - RNA, 21 nt, synthetic construct
  source 1..21: mol_type = other RNA
ccctcctccagtccagggaca

SEQ ID NO: 82790 - RNA, 21 nt, synthetic construct
  source 1..21: mol_type = other RNA
cctcctccactccagagacta

SEQ ID NO: 82791 - RNA, 21 nt, synthetic construct
  source 1..21: mol_type = other RNA
cctcctccactccagagacta

SEQ ID NO: 82792 - RNA, 21 nt, synthetic construct
  source 1..21: mol_type = other RNA
cctcctccactccagagacta

SEQ ID NO: 82793 - RNA, 21 nt, synthetic construct
  source 1..21: mol_type = other RNA
cctcctccactccagagacta

SEQ ID NO: 82794 - RNA, 21 nt, synthetic construct
  source 1..21: mol_type = other RNA
ggtactcccccatcactgata

SEQ ID NO: 82795 - RNA, 21 nt, synthetic construct
  source 1..21: mol_type = other RNA
gctgacatcgagtgccgggca

SEQ ID NO: 82796 - RNA, 21 nt, synthetic construct
  source 1..21: mol_type = other RNA
gcaacaatactacctgtccca

SEQ ID NO: 82797 - RNA, 21 nt, synthetic construct
  source 1..21: mol_type = other RNA
gcgactggagggacggcgtca

SEQ ID NO: 82798 - RNA, 21 nt, synthetic construct
  source 1..21: mol_type = other RNA
cccggtctccaccgtgtgtga

SEQ ID NO: 82799 - RNA, 21 nt, synthetic construct
  source 1..21: mol_type = other RNA
tcaacgcacacatgggcatca

SEQ ID NO: 82800 - RNA, 21 nt, synthetic construct
  source 1..21: mol_type = other RNA
cctacgtggtggatgcctgca

SEQ ID NO: 82801 - RNA, 21 nt, synthetic construct
  source 1..21: mol_type = other RNA
gggcaactgctggcaccctca

SEQ ID NO: 82802 - RNA, 21 nt, synthetic construct
  source 1..21: mol_type = other RNA
gtatgccctgtgctggctgaa

SEQ ID NO: 82803 - RNA, 21 nt, synthetic construct
  source 1..21: mol_type = other RNA
aggcaactgctggcaccccaa

SEQ ID NO: 82804 - RNA, 21 nt, synthetic construct
  source 1..21: mol_type = other RNA
aggcaactgctggcaccccaa

SEQ ID NO: 82805 - RNA, 21 nt, synthetic construct
  source 1..21: mol_type = other RNA
aggcaactgctggcaccccaa

SEQ ID NO: 82806 - RNA, 21 nt, synthetic construct
  source 1..21: mol_type = other RNA
tcgtacaatggcaccttctaa

SEQ ID NO: 82807 - RNA, 21 nt, synthetic construct
  source 1..21: mol_type = other RNA
agctaccagcgttacagccaa

SEQ ID NO: 82808 - RNA, 21 nt, synthetic construct
  source 1..21: mol_type = other RNA
ccacttcggcctggtgtgcaa

SEQ ID NO: 82809 - RNA, 21 nt, synthetic construct
  source 1..21: mol_type = other RNA
agcccttccagggacgacgga

SEQ ID NO: 82810 - RNA, 21 nt, synthetic construct
  source 1..21: mol_type = other RNA
cagccactacgactgagtcca

SEQ ID NO: 82811 - RNA, 21 nt, synthetic construct
  source 1..21: mol_type = other RNA
ggccaccatgtccacaatcca

SEQ ID NO: 82812 - RNA, 21 nt, synthetic construct
  source 1..21: mol_type = other RNA
cagccactacgactgagtcca

SEQ ID NO: 82813 - RNA, 21 nt, synthetic construct
  source 1..21: mol_type = other RNA
ggccaccatgtccacaatcca

SEQ ID NO: 82814 - RNA, 21 nt, synthetic construct
  source 1..21: mol_type = other RNA
acgagggttcagtgtcggtga

SEQ ID NO: 82815 - RNA, 21 nt, synthetic construct
  source 1..21: mol_type = other RNA
gtgatggtgcccaccggttca

SEQ ID NO: 82816 - RNA, 21 nt, synthetic construct
  source 1..21: mol_type = other RNA
gcctgcaacaatactacctga

SEQ ID NO: 82817 - RNA, 21 nt, synthetic construct
  source 1..21: mol_type = other RNA
cccggcgcacaatgggcggga

SEQ ID NO: 82818 - RNA, 21 nt, synthetic construct
  source 1..21: mol_type = other RNA
gcctacgtggtggatgcctga

SEQ ID NO: 82819 - RNA, 21 nt, synthetic construct
  source 1..21: mol_type = other RNA
gaccaccctatgggtgaccca

SEQ ID NO: 82820 - RNA, 21 nt, synthetic construct
  source 1..21: mol_type = other RNA
gacccgcacctcgaccctgca

SEQ ID NO: 82821 - RNA, 21 nt, synthetic construct
  source 1..21: mol_type = other RNA
gacccgcacctcgaccctgca

SEQ ID NO: 82822 - RNA, 21 nt, synthetic construct
  source 1..21: mol_type = other RNA
gacccgcacctcgaccctgca

SEQ ID NO: 82823 - RNA, 21 nt, synthetic construct
  source 1..21: mol_type = other RNA
gacccgcacctcgaccctgca

SEQ ID NO: 82824 - RNA, 21 nt, synthetic construct
  source 1..21: mol_type = other RNA
caccgcttccaaagagccgca

SEQ ID NO: 82825 - RNA, 21 nt, synthetic construct
  source 1..21: mol_type = other RNA
ccagctttacagccatcccca

SEQ ID NO: 82826 - RNA, 21 nt, synthetic construct
  source 1..21: mol_type = other RNA
ccagctttacagccatcccca

SEQ ID NO: 82827 - RNA, 21 nt, synthetic construct
  source 1..21: mol_type = other RNA
ccagctttacagccatcccca

SEQ ID NO: 82828 - RNA, 21 nt, synthetic construct
  source 1..21: mol_type = other RNA
gacgacggggagcttgggcaa

SEQ ID NO: 82829 - RNA, 21 nt, synthetic construct
  source 1..21: mol_type = other RNA
acaaccggggccaccggctca

SEQ ID NO: 82830 - RNA, 21 nt, synthetic construct
  source 1..21: mol_type = other RNA
tcaccctagcagcaggaccaa

SEQ ID NO: 82831 - RNA, 21 nt, synthetic construct
  source 1..21: mol_type = other RNA
tcaccctagcagcaggaccaa

SEQ ID NO: 82832 - RNA, 21 nt, synthetic construct
  source 1..21: mol_type = other RNA
tcaccctagcagcaggaccaa

SEQ ID NO: 82833 - RNA, 21 nt, synthetic construct
  source 1..21: mol_type = other RNA
acaaccggggccaccggctca

SEQ ID NO: 82834 - RNA, 21 nt, synthetic construct
  source 1..21: mol_type = other RNA
gcctcacgcccgatggccaga

SEQ ID NO: 82835 - RNA, 21 nt, synthetic construct
  source 1..21: mol_type = other RNA
tgctggctgacatcgagtgca

SEQ ID NO: 82836 - RNA, 21 nt, synthetic construct
  source 1..21: mol_type = other RNA
ggaatgcagcctggactttga

SEQ ID NO: 82837 - RNA, 21 nt, synthetic construct
  source 1..21: mol_type = other RNA
cccacatgtgagcaccacgga

SEQ ID NO: 82838 - RNA, 21 nt, synthetic construct
  source 1..21: mol_type = other RNA
ggaatgcagcctggactttga

SEQ ID NO: 82839 - RNA, 21 nt, synthetic construct
  source 1..21: mol_type = other RNA
ggaatgcagcctggactttga

SEQ ID NO: 82840 - RNA, 21 nt, synthetic construct
  source 1..21: mol_type = other RNA
cccacatgtgagcaccacgga

SEQ ID NO: 82841 - RNA, 21 nt, synthetic construct
  source 1..21: mol_type = other RNA
ggaatgcagcctggactttga

SEQ ID NO: 82842 - RNA, 21 nt, synthetic construct
  source 1..21: mol_type = other RNA
cccacatgtgagcaccacgga

SEQ ID NO: 82843 - RNA, 21 nt, synthetic construct
  source 1..21: mol_type = other RNA
acggtgcaatgtcaggaggaa

SEQ ID NO: 82844 - RNA, 21 nt, synthetic construct
  source 1..21: mol_type = other RNA
cggtgcaatgtcaggaggata

SEQ ID NO: 82845 - RNA, 21 nt, synthetic construct
  source 1..21: mol_type = other RNA
ggagggcgccactcaggagta

SEQ ID NO: 82846 - RNA, 21 nt, synthetic construct
  source 1..21: mol_type = other RNA
accaggtatgccctgtgctga

SEQ ID NO: 82847 - RNA, 21 nt, synthetic construct
  source 1..21: mol_type = other RNA
ccaccacgacaagggccacca

SEQ ID NO: 82848 - RNA, 21 nt, synthetic construct
  source 1..21: mol_type = other RNA
ccaccacgacaagggccacca

SEQ ID NO: 82849 - RNA, 21 nt, synthetic construct
  source 1..21: mol_type = other RNA
ggctctggcggccatgctcga

SEQ ID NO: 82850 - RNA, 21 nt, synthetic construct
  source 1..21: mol_type = other RNA
cccgggcacctccttcaacaa

SEQ ID NO: 82851 - RNA, 21 nt, synthetic construct
  source 1..21: mol_type = other RNA
acaaccagaggctccacggta

SEQ ID NO: 82852 - RNA, 21 nt, synthetic construct
  source 1..21: mol_type = other RNA
tggtactcccccatcactgaa

SEQ ID NO: 82853 - RNA, 21 nt, synthetic construct
  source 1..21: mol_type = other RNA
tggtactcccccatcactgaa

SEQ ID NO: 82854 - RNA, 21 nt, synthetic construct
  source 1..21: mol_type = other RNA
acaaccagaggctccacggta

SEQ ID NO: 82855 - RNA, 21 nt, synthetic construct
  source 1..21: mol_type = other RNA
tggtactcccccatcactgaa

SEQ ID NO: 82856 - RNA, 21 nt, synthetic construct
  source 1..21: mol_type = other RNA
tggtactcccccatcactgaa

SEQ ID NO: 82857 - RNA, 21 nt, synthetic construct
  source 1..21: mol_type = other RNA
tggtactcccccatcactgaa

SEQ ID NO: 82858 - RNA, 21 nt, synthetic construct
  source 1..21: mol_type = other RNA
gtgtggctcaccctgcacgga

SEQ ID NO: 82859 - RNA, 21 nt, synthetic construct
  source 1..21: mol_type = other RNA
tgccacaaccttgtgccccca

SEQ ID NO: 82860 - RNA, 21 nt, synthetic construct
  source 1..21: mol_type = other RNA
aacgcctgcatcagcgaccaa

SEQ ID NO: 82861 - RNA, 21 nt, synthetic construct
  source 1..21: mol_type = other RNA
ggggggccagccgcggaacta

SEQ ID NO: 82862 - RNA, 21 nt, synthetic construct
  source 1..21: mol_type = other RNA
gttctgtccaagaaatgtgca

SEQ ID NO: 82863 - RNA, 21 nt, synthetic construct
  source 1..21: mol_type = other RNA
tggtggaggccacgggcgcaa

SEQ ID NO: 82864 - RNA, 21 nt, synthetic construct
  source 1..21: mol_type = other RNA
aggctgcctgtgccaatgcca

SEQ ID NO: 82865 - RNA, 21 nt, synthetic construct
  source 1..21: mol_type = other RNA
tggtgtacctggactgcagca

SEQ ID NO: 82866 - RNA, 21 nt, synthetic construct
  source 1..21: mol_type = other RNA
agactttgagacgtttgaaaa

SEQ ID NO: 82867 - RNA, 21 nt, synthetic construct
  source 1..21: mol_type = other RNA
cagagctggagacggccacca

SEQ ID NO: 82868 - RNA, 21 nt, synthetic construct
  source 1..21: mol_type = other RNA
gcttccaaagagccgctgaca

SEQ ID NO: 82869 - RNA, 21 nt, synthetic construct
  source 1..21: mol_type = other RNA
acctggatcctcacagagcaa

SEQ ID NO: 82870 - RNA, 21 nt, synthetic construct
  source 1..21: mol_type = other RNA
accacagcagccactacgaca

SEQ ID NO: 82871 - RNA, 21 nt, synthetic construct
  source 1..21: mol_type = other RNA
accactggatccacggccata

SEQ ID NO: 82872 - RNA, 21 nt, synthetic construct
  source 1..21: mol_type = other RNA
aaagtgctgaccagcacggca

SEQ ID NO: 82873 - RNA, 21 nt, synthetic construct
  source 1..21: mol_type = other RNA
aaagtgctgaccagcacggca

SEQ ID NO: 82874 - RNA, 21 nt, synthetic construct
  source 1..21: mol_type = other RNA
tcaactccagggacaactcca

SEQ ID NO: 82875 - RNA, 21 nt, synthetic construct
  source 1..21: mol_type = other RNA
agtggctccacggtgacccca

SEQ ID NO: 82876 - RNA, 21 nt, synthetic construct
  source 1..21: mol_type = other RNA
agtggctccacggtgacccca

SEQ ID NO: 82877 - RNA, 21 nt, synthetic construct
  source 1..21: mol_type = other RNA
tactccagagaccacccacaa

SEQ ID NO: 82878 - RNA, 21 nt, synthetic construct
  source 1..21: mol_type = other RNA
cccaaagcctgtggccaacga

SEQ ID NO: 82879 - RNA, 21 nt, synthetic construct
  source 1..21: mol_type = other RNA
gaaaggatggctgctgggcca

SEQ ID NO: 82880 - RNA, 21 nt, synthetic construct
  source 1..21: mol_type = other RNA
ctgagccaggtctttgctgaa

SEQ ID NO: 82881 - RNA, 21 nt, synthetic construct
  source 1..21: mol_type = other RNA
gcccttccctgccacatgtga

SEQ ID NO: 82882 - RNA, 21 nt, synthetic construct
  source 1..21: mol_type = other RNA
agtgctgtggggagtgcgtca

SEQ ID NO: 82883 - RNA, 21 nt, synthetic construct
  source 1..21: mol_type = other RNA
tgaatgaaacctgggtcaaca

SEQ ID NO: 82884 - RNA, 21 nt, synthetic construct
  source 1..21: mol_type = other RNA
gagggcgccactcaggagtca

SEQ ID NO: 82885 - RNA, 21 nt, synthetic construct
  source 1..21: mol_type = other RNA
agaaccaggctgacgacttca

SEQ ID NO: 82886 - RNA, 21 nt, synthetic construct
  source 1..21: mol_type = other RNA
ccgccaagggcgtacagctca

SEQ ID NO: 82887 - RNA, 21 nt, synthetic construct
  source 1..21: mol_type = other RNA
gtgtgtgacgagggttcagta

SEQ ID NO: 82888 - RNA, 21 nt, synthetic construct
  source 1..21: mol_type = other RNA
caggccccgtgacggtcacca

SEQ ID NO: 82889 - RNA, 21 nt, synthetic construct
  source 1..21: mol_type = other RNA
cacaaccagaggctccacgga

SEQ ID NO: 82890 - RNA, 21 nt, synthetic construct
  source 1..21: mol_type = other RNA
cacaaccagaggctccacgga

SEQ ID NO: 82891 - RNA, 21 nt, synthetic construct
  source 1..21: mol_type = other RNA
ccacccagcactcgactccaa

SEQ ID NO: 82892 - RNA, 21 nt, synthetic construct
  source 1..21: mol_type = other RNA
ccacccagcactcgactccaa

SEQ ID NO: 82893 - RNA, 21 nt, synthetic construct
  source 1..21: mol_type = other RNA
ccacccagcactcgactccaa

SEQ ID NO: 82894 - RNA, 21 nt, synthetic construct
  source 1..21: mol_type = other RNA
atcctcacaaagctgaccaca

SEQ ID NO: 82895 - RNA, 21 nt, synthetic construct
  source 1..21: mol_type = other RNA
ccacccagcactcgactccaa

SEQ ID NO: 82896 - RNA, 21 nt, synthetic construct
  source 1..21: mol_type = other RNA
ccttccctgccacatgtgtaa

SEQ ID NO: 82897 - RNA, 21 nt, synthetic construct
  source 1..21: mol_type = other RNA
tgtgtgacgagggttcagtga

SEQ ID NO: 82898 - RNA, 21 nt, synthetic construct
  source 1..21: mol_type = other RNA
ggcgccactcaggagtcctaa

SEQ ID NO: 82899 - RNA, 21 nt, synthetic construct
  source 1..21: mol_type = other RNA
tccagtccaaggactgcaaca

SEQ ID NO: 82900 - RNA, 21 nt, synthetic construct
  source 1..21: mol_type = other RNA
tccagtccaaggactgcaaca

SEQ ID NO: 82901 - RNA, 21 nt, synthetic construct
  source 1..21: mol_type = other RNA
tccagtccaaggactgcaaca

SEQ ID NO: 82902 - RNA, 21 nt, synthetic construct
  source 1..21: mol_type = other RNA
caagaaatgtgccgacagcaa

SEQ ID NO: 82903 - RNA, 21 nt, synthetic construct
  source 1..21: mol_type = other RNA
gacaagggccaccagttccaa

SEQ ID NO: 82904 - RNA, 21 nt, synthetic construct
  source 1..21: mol_type = other RNA
tcctcacaaagctgaccacaa

SEQ ID NO: 82905 - RNA, 21 nt, synthetic construct
  source 1..21: mol_type = other RNA
gacaagggccaccagttccaa

SEQ ID NO: 82906 - RNA, 21 nt, synthetic construct
  source 1..21: mol_type = other RNA
gtacagccaccacgggaggca

SEQ ID NO: 82907 - RNA, 21 nt, synthetic construct
  source 1..21: mol_type = other RNA
ggccacaccaggggcacctca

SEQ ID NO: 82908 - RNA, 21 nt, synthetic construct
  source 1..21: mol_type = other RNA
gtgcactgtgacgtccactta

SEQ ID NO: 82909 - RNA, 21 nt, synthetic construct
  source 1..21: mol_type = other RNA
ggccgcctgcgcccaggacca

SEQ ID NO: 82910 - RNA, 21 nt, synthetic construct
  source 1..21: mol_type = other RNA
ggtgcactgtgacgtccacta

SEQ ID NO: 82911 - RNA, 21 nt, synthetic construct
  source 1..21: mol_type = other RNA
gctggcaccctcaaagtgcta

SEQ ID NO: 82912 - RNA, 21 nt, synthetic construct
  source 1..21: mol_type = other RNA
cggcgcacaatgggcgggtga

SEQ ID NO: 82913 - RNA, 21 nt, synthetic construct
  source 1..21: mol_type = other RNA
gccctcacctcgcagactgga

SEQ ID NO: 82914 - RNA, 21 nt, synthetic construct
  source 1..21: mol_type = other RNA
tgacgtccacttcggcctgga

SEQ ID NO: 82915 - RNA, 21 nt, synthetic construct
  source 1..21: mol_type = other RNA
atcccccagatacacaagcaa

SEQ ID NO: 82916 - RNA, 21 nt, synthetic construct
  source 1..21: mol_type = other RNA
cctatcacagaccaccacaca

SEQ ID NO: 82917 - RNA, 21 nt, synthetic construct
  source 1..21: mol_type = other RNA
tgtgcctggtcagagtggcta

SEQ ID NO: 82918 - RNA, 21 nt, synthetic construct
  source 1..21: mol_type = other RNA
cctatcacagaccaccacaca

SEQ ID NO: 82919 - RNA, 21 nt, synthetic construct
  source 1..21: mol_type = other RNA
tgtgcctggtcagagtggcta

SEQ ID NO: 82920 - RNA, 21 nt, synthetic construct
  source 1..21: mol_type = other RNA
ctggatcctcacagagcccaa

SEQ ID NO: 82921 - RNA, 21 nt, synthetic construct
  source 1..21: mol_type = other RNA
cctatcacagaccaccacaca

SEQ ID NO: 82922 - RNA, 21 nt, synthetic construct
  source 1..21: mol_type = other RNA
tgtgcctggtcagagtggcta

SEQ ID NO: 82923 - RNA, 21 nt, synthetic construct
  source 1..21: mol_type = other RNA
cctatcacagaccaccacaca

SEQ ID NO: 82924 - RNA, 21 nt, synthetic construct
  source 1..21: mol_type = other RNA
tgtgcctggtcagagtggcta

SEQ ID NO: 82925 - RNA, 21 nt, synthetic construct
  source 1..21: mol_type = other RNA
cctatcacagaccaccacaca

SEQ ID NO: 82926 - RNA, 21 nt, synthetic construct
  source 1..21: mol_type = other RNA
cacctcctctactccagagaa

SEQ ID NO: 82927 - RNA, 21 nt, synthetic construct
  source 1..21: mol_type = other RNA
tcagcatcccaaagcccccta

SEQ ID NO: 82928 - RNA, 21 nt, synthetic construct
  source 1..21: mol_type = other RNA
ggagccgagctgggagaatga

SEQ ID NO: 82929 - RNA, 21 nt, synthetic construct
  source 1..21: mol_type = other RNA
caggctgaccccgctccagta

SEQ ID NO: 82930 - RNA, 21 nt, synthetic construct
  source 1..21: mol_type = other RNA
ctgcgggttctctgctgcgaa

SEQ ID NO: 82931 - RNA, 21 nt, synthetic construct
  source 1..21: mol_type = other RNA
ccgacaggcacagccagcaca

SEQ ID NO: 82932 - RNA, 21 nt, synthetic construct
  source 1..21: mol_type = other RNA
tggcaacaccctcctctagca

SEQ ID NO: 82933 - RNA, 21 nt, synthetic construct
  source 1..21: mol_type = other RNA
agcactcgactccagccctta

SEQ ID NO: 82934 - RNA, 21 nt, synthetic construct
  source 1..21: mol_type = other RNA
tgaccatgggctgtgagccca

SEQ ID NO: 82935 - RNA, 21 nt, synthetic construct
  source 1..21: mol_type = other RNA
ccagtgtgcctggtcagagta

SEQ ID NO: 82936 - RNA, 21 nt, synthetic construct
  source 1..21: mol_type = other RNA
cgagtgccgtgcccaggccca

SEQ ID NO: 82937 - RNA, 21 nt, synthetic construct
  source 1..21: mol_type = other RNA
tggcaacaccctcctctagca

SEQ ID NO: 82938 - RNA, 21 nt, synthetic construct
  source 1..21: mol_type = other RNA
tgaccatgggctgtgagccca

SEQ ID NO: 82939 - RNA, 21 nt, synthetic construct
  source 1..21: mol_type = other RNA
ccagtgtgcctggtcagagta

SEQ ID NO: 82940 - RNA, 21 nt, synthetic construct
  source 1..21: mol_type = other RNA
cgagtgccgtgcccaggccca

SEQ ID NO: 82941 - RNA, 21 nt, synthetic construct
  source 1..21: mol_type = other RNA
tccagggacgacctggatcca

SEQ ID NO: 82942 - RNA, 21 nt, synthetic construct
  source 1..21: mol_type = other RNA
accccgggaacagctccccca

SEQ ID NO: 82943 - RNA, 21 nt, synthetic construct
  source 1..21: mol_type = other RNA
ccctcccagaacagaccacca

SEQ ID NO: 82944 - RNA, 21 nt, synthetic construct
  source 1..21: mol_type = other RNA
ctggcaccctcaaagtgctga

SEQ ID NO: 82945 - RNA, 21 nt, synthetic construct
  source 1..21: mol_type = other RNA
tggcaacaccctcctctagca

SEQ ID NO: 82946 - RNA, 21 nt, synthetic construct
  source 1..21: mol_type = other RNA
ccagtgtgcctggtcagagta

SEQ ID NO: 82947 - RNA, 21 nt, synthetic construct
  source 1..21: mol_type = other RNA
cgagtgccgtgcccaggccca

SEQ ID NO: 82948 - RNA, 21 nt, synthetic construct
  source 1..21: mol_type = other RNA
gacggcacgcacgcctccaga

SEQ ID NO: 82949 - RNA, 21 nt, synthetic construct
  source 1..21: mol_type = other RNA
tggcaacaccctcctctagca

SEQ ID NO: 82950 - RNA, 21 nt, synthetic construct
  source 1..21: mol_type = other RNA
ccagtgtgcctggtcagagta

SEQ ID NO: 82951 - RNA, 21 nt, synthetic construct
  source 1..21: mol_type = other RNA
cgagtgccgtgcccaggccca

SEQ ID NO: 82952 - RNA, 21 nt, synthetic construct
  source 1..21: mol_type = other RNA
accccgggaacagctccccca

SEQ ID NO: 82953 - RNA, 21 nt, synthetic construct
  source 1..21: mol_type = other RNA
ccctcccagaacagaccacca

SEQ ID NO: 82954 - RNA, 21 nt, synthetic construct
  source 1..21: mol_type = other RNA
ccgtggccaccatgtccacaa

SEQ ID NO: 82955 - RNA, 21 nt, synthetic construct
  source 1..21: mol_type = other RNA
ccgccagagtgctgaccacca

SEQ ID NO: 82956 - RNA, 21 nt, synthetic construct
  source 1..21: mol_type = other RNA
tggcaacaccctcctctagca

SEQ ID NO: 82957 - RNA, 21 nt, synthetic construct
  source 1..21: mol_type = other RNA
ccggggagcggtgggtcagca

SEQ ID NO: 82958 - RNA, 21 nt, synthetic construct
  source 1..21: mol_type = other RNA
gcctgtgtgcccgccagggca

SEQ ID NO: 82959 - RNA, 21 nt, synthetic construct
  source 1..21: mol_type = other RNA
ctttgagtacaagagagtgga

SEQ ID NO: 82960 - RNA, 21 nt, synthetic construct
  source 1..21: mol_type = other RNA
ccctcaacatgcagcaccaga

SEQ ID NO: 82961 - RNA, 21 nt, synthetic construct
  source 1..21: mol_type = other RNA
tcccccagatacacaagcaca

SEQ ID NO: 82962 - RNA, 21 nt, synthetic construct
  source 1..21: mol_type = other RNA
cctctccggcaggtgaatgaa

SEQ ID NO: 82963 - RNA, 21 nt, synthetic construct
  source 1..21: mol_type = other RNA
cttctcgcgctgccactccaa

SEQ ID NO: 82964 - RNA, 21 nt, synthetic construct
  source 1..21: mol_type = other RNA
ggtgaccacgggctgtgagca

SEQ ID NO: 82965 - RNA, 21 nt, synthetic construct
  source 1..21: mol_type = other RNA
ggtgaccacgggctgtgagca

SEQ ID NO: 82966 - RNA, 21 nt, synthetic construct
  source 1..21: mol_type = other RNA
gctgagggtggagtccattta

SEQ ID NO: 82967 - RNA, 21 nt, synthetic construct
  source 1..21: mol_type = other RNA
tgcccaccccgtgggtgaaaa

SEQ ID NO: 82968 - RNA, 21 nt, synthetic construct
  source 1..21: mol_type = other RNA
gccgcctgcgcccaggaccta

SEQ ID NO: 82969 - RNA, 21 nt, synthetic construct
  source 1..21: mol_type = other RNA
acagctttgaaggcagctgca

SEQ ID NO: 82970 - RNA, 21 nt, synthetic construct
  source 1..21: mol_type = other RNA
gacatcccccagatacacaaa

SEQ ID NO: 82971 - RNA, 21 nt, synthetic construct
  source 1..21: mol_type = other RNA
ctagggaccacccacacacca

SEQ ID NO: 82972 - RNA, 21 nt, synthetic construct
  source 1..21: mol_type = other RNA
agccccacatcggcccccata

SEQ ID NO: 82973 - RNA, 21 nt, synthetic construct
  source 1..21: mol_type = other RNA
gaccatgggctgtgagcccca

SEQ ID NO: 82974 - RNA, 21 nt, synthetic construct
  source 1..21: mol_type = other RNA
ctagggaccacccacacacca

SEQ ID NO: 82975 - RNA, 21 nt, synthetic construct
  source 1..21: mol_type = other RNA
gaccatgggctgtgagcccca

SEQ ID NO: 82976 - RNA, 21 nt, synthetic construct
  source 1..21: mol_type = other RNA
ctagggaccacccacacacca

SEQ ID NO: 82977 - RNA, 21 nt, synthetic construct
  source 1..21: mol_type = other RNA
agccccacatcggcccccata

SEQ ID NO: 82978 - RNA, 21 nt, synthetic construct
  source 1..21: mol_type = other RNA
ctagggaccacccacacacca

SEQ ID NO: 82979 - RNA, 21 nt, synthetic construct
  source 1..21: mol_type = other RNA
agccccacatcggcccccata

SEQ ID NO: 82980 - RNA, 21 nt, synthetic construct
  source 1..21: mol_type = other RNA
tgggccccgactggcacacca

SEQ ID NO: 82981 - RNA, 21 nt, synthetic construct
  source 1..21: mol_type = other RNA
ggtgtctagcacacccaccca

SEQ ID NO: 82982 - RNA, 21 nt, synthetic construct
  source 1..21: mol_type = other RNA
atgctcgtggtgccgcaggca

SEQ ID NO: 82983 - RNA, 21 nt, synthetic construct
  source 1..21: mol_type = other RNA
ggcgcacaatgggcgggtgta

SEQ ID NO: 82984 - RNA, 21 nt, synthetic construct
  source 1..21: mol_type = other RNA
ctggtgctgacattcctgtga

SEQ ID NO: 82985 - RNA, 21 nt, synthetic construct
  source 1..21: mol_type = other RNA
tggtgctgacattcctgtgga

SEQ ID NO: 82986 - RNA, 21 nt, synthetic construct
  source 1..21: mol_type = other RNA
tgctggatgacatcacgcaca

SEQ ID NO: 82987 - RNA, 21 nt, synthetic construct
  source 1..21: mol_type = other RNA
cgcacctacagcccgggcaca

SEQ ID NO: 82988 - RNA, 21 nt, synthetic construct
  source 1..21: mol_type = other RNA
ggctgacgacttcacggccca

SEQ ID NO: 82989 - RNA, 21 nt, synthetic construct
  source 1..21: mol_type = other RNA
agcgactggagggacggcgta

SEQ ID NO: 82990 - RNA, 21 nt, synthetic construct
  source 1..21: mol_type = other RNA
caccacccacgggaccttcca

SEQ ID NO: 82991 - RNA, 21 nt, synthetic construct
  source 1..21: mol_type = other RNA
gagctgatcctccaagaggga

SEQ ID NO: 82992 - RNA, 21 nt, synthetic construct
  source 1..21: mol_type = other RNA
tccggacacctgccccttgta

SEQ ID NO: 82993 - RNA, 21 nt, synthetic construct
  source 1..21: mol_type = other RNA
cgagctgcgggttctctgcta

SEQ ID NO: 82994 - RNA, 21 nt, synthetic construct
  source 1..21: mol_type = other RNA
cctatgggtgaccccgagcaa

SEQ ID NO: 82995 - RNA, 21 nt, synthetic construct
  source 1..21: mol_type = other RNA
cctctcagaaggactgacata

SEQ ID NO: 82996 - RNA, 21 nt, synthetic construct
  source 1..21: mol_type = other RNA
cccccagatacacaagcacca

SEQ ID NO: 82997 - RNA, 21 nt, synthetic construct
  source 1..21: mol_type = other RNA
gccacccacgctggccccaaa

SEQ ID NO: 82998 - RNA, 21 nt, synthetic construct
  source 1..21: mol_type = other RNA
cacccacgctggccccaacaa

SEQ ID NO: 82999 - RNA, 21 nt, synthetic construct
  source 1..21: mol_type = other RNA
tccaaagagccgctgaccaca

SEQ ID NO: 83000 - RNA, 21 nt, synthetic construct
  source 1..21: mol_type = other RNA
cgagcgagctgtccacctcta

SEQ ID NO: 83001 - RNA, 21 nt, synthetic construct
  source 1..21: mol_type = other RNA
ctgagaacagctccccctcca

SEQ ID NO: 83002 - RNA, 21 nt, synthetic construct
  source 1..21: mol_type = other RNA
cccagtgccgaacaccatgga

SEQ ID NO: 83003 - RNA, 21 nt, synthetic construct
  source 1..21: mol_type = other RNA
cacccacatcacagagcctta

SEQ ID NO: 83004 - RNA, 21 nt, synthetic construct
  source 1..21: mol_type = other RNA
acccacatcacagagccttca

SEQ ID NO: 83005 - RNA, 21 nt, synthetic construct
  source 1..21: mol_type = other RNA
catcacagagccttccacgga

SEQ ID NO: 83006 - RNA, 21 nt, synthetic construct
  source 1..21: mol_type = other RNA
agagccttccacggtgactta

SEQ ID NO: 83007 - RNA, 21 nt, synthetic construct
  source 1..21: mol_type = other RNA
gccctcaccctagcagcagaa

SEQ ID NO: 83008 - RNA, 21 nt, synthetic construct
  source 1..21: mol_type = other RNA
gccccacatcggcccccataa

SEQ ID NO: 83009 - RNA, 21 nt, synthetic construct
  source 1..21: mol_type = other RNA
gtctgcaggaaccgtgagcaa

SEQ ID NO: 83010 - RNA, 21 nt, synthetic construct
  source 1..21: mol_type = other RNA
ggccaccagctctacggccaa

SEQ ID NO: 83011 - RNA, 21 nt, synthetic construct
  source 1..21: mol_type = other RNA
gccactcccttctccagtcca

SEQ ID NO: 83012 - RNA, 21 nt, synthetic construct
  source 1..21: mol_type = other RNA
cacccacatcacagagcctta

SEQ ID NO: 83013 - RNA, 21 nt, synthetic construct
  source 1..21: mol_type = other RNA
acccacatcacagagccttca

SEQ ID NO: 83014 - RNA, 21 nt, synthetic construct
  source 1..21: mol_type = other RNA
catcacagagccttccacgga

SEQ ID NO: 83015 - RNA, 21 nt, synthetic construct
  source 1..21: mol_type = other RNA
gtctgcaggaaccgtgagcaa

SEQ ID NO: 83016 - RNA, 21 nt, synthetic construct
  source 1..21: mol_type = other RNA
ggccaccagctctacggccaa

SEQ ID NO: 83017 - RNA, 21 nt, synthetic construct
  source 1..21: mol_type = other RNA
atcctcacagagcagaccaca

SEQ ID NO: 83018 - RNA, 21 nt, synthetic construct
  source 1..21: mol_type = other RNA
ggccatcccgtcctccaccca

SEQ ID NO: 83019 - RNA, 21 nt, synthetic construct
  source 1..21: mol_type = other RNA
tcccagaacagaccaccacaa

SEQ ID NO: 83020 - RNA, 21 nt, synthetic construct
  source 1..21: mol_type = other RNA
cacccatggccaccatgtcca

SEQ ID NO: 83021 - RNA, 21 nt, synthetic construct
  source 1..21: mol_type = other RNA
cacccacatcacagagcctta

SEQ ID NO: 83022 - RNA, 21 nt, synthetic construct
  source 1..21: mol_type = other RNA
acccacatcacagagccttca

SEQ ID NO: 83023 - RNA, 21 nt, synthetic construct
  source 1..21: mol_type = other RNA
catcacagagccttccacgga

SEQ ID NO: 83024 - RNA, 21 nt, synthetic construct
  source 1..21: mol_type = other RNA
agagccttccacggtgactta

SEQ ID NO: 83025 - RNA, 21 nt, synthetic construct
  source 1..21: mol_type = other RNA
gccccacatcggcccccataa

SEQ ID NO: 83026 - RNA, 21 nt, synthetic construct
  source 1..21: mol_type = other RNA
gtctgcaggaaccgtgagcaa

SEQ ID NO: 83027 - RNA, 21 nt, synthetic construct
  source 1..21: mol_type = other RNA
ggccaccagctctacggccaa

SEQ ID NO: 83028 - RNA, 21 nt, synthetic construct
  source 1..21: mol_type = other RNA
gccactcccttctccagtcca

SEQ ID NO: 83029 - RNA, 21 nt, synthetic construct
  source 1..21: mol_type = other RNA
catcactgatcaccacggcca

SEQ ID NO: 83030 - RNA, 21 nt, synthetic construct
  source 1..21: mol_type = other RNA
cacccacatcacagagcctta

SEQ ID NO: 83031 - RNA, 21 nt, synthetic construct
  source 1..21: mol_type = other RNA
acccacatcacagagccttca

SEQ ID NO: 83032 - RNA, 21 nt, synthetic construct
  source 1..21: mol_type = other RNA
catcacagagccttccacgga

SEQ ID NO: 83033 - RNA, 21 nt, synthetic construct
  source 1..21: mol_type = other RNA
gccccacatcggcccccataa

SEQ ID NO: 83034 - RNA, 21 nt, synthetic construct
  source 1..21: mol_type = other RNA
gtctgcaggaaccgtgagcaa

SEQ ID NO: 83035 - RNA, 21 nt, synthetic construct
  source 1..21: mol_type = other RNA
ggccaccagctctacggccaa

SEQ ID NO: 83036 - RNA, 21 nt, synthetic construct
  source 1..21: mol_type = other RNA
tcccagaacagaccaccacaa

SEQ ID NO: 83037 - RNA, 21 nt, synthetic construct
  source 1..21: mol_type = other RNA
tccaccctgtggaccacgtga

SEQ ID NO: 83038 - RNA, 21 nt, synthetic construct
  source 1..21: mol_type = other RNA
cacagtgctgaccaccacaga

SEQ ID NO: 83039 - RNA, 21 nt, synthetic construct
  source 1..21: mol_type = other RNA
actggatccacggccacccta

SEQ ID NO: 83040 - RNA, 21 nt, synthetic construct
  source 1..21: mol_type = other RNA
gtcctcaccaccctgagacca

SEQ ID NO: 83041 - RNA, 21 nt, synthetic construct
  source 1..21: mol_type = other RNA
cgctttgggaatctcagccta

SEQ ID NO: 83042 - RNA, 21 nt, synthetic construct
  source 1..21: mol_type = other RNA
ccaaagtgtacaagccatgca

SEQ ID NO: 83043 - RNA, 21 nt, synthetic construct
  source 1..21: mol_type = other RNA
accttccgctgcagacctcaa

SEQ ID NO: 83044 - RNA, 21 nt, synthetic construct
  source 1..21: mol_type = other RNA
tgtgtacctgcctctctggga

SEQ ID NO: 83045 - RNA, 21 nt, synthetic construct
  source 1..21: mol_type = other RNA
gctttgagtacaagagagtga

SEQ ID NO: 83046 - RNA, 21 nt, synthetic construct
  source 1..21: mol_type = other RNA
aggaggactcctgtcaagtca

SEQ ID NO: 83047 - RNA, 21 nt, synthetic construct
  source 1..21: mol_type = other RNA
gaccatcctgtggcaccagga

SEQ ID NO: 83048 - RNA, 21 nt, synthetic construct
  source 1..21: mol_type = other RNA
cgaggagacggtgcccttgca

SEQ ID NO: 83049 - RNA, 21 nt, synthetic construct
  source 1..21: mol_type = other RNA
tgcgcccatggctcccccaca

SEQ ID NO: 83050 - RNA, 21 nt, synthetic construct
  source 1..21: mol_type = other RNA
ggagcgcccgcgcagcacgga

SEQ ID NO: 83051 - RNA, 21 nt, synthetic construct
  source 1..21: mol_type = other RNA
gccaggaagctgcgacaggca

SEQ ID NO: 83052 - RNA, 21 nt, synthetic construct
  source 1..21: mol_type = other RNA
cagatacacaagcacccttga

SEQ ID NO: 83053 - RNA, 21 nt, synthetic construct
  source 1..21: mol_type = other RNA
ggcgtacagctcagcgactga

SEQ ID NO: 83054 - RNA, 21 nt, synthetic construct
  source 1..21: mol_type = other RNA
ccgacgtcctcgcccacccga

SEQ ID NO: 83055 - RNA, 21 nt, synthetic construct
  source 1..21: mol_type = other RNA
ccacaaccagaggttccacga

SEQ ID NO: 83056 - RNA, 21 nt, synthetic construct
  source 1..21: mol_type = other RNA
acaacacctatccccccagta

SEQ ID NO: 83057 - RNA, 21 nt, synthetic construct
  source 1..21: mol_type = other RNA
acaacacctatccccccagta

SEQ ID NO: 83058 - RNA, 21 nt, synthetic construct
  source 1..21: mol_type = other RNA
gcgacctcacctgcccaccca

SEQ ID NO: 83059 - RNA, 21 nt, synthetic construct
  source 1..21: mol_type = other RNA
cttccgctgcagacctcagca

SEQ ID NO: 83060 - RNA, 21 nt, synthetic construct
  source 1..21: mol_type = other RNA
acttctacaacccacatggga

SEQ ID NO: 83061 - RNA, 21 nt, synthetic construct
  source 1..21: mol_type = other RNA
ggtctgcaggaaccgtgagca

SEQ ID NO: 83062 - RNA, 21 nt, synthetic construct
  source 1..21: mol_type = other RNA
ggtctgcaggaaccgtgagca

SEQ ID NO: 83063 - RNA, 21 nt, synthetic construct
  source 1..21: mol_type = other RNA
ggtctgcaggaaccgtgagca

SEQ ID NO: 83064 - RNA, 21 nt, synthetic construct
  source 1..21: mol_type = other RNA
ggtctgcaggaaccgtgagca

SEQ ID NO: 83065 - RNA, 21 nt, synthetic construct
  source 1..21: mol_type = other RNA
cagggcatttggacagtttta

SEQ ID NO: 83066 - RNA, 21 nt, synthetic construct
  source 1..21: mol_type = other RNA
ggagaatgcagggcacaccaa

SEQ ID NO: 83067 - RNA, 21 nt, synthetic construct
  source 1..21: mol_type = other RNA
taccaggtatgccctgtgcta

SEQ ID NO: 83068 - RNA, 21 nt, synthetic construct
  source 1..21: mol_type = other RNA
ctccagagactgcccacacca

SEQ ID NO: 83069 - RNA, 21 nt, synthetic construct
  source 1..21: mol_type = other RNA
ttccagccctcaccctagcaa

SEQ ID NO: 83070 - RNA, 21 nt, synthetic construct
  source 1..21: mol_type = other RNA
gtccagccctcaccctagcaa

SEQ ID NO: 83071 - RNA, 21 nt, synthetic construct
  source 1..21: mol_type = other RNA
tcacagagcccagcactacaa

SEQ ID NO: 83072 - RNA, 21 nt, synthetic construct
  source 1..21: mol_type = other RNA
cctcctccacccgggcaacta

SEQ ID NO: 83073 - RNA, 21 nt, synthetic construct
  source 1..21: mol_type = other RNA
gtccagccctcaccctagcaa

SEQ ID NO: 83074 - RNA, 21 nt, synthetic construct
  source 1..21: mol_type = other RNA
ctccagagactgcccacacca

SEQ ID NO: 83075 - RNA, 21 nt, synthetic construct
  source 1..21: mol_type = other RNA
gtccagccctcaccctagcaa

SEQ ID NO: 83076 - RNA, 21 nt, synthetic construct
  source 1..21: mol_type = other RNA
caactccagggacaacaccca

SEQ ID NO: 83077 - RNA, 21 nt, synthetic construct
  source 1..21: mol_type = other RNA
tgttggctctggcggccatga

SEQ ID NO: 83078 - RNA, 21 nt, synthetic construct
  source 1..21: mol_type = other RNA
cttctacaacccacatgggga

SEQ ID NO: 83079 - RNA, 21 nt, synthetic construct
  source 1..21: mol_type = other RNA
gcgggcctatgtgtccctgca

SEQ ID NO: 83080 - RNA, 21 nt, synthetic construct
  source 1..21: mol_type = other RNA
ccatcccctccttcaccctta

SEQ ID NO: 83081 - RNA, 21 nt, synthetic construct
  source 1..21: mol_type = other RNA
ccaacaacaatggcaacctca

SEQ ID NO: 83082 - RNA, 21 nt, synthetic construct
  source 1..21: mol_type = other RNA
agaactgcctgaaagcggtga

SEQ ID NO: 83083 - RNA, 21 nt, synthetic construct
  source 1..21: mol_type = other RNA
caacaacaatggcaacctcca

SEQ ID NO: 83084 - RNA, 21 nt, synthetic construct
  source 1..21: mol_type = other RNA
ccatgtccacaatccacccca

SEQ ID NO: 83085 - RNA, 21 nt, synthetic construct
  source 1..21: mol_type = other RNA
ccatgtccacaatccacccca

SEQ ID NO: 83086 - RNA, 21 nt, synthetic construct
  source 1..21: mol_type = other RNA
ccacgtccggccgctggggca

SEQ ID NO: 83087 - RNA, 21 nt, synthetic construct
  source 1..21: mol_type = other RNA
aacaacaatggcaacctccaa

SEQ ID NO: 83088 - RNA, 21 nt, synthetic construct
  source 1..21: mol_type = other RNA
cgcgtgtgcctgcgactcgga

SEQ ID NO: 83089 - RNA, 21 nt, synthetic construct
  source 1..21: mol_type = other RNA
cctcacctgcccacccaccaa

SEQ ID NO: 83090 - RNA, 21 nt, synthetic construct
  source 1..21: mol_type = other RNA
ctgccacctgcaactctagga

SEQ ID NO: 83091 - RNA, 21 nt, synthetic construct
  source 1..21: mol_type = other RNA
acccccaaagtggtgaccaca

SEQ ID NO: 83092 - RNA, 21 nt, synthetic construct
  source 1..21: mol_type = other RNA
gcagacctcagctgtgttcga

SEQ ID NO: 83093 - RNA, 21 nt, synthetic construct
  source 1..21: mol_type = other RNA
ctcagcgactggagggacgga

SEQ ID NO: 83094 - RNA, 21 nt, synthetic construct
  source 1..21: mol_type = other RNA
acaaagctgaccacaacagca

SEQ ID NO: 83095 - RNA, 21 nt, synthetic construct
  source 1..21: mol_type = other RNA
cagcccgggcacctccttcaa

SEQ ID NO: 83096 - RNA, 21 nt, synthetic construct
  source 1..21: mol_type = other RNA
aaccccgccaccgaccacaga

SEQ ID NO: 83097 - RNA, 21 nt, synthetic construct
  source 1..21: mol_type = other RNA
tcccaaagtgctgaccaccaa

SEQ ID NO: 83098 - RNA, 21 nt, synthetic construct
  source 1..21: mol_type = other RNA
actgagaagcacagccaccaa

SEQ ID NO: 83099 - RNA, 21 nt, synthetic construct
  source 1..21: mol_type = other RNA
ccatgccggggccctctggca

SEQ ID NO: 83100 - RNA, 21 nt, synthetic construct
  source 1..21: mol_type = other RNA
actgagaagcacagccaccaa

SEQ ID NO: 83101 - RNA, 21 nt, synthetic construct
  source 1..21: mol_type = other RNA
ggacttcccacaccccagcaa

SEQ ID NO: 83102 - RNA, 21 nt, synthetic construct
  source 1..21: mol_type = other RNA
ccatgccggggccctctggca

SEQ ID NO: 83103 - RNA, 21 nt, synthetic construct
  source 1..21: mol_type = other RNA
actgagaagcacagccaccaa

SEQ ID NO: 83104 - RNA, 21 nt, synthetic construct
  source 1..21: mol_type = other RNA
cacaccctcctctactccaga

SEQ ID NO: 83105 - RNA, 21 nt, synthetic construct
  source 1..21: mol_type = other RNA
tgacttcccacaccccagcaa

SEQ ID NO: 83106 - RNA, 21 nt, synthetic construct
  source 1..21: mol_type = other RNA
ccatgccggggccctctggca

SEQ ID NO: 83107 - RNA, 21 nt, synthetic construct
  source 1..21: mol_type = other RNA
actgagaagcacagccaccaa

SEQ ID NO: 83108 - RNA, 21 nt, synthetic construct
  source 1..21: mol_type = other RNA
ggacttcccacaccccagcaa

SEQ ID NO: 83109 - RNA, 21 nt, synthetic construct
  source 1..21: mol_type = other RNA
ccatgccggggccctctggca

SEQ ID NO: 83110 - RNA, 21 nt, synthetic construct
  source 1..21: mol_type = other RNA
actgagaagcacagccaccaa

SEQ ID NO: 83111 - RNA, 21 nt, synthetic construct
  source 1..21: mol_type = other RNA
atggtgcatgggaaggaggaa

SEQ ID NO: 83112 - RNA, 21 nt, synthetic construct
  source 1..21: mol_type = other RNA
tgtctgtgctggggaccacca

SEQ ID NO: 83113 - RNA, 21 nt, synthetic construct
  source 1..21: mol_type = other RNA
tgtgtgcccgccagggcagga

SEQ ID NO: 83114 - RNA, 21 nt, synthetic construct
  source 1..21: mol_type = other RNA
ggcaccagggctgcgagacca

SEQ ID NO: 83115 - RNA, 21 nt, synthetic construct
  source 1..21: mol_type = other RNA
ccagttttgcaaataaaccca

SEQ ID NO: 83116 - RNA, 21 nt, synthetic construct
  source 1..21: mol_type = other RNA
aggtggactgtgaccgcatga

SEQ ID NO: 83117 - RNA, 21 nt, synthetic construct
  source 1..21: mol_type = other RNA
cgtgcggccggaggggcagta

SEQ ID NO: 83118 - RNA, 21 nt, synthetic construct
  source 1..21: mol_type = other RNA
gtcgtcctgctggacccaaaa

SEQ ID NO: 83119 - RNA, 21 nt, synthetic construct
  source 1..21: mol_type = other RNA
actatgcccacagccactgca

SEQ ID NO: 83120 - RNA, 21 nt, synthetic construct
  source 1..21: mol_type = other RNA
cacgtggatgagtgtggctga

SEQ ID NO: 83121 - RNA, 21 nt, synthetic construct
  source 1..21: mol_type = other RNA
atcctcactgagctgaccaca

SEQ ID NO: 83122 - RNA, 21 nt, synthetic construct
  source 1..21: mol_type = other RNA
gatcctcactgagctgaccaa

SEQ ID NO: 83123 - RNA, 21 nt, synthetic construct
  source 1..21: mol_type = other RNA
ctcggcgggcacccctgggga

SEQ ID NO: 83124 - RNA, 21 nt, synthetic construct
  source 1..21: mol_type = other RNA
caactccagggacaactccca

SEQ ID NO: 83125 - RNA, 21 nt, synthetic construct
  source 1..21: mol_type = other RNA
cgtggccaccatgtccacaaa

SEQ ID NO: 83126 - RNA, 21 nt, synthetic construct
  source 1..21: mol_type = other RNA
ggccttgcccctccctgatga

SEQ ID NO: 83127 - RNA, 21 nt, synthetic construct
  source 1..21: mol_type = other RNA
acgccaggctgaccccgctca

SEQ ID NO: 83128 - RNA, 21 nt, synthetic construct
  source 1..21: mol_type = other RNA
ctgtaactgcacacccagtga

SEQ ID NO: 83129 - RNA, 21 nt, synthetic construct
  source 1..21: mol_type = other RNA
gtttgaaaacctgaggcagaa

SEQ ID NO: 83130 - RNA, 21 nt, synthetic construct
  source 1..21: mol_type = other RNA
aacaccatggccaccacacaa

SEQ ID NO: 83131 - RNA, 21 nt, synthetic construct
  source 1..21: mol_type = other RNA
gctgagccaggtctttgctga

SEQ ID NO: 83132 - RNA, 21 nt, synthetic construct
  source 1..21: mol_type = other RNA
tcggcgggcacccctggggca

SEQ ID NO: 83133 - RNA, 21 nt, synthetic construct
  source 1..21: mol_type = other RNA
cccgatggccagccagtccaa

SEQ ID NO: 83134 - RNA, 21 nt, synthetic construct
  source 1..21: mol_type = other RNA
aggaaccgtgagcaggtggga

SEQ ID NO: 83135 - RNA, 21 nt, synthetic construct
  source 1..21: mol_type = other RNA
ccaccacaaccggggccacca

SEQ ID NO: 83136 - RNA, 21 nt, synthetic construct
  source 1..21: mol_type = other RNA
aggaaccgtgagcaggtggga

SEQ ID NO: 83137 - RNA, 21 nt, synthetic construct
  source 1..21: mol_type = other RNA
aggaaccgtgagcaggtggga

SEQ ID NO: 83138 - RNA, 21 nt, synthetic construct
  source 1..21: mol_type = other RNA
aggaaccgtgagcaggtggga

SEQ ID NO: 83139 - RNA, 21 nt, synthetic construct
  source 1..21: mol_type = other RNA
ccaccacaaccggggccacca

SEQ ID NO: 83140 - RNA, 21 nt, synthetic construct
  source 1..21: mol_type = other RNA
cagctctgcgaggaccactga

SEQ ID NO: 83141 - RNA, 21 nt, synthetic construct
  source 1..21: mol_type = other RNA
tgccctagggaccacccacaa

SEQ ID NO: 83142 - RNA, 21 nt, synthetic construct
  source 1..21: mol_type = other RNA
tgccctagggaccacccacaa

SEQ ID NO: 83143 - RNA, 21 nt, synthetic construct
  source 1..21: mol_type = other RNA
tgccctagggaccacccacaa

SEQ ID NO: 83144 - RNA, 21 nt, synthetic construct
  source 1..21: mol_type = other RNA
tgccctagggaccacccacaa

SEQ ID NO: 83145 - RNA, 21 nt, synthetic construct
  source 1..21: mol_type = other RNA
cggccgcctgtccatgcctga

SEQ ID NO: 83146 - RNA, 21 nt, synthetic construct
  source 1..21: mol_type = other RNA
tgccgcaggcagagacccaga

SEQ ID NO: 83147 - RNA, 21 nt, synthetic construct
  source 1..21: mol_type = other RNA
ggctgaccagggctcccccga

SEQ ID NO: 83148 - RNA, 21 nt, synthetic construct
  source 1..21: mol_type = other RNA
caactggggccaccggctcta

SEQ ID NO: 83149 - RNA, 21 nt, synthetic construct
  source 1..21: mol_type = other RNA
gcaacacagtgactccctcca

SEQ ID NO: 83150 - RNA, 21 nt, synthetic construct
  source 1..21: mol_type = other RNA
agcagaaccaccgagtcacca

SEQ ID NO: 83151 - RNA, 21 nt, synthetic construct
  source 1..21: mol_type = other RNA
tcctctactccagagactgta

SEQ ID NO: 83152 - RNA, 21 nt, synthetic construct
  source 1..21: mol_type = other RNA
ctctactccagagaccaccca

SEQ ID NO: 83153 - RNA, 21 nt, synthetic construct
  source 1..21: mol_type = other RNA
cagtcctcaccaccctgagaa

SEQ ID NO: 83154 - RNA, 21 nt, synthetic construct
  source 1..21: mol_type = other RNA
tgtggcctgtgtggggactta

SEQ ID NO: 83155 - RNA, 21 nt, synthetic construct
  source 1..21: mol_type = other RNA
aggagggcatctgccaccgca

SEQ ID NO: 83156 - RNA, 21 nt, synthetic construct
  source 1..21: mol_type = other RNA
ggaccactgtgtggacggcta

SEQ ID NO: 83157 - RNA, 21 nt, synthetic construct
  source 1..21: mol_type = other RNA
gtgcagctggtgccactcata

SEQ ID NO: 83158 - RNA, 21 nt, synthetic construct
  source 1..21: mol_type = other RNA
ccaggctgacgacttcacgga

SEQ ID NO: 83159 - RNA, 21 nt, synthetic construct
  source 1..21: mol_type = other RNA
cttatgccagcagcctaagga

SEQ ID NO: 83160 - RNA, 21 nt, synthetic construct
  source 1..21: mol_type = other RNA
ccccagatacacaagcaccca

SEQ ID NO: 83161 - RNA, 21 nt, synthetic construct
  source 1..21: mol_type = other RNA
aggggtggccacatccaccca

SEQ ID NO: 83162 - RNA, 21 nt, synthetic construct
  source 1..21: mol_type = other RNA
catccacccttccaacacgca

SEQ ID NO: 83163 - RNA, 21 nt, synthetic construct
  source 1..21: mol_type = other RNA
ttaccgccacggccaccacaa

SEQ ID NO: 83164 - RNA, 21 nt, synthetic construct
  source 1..21: mol_type = other RNA
cctcaactcctgggacaacta

SEQ ID NO: 83165 - RNA, 21 nt, synthetic construct
  source 1..21: mol_type = other RNA
actacagccaccgtgacggta

SEQ ID NO: 83166 - RNA, 21 nt, synthetic construct
  source 1..21: mol_type = other RNA
agtccaaggactgcaaccaca

SEQ ID NO: 83167 - RNA, 21 nt, synthetic construct
  source 1..21: mol_type = other RNA
catcccctccttcacccttga

SEQ ID NO: 83168 - RNA, 21 nt, synthetic construct
  source 1..21: mol_type = other RNA
cccagaacagaccaccacaca

SEQ ID NO: 83169 - RNA, 21 nt, synthetic construct
  source 1..21: mol_type = other RNA
actacagccaccgtgacggta

SEQ ID NO: 83170 - RNA, 21 nt, synthetic construct
  source 1..21: mol_type = other RNA
actacagccaccgtgacggta

SEQ ID NO: 83171 - RNA, 21 nt, synthetic construct
  source 1..21: mol_type = other RNA
agtccaaggactgcaaccaca

SEQ ID NO: 83172 - RNA, 21 nt, synthetic construct
  source 1..21: mol_type = other RNA
cccagaacagaccaccacaca

SEQ ID NO: 83173 - RNA, 21 nt, synthetic construct
  source 1..21: mol_type = other RNA
actacagccaccgtgacggta

SEQ ID NO: 83174 - RNA, 21 nt, synthetic construct
  source 1..21: mol_type = other RNA
ttaccgccacggccaccacaa

SEQ ID NO: 83175 - RNA, 21 nt, synthetic construct
  source 1..21: mol_type = other RNA
agtccaaggactgcaaccaca

SEQ ID NO: 83176 - RNA, 21 nt, synthetic construct
  source 1..21: mol_type = other RNA
cacagccgctctgtgatctga

SEQ ID NO: 83177 - RNA, 21 nt, synthetic construct
  source 1..21: mol_type = other RNA
ccgggccgagaacccctgcta

SEQ ID NO: 83178 - RNA, 21 nt, synthetic construct
  source 1..21: mol_type = other RNA
cacggggacttcccacaccca

SEQ ID NO: 83179 - RNA, 21 nt, synthetic construct
  source 1..21: mol_type = other RNA
tgccgactaccacaaccacga

SEQ ID NO: 83180 - RNA, 21 nt, synthetic construct
  source 1..21: mol_type = other RNA
tgccgactaccacaaccacga

SEQ ID NO: 83181 - RNA, 21 nt, synthetic construct
  source 1..21: mol_type = other RNA
cagtggctccacggtgaccca

SEQ ID NO: 83182 - RNA, 21 nt, synthetic construct
  source 1..21: mol_type = other RNA
cacggggacttcccacaccca

SEQ ID NO: 83183 - RNA, 21 nt, synthetic construct
  source 1..21: mol_type = other RNA
tgccgactaccacaaccacga

SEQ ID NO: 83184 - RNA, 21 nt, synthetic construct
  source 1..21: mol_type = other RNA
cagtggctccacggtgaccca

SEQ ID NO: 83185 - RNA, 21 nt, synthetic construct
  source 1..21: mol_type = other RNA
tcaacatcaccttctgcgaga

SEQ ID NO: 83186 - RNA, 21 nt, synthetic construct
  source 1..21: mol_type = other RNA
tgaccgcatgcgggggctgaa

SEQ ID NO: 83187 - RNA, 21 nt, synthetic construct
  source 1..21: mol_type = other RNA
cgacgtcctcgcccacccgga

SEQ ID NO: 83188 - RNA, 21 nt, synthetic construct
  source 1..21: mol_type = other RNA
gaaactctacgacctgcatga

SEQ ID NO: 83189 - RNA, 21 nt, synthetic construct
  source 1..21: mol_type = other RNA
gactttgagacgtttgaaaaa

SEQ ID NO: 83190 - RNA, 21 nt, synthetic construct
  source 1..21: mol_type = other RNA
ccagaacagaccaccacacca

SEQ ID NO: 83191 - RNA, 21 nt, synthetic construct
  source 1..21: mol_type = other RNA
gtgtccccctgggggagttga

SEQ ID NO: 83192 - RNA, 21 nt, synthetic construct
  source 1..21: mol_type = other RNA
ccagaacagaccaccacacca

SEQ ID NO: 83193 - RNA, 21 nt, synthetic construct
  source 1..21: mol_type = other RNA
atagccaccgtgatggtgcca

SEQ ID NO: 83194 - RNA, 21 nt, synthetic construct
  source 1..21: mol_type = other RNA
tcgtccaccgtggggaccaca

SEQ ID NO: 83195 - RNA, 21 nt, synthetic construct
  source 1..21: mol_type = other RNA
cacctgcaactctaggaacca

SEQ ID NO: 83196 - RNA, 21 nt, synthetic construct
  source 1..21: mol_type = other RNA
agacggtgcccttgcactgta

SEQ ID NO: 83197 - RNA, 21 nt, synthetic construct
  source 1..21: mol_type = other RNA
tgccccgagcgcgtgccggaa

SEQ ID NO: 83198 - RNA, 21 nt, synthetic construct
  source 1..21: mol_type = other RNA
tgagccccctgaacccggcga

SEQ ID NO: 83199 - RNA, 21 nt, synthetic construct
  source 1..21: mol_type = other RNA
aggaccactgtgtggacggca

SEQ ID NO: 83200 - RNA, 21 nt, synthetic construct
  source 1..21: mol_type = other RNA
gccgcacctacagcccgggca

SEQ ID NO: 83201 - RNA, 21 nt, synthetic construct
  source 1..21: mol_type = other RNA
ctgctctgtgcagggcgggga

SEQ ID NO: 83202 - RNA, 21 nt, synthetic construct
  source 1..21: mol_type = other RNA
agaaactctacgacctgcata

SEQ ID NO: 83203 - RNA, 21 nt, synthetic construct
  source 1..21: mol_type = other RNA
agctgcgagtacatcttggca

SEQ ID NO: 83204 - RNA, 21 nt, synthetic construct
  source 1..21: mol_type = other RNA
gaaggctgctacccgaagtga

SEQ ID NO: 83205 - RNA, 21 nt, synthetic construct
  source 1..21: mol_type = other RNA
acagctaccaggacgtcatca

SEQ ID NO: 83206 - RNA, 21 nt, synthetic construct
  source 1..21: mol_type = other RNA
tcaggccgagaccagcacgca

SEQ ID NO: 83207 - RNA, 21 nt, synthetic construct
  source 1..21: mol_type = other RNA
accagccagggcacgacccga

SEQ ID NO: 83208 - RNA, 21 nt, synthetic construct
  source 1..21: mol_type = other RNA
tccactggatccacggccaca

SEQ ID NO: 83209 - RNA, 21 nt, synthetic construct
  source 1..21: mol_type = other RNA
cacacagaccagtggtactca

SEQ ID NO: 83210 - RNA, 21 nt, synthetic construct
  source 1..21: mol_type = other RNA
tcaactcctgggacaactcca

SEQ ID NO: 83211 - RNA, 21 nt, synthetic construct
  source 1..21: mol_type = other RNA
tccactggatccacggccaca

SEQ ID NO: 83212 - RNA, 21 nt, synthetic construct
  source 1..21: mol_type = other RNA
cacacagaccagtggtactca

SEQ ID NO: 83213 - RNA, 21 nt, synthetic construct
  source 1..21: mol_type = other RNA
caacacctatccccccagtga

SEQ ID NO: 83214 - RNA, 21 nt, synthetic construct
  source 1..21: mol_type = other RNA
cacacagaccagtggtactca

SEQ ID NO: 83215 - RNA, 21 nt, synthetic construct
  source 1..21: mol_type = other RNA
tccactggatccacggccaca

SEQ ID NO: 83216 - RNA, 21 nt, synthetic construct
  source 1..21: mol_type = other RNA
cacacagaccagtggtactca

SEQ ID NO: 83217 - RNA, 21 nt, synthetic construct
  source 1..21: mol_type = other RNA
caacacctatccccccagtga

SEQ ID NO: 83218 - RNA, 21 nt, synthetic construct
  source 1..21: mol_type = other RNA
tccactggatccacggccaca

SEQ ID NO: 83219 - RNA, 21 nt, synthetic construct
  source 1..21: mol_type = other RNA
tccactggatccacggccaca

SEQ ID NO: 83220 - RNA, 21 nt, synthetic construct
  source 1..21: mol_type = other RNA
ccagtccagggactgcaacta

SEQ ID NO: 83221 - RNA, 21 nt, synthetic construct
  source 1..21: mol_type = other RNA
cacacagaccagtggtactca

SEQ ID NO: 83222 - RNA, 21 nt, synthetic construct
  source 1..21: mol_type = other RNA
acggccaccacacccgcagca

SEQ ID NO: 83223 - RNA, 21 nt, synthetic construct
  source 1..21: mol_type = other RNA
caacagccactacaactgcaa

SEQ ID NO: 83224 - RNA, 21 nt, synthetic construct
  source 1..21: mol_type = other RNA
gccactggatccacggccaca

SEQ ID NO: 83225 - RNA, 21 nt, synthetic construct
  source 1..21: mol_type = other RNA
cctcagtcctcaccaccctga

SEQ ID NO: 83226 - RNA, 21 nt, synthetic construct
  source 1..21: mol_type = other RNA
cgtcctgctggacccaaagca

SEQ ID NO: 83227 - RNA, 21 nt, synthetic construct
  source 1..21: mol_type = other RNA
cattcctgccctgggcgtgaa

SEQ ID NO: 83228 - RNA, 21 nt, synthetic construct
  source 1..21: mol_type = other RNA
caccttcaatggccaagtcta

SEQ ID NO: 83229 - RNA, 21 nt, synthetic construct
  source 1..21: mol_type = other RNA
tgagccaggtctttgctgaga

SEQ ID NO: 83230 - RNA, 21 nt, synthetic construct
  source 1..21: mol_type = other RNA
aacgcacacatgggcatctga

SEQ ID NO: 83231 - RNA, 21 nt, synthetic construct
  source 1..21: mol_type = other RNA
gcgtccagaccgcctgcctca

SEQ ID NO: 83232 - RNA, 21 nt, synthetic construct
  source 1..21: mol_type = other RNA
cgtccagaccgcctgcctcaa

SEQ ID NO: 83233 - RNA, 21 nt, synthetic construct
  source 1..21: mol_type = other RNA
cgaccatcctgtggcaccaga

SEQ ID NO: 83234 - RNA, 21 nt, synthetic construct
  source 1..21: mol_type = other RNA
gaggcgggtccacgaggagaa

SEQ ID NO: 83235 - RNA, 21 nt, synthetic construct
  source 1..21: mol_type = other RNA
cccacgtggatgagtgtggca

SEQ ID NO: 83236 - RNA, 21 nt, synthetic construct
  source 1..21: mol_type = other RNA
ctggagccaggatgtgcatta

SEQ ID NO: 83237 - RNA, 21 nt, synthetic construct
  source 1..21: mol_type = other RNA
ccccggcctgtgtgtggcaca

SEQ ID NO: 83238 - RNA, 21 nt, synthetic construct
  source 1..21: mol_type = other RNA
catgcgggggctgatgtgcga

SEQ ID NO: 83239 - RNA, 21 nt, synthetic construct
  source 1..21: mol_type = other RNA
agactgtccacacctccacaa

SEQ ID NO: 83240 - RNA, 21 nt, synthetic construct
  source 1..21: mol_type = other RNA
gcccagcactacagccaccga

SEQ ID NO: 83241 - RNA, 21 nt, synthetic construct
  source 1..21: mol_type = other RNA
agactgtccacacctccacaa

SEQ ID NO: 83242 - RNA, 21 nt, synthetic construct
  source 1..21: mol_type = other RNA
caccccagcagcaaccaccaa

SEQ ID NO: 83243 - RNA, 21 nt, synthetic construct
  source 1..21: mol_type = other RNA
agactgtccacacctccacaa

SEQ ID NO: 83244 - RNA, 21 nt, synthetic construct
  source 1..21: mol_type = other RNA
actccagagaccacccacaca

SEQ ID NO: 83245 - RNA, 21 nt, synthetic construct
  source 1..21: mol_type = other RNA
cctgcgtgtgtgacgagggta

SEQ ID NO: 83246 - RNA, 21 nt, synthetic construct
  source 1..21: mol_type = other RNA
ctgctgtgcctaccccaacca

SEQ ID NO: 83247 - RNA, 21 nt, synthetic construct
  source 1..21: mol_type = other RNA
agagtggccgggcagtgctga

SEQ ID NO: 83248 - RNA, 21 nt, synthetic construct
  source 1..21: mol_type = other RNA
cctgctgcagggtaactcaga

SEQ ID NO: 83249 - RNA, 21 nt, synthetic construct
  source 1..21: mol_type = other RNA
cggaactggaggtgccctgaa

SEQ ID NO: 83250 - RNA, 21 nt, synthetic construct
  source 1..21: mol_type = other RNA
gggtggcgactgcgagtgtta

SEQ ID NO: 83251 - RNA, 21 nt, synthetic construct
  source 1..21: mol_type = other RNA
gcgcccctcacagccacccaa

SEQ ID NO: 83252 - RNA, 21 nt, synthetic construct
  source 1..21: mol_type = other RNA
caccccgggaacagctcccca

SEQ ID NO: 83253 - RNA, 21 nt, synthetic construct
  source 1..21: mol_type = other RNA
caccccgggaacagctcccca

SEQ ID NO: 83254 - RNA, 21 nt, synthetic construct
  source 1..21: mol_type = other RNA
atgtcaggaggatgcctgcaa

SEQ ID NO: 83255 - RNA, 21 nt, synthetic construct
  source 1..21: mol_type = other RNA
acggccaccatgtccacagca

SEQ ID NO: 83256 - RNA, 21 nt, synthetic construct
  source 1..21: mol_type = other RNA
acggccaccatgtccacagca

SEQ ID NO: 83257 - RNA, 21 nt, synthetic construct
  source 1..21: mol_type = other RNA
acggccaccatgtccacagca

SEQ ID NO: 83258 - RNA, 21 nt, synthetic construct
  source 1..21: mol_type = other RNA
acggccaccatgtccacagca

SEQ ID NO: 83259 - RNA, 21 nt, synthetic construct
  source 1..21: mol_type = other RNA
acggccaccatgtccacagca

SEQ ID NO: 83260 - RNA, 21 nt, synthetic construct
  source 1..21: mol_type = other RNA
acgcagtgtgcaatcagcaca

SEQ ID NO: 83261 - RNA, 21 nt, synthetic construct
  source 1..21: mol_type = other RNA
ctgctgcagggtaactcagga

SEQ ID NO: 83262 - RNA, 21 nt, synthetic construct
  source 1..21: mol_type = other RNA
ctacgtgttctctgagcacta

SEQ ID NO: 83263 - RNA, 21 nt, synthetic construct
  source 1..21: mol_type = other RNA
ctgcgtgtgtgacgagggtta

SEQ ID NO: 83264 - RNA, 21 nt, synthetic construct
  source 1..21: mol_type = other RNA
ctggaaggcccaggctgccta

SEQ ID NO: 83265 - RNA, 21 nt, synthetic construct
  source 1..21: mol_type = other RNA
gctggagggcacttatgccaa

SEQ ID NO: 83266 - RNA, 21 nt, synthetic construct
  source 1..21: mol_type = other RNA
aacccctcctcaactccagga

SEQ ID NO: 83267 - RNA, 21 nt, synthetic construct
  source 1..21: mol_type = other RNA
acagagccttccacggggaca

SEQ ID NO: 83268 - RNA, 21 nt, synthetic construct
  source 1..21: mol_type = other RNA
aacccctcctcaactccagga

SEQ ID NO: 83269 - RNA, 21 nt, synthetic construct
  source 1..21: mol_type = other RNA
aacccctcctcaactccagga

SEQ ID NO: 83270 - RNA, 21 nt, synthetic construct
  source 1..21: mol_type = other RNA
acagagccttccacggggaca

SEQ ID NO: 83271 - RNA, 21 nt, synthetic construct
  source 1..21: mol_type = other RNA
aacccctcctcaactccagga

SEQ ID NO: 83272 - RNA, 21 nt, synthetic construct
  source 1..21: mol_type = other RNA
gagatccatgcacgctttgga

SEQ ID NO: 83273 - RNA, 21 nt, synthetic construct
  source 1..21: mol_type = other RNA
cccaggaggagggcgactgca

SEQ ID NO: 83274 - RNA, 21 nt, synthetic construct
  source 1..21: mol_type = other RNA
gcggccatgctcgtggtgcca

SEQ ID NO: 83275 - RNA, 21 nt, synthetic construct
  source 1..21: mol_type = other RNA
gctacagctttgaaggcagca

SEQ ID NO: 83276 - RNA, 21 nt, synthetic construct
  source 1..21: mol_type = other RNA
ttctccagggacgaccaccca

SEQ ID NO: 83277 - RNA, 21 nt, synthetic construct
  source 1..21: mol_type = other RNA
ttctccagggacgaccaccca

SEQ ID NO: 83278 - RNA, 21 nt, synthetic construct
  source 1..21: mol_type = other RNA
caaccaccagtaccacccaga

SEQ ID NO: 83279 - RNA, 21 nt, synthetic construct
  source 1..21: mol_type = other RNA
ttctccagggacgaccaccca

SEQ ID NO: 83280 - RNA, 21 nt, synthetic construct
  source 1..21: mol_type = other RNA
atgggcatctgcgtgcaggca

SEQ ID NO: 83281 - RNA, 21 nt, synthetic construct
  source 1..21: mol_type = other RNA
ccagggacgacggggagctta

SEQ ID NO: 83282 - RNA, 21 nt, synthetic construct
  source 1..21: mol_type = other RNA
atctgccaccgcaccctgcta

SEQ ID NO: 83283 - RNA, 21 nt, synthetic construct
  source 1..21: mol_type = other RNA
gactgcccctgtgtgcacaaa

SEQ ID NO: 83284 - RNA, 21 nt, synthetic construct
  source 1..21: mol_type = other RNA
gtgtggatcagcacaaccaca

SEQ ID NO: 83285 - RNA, 21 nt, synthetic construct
  source 1..21: mol_type = other RNA
tctccagggacgaccacccca

SEQ ID NO: 83286 - RNA, 21 nt, synthetic construct
  source 1..21: mol_type = other RNA
gtgtggatcagcacaaccaca

SEQ ID NO: 83287 - RNA, 21 nt, synthetic construct
  source 1..21: mol_type = other RNA
tctccagggacgaccacccca

SEQ ID NO: 83288 - RNA, 21 nt, synthetic construct
  source 1..21: mol_type = other RNA
gtgtggatcagcacaaccaca

SEQ ID NO: 83289 - RNA, 21 nt, synthetic construct
  source 1..21: mol_type = other RNA
tctccagggacgaccacccca

SEQ ID NO: 83290 - RNA, 21 nt, synthetic construct
  source 1..21: mol_type = other RNA
gtgtggatcagcacaaccaca

SEQ ID NO: 83291 - RNA, 21 nt, synthetic construct
  source 1..21: mol_type = other RNA
gtgtggatcagcacaaccaca

SEQ ID NO: 83292 - RNA, 21 nt, synthetic construct
  source 1..21: mol_type = other RNA
cccggggagcggtgggtcaga

SEQ ID NO: 83293 - RNA, 21 nt, synthetic construct
  source 1..21: mol_type = other RNA
gcgggtccacgaggagacgga

SEQ ID NO: 83294 - RNA, 21 nt, synthetic construct
  source 1..21: mol_type = other RNA
cccaggatgggtgccccgaga

SEQ ID NO: 83295 - RNA, 21 nt, synthetic construct
  source 1..21: mol_type = other RNA
ctcctggtggagcagagcgga

SEQ ID NO: 83296 - RNA, 21 nt, synthetic construct
  source 1..21: mol_type = other RNA
ggaactggaggtgccctgaga

SEQ ID NO: 83297 - RNA, 21 nt, synthetic construct
  source 1..21: mol_type = other RNA
gaggaccactgtgtggacgga

SEQ ID NO: 83298 - RNA, 21 nt, synthetic construct
  source 1..21: mol_type = other RNA
gcctgtgtgcccgcccaggaa

SEQ ID NO: 83299 - RNA, 21 nt, synthetic construct
  source 1..21: mol_type = other RNA
tccaagaggggacctttaaga

SEQ ID NO: 83300 - RNA, 21 nt, synthetic construct
  source 1..21: mol_type = other RNA
gtcttcaagatgtgctacaaa

SEQ ID NO: 83301 - RNA, 21 nt, synthetic construct
  source 1..21: mol_type = other RNA
gccacaaccccgccaccgaca

SEQ ID NO: 83302 - RNA, 21 nt, synthetic construct
  source 1..21: mol_type = other RNA
agtcaccagctccaaagccaa

SEQ ID NO: 83303 - RNA, 21 nt, synthetic construct
  source 1..21: mol_type = other RNA
gtcaccagctccaaagccaca

SEQ ID NO: 83304 - RNA, 21 nt, synthetic construct
  source 1..21: mol_type = other RNA
agaccaccacacccacggcca

SEQ ID NO: 83305 - RNA, 21 nt, synthetic construct
  source 1..21: mol_type = other RNA
tgaccccctcctccatcccga

SEQ ID NO: 83306 - RNA, 21 nt, synthetic construct
  source 1..21: mol_type = other RNA
caactcctgggacaactccca

SEQ ID NO: 83307 - RNA, 21 nt, synthetic construct
  source 1..21: mol_type = other RNA
agtcaccagctccaaagccaa

SEQ ID NO: 83308 - RNA, 21 nt, synthetic construct
  source 1..21: mol_type = other RNA
gtcaccagctccaaagccaca

SEQ ID NO: 83309 - RNA, 21 nt, synthetic construct
  source 1..21: mol_type = other RNA
agaccaccacacccacggcca

SEQ ID NO: 83310 - RNA, 21 nt, synthetic construct
  source 1..21: mol_type = other RNA
tgaccccctcctccatcccga

SEQ ID NO: 83311 - RNA, 21 nt, synthetic construct
  source 1..21: mol_type = other RNA
caatccacccctcctccacta

SEQ ID NO: 83312 - RNA, 21 nt, synthetic construct
  source 1..21: mol_type = other RNA
gcaccctcaaagtgctgacca

SEQ ID NO: 83313 - RNA, 21 nt, synthetic construct
  source 1..21: mol_type = other RNA
agaccaccacacccacggcca

SEQ ID NO: 83314 - RNA, 21 nt, synthetic construct
  source 1..21: mol_type = other RNA
tgaccccctcctccatcccga

SEQ ID NO: 83315 - RNA, 21 nt, synthetic construct
  source 1..21: mol_type = other RNA
agtcaccagctccaaagccaa

SEQ ID NO: 83316 - RNA, 21 nt, synthetic construct
  source 1..21: mol_type = other RNA
gtcaccagctccaaagccaca

SEQ ID NO: 83317 - RNA, 21 nt, synthetic construct
  source 1..21: mol_type = other RNA
agaccaccacacccacggcca

SEQ ID NO: 83318 - RNA, 21 nt, synthetic construct
  source 1..21: mol_type = other RNA
gtccccctgggggagttggga

SEQ ID NO: 83319 - RNA, 21 nt, synthetic construct
  source 1..21: mol_type = other RNA
caatccacccctcctccacta

SEQ ID NO: 83320 - RNA, 21 nt, synthetic construct
  source 1..21: mol_type = other RNA
agtcaccagctccaaagccaa

SEQ ID NO: 83321 - RNA, 21 nt, synthetic construct
  source 1..21: mol_type = other RNA
gtcaccagctccaaagccaca

SEQ ID NO: 83322 - RNA, 21 nt, synthetic construct
  source 1..21: mol_type = other RNA
gcaactgcccttccagcacta

SEQ ID NO: 83323 - RNA, 21 nt, synthetic construct
  source 1..21: mol_type = other RNA
agaccaccacacccacggcca

SEQ ID NO: 83324 - RNA, 21 nt, synthetic construct
  source 1..21: mol_type = other RNA
tgaccccctcctccatcccga

SEQ ID NO: 83325 - RNA, 21 nt, synthetic construct
  source 1..21: mol_type = other RNA
accatggccactatgcccaca

SEQ ID NO: 83326 - RNA, 21 nt, synthetic construct
  source 1..21: mol_type = other RNA
agcagcctgccaaccttcaga

SEQ ID NO: 83327 - RNA, 21 nt, synthetic construct
  source 1..21: mol_type = other RNA
cgtacaatggcaccttctaca

SEQ ID NO: 83328 - RNA, 21 nt, synthetic construct
  source 1..21: mol_type = other RNA
gagcgcccgcgcagcacggaa

SEQ ID NO: 83329 - RNA, 21 nt, synthetic construct
  source 1..21: mol_type = other RNA
cgtccccccacccgtgccaga

SEQ ID NO: 83330 - RNA, 21 nt, synthetic construct
  source 1..21: mol_type = other RNA
gacccagggccctgtggagca

SEQ ID NO: 83331 - RNA, 21 nt, synthetic construct
  source 1..21: mol_type = other RNA
cgtcctcatcaatgggcagca

SEQ ID NO: 83332 - RNA, 21 nt, synthetic construct
  source 1..21: mol_type = other RNA
tcagcatccggctggtgctga

SEQ ID NO: 83333 - RNA, 21 nt, synthetic construct
  source 1..21: mol_type = other RNA
tggagctggatcccaaataca

SEQ ID NO: 83334 - RNA, 21 nt, synthetic construct
  source 1..21: mol_type = other RNA
gcggaactggaggtgccctga

SEQ ID NO: 83335 - RNA, 21 nt, synthetic construct
  source 1..21: mol_type = other RNA
ggctcaccctgcacggacaca

SEQ ID NO: 83336 - RNA, 21 nt, synthetic construct
  source 1..21: mol_type = other RNA
gctcaccctgcacggacacca

SEQ ID NO: 83337 - RNA, 21 nt, synthetic construct
  source 1..21: mol_type = other RNA
ctgcacggacacctgctccaa

SEQ ID NO: 83338 - RNA, 21 nt, synthetic construct
  source 1..21: mol_type = other RNA
gcgcagctctgcgaggaccaa

SEQ ID NO: 83339 - RNA, 21 nt, synthetic construct
  source 1..21: mol_type = other RNA
ttcaccgtgctggctgagcta

SEQ ID NO: 83340 - RNA, 21 nt, synthetic construct
  source 1..21: mol_type = other RNA
gtgccaatgccaggaacagca

SEQ ID NO: 83341 - RNA, 21 nt, synthetic construct
  source 1..21: mol_type = other RNA
gctcagcgactggagggacga

SEQ ID NO: 83342 - RNA, 21 nt, synthetic construct
  source 1..21: mol_type = other RNA
gaactgccccaagtcccagca

SEQ ID NO: 83343 - RNA, 21 nt, synthetic construct
  source 1..21: mol_type = other RNA
tggtggatgcctgccagccca

SEQ ID NO: 83344 - RNA, 21 nt, synthetic construct
  source 1..21: mol_type = other RNA
gggtgtgcagcccccatggta

SEQ ID NO: 83345 - RNA, 21 nt, synthetic construct
  source 1..21: mol_type = other RNA
gggacaacaccacccacggga

SEQ ID NO: 83346 - RNA, 21 nt, synthetic construct
  source 1..21: mol_type = other RNA
caccttcgccgcctgccgcta

SEQ ID NO: 83347 - RNA, 21 nt, synthetic construct
  source 1..21: mol_type = other RNA
ggcatgtcctggaactccaga

SEQ ID NO: 83348 - RNA, 21 nt, synthetic construct
  source 1..21: mol_type = other RNA
ggtatgccctgtgctggctga

SEQ ID NO: 83349 - RNA, 21 nt, synthetic construct
  source 1..21: mol_type = other RNA
acatcgagtgccgggcggcga

SEQ ID NO: 83350 - RNA, 21 nt, synthetic construct
  source 1..21: mol_type = other RNA
ccaactggaccctggcacaga

SEQ ID NO: 83351 - RNA, 21 nt, synthetic construct
  source 1..21: mol_type = other RNA
ctggaccctggcacaggtgga

SEQ ID NO: 83352 - RNA, 21 nt, synthetic construct
  source 1..21: mol_type = other RNA
gagcaggagggcgtcttcaaa

SEQ ID NO: 83353 - RNA, 21 nt, synthetic construct
  source 1..21: mol_type = other RNA
cagtgacgaccactgcaggga

SEQ ID NO: 83354 - RNA, 21 nt, synthetic construct
  source 1..21: mol_type = other RNA
agctggagacggccaccacca

SEQ ID NO: 83355 - RNA, 21 nt, synthetic construct
  source 1..21: mol_type = other RNA
tggcaacctccagagctcgca

SEQ ID NO: 83356 - RNA, 21 nt, synthetic construct
  source 1..21: mol_type = other RNA
acggccaccccgacctccaca

SEQ ID NO: 83357 - RNA, 21 nt, synthetic construct
  source 1..21: mol_type = other RNA
ctatcacagaccaccacacca

SEQ ID NO: 83358 - RNA, 21 nt, synthetic construct
  source 1..21: mol_type = other RNA
tgcccacacctccacagtgca

SEQ ID NO: 83359 - RNA, 21 nt, synthetic construct
  source 1..21: mol_type = other RNA
gcttaccgccacggccaccaa

SEQ ID NO: 83360 - RNA, 21 nt, synthetic construct
  source 1..21: mol_type = other RNA
cgggcttcacagccaccccca

SEQ ID NO: 83361 - RNA, 21 nt, synthetic construct
  source 1..21: mol_type = other RNA
actcacgcctccagtgtggaa

SEQ ID NO: 83362 - RNA, 21 nt, synthetic construct
  source 1..21: mol_type = other RNA
ctagcacacagaccagtggta

SEQ ID NO: 83363 - RNA, 21 nt, synthetic construct
  source 1..21: mol_type = other RNA
agccaccagcaacacagtgaa

SEQ ID NO: 83364 - RNA, 21 nt, synthetic construct
  source 1..21: mol_type = other RNA
acggtgcgcacagcctggaca

SEQ ID NO: 83365 - RNA, 21 nt, synthetic construct
  source 1..21: mol_type = other RNA
cccgggccacaccacggccaa

SEQ ID NO: 83366 - RNA, 21 nt, synthetic construct
  source 1..21: mol_type = other RNA
ccgggccacaccacggccaca

SEQ ID NO: 83367 - RNA, 21 nt, synthetic construct
  source 1..21: mol_type = other RNA
gagtgccgtgcccaggcccaa

SEQ ID NO: 83368 - RNA, 21 nt, synthetic construct
  source 1..21: mol_type = other RNA
agtgccgtgcccaggcccaga

SEQ ID NO: 83369 - RNA, 21 nt, synthetic construct
  source 1..21: mol_type = other RNA
ccactccggggacgacctgga

SEQ ID NO: 83370 - RNA, 21 nt, synthetic construct
  source 1..21: mol_type = other RNA
ccacggccaccccgtcctcca

SEQ ID NO: 83371 - RNA, 21 nt, synthetic construct
  source 1..21: mol_type = other RNA
cacggccaccccgtcctccaa

SEQ ID NO: 83372 - RNA, 21 nt, synthetic construct
  source 1..21: mol_type = other RNA
gccaccgtgacggtgcccaca

SEQ ID NO: 83373 - RNA, 21 nt, synthetic construct
  source 1..21: mol_type = other RNA
ctatcacagaccaccacacca

SEQ ID NO: 83374 - RNA, 21 nt, synthetic construct
  source 1..21: mol_type = other RNA
cgggcttcacagccaccccca

SEQ ID NO: 83375 - RNA, 21 nt, synthetic construct
  source 1..21: mol_type = other RNA
cacccccacagtgctgaccaa

SEQ ID NO: 83376 - RNA, 21 nt, synthetic construct
  source 1..21: mol_type = other RNA
ctagcacacagaccagtggta

SEQ ID NO: 83377 - RNA, 21 nt, synthetic construct
  source 1..21: mol_type = other RNA
gacaacacctatccccccaga

SEQ ID NO: 83378 - RNA, 21 nt, synthetic construct
  source 1..21: mol_type = other RNA
cgggcgatccctgtcccccaa

SEQ ID NO: 83379 - RNA, 21 nt, synthetic construct
  source 1..21: mol_type = other RNA
acggtgcgcacagcctggaca

SEQ ID NO: 83380 - RNA, 21 nt, synthetic construct
  source 1..21: mol_type = other RNA
caccccagcagcaaccaccga

SEQ ID NO: 83381 - RNA, 21 nt, synthetic construct
  source 1..21: mol_type = other RNA
agcaggaccaccgagtcacca

SEQ ID NO: 83382 - RNA, 21 nt, synthetic construct
  source 1..21: mol_type = other RNA
gagtgccgtgcccaggcccaa

SEQ ID NO: 83383 - RNA, 21 nt, synthetic construct
  source 1..21: mol_type = other RNA
agtgccgtgcccaggcccaga

SEQ ID NO: 83384 - RNA, 21 nt, synthetic construct
  source 1..21: mol_type = other RNA
cactccagggacgacctggaa

SEQ ID NO: 83385 - RNA, 21 nt, synthetic construct
  source 1..21: mol_type = other RNA
cgggaccctcccagaacagaa

SEQ ID NO: 83386 - RNA, 21 nt, synthetic construct
  source 1..21: mol_type = other RNA
ccactccggggacgacctgga

SEQ ID NO: 83387 - RNA, 21 nt, synthetic construct
  source 1..21: mol_type = other RNA
ccacggccaccccgtcctcca

SEQ ID NO: 83388 - RNA, 21 nt, synthetic construct
  source 1..21: mol_type = other RNA
cacggccaccccgtcctccaa

SEQ ID NO: 83389 - RNA, 21 nt, synthetic construct
  source 1..21: mol_type = other RNA
gccaccgtgacggtgcccaca

SEQ ID NO: 83390 - RNA, 21 nt, synthetic construct
  source 1..21: mol_type = other RNA
tggcaccctcaaagtgctgaa

SEQ ID NO: 83391 - RNA, 21 nt, synthetic construct
  source 1..21: mol_type = other RNA
catcagctccagagccactca

SEQ ID NO: 83392 - RNA, 21 nt, synthetic construct
  source 1..21: mol_type = other RNA
ctatcacagaccaccacacca

SEQ ID NO: 83393 - RNA, 21 nt, synthetic construct
  source 1..21: mol_type = other RNA
cgggcttcacagccaccccca

SEQ ID NO: 83394 - RNA, 21 nt, synthetic construct
  source 1..21: mol_type = other RNA
actcacgcctccagtgtggaa

SEQ ID NO: 83395 - RNA, 21 nt, synthetic construct
  source 1..21: mol_type = other RNA
ctagcacacagaccagtggta

SEQ ID NO: 83396 - RNA, 21 nt, synthetic construct
  source 1..21: mol_type = other RNA
acggtgcgcacagcctggaca

SEQ ID NO: 83397 - RNA, 21 nt, synthetic construct
  source 1..21: mol_type = other RNA
agcaggaccaccgagtcacca

SEQ ID NO: 83398 - RNA, 21 nt, synthetic construct
  source 1..21: mol_type = other RNA
gagtgccgtgcccaggcccaa

SEQ ID NO: 83399 - RNA, 21 nt, synthetic construct
  source 1..21: mol_type = other RNA
agtgccgtgcccaggcccaga

SEQ ID NO: 83400 - RNA, 21 nt, synthetic construct
  source 1..21: mol_type = other RNA
ccacggccaccccgtcctcca

SEQ ID NO: 83401 - RNA, 21 nt, synthetic construct
  source 1..21: mol_type = other RNA
cacggccaccccgtcctccaa

SEQ ID NO: 83402 - RNA, 21 nt, synthetic construct
  source 1..21: mol_type = other RNA
gccaccgtgacggtgcccaca

SEQ ID NO: 83403 - RNA, 21 nt, synthetic construct
  source 1..21: mol_type = other RNA
ctatcacagaccaccacacca

SEQ ID NO: 83404 - RNA, 21 nt, synthetic construct
  source 1..21: mol_type = other RNA
tgcccacacctccacagtgca

SEQ ID NO: 83405 - RNA, 21 nt, synthetic construct
  source 1..21: mol_type = other RNA
cagtcaccccctcctccagca

SEQ ID NO: 83406 - RNA, 21 nt, synthetic construct
  source 1..21: mol_type = other RNA
cccacaaccagtggctccaca

SEQ ID NO: 83407 - RNA, 21 nt, synthetic construct
  source 1..21: mol_type = other RNA
cacccccacagtgctgaccaa

SEQ ID NO: 83408 - RNA, 21 nt, synthetic construct
  source 1..21: mol_type = other RNA
ctagcacacagaccagtggta

SEQ ID NO: 83409 - RNA, 21 nt, synthetic construct
  source 1..21: mol_type = other RNA
gacaacacctatccccccaga

SEQ ID NO: 83410 - RNA, 21 nt, synthetic construct
  source 1..21: mol_type = other RNA
cgggcgatccctgtcccccaa

SEQ ID NO: 83411 - RNA, 21 nt, synthetic construct
  source 1..21: mol_type = other RNA
acggtgcgcacagcctggaca

SEQ ID NO: 83412 - RNA, 21 nt, synthetic construct
  source 1..21: mol_type = other RNA
caccccagcagcaaccaccga

SEQ ID NO: 83413 - RNA, 21 nt, synthetic construct
  source 1..21: mol_type = other RNA
agcaggaccaccgagtcacca

SEQ ID NO: 83414 - RNA, 21 nt, synthetic construct
  source 1..21: mol_type = other RNA
cccgggccacaccacggccaa

SEQ ID NO: 83415 - RNA, 21 nt, synthetic construct
  source 1..21: mol_type = other RNA
ccgggccacaccacggccaca

SEQ ID NO: 83416 - RNA, 21 nt, synthetic construct
  source 1..21: mol_type = other RNA
gagtgccgtgcccaggcccaa

SEQ ID NO: 83417 - RNA, 21 nt, synthetic construct
  source 1..21: mol_type = other RNA
agtgccgtgcccaggcccaga

SEQ ID NO: 83418 - RNA, 21 nt, synthetic construct
  source 1..21: mol_type = other RNA
ccactccggggacgacctgga

SEQ ID NO: 83419 - RNA, 21 nt, synthetic construct
  source 1..21: mol_type = other RNA
ccacggccaccccgtcctcca

SEQ ID NO: 83420 - RNA, 21 nt, synthetic construct
  source 1..21: mol_type = other RNA
cacggccaccccgtcctccaa

SEQ ID NO: 83421 - RNA, 21 nt, synthetic construct
  source 1..21: mol_type = other RNA
cagcccggccaccacacccaa

SEQ ID NO: 83422 - RNA, 21 nt, synthetic construct
  source 1..21: mol_type = other RNA
cgggaccctcccagaacagaa

SEQ ID NO: 83423 - RNA, 21 nt, synthetic construct
  source 1..21: mol_type = other RNA
ccactccggggacgacctgga

SEQ ID NO: 83424 - RNA, 21 nt, synthetic construct
  source 1..21: mol_type = other RNA
ccacggccaccccgtcctcca

SEQ ID NO: 83425 - RNA, 21 nt, synthetic construct
  source 1..21: mol_type = other RNA
cacggccaccccgtcctccaa

SEQ ID NO: 83426 - RNA, 21 nt, synthetic construct
  source 1..21: mol_type = other RNA
ccacggccaccccgtcctcca

SEQ ID NO: 83427 - RNA, 21 nt, synthetic construct
  source 1..21: mol_type = other RNA
cacggccaccccgtcctccaa

SEQ ID NO: 83428 - RNA, 21 nt, synthetic construct
  source 1..21: mol_type = other RNA
gccaccgtgacggtgcccaca

SEQ ID NO: 83429 - RNA, 21 nt, synthetic construct
  source 1..21: mol_type = other RNA
ctatcacagaccaccacacca

SEQ ID NO: 83430 - RNA, 21 nt, synthetic construct
  source 1..21: mol_type = other RNA
gcttaccgccacggccaccaa

SEQ ID NO: 83431 - RNA, 21 nt, synthetic construct
  source 1..21: mol_type = other RNA
cgggcttcacagccaccccca

SEQ ID NO: 83432 - RNA, 21 nt, synthetic construct
  source 1..21: mol_type = other RNA
actcacgcctccagtgtggaa

SEQ ID NO: 83433 - RNA, 21 nt, synthetic construct
  source 1..21: mol_type = other RNA
cccacaaccagtggctccaca

SEQ ID NO: 83434 - RNA, 21 nt, synthetic construct
  source 1..21: mol_type = other RNA
ctagcacacagaccagtggta

SEQ ID NO: 83435 - RNA, 21 nt, synthetic construct
  source 1..21: mol_type = other RNA
ccatgacaagggccaccaata

SEQ ID NO: 83436 - RNA, 21 nt, synthetic construct
  source 1..21: mol_type = other RNA
aattccacggccacaccctca

SEQ ID NO: 83437 - RNA, 21 nt, synthetic construct
  source 1..21: mol_type = other RNA
cccggatcctcactgagctga

SEQ ID NO: 83438 - RNA, 21 nt, synthetic construct
  source 1..21: mol_type = other RNA
cacggccaccctgtcctccaa

SEQ ID NO: 83439 - RNA, 21 nt, synthetic construct
  source 1..21: mol_type = other RNA
ctcacacccccaaagtggtga

SEQ ID NO: 83440 - RNA, 21 nt, synthetic construct
  source 1..21: mol_type = other RNA
ccaaagtggtgaccaccatga

SEQ ID NO: 83441 - RNA, 21 nt, synthetic construct
  source 1..21: mol_type = other RNA
aaagtggtgaccaccatggca

SEQ ID NO: 83442 - RNA, 21 nt, synthetic construct
  source 1..21: mol_type = other RNA
cacccgcacccctgcagtgca

SEQ ID NO: 83443 - RNA, 21 nt, synthetic construct
  source 1..21: mol_type = other RNA
accgaccgagccggctgccaa

SEQ ID NO: 83444 - RNA, 21 nt, synthetic construct
  source 1..21: mol_type = other RNA
ggcgcctgtcccacctcccca

SEQ ID NO: 83445 - RNA, 21 nt, synthetic construct
  source 1..21: mol_type = other RNA
gtgtcctccgccccgctgtca

SEQ ID NO: 83446 - RNA, 21 nt, synthetic construct
  source 1..21: mol_type = other RNA
gacccaaagcctgtggccaaa

SEQ ID NO: 83447 - RNA, 21 nt, synthetic construct
  source 1..21: mol_type = other RNA
agcatgtggggcggctcccaa

SEQ ID NO: 83448 - RNA, 21 nt, synthetic construct
  source 1..21: mol_type = other RNA
ctcagcatccactacaagtca

SEQ ID NO: 83449 - RNA, 21 nt, synthetic construct
  source 1..21: mol_type = other RNA
caagacgtggctggtccccga

SEQ ID NO: 83450 - RNA, 21 nt, synthetic construct
  source 1..21: mol_type = other RNA
tgtctagcacacccaccccca

SEQ ID NO: 83451 - RNA, 21 nt, synthetic construct
  source 1..21: mol_type = other RNA
tctagcacacccacccccaca

SEQ ID NO: 83452 - RNA, 21 nt, synthetic construct
  source 1..21: mol_type = other RNA
aggtctttgctgagtgccaca

SEQ ID NO: 83453 - RNA, 21 nt, synthetic construct
  source 1..21: mol_type = other RNA
gtctttgctgagtgccacaaa

SEQ ID NO: 83454 - RNA, 21 nt, synthetic construct
  source 1..21: mol_type = other RNA
catacagcctgccacctgcaa

SEQ ID NO: 83455 - RNA, 21 nt, synthetic construct
  source 1..21: mol_type = other RNA
gcgtgtgcaacacaaccacca

SEQ ID NO: 83456 - RNA, 21 nt, synthetic construct
  source 1..21: mol_type = other RNA
gctgtcccaccttccgctgca

SEQ ID NO: 83457 - RNA, 21 nt, synthetic construct
  source 1..21: mol_type = other RNA
gtcaggaggatgcctgcaaca

SEQ ID NO: 83458 - RNA, 21 nt, synthetic construct
  source 1..21: mol_type = other RNA
atactacctgtccccagggca

SEQ ID NO: 83459 - RNA, 21 nt, synthetic construct
  source 1..21: mol_type = other RNA
tactacctgtccccagggcta

SEQ ID NO: 83460 - RNA, 21 nt, synthetic construct
  source 1..21: mol_type = other RNA
gcccgatggccagccagtcca

SEQ ID NO: 83461 - RNA, 21 nt, synthetic construct
  source 1..21: mol_type = other RNA
tgggtcaacagccatgtggaa

SEQ ID NO: 83462 - RNA, 21 nt, synthetic construct
  source 1..21: mol_type = other RNA
cctgctgcccaccccgtggga

SEQ ID NO: 83463 - RNA, 21 nt, synthetic construct
  source 1..21: mol_type = other RNA
cctaccctgggagagcctgta

SEQ ID NO: 83464 - RNA, 21 nt, synthetic construct
  source 1..21: mol_type = other RNA
gacaagcccggccctcccgga

SEQ ID NO: 83465 - RNA, 21 nt, synthetic construct
  source 1..21: mol_type = other RNA
atcagcacaaccaccacacca

SEQ ID NO: 83466 - RNA, 21 nt, synthetic construct
  source 1..21: mol_type = other RNA
gctccacggtgaccccctcca

SEQ ID NO: 83467 - RNA, 21 nt, synthetic construct
  source 1..21: mol_type = other RNA
ccagtggtactcccccatcaa

SEQ ID NO: 83468 - RNA, 21 nt, synthetic construct
  source 1..21: mol_type = other RNA
ttgggcaccacccacatcaca

SEQ ID NO: 83469 - RNA, 21 nt, synthetic construct
  source 1..21: mol_type = other RNA
atcagcacaaccaccacacca

SEQ ID NO: 83470 - RNA, 21 nt, synthetic construct
  source 1..21: mol_type = other RNA
ccagtggtactcccccatcaa

SEQ ID NO: 83471 - RNA, 21 nt, synthetic construct
  source 1..21: mol_type = other RNA
ttgggcaccacccacatcaca

SEQ ID NO: 83472 - RNA, 21 nt, synthetic construct
  source 1..21: mol_type = other RNA
ggcaccctcaaagtgctgaca

SEQ ID NO: 83473 - RNA, 21 nt, synthetic construct
  source 1..21: mol_type = other RNA
atcagcacaaccaccacacca

SEQ ID NO: 83474 - RNA, 21 nt, synthetic construct
  source 1..21: mol_type = other RNA
gctccacggtgaccccctcca

SEQ ID NO: 83475 - RNA, 21 nt, synthetic construct
  source 1..21: mol_type = other RNA
ccagtggtactcccccatcaa

SEQ ID NO: 83476 - RNA, 21 nt, synthetic construct
  source 1..21: mol_type = other RNA
ttgggcaccacccacatcaca

SEQ ID NO: 83477 - RNA, 21 nt, synthetic construct
  source 1..21: mol_type = other RNA
atcagcacaaccaccacacca

SEQ ID NO: 83478 - RNA, 21 nt, synthetic construct
  source 1..21: mol_type = other RNA
gctccacggtgaccccctcca

SEQ ID NO: 83479 - RNA, 21 nt, synthetic construct
  source 1..21: mol_type = other RNA
ccagtggtactcccccatcaa

SEQ ID NO: 83480 - RNA, 21 nt, synthetic construct
  source 1..21: mol_type = other RNA
ttgggcaccacccacatcaca

SEQ ID NO: 83481 - RNA, 21 nt, synthetic construct
  source 1..21: mol_type = other RNA
gttccacgtccaccccctcca

SEQ ID NO: 83482 - RNA, 21 nt, synthetic construct
  source 1..21: mol_type = other RNA
atcagcacaaccaccacacca

SEQ ID NO: 83483 - RNA, 21 nt, synthetic construct
  source 1..21: mol_type = other RNA
gctccacggtgaccccctcca

SEQ ID NO: 83484 - RNA, 21 nt, synthetic construct
  source 1..21: mol_type = other RNA
ccagtggtactcccccatcaa

SEQ ID NO: 83485 - RNA, 21 nt, synthetic construct
  source 1..21: mol_type = other RNA
tcctcactgagctgaccacaa

SEQ ID NO: 83486 - RNA, 21 nt, synthetic construct
  source 1..21: mol_type = other RNA
gaacagctcacacccccaaaa

SEQ ID NO: 83487 - RNA, 21 nt, synthetic construct
  source 1..21: mol_type = other RNA
tccagggcgcctgtcccacca

SEQ ID NO: 83488 - RNA, 21 nt, synthetic construct
  source 1..21: mol_type = other RNA
cggacccgagccagccctgta

SEQ ID NO: 83489 - RNA, 21 nt, synthetic construct
  source 1..21: mol_type = other RNA
atggcggagggctgcttctga

SEQ ID NO: 83490 - RNA, 21 nt, synthetic construct
  source 1..21: mol_type = other RNA
ctgcttctgccctgaggacca

SEQ ID NO: 83491 - RNA, 21 nt, synthetic construct
  source 1..21: mol_type = other RNA
cctgaggaccagatcctctta

SEQ ID NO: 83492 - RNA, 21 nt, synthetic construct
  source 1..21: mol_type = other RNA
ccgcctgcgcccaggacctga

SEQ ID NO: 83493 - RNA, 21 nt, synthetic construct
  source 1..21: mol_type = other RNA
ctgcccccggacctgccccca

SEQ ID NO: 83494 - RNA, 21 nt, synthetic construct
  source 1..21: mol_type = other RNA
gcttcttcatcgtggtgcaga

SEQ ID NO: 83495 - RNA, 21 nt, synthetic construct
  source 1..21: mol_type = other RNA
aagctaagctgcctgggagca

SEQ ID NO: 83496 - RNA, 21 nt, synthetic construct
  source 1..21: mol_type = other RNA
gtcctggaactccagccacaa

SEQ ID NO: 83497 - RNA, 21 nt, synthetic construct
  source 1..21: mol_type = other RNA
cgacaagcccggccctcccga

SEQ ID NO: 83498 - RNA, 21 nt, synthetic construct
  source 1..21: mol_type = other RNA
cgacctccaccctgagaacaa

SEQ ID NO: 83499 - RNA, 21 nt, synthetic construct
  source 1..21: mol_type = other RNA
ctccctgggcaccacctggaa

SEQ ID NO: 83500 - RNA, 21 nt, synthetic construct
  source 1..21: mol_type = other RNA
ctgcccacacctccacagtga

SEQ ID NO: 83501 - RNA, 21 nt, synthetic construct
  source 1..21: mol_type = other RNA
caggaaccgtgagcaggtgga

SEQ ID NO: 83502 - RNA, 21 nt, synthetic construct
  source 1..21: mol_type = other RNA
ctccctgggcaccacctggaa

SEQ ID NO: 83503 - RNA, 21 nt, synthetic construct
  source 1..21: mol_type = other RNA
caggaaccgtgagcaggtgga

SEQ ID NO: 83504 - RNA, 21 nt, synthetic construct
  source 1..21: mol_type = other RNA
caggaaccgtgagcaggtgga

SEQ ID NO: 83505 - RNA, 21 nt, synthetic construct
  source 1..21: mol_type = other RNA
ctccctgggcaccacctggaa

SEQ ID NO: 83506 - RNA, 21 nt, synthetic construct
  source 1..21: mol_type = other RNA
ctgcccacacctccacagtga

SEQ ID NO: 83507 - RNA, 21 nt, synthetic construct
  source 1..21: mol_type = other RNA
caggaaccgtgagcaggtgga

SEQ ID NO: 83508 - RNA, 21 nt, synthetic construct
  source 1..21: mol_type = other RNA
ctccctgggcaccacctggaa

SEQ ID NO: 83509 - RNA, 21 nt, synthetic construct
  source 1..21: mol_type = other RNA
cctcactgagctgaccacaaa

SEQ ID NO: 83510 - RNA, 21 nt, synthetic construct
  source 1..21: mol_type = other RNA
accgtgtacctctgtgaggca

SEQ ID NO: 83511 - RNA, 21 nt, synthetic construct
  source 1..21: mol_type = other RNA
gcactggtggacagcactgca

SEQ ID NO: 83512 - RNA, 21 nt, synthetic construct
  source 1..21: mol_type = other RNA
cggggggccagccgcggaaca

SEQ ID NO: 83513 - RNA, 21 nt, synthetic construct
  source 1..21: mol_type = other RNA
atgcctgccagcccacttgca

SEQ ID NO: 83514 - RNA, 21 nt, synthetic construct
  source 1..21: mol_type = other RNA
gtgtgcccgcccaggagtgca

SEQ ID NO: 83515 - RNA, 21 nt, synthetic construct
  source 1..21: mol_type = other RNA
gggctgcattgccgaggagga

SEQ ID NO: 83516 - RNA, 21 nt, synthetic construct
  source 1..21: mol_type = other RNA
ctacaagcctggagagaccaa

SEQ ID NO: 83517 - RNA, 21 nt, synthetic construct
  source 1..21: mol_type = other RNA
gtggggacaacaccacccaca

SEQ ID NO: 83518 - RNA, 21 nt, synthetic construct
  source 1..21: mol_type = other RNA
ctggatccacggccaccccga

SEQ ID NO: 83519 - RNA, 21 nt, synthetic construct
  source 1..21: mol_type = other RNA
gtggatcagcacaaccaccaa

SEQ ID NO: 83520 - RNA, 21 nt, synthetic construct
  source 1..21: mol_type = other RNA
ccgtgagcaggtggggaagta

SEQ ID NO: 83521 - RNA, 21 nt, synthetic construct
  source 1..21: mol_type = other RNA
ctggatccacggccaccccga

SEQ ID NO: 83522 - RNA, 21 nt, synthetic construct
  source 1..21: mol_type = other RNA
catgtgagcaccacggccaca

SEQ ID NO: 83523 - RNA, 21 nt, synthetic construct
  source 1..21: mol_type = other RNA
cagctttacagccatccccta

SEQ ID NO: 83524 - RNA, 21 nt, synthetic construct
  source 1..21: mol_type = other RNA
gtggatcagcacaaccaccaa

SEQ ID NO: 83525 - RNA, 21 nt, synthetic construct
  source 1..21: mol_type = other RNA
cccggggaccacccacaccca

SEQ ID NO: 83526 - RNA, 21 nt, synthetic construct
  source 1..21: mol_type = other RNA
cacaccccagcagcaaccaca

SEQ ID NO: 83527 - RNA, 21 nt, synthetic construct
  source 1..21: mol_type = other RNA
accccgggccacaccagggca

SEQ ID NO: 83528 - RNA, 21 nt, synthetic construct
  source 1..21: mol_type = other RNA
ccgtgagcaggtggggaagta

SEQ ID NO: 83529 - RNA, 21 nt, synthetic construct
  source 1..21: mol_type = other RNA
ggccaccagttccatgtccaa

SEQ ID NO: 83530 - RNA, 21 nt, synthetic construct
  source 1..21: mol_type = other RNA
gtggatcagcacaaccaccaa

SEQ ID NO: 83531 - RNA, 21 nt, synthetic construct
  source 1..21: mol_type = other RNA
cacaccccagcagcaaccaca

SEQ ID NO: 83532 - RNA, 21 nt, synthetic construct
  source 1..21: mol_type = other RNA
ccgtgagcaggtggggaagta

SEQ ID NO: 83533 - RNA, 21 nt, synthetic construct
  source 1..21: mol_type = other RNA
ctggatccacggccaccccga

SEQ ID NO: 83534 - RNA, 21 nt, synthetic construct
  source 1..21: mol_type = other RNA
catgtgagcaccacggccaca

SEQ ID NO: 83535 - RNA, 21 nt, synthetic construct
  source 1..21: mol_type = other RNA
cagctttacagccatccccta

SEQ ID NO: 83536 - RNA, 21 nt, synthetic construct
  source 1..21: mol_type = other RNA
gtggatcagcacaaccaccaa

SEQ ID NO: 83537 - RNA, 21 nt, synthetic construct
  source 1..21: mol_type = other RNA
cccggggaccacccacaccca

SEQ ID NO: 83538 - RNA, 21 nt, synthetic construct
  source 1..21: mol_type = other RNA
cacaccccagcagcaaccaca

SEQ ID NO: 83539 - RNA, 21 nt, synthetic construct
  source 1..21: mol_type = other RNA
ccgtgagcaggtggggaagta

SEQ ID NO: 83540 - RNA, 21 nt, synthetic construct
  source 1..21: mol_type = other RNA
ctggatccacggccaccccga

SEQ ID NO: 83541 - RNA, 21 nt, synthetic construct
  source 1..21: mol_type = other RNA
ctggatccacggccaccccga

SEQ ID NO: 83542 - RNA, 21 nt, synthetic construct
  source 1..21: mol_type = other RNA
catgtgagcaccacggccaca

SEQ ID NO: 83543 - RNA, 21 nt, synthetic construct
  source 1..21: mol_type = other RNA
cagctttacagccatccccta

SEQ ID NO: 83544 - RNA, 21 nt, synthetic construct
  source 1..21: mol_type = other RNA
gtggatcagcacaaccaccaa

SEQ ID NO: 83545 - RNA, 21 nt, synthetic construct
  source 1..21: mol_type = other RNA
ggatcctcactgagctgacca

SEQ ID NO: 83546 - RNA, 21 nt, synthetic construct
  source 1..21: mol_type = other RNA
ctggatccacggccaccctga

SEQ ID NO: 83547 - RNA, 21 nt, synthetic construct
  source 1..21: mol_type = other RNA
gggaccacccgcacccctgca

SEQ ID NO: 83548 - RNA, 21 nt, synthetic construct
  source 1..21: mol_type = other RNA
cggcacctcttacaccttcca

SEQ ID NO: 83549 - RNA, 21 nt, synthetic construct
  source 1..21: mol_type = other RNA
ggcacctcttacaccttccga

SEQ ID NO: 83550 - RNA, 21 nt, synthetic construct
  source 1..21: mol_type = other RNA
attcttcaacgcctgcatcaa

SEQ ID NO: 83551 - RNA, 21 nt, synthetic construct
  source 1..21: mol_type = other RNA
agggcaggagtccatctgcaa

SEQ ID NO: 83552 - RNA, 21 nt, synthetic construct
  source 1..21: mol_type = other RNA
ggcaggagtccatctgcacca

SEQ ID NO: 83553 - RNA, 21 nt, synthetic construct
  source 1..21: mol_type = other RNA
tggccgggcagtgctgtggga

SEQ ID NO: 83554 - RNA, 21 nt, synthetic construct
  source 1..21: mol_type = other RNA
gaggctgagggtggagtccaa

SEQ ID NO: 83555 - RNA, 21 nt, synthetic construct
  source 1..21: mol_type = other RNA
cgcccatggctcccccacaca

SEQ ID NO: 83556 - RNA, 21 nt, synthetic construct
  source 1..21: mol_type = other RNA
gtctgagaacgttctgcctca

SEQ ID NO: 83557 - RNA, 21 nt, synthetic construct
  source 1..21: mol_type = other RNA
ggccggagcgcccgcgcagca

SEQ ID NO: 83558 - RNA, 21 nt, synthetic construct
  source 1..21: mol_type = other RNA
gtgccagcccccaggatggga

SEQ ID NO: 83559 - RNA, 21 nt, synthetic construct
  source 1..21: mol_type = other RNA
gcttccctggcctttgcaaca

SEQ ID NO: 83560 - RNA, 21 nt, synthetic construct
  source 1..21: mol_type = other RNA
gggactacatcaaggtcagca

SEQ ID NO: 83561 - RNA, 21 nt, synthetic construct
  source 1..21: mol_type = other RNA
agggcatctgccaccgcacca

SEQ ID NO: 83562 - RNA, 21 nt, synthetic construct
  source 1..21: mol_type = other RNA
ccacgcggggggccagccgca

SEQ ID NO: 83563 - RNA, 21 nt, synthetic construct
  source 1..21: mol_type = other RNA
caacatgcagcaccaggagta

SEQ ID NO: 83564 - RNA, 21 nt, synthetic construct
  source 1..21: mol_type = other RNA
cacggacacctgctccaacca

SEQ ID NO: 83565 - RNA, 21 nt, synthetic construct
  source 1..21: mol_type = other RNA
tgtggacggctgcttctgcca

SEQ ID NO: 83566 - RNA, 21 nt, synthetic construct
  source 1..21: mol_type = other RNA
ccgcacctacagcccgggcaa

SEQ ID NO: 83567 - RNA, 21 nt, synthetic construct
  source 1..21: mol_type = other RNA
ccgacagcagcttcaccgtga

SEQ ID NO: 83568 - RNA, 21 nt, synthetic construct
  source 1..21: mol_type = other RNA
cacctggaaggcccaggctga

SEQ ID NO: 83569 - RNA, 21 nt, synthetic construct
  source 1..21: mol_type = other RNA
cgtttccttcgtgcctgtgga

SEQ ID NO: 83570 - RNA, 21 nt, synthetic construct
  source 1..21: mol_type = other RNA
ctgcacctgccccgcgggcaa

SEQ ID NO: 83571 - RNA, 21 nt, synthetic construct
  source 1..21: mol_type = other RNA
gtgcccgcccaggagtgccca

SEQ ID NO: 83572 - RNA, 21 nt, synthetic construct
  source 1..21: mol_type = other RNA
tgtcggatgggagtgggggca

SEQ ID NO: 83573 - RNA, 21 nt, synthetic construct
  source 1..21: mol_type = other RNA
gccgaggaggactgcccctga

SEQ ID NO: 83574 - RNA, 21 nt, synthetic construct
  source 1..21: mol_type = other RNA
gtgtgcacaacgaggccacca

SEQ ID NO: 83575 - RNA, 21 nt, synthetic construct
  source 1..21: mol_type = other RNA
gagagaccatcagggtcgaca

SEQ ID NO: 83576 - RNA, 21 nt, synthetic construct
  source 1..21: mol_type = other RNA
tacagctttgaaggcagctga

SEQ ID NO: 83577 - RNA, 21 nt, synthetic construct
  source 1..21: mol_type = other RNA
cgagctgatcctccaagagga

SEQ ID NO: 83578 - RNA, 21 nt, synthetic construct
  source 1..21: mol_type = other RNA
tggcacccaaggacccctgca

SEQ ID NO: 83579 - RNA, 21 nt, synthetic construct
  source 1..21: mol_type = other RNA
caacccacatgggggctgtga

SEQ ID NO: 83580 - RNA, 21 nt, synthetic construct
  source 1..21: mol_type = other RNA
taactgcacacccagtggcaa

SEQ ID NO: 83581 - RNA, 21 nt, synthetic construct
  source 1..21: mol_type = other RNA
atgtcctggaactccagccaa

SEQ ID NO: 83582 - RNA, 21 nt, synthetic construct
  source 1..21: mol_type = other RNA
tgtcctggaactccagccaca

SEQ ID NO: 83583 - RNA, 21 nt, synthetic construct
  source 1..21: mol_type = other RNA
agtgccgggcggcgcagctta

SEQ ID NO: 83584 - RNA, 21 nt, synthetic construct
  source 1..21: mol_type = other RNA
gcctaccccaacccagaccaa

SEQ ID NO: 83585 - RNA, 21 nt, synthetic construct
  source 1..21: mol_type = other RNA
cctaccccaacccagaccaca

SEQ ID NO: 83586 - RNA, 21 nt, synthetic construct
  source 1..21: mol_type = other RNA
ttccccaactggaccctggca

SEQ ID NO: 83587 - RNA, 21 nt, synthetic construct
  source 1..21: mol_type = other RNA
acaggtggggcagaaggtgca

SEQ ID NO: 83588 - RNA, 21 nt, synthetic construct
  source 1..21: mol_type = other RNA
aggtggggcagaaggtgcaca

SEQ ID NO: 83589 - RNA, 21 nt, synthetic construct
  source 1..21: mol_type = other RNA
gcagtgacgaccactgcagga

SEQ ID NO: 83590 - RNA, 21 nt, synthetic construct
  source 1..21: mol_type = other RNA
gggctcccccggccagcacca

SEQ ID NO: 83591 - RNA, 21 nt, synthetic construct
  source 1..21: mol_type = other RNA
ccactggatccacggccacca

SEQ ID NO: 83592 - RNA, 21 nt, synthetic construct
  source 1..21: mol_type = other RNA
cactggatccacggccaccca

SEQ ID NO: 83593 - RNA, 21 nt, synthetic construct
  source 1..21: mol_type = other RNA
actggatccacggccacccca

SEQ ID NO: 83594 - RNA, 21 nt, synthetic construct
  source 1..21: mol_type = other RNA
ccacagctaccagcgttacaa

SEQ ID NO: 83595 - RNA, 21 nt, synthetic construct
  source 1..21: mol_type = other RNA
actccagagactgcccacaca

SEQ ID NO: 83596 - RNA, 21 nt, synthetic construct
  source 1..21: mol_type = other RNA
gcccacacctccacagtgcta

SEQ ID NO: 83597 - RNA, 21 nt, synthetic construct
  source 1..21: mol_type = other RNA
aactggggccaccggctctga

SEQ ID NO: 83598 - RNA, 21 nt, synthetic construct
  source 1..21: mol_type = other RNA
gcacaaccaccacacccacaa

SEQ ID NO: 83599 - RNA, 21 nt, synthetic construct
  source 1..21: mol_type = other RNA
cctcctccatcccggggacca

SEQ ID NO: 83600 - RNA, 21 nt, synthetic construct
  source 1..21: mol_type = other RNA
cacagtgctgaccaccaccaa

SEQ ID NO: 83601 - RNA, 21 nt, synthetic construct
  source 1..21: mol_type = other RNA
ccaccaccacaactgtggcca

SEQ ID NO: 83602 - RNA, 21 nt, synthetic construct
  source 1..21: mol_type = other RNA
tctagcacacagaccagtgga

SEQ ID NO: 83603 - RNA, 21 nt, synthetic construct
  source 1..21: mol_type = other RNA
gatcacggccaccggctccaa

SEQ ID NO: 83604 - RNA, 21 nt, synthetic construct
  source 1..21: mol_type = other RNA
aacccctcctcaactcctgga

SEQ ID NO: 83605 - RNA, 21 nt, synthetic construct
  source 1..21: mol_type = other RNA
cagcaacacagtgactcccta

SEQ ID NO: 83606 - RNA, 21 nt, synthetic construct
  source 1..21: mol_type = other RNA
aacacagtgactccctcctca

SEQ ID NO: 83607 - RNA, 21 nt, synthetic construct
  source 1..21: mol_type = other RNA
ccacatcacagagccttccaa

SEQ ID NO: 83608 - RNA, 21 nt, synthetic construct
  source 1..21: mol_type = other RNA
ggaccacagccacggccacaa

SEQ ID NO: 83609 - RNA, 21 nt, synthetic construct
  source 1..21: mol_type = other RNA
ccacacccagcaagacccgca

SEQ ID NO: 83610 - RNA, 21 nt, synthetic construct
  source 1..21: mol_type = other RNA
ccccagtgtgcctggtcagaa

SEQ ID NO: 83611 - RNA, 21 nt, synthetic construct
  source 1..21: mol_type = other RNA
catgccggggccctctggcga

SEQ ID NO: 83612 - RNA, 21 nt, synthetic construct
  source 1..21: mol_type = other RNA
atgccggggccctctggcgga

SEQ ID NO: 83613 - RNA, 21 nt, synthetic construct
  source 1..21: mol_type = other RNA
tgccggggccctctggcggga

SEQ ID NO: 83614 - RNA, 21 nt, synthetic construct
  source 1..21: mol_type = other RNA
gaatgcagcctggactttgga

SEQ ID NO: 83615 - RNA, 21 nt, synthetic construct
  source 1..21: mol_type = other RNA
aatgcagcctggactttggca

SEQ ID NO: 83616 - RNA, 21 nt, synthetic construct
  source 1..21: mol_type = other RNA
ccactggatccacggccacca

SEQ ID NO: 83617 - RNA, 21 nt, synthetic construct
  source 1..21: mol_type = other RNA
cactggatccacggccaccca

SEQ ID NO: 83618 - RNA, 21 nt, synthetic construct
  source 1..21: mol_type = other RNA
actggatccacggccacccca

SEQ ID NO: 83619 - RNA, 21 nt, synthetic construct
  source 1..21: mol_type = other RNA
ccaccccgtcctccaccccaa

SEQ ID NO: 83620 - RNA, 21 nt, synthetic construct
  source 1..21: mol_type = other RNA
cctccacccaggcaactgcta

SEQ ID NO: 83621 - RNA, 21 nt, synthetic construct
  source 1..21: mol_type = other RNA
ttacagccatcccctcctcca

SEQ ID NO: 83622 - RNA, 21 nt, synthetic construct
  source 1..21: mol_type = other RNA
tcctccactccagagactgta

SEQ ID NO: 83623 - RNA, 21 nt, synthetic construct
  source 1..21: mol_type = other RNA
gcacaaccaccacacccacaa

SEQ ID NO: 83624 - RNA, 21 nt, synthetic construct
  source 1..21: mol_type = other RNA
cctcctccatcccggggacca

SEQ ID NO: 83625 - RNA, 21 nt, synthetic construct
  source 1..21: mol_type = other RNA
cacagtgctgaccaccaccaa

SEQ ID NO: 83626 - RNA, 21 nt, synthetic construct
  source 1..21: mol_type = other RNA
ccaccaccacaactgtggcca

SEQ ID NO: 83627 - RNA, 21 nt, synthetic construct
  source 1..21: mol_type = other RNA
tctagcacacagaccagtgga

SEQ ID NO: 83628 - RNA, 21 nt, synthetic construct
  source 1..21: mol_type = other RNA
gatcacggccaccggctccaa

SEQ ID NO: 83629 - RNA, 21 nt, synthetic construct
  source 1..21: mol_type = other RNA
ccacatcacagagccttccaa

SEQ ID NO: 83630 - RNA, 21 nt, synthetic construct
  source 1..21: mol_type = other RNA
agccctgtccagccctcacca

SEQ ID NO: 83631 - RNA, 21 nt, synthetic construct
  source 1..21: mol_type = other RNA
ccacacccagcaagacccgca

SEQ ID NO: 83632 - RNA, 21 nt, synthetic construct
  source 1..21: mol_type = other RNA
ccccagtgtgcctggtcagaa

SEQ ID NO: 83633 - RNA, 21 nt, synthetic construct
  source 1..21: mol_type = other RNA
catgccggggccctctggcga

SEQ ID NO: 83634 - RNA, 21 nt, synthetic construct
  source 1..21: mol_type = other RNA
atgccggggccctctggcgga

SEQ ID NO: 83635 - RNA, 21 nt, synthetic construct
  source 1..21: mol_type = other RNA
tgccggggccctctggcggga

SEQ ID NO: 83636 - RNA, 21 nt, synthetic construct
  source 1..21: mol_type = other RNA
gaatgcagcctggactttgga

SEQ ID NO: 83637 - RNA, 21 nt, synthetic construct
  source 1..21: mol_type = other RNA
aatgcagcctggactttggca

SEQ ID NO: 83638 - RNA, 21 nt, synthetic construct
  source 1..21: mol_type = other RNA
catcccgtcctccaccccgga

SEQ ID NO: 83639 - RNA, 21 nt, synthetic construct
  source 1..21: mol_type = other RNA
atcccgtcctccaccccggga

SEQ ID NO: 83640 - RNA, 21 nt, synthetic construct
  source 1..21: mol_type = other RNA
gctgaccagcacggccaccaa

SEQ ID NO: 83641 - RNA, 21 nt, synthetic construct
  source 1..21: mol_type = other RNA
cacagccaccaaatccacaga

SEQ ID NO: 83642 - RNA, 21 nt, synthetic construct
  source 1..21: mol_type = other RNA
gctttacacccatcccctcca

SEQ ID NO: 83643 - RNA, 21 nt, synthetic construct
  source 1..21: mol_type = other RNA
cacccatcccctccttcacca

SEQ ID NO: 83644 - RNA, 21 nt, synthetic construct
  source 1..21: mol_type = other RNA
cttgggaccaccgggacccta

SEQ ID NO: 83645 - RNA, 21 nt, synthetic construct
  source 1..21: mol_type = other RNA
ccaccgggaccctcccagaaa

SEQ ID NO: 83646 - RNA, 21 nt, synthetic construct
  source 1..21: mol_type = other RNA
ccacaatccacccctcctcca

SEQ ID NO: 83647 - RNA, 21 nt, synthetic construct
  source 1..21: mol_type = other RNA
aatccacccctcctccactca

SEQ ID NO: 83648 - RNA, 21 nt, synthetic construct
  source 1..21: mol_type = other RNA
acccacacctccacagtgcta

SEQ ID NO: 83649 - RNA, 21 nt, synthetic construct
  source 1..21: mol_type = other RNA
gcagccactggccccacggca

SEQ ID NO: 83650 - RNA, 21 nt, synthetic construct
  source 1..21: mol_type = other RNA
ccaccccgtcctccaccccaa

SEQ ID NO: 83651 - RNA, 21 nt, synthetic construct
  source 1..21: mol_type = other RNA
gctgaccagcacggccaccaa

SEQ ID NO: 83652 - RNA, 21 nt, synthetic construct
  source 1..21: mol_type = other RNA
agtcatcagctccagagccaa

SEQ ID NO: 83653 - RNA, 21 nt, synthetic construct
  source 1..21: mol_type = other RNA
ccacagctaccagcgttacaa

SEQ ID NO: 83654 - RNA, 21 nt, synthetic construct
  source 1..21: mol_type = other RNA
acagccacaccctcctctaca

SEQ ID NO: 83655 - RNA, 21 nt, synthetic construct
  source 1..21: mol_type = other RNA
gcacaaccaccacacccacaa

SEQ ID NO: 83656 - RNA, 21 nt, synthetic construct
  source 1..21: mol_type = other RNA
cctcctccatcccggggacca

SEQ ID NO: 83657 - RNA, 21 nt, synthetic construct
  source 1..21: mol_type = other RNA
cacagtgctgaccaccaccaa

SEQ ID NO: 83658 - RNA, 21 nt, synthetic construct
  source 1..21: mol_type = other RNA
ccaccaccacaactgtggcca

SEQ ID NO: 83659 - RNA, 21 nt, synthetic construct
  source 1..21: mol_type = other RNA
tctagcacacagaccagtgga

SEQ ID NO: 83660 - RNA, 21 nt, synthetic construct
  source 1..21: mol_type = other RNA
ccacatcacagagccttccaa

SEQ ID NO: 83661 - RNA, 21 nt, synthetic construct
  source 1..21: mol_type = other RNA
gtgacttcccacaccccagca

SEQ ID NO: 83662 - RNA, 21 nt, synthetic construct
  source 1..21: mol_type = other RNA
accaccagtaccacccagcaa

SEQ ID NO: 83663 - RNA, 21 nt, synthetic construct
  source 1..21: mol_type = other RNA
ccaccagtaccacccagcaca

SEQ ID NO: 83664 - RNA, 21 nt, synthetic construct
  source 1..21: mol_type = other RNA
agccctgtccagccctcacca
